United States Patent Application Publication US 2014/0004565 A1 - sequence listing, part 26

SEQ ID NO: 540787 - RNA, 19 nt, Artificial Sequence
  Description of Artificial Sequence: Synthetic oligonucleotide
cacgacgggucaggucucu

SEQ ID NO: 540788 - RNA, 19 nt, Artificial Sequence
  Description of Artificial Sequence: Synthetic oligonucleotide
cgcgggucuccucgaacca

SEQ ID NO: 540789 - RNA, 19 nt, Artificial Sequence
  Description of Artificial Sequence: Synthetic oligonucleotide
cgcugcgcucucuucgaaa

SEQ ID NO: 540790 - RNA, 19 nt, Artificial Sequence
  Description of Artificial Sequence: Synthetic oligonucleotide
cccacgcauagggcauguc

SEQ ID NO: 540791 - RNA, 19 nt, Artificial Sequence
  Description of Artificial Sequence: Synthetic oligonucleotide
ccgcgugcuuauugaagau

SEQ ID NO: 540792 - RNA, 19 nt, Artificial Sequence
  Description of Artificial Sequence: Synthetic oligonucleotide
cgucuucgaucguacucgu

SEQ ID NO: 540793 - RNA, 19 nt, Artificial Sequence
  Description of Artificial Sequence: Synthetic oligonucleotide
caucgccacugugcuuccu

SEQ ID NO: 540794 - RNA, 19 nt, Artificial Sequence
  Description of Artificial Sequence: Synthetic oligonucleotide
cgcccaucgugcugucaga

SEQ ID NO: 540795 - RNA, 19 nt, Artificial Sequence
  Description of Artificial Sequence: Synthetic oligonucleotide
gcuggccauagggcaucaa

SEQ ID NO: 540796 - RNA, 19 nt, Artificial Sequence
  Description of Artificial Sequence: Synthetic oligonucleotide
guccccggacauggauuau

SEQ ID NO: 540797 - RNA, 19 nt, Artificial Sequence
  Description of Artificial Sequence: Synthetic oligonucleotide
ccccgacugcggcgcuccc

SEQ ID NO: 540798 - RNA, 19 nt, Artificial Sequence
  Description of Artificial Sequence: Synthetic oligonucleotide
cgacaaugccacgcgcaua

SEQ ID NO: 540799 - RNA, 19 nt, Artificial Sequence
  Description of Artificial Sequence: Synthetic oligonucleotide
ggucccacucucggucauu

SEQ ID NO: 540800 - RNA, 19 nt, Artificial Sequence
  Description of Artificial Sequence: Synthetic oligonucleotide
cccuucgauuccggucaua

SEQ ID NO: 540801 - RNA, 19 nt, Artificial Sequence
  Description of Artificial Sequence: Synthetic oligonucleotide
ccccacgcauagggcaugu

SEQ ID NO: 540802 - RNA, 19 nt, Artificial Sequence
  Description of Artificial Sequence: Synthetic oligonucleotide
cggacacgacgggucaggu

SEQ ID NO: 540803 - RNA, 19 nt, Artificial Sequence
  Description of Artificial Sequence: Synthetic oligonucleotide
ccacagcgguugggcaucu

SEQ ID NO: 540804 - RNA, 19 nt, Artificial Sequence
  Description of Artificial Sequence: Synthetic oligonucleotide
  modified_base (1)..(1): a, c, u, g, unknown or other
ngaaacguucccuucgauu

SEQ ID NO: 540805 - RNA, 19 nt, Artificial Sequence
  Description of Artificial Sequence: Synthetic oligonucleotide
aaauguguguaucugaugc

SEQ ID NO: 540806 - RNA, 19 nt, Artificial Sequence
  Description of Artificial Sequence: Synthetic oligonucleotide
aaaucuaccaauuagaaau

SEQ ID NO: 540807 - RNA, 19 nt, Artificial Sequence
  Description of Artificial Sequence: Synthetic oligonucleotide
uauuauaacgaucaugugg

SEQ ID NO: 540808 - RNA, 19 nt, Artificial Sequence
  Description of Artificial Sequence: Synthetic oligonucleotide
acuaaaacuauuuacuccc

SEQ ID NO: 540809 - RNA, 19 nt, Artificial Sequence
  Description of Artificial Sequence: Synthetic oligonucleotide
aaauuuaccauuuauacaa

SEQ ID NO: 540810 - RNA, 19 nt, Artificial Sequence
  Description of Artificial Sequence: Synthetic oligonucleotide
aaaaccaugguccaguagg

SEQ ID NO: 540811 - RNA, 19 nt, Artificial Sequence
  Description of Artificial Sequence: Synthetic oligonucleotide
acuaaaaugguauuuacag

SEQ ID NO: 540812 - RNA, 19 nt, Artificial Sequence
  Description of Artificial Sequence: Synthetic oligonucleotide
aaucagguaaaauaaacca

SEQ ID NO: 540813 - RNA, 19 nt, Artificial Sequence
  Description of Artificial Sequence: Synthetic oligonucleotide
aaagcuguuuccuauaugu

SEQ ID NO: 540814 - RNA, 19 nt, Artificial Sequence
  Description of Artificial Sequence: Synthetic oligonucleotide
ugaacaaugccauagcaag

SEQ ID NO: 540815 - RNA, 19 nt, Artificial Sequence
  Description of Artificial Sequence: Synthetic oligonucleotide
aaaaccaagugguagcuag

SEQ ID NO: 540816 - RNA, 19 nt, Artificial Sequence
  Description of Artificial Sequence: Synthetic oligonucleotide
aaaacgauuggcuccauug

SEQ ID NO: 540817 - RNA, 19 nt, Artificial Sequence
  Description of Artificial Sequence: Synthetic oligonucleotide
cuaauuugaucacaaaacg

SEQ ID NO: 540818 - RNA, 19 nt, Artificial Sequence
  Description of Artificial Sequence: Synthetic oligonucleotide
uuauguacaucuuugguug

SEQ ID NO: 540819 - RNA, 19 nt, Artificial Sequence
  Description of Artificial Sequence: Synthetic oligonucleotide
aaaauuuaccauuuauaca

SEQ ID NO: 540820 - RNA, 19 nt, Artificial Sequence
  Description of Artificial Sequence: Synthetic oligonucleotide
auaacgaucauguggacag

SEQ ID NO: 540821 - RNA, 19 nt, Artificial Sequence
  Description of Artificial Sequence: Synthetic oligonucleotide
uguauaaucacaugguuaa

SEQ ID NO: 540822 - RNA, 19 nt, Artificial Sequence
  Description of Artificial Sequence: Synthetic oligonucleotide
gacaaaucucauuacagag

SEQ ID NO: 540823 - RNA, 19 nt, Artificial Sequence
  Description of Artificial Sequence: Synthetic oligonucleotide
uuucacauuacaaaacaga

SEQ ID NO: 540824 - RNA, 19 nt, Artificial Sequence
  Description of Artificial Sequence: Synthetic oligonucleotide
aacgcaacagccuccaauc

SEQ ID NO: 540825 - RNA, 19 nt, Artificial Sequence
  Description of Artificial Sequence: Synthetic oligonucleotide
agcaagucuuauuauaacg

SEQ ID NO: 540826 - RNA, 19 nt, Artificial Sequence
  Description of Artificial Sequence: Synthetic oligonucleotide
aauguuaucuuaugaauuu

SEQ ID NO: 540827 - RNA, 19 nt, Artificial Sequence
  Description of Artificial Sequence: Synthetic oligonucleotide
ucaaugaaucaguaguagg

SEQ ID NO: 540828 - RNA, 19 nt, Artificial Sequence
  Description of Artificial Sequence: Synthetic oligonucleotide
ugucauacaagcaccagug

SEQ ID NO: 540829 - RNA, 19 nt, Artificial Sequence
  Description of Artificial Sequence: Synthetic oligonucleotide
uucaacuugaaguuggugu

SEQ ID NO: 540830 - RNA, 19 nt, Artificial Sequence
  Description of Artificial Sequence: Synthetic oligonucleotide
ucuaucccaaaugagaucc

SEQ ID NO: 540831 - RNA, 19 nt, Artificial Sequence
  Description of Artificial Sequence: Synthetic oligonucleotide
ugauuuaauacagggagag

SEQ ID NO: 540832 - RNA, 19 nt, Artificial Sequence
  Description of Artificial Sequence: Synthetic oligonucleotide
agaucaaugguuauauccc

SEQ ID NO: 540833 - RNA, 19 nt, Artificial Sequence
  Description of Artificial Sequence: Synthetic oligonucleotide
caucuaaguaaaauaacag

SEQ ID NO: 540834 - RNA, 19 nt, Artificial Sequence
  Description of Artificial Sequence: Synthetic oligonucleotide
uuaaaucuaccaauuagaa

SEQ ID NO: 540835 - RNA, 19 nt, Artificial Sequence
  Description of Artificial Sequence: Synthetic oligonucleotide
cuuauuauaacgaucaugu

SEQ ID NO: 540836 - RNA, 19 nt, Artificial Sequence
  Description of Artificial Sequence: Synthetic oligonucleotide
aauguguguaucugaugcg

SEQ ID NO: 540837 - RNA, 19 nt, Artificial Sequence
  Description of Artificial Sequence: Synthetic oligonucleotide
aaacggacaaaucucauua

SEQ ID NO: 540838 - RNA, 19 nt, Artificial Sequence
  Description of Artificial Sequence: Synthetic oligonucleotide
cauacuaugggagaccucg

SEQ ID NO: 540839 - RNA, 19 nt, Artificial Sequence
  Description of Artificial Sequence: Synthetic oligonucleotide
ucauacaagcaccaguggc

SEQ ID NO: 540840 - RNA, 19 nt, Artificial Sequence
  Description of Artificial Sequence: Synthetic oligonucleotide
cuaaguaaaauaacagcac

SEQ ID NO: 540841 - RNA, 19 nt, Artificial Sequence
  Description of Artificial Sequence: Synthetic oligonucleotide
uccaguagguacuugaaca

SEQ ID NO: 540842 - RNA, 19 nt, Artificial Sequence
  Description of Artificial Sequence: Synthetic oligonucleotide
auuauaacgaucaugugga

SEQ ID NO: 540843 - RNA, 19 nt, Artificial Sequence
  Description of Artificial Sequence: Synthetic oligonucleotide
aaaccguauuuacagaagu

SEQ ID NO: 540844 - RNA, 19 nt, Artificial Sequence
  Description of Artificial Sequence: Synthetic oligonucleotide
uuaaguccugauuuaauac

SEQ ID NO: 540845 - RNA, 19 nt, Artificial Sequence
  Description of Artificial Sequence: Synthetic oligonucleotide
auaaucacaugguuaauga

SEQ ID NO: 540846 - RNA, 19 nt, Artificial Sequence
  Description of Artificial Sequence: Synthetic oligonucleotide
accucuggaauauagagga

SEQ ID NO: 540847 - RNA, 19 nt, Artificial Sequence
  Description of Artificial Sequence: Synthetic oligonucleotide
guuuauaccccgcuguagg

SEQ ID NO: 540848 - RNA, 19 nt, Artificial Sequence
  Description of Artificial Sequence: Synthetic oligonucleotide
uccuuuauguacaucuuug

SEQ ID NO: 540849 - RNA, 19 nt, Artificial Sequence
  Description of Artificial Sequence: Synthetic oligonucleotide
acuugaacaaugccauagc

SEQ ID NO: 540850 - RNA, 19 nt, Artificial Sequence
  Description of Artificial Sequence: Synthetic oligonucleotide
uauaaucacaugguuaaug

SEQ ID NO: 540851 - RNA, 19 nt, Artificial Sequence
  Description of Artificial Sequence: Synthetic oligonucleotide
uuacauggaaagccugucg

SEQ ID NO: 540852 - RNA, 19 nt, Artificial Sequence
  Description of Artificial Sequence: Synthetic oligonucleotide
aaucucauuacagaggaau

SEQ ID NO: 540853 - RNA, 19 nt, Artificial Sequence
  Description of Artificial Sequence: Synthetic oligonucleotide
uucuuaagacaacauuugc

SEQ ID NO: 540854 - RNA, 19 nt, Artificial Sequence
  Description of Artificial Sequence: Synthetic oligonucleotide
aaacauuggcaaauuguac

SEQ ID NO: 540855 - RNA, 19 nt, Artificial Sequence
  Description of Artificial Sequence: Synthetic oligonucleotide
aguagguuuaacaauaaga

SEQ ID NO: 540856 - RNA, 19 nt, Artificial Sequence
  Description of Artificial Sequence: Synthetic oligonucleotide
aacggacaaaucucauuac

SEQ ID NO: 540857 - RNA, 19 nt, Artificial Sequence
  Description of Artificial Sequence: Synthetic oligonucleotide
accaugguccaguagguac

SEQ ID NO: 540858 - RNA, 19 nt, Artificial Sequence
  Description of Artificial Sequence: Synthetic oligonucleotide
guccugauuuaauacaggg

SEQ ID NO: 540859 - RNA, 19 nt, Artificial Sequence
  Description of Artificial Sequence: Synthetic oligonucleotide
agucuuauuauaacgauca

SEQ ID NO: 540860 - RNA, 19 nt, Artificial Sequence
  Description of Artificial Sequence: Synthetic oligonucleotide
ucugagcccguuuauaccc

SEQ ID NO: 540861 - RNA, 19 nt, Artificial Sequence
  Description of Artificial Sequence: Synthetic oligonucleotide
ugacuacuccaauagaucu

SEQ ID NO: 540862 - RNA, 19 nt, Artificial Sequence
  Description of Artificial Sequence: Synthetic oligonucleotide
uacuugaacaaugccauag

SEQ ID NO: 540863 - RNA, 19 nt, Artificial Sequence
  Description of Artificial Sequence: Synthetic oligonucleotide
acugucacgccauugaccu

SEQ ID NO: 540864 - RNA, 19 nt, Artificial Sequence
  Description of Artificial Sequence: Synthetic oligonucleotide
ugcuauucaaugaaucagu

SEQ ID NO: 540865 - RNA, 19 nt, Artificial Sequence
  Description of Artificial Sequence: Synthetic oligonucleotide
aagucuuauuauaacgauc

SEQ ID NO: 540866 - RNA, 19 nt, Artificial Sequence
  Description of Artificial Sequence: Synthetic oligonucleotide
aucagguaaaauaaaccac

SEQ ID NO: 540867 - RNA, 19 nt, Artificial Sequence
  Description of Artificial Sequence: Synthetic oligonucleotide
auaaucaagagcaugacua

SEQ ID NO: 540868 - RNA, 19 nt, Artificial Sequence
  Description of Artificial Sequence: Synthetic oligonucleotide
ugcagcgucacuaggagac

SEQ ID NO: 540869 - RNA, 19 nt, Artificial Sequence
  Description of Artificial Sequence: Synthetic oligonucleotide
agacuguaaaacgauuggc

SEQ ID NO: 540870 - RNA, 19 nt, Artificial Sequence
  Description of Artificial Sequence: Synthetic oligonucleotide
uuuauaccccgcuguaggg

SEQ ID NO: 540871 - RNA, 19 nt, Artificial Sequence
  Description of Artificial Sequence: Synthetic oligonucleotide
acugcuauucaaugaauca

SEQ ID NO: 540872 - RNA, 19 nt, Artificial Sequence
  Description of Artificial Sequence: Synthetic oligonucleotide
guuacagaauaacaaccag

SEQ ID NO: 540873 - RNA, 19 nt, Artificial Sequence
  Description of Artificial Sequence: Synthetic oligonucleotide
uauagcaagucuuauuaua

SEQ ID NO: 540874 - RNA, 19 nt, Artificial Sequence
  Description of Artificial Sequence: Synthetic oligonucleotide
ucgacauccauguuuauua

SEQ ID NO: 540875 - RNA, 19 nt, Artificial Sequence
  Description of Artificial Sequence: Synthetic oligonucleotide
auuuacagaagugagguaa

SEQ ID NO: 540876 - RNA, 19 nt, Artificial Sequence
  Description of Artificial Sequence: Synthetic oligonucleotide
uuugaacuuucuuuaaaau

SEQ ID NO: 540877 - RNA, 19 nt, Artificial Sequence
  Description of Artificial Sequence: Synthetic oligonucleotide
cuaccaauuagaaauauua

SEQ ID NO: 540878 - RNA, 19 nt, Artificial Sequence
  Description of Artificial Sequence: Synthetic oligonucleotide
auaucaauguuaucuuaug

SEQ ID NO: 540879 - RNA, 19 nt, Artificial Sequence
  Description of Artificial Sequence: Synthetic oligonucleotide
uugaaguugguguaaugac

SEQ ID NO: 540880 - RNA, 19 nt, Artificial Sequence
  Description of Artificial Sequence: Synthetic oligonucleotide
uuuaauacaugugaauuuu

SEQ ID NO: 540881 - RNA, 19 nt, Artificial Sequence
  Description of Artificial Sequence: Synthetic oligonucleotide
acuacuccaauagaucugg

SEQ ID NO: 540882 - RNA, 19 nt, Artificial Sequence
  Description of Artificial Sequence: Synthetic oligonucleotide
ugagauccccauuucauac

SEQ ID NO: 540883 - RNA, 19 nt, Artificial Sequence
  Description of Artificial Sequence: Synthetic oligonucleotide
auuugaucacaaaacggac

SEQ ID NO: 540884 - RNA, 19 nt, Artificial Sequence
  Description of Artificial Sequence: Synthetic oligonucleotide
uaaaucuaccaauuagaaa

SEQ ID NO: 540885 - RNA, 19 nt, Artificial Sequence
  Description of Artificial Sequence: Synthetic oligonucleotide
uguguaucugaugcggugg

SEQ ID NO: 540886 - RNA, 19 nt, Artificial Sequence
  Description of Artificial Sequence: Synthetic oligonucleotide
cuauucaaugaaucaguag

SEQ ID NO: 540887 - RNA, 19 nt, Artificial Sequence
  Description of Artificial Sequence: Synthetic oligonucleotide
aaguccugauuuaauacag

SEQ ID NO: 540888 - RNA, 19 nt, Artificial Sequence
  Description of Artificial Sequence: Synthetic oligonucleotide
uaacaguugaggucacagg

SEQ ID NO: 540889 - RNA, 19 nt, Artificial Sequence
  Description of Artificial Sequence: Synthetic oligonucleotide
aaacgauuggcuccauugu

SEQ ID NO: 540890 - RNA, 19 nt, Artificial Sequence
  Description of Artificial Sequence: Synthetic oligonucleotide
acaaaucucauuacagagg

SEQ ID NO: 540891 - RNA, 19 nt, Artificial Sequence
  Description of Artificial Sequence: Synthetic oligonucleotide
aacgaucauguggacagac

SEQ ID NO: 540892 - RNA, 19 nt, Artificial Sequence
  Description of Artificial Sequence: Synthetic oligonucleotide
gguuaaaucagguaaaaua

SEQ ID NO: 540893 - RNA, 19 nt, Artificial Sequence
  Description of Artificial Sequence: Synthetic oligonucleotide
guaacugucauugcgaaga

SEQ ID NO: 540894 - RNA, 19 nt, Artificial Sequence
  Description of Artificial Sequence: Synthetic oligonucleotide
aaccaagugguagcuagcg

SEQ ID NO: 540895 - RNA, 19 nt, Artificial Sequence
  Description of Artificial Sequence: Synthetic oligonucleotide
agugacacgggccggucgc

SEQ ID NO: 540896 - RNA, 19 nt, Artificial Sequence
  Description of Artificial Sequence: Synthetic oligonucleotide
aucacauauauagcaaguc

SEQ ID NO: 540897 - RNA, 19 nt, Artificial Sequence
  Description of Artificial Sequence: Synthetic oligonucleotide
uguagaaacauuggcaaau

SEQ ID NO: 540898 - RNA, 19 nt, Artificial Sequence
  Description of Artificial Sequence: Synthetic oligonucleotide
cagacuguaaaacgauugg

SEQ ID NO: 540899 - RNA, 19 nt, Artificial Sequence
  Description of Artificial Sequence: Synthetic oligonucleotide
uuaucuacaaaagguuuga

SEQ ID NO: 540900 - RNA, 19 nt, Artificial Sequence
  Description of Artificial Sequence: Synthetic oligonucleotide
uguaaaacgauuggcucca

SEQ ID NO: 540901 - RNA, 19 nt, Artificial Sequence
  Description of Artificial Sequence: Synthetic oligonucleotide
caauagaucugguucuccc

SEQ ID NO: 540902 - RNA, 19 nt, Artificial Sequence
  Description of Artificial Sequence: Synthetic oligonucleotide
caaccagugguuaaaucag

SEQ ID NO: 540903 - RNA, 19 nt, Artificial Sequence
  Description of Artificial Sequence: Synthetic oligonucleotide
aaaacggacaaaucucauu

SEQ ID NO: 540904 - RNA, 19 nt, Artificial Sequence
  Description of Artificial Sequence: Synthetic oligonucleotide
uccugauuuaauacaggga

SEQ ID NO: 540905 - RNA, 19 nt, Artificial Sequence
  Description of Artificial Sequence: Synthetic oligonucleotide
acaaaccguauuuacagaa

SEQ ID NO: 540906 - RNA, 19 nt, Artificial Sequence
  Description of Artificial Sequence: Synthetic oligonucleotide
aaacgcaacagccuccaau

SEQ ID NO: 540907 - RNA, 19 nt, Artificial Sequence
  Description of Artificial Sequence: Synthetic oligonucleotide
acaacauuugcaaagccca

SEQ ID NO: 540908 - RNA, 19 nt, Artificial Sequence
  Description of Artificial Sequence: Synthetic oligonucleotide
uuauuauaacgaucaugug

SEQ ID NO: 540909 - RNA, 19 nt, Artificial Sequence
  Description of Artificial Sequence: Synthetic oligonucleotide
agauccccauuucauacuc

SEQ ID NO: 540910 - RNA, 19 nt, Artificial Sequence
  Description of Artificial Sequence: Synthetic oligonucleotide
auuggcaaauuguaccucu

SEQ ID NO: 540911 - RNA, 19 nt, Artificial Sequence
  Description of Artificial Sequence: Synthetic oligonucleotide
aagaguagguuuaacaaua

SEQ ID NO: 540912 - RNA, 19 nt, Artificial Sequence
  Description of Artificial Sequence: Synthetic oligonucleotide
ucucgucugagcaaacgca

SEQ ID NO: 540913 - RNA, 19 nt, Artificial Sequence
  Description of Artificial Sequence: Synthetic oligonucleotide
agcaguaccaggugacuuc

SEQ ID NO: 540914 - RNA, 19 nt, Artificial Sequence
  Description of Artificial Sequence: Synthetic oligonucleotide
uccagacucuccuuuaugu

SEQ ID NO: 540915 - RNA, 19 nt, Artificial Sequence
  Description of Artificial Sequence: Synthetic oligonucleotide
uacugcuauucaaugaauc

SEQ ID NO: 540916 - RNA, 19 nt, Artificial Sequence
  Description of Artificial Sequence: Synthetic oligonucleotide
uauaacgaucauguggaca

SEQ ID NO: 540917 - RNA, 19 nt, Artificial Sequence
  Description of Artificial Sequence: Synthetic oligonucleotide
cuaccaguccgccauauug

SEQ ID NO: 540918 - RNA, 19 nt, Artificial Sequence
  Description of Artificial Sequence: Synthetic oligonucleotide
uauaccccgcuguagggag

SEQ ID NO: 540919 - RNA, 19 nt, Artificial Sequence
  Description of Artificial Sequence: Synthetic oligonucleotide
ucugugcggaaaaugugug

SEQ ID NO: 540920 - RNA, 19 nt, Artificial Sequence
  Description of Artificial Sequence: Synthetic oligonucleotide
uuaagacaacauuugcaaa

SEQ ID NO: 540921 - RNA, 19 nt, Artificial Sequence
  Description of Artificial Sequence: Synthetic oligonucleotide
uuuugggcugugaaguaac

SEQ ID NO: 540922 - RNA, 19 nt, Artificial Sequence
  Description of Artificial Sequence: Synthetic oligonucleotide
guagcuagcgccccuacug

SEQ ID NO: 540923 - RNA, 19 nt, Artificial Sequence
  Description of Artificial Sequence: Synthetic oligonucleotide
uaaccuaccaguccgccau

SEQ ID NO: 540924 - RNA, 19 nt, Artificial Sequence
  Description of Artificial Sequence: Synthetic oligonucleotide
uuuuaaccuaccaguccgc

SEQ ID NO: 540925 - RNA, 19 nt, Artificial Sequence
  Description of Artificial Sequence: Synthetic oligonucleotide
gguggacuaggauuggucg

SEQ ID NO: 540926 - RNA, 19 nt, Artificial Sequence
  Description of Artificial Sequence: Synthetic oligonucleotide
aaaccaagugguagcuagc

SEQ ID NO: 540927 - RNA, 19 nt, Artificial Sequence
  Description of Artificial Sequence: Synthetic oligonucleotide
ugcagcuuacuaaaauggu

SEQ ID NO: 540928 - RNA, 19 nt, Artificial Sequence
  Description of Artificial Sequence: Synthetic oligonucleotide
gaguagguuuaacaauaag

SEQ ID NO: 540929 - RNA, 19 nt, Artificial Sequence
  Description of Artificial Sequence: Synthetic oligonucleotide
auaccggaagucugagccc

SEQ ID NO: 540930 - RNA, 19 nt, Artificial Sequence
  Description of Artificial Sequence: Synthetic oligonucleotide
cuauauguggggcucuuac

SEQ ID NO: 540931 - RNA, 19 nt, Artificial Sequence
  Description of Artificial Sequence: Synthetic oligonucleotide
uacugucacgccauugacc

SEQ ID NO: 540932 - RNA, 19 nt, Artificial Sequence
  Description of Artificial Sequence: Synthetic oligonucleotide
ucgcuauuguuggaaaagg

SEQ ID NO: 540933 - RNA, 19 nt, Artificial Sequence
  Description of Artificial Sequence: Synthetic oligonucleotide
aucaagagcaugacuacuc

SEQ ID NO: 540934 - RNA, 19 nt, Artificial Sequence
  Description of Artificial Sequence: Synthetic oligonucleotide
auguguguaucugaugcgg

SEQ ID NO: 540935 - RNA, 19 nt, Artificial Sequence
  Description of Artificial Sequence: Synthetic oligonucleotide
uccacuaggaagucaugca

SEQ ID NO: 540936 - RNA, 19 nt, Artificial Sequence
  Description of Artificial Sequence: Synthetic oligonucleotide
uuaauacagggagagaauu

SEQ ID NO: 540937 - RNA, 19 nt, Artificial Sequence
  Description of Artificial Sequence: Synthetic oligonucleotide
aaacagauucacaaaccgu

SEQ ID NO: 540938 - RNA, 19 nt, Artificial Sequence
  Description of Artificial Sequence: Synthetic oligonucleotide
aaucaagagcaugacuacu

SEQ ID NO: 540939 - RNA, 19 nt, Artificial Sequence
  Description of Artificial Sequence: Synthetic oligonucleotide
auauauagcaagucuuauu

SEQ ID NO: 540940 - RNA, 19 nt, Artificial Sequence
  Description of Artificial Sequence: Synthetic oligonucleotide
augacuacuccaauagauc

SEQ ID NO: 540941 - RNA, 19 nt, Artificial Sequence
  Description of Artificial Sequence: Synthetic oligonucleotide
acagacuguaaaacgauug

SEQ ID NO: 540942 - RNA, 19 nt, Artificial Sequence
  Description of Artificial Sequence: Synthetic oligonucleotide
ccuguucuaauaaaauugc

SEQ ID NO: 540943 - RNA, 19 nt, Artificial Sequence
  Description of Artificial Sequence: Synthetic oligonucleotide
cugcuauucaaugaaucag

SEQ ID NO: 540944 - RNA, 19 nt, Artificial Sequence
  Description of Artificial Sequence: Synthetic oligonucleotide
ugguuauauccccaacugu

SEQ ID NO: 540945 - RNA, 19 nt, Artificial Sequence
  Description of Artificial Sequence: Synthetic oligonucleotide
cacucuaucccaaaugaga

SEQ ID NO: 540946 - RNA, 19 nt, Artificial Sequence
  Description of Artificial Sequence: Synthetic oligonucleotide
accguauuuacagaaguga

SEQ ID NO: 540947 - RNA, 19 nt, Artificial Sequence
  Description of Artificial Sequence: Synthetic oligonucleotide
gcaagcuugaugcaccgcg

SEQ ID NO: 540948 - RNA, 19 nt, Artificial Sequence
  Description of Artificial Sequence: Synthetic oligonucleotide
guuaaguccugauuuaaua

SEQ ID NO: 540949 - RNA, 19 nt, Artificial Sequence
  Description of Artificial Sequence: Synthetic oligonucleotide
agguaaaauaaaccacacu

SEQ ID NO: 540950 - RNA, 19 nt, Artificial Sequence
  Description of Artificial Sequence: Synthetic oligonucleotide
uauauguggggcucuuacu

SEQ ID NO: 540951 - RNA, 19 nt, Artificial Sequence
  Description of Artificial Sequence: Synthetic oligonucleotide
agguacuugaacaaugcca

SEQ ID NO: 540952 - RNA, 19 nt, Artificial Sequence
  Description of Artificial Sequence: Synthetic oligonucleotide
acggacaaaucucauuaca

SEQ ID NO: 540953 - RNA, 19 nt, Artificial Sequence
  Description of Artificial Sequence: Synthetic oligonucleotide
aacgauuggcuccauugua

SEQ ID NO: 540954 - RNA, 19 nt, Artificial Sequence
  Description of Artificial Sequence: Synthetic oligonucleotide
gaacuucccaaaucuccag

SEQ ID NO: 540955 - RNA, 19 nt, Artificial Sequence
  Description of Artificial Sequence: Synthetic oligonucleotide
uucaguaacugcagacgcu

SEQ ID NO: 540956 - RNA, 19 nt, Artificial Sequence
  Description of Artificial Sequence: Synthetic oligonucleotide
uucauacuaugggagaccu

SEQ ID NO: 540957 - RNA, 19 nt, Artificial Sequence
  Description of Artificial Sequence: Synthetic oligonucleotide
ugacuucauccuaauuuga

SEQ ID NO: 540958 - RNA, 19 nt, Artificial Sequence
  Description of Artificial Sequence: Synthetic oligonucleotide
uccuucauacuaugggaga

SEQ ID NO: 540959 - RNA, 19 nt, Artificial Sequence
  Description of Artificial Sequence: Synthetic oligonucleotide
aaaaucacugucagcagua

SEQ ID NO: 540960 - RNA, 19 nt, Artificial Sequence
  Description of Artificial Sequence: Synthetic oligonucleotide
aaggcacggaaagcugugc

SEQ ID NO: 540961 - RNA, 19 nt, Artificial Sequence
  Description of Artificial Sequence: Synthetic oligonucleotide
ugcugaaccccaccuaacu

SEQ ID NO: 540962 - RNA, 19 nt, Artificial Sequence
  Description of Artificial Sequence: Synthetic oligonucleotide
cuaggauuggucgcuauug

SEQ ID NO: 540963 - RNA, 19 nt, Artificial Sequence
  Description of Artificial Sequence: Synthetic oligonucleotide
acaugguuaaugaacacaa

SEQ ID NO: 540964 - RNA, 19 nt, Artificial Sequence
  Description of Artificial Sequence: Synthetic oligonucleotide
aaccguauuuacagaagug

SEQ ID NO: 540965 - RNA, 19 nt, Artificial Sequence
  Description of Artificial Sequence: Synthetic oligonucleotide
uaccggaagucugagcccg

SEQ ID NO: 540966 - RNA, 19 nt, Artificial Sequence
  Description of Artificial Sequence: Synthetic oligonucleotide
uagcaagucuuauuauaac

SEQ ID NO: 540967 - RNA, 19 nt, Artificial Sequence
  Description of Artificial Sequence: Synthetic oligonucleotide
uaccaguccgccauauugu

SEQ ID NO: 540968 - RNA, 19 nt, Artificial Sequence
  Description of Artificial Sequence: Synthetic oligonucleotide
gacgcugcagccgugcccg

SEQ ID NO: 540969 - RNA, 19 nt, Artificial Sequence
  Description of Artificial Sequence: Synthetic oligonucleotide
aaccagugguuaaaucagg

SEQ ID NO: 540970 - RNA, 19 nt, Artificial Sequence
  Description of Artificial Sequence: Synthetic oligonucleotide
gucauacaagcaccagugg

SEQ ID NO: 540971 - RNA, 19 nt, Artificial Sequence
  Description of Artificial Sequence: Synthetic oligonucleotide
uucauccuaauuugaucac

SEQ ID NO: 540972 - RNA, 19 nt, Artificial Sequence
  Description of Artificial Sequence: Synthetic oligonucleotide
uuaaccuaccaguccgcca

SEQ ID NO: 540973 - RNA, 19 nt, Artificial Sequence
  Description of Artificial Sequence: Synthetic oligonucleotide
gucgcuauuguuggaaaag

SEQ ID NO: 540974 - RNA, 19 nt, Artificial Sequence
  Description of Artificial Sequence: Synthetic oligonucleotide
caucuuuauggggacacag

SEQ ID NO: 540975 - RNA, 19 nt, Artificial Sequence
  Description of Artificial Sequence: Synthetic oligonucleotide
uaucccaaaugagaucccc

SEQ ID NO: 540976 - RNA, 19 nt, Artificial Sequence
  Description of Artificial Sequence: Synthetic oligonucleotide
uuuguccacuggaaguuaa

SEQ ID NO: 540977 - RNA, 19 nt, Artificial Sequence
  Description of Artificial Sequence: Synthetic oligonucleotide
ugcccgucgcaauaaacca

SEQ ID NO: 540978 - RNA, 19 nt, Artificial Sequence
  Description of Artificial Sequence: Synthetic oligonucleotide
uguacaucuuugguugaug

SEQ ID NO: 540979 - RNA, 19 nt, Artificial Sequence
  Description of Artificial Sequence: Synthetic oligonucleotide
ugaaccccaccuaacuccu

SEQ ID NO: 540980 - RNA, 19 nt, Artificial Sequence
  Description of Artificial Sequence: Synthetic oligonucleotide
uuggcaaauuguaccucug

SEQ ID NO: 540981 - RNA, 19 nt, Artificial Sequence
  Description of Artificial Sequence: Synthetic oligonucleotide
cuaaaaugucacuaggagu

SEQ ID NO: 540982 - RNA, 19 nt, Artificial Sequence
  Description of Artificial Sequence: Synthetic oligonucleotide
uaggauuggucgcuauugu

SEQ ID NO: 540983 - RNA, 19 nt, Artificial Sequence
  Description of Artificial Sequence: Synthetic oligonucleotide
acaaaagguuugaacuuuc

SEQ ID NO: 540984 - RNA, 19 nt, Artificial Sequence
  Description of Artificial Sequence: Synthetic oligonucleotide
augaugacugcugggaaug

SEQ ID NO: 540985 - RNA, 19 nt, Artificial Sequence
  Description of Artificial Sequence: Synthetic oligonucleotide
guacaucuuugguugauga

SEQ ID NO: 540986 - RNA, 19 nt, Artificial Sequence
  Description of Artificial Sequence: Synthetic oligonucleotide
cuucacuccacucuuuaca

SEQ ID NO: 540987 - RNA, 19 nt, Artificial Sequence
  Description of Artificial Sequence: Synthetic oligonucleotide
accaguccgccauauuguc

SEQ ID NO: 540988 - RNA, 19 nt, Artificial Sequence
  Description of Artificial Sequence: Synthetic oligonucleotide
acaguacugaacguugucu

SEQ ID NO: 540989 - RNA, 19 nt, Artificial Sequence
  Description of Artificial Sequence: Synthetic oligonucleotide
uauguacaucuuugguuga

SEQ ID NO: 540990 - RNA, 19 nt, Artificial Sequence
  Description of Artificial Sequence: Synthetic oligonucleotide
ugugcggaaaaugugugua

SEQ ID NO: 540991 - RNA, 19 nt, Artificial Sequence
  Description of Artificial Sequence: Synthetic oligonucleotide
uccuuguucaucacauaua

SEQ ID NO: 540992 - RNA, 19 nt, Artificial Sequence
  Description of Artificial Sequence: Synthetic oligonucleotide
cuguauaaucacaugguua

SEQ ID NO: 540993 - RNA, 19 nt, Artificial Sequence
  Description of Artificial Sequence: Synthetic oligonucleotide
ccauagaacaagcacacuc

SEQ ID NO: 540994 - RNA, 19 nt, Artificial Sequence
  Description of Artificial Sequence: Synthetic oligonucleotide
ugacccacuaaagaacuaa

SEQ ID NO: 540995 - RNA, 19 nt, Artificial Sequence
  Description of Artificial Sequence: Synthetic oligonucleotide
agaauaacaaccagugguu

SEQ ID NO: 540996 - RNA, 19 nt, Artificial Sequence
  Description of Artificial Sequence: Synthetic oligonucleotide
ugcgaagaucugaaucugu

SEQ ID NO: 540997 - RNA, 19 nt, Artificial Sequence
  Description of Artificial Sequence: Synthetic oligonucleotide
cuucauacuaugggagacc

SEQ ID NO: 540998 - RNA, 19 nt, Artificial Sequence
  Description of Artificial Sequence: Synthetic oligonucleotide
auaacaaccagugguuaaa

SEQ ID NO: 540999 - RNA, 19 nt, Artificial Sequence
  Description of Artificial Sequence: Synthetic oligonucleotide
gaaauuggacaguucucaa

SEQ ID NO: 541000 - RNA, 19 nt, Artificial Sequence
  Description of Artificial Sequence: Synthetic oligonucleotide
uuuccuauauguggggcuc

SEQ ID NO: 541001 - RNA, 19 nt, Artificial Sequence
  Description of Artificial Sequence: Synthetic oligonucleotide
auuucauacuccaacuuuu

SEQ ID NO: 541002 - RNA, 19 nt, Artificial Sequence
  Description of Artificial Sequence: Synthetic oligonucleotide
gugagguaagaacugugca

SEQ ID NO: 541003 - RNA, 19 nt, Artificial Sequence
  Description of Artificial Sequence: Synthetic oligonucleotide
agcgccccuacugucacgc

SEQ ID NO: 541004 - RNA, 19 nt, Artificial Sequence
  Description of Artificial Sequence: Synthetic oligonucleotide
agcaaacgcaacagccucc

SEQ ID NO: 541005 - RNA, 19 nt, Artificial Sequence
  Description of Artificial Sequence: Synthetic oligonucleotide
gaugcgguggacuaggauu

SEQ ID NO: 541006 - RNA, 19 nt, Artificial Sequence
  Description of Artificial Sequence: Synthetic oligonucleotide
gacuacuccaauagaucug

SEQ ID NO: 541007 - RNA, 19 nt, Artificial Sequence
  Description of Artificial Sequence: Synthetic oligonucleotide
ggaaaauguguguaucuga

SEQ ID NO: 541008 - RNA, 19 nt, Artificial Sequence
  Description of Artificial Sequence: Synthetic oligonucleotide
gacuguaaaacgauuggcu

SEQ ID NO: 541009 - RNA, 19 nt, Artificial Sequence
  Description of Artificial Sequence: Synthetic oligonucleotide
uaauaaaauugcuguccuu

SEQ ID NO: 541010 - RNA, 19 nt, Artificial Sequence
  Description of Artificial Sequence: Synthetic oligonucleotide
acucuaucccaaaugagau

SEQ ID NO: 541011 - RNA, 19 nt, Artificial Sequence
  Description of Artificial Sequence: Synthetic oligonucleotide
guggacuaggauuggucgc

SEQ ID NO: 541012 - RNA, 19 nt, Artificial Sequence
  Description of Artificial Sequence: Synthetic oligonucleotide
gaccucguccuccagugac

SEQ ID NO: 541013 - RNA, 19 nt, Artificial Sequence
  Description of Artificial Sequence: Synthetic oligonucleotide
aaaccaugguccaguaggu

SEQ ID NO: 541014 - RNA, 19 nt, Artificial Sequence
  Description of Artificial Sequence: Synthetic oligonucleotide
uuauaacgaucauguggac

SEQ ID NO: 541015 - RNA, 19 nt, Artificial Sequence
  Description of Artificial Sequence: Synthetic oligonucleotide
ggauuggucgcuauuguug

SEQ ID NO: 541016 - RNA, 19 nt, Artificial Sequence
  Description of Artificial Sequence: Synthetic oligonucleotide
uuauaccccgcuguaggga

SEQ ID NO: 541017 - RNA, 19 nt, Artificial Sequence
  Description of Artificial Sequence: Synthetic oligonucleotide
gugaaguaacaguugaggu

SEQ ID NO: 541018 - RNA, 19 nt, Artificial Sequence
  Description of Artificial Sequence: Synthetic oligonucleotide
ugaaucugugaagcuuaag

SEQ ID NO: 541019 - RNA, 19 nt, Artificial Sequence
  Description of Artificial Sequence: Synthetic oligonucleotide
uacuccaauagaucugguu

SEQ ID NO: 541020 - RNA, 19 nt, Artificial Sequence
  Description of Artificial Sequence: Synthetic oligonucleotide
uccucgauaccggaagucu

SEQ ID NO: 541021 - RNA, 19 nt, Artificial Sequence
  Description of Artificial Sequence: Synthetic oligonucleotide
cauacaagcaccaguggcu

SEQ ID NO: 541022 - RNA, 19 nt, Artificial Sequence
  Description of Artificial Sequence: Synthetic oligonucleotide
gucugagcccguuuauacc

SEQ ID NO: 541023 - RNA, 19 nt, Artificial Sequence
  Description of Artificial Sequence: Synthetic oligonucleotide
caugacuacuccaauagau

SEQ ID NO: 541024 - RNA, 19 nt, Artificial Sequence
  Description of Artificial Sequence: Synthetic oligonucleotide
cauccuaauuugaucacaa

SEQ ID NO: 541025 - RNA, 19 nt, Artificial Sequence
  Description of Artificial Sequence: Synthetic oligonucleotide
acauauauagcaagucuua

SEQ ID NO: 541026 - RNA, 19 nt, Artificial Sequence
  Description of Artificial Sequence: Synthetic oligonucleotide
gugcccgucgcaauaaacc

SEQ ID NO: 541027 - RNA, 19 nt, Artificial Sequence
  Description of Artificial Sequence: Synthetic oligonucleotide
caaauuguaccucuggaau

SEQ ID NO: 541028 - RNA, 19 nt, Artificial Sequence
  Description of Artificial Sequence: Synthetic oligonucleotide
acaaauuguuacagaauaa

SEQ ID NO: 541029 - RNA, 19 nt, Artificial Sequence
  Description of Artificial Sequence: Synthetic oligonucleotide
ccauauugucauaaucaag

SEQ ID NO: 541030 - RNA, 19 nt, Artificial Sequence
  Description of Artificial Sequence: Synthetic oligonucleotide
cugggucuuuuccacuagg

SEQ ID NO: 541031 - RNA, 19 nt, Artificial Sequence
  Description of Artificial Sequence: Synthetic oligonucleotide
uugcgaagaucugaaucug

SEQ ID NO: 541032 - RNA, 19 nt, Artificial Sequence
  Description of Artificial Sequence: Synthetic oligonucleotide
cuuguucuuccagcuaagc

SEQ ID NO: 541033 - RNA, 19 nt, Artificial Sequence
  Description of Artificial Sequence: Synthetic oligonucleotide
agagaauugucagguaaaa

SEQ ID NO: 541034 - RNA, 19 nt, Artificial Sequence
  Description of Artificial Sequence: Synthetic oligonucleotide
uauggggacacagcucaca

SEQ ID NO: 541035 - RNA, 19 nt, Artificial Sequence
  Description of Artificial Sequence: Synthetic oligonucleotide
gauuuaauacagggagaga

SEQ ID NO: 541036 - RNA, 19 nt, Artificial Sequence
  Description of Artificial Sequence: Synthetic oligonucleotide
cuacugucacgccauugac

SEQ ID NO: 541037 - RNA, 19 nt, Artificial Sequence
  Description of Artificial Sequence: Synthetic oligonucleotide
cucuaucccaaaugagauc

SEQ ID NO: 541038 - RNA, 19 nt, Artificial Sequence
  Description of Artificial Sequence: Synthetic oligonucleotide
gcuauuguuggaaaaggca

SEQ ID NO: 541039 - RNA, 19 nt, Artificial Sequence
  Description of Artificial Sequence: Synthetic oligonucleotide
caauuaaaucuaccaauua

SEQ ID NO: 541040 - RNA, 19 nt, Artificial Sequence
  Description of Artificial Sequence: Synthetic oligonucleotide
uaaaacgauuggcuccauu

SEQ ID NO: 541041 - RNA, 19 nt, Artificial Sequence
  Description of Artificial Sequence: Synthetic oligonucleotide
agagcaugacuacuccaau

SEQ ID NO: 541042 - RNA, 19 nt, Artificial Sequence
  Description of Artificial Sequence: Synthetic oligonucleotide
uuggucgcuauuguuggaa

SEQ ID NO: 541043 - RNA, 19 nt, Artificial Sequence
  Description of Artificial Sequence: Synthetic oligonucleotide
guuacauggaaagccuguc

SEQ ID NO: 541044 - RNA, 19 nt, Artificial Sequence
  Description of Artificial Sequence: Synthetic oligonucleotide
agcuuacuaaaaugguauu

SEQ ID NO: 541045 - RNA, 19 nt, Artificial Sequence
  Description of Artificial Sequence: Synthetic oligonucleotide
aaagcccaguugaggaucu

SEQ ID NO: 541046 - RNA, 19 nt, Artificial Sequence
  Description of Artificial Sequence: Synthetic oligonucleotide
cccaccuaacuccugaggc

SEQ ID NO: 541047 - RNA, 19 nt, Artificial Sequence
  Description of Artificial Sequence: Synthetic oligonucleotide
aguaacugcagacgcucuu

SEQ ID NO: 541048 - RNA, 19 nt, Artificial Sequence
  Description of Artificial Sequence: Synthetic oligonucleotide
ucgauaccggaagucugag

SEQ ID NO: 541049 - RNA, 19 nt, Artificial Sequence
  Description of Artificial Sequence: Synthetic oligonucleotide
gcucacaucucacucuggc

SEQ ID NO: 541050 - RNA, 19 nt, Artificial Sequence
  Description of Artificial Sequence: Synthetic oligonucleotide
augcgguggacuaggauug

SEQ ID NO: 541051 - RNA, 19 nt, Artificial Sequence
  Description of Artificial Sequence: Synthetic oligonucleotide
aggagugccuguucuaaua

SEQ ID NO: 541052 - RNA, 19 nt, Artificial Sequence
  Description of Artificial Sequence: Synthetic oligonucleotide
aucaaugguuauaucccca

SEQ ID NO: 541053 - RNA, 19 nt, Artificial Sequence
  Description of Artificial Sequence: Synthetic oligonucleotide
uccacucuuuacagccucu

SEQ ID NO: 541054 - RNA, 19 nt, Artificial Sequence
  Description of Artificial Sequence: Synthetic oligonucleotide
gcuugaugcaccgcgacgc

SEQ ID NO: 541055 - RNA, 19 nt, Artificial Sequence
  Description of Artificial Sequence: Synthetic oligonucleotide
gcaaauuguaccucuggaa

SEQ ID NO: 541056 - RNA, 19 nt, Artificial Sequence
  Description of Artificial Sequence: Synthetic oligonucleotide
acuaggauuggucgcuauu

SEQ ID NO: 541057 - RNA, 19 nt, Artificial Sequence
  Description of Artificial Sequence: Synthetic oligonucleotide
gaugacugcugggaaugac

SEQ ID NO: 541058 - RNA, 19 nt, Artificial Sequence
  Description of Artificial Sequence: Synthetic oligonucleotide
cccgucgcaauaaaccagg

SEQ ID NO: 541059 - RNA, 19 nt, Artificial Sequence
  Description of Artificial Sequence: Synthetic oligonucleotide
gaauaacaaccagugguua

SEQ ID NO: 541060 - RNA, 19 nt, Artificial Sequence
  Description of Artificial Sequence: Synthetic oligonucleotide
aguuaaguccugauuuaau

SEQ ID NO: 541061 - RNA, 19 nt, Artificial Sequence
  Description of Artificial Sequence: Synthetic oligonucleotide
cugagcccguuuauacccc

SEQ ID NO: 541062 - RNA, 19 nt, Artificial Sequence
  Description of Artificial Sequence: Synthetic oligonucleotide
uaacaaccagugguuaaau

SEQ ID NO: 541063 - RNA, 19 nt, Artificial Sequence
  Description of Artificial Sequence: Synthetic oligonucleotide
gacacgggccggucgcuag

SEQ ID NO: 541064 - RNA, 19 nt, Artificial Sequence
  Description of Artificial Sequence: Synthetic oligonucleotide
cugucgacauccauguuua

SEQ ID NO: 541065 - RNA, 19 nt, Artificial Sequence
  Description of Artificial Sequence: Synthetic oligonucleotide
guacugaacguugucugca

SEQ ID NO: 541066 - RNA, 19 nt, Artificial Sequence
  Description of Artificial Sequence: Synthetic oligonucleotide
acaugucauacaagcacca

SEQ ID NO: 541067 - RNA, 19 nt, Artificial Sequence
  Description of Artificial Sequence: Synthetic oligonucleotide
gagcaugacuacuccaaua

SEQ ID NO: 541068 - RNA, 19 nt, Artificial Sequence
  Description of Artificial Sequence: Synthetic oligonucleotide
uccaauagaucugguucuc

SEQ ID NO: 541069 - RNA, 19 nt, Artificial Sequence
  Description of Artificial Sequence: Synthetic oligonucleotide
caagaguagguuuaacaau

SEQ ID NO: 541070 - RNA, 19 nt, Artificial Sequence
  Description of Artificial Sequence: Synthetic oligonucleotide
ucauacuaugggagaccuc

SEQ ID NO: 541071 - RNA, 19 nt, Artificial Sequence
  Description of Artificial Sequence: Synthetic oligonucleotide
ucacuaggagugccuguuc

SEQ ID NO: 541072 - RNA, 19 nt, Artificial Sequence
  Description of Artificial Sequence: Synthetic oligonucleotide
acgccauugaccugcugaa

SEQ ID NO: 541073 - RNA, 19 nt, Artificial Sequence
  Description of Artificial Sequence: Synthetic oligonucleotide
uggucgcuauuguuggaaa

SEQ ID NO: 541074 - RNA, 19 nt, Artificial Sequence
  Description of Artificial Sequence: Synthetic oligonucleotide
agccuuacaagaguagguu

SEQ ID NO: 541075 - RNA, 19 nt, Artificial Sequence
  Description of Artificial Sequence: Synthetic oligonucleotide
auuggucgcuauuguugga

SEQ ID NO: 541076 - RNA, 19 nt, Artificial Sequence
  Description of Artificial Sequence: Synthetic oligonucleotide
caagucuuauuauaacgau

SEQ ID NO: 541077 - RNA, 19 nt, Artificial Sequence
  Description of Artificial Sequence: Synthetic oligonucleotide
ccccauagaacaagcacac

SEQ ID NO: 541078 - RNA, 19 nt, Artificial Sequence
  Description of Artificial Sequence: Synthetic oligonucleotide
acagauucacaaaccguau

SEQ ID NO: 541079 - RNA, 19 nt, Artificial Sequence
  Description of Artificial Sequence: Synthetic oligonucleotide
cucgucugagcaaacgcaa

SEQ ID NO: 541080 - RNA, 19 nt, Artificial Sequence
  Description of Artificial Sequence: Synthetic oligonucleotide
auguuaucuuaugaauuuu

SEQ ID NO: 541081 - RNA, 19 nt, Artificial Sequence
  Description of Artificial Sequence: Synthetic oligonucleotide
accgcgacgcugcagccgu

SEQ ID NO: 541082 - RNA, 19 nt, Artificial Sequence
  Description of Artificial Sequence: Synthetic oligonucleotide
gaagugagguaagaacugu

SEQ ID NO: 541083 - RNA, 19 nt, Artificial Sequence
  Description of Artificial Sequence: Synthetic oligonucleotide
agcccguuuauaccccgcu

SEQ ID NO: 541084 - RNA, 19 nt, Artificial Sequence
  Description of Artificial Sequence: Synthetic oligonucleotide
agugguagcuagcgccccu

SEQ ID NO: 541085 - RNA, 19 nt, Artificial Sequence
  Description of Artificial Sequence: Synthetic oligonucleotide
cauuucauacuccaacuuu

SEQ ID NO: 541086 - RNA, 19 nt, Artificial Sequence
  Description of Artificial Sequence: Synthetic oligonucleotide
uugaugcaccgcgacgcug

SEQ ID NO: 541087 - RNA, 19 nt, Artificial Sequence
  Description of Artificial Sequence: Synthetic oligonucleotide
cuagcgccccuacugucac

SEQ ID NO: 541088 - RNA, 19 nt, Artificial Sequence
  Description of Artificial Sequence: Synthetic oligonucleotide
agaguagguuuaacaauaa

SEQ ID NO: 541089 - RNA, 19 nt, Artificial Sequence
  Description of Artificial Sequence: Synthetic oligonucleotide
aggcuuugcugagcugggc

SEQ ID NO: 541090 - RNA, 19 nt, Artificial Sequence
  Description of Artificial Sequence: Synthetic oligonucleotide
ugaucacaaaacggacaaa

SEQ ID NO: 541091 - RNA, 19 nt, Artificial Sequence
  Description of Artificial Sequence: Synthetic oligonucleotide
cuaugggagaccucguccu

SEQ ID NO: 541092 - RNA, 19 nt, Artificial Sequence
  Description of Artificial Sequence: Synthetic oligonucleotide
ugaugacugcugggaauga

SEQ ID NO: 541093 - RNA, 19 nt, Artificial Sequence
  Description of Artificial Sequence: Synthetic oligonucleotide
uuccucgauaccggaaguc

SEQ ID NO: 541094 - RNA, 19 nt, Artificial Sequence
  Description of Artificial Sequence: Synthetic oligonucleotide
gaucauguggacagacugu

SEQ ID NO: 541095 - RNA, 19 nt, Artificial Sequence
  Description of Artificial Sequence: Synthetic oligonucleotide
cacuggaaguuaaguccug

SEQ ID NO: 541096 - RNA, 19 nt, Artificial Sequence
  Description of Artificial Sequence: Synthetic oligonucleotide
cugcugaaccccaccuaac

SEQ ID NO: 541097 - RNA, 19 nt, Artificial Sequence
  Description of Artificial Sequence: Synthetic oligonucleotide
gagauccccauuucauacu

SEQ ID NO: 541098 - RNA, 19 nt, Artificial Sequence
  Description of Artificial Sequence: Synthetic oligonucleotide
cgcuauuguuggaaaaggc

SEQ ID NO: 541099 - RNA, 19 nt, Artificial Sequence
  Description of Artificial Sequence: Synthetic oligonucleotide
ugguagcuagcgccccuac

SEQ ID NO: 541100 - RNA, 19 nt, Artificial Sequence
  Description of Artificial Sequence: Synthetic oligonucleotide
ccuucauacuaugggagac

SEQ ID NO: 541101 - RNA, 19 nt, Artificial Sequence
  Description of Artificial Sequence: Synthetic oligonucleotide
cagcgucacuaggagacag

SEQ ID NO: 541102 - RNA, 19 nt, Artificial Sequence
  Description of Artificial Sequence: Synthetic oligonucleotide
uaacgaucauguggacaga

SEQ ID NO: 541103 - RNA, 19 nt, Artificial Sequence
  Description of Artificial Sequence: Synthetic oligonucleotide
caugugaauuuuacaucua

SEQ ID NO: 541104 - RNA, 19 nt, Artificial Sequence
  Description of Artificial Sequence: Synthetic oligonucleotide
ccccugaacauauaaaaua

SEQ ID NO: 541105 - RNA, 19 nt, Artificial Sequence
  Description of Artificial Sequence: Synthetic oligonucleotide
cagcaaacugagcacaggu

SEQ ID NO: 541106 - RNA, 19 nt, Artificial Sequence
  Description of Artificial Sequence: Synthetic oligonucleotide
gguuauauccccaacuguu

SEQ ID NO: 541107 - RNA, 19 nt, Artificial Sequence
  Description of Artificial Sequence: Synthetic oligonucleotide
caagcacacucuaucccaa

SEQ ID NO: 541108 - RNA, 19 nt, Artificial Sequence
  Description of Artificial Sequence: Synthetic oligonucleotide
acgaucauguggacagacu

SEQ ID NO: 541109 - RNA, 19 nt, Artificial Sequence
  Description of Artificial Sequence: Synthetic oligonucleotide
acggaaagcugugcauuca

SEQ ID NO: 541110 - RNA, 19 nt, Artificial Sequence
  Description of Artificial Sequence: Synthetic oligonucleotide
ccuuacaagaguagguuua

SEQ ID NO: 541111 - RNA, 19 nt, Artificial Sequence
  Description of Artificial Sequence: Synthetic oligonucleotide
ggcuggaacuucccaaauc

SEQ ID NO: 541112 - RNA, 19 nt, Artificial Sequence
  Description of Artificial Sequence: Synthetic oligonucleotide
cauauauagcaagucuuau

SEQ ID NO: 541113 - RNA, 19 nt, Artificial Sequence
  Description of Artificial Sequence: Synthetic oligonucleotide
gccuccaaucauuuccuuc

SEQ ID NO: 541114 - RNA, 19 nt, Artificial Sequence
  Description of Artificial Sequence: Synthetic oligonucleotide
uagcgccccuacugucacg

SEQ ID NO: 541115 - RNA, 19 nt, Artificial Sequence
  Description of Artificial Sequence: Synthetic oligonucleotide
cugaaucugugaagcuuaa

SEQ ID NO: 541116 - RNA, 19 nt, Artificial Sequence
  Description of Artificial Sequence: Synthetic oligonucleotide
caguccgccauauugucau

SEQ ID NO: 541117 - RNA, 19 nt, Artificial Sequence
  Description of Artificial Sequence: Synthetic oligonucleotide
guuauauccccaacuguuu

SEQ ID NO: 541118 - RNA, 19 nt, Artificial Sequence
  Description of Artificial Sequence: Synthetic oligonucleotide
agaccucguccuccaguga

SEQ ID NO: 541119 - RNA, 19 nt, Artificial Sequence
  Description of Artificial Sequence: Synthetic oligonucleotide
cgucgcaauaaaccagggg

SEQ ID NO: 541120 - RNA, 19 nt, Artificial Sequence
  Description of Artificial Sequence: Synthetic oligonucleotide
gcagcuuacuaaaauggua

SEQ ID NO: 541121 - RNA, 19 nt, Artificial Sequence
  Description of Artificial Sequence: Synthetic oligonucleotide
agcucacaucucacucugg

SEQ ID NO: 541122 - RNA, 19 nt, Artificial Sequence
  Description of Artificial Sequence: Synthetic oligonucleotide
cucucucgucugagcaaac

SEQ ID NO: 541123 - RNA, 19 nt, Artificial Sequence
  Description of Artificial Sequence: Synthetic oligonucleotide
aaccuaccaguccgccaua

SEQ ID NO: 541124 - RNA, 19 nt, Artificial Sequence
  Description of Artificial Sequence: Synthetic oligonucleotide
ugucgacauccauguuuau

SEQ ID NO: 541125 - RNA, 19 nt, Artificial Sequence
  Description of Artificial Sequence: Synthetic oligonucleotide
ccaguagguacuugaacaa

SEQ ID NO: 541126 - RNA, 19 nt, Artificial Sequence
  Description of Artificial Sequence: Synthetic oligonucleotide
gagcccguuuauaccccgc

SEQ ID NO: 541127 - RNA, 19 nt, Artificial Sequence
  Description of Artificial Sequence: Synthetic oligonucleotide
ggucgcuauuguuggaaaa

SEQ ID NO: 541128 - RNA, 19 nt, Artificial Sequence
  Description of Artificial Sequence: Synthetic oligonucleotide
auaccccgcuguagggagg

SEQ ID NO: 541129 - RNA, 19 nt, Artificial Sequence
  Description of Artificial Sequence: Synthetic oligonucleotide
ggugacccacuaaagaacu

SEQ ID NO: 541130 - RNA, 19 nt, Artificial Sequence
  Description of Artificial Sequence: Synthetic oligonucleotide
gugcagcgucacuaggaga

SEQ ID NO: 541131 - RNA, 19 nt, Artificial Sequence
  Description of Artificial Sequence: Synthetic oligonucleotide
uccuauauguggggcucuu

SEQ ID NO: 541132 - RNA, 19 nt, Artificial Sequence
  Description of Artificial Sequence: Synthetic oligonucleotide
cugucacgccauugaccug

SEQ ID NO: 541133 - RNA, 19 nt, Artificial Sequence
  Description of Artificial Sequence: Synthetic oligonucleotide
gucuuauuauaacgaucau

SEQ ID NO: 541134 - RNA, 19 nt, Artificial Sequence
  Description of Artificial Sequence: Synthetic oligonucleotide
acacgggccggucgcuaga

SEQ ID NO: 541135 - RNA, 19 nt, Artificial Sequence
  Description of Artificial Sequence: Synthetic oligonucleotide
gcaaacgcaacagccucca

SEQ ID NO: 541136 - RNA, 19 nt, Artificial Sequence
  Description of Artificial Sequence: Synthetic oligonucleotide
cggaaagcugugcauucag

SEQ ID NO: 541137 - RNA, 19 nt, Artificial Sequence
  Description of Artificial Sequence: Synthetic oligonucleotide
ccgucgcaauaaaccaggg

SEQ ID NO: 541138 - RNA, 19 nt, Artificial Sequence
  Description of Artificial Sequence: Synthetic oligonucleotide
cugugcggaaaaugugugu

SEQ ID NO: 541139 - RNA, 19 nt, Artificial Sequence
  Description of Artificial Sequence: Synthetic oligonucleotide
gugccuguucuaauaaaau

SEQ ID NO: 541140 - RNA, 19 nt, Artificial Sequence
  Description of Artificial Sequence: Synthetic oligonucleotide
gcccguuuauaccccgcug

SEQ ID NO: 541141 - RNA, 19 nt, Artificial Sequence
  Description of Artificial Sequence: Synthetic oligonucleotide
gggcucuuacugcuauuca

SEQ ID NO: 541142 - RNA, 19 nt, Artificial Sequence
  Description of Artificial Sequence: Synthetic oligonucleotide
gcuuacuaaaaugguauuu

SEQ ID NO: 541143 - RNA, 19 nt, Artificial Sequence
  Description of Artificial Sequence: Synthetic oligonucleotide
cguuuauaccccgcuguag

SEQ ID NO: 541144 - RNA, 19 nt, Artificial Sequence
  Description of Artificial Sequence: Synthetic oligonucleotide
gacuaggauuggucgcuau

SEQ ID NO: 541145 - RNA, 19 nt, Artificial Sequence
  Description of Artificial Sequence: Synthetic oligonucleotide
gugcggaaaauguguguau

SEQ ID NO: 541146 - RNA, 19 nt, Artificial Sequence
  Description of Artificial Sequence: Synthetic oligonucleotide
cacgggccggucgcuagag

SEQ ID NO: 541147 - RNA, 19 nt, Artificial Sequence
  Description of Artificial Sequence: Synthetic oligonucleotide
accuaccaguccgccauau

SEQ ID NO: 541148 - RNA, 19 nt, Artificial Sequence
  Description of Artificial Sequence: Synthetic oligonucleotide
guauaaucacaugguuaau

SEQ ID NO: 541149 - RNA, 19 nt, Artificial Sequence
  Description of Artificial Sequence: Synthetic oligonucleotide
ggccggucgcuagagacca

SEQ ID NO: 541150 - RNA, 19 nt, Artificial Sequence
  Description of Artificial Sequence: Synthetic oligonucleotide
aguccgccauauugucaua

SEQ ID NO: 541151 - RNA, 19 nt, Artificial Sequence
  Description of Artificial Sequence: Synthetic oligonucleotide
cuugaugcaccgcgacgcu

SEQ ID NO: 541152 - RNA, 19 nt, Artificial Sequence
  Description of Artificial Sequence: Synthetic oligonucleotide
gcuuuugggcugugaagua

SEQ ID NO: 541153 - RNA, 19 nt, Artificial Sequence
  Description of Artificial Sequence: Synthetic oligonucleotide
cgauaccggaagucugagc

SEQ ID NO: 541154 - RNA, 19 nt, Artificial Sequence
  Description of Artificial Sequence: Synthetic oligonucleotide
ugacacgggccggucgcua

SEQ ID NO: 541155 - RNA, 19 nt, Artificial Sequence
  Description of Artificial Sequence: Synthetic oligonucleotide
ccugucgacauccauguuu

SEQ ID NO: 541156 - RNA, 19 nt, Artificial Sequence
  Description of Artificial Sequence: Synthetic oligonucleotide
cgugcccgucgcaauaaac

SEQ ID NO: 541157 - RNA, 19 nt, Artificial Sequence
  Description of Artificial Sequence: Synthetic oligonucleotide
caacagccuccaaucauuu

SEQ ID NO: 541158 - RNA, 19 nt, Artificial Sequence
  Description of Artificial Sequence: Synthetic oligonucleotide
gggccggucgcuagagacc

SEQ ID NO: 541159 - RNA, 19 nt, Artificial Sequence
  Description of Artificial Sequence: Synthetic oligonucleotide
acgggccggucgcuagaga

SEQ ID NO: 541160 - RNA, 19 nt, Artificial Sequence
  Description of Artificial Sequence: Synthetic oligonucleotide
ccaguccgccauauuguca

SEQ ID NO: 541161 - RNA, 19 nt, Artificial Sequence
  Description of Artificial Sequence: Synthetic oligonucleotide
gugacccacuaaagaacua

SEQ ID NO: 541162 - RNA, 19 nt, Artificial Sequence
  Description of Artificial Sequence: Synthetic oligonucleotide
cccguuuauaccccgcugu

SEQ ID NO: 541163 - RNA, 19 nt, Artificial Sequence
  Description of Artificial Sequence: Synthetic oligonucleotide
gguagcuagcgccccuacu

SEQ ID NO: 541164 - RNA, 19 nt, Artificial Sequence
  Description of Artificial Sequence: Synthetic oligonucleotide
caccuaacuccugaggcuu

SEQ ID NO: 541165 - RNA, 19 nt, Artificial Sequence
  Description of Artificial Sequence: Synthetic oligonucleotide
gcaacagccuccaaucauu

SEQ ID NO: 541166 - RNA, 19 nt, Artificial Sequence
  Description of Artificial Sequence: Synthetic oligonucleotide
ccggucgcuagagaccaug

SEQ ID NO: 541167 - RNA, 19 nt, Artificial Sequence
  Description of Artificial Sequence: Synthetic oligonucleotide
gcgacgcugcagccgugcc

SEQ ID NO: 541168 - RNA, 19 nt, Artificial Sequence
  Description of Artificial Sequence: Synthetic oligonucleotide
cccuacugucacgccauug

SEQ ID NO: 541169 - RNA, 19 nt, Artificial Sequence
  Description of Artificial Sequence: Synthetic oligonucleotide
ccucuuccucgauaccgga

SEQ ID NO: 541170 - RNA, 19 nt, Artificial Sequence
  Description of Artificial Sequence: Synthetic oligonucleotide
ccucucucgucugagcaaa

SEQ ID NO: 541171 - RNA, 19 nt, Artificial Sequence
  Description of Artificial Sequence: Synthetic oligonucleotide
accggaagucugagcccgu

SEQ ID NO: 541172 - RNA, 19 nt, Artificial Sequence
  Description of Artificial Sequence: Synthetic oligonucleotide
ccguuuauaccccgcugua

SEQ ID NO: 541173 - RNA, 19 nt, Artificial Sequence
  Description of Artificial Sequence: Synthetic oligonucleotide
gcagcgucacuaggagaca

SEQ ID NO: 541174 - RNA, 19 nt, Artificial Sequence
  Description of Artificial Sequence: Synthetic oligonucleotide
ggucgcuagagaccauguu

SEQ ID NO: 541175 - RNA, 19 nt, Artificial Sequence
  Description of Artificial Sequence: Synthetic oligonucleotide
guaaaacgauuggcuccau

SEQ ID NO: 541176 - RNA, 19 nt, Artificial Sequence
  Description of Artificial Sequence: Synthetic oligonucleotide
acgcugcagccgugcccgu

SEQ ID NO: 541177 - RNA, 19 nt, Artificial Sequence
  Description of Artificial Sequence: Synthetic oligonucleotide
gcgccccuacugucacgcc

SEQ ID NO: 541178 - RNA, 19 nt, Artificial Sequence
  Description of Artificial Sequence: Synthetic oligonucleotide
cgccccuacugucacgcca

SEQ ID NO: 541179 - RNA, 19 nt, Artificial Sequence
  Description of Artificial Sequence: Synthetic oligonucleotide
cgcgacgcugcagccgugc

SEQ ID NO: 541180 - RNA, 19 nt, Artificial Sequence
  Description of Artificial Sequence: Synthetic oligonucleotide
gugacacgggccggucgcu

SEQ ID NO: 541181 - RNA, 19 nt, Artificial Sequence
  Description of Artificial Sequence: Synthetic oligonucleotide
accccgcuguagggaggcu

SEQ ID NO: 541182 - RNA, 19 nt, Artificial Sequence
  Description of Artificial Sequence: Synthetic oligonucleotide
gccgugcccgucgcaauaa

SEQ ID NO: 541183 - RNA, 19 nt, Artificial Sequence
  Description of Artificial Sequence: Synthetic oligonucleotide
ccuauauguggggcucuua

SEQ ID NO: 541184 - RNA, 19 nt, Artificial Sequence
  Description of Artificial Sequence: Synthetic oligonucleotide
gguucucggcccagccucu

SEQ ID NO: 541185 - RNA, 19 nt, Artificial Sequence
  Description of Artificial Sequence: Synthetic oligonucleotide
gccccuacugucacgccau

SEQ ID NO: 541186 - RNA, 19 nt, Artificial Sequence
  Description of Artificial Sequence: Synthetic oligonucleotide
cggucgcuagagaccaugu

SEQ ID NO: 541187 - RNA, 19 nt, Artificial Sequence
  Description of Artificial Sequence: Synthetic oligonucleotide
ccuaccaguccgccauauu

SEQ ID NO: 541188 - RNA, 19 nt, Artificial Sequence
  Description of Artificial Sequence: Synthetic oligonucleotide
ccgcgacgcugcagccgug

SEQ ID NO: 541189 - RNA, 19 nt, Artificial Sequence
  Description of Artificial Sequence: Synthetic oligonucleotide
cggaagucugagcccguuu

SEQ ID NO: 541190 - RNA, 19 nt, Artificial Sequence
  Description of Artificial Sequence: Synthetic oligonucleotide
ccggaagucugagcccguu

SEQ ID NO: 541191 - RNA, 19 nt, Artificial Sequence
  Description of Artificial Sequence: Synthetic oligonucleotide
ccccuacugucacgccauu

SEQ ID NO: 541192 - RNA, 19 nt, Artificial Sequence
  Description of Artificial Sequence: Synthetic oligonucleotide
aagaguaggaaucuuggcc

SEQ ID NO: 541193 - RNA, 19 nt, Artificial Sequence
  Description of Artificial Sequence: Synthetic oligonucleotide
aaugaguucaucucucugc

SEQ ID NO: 541194 - RNA, 19 nt, Artificial Sequence
  Description of Artificial Sequence: Synthetic oligonucleotide
agaaaaucgaucuucacgg

SEQ ID NO: 541195 - RNA, 19 nt, Artificial Sequence
  Description of Artificial Sequence: Synthetic oligonucleotide
uuuguauucacuaauuugu

SEQ ID NO: 541196 - RNA, 19 nt, Artificial Sequence
  Description of Artificial Sequence: Synthetic oligonucleotide
aaaacgugauucuagaaug

SEQ ID NO: 541197 - RNA, 19 nt, Artificial Sequence
  Description of Artificial Sequence: Synthetic oligonucleotide
uagucuagaaccaaguagg

SEQ ID NO: 541198 - RNA, 19 nt, Artificial Sequence
  Description of Artificial Sequence: Synthetic oligonucleotide
ugaguuuccgcuuagaggc

SEQ ID NO: 541199 - RNA, 19 nt, Artificial Sequence
  Description of Artificial Sequence: Synthetic oligonucleotide
auuugcgugaaacacagac

SEQ ID NO: 541200 - RNA, 19 nt, Artificial Sequence
  Description of Artificial Sequence: Synthetic oligonucleotide
aacacuuugagcuacaaua

SEQ ID NO: 541201 - RNA, 19 nt, Artificial Sequence
  Description of Artificial Sequence: Synthetic oligonucleotide
ucuagaaccaaguagggug

SEQ ID NO: 541202 - RNA, 19 nt, Artificial Sequence
  Description of Artificial Sequence: Synthetic oligonucleotide
uuagucuagaaccaaguag

SEQ ID NO: 541203 - RNA, 19 nt, Artificial Sequence
  Description of Artificial Sequence: Synthetic oligonucleotide
ugaaauauaauugcucugg

SEQ ID NO: 541204 - RNA, 19 nt, Artificial Sequence
  Description of Artificial Sequence: Synthetic oligonucleotide
ugagcuacaauaaucauuc

SEQ ID NO: 541205 - RNA, 19 nt, Artificial Sequence
  Description of Artificial Sequence: Synthetic oligonucleotide
uugauugugacaaaagaga

SEQ ID NO: 541206 - RNA, 19 nt, Artificial Sequence
  Description of Artificial Sequence: Synthetic oligonucleotide
agcuacaauaaucauuccc

SEQ ID NO: 541207 - RNA, 19 nt, Artificial Sequence
  Description of Artificial Sequence: Synthetic oligonucleotide
uucaguucacuuaacgagg

SEQ ID NO: 541208 - RNA, 19 nt, Artificial Sequence
  Description of Artificial Sequence: Synthetic oligonucleotide
uauaacuaagccauguuuc

SEQ ID NO: 541209 - RNA, 19 nt, Artificial Sequence
  Description of Artificial Sequence: Synthetic oligonucleotide
uuuauguugcagcacacug

SEQ ID NO: 541210 - RNA, 19 nt, Artificial Sequence
  Description of Artificial Sequence: Synthetic oligonucleotide
auuuguauucacuaauuug

SEQ ID NO: 541211 - RNA, 19 nt, Artificial Sequence
  Description of Artificial Sequence: Synthetic oligonucleotide
ugcaagucuagauuaagag

SEQ ID NO: 541212 - RNA, 19 nt, Artificial Sequence
  Description of Artificial Sequence: Synthetic oligonucleotide
ugugcguuggacaccaugg

SEQ ID NO: 541213 - RNA, 19 nt, Artificial Sequence
  Description of Artificial Sequence: Synthetic oligonucleotide
cuucaguucacuuaacgag

SEQ ID NO: 541214 - RNA, 19 nt, Artificial Sequence
  Description of Artificial Sequence: Synthetic oligonucleotide
ucacuaauuugucuauugg

SEQ ID NO: 541215 - RNA, 19 nt, Artificial Sequence
  Description of Artificial Sequence: Synthetic oligonucleotide
agaaucacaaacccuauga

SEQ ID NO: 541216 - RNA, 19 nt, Artificial Sequence
  Description of Artificial Sequence: Synthetic oligonucleotide
aaauuugcgugaaacacag

SEQ ID NO: 541217 - RNA, 19 nt, Artificial Sequence
  Description of Artificial Sequence: Synthetic oligonucleotide
uaucacaccguggagaagg

SEQ ID NO: 541218 - RNA, 19 nt, Artificial Sequence
  Description of Artificial Sequence: Synthetic oligonucleotide
aacacagacuccccuggcc

SEQ ID NO: 541219 - RNA, 19 nt, Artificial Sequence
  Description of Artificial Sequence: Synthetic oligonucleotide
uaaauuugcgugaaacaca

SEQ ID NO: 541220 - RNA, 19 nt, Artificial Sequence
  Description of Artificial Sequence: Synthetic oligonucleotide
ugggauuauaacuaagcca

SEQ ID NO: 541221 - RNA, 19 nt, Artificial Sequence
  Description of Artificial Sequence: Synthetic oligonucleotide
ucuagaaugcugaaaacua

SEQ ID NO: 541222 - RNA, 19 nt, Artificial Sequence
  Description of Artificial Sequence: Synthetic oligonucleotide
aauuucgagaugaaggucu

SEQ ID NO: 541223 - RNA, 19 nt, Artificial Sequence
  Description of Artificial Sequence: Synthetic oligonucleotide
agaauuucgagaugaaggu

SEQ ID NO: 541224 - RNA, 19 nt, Artificial Sequence
  Description of Artificial Sequence: Synthetic oligonucleotide
ucuauuggcaucucucugc

SEQ ID NO: 541225 - RNA, 19 nt, Artificial Sequence
  Description of Artificial Sequence: Synthetic oligonucleotide
agcgaugcuacucaaagcu

SEQ ID NO: 541226 - RNA, 19 nt, Artificial Sequence
  Description of Artificial Sequence: Synthetic oligonucleotide
uugcgugaaacacagacuc

SEQ ID NO: 541227 - RNA, 19 nt, Artificial Sequence
  Description of Artificial Sequence: Synthetic oligonucleotide
aaaaucgaucuucacgggu

SEQ ID NO: 541228 - RNA, 19 nt, Artificial Sequence
  Description of Artificial Sequence: Synthetic oligonucleotide
ugauugugacaaaagagaa

SEQ ID NO: 541229 - RNA, 19 nt, Artificial Sequence
  Description of Artificial Sequence: Synthetic oligonucleotide
uuauaacuaagccauguuu

SEQ ID NO: 541230 - RNA, 19 nt, Artificial Sequence
  Description of Artificial Sequence: Synthetic oligonucleotide
ugaagcccguaucacaccg

SEQ ID NO: 541231 - RNA, 19 nt, Artificial Sequence
  Description of Artificial Sequence: Synthetic oligonucleotide
uuuccguagccucacaucu

SEQ ID NO: 541232 - RNA, 19 nt, Artificial Sequence
  Description of Artificial Sequence: Synthetic oligonucleotide
cacuaauuugucuauuggc

SEQ ID NO: 541233 - RNA, 19 nt, Artificial Sequence
  Description of Artificial Sequence: Synthetic oligonucleotide
uuauguugcagcacacugc

SEQ ID NO: 541234 - RNA, 19 nt, Artificial Sequence
  Description of Artificial Sequence: Synthetic oligonucleotide
aaacgugauucuagaaugc

SEQ ID NO: 541235 - RNA, 19 nt, Artificial Sequence
  Description of Artificial Sequence: Synthetic oligonucleotide
uuuaaugacaagacucaaa

SEQ ID NO: 541236 - RNA, 19 nt, Artificial Sequence
  Description of Artificial Sequence: Synthetic oligonucleotide
aguuuaauauacacucccc

SEQ ID NO: 541237 - RNA, 19 nt, Artificial Sequence
  Description of Artificial Sequence: Synthetic oligonucleotide
cuuugagcuacaauaauca

SEQ ID NO: 541238 - RNA, 19 nt, Artificial Sequence
  Description of Artificial Sequence: Synthetic oligonucleotide
ucucuagccgcuuugccag

SEQ ID NO: 541239 - RNA, 19 nt, Artificial Sequence
  Description of Artificial Sequence: Synthetic oligonucleotide
auucuagaaugcugaaaac

SEQ ID NO: 541240 - RNA, 19 nt, Artificial Sequence
  Description of Artificial Sequence: Synthetic oligonucleotide
uguauucacuaauuugucu

SEQ ID NO: 541241 - RNA, 19 nt, Artificial Sequence
  Description of Artificial Sequence: Synthetic oligonucleotide
uagauuaagaggcuuugau

SEQ ID NO: 541242 - RNA, 19 nt, Artificial Sequence
  Description of Artificial Sequence: Synthetic oligonucleotide
uuaacgaggugucuggguc

SEQ ID NO: 541243 - RNA, 19 nt, Artificial Sequence
  Description of Artificial Sequence: Synthetic oligonucleotide
acuuugagcuacaauaauc

SEQ ID NO: 541244 - RNA, 19 nt, Artificial Sequence
  Description of Artificial Sequence: Synthetic oligonucleotide
auaacuaagccauguuucu

SEQ ID NO: 541245 - RNA, 19 nt, Artificial Sequence
  Description of Artificial Sequence: Synthetic oligonucleotide
cugggauuauaacuaagcc

SEQ ID NO: 541246 - RNA, 19 nt, Artificial Sequence
  Description of Artificial Sequence: Synthetic oligonucleotide
ucuaguugcaagucuagau

SEQ ID NO: 541247 - RNA, 19 nt, Artificial Sequence
  Description of Artificial Sequence: Synthetic oligonucleotide
uucugcaagaaaaucgauc

SEQ ID NO: 541248 - RNA, 19 nt, Artificial Sequence
  Description of Artificial Sequence: Synthetic oligonucleotide
uuaucuaguugcaagucua

SEQ ID NO: 541249 - RNA, 19 nt, Artificial Sequence
  Description of Artificial Sequence: Synthetic oligonucleotide
caaguagggugguaaaugc

SEQ ID NO: 541250 - RNA, 19 nt, Artificial Sequence
  Description of Artificial Sequence: Synthetic oligonucleotide
gacaucaccauugggagug

SEQ ID NO: 541251 - RNA, 19 nt, Artificial Sequence
  Description of Artificial Sequence: Synthetic oligonucleotide
aaguagggugguaaaugcc

SEQ ID NO: 541252 - RNA, 19 nt, Artificial Sequence
  Description of Artificial Sequence: Synthetic oligonucleotide
gaaaaucgaucuucacggg

SEQ ID NO: 541253 - RNA, 19 nt, Artificial Sequence
  Description of Artificial Sequence: Synthetic oligonucleotide
aaaucgaucuucacgggug

SEQ ID NO: 541254 - RNA, 19 nt, Artificial Sequence
  Description of Artificial Sequence: Synthetic oligonucleotide
aaucuuggccacuggucuc

SEQ ID NO: 541255 - RNA, 19 nt, Artificial Sequence
  Description of Artificial Sequence: Synthetic oligonucleotide
uuugcgugaaacacagacu

SEQ ID NO: 541256 - RNA, 19 nt, Artificial Sequence
  Description of Artificial Sequence: Synthetic oligonucleotide
guagccucacaucuagugg

SEQ ID NO: 541257 - RNA, 19 nt, Artificial Sequence
  Description of Artificial Sequence: Synthetic oligonucleotide
uaucuaguugcaagucuag

SEQ ID NO: 541258 - RNA, 19 nt, Artificial Sequence
  Description of Artificial Sequence: Synthetic oligonucleotide
uuuagucuagaaccaagua

SEQ ID NO: 541259 - RNA, 19 nt, Artificial Sequence
  Description of Artificial Sequence: Synthetic oligonucleotide
gcaagucuagauuaagagg

SEQ ID NO: 541260 - RNA, 19 nt, Artificial Sequence
  Description of Artificial Sequence: Synthetic oligonucleotide
caaacauaaauuugcguga

SEQ ID NO: 541261 - RNA, 19 nt, Artificial Sequence
  Description of Artificial Sequence: Synthetic oligonucleotide
caagugccuaguuagggag

SEQ ID NO: 541262 - RNA, 19 nt, Artificial Sequence
  Description of Artificial Sequence: Synthetic oligonucleotide
ucuucuauucucucagcgu

SEQ ID NO: 541263 - RNA, 19 nt, Artificial Sequence
  Description of Artificial Sequence: Synthetic oligonucleotide
ucuagauuaagaggcuuug

SEQ ID NO: 541264 - RNA, 19 nt, Artificial Sequence
  Description of Artificial Sequence: Synthetic oligonucleotide
aucucgaugaacugcaaau

SEQ ID NO: 541265 - RNA, 19 nt, Artificial Sequence
  Description of Artificial Sequence: Synthetic oligonucleotide
uccguagccucacaucuag

SEQ ID NO: 541266 - RNA, 19 nt, Artificial Sequence
  Description of Artificial Sequence: Synthetic oligonucleotide
ucugccccgugcaauaaag

SEQ ID NO: 541267 - RNA, 19 nt, Artificial Sequence
  Description of Artificial Sequence: Synthetic oligonucleotide
cauuuuauguugcagcaca

SEQ ID NO: 541268 - RNA, 19 nt, Artificial Sequence
  Description of Artificial Sequence: Synthetic oligonucleotide
uggugagaaaacgugauuc

SEQ ID NO: 541269 - RNA, 19 nt, Artificial Sequence
  Description of Artificial Sequence: Synthetic oligonucleotide
caucuaguggcccuucucc

SEQ ID NO: 541270 - RNA, 19 nt, Artificial Sequence
  Description of Artificial Sequence: Synthetic oligonucleotide
cuagcugugcguuggacac

SEQ ID NO: 541271 - RNA, 19 nt, Artificial Sequence
  Description of Artificial Sequence: Synthetic oligonucleotide
ugcaaacauaaauuugcgu

SEQ ID NO: 541272 - RNA, 19 nt, Artificial Sequence
  Description of Artificial Sequence: Synthetic oligonucleotide
uuaaggggcccaacaauga

SEQ ID NO: 541273 - RNA, 19 nt, Artificial Sequence
  Description of Artificial Sequence: Synthetic oligonucleotide
uguaaacacuuugagcuac

SEQ ID NO: 541274 - RNA, 19 nt, Artificial Sequence
  Description of Artificial Sequence: Synthetic oligonucleotide
ugagccauucugcaguccu

SEQ ID NO: 541275 - RNA, 19 nt, Artificial Sequence
  Description of Artificial Sequence: Synthetic oligonucleotide
ugucuauuggcaucucucu

SEQ ID NO: 541276 - RNA, 19 nt, Artificial Sequence
  Description of Artificial Sequence: Synthetic oligonucleotide
gauacgccaucguuccugg

SEQ ID NO: 541277 - RNA, 19 nt, Artificial Sequence
  Description of Artificial Sequence: Synthetic oligonucleotide
gaaaacgugauucuagaau

SEQ ID NO: 541278 - RNA, 19 nt, Artificial Sequence
  Description of Artificial Sequence: Synthetic oligonucleotide
aguucacuuaacgaggugu

SEQ ID NO: 541279 - RNA, 19 nt, Artificial Sequence
  Description of Artificial Sequence: Synthetic oligonucleotide
aggugguuaugucuuguuc

SEQ ID NO: 541280 - RNA, 19 nt, Artificial Sequence
  Description of Artificial Sequence: Synthetic oligonucleotide
acauagacccugucucuac

SEQ ID NO: 541281 - RNA, 19 nt, Artificial Sequence
  Description of Artificial Sequence: Synthetic oligonucleotide
uggaaucccagcacuuaag

SEQ ID NO: 541282 - RNA, 19 nt, Artificial Sequence
  Description of Artificial Sequence: Synthetic oligonucleotide
uuaugucuuguucugcuuu

SEQ ID NO: 541283 - RNA, 19 nt, Artificial Sequence
  Description of Artificial Sequence: Synthetic oligonucleotide
ugcguuggacaccauggcc

SEQ ID NO: 541284 - RNA, 19 nt, Artificial Sequence
  Description of Artificial Sequence: Synthetic oligonucleotide
ucaugcgaaugucucuugc

SEQ ID NO: 541285 - RNA, 19 nt, Artificial Sequence
  Description of Artificial Sequence: Synthetic oligonucleotide
uauucacuaauuugucuau

SEQ ID NO: 541286 - RNA, 19 nt, Artificial Sequence
  Description of Artificial Sequence: Synthetic oligonucleotide
aaucgaucuucacgggugu

SEQ ID NO: 541287 - RNA, 19 nt, Artificial Sequence
  Description of Artificial Sequence: Synthetic oligonucleotide
aaacauaaauuugcgugaa

SEQ ID NO: 541288 - RNA, 19 nt, Artificial Sequence
  Description of Artificial Sequence: Synthetic oligonucleotide
uuagaggcgugguugcuga

SEQ ID NO: 541289 - RNA, 19 nt, Artificial Sequence
  Description of Artificial Sequence: Synthetic oligonucleotide
aauggccauccuccagaac

SEQ ID NO: 541290 - RNA, 19 nt, Artificial Sequence
  Description of Artificial Sequence: Synthetic oligonucleotide
cacaccguggagaaggcac

SEQ ID NO: 541291 - RNA, 19 nt, Artificial Sequence
  Description of Artificial Sequence: Synthetic oligonucleotide
gagaaucacaaacccuaug

SEQ ID NO: 541292 - RNA, 19 nt, Artificial Sequence
  Description of Artificial Sequence: Synthetic oligonucleotide
aacgugauucuagaaugcu

SEQ ID NO: 541293 - RNA, 19 nt, Artificial Sequence
  Description of Artificial Sequence: Synthetic oligonucleotide
acgccaucguuccuggaac

SEQ ID NO: 541294 - RNA, 19 nt, Artificial Sequence
  Description of Artificial Sequence: Synthetic oligonucleotide
aagcccguaucacaccgug

SEQ ID NO: 541295 - RNA, 19 nt, Artificial Sequence
  Description of Artificial Sequence: Synthetic oligonucleotide
ugaguucaucucucugccg

SEQ ID NO: 541296 - RNA, 19 nt, Artificial Sequence
  Description of Artificial Sequence: Synthetic oligonucleotide
auuuuauguugcagcacac

SEQ ID NO: 541297 - RNA, 19 nt, Artificial Sequence
  Description of Artificial Sequence: Synthetic oligonucleotide
auguccguagcucucgcug

SEQ ID NO: 541298 - RNA, 19 nt, Artificial Sequence
  Description of Artificial Sequence: Synthetic oligonucleotide
gcuacauagacccugucuc

SEQ ID NO: 541299 - RNA, 19 nt, Artificial Sequence
  Description of Artificial Sequence: Synthetic oligonucleotide
uuugagcuacaauaaucau

SEQ ID NO: 541300 - RNA, 19 nt, Artificial Sequence
  Description of Artificial Sequence: Synthetic oligonucleotide
gcuacaauaaucauuccca

SEQ ID NO: 541301 - RNA, 19 nt, Artificial Sequence
  Description of Artificial Sequence: Synthetic oligonucleotide
agaacccacaccaaggccu

SEQ ID NO: 541302 - RNA, 19 nt, Artificial Sequence
  Description of Artificial Sequence: Synthetic oligonucleotide
ccucacugaaauauaauug

SEQ ID NO: 541303 - RNA, 19 nt, Artificial Sequence
  Description of Artificial Sequence: Synthetic oligonucleotide
aacauaaauuugcgugaaa

SEQ ID NO: 541304 - RNA, 19 nt, Artificial Sequence
  Description of Artificial Sequence: Synthetic oligonucleotide
auauguuucugccuuucua

SEQ ID NO: 541305 - RNA, 19 nt, Artificial Sequence
  Description of Artificial Sequence: Synthetic oligonucleotide
uacgccaucguuccuggaa

SEQ ID NO: 541306 - RNA, 19 nt, Artificial Sequence
  Description of Artificial Sequence: Synthetic oligonucleotide
gauuauaacuaagccaugu

SEQ ID NO: 541307 - RNA, 19 nt, Artificial Sequence
  Description of Artificial Sequence: Synthetic oligonucleotide
uagaugaguuuccgcuuag

SEQ ID NO: 541308 - RNA, 19 nt, Artificial Sequence
  Description of Artificial Sequence: Synthetic oligonucleotide
agaaaacgugauucuagaa

SEQ ID NO: 541309 - RNA, 19 nt, Artificial Sequence
  Description of Artificial Sequence: Synthetic oligonucleotide
ucauguacugggcucuuua

SEQ ID NO: 541310 - RNA, 19 nt, Artificial Sequence
  Description of Artificial Sequence: Synthetic oligonucleotide
ugcgugaaacacagacucc

SEQ ID NO: 541311 - RNA, 19 nt, Artificial Sequence
  Description of Artificial Sequence: Synthetic oligonucleotide
ugcgaaugucucuugcuuc

SEQ ID NO: 541312 - RNA, 19 nt, Artificial Sequence
  Description of Artificial Sequence: Synthetic oligonucleotide
gucuagaugaguuuccgcu

SEQ ID NO: 541313 - RNA, 19 nt, Artificial Sequence
  Description of Artificial Sequence: Synthetic oligonucleotide
gacuaguccucacuguaga

SEQ ID NO: 541314 - RNA, 19 nt, Artificial Sequence
  Description of Artificial Sequence: Synthetic oligonucleotide
ugccucucuaaagcgaugc

SEQ ID NO: 541315 - RNA, 19 nt, Artificial Sequence
  Description of Artificial Sequence: Synthetic oligonucleotide
ucuagaugaguuuccgcuu

SEQ ID NO: 541316 - RNA, 19 nt, Artificial Sequence
  Description of Artificial Sequence: Synthetic oligonucleotide
uucacggguguucuuuccu

SEQ ID NO: 541317 - RNA, 19 nt, Artificial Sequence
  Description of Artificial Sequence: Synthetic oligonucleotide
uuagaggagcgcccagaug

SEQ ID NO: 541318 - RNA, 19 nt, Artificial Sequence
  Description of Artificial Sequence: Synthetic oligonucleotide
ugucugggucuacuaaacu

SEQ ID NO: 541319 - RNA, 19 nt, Artificial Sequence
  Description of Artificial Sequence: Synthetic oligonucleotide
ccggcugauacuuuguucc

SEQ ID NO: 541320 - RNA, 19 nt, Artificial Sequence
  Description of Artificial Sequence: Synthetic oligonucleotide
aguucccucaugcgaaugu

SEQ ID NO: 541321 - RNA, 19 nt, Artificial Sequence
  Description of Artificial Sequence: Synthetic oligonucleotide
ucgagaugaaggucuugug

SEQ ID NO: 541322 - RNA, 19 nt, Artificial Sequence
  Description of Artificial Sequence: Synthetic oligonucleotide
aggcagaauuucgagauga

SEQ ID NO: 541323 - RNA, 19 nt, Artificial Sequence
  Description of Artificial Sequence: Synthetic oligonucleotide
caaugaguucaucucucug

SEQ ID NO: 541324 - RNA, 19 nt, Artificial Sequence
  Description of Artificial Sequence: Synthetic oligonucleotide
agauacgccaucguuccug

SEQ ID NO: 541325 - RNA, 19 nt, Artificial Sequence
  Description of Artificial Sequence: Synthetic oligonucleotide
gucuauuggcaucucucug

SEQ ID NO: 541326 - RNA, 19 nt, Artificial Sequence
  Description of Artificial Sequence: Synthetic oligonucleotide
aaccaaguagggugguaaa

SEQ ID NO: 541327 - RNA, 19 nt, Artificial Sequence
  Description of Artificial Sequence: Synthetic oligonucleotide
gaauuucgagaugaagguc

SEQ ID NO: 541328 - RNA, 19 nt, Artificial Sequence
  Description of Artificial Sequence: Synthetic oligonucleotide
ccagauacgccaucguucc

SEQ ID NO: 541329 - RNA, 19 nt, Artificial Sequence
  Description of Artificial Sequence: Synthetic oligonucleotide
uucccucaugcgaaugucu

SEQ ID NO: 541330 - RNA, 19 nt, Artificial Sequence
  Description of Artificial Sequence: Synthetic oligonucleotide
ucccucaugcgaaugucuc

SEQ ID NO: 541331 - RNA, 19 nt, Artificial Sequence
  Description of Artificial Sequence: Synthetic oligonucleotide
agcauacuguuuguccgac

SEQ ID NO: 541332 - RNA, 19 nt, Artificial Sequence
  Description of Artificial Sequence: Synthetic oligonucleotide
uaacgaggugucugggucu

SEQ ID NO: 541333 - RNA, 19 nt, Artificial Sequence
  Description of Artificial Sequence: Synthetic oligonucleotide
caagccggcugauacuuug

SEQ ID NO: 541334 - RNA, 19 nt, Artificial Sequence
  Description of Artificial Sequence: Synthetic oligonucleotide
aagucuagauuaagaggcu

SEQ ID NO: 541335 - RNA, 19 nt, Artificial Sequence
  Description of Artificial Sequence: Synthetic oligonucleotide
uguccguagcucucgcuga

SEQ ID NO: 541336 - RNA, 19 nt, Artificial Sequence
  Description of Artificial Sequence: Synthetic oligonucleotide
aggccgucccaucuuguuc

SEQ ID NO: 541337 - RNA, 19 nt, Artificial Sequence
  Description of Artificial Sequence: Synthetic oligonucleotide
acaccaaggccucccaagu

SEQ ID NO: 541338 - RNA, 19 nt, Artificial Sequence
  Description of Artificial Sequence: Synthetic oligonucleotide
ggagcgcccagauggaagg

SEQ ID NO: 541339 - RNA, 19 nt, Artificial Sequence
  Description of Artificial Sequence: Synthetic oligonucleotide
gcuacaguagaggggaggg

SEQ ID NO: 541340 - RNA, 19 nt, Artificial Sequence
  Description of Artificial Sequence: Synthetic oligonucleotide
augaugacuagagguggag

SEQ ID NO: 541341 - RNA, 19 nt, Artificial Sequence
  Description of Artificial Sequence: Synthetic oligonucleotide
gggauuauaacuaagccau

SEQ ID NO: 541342 - RNA, 19 nt, Artificial Sequence
  Description of Artificial Sequence: Synthetic oligonucleotide
aucuaguggcccuucuccu

SEQ ID NO: 541343 - RNA, 19 nt, Artificial Sequence
  Description of Artificial Sequence: Synthetic oligonucleotide
cauugggagugcugucugg

SEQ ID NO: 541344 - RNA, 19 nt, Artificial Sequence
  Description of Artificial Sequence: Synthetic oligonucleotide
gaguaggaaucuuggccac

SEQ ID NO: 541345 - RNA, 19 nt, Artificial Sequence
  Description of Artificial Sequence: Synthetic oligonucleotide
cuuccucacugaaauauaa

SEQ ID NO: 541346 - RNA, 19 nt, Artificial Sequence
  Description of Artificial Sequence: Synthetic oligonucleotide
aaggugguuaugucuuguu

SEQ ID NO: 541347 - RNA, 19 nt, Artificial Sequence
  Description of Artificial Sequence: Synthetic oligonucleotide
accuugauugugacaaaag

SEQ ID NO: 541348 - RNA, 19 nt, Artificial Sequence
  Description of Artificial Sequence: Synthetic oligonucleotide
gcuacucaaagcuucaucu

SEQ ID NO: 541349 - RNA, 19 nt, Artificial Sequence
  Description of Artificial Sequence: Synthetic oligonucleotide
auguacugggcucuuuaaa

SEQ ID NO: 541350 - RNA, 19 nt, Artificial Sequence
  Description of Artificial Sequence: Synthetic oligonucleotide
ugccguucuuccucuaacu

SEQ ID NO: 541351 - RNA, 19 nt, Artificial Sequence
  Description of Artificial Sequence: Synthetic oligonucleotide
agugauguccguagcucuc

SEQ ID NO: 541352 - RNA, 19 nt, Artificial Sequence
  Description of Artificial Sequence: Synthetic oligonucleotide
aggguggugagaaaacgug

SEQ ID NO: 541353 - RNA, 19 nt, Artificial Sequence
  Description of Artificial Sequence: Synthetic oligonucleotide
gaaccaaguagggugguaa

SEQ ID NO: 541354 - RNA, 19 nt, Artificial Sequence
  Description of Artificial Sequence: Synthetic oligonucleotide
ugauguccguagcucucgc

SEQ ID NO: 541355 - RNA, 19 nt, Artificial Sequence
  Description of Artificial Sequence: Synthetic oligonucleotide
ugggcuacauagacccugu

SEQ ID NO: 541356 - RNA, 19 nt, Artificial Sequence
  Description of Artificial Sequence: Synthetic oligonucleotide
uucacuuaacgaggugucu

SEQ ID NO: 541357 - RNA, 19 nt, Artificial Sequence
  Description of Artificial Sequence: Synthetic oligonucleotide
cacugccccgucuagauga

SEQ ID NO: 541358 - RNA, 19 nt, Artificial Sequence
  Description of Artificial Sequence: Synthetic oligonucleotide
uaacuaagccauguuucuc

SEQ ID NO: 541359 - RNA, 19 nt, Artificial Sequence
  Description of Artificial Sequence: Synthetic oligonucleotide
gaugcuacucaaagcuuca

SEQ ID NO: 541360 - RNA, 19 nt, Artificial Sequence
  Description of Artificial Sequence: Synthetic oligonucleotide
augcgaaugucucuugcuu

SEQ ID NO: 541361 - RNA, 19 nt, Artificial Sequence
  Description of Artificial Sequence: Synthetic oligonucleotide
ugccccgugcaauaaaguu

SEQ ID NO: 541362 - RNA, 19 nt, Artificial Sequence
  Description of Artificial Sequence: Synthetic oligonucleotide
caagugucucagcacucag

SEQ ID NO: 541363 - RNA, 19 nt, Artificial Sequence
  Description of Artificial Sequence: Synthetic oligonucleotide
uuuccgcuuagaggcgugg

SEQ ID NO: 541364 - RNA, 19 nt, Artificial Sequence
  Description of Artificial Sequence: Synthetic oligonucleotide
gugauguccguagcucucg

SEQ ID NO: 541365 - RNA, 19 nt, Artificial Sequence
  Description of Artificial Sequence: Synthetic oligonucleotide
uccccauaucuuuuccuaa

SEQ ID NO: 541366 - RNA, 19 nt, Artificial Sequence
  Description of Artificial Sequence: Synthetic oligonucleotide
auagacccugucucuacaa

SEQ ID NO: 541367 - RNA, 19 nt, Artificial Sequence
  Description of Artificial Sequence: Synthetic oligonucleotide
ugccccgucuagaugaguu

SEQ ID NO: 541368 - RNA, 19 nt, Artificial Sequence
  Description of Artificial Sequence: Synthetic oligonucleotide
agccucacaucuaguggcc

SEQ ID NO: 541369 - RNA, 19 nt, Artificial Sequence
  Description of Artificial Sequence: Synthetic oligonucleotide
ucuuuuccgcuuucagcuc

SEQ ID NO: 541370 - RNA, 19 nt, Artificial Sequence
  Description of Artificial Sequence: Synthetic oligonucleotide
uaaacacuuugagcuacaa

SEQ ID NO: 541371 - RNA, 19 nt, Artificial Sequence
  Description of Artificial Sequence: Synthetic oligonucleotide
agcacuuaaggggcccaac

SEQ ID NO: 541372 - RNA, 19 nt, Artificial Sequence
  Description of Artificial Sequence: Synthetic oligonucleotide
cugaggcagaauuucgaga

SEQ ID NO: 541373 - RNA, 19 nt, Artificial Sequence
  Description of Artificial Sequence: Synthetic oligonucleotide
acgugauucuagaaugcug

SEQ ID NO: 541374 - RNA, 19 nt, Artificial Sequence
  Description of Artificial Sequence: Synthetic oligonucleotide
aagggccguccuguuggcc

SEQ ID NO: 541375 - RNA, 19 nt, Artificial Sequence
  Description of Artificial Sequence: Synthetic oligonucleotide
ggucuuguguaaauuucag

SEQ ID NO: 541376 - RNA, 19 nt, Artificial Sequence
  Description of Artificial Sequence: Synthetic oligonucleotide
aguuagggaggcagcuugg

SEQ ID NO: 541377 - RNA, 19 nt, Artificial Sequence
  Description of Artificial Sequence: Synthetic oligonucleotide
ggaagggccgccuuccuac

SEQ ID NO: 541378 - RNA, 19 nt, Artificial Sequence
  Description of Artificial Sequence: Synthetic oligonucleotide
cuuuuccgcuuucagcuca

SEQ ID NO: 541379 - RNA, 19 nt, Artificial Sequence
  Description of Artificial Sequence: Synthetic oligonucleotide
acuaguccucacuguagaa

SEQ ID NO: 541380 - RNA, 19 nt, Artificial Sequence
  Description of Artificial Sequence: Synthetic oligonucleotide
augacuagagguggaggca

SEQ ID NO: 541381 - RNA, 19 nt, Artificial Sequence
  Description of Artificial Sequence: Synthetic oligonucleotide
cugggcuacauagacccug

SEQ ID NO: 541382 - RNA, 19 nt, Artificial Sequence
  Description of Artificial Sequence: Synthetic oligonucleotide
uacauagacccugucucua

SEQ ID NO: 541383 - RNA, 19 nt, Artificial Sequence
  Description of Artificial Sequence: Synthetic oligonucleotide
aucacaccguggagaaggc

SEQ ID NO: 541384 - RNA, 19 nt, Artificial Sequence
  Description of Artificial Sequence: Synthetic oligonucleotide
gaguuuccgcuuagaggcg

SEQ ID NO: 541385 - RNA, 19 nt, Artificial Sequence
  Description of Artificial Sequence: Synthetic oligonucleotide
uccccuggccccugaauac

SEQ ID NO: 541386 - RNA, 19 nt, Artificial Sequence
  Description of Artificial Sequence: Synthetic oligonucleotide
uccugccgacuccaagacc

SEQ ID NO: 541387 - RNA, 19 nt, Artificial Sequence
  Description of Artificial Sequence: Synthetic oligonucleotide
cugugcguuggacaccaug

SEQ ID NO: 541388 - RNA, 19 nt, Artificial Sequence
  Description of Artificial Sequence: Synthetic oligonucleotide
cgugcaauaaaguuuaaua

SEQ ID NO: 541389 - RNA, 19 nt, Artificial Sequence
  Description of Artificial Sequence: Synthetic oligonucleotide
ccuugauugugacaaaaga

SEQ ID NO: 541390 - RNA, 19 nt, Artificial Sequence
  Description of Artificial Sequence: Synthetic oligonucleotide
gugcguuggacaccauggc

SEQ ID NO: 541391 - RNA, 19 nt, Artificial Sequence
  Description of Artificial Sequence: Synthetic oligonucleotide
uucucugccccgugcaaua

SEQ ID NO: 541392 - RNA, 19 nt, Artificial Sequence
  Description of Artificial Sequence: Synthetic oligonucleotide
cuagaugaguuuccgcuua

SEQ ID NO: 541393 - RNA, 19 nt, Artificial Sequence
  Description of Artificial Sequence: Synthetic oligonucleotide
agccgcuuugccagguggc

SEQ ID NO: 541394 - RNA, 19 nt, Artificial Sequence
  Description of Artificial Sequence: Synthetic oligonucleotide
cucaugcgaaugucucuug

SEQ ID NO: 541395 - RNA, 19 nt, Artificial Sequence
  Description of Artificial Sequence: Synthetic oligonucleotide
cugucguuccaguucccuc

SEQ ID NO: 541396 - RNA, 19 nt, Artificial Sequence
  Description of Artificial Sequence: Synthetic oligonucleotide
cccagauacgccaucguuc

SEQ ID NO: 541397 - RNA, 19 nt, Artificial Sequence
  Description of Artificial Sequence: Synthetic oligonucleotide
uggaacacuucugccguuc

SEQ ID NO: 541398 - RNA, 19 nt, Artificial Sequence
  Description of Artificial Sequence: Synthetic oligonucleotide
uccgcuuagaggcgugguu

SEQ ID NO: 541399 - RNA, 19 nt, Artificial Sequence
  Description of Artificial Sequence: Synthetic oligonucleotide
cuucuauucucucagcguu

SEQ ID NO: 541400 - RNA, 19 nt, Artificial Sequence
  Description of Artificial Sequence: Synthetic oligonucleotide
cuagauuaagaggcuuuga

SEQ ID NO: 541401 - RNA, 19 nt, Artificial Sequence
  Description of Artificial Sequence: Synthetic oligonucleotide
ggcgugguugcugaggcag

SEQ ID NO: 541402 - RNA, 19 nt, Artificial Sequence
  Description of Artificial Sequence: Synthetic oligonucleotide
ucacggguguucuuuccuu

SEQ ID NO: 541403 - RNA, 19 nt, Artificial Sequence
  Description of Artificial Sequence: Synthetic oligonucleotide
cacggguguucuuuccuuc

SEQ ID NO: 541404 - RNA, 19 nt, Artificial Sequence
  Description of Artificial Sequence: Synthetic oligonucleotide
aacucucuuugcugucguu

SEQ ID NO: 541405 - RNA, 19 nt, Artificial Sequence
  Description of Artificial Sequence: Synthetic oligonucleotide
cauagacccugucucuaca

SEQ ID NO: 541406 - RNA, 19 nt, Artificial Sequence
  Description of Artificial Sequence: Synthetic oligonucleotide
aucaccauugggagugcug

SEQ ID NO: 541407 - RNA, 19 nt, Artificial Sequence
  Description of Artificial Sequence: Synthetic oligonucleotide
ggaaucuuggccacugguc

SEQ ID NO: 541408 - RNA, 19 nt, Artificial Sequence
  Description of Artificial Sequence: Synthetic oligonucleotide
accaaguagggugguaaau

SEQ ID NO: 541409 - RNA, 19 nt, Artificial Sequence
  Description of Artificial Sequence: Synthetic oligonucleotide
cucagcguucucagcagca

SEQ ID NO: 541410 - RNA, 19 nt, Artificial Sequence
  Description of Artificial Sequence: Synthetic oligonucleotide
agagaaucacaaacccuau

SEQ ID NO: 541411 - RNA, 19 nt, Artificial Sequence
  Description of Artificial Sequence: Synthetic oligonucleotide
aguuuccgcuuagaggcgu

SEQ ID NO: 541412 - RNA, 19 nt, Artificial Sequence
  Description of Artificial Sequence: Synthetic oligonucleotide
uccccagauacgccaucgu

SEQ ID NO: 541413 - RNA, 19 nt, Artificial Sequence
  Description of Artificial Sequence: Synthetic oligonucleotide
aggagcgcccagauggaag

SEQ ID NO: 541414 - RNA, 19 nt, Artificial Sequence
  Description of Artificial Sequence: Synthetic oligonucleotide
aauuugcgugaaacacaga

SEQ ID NO: 541415 - RNA, 19 nt, Artificial Sequence
  Description of Artificial Sequence: Synthetic oligonucleotide
uuccguagccucacaucua

SEQ ID NO: 541416 - RNA, 19 nt, Artificial Sequence
  Description of Artificial Sequence: Synthetic oligonucleotide
caguucacuuaacgaggug

SEQ ID NO: 541417 - RNA, 19 nt, Artificial Sequence
  Description of Artificial Sequence: Synthetic oligonucleotide
agggugguaaaugccugga

SEQ ID NO: 541418 - RNA, 19 nt, Artificial Sequence
  Description of Artificial Sequence: Synthetic oligonucleotide
gcucugguaagaagaguag

SEQ ID NO: 541419 - RNA, 19 nt, Artificial Sequence
  Description of Artificial Sequence: Synthetic oligonucleotide
caucucgaugaacugcaaa

SEQ ID NO: 541420 - RNA, 19 nt, Artificial Sequence
  Description of Artificial Sequence: Synthetic oligonucleotide
aacgaggugucugggucua

SEQ ID NO: 541421 - RNA, 19 nt, Artificial Sequence
  Description of Artificial Sequence: Synthetic oligonucleotide
agaugaguuuccgcuuaga

SEQ ID NO: 541422 - RNA, 19 nt, Artificial Sequence
  Description of Artificial Sequence: Synthetic oligonucleotide
guaaacacuuugagcuaca

SEQ ID NO: 541423 - RNA, 19 nt, Artificial Sequence
  Description of Artificial Sequence: Synthetic oligonucleotide
cuuaacgaggugucugggu

SEQ ID NO: 541424 - RNA, 19 nt, Artificial Sequence
  Description of Artificial Sequence: Synthetic oligonucleotide
gaacccacaccaaggccuc

SEQ ID NO: 541425 - RNA, 19 nt, Artificial Sequence
  Description of Artificial Sequence: Synthetic oligonucleotide
uagaaccaaguaggguggu

SEQ ID NO: 541426 - RNA, 19 nt, Artificial Sequence
  Description of Artificial Sequence: Synthetic oligonucleotide
cucuagccgcuuugccagg

SEQ ID NO: 541427 - RNA, 19 nt, Artificial Sequence
  Description of Artificial Sequence: Synthetic oligonucleotide
cuacauagacccugucucu

SEQ ID NO: 541428 - RNA, 19 nt, Artificial Sequence
  Description of Artificial Sequence: Synthetic oligonucleotide
caugcgaaugucucuugcu

SEQ ID NO: 541429 - RNA, 19 nt, Artificial Sequence
  Description of Artificial Sequence: Synthetic oligonucleotide
uauuggcaucucucugcau

SEQ ID NO: 541430 - RNA, 19 nt, Artificial Sequence
  Description of Artificial Sequence: Synthetic oligonucleotide
ccaacucucuuugcugucg

SEQ ID NO: 541431 - RNA, 19 nt, Artificial Sequence
  Description of Artificial Sequence: Synthetic oligonucleotide
ggauuauaacuaagccaug

SEQ ID NO: 541432 - RNA, 19 nt, Artificial Sequence
  Description of Artificial Sequence: Synthetic oligonucleotide
ucacaccguggagaaggca

SEQ ID NO: 541433 - RNA, 19 nt, Artificial Sequence
  Description of Artificial Sequence: Synthetic oligonucleotide
gccgaaggccuucuuugag

SEQ ID NO: 541434 - RNA, 19 nt, Artificial Sequence
  Description of Artificial Sequence: Synthetic oligonucleotide
aagccggcugauacuuugu

SEQ ID NO: 541435 - RNA, 19 nt, Artificial Sequence
  Description of Artificial Sequence: Synthetic oligonucleotide
guucccucaugcgaauguc

SEQ ID NO: 541436 - RNA, 19 nt, Artificial Sequence
  Description of Artificial Sequence: Synthetic oligonucleotide
ucgcugaagcuuccucuuu

SEQ ID NO: 541437 - RNA, 19 nt, Artificial Sequence
  Description of Artificial Sequence: Synthetic oligonucleotide
caguucuguaccgcagcac

SEQ ID NO: 541438 - RNA, 19 nt, Artificial Sequence
  Description of Artificial Sequence: Synthetic oligonucleotide
agcguucucagcagcaguu

SEQ ID NO: 541439 - RNA, 19 nt, Artificial Sequence
  Description of Artificial Sequence: Synthetic oligonucleotide
ucaagccggcugauacuuu

SEQ ID NO: 541440 - RNA, 19 nt, Artificial Sequence
  Description of Artificial Sequence: Synthetic oligonucleotide
ggaaagcuugaauuuguau

SEQ ID NO: 541441 - RNA, 19 nt, Artificial Sequence
  Description of Artificial Sequence: Synthetic oligonucleotide
uuccgcuuagaggcguggu

SEQ ID NO: 541442 - RNA, 19 nt, Artificial Sequence
  Description of Artificial Sequence: Synthetic oligonucleotide
gagcgcccagauggaaggg

SEQ ID NO: 541443 - RNA, 19 nt, Artificial Sequence
  Description of Artificial Sequence: Synthetic oligonucleotide
guuagggaggcagcuugga

SEQ ID NO: 541444 - RNA, 19 nt, Artificial Sequence
  Description of Artificial Sequence: Synthetic oligonucleotide
guaucacaccguggagaag

SEQ ID NO: 541445 - RNA, 19 nt, Artificial Sequence
  Description of Artificial Sequence: Synthetic oligonucleotide
ugccgacuccaagaccuga

SEQ ID NO: 541446 - RNA, 19 nt, Artificial Sequence
  Description of Artificial Sequence: Synthetic oligonucleotide
cccgucuagaugaguuucc

SEQ ID NO: 541447 - RNA, 19 nt, Artificial Sequence
  Description of Artificial Sequence: Synthetic oligonucleotide
agcccguaucacaccgugg

SEQ ID NO: 541448 - RNA, 19 nt, Artificial Sequence
  Description of Artificial Sequence: Synthetic oligonucleotide
gguggcuguuuaaugacaa

SEQ ID NO: 541449 - RNA, 19 nt, Artificial Sequence
  Description of Artificial Sequence: Synthetic oligonucleotide
cagcccgcuuugcugcuag

SEQ ID NO: 541450 - RNA, 19 nt, Artificial Sequence
  Description of Artificial Sequence: Synthetic oligonucleotide
cucgaucuuguccagugau

SEQ ID NO: 541451 - RNA, 19 nt, Artificial Sequence
  Description of Artificial Sequence: Synthetic oligonucleotide
guuuccgcuuagaggcgug

SEQ ID NO: 541452 - RNA, 19 nt, Artificial Sequence
  Description of Artificial Sequence: Synthetic oligonucleotide
agccggcugauacuuuguu

SEQ ID NO: 541453 - RNA, 19 nt, Artificial Sequence
  Description of Artificial Sequence: Synthetic oligonucleotide
cagugauguccguagcucu

SEQ ID NO: 541454 - RNA, 19 nt, Artificial Sequence
  Description of Artificial Sequence: Synthetic oligonucleotide
gucuagaaccaaguagggu

SEQ ID NO: 541455 - RNA, 19 nt, Artificial Sequence
  Description of Artificial Sequence: Synthetic oligonucleotide
acccuaugaaguggcuaca

SEQ ID NO: 541456 - RNA, 19 nt, Artificial Sequence
  Description of Artificial Sequence: Synthetic oligonucleotide
ccgucuagaugaguuuccg

SEQ ID NO: 541457 - RNA, 19 nt, Artificial Sequence
  Description of Artificial Sequence: Synthetic oligonucleotide
agaaccaaguaggguggua

SEQ ID NO: 541458 - RNA, 19 nt, Artificial Sequence
  Description of Artificial Sequence: Synthetic oligonucleotide
ggguggugagaaaacguga

SEQ ID NO: 541459 - RNA, 19 nt, Artificial Sequence
  Description of Artificial Sequence: Synthetic oligonucleotide
ucucugccccgugcaauaa

SEQ ID NO: 541460 - RNA, 19 nt, Artificial Sequence
  Description of Artificial Sequence: Synthetic oligonucleotide
gaguuuccguagccucaca

SEQ ID NO: 541461 - RNA, 19 nt, Artificial Sequence
  Description of Artificial Sequence: Synthetic oligonucleotide
cugccgacuccaagaccug

SEQ ID NO: 541462 - RNA, 19 nt, Artificial Sequence
  Description of Artificial Sequence: Synthetic oligonucleotide
ccgacuccaagaccugagc

SEQ ID NO: 541463 - RNA, 19 nt, Artificial Sequence
  Description of Artificial Sequence: Synthetic oligonucleotide
gccggcugauacuuuguuc

SEQ ID NO: 541464 - RNA, 19 nt, Artificial Sequence
  Description of Artificial Sequence: Synthetic oligonucleotide
ggccccugaauacuuccuc

SEQ ID NO: 541465 - RNA, 19 nt, Artificial Sequence
  Description of Artificial Sequence: Synthetic oligonucleotide
cuucagacaaagacuccuu

SEQ ID NO: 541466 - RNA, 19 nt, Artificial Sequence
  Description of Artificial Sequence: Synthetic oligonucleotide
caguucccucaugcgaaug

SEQ ID NO: 541467 - RNA, 19 nt, Artificial Sequence
  Description of Artificial Sequence: Synthetic oligonucleotide
ccgcuuagaggcgugguug

SEQ ID NO: 541468 - RNA, 19 nt, Artificial Sequence
  Description of Artificial Sequence: Synthetic oligonucleotide
auacgccaucguuccugga

SEQ ID NO: 541469 - RNA, 19 nt, Artificial Sequence
  Description of Artificial Sequence: Synthetic oligonucleotide
ccccgugcaauaaaguuua

SEQ ID NO: 541470 - RNA, 19 nt, Artificial Sequence
  Description of Artificial Sequence: Synthetic oligonucleotide
aggcgugguugcugaggca

SEQ ID NO: 541471 - RNA, 19 nt, Artificial Sequence
  Description of Artificial Sequence: Synthetic oligonucleotide
cguaucacaccguggagaa

SEQ ID NO: 541472 - RNA, 19 nt, Artificial Sequence
  Description of Artificial Sequence: Synthetic oligonucleotide
cgcuuagaggcgugguugc

SEQ ID NO: 541473 - RNA, 19 nt, Artificial Sequence
  Description of Artificial Sequence: Synthetic oligonucleotide
acgaggugucugggucuac

SEQ ID NO: 541474 - RNA, 19 nt, Artificial Sequence
  Description of Artificial Sequence: Synthetic oligonucleotide
guggugagaaaacgugauu

SEQ ID NO: 541475 - RNA, 19 nt, Artificial Sequence
  Description of Artificial Sequence: Synthetic oligonucleotide
gcuagaagggccguccugu

SEQ ID NO: 541476 - RNA, 19 nt, Artificial Sequence
  Description of Artificial Sequence: Synthetic oligonucleotide
guccguagcucucgcugaa

SEQ ID NO: 541477 - RNA, 19 nt, Artificial Sequence
  Description of Artificial Sequence: Synthetic oligonucleotide
ugacauccuugaggguguc

SEQ ID NO: 541478 - RNA, 19 nt, Artificial Sequence
  Description of Artificial Sequence: Synthetic oligonucleotide
ggcccuuagaggagcgccc

SEQ ID NO: 541479 - RNA, 19 nt, Artificial Sequence
  Description of Artificial Sequence: Synthetic oligonucleotide
ccacagguucaugauugac

SEQ ID NO: 541480 - RNA, 19 nt, Artificial Sequence
  Description of Artificial Sequence: Synthetic oligonucleotide
cccguaucacaccguggag

SEQ ID NO: 541481 - RNA, 19 nt, Artificial Sequence
  Description of Artificial Sequence: Synthetic oligonucleotide
gcguuggacaccauggccu

SEQ ID NO: 541482 - RNA, 19 nt, Artificial Sequence
  Description of Artificial Sequence: Synthetic oligonucleotide
gaagggccgccuuccuacu

SEQ ID NO: 541483 - RNA, 19 nt, Artificial Sequence
  Description of Artificial Sequence: Synthetic oligonucleotide
ccguaucacaccguggaga

SEQ ID NO: 541484 - RNA, 19 nt, Artificial Sequence
  Description of Artificial Sequence: Synthetic oligonucleotide
gaggagcgcccagauggaa

SEQ ID NO: 541485 - RNA, 19 nt, Artificial Sequence
  Description of Artificial Sequence: Synthetic oligonucleotide
cucaagccggcugauacuu

SEQ ID NO: 541486 - RNA, 19 nt, Artificial Sequence
  Description of Artificial Sequence: Synthetic oligonucleotide
gaggcaaccugggcuacau

SEQ ID NO: 541487 - RNA, 19 nt, Artificial Sequence
  Description of Artificial Sequence: Synthetic oligonucleotide
gcacagacuaguccucacu

SEQ ID NO: 541488 - RNA, 19 nt, Artificial Sequence
  Description of Artificial Sequence: Synthetic oligonucleotide
gaagcccguaucacaccgu

SEQ ID NO: 541489 - RNA, 19 nt, Artificial Sequence
  Description of Artificial Sequence: Synthetic oligonucleotide
cucugccccgugcaauaaa

SEQ ID NO: 541490 - RNA, 19 nt, Artificial Sequence
  Description of Artificial Sequence: Synthetic oligonucleotide
cagcguucucagcagcagu

SEQ ID NO: 541491 - RNA, 19 nt, Artificial Sequence
  Description of Artificial Sequence: Synthetic oligonucleotide
cugccccgugcaauaaagu

SEQ ID NO: 541492 - RNA, 19 nt, Artificial Sequence
  Description of Artificial Sequence: Synthetic oligonucleotide
gaucuucacggguguucuu

SEQ ID NO: 541493 - RNA, 19 nt, Artificial Sequence
  Description of Artificial Sequence: Synthetic oligonucleotide
cgaguuuccguagccucac

SEQ ID NO: 541494 - RNA, 19 nt, Artificial Sequence
  Description of Artificial Sequence: Synthetic oligonucleotide
ccuuccuacugcugggcua

SEQ ID NO: 541495 - RNA, 19 nt, Artificial Sequence
  Description of Artificial Sequence: Synthetic oligonucleotide
ccaugaaaccaccuugauu

SEQ ID NO: 541496 - RNA, 19 nt, Artificial Sequence
  Description of Artificial Sequence: Synthetic oligonucleotide
cucacaucuaguggcccuu

SEQ ID NO: 541497 - RNA, 19 nt, Artificial Sequence
  Description of Artificial Sequence: Synthetic oligonucleotide
gccccgugcaauaaaguuu

SEQ ID NO: 541498 - RNA, 19 nt, Artificial Sequence
  Description of Artificial Sequence: Synthetic oligonucleotide
gccucucuaaagcgaugcu

SEQ ID NO: 541499 - RNA, 19 nt, Artificial Sequence
  Description of Artificial Sequence: Synthetic oligonucleotide
ggaggcaaccugggcuaca

SEQ ID NO: 541500 - RNA, 19 nt, Artificial Sequence
  Description of Artificial Sequence: Synthetic oligonucleotide
cagauacgccaucguuccu

SEQ ID NO: 541501 - RNA, 19 nt, Artificial Sequence
  Description of Artificial Sequence: Synthetic oligonucleotide
caggccgucccaucuuguu

SEQ ID NO: 541502 - RNA, 19 nt, Artificial Sequence
  Description of Artificial Sequence: Synthetic oligonucleotide
ccucaagccggcugauacu

SEQ ID NO: 541503 - RNA, 19 nt, Artificial Sequence
  Description of Artificial Sequence: Synthetic oligonucleotide
gcaucucgaugaacugcaa

SEQ ID NO: 541504 - RNA, 19 nt, Artificial Sequence
  Description of Artificial Sequence: Synthetic oligonucleotide
ccaucguuccuggaacacu

SEQ ID NO: 541505 - RNA, 19 nt, Artificial Sequence
  Description of Artificial Sequence: Synthetic oligonucleotide
gcuuagaggcgugguugcu

SEQ ID NO: 541506 - RNA, 19 nt, Artificial Sequence
  Description of Artificial Sequence: Synthetic oligonucleotide
gcgugguugcugaggcaga

SEQ ID NO: 541507 - RNA, 19 nt, Artificial Sequence
  Description of Artificial Sequence: Synthetic oligonucleotide
gccgcuuugccagguggcu

SEQ ID NO: 541508 - RNA, 19 nt, Artificial Sequence
  Description of Artificial Sequence: Synthetic oligonucleotide
gcgaugcuacucaaagcuu

SEQ ID NO: 541509 - RNA, 19 nt, Artificial Sequence
  Description of Artificial Sequence: Synthetic oligonucleotide
ccgcuuugcugcuagccuu

SEQ ID NO: 541510 - RNA, 19 nt, Artificial Sequence
  Description of Artificial Sequence: Synthetic oligonucleotide
gccccgucuagaugaguuu

SEQ ID NO: 541511 - RNA, 19 nt, Artificial Sequence
  Description of Artificial Sequence: Synthetic oligonucleotide
ccccagauacgccaucguu

SEQ ID NO: 541512 - RNA, 19 nt, Artificial Sequence
  Description of Artificial Sequence: Synthetic oligonucleotide
cccgugcaauaaaguuuaa

SEQ ID NO: 541513 - RNA, 19 nt, Artificial Sequence
  Description of Artificial Sequence: Synthetic oligonucleotide
cguuggacaccauggccuu

SEQ ID NO: 541514 - RNA, 19 nt, Artificial Sequence
  Description of Artificial Sequence: Synthetic oligonucleotide
gccguccuguuggccuuca

SEQ ID NO: 541515 - RNA, 19 nt, Artificial Sequence
  Description of Artificial Sequence: Synthetic oligonucleotide
cugccccgucuagaugagu

SEQ ID NO: 541516 - RNA, 19 nt, Artificial Sequence
  Description of Artificial Sequence: Synthetic oligonucleotide
ccguagccucacaucuagu

SEQ ID NO: 541517 - RNA, 19 nt, Artificial Sequence
  Description of Artificial Sequence: Synthetic oligonucleotide
gcagcccgcuuugcugcua

SEQ ID NO: 541518 - RNA, 19 nt, Artificial Sequence
  Description of Artificial Sequence: Synthetic oligonucleotide
ccgcagcaccugccccuca

SEQ ID NO: 541519 - RNA, 19 nt, Artificial Sequence
  Description of Artificial Sequence: Synthetic oligonucleotide
ccccucaagccggcugaua

SEQ ID NO: 541520 - RNA, 19 nt, Artificial Sequence
  Description of Artificial Sequence: Synthetic oligonucleotide
gcugugcguuggacaccau

SEQ ID NO: 541521 - RNA, 19 nt, Artificial Sequence
  Description of Artificial Sequence: Synthetic oligonucleotide
ccguccuguuggccuucau

SEQ ID NO: 541522 - RNA, 19 nt, Artificial Sequence
  Description of Artificial Sequence: Synthetic oligonucleotide
aguguaugaacucuaauuc

SEQ ID NO: 541523 - RNA, 19 nt, Artificial Sequence
  Description of Artificial Sequence: Synthetic oligonucleotide
uauaaguugggaugaaucg

SEQ ID NO: 541524 - RNA, 19 nt, Artificial Sequence
  Description of Artificial Sequence: Synthetic oligonucleotide
uguacagaaacucuucggg

SEQ ID NO: 541525 - RNA, 19 nt, Artificial Sequence
  Description of Artificial Sequence: Synthetic oligonucleotide
cauaguaagagaaugcagc

SEQ ID NO: 541526 - RNA, 19 nt, Artificial Sequence
  Description of Artificial Sequence: Synthetic oligonucleotide
ucuaguuuagacuaugaca

SEQ ID NO: 541527 - RNA, 19 nt, Artificial Sequence
  Description of Artificial Sequence: Synthetic oligonucleotide
uaugcauuagucaaccuca

SEQ ID NO: 541528 - RNA, 19 nt, Artificial Sequence
  Description of Artificial Sequence: Synthetic oligonucleotide
cuuugcuugacguauagag

SEQ ID NO: 541529 - RNA, 19 nt, Artificial Sequence
  Description of Artificial Sequence: Synthetic oligonucleotide
ucuauaucagacacaauca

SEQ ID NO: 541530 - RNA, 19 nt, Artificial Sequence
  Description of Artificial Sequence: Synthetic oligonucleotide
auugagagaccuuuaguac

SEQ ID NO: 541531 - RNA, 19 nt, Artificial Sequence
  Description of Artificial Sequence: Synthetic oligonucleotide
auaugcauuagucaaccuc

SEQ ID NO: 541532 - RNA, 19 nt, Artificial Sequence
  Description of Artificial Sequence: Synthetic oligonucleotide
aucagaaacucauaguaag

SEQ ID NO: 541533 - RNA, 19 nt, Artificial Sequence
  Description of Artificial Sequence: Synthetic oligonucleotide
uguuaauuguaagaagacg

SEQ ID NO: 541534 - RNA, 19 nt, Artificial Sequence
  Description of Artificial Sequence: Synthetic oligonucleotide
ugucauuccacacaguccu

SEQ ID NO: 541535 - RNA, 19 nt, Artificial Sequence
  Description of Artificial Sequence: Synthetic oligonucleotide
aauguagcacaguuuagca

SEQ ID NO: 541536 - RNA, 19 nt, Artificial Sequence
  Description of Artificial Sequence: Synthetic oligonucleotide
gacucaauucauaauaugc

SEQ ID NO: 541537 - RNA, 19 nt, Artificial Sequence
  Description of Artificial Sequence: Synthetic oligonucleotide
acuggcauaaaacugacaa

SEQ ID NO: 541538 - RNA, 19 nt, Artificial Sequence
  Description of Artificial Sequence: Synthetic oligonucleotide
gacuuuaucuaguuuagac

SEQ ID NO: 541539 - RNA, 19 nt, Artificial Sequence
  Description of Artificial Sequence: Synthetic oligonucleotide
uguacguccgacacgcucg

SEQ ID NO: 541540 - RNA, 19 nt, Artificial Sequence
  Description of Artificial Sequence: Synthetic oligonucleotide
augaacaagcggcugagac

SEQ ID NO: 541541 - RNA, 19 nt, Artificial Sequence
  Description of Artificial Sequence: Synthetic oligonucleotide
uuaacucuaugacacaggu

SEQ ID NO: 541542 - RNA, 19 nt, Artificial Sequence
  Description of Artificial Sequence: Synthetic oligonucleotide
uugcuugacguauagagca

SEQ ID NO: 541543 - RNA, 19 nt, Artificial Sequence
  Description of Artificial Sequence: Synthetic oligonucleotide
ugagacacgucuaaaacaa

SEQ ID NO: 541544 - RNA, 19 nt, Artificial Sequence
  Description of Artificial Sequence: Synthetic oligonucleotide
guuauaaaggaucuaguuc

SEQ ID NO: 541545 - RNA, 19 nt, Artificial Sequence
  Description of Artificial Sequence: Synthetic oligonucleotide
ugguauugcugcaaaauca

SEQ ID NO: 541546 - RNA, 19 nt, Artificial Sequence
  Description of Artificial Sequence: Synthetic oligonucleotide
uaugaacucuaauucuccg

SEQ ID NO: 541547 - RNA, 19 nt, Artificial Sequence
  Description of Artificial Sequence: Synthetic oligonucleotide
cauaauaugcauuagucaa

SEQ ID NO: 541548 - RNA, 19 nt, Artificial Sequence
  Description of Artificial Sequence: Synthetic oligonucleotide
ugacguauagagcagggcu

SEQ ID NO: 541549 - RNA, 19 nt, Artificial Sequence
  Description of Artificial Sequence: Synthetic oligonucleotide
uuaauggucggcugucucg

SEQ ID NO: 541550 - RNA, 19 nt, Artificial Sequence
  Description of Artificial Sequence: Synthetic oligonucleotide
gucauuaacauguauggca

SEQ ID NO: 541551 - RNA, 19 nt, Artificial Sequence
  Description of Artificial Sequence: Synthetic oligonucleotide
agcuugaggacaccgagcg

SEQ ID NO: 541552 - RNA, 19 nt, Artificial Sequence
  Description of Artificial Sequence: Synthetic oligonucleotide
cauuagucaaccucauucc

SEQ ID NO: 541553 - RNA, 19 nt, Artificial Sequence
  Description of Artificial Sequence: Synthetic oligonucleotide
gaugaaucguuuucauuag

SEQ ID NO: 541554 - RNA, 19 nt, Artificial Sequence
  Description of Artificial Sequence: Synthetic oligonucleotide
augaauccuauccuuguuc

SEQ ID NO: 541555 - RNA, 19 nt, Artificial Sequence
  Description of Artificial Sequence: Synthetic oligonucleotide
ugagguacuacccugucau

SEQ ID NO: 541556 - RNA, 19 nt, Artificial Sequence
  Description of Artificial Sequence: Synthetic oligonucleotide
aaguuuucuaguaaugacu

SEQ ID NO: 541557 - RNA, 19 nt, Artificial Sequence
  Description of Artificial Sequence: Synthetic oligonucleotide
gcauaaaacugacaaauag

SEQ ID NO: 541558 - RNA, 19 nt, Artificial Sequence
  Description of Artificial Sequence: Synthetic oligonucleotide
gcgaucuucaaucaaaugc

SEQ ID NO: 541559 - RNA, 19 nt, Artificial Sequence
  Description of Artificial Sequence: Synthetic oligonucleotide
uugagagaccuuuaguaca

SEQ ID NO: 541560 - RNA, 19 nt, Artificial Sequence
  Description of Artificial Sequence: Synthetic oligonucleotide
ggaaagugugcauugagag

SEQ ID NO: 541561 - RNA, 19 nt, Artificial Sequence
  Description of Artificial Sequence: Synthetic oligonucleotide
ugauguacguccgacacgc

SEQ ID NO: 541562 - RNA, 19 nt, Artificial Sequence
  Description of Artificial Sequence: Synthetic oligonucleotide
ugcauugagagaccuuuag

SEQ ID NO: 541563 - RNA, 19 nt, Artificial Sequence
  Description of Artificial Sequence: Synthetic oligonucleotide
ugaaucguuuucauuagau

SEQ ID NO: 541564 - RNA, 19 nt, Artificial Sequence
  Description of Artificial Sequence: Synthetic oligonucleotide
agacacaaucaacauuugg

SEQ ID NO: 541565 - RNA, 19 nt, Artificial Sequence
  Description of Artificial Sequence: Synthetic oligonucleotide
gaacggacaaagaaguucc

SEQ ID NO: 541566 - RNA, 19 nt, Artificial Sequence
  Description of Artificial Sequence: Synthetic oligonucleotide
aguagaauaugcacccugc

SEQ ID NO: 541567 - RNA, 19 nt, Artificial Sequence
  Description of Artificial Sequence: Synthetic oligonucleotide
gguaguagaauaugcaccc

SEQ ID NO: 541568 - RNA, 19 nt, Artificial Sequence
  Description of Artificial Sequence: Synthetic oligonucleotide
caucugacaagcuugagga

SEQ ID NO: 541569 - RNA, 19 nt, Artificial Sequence
  Description of Artificial Sequence: Synthetic oligonucleotide
uucuauagcucauguacug

SEQ ID NO: 541570 - RNA, 19 nt, Artificial Sequence
  Description of Artificial Sequence: Synthetic oligonucleotide
ucugcgagugaacucacca

SEQ ID NO: 541571 - RNA, 19 nt, Artificial Sequence
  Description of Artificial Sequence: Synthetic oligonucleotide
auaugaaucauuccuguua

SEQ ID NO: 541572 - RNA, 19 nt, Artificial Sequence
  Description of Artificial Sequence: Synthetic oligonucleotide
uguaagaagacgacuuuau

SEQ ID NO: 541573 - RNA, 19 nt, Artificial Sequence
  Description of Artificial Sequence: Synthetic oligonucleotide
guacugaaacucuagugcc

SEQ ID NO: 541574 - RNA, 19 nt, Artificial Sequence
  Description of Artificial Sequence: Synthetic oligonucleotide
uaguagaauaugcacccug

SEQ ID NO: 541575 - RNA, 19 nt, Artificial Sequence
  Description of Artificial Sequence: Synthetic oligonucleotide
uggaagaugugucauuuuc

SEQ ID NO: 541576 - RNA, 19 nt, Artificial Sequence
  Description of Artificial Sequence: Synthetic oligonucleotide
acaaguagacugcaggcug

SEQ ID NO: 541577 - RNA, 19 nt, Artificial Sequence
  Description of Artificial Sequence: Synthetic oligonucleotide
acugucgucuauaucagac

SEQ ID NO: 541578 - RNA, 19 nt, Artificial Sequence
  Description of Artificial Sequence: Synthetic oligonucleotide
caccuuauucucauaacag

SEQ ID NO: 541579 - RNA, 19 nt, Artificial Sequence
  Description of Artificial Sequence: Synthetic oligonucleotide
uuagacuaugacaugucau

SEQ ID NO: 541580 - RNA, 19 nt, Artificial Sequence
  Description of Artificial Sequence: Synthetic oligonucleotide
acaccuuauucucauaaca

SEQ ID NO: 541581 - RNA, 19 nt, Artificial Sequence
  Description of Artificial Sequence: Synthetic oligonucleotide
augauagcgugucuaguuc

SEQ ID NO: 541582 - RNA, 19 nt, Artificial Sequence
  Description of Artificial Sequence: Synthetic oligonucleotide
cacguuauaaaggaucuag

SEQ ID NO: 541583 - RNA, 19 nt, Artificial Sequence
  Description of Artificial Sequence: Synthetic oligonucleotide
auguuaauuguaagaagac

SEQ ID NO: 541584 - RNA, 19 nt, Artificial Sequence
  Description of Artificial Sequence: Synthetic oligonucleotide
cuaguuuagacuaugacau

SEQ ID NO: 541585 - RNA, 19 nt, Artificial Sequence
  Description of Artificial Sequence: Synthetic oligonucleotide
gaagcauguaguccgagga

SEQ ID NO: 541586 - RNA, 19 nt, Artificial Sequence
  Description of Artificial Sequence: Synthetic oligonucleotide
cacaaucaacauuuggggc

SEQ ID NO: 541587 - RNA, 19 nt, Artificial Sequence
  Description of Artificial Sequence: Synthetic oligonucleotide
agacacgucuaaaacaaac

SEQ ID NO: 541588 - RNA, 19 nt, Artificial Sequence
  Description of Artificial Sequence: Synthetic oligonucleotide
agcgcggcacacuugacac

SEQ ID NO: 541589 - RNA, 19 nt, Artificial Sequence
  Description of Artificial Sequence: Synthetic oligonucleotide
ugagagaccuuuaguacac

SEQ ID NO: 541590 - RNA, 19 nt, Artificial Sequence
  Description of Artificial Sequence: Synthetic oligonucleotide
aguggaacggacaaagaag

SEQ ID NO: 541591 - RNA, 19 nt, Artificial Sequence
  Description of Artificial Sequence: Synthetic oligonucleotide
aguuuagacuaugacaugu

SEQ ID NO: 541592 - RNA, 19 nt, Artificial Sequence
  Description of Artificial Sequence: Synthetic oligonucleotide
aggacgaagcauguagucc

SEQ ID NO: 541593 - RNA, 19 nt, Artificial Sequence
  Description of Artificial Sequence: Synthetic oligonucleotide
uucuuaguuacauuuuaua

SEQ ID NO: 541594 - RNA, 19 nt, Artificial Sequence
  Description of Artificial Sequence: Synthetic oligonucleotide
guaaugacuggcauaaaac

SEQ ID NO: 541595 - RNA, 19 nt, Artificial Sequence
  Description of Artificial Sequence: Synthetic oligonucleotide
ugagguucuccguaagacc

SEQ ID NO: 541596 - RNA, 19 nt, Artificial Sequence
  Description of Artificial Sequence: Synthetic oligonucleotide
ggacgaagcauguaguccg

SEQ ID NO: 541597 - RNA, 19 nt, Artificial Sequence
  Description of Artificial Sequence: Synthetic oligonucleotide
uguauggcacccucauccg

SEQ ID NO: 541598 - RNA, 19 nt, Artificial Sequence
  Description of Artificial Sequence: Synthetic oligonucleotide
ugcgagugaacucaccacu

SEQ ID NO: 541599 - RNA, 19 nt, Artificial Sequence
  Description of Artificial Sequence: Synthetic oligonucleotide
aaguuauugucacaaccuu

SEQ ID NO: 541600 - RNA, 19 nt, Artificial Sequence
  Description of Artificial Sequence: Synthetic oligonucleotide
caugaccaaagaagcaagg

SEQ ID NO: 541601 - RNA, 19 nt, Artificial Sequence
  Description of Artificial Sequence: Synthetic oligonucleotide
aacaaguagacugcaggcu

SEQ ID NO: 541602 - RNA, 19 nt, Artificial Sequence
  Description of Artificial Sequence: Synthetic oligonucleotide
agaagacgacuuuaucuag

SEQ ID NO: 541603 - RNA, 19 nt, Artificial Sequence
  Description of Artificial Sequence: Synthetic oligonucleotide
ucgucuauaucagacacaa

SEQ ID NO: 541604 - RNA, 19 nt, Artificial Sequence
  Description of Artificial Sequence: Synthetic oligonucleotide
augaccaaagaagcaaggg

SEQ ID NO: 541605 - RNA, 19 nt, Artificial Sequence
  Description of Artificial Sequence: Synthetic oligonucleotide
ucuaguaaugacuggcaua

SEQ ID NO: 541606 - RNA, 19 nt, Artificial Sequence
  Description of Artificial Sequence: Synthetic oligonucleotide
aaugaauagugcugucaaa

SEQ ID NO: 541607 - RNA, 19 nt, Artificial Sequence
  Description of Artificial Sequence: Synthetic oligonucleotide
ucgggaacaucauuaacuc

SEQ ID NO: 541608 - RNA, 19 nt, Artificial Sequence
  Description of Artificial Sequence: Synthetic oligonucleotide
ugaacaagcggcugagacu

SEQ ID NO: 541609 - RNA, 19 nt, Artificial Sequence
  Description of Artificial Sequence: Synthetic oligonucleotide
uaaguugggaugaaucguu

SEQ ID NO: 541610 - RNA, 19 nt, Artificial Sequence
  Description of Artificial Sequence: Synthetic oligonucleotide
acucaauucauaauaugca

SEQ ID NO: 541611 - RNA, 19 nt, Artificial Sequence
  Description of Artificial Sequence: Synthetic oligonucleotide
agcaaugaacuccacaguu

SEQ ID NO: 541612 - RNA, 19 nt, Artificial Sequence
  Description of Artificial Sequence: Synthetic oligonucleotide
cauugagagaccuuuagua

SEQ ID NO: 541613 - RNA, 19 nt, Artificial Sequence
  Description of Artificial Sequence: Synthetic oligonucleotide
cuugcgaaggguugugagc

SEQ ID NO: 541614 - RNA, 19 nt, Artificial Sequence
  Description of Artificial Sequence: Synthetic oligonucleotide
agggucaagaauacugucg

SEQ ID NO: 541615 - RNA, 19 nt, Artificial Sequence
  Description of Artificial Sequence: Synthetic oligonucleotide
caccgagcgauccacagcc

SEQ ID NO: 541616 - RNA, 19 nt, Artificial Sequence
  Description of Artificial Sequence: Synthetic oligonucleotide
aguccucgagucugcaggc

SEQ ID NO: 541617 - RNA, 19 nt, Artificial Sequence
  Description of Artificial Sequence: Synthetic oligonucleotide
uauccuuguucgugaaucc

SEQ ID NO: 541618 - RNA, 19 nt, Artificial Sequence
  Description of Artificial Sequence: Synthetic oligonucleotide
guauaaguugggaugaauc

SEQ ID NO: 541619 - RNA, 19 nt, Artificial Sequence
  Description of Artificial Sequence: Synthetic oligonucleotide
auaugcacccugcagagua

SEQ ID NO: 541620 - RNA, 19 nt, Artificial Sequence
  Description of Artificial Sequence: Synthetic oligonucleotide
cuccguaagaccgagucag

SEQ ID NO: 541621 - RNA, 19 nt, Artificial Sequence
  Description of Artificial Sequence: Synthetic oligonucleotide
cagauguaaaagacugagc

SEQ ID NO: 541622 - RNA, 19 nt, Artificial Sequence
  Description of Artificial Sequence: Synthetic oligonucleotide
ugauagcgugucuaguucu

SEQ ID NO: 541623 - RNA, 19 nt, Artificial Sequence
  Description of Artificial Sequence: Synthetic oligonucleotide
agccacguuauaaaggauc

SEQ ID NO: 541624 - RNA, 19 nt, Artificial Sequence
  Description of Artificial Sequence: Synthetic oligonucleotide
ugugcauugagagaccuuu

SEQ ID NO: 541625 - RNA, 19 nt, Artificial Sequence
  Description of Artificial Sequence: Synthetic oligonucleotide
uugugagacacgucuaaaa

SEQ ID NO: 541626 - RNA, 19 nt, Artificial Sequence
  Description of Artificial Sequence: Synthetic oligonucleotide
auaaguugggaugaaucgu

SEQ ID NO: 541627 - RNA, 19 nt, Artificial Sequence
  Description of Artificial Sequence: Synthetic oligonucleotide
ugagguaccguuugagguc

SEQ ID NO: 541628 - RNA, 19 nt, Artificial Sequence
  Description of Artificial Sequence: Synthetic oligonucleotide
cuccgugcgaucuucaauc

SEQ ID NO: 541629 - RNA, 19 nt, Artificial Sequence
  Description of Artificial Sequence: Synthetic oligonucleotide
uauagcucauguacugaaa

SEQ ID NO: 541630 - RNA, 19 nt, Artificial Sequence
  Description of Artificial Sequence: Synthetic oligonucleotide
uuagaugaacaagcggcug

SEQ ID NO: 541631 - RNA, 19 nt, Artificial Sequence
  Description of Artificial Sequence: Synthetic oligonucleotide
acuuccggccguuugugag

SEQ ID NO: 541632 - RNA, 19 nt, Artificial Sequence
  Description of Artificial Sequence: Synthetic oligonucleotide
guaugaacucuaauucucc

SEQ ID NO: 541633 - RNA, 19 nt, Artificial Sequence
  Description of Artificial Sequence: Synthetic oligonucleotide
ugagaagcgccaaaacaua

SEQ ID NO: 541634 - RNA, 19 nt, Artificial Sequence
  Description of Artificial Sequence: Synthetic oligonucleotide
gagaagcgccaaaacauag

SEQ ID NO: 541635 - RNA, 19 nt, Artificial Sequence
  Description of Artificial Sequence: Synthetic oligonucleotide
acaccgagcgauccacagc

SEQ ID NO: 541636 - RNA, 19 nt, Artificial Sequence
  Description of Artificial Sequence: Synthetic oligonucleotide
uacaccuuauucucauaac

SEQ ID NO: 541637 - RNA, 19 nt, Artificial Sequence
  Description of Artificial Sequence: Synthetic oligonucleotide
ucuauagcucauguacuga

SEQ ID NO: 541638 - RNA, 19 nt, Artificial Sequence
  Description of Artificial Sequence: Synthetic oligonucleotide
gaguguaugaacucuaauu

SEQ ID NO: 541639 - RNA, 19 nt, Artificial Sequence
  Description of Artificial Sequence: Synthetic oligonucleotide
auuguaagaagacgacuuu

SEQ ID NO: 541640 - RNA, 19 nt, Artificial Sequence
  Description of Artificial Sequence: Synthetic oligonucleotide
gacguauagagcagggcug

SEQ ID NO: 541641 - RNA, 19 nt, Artificial Sequence
  Description of Artificial Sequence: Synthetic oligonucleotide
gacaccgagcgauccacag

SEQ ID NO: 541642 - RNA, 19 nt, Artificial Sequence
  Description of Artificial Sequence: Synthetic oligonucleotide
gguauugcugcaaaaucag

SEQ ID NO: 541643 - RNA, 19 nt, Artificial Sequence
  Description of Artificial Sequence: Synthetic oligonucleotide
auuagaugaacaagcggcu

SEQ ID NO: 541644 - RNA, 19 nt, Artificial Sequence
  Description of Artificial Sequence: Synthetic oligonucleotide
agaauacugucgucuauau

SEQ ID NO: 541645 - RNA, 19 nt, Artificial Sequence
  Description of Artificial Sequence: Synthetic oligonucleotide
gugguauugcugcaaaauc

SEQ ID NO: 541646 - RNA, 19 nt, Artificial Sequence
  Description of Artificial Sequence: Synthetic oligonucleotide
gacacgucuaaaacaaaca

SEQ ID NO: 541647 - RNA, 19 nt, Artificial Sequence
  Description of Artificial Sequence: Synthetic oligonucleotide
uaguuuagacuaugacaug

SEQ ID NO: 541648 - RNA, 19 nt, Artificial Sequence
  Description of Artificial Sequence: Synthetic oligonucleotide
ucggcaccucacaauagug

SEQ ID NO: 541649 - RNA, 19 nt, Artificial Sequence
  Description of Artificial Sequence: Synthetic oligonucleotide
uccgucagccugucuaucc

SEQ ID NO: 541650 - RNA, 19 nt, Artificial Sequence
  Description of Artificial Sequence: Synthetic oligonucleotide
acggacaaagaaguucccg

SEQ ID NO: 541651 - RNA, 19 nt, Artificial Sequence
  Description of Artificial Sequence: Synthetic oligonucleotide
cugcauagacgucugcgag

SEQ ID NO: 541652 - RNA, 19 nt, Artificial Sequence
  Description of Artificial Sequence: Synthetic oligonucleotide
ucuccguaagaccgaguca

SEQ ID NO: 541653 - RNA, 19 nt, Artificial Sequence
  Description of Artificial Sequence: Synthetic oligonucleotide
ucguuuucauuagaugaac

SEQ ID NO: 541654 - RNA, 19 nt, Artificial Sequence
  Description of Artificial Sequence: Synthetic oligonucleotide
guacaccuuauucucauaa

SEQ ID NO: 541655 - RNA, 19 nt, Artificial Sequence
  Description of Artificial Sequence: Synthetic oligonucleotide
ugcauagacgucugcgagu

SEQ ID NO: 541656 - RNA, 19 nt, Artificial Sequence
  Description of Artificial Sequence: Synthetic oligonucleotide
agaugaacaagcggcugag

SEQ ID NO: 541657 - RNA, 19 nt, Artificial Sequence
  Description of Artificial Sequence: Synthetic oligonucleotide
gaggacgaagcauguaguc

SEQ ID NO: 541658 - RNA, 19 nt, Artificial Sequence
  Description of Artificial Sequence: Synthetic oligonucleotide
uucucauaacagcuucaaa

SEQ ID NO: 541659 - RNA, 19 nt, Artificial Sequence
  Description of Artificial Sequence: Synthetic oligonucleotide
ggguaguagaauaugcacc

SEQ ID NO: 541660 - RNA, 19 nt, Artificial Sequence
  Description of Artificial Sequence: Synthetic oligonucleotide
cagcaagucaguggaacgg

SEQ ID NO: 541661 - RNA, 19 nt, Artificial Sequence
  Description of Artificial Sequence: Synthetic oligonucleotide
acgacuuuaucuaguuuag

SEQ ID NO: 541662 - RNA, 19 nt, Artificial Sequence
  Description of Artificial Sequence: Synthetic oligonucleotide
uguauaaguugggaugaau

SEQ ID NO: 541663 - RNA, 19 nt, Artificial Sequence
  Description of Artificial Sequence: Synthetic oligonucleotide
uuggacaugcaugaccaaa

SEQ ID NO: 541664 - RNA, 19 nt, Artificial Sequence
  Description of Artificial Sequence: Synthetic oligonucleotide
uugacguauagagcagggc

SEQ ID NO: 541665 - RNA, 19 nt, Artificial Sequence
  Description of Artificial Sequence: Synthetic oligonucleotide
acaguugaauucugaacuu

SEQ ID NO: 541666 - RNA, 19 nt, Artificial Sequence
  Description of Artificial Sequence: Synthetic oligonucleotide
cuuccggccguuugugagg

SEQ ID NO: 541667 - RNA, 19 nt, Artificial Sequence
  Description of Artificial Sequence: Synthetic oligonucleotide
uaauggucggcugucucga

SEQ ID NO: 541668 - RNA, 19 nt, Artificial Sequence
  Description of Artificial Sequence: Synthetic oligonucleotide
agaguguaugaacucuaau

SEQ ID NO: 541669 - RNA, 19 nt, Artificial Sequence
  Description of Artificial Sequence: Synthetic oligonucleotide
cuaugacaugucauuccac

SEQ ID NO: 541670 - RNA, 19 nt, Artificial Sequence
  Description of Artificial Sequence: Synthetic oligonucleotide
cuuaauggucggcugucuc

SEQ ID NO: 541671 - RNA, 19 nt, Artificial Sequence
  Description of Artificial Sequence: Synthetic oligonucleotide
aggaugggguaguagaaua

SEQ ID NO: 541672 - RNA, 19 nt, Artificial Sequence
  Description of Artificial Sequence: Synthetic oligonucleotide
gaugauagcgugucuaguu

SEQ ID NO: 541673 - RNA, 19 nt, Artificial Sequence
  Description of Artificial Sequence: Synthetic oligonucleotide
cacacuugacacugcggag

SEQ ID NO: 541674 - RNA, 19 nt, Artificial Sequence
  Description of Artificial Sequence: Synthetic oligonucleotide
gauagcgugucuaguucug

SEQ ID NO: 541675 - RNA, 19 nt, Artificial Sequence
  Description of Artificial Sequence: Synthetic oligonucleotide
ccuuuaguacaccuuauuc

SEQ ID NO: 541676 - RNA, 19 nt, Artificial Sequence
  Description of Artificial Sequence: Synthetic oligonucleotide
ggacaaagaaguucccgug

SEQ ID NO: 541677 - RNA, 19 nt, Artificial Sequence
  Description of Artificial Sequence: Synthetic oligonucleotide
cuauagcucauguacugaa

SEQ ID NO: 541678 - RNA, 19 nt, Artificial Sequence
  Description of Artificial Sequence: Synthetic oligonucleotide
guagaauaugcacccugca

SEQ ID NO: 541679 - RNA, 19 nt, Artificial Sequence
  Description of Artificial Sequence: Synthetic oligonucleotide
auagcgugucuaguucugg

SEQ ID NO: 541680 - RNA, 19 nt, Artificial Sequence
  Description of Artificial Sequence: Synthetic oligonucleotide
auagacgucugcgagugaa

SEQ ID NO: 541681 - RNA, 19 nt, Artificial Sequence
  Description of Artificial Sequence: Synthetic oligonucleotide
cucuucgggaacaucauua

SEQ ID NO: 541682 - RNA, 19 nt, Artificial Sequence
  Description of Artificial Sequence: Synthetic oligonucleotide
gacugggcuuaauggucgg

SEQ ID NO: 541683 - RNA, 19 nt, Artificial Sequence
  Description of Artificial Sequence: Synthetic oligonucleotide
cacugcauugugagacacg

SEQ ID NO: 541684 - RNA, 19 nt, Artificial Sequence
  Description of Artificial Sequence: Synthetic oligonucleotide
ugucaggcucucuucaauu

SEQ ID NO: 541685 - RNA, 19 nt, Artificial Sequence
  Description of Artificial Sequence: Synthetic oligonucleotide
ugaugauagcgugucuagu

SEQ ID NO: 541686 - RNA, 19 nt, Artificial Sequence
  Description of Artificial Sequence: Synthetic oligonucleotide
gugagguaccguuugaggu

SEQ ID NO: 541687 - RNA, 19 nt, Artificial Sequence
  Description of Artificial Sequence: Synthetic oligonucleotide
uaugcacccugcagaguac

SEQ ID NO: 541688 - RNA, 19 nt, Artificial Sequence
  Description of Artificial Sequence: Synthetic oligonucleotide
cucaauucauaauaugcau

SEQ ID NO: 541689 - RNA, 19 nt, Artificial Sequence
  Description of Artificial Sequence: Synthetic oligonucleotide
aauaugcacccugcagagu

SEQ ID NO: 541690 - RNA, 19 nt, Artificial Sequence
  Description of Artificial Sequence: Synthetic oligonucleotide
auucuccguucaccuuugc

SEQ ID NO: 541691 - RNA, 19 nt, Artificial Sequence
  Description of Artificial Sequence: Synthetic oligonucleotide
agggcugucugaaagcaca

SEQ ID NO: 541692 - RNA, 19 nt, Artificial Sequence
  Description of Artificial Sequence: Synthetic oligonucleotide
cugcgagugaacucaccac

SEQ ID NO: 541693 - RNA, 19 nt, Artificial Sequence
  Description of Artificial Sequence: Synthetic oligonucleotide
uccguaagaccgagucagc

SEQ ID NO: 541694 - RNA, 19 nt, Artificial Sequence
  Description of Artificial Sequence: Synthetic oligonucleotide
guuuagacuaugacauguc

SEQ ID NO: 541695 - RNA, 19 nt, Artificial Sequence
  Description of Artificial Sequence: Synthetic oligonucleotide
uagacgucugcgagugaac

SEQ ID NO: 541696 - RNA, 19 nt, Artificial Sequence
  Description of Artificial Sequence: Synthetic oligonucleotide
guaaguuguagaaaugaau

SEQ ID NO: 541697 - RNA, 19 nt, Artificial Sequence
  Description of Artificial Sequence: Synthetic oligonucleotide
acguuauaaaggaucuagu

SEQ ID NO: 541698 - RNA, 19 nt, Artificial Sequence
  Description of Artificial Sequence: Synthetic oligonucleotide
aggauugauguuggcaaga

SEQ ID NO: 541699 - RNA, 19 nt, Artificial Sequence
  Description of Artificial Sequence: Synthetic oligonucleotide
acgaagggguugauguacg

SEQ ID NO: 541700 - RNA, 19 nt, Artificial Sequence
  Description of Artificial Sequence: Synthetic oligonucleotide
gaacaagcggcugagacuu

SEQ ID NO: 541701 - RNA, 19 nt, Artificial Sequence
  Description of Artificial Sequence: Synthetic oligonucleotide
ccagaaggcaaauggcggc

SEQ ID NO: 541702 - RNA, 19 nt, Artificial Sequence
  Description of Artificial Sequence: Synthetic oligonucleotide
ugcauuagucaaccucauu

SEQ ID NO: 541703 - RNA, 19 nt, Artificial Sequence
  Description of Artificial Sequence: Synthetic oligonucleotide
uaagaccgagucagcgggu

SEQ ID NO: 541704 - RNA, 19 nt, Artificial Sequence
  Description of Artificial Sequence: Synthetic oligonucleotide
gacgucugcgagugaacuc

SEQ ID NO: 541705 - RNA, 19 nt, Artificial Sequence
  Description of Artificial Sequence: Synthetic oligonucleotide
agaagcgccaaaacauaga

SEQ ID NO: 541706 - RNA, 19 nt, Artificial Sequence
  Description of Artificial Sequence: Synthetic oligonucleotide
agccugucuauccuguaua

SEQ ID NO: 541707 - RNA, 19 nt, Artificial Sequence
  Description of Artificial Sequence: Synthetic oligonucleotide
guacguccgacacgcucgg

SEQ ID NO: 541708 - RNA, 19 nt, Artificial Sequence
  Description of Artificial Sequence: Synthetic oligonucleotide
gaacuuccggccguuugug

SEQ ID NO: 541709 - RNA, 19 nt, Artificial Sequence
  Description of Artificial Sequence: Synthetic oligonucleotide
gcuugcgaaggguugugag

SEQ ID NO: 541710 - RNA, 19 nt, Artificial Sequence
  Description of Artificial Sequence: Synthetic oligonucleotide
caaguagacugcaggcuga

SEQ ID NO: 541711 - RNA, 19 nt, Artificial Sequence
  Description of Artificial Sequence: Synthetic oligonucleotide
agacgucugcgagugaacu

SEQ ID NO: 541712 - RNA, 19 nt, Artificial Sequence
  Description of Artificial Sequence: Synthetic oligonucleotide
agcaagucaguggaacgga

SEQ ID NO: 541713 - RNA, 19 nt, Artificial Sequence
  Description of Artificial Sequence: Synthetic oligonucleotide
cugucgucuauaucagaca

SEQ ID NO: 541714 - RNA, 19 nt, Artificial Sequence
  Description of Artificial Sequence: Synthetic oligonucleotide
gcauagacgucugcgagug

SEQ ID NO: 541715 - RNA, 19 nt, Artificial Sequence
  Description of Artificial Sequence: Synthetic oligonucleotide
gagcgcggcacacuugaca

SEQ ID NO: 541716 - RNA, 19 nt, Artificial Sequence
  Description of Artificial Sequence: Synthetic oligonucleotide
uccguucaccuuugcuuga

SEQ ID NO: 541717 - RNA, 19 nt, Artificial Sequence
  Description of Artificial Sequence: Synthetic oligonucleotide
guucaccuuugcuugacgu

SEQ ID NO: 541718 - RNA, 19 nt, Artificial Sequence
  Description of Artificial Sequence: Synthetic oligonucleotide
gucagcggguuguacagaa

SEQ ID NO: 541719 - RNA, 19 nt, Artificial Sequence
  Description of Artificial Sequence: Synthetic oligonucleotide
gaagacgacuuuaucuagu

SEQ ID NO: 541720 - RNA, 19 nt, Artificial Sequence
  Description of Artificial Sequence: Synthetic oligonucleotide
uccuauccuuguucgugaa

SEQ ID NO: 541721 - RNA, 19 nt, Artificial Sequence
  Description of Artificial Sequence: Synthetic oligonucleotide
gguacuacccugucauuaa

SEQ ID NO: 541722 - RNA, 19 nt, Artificial Sequence
  Description of Artificial Sequence: Synthetic oligonucleotide
gagagaccuuuaguacacc

SEQ ID NO: 541723 - RNA, 19 nt, Artificial Sequence
  Description of Artificial Sequence: Synthetic oligonucleotide
gguugauguacguccgaca

SEQ ID NO: 541724 - RNA, 19 nt, Artificial Sequence
  Description of Artificial Sequence: Synthetic oligonucleotide
aaguugggaugaaucguuu

SEQ ID NO: 541725 - RNA, 19 nt, Artificial Sequence
  Description of Artificial Sequence: Synthetic oligonucleotide
gggucaagaauacugucgu

SEQ ID NO: 541726 - RNA, 19 nt, Artificial Sequence
  Description of Artificial Sequence: Synthetic oligonucleotide
cuugaggacaccgagcgau

SEQ ID NO: 541727 - RNA, 19 nt, Artificial Sequence
  Description of Artificial Sequence: Synthetic oligonucleotide
aagaccgagucagcggguu

SEQ ID NO: 541728 - RNA, 19 nt, Artificial Sequence
  Description of Artificial Sequence: Synthetic oligonucleotide
aacucaccacuggcaagca

SEQ ID NO: 541729 - RNA, 19 nt, Artificial Sequence
  Description of Artificial Sequence: Synthetic oligonucleotide
cagaguguaugaacucuaa

SEQ ID NO: 541730 - RNA, 19 nt, Artificial Sequence
  Description of Artificial Sequence: Synthetic oligonucleotide
uagugccuuuacagggaaa

SEQ ID NO: 541731 - RNA, 19 nt, Artificial Sequence
  Description of Artificial Sequence: Synthetic oligonucleotide
gaugaacaagcggcugaga

SEQ ID NO: 541732 - RNA, 19 nt, Artificial Sequence
  Description of Artificial Sequence: Synthetic oligonucleotide
ggacaugcaugaccaaaga

SEQ ID NO: 541733 - RNA, 19 nt, Artificial Sequence
  Description of Artificial Sequence: Synthetic oligonucleotide
ugcuugcgaaggguuguga

SEQ ID NO: 541734 - RNA, 19 nt, Artificial Sequence
  Description of Artificial Sequence: Synthetic oligonucleotide
uuccggccguuugugaggu

SEQ ID NO: 541735 - RNA, 19 nt, Artificial Sequence
  Description of Artificial Sequence: Synthetic oligonucleotide
acgaagcauguaguccgag

SEQ ID NO: 541736 - RNA, 19 nt, Artificial Sequence
  Description of Artificial Sequence: Synthetic oligonucleotide
acacgaucauccaggcgug

SEQ ID NO: 541737 - RNA, 19 nt, Artificial Sequence
  Description of Artificial Sequence: Synthetic oligonucleotide
gcggguuguacagaaacuc

SEQ ID NO: 541738 - RNA, 19 nt, Artificial Sequence
  Description of Artificial Sequence: Synthetic oligonucleotide
gguucuccguaagaccgag

SEQ ID NO: 541739 - RNA, 19 nt, Artificial Sequence
  Description of Artificial Sequence: Synthetic oligonucleotide
gucgucuauaucagacaca

SEQ ID NO: 541740 - RNA, 19 nt, Artificial Sequence
  Description of Artificial Sequence: Synthetic oligonucleotide
aggaagcaaugaacuccac

SEQ ID NO: 541741 - RNA, 19 nt, Artificial Sequence
  Description of Artificial Sequence: Synthetic oligonucleotide
aagccacguuauaaaggau

SEQ ID NO: 541742 - RNA, 19 nt, Artificial Sequence
  Description of Artificial Sequence: Synthetic oligonucleotide
ggcaaauggcggcuugcac

SEQ ID NO: 541743 - RNA, 19 nt, Artificial Sequence
  Description of Artificial Sequence: Synthetic oligonucleotide
cugcauugugagacacguc

SEQ ID NO: 541744 - RNA, 19 nt, Artificial Sequence
  Description of Artificial Sequence: Synthetic oligonucleotide
uccaccuacgcuggucaau

SEQ ID NO: 541745 - RNA, 19 nt, Artificial Sequence
  Description of Artificial Sequence: Synthetic oligonucleotide
gacgaagcauguaguccga

SEQ ID NO: 541746 - RNA, 19 nt, Artificial Sequence
  Description of Artificial Sequence: Synthetic oligonucleotide
ggucaagaauacugucguc

SEQ ID NO: 541747 - RNA, 19 nt, Artificial Sequence
  Description of Artificial Sequence: Synthetic oligonucleotide
uuccaccuacgcuggucaa

SEQ ID NO: 541748 - RNA, 19 nt, Artificial Sequence
  Description of Artificial Sequence: Synthetic oligonucleotide
gcgagugaacucaccacug

SEQ ID NO: 541749 - RNA, 19 nt, Artificial Sequence
  Description of Artificial Sequence: Synthetic oligonucleotide
gagacacgucuaaaacaaa

SEQ ID NO: 541750 - RNA, 19 nt, Artificial Sequence
  Description of Artificial Sequence: Synthetic oligonucleotide
gcauugagagaccuuuagu

SEQ ID NO: 541751 - RNA, 19 nt, Artificial Sequence
  Description of Artificial Sequence: Synthetic oligonucleotide
ggaucuaguucucucugau

SEQ ID NO: 541752 - RNA, 19 nt, Artificial Sequence
  Description of Artificial Sequence: Synthetic oligonucleotide
augcauuagucaaccucau

SEQ ID NO: 541753 - RNA, 19 nt, Artificial Sequence
  Description of Artificial Sequence: Synthetic oligonucleotide
ccaccuacgcuggucaaug

SEQ ID NO: 541754 - RNA, 19 nt, Artificial Sequence
  Description of Artificial Sequence: Synthetic oligonucleotide
cgugcgaucuucaaucaaa

SEQ ID NO: 541755 - RNA, 19 nt, Artificial Sequence
  Description of Artificial Sequence: Synthetic oligonucleotide
gaaggguugugagcagagu

SEQ ID NO: 541756 - RNA, 19 nt, Artificial Sequence
  Description of Artificial Sequence: Synthetic oligonucleotide
gcaagucaguggaacggac

SEQ ID NO: 541757 - RNA, 19 nt, Artificial Sequence
  Description of Artificial Sequence: Synthetic oligonucleotide
caugaauccuauccuuguu

SEQ ID NO: 541758 - RNA, 19 nt, Artificial Sequence
  Description of Artificial Sequence: Synthetic oligonucleotide
guaguagaauaugcacccu

SEQ ID NO: 541759 - RNA, 19 nt, Artificial Sequence
  Description of Artificial Sequence: Synthetic oligonucleotide
ggcaccucacaauaguguu

SEQ ID NO: 541760 - RNA, 19 nt, Artificial Sequence
  Description of Artificial Sequence: Synthetic oligonucleotide
cacgcucggcaccucacaa

SEQ ID NO: 541761 - RNA, 19 nt, Artificial Sequence
  Description of Artificial Sequence: Synthetic oligonucleotide
gucucgaagccacguuaua

SEQ ID NO: 541762 - RNA, 19 nt, Artificial Sequence
  Description of Artificial Sequence: Synthetic oligonucleotide
gaccuuuaguacaccuuau

SEQ ID NO: 541763 - RNA, 19 nt, Artificial Sequence
  Description of Artificial Sequence: Synthetic oligonucleotide
ccuagcugugacaaagagu

SEQ ID NO: 541764 - RNA, 19 nt, Artificial Sequence
  Description of Artificial Sequence: Synthetic oligonucleotide
cguuauaaaggaucuaguu

SEQ ID NO: 541765 - RNA, 19 nt, Artificial Sequence
  Description of Artificial Sequence: Synthetic oligonucleotide
cuguauaaguugggaugaa

SEQ ID NO: 541766 - RNA, 19 nt, Artificial Sequence
  Description of Artificial Sequence: Synthetic oligonucleotide
gugcgaucuucaaucaaau

SEQ ID NO: 541767 - RNA, 19 nt, Artificial Sequence
  Description of Artificial Sequence: Synthetic oligonucleotide
caccuacgcuggucaauga

SEQ ID NO: 541768 - RNA, 19 nt, Artificial Sequence
  Description of Artificial Sequence: Synthetic oligonucleotide
ccacugcauugugagacac

SEQ ID NO: 541769 - RNA, 19 nt, Artificial Sequence
  Description of Artificial Sequence: Synthetic oligonucleotide
cagaaggcaaauggcggcu

SEQ ID NO: 541770 - RNA, 19 nt, Artificial Sequence
  Description of Artificial Sequence: Synthetic oligonucleotide
cauccgucagccugucuau

SEQ ID NO: 541771 - RNA, 19 nt, Artificial Sequence
  Description of Artificial Sequence: Synthetic oligonucleotide
cauagacgucugcgaguga

SEQ ID NO: 541772 - RNA, 19 nt, Artificial Sequence
  Description of Artificial Sequence: Synthetic oligonucleotide
caccuuugcuugacguaua

SEQ ID NO: 541773 - RNA, 19 nt, Artificial Sequence
  Description of Artificial Sequence: Synthetic oligonucleotide
ggaggacgaagcauguagu

SEQ ID NO: 541774 - RNA, 19 nt, Artificial Sequence
  Description of Artificial Sequence: Synthetic oligonucleotide
gcucggcaccucacaauag

SEQ ID NO: 541775 - RNA, 19 nt, Artificial Sequence
  Description of Artificial Sequence: Synthetic oligonucleotide
gggaugaaucguuuucauu

SEQ ID NO: 541776 - RNA, 19 nt, Artificial Sequence
  Description of Artificial Sequence: Synthetic oligonucleotide
gggguugauguacguccga

SEQ ID NO: 541777 - RNA, 19 nt, Artificial Sequence
  Description of Artificial Sequence: Synthetic oligonucleotide
gugcauugagagaccuuua

SEQ ID NO: 541778 - RNA, 19 nt, Artificial Sequence
  Description of Artificial Sequence: Synthetic oligonucleotide
ccggccguuugugagguuc

SEQ ID NO: 541779 - RNA, 19 nt, Artificial Sequence
  Description of Artificial Sequence: Synthetic oligonucleotide
gagguacuacccugucauu

SEQ ID NO: 541780 - RNA, 19 nt, Artificial Sequence
  Description of Artificial Sequence: Synthetic oligonucleotide
cagccugucuauccuguau

SEQ ID NO: 541781 - RNA, 19 nt, Artificial Sequence
  Description of Artificial Sequence: Synthetic oligonucleotide
acggagcgcggcacacuug

SEQ ID NO: 541782 - RNA, 19 nt, Artificial Sequence
  Description of Artificial Sequence: Synthetic oligonucleotide
guaccguuugaggucuuuu

SEQ ID NO: 541783 - RNA, 19 nt, Artificial Sequence
  Description of Artificial Sequence: Synthetic oligonucleotide
gauguacguccgacacgcu

SEQ ID NO: 541784 - RNA, 19 nt, Artificial Sequence
  Description of Artificial Sequence: Synthetic oligonucleotide
cacggagcgcggcacacuu

SEQ ID NO: 541785 - RNA, 19 nt, Artificial Sequence
  Description of Artificial Sequence: Synthetic oligonucleotide
ggcggcuugcacauccacu

SEQ ID NO: 541786 - RNA, 19 nt, Artificial Sequence
  Description of Artificial Sequence: Synthetic oligonucleotide
ggacaccgagcgauccaca

SEQ ID NO: 541787 - RNA, 19 nt, Artificial Sequence
  Description of Artificial Sequence: Synthetic oligonucleotide
guucuccguaagaccgagu

SEQ ID NO: 541788 - RNA, 19 nt, Artificial Sequence
  Description of Artificial Sequence: Synthetic oligonucleotide
ggcugucugaaagcacacu

SEQ ID NO: 541789 - RNA, 19 nt, Artificial Sequence
  Description of Artificial Sequence: Synthetic oligonucleotide
ccgagucagcggguuguac

SEQ ID NO: 541790 - RNA, 19 nt, Artificial Sequence
  Description of Artificial Sequence: Synthetic oligonucleotide
cgacuuuaucuaguuuaga

SEQ ID NO: 541791 - RNA, 19 nt, Artificial Sequence
  Description of Artificial Sequence: Synthetic oligonucleotide
ggccguuugugagguucuc

SEQ ID NO: 541792 - RNA, 19 nt, Artificial Sequence
  Description of Artificial Sequence: Synthetic oligonucleotide
uccggccguuugugagguu

SEQ ID NO: 541793 - RNA, 19 nt, Artificial Sequence
  Description of Artificial Sequence: Synthetic oligonucleotide
gugugcauugagagaccuu

SEQ ID NO: 541794 - RNA, 19 nt, Artificial Sequence
  Description of Artificial Sequence: Synthetic oligonucleotide
ccgugcgaucuucaaucaa

SEQ ID NO: 541795 - RNA, 19 nt, Artificial Sequence
  Description of Artificial Sequence: Synthetic oligonucleotide
cggcaccucacaauagugu

SEQ ID NO: 541796 - RNA, 19 nt, Artificial Sequence
  Description of Artificial Sequence: Synthetic oligonucleotide
ccuauccuuguucgugaau

SEQ ID NO: 541797 - RNA, 19 nt, Artificial Sequence
  Description of Artificial Sequence: Synthetic oligonucleotide
cccguggaaagugugcauu

SEQ ID NO: 541798 - RNA, 19 nt, Artificial Sequence
  Description of Artificial Sequence: Synthetic oligonucleotide
gcgcggcacacuugacacu

SEQ ID NO: 541799 - RNA, 19 nt, Artificial Sequence
  Description of Artificial Sequence: Synthetic oligonucleotide
gcacggagcgcggcacacu

SEQ ID NO: 541800 - RNA, 19 nt, Artificial Sequence
  Description of Artificial Sequence: Synthetic oligonucleotide
cgucuauaucagacacaau

SEQ ID NO: 541801 - RNA, 19 nt, Artificial Sequence
  Description of Artificial Sequence: Synthetic oligonucleotide
cggccguuugugagguucu

SEQ ID NO: 541802 - RNA, 19 nt, Artificial Sequence
  Description of Artificial Sequence: Synthetic oligonucleotide
ucuaccucgaauacaagcg

SEQ ID NO: 541803 - RNA, 19 nt, Artificial Sequence
  Description of Artificial Sequence: Synthetic oligonucleotide
ucuaauucacucaaaauuc

SEQ ID NO: 541804 - RNA, 19 nt, Artificial Sequence
  Description of Artificial Sequence: Synthetic oligonucleotide
accaucuacaacuaucccc

SEQ ID NO: 541805 - RNA, 19 nt, Artificial Sequence
  Description of Artificial Sequence: Synthetic oligonucleotide
aauaccagaggauuaucag

SEQ ID NO: 541806 - RNA, 19 nt, Artificial Sequence
  Description of Artificial Sequence: Synthetic oligonucleotide
aaauaaaggucuaauucac

SEQ ID NO: 541807 - RNA, 19 nt, Artificial Sequence
  Description of Artificial Sequence: Synthetic oligonucleotide
ucagcgugcauuaaagagg

SEQ ID NO: 541808 - RNA, 19 nt, Artificial Sequence
  Description of Artificial Sequence: Synthetic oligonucleotide
aaaaugucugcccagggga

SEQ ID NO: 541809 - RNA, 19 nt, Artificial Sequence
  Description of Artificial Sequence: Synthetic oligonucleotide
auaguagccuuccagugcc

SEQ ID NO: 541810 - RNA, 19 nt, Artificial Sequence
  Description of Artificial Sequence: Synthetic oligonucleotide
uucccugccauauuguucg

SEQ ID NO: 541811 - RNA, 19 nt, Artificial Sequence
  Description of Artificial Sequence: Synthetic oligonucleotide
uucagcgugcauuaaagag

SEQ ID NO: 541812 - RNA, 19 nt, Artificial Sequence
  Description of Artificial Sequence: Synthetic oligonucleotide
aauucacucaaaauucuuc

SEQ ID NO: 541813 - RNA, 19 nt, Artificial Sequence
  Description of Artificial Sequence: Synthetic oligonucleotide
uauacaauggaacguucgc

SEQ ID NO: 541814 - RNA, 19 nt, Artificial Sequence
  Description of Artificial Sequence: Synthetic oligonucleotide
acuagacucguauucuagc

SEQ ID NO: 541815 - RNA, 19 nt, Artificial Sequence
  Description of Artificial Sequence: Synthetic oligonucleotide
ugucuagaggugaucaccg

SEQ ID NO: 541816 - RNA, 19 nt, Artificial Sequence
  Description of Artificial Sequence: Synthetic oligonucleotide
uuauugcucaagcacagga

SEQ ID NO: 541817 - RNA, 19 nt, Artificial Sequence
  Description of Artificial Sequence: Synthetic oligonucleotide
gaaaaugucugcccagggg

SEQ ID NO: 541818 - RNA, 19 nt, Artificial Sequence
  Description of Artificial Sequence: Synthetic oligonucleotide
aauacaagcguggcguugg

SEQ ID NO: 541819 - RNA, 19 nt, Artificial Sequence
  Description of Artificial Sequence: Synthetic oligonucleotide
gaggugaucaccgaaauac

SEQ ID NO: 541820 - RNA, 19 nt, Artificial Sequence
  Description of Artificial Sequence: Synthetic oligonucleotide
aaaagcauagcuagguuug

SEQ ID NO: 541821 - RNA, 19 nt, Artificial Sequence
  Description of Artificial Sequence: Synthetic oligonucleotide
auaccagaggauuaucagg

SEQ ID NO: 541822 - RNA, 19 nt, Artificial Sequence
  Description of Artificial Sequence: Synthetic oligonucleotide
uugagguauacaauggaac

SEQ ID NO: 541823 - RNA, 19 nt, Artificial Sequence
  Description of Artificial Sequence: Synthetic oligonucleotide
uauaguagccuuccagugc

SEQ ID NO: 541824 - RNA, 19 nt, Artificial Sequence
  Description of Artificial Sequence: Synthetic oligonucleotide
aaaggucuaauucacucaa

SEQ ID NO: 541825 - RNA, 19 nt, Artificial Sequence
  Description of Artificial Sequence: Synthetic oligonucleotide
ugauauggcagacuucccc

SEQ ID NO: 541826 - RNA, 19 nt, Artificial Sequence
  Description of Artificial Sequence: Synthetic oligonucleotide
ucgauggcagcugagaagg

SEQ ID NO: 541827 - RNA, 19 nt, Artificial Sequence
  Description of Artificial Sequence: Synthetic oligonucleotide
uuugcauuuccucaccgga

SEQ ID NO: 541828 - RNA, 19 nt, Artificial Sequence
  Description of Artificial Sequence: Synthetic oligonucleotide
ucguauucuagccaagaca

SEQ ID NO: 541829 - RNA, 19 nt, Artificial Sequence
  Description of Artificial Sequence: Synthetic oligonucleotide
gaauuuguccuugcgaucc

SEQ ID NO: 541830 - RNA, 19 nt, Artificial Sequence
  Description of Artificial Sequence: Synthetic oligonucleotide
auucacucaaaauucuuca

SEQ ID NO: 541831 - RNA, 19 nt, Artificial Sequence
  Description of Artificial Sequence: Synthetic oligonucleotide
uggacaaagacccgguccc

SEQ ID NO: 541832 - RNA, 19 nt, Artificial Sequence
  Description of Artificial Sequence: Synthetic oligonucleotide
auacaauggaacguucgcc

SEQ ID NO: 541833 - RNA, 19 nt, Artificial Sequence
  Description of Artificial Sequence: Synthetic oligonucleotide
cuggcuucuuaucagaccc

SEQ ID NO: 541834 - RNA, 19 nt, Artificial Sequence
  Description of Artificial Sequence: Synthetic oligonucleotide
acgaggaaaaugucugccc

SEQ ID NO: 541835 - RNA, 19 nt, Artificial Sequence
  Description of Artificial Sequence: Synthetic oligonucleotide
gacgagggaaaccaauagg

SEQ ID NO: 541836 - RNA, 19 nt, Artificial Sequence
  Description of Artificial Sequence: Synthetic oligonucleotide
ugggaucugaaacuuuucc

SEQ ID NO: 541837 - RNA, 19 nt, Artificial Sequence
  Description of Artificial Sequence: Synthetic oligonucleotide
acagugguuuaccccaugc

SEQ ID NO: 541838 - RNA, 19 nt, Artificial Sequence
  Description of Artificial Sequence: Synthetic oligonucleotide
uaaaggucuaauucacuca

SEQ ID NO: 541839 - RNA, 19 nt, Artificial Sequence
  Description of Artificial Sequence: Synthetic oligonucleotide
agcauagcuagguuugagg

SEQ ID NO: 541840 - RNA, 19 nt, Artificial Sequence
  Description of Artificial Sequence: Synthetic oligonucleotide
uucugaugcguuaugugug

SEQ ID NO: 541841 - RNA, 19 nt, Artificial Sequence
  Description of Artificial Sequence: Synthetic oligonucleotide
ucugaugcguuaugugugg

SEQ ID NO: 541842 - RNA, 19 nt, Artificial Sequence
  Description of Artificial Sequence: Synthetic oligonucleotide
gaagauacgaggaaaaugu

SEQ ID NO: 541843 - RNA, 19 nt, Artificial Sequence
  Description of Artificial Sequence: Synthetic oligonucleotide
ucgaauacaagcguggcgu

SEQ ID NO: 541844 - RNA, 19 nt, Artificial Sequence
  Description of Artificial Sequence: Synthetic oligonucleotide
uacaauggaacguucgccu

SEQ ID NO: 541845 - RNA, 19 nt, Artificial Sequence
  Description of Artificial Sequence: Synthetic oligonucleotide
cauaccucaguucagcaug

SEQ ID NO: 541846 - RNA, 19 nt, Artificial Sequence
  Description of Artificial Sequence: Synthetic oligonucleotide
cauauuguucggcucaccc

SEQ ID NO: 541847 - RNA, 19 nt, Artificial Sequence
  Description of Artificial Sequence: Synthetic oligonucleotide
cuagacucguauucuagcc

SEQ ID NO: 541848 - RNA, 19 nt, Artificial Sequence
  Description of Artificial Sequence: Synthetic oligonucleotide
guugcuuggauagagcugc

SEQ ID NO: 541849 - RNA, 19 nt, Artificial Sequence
  Description of Artificial Sequence: Synthetic oligonucleotide
uggcauagccuucaccacg

SEQ ID NO: 541850 - RNA, 19 nt, Artificial Sequence
  Description of Artificial Sequence: Synthetic oligonucleotide
cuagguuugagguauacaa

SEQ ID NO: 541851 - RNA, 19 nt, Artificial Sequence
  Description of Artificial Sequence: Synthetic oligonucleotide
uucgccgacuucaaagcgg

SEQ ID NO: 541852 - RNA, 19 nt, Artificial Sequence
  Description of Artificial Sequence: Synthetic oligonucleotide
aaagacccgguccccaauc

SEQ ID NO: 541853 - RNA, 19 nt, Artificial Sequence
  Description of Artificial Sequence: Synthetic oligonucleotide
uaucacacccacuucuacc

SEQ ID NO: 541854 - RNA, 19 nt, Artificial Sequence
  Description of Artificial Sequence: Synthetic oligonucleotide
aucaccgaaauaccagagg

SEQ ID NO: 541855 - RNA, 19 nt, Artificial Sequence
  Description of Artificial Sequence: Synthetic oligonucleotide
acuaacaggguggaguagg

SEQ ID NO: 541856 - RNA, 19 nt, Artificial Sequence
  Description of Artificial Sequence: Synthetic oligonucleotide
aaacuaacaggguggagua

SEQ ID NO: 541857 - RNA, 19 nt, Artificial Sequence
  Description of Artificial Sequence: Synthetic oligonucleotide
gaugcguuauguguggaag

SEQ ID NO: 541858 - RNA, 19 nt, Artificial Sequence
  Description of Artificial Sequence: Synthetic oligonucleotide
cacuucuaccacuugaaac

SEQ ID NO: 541859 - RNA, 19 nt, Artificial Sequence
  Description of Artificial Sequence: Synthetic oligonucleotide
acagcucuaccucgaauac

SEQ ID NO: 541860 - RNA, 19 nt, Artificial Sequence
  Description of Artificial Sequence: Synthetic oligonucleotide
ugaucaccgaaauaccaga

SEQ ID NO: 541861 - RNA, 19 nt, Artificial Sequence
  Description of Artificial Sequence: Synthetic oligonucleotide
cauguuagcauagagccuc

SEQ ID NO: 541862 - RNA, 19 nt, Artificial Sequence
  Description of Artificial Sequence: Synthetic oligonucleotide
uguacccucucucuugaug

SEQ ID NO: 541863 - RNA, 19 nt, Artificial Sequence
  Description of Artificial Sequence: Synthetic oligonucleotide
gcauauuccggcuugcagg

SEQ ID NO: 541864 - RNA, 19 nt, Artificial Sequence
  Description of Artificial Sequence: Synthetic oligonucleotide
ucauucacggccaggugug

SEQ ID NO: 541865 - RNA, 19 nt, Artificial Sequence
  Description of Artificial Sequence: Synthetic oligonucleotide
cuacuugagacugauuccc

SEQ ID NO: 541866 - RNA, 19 nt, Artificial Sequence
  Description of Artificial Sequence: Synthetic oligonucleotide
ugcguuauguguggaaggg

SEQ ID NO: 541867 - RNA, 19 nt, Artificial Sequence
  Description of Artificial Sequence: Synthetic oligonucleotide
aacuuugugccaucuaaua

SEQ ID NO: 541868 - RNA, 19 nt, Artificial Sequence
  Description of Artificial Sequence: Synthetic oligonucleotide
uauuguucggcucacccuu

SEQ ID NO: 541869 - RNA, 19 nt, Artificial Sequence
  Description of Artificial Sequence: Synthetic oligonucleotide
ucguguguaauggggaagg

SEQ ID NO: 541870 - RNA, 19 nt, Artificial Sequence
  Description of Artificial Sequence: Synthetic oligonucleotide
guaacaaccagagagggaa

SEQ ID NO: 541871 - RNA, 19 nt, Artificial Sequence
  Description of Artificial Sequence: Synthetic oligonucleotide
uguaguggacaaagacccg

SEQ ID NO: 541872 - RNA, 19 nt, Artificial Sequence
  Description of Artificial Sequence: Synthetic oligonucleotide
cagucgaagggcauggacc

SEQ ID NO: 541873 - RNA, 19 nt, Artificial Sequence
  Description of Artificial Sequence: Synthetic oligonucleotide
cagcgugcauuaaagaggc

SEQ ID NO: 541874 - RNA, 19 nt, Artificial Sequence
  Description of Artificial Sequence: Synthetic oligonucleotide
ucagaccccaucccuauca

SEQ ID NO: 541875 - RNA, 19 nt, Artificial Sequence
  Description of Artificial Sequence: Synthetic oligonucleotide
uguugcuuggauagagcug

SEQ ID NO: 541876 - RNA, 19 nt, Artificial Sequence
  Description of Artificial Sequence: Synthetic oligonucleotide
ugcauuaaagaggcugagg

SEQ ID NO: 541877 - RNA, 19 nt, Artificial Sequence
  Description of Artificial Sequence: Synthetic oligonucleotide
aggagaauuuguccuugcg

SEQ ID NO: 541878 - RNA, 19 nt, Artificial Sequence
  Description of Artificial Sequence: Synthetic oligonucleotide
aaaccaauaggagcggaga

SEQ ID NO: 541879 - RNA, 19 nt, Artificial Sequence
  Description of Artificial Sequence: Synthetic oligonucleotide
ucuagccaagacacaaucu

SEQ ID NO: 541880 - RNA, 19 nt, Artificial Sequence
  Description of Artificial Sequence: Synthetic oligonucleotide
uauucugcggaugauccca

SEQ ID NO: 541881 - RNA, 19 nt, Artificial Sequence
  Description of Artificial Sequence: Synthetic oligonucleotide
uucggcucacccuucaucu

SEQ ID NO: 541882 - RNA, 19 nt, Artificial Sequence
  Description of Artificial Sequence: Synthetic oligonucleotide
uagacucguauucuagcca

SEQ ID NO: 541883 - RNA, 19 nt, Artificial Sequence
  Description of Artificial Sequence: Synthetic oligonucleotide
uugagacugauucccugcc

SEQ ID NO: 541884 - RNA, 19 nt, Artificial Sequence
  Description of Artificial Sequence: Synthetic oligonucleotide
aacuagacucguauucuag

SEQ ID NO: 541885 - RNA, 19 nt, Artificial Sequence
  Description of Artificial Sequence: Synthetic oligonucleotide
aaaugucugcccaggggac

SEQ ID NO: 541886 - RNA, 19 nt, Artificial Sequence
  Description of Artificial Sequence: Synthetic oligonucleotide
guaguggacaaagacccgg

SEQ ID NO: 541887 - RNA, 19 nt, Artificial Sequence
  Description of Artificial Sequence: Synthetic oligonucleotide
aagauacgaggaaaauguc

SEQ ID NO: 541888 - RNA, 19 nt, Artificial Sequence
  Description of Artificial Sequence: Synthetic oligonucleotide
agucgaagggcauggaccu

SEQ ID NO: 541889 - RNA, 19 nt, Artificial Sequence
  Description of Artificial Sequence: Synthetic oligonucleotide
auggaccuuuugcauuucc

SEQ ID NO: 541890 - RNA, 19 nt, Artificial Sequence
  Description of Artificial Sequence: Synthetic oligonucleotide
uacgaggaaaaugucugcc

SEQ ID NO: 541891 - RNA, 19 nt, Artificial Sequence
  Description of Artificial Sequence: Synthetic oligonucleotide
gagcggagauacuggaagg

SEQ ID NO: 541892 - RNA, 19 nt, Artificial Sequence
  Description of Artificial Sequence: Synthetic oligonucleotide
uaccucgaauacaagcgug

SEQ ID NO: 541893 - RNA, 19 nt, Artificial Sequence
  Description of Artificial Sequence: Synthetic oligonucleotide
gaaaccaauaggagcggag

SEQ ID NO: 541894 - RNA, 19 nt, Artificial Sequence
  Description of Artificial Sequence: Synthetic oligonucleotide
cucgaauacaagcguggcg

SEQ ID NO: 541895 - RNA, 19 nt, Artificial Sequence
  Description of Artificial Sequence: Synthetic oligonucleotide
uguaauggggaaggaaaga

SEQ ID NO: 541896 - RNA, 19 nt, Artificial Sequence
  Description of Artificial Sequence: Synthetic oligonucleotide
ugaaguauacagugccccu

SEQ ID NO: 541897 - RNA, 19 nt, Artificial Sequence
  Description of Artificial Sequence: Synthetic oligonucleotide
uuacagcuuucgauggcag

SEQ ID NO: 541898 - RNA, 19 nt, Artificial Sequence
  Description of Artificial Sequence: Synthetic oligonucleotide
cugauucccugccauauug

SEQ ID NO: 541899 - RNA, 19 nt, Artificial Sequence
  Description of Artificial Sequence: Synthetic oligonucleotide
aaacuagacucguauucua

SEQ ID NO: 541900 - RNA, 19 nt, Artificial Sequence
  Description of Artificial Sequence: Synthetic oligonucleotide
agcaaagcuugcuuguacu

SEQ ID NO: 541901 - RNA, 19 nt, Artificial Sequence
  Description of Artificial Sequence: Synthetic oligonucleotide
auauuguucggcucacccu

SEQ ID NO: 541902 - RNA, 19 nt, Artificial Sequence
  Description of Artificial Sequence: Synthetic oligonucleotide
cguauucuagccaagacac

SEQ ID NO: 541903 - RNA, 19 nt, Artificial Sequence
  Description of Artificial Sequence: Synthetic oligonucleotide
gacaccaucuacaacuauc

SEQ ID NO: 541904 - RNA, 19 nt, Artificial Sequence
  Description of Artificial Sequence: Synthetic oligonucleotide
gagaauuuguccuugcgau

SEQ ID NO: 541905 - RNA, 19 nt, Artificial Sequence
  Description of Artificial Sequence: Synthetic oligonucleotide
uucaccacgaguccguauu

SEQ ID NO: 541906 - RNA, 19 nt, Artificial Sequence
  Description of Artificial Sequence: Synthetic oligonucleotide
acgagggaaaccaauagga

SEQ ID NO: 541907 - RNA, 19 nt, Artificial Sequence
  Description of Artificial Sequence: Synthetic oligonucleotide
gauuaucagggguaccauc

SEQ ID NO: 541908 - RNA, 19 nt, Artificial Sequence
  Description of Artificial Sequence: Synthetic oligonucleotide
uucauaccucaguucagca

SEQ ID NO: 541909 - RNA, 19 nt, Artificial Sequence
  Description of Artificial Sequence: Synthetic oligonucleotide
uagguuugagguauacaau

SEQ ID NO: 541910 - RNA, 19 nt, Artificial Sequence
  Description of Artificial Sequence: Synthetic oligonucleotide
aggauuaucagggguacca

SEQ ID NO: 541911 - RNA, 19 nt, Artificial Sequence
  Description of Artificial Sequence: Synthetic oligonucleotide
ugugccuguacccucucuc

SEQ ID NO: 541912 - RNA, 19 nt, Artificial Sequence
  Description of Artificial Sequence: Synthetic oligonucleotide
uuaucagaccccaucccua

SEQ ID NO: 541913 - RNA, 19 nt, Artificial Sequence
  Description of Artificial Sequence: Synthetic oligonucleotide
uggagcuaacagagggagg

SEQ ID NO: 541914 - RNA, 19 nt, Artificial Sequence
  Description of Artificial Sequence: Synthetic oligonucleotide
cugucuagaggugaucacc

SEQ ID NO: 541915 - RNA, 19 nt, Artificial Sequence
  Description of Artificial Sequence: Synthetic oligonucleotide
aggacaaccuggacgaggg

SEQ ID NO: 541916 - RNA, 19 nt, Artificial Sequence
  Description of Artificial Sequence: Synthetic oligonucleotide
guacccucucucuugauga

SEQ ID NO: 541917 - RNA, 19 nt, Artificial Sequence
  Description of Artificial Sequence: Synthetic oligonucleotide
gaucaccgaaauaccagag

SEQ ID NO: 541918 - RNA, 19 nt, Artificial Sequence
  Description of Artificial Sequence: Synthetic oligonucleotide
gugaucaccgaaauaccag

SEQ ID NO: 541919 - RNA, 19 nt, Artificial Sequence
  Description of Artificial Sequence: Synthetic oligonucleotide
uguccuugcgauccagacu

SEQ ID NO: 541920 - RNA, 19 nt, Artificial Sequence
  Description of Artificial Sequence: Synthetic oligonucleotide
aaccuggacgagggaaacc

SEQ ID NO: 541921 - RNA, 19 nt, Artificial Sequence
  Description of Artificial Sequence: Synthetic oligonucleotide
agacucguauucuagccaa

SEQ ID NO: 541922 - RNA, 19 nt, Artificial Sequence
  Description of Artificial Sequence: Synthetic oligonucleotide
cugaaccauaggcauauuc

SEQ ID NO: 541923 - RNA, 19 nt, Artificial Sequence
  Description of Artificial Sequence: Synthetic oligonucleotide
aauggccgacuccagccca

SEQ ID NO: 541924 - RNA, 19 nt, Artificial Sequence
  Description of Artificial Sequence: Synthetic oligonucleotide
ggaagauacgaggaaaaug

SEQ ID NO: 541925 - RNA, 19 nt, Artificial Sequence
  Description of Artificial Sequence: Synthetic oligonucleotide
gaggguugacaccaucuac

SEQ ID NO: 541926 - RNA, 19 nt, Artificial Sequence
  Description of Artificial Sequence: Synthetic oligonucleotide
acagcuuucgauggcagcu

SEQ ID NO: 541927 - RNA, 19 nt, Artificial Sequence
  Description of Artificial Sequence: Synthetic oligonucleotide
ugcacacucguguguaaug

SEQ ID NO: 541928 - RNA, 19 nt, Artificial Sequence
  Description of Artificial Sequence: Synthetic oligonucleotide
aauuuguccuugcgaucca

SEQ ID NO: 541929 - RNA, 19 nt, Artificial Sequence
  Description of Artificial Sequence: Synthetic oligonucleotide
aggugaucaccgaaauacc

SEQ ID NO: 541930 - RNA, 19 nt, Artificial Sequence
  Description of Artificial Sequence: Synthetic oligonucleotide
agggguaccaucucaggaa

SEQ ID NO: 541931 - RNA, 19 nt, Artificial Sequence
  Description of Artificial Sequence: Synthetic oligonucleotide
uagaggugaucaccgaaau

SEQ ID NO: 541932 - RNA, 19 nt, Artificial Sequence
  Description of Artificial Sequence: Synthetic oligonucleotide
acacucguguguaaugggg

SEQ ID NO: 541933 - RNA, 19 nt, Artificial Sequence
  Description of Artificial Sequence: Synthetic oligonucleotide
cuucgccgacuucaaagcg

SEQ ID NO: 541934 - RNA, 19 nt, Artificial Sequence
  Description of Artificial Sequence: Synthetic oligonucleotide
cagauugaggugugaggcc

SEQ ID NO: 541935 - RNA, 19 nt, Artificial Sequence
  Description of Artificial Sequence: Synthetic oligonucleotide
ucauaccucaguucagcau

SEQ ID NO: 541936 - RNA, 19 nt, Artificial Sequence
  Description of Artificial Sequence: Synthetic oligonucleotide
agauugaggugugaggcca

SEQ ID NO: 541937 - RNA, 19 nt, Artificial Sequence
  Description of Artificial Sequence: Synthetic oligonucleotide
cucguauucuagccaagac

SEQ ID NO: 541938 - RNA, 19 nt, Artificial Sequence
  Description of Artificial Sequence: Synthetic oligonucleotide
uggacgagggaaaccaaua

SEQ ID NO: 541939 - RNA, 19 nt, Artificial Sequence
  Description of Artificial Sequence: Synthetic oligonucleotide
aaacuuugugccaucuaau

SEQ ID NO: 541940 - RNA, 19 nt, Artificial Sequence
  Description of Artificial Sequence: Synthetic oligonucleotide
cacacucguguguaauggg

SEQ ID NO: 541941 - RNA, 19 nt, Artificial Sequence
  Description of Artificial Sequence: Synthetic oligonucleotide
uggcacaccgccagcuggg

SEQ ID NO: 541942 - RNA, 19 nt, Artificial Sequence
  Description of Artificial Sequence: Synthetic oligonucleotide
uugagcacgcccucguccu

SEQ ID NO: 541943 - RNA, 19 nt, Artificial Sequence
  Description of Artificial Sequence: Synthetic oligonucleotide
auucccugccauauuguuc

SEQ ID NO: 541944 - RNA, 19 nt, Artificial Sequence
  Description of Artificial Sequence: Synthetic oligonucleotide
accccaucccuaucacacc

SEQ ID NO: 541945 - RNA, 19 nt, Artificial Sequence
  Description of Artificial Sequence: Synthetic oligonucleotide
ugcgauccagacuggaguc

SEQ ID NO: 541946 - RNA, 19 nt, Artificial Sequence
  Description of Artificial Sequence: Synthetic oligonucleotide
accucgaauacaagcgugg

SEQ ID NO: 541947 - RNA, 19 nt, Artificial Sequence
  Description of Artificial Sequence: Synthetic oligonucleotide
guuauguguggaagggugc

SEQ ID NO: 541948 - RNA, 19 nt, Artificial Sequence
  Description of Artificial Sequence: Synthetic oligonucleotide
uucuaccacuugaaacaug

SEQ ID NO: 541949 - RNA, 19 nt, Artificial Sequence
  Description of Artificial Sequence: Synthetic oligonucleotide
aauagccagccaguguagu

SEQ ID NO: 541950 - RNA, 19 nt, Artificial Sequence
  Description of Artificial Sequence: Synthetic oligonucleotide
ggaaggugcugucuagagg

SEQ ID NO: 541951 - RNA, 19 nt, Artificial Sequence
  Description of Artificial Sequence: Synthetic oligonucleotide
uucgcugaauggccgacuc

SEQ ID NO: 541952 - RNA, 19 nt, Artificial Sequence
  Description of Artificial Sequence: Synthetic oligonucleotide
aaagcauagcuagguuuga

SEQ ID NO: 541953 - RNA, 19 nt, Artificial Sequence
  Description of Artificial Sequence: Synthetic oligonucleotide
uagccuucaccacgagucc

SEQ ID NO: 541954 - RNA, 19 nt, Artificial Sequence
  Description of Artificial Sequence: Synthetic oligonucleotide
ccagauugaggugugaggc

SEQ ID NO: 541955 - RNA, 19 nt, Artificial Sequence
  Description of Artificial Sequence: Synthetic oligonucleotide
gaauacaagcguggcguug

SEQ ID NO: 541956 - RNA, 19 nt, Artificial Sequence
  Description of Artificial Sequence: Synthetic oligonucleotide
cagugguuuaccccaugcc

SEQ ID NO: 541957 - RNA, 19 nt, Artificial Sequence
  Description of Artificial Sequence: Synthetic oligonucleotide
aggguugacaccaucuaca

SEQ ID NO: 541958 - RNA, 19 nt, Artificial Sequence
  Description of Artificial Sequence: Synthetic oligonucleotide
accgaaauaccagaggauu

SEQ ID NO: 541959 - RNA, 19 nt, Artificial Sequence
  Description of Artificial Sequence: Synthetic oligonucleotide
ugcucaagcacaggacuug

SEQ ID NO: 541960 - RNA, 19 nt, Artificial Sequence
  Description of Artificial Sequence: Synthetic oligonucleotide
uuuuggaagucagcucgug

SEQ ID NO: 541961 - RNA, 19 nt, Artificial Sequence
  Description of Artificial Sequence: Synthetic oligonucleotide
agcacaggacuugaggugu

SEQ ID NO: 541962 - RNA, 19 nt, Artificial Sequence
  Description of Artificial Sequence: Synthetic oligonucleotide
cuaucacacccacuucuac

SEQ ID NO: 541963 - RNA, 19 nt, Artificial Sequence
  Description of Artificial Sequence: Synthetic oligonucleotide
ggacgagggaaaccaauag

SEQ ID NO: 541964 - RNA, 19 nt, Artificial Sequence
  Description of Artificial Sequence: Synthetic oligonucleotide
guauucugcggaugauccc

SEQ ID NO: 541965 - RNA, 19 nt, Artificial Sequence
  Description of Artificial Sequence: Synthetic oligonucleotide
agcucuaccucgaauacaa

SEQ ID NO: 541966 - RNA, 19 nt, Artificial Sequence
  Description of Artificial Sequence: Synthetic oligonucleotide
uuaccccaugccccuagca

SEQ ID NO: 541967 - RNA, 19 nt, Artificial Sequence
  Description of Artificial Sequence: Synthetic oligonucleotide
ugaugcguuauguguggaa

SEQ ID NO: 541968 - RNA, 19 nt, Artificial Sequence
  Description of Artificial Sequence: Synthetic oligonucleotide
uuuaccccaugccccuagc

SEQ ID NO: 541969 - RNA, 19 nt, Artificial Sequence
  Description of Artificial Sequence: Synthetic oligonucleotide
aaugucugcccaggggaca

SEQ ID NO: 541970 - RNA, 19 nt, Artificial Sequence
  Description of Artificial Sequence: Synthetic oligonucleotide
cacgccuucgagaggcagg

SEQ ID NO: 541971 - RNA, 19 nt, Artificial Sequence
  Description of Artificial Sequence: Synthetic oligonucleotide
cucgugcaaggucaaaguc

SEQ ID NO: 541972 - RNA, 19 nt, Artificial Sequence
  Description of Artificial Sequence: Synthetic oligonucleotide
ugguuuaccccaugccccu

SEQ ID NO: 541973 - RNA, 19 nt, Artificial Sequence
  Description of Artificial Sequence: Synthetic oligonucleotide
gccagauugaggugugagg

SEQ ID NO: 541974 - RNA, 19 nt, Artificial Sequence
  Description of Artificial Sequence: Synthetic oligonucleotide
agguauacaauggaacguu

SEQ ID NO: 541975 - RNA, 19 nt, Artificial Sequence
  Description of Artificial Sequence: Synthetic oligonucleotide
agggccuuguuacagcuuu

SEQ ID NO: 541976 - RNA, 19 nt, Artificial Sequence
  Description of Artificial Sequence: Synthetic oligonucleotide
ucgcucuggccgccgaccg

SEQ ID NO: 541977 - RNA, 19 nt, Artificial Sequence
  Description of Artificial Sequence: Synthetic oligonucleotide
ccaauaggagcggagauac

SEQ ID NO: 541978 - RNA, 19 nt, Artificial Sequence
  Description of Artificial Sequence: Synthetic oligonucleotide
guuuaccccaugccccuag

SEQ ID NO: 541979 - RNA, 19 nt, Artificial Sequence
  Description of Artificial Sequence: Synthetic oligonucleotide
aucagggguaccaucucag

SEQ ID NO: 541980 - RNA, 19 nt, Artificial Sequence
  Description of Artificial Sequence: Synthetic oligonucleotide
cagguuuggguaacaacca

SEQ ID NO: 541981 - RNA, 19 nt, Artificial Sequence
  Description of Artificial Sequence: Synthetic oligonucleotide
auacaagcguggcguuggg

SEQ ID NO: 541982 - RNA, 19 nt, Artificial Sequence
  Description of Artificial Sequence: Synthetic oligonucleotide
acucguguguaauggggaa

SEQ ID NO: 541983 - RNA, 19 nt, Artificial Sequence
  Description of Artificial Sequence: Synthetic oligonucleotide
guccacgccuucgagaggc

SEQ ID NO: 541984 - RNA, 19 nt, Artificial Sequence
  Description of Artificial Sequence: Synthetic oligonucleotide
uacaagcguggcguugggg

SEQ ID NO: 541985 - RNA, 19 nt, Artificial Sequence
  Description of Artificial Sequence: Synthetic oligonucleotide
cuuucaugguugccacagc

SEQ ID NO: 541986 - RNA, 19 nt, Artificial Sequence
  Description of Artificial Sequence: Synthetic oligonucleotide
acacauggccagauugagg

SEQ ID NO: 541987 - RNA, 19 nt, Artificial Sequence
  Description of Artificial Sequence: Synthetic oligonucleotide
cucaagcacaggacuugag

SEQ ID NO: 541988 - RNA, 19 nt, Artificial Sequence
  Description of Artificial Sequence: Synthetic oligonucleotide
acgccuucgagaggcaggg

SEQ ID NO: 541989 - RNA, 19 nt, Artificial Sequence
  Description of Artificial Sequence: Synthetic oligonucleotide
caccaucuacaacuauccc

SEQ ID NO: 541990 - RNA, 19 nt, Artificial Sequence
  Description of Artificial Sequence: Synthetic oligonucleotide
gacaaccuggacgagggaa

SEQ ID NO: 541991 - RNA, 19 nt, Artificial Sequence
  Description of Artificial Sequence: Synthetic oligonucleotide
acucguauucuagccaaga

SEQ ID NO: 541992 - RNA, 19 nt, Artificial Sequence
  Description of Artificial Sequence: Synthetic oligonucleotide
agaucuaggcuuuccccuu

SEQ ID NO: 541993 - RNA, 19 nt, Artificial Sequence
  Description of Artificial Sequence: Synthetic oligonucleotide
cauggagcuaacagaggga

SEQ ID NO: 541994 - RNA, 19 nt, Artificial Sequence
  Description of Artificial Sequence: Synthetic oligonucleotide
ggcagaucuaggcuuuccc

SEQ ID NO: 541995 - RNA, 19 nt, Artificial Sequence
  Description of Artificial Sequence: Synthetic oligonucleotide
ucgcugaauggccgacucc

SEQ ID NO: 541996 - RNA, 19 nt, Artificial Sequence
  Description of Artificial Sequence: Synthetic oligonucleotide
ccgacuccagcccacaggg

SEQ ID NO: 541997 - RNA, 19 nt, Artificial Sequence
  Description of Artificial Sequence: Synthetic oligonucleotide
gauugaggugugaggccag

SEQ ID NO: 541998 - RNA, 19 nt, Artificial Sequence
  Description of Artificial Sequence: Synthetic oligonucleotide
gcacacucguguguaaugg

SEQ ID NO: 541999 - RNA, 19 nt, Artificial Sequence
  Description of Artificial Sequence: Synthetic oligonucleotide
cguuauguguggaagggug

SEQ ID NO: 542000 - RNA, 19 nt, Artificial Sequence
  Description of Artificial Sequence: Synthetic oligonucleotide
ggaugaucccaccaucuuc

SEQ ID NO: 542001 - RNA, 19 nt, Artificial Sequence
  Description of Artificial Sequence: Synthetic oligonucleotide
gcucccgcuggucaaagag

SEQ ID NO: 542002 - RNA, 19 nt, Artificial Sequence
  Description of Artificial Sequence: Synthetic oligonucleotide
agcaaugucccaagccuug

SEQ ID NO: 542003 - RNA, 19 nt, Artificial Sequence
  Description of Artificial Sequence: Synthetic oligonucleotide
gauggacuucauaccucag

SEQ ID NO: 542004 - RNA, 19 nt, Artificial Sequence
  Description of Artificial Sequence: Synthetic oligonucleotide
acaauggaacguucgccuu

SEQ ID NO: 542005 - RNA, 19 nt, Artificial Sequence
  Description of Artificial Sequence: Synthetic oligonucleotide
ugcuuggauagagcugcag

SEQ ID NO: 542006 - RNA, 19 nt, Artificial Sequence
  Description of Artificial Sequence: Synthetic oligonucleotide
gcgugcauuaaagaggcug

SEQ ID NO: 542007 - RNA, 19 nt, Artificial Sequence
  Description of Artificial Sequence: Synthetic oligonucleotide
agaguucaucucccaagau

SEQ ID NO: 542008 - RNA, 19 nt, Artificial Sequence
  Description of Artificial Sequence: Synthetic oligonucleotide
gagguauacaauggaacgu

SEQ ID NO: 542009 - RNA, 19 nt, Artificial Sequence
  Description of Artificial Sequence: Synthetic oligonucleotide
guccguauucugcggauga

SEQ ID NO: 542010 - RNA, 19 nt, Artificial Sequence
  Description of Artificial Sequence: Synthetic oligonucleotide
cucguguguaauggggaag

SEQ ID NO: 542011 - RNA, 19 nt, Artificial Sequence
  Description of Artificial Sequence: Synthetic oligonucleotide
cacucguguguaaugggga

SEQ ID NO: 542012 - RNA, 19 nt, Artificial Sequence
  Description of Artificial Sequence: Synthetic oligonucleotide
agcuuucgauggcagcuga

SEQ ID NO: 542013 - RNA, 19 nt, Artificial Sequence
  Description of Artificial Sequence: Synthetic oligonucleotide
ccuucgagaggcaggggcg

SEQ ID NO: 542014 - RNA, 19 nt, Artificial Sequence
  Description of Artificial Sequence: Synthetic oligonucleotide
ucggccgccuucaucuccu

SEQ ID NO: 542015 - RNA, 19 nt, Artificial Sequence
  Description of Artificial Sequence: Synthetic oligonucleotide
aaggcggcgcugcccacca

SEQ ID NO: 542016 - RNA, 19 nt, Artificial Sequence
  Description of Artificial Sequence: Synthetic oligonucleotide
agcggagauacuggaaggu

SEQ ID NO: 542017 - RNA, 19 nt, Artificial Sequence
  Description of Artificial Sequence: Synthetic oligonucleotide
cauauuccggcuugcaggu

SEQ ID NO: 542018 - RNA, 19 nt, Artificial Sequence
  Description of Artificial Sequence: Synthetic oligonucleotide
gucuggcauagccuucacc

SEQ ID NO: 542019 - RNA, 19 nt, Artificial Sequence
  Description of Artificial Sequence: Synthetic oligonucleotide
gaccuugagcacgcccucg

SEQ ID NO: 542020 - RNA, 19 nt, Artificial Sequence
  Description of Artificial Sequence: Synthetic oligonucleotide
guaccaucucaggaaagca

SEQ ID NO: 542021 - RNA, 19 nt, Artificial Sequence
  Description of Artificial Sequence: Synthetic oligonucleotide
gccuucgagaggcaggggc

SEQ ID NO: 542022 - RNA, 19 nt, Artificial Sequence
  Description of Artificial Sequence: Synthetic oligonucleotide
ggugaucaccgaaauacca

SEQ ID NO: 542023 - RNA, 19 nt, Artificial Sequence
  Description of Artificial Sequence: Synthetic oligonucleotide
caagcugccugcggguccg

SEQ ID NO: 542024 - RNA, 19 nt, Artificial Sequence
  Description of Artificial Sequence: Synthetic oligonucleotide
auggccgcugggcgcaccg

SEQ ID NO: 542025 - RNA, 19 nt, Artificial Sequence
  Description of Artificial Sequence: Synthetic oligonucleotide
gacucguauucuagccaag

SEQ ID NO: 542026 - RNA, 19 nt, Artificial Sequence
  Description of Artificial Sequence: Synthetic oligonucleotide
uucugcggaugaucccacc

SEQ ID NO: 542027 - RNA, 19 nt, Artificial Sequence
  Description of Artificial Sequence: Synthetic oligonucleotide
ggccuuguuacagcuuucg

SEQ ID NO: 542028 - RNA, 19 nt, Artificial Sequence
  Description of Artificial Sequence: Synthetic oligonucleotide
uaggcauauuccggcuugc

SEQ ID NO: 542029 - RNA, 19 nt, Artificial Sequence
  Description of Artificial Sequence: Synthetic oligonucleotide
gagacugauucccugccau

SEQ ID NO: 542030 - RNA, 19 nt, Artificial Sequence
  Description of Artificial Sequence: Synthetic oligonucleotide
gaagggcauggaccuuuug

SEQ ID NO: 542031 - RNA, 19 nt, Artificial Sequence
  Description of Artificial Sequence: Synthetic oligonucleotide
gcauagcuagguuugaggu

SEQ ID NO: 542032 - RNA, 19 nt, Artificial Sequence
  Description of Artificial Sequence: Synthetic oligonucleotide
agggugcacacucgugugu

SEQ ID NO: 542033 - RNA, 19 nt, Artificial Sequence
  Description of Artificial Sequence: Synthetic oligonucleotide
cuucgagaggcaggggcgc

SEQ ID NO: 542034 - RNA, 19 nt, Artificial Sequence
  Description of Artificial Sequence: Synthetic oligonucleotide
auuguucggcucacccuuc

SEQ ID NO: 542035 - RNA, 19 nt, Artificial Sequence
  Description of Artificial Sequence: Synthetic oligonucleotide
cugggcgcaccguuggcug

SEQ ID NO: 542036 - RNA, 19 nt, Artificial Sequence
  Description of Artificial Sequence: Synthetic oligonucleotide
ggcggugcggcagaaggcg

SEQ ID NO: 542037 - RNA, 19 nt, Artificial Sequence
  Description of Artificial Sequence: Synthetic oligonucleotide
caucuaauagccagccagu

SEQ ID NO: 542038 - RNA, 19 nt, Artificial Sequence
  Description of Artificial Sequence: Synthetic oligonucleotide
acugauucccugccauauu

SEQ ID NO: 542039 - RNA, 19 nt, Artificial Sequence
  Description of Artificial Sequence: Synthetic oligonucleotide
caggcuaggcuuccgucuc

SEQ ID NO: 542040 - RNA, 19 nt, Artificial Sequence
  Description of Artificial Sequence: Synthetic oligonucleotide
aaggucuaauucacucaaa

SEQ ID NO: 542041 - RNA, 19 nt, Artificial Sequence
  Description of Artificial Sequence: Synthetic oligonucleotide
ucccgggcaagcugccugc

SEQ ID NO: 542042 - RNA, 19 nt, Artificial Sequence
  Description of Artificial Sequence: Synthetic oligonucleotide
aguccguauucugcggaug

SEQ ID NO: 542043 - RNA, 19 nt, Artificial Sequence
  Description of Artificial Sequence: Synthetic oligonucleotide
ugagcacgcccucguccug

SEQ ID NO: 542044 - RNA, 19 nt, Artificial Sequence
  Description of Artificial Sequence: Synthetic oligonucleotide
gccgacuucaaagcggagc

SEQ ID NO: 542045 - RNA, 19 nt, Artificial Sequence
  Description of Artificial Sequence: Synthetic oligonucleotide
caucauugggucuggcaua

SEQ ID NO: 542046 - RNA, 19 nt, Artificial Sequence
  Description of Artificial Sequence: Synthetic oligonucleotide
uguucggcucacccuucau

SEQ ID NO: 542047 - RNA, 19 nt, Artificial Sequence
  Description of Artificial Sequence: Synthetic oligonucleotide
auaccucaguucagcaugu

SEQ ID NO: 542048 - RNA, 19 nt, Artificial Sequence
  Description of Artificial Sequence: Synthetic oligonucleotide
uaguagccuuccagugcca

SEQ ID NO: 542049 - RNA, 19 nt, Artificial Sequence
  Description of Artificial Sequence: Synthetic oligonucleotide
ucccugccauauuguucgg

SEQ ID NO: 542050 - RNA, 19 nt, Artificial Sequence
  Description of Artificial Sequence: Synthetic oligonucleotide
agacugauucccugccaua

SEQ ID NO: 542051 - RNA, 19 nt, Artificial Sequence
  Description of Artificial Sequence: Synthetic oligonucleotide
cucccgggcaagcugccug

SEQ ID NO: 542052 - RNA, 19 nt, Artificial Sequence
  Description of Artificial Sequence: Synthetic oligonucleotide
gguauacaauggaacguuc

SEQ ID NO: 542053 - RNA, 19 nt, Artificial Sequence
  Description of Artificial Sequence: Synthetic oligonucleotide
cauucgcugaauggccgac

SEQ ID NO: 542054 - RNA, 19 nt, Artificial Sequence
  Description of Artificial Sequence: Synthetic oligonucleotide
gugauauggcagacuuccc

SEQ ID NO: 542055 - RNA, 19 nt, Artificial Sequence
  Description of Artificial Sequence: Synthetic oligonucleotide
gguugacaccaucuacaac

SEQ ID NO: 542056 - RNA, 19 nt, Artificial Sequence
  Description of Artificial Sequence: Synthetic oligonucleotide
gggaaaccaauaggagcgg

SEQ ID NO: 542057 - RNA, 19 nt, Artificial Sequence
  Description of Artificial Sequence: Synthetic oligonucleotide
gucuagaggugaucaccga

SEQ ID NO: 542058 - RNA, 19 nt, Artificial Sequence
  Description of Artificial Sequence: Synthetic oligonucleotide
gccuguacccucucucuug

SEQ ID NO: 542059 - RNA, 19 nt, Artificial Sequence
  Description of Artificial Sequence: Synthetic oligonucleotide
ggcgcugcccaccacgaac

SEQ ID NO: 542060 - RNA, 19 nt, Artificial Sequence
  Description of Artificial Sequence: Synthetic oligonucleotide
ggucuaauucacucaaaau

SEQ ID NO: 542061 - RNA, 19 nt, Artificial Sequence
  Description of Artificial Sequence: Synthetic oligonucleotide
gacugauucccugccauau

SEQ ID NO: 542062 - RNA, 19 nt, Artificial Sequence
  Description of Artificial Sequence: Synthetic oligonucleotide
guauucuagccaagacaca

SEQ ID NO: 542063 - RNA, 19 nt, Artificial Sequence
  Description of Artificial Sequence: Synthetic oligonucleotide
cuaccucgaauacaagcgu

SEQ ID NO: 542064 - RNA, 19 nt, Artificial Sequence
  Description of Artificial Sequence: Synthetic oligonucleotide
ugcggguccgcugcuggca

SEQ ID NO: 542065 - RNA, 19 nt, Artificial Sequence
  Description of Artificial Sequence: Synthetic oligonucleotide
gaccggggcgagcggugcg

SEQ ID NO: 542066 - RNA, 19 nt, Artificial Sequence
  Description of Artificial Sequence: Synthetic oligonucleotide
aggcaggcuaggcuuccgu

SEQ ID NO: 542067 - RNA, 19 nt, Artificial Sequence
  Description of Artificial Sequence: Synthetic oligonucleotide
auucgcugaauggccgacu

SEQ ID NO: 542068 - RNA, 19 nt, Artificial Sequence
  Description of Artificial Sequence: Synthetic oligonucleotide
caggugauauggcagacuu

SEQ ID NO: 542069 - RNA, 19 nt, Artificial Sequence
  Description of Artificial Sequence: Synthetic oligonucleotide
ggccagucgaagggcaugg

SEQ ID NO: 542070 - RNA, 19 nt, Artificial Sequence
  Description of Artificial Sequence: Synthetic oligonucleotide
gcugucuagaggugaucac

SEQ ID NO: 542071 - RNA, 19 nt, Artificial Sequence
  Description of Artificial Sequence: Synthetic oligonucleotide
gggacaaggacaaccugga

SEQ ID NO: 542072 - RNA, 19 nt, Artificial Sequence
  Description of Artificial Sequence: Synthetic oligonucleotide
gcaccguuggcugcggcgg

SEQ ID NO: 542073 - RNA, 19 nt, Artificial Sequence
  Description of Artificial Sequence: Synthetic oligonucleotide
cugcggcgggaguggagcg

SEQ ID NO: 542074 - RNA, 19 nt, Artificial Sequence
  Description of Artificial Sequence: Synthetic oligonucleotide
cuaggcuuccgucucuacu

SEQ ID NO: 542075 - RNA, 19 nt, Artificial Sequence
  Description of Artificial Sequence: Synthetic oligonucleotide
cggcuugcaggugauaugg

SEQ ID NO: 542076 - RNA, 19 nt, Artificial Sequence
  Description of Artificial Sequence: Synthetic oligonucleotide
cagcuuucgauggcagcug

SEQ ID NO: 542077 - RNA, 19 nt, Artificial Sequence
  Description of Artificial Sequence: Synthetic oligonucleotide
cugcgccccguucucggcc

SEQ ID NO: 542078 - RNA, 19 nt, Artificial Sequence
  Description of Artificial Sequence: Synthetic oligonucleotide
cgugcauuaaagaggcuga

SEQ ID NO: 542079 - RNA, 19 nt, Artificial Sequence
  Description of Artificial Sequence: Synthetic oligonucleotide
uccguauucugcggaugau

SEQ ID NO: 542080 - RNA, 19 nt, Artificial Sequence
  Description of Artificial Sequence: Synthetic oligonucleotide
ccagucgaagggcauggac

SEQ ID NO: 542081 - RNA, 19 nt, Artificial Sequence
  Description of Artificial Sequence: Synthetic oligonucleotide
aggccagucgaagggcaug

SEQ ID NO: 542082 - RNA, 19 nt, Artificial Sequence
  Description of Artificial Sequence: Synthetic oligonucleotide
cucuccccggcggaacagg

SEQ ID NO: 542083 - RNA, 19 nt, Artificial Sequence
  Description of Artificial Sequence: Synthetic oligonucleotide
gcgggaguggagcggggcg

SEQ ID NO: 542084 - RNA, 19 nt, Artificial Sequence
  Description of Artificial Sequence: Synthetic oligonucleotide
gucgcucuggccgccgacc

SEQ ID NO: 542085 - RNA, 19 nt, Artificial Sequence
  Description of Artificial Sequence: Synthetic oligonucleotide
cauucacggccaggugugc

SEQ ID NO: 542086 - RNA, 19 nt, Artificial Sequence
  Description of Artificial Sequence: Synthetic oligonucleotide
ccucgaauacaagcguggc

SEQ ID NO: 542087 - RNA, 19 nt, Artificial Sequence
  Description of Artificial Sequence: Synthetic oligonucleotide
augccccuagcaucugcau

SEQ ID NO: 542088 - RNA, 19 nt, Artificial Sequence
  Description of Artificial Sequence: Synthetic oligonucleotide
gcaagcugccugcgggucc

SEQ ID NO: 542089 - RNA, 19 nt, Artificial Sequence
  Description of Artificial Sequence: Synthetic oligonucleotide
uccacgccuucgagaggca

SEQ ID NO: 542090 - RNA, 19 nt, Artificial Sequence
  Description of Artificial Sequence: Synthetic oligonucleotide
aggcuaggcuuccgucucu

SEQ ID NO: 542091 - RNA, 19 nt, Artificial Sequence
  Description of Artificial Sequence: Synthetic oligonucleotide
gggguaccaucucaggaaa

SEQ ID NO: 542092 - RNA, 19 nt, Artificial Sequence
  Description of Artificial Sequence: Synthetic oligonucleotide
auguuagcauagagccucu

SEQ ID NO: 542093 - RNA, 19 nt, Artificial Sequence
  Description of Artificial Sequence: Synthetic oligonucleotide
auauuccggcuugcaggug

SEQ ID NO: 542094 - RNA, 19 nt, Artificial Sequence
  Description of Artificial Sequence: Synthetic oligonucleotide
cacuucuaccauggcacca

SEQ ID NO: 542095 - RNA, 19 nt, Artificial Sequence
  Description of Artificial Sequence: Synthetic oligonucleotide
cgaaacucuucagauggac

SEQ ID NO: 542096 - RNA, 19 nt, Artificial Sequence
  Description of Artificial Sequence: Synthetic oligonucleotide
gcuagguuugagguauaca

SEQ ID NO: 542097 - RNA, 19 nt, Artificial Sequence
  Description of Artificial Sequence: Synthetic oligonucleotide
uagcuagguuugagguaua

SEQ ID NO: 542098 - RNA, 19 nt, Artificial Sequence
  Description of Artificial Sequence: Synthetic oligonucleotide
ggaaaccaauaggagcgga

SEQ ID NO: 542099 - RNA, 19 nt, Artificial Sequence
  Description of Artificial Sequence: Synthetic oligonucleotide
gaguccguauucugcggau

SEQ ID NO: 542100 - RNA, 19 nt, Artificial Sequence
  Description of Artificial Sequence: Synthetic oligonucleotide
gugcggguggcggugcggc

SEQ ID NO: 542101 - RNA, 19 nt, Artificial Sequence
  Description of Artificial Sequence: Synthetic oligonucleotide
cuggacgagggaaaccaau

SEQ ID NO: 542102 - RNA, 19 nt, Artificial Sequence
  Description of Artificial Sequence: Synthetic oligonucleotide
caccgaaauaccagaggau

SEQ ID NO: 542103 - RNA, 19 nt, Artificial Sequence
  Description of Artificial Sequence: Synthetic oligonucleotide
ggacaaagacccggucccc

SEQ ID NO: 542104 - RNA, 19 nt, Artificial Sequence
  Description of Artificial Sequence: Synthetic oligonucleotide
cagcucuaccucgaauaca

SEQ ID NO: 542105 - RNA, 19 nt, Artificial Sequence
  Description of Artificial Sequence: Synthetic oligonucleotide
gcucgugcaaggucaaagu

SEQ ID NO: 542106 - RNA, 19 nt, Artificial Sequence
  Description of Artificial Sequence: Synthetic oligonucleotide
uggccagauugagguguga

SEQ ID NO: 542107 - RNA, 19 nt, Artificial Sequence
  Description of Artificial Sequence: Synthetic oligonucleotide
ccaucauugggucuggcau

SEQ ID NO: 542108 - RNA, 19 nt, Artificial Sequence
  Description of Artificial Sequence: Synthetic oligonucleotide
gucucuacuugagacugau

SEQ ID NO: 542109 - RNA, 19 nt, Artificial Sequence
  Description of Artificial Sequence: Synthetic oligonucleotide
ccgacuucaaagcggagcu

SEQ ID NO: 542110 - RNA, 19 nt, Artificial Sequence
  Description of Artificial Sequence: Synthetic oligonucleotide
cuucuaccacuugaaacau

SEQ ID NO: 542111 - RNA, 19 nt, Artificial Sequence
  Description of Artificial Sequence: Synthetic oligonucleotide
ccguauucugcggaugauc

SEQ ID NO: 542112 - RNA, 19 nt, Artificial Sequence
  Description of Artificial Sequence: Synthetic oligonucleotide
ccaagauuccuuggccuuc

SEQ ID NO: 542113 - RNA, 19 nt, Artificial Sequence
  Description of Artificial Sequence: Synthetic oligonucleotide
cgcaccguuggcugcggcg

SEQ ID NO: 542114 - RNA, 19 nt, Artificial Sequence
  Description of Artificial Sequence: Synthetic oligonucleotide
cugaugcguuaugugugga

SEQ ID NO: 542115 - RNA, 19 nt, Artificial Sequence
  Description of Artificial Sequence: Synthetic oligonucleotide
gggcagaucuaggcuuucc

SEQ ID NO: 542116 - RNA, 19 nt, Artificial Sequence
  Description of Artificial Sequence: Synthetic oligonucleotide
caauggaacguucgccuuu

SEQ ID NO: 542117 - RNA, 19 nt, Artificial Sequence
  Description of Artificial Sequence: Synthetic oligonucleotide
ccaugccccuagcaucugc

SEQ ID NO: 542118 - RNA, 19 nt, Artificial Sequence
  Description of Artificial Sequence: Synthetic oligonucleotide
ggcauggaccuuuugcauu

SEQ ID NO: 542119 - RNA, 19 nt, Artificial Sequence
  Description of Artificial Sequence: Synthetic oligonucleotide
gcauggaccuuuugcauuu

SEQ ID NO: 542120 - RNA, 19 nt, Artificial Sequence
  Description of Artificial Sequence: Synthetic oligonucleotide
uggccgacuccagcccaca

SEQ ID NO: 542121 - RNA, 19 nt, Artificial Sequence
  Description of Artificial Sequence: Synthetic oligonucleotide
gacuggagucaaacuuugu

SEQ ID NO: 542122 - RNA, 19 nt, Artificial Sequence
  Description of Artificial Sequence: Synthetic oligonucleotide
caagauuccuuggccuucu

SEQ ID NO: 542123 - RNA, 19 nt, Artificial Sequence
  Description of Artificial Sequence: Synthetic oligonucleotide
ccuaucacacccacuucua

SEQ ID NO: 542124 - RNA, 19 nt, Artificial Sequence
  Description of Artificial Sequence: Synthetic oligonucleotide
gcggcgggaguggagcggg

SEQ ID NO: 542125 - RNA, 19 nt, Artificial Sequence
  Description of Artificial Sequence: Synthetic oligonucleotide
gcuaggcuuccgucucuac

SEQ ID NO: 542126 - RNA, 19 nt, Artificial Sequence
  Description of Artificial Sequence: Synthetic oligonucleotide
gcucaagcacaggacuuga

SEQ ID NO: 542127 - RNA, 19 nt, Artificial Sequence
  Description of Artificial Sequence: Synthetic oligonucleotide
gccuggaccuucagcgugc

SEQ ID NO: 542128 - RNA, 19 nt, Artificial Sequence
  Description of Artificial Sequence: Synthetic oligonucleotide
gcucuaccucgaauacaag

SEQ ID NO: 542129 - RNA, 19 nt, Artificial Sequence
  Description of Artificial Sequence: Synthetic oligonucleotide
gggcgcaccguuggcugcg

SEQ ID NO: 542130 - RNA, 19 nt, Artificial Sequence
  Description of Artificial Sequence: Synthetic oligonucleotide
cugcggaugaucccaccau

SEQ ID NO: 542131 - RNA, 19 nt, Artificial Sequence
  Description of Artificial Sequence: Synthetic oligonucleotide
cacuugaaacauggagcua

SEQ ID NO: 542132 - RNA, 19 nt, Artificial Sequence
  Description of Artificial Sequence: Synthetic oligonucleotide
ccgcugggcgcaccguugg

SEQ ID NO: 542133 - RNA, 19 nt, Artificial Sequence
  Description of Artificial Sequence: Synthetic oligonucleotide
gcccaggggacaacuuccc

SEQ ID NO: 542134 - RNA, 19 nt, Artificial Sequence
  Description of Artificial Sequence: Synthetic oligonucleotide
agcgugcauuaaagaggcu

SEQ ID NO: 542135 - RNA, 19 nt, Artificial Sequence
  Description of Artificial Sequence: Synthetic oligonucleotide
cccugccauauuguucggc

SEQ ID NO: 542136 - RNA, 19 nt, Artificial Sequence
  Description of Artificial Sequence: Synthetic oligonucleotide
gggcauggaccuuuugcau

SEQ ID NO: 542137 - RNA, 19 nt, Artificial Sequence
  Description of Artificial Sequence: Synthetic oligonucleotide
ccucagaguucaucuccca

SEQ ID NO: 542138 - RNA, 19 nt, Artificial Sequence
  Description of Artificial Sequence: Synthetic oligonucleotide
ggcaagcugccugcggguc

SEQ ID NO: 542139 - RNA, 19 nt, Artificial Sequence
  Description of Artificial Sequence: Synthetic oligonucleotide
cuucaccacgaguccguau

SEQ ID NO: 542140 - RNA, 19 nt, Artificial Sequence
  Description of Artificial Sequence: Synthetic oligonucleotide
gcgauccagacuggaguca

SEQ ID NO: 542141 - RNA, 19 nt, Artificial Sequence
  Description of Artificial Sequence: Synthetic oligonucleotide
ggucgcucuggccgccgac

SEQ ID NO: 542142 - RNA, 19 nt, Artificial Sequence
  Description of Artificial Sequence: Synthetic oligonucleotide
ccgggcaagcugccugcgg

SEQ ID NO: 542143 - RNA, 19 nt, Artificial Sequence
  Description of Artificial Sequence: Synthetic oligonucleotide
caaagacccgguccccaau

SEQ ID NO: 542144 - RNA, 19 nt, Artificial Sequence
  Description of Artificial Sequence: Synthetic oligonucleotide
gggugcacacucgugugua

SEQ ID NO: 542145 - RNA, 19 nt, Artificial Sequence
  Description of Artificial Sequence: Synthetic oligonucleotide
cgaguccguauucugcgga

SEQ ID NO: 542146 - RNA, 19 nt, Artificial Sequence
  Description of Artificial Sequence: Synthetic oligonucleotide
ggugcugucuagaggugau

SEQ ID NO: 542147 - RNA, 19 nt, Artificial Sequence
  Description of Artificial Sequence: Synthetic oligonucleotide
gcggguccgcugcuggcac

SEQ ID NO: 542148 - RNA, 19 nt, Artificial Sequence
  Description of Artificial Sequence: Synthetic oligonucleotide
gagcggugcggguggcggu

SEQ ID NO: 542149 - RNA, 19 nt, Artificial Sequence
  Description of Artificial Sequence: Synthetic oligonucleotide
ccacgccuucgagaggcag

SEQ ID NO: 542150 - RNA, 19 nt, Artificial Sequence
  Description of Artificial Sequence: Synthetic oligonucleotide
gccaagacacaaucuucuu

SEQ ID NO: 542151 - RNA, 19 nt, Artificial Sequence
  Description of Artificial Sequence: Synthetic oligonucleotide
ccaaaagcauagcuagguu

SEQ ID NO: 542152 - RNA, 19 nt, Artificial Sequence
  Description of Artificial Sequence: Synthetic oligonucleotide
ccgacugcgccccguucuc

SEQ ID NO: 542153 - RNA, 19 nt, Artificial Sequence
  Description of Artificial Sequence: Synthetic oligonucleotide
gcggcagaaggcggcgcug

SEQ ID NO: 542154 - RNA, 19 nt, Artificial Sequence
  Description of Artificial Sequence: Synthetic oligonucleotide
ggcgcaccguuggcugcgg

SEQ ID NO: 542155 - RNA, 19 nt, Artificial Sequence
  Description of Artificial Sequence: Synthetic oligonucleotide
gcguuauguguggaagggu

SEQ ID NO: 542156 - RNA, 19 nt, Artificial Sequence
  Description of Artificial Sequence: Synthetic oligonucleotide
gcgcgagccggucgcucug

SEQ ID NO: 542157 - RNA, 19 nt, Artificial Sequence
  Description of Artificial Sequence: Synthetic oligonucleotide
ccgaccggggcgagcggug

SEQ ID NO: 542158 - RNA, 19 nt, Artificial Sequence
  Description of Artificial Sequence: Synthetic oligonucleotide
gcugggcgcaccguuggcu

SEQ ID NO: 542159 - RNA, 19 nt, Artificial Sequence
  Description of Artificial Sequence: Synthetic oligonucleotide
ggcuaggcuuccgucucua

SEQ ID NO: 542160 - RNA, 19 nt, Artificial Sequence
  Description of Artificial Sequence: Synthetic oligonucleotide
cuguacccucucucuugau

SEQ ID NO: 542161 - RNA, 19 nt, Artificial Sequence
  Description of Artificial Sequence: Synthetic oligonucleotide
cccgggcaagcugccugcg

SEQ ID NO: 542162 - RNA, 19 nt, Artificial Sequence
  Description of Artificial Sequence: Synthetic oligonucleotide
ccgcugaaccauaggcaua

SEQ ID NO: 542163 - RNA, 19 nt, Artificial Sequence
  Description of Artificial Sequence: Synthetic oligonucleotide
cgacuucaaagcggagcuc

SEQ ID NO: 542164 - RNA, 19 nt, Artificial Sequence
  Description of Artificial Sequence: Synthetic oligonucleotide
gcgcaccguuggcugcggc

SEQ ID NO: 542165 - RNA, 19 nt, Artificial Sequence
  Description of Artificial Sequence: Synthetic oligonucleotide
gccagucgaagggcaugga

SEQ ID NO: 542166 - RNA, 19 nt, Artificial Sequence
  Description of Artificial Sequence: Synthetic oligonucleotide
ccuucccaacacugccaaa

SEQ ID NO: 542167 - RNA, 19 nt, Artificial Sequence
  Description of Artificial Sequence: Synthetic oligonucleotide
cgccgacuucaaagcggag

SEQ ID NO: 542168 - RNA, 19 nt, Artificial Sequence
  Description of Artificial Sequence: Synthetic oligonucleotide
ggaguggagcggggcgcga

SEQ ID NO: 542169 - RNA, 19 nt, Artificial Sequence
  Description of Artificial Sequence: Synthetic oligonucleotide
gcggugcggguggcggugc

SEQ ID NO: 542170 - RNA, 19 nt, Artificial Sequence
  Description of Artificial Sequence: Synthetic oligonucleotide
cgcgagccggucgcucugg

SEQ ID NO: 542171 - RNA, 19 nt, Artificial Sequence
  Description of Artificial Sequence: Synthetic oligonucleotide
ccuggaccuucagcgugca

SEQ ID NO: 542172 - RNA, 19 nt, Artificial Sequence
  Description of Artificial Sequence: Synthetic oligonucleotide
cgaccggggcgagcggugc

SEQ ID NO: 542173 - RNA, 19 nt, Artificial Sequence
  Description of Artificial Sequence: Synthetic oligonucleotide
cgaauacaagcguggcguu

SEQ ID NO: 542174 - RNA, 19 nt, Artificial Sequence
  Description of Artificial Sequence: Synthetic oligonucleotide
gggcgccgacugcgccccg

SEQ ID NO: 542175 - RNA, 19 nt, Artificial Sequence
  Description of Artificial Sequence: Synthetic oligonucleotide
cgccuucgagaggcagggg

SEQ ID NO: 542176 - RNA, 19 nt, Artificial Sequence
  Description of Artificial Sequence: Synthetic oligonucleotide
gccgaccggggcgagcggu

SEQ ID NO: 542177 - RNA, 19 nt, Artificial Sequence
  Description of Artificial Sequence: Synthetic oligonucleotide
ccccuucgccgacuucaaa

SEQ ID NO: 542178 - RNA, 19 nt, Artificial Sequence
  Description of Artificial Sequence: Synthetic oligonucleotide
gccgcaggggugggcaggu

SEQ ID NO: 542179 - RNA, 19 nt, Artificial Sequence
  Description of Artificial Sequence: Synthetic oligonucleotide
cucggcggucauggccgcu

SEQ ID NO: 542180 - RNA, 19 nt, Artificial Sequence
  Description of Artificial Sequence: Synthetic oligonucleotide
cgccgaccggggcgagcgg

SEQ ID NO: 542181 - RNA, 19 nt, Artificial Sequence
  Description of Artificial Sequence: Synthetic oligonucleotide
cgccccguucucggccgcc

SEQ ID NO: 542182 - RNA, 19 nt, Artificial Sequence
  Description of Artificial Sequence: Synthetic oligonucleotide
cgaagggcauggaccuuuu

SEQ ID NO: 542183 - RNA, 19 nt, Artificial Sequence
  Description of Artificial Sequence: Synthetic oligonucleotide
ccccggcggaacaggcccu

SEQ ID NO: 542184 - RNA, 19 nt, Artificial Sequence
  Description of Artificial Sequence: Synthetic oligonucleotide
ggggcgcgagccggucgcu

SEQ ID NO: 542185 - RNA, 19 nt, Artificial Sequence
  Description of Artificial Sequence: Synthetic oligonucleotide
aauaagauaugauuuaugu

SEQ ID NO: 542186 - RNA, 19 nt, Artificial Sequence
  Description of Artificial Sequence: Synthetic oligonucleotide
aguuauuccagccacuacc

SEQ ID NO: 542187 - RNA, 19 nt, Artificial Sequence
  Description of Artificial Sequence: Synthetic oligonucleotide
aauuaaggcugugaaaagc

SEQ ID NO: 542188 - RNA, 19 nt, Artificial Sequence
  Description of Artificial Sequence: Synthetic oligonucleotide
aauccaaucacuuguucag

SEQ ID NO: 542189 - RNA, 19 nt, Artificial Sequence
  Description of Artificial Sequence: Synthetic oligonucleotide
ucuuccauaggaaugaccu

SEQ ID NO: 542190 - RNA, 19 nt, Artificial Sequence
  Description of Artificial Sequence: Synthetic oligonucleotide
ugugcgaugauccugauuu

SEQ ID NO: 542191 - RNA, 19 nt, Artificial Sequence
  Description of Artificial Sequence: Synthetic oligonucleotide
gauuuuauccucaauggag

SEQ ID NO: 542192 - RNA, 19 nt, Artificial Sequence
  Description of Artificial Sequence: Synthetic oligonucleotide
aacucgaugucaucugccc

SEQ ID NO: 542193 - RNA, 19 nt, Artificial Sequence
  Description of Artificial Sequence: Synthetic oligonucleotide
caagcgauuaaagagagcc

SEQ ID NO: 542194 - RNA, 19 nt, Artificial Sequence
  Description of Artificial Sequence: Synthetic oligonucleotide
ucuguuuaaaacaauccaa

SEQ ID NO: 542195 - RNA, 19 nt, Artificial Sequence
  Description of Artificial Sequence: Synthetic oligonucleotide
auagguagauucccgaaac

SEQ ID NO: 542196 - RNA, 19 nt, Artificial Sequence
  Description of Artificial Sequence: Synthetic oligonucleotide
auuaaagagagccuuuucu

SEQ ID NO: 542197 - RNA, 19 nt, Artificial Sequence
  Description of Artificial Sequence: Synthetic oligonucleotide
guaccaagcgauuaaagag

SEQ ID NO: 542198 - RNA, 19 nt, Artificial Sequence
  Description of Artificial Sequence: Synthetic oligonucleotide
agagcuugaggucauagag

SEQ ID NO: 542199 - RNA, 19 nt, Artificial Sequence
  Description of Artificial Sequence: Synthetic oligonucleotide
gagauaucaaacugagccg

SEQ ID NO: 542200 - RNA, 19 nt, Artificial Sequence
  Description of Artificial Sequence: Synthetic oligonucleotide
aaugccuaaccuccguaac

SEQ ID NO: 542201 - RNA, 19 nt, Artificial Sequence
  Description of Artificial Sequence: Synthetic oligonucleotide
aaagcuucacggaaacucc

SEQ ID NO: 542202 - RNA, 19 nt, Artificial Sequence
  Description of Artificial Sequence: Synthetic oligonucleotide
aaaucugauuaucucguca

SEQ ID NO: 542203 - RNA, 19 nt, Artificial Sequence
  Description of Artificial Sequence: Synthetic oligonucleotide
aagaucgugauauaucaau

SEQ ID NO: 542204 - RNA, 19 nt, Artificial Sequence
  Description of Artificial Sequence: Synthetic oligonucleotide
aguuucaggguccaaauca

SEQ ID NO: 542205 - RNA, 19 nt, Artificial Sequence
  Description of Artificial Sequence: Synthetic oligonucleotide
ucuaaggucugcaugagau

SEQ ID NO: 542206 - RNA, 19 nt, Artificial Sequence
  Description of Artificial Sequence: Synthetic oligonucleotide
uccacucacgcccagauca

SEQ ID NO: 542207 - RNA, 19 nt, Artificial Sequence
  Description of Artificial Sequence: Synthetic oligonucleotide
ucauccgucaguguggugg

SEQ ID NO: 542208 - RNA, 19 nt, Artificial Sequence
  Description of Artificial Sequence: Synthetic oligonucleotide
uguuguacugaauugucca

SEQ ID NO: 542209 - RNA, 19 nt, Artificial Sequence
  Description of Artificial Sequence: Synthetic oligonucleotide
aauagugaucuuccucagg

SEQ ID NO: 542210 - RNA, 19 nt, Artificial Sequence
  Description of Artificial Sequence: Synthetic oligonucleotide
ucgugauauaucaauguca

SEQ ID NO: 542211 - RNA, 19 nt, Artificial Sequence
  Description of Artificial Sequence: Synthetic oligonucleotide
cuuuugaagguaccaagcg

SEQ ID NO: 542212 - RNA, 19 nt, Artificial Sequence
  Description of Artificial Sequence: Synthetic oligonucleotide
cagaagaucuguuuaaaac

SEQ ID NO: 542213 - RNA, 19 nt, Artificial Sequence
  Description of Artificial Sequence: Synthetic oligonucleotide
aauuucucgggccagguua

SEQ ID NO: 542214 - RNA, 19 nt, Artificial Sequence
  Description of Artificial Sequence: Synthetic oligonucleotide
ugugaugcucucuggacgg

SEQ ID NO: 542215 - RNA, 19 nt, Artificial Sequence
  Description of Artificial Sequence: Synthetic oligonucleotide
aaucugauuaucucgucau

SEQ ID NO: 542216 - RNA, 19 nt, Artificial Sequence
  Description of Artificial Sequence: Synthetic oligonucleotide
aucgugauauaucaauguc

SEQ ID NO: 542217 - RNA, 19 nt, Artificial Sequence
  Description of Artificial Sequence: Synthetic oligonucleotide
acuacgaagcccucagggc

SEQ ID NO: 542218 - RNA, 19 nt, Artificial Sequence
  Description of Artificial Sequence: Synthetic oligonucleotide
agaauaucggcacuugaug

SEQ ID NO: 542219 - RNA, 19 nt, Artificial Sequence
  Description of Artificial Sequence: Synthetic oligonucleotide
aacgagaaccaccacgugu

SEQ ID NO: 542220 - RNA, 19 nt, Artificial Sequence
  Description of Artificial Sequence: Synthetic oligonucleotide
aaaggguacagaaaaccag

SEQ ID NO: 542221 - RNA, 19 nt, Artificial Sequence
  Description of Artificial Sequence: Synthetic oligonucleotide
ugcaccagcccaauugugg

SEQ ID NO: 542222 - RNA, 19 nt, Artificial Sequence
  Description of Artificial Sequence: Synthetic oligonucleotide
agguagauucccgaaaccc

SEQ ID NO: 542223 - RNA, 19 nt, Artificial Sequence
  Description of Artificial Sequence: Synthetic oligonucleotide
gguugugagacaaagacag

SEQ ID NO: 542224 - RNA, 19 nt, Artificial Sequence
  Description of Artificial Sequence: Synthetic oligonucleotide
ugagcagcccaauuucucg

SEQ ID NO: 542225 - RNA, 19 nt, Artificial Sequence
  Description of Artificial Sequence: Synthetic oligonucleotide
uaccaagcgauuaaagaga

SEQ ID NO: 542226 - RNA, 19 nt, Artificial Sequence
  Description of Artificial Sequence: Synthetic oligonucleotide
ugagguggagauuaaacuc

SEQ ID NO: 542227 - RNA, 19 nt, Artificial Sequence
  Description of Artificial Sequence: Synthetic oligonucleotide
uugguuugcaagaucguga

SEQ ID NO: 542228 - RNA, 19 nt, Artificial Sequence
  Description of Artificial Sequence: Synthetic oligonucleotide
uuuuauccucaauggagag

SEQ ID NO: 542229 - RNA, 19 nt, Artificial Sequence
  Description of Artificial Sequence: Synthetic oligonucleotide
auaucugaguaucgauggc

SEQ ID NO: 542230 - RNA, 19 nt, Artificial Sequence
  Description of Artificial Sequence: Synthetic oligonucleotide
auuuuggacuuucacuaag

SEQ ID NO: 542231 - RNA, 19 nt, Artificial Sequence
  Description of Artificial Sequence: Synthetic oligonucleotide
ucugacaguggcaacgaga

SEQ ID NO: 542232 - RNA, 19 nt, Artificial Sequence
  Description of Artificial Sequence: Synthetic oligonucleotide
cugauuaucucgucauccg

SEQ ID NO: 542233 - RNA, 19 nt, Artificial Sequence
  Description of Artificial Sequence: Synthetic oligonucleotide
cuaaccuccguaaccuucg

SEQ ID NO: 542234 - RNA, 19 nt, Artificial Sequence
  Description of Artificial Sequence: Synthetic oligonucleotide
aggaaucuaucauuggugu

SEQ ID NO: 542235 - RNA, 19 nt, Artificial Sequence
  Description of Artificial Sequence: Synthetic oligonucleotide
ucuaucauugguguccagc

SEQ ID NO: 542236 - RNA, 19 nt, Artificial Sequence
  Description of Artificial Sequence: Synthetic oligonucleotide
aucuggauaucacagaauu

SEQ ID NO: 542237 - RNA, 19 nt, Artificial Sequence
  Description of Artificial Sequence: Synthetic oligonucleotide
cauuuuaagagcucugaca

SEQ ID NO: 542238 - RNA, 19 nt, Artificial Sequence
  Description of Artificial Sequence: Synthetic oligonucleotide
uuuuggacuuucacuaagu

SEQ ID NO: 542239 - RNA, 19 nt, Artificial Sequence
  Description of Artificial Sequence: Synthetic oligonucleotide
ucauaucuuucagagaagu

SEQ ID NO: 542240 - RNA, 19 nt, Artificial Sequence
  Description of Artificial Sequence: Synthetic oligonucleotide
uuucaaugccuaaccuccg

SEQ ID NO: 542241 - RNA, 19 nt, Artificial Sequence
  Description of Artificial Sequence: Synthetic oligonucleotide
uguuggaguuauuccagcc

SEQ ID NO: 542242 - RNA, 19 nt, Artificial Sequence
  Description of Artificial Sequence: Synthetic oligonucleotide
cacuacgaagcccucaggg

SEQ ID NO: 542243 - RNA, 19 nt, Artificial Sequence
  Description of Artificial Sequence: Synthetic oligonucleotide
aauaucggcacuugauguu

SEQ ID NO: 542244 - RNA, 19 nt, Artificial Sequence
  Description of Artificial Sequence: Synthetic oligonucleotide
ugcaagaucgugauauauc

SEQ ID NO: 542245 - RNA, 19 nt, Artificial Sequence
  Description of Artificial Sequence: Synthetic oligonucleotide
aucaucaacagugaugggu

SEQ ID NO: 542246 - RNA, 19 nt, Artificial Sequence
  Description of Artificial Sequence: Synthetic oligonucleotide
acagagauaucaaacugag

SEQ ID NO: 542247 - RNA, 19 nt, Artificial Sequence
  Description of Artificial Sequence: Synthetic oligonucleotide
ucgucauccgucagugugg

SEQ ID NO: 542248 - RNA, 19 nt, Artificial Sequence
  Description of Artificial Sequence: Synthetic oligonucleotide
ucggggagcaacucgaugu

SEQ ID NO: 542249 - RNA, 19 nt, Artificial Sequence
  Description of Artificial Sequence: Synthetic oligonucleotide
acguuaugguuucuggauc

SEQ ID NO: 542250 - RNA, 19 nt, Artificial Sequence
  Description of Artificial Sequence: Synthetic oligonucleotide
gccacuaccacguauuucc

SEQ ID NO: 542251 - RNA, 19 nt, Artificial Sequence
  Description of Artificial Sequence: Synthetic oligonucleotide
acaauccaaucacuuguuc

SEQ ID NO: 542252 - RNA, 19 nt, Artificial Sequence
  Description of Artificial Sequence: Synthetic oligonucleotide
cuuucuuacuggaugccac

SEQ ID NO: 542253 - RNA, 19 nt, Artificial Sequence
  Description of Artificial Sequence: Synthetic oligonucleotide
ucacggaugggcagaauga

SEQ ID NO: 542254 - RNA, 19 nt, Artificial Sequence
  Description of Artificial Sequence: Synthetic oligonucleotide
aacccugcuuuguguagac

SEQ ID NO: 542255 - RNA, 19 nt, Artificial Sequence
  Description of Artificial Sequence: Synthetic oligonucleotide
ugauuaucucgucauccgu

SEQ ID NO: 542256 - RNA, 19 nt, Artificial Sequence
  Description of Artificial Sequence: Synthetic oligonucleotide
uuucuuacuggaugccacc

SEQ ID NO: 542257 - RNA, 19 nt, Artificial Sequence
  Description of Artificial Sequence: Synthetic oligonucleotide
auuuuauccucaauggaga

SEQ ID NO: 542258 - RNA, 19 nt, Artificial Sequence
  Description of Artificial Sequence: Synthetic oligonucleotide
gggccaacaagcuugagug

SEQ ID NO: 542259 - RNA, 19 nt, Artificial Sequence
  Description of Artificial Sequence: Synthetic oligonucleotide
aaguagugagggccagaac

SEQ ID NO: 542260 - RNA, 19 nt, Artificial Sequence
  Description of Artificial Sequence: Synthetic oligonucleotide
agauaucaaacugagccgu

SEQ ID NO: 542261 - RNA, 19 nt, Artificial Sequence
  Description of Artificial Sequence: Synthetic oligonucleotide
auaugguuccaccucuucu

SEQ ID NO: 542262 - RNA, 19 nt, Artificial Sequence
  Description of Artificial Sequence: Synthetic oligonucleotide
agcaucaaaagccccgugu

SEQ ID NO: 542263 - RNA, 19 nt, Artificial Sequence
  Description of Artificial Sequence: Synthetic oligonucleotide
uggauaucacagaauuuuc

SEQ ID NO: 542264 - RNA, 19 nt, Artificial Sequence
  Description of Artificial Sequence: Synthetic oligonucleotide
uuuauccucaauggagagc

SEQ ID NO: 542265 - RNA, 19 nt, Artificial Sequence
  Description of Artificial Sequence: Synthetic oligonucleotide
ccagcguggacaaacaccg

SEQ ID NO: 542266 - RNA, 19 nt, Artificial Sequence
  Description of Artificial Sequence: Synthetic oligonucleotide
uuuguguccccauaugguu

SEQ ID NO: 542267 - RNA, 19 nt, Artificial Sequence
  Description of Artificial Sequence: Synthetic oligonucleotide
ugcagauagguagauuccc

SEQ ID NO: 542268 - RNA, 19 nt, Artificial Sequence
  Description of Artificial Sequence: Synthetic oligonucleotide
ugugcuucggggagcaacu

SEQ ID NO: 542269 - RNA, 19 nt, Artificial Sequence
  Description of Artificial Sequence: Synthetic oligonucleotide
aucaauuuccagucuuaca

SEQ ID NO: 542270 - RNA, 19 nt, Artificial Sequence
  Description of Artificial Sequence: Synthetic oligonucleotide
caaacauccuagcauuuuc

SEQ ID NO: 542271 - RNA, 19 nt, Artificial Sequence
  Description of Artificial Sequence: Synthetic oligonucleotide
uccgaaucccgcuucaguc

SEQ ID NO: 542272 - RNA, 19 nt, Artificial Sequence
  Description of Artificial Sequence: Synthetic oligonucleotide
gauagguagauucccgaaa

SEQ ID NO: 542273 - RNA, 19 nt, Artificial Sequence
  Description of Artificial Sequence: Synthetic oligonucleotide
gaauaucggcacuugaugu

SEQ ID NO: 542274 - RNA, 19 nt, Artificial Sequence
  Description of Artificial Sequence: Synthetic oligonucleotide
augaaauaucugaguaucg

SEQ ID NO: 542275 - RNA, 19 nt, Artificial Sequence
  Description of Artificial Sequence: Synthetic oligonucleotide
acuaccacguauuucccau

SEQ ID NO: 542276 - RNA, 19 nt, Artificial Sequence
  Description of Artificial Sequence: Synthetic oligonucleotide
cagcucaugaaauaucuga

SEQ ID NO: 542277 - RNA, 19 nt, Artificial Sequence
  Description of Artificial Sequence: Synthetic oligonucleotide
caauccaaucacuuguuca

SEQ ID NO: 542278 - RNA, 19 nt, Artificial Sequence
  Description of Artificial Sequence: Synthetic oligonucleotide
aucaacagugauggguucg

SEQ ID NO: 542279 - RNA, 19 nt, Artificial Sequence
  Description of Artificial Sequence: Synthetic oligonucleotide
ugcaauccggucugcaaug

SEQ ID NO: 542280 - RNA, 19 nt, Artificial Sequence
  Description of Artificial Sequence: Synthetic oligonucleotide
gcagccacgagauuauuag

SEQ ID NO: 542281 - RNA, 19 nt, Artificial Sequence
  Description of Artificial Sequence: Synthetic oligonucleotide
acaaacaccggugugcccu

SEQ ID NO: 542282 - RNA, 19 nt, Artificial Sequence
  Description of Artificial Sequence: Synthetic oligonucleotide
gcaagaucgugauauauca

SEQ ID NO: 542283 - RNA, 19 nt, Artificial Sequence
  Description of Artificial Sequence: Synthetic oligonucleotide
agauuauuagcugcaguga

SEQ ID NO: 542284 - RNA, 19 nt, Artificial Sequence
  Description of Artificial Sequence: Synthetic oligonucleotide
cauuccuaugucugcuccg

SEQ ID NO: 542285 - RNA, 19 nt, Artificial Sequence
  Description of Artificial Sequence: Synthetic oligonucleotide
gaucgugauauaucaaugu

SEQ ID NO: 542286 - RNA, 19 nt, Artificial Sequence
  Description of Artificial Sequence: Synthetic oligonucleotide
gaaugaccugggaauagcc

SEQ ID NO: 542287 - RNA, 19 nt, Artificial Sequence
  Description of Artificial Sequence: Synthetic oligonucleotide
gauuaucucgucauccguc

SEQ ID NO: 542288 - RNA, 19 nt, Artificial Sequence
  Description of Artificial Sequence: Synthetic oligonucleotide
uaucucgucauccgucagu

SEQ ID NO: 542289 - RNA, 19 nt, Artificial Sequence
  Description of Artificial Sequence: Synthetic oligonucleotide
ggcagaaugaagccaguag

SEQ ID NO: 542290 - RNA, 19 nt, Artificial Sequence
  Description of Artificial Sequence: Synthetic oligonucleotide
uuccucaggaaucuaucau

SEQ ID NO: 542291 - RNA, 19 nt, Artificial Sequence
  Description of Artificial Sequence: Synthetic oligonucleotide
gacuuuggccuuugugucc

SEQ ID NO: 542292 - RNA, 19 nt, Artificial Sequence
  Description of Artificial Sequence: Synthetic oligonucleotide
agcgccaccuuuuauucca

SEQ ID NO: 542293 - RNA, 19 nt, Artificial Sequence
  Description of Artificial Sequence: Synthetic oligonucleotide
ugaguaucgauggcagcag

SEQ ID NO: 542294 - RNA, 19 nt, Artificial Sequence
  Description of Artificial Sequence: Synthetic oligonucleotide
agaucgugauauaucaaug

SEQ ID NO: 542295 - RNA, 19 nt, Artificial Sequence
  Description of Artificial Sequence: Synthetic oligonucleotide
accuccguaaccuucggau

SEQ ID NO: 542296 - RNA, 19 nt, Artificial Sequence
  Description of Artificial Sequence: Synthetic oligonucleotide
uucaaugccuaaccuccgu

SEQ ID NO: 542297 - RNA, 19 nt, Artificial Sequence
  Description of Artificial Sequence: Synthetic oligonucleotide
ugguuugcaagaucgugau

SEQ ID NO: 542298 - RNA, 19 nt, Artificial Sequence
  Description of Artificial Sequence: Synthetic oligonucleotide
ucugaguaucgauggcagc

SEQ ID NO: 542299 - RNA, 19 nt, Artificial Sequence
  Description of Artificial Sequence: Synthetic oligonucleotide
guuggaguuauuccagcca

SEQ ID NO: 542300 - RNA, 19 nt, Artificial Sequence
  Description of Artificial Sequence: Synthetic oligonucleotide
accacgggcacuccaaaca

SEQ ID NO: 542301 - RNA, 19 nt, Artificial Sequence
  Description of Artificial Sequence: Synthetic oligonucleotide
ucuggauaucacagaauuu

SEQ ID NO: 542302 - RNA, 19 nt, Artificial Sequence
  Description of Artificial Sequence: Synthetic oligonucleotide
agcccaauugugguuguac

SEQ ID NO: 542303 - RNA, 19 nt, Artificial Sequence
  Description of Artificial Sequence: Synthetic oligonucleotide
gaagguaccaagcgauuaa

SEQ ID NO: 542304 - RNA, 19 nt, Artificial Sequence
  Description of Artificial Sequence: Synthetic oligonucleotide
ucagcgucuguaucugucu

SEQ ID NO: 542305 - RNA, 19 nt, Artificial Sequence
  Description of Artificial Sequence: Synthetic oligonucleotide
gagacuguccaauagugau

SEQ ID NO: 542306 - RNA, 19 nt, Artificial Sequence
  Description of Artificial Sequence: Synthetic oligonucleotide
acgagaaccaccacgugug

SEQ ID NO: 542307 - RNA, 19 nt, Artificial Sequence
  Description of Artificial Sequence: Synthetic oligonucleotide
auaucggcacuugauguug

SEQ ID NO: 542308 - RNA, 19 nt, Artificial Sequence
  Description of Artificial Sequence: Synthetic oligonucleotide
agauagguagauucccgaa

SEQ ID NO: 542309 - RNA, 19 nt, Artificial Sequence
  Description of Artificial Sequence: Synthetic oligonucleotide
aggguccaaaucaauauca

SEQ ID NO: 542310 - RNA, 19 nt, Artificial Sequence
  Description of Artificial Sequence: Synthetic oligonucleotide
accaagcgauuaaagagag

SEQ ID NO: 542311 - RNA, 19 nt, Artificial Sequence
  Description of Artificial Sequence: Synthetic oligonucleotide
gcccagaucaucaacagug

SEQ ID NO: 542312 - RNA, 19 nt, Artificial Sequence
  Description of Artificial Sequence: Synthetic oligonucleotide
agccacgagauuauuagcu

SEQ ID NO: 542313 - RNA, 19 nt, Artificial Sequence
  Description of Artificial Sequence: Synthetic oligonucleotide
aaacccugcuuuguguaga

SEQ ID NO: 542314 - RNA, 19 nt, Artificial Sequence
  Description of Artificial Sequence: Synthetic oligonucleotide
ccuuuguguccccauaugg

SEQ ID NO: 542315 - RNA, 19 nt, Artificial Sequence
  Description of Artificial Sequence: Synthetic oligonucleotide
agcgauuaaagagagccuu

SEQ ID NO: 542316 - RNA, 19 nt, Artificial Sequence
  Description of Artificial Sequence: Synthetic oligonucleotide
ucaaugccuaaccuccgua

SEQ ID NO: 542317 - RNA, 19 nt, Artificial Sequence
  Description of Artificial Sequence: Synthetic oligonucleotide
ugaagguaccaagcgauua

SEQ ID NO: 542318 - RNA, 19 nt, Artificial Sequence
  Description of Artificial Sequence: Synthetic oligonucleotide
cuguccaauagugaucuuc

SEQ ID NO: 542319 - RNA, 19 nt, Artificial Sequence
  Description of Artificial Sequence: Synthetic oligonucleotide
gauaucaaacugagccgug

SEQ ID NO: 542320 - RNA, 19 nt, Artificial Sequence
  Description of Artificial Sequence: Synthetic oligonucleotide
gcaaugauggaggaauucc

SEQ ID NO: 542321 - RNA, 19 nt, Artificial Sequence
  Description of Artificial Sequence: Synthetic oligonucleotide
uaaccuccguaaccuucgg

SEQ ID NO: 542322 - RNA, 19 nt, Artificial Sequence
  Description of Artificial Sequence: Synthetic oligonucleotide
ugucugggucagcucauga

SEQ ID NO: 542323 - RNA, 19 nt, Artificial Sequence
  Description of Artificial Sequence: Synthetic oligonucleotide
agacuguccaauagugauc

SEQ ID NO: 542324 - RNA, 19 nt, Artificial Sequence
  Description of Artificial Sequence: Synthetic oligonucleotide
uucggggagcaacucgaug

SEQ ID NO: 542325 - RNA, 19 nt, Artificial Sequence
  Description of Artificial Sequence: Synthetic oligonucleotide
ugagccgugcguguguggc

SEQ ID NO: 542326 - RNA, 19 nt, Artificial Sequence
  Description of Artificial Sequence: Synthetic oligonucleotide
cuuccauaggaaugaccug

SEQ ID NO: 542327 - RNA, 19 nt, Artificial Sequence
  Description of Artificial Sequence: Synthetic oligonucleotide
guaagccucgggaaggggc

SEQ ID NO: 542328 - RNA, 19 nt, Artificial Sequence
  Description of Artificial Sequence: Synthetic oligonucleotide
gaguaucgauggcagcagc

SEQ ID NO: 542329 - RNA, 19 nt, Artificial Sequence
  Description of Artificial Sequence: Synthetic oligonucleotide
cugaguaucgauggcagca

SEQ ID NO: 542330 - RNA, 19 nt, Artificial Sequence
  Description of Artificial Sequence: Synthetic oligonucleotide
cacgagauuauuagcugca

SEQ ID NO: 542331 - RNA, 19 nt, Artificial Sequence
  Description of Artificial Sequence: Synthetic oligonucleotide
gaguuauuccagccacuac

SEQ ID NO: 542332 - RNA, 19 nt, Artificial Sequence
  Description of Artificial Sequence: Synthetic oligonucleotide
uggaguuauuccagccacu

SEQ ID NO: 542333 - RNA, 19 nt, Artificial Sequence
  Description of Artificial Sequence: Synthetic oligonucleotide
cauccuucaacagcaccgc

SEQ ID NO: 542334 - RNA, 19 nt, Artificial Sequence
  Description of Artificial Sequence: Synthetic oligonucleotide
gccauaauuucacuggcca

SEQ ID NO: 542335 - RNA, 19 nt, Artificial Sequence
  Description of Artificial Sequence: Synthetic oligonucleotide
ucucgggccagguuacaga

SEQ ID NO: 542336 - RNA, 19 nt, Artificial Sequence
  Description of Artificial Sequence: Synthetic oligonucleotide
aagguaccaagcgauuaaa

SEQ ID NO: 542337 - RNA, 19 nt, Artificial Sequence
  Description of Artificial Sequence: Synthetic oligonucleotide
ccgccaugcauuuuaagag

SEQ ID NO: 542338 - RNA, 19 nt, Artificial Sequence
  Description of Artificial Sequence: Synthetic oligonucleotide
cuaucauaucuuucagaga

SEQ ID NO: 542339 - RNA, 19 nt, Artificial Sequence
  Description of Artificial Sequence: Synthetic oligonucleotide
uguaagccucgggaagggg

SEQ ID NO: 542340 - RNA, 19 nt, Artificial Sequence
  Description of Artificial Sequence: Synthetic oligonucleotide
augcauucauggccacgac

SEQ ID NO: 542341 - RNA, 19 nt, Artificial Sequence
  Description of Artificial Sequence: Synthetic oligonucleotide
aggaaugaccugggaauag

SEQ ID NO: 542342 - RNA, 19 nt, Artificial Sequence
  Description of Artificial Sequence: Synthetic oligonucleotide
uucccgaaacccugcuuug

SEQ ID NO: 542343 - RNA, 19 nt, Artificial Sequence
  Description of Artificial Sequence: Synthetic oligonucleotide
gggaauagccgccuccugc

SEQ ID NO: 542344 - RNA, 19 nt, Artificial Sequence
  Description of Artificial Sequence: Synthetic oligonucleotide
agcccaauuucucgggcca

SEQ ID NO: 542345 - RNA, 19 nt, Artificial Sequence
  Description of Artificial Sequence: Synthetic oligonucleotide
guggcaacgagaaccacca

SEQ ID NO: 542346 - RNA, 19 nt, Artificial Sequence
  Description of Artificial Sequence: Synthetic oligonucleotide
ggaucuggauaucacagaa

SEQ ID NO: 542347 - RNA, 19 nt, Artificial Sequence
  Description of Artificial Sequence: Synthetic oligonucleotide
ucaggcguuucagugugga

SEQ ID NO: 542348 - RNA, 19 nt, Artificial Sequence
  Description of Artificial Sequence: Synthetic oligonucleotide
ggcgaugagguccagcuca

SEQ ID NO: 542349 - RNA, 19 nt, Artificial Sequence
  Description of Artificial Sequence: Synthetic oligonucleotide
acauucugauucagguggg

SEQ ID NO: 542350 - RNA, 19 nt, Artificial Sequence
  Description of Artificial Sequence: Synthetic oligonucleotide
uucaggcguuucagugugg

SEQ ID NO: 542351 - RNA, 19 nt, Artificial Sequence
  Description of Artificial Sequence: Synthetic oligonucleotide
gccacguuaugguuucugg

SEQ ID NO: 542352 - RNA, 19 nt, Artificial Sequence
  Description of Artificial Sequence: Synthetic oligonucleotide
auccuagcauuuucuauuu

SEQ ID NO: 542353 - RNA, 19 nt, Artificial Sequence
  Description of Artificial Sequence: Synthetic oligonucleotide
ggucagucuuuucaaugcc

SEQ ID NO: 542354 - RNA, 19 nt, Artificial Sequence
  Description of Artificial Sequence: Synthetic oligonucleotide
cagccacgagauuauuagc

SEQ ID NO: 542355 - RNA, 19 nt, Artificial Sequence
  Description of Artificial Sequence: Synthetic oligonucleotide
uugaagguaccaagcgauu

SEQ ID NO: 542356 - RNA, 19 nt, Artificial Sequence
  Description of Artificial Sequence: Synthetic oligonucleotide
gagguggagauuaaacucu

SEQ ID NO: 542357 - RNA, 19 nt, Artificial Sequence
  Description of Artificial Sequence: Synthetic oligonucleotide
guggacaaacaccggugug

SEQ ID NO: 542358 - RNA, 19 nt, Artificial Sequence
  Description of Artificial Sequence: Synthetic oligonucleotide
acgagauuauuagcugcag

SEQ ID NO: 542359 - RNA, 19 nt, Artificial Sequence
  Description of Artificial Sequence: Synthetic oligonucleotide
gaagccaguaggugcaccu

SEQ ID NO: 542360 - RNA, 19 nt, Artificial Sequence
  Description of Artificial Sequence: Synthetic oligonucleotide
agguaccaagcgauuaaag

SEQ ID NO: 542361 - RNA, 19 nt, Artificial Sequence
  Description of Artificial Sequence: Synthetic oligonucleotide
uucucgggccagguuacag

SEQ ID NO: 542362 - RNA, 19 nt, Artificial Sequence
  Description of Artificial Sequence: Synthetic oligonucleotide
cccauagaucuucugugcg

SEQ ID NO: 542363 - RNA, 19 nt, Artificial Sequence
  Description of Artificial Sequence: Synthetic oligonucleotide
ggagauuaaacucuuccau

SEQ ID NO: 542364 - RNA, 19 nt, Artificial Sequence
  Description of Artificial Sequence: Synthetic oligonucleotide
cuuuguguccccauauggu

SEQ ID NO: 542365 - RNA, 19 nt, Artificial Sequence
  Description of Artificial Sequence: Synthetic oligonucleotide
agauucccgaaacccugcu

SEQ ID NO: 542366 - RNA, 19 nt, Artificial Sequence
  Description of Artificial Sequence: Synthetic oligonucleotide
ugcgaugauccugauuuua

SEQ ID NO: 542367 - RNA, 19 nt, Artificial Sequence
  Description of Artificial Sequence: Synthetic oligonucleotide
ugggaauagccgccuccug

SEQ ID NO: 542368 - RNA, 19 nt, Artificial Sequence
  Description of Artificial Sequence: Synthetic oligonucleotide
uaggaaugaccugggaaua

SEQ ID NO: 542369 - RNA, 19 nt, Artificial Sequence
  Description of Artificial Sequence: Synthetic oligonucleotide
gguucgccuuucuuacugg

SEQ ID NO: 542370 - RNA, 19 nt, Artificial Sequence
  Description of Artificial Sequence: Synthetic oligonucleotide
aaucccgcuucagucacua

SEQ ID NO: 542371 - RNA, 19 nt, Artificial Sequence
  Description of Artificial Sequence: Synthetic oligonucleotide
cauucugauucaggugggc

SEQ ID NO: 542372 - RNA, 19 nt, Artificial Sequence
  Description of Artificial Sequence: Synthetic oligonucleotide
cuggauaucacagaauuuu

SEQ ID NO: 542373 - RNA, 19 nt, Artificial Sequence
  Description of Artificial Sequence: Synthetic oligonucleotide
ucacggaaacucccacuau

SEQ ID NO: 542374 - RNA, 19 nt, Artificial Sequence
  Description of Artificial Sequence: Synthetic oligonucleotide
ugcuccgaaucccgcuuca

SEQ ID NO: 542375 - RNA, 19 nt, Artificial Sequence
  Description of Artificial Sequence: Synthetic oligonucleotide
uuucaaccagguccagguu

SEQ ID NO: 542376 - RNA, 19 nt, Artificial Sequence
  Description of Artificial Sequence: Synthetic oligonucleotide
cauccuagcauuuucuauu

SEQ ID NO: 542377 - RNA, 19 nt, Artificial Sequence
  Description of Artificial Sequence: Synthetic oligonucleotide
ugccacguuaugguuucug

SEQ ID NO: 542378 - RNA, 19 nt, Artificial Sequence
  Description of Artificial Sequence: Synthetic oligonucleotide
guguaagccucgggaaggg

SEQ ID NO: 542379 - RNA, 19 nt, Artificial Sequence
  Description of Artificial Sequence: Synthetic oligonucleotide
ugauggguucgccuuucuu

SEQ ID NO: 542380 - RNA, 19 nt, Artificial Sequence
  Description of Artificial Sequence: Synthetic oligonucleotide
caaugccuaaccuccguaa

SEQ ID NO: 542381 - RNA, 19 nt, Artificial Sequence
  Description of Artificial Sequence: Synthetic oligonucleotide
ggaaugaccugggaauagc

SEQ ID NO: 542382 - RNA, 19 nt, Artificial Sequence
  Description of Artificial Sequence: Synthetic oligonucleotide
ggaaucuaucauugguguc

SEQ ID NO: 542383 - RNA, 19 nt, Artificial Sequence
  Description of Artificial Sequence: Synthetic oligonucleotide
cugugcuucggggagcaac

SEQ ID NO: 542384 - RNA, 19 nt, Artificial Sequence
  Description of Artificial Sequence: Synthetic oligonucleotide
guaaccuucggaucuggau

SEQ ID NO: 542385 - RNA, 19 nt, Artificial Sequence
  Description of Artificial Sequence: Synthetic oligonucleotide
acggaugggcagaaugaag

SEQ ID NO: 542386 - RNA, 19 nt, Artificial Sequence
  Description of Artificial Sequence: Synthetic oligonucleotide
cauucauggccacgaccac

SEQ ID NO: 542387 - RNA, 19 nt, Artificial Sequence
  Description of Artificial Sequence: Synthetic oligonucleotide
ccauaauuucacuggccac

SEQ ID NO: 542388 - RNA, 19 nt, Artificial Sequence
  Description of Artificial Sequence: Synthetic oligonucleotide
gguucucuuugguguaagc

SEQ ID NO: 542389 - RNA, 19 nt, Artificial Sequence
  Description of Artificial Sequence: Synthetic oligonucleotide
uccguaaccuucggaucug

SEQ ID NO: 542390 - RNA, 19 nt, Artificial Sequence
  Description of Artificial Sequence: Synthetic oligonucleotide
guuacagaugggcuuuggu

SEQ ID NO: 542391 - RNA, 19 nt, Artificial Sequence
  Description of Artificial Sequence: Synthetic oligonucleotide
caagaucgugauauaucaa

SEQ ID NO: 542392 - RNA, 19 nt, Artificial Sequence
  Description of Artificial Sequence: Synthetic oligonucleotide
auccugauuuuauccucaa

SEQ ID NO: 542393 - RNA, 19 nt, Artificial Sequence
  Description of Artificial Sequence: Synthetic oligonucleotide
guucgccuuucuuacugga

SEQ ID NO: 542394 - RNA, 19 nt, Artificial Sequence
  Description of Artificial Sequence: Synthetic oligonucleotide
cacguuaugguuucuggau

SEQ ID NO: 542395 - RNA, 19 nt, Artificial Sequence
  Description of Artificial Sequence: Synthetic oligonucleotide
ccauuccuaugucugcucc

SEQ ID NO: 542396 - RNA, 19 nt, Artificial Sequence
  Description of Artificial Sequence: Synthetic oligonucleotide
gagccggaaguugcugggg

SEQ ID NO: 542397 - RNA, 19 nt, Artificial Sequence
  Description of Artificial Sequence: Synthetic oligonucleotide
uggcacggaugucacggau

SEQ ID NO: 542398 - RNA, 19 nt, Artificial Sequence
  Description of Artificial Sequence: Synthetic oligonucleotide
ugggcagaaugaagccagu

SEQ ID NO: 542399 - RNA, 19 nt, Artificial Sequence
  Description of Artificial Sequence: Synthetic oligonucleotide
uggcuggagcccagaauau

SEQ ID NO: 542400 - RNA, 19 nt, Artificial Sequence
  Description of Artificial Sequence: Synthetic oligonucleotide
gacuuucacuaaguaaaua

SEQ ID NO: 542401 - RNA, 19 nt, Artificial Sequence
  Description of Artificial Sequence: Synthetic oligonucleotide
ccuaaccuccguaaccuuc

SEQ ID NO: 542402 - RNA, 19 nt, Artificial Sequence
  Description of Artificial Sequence: Synthetic oligonucleotide
cucugacaguggcaacgag

SEQ ID NO: 542403 - RNA, 19 nt, Artificial Sequence
  Description of Artificial Sequence: Synthetic oligonucleotide
acggaaacucccacuauuu

SEQ ID NO: 542404 - RNA, 19 nt, Artificial Sequence
  Description of Artificial Sequence: Synthetic oligonucleotide
cacuaccacguauuuccca

SEQ ID NO: 542405 - RNA, 19 nt, Artificial Sequence
  Description of Artificial Sequence: Synthetic oligonucleotide
accaacgcuggcacggaug

SEQ ID NO: 542406 - RNA, 19 nt, Artificial Sequence
  Description of Artificial Sequence: Synthetic oligonucleotide
cugucggacacacgcaaaa

SEQ ID NO: 542407 - RNA, 19 nt, Artificial Sequence
  Description of Artificial Sequence: Synthetic oligonucleotide
uggccuuuguguccccaua

SEQ ID NO: 542408 - RNA, 19 nt, Artificial Sequence
  Description of Artificial Sequence: Synthetic oligonucleotide
gccaacaagcuugagugca

SEQ ID NO: 542409 - RNA, 19 nt, Artificial Sequence
  Description of Artificial Sequence: Synthetic oligonucleotide
cucuggacggccugagcca

SEQ ID NO: 542410 - RNA, 19 nt, Artificial Sequence
  Description of Artificial Sequence: Synthetic oligonucleotide
gaugggcuuugguuugcaa

SEQ ID NO: 542411 - RNA, 19 nt, Artificial Sequence
  Description of Artificial Sequence: Synthetic oligonucleotide
guaucugucuugaaugcau

SEQ ID NO: 542412 - RNA, 19 nt, Artificial Sequence
  Description of Artificial Sequence: Synthetic oligonucleotide
gagccgugcguguguggcc

SEQ ID NO: 542413 - RNA, 19 nt, Artificial Sequence
  Description of Artificial Sequence: Synthetic oligonucleotide
caacgagaaccaccacgug

SEQ ID NO: 542414 - RNA, 19 nt, Artificial Sequence
  Description of Artificial Sequence: Synthetic oligonucleotide
gguuacagaugggcuuugg

SEQ ID NO: 542415 - RNA, 19 nt, Artificial Sequence
  Description of Artificial Sequence: Synthetic oligonucleotide
ucccgaaacccugcuuugu

SEQ ID NO: 542416 - RNA, 19 nt, Artificial Sequence
  Description of Artificial Sequence: Synthetic oligonucleotide
agcuucacggaaacuccca

SEQ ID NO: 542417 - RNA, 19 nt, Artificial Sequence
  Description of Artificial Sequence: Synthetic oligonucleotide
caacagugauggguucgcc

SEQ ID NO: 542418 - RNA, 19 nt, Artificial Sequence
  Description of Artificial Sequence: Synthetic oligonucleotide
caccggugugcccucuaag

SEQ ID NO: 542419 - RNA, 19 nt, Artificial Sequence
  Description of Artificial Sequence: Synthetic oligonucleotide
ggauaucacagaauuuucu

SEQ ID NO: 542420 - RNA, 19 nt, Artificial Sequence
  Description of Artificial Sequence: Synthetic oligonucleotide
gugcauuugacagcaucaa

SEQ ID NO: 542421 - RNA, 19 nt, Artificial Sequence
  Description of Artificial Sequence: Synthetic oligonucleotide
ugagugcaauccggucugc

SEQ ID NO: 542422 - RNA, 19 nt, Artificial Sequence
  Description of Artificial Sequence: Synthetic oligonucleotide
caggcguuucaguguggac

SEQ ID NO: 542423 - RNA, 19 nt, Artificial Sequence
  Description of Artificial Sequence: Synthetic oligonucleotide
ggccaacaagcuugagugc

SEQ ID NO: 542424 - RNA, 19 nt, Artificial Sequence
  Description of Artificial Sequence: Synthetic oligonucleotide
ccggucugcaaugauggag

SEQ ID NO: 542425 - RNA, 19 nt, Artificial Sequence
  Description of Artificial Sequence: Synthetic oligonucleotide
cagaugggcuuugguuugc

SEQ ID NO: 542426 - RNA, 19 nt, Artificial Sequence
  Description of Artificial Sequence: Synthetic oligonucleotide
ggcuaaggcuccccgcccc

SEQ ID NO: 542427 - RNA, 19 nt, Artificial Sequence
  Description of Artificial Sequence: Synthetic oligonucleotide
ccguguucucuggagaggc

SEQ ID NO: 542428 - RNA, 19 nt, Artificial Sequence
  Description of Artificial Sequence: Synthetic oligonucleotide
uagggaguccaggcauugu

SEQ ID NO: 542429 - RNA, 19 nt, Artificial Sequence
  Description of Artificial Sequence: Synthetic oligonucleotide
ccaagcgauuaaagagagc

SEQ ID NO: 542430 - RNA, 19 nt, Artificial Sequence
  Description of Artificial Sequence: Synthetic oligonucleotide
ggaguuauuccagccacua

SEQ ID NO: 542431 - RNA, 19 nt, Artificial Sequence
  Description of Artificial Sequence: Synthetic oligonucleotide
ggagacagaagaucuguuu

SEQ ID NO: 542432 - RNA, 19 nt, Artificial Sequence
  Description of Artificial Sequence: Synthetic oligonucleotide
ucgaugucaucugccccau

SEQ ID NO: 542433 - RNA, 19 nt, Artificial Sequence
  Description of Artificial Sequence: Synthetic oligonucleotide
ccccguguucucuggagag

SEQ ID NO: 542434 - RNA, 19 nt, Artificial Sequence
  Description of Artificial Sequence: Synthetic oligonucleotide
uuucucgggccagguuaca

SEQ ID NO: 542435 - RNA, 19 nt, Artificial Sequence
  Description of Artificial Sequence: Synthetic oligonucleotide
ggcacggaugucacggaug

SEQ ID NO: 542436 - RNA, 19 nt, Artificial Sequence
  Description of Artificial Sequence: Synthetic oligonucleotide
accuucggaucuggauauc

SEQ ID NO: 542437 - RNA, 19 nt, Artificial Sequence
  Description of Artificial Sequence: Synthetic oligonucleotide
gagaaggcugucggacaca

SEQ ID NO: 542438 - RNA, 19 nt, Artificial Sequence
  Description of Artificial Sequence: Synthetic oligonucleotide
gaauucccaugugcaaugu

SEQ ID NO: 542439 - RNA, 19 nt, Artificial Sequence
  Description of Artificial Sequence: Synthetic oligonucleotide
ccagggcuaaggcuccccg

SEQ ID NO: 542440 - RNA, 19 nt, Artificial Sequence
  Description of Artificial Sequence: Synthetic oligonucleotide
agguggagauuaaacucuu

SEQ ID NO: 542441 - RNA, 19 nt, Artificial Sequence
  Description of Artificial Sequence: Synthetic oligonucleotide
cugcuccgaaucccgcuuc

SEQ ID NO: 542442 - RNA, 19 nt, Artificial Sequence
  Description of Artificial Sequence: Synthetic oligonucleotide
ccuccguaaccuucggauc

SEQ ID NO: 542443 - RNA, 19 nt, Artificial Sequence
  Description of Artificial Sequence: Synthetic oligonucleotide
gcguguguggccuuucucu

SEQ ID NO: 542444 - RNA, 19 nt, Artificial Sequence
  Description of Artificial Sequence: Synthetic oligonucleotide
cccgcuucagucacuacga

SEQ ID NO: 542445 - RNA, 19 nt, Artificial Sequence
  Description of Artificial Sequence: Synthetic oligonucleotide
cuccacucacgcccagauc

SEQ ID NO: 542446 - RNA, 19 nt, Artificial Sequence
  Description of Artificial Sequence: Synthetic oligonucleotide
cccgaaacccugcuuugug

SEQ ID NO: 542447 - RNA, 19 nt, Artificial Sequence
  Description of Artificial Sequence: Synthetic oligonucleotide
ccacguuaugguuucugga

SEQ ID NO: 542448 - RNA, 19 nt, Artificial Sequence
  Description of Artificial Sequence: Synthetic oligonucleotide
gagaggcgggcgaugaggu

SEQ ID NO: 542449 - RNA, 19 nt, Artificial Sequence
  Description of Artificial Sequence: Synthetic oligonucleotide
cacggaugucacggauggg

SEQ ID NO: 542450 - RNA, 19 nt, Artificial Sequence
  Description of Artificial Sequence: Synthetic oligonucleotide
cacggaaacucccacuauu

SEQ ID NO: 542451 - RNA, 19 nt, Artificial Sequence
  Description of Artificial Sequence: Synthetic oligonucleotide
cguguguggccuuucucug

SEQ ID NO: 542452 - RNA, 19 nt, Artificial Sequence
  Description of Artificial Sequence: Synthetic oligonucleotide
gauucccgaaacccugcuu

SEQ ID NO: 542453 - RNA, 19 nt, Artificial Sequence
  Description of Artificial Sequence: Synthetic oligonucleotide
cucgggccagguuacagau

SEQ ID NO: 542454 - RNA, 19 nt, Artificial Sequence
  Description of Artificial Sequence: Synthetic oligonucleotide
cccaauuucucgggccagg

SEQ ID NO: 542455 - RNA, 19 nt, Artificial Sequence
  Description of Artificial Sequence: Synthetic oligonucleotide
acgaccacgggcacuccaa

SEQ ID NO: 542456 - RNA, 19 nt, Artificial Sequence
  Description of Artificial Sequence: Synthetic oligonucleotide
cgaaucccgcuucagucac

SEQ ID NO: 542457 - RNA, 19 nt, Artificial Sequence
  Description of Artificial Sequence: Synthetic oligonucleotide
cccaugugcaauguuggca

SEQ ID NO: 542458 - RNA, 19 nt, Artificial Sequence
  Description of Artificial Sequence: Synthetic oligonucleotide
gcaucaaaagccccguguu

SEQ ID NO: 542459 - RNA, 19 nt, Artificial Sequence
  Description of Artificial Sequence: Synthetic oligonucleotide
gguggagauuaaacucuuc

SEQ ID NO: 542460 - RNA, 19 nt, Artificial Sequence
  Description of Artificial Sequence: Synthetic oligonucleotide
ccgaaucccgcuucaguca

SEQ ID NO: 542461 - RNA, 19 nt, Artificial Sequence
  Description of Artificial Sequence: Synthetic oligonucleotide
augucacggaugggcagaa

SEQ ID NO: 542462 - RNA, 19 nt, Artificial Sequence
  Description of Artificial Sequence: Synthetic oligonucleotide
cuggcacggaugucacgga

SEQ ID NO: 542463 - RNA, 19 nt, Artificial Sequence
  Description of Artificial Sequence: Synthetic oligonucleotide
cacucacgcccagaucauc

SEQ ID NO: 542464 - RNA, 19 nt, Artificial Sequence
  Description of Artificial Sequence: Synthetic oligonucleotide
cacgaccacgggcacucca

SEQ ID NO: 542465 - RNA, 19 nt, Artificial Sequence
  Description of Artificial Sequence: Synthetic oligonucleotide
cuccgaaucccgcuucagu

SEQ ID NO: 542466 - RNA, 19 nt, Artificial Sequence
  Description of Artificial Sequence: Synthetic oligonucleotide
caguguggacagcaagacu

SEQ ID NO: 542467 - RNA, 19 nt, Artificial Sequence
  Description of Artificial Sequence: Synthetic oligonucleotide
cggugugcccucuaagguc

SEQ ID NO: 542468 - RNA, 19 nt, Artificial Sequence
  Description of Artificial Sequence: Synthetic oligonucleotide
cccguguucucuggagagg

SEQ ID NO: 542469 - RNA, 19 nt, Artificial Sequence
  Description of Artificial Sequence: Synthetic oligonucleotide
cugggaauagccgccuccu

SEQ ID NO: 542470 - RNA, 19 nt, Artificial Sequence
  Description of Artificial Sequence: Synthetic oligonucleotide
acccugcuuuguguagacu

SEQ ID NO: 542471 - RNA, 19 nt, Artificial Sequence
  Description of Artificial Sequence: Synthetic oligonucleotide
ccuucggaucuggauauca

SEQ ID NO: 542472 - RNA, 19 nt, Artificial Sequence
  Description of Artificial Sequence: Synthetic oligonucleotide
ugucacggaugggcagaau

SEQ ID NO: 542473 - RNA, 19 nt, Artificial Sequence
  Description of Artificial Sequence: Synthetic oligonucleotide
gccgccgccaugcauuuua

SEQ ID NO: 542474 - RNA, 19 nt, Artificial Sequence
  Description of Artificial Sequence: Synthetic oligonucleotide
gcccagcguggacaaacac

SEQ ID NO: 542475 - RNA, 19 nt, Artificial Sequence
  Description of Artificial Sequence: Synthetic oligonucleotide
gguuugcaagaucgugaua

SEQ ID NO: 542476 - RNA, 19 nt, Artificial Sequence
  Description of Artificial Sequence: Synthetic oligonucleotide
gcuccgaaucccgcuucag

SEQ ID NO: 542477 - RNA, 19 nt, Artificial Sequence
  Description of Artificial Sequence: Synthetic oligonucleotide
ccguaaccuucggaucugg

SEQ ID NO: 542478 - RNA, 19 nt, Artificial Sequence
  Description of Artificial Sequence: Synthetic oligonucleotide
ggacuuucacuaaguaaau

SEQ ID NO: 542479 - RNA, 19 nt, Artificial Sequence
  Description of Artificial Sequence: Synthetic oligonucleotide
aggcgggcgaugaggucca

SEQ ID NO: 542480 - RNA, 19 nt, Artificial Sequence
  Description of Artificial Sequence: Synthetic oligonucleotide
ccagucuuacaaaucugau

SEQ ID NO: 542481 - RNA, 19 nt, Artificial Sequence
  Description of Artificial Sequence: Synthetic oligonucleotide
ccacucucucuaucauauc

SEQ ID NO: 542482 - RNA, 19 nt, Artificial Sequence
  Description of Artificial Sequence: Synthetic oligonucleotide
gugcuucggggagcaacuc

SEQ ID NO: 542483 - RNA, 19 nt, Artificial Sequence
  Description of Artificial Sequence: Synthetic oligonucleotide
ccaacgcuggcacggaugu

SEQ ID NO: 542484 - RNA, 19 nt, Artificial Sequence
  Description of Artificial Sequence: Synthetic oligonucleotide
cagggccaacaagcuugag

SEQ ID NO: 542485 - RNA, 19 nt, Artificial Sequence
  Description of Artificial Sequence: Synthetic oligonucleotide
caauuucucgggccagguu

SEQ ID NO: 542486 - RNA, 19 nt, Artificial Sequence
  Description of Artificial Sequence: Synthetic oligonucleotide
gcgaugauccugauuuuau

SEQ ID NO: 542487 - RNA, 19 nt, Artificial Sequence
  Description of Artificial Sequence: Synthetic oligonucleotide
caacgcuggcacggauguc

SEQ ID NO: 542488 - RNA, 19 nt, Artificial Sequence
  Description of Artificial Sequence: Synthetic oligonucleotide
ccagccacuaccacguauu

SEQ ID NO: 542489 - RNA, 19 nt, Artificial Sequence
  Description of Artificial Sequence: Synthetic oligonucleotide
cuucggggagcaacucgau

SEQ ID NO: 542490 - RNA, 19 nt, Artificial Sequence
  Description of Artificial Sequence: Synthetic oligonucleotide
gggcagaaugaagccagua

SEQ ID NO: 542491 - RNA, 19 nt, Artificial Sequence
  Description of Artificial Sequence: Synthetic oligonucleotide
cgagauuauuagcugcagu

SEQ ID NO: 542492 - RNA, 19 nt, Artificial Sequence
  Description of Artificial Sequence: Synthetic oligonucleotide
cccaauugugguuguacuu

SEQ ID NO: 542493 - RNA, 19 nt, Artificial Sequence
  Description of Artificial Sequence: Synthetic oligonucleotide
ccgaaacccugcuuugugu

SEQ ID NO: 542494 - RNA, 19 nt, Artificial Sequence
  Description of Artificial Sequence: Synthetic oligonucleotide
ggacggccugagccagggc

SEQ ID NO: 542495 - RNA, 19 nt, Artificial Sequence
  Description of Artificial Sequence: Synthetic oligonucleotide
cagugauggguucgccuuu

SEQ ID NO: 542496 - RNA, 19 nt, Artificial Sequence
  Description of Artificial Sequence: Synthetic oligonucleotide
gggccggguagggagucca

SEQ ID NO: 542497 - RNA, 19 nt, Artificial Sequence
  Description of Artificial Sequence: Synthetic oligonucleotide
cguggacaaacaccggugu

SEQ ID NO: 542498 - RNA, 19 nt, Artificial Sequence
  Description of Artificial Sequence: Synthetic oligonucleotide
gcgauuaaagagagccuuu

SEQ ID NO: 542499 - RNA, 19 nt, Artificial Sequence
  Description of Artificial Sequence: Synthetic oligonucleotide
cgccgccaugcauuuuaag

SEQ ID NO: 542500 - RNA, 19 nt, Artificial Sequence
  Description of Artificial Sequence: Synthetic oligonucleotide
gcgggcgaugagguccagc

SEQ ID NO: 542501 - RNA, 19 nt, Artificial Sequence
  Description of Artificial Sequence: Synthetic oligonucleotide
cagccacuaccacguauuu

SEQ ID NO: 542502 - RNA, 19 nt, Artificial Sequence
  Description of Artificial Sequence: Synthetic oligonucleotide
gguagggaguccaggcauu

SEQ ID NO: 542503 - RNA, 19 nt, Artificial Sequence
  Description of Artificial Sequence: Synthetic oligonucleotide
gcucagcgucuguaucugu

SEQ ID NO: 542504 - RNA, 19 nt, Artificial Sequence
  Description of Artificial Sequence: Synthetic oligonucleotide
cugcagcgccaccuuuuau

SEQ ID NO: 542505 - RNA, 19 nt, Artificial Sequence
  Description of Artificial Sequence: Synthetic oligonucleotide
cagcccaauugugguugua

SEQ ID NO: 542506 - RNA, 19 nt, Artificial Sequence
  Description of Artificial Sequence: Synthetic oligonucleotide
gccaguaggugcaccuuuu

SEQ ID NO: 542507 - RNA, 19 nt, Artificial Sequence
  Description of Artificial Sequence: Synthetic oligonucleotide
ccgcuucagucacuacgaa

SEQ ID NO: 542508 - RNA, 19 nt, Artificial Sequence
  Description of Artificial Sequence: Synthetic oligonucleotide
ccauaugguuccaccucuu

SEQ ID NO: 542509 - RNA, 19 nt, Artificial Sequence
  Description of Artificial Sequence: Synthetic oligonucleotide
gccuaaccuccguaaccuu

SEQ ID NO: 542510 - RNA, 19 nt, Artificial Sequence
  Description of Artificial Sequence: Synthetic oligonucleotide
cgucuguaucugucuugaa

SEQ ID NO: 542511 - RNA, 19 nt, Artificial Sequence
  Description of Artificial Sequence: Synthetic oligonucleotide
ccacucacgcccagaucau

SEQ ID NO: 542512 - RNA, 19 nt, Artificial Sequence
  Description of Artificial Sequence: Synthetic oligonucleotide
ggcuugcaccagcccaauu

SEQ ID NO: 542513 - RNA, 19 nt, Artificial Sequence
  Description of Artificial Sequence: Synthetic oligonucleotide
ggcgggcgaugagguccag

SEQ ID NO: 542514 - RNA, 19 nt, Artificial Sequence
  Description of Artificial Sequence: Synthetic oligonucleotide
cgucauccgucaguguggu

SEQ ID NO: 542515 - RNA, 19 nt, Artificial Sequence
  Description of Artificial Sequence: Synthetic oligonucleotide
cagcacucucugccacguu

SEQ ID NO: 542516 - RNA, 19 nt, Artificial Sequence
  Description of Artificial Sequence: Synthetic oligonucleotide
gggccgccgccaugcauuu

SEQ ID NO: 542517 - RNA, 19 nt, Artificial Sequence
  Description of Artificial Sequence: Synthetic oligonucleotide
gccgugcguguguggccuu

SEQ ID NO: 542518 - RNA, 19 nt, Artificial Sequence
  Description of Artificial Sequence: Synthetic oligonucleotide
ggccgccgccaugcauuuu

SEQ ID NO: 542519 - RNA, 19 nt, Artificial Sequence
  Description of Artificial Sequence: Synthetic oligonucleotide
aucuauacaacauaaaucc

SEQ ID NO: 542520 - RNA, 19 nt, Artificial Sequence
  Description of Artificial Sequence: Synthetic oligonucleotide
aauugguacacuuaaauag

SEQ ID NO: 542521 - RNA, 19 nt, Artificial Sequence
  Description of Artificial Sequence: Synthetic oligonucleotide
aagaauacaagucugcguc

SEQ ID NO: 542522 - RNA, 19 nt, Artificial Sequence
  Description of Artificial Sequence: Synthetic oligonucleotide
aauguaggcacuuaaagca

SEQ ID NO: 542523 - RNA, 19 nt, Artificial Sequence
  Description of Artificial Sequence: Synthetic oligonucleotide
auaucuuuaccauagagag

SEQ ID NO: 542524 - RNA, 19 nt, Artificial Sequence
  Description of Artificial Sequence: Synthetic oligonucleotide
aacgaagauacuuaguguc

SEQ ID NO: 542525 - RNA, 19 nt, Artificial Sequence
  Description of Artificial Sequence: Synthetic oligonucleotide
aguaaaacagaguacuaac

SEQ ID NO: 542526 - RNA, 19 nt, Artificial Sequence
  Description of Artificial Sequence: Synthetic oligonucleotide
auaacgaagauacuuagug

SEQ ID NO: 542527 - RNA, 19 nt, Artificial Sequence
  Description of Artificial Sequence: Synthetic oligonucleotide
uuaacugaauaauuuaccc

SEQ ID NO: 542528 - RNA, 19 nt, Artificial Sequence
  Description of Artificial Sequence: Synthetic oligonucleotide
aaaaggauggucaucacuc

SEQ ID NO: 542529 - RNA, 19 nt, Artificial Sequence
  Description of Artificial Sequence: Synthetic oligonucleotide
agacuuuuaaaguugugcg

SEQ ID NO: 542530 - RNA, 19 nt, Artificial Sequence
  Description of Artificial Sequence: Synthetic oligonucleotide
auuguuaggccuuaugcac

SEQ ID NO: 542531 - RNA, 19 nt, Artificial Sequence
  Description of Artificial Sequence: Synthetic oligonucleotide
uacaauaggcuucugaugu

SEQ ID NO: 542532 - RNA, 19 nt, Artificial Sequence
  Description of Artificial Sequence: Synthetic oligonucleotide
uuugcuauccauaguaagc

SEQ ID NO: 542533 - RNA, 19 nt, Artificial Sequence
  Description of Artificial Sequence: Synthetic oligonucleotide
ucaguguacauacacagga

SEQ ID NO: 542534 - RNA, 19 nt, Artificial Sequence
  Description of Artificial Sequence: Synthetic oligonucleotide
uaucauugcauuaauugca

SEQ ID NO: 542535 - RNA, 19 nt, Artificial Sequence
  Description of Artificial Sequence: Synthetic oligonucleotide
uaaaguugugcgcaaauga

SEQ ID NO: 542536 - RNA, 19 nt, Artificial Sequence
  Description of Artificial Sequence: Synthetic oligonucleotide
uuauauguuaauugguaca

SEQ ID NO: 542537 - RNA, 19 nt, Artificial Sequence
  Description of Artificial Sequence: Synthetic oligonucleotide
acuguuagguaauguaggc

SEQ ID NO: 542538 - RNA, 19 nt, Artificial Sequence
  Description of Artificial Sequence: Synthetic oligonucleotide
uuaucgaggaauguaaugc

SEQ ID NO: 542539 - RNA, 19 nt, Artificial Sequence
  Description of Artificial Sequence: Synthetic oligonucleotide
aauaucuuuaccauagaga

SEQ ID NO: 542540 - RNA, 19 nt, Artificial Sequence
  Description of Artificial Sequence: Synthetic oligonucleotide
cuaucauugcauuaauugc

SEQ ID NO: 542541 - RNA, 19 nt, Artificial Sequence
  Description of Artificial Sequence: Synthetic oligonucleotide
aagucgaaagcaguaaaac

SEQ ID NO: 542542 - RNA, 19 nt, Artificial Sequence
  Description of Artificial Sequence: Synthetic oligonucleotide
uuuacaauaggcuucugau

SEQ ID NO: 542543 - RNA, 19 nt, Artificial Sequence
  Description of Artificial Sequence: Synthetic oligonucleotide
uauuauauguuaauuggua

SEQ ID NO: 542544 - RNA, 19 nt, Artificial Sequence
  Description of Artificial Sequence: Synthetic oligonucleotide
uguuaauugguacacuuaa

SEQ ID NO: 542545 - RNA, 19 nt, Artificial Sequence
  Description of Artificial Sequence: Synthetic oligonucleotide
uuaaauuaguuaaacggua

SEQ ID NO: 542546 - RNA, 19 nt, Artificial Sequence
  Description of Artificial Sequence: Synthetic oligonucleotide
cauacgacuggguaguucg

SEQ ID NO: 542547 - RNA, 19 nt, Artificial Sequence
  Description of Artificial Sequence: Synthetic oligonucleotide
aaaguugugcgcaaaugac

SEQ ID NO: 542548 - RNA, 19 nt, Artificial Sequence
  Description of Artificial Sequence: Synthetic oligonucleotide
ggauauguccaauaaauag

SEQ ID NO: 542549 - RNA, 19 nt, Artificial Sequence
  Description of Artificial Sequence: Synthetic oligonucleotide
aaccacaacauuaucgagg

SEQ ID NO: 542550 - RNA, 19 nt, Artificial Sequence
  Description of Artificial Sequence: Synthetic oligonucleotide
uaguuaaacgguaaauugu

SEQ ID NO: 542551 - RNA, 19 nt, Artificial Sequence
  Description of Artificial Sequence: Synthetic oligonucleotide
aaacgguaaauuguuuugg

SEQ ID NO: 542552 - RNA, 19 nt, Artificial Sequence
  Description of Artificial Sequence: Synthetic oligonucleotide
uuuugcuauccauaguaag

SEQ ID NO: 542553 - RNA, 19 nt, Artificial Sequence
  Description of Artificial Sequence: Synthetic oligonucleotide
gucgaaagcaguaaaacag

SEQ ID NO: 542554 - RNA, 19 nt, Artificial Sequence
  Description of Artificial Sequence: Synthetic oligonucleotide
aacggcaacaaaccacaac

SEQ ID NO: 542555 - RNA, 19 nt, Artificial Sequence
  Description of Artificial Sequence: Synthetic oligonucleotide
uugcuauccauaguaagcg

SEQ ID NO: 542556 - RNA, 19 nt, Artificial Sequence
  Description of Artificial Sequence: Synthetic oligonucleotide
auccuuaugaaacgccagc

SEQ ID NO: 542557 - RNA, 19 nt, Artificial Sequence
  Description of Artificial Sequence: Synthetic oligonucleotide
agaauacaagucugcgucc

SEQ ID NO: 542558 - RNA, 19 nt, Artificial Sequence
  Description of Artificial Sequence: Synthetic oligonucleotide
uauauguuaauugguacac

SEQ ID NO: 542559 - RNA, 19 nt, Artificial Sequence
  Description of Artificial Sequence: Synthetic oligonucleotide
uccagguuaauccaacugu

SEQ ID NO: 542560 - RNA, 19 nt, Artificial Sequence
  Description of Artificial Sequence: Synthetic oligonucleotide
auaauuuacccuguuaugu

SEQ ID NO: 542561 - RNA, 19 nt, Artificial Sequence
  Description of Artificial Sequence: Synthetic oligonucleotide
uuuaccauagagagaacaa

SEQ ID NO: 542562 - RNA, 19 nt, Artificial Sequence
  Description of Artificial Sequence: Synthetic oligonucleotide
uaucagaagucgaaagcag

SEQ ID NO: 542563 - RNA, 19 nt, Artificial Sequence
  Description of Artificial Sequence: Synthetic oligonucleotide
uguagaaccacuguacugu

SEQ ID NO: 542564 - RNA, 19 nt, Artificial Sequence
  Description of Artificial Sequence: Synthetic oligonucleotide
accgaaguaugaaauaacc

SEQ ID NO: 542565 - RNA, 19 nt, Artificial Sequence
  Description of Artificial Sequence: Synthetic oligonucleotide
aggcacuuaaagcaggagg

SEQ ID NO: 542566 - RNA, 19 nt, Artificial Sequence
  Description of Artificial Sequence: Synthetic oligonucleotide
uguaaugcagacuuuuaaa

SEQ ID NO: 542567 - RNA, 19 nt, Artificial Sequence
  Description of Artificial Sequence: Synthetic oligonucleotide
uuggcaacggcaacaaacc

SEQ ID NO: 542568 - RNA, 19 nt, Artificial Sequence
  Description of Artificial Sequence: Synthetic oligonucleotide
gguaaauuguuuugguugg

SEQ ID NO: 542569 - RNA, 19 nt, Artificial Sequence
  Description of Artificial Sequence: Synthetic oligonucleotide
agucccacccgacaugucc

SEQ ID NO: 542570 - RNA, 19 nt, Artificial Sequence
  Description of Artificial Sequence: Synthetic oligonucleotide
ucuauccuuaugaaacgcc

SEQ ID NO: 542571 - RNA, 19 nt, Artificial Sequence
  Description of Artificial Sequence: Synthetic oligonucleotide
caagucugcguccuuaugg

SEQ ID NO: 542572 - RNA, 19 nt, Artificial Sequence
  Description of Artificial Sequence: Synthetic oligonucleotide
uaacugaauaauuuacccu

SEQ ID NO: 542573 - RNA, 19 nt, Artificial Sequence
  Description of Artificial Sequence: Synthetic oligonucleotide
uccaauugaaaaccucuug

SEQ ID NO: 542574 - RNA, 19 nt, Artificial Sequence
  Description of Artificial Sequence: Synthetic oligonucleotide
auuaucgaggaauguaaug

SEQ ID NO: 542575 - RNA, 19 nt, Artificial Sequence
  Description of Artificial Sequence: Synthetic oligonucleotide
aaaccacaacauuaucgag

SEQ ID NO: 542576 - RNA, 19 nt, Artificial Sequence
  Description of Artificial Sequence: Synthetic oligonucleotide
gaugucgacagaccucucg

SEQ ID NO: 542577 - RNA, 19 nt, Artificial Sequence
  Description of Artificial Sequence: Synthetic oligonucleotide
auuuacaauaggcuucuga

SEQ ID NO: 542578 - RNA, 19 nt, Artificial Sequence
  Description of Artificial Sequence: Synthetic oligonucleotide
uauguuaauugguacacuu

SEQ ID NO: 542579 - RNA, 19 nt, Artificial Sequence
  Description of Artificial Sequence: Synthetic oligonucleotide
uggauucgggcucugaucu

SEQ ID NO: 542580 - RNA, 19 nt, Artificial Sequence
  Description of Artificial Sequence: Synthetic oligonucleotide
caauaacgaagauacuuag

SEQ ID NO: 542581 - RNA, 19 nt, Artificial Sequence
  Description of Artificial Sequence: Synthetic oligonucleotide
auuaucaauucacaauuaa

SEQ ID NO: 542582 - RNA, 19 nt, Artificial Sequence
  Description of Artificial Sequence: Synthetic oligonucleotide
uuugauaccgggacuuucu

SEQ ID NO: 542583 - RNA, 19 nt, Artificial Sequence
  Description of Artificial Sequence: Synthetic oligonucleotide
uuacaauaggcuucugaug

SEQ ID NO: 542584 - RNA, 19 nt, Artificial Sequence
  Description of Artificial Sequence: Synthetic oligonucleotide
ucgaaagcaguaaaacaga

SEQ ID NO: 542585 - RNA, 19 nt, Artificial Sequence
  Description of Artificial Sequence: Synthetic oligonucleotide
uauacaugcaguucauaaa

SEQ ID NO: 542586 - RNA, 19 nt, Artificial Sequence
  Description of Artificial Sequence: Synthetic oligonucleotide
uuaccauagagagaacaag

SEQ ID NO: 542587 - RNA, 19 nt, Artificial Sequence
  Description of Artificial Sequence: Synthetic oligonucleotide
agucgaaagcaguaaaaca

SEQ ID NO: 542588 - RNA, 19 nt, Artificial Sequence
  Description of Artificial Sequence: Synthetic oligonucleotide
accacaacauuaucgagga

SEQ ID NO: 542589 - RNA, 19 nt, Artificial Sequence
  Description of Artificial Sequence: Synthetic oligonucleotide
uuuaaaguugugcgcaaau

SEQ ID NO: 542590 - RNA, 19 nt, Artificial Sequence
  Description of Artificial Sequence: Synthetic oligonucleotide
gauaccgggacuuucucca

SEQ ID NO: 542591 - RNA, 19 nt, Artificial Sequence
  Description of Artificial Sequence: Synthetic oligonucleotide
gacugugacagucccaccc

SEQ ID NO: 542592 - RNA, 19 nt, Artificial Sequence
  Description of Artificial Sequence: Synthetic oligonucleotide
gguaguucggcauugcgag

SEQ ID NO: 542593 - RNA, 19 nt, Artificial Sequence
  Description of Artificial Sequence: Synthetic oligonucleotide
ucauggauauguccaauaa

SEQ ID NO: 542594 - RNA, 19 nt, Artificial Sequence
  Description of Artificial Sequence: Synthetic oligonucleotide
auuguagaaccacuguacu

SEQ ID NO: 542595 - RNA, 19 nt, Artificial Sequence
  Description of Artificial Sequence: Synthetic oligonucleotide
ucgacagaccucucgaacc

SEQ ID NO: 542596 - RNA, 19 nt, Artificial Sequence
  Description of Artificial Sequence: Synthetic oligonucleotide
cuauccauaguaagcgccc

SEQ ID NO: 542597 - RNA, 19 nt, Artificial Sequence
  Description of Artificial Sequence: Synthetic oligonucleotide
uaacgaagauacuuagugu

SEQ ID NO: 542598 - RNA, 19 nt, Artificial Sequence
  Description of Artificial Sequence: Synthetic oligonucleotide
uaucgaggaauguaaugca

SEQ ID NO: 542599 - RNA, 19 nt, Artificial Sequence
  Description of Artificial Sequence: Synthetic oligonucleotide
gauccaaacccgcuccagg

SEQ ID NO: 542600 - RNA, 19 nt, Artificial Sequence
  Description of Artificial Sequence: Synthetic oligonucleotide
aacauuaucgaggaaugua

SEQ ID NO: 542601 - RNA, 19 nt, Artificial Sequence
  Description of Artificial Sequence: Synthetic oligonucleotide
auggauauguccaauaaau

SEQ ID NO: 542602 - RNA, 19 nt, Artificial Sequence
  Description of Artificial Sequence: Synthetic oligonucleotide
ucugaucuaagugucuggc

SEQ ID NO: 542603 - RNA, 19 nt, Artificial Sequence
  Description of Artificial Sequence: Synthetic oligonucleotide
aagucugcguccuuauggu

SEQ ID NO: 542604 - RNA, 19 nt, Artificial Sequence
  Description of Artificial Sequence: Synthetic oligonucleotide
uaagcgcccgaacauacga

SEQ ID NO: 542605 - RNA, 19 nt, Artificial Sequence
  Description of Artificial Sequence: Synthetic oligonucleotide
accauaguaaggaaaagga

SEQ ID NO: 542606 - RNA, 19 nt, Artificial Sequence
  Description of Artificial Sequence: Synthetic oligonucleotide
ucagaagucgaaagcagua

SEQ ID NO: 542607 - RNA, 19 nt, Artificial Sequence
  Description of Artificial Sequence: Synthetic oligonucleotide
uuagugucuuaaauuaguu

SEQ ID NO: 542608 - RNA, 19 nt, Artificial Sequence
  Description of Artificial Sequence: Synthetic oligonucleotide
ucaugcaaccgaaguauga

SEQ ID NO: 542609 - RNA, 19 nt, Artificial Sequence
  Description of Artificial Sequence: Synthetic oligonucleotide
aauaacgaagauacuuagu

SEQ ID NO: 542610 - RNA, 19 nt, Artificial Sequence
  Description of Artificial Sequence: Synthetic oligonucleotide
agcagcaugcuauuuauua

SEQ ID NO: 542611 - RNA, 19 nt, Artificial Sequence
  Description of Artificial Sequence: Synthetic oligonucleotide
acucucauagacauguuug

SEQ ID NO: 542612 - RNA, 19 nt, Artificial Sequence
  Description of Artificial Sequence: Synthetic oligonucleotide
auauuauauguuaauuggu

SEQ ID NO: 542613 - RNA, 19 nt, Artificial Sequence
  Description of Artificial Sequence: Synthetic oligonucleotide
ucuucguugggccgaaccu

SEQ ID NO: 542614 - RNA, 19 nt, Artificial Sequence
  Description of Artificial Sequence: Synthetic oligonucleotide
auuccaacgcuaucagaag

SEQ ID NO: 542615 - RNA, 19 nt, Artificial Sequence
  Description of Artificial Sequence: Synthetic oligonucleotide
ugcagacuuuuaaaguugu

SEQ ID NO: 542616 - RNA, 19 nt, Artificial Sequence
  Description of Artificial Sequence: Synthetic oligonucleotide
agauuguagaaccacugua

SEQ ID NO: 542617 - RNA, 19 nt, Artificial Sequence
  Description of Artificial Sequence: Synthetic oligonucleotide
uuccaacgcuaucagaagu

SEQ ID NO: 542618 - RNA, 19 nt, Artificial Sequence
  Description of Artificial Sequence: Synthetic oligonucleotide
aaagugucagccagggaug

SEQ ID NO: 542619 - RNA, 19 nt, Artificial Sequence
  Description of Artificial Sequence: Synthetic oligonucleotide
uccuuaugaaacgccagcc

SEQ ID NO: 542620 - RNA, 19 nt, Artificial Sequence
  Description of Artificial Sequence: Synthetic oligonucleotide
auaguaagcgcccgaacau

SEQ ID NO: 542621 - RNA, 19 nt, Artificial Sequence
  Description of Artificial Sequence: Synthetic oligonucleotide
uuaugaaacgccagccaau

SEQ ID NO: 542622 - RNA, 19 nt, Artificial Sequence
  Description of Artificial Sequence: Synthetic oligonucleotide
acauuuggauccaaacccg

SEQ ID NO: 542623 - RNA, 19 nt, Artificial Sequence
  Description of Artificial Sequence: Synthetic oligonucleotide
ugcgcaaaugacuguuucc

SEQ ID NO: 542624 - RNA, 19 nt, Artificial Sequence
  Description of Artificial Sequence: Synthetic oligonucleotide
uggauauguccaauaaaua

SEQ ID NO: 542625 - RNA, 19 nt, Artificial Sequence
  Description of Artificial Sequence: Synthetic oligonucleotide
aguugugcgcaaaugacug

SEQ ID NO: 542626 - RNA, 19 nt, Artificial Sequence
  Description of Artificial Sequence: Synthetic oligonucleotide
uugguacacuuaaauagau

SEQ ID NO: 542627 - RNA, 19 nt, Artificial Sequence
  Description of Artificial Sequence: Synthetic oligonucleotide
aaccuaaggcuuccuuaag

SEQ ID NO: 542628 - RNA, 19 nt, Artificial Sequence
  Description of Artificial Sequence: Synthetic oligonucleotide
uccaacgcuaucagaaguc

SEQ ID NO: 542629 - RNA, 19 nt, Artificial Sequence
  Description of Artificial Sequence: Synthetic oligonucleotide
cauuuggauccaaacccgc

SEQ ID NO: 542630 - RNA, 19 nt, Artificial Sequence
  Description of Artificial Sequence: Synthetic oligonucleotide
ugauaccgggacuuucucc

SEQ ID NO: 542631 - RNA, 19 nt, Artificial Sequence
  Description of Artificial Sequence: Synthetic oligonucleotide
aguaagcgcccgaacauac

SEQ ID NO: 542632 - RNA, 19 nt, Artificial Sequence
  Description of Artificial Sequence: Synthetic oligonucleotide
caccuagaccucaggaugg

SEQ ID NO: 542633 - RNA, 19 nt, Artificial Sequence
  Description of Artificial Sequence: Synthetic oligonucleotide
cuauccuuaugaaacgcca

SEQ ID NO: 542634 - RNA, 19 nt, Artificial Sequence
  Description of Artificial Sequence: Synthetic oligonucleotide
cuaucagaagucgaaagca

SEQ ID NO: 542635 - RNA, 19 nt, Artificial Sequence
  Description of Artificial Sequence: Synthetic oligonucleotide
uguuaggccuuaugcaccu

SEQ ID NO: 542636 - RNA, 19 nt, Artificial Sequence
  Description of Artificial Sequence: Synthetic oligonucleotide
aaguauccucauagcaaac

SEQ ID NO: 542637 - RNA, 19 nt, Artificial Sequence
  Description of Artificial Sequence: Synthetic oligonucleotide
ucguagaaauauugcuuca

SEQ ID NO: 542638 - RNA, 19 nt, Artificial Sequence
  Description of Artificial Sequence: Synthetic oligonucleotide
acaauaacgaagauacuua

SEQ ID NO: 542639 - RNA, 19 nt, Artificial Sequence
  Description of Artificial Sequence: Synthetic oligonucleotide
cuuaugaaacgccagccaa

SEQ ID NO: 542640 - RNA, 19 nt, Artificial Sequence
  Description of Artificial Sequence: Synthetic oligonucleotide
guuaauccaacugucuaca

SEQ ID NO: 542641 - RNA, 19 nt, Artificial Sequence
  Description of Artificial Sequence: Synthetic oligonucleotide
aguuaaacgguaaauuguu

SEQ ID NO: 542642 - RNA, 19 nt, Artificial Sequence
  Description of Artificial Sequence: Synthetic oligonucleotide
aguauccucauagcaaaca

SEQ ID NO: 542643 - RNA, 19 nt, Artificial Sequence
  Description of Artificial Sequence: Synthetic oligonucleotide
agguuaauccaacugucua

SEQ ID NO: 542644 - RNA, 19 nt, Artificial Sequence
  Description of Artificial Sequence: Synthetic oligonucleotide
acauuaucgaggaauguaa

SEQ ID NO: 542645 - RNA, 19 nt, Artificial Sequence
  Description of Artificial Sequence: Synthetic oligonucleotide
ugagugagguuuuccaauu

SEQ ID NO: 542646 - RNA, 19 nt, Artificial Sequence
  Description of Artificial Sequence: Synthetic oligonucleotide
ucuaagcaacuugacacau

SEQ ID NO: 542647 - RNA, 19 nt, Artificial Sequence
  Description of Artificial Sequence: Synthetic oligonucleotide
uuaaagcaggaggucuaag

SEQ ID NO: 542648 - RNA, 19 nt, Artificial Sequence
  Description of Artificial Sequence: Synthetic oligonucleotide
auauugcuucaguuggccu

SEQ ID NO: 542649 - RNA, 19 nt, Artificial Sequence
  Description of Artificial Sequence: Synthetic oligonucleotide
uaugaaacgccagccaauu

SEQ ID NO: 542650 - RNA, 19 nt, Artificial Sequence
  Description of Artificial Sequence: Synthetic oligonucleotide
agguaauguaggcacuuaa

SEQ ID NO: 542651 - RNA, 19 nt, Artificial Sequence
  Description of Artificial Sequence: Synthetic oligonucleotide
cgguaaauuguuuugguug

SEQ ID NO: 542652 - RNA, 19 nt, Artificial Sequence
  Description of Artificial Sequence: Synthetic oligonucleotide
cacucgcuaauacugucac

SEQ ID NO: 542653 - RNA, 19 nt, Artificial Sequence
  Description of Artificial Sequence: Synthetic oligonucleotide
aucgaggaauguaaugcag

SEQ ID NO: 542654 - RNA, 19 nt, Artificial Sequence
  Description of Artificial Sequence: Synthetic oligonucleotide
acggauggagggcauaaau

SEQ ID NO: 542655 - RNA, 19 nt, Artificial Sequence
  Description of Artificial Sequence: Synthetic oligonucleotide
uucuuucaugggcgcagcc

SEQ ID NO: 542656 - RNA, 19 nt, Artificial Sequence
  Description of Artificial Sequence: Synthetic oligonucleotide
cuugagcacuguuagguaa

SEQ ID NO: 542657 - RNA, 19 nt, Artificial Sequence
  Description of Artificial Sequence: Synthetic oligonucleotide
uucguugggccgaaccuuc

SEQ ID NO: 542658 - RNA, 19 nt, Artificial Sequence
  Description of Artificial Sequence: Synthetic oligonucleotide
ugugacagucccacccgac

SEQ ID NO: 542659 - RNA, 19 nt, Artificial Sequence
  Description of Artificial Sequence: Synthetic oligonucleotide
gucuauccuuaugaaacgc

SEQ ID NO: 542660 - RNA, 19 nt, Artificial Sequence
  Description of Artificial Sequence: Synthetic oligonucleotide
acgguaaauuguuuugguu

SEQ ID NO: 542661 - RNA, 19 nt, Artificial Sequence
  Description of Artificial Sequence: Synthetic oligonucleotide
uaggaacggauggagggca

SEQ ID NO: 542662 - RNA, 19 nt, Artificial Sequence
  Description of Artificial Sequence: Synthetic oligonucleotide
gcacuguuagguaauguag

SEQ ID NO: 542663 - RNA, 19 nt, Artificial Sequence
  Description of Artificial Sequence: Synthetic oligonucleotide
agagccuacucugaagggu

SEQ ID NO: 542664 - RNA, 19 nt, Artificial Sequence
  Description of Artificial Sequence: Synthetic oligonucleotide
gucgacagaccucucgaac

SEQ ID NO: 542665 - RNA, 19 nt, Artificial Sequence
  Description of Artificial Sequence: Synthetic oligonucleotide
cuaagcaacuugacacauc

SEQ ID NO: 542666 - RNA, 19 nt, Artificial Sequence
  Description of Artificial Sequence: Synthetic oligonucleotide
aucagaagucgaaagcagu

SEQ ID NO: 542667 - RNA, 19 nt, Artificial Sequence
  Description of Artificial Sequence: Synthetic oligonucleotide
uucggcauugcgaguucca

SEQ ID NO: 542668 - RNA, 19 nt, Artificial Sequence
  Description of Artificial Sequence: Synthetic oligonucleotide
agcgcccgaacauacgacu

SEQ ID NO: 542669 - RNA, 19 nt, Artificial Sequence
  Description of Artificial Sequence: Synthetic oligonucleotide
gaaacgccagccaauucuc

SEQ ID NO: 542670 - RNA, 19 nt, Artificial Sequence
  Description of Artificial Sequence: Synthetic oligonucleotide
aagcgcccgaacauacgac

SEQ ID NO: 542671 - RNA, 19 nt, Artificial Sequence
  Description of Artificial Sequence: Synthetic oligonucleotide
aguucggcauugcgaguuc

SEQ ID NO: 542672 - RNA, 19 nt, Artificial Sequence
  Description of Artificial Sequence: Synthetic oligonucleotide
acauacgacuggguaguuc

SEQ ID NO: 542673 - RNA, 19 nt, Artificial Sequence
  Description of Artificial Sequence: Synthetic oligonucleotide
ccuguuauguauauauaca

SEQ ID NO: 542674 - RNA, 19 nt, Artificial Sequence
  Description of Artificial Sequence: Synthetic oligonucleotide
gcuauccauaguaagcgcc

SEQ ID NO: 542675 - RNA, 19 nt, Artificial Sequence
  Description of Artificial Sequence: Synthetic oligonucleotide
cauggauauguccaauaaa

SEQ ID NO: 542676 - RNA, 19 nt, Artificial Sequence
  Description of Artificial Sequence: Synthetic oligonucleotide
acacuuaaauagauccugu

SEQ ID NO: 542677 - RNA, 19 nt, Artificial Sequence
  Description of Artificial Sequence: Synthetic oligonucleotide
ccaauugaaaaccucuuga

SEQ ID NO: 542678 - RNA, 19 nt, Artificial Sequence
  Description of Artificial Sequence: Synthetic oligonucleotide
uacgacuggguaguucggc

SEQ ID NO: 542679 - RNA, 19 nt, Artificial Sequence
  Description of Artificial Sequence: Synthetic oligonucleotide
cgaacauacgacuggguag

SEQ ID NO: 542680 - RNA, 19 nt, Artificial Sequence
  Description of Artificial Sequence: Synthetic oligonucleotide
gaacauacgacuggguagu

SEQ ID NO: 542681 - RNA, 19 nt, Artificial Sequence
  Description of Artificial Sequence: Synthetic oligonucleotide
gaucuaagugucuggcugu

SEQ ID NO: 542682 - RNA, 19 nt, Artificial Sequence
  Description of Artificial Sequence: Synthetic oligonucleotide
acgaagauacuuagugucu

SEQ ID NO: 542683 - RNA, 19 nt, Artificial Sequence
  Description of Artificial Sequence: Synthetic oligonucleotide
uggucauggauauguccaa

SEQ ID NO: 542684 - RNA, 19 nt, Artificial Sequence
  Description of Artificial Sequence: Synthetic oligonucleotide
uccauaguaagcgcccgaa

SEQ ID NO: 542685 - RNA, 19 nt, Artificial Sequence
  Description of Artificial Sequence: Synthetic oligonucleotide
ucggcauugcgaguuccag

SEQ ID NO: 542686 - RNA, 19 nt, Artificial Sequence
  Description of Artificial Sequence: Synthetic oligonucleotide
uggauccaaacccgcucca

SEQ ID NO: 542687 - RNA, 19 nt, Artificial Sequence
  Description of Artificial Sequence: Synthetic oligonucleotide
cuuccccucuuaaugguca

SEQ ID NO: 542688 - RNA, 19 nt, Artificial Sequence
  Description of Artificial Sequence: Synthetic oligonucleotide
ugagcacuguuagguaaug

SEQ ID NO: 542689 - RNA, 19 nt, Artificial Sequence
  Description of Artificial Sequence: Synthetic oligonucleotide
caguaaaacagaguacuaa

SEQ ID NO: 542690 - RNA, 19 nt, Artificial Sequence
  Description of Artificial Sequence: Synthetic oligonucleotide
ucugcguccuuaugguuuu

SEQ ID NO: 542691 - RNA, 19 nt, Artificial Sequence
  Description of Artificial Sequence: Synthetic oligonucleotide
uuggucucguagaaauauu

SEQ ID NO: 542692 - RNA, 19 nt, Artificial Sequence
  Description of Artificial Sequence: Synthetic oligonucleotide
uaguucggcauugcgaguu

SEQ ID NO: 542693 - RNA, 19 nt, Artificial Sequence
  Description of Artificial Sequence: Synthetic oligonucleotide
ggaaaugguaugucagcuc

SEQ ID NO: 542694 - RNA, 19 nt, Artificial Sequence
  Description of Artificial Sequence: Synthetic oligonucleotide
uguaacccaugggauuaca

SEQ ID NO: 542695 - RNA, 19 nt, Artificial Sequence
  Description of Artificial Sequence: Synthetic oligonucleotide
ugucgacagaccucucgaa

SEQ ID NO: 542696 - RNA, 19 nt, Artificial Sequence
  Description of Artificial Sequence: Synthetic oligonucleotide
guaagcgcccgaacauacg

SEQ ID NO: 542697 - RNA, 19 nt, Artificial Sequence
  Description of Artificial Sequence: Synthetic oligonucleotide
caucacccgggaagaauac

SEQ ID NO: 542698 - RNA, 19 nt, Artificial Sequence
  Description of Artificial Sequence: Synthetic oligonucleotide
uucgggcucugaucuaagu

SEQ ID NO: 542699 - RNA, 19 nt, Artificial Sequence
  Description of Artificial Sequence: Synthetic oligonucleotide
gggauuacacuuggucucg

SEQ ID NO: 542700 - RNA, 19 nt, Artificial Sequence
  Description of Artificial Sequence: Synthetic oligonucleotide
cacuguacuguauaaacuu

SEQ ID NO: 542701 - RNA, 19 nt, Artificial Sequence
  Description of Artificial Sequence: Synthetic oligonucleotide
ugugcgcaaaugacuguuu

SEQ ID NO: 542702 - RNA, 19 nt, Artificial Sequence
  Description of Artificial Sequence: Synthetic oligonucleotide
uugugcgcaaaugacuguu

SEQ ID NO: 542703 - RNA, 19 nt, Artificial Sequence
  Description of Artificial Sequence: Synthetic oligonucleotide
guuaauugguacacuuaaa

SEQ ID NO: 542704 - RNA, 19 nt, Artificial Sequence
  Description of Artificial Sequence: Synthetic oligonucleotide
guaacccaugggauuacac

SEQ ID NO: 542705 - RNA, 19 nt, Artificial Sequence
  Description of Artificial Sequence: Synthetic oligonucleotide
auccauaguaagcgcccga

SEQ ID NO: 542706 - RNA, 19 nt, Artificial Sequence
  Description of Artificial Sequence: Synthetic oligonucleotide
gucauggauauguccaaua

SEQ ID NO: 542707 - RNA, 19 nt, Artificial Sequence
  Description of Artificial Sequence: Synthetic oligonucleotide
ggaggucuaagcaacuuga

SEQ ID NO: 542708 - RNA, 19 nt, Artificial Sequence
  Description of Artificial Sequence: Synthetic oligonucleotide
gugcgcaaaugacuguuuc

SEQ ID NO: 542709 - RNA, 19 nt, Artificial Sequence
  Description of Artificial Sequence: Synthetic oligonucleotide
guagcucuucgaucacaug

SEQ ID NO: 542710 - RNA, 19 nt, Artificial Sequence
  Description of Artificial Sequence: Synthetic oligonucleotide
auguuaauugguacacuua

SEQ ID NO: 542711 - RNA, 19 nt, Artificial Sequence
  Description of Artificial Sequence: Synthetic oligonucleotide
uaguaagcgcccgaacaua

SEQ ID NO: 542712 - RNA, 19 nt, Artificial Sequence
  Description of Artificial Sequence: Synthetic oligonucleotide
gauuacacuuggucucgua

SEQ ID NO: 542713 - RNA, 19 nt, Artificial Sequence
  Description of Artificial Sequence: Synthetic oligonucleotide
ccaacgcuaucagaagucg

SEQ ID NO: 542714 - RNA, 19 nt, Artificial Sequence
  Description of Artificial Sequence: Synthetic oligonucleotide
auuuacccuguuauguaua

SEQ ID NO: 542715 - RNA, 19 nt, Artificial Sequence
  Description of Artificial Sequence: Synthetic oligonucleotide
auacgacuggguaguucgg

SEQ ID NO: 542716 - RNA, 19 nt, Artificial Sequence
  Description of Artificial Sequence: Synthetic oligonucleotide
aggaagugucuauccuuau

SEQ ID NO: 542717 - RNA, 19 nt, Artificial Sequence
  Description of Artificial Sequence: Synthetic oligonucleotide
gaacggauggagggcauaa

SEQ ID NO: 542718 - RNA, 19 nt, Artificial Sequence
  Description of Artificial Sequence: Synthetic oligonucleotide
cacccgacauguccacugc

SEQ ID NO: 542719 - RNA, 19 nt, Artificial Sequence
  Description of Artificial Sequence: Synthetic oligonucleotide
auugcgaguuccagugccu

SEQ ID NO: 542720 - RNA, 19 nt, Artificial Sequence
  Description of Artificial Sequence: Synthetic oligonucleotide
aacggauggagggcauaaa

SEQ ID NO: 542721 - RNA, 19 nt, Artificial Sequence
  Description of Artificial Sequence: Synthetic oligonucleotide
guagaaccacuguacugua

SEQ ID NO: 542722 - RNA, 19 nt, Artificial Sequence
  Description of Artificial Sequence: Synthetic oligonucleotide
uccuuaagucuagguuaca

SEQ ID NO: 542723 - RNA, 19 nt, Artificial Sequence
  Description of Artificial Sequence: Synthetic oligonucleotide
ucguugggccgaaccuucu

SEQ ID NO: 542724 - RNA, 19 nt, Artificial Sequence
  Description of Artificial Sequence: Synthetic oligonucleotide
ucuaagugucuggcuguau

SEQ ID NO: 542725 - RNA, 19 nt, Artificial Sequence
  Description of Artificial Sequence: Synthetic oligonucleotide
guucggcauugcgaguucc

SEQ ID NO: 542726 - RNA, 19 nt, Artificial Sequence
  Description of Artificial Sequence: Synthetic oligonucleotide
cagguuaauccaacugucu

SEQ ID NO: 542727 - RNA, 19 nt, Artificial Sequence
  Description of Artificial Sequence: Synthetic oligonucleotide
cagaagucgaaagcaguaa

SEQ ID NO: 542728 - RNA, 19 nt, Artificial Sequence
  Description of Artificial Sequence: Synthetic oligonucleotide
acccgacauguccacugca

SEQ ID NO: 542729 - RNA, 19 nt, Artificial Sequence
  Description of Artificial Sequence: Synthetic oligonucleotide
agucugcguccuuaugguu

SEQ ID NO: 542730 - RNA, 19 nt, Artificial Sequence
  Description of Artificial Sequence: Synthetic oligonucleotide
cuuaauggucaguguacau

SEQ ID NO: 542731 - RNA, 19 nt, Artificial Sequence
  Description of Artificial Sequence: Synthetic oligonucleotide
acgcuaucagaagucgaaa

SEQ ID NO: 542732 - RNA, 19 nt, Artificial Sequence
  Description of Artificial Sequence: Synthetic oligonucleotide
gcaaccgaaguaugaaaua

SEQ ID NO: 542733 - RNA, 19 nt, Artificial Sequence
  Description of Artificial Sequence: Synthetic oligonucleotide
ggguaguucggcauugcga

SEQ ID NO: 542734 - RNA, 19 nt, Artificial Sequence
  Description of Artificial Sequence: Synthetic oligonucleotide
ccuuaugaaacgccagcca

SEQ ID NO: 542735 - RNA, 19 nt, Artificial Sequence
  Description of Artificial Sequence: Synthetic oligonucleotide
gcccgaacauacgacuggg

SEQ ID NO: 542736 - RNA, 19 nt, Artificial Sequence
  Description of Artificial Sequence: Synthetic oligonucleotide
caaaagugucagccaggga

SEQ ID NO: 542737 - RNA, 19 nt, Artificial Sequence
  Description of Artificial Sequence: Synthetic oligonucleotide
cugaucuaagugucuggcu

SEQ ID NO: 542738 - RNA, 19 nt, Artificial Sequence
  Description of Artificial Sequence: Synthetic oligonucleotide
gcgccggacucucauagac

SEQ ID NO: 542739 - RNA, 19 nt, Artificial Sequence
  Description of Artificial Sequence: Synthetic oligonucleotide
ccauucaguagcauuucaa

SEQ ID NO: 542740 - RNA, 19 nt, Artificial Sequence
  Description of Artificial Sequence: Synthetic oligonucleotide
ccacccgacauguccacug

SEQ ID NO: 542741 - RNA, 19 nt, Artificial Sequence
  Description of Artificial Sequence: Synthetic oligonucleotide
aacauacgacuggguaguu

SEQ ID NO: 542742 - RNA, 19 nt, Artificial Sequence
  Description of Artificial Sequence: Synthetic oligonucleotide
acccacucgcuaauacugu

SEQ ID NO: 542743 - RNA, 19 nt, Artificial Sequence
  Description of Artificial Sequence: Synthetic oligonucleotide
uccccucuuaauggucagu

SEQ ID NO: 542744 - RNA, 19 nt, Artificial Sequence
  Description of Artificial Sequence: Synthetic oligonucleotide
guugugcgcaaaugacugu

SEQ ID NO: 542745 - RNA, 19 nt, Artificial Sequence
  Description of Artificial Sequence: Synthetic oligonucleotide
guuaaacgguaaauuguuu

SEQ ID NO: 542746 - RNA, 19 nt, Artificial Sequence
  Description of Artificial Sequence: Synthetic oligonucleotide
ccauaguaagcgcccgaac

SEQ ID NO: 542747 - RNA, 19 nt, Artificial Sequence
  Description of Artificial Sequence: Synthetic oligonucleotide
gcagacuuuuaaaguugug

SEQ ID NO: 542748 - RNA, 19 nt, Artificial Sequence
  Description of Artificial Sequence: Synthetic oligonucleotide
caaacccgcuccagguuaa

SEQ ID NO: 542749 - RNA, 19 nt, Artificial Sequence
  Description of Artificial Sequence: Synthetic oligonucleotide
cugugacagucccacccga

SEQ ID NO: 542750 - RNA, 19 nt, Artificial Sequence
  Description of Artificial Sequence: Synthetic oligonucleotide
guguaacccaugggauuac

SEQ ID NO: 542751 - RNA, 19 nt, Artificial Sequence
  Description of Artificial Sequence: Synthetic oligonucleotide
gcagcaugcuauuuauuau

SEQ ID NO: 542752 - RNA, 19 nt, Artificial Sequence
  Description of Artificial Sequence: Synthetic oligonucleotide
gcgcaaaugacuguuuccu

SEQ ID NO: 542753 - RNA, 19 nt, Artificial Sequence
  Description of Artificial Sequence: Synthetic oligonucleotide
ccgaacauacgacugggua

SEQ ID NO: 542754 - RNA, 19 nt, Artificial Sequence
  Description of Artificial Sequence: Synthetic oligonucleotide
cccacucgcuaauacuguc

SEQ ID NO: 542755 - RNA, 19 nt, Artificial Sequence
  Description of Artificial Sequence: Synthetic oligonucleotide
ccuuaagucuagguuacaa

SEQ ID NO: 542756 - RNA, 19 nt, Artificial Sequence
  Description of Artificial Sequence: Synthetic oligonucleotide
gagcacuguuagguaaugu

SEQ ID NO: 542757 - RNA, 19 nt, Artificial Sequence
  Description of Artificial Sequence: Synthetic oligonucleotide
gccggacucucauagacau

SEQ ID NO: 542758 - RNA, 19 nt, Artificial Sequence
  Description of Artificial Sequence: Synthetic oligonucleotide
gucugcguccuuaugguuu

SEQ ID NO: 542759 - RNA, 19 nt, Artificial Sequence
  Description of Artificial Sequence: Synthetic oligonucleotide
guaguucggcauugcgagu

SEQ ID NO: 542760 - RNA, 19 nt, Artificial Sequence
  Description of Artificial Sequence: Synthetic oligonucleotide
ggauuugagugagguuuuc

SEQ ID NO: 542761 - RNA, 19 nt, Artificial Sequence
  Description of Artificial Sequence: Synthetic oligonucleotide
cgcccgaacauacgacugg

SEQ ID NO: 542762 - RNA, 19 nt, Artificial Sequence
  Description of Artificial Sequence: Synthetic oligonucleotide
ggagggcauaaauggauuu

SEQ ID NO: 542763 - RNA, 19 nt, Artificial Sequence
  Description of Artificial Sequence: Synthetic oligonucleotide
ccuagaccucaggauggcc

SEQ ID NO: 542764 - RNA, 19 nt, Artificial Sequence
  Description of Artificial Sequence: Synthetic oligonucleotide
cugccgcugugacccacuc

SEQ ID NO: 542765 - RNA, 19 nt, Artificial Sequence
  Description of Artificial Sequence: Synthetic oligonucleotide
gcgcccgaacauacgacug

SEQ ID NO: 542766 - RNA, 19 nt, Artificial Sequence
  Description of Artificial Sequence: Synthetic oligonucleotide
ccauggguccgcacaccug

SEQ ID NO: 542767 - RNA, 19 nt, Artificial Sequence
  Description of Artificial Sequence: Synthetic oligonucleotide
cagucccacccgacauguc

SEQ ID NO: 542768 - RNA, 19 nt, Artificial Sequence
  Description of Artificial Sequence: Synthetic oligonucleotide
cuucguugggccgaaccuu

SEQ ID NO: 542769 - RNA, 19 nt, Artificial Sequence
  Description of Artificial Sequence: Synthetic oligonucleotide
ccggacucucauagacaug

SEQ ID NO: 542770 - RNA, 19 nt, Artificial Sequence
  Description of Artificial Sequence: Synthetic oligonucleotide
cuuuugauaccgggacuuu

SEQ ID NO: 542771 - RNA, 19 nt, Artificial Sequence
  Description of Artificial Sequence: Synthetic oligonucleotide
ccuuuugauaccgggacuu

SEQ ID NO: 542772 - RNA, 19 nt, Artificial Sequence
  Description of Artificial Sequence: Synthetic oligonucleotide
ggauucgggcucugaucua

SEQ ID NO: 542773 - RNA, 19 nt, Artificial Sequence
  Description of Artificial Sequence: Synthetic oligonucleotide
gccaugcaugaaacauuuc

SEQ ID NO: 542774 - RNA, 19 nt, Artificial Sequence
  Description of Artificial Sequence: Synthetic oligonucleotide
ggaacggauggagggcaua

SEQ ID NO: 542775 - RNA, 19 nt, Artificial Sequence
  Description of Artificial Sequence: Synthetic oligonucleotide
cugcguccuuaugguuuuc

SEQ ID NO: 542776 - RNA, 19 nt, Artificial Sequence
  Description of Artificial Sequence: Synthetic oligonucleotide
ggauuacacuuggucucgu

SEQ ID NO: 542777 - RNA, 19 nt, Artificial Sequence
  Description of Artificial Sequence: Synthetic oligonucleotide
cccauggguccgcacaccu

SEQ ID NO: 542778 - RNA, 19 nt, Artificial Sequence
  Description of Artificial Sequence: Synthetic oligonucleotide
cccgaacauacgacugggu

SEQ ID NO: 542779 - RNA, 19 nt, Artificial Sequence
  Description of Artificial Sequence: Synthetic oligonucleotide
ccacaacauuaucgaggaa

SEQ ID NO: 542780 - RNA, 19 nt, Artificial Sequence
  Description of Artificial Sequence: Synthetic oligonucleotide
guuaggccuuaugcaccuu

SEQ ID NO: 542781 - RNA, 19 nt, Artificial Sequence
  Description of Artificial Sequence: Synthetic oligonucleotide
cggcauugcgaguuccagu

SEQ ID NO: 542782 - RNA, 19 nt, Artificial Sequence
  Description of Artificial Sequence: Synthetic oligonucleotide
cgacuggguaguucggcau

SEQ ID NO: 542783 - RNA, 19 nt, Artificial Sequence
  Description of Artificial Sequence: Synthetic oligonucleotide
ggacucucauagacauguu

SEQ ID NO: 542784 - RNA, 19 nt, Artificial Sequence
  Description of Artificial Sequence: Synthetic oligonucleotide
ugaaccguaaucaugagcu

SEQ ID NO: 542785 - RNA, 19 nt, Artificial Sequence
  Description of Artificial Sequence: Synthetic oligonucleotide
aguacguggagucucagcc

SEQ ID NO: 542786 - RNA, 19 nt, Artificial Sequence
  Description of Artificial Sequence: Synthetic oligonucleotide
uuagcaauggucaguagag

SEQ ID NO: 542787 - RNA, 19 nt, Artificial Sequence
  Description of Artificial Sequence: Synthetic oligonucleotide
uuaccaaggaaaaguauag

SEQ ID NO: 542788 - RNA, 19 nt, Artificial Sequence
  Description of Artificial Sequence: Synthetic oligonucleotide
agaaaaguccgugacaugg

SEQ ID NO: 542789 - RNA, 19 nt, Artificial Sequence
  Description of Artificial Sequence: Synthetic oligonucleotide
ugcccaguaggccagaagg

SEQ ID NO: 542790 - RNA, 19 nt, Artificial Sequence
  Description of Artificial Sequence: Synthetic oligonucleotide
uccugaaccguaaucauga

SEQ ID NO: 542791 - RNA, 19 nt, Artificial Sequence
  Description of Artificial Sequence: Synthetic oligonucleotide
agcuaagcaccuucuagcc

SEQ ID NO: 542792 - RNA, 19 nt, Artificial Sequence
  Description of Artificial Sequence: Synthetic oligonucleotide
acguuuauuuucaacaacg

SEQ ID NO: 542793 - RNA, 19 nt, Artificial Sequence
  Description of Artificial Sequence: Synthetic oligonucleotide
uguagucuucgcuggaugg

SEQ ID NO: 542794 - RNA, 19 nt, Artificial Sequence
  Description of Artificial Sequence: Synthetic oligonucleotide
ugcuuuucuugucacacgc

SEQ ID NO: 542795 - RNA, 19 nt, Artificial Sequence
  Description of Artificial Sequence: Synthetic oligonucleotide
uucuauggccauaacacgu

SEQ ID NO: 542796 - RNA, 19 nt, Artificial Sequence
  Description of Artificial Sequence: Synthetic oligonucleotide
agagcuaagcaccuucuag

SEQ ID NO: 542797 - RNA, 19 nt, Artificial Sequence
  Description of Artificial Sequence: Synthetic oligonucleotide
ugugaagucaaaggcagcc

SEQ ID NO: 542798 - RNA, 19 nt, Artificial Sequence
  Description of Artificial Sequence: Synthetic oligonucleotide
ucaacaacgaagccucuga

SEQ ID NO: 542799 - RNA, 19 nt, Artificial Sequence
  Description of Artificial Sequence: Synthetic oligonucleotide
auuuucaacaacgaagccu

SEQ ID NO: 542800 - RNA, 19 nt, Artificial Sequence
  Description of Artificial Sequence: Synthetic oligonucleotide
ucagauacuaggcuguuuu

SEQ ID NO: 542801 - RNA, 19 nt, Artificial Sequence
  Description of Artificial Sequence: Synthetic oligonucleotide
cuuuucuugucacacgcgc

SEQ ID NO: 542802 - RNA, 19 nt, Artificial Sequence
  Description of Artificial Sequence: Synthetic oligonucleotide
ucagggauaauggccaagg

SEQ ID NO: 542803 - RNA, 19 nt, Artificial Sequence
  Description of Artificial Sequence: Synthetic oligonucleotide
gagcuaagcaccuucuagc

SEQ ID NO: 542804 - RNA, 19 nt, Artificial Sequence
  Description of Artificial Sequence: Synthetic oligonucleotide
aacaacgaagccucugacu

SEQ ID NO: 542805 - RNA, 19 nt, Artificial Sequence
  Description of Artificial Sequence: Synthetic oligonucleotide
uaccaugucggguacuuag

SEQ ID NO: 542806 - RNA, 19 nt, Artificial Sequence
  Description of Artificial Sequence: Synthetic oligonucleotide
ugcaguuuaccaaggaaaa

SEQ ID NO: 542807 - RNA, 19 nt, Artificial Sequence
  Description of Artificial Sequence: Synthetic oligonucleotide
auggccaaggaggacagcc

SEQ ID NO: 542808 - RNA, 19 nt, Artificial Sequence
  Description of Artificial Sequence: Synthetic oligonucleotide
acagaagcguuccaggaug

SEQ ID NO: 542809 - RNA, 19 nt, Artificial Sequence
  Description of Artificial Sequence: Synthetic oligonucleotide
uauuuucaacaacgaagcc

SEQ ID NO: 542810 - RNA, 19 nt, Artificial Sequence
  Description of Artificial Sequence: Synthetic oligonucleotide
ugugcggauagcacugggg

SEQ ID NO: 542811 - RNA, 19 nt, Artificial Sequence
  Description of Artificial Sequence: Synthetic oligonucleotide
accuucagugcccaggcgg

SEQ ID NO: 542812 - RNA, 19 nt, Artificial Sequence
  Description of Artificial Sequence: Synthetic oligonucleotide
acaacgaagccucugacua

SEQ ID NO: 542813 - RNA, 19 nt, Artificial Sequence
  Description of Artificial Sequence: Synthetic oligonucleotide
ucguccaucagcccaggag

SEQ ID NO: 542814 - RNA, 19 nt, Artificial Sequence
  Description of Artificial Sequence: Synthetic oligonucleotide
uguucuggagagcugcucu

SEQ ID NO: 542815 - RNA, 19 nt, Artificial Sequence
  Description of Artificial Sequence: Synthetic oligonucleotide
cauaacacguuuauuuuca

SEQ ID NO: 542816 - RNA, 19 nt, Artificial Sequence
  Description of Artificial Sequence: Synthetic oligonucleotide
uggagucucagccucuacc

SEQ ID NO: 542817 - RNA, 19 nt, Artificial Sequence
  Description of Artificial Sequence: Synthetic oligonucleotide
acgcgcagaacucucugcc

SEQ ID NO: 542818 - RNA, 19 nt, Artificial Sequence
  Description of Artificial Sequence: Synthetic oligonucleotide
uucgauaccaugucgggua

SEQ ID NO: 542819 - RNA, 19 nt, Artificial Sequence
  Description of Artificial Sequence: Synthetic oligonucleotide
ugacuagacaguccagaug

SEQ ID NO: 542820 - RNA, 19 nt, Artificial Sequence
  Description of Artificial Sequence: Synthetic oligonucleotide
ucugcccgcaucaugcuug

SEQ ID NO: 542821 - RNA, 19 nt, Artificial Sequence
  Description of Artificial Sequence: Synthetic oligonucleotide
cagagcucguccaucagcc

SEQ ID NO: 542822 - RNA, 19 nt, Artificial Sequence
  Description of Artificial Sequence: Synthetic oligonucleotide
uuagucauggugccugagu

SEQ ID NO: 542823 - RNA, 19 nt, Artificial Sequence
  Description of Artificial Sequence: Synthetic oligonucleotide
uguagggagcuccugguuc

SEQ ID NO: 542824 - RNA, 19 nt, Artificial Sequence
  Description of Artificial Sequence: Synthetic oligonucleotide
cuuagcaauggucaguaga

SEQ ID NO: 542825 - RNA, 19 nt, Artificial Sequence
  Description of Artificial Sequence: Synthetic oligonucleotide
ucagccgacggguaggcug

SEQ ID NO: 542826 - RNA, 19 nt, Artificial Sequence
  Description of Artificial Sequence: Synthetic oligonucleotide
gaacuuguggcgcuuggac

SEQ ID NO: 542827 - RNA, 19 nt, Artificial Sequence
  Description of Artificial Sequence: Synthetic oligonucleotide
caugcuuuucuugucacac

SEQ ID NO: 542828 - RNA, 19 nt, Artificial Sequence
  Description of Artificial Sequence: Synthetic oligonucleotide
caugcuugugaagucaaag

SEQ ID NO: 542829 - RNA, 19 nt, Artificial Sequence
  Description of Artificial Sequence: Synthetic oligonucleotide
accuucuagcccugggccc

SEQ ID NO: 542830 - RNA, 19 nt, Artificial Sequence
  Description of Artificial Sequence: Synthetic oligonucleotide
aagaaaaguccgugacaug

SEQ ID NO: 542831 - RNA, 19 nt, Artificial Sequence
  Description of Artificial Sequence: Synthetic oligonucleotide
ucuaaacuggagaggcgga

SEQ ID NO: 542832 - RNA, 19 nt, Artificial Sequence
  Description of Artificial Sequence: Synthetic oligonucleotide
aggguucgauaccaugucg

SEQ ID NO: 542833 - RNA, 19 nt, Artificial Sequence
  Description of Artificial Sequence: Synthetic oligonucleotide
auccacacagaagcguucc

SEQ ID NO: 542834 - RNA, 19 nt, Artificial Sequence
  Description of Artificial Sequence: Synthetic oligonucleotide
cuagccagaguuucuuuug

SEQ ID NO: 542835 - RNA, 19 nt, Artificial Sequence
  Description of Artificial Sequence: Synthetic oligonucleotide
uguggccucaggaacuugu

SEQ ID NO: 542836 - RNA, 19 nt, Artificial Sequence
  Description of Artificial Sequence: Synthetic oligonucleotide
cugaaccguaaucaugagc

SEQ ID NO: 542837 - RNA, 19 nt, Artificial Sequence
  Description of Artificial Sequence: Synthetic oligonucleotide
ggcguucuaaacuggagag

SEQ ID NO: 542838 - RNA, 19 nt, Artificial Sequence
  Description of Artificial Sequence: Synthetic oligonucleotide
uggacuuccaucgcuguca

SEQ ID NO: 542839 - RNA, 19 nt, Artificial Sequence
  Description of Artificial Sequence: Synthetic oligonucleotide
guaaucaugagcucagccu

SEQ ID NO: 542840 - RNA, 19 nt, Artificial Sequence
  Description of Artificial Sequence: Synthetic oligonucleotide
aagggacuuucuuccaccu

SEQ ID NO: 542841 - RNA, 19 nt, Artificial Sequence
  Description of Artificial Sequence: Synthetic oligonucleotide
uccugggucagggauaaug

SEQ ID NO: 542842 - RNA, 19 nt, Artificial Sequence
  Description of Artificial Sequence: Synthetic oligonucleotide
aggcguucuaaacuggaga

SEQ ID NO: 542843 - RNA, 19 nt, Artificial Sequence
  Description of Artificial Sequence: Synthetic oligonucleotide
uguagagguguuucccaca

SEQ ID NO: 542844 - RNA, 19 nt, Artificial Sequence
  Description of Artificial Sequence: Synthetic oligonucleotide
augucggguacuuagucau

SEQ ID NO: 542845 - RNA, 19 nt, Artificial Sequence
  Description of Artificial Sequence: Synthetic oligonucleotide
uccagcuuugugccuuccg

SEQ ID NO: 542846 - RNA, 19 nt, Artificial Sequence
  Description of Artificial Sequence: Synthetic oligonucleotide
cuugucacccuuccucugc

SEQ ID NO: 542847 - RNA, 19 nt, Artificial Sequence
  Description of Artificial Sequence: Synthetic oligonucleotide
gaggaagaaaaguccguga

SEQ ID NO: 542848 - RNA, 19 nt, Artificial Sequence
  Description of Artificial Sequence: Synthetic oligonucleotide
aacgaagccucugacuaga

SEQ ID NO: 542849 - RNA, 19 nt, Artificial Sequence
  Description of Artificial Sequence: Synthetic oligonucleotide
gaagaaaaguccgugacau

SEQ ID NO: 542850 - RNA, 19 nt, Artificial Sequence
  Description of Artificial Sequence: Synthetic oligonucleotide
uggagaggcggaucagccg

SEQ ID NO: 542851 - RNA, 19 nt, Artificial Sequence
  Description of Artificial Sequence: Synthetic oligonucleotide
cuaccuucagugcccaggc

SEQ ID NO: 542852 - RNA, 19 nt, Artificial Sequence
  Description of Artificial Sequence: Synthetic oligonucleotide
caggguuucuucccgauuc

SEQ ID NO: 542853 - RNA, 19 nt, Artificial Sequence
  Description of Artificial Sequence: Synthetic oligonucleotide
ucuauggccauaacacguu

SEQ ID NO: 542854 - RNA, 19 nt, Artificial Sequence
  Description of Artificial Sequence: Synthetic oligonucleotide
ucucuggacuuccaucgcu

SEQ ID NO: 542855 - RNA, 19 nt, Artificial Sequence
  Description of Artificial Sequence: Synthetic oligonucleotide
cucggacugacgaucggcc

SEQ ID NO: 542856 - RNA, 19 nt, Artificial Sequence
  Description of Artificial Sequence: Synthetic oligonucleotide
ugacgaucggccucugucu

SEQ ID NO: 542857 - RNA, 19 nt, Artificial Sequence
  Description of Artificial Sequence: Synthetic oligonucleotide
ucuugucacacgcgcagaa

SEQ ID NO: 542858 - RNA, 19 nt, Artificial Sequence
  Description of Artificial Sequence: Synthetic oligonucleotide
gucggguacuuagucaugg

SEQ ID NO: 542859 - RNA, 19 nt, Artificial Sequence
  Description of Artificial Sequence: Synthetic oligonucleotide
auggccauaacacguuuau

SEQ ID NO: 542860 - RNA, 19 nt, Artificial Sequence
  Description of Artificial Sequence: Synthetic oligonucleotide
uaccaaggaaaaguauagc

SEQ ID NO: 542861 - RNA, 19 nt, Artificial Sequence
  Description of Artificial Sequence: Synthetic oligonucleotide
uucagauggcagugauggg

SEQ ID NO: 542862 - RNA, 19 nt, Artificial Sequence
  Description of Artificial Sequence: Synthetic oligonucleotide
augaggguucgauaccaug

SEQ ID NO: 542863 - RNA, 19 nt, Artificial Sequence
  Description of Artificial Sequence: Synthetic oligonucleotide
cugacgaucggccucuguc

SEQ ID NO: 542864 - RNA, 19 nt, Artificial Sequence
  Description of Artificial Sequence: Synthetic oligonucleotide
ucauacagggcuucaccau

SEQ ID NO: 542865 - RNA, 19 nt, Artificial Sequence
  Description of Artificial Sequence: Synthetic oligonucleotide
cauacagggcuucaccauc

SEQ ID NO: 542866 - RNA, 19 nt, Artificial Sequence
  Description of Artificial Sequence: Synthetic oligonucleotide
ggguacuuagucauggugc

SEQ ID NO: 542867 - RNA, 19 nt, Artificial Sequence
  Description of Artificial Sequence: Synthetic oligonucleotide
uucagugcccaggcggugg

SEQ ID NO: 542868 - RNA, 19 nt, Artificial Sequence
  Description of Artificial Sequence: Synthetic oligonucleotide
guagccucgcagcuccugg

SEQ ID NO: 542869 - RNA, 19 nt, Artificial Sequence
  Description of Artificial Sequence: Synthetic oligonucleotide
ccauguguggcaaaaucag

SEQ ID NO: 542870 - RNA, 19 nt, Artificial Sequence
  Description of Artificial Sequence: Synthetic oligonucleotide
caauggucaguagagucug

SEQ ID NO: 542871 - RNA, 19 nt, Artificial Sequence
  Description of Artificial Sequence: Synthetic oligonucleotide
aaaguccgugacauggacu

SEQ ID NO: 542872 - RNA, 19 nt, Artificial Sequence
  Description of Artificial Sequence: Synthetic oligonucleotide
cuaagcaccuucuagcccu

SEQ ID NO: 542873 - RNA, 19 nt, Artificial Sequence
  Description of Artificial Sequence: Synthetic oligonucleotide
caccauccaggcugcaucg

SEQ ID NO: 542874 - RNA, 19 nt, Artificial Sequence
  Description of Artificial Sequence: Synthetic oligonucleotide
ugucacacgcgcagaacuc

SEQ ID NO: 542875 - RNA, 19 nt, Artificial Sequence
  Description of Artificial Sequence: Synthetic oligonucleotide
uucucuggacuuccaucgc

SEQ ID NO: 542876 - RNA, 19 nt, Artificial Sequence
  Description of Artificial Sequence: Synthetic oligonucleotide
ugagucggucuugucaccc

SEQ ID NO: 542877 - RNA, 19 nt, Artificial Sequence
  Description of Artificial Sequence: Synthetic oligonucleotide
ucuuagcaauggucaguag

SEQ ID NO: 542878 - RNA, 19 nt, Artificial Sequence
  Description of Artificial Sequence: Synthetic oligonucleotide
gaacucucugcccgcauca

SEQ ID NO: 542879 - RNA, 19 nt, Artificial Sequence
  Description of Artificial Sequence: Synthetic oligonucleotide
ucccaagcuugccaugugu

SEQ ID NO: 542880 - RNA, 19 nt, Artificial Sequence
  Description of Artificial Sequence: Synthetic oligonucleotide
gaggguucgauaccauguc

SEQ ID NO: 542881 - RNA, 19 nt, Artificial Sequence
  Description of Artificial Sequence: Synthetic oligonucleotide
aggcggaucagccgacggg

SEQ ID NO: 542882 - RNA, 19 nt, Artificial Sequence
  Description of Artificial Sequence: Synthetic oligonucleotide
uguuccugggucagggaua

SEQ ID NO: 542883 - RNA, 19 nt, Artificial Sequence
  Description of Artificial Sequence: Synthetic oligonucleotide
ugccuauagccaccuggcc

SEQ ID NO: 542884 - RNA, 19 nt, Artificial Sequence
  Description of Artificial Sequence: Synthetic oligonucleotide
gaggcggaucagccgacgg

SEQ ID NO: 542885 - RNA, 19 nt, Artificial Sequence
  Description of Artificial Sequence: Synthetic oligonucleotide
ggugccugaguucuuagca

SEQ ID NO: 542886 - RNA, 19 nt, Artificial Sequence
  Description of Artificial Sequence: Synthetic oligonucleotide
uccguuguaggguccucug

SEQ ID NO: 542887 - RNA, 19 nt, Artificial Sequence
  Description of Artificial Sequence: Synthetic oligonucleotide
uaccuucagugcccaggcg

SEQ ID NO: 542888 - RNA, 19 nt, Artificial Sequence
  Description of Artificial Sequence: Synthetic oligonucleotide
caugucggguacuuaguca

SEQ ID NO: 542889 - RNA, 19 nt, Artificial Sequence
  Description of Artificial Sequence: Synthetic oligonucleotide
ucgauaccaugucggguac

SEQ ID NO: 542890 - RNA, 19 nt, Artificial Sequence
  Description of Artificial Sequence: Synthetic oligonucleotide
uucguuccuccuggaagcg

SEQ ID NO: 542891 - RNA, 19 nt, Artificial Sequence
  Description of Artificial Sequence: Synthetic oligonucleotide
auaacacguuuauuuucaa

SEQ ID NO: 542892 - RNA, 19 nt, Artificial Sequence
  Description of Artificial Sequence: Synthetic oligonucleotide
agucugcucuaagucuggc

SEQ ID NO: 542893 - RNA, 19 nt, Artificial Sequence
  Description of Artificial Sequence: Synthetic oligonucleotide
aggagauacaggaggugag

SEQ ID NO: 542894 - RNA, 19 nt, Artificial Sequence
  Description of Artificial Sequence: Synthetic oligonucleotide
acuagacaguccagauggc

SEQ ID NO: 542895 - RNA, 19 nt, Artificial Sequence
  Description of Artificial Sequence: Synthetic oligonucleotide
ugcucuagccagaguuucu

SEQ ID NO: 542896 - RNA, 19 nt, Artificial Sequence
  Description of Artificial Sequence: Synthetic oligonucleotide
ugucggguacuuagucaug

SEQ ID NO: 542897 - RNA, 19 nt, Artificial Sequence
  Description of Artificial Sequence: Synthetic oligonucleotide
caacaacgaagccucugac

SEQ ID NO: 542898 - RNA, 19 nt, Artificial Sequence
  Description of Artificial Sequence: Synthetic oligonucleotide
ggaagaaaaguccgugaca

SEQ ID NO: 542899 - RNA, 19 nt, Artificial Sequence
  Description of Artificial Sequence: Synthetic oligonucleotide
cguucuaaacuggagaggc

SEQ ID NO: 542900 - RNA, 19 nt, Artificial Sequence
  Description of Artificial Sequence: Synthetic oligonucleotide
agggcugacccucuccaca

SEQ ID NO: 542901 - RNA, 19 nt, Artificial Sequence
  Description of Artificial Sequence: Synthetic oligonucleotide
guagagguguuucccacaa

SEQ ID NO: 542902 - RNA, 19 nt, Artificial Sequence
  Description of Artificial Sequence: Synthetic oligonucleotide
ucaugcuugugaagucaaa

SEQ ID NO: 542903 - RNA, 19 nt, Artificial Sequence
  Description of Artificial Sequence: Synthetic oligonucleotide
gcaaaaccucuucaucucc

SEQ ID NO: 542904 - RNA, 19 nt, Artificial Sequence
  Description of Artificial Sequence: Synthetic oligonucleotide
guagucuucgcuggauggc

SEQ ID NO: 542905 - RNA, 19 nt, Artificial Sequence
  Description of Artificial Sequence: Synthetic oligonucleotide
uuucaacaacgaagccucu

SEQ ID NO: 542906 - RNA, 19 nt, Artificial Sequence
  Description of Artificial Sequence: Synthetic oligonucleotide
uccgugacauggacuccag

SEQ ID NO: 542907 - RNA, 19 nt, Artificial Sequence
  Description of Artificial Sequence: Synthetic oligonucleotide
ggcuccaccagacagucuc

SEQ ID NO: 542908 - RNA, 19 nt, Artificial Sequence
  Description of Artificial Sequence: Synthetic oligonucleotide
ggaggaagaaaaguccgug

SEQ ID NO: 542909 - RNA, 19 nt, Artificial Sequence
  Description of Artificial Sequence: Synthetic oligonucleotide
caguuuaccaaggaaaagu

SEQ ID NO: 542910 - RNA, 19 nt, Artificial Sequence
  Description of Artificial Sequence: Synthetic oligonucleotide
uagagcuaagcaccuucua

SEQ ID NO: 542911 - RNA, 19 nt, Artificial Sequence
  Description of Artificial Sequence: Synthetic oligonucleotide
gcuaccuucagugcccagg

SEQ ID NO: 542912 - RNA, 19 nt, Artificial Sequence
  Description of Artificial Sequence: Synthetic oligonucleotide
aucucacugagccuucguu

SEQ ID NO: 542913 - RNA, 19 nt, Artificial Sequence
  Description of Artificial Sequence: Synthetic oligonucleotide
auagagcuaagcaccuucu

SEQ ID NO: 542914 - RNA, 19 nt, Artificial Sequence
  Description of Artificial Sequence: Synthetic oligonucleotide
uuggguggaggcucuguuc

SEQ ID NO: 542915 - RNA, 19 nt, Artificial Sequence
  Description of Artificial Sequence: Synthetic oligonucleotide
uuccaucgcugucagccuc

SEQ ID NO: 542916 - RNA, 19 nt, Artificial Sequence
  Description of Artificial Sequence: Synthetic oligonucleotide
gaaccguaaucaugagcuc

SEQ ID NO: 542917 - RNA, 19 nt, Artificial Sequence
  Description of Artificial Sequence: Synthetic oligonucleotide
ccauaacacguuuauuuuc

SEQ ID NO: 542918 - RNA, 19 nt, Artificial Sequence
  Description of Artificial Sequence: Synthetic oligonucleotide
cacaucuggccgcccacgg

SEQ ID NO: 542919 - RNA, 19 nt, Artificial Sequence
  Description of Artificial Sequence: Synthetic oligonucleotide
uccucggacugacgaucgg

SEQ ID NO: 542920 - RNA, 19 nt, Artificial Sequence
  Description of Artificial Sequence: Synthetic oligonucleotide
ucagugcccaggcgguggc

SEQ ID NO: 542921 - RNA, 19 nt, Artificial Sequence
  Description of Artificial Sequence: Synthetic oligonucleotide
cccgguggaagaaauggcc

SEQ ID NO: 542922 - RNA, 19 nt, Artificial Sequence
  Description of Artificial Sequence: Synthetic oligonucleotide
agguucccaagcuugccau

SEQ ID NO: 542923 - RNA, 19 nt, Artificial Sequence
  Description of Artificial Sequence: Synthetic oligonucleotide
gcgcagaacucucugcccg

SEQ ID NO: 542924 - RNA, 19 nt, Artificial Sequence
  Description of Artificial Sequence: Synthetic oligonucleotide
cuuggacuggcacacccca

SEQ ID NO: 542925 - RNA, 19 nt, Artificial Sequence
  Description of Artificial Sequence: Synthetic oligonucleotide
acacgcgcagaacucucug

SEQ ID NO: 542926 - RNA, 19 nt, Artificial Sequence
  Description of Artificial Sequence: Synthetic oligonucleotide
cacgcgcagaacucucugc

SEQ ID NO: 542927 - RNA, 19 nt, Artificial Sequence
  Description of Artificial Sequence: Synthetic oligonucleotide
uucccaagcuugccaugug

SEQ ID NO: 542928 - RNA, 19 nt, Artificial Sequence
  Description of Artificial Sequence: Synthetic oligonucleotide
acuuagucauggugccuga

SEQ ID NO: 542929 - RNA, 19 nt, Artificial Sequence
  Description of Artificial Sequence: Synthetic oligonucleotide
ugccuaccacuacugccug

SEQ ID NO: 542930 - RNA, 19 nt, Artificial Sequence
  Description of Artificial Sequence: Synthetic oligonucleotide
uucgcuggauggccugggc

SEQ ID NO: 542931 - RNA, 19 nt, Artificial Sequence
  Description of Artificial Sequence: Synthetic oligonucleotide
uggcgcuuggacuggcaca

SEQ ID NO: 542932 - RNA, 19 nt, Artificial Sequence
  Description of Artificial Sequence: Synthetic oligonucleotide
ugcucuaagucuggcucca

SEQ ID NO: 542933 - RNA, 19 nt, Artificial Sequence
  Description of Artificial Sequence: Synthetic oligonucleotide
accagacagucucccacca

SEQ ID NO: 542934 - RNA, 19 nt, Artificial Sequence
  Description of Artificial Sequence: Synthetic oligonucleotide
ucacacgcgcagaacucuc

SEQ ID NO: 542935 - RNA, 19 nt, Artificial Sequence
  Description of Artificial Sequence: Synthetic oligonucleotide
cauccacacagaagcguuc

SEQ ID NO: 542936 - RNA, 19 nt, Artificial Sequence
  Description of Artificial Sequence: Synthetic oligonucleotide
gguucaccacauccaacag

SEQ ID NO: 542937 - RNA, 19 nt, Artificial Sequence
  Description of Artificial Sequence: Synthetic oligonucleotide
aggguuucuucccgauuca

SEQ ID NO: 542938 - RNA, 19 nt, Artificial Sequence
  Description of Artificial Sequence: Synthetic oligonucleotide
ggagaggcggaucagccga

SEQ ID NO: 542939 - RNA, 19 nt, Artificial Sequence
  Description of Artificial Sequence: Synthetic oligonucleotide
ucggacugacgaucggccu

SEQ ID NO: 542940 - RNA, 19 nt, Artificial Sequence
  Description of Artificial Sequence: Synthetic oligonucleotide
ucaguagagucugcucuaa

SEQ ID NO: 542941 - RNA, 19 nt, Artificial Sequence
  Description of Artificial Sequence: Synthetic oligonucleotide
aggacagccgcaggcguuc

SEQ ID NO: 542942 - RNA, 19 nt, Artificial Sequence
  Description of Artificial Sequence: Synthetic oligonucleotide
gcgcaugaggguucgauac

SEQ ID NO: 542943 - RNA, 19 nt, Artificial Sequence
  Description of Artificial Sequence: Synthetic oligonucleotide
aagccucugacuagacagu

SEQ ID NO: 542944 - RNA, 19 nt, Artificial Sequence
  Description of Artificial Sequence: Synthetic oligonucleotide
cguaaucaugagcucagcc

SEQ ID NO: 542945 - RNA, 19 nt, Artificial Sequence
  Description of Artificial Sequence: Synthetic oligonucleotide
cuagacaguccagauggca

SEQ ID NO: 542946 - RNA, 19 nt, Artificial Sequence
  Description of Artificial Sequence: Synthetic oligonucleotide
acgggcaucccgagcaaac

SEQ ID NO: 542947 - RNA, 19 nt, Artificial Sequence
  Description of Artificial Sequence: Synthetic oligonucleotide
ugcaucgaaggcugccaaa

SEQ ID NO: 542948 - RNA, 19 nt, Artificial Sequence
  Description of Artificial Sequence: Synthetic oligonucleotide
uguggggcauguucuugaa

SEQ ID NO: 542949 - RNA, 19 nt, Artificial Sequence
  Description of Artificial Sequence: Synthetic oligonucleotide
cagcucuuguucugcuacc

SEQ ID NO: 542950 - RNA, 19 nt, Artificial Sequence
  Description of Artificial Sequence: Synthetic oligonucleotide
caccacgucauacagggcu

SEQ ID NO: 542951 - RNA, 19 nt, Artificial Sequence
  Description of Artificial Sequence: Synthetic oligonucleotide
gcuaagcaccuucuagccc

SEQ ID NO: 542952 - RNA, 19 nt, Artificial Sequence
  Description of Artificial Sequence: Synthetic oligonucleotide
ucguuccuccuggaagcgg

SEQ ID NO: 542953 - RNA, 19 nt, Artificial Sequence
  Description of Artificial Sequence: Synthetic oligonucleotide
ucggguacuuagucauggu

SEQ ID NO: 542954 - RNA, 19 nt, Artificial Sequence
  Description of Artificial Sequence: Synthetic oligonucleotide
cgagcaaacuccagguucc

SEQ ID NO: 542955 - RNA, 19 nt, Artificial Sequence
  Description of Artificial Sequence: Synthetic oligonucleotide
cuggcacaccccaacccac

SEQ ID NO: 542956 - RNA, 19 nt, Artificial Sequence
  Description of Artificial Sequence: Synthetic oligonucleotide
cuugucacacgcgcagaac

SEQ ID NO: 542957 - RNA, 19 nt, Artificial Sequence
  Description of Artificial Sequence: Synthetic oligonucleotide
gaucagccgacggguaggc

SEQ ID NO: 542958 - RNA, 19 nt, Artificial Sequence
  Description of Artificial Sequence: Synthetic oligonucleotide
cuacugccugugcggauag

SEQ ID NO: 542959 - RNA, 19 nt, Artificial Sequence
  Description of Artificial Sequence: Synthetic oligonucleotide
gccccgguggaagaaaugg

SEQ ID NO: 542960 - RNA, 19 nt, Artificial Sequence
  Description of Artificial Sequence: Synthetic oligonucleotide
gacggguaggcuggcuggg

SEQ ID NO: 542961 - RNA, 19 nt, Artificial Sequence
  Description of Artificial Sequence: Synthetic oligonucleotide
cuuagucauggugccugag

SEQ ID NO: 542962 - RNA, 19 nt, Artificial Sequence
  Description of Artificial Sequence: Synthetic oligonucleotide
ccgcauagcagccucaauc

SEQ ID NO: 542963 - RNA, 19 nt, Artificial Sequence
  Description of Artificial Sequence: Synthetic oligonucleotide
uagagcucccaugcccugc

SEQ ID NO: 542964 - RNA, 19 nt, Artificial Sequence
  Description of Artificial Sequence: Synthetic oligonucleotide
guccucggacugacgaucg

SEQ ID NO: 542965 - RNA, 19 nt, Artificial Sequence
  Description of Artificial Sequence: Synthetic oligonucleotide
caccaugcuuuucuuguca

SEQ ID NO: 542966 - RNA, 19 nt, Artificial Sequence
  Description of Artificial Sequence: Synthetic oligonucleotide
uguagccucgcagcuccug

SEQ ID NO: 542967 - RNA, 19 nt, Artificial Sequence
  Description of Artificial Sequence: Synthetic oligonucleotide
cuaccacuacugccugugc

SEQ ID NO: 542968 - RNA, 19 nt, Artificial Sequence
  Description of Artificial Sequence: Synthetic oligonucleotide
agcucuuguucugcuaccu

SEQ ID NO: 542969 - RNA, 19 nt, Artificial Sequence
  Description of Artificial Sequence: Synthetic oligonucleotide
ccgagcaaacuccagguuc

SEQ ID NO: 542970 - RNA, 19 nt, Artificial Sequence
  Description of Artificial Sequence: Synthetic oligonucleotide
gaggggccuggcugcaugc

SEQ ID NO: 542971 - RNA, 19 nt, Artificial Sequence
  Description of Artificial Sequence: Synthetic oligonucleotide
ggcaucccgagcaaacucc

SEQ ID NO: 542972 - RNA, 19 nt, Artificial Sequence
  Description of Artificial Sequence: Synthetic oligonucleotide
caugcccugcagcucugag

SEQ ID NO: 542973 - RNA, 19 nt, Artificial Sequence
  Description of Artificial Sequence: Synthetic oligonucleotide
aacugcccuccagagccug

SEQ ID NO: 542974 - RNA, 19 nt, Artificial Sequence
  Description of Artificial Sequence: Synthetic oligonucleotide
uccucaguacguggagucu

SEQ ID NO: 542975 - RNA, 19 nt, Artificial Sequence
  Description of Artificial Sequence: Synthetic oligonucleotide
cucaguacguggagucuca

SEQ ID NO: 542976 - RNA, 19 nt, Artificial Sequence
  Description of Artificial Sequence: Synthetic oligonucleotide
cuagagcucccaugcccug

SEQ ID NO: 542977 - RNA, 19 nt, Artificial Sequence
  Description of Artificial Sequence: Synthetic oligonucleotide
gugcggauagcacuggggu

SEQ ID NO: 542978 - RNA, 19 nt, Artificial Sequence
  Description of Artificial Sequence: Synthetic oligonucleotide
cugccuaccacuacugccu

SEQ ID NO: 542979 - RNA, 19 nt, Artificial Sequence
  Description of Artificial Sequence: Synthetic oligonucleotide
guaggcggugcaccagggc

SEQ ID NO: 542980 - RNA, 19 nt, Artificial Sequence
  Description of Artificial Sequence: Synthetic oligonucleotide
gucagggauaauggccaag

SEQ ID NO: 542981 - RNA, 19 nt, Artificial Sequence
  Description of Artificial Sequence: Synthetic oligonucleotide
gguacacugggcucagaga

SEQ ID NO: 542982 - RNA, 19 nt, Artificial Sequence
  Description of Artificial Sequence: Synthetic oligonucleotide
cugcucuagccagaguuuc

SEQ ID NO: 542983 - RNA, 19 nt, Artificial Sequence
  Description of Artificial Sequence: Synthetic oligonucleotide
acuacugccugugcggaua

SEQ ID NO: 542984 - RNA, 19 nt, Artificial Sequence
  Description of Artificial Sequence: Synthetic oligonucleotide
gccauguguggcaaaauca

SEQ ID NO: 542985 - RNA, 19 nt, Artificial Sequence
  Description of Artificial Sequence: Synthetic oligonucleotide
caggucccgcauagcagcc

SEQ ID NO: 542986 - RNA, 19 nt, Artificial Sequence
  Description of Artificial Sequence: Synthetic oligonucleotide
gucuucgcuggauggccug

SEQ ID NO: 542987 - RNA, 19 nt, Artificial Sequence
  Description of Artificial Sequence: Synthetic oligonucleotide
gguccucugcaguuuacca

SEQ ID NO: 542988 - RNA, 19 nt, Artificial Sequence
  Description of Artificial Sequence: Synthetic oligonucleotide
aguaggcgggcaccaugcu

SEQ ID NO: 542989 - RNA, 19 nt, Artificial Sequence
  Description of Artificial Sequence: Synthetic oligonucleotide
gcguucuaaacuggagagg

SEQ ID NO: 542990 - RNA, 19 nt, Artificial Sequence
  Description of Artificial Sequence: Synthetic oligonucleotide
uucccugagucggucuugu

SEQ ID NO: 542991 - RNA, 19 nt, Artificial Sequence
  Description of Artificial Sequence: Synthetic oligonucleotide
guggcgcuuggacuggcac

SEQ ID NO: 542992 - RNA, 19 nt, Artificial Sequence
  Description of Artificial Sequence: Synthetic oligonucleotide
agaggcggaucagccgacg

SEQ ID NO: 542993 - RNA, 19 nt, Artificial Sequence
  Description of Artificial Sequence: Synthetic oligonucleotide
uucagauacuaggcuguuu

SEQ ID NO: 542994 - RNA, 19 nt, Artificial Sequence
  Description of Artificial Sequence: Synthetic oligonucleotide
ggacuuccaucgcugucag

SEQ ID NO: 542995 - RNA, 19 nt, Artificial Sequence
  Description of Artificial Sequence: Synthetic oligonucleotide
guagggagcuccugguucu

SEQ ID NO: 542996 - RNA, 19 nt, Artificial Sequence
  Description of Artificial Sequence: Synthetic oligonucleotide
ccucugacuagacagucca

SEQ ID NO: 542997 - RNA, 19 nt, Artificial Sequence
  Description of Artificial Sequence: Synthetic oligonucleotide
ccgcugguucaccacaucc

SEQ ID NO: 542998 - RNA, 19 nt, Artificial Sequence
  Description of Artificial Sequence: Synthetic oligonucleotide
cccaagcuugccaugugug

SEQ ID NO: 542999 - RNA, 19 nt, Artificial Sequence
  Description of Artificial Sequence: Synthetic oligonucleotide
agucggucuugucacccuu

SEQ ID NO: 543000 - RNA, 19 nt, Artificial Sequence
  Description of Artificial Sequence: Synthetic oligonucleotide
aggacccgguccucggacu

SEQ ID NO: 543001 - RNA, 19 nt, Artificial Sequence
  Description of Artificial Sequence: Synthetic oligonucleotide
acugacgaucggccucugu

SEQ ID NO: 543002 - RNA, 19 nt, Artificial Sequence
  Description of Artificial Sequence: Synthetic oligonucleotide
caggacccgguccucggac

SEQ ID NO: 543003 - RNA, 19 nt, Artificial Sequence
  Description of Artificial Sequence: Synthetic oligonucleotide
gcuuacagggcagggagca

SEQ ID NO: 543004 - RNA, 19 nt, Artificial Sequence
  Description of Artificial Sequence: Synthetic oligonucleotide
acgcccagcucuuguucug

SEQ ID NO: 543005 - RNA, 19 nt, Artificial Sequence
  Description of Artificial Sequence: Synthetic oligonucleotide
acgaagccucugacuagac

SEQ ID NO: 543006 - RNA, 19 nt, Artificial Sequence
  Description of Artificial Sequence: Synthetic oligonucleotide
gacgcccagcucuuguucu

SEQ ID NO: 543007 - RNA, 19 nt, Artificial Sequence
  Description of Artificial Sequence: Synthetic oligonucleotide
ucgcugucagccuccuuuu

SEQ ID NO: 543008 - RNA, 19 nt, Artificial Sequence
  Description of Artificial Sequence: Synthetic oligonucleotide
gacuuccaucgcugucagc

SEQ ID NO: 543009 - RNA, 19 nt, Artificial Sequence
  Description of Artificial Sequence: Synthetic oligonucleotide
cugacuagacaguccagau

SEQ ID NO: 543010 - RNA, 19 nt, Artificial Sequence
  Description of Artificial Sequence: Synthetic oligonucleotide
uauagccaccuggccacaa

SEQ ID NO: 543011 - RNA, 19 nt, Artificial Sequence
  Description of Artificial Sequence: Synthetic oligonucleotide
gcccgcaucaugcuuguga

SEQ ID NO: 543012 - RNA, 19 nt, Artificial Sequence
  Description of Artificial Sequence: Synthetic oligonucleotide
gcggauagcacugggguga

SEQ ID NO: 543013 - RNA, 19 nt, Artificial Sequence
  Description of Artificial Sequence: Synthetic oligonucleotide
aacucucugcccgcaucau

SEQ ID NO: 543014 - RNA, 19 nt, Artificial Sequence
  Description of Artificial Sequence: Synthetic oligonucleotide
ccuaccacuacugccugug

SEQ ID NO: 543015 - RNA, 19 nt, Artificial Sequence
  Description of Artificial Sequence: Synthetic oligonucleotide
acccgguccucggacugac

SEQ ID NO: 543016 - RNA, 19 nt, Artificial Sequence
  Description of Artificial Sequence: Synthetic oligonucleotide
cucggcgcaugaggguucg

SEQ ID NO: 543017 - RNA, 19 nt, Artificial Sequence
  Description of Artificial Sequence: Synthetic oligonucleotide
ccgcaggcguucuaaacug

SEQ ID NO: 543018 - RNA, 19 nt, Artificial Sequence
  Description of Artificial Sequence: Synthetic oligonucleotide
acggguaggcuggcugggg

SEQ ID NO: 543019 - RNA, 19 nt, Artificial Sequence
  Description of Artificial Sequence: Synthetic oligonucleotide
uggcucggcgcaugagggu

SEQ ID NO: 543020 - RNA, 19 nt, Artificial Sequence
  Description of Artificial Sequence: Synthetic oligonucleotide
ccaugucggguacuuaguc

SEQ ID NO: 543021 - RNA, 19 nt, Artificial Sequence
  Description of Artificial Sequence: Synthetic oligonucleotide
guacguggagucucagccu

SEQ ID NO: 543022 - RNA, 19 nt, Artificial Sequence
  Description of Artificial Sequence: Synthetic oligonucleotide
cuuccgucuccaggucccg

SEQ ID NO: 543023 - RNA, 19 nt, Artificial Sequence
  Description of Artificial Sequence: Synthetic oligonucleotide
uugccauguguggcaaaau

SEQ ID NO: 543024 - RNA, 19 nt, Artificial Sequence
  Description of Artificial Sequence: Synthetic oligonucleotide
cagucucccaccagcccca

SEQ ID NO: 543025 - RNA, 19 nt, Artificial Sequence
  Description of Artificial Sequence: Synthetic oligonucleotide
gggcaucccgagcaaacuc

SEQ ID NO: 543026 - RNA, 19 nt, Artificial Sequence
  Description of Artificial Sequence: Synthetic oligonucleotide
gcccggguccguuguaggg

SEQ ID NO: 543027 - RNA, 19 nt, Artificial Sequence
  Description of Artificial Sequence: Synthetic oligonucleotide
ccugaaccguaaucaugag

SEQ ID NO: 543028 - RNA, 19 nt, Artificial Sequence
  Description of Artificial Sequence: Synthetic oligonucleotide
guucgauaccaugucgggu

SEQ ID NO: 543029 - RNA, 19 nt, Artificial Sequence
  Description of Artificial Sequence: Synthetic oligonucleotide
gguccucggacugacgauc

SEQ ID NO: 543030 - RNA, 19 nt, Artificial Sequence
  Description of Artificial Sequence: Synthetic oligonucleotide
guggagucucagccucuac

SEQ ID NO: 543031 - RNA, 19 nt, Artificial Sequence
  Description of Artificial Sequence: Synthetic oligonucleotide
ggguccucugcaguuuacc

SEQ ID NO: 543032 - RNA, 19 nt, Artificial Sequence
  Description of Artificial Sequence: Synthetic oligonucleotide
cggguacuuagucauggug

SEQ ID NO: 543033 - RNA, 19 nt, Artificial Sequence
  Description of Artificial Sequence: Synthetic oligonucleotide
gagaggcggaucagccgac

SEQ ID NO: 543034 - RNA, 19 nt, Artificial Sequence
  Description of Artificial Sequence: Synthetic oligonucleotide
gccauaacacguuuauuuu

SEQ ID NO: 543035 - RNA, 19 nt, Artificial Sequence
  Description of Artificial Sequence: Synthetic oligonucleotide
gccugugcggauagcacug

SEQ ID NO: 543036 - RNA, 19 nt, Artificial Sequence
  Description of Artificial Sequence: Synthetic oligonucleotide
ggacccgguccucggacug

SEQ ID NO: 543037 - RNA, 19 nt, Artificial Sequence
  Description of Artificial Sequence: Synthetic oligonucleotide
cacagaagcguuccaggau

SEQ ID NO: 543038 - RNA, 19 nt, Artificial Sequence
  Description of Artificial Sequence: Synthetic oligonucleotide
ggcccggguccguuguagg

SEQ ID NO: 543039 - RNA, 19 nt, Artificial Sequence
  Description of Artificial Sequence: Synthetic oligonucleotide
ccucggacugacgaucggc

SEQ ID NO: 543040 - RNA, 19 nt, Artificial Sequence
  Description of Artificial Sequence: Synthetic oligonucleotide
gcuuggacuggcacacccc

SEQ ID NO: 543041 - RNA, 19 nt, Artificial Sequence
  Description of Artificial Sequence: Synthetic oligonucleotide
cccacgggcaucccgagca

SEQ ID NO: 543042 - RNA, 19 nt, Artificial Sequence
  Description of Artificial Sequence: Synthetic oligonucleotide
gccgcaggcguucuaaacu

SEQ ID NO: 543043 - RNA, 19 nt, Artificial Sequence
  Description of Artificial Sequence: Synthetic oligonucleotide
gagucggucuugucacccu

SEQ ID NO: 543044 - RNA, 19 nt, Artificial Sequence
  Description of Artificial Sequence: Synthetic oligonucleotide
cgacggguaggcuggcugg

SEQ ID NO: 543045 - RNA, 19 nt, Artificial Sequence
  Description of Artificial Sequence: Synthetic oligonucleotide
gacgaucggccucugucuu

SEQ ID NO: 543046 - RNA, 19 nt, Artificial Sequence
  Description of Artificial Sequence: Synthetic oligonucleotide
gucggucuugucacccuuc

SEQ ID NO: 543047 - RNA, 19 nt, Artificial Sequence
  Description of Artificial Sequence: Synthetic oligonucleotide
uacugccugugcggauagc

SEQ ID NO: 543048 - RNA, 19 nt, Artificial Sequence
  Description of Artificial Sequence: Synthetic oligonucleotide
ccucaguacguggagucuc

SEQ ID NO: 543049 - RNA, 19 nt, Artificial Sequence
  Description of Artificial Sequence: Synthetic oligonucleotide
accauccaggcugcaucga

SEQ ID NO: 543050 - RNA, 19 nt, Artificial Sequence
  Description of Artificial Sequence: Synthetic oligonucleotide
cgcaugaggguucgauacc

SEQ ID NO: 543051 - RNA, 19 nt, Artificial Sequence
  Description of Artificial Sequence: Synthetic oligonucleotide
ccagacagucucccaccag

SEQ ID NO: 543052 - RNA, 19 nt, Artificial Sequence
  Description of Artificial Sequence: Synthetic oligonucleotide
auaccaugucggguacuua

SEQ ID NO: 543053 - RNA, 19 nt, Artificial Sequence
  Description of Artificial Sequence: Synthetic oligonucleotide
agaagcguuccaggaugua

SEQ ID NO: 543054 - RNA, 19 nt, Artificial Sequence
  Description of Artificial Sequence: Synthetic oligonucleotide
cuaaacuggagaggcggau

SEQ ID NO: 543055 - RNA, 19 nt, Artificial Sequence
  Description of Artificial Sequence: Synthetic oligonucleotide
ggcgcaugaggguucgaua

SEQ ID NO: 543056 - RNA, 19 nt, Artificial Sequence
  Description of Artificial Sequence: Synthetic oligonucleotide
gagucucagccucuaccuu

SEQ ID NO: 543057 - RNA, 19 nt, Artificial Sequence
  Description of Artificial Sequence: Synthetic oligonucleotide
cgcaggcguucuaaacugg

SEQ ID NO: 543058 - RNA, 19 nt, Artificial Sequence
  Description of Artificial Sequence: Synthetic oligonucleotide
cccgcaucaugcuugugaa

SEQ ID NO: 543059 - RNA, 19 nt, Artificial Sequence
  Description of Artificial Sequence: Synthetic oligonucleotide
agccccgguggaagaaaug

SEQ ID NO: 543060 - RNA, 19 nt, Artificial Sequence
  Description of Artificial Sequence: Synthetic oligonucleotide
gccgcccacgggcaucccg

SEQ ID NO: 543061 - RNA, 19 nt, Artificial Sequence
  Description of Artificial Sequence: Synthetic oligonucleotide
uuggcccggguccguugua

SEQ ID NO: 543062 - RNA, 19 nt, Artificial Sequence
  Description of Artificial Sequence: Synthetic oligonucleotide
gcgggcaccaugcuuuucu

SEQ ID NO: 543063 - RNA, 19 nt, Artificial Sequence
  Description of Artificial Sequence: Synthetic oligonucleotide
ccgugacauggacuccagg

SEQ ID NO: 543064 - RNA, 19 nt, Artificial Sequence
  Description of Artificial Sequence: Synthetic oligonucleotide
cgcgcagaacucucugccc

SEQ ID NO: 543065 - RNA, 19 nt, Artificial Sequence
  Description of Artificial Sequence: Synthetic oligonucleotide
ccgcaucaugcuugugaag

SEQ ID NO: 543066 - RNA, 19 nt, Artificial Sequence
  Description of Artificial Sequence: Synthetic oligonucleotide
ccuugcaaaaccucuucau

SEQ ID NO: 543067 - RNA, 19 nt, Artificial Sequence
  Description of Artificial Sequence: Synthetic oligonucleotide
ccacaucuggccgcccacg

SEQ ID NO: 543068 - RNA, 19 nt, Artificial Sequence
  Description of Artificial Sequence: Synthetic oligonucleotide
cuauggccauaacacguuu

SEQ ID NO: 543069 - RNA, 19 nt, Artificial Sequence
  Description of Artificial Sequence: Synthetic oligonucleotide
cgcagaacucucugcccgc

SEQ ID NO: 543070 - RNA, 19 nt, Artificial Sequence
  Description of Artificial Sequence: Synthetic oligonucleotide
cacacgcgcagaacucucu

SEQ ID NO: 543071 - RNA, 19 nt, Artificial Sequence
  Description of Artificial Sequence: Synthetic oligonucleotide
ccgguccucggacugacga

SEQ ID NO: 543072 - RNA, 19 nt, Artificial Sequence
  Description of Artificial Sequence: Synthetic oligonucleotide
gaaacccagcugucugcuu

SEQ ID NO: 543073 - RNA, 19 nt, Artificial Sequence
  Description of Artificial Sequence: Synthetic oligonucleotide
agcaguaggcgggcaccau

SEQ ID NO: 543074 - RNA, 19 nt, Artificial Sequence
  Description of Artificial Sequence: Synthetic oligonucleotide
caugaggguucgauaccau

SEQ ID NO: 543075 - RNA, 19 nt, Artificial Sequence
  Description of Artificial Sequence: Synthetic oligonucleotide
ccggguccguuguaggguc

SEQ ID NO: 543076 - RNA, 19 nt, Artificial Sequence
  Description of Artificial Sequence: Synthetic oligonucleotide
gacccgguccucggacuga

SEQ ID NO: 543077 - RNA, 19 nt, Artificial Sequence
  Description of Artificial Sequence: Synthetic oligonucleotide
cagcaguaggcgggcacca

SEQ ID NO: 543078 - RNA, 19 nt, Artificial Sequence
  Description of Artificial Sequence: Synthetic oligonucleotide
gacugacgaucggccucug

SEQ ID NO: 543079 - RNA, 19 nt, Artificial Sequence
  Description of Artificial Sequence: Synthetic oligonucleotide
cggacugacgaucggccuc

SEQ ID NO: 543080 - RNA, 19 nt, Artificial Sequence
  Description of Artificial Sequence: Synthetic oligonucleotide
ccguuucugaagccaucuc

SEQ ID NO: 543081 - RNA, 19 nt, Artificial Sequence
  Description of Artificial Sequence: Synthetic oligonucleotide
guccguuguaggguccucu

SEQ ID NO: 543082 - RNA, 19 nt, Artificial Sequence
  Description of Artificial Sequence: Synthetic oligonucleotide
guguagggagcuccugguu

SEQ ID NO: 543083 - RNA, 19 nt, Artificial Sequence
  Description of Artificial Sequence: Synthetic oligonucleotide
aggcgggcaccaugcuuuu

SEQ ID NO: 543084 - RNA, 19 nt, Artificial Sequence
  Description of Artificial Sequence: Synthetic oligonucleotide
cugcuaccuucagugccca

SEQ ID NO: 543085 - RNA, 19 nt, Artificial Sequence
  Description of Artificial Sequence: Synthetic oligonucleotide
guaggccagaagggcucca

SEQ ID NO: 543086 - RNA, 19 nt, Artificial Sequence
  Description of Artificial Sequence: Synthetic oligonucleotide
uaccuuggcccggguccgu

SEQ ID NO: 543087 - RNA, 19 nt, Artificial Sequence
  Description of Artificial Sequence: Synthetic oligonucleotide
gccccgggccacuccagug

SEQ ID NO: 543088 - RNA, 19 nt, Artificial Sequence
  Description of Artificial Sequence: Synthetic oligonucleotide
gacagccgcaggcguucua

SEQ ID NO: 543089 - RNA, 19 nt, Artificial Sequence
  Description of Artificial Sequence: Synthetic oligonucleotide
ccaccacgucauacagggc

SEQ ID NO: 543090 - RNA, 19 nt, Artificial Sequence
  Description of Artificial Sequence: Synthetic oligonucleotide
caaggcagagcagcuucgu

SEQ ID NO: 543091 - RNA, 19 nt, Artificial Sequence
  Description of Artificial Sequence: Synthetic oligonucleotide
cuggccgcccacgggcauc

SEQ ID NO: 543092 - RNA, 19 nt, Artificial Sequence
  Description of Artificial Sequence: Synthetic oligonucleotide
ggacugacgaucggccucu

SEQ ID NO: 543093 - RNA, 19 nt, Artificial Sequence
  Description of Artificial Sequence: Synthetic oligonucleotide
ccccguuucugaagccauc

SEQ ID NO: 543094 - RNA, 19 nt, Artificial Sequence
  Description of Artificial Sequence: Synthetic oligonucleotide
ccuucagugcccaggcggu

SEQ ID NO: 543095 - RNA, 19 nt, Artificial Sequence
  Description of Artificial Sequence: Synthetic oligonucleotide
ccgauucauguagccucgc

SEQ ID NO: 543096 - RNA, 19 nt, Artificial Sequence
  Description of Artificial Sequence: Synthetic oligonucleotide
gcaaugaggcccagugggu

SEQ ID NO: 543097 - RNA, 19 nt, Artificial Sequence
  Description of Artificial Sequence: Synthetic oligonucleotide
gcccacgggcaucccgagc

SEQ ID NO: 543098 - RNA, 19 nt, Artificial Sequence
  Description of Artificial Sequence: Synthetic oligonucleotide
ucggcgcaugaggguucga

SEQ ID NO: 543099 - RNA, 19 nt, Artificial Sequence
  Description of Artificial Sequence: Synthetic oligonucleotide
cugcccgcaucaugcuugu

SEQ ID NO: 543100 - RNA, 19 nt, Artificial Sequence
  Description of Artificial Sequence: Synthetic oligonucleotide
ccgcccacgggcaucccga

SEQ ID NO: 543101 - RNA, 19 nt, Artificial Sequence
  Description of Artificial Sequence: Synthetic oligonucleotide
cacuacugccugugcggau

SEQ ID NO: 543102 - RNA, 19 nt, Artificial Sequence
  Description of Artificial Sequence: Synthetic oligonucleotide
cgaucggccucugucuuca

SEQ ID NO: 543103 - RNA, 19 nt, Artificial Sequence
  Description of Artificial Sequence: Synthetic oligonucleotide
gguccguuguaggguccuc

SEQ ID NO: 543104 - RNA, 19 nt, Artificial Sequence
  Description of Artificial Sequence: Synthetic oligonucleotide
cucugcccgcaucaugcuu

SEQ ID NO: 543105 - RNA, 19 nt, Artificial Sequence
  Description of Artificial Sequence: Synthetic oligonucleotide
cccgcugguucaccacauc

SEQ ID NO: 543106 - RNA, 19 nt, Artificial Sequence
  Description of Artificial Sequence: Synthetic oligonucleotide
cggguccguuguagggucc

SEQ ID NO: 543107 - RNA, 19 nt, Artificial Sequence
  Description of Artificial Sequence: Synthetic oligonucleotide
gggcuucaccauccaggcu

SEQ ID NO: 543108 - RNA, 19 nt, Artificial Sequence
  Description of Artificial Sequence: Synthetic oligonucleotide
gcgguggcuucuagagcuc

SEQ ID NO: 543109 - RNA, 19 nt, Artificial Sequence
  Description of Artificial Sequence: Synthetic oligonucleotide
ggguccguuguaggguccu

SEQ ID NO: 543110 - RNA, 19 nt, Artificial Sequence
  Description of Artificial Sequence: Synthetic oligonucleotide
gcgcuuggacuggcacacc

SEQ ID NO: 543111 - RNA, 19 nt, Artificial Sequence
  Description of Artificial Sequence: Synthetic oligonucleotide
gccuaccacuacugccugu

SEQ ID NO: 543112 - RNA, 19 nt, Artificial Sequence
  Description of Artificial Sequence: Synthetic oligonucleotide
gcucuaagucuggcuccaa

SEQ ID NO: 543113 - RNA, 19 nt, Artificial Sequence
  Description of Artificial Sequence: Synthetic oligonucleotide
ggcgggcaccaugcuuuuc

SEQ ID NO: 543114 - RNA, 19 nt, Artificial Sequence
  Description of Artificial Sequence: Synthetic oligonucleotide
cgcccacgggcaucccgag

SEQ ID NO: 543115 - RNA, 19 nt, Artificial Sequence
  Description of Artificial Sequence: Synthetic oligonucleotide
cccggguccguuguagggu

SEQ ID NO: 543116 - RNA, 19 nt, Artificial Sequence
  Description of Artificial Sequence: Synthetic oligonucleotide
gugaggggccuggcugcau

SEQ ID NO: 543117 - RNA, 19 nt, Artificial Sequence
  Description of Artificial Sequence: Synthetic oligonucleotide
ggacagccgcaggcguucu

SEQ ID NO: 543118 - RNA, 19 nt, Artificial Sequence
  Description of Artificial Sequence: Synthetic oligonucleotide
ggggugacgcccagcucuu

SEQ ID NO: 543119 - RNA, 19 nt, Artificial Sequence
  Description of Artificial Sequence: Synthetic oligonucleotide
cgggcaucccgagcaaacu

SEQ ID NO: 543120 - RNA, 19 nt, Artificial Sequence
  Description of Artificial Sequence: Synthetic oligonucleotide
cccgcauagcagccucaau

SEQ ID NO: 543121 - RNA, 19 nt, Artificial Sequence
  Description of Artificial Sequence: Synthetic oligonucleotide
cgguccucggacugacgau

SEQ ID NO: 543122 - RNA, 19 nt, Artificial Sequence
  Description of Artificial Sequence: Synthetic oligonucleotide
cgauaccaugucggguacu

SEQ ID NO: 543123 - RNA, 19 nt, Artificial Sequence
  Description of Artificial Sequence: Synthetic oligonucleotide
gcccaggcgguggcuucua

SEQ ID NO: 543124 - RNA, 19 nt, Artificial Sequence
  Description of Artificial Sequence: Synthetic oligonucleotide
cggcgcaugaggguucgau

SEQ ID NO: 543125 - RNA, 19 nt, Artificial Sequence
  Description of Artificial Sequence: Synthetic oligonucleotide
aauaauaagaauuaugaac

SEQ ID NO: 543126 - RNA, 19 nt, Artificial Sequence
  Description of Artificial Sequence: Synthetic oligonucleotide
aauaauacgaggcuugucc

SEQ ID NO: 543127 - RNA, 19 nt, Artificial Sequence
  Description of Artificial Sequence: Synthetic oligonucleotide
auaauaagaauuaugaacg

SEQ ID NO: 543128 - RNA, 19 nt, Artificial Sequence
  Description of Artificial Sequence: Synthetic oligonucleotide
gaucaaaucagucaucugg

SEQ ID NO: 543129 - RNA, 19 nt, Artificial Sequence
  Description of Artificial Sequence: Synthetic oligonucleotide
ucagauuagagauaaagcc

SEQ ID NO: 543130 - RNA, 19 nt, Artificial Sequence
  Description of Artificial Sequence: Synthetic oligonucleotide
aaagacuuguguuucacuc

SEQ ID NO: 543131 - RNA, 19 nt, Artificial Sequence
  Description of Artificial Sequence: Synthetic oligonucleotide
uuguagacgaaucagagcu

SEQ ID NO: 543132 - RNA, 19 nt, Artificial Sequence
  Description of Artificial Sequence: Synthetic oligonucleotide
uuuuaaauguccuguaucc

SEQ ID NO: 543133 - RNA, 19 nt, Artificial Sequence
  Description of Artificial Sequence: Synthetic oligonucleotide
auuagagaacaacaggagc

SEQ ID NO: 543134 - RNA, 19 nt, Artificial Sequence
  Description of Artificial Sequence: Synthetic oligonucleotide
ucuuaaguuaccauuagcu

SEQ ID NO: 543135 - RNA, 19 nt, Artificial Sequence
  Description of Artificial Sequence: Synthetic oligonucleotide
aaaacgucuaagucugagc

SEQ ID NO: 543136 - RNA, 19 nt, Artificial Sequence
  Description of Artificial Sequence: Synthetic oligonucleotide
uuauaaucagcaauugugc

SEQ ID NO: 543137 - RNA, 19 nt, Artificial Sequence
  Description of Artificial Sequence: Synthetic oligonucleotide
aauaucuuaaguuaccauu

SEQ ID NO: 543138 - RNA, 19 nt, Artificial Sequence
  Description of Artificial Sequence: Synthetic oligonucleotide
guuucauuaacuugaaugc

SEQ ID NO: 543139 - RNA, 19 nt, Artificial Sequence
  Description of Artificial Sequence: Synthetic oligonucleotide
acgaaucagagcuuuagcc

SEQ ID NO: 543140 - RNA, 19 nt, Artificial Sequence
  Description of Artificial Sequence: Synthetic oligonucleotide
gaaauaaugucauggaaac

SEQ ID NO: 543141 - RNA, 19 nt, Artificial Sequence
  Description of Artificial Sequence: Synthetic oligonucleotide
gaaguauugccucugaaug

SEQ ID NO: 543142 - RNA, 19 nt, Artificial Sequence
  Description of Artificial Sequence: Synthetic oligonucleotide
uuaaguuaccauuagcucu

SEQ ID NO: 543143 - RNA, 19 nt, Artificial Sequence
  Description of Artificial Sequence: Synthetic oligonucleotide
aauaauggaguguuaguca

SEQ ID NO: 543144 - RNA, 19 nt, Artificial Sequence
  Description of Artificial Sequence: Synthetic oligonucleotide
auaagaauuaugaacgugg

SEQ ID NO: 543145 - RNA, 19 nt, Artificial Sequence
  Description of Artificial Sequence: Synthetic oligonucleotide
auuagugcuuguuccaucc

SEQ ID NO: 543146 - RNA, 19 nt, Artificial Sequence
  Description of Artificial Sequence: Synthetic oligonucleotide
aagacuuguguuucacucc

SEQ ID NO: 543147 - RNA, 19 nt, Artificial Sequence
  Description of Artificial Sequence: Synthetic oligonucleotide
aaacgucuaagucugagca

SEQ ID NO: 543148 - RNA, 19 nt, Artificial Sequence
  Description of Artificial Sequence: Synthetic oligonucleotide
ugcuguauuggucagucgg

SEQ ID NO: 543149 - RNA, 19 nt, Artificial Sequence
  Description of Artificial Sequence: Synthetic oligonucleotide
gaaacgaauaauacgaggc

SEQ ID NO: 543150 - RNA, 19 nt, Artificial Sequence
  Description of Artificial Sequence: Synthetic oligonucleotide
guuauaaucagcaauugug

SEQ ID NO: 543151 - RNA, 19 nt, Artificial Sequence
  Description of Artificial Sequence: Synthetic oligonucleotide
acagucaaaacacaggaug

SEQ ID NO: 543152 - RNA, 19 nt, Artificial Sequence
  Description of Artificial Sequence: Synthetic oligonucleotide
aaguauugccucugaaugg

SEQ ID NO: 543153 - RNA, 19 nt, Artificial Sequence
  Description of Artificial Sequence: Synthetic oligonucleotide
aaugcauuuacaggaugcc

SEQ ID NO: 543154 - RNA, 19 nt, Artificial Sequence
  Description of Artificial Sequence: Synthetic oligonucleotide
agcucaaauaaucuaggac

SEQ ID NO: 543155 - RNA, 19 nt, Artificial Sequence
  Description of Artificial Sequence: Synthetic oligonucleotide
aaaacaguagcuccuccag

SEQ ID NO: 543156 - RNA, 19 nt, Artificial Sequence
  Description of Artificial Sequence: Synthetic oligonucleotide
ucuuguagacgaaucagag

SEQ ID NO: 543157 - RNA, 19 nt, Artificial Sequence
  Description of Artificial Sequence: Synthetic oligonucleotide
uuggaaagcaucuggcucg

SEQ ID NO: 543158 - RNA, 19 nt, Artificial Sequence
  Description of Artificial Sequence: Synthetic oligonucleotide
auaauacgaggcuuguccc

SEQ ID NO: 543159 - RNA, 19 nt, Artificial Sequence
  Description of Artificial Sequence: Synthetic oligonucleotide
aaccccacaaaauaaguga

SEQ ID NO: 543160 - RNA, 19 nt, Artificial Sequence
  Description of Artificial Sequence: Synthetic oligonucleotide
ucacucauauagaacagcc

SEQ ID NO: 543161 - RNA, 19 nt, Artificial Sequence
  Description of Artificial Sequence: Synthetic oligonucleotide
aaacaguagcuccuccagc

SEQ ID NO: 543162 - RNA, 19 nt, Artificial Sequence
  Description of Artificial Sequence: Synthetic oligonucleotide
uuuuagauacucuguacug

SEQ ID NO: 543163 - RNA, 19 nt, Artificial Sequence
  Description of Artificial Sequence: Synthetic oligonucleotide
ugaauggucagauuagaga

SEQ ID NO: 543164 - RNA, 19 nt, Artificial Sequence
  Description of Artificial Sequence: Synthetic oligonucleotide
aagaaaacgucuaagucug

SEQ ID NO: 543165 - RNA, 19 nt, Artificial Sequence
  Description of Artificial Sequence: Synthetic oligonucleotide
uuugcuaccuguaauuccu

SEQ ID NO: 543166 - RNA, 19 nt, Artificial Sequence
  Description of Artificial Sequence: Synthetic oligonucleotide
uauaaucagcaauugugcc

SEQ ID NO: 543167 - RNA, 19 nt, Artificial Sequence
  Description of Artificial Sequence: Synthetic oligonucleotide
ucaugcagccauuuguugg

SEQ ID NO: 543168 - RNA, 19 nt, Artificial Sequence
  Description of Artificial Sequence: Synthetic oligonucleotide
gucaaaaugggguucauac

SEQ ID NO: 543169 - RNA, 19 nt, Artificial Sequence
  Description of Artificial Sequence: Synthetic oligonucleotide
cucaguauggaucaaauca

SEQ ID NO: 543170 - RNA, 19 nt, Artificial Sequence
  Description of Artificial Sequence: Synthetic oligonucleotide
aaacgaauaauacgaggcu

SEQ ID NO: 543171 - RNA, 19 nt, Artificial Sequence
  Description of Artificial Sequence: Synthetic oligonucleotide
aggaucuaguucaagaagc

SEQ ID NO: 543172 - RNA, 19 nt, Artificial Sequence
  Description of Artificial Sequence: Synthetic oligonucleotide
uuugacaaucucaauuucu

SEQ ID NO: 543173 - RNA, 19 nt, Artificial Sequence
  Description of Artificial Sequence: Synthetic oligonucleotide
uggaguguuagucagcugu

SEQ ID NO: 543174 - RNA, 19 nt, Artificial Sequence
  Description of Artificial Sequence: Synthetic oligonucleotide
gauuguaggugucuuguag

SEQ ID NO: 543175 - RNA, 19 nt, Artificial Sequence
  Description of Artificial Sequence: Synthetic oligonucleotide
ggauucuucauuuuaaaug

SEQ ID NO: 543176 - RNA, 19 nt, Artificial Sequence
  Description of Artificial Sequence: Synthetic oligonucleotide
uguacuguagcucggcuca

SEQ ID NO: 543177 - RNA, 19 nt, Artificial Sequence
  Description of Artificial Sequence: Synthetic oligonucleotide
uaaucuaggacagagacuu

SEQ ID NO: 543178 - RNA, 19 nt, Artificial Sequence
  Description of Artificial Sequence: Synthetic oligonucleotide
aauuuaggauuccgguuuc

SEQ ID NO: 543179 - RNA, 19 nt, Artificial Sequence
  Description of Artificial Sequence: Synthetic oligonucleotide
ugcauuuacaggaugccca

SEQ ID NO: 543180 - RNA, 19 nt, Artificial Sequence
  Description of Artificial Sequence: Synthetic oligonucleotide
aauucuauuuccuguccca

SEQ ID NO: 543181 - RNA, 19 nt, Artificial Sequence
  Description of Artificial Sequence: Synthetic oligonucleotide
uuuugggccaaacacuggc

SEQ ID NO: 543182 - RNA, 19 nt, Artificial Sequence
  Description of Artificial Sequence: Synthetic oligonucleotide
aaacauccaguccugugag

SEQ ID NO: 543183 - RNA, 19 nt, Artificial Sequence
  Description of Artificial Sequence: Synthetic oligonucleotide
agguaauccacagcaaucc

SEQ ID NO: 543184 - RNA, 19 nt, Artificial Sequence
  Description of Artificial Sequence: Synthetic oligonucleotide
gaccuguacauuuaacucc

SEQ ID NO: 543185 - RNA, 19 nt, Artificial Sequence
  Description of Artificial Sequence: Synthetic oligonucleotide
uuaugaacguggaauaaaa

SEQ ID NO: 543186 - RNA, 19 nt, Artificial Sequence
  Description of Artificial Sequence: Synthetic oligonucleotide
uuuugcuaagucuuugaca

SEQ ID NO: 543187 - RNA, 19 nt, Artificial Sequence
  Description of Artificial Sequence: Synthetic oligonucleotide
cuggcaaacagauuauacc

SEQ ID NO: 543188 - RNA, 19 nt, Artificial Sequence
  Description of Artificial Sequence: Synthetic oligonucleotide
uuagaaaagacuuguguuu

SEQ ID NO: 543189 - RNA, 19 nt, Artificial Sequence
  Description of Artificial Sequence: Synthetic oligonucleotide
auuuugauacccuccccac

SEQ ID NO: 543190 - RNA, 19 nt, Artificial Sequence
  Description of Artificial Sequence: Synthetic oligonucleotide
auggaaacgaauaauacga

SEQ ID NO: 543191 - RNA, 19 nt, Artificial Sequence
  Description of Artificial Sequence: Synthetic oligonucleotide
acagauuauaccagaagac

SEQ ID NO: 543192 - RNA, 19 nt, Artificial Sequence
  Description of Artificial Sequence: Synthetic oligonucleotide
uguacauuuaacucccagu

SEQ ID NO: 543193 - RNA, 19 nt, Artificial Sequence
  Description of Artificial Sequence: Synthetic oligonucleotide
ucagcaauugugccaggcg

SEQ ID NO: 543194 - RNA, 19 nt, Artificial Sequence
  Description of Artificial Sequence: Synthetic oligonucleotide
gagugaaagcgccuuaucc

SEQ ID NO: 543195 - RNA, 19 nt, Artificial Sequence
  Description of Artificial Sequence: Synthetic oligonucleotide
uuuugauacccuccccacg

SEQ ID NO: 543196 - RNA, 19 nt, Artificial Sequence
  Description of Artificial Sequence: Synthetic oligonucleotide
uaauaauggaguguuaguc

SEQ ID NO: 543197 - RNA, 19 nt, Artificial Sequence
  Description of Artificial Sequence: Synthetic oligonucleotide
uaucuuaaguuaccauuag

SEQ ID NO: 543198 - RNA, 19 nt, Artificial Sequence
  Description of Artificial Sequence: Synthetic oligonucleotide
uucuguguaggccacuuug

SEQ ID NO: 543199 - RNA, 19 nt, Artificial Sequence
  Description of Artificial Sequence: Synthetic oligonucleotide
aaguucaugaccaaauuaa

SEQ ID NO: 543200 - RNA, 19 nt, Artificial Sequence
  Description of Artificial Sequence: Synthetic oligonucleotide
ucuccgaggagucauuuug

SEQ ID NO: 543201 - RNA, 19 nt, Artificial Sequence
  Description of Artificial Sequence: Synthetic oligonucleotide
auuaauucuugacaccaca

SEQ ID NO: 543202 - RNA, 19 nt, Artificial Sequence
  Description of Artificial Sequence: Synthetic oligonucleotide
ucuaguucaagaagcuucu

SEQ ID NO: 543203 - RNA, 19 nt, Artificial Sequence
  Description of Artificial Sequence: Synthetic oligonucleotide
ucuaagucugagcaucuca

SEQ ID NO: 543204 - RNA, 19 nt, Artificial Sequence
  Description of Artificial Sequence: Synthetic oligonucleotide
uuaauaauggaguguuagu

SEQ ID NO: 543205 - RNA, 19 nt, Artificial Sequence
  Description of Artificial Sequence: Synthetic oligonucleotide
cuuaaguuaccauuagcuc

SEQ ID NO: 543206 - RNA, 19 nt, Artificial Sequence
  Description of Artificial Sequence: Synthetic oligonucleotide
uaaguuaccauuagcucuc

SEQ ID NO: 543207 - RNA, 19 nt, Artificial Sequence
  Description of Artificial Sequence: Synthetic oligonucleotide
auacccauuuguuuccaac

SEQ ID NO: 543208 - RNA, 19 nt, Artificial Sequence
  Description of Artificial Sequence: Synthetic oligonucleotide
agugaaagcgccuuaucca

SEQ ID NO: 543209 - RNA, 19 nt, Artificial Sequence
  Description of Artificial Sequence: Synthetic oligonucleotide
agauuauaccagaagacag

SEQ ID NO: 543210 - RNA, 19 nt, Artificial Sequence
  Description of Artificial Sequence: Synthetic oligonucleotide
acuagcacgggacaggcug

SEQ ID NO: 543211 - RNA, 19 nt, Artificial Sequence
  Description of Artificial Sequence: Synthetic oligonucleotide
cuuugucuaugguagaaac

SEQ ID NO: 543212 - RNA, 19 nt, Artificial Sequence
  Description of Artificial Sequence: Synthetic oligonucleotide
uguuuacucagaaugccaa

SEQ ID NO: 543213 - RNA, 19 nt, Artificial Sequence
  Description of Artificial Sequence: Synthetic oligonucleotide
cuaagucugagcaucucag

SEQ ID NO: 543214 - RNA, 19 nt, Artificial Sequence
  Description of Artificial Sequence: Synthetic oligonucleotide
aauugugccaggcggauua

SEQ ID NO: 543215 - RNA, 19 nt, Artificial Sequence
  Description of Artificial Sequence: Synthetic oligonucleotide
uauccugugauaacugaac

SEQ ID NO: 543216 - RNA, 19 nt, Artificial Sequence
  Description of Artificial Sequence: Synthetic oligonucleotide
aauggaguguuagucagcu

SEQ ID NO: 543217 - RNA, 19 nt, Artificial Sequence
  Description of Artificial Sequence: Synthetic oligonucleotide
agcauuucguacuuccguc

SEQ ID NO: 543218 - RNA, 19 nt, Artificial Sequence
  Description of Artificial Sequence: Synthetic oligonucleotide
aggauuccgguuuccaucg

SEQ ID NO: 543219 - RNA, 19 nt, Artificial Sequence
  Description of Artificial Sequence: Synthetic oligonucleotide
uguuagucagcuguaaacu

SEQ ID NO: 543220 - RNA, 19 nt, Artificial Sequence
  Description of Artificial Sequence: Synthetic oligonucleotide
aggaccuguacauuuaacu

SEQ ID NO: 543221 - RNA, 19 nt, Artificial Sequence
  Description of Artificial Sequence: Synthetic oligonucleotide
uggaaacgaauaauacgag

SEQ ID NO: 543222 - RNA, 19 nt, Artificial Sequence
  Description of Artificial Sequence: Synthetic oligonucleotide
gaaaguuauaaucagcaau

SEQ ID NO: 543223 - RNA, 19 nt, Artificial Sequence
  Description of Artificial Sequence: Synthetic oligonucleotide
uacauaaugugaucguuaa

SEQ ID NO: 543224 - RNA, 19 nt, Artificial Sequence
  Description of Artificial Sequence: Synthetic oligonucleotide
uccgugcaaagucaaaaug

SEQ ID NO: 543225 - RNA, 19 nt, Artificial Sequence
  Description of Artificial Sequence: Synthetic oligonucleotide
ucuaugguagaaaccucgc

SEQ ID NO: 543226 - RNA, 19 nt, Artificial Sequence
  Description of Artificial Sequence: Synthetic oligonucleotide
ggaaacgaauaauacgagg

SEQ ID NO: 543227 - RNA, 19 nt, Artificial Sequence
  Description of Artificial Sequence: Synthetic oligonucleotide
guaggugucuuguagacga

SEQ ID NO: 543228 - RNA, 19 nt, Artificial Sequence
  Description of Artificial Sequence: Synthetic oligonucleotide
uuacauaaugugaucguua

SEQ ID NO: 543229 - RNA, 19 nt, Artificial Sequence
  Description of Artificial Sequence: Synthetic oligonucleotide
ugguacacggcguagcuca

SEQ ID NO: 543230 - RNA, 19 nt, Artificial Sequence
  Description of Artificial Sequence: Synthetic oligonucleotide
cauguagcaauucuauuuc

SEQ ID NO: 543231 - RNA, 19 nt, Artificial Sequence
  Description of Artificial Sequence: Synthetic oligonucleotide
ugauaacugaacugcaaaa

SEQ ID NO: 543232 - RNA, 19 nt, Artificial Sequence
  Description of Artificial Sequence: Synthetic oligonucleotide
aagauugcccuuugagaug

SEQ ID NO: 543233 - RNA, 19 nt, Artificial Sequence
  Description of Artificial Sequence: Synthetic oligonucleotide
ugaaugcauuuacaggaug

SEQ ID NO: 543234 - RNA, 19 nt, Artificial Sequence
  Description of Artificial Sequence: Synthetic oligonucleotide
ugucuuguagacgaaucag

SEQ ID NO: 543235 - RNA, 19 nt, Artificial Sequence
  Description of Artificial Sequence: Synthetic oligonucleotide
ucaguguucagacguuuca

SEQ ID NO: 543236 - RNA, 19 nt, Artificial Sequence
  Description of Artificial Sequence: Synthetic oligonucleotide
cuuguagacgaaucagagc

SEQ ID NO: 543237 - RNA, 19 nt, Artificial Sequence
  Description of Artificial Sequence: Synthetic oligonucleotide
uauugccucugaaugguca

SEQ ID NO: 543238 - RNA, 19 nt, Artificial Sequence
  Description of Artificial Sequence: Synthetic oligonucleotide
aaguuauaaucagcaauug

SEQ ID NO: 543239 - RNA, 19 nt, Artificial Sequence
  Description of Artificial Sequence: Synthetic oligonucleotide
cagauuagagauaaagcca

SEQ ID NO: 543240 - RNA, 19 nt, Artificial Sequence
  Description of Artificial Sequence: Synthetic oligonucleotide
gaauggucagauuagagau

SEQ ID NO: 543241 - RNA, 19 nt, Artificial Sequence
  Description of Artificial Sequence: Synthetic oligonucleotide
uuugcccaacucaaagcag

SEQ ID NO: 543242 - RNA, 19 nt, Artificial Sequence
  Description of Artificial Sequence: Synthetic oligonucleotide
ucuguguaggccacuuugc

SEQ ID NO: 543243 - RNA, 19 nt, Artificial Sequence
  Description of Artificial Sequence: Synthetic oligonucleotide
agauugcccuuugagaugg

SEQ ID NO: 543244 - RNA, 19 nt, Artificial Sequence
  Description of Artificial Sequence: Synthetic oligonucleotide
guuaccauuagcucucuga

SEQ ID NO: 543245 - RNA, 19 nt, Artificial Sequence
  Description of Artificial Sequence: Synthetic oligonucleotide
cguuucauuaacuugaaug

SEQ ID NO: 543246 - RNA, 19 nt, Artificial Sequence
  Description of Artificial Sequence: Synthetic oligonucleotide
ggugccaaaauaaauuuag

SEQ ID NO: 543247 - RNA, 19 nt, Artificial Sequence
  Description of Artificial Sequence: Synthetic oligonucleotide
gucuaugguagaaaccucg

SEQ ID NO: 543248 - RNA, 19 nt, Artificial Sequence
  Description of Artificial Sequence: Synthetic oligonucleotide
aaaccccacaaaauaagug

SEQ ID NO: 543249 - RNA, 19 nt, Artificial Sequence
  Description of Artificial Sequence: Synthetic oligonucleotide
uaaugugaucguuaauuaa

SEQ ID NO: 543250 - RNA, 19 nt, Artificial Sequence
  Description of Artificial Sequence: Synthetic oligonucleotide
uguauccugugauaacuga

SEQ ID NO: 543251 - RNA, 19 nt, Artificial Sequence
  Description of Artificial Sequence: Synthetic oligonucleotide
gaaaacgucuaagucugag

SEQ ID NO: 543252 - RNA, 19 nt, Artificial Sequence
  Description of Artificial Sequence: Synthetic oligonucleotide
gaauuaugaacguggaaua

SEQ ID NO: 543253 - RNA, 19 nt, Artificial Sequence
  Description of Artificial Sequence: Synthetic oligonucleotide
aucugacauauccuugagg

SEQ ID NO: 543254 - RNA, 19 nt, Artificial Sequence
  Description of Artificial Sequence: Synthetic oligonucleotide
auaaugugaucguuaauua

SEQ ID NO: 543255 - RNA, 19 nt, Artificial Sequence
  Description of Artificial Sequence: Synthetic oligonucleotide
uccugugauaacugaacug

SEQ ID NO: 543256 - RNA, 19 nt, Artificial Sequence
  Description of Artificial Sequence: Synthetic oligonucleotide
uuuguuggauacccauuug

SEQ ID NO: 543257 - RNA, 19 nt, Artificial Sequence
  Description of Artificial Sequence: Synthetic oligonucleotide
guagcucaaauaaucuagg

SEQ ID NO: 543258 - RNA, 19 nt, Artificial Sequence
  Description of Artificial Sequence: Synthetic oligonucleotide
agccgcuccaaccugaucu

SEQ ID NO: 543259 - RNA, 19 nt, Artificial Sequence
  Description of Artificial Sequence: Synthetic oligonucleotide
aauucaccaguggugagga

SEQ ID NO: 543260 - RNA, 19 nt, Artificial Sequence
  Description of Artificial Sequence: Synthetic oligonucleotide
agauacucuguacugugcu

SEQ ID NO: 543261 - RNA, 19 nt, Artificial Sequence
  Description of Artificial Sequence: Synthetic oligonucleotide
uguagcucggcucagccuu

SEQ ID NO: 543262 - RNA, 19 nt, Artificial Sequence
  Description of Artificial Sequence: Synthetic oligonucleotide
augcauuuacaggaugccc

SEQ ID NO: 543263 - RNA, 19 nt, Artificial Sequence
  Description of Artificial Sequence: Synthetic oligonucleotide
cagcaauugugccaggcgg

SEQ ID NO: 543264 - RNA, 19 nt, Artificial Sequence
  Description of Artificial Sequence: Synthetic oligonucleotide
caaaccaguugaauucacc

SEQ ID NO: 543265 - RNA, 19 nt, Artificial Sequence
  Description of Artificial Sequence: Synthetic oligonucleotide
guguuagucagcuguaaac

SEQ ID NO: 543266 - RNA, 19 nt, Artificial Sequence
  Description of Artificial Sequence: Synthetic oligonucleotide
aauuaugaacguggaauaa

SEQ ID NO: 543267 - RNA, 19 nt, Artificial Sequence
  Description of Artificial Sequence: Synthetic oligonucleotide
caugaucagucauugaaga

SEQ ID NO: 543268 - RNA, 19 nt, Artificial Sequence
  Description of Artificial Sequence: Synthetic oligonucleotide
gacgaaucagagcuuuagc

SEQ ID NO: 543269 - RNA, 19 nt, Artificial Sequence
  Description of Artificial Sequence: Synthetic oligonucleotide
acgucuaagucugagcauc

SEQ ID NO: 543270 - RNA, 19 nt, Artificial Sequence
  Description of Artificial Sequence: Synthetic oligonucleotide
gagaacaacaggagcgagg

SEQ ID NO: 543271 - RNA, 19 nt, Artificial Sequence
  Description of Artificial Sequence: Synthetic oligonucleotide
uggacaugaucagucauug

SEQ ID NO: 543272 - RNA, 19 nt, Artificial Sequence
  Description of Artificial Sequence: Synthetic oligonucleotide
cucauauagaacagccaug

SEQ ID NO: 543273 - RNA, 19 nt, Artificial Sequence
  Description of Artificial Sequence: Synthetic oligonucleotide
gauacucuguacugugcug

SEQ ID NO: 543274 - RNA, 19 nt, Artificial Sequence
  Description of Artificial Sequence: Synthetic oligonucleotide
aaauaaucuaggacagaga

SEQ ID NO: 543275 - RNA, 19 nt, Artificial Sequence
  Description of Artificial Sequence: Synthetic oligonucleotide
uagauacucuguacugugc

SEQ ID NO: 543276 - RNA, 19 nt, Artificial Sequence
  Description of Artificial Sequence: Synthetic oligonucleotide
ucagacguuucauuaacuu

SEQ ID NO: 543277 - RNA, 19 nt, Artificial Sequence
  Description of Artificial Sequence: Synthetic oligonucleotide
uguucagacguuucauuaa

SEQ ID NO: 543278 - RNA, 19 nt, Artificial Sequence
  Description of Artificial Sequence: Synthetic oligonucleotide
ugcauuagugcuuguucca

SEQ ID NO: 543279 - RNA, 19 nt, Artificial Sequence
  Description of Artificial Sequence: Synthetic oligonucleotide
agauuagagauaaagccau

SEQ ID NO: 543280 - RNA, 19 nt, Artificial Sequence
  Description of Artificial Sequence: Synthetic oligonucleotide
ccgugcaaagucaaaaugg

SEQ ID NO: 543281 - RNA, 19 nt, Artificial Sequence
  Description of Artificial Sequence: Synthetic oligonucleotide
aacgaauaauacgaggcuu

SEQ ID NO: 543282 - RNA, 19 nt, Artificial Sequence
  Description of Artificial Sequence: Synthetic oligonucleotide
uguauuggucagucggucu

SEQ ID NO: 543283 - RNA, 19 nt, Artificial Sequence
  Description of Artificial Sequence: Synthetic oligonucleotide
uuuagccgcuccaaccuga

SEQ ID NO: 543284 - RNA, 19 nt, Artificial Sequence
  Description of Artificial Sequence: Synthetic oligonucleotide
acaugaucagucauugaag

SEQ ID NO: 543285 - RNA, 19 nt, Artificial Sequence
  Description of Artificial Sequence: Synthetic oligonucleotide
uuuacauaaugugaucguu

SEQ ID NO: 543286 - RNA, 19 nt, Artificial Sequence
  Description of Artificial Sequence: Synthetic oligonucleotide
ucuggcucgucuuuccgug

SEQ ID NO: 543287 - RNA, 19 nt, Artificial Sequence
  Description of Artificial Sequence: Synthetic oligonucleotide
uuguuccauccacaguucc

SEQ ID NO: 543288 - RNA, 19 nt, Artificial Sequence
  Description of Artificial Sequence: Synthetic oligonucleotide
ggauuagagaacaacagga

SEQ ID NO: 543289 - RNA, 19 nt, Artificial Sequence
  Description of Artificial Sequence: Synthetic oligonucleotide
guucagacguuucauuaac

SEQ ID NO: 543290 - RNA, 19 nt, Artificial Sequence
  Description of Artificial Sequence: Synthetic oligonucleotide
uuuccgugcaaagucaaaa

SEQ ID NO: 543291 - RNA, 19 nt, Artificial Sequence
  Description of Artificial Sequence: Synthetic oligonucleotide
uucagacguuucauuaacu

SEQ ID NO: 543292 - RNA, 19 nt, Artificial Sequence
  Description of Artificial Sequence: Synthetic oligonucleotide
ugcccaacaaacccuucug

SEQ ID NO: 543293 - RNA, 19 nt, Artificial Sequence
  Description of Artificial Sequence: Synthetic oligonucleotide
cugcccauuguuuuauuug

SEQ ID NO: 543294 - RNA, 19 nt, Artificial Sequence
  Description of Artificial Sequence: Synthetic oligonucleotide
gucaauuuccccgucucag

SEQ ID NO: 543295 - RNA, 19 nt, Artificial Sequence
  Description of Artificial Sequence: Synthetic oligonucleotide
ucugaauggucagauuaga

SEQ ID NO: 543296 - RNA, 19 nt, Artificial Sequence
  Description of Artificial Sequence: Synthetic oligonucleotide
guuagaaaagacuuguguu

SEQ ID NO: 543297 - RNA, 19 nt, Artificial Sequence
  Description of Artificial Sequence: Synthetic oligonucleotide
guaucggcagaacagcuuc

SEQ ID NO: 543298 - RNA, 19 nt, Artificial Sequence
  Description of Artificial Sequence: Synthetic oligonucleotide
auccugugauaacugaacu

SEQ ID NO: 543299 - RNA, 19 nt, Artificial Sequence
  Description of Artificial Sequence: Synthetic oligonucleotide
ucgugguaucggcagaaca

SEQ ID NO: 543300 - RNA, 19 nt, Artificial Sequence
  Description of Artificial Sequence: Synthetic oligonucleotide
cauuuugauacccucccca

SEQ ID NO: 543301 - RNA, 19 nt, Artificial Sequence
  Description of Artificial Sequence: Synthetic oligonucleotide
gagucauuuugauacccuc

SEQ ID NO: 543302 - RNA, 19 nt, Artificial Sequence
  Description of Artificial Sequence: Synthetic oligonucleotide
aaggaccuguacauuuaac

SEQ ID NO: 543303 - RNA, 19 nt, Artificial Sequence
  Description of Artificial Sequence: Synthetic oligonucleotide
agacgaaucagagcuuuag

SEQ ID NO: 543304 - RNA, 19 nt, Artificial Sequence
  Description of Artificial Sequence: Synthetic oligonucleotide
auaucuuaaguuaccauua

SEQ ID NO: 543305 - RNA, 19 nt, Artificial Sequence
  Description of Artificial Sequence: Synthetic oligonucleotide
acgaauaauacgaggcuug

SEQ ID NO: 543306 - RNA, 19 nt, Artificial Sequence
  Description of Artificial Sequence: Synthetic oligonucleotide
uagagaacaacaggagcga

SEQ ID NO: 543307 - RNA, 19 nt, Artificial Sequence
  Description of Artificial Sequence: Synthetic oligonucleotide
auuaugaacguggaauaaa

SEQ ID NO: 543308 - RNA, 19 nt, Artificial Sequence
  Description of Artificial Sequence: Synthetic oligonucleotide
cagguaauccacagcaauc

SEQ ID NO: 543309 - RNA, 19 nt, Artificial Sequence
  Description of Artificial Sequence: Synthetic oligonucleotide
uuagcucucugauguucag

SEQ ID NO: 543310 - RNA, 19 nt, Artificial Sequence
  Description of Artificial Sequence: Synthetic oligonucleotide
gucggucuaacuucucugc

SEQ ID NO: 543311 - RNA, 19 nt, Artificial Sequence
  Description of Artificial Sequence: Synthetic oligonucleotide
cguagcucaaauaaucuag

SEQ ID NO: 543312 - RNA, 19 nt, Artificial Sequence
  Description of Artificial Sequence: Synthetic oligonucleotide
aaagcgccuuauccagguc

SEQ ID NO: 543313 - RNA, 19 nt, Artificial Sequence
  Description of Artificial Sequence: Synthetic oligonucleotide
aacgucuaagucugagcau

SEQ ID NO: 543314 - RNA, 19 nt, Artificial Sequence
  Description of Artificial Sequence: Synthetic oligonucleotide
ucucaguauggaucaaauc

SEQ ID NO: 543315 - RNA, 19 nt, Artificial Sequence
  Description of Artificial Sequence: Synthetic oligonucleotide
gauuccgguuuccaucgug

SEQ ID NO: 543316 - RNA, 19 nt, Artificial Sequence
  Description of Artificial Sequence: Synthetic oligonucleotide
uaccauuagcucucugaug

SEQ ID NO: 543317 - RNA, 19 nt, Artificial Sequence
  Description of Artificial Sequence: Synthetic oligonucleotide
uuugggccaaacacuggcu

SEQ ID NO: 543318 - RNA, 19 nt, Artificial Sequence
  Description of Artificial Sequence: Synthetic oligonucleotide
aagugauuguccacaguca

SEQ ID NO: 543319 - RNA, 19 nt, Artificial Sequence
  Description of Artificial Sequence: Synthetic oligonucleotide
uuaggauuccgguuuccau

SEQ ID NO: 543320 - RNA, 19 nt, Artificial Sequence
  Description of Artificial Sequence: Synthetic oligonucleotide
gugauaacugaacugcaaa

SEQ ID NO: 543321 - RNA, 19 nt, Artificial Sequence
  Description of Artificial Sequence: Synthetic oligonucleotide
ucauuacaaggaccuguac

SEQ ID NO: 543322 - RNA, 19 nt, Artificial Sequence
  Description of Artificial Sequence: Synthetic oligonucleotide
cagauuauaccagaagaca

SEQ ID NO: 543323 - RNA, 19 nt, Artificial Sequence
  Description of Artificial Sequence: Synthetic oligonucleotide
uucaguguucagacguuuc

SEQ ID NO: 543324 - RNA, 19 nt, Artificial Sequence
  Description of Artificial Sequence: Synthetic oligonucleotide
aggcggauuagagaacaac

SEQ ID NO: 543325 - RNA, 19 nt, Artificial Sequence
  Description of Artificial Sequence: Synthetic oligonucleotide
ggugaggagggaaauuugg

SEQ ID NO: 543326 - RNA, 19 nt, Artificial Sequence
  Description of Artificial Sequence: Synthetic oligonucleotide
gaggagucauuuugauacc

SEQ ID NO: 543327 - RNA, 19 nt, Artificial Sequence
  Description of Artificial Sequence: Synthetic oligonucleotide
caguugaauucaccagugg

SEQ ID NO: 543328 - RNA, 19 nt, Artificial Sequence
  Description of Artificial Sequence: Synthetic oligonucleotide
uggugccaaaauaaauuua

SEQ ID NO: 543329 - RNA, 19 nt, Artificial Sequence
  Description of Artificial Sequence: Synthetic oligonucleotide
cuguauccugugauaacug

SEQ ID NO: 543330 - RNA, 19 nt, Artificial Sequence
  Description of Artificial Sequence: Synthetic oligonucleotide
ggaccuguacauuuaacuc

SEQ ID NO: 543331 - RNA, 19 nt, Artificial Sequence
  Description of Artificial Sequence: Synthetic oligonucleotide
ugauacccuccccacggca

SEQ ID NO: 543332 - RNA, 19 nt, Artificial Sequence
  Description of Artificial Sequence: Synthetic oligonucleotide
ugagugaaagcgccuuauc

SEQ ID NO: 543333 - RNA, 19 nt, Artificial Sequence
  Description of Artificial Sequence: Synthetic oligonucleotide
uuccgugcaaagucaaaau

SEQ ID NO: 543334 - RNA, 19 nt, Artificial Sequence
  Description of Artificial Sequence: Synthetic oligonucleotide
gccaagcacuuuuagauac

SEQ ID NO: 543335 - RNA, 19 nt, Artificial Sequence
  Description of Artificial Sequence: Synthetic oligonucleotide
auuucguacuuccgucucu

SEQ ID NO: 543336 - RNA, 19 nt, Artificial Sequence
  Description of Artificial Sequence: Synthetic oligonucleotide
uacacggcguagcucaaau

SEQ ID NO: 543337 - RNA, 19 nt, Artificial Sequence
  Description of Artificial Sequence: Synthetic oligonucleotide
cuuuugucuccgaggaguc

SEQ ID NO: 543338 - RNA, 19 nt, Artificial Sequence
  Description of Artificial Sequence: Synthetic oligonucleotide
augcccaacaaacccuucu

SEQ ID NO: 543339 - RNA, 19 nt, Artificial Sequence
  Description of Artificial Sequence: Synthetic oligonucleotide
auaaucuaggacagagacu

SEQ ID NO: 543340 - RNA, 19 nt, Artificial Sequence
  Description of Artificial Sequence: Synthetic oligonucleotide
ugguuuugcuaagucuuug

SEQ ID NO: 543341 - RNA, 19 nt, Artificial Sequence
  Description of Artificial Sequence: Synthetic oligonucleotide
aguuccgugugguaauaau

SEQ ID NO: 543342 - RNA, 19 nt, Artificial Sequence
  Description of Artificial Sequence: Synthetic oligonucleotide
gcagccauuuguuggauac

SEQ ID NO: 543343 - RNA, 19 nt, Artificial Sequence
  Description of Artificial Sequence: Synthetic oligonucleotide
cacggcguagcucaaauaa

SEQ ID NO: 543344 - RNA, 19 nt, Artificial Sequence
  Description of Artificial Sequence: Synthetic oligonucleotide
caugcagccauuuguugga

SEQ ID NO: 543345 - RNA, 19 nt, Artificial Sequence
  Description of Artificial Sequence: Synthetic oligonucleotide
augccguguacuguaaucu

SEQ ID NO: 543346 - RNA, 19 nt, Artificial Sequence
  Description of Artificial Sequence: Synthetic oligonucleotide
cuaggacagagacuuuguc

SEQ ID NO: 543347 - RNA, 19 nt, Artificial Sequence
  Description of Artificial Sequence: Synthetic oligonucleotide
cucgucuuuccgugcaaag

SEQ ID NO: 543348 - RNA, 19 nt, Artificial Sequence
  Description of Artificial Sequence: Synthetic oligonucleotide
uccuguauccugugauaac

SEQ ID NO: 543349 - RNA, 19 nt, Artificial Sequence
  Description of Artificial Sequence: Synthetic oligonucleotide
ucgucuuuccgugcaaagu

SEQ ID NO: 543350 - RNA, 19 nt, Artificial Sequence
  Description of Artificial Sequence: Synthetic oligonucleotide
cauuucguacuuccgucuc

SEQ ID NO: 543351 - RNA, 19 nt, Artificial Sequence
  Description of Artificial Sequence: Synthetic oligonucleotide
uugauacccuccccacggc

SEQ ID NO: 543352 - RNA, 19 nt, Artificial Sequence
  Description of Artificial Sequence: Synthetic oligonucleotide
ugugagugaaagcgccuua

SEQ ID NO: 543353 - RNA, 19 nt, Artificial Sequence
  Description of Artificial Sequence: Synthetic oligonucleotide
gugguaucggcagaacagc

SEQ ID NO: 543354 - RNA, 19 nt, Artificial Sequence
  Description of Artificial Sequence: Synthetic oligonucleotide
cuagcacgggacaggcugc

SEQ ID NO: 543355 - RNA, 19 nt, Artificial Sequence
  Description of Artificial Sequence: Synthetic oligonucleotide
uguagacgaaucagagcuu

SEQ ID NO: 543356 - RNA, 19 nt, Artificial Sequence
  Description of Artificial Sequence: Synthetic oligonucleotide
agagaacaacaggagcgag

SEQ ID NO: 543357 - RNA, 19 nt, Artificial Sequence
  Description of Artificial Sequence: Synthetic oligonucleotide
uaggccacuuugcccaacu

SEQ ID NO: 543358 - RNA, 19 nt, Artificial Sequence
  Description of Artificial Sequence: Synthetic oligonucleotide
uaacucccagucuccuaag

SEQ ID NO: 543359 - RNA, 19 nt, Artificial Sequence
  Description of Artificial Sequence: Synthetic oligonucleotide
uuucguacuuccgucucuc

SEQ ID NO: 543360 - RNA, 19 nt, Artificial Sequence
  Description of Artificial Sequence: Synthetic oligonucleotide
gaauaauacgaggcuuguc

SEQ ID NO: 543361 - RNA, 19 nt, Artificial Sequence
  Description of Artificial Sequence: Synthetic oligonucleotide
gcggauuagagaacaacag

SEQ ID NO: 543362 - RNA, 19 nt, Artificial Sequence
  Description of Artificial Sequence: Synthetic oligonucleotide
uggcuggugccaaaauaaa

SEQ ID NO: 543363 - RNA, 19 nt, Artificial Sequence
  Description of Artificial Sequence: Synthetic oligonucleotide
guacuuccgucucucuggc

SEQ ID NO: 543364 - RNA, 19 nt, Artificial Sequence
  Description of Artificial Sequence: Synthetic oligonucleotide
cacucauauagaacagcca

SEQ ID NO: 543365 - RNA, 19 nt, Artificial Sequence
  Description of Artificial Sequence: Synthetic oligonucleotide
uccgaggagucauuuugau

SEQ ID NO: 543366 - RNA, 19 nt, Artificial Sequence
  Description of Artificial Sequence: Synthetic oligonucleotide
cgugguaucggcagaacag

SEQ ID NO: 543367 - RNA, 19 nt, Artificial Sequence
  Description of Artificial Sequence: Synthetic oligonucleotide
uggcucgucuuuccgugca

SEQ ID NO: 543368 - RNA, 19 nt, Artificial Sequence
  Description of Artificial Sequence: Synthetic oligonucleotide
cagccaagcacuuuuagau

SEQ ID NO: 543369 - RNA, 19 nt, Artificial Sequence
  Description of Artificial Sequence: Synthetic oligonucleotide
cuuuagccgcuccaaccug

SEQ ID NO: 543370 - RNA, 19 nt, Artificial Sequence
  Description of Artificial Sequence: Synthetic oligonucleotide
ucuaacuucucugcccauu

SEQ ID NO: 543371 - RNA, 19 nt, Artificial Sequence
  Description of Artificial Sequence: Synthetic oligonucleotide
ugccguguacuguaaucuc

SEQ ID NO: 543372 - RNA, 19 nt, Artificial Sequence
  Description of Artificial Sequence: Synthetic oligonucleotide
uccgguuuccaucguggua

SEQ ID NO: 543373 - RNA, 19 nt, Artificial Sequence
  Description of Artificial Sequence: Synthetic oligonucleotide
uacgaggcuugucccacuc

SEQ ID NO: 543374 - RNA, 19 nt, Artificial Sequence
  Description of Artificial Sequence: Synthetic oligonucleotide
ugcugguacacggcguagc

SEQ ID NO: 543375 - RNA, 19 nt, Artificial Sequence
  Description of Artificial Sequence: Synthetic oligonucleotide
acuuugucuaugguagaaa

SEQ ID NO: 543376 - RNA, 19 nt, Artificial Sequence
  Description of Artificial Sequence: Synthetic oligonucleotide
ggcggauuagagaacaaca

SEQ ID NO: 543377 - RNA, 19 nt, Artificial Sequence
  Description of Artificial Sequence: Synthetic oligonucleotide
cuccaacuccauaguuugc

SEQ ID NO: 543378 - RNA, 19 nt, Artificial Sequence
  Description of Artificial Sequence: Synthetic oligonucleotide
aguuaccauuagcucucug

SEQ ID NO: 543379 - RNA, 19 nt, Artificial Sequence
  Description of Artificial Sequence: Synthetic oligonucleotide
aucauuacaaggaccugua

SEQ ID NO: 543380 - RNA, 19 nt, Artificial Sequence
  Description of Artificial Sequence: Synthetic oligonucleotide
gguagaaaccucgccuucc

SEQ ID NO: 543381 - RNA, 19 nt, Artificial Sequence
  Description of Artificial Sequence: Synthetic oligonucleotide
uguggucaauuuccccguc

SEQ ID NO: 543382 - RNA, 19 nt, Artificial Sequence
  Description of Artificial Sequence: Synthetic oligonucleotide
aggaugcccaacaaacccu

SEQ ID NO: 543383 - RNA, 19 nt, Artificial Sequence
  Description of Artificial Sequence: Synthetic oligonucleotide
cagucuucggcuguuagaa

SEQ ID NO: 543384 - RNA, 19 nt, Artificial Sequence
  Description of Artificial Sequence: Synthetic oligonucleotide
cccauuuguuuccaacuag

SEQ ID NO: 543385 - RNA, 19 nt, Artificial Sequence
  Description of Artificial Sequence: Synthetic oligonucleotide
agcaauugugccaggcgga

SEQ ID NO: 543386 - RNA, 19 nt, Artificial Sequence
  Description of Artificial Sequence: Synthetic oligonucleotide
agcgccuuauccaggucuc

SEQ ID NO: 543387 - RNA, 19 nt, Artificial Sequence
  Description of Artificial Sequence: Synthetic oligonucleotide
aaagcagucuucggcuguu

SEQ ID NO: 543388 - RNA, 19 nt, Artificial Sequence
  Description of Artificial Sequence: Synthetic oligonucleotide
guauccugugauaacugaa

SEQ ID NO: 543389 - RNA, 19 nt, Artificial Sequence
  Description of Artificial Sequence: Synthetic oligonucleotide
aucgugguaucggcagaac

SEQ ID NO: 543390 - RNA, 19 nt, Artificial Sequence
  Description of Artificial Sequence: Synthetic oligonucleotide
uagacgaaucagagcuuua

SEQ ID NO: 543391 - RNA, 19 nt, Artificial Sequence
  Description of Artificial Sequence: Synthetic oligonucleotide
uucguacuuccgucucucu

SEQ ID NO: 543392 - RNA, 19 nt, Artificial Sequence
  Description of Artificial Sequence: Synthetic oligonucleotide
caucauuacaaggaccugu

SEQ ID NO: 543393 - RNA, 19 nt, Artificial Sequence
  Description of Artificial Sequence: Synthetic oligonucleotide
ggaaguauugccucugaau

SEQ ID NO: 543394 - RNA, 19 nt, Artificial Sequence
  Description of Artificial Sequence: Synthetic oligonucleotide
ugcaugccguguacuguaa

SEQ ID NO: 543395 - RNA, 19 nt, Artificial Sequence
  Description of Artificial Sequence: Synthetic oligonucleotide
acguuucauuaacuugaau

SEQ ID NO: 543396 - RNA, 19 nt, Artificial Sequence
  Description of Artificial Sequence: Synthetic oligonucleotide
aggggagcuugucugucau

SEQ ID NO: 543397 - RNA, 19 nt, Artificial Sequence
  Description of Artificial Sequence: Synthetic oligonucleotide
uaggugucuuguagacgaa

SEQ ID NO: 543398 - RNA, 19 nt, Artificial Sequence
  Description of Artificial Sequence: Synthetic oligonucleotide
cuggcucgucuuuccgugc

SEQ ID NO: 543399 - RNA, 19 nt, Artificial Sequence
  Description of Artificial Sequence: Synthetic oligonucleotide
ggccacuuugcccaacuca

SEQ ID NO: 543400 - RNA, 19 nt, Artificial Sequence
  Description of Artificial Sequence: Synthetic oligonucleotide
uggaaagcaucuggcucgu

SEQ ID NO: 543401 - RNA, 19 nt, Artificial Sequence
  Description of Artificial Sequence: Synthetic oligonucleotide
gacguuucauuaacuugaa

SEQ ID NO: 543402 - RNA, 19 nt, Artificial Sequence
  Description of Artificial Sequence: Synthetic oligonucleotide
ggcugcaugccguguacug

SEQ ID NO: 543403 - RNA, 19 nt, Artificial Sequence
  Description of Artificial Sequence: Synthetic oligonucleotide
caguauggaucaaaucagu

SEQ ID NO: 543404 - RNA, 19 nt, Artificial Sequence
  Description of Artificial Sequence: Synthetic oligonucleotide
cgucuuuccgugcaaaguc

SEQ ID NO: 543405 - RNA, 19 nt, Artificial Sequence
  Description of Artificial Sequence: Synthetic oligonucleotide
gccguguacuguaaucucc

SEQ ID NO: 543406 - RNA, 19 nt, Artificial Sequence
  Description of Artificial Sequence: Synthetic oligonucleotide
auacgaggcuugucccacu

SEQ ID NO: 543407 - RNA, 19 nt, Artificial Sequence
  Description of Artificial Sequence: Synthetic oligonucleotide
cucgcuccauucaguguuc

SEQ ID NO: 543408 - RNA, 19 nt, Artificial Sequence
  Description of Artificial Sequence: Synthetic oligonucleotide
gacuuguguuucacuccug

SEQ ID NO: 543409 - RNA, 19 nt, Artificial Sequence
  Description of Artificial Sequence: Synthetic oligonucleotide
gaguguuagucagcuguaa

SEQ ID NO: 543410 - RNA, 19 nt, Artificial Sequence
  Description of Artificial Sequence: Synthetic oligonucleotide
ccauucaguguucagacgu

SEQ ID NO: 543411 - RNA, 19 nt, Artificial Sequence
  Description of Artificial Sequence: Synthetic oligonucleotide
cuuuccgugcaaagucaaa

SEQ ID NO: 543412 - RNA, 19 nt, Artificial Sequence
  Description of Artificial Sequence: Synthetic oligonucleotide
aacuagcacgggacaggcu

SEQ ID NO: 543413 - RNA, 19 nt, Artificial Sequence
  Description of Artificial Sequence: Synthetic oligonucleotide
ggucaauuuccccgucuca

SEQ ID NO: 543414 - RNA, 19 nt, Artificial Sequence
  Description of Artificial Sequence: Synthetic oligonucleotide
cagcauuucguacuuccgu

SEQ ID NO: 543415 - RNA, 19 nt, Artificial Sequence
  Description of Artificial Sequence: Synthetic oligonucleotide
cugcaugccguguacugua

SEQ ID NO: 543416 - RNA, 19 nt, Artificial Sequence
  Description of Artificial Sequence: Synthetic oligonucleotide
cccacggcacagcauuucg

SEQ ID NO: 543417 - RNA, 19 nt, Artificial Sequence
  Description of Artificial Sequence: Synthetic oligonucleotide
gcauuuacaggaugcccaa

SEQ ID NO: 543418 - RNA, 19 nt, Artificial Sequence
  Description of Artificial Sequence: Synthetic oligonucleotide
ugacagggugcauggccuu

SEQ ID NO: 543419 - RNA, 19 nt, Artificial Sequence
  Description of Artificial Sequence: Synthetic oligonucleotide
uugucuccgaggagucauu

SEQ ID NO: 543420 - RNA, 19 nt, Artificial Sequence
  Description of Artificial Sequence: Synthetic oligonucleotide
agcugcauuagugcuuguu

SEQ ID NO: 543421 - RNA, 19 nt, Artificial Sequence
  Description of Artificial Sequence: Synthetic oligonucleotide
gcuuuagccgcuccaaccu

SEQ ID NO: 543422 - RNA, 19 nt, Artificial Sequence
  Description of Artificial Sequence: Synthetic oligonucleotide
cucggcucagccuugguuu

SEQ ID NO: 543423 - RNA, 19 nt, Artificial Sequence
  Description of Artificial Sequence: Synthetic oligonucleotide
gcacgggacaggcugcaug

SEQ ID NO: 543424 - RNA, 19 nt, Artificial Sequence
  Description of Artificial Sequence: Synthetic oligonucleotide
gugaggggcaguucugcua

SEQ ID NO: 543425 - RNA, 19 nt, Artificial Sequence
  Description of Artificial Sequence: Synthetic oligonucleotide
gaugcccaacaaacccuuc

SEQ ID NO: 543426 - RNA, 19 nt, Artificial Sequence
  Description of Artificial Sequence: Synthetic oligonucleotide
cauuuguuggauacccauu

SEQ ID NO: 543427 - RNA, 19 nt, Artificial Sequence
  Description of Artificial Sequence: Synthetic oligonucleotide
gaucuaguucaagaagcuu

SEQ ID NO: 543428 - RNA, 19 nt, Artificial Sequence
  Description of Artificial Sequence: Synthetic oligonucleotide
cggcguagcucaaauaauc

SEQ ID NO: 543429 - RNA, 19 nt, Artificial Sequence
  Description of Artificial Sequence: Synthetic oligonucleotide
ucgcuccauucaguguuca

SEQ ID NO: 543430 - RNA, 19 nt, Artificial Sequence
  Description of Artificial Sequence: Synthetic oligonucleotide
acggcguagcucaaauaau

SEQ ID NO: 543431 - RNA, 19 nt, Artificial Sequence
  Description of Artificial Sequence: Synthetic oligonucleotide
agaaaacgucuaagucuga

SEQ ID NO: 543432 - RNA, 19 nt, Artificial Sequence
  Description of Artificial Sequence: Synthetic oligonucleotide
acacggcguagcucaaaua

SEQ ID NO: 543433 - RNA, 19 nt, Artificial Sequence
  Description of Artificial Sequence: Synthetic oligonucleotide
ccgucucagggucauguac

SEQ ID NO: 543434 - RNA, 19 nt, Artificial Sequence
  Description of Artificial Sequence: Synthetic oligonucleotide
gacagggugcauggccuuc

SEQ ID NO: 543435 - RNA, 19 nt, Artificial Sequence
  Description of Artificial Sequence: Synthetic oligonucleotide
cugucccaagcucuuggaa

SEQ ID NO: 543436 - RNA, 19 nt, Artificial Sequence
  Description of Artificial Sequence: Synthetic oligonucleotide
cuguggucaauuuccccgu

SEQ ID NO: 543437 - RNA, 19 nt, Artificial Sequence
  Description of Artificial Sequence: Synthetic oligonucleotide
gcguagcucaaauaaucua

SEQ ID NO: 543438 - RNA, 19 nt, Artificial Sequence
  Description of Artificial Sequence: Synthetic oligonucleotide
aucggcagaacagcuucuu

SEQ ID NO: 543439 - RNA, 19 nt, Artificial Sequence
  Description of Artificial Sequence: Synthetic oligonucleotide
guggucaauuuccccgucu

SEQ ID NO: 543440 - RNA, 19 nt, Artificial Sequence
  Description of Artificial Sequence: Synthetic oligonucleotide
ggaucuaguucaagaagcu

SEQ ID NO: 543441 - RNA, 19 nt, Artificial Sequence
  Description of Artificial Sequence: Synthetic oligonucleotide
gggaaguauugccucugaa

SEQ ID NO: 543442 - RNA, 19 nt, Artificial Sequence
  Description of Artificial Sequence: Synthetic oligonucleotide
gcacaguguuuacucagaa

SEQ ID NO: 543443 - RNA, 19 nt, Artificial Sequence
  Description of Artificial Sequence: Synthetic oligonucleotide
caucgugguaucggcagaa

SEQ ID NO: 543444 - RNA, 19 nt, Artificial Sequence
  Description of Artificial Sequence: Synthetic oligonucleotide
guagcucggcucagccuug

SEQ ID NO: 543445 - RNA, 19 nt, Artificial Sequence
  Description of Artificial Sequence: Synthetic oligonucleotide
acaguuccgugugguaaua

SEQ ID NO: 543446 - RNA, 19 nt, Artificial Sequence
  Description of Artificial Sequence: Synthetic oligonucleotide
ggcguagcucaaauaaucu

SEQ ID NO: 543447 - RNA, 19 nt, Artificial Sequence
  Description of Artificial Sequence: Synthetic oligonucleotide
uuccccgucucagggucau

SEQ ID NO: 543448 - RNA, 19 nt, Artificial Sequence
  Description of Artificial Sequence: Synthetic oligonucleotide
ccuguauccugugauaacu

SEQ ID NO: 543449 - RNA, 19 nt, Artificial Sequence
  Description of Artificial Sequence: Synthetic oligonucleotide
gugagugaaagcgccuuau

SEQ ID NO: 543450 - RNA, 19 nt, Artificial Sequence
  Description of Artificial Sequence: Synthetic oligonucleotide
aggcugcaugccguguacu

SEQ ID NO: 543451 - RNA, 19 nt, Artificial Sequence
  Description of Artificial Sequence: Synthetic oligonucleotide
cgugugguaauaaucugcu

SEQ ID NO: 543452 - RNA, 19 nt, Artificial Sequence
  Description of Artificial Sequence: Synthetic oligonucleotide
ccauuuguuggauacccau

SEQ ID NO: 543453 - RNA, 19 nt, Artificial Sequence
  Description of Artificial Sequence: Synthetic oligonucleotide
ggaguguuagucagcugua

SEQ ID NO: 543454 - RNA, 19 nt, Artificial Sequence
  Description of Artificial Sequence: Synthetic oligonucleotide
caggcggauuagagaacaa

SEQ ID NO: 543455 - RNA, 19 nt, Artificial Sequence
  Description of Artificial Sequence: Synthetic oligonucleotide
agcgaggaggggagcuugu

SEQ ID NO: 543456 - RNA, 19 nt, Artificial Sequence
  Description of Artificial Sequence: Synthetic oligonucleotide
guccacguucaugcagcca

SEQ ID NO: 543457 - RNA, 19 nt, Artificial Sequence
  Description of Artificial Sequence: Synthetic oligonucleotide
gugugguaauaaucugcuu

SEQ ID NO: 543458 - RNA, 19 nt, Artificial Sequence
  Description of Artificial Sequence: Synthetic oligonucleotide
ccguguacuguaaucuccu

SEQ ID NO: 543459 - RNA, 19 nt, Artificial Sequence
  Description of Artificial Sequence: Synthetic oligonucleotide
ggcuggugccaaaauaaau

SEQ ID NO: 543460 - RNA, 19 nt, Artificial Sequence
  Description of Artificial Sequence: Synthetic oligonucleotide
cagggugcauggccuucga

SEQ ID NO: 543461 - RNA, 19 nt, Artificial Sequence
  Description of Artificial Sequence: Synthetic oligonucleotide
ccgguuuccaucgugguau

SEQ ID NO: 543462 - RNA, 19 nt, Artificial Sequence
  Description of Artificial Sequence: Synthetic oligonucleotide
ccgaggagucauuuugaua

SEQ ID NO: 543463 - RNA, 19 nt, Artificial Sequence
  Description of Artificial Sequence: Synthetic oligonucleotide
guucugcuaugcaggacuu

SEQ ID NO: 543464 - RNA, 19 nt, Artificial Sequence
  Description of Artificial Sequence: Synthetic oligonucleotide
gguaucggcagaacagcuu

SEQ ID NO: 543465 - RNA, 19 nt, Artificial Sequence
  Description of Artificial Sequence: Synthetic oligonucleotide
ccaucgugguaucggcaga

SEQ ID NO: 543466 - RNA, 19 nt, Artificial Sequence
  Description of Artificial Sequence: Synthetic oligonucleotide
cuucuguguaggccacuuu

SEQ ID NO: 543467 - RNA, 19 nt, Artificial Sequence
  Description of Artificial Sequence: Synthetic oligonucleotide
gcucgucuuuccgugcaaa

SEQ ID NO: 543468 - RNA, 19 nt, Artificial Sequence
  Description of Artificial Sequence: Synthetic oligonucleotide
gcgccuuauccaggucucc

SEQ ID NO: 543469 - RNA, 19 nt, Artificial Sequence
  Description of Artificial Sequence: Synthetic oligonucleotide
cuaguucaagaagcuucuu

SEQ ID NO: 543470 - RNA, 19 nt, Artificial Sequence
  Description of Artificial Sequence: Synthetic oligonucleotide
gauugcccuuugagauggu

SEQ ID NO: 543471 - RNA, 19 nt, Artificial Sequence
  Description of Artificial Sequence: Synthetic oligonucleotide
gcgaggaggggagcuuguc

SEQ ID NO: 543472 - RNA, 19 nt, Artificial Sequence
  Description of Artificial Sequence: Synthetic oligonucleotide
gcccaacucaaagcagucu

SEQ ID NO: 543473 - RNA, 19 nt, Artificial Sequence
  Description of Artificial Sequence: Synthetic oligonucleotide
gguacacggcguagcucaa

SEQ ID NO: 543474 - RNA, 19 nt, Artificial Sequence
  Description of Artificial Sequence: Synthetic oligonucleotide
cgaauaauacgaggcuugu

SEQ ID NO: 543475 - RNA, 19 nt, Artificial Sequence
  Description of Artificial Sequence: Synthetic oligonucleotide
gcaugccguguacuguaau

SEQ ID NO: 543476 - RNA, 19 nt, Artificial Sequence
  Description of Artificial Sequence: Synthetic oligonucleotide
caauugugccaggcggauu

SEQ ID NO: 543477 - RNA, 19 nt, Artificial Sequence
  Description of Artificial Sequence: Synthetic oligonucleotide
cgucuaagucugagcaucu

SEQ ID NO: 543478 - RNA, 19 nt, Artificial Sequence
  Description of Artificial Sequence: Synthetic oligonucleotide
caacucccucacucaucau

SEQ ID NO: 543479 - RNA, 19 nt, Artificial Sequence
  Description of Artificial Sequence: Synthetic oligonucleotide
gccgcuccaaccugaucuu

SEQ ID NO: 543480 - RNA, 19 nt, Artificial Sequence
  Description of Artificial Sequence: Synthetic oligonucleotide
gcccauuguuuuauuuguu

SEQ ID NO: 543481 - RNA, 19 nt, Artificial Sequence
  Description of Artificial Sequence: Synthetic oligonucleotide
cccgucucagggucaugua

SEQ ID NO: 543482 - RNA, 19 nt, Artificial Sequence
  Description of Artificial Sequence: Synthetic oligonucleotide
ggagcgaggaggggagcuu

SEQ ID NO: 543483 - RNA, 19 nt, Artificial Sequence
  Description of Artificial Sequence: Synthetic oligonucleotide
cagcugcauuagugcuugu

SEQ ID NO: 543484 - RNA, 19 nt, Artificial Sequence
  Description of Artificial Sequence: Synthetic oligonucleotide
aaugaugagagacagaucc

SEQ ID NO: 543485 - RNA, 19 nt, Artificial Sequence
  Description of Artificial Sequence: Synthetic oligonucleotide
uguagaaucaucuauaccc

SEQ ID NO: 543486 - RNA, 19 nt, Artificial Sequence
  Description of Artificial Sequence: Synthetic oligonucleotide
uugaauuaaacccaaauga

SEQ ID NO: 543487 - RNA, 19 nt, Artificial Sequence
  Description of Artificial Sequence: Synthetic oligonucleotide
ucuuuauuggcuuauaugc

SEQ ID NO: 543488 - RNA, 19 nt, Artificial Sequence
  Description of Artificial Sequence: Synthetic oligonucleotide
ugauguaugauuucggugg

SEQ ID NO: 543489 - RNA, 19 nt, Artificial Sequence
  Description of Artificial Sequence: Synthetic oligonucleotide
ucugauacaauuuguacgg

SEQ ID NO: 543490 - RNA, 19 nt, Artificial Sequence
  Description of Artificial Sequence: Synthetic oligonucleotide
ugcaaagugacccaguacg

SEQ ID NO: 543491 - RNA, 19 nt, Artificial Sequence
  Description of Artificial Sequence: Synthetic oligonucleotide
agaacuauuaucuaggaga

SEQ ID NO: 543492 - RNA, 19 nt, Artificial Sequence
  Description of Artificial Sequence: Synthetic oligonucleotide
aguggugcaacauacaugg

SEQ ID NO: 543493 - RNA, 19 nt, Artificial Sequence
  Description of Artificial Sequence: Synthetic oligonucleotide
aaaaugagugcccagagcu

SEQ ID NO: 543494 - RNA, 19 nt, Artificial Sequence
  Description of Artificial Sequence: Synthetic oligonucleotide
agaggcauaacuuuuaaag

SEQ ID NO: 543495 - RNA, 19 nt, Artificial Sequence
  Description of Artificial Sequence: Synthetic oligonucleotide
aaaacuaagagaaucacca

SEQ ID NO: 543496 - RNA, 19 nt, Artificial Sequence
  Description of Artificial Sequence: Synthetic oligonucleotide
ugaauuaaacccaaaugag

SEQ ID NO: 543497 - RNA, 19 nt, Artificial Sequence
  Description of Artificial Sequence: Synthetic oligonucleotide
agauauucaaaaugagugc

SEQ ID NO: 543498 - RNA, 19 nt, Artificial Sequence
  Description of Artificial Sequence: Synthetic oligonucleotide
gagauauucaaaaugagug

SEQ ID NO: 543499 - RNA, 19 nt, Artificial Sequence
  Description of Artificial Sequence: Synthetic oligonucleotide
uccgauuucucucagauga

SEQ ID NO: 543500 - RNA, 19 nt, Artificial Sequence
  Description of Artificial Sequence: Synthetic oligonucleotide
uuugguggauaaaagacag

SEQ ID NO: 543501 - RNA, 19 nt, Artificial Sequence
  Description of Artificial Sequence: Synthetic oligonucleotide
uaaaugauauacgaagugg

SEQ ID NO: 543502 - RNA, 19 nt, Artificial Sequence
  Description of Artificial Sequence: Synthetic oligonucleotide
aaaggauacacauucaguu

SEQ ID NO: 543503 - RNA, 19 nt, Artificial Sequence
  Description of Artificial Sequence: Synthetic oligonucleotide
auuaaacccaaaugagucc

SEQ ID NO: 543504 - RNA, 19 nt, Artificial Sequence
  Description of Artificial Sequence: Synthetic oligonucleotide
aaagugacccaguacggac

SEQ ID NO: 543505 - RNA, 19 nt, Artificial Sequence
  Description of Artificial Sequence: Synthetic oligonucleotide
auuaauuaauaccucaaga

SEQ ID NO: 543506 - RNA, 19 nt, Artificial Sequence
  Description of Artificial Sequence: Synthetic oligonucleotide
acaaguuaggaaucugugc

SEQ ID NO: 543507 - RNA, 19 nt, Artificial Sequence
  Description of Artificial Sequence: Synthetic oligonucleotide
uaaccaaagacacauuuga

SEQ ID NO: 543508 - RNA, 19 nt, Artificial Sequence
  Description of Artificial Sequence: Synthetic oligonucleotide
uaaaacuaagagaaucacc

SEQ ID NO: 543509 - RNA, 19 nt, Artificial Sequence
  Description of Artificial Sequence: Synthetic oligonucleotide
caaguuaggaaucugugcc

SEQ ID NO: 543510 - RNA, 19 nt, Artificial Sequence
  Description of Artificial Sequence: Synthetic oligonucleotide
cuuauugcauauaugguac

SEQ ID NO: 543511 - RNA, 19 nt, Artificial Sequence
  Description of Artificial Sequence: Synthetic oligonucleotide
ugaguccuaaaacuaagag

SEQ ID NO: 543512 - RNA, 19 nt, Artificial Sequence
  Description of Artificial Sequence: Synthetic oligonucleotide
gacaguagcaaacagaaaa

SEQ ID NO: 543513 - RNA, 19 nt, Artificial Sequence
  Description of Artificial Sequence: Synthetic oligonucleotide
ugcuguaucacguuggucu

SEQ ID NO: 543514 - RNA, 19 nt, Artificial Sequence
  Description of Artificial Sequence: Synthetic oligonucleotide
uuugcauaguucaugauua

SEQ ID NO: 543515 - RNA, 19 nt, Artificial Sequence
  Description of Artificial Sequence: Synthetic oligonucleotide
cuugaauuaaacccaaaug

SEQ ID NO: 543516 - RNA, 19 nt, Artificial Sequence
  Description of Artificial Sequence: Synthetic oligonucleotide
cagaugauaaaagaguugg

SEQ ID NO: 543517 - RNA, 19 nt, Artificial Sequence
  Description of Artificial Sequence: Synthetic oligonucleotide
uauacgaagugguugagcu

SEQ ID NO: 543518 - RNA, 19 nt, Artificial Sequence
  Description of Artificial Sequence: Synthetic oligonucleotide
aguccuuaggugcauagac

SEQ ID NO: 543519 - RNA, 19 nt, Artificial Sequence
  Description of Artificial Sequence: Synthetic oligonucleotide
ucaugauacagaaaacaca

SEQ ID NO: 543520 - RNA, 19 nt, Artificial Sequence
  Description of Artificial Sequence: Synthetic oligonucleotide
uauuauagugccuuuaguu

SEQ ID NO: 543521 - RNA, 19 nt, Artificial Sequence
  Description of Artificial Sequence: Synthetic oligonucleotide
caaucaucaaucagcaugc

SEQ ID NO: 543522 - RNA, 19 nt, Artificial Sequence
  Description of Artificial Sequence: Synthetic oligonucleotide
uuuaacugaggauggaaca

SEQ ID NO: 543523 - RNA, 19 nt, Artificial Sequence
  Description of Artificial Sequence: Synthetic oligonucleotide
uaauaaucaucguugcuug

SEQ ID NO: 543524 - RNA, 19 nt, Artificial Sequence
  Description of Artificial Sequence: Synthetic oligonucleotide
ucuuauugcauauauggua

SEQ ID NO: 543525 - RNA, 19 nt, Artificial Sequence
  Description of Artificial Sequence: Synthetic oligonucleotide
aaaagcucgaaccauccau

SEQ ID NO: 543526 - RNA, 19 nt, Artificial Sequence
  Description of Artificial Sequence: Synthetic oligonucleotide
cacauuauauauuucccag

SEQ ID NO: 543527 - RNA, 19 nt, Artificial Sequence
  Description of Artificial Sequence: Synthetic oligonucleotide
uccuuaggugcauagacag

SEQ ID NO: 543528 - RNA, 19 nt, Artificial Sequence
  Description of Artificial Sequence: Synthetic oligonucleotide
ugauauacgaagugguuga

SEQ ID NO: 543529 - RNA, 19 nt, Artificial Sequence
  Description of Artificial Sequence: Synthetic oligonucleotide
ugauaaaagaguuggggaa

SEQ ID NO: 543530 - RNA, 19 nt, Artificial Sequence
  Description of Artificial Sequence: Synthetic oligonucleotide
aggguuauuguuucaaaag

SEQ ID NO: 543531 - RNA, 19 nt, Artificial Sequence
  Description of Artificial Sequence: Synthetic oligonucleotide
aaacuagauguguugucag

SEQ ID NO: 543532 - RNA, 19 nt, Artificial Sequence
  Description of Artificial Sequence: Synthetic oligonucleotide
aguuguccuguacuuaagc

SEQ ID NO: 543533 - RNA, 19 nt, Artificial Sequence
  Description of Artificial Sequence: Synthetic oligonucleotide
acucaaacacauuauauau

SEQ ID NO: 543534 - RNA, 19 nt, Artificial Sequence
  Description of Artificial Sequence: Synthetic oligonucleotide
guuguaugcaaagugaccc

SEQ ID NO: 543535 - RNA, 19 nt, Artificial Sequence
  Description of Artificial Sequence: Synthetic oligonucleotide
uauaaauuagacuguccac

SEQ ID NO: 543536 - RNA, 19 nt, Artificial Sequence
  Description of Artificial Sequence: Synthetic oligonucleotide
cauaauuuggguugcggag

SEQ ID NO: 543537 - RNA, 19 nt, Artificial Sequence
  Description of Artificial Sequence: Synthetic oligonucleotide
aaauuggagcccuugaguu

SEQ ID NO: 543538 - RNA, 19 nt, Artificial Sequence
  Description of Artificial Sequence: Synthetic oligonucleotide
uaugguacgugccuguuac

SEQ ID NO: 543539 - RNA, 19 nt, Artificial Sequence
  Description of Artificial Sequence: Synthetic oligonucleotide
ugcucggaaagcaaacacg

SEQ ID NO: 543540 - RNA, 19 nt, Artificial Sequence
  Description of Artificial Sequence: Synthetic oligonucleotide
uaccugauauaaauaaucu

SEQ ID NO: 543541 - RNA, 19 nt, Artificial Sequence
  Description of Artificial Sequence: Synthetic oligonucleotide
aaaugauauacgaaguggu

SEQ ID NO: 543542 - RNA, 19 nt, Artificial Sequence
  Description of Artificial Sequence: Synthetic oligonucleotide
auacuauuuaaacucuuca

SEQ ID NO: 543543 - RNA, 19 nt, Artificial Sequence
  Description of Artificial Sequence: Synthetic oligonucleotide
uuuguacgguucaugauac

SEQ ID NO: 543544 - RNA, 19 nt, Artificial Sequence
  Description of Artificial Sequence: Synthetic oligonucleotide
ucagaugauaaaagaguug

SEQ ID NO: 543545 - RNA, 19 nt, Artificial Sequence
  Description of Artificial Sequence: Synthetic oligonucleotide
aaagcggacguacaucuca

SEQ ID NO: 543546 - RNA, 19 nt, Artificial Sequence
  Description of Artificial Sequence: Synthetic oligonucleotide
gagauuaauuaauaccuca

SEQ ID NO: 543547 - RNA, 19 nt, Artificial Sequence
  Description of Artificial Sequence: Synthetic oligonucleotide
uuaucuaggagaaguuuac

SEQ ID NO: 543548 - RNA, 19 nt, Artificial Sequence
  Description of Artificial Sequence: Synthetic oligonucleotide
cauacauggaaaauccaug

SEQ ID NO: 543549 - RNA, 19 nt, Artificial Sequence
  Description of Artificial Sequence: Synthetic oligonucleotide
gauuacaccauuuggugga

SEQ ID NO: 543550 - RNA, 19 nt, Artificial Sequence
  Description of Artificial Sequence: Synthetic oligonucleotide
uuauugagaaguucuuucu

SEQ ID NO: 543551 - RNA, 19 nt, Artificial Sequence
  Description of Artificial Sequence: Synthetic oligonucleotide
uguacgguucaugauacag

SEQ ID NO: 543552 - RNA, 19 nt, Artificial Sequence
  Description of Artificial Sequence: Synthetic oligonucleotide
cuucuuagcuuuaacugag

SEQ ID NO: 543553 - RNA, 19 nt, Artificial Sequence
  Description of Artificial Sequence: Synthetic oligonucleotide
aauacgcacaugcucauuu

SEQ ID NO: 543554 - RNA, 19 nt, Artificial Sequence
  Description of Artificial Sequence: Synthetic oligonucleotide
uguguagaaucaucuauac

SEQ ID NO: 543555 - RNA, 19 nt, Artificial Sequence
  Description of Artificial Sequence: Synthetic oligonucleotide
uagccuaggauucuauccc

SEQ ID NO: 543556 - RNA, 19 nt, Artificial Sequence
  Description of Artificial Sequence: Synthetic oligonucleotide
acaaauuggagcccuugag

SEQ ID NO: 543557 - RNA, 19 nt, Artificial Sequence
  Description of Artificial Sequence: Synthetic oligonucleotide
guagccuaggauucuaucc

SEQ ID NO: 543558 - RNA, 19 nt, Artificial Sequence
  Description of Artificial Sequence: Synthetic oligonucleotide
uuuuacuuucagaggaacu

SEQ ID NO: 543559 - RNA, 19 nt, Artificial Sequence
  Description of Artificial Sequence: Synthetic oligonucleotide
acuugaauuaaacccaaau

SEQ ID NO: 543560 - RNA, 19 nt, Artificial Sequence
  Description of Artificial Sequence: Synthetic oligonucleotide
aaaaggcuuaaaucuggcu

SEQ ID NO: 543561 - RNA, 19 nt, Artificial Sequence
  Description of Artificial Sequence: Synthetic oligonucleotide
uuauugcauauaugguacg

SEQ ID NO: 543562 - RNA, 19 nt, Artificial Sequence
  Description of Artificial Sequence: Synthetic oligonucleotide
gugccuuuaguucuuauug

SEQ ID NO: 543563 - RNA, 19 nt, Artificial Sequence
  Description of Artificial Sequence: Synthetic oligonucleotide
uuauuauagugccuuuagu

SEQ ID NO: 543564 - RNA, 19 nt, Artificial Sequence
  Description of Artificial Sequence: Synthetic oligonucleotide
auuuguacgguucaugaua

SEQ ID NO: 543565 - RNA, 19 nt, Artificial Sequence
  Description of Artificial Sequence: Synthetic oligonucleotide
ugcauauaugguacgugcc

SEQ ID NO: 543566 - RNA, 19 nt, Artificial Sequence
  Description of Artificial Sequence: Synthetic oligonucleotide
aauuuccagagaguuguag

SEQ ID NO: 543567 - RNA, 19 nt, Artificial Sequence
  Description of Artificial Sequence: Synthetic oligonucleotide
gaguccuaaaacuaagaga

SEQ ID NO: 543568 - RNA, 19 nt, Artificial Sequence
  Description of Artificial Sequence: Synthetic oligonucleotide
ucugauguaugauuucggu

SEQ ID NO: 543569 - RNA, 19 nt, Artificial Sequence
  Description of Artificial Sequence: Synthetic oligonucleotide
uuggcuuauaugcaaaguu

SEQ ID NO: 543570 - RNA, 19 nt, Artificial Sequence
  Description of Artificial Sequence: Synthetic oligonucleotide
guaugcagaguuugcauag

SEQ ID NO: 543571 - RNA, 19 nt, Artificial Sequence
  Description of Artificial Sequence: Synthetic oligonucleotide
uauuggcuuauaugcaaag

SEQ ID NO: 543572 - RNA, 19 nt, Artificial Sequence
  Description of Artificial Sequence: Synthetic oligonucleotide
uuaaacccaaaugaguccu

SEQ ID NO: 543573 - RNA, 19 nt, Artificial Sequence
  Description of Artificial Sequence: Synthetic oligonucleotide
uucuaucccacaaaagcaa

SEQ ID NO: 543574 - RNA, 19 nt, Artificial Sequence
  Description of Artificial Sequence: Synthetic oligonucleotide
gagaaguuuacaaaccgac

SEQ ID NO: 543575 - RNA, 19 nt, Artificial Sequence
  Description of Artificial Sequence: Synthetic oligonucleotide
uuagugaggggcaauuuau

SEQ ID NO: 543576 - RNA, 19 nt, Artificial Sequence
  Description of Artificial Sequence: Synthetic oligonucleotide
cucacggaauaucugauac

SEQ ID NO: 543577 - RNA, 19 nt, Artificial Sequence
  Description of Artificial Sequence: Synthetic oligonucleotide
caucaaucagcaugcaagc

SEQ ID NO: 543578 - RNA, 19 nt, Artificial Sequence
  Description of Artificial Sequence: Synthetic oligonucleotide
agaggaacuugaauuaaac

SEQ ID NO: 543579 - RNA, 19 nt, Artificial Sequence
  Description of Artificial Sequence: Synthetic oligonucleotide
acuuaagccaaguucuaca

SEQ ID NO: 543580 - RNA, 19 nt, Artificial Sequence
  Description of Artificial Sequence: Synthetic oligonucleotide
aaucaucuauacccaguug

SEQ ID NO: 543581 - RNA, 19 nt, Artificial Sequence
  Description of Artificial Sequence: Synthetic oligonucleotide
uguccuguacuuaagccaa

SEQ ID NO: 543582 - RNA, 19 nt, Artificial Sequence
  Description of Artificial Sequence: Synthetic oligonucleotide
uuagacuguccaccaaaag

SEQ ID NO: 543583 - RNA, 19 nt, Artificial Sequence
  Description of Artificial Sequence: Synthetic oligonucleotide
ugcucauaauacaggaugu

SEQ ID NO: 543584 - RNA, 19 nt, Artificial Sequence
  Description of Artificial Sequence: Synthetic oligonucleotide
uaguucuuauugcauauau

SEQ ID NO: 543585 - RNA, 19 nt, Artificial Sequence
  Description of Artificial Sequence: Synthetic oligonucleotide
aaagcaaacacggcagcug

SEQ ID NO: 543586 - RNA, 19 nt, Artificial Sequence
  Description of Artificial Sequence: Synthetic oligonucleotide
uguagcuaaguauccagaa

SEQ ID NO: 543587 - RNA, 19 nt, Artificial Sequence
  Description of Artificial Sequence: Synthetic oligonucleotide
ucaugauuaguugcuaaug

SEQ ID NO: 543588 - RNA, 19 nt, Artificial Sequence
  Description of Artificial Sequence: Synthetic oligonucleotide
cauacuauuuaaacucuuc

SEQ ID NO: 543589 - RNA, 19 nt, Artificial Sequence
  Description of Artificial Sequence: Synthetic oligonucleotide
augauauacgaagugguug

SEQ ID NO: 543590 - RNA, 19 nt, Artificial Sequence
  Description of Artificial Sequence: Synthetic oligonucleotide
aauuuguacgguucaugau

SEQ ID NO: 543591 - RNA, 19 nt, Artificial Sequence
  Description of Artificial Sequence: Synthetic oligonucleotide
ugcauagacaggucgaaaa

SEQ ID NO: 543592 - RNA, 19 nt, Artificial Sequence
  Description of Artificial Sequence: Synthetic oligonucleotide
uuuagugaggggcaauuua

SEQ ID NO: 543593 - RNA, 19 nt, Artificial Sequence
  Description of Artificial Sequence: Synthetic oligonucleotide
uaaucaucguugcuugcug

SEQ ID NO: 543594 - RNA, 19 nt, Artificial Sequence
  Description of Artificial Sequence: Synthetic oligonucleotide
aaccggucucuuucgugcc

SEQ ID NO: 543595 - RNA, 19 nt, Artificial Sequence
  Description of Artificial Sequence: Synthetic oligonucleotide
aaaggucaugcuguaucac

SEQ ID NO: 543596 - RNA, 19 nt, Artificial Sequence
  Description of Artificial Sequence: Synthetic oligonucleotide
uuucgugccaaugggauac

SEQ ID NO: 543597 - RNA, 19 nt, Artificial Sequence
  Description of Artificial Sequence: Synthetic oligonucleotide
uuaaaguagaaaggucagc

SEQ ID NO: 543598 - RNA, 19 nt, Artificial Sequence
  Description of Artificial Sequence: Synthetic oligonucleotide
uccuaucccaucauuggcu

SEQ ID NO: 543599 - RNA, 19 nt, Artificial Sequence
  Description of Artificial Sequence: Synthetic oligonucleotide
cauaauacaggauguccuc

SEQ ID NO: 543600 - RNA, 19 nt, Artificial Sequence
  Description of Artificial Sequence: Synthetic oligonucleotide
aacuagauguguugucagu

SEQ ID NO: 543601 - RNA, 19 nt, Artificial Sequence
  Description of Artificial Sequence: Synthetic oligonucleotide
gaccucgggucucugaagg

SEQ ID NO: 543602 - RNA, 19 nt, Artificial Sequence
  Description of Artificial Sequence: Synthetic oligonucleotide
uucuuagcuuuaacugagg

SEQ ID NO: 543603 - RNA, 19 nt, Artificial Sequence
  Description of Artificial Sequence: Synthetic oligonucleotide
gggaagauauguuugaaga

SEQ ID NO: 543604 - RNA, 19 nt, Artificial Sequence
  Description of Artificial Sequence: Synthetic oligonucleotide
agguucacugcucggaaag

SEQ ID NO: 543605 - RNA, 19 nt, Artificial Sequence
  Description of Artificial Sequence: Synthetic oligonucleotide
uaugcaaagugacccagua

SEQ ID NO: 543606 - RNA, 19 nt, Artificial Sequence
  Description of Artificial Sequence: Synthetic oligonucleotide
uuggcuuuagugaggggca

SEQ ID NO: 543607 - RNA, 19 nt, Artificial Sequence
  Description of Artificial Sequence: Synthetic oligonucleotide
aaucaucguugcuugcugu

SEQ ID NO: 543608 - RNA, 19 nt, Artificial Sequence
  Description of Artificial Sequence: Synthetic oligonucleotide
cuguuguaugcaaagugac

SEQ ID NO: 543609 - RNA, 19 nt, Artificial Sequence
  Description of Artificial Sequence: Synthetic oligonucleotide
cugauguaugauuucggug

SEQ ID NO: 543610 - RNA, 19 nt, Artificial Sequence
  Description of Artificial Sequence: Synthetic oligonucleotide
acccaguacggacguaucc

SEQ ID NO: 543611 - RNA, 19 nt, Artificial Sequence
  Description of Artificial Sequence: Synthetic oligonucleotide
ggauuacaccauuuggugg

SEQ ID NO: 543612 - RNA, 19 nt, Artificial Sequence
  Description of Artificial Sequence: Synthetic oligonucleotide
ucaucuauacccaguuguc

SEQ ID NO: 543613 - RNA, 19 nt, Artificial Sequence
  Description of Artificial Sequence: Synthetic oligonucleotide
ugcggagauuaauuaauac

SEQ ID NO: 543614 - RNA, 19 nt, Artificial Sequence
  Description of Artificial Sequence: Synthetic oligonucleotide
agguugacuggagauauuc

SEQ ID NO: 543615 - RNA, 19 nt, Artificial Sequence
  Description of Artificial Sequence: Synthetic oligonucleotide
gugccaaugggauacucag

SEQ ID NO: 543616 - RNA, 19 nt, Artificial Sequence
  Description of Artificial Sequence: Synthetic oligonucleotide
ucggauguacugcugggca

SEQ ID NO: 543617 - RNA, 19 nt, Artificial Sequence
  Description of Artificial Sequence: Synthetic oligonucleotide
caauuuguacgguucauga

SEQ ID NO: 543618 - RNA, 19 nt, Artificial Sequence
  Description of Artificial Sequence: Synthetic oligonucleotide
uucaugauuaguugcuaau

SEQ ID NO: 543619 - RNA, 19 nt, Artificial Sequence
  Description of Artificial Sequence: Synthetic oligonucleotide
auucuaucccacaaaagca

SEQ ID NO: 543620 - RNA, 19 nt, Artificial Sequence
  Description of Artificial Sequence: Synthetic oligonucleotide
uggcuuauaugcaaaguuu

SEQ ID NO: 543621 - RNA, 19 nt, Artificial Sequence
  Description of Artificial Sequence: Synthetic oligonucleotide
acuagauguguugucagug

SEQ ID NO: 543622 - RNA, 19 nt, Artificial Sequence
  Description of Artificial Sequence: Synthetic oligonucleotide
gcggagauuaauuaauacc

SEQ ID NO: 543623 - RNA, 19 nt, Artificial Sequence
  Description of Artificial Sequence: Synthetic oligonucleotide
aggggcaauuuauaaaaga

SEQ ID NO: 543624 - RNA, 19 nt, Artificial Sequence
  Description of Artificial Sequence: Synthetic oligonucleotide
agugguugagcuccgauuu

SEQ ID NO: 543625 - RNA, 19 nt, Artificial Sequence
  Description of Artificial Sequence: Synthetic oligonucleotide
augcaaagugacccaguac

SEQ ID NO: 543626 - RNA, 19 nt, Artificial Sequence
  Description of Artificial Sequence: Synthetic oligonucleotide
uuccuugucggauguacug

SEQ ID NO: 543627 - RNA, 19 nt, Artificial Sequence
  Description of Artificial Sequence: Synthetic oligonucleotide
aauucagggaugucuuuua

SEQ ID NO: 543628 - RNA, 19 nt, Artificial Sequence
  Description of Artificial Sequence: Synthetic oligonucleotide
acccaaaugaguccuaaaa

SEQ ID NO: 543629 - RNA, 19 nt, Artificial Sequence
  Description of Artificial Sequence: Synthetic oligonucleotide
cucugauguaugauuucgg

SEQ ID NO: 543630 - RNA, 19 nt, Artificial Sequence
  Description of Artificial Sequence: Synthetic oligonucleotide
caaccggucucuuucgugc

SEQ ID NO: 543631 - RNA, 19 nt, Artificial Sequence
  Description of Artificial Sequence: Synthetic oligonucleotide
aggaugacugggcaaagga

SEQ ID NO: 543632 - RNA, 19 nt, Artificial Sequence
  Description of Artificial Sequence: Synthetic oligonucleotide
aagcgcaguauuuggugug

SEQ ID NO: 543633 - RNA, 19 nt, Artificial Sequence
  Description of Artificial Sequence: Synthetic oligonucleotide
ucuauacccaguuguccug

SEQ ID NO: 543634 - RNA, 19 nt, Artificial Sequence
  Description of Artificial Sequence: Synthetic oligonucleotide
auacaggauguccucaggu

SEQ ID NO: 543635 - RNA, 19 nt, Artificial Sequence
  Description of Artificial Sequence: Synthetic oligonucleotide
cuuugagugacucaagucu

SEQ ID NO: 543636 - RNA, 19 nt, Artificial Sequence
  Description of Artificial Sequence: Synthetic oligonucleotide
aucaucguugcuugcuguc

SEQ ID NO: 543637 - RNA, 19 nt, Artificial Sequence
  Description of Artificial Sequence: Synthetic oligonucleotide
augcaagcgcaguauuugg

SEQ ID NO: 543638 - RNA, 19 nt, Artificial Sequence
  Description of Artificial Sequence: Synthetic oligonucleotide
caaugggauacucaguuca

SEQ ID NO: 543639 - RNA, 19 nt, Artificial Sequence
  Description of Artificial Sequence: Synthetic oligonucleotide
uauugcauauaugguacgu

SEQ ID NO: 543640 - RNA, 19 nt, Artificial Sequence
  Description of Artificial Sequence: Synthetic oligonucleotide
acuguuguaugcaaaguga

SEQ ID NO: 543641 - RNA, 19 nt, Artificial Sequence
  Description of Artificial Sequence: Synthetic oligonucleotide
uacccaguuguccuguacu

SEQ ID NO: 543642 - RNA, 19 nt, Artificial Sequence
  Description of Artificial Sequence: Synthetic oligonucleotide
gguuauuguuucaaaagug

SEQ ID NO: 543643 - RNA, 19 nt, Artificial Sequence
  Description of Artificial Sequence: Synthetic oligonucleotide
cugagcguacaaauuggag

SEQ ID NO: 543644 - RNA, 19 nt, Artificial Sequence
  Description of Artificial Sequence: Synthetic oligonucleotide
gacuaucugggcaaugaug

SEQ ID NO: 543645 - RNA, 19 nt, Artificial Sequence
  Description of Artificial Sequence: Synthetic oligonucleotide
aaauuagacuguccaccaa

SEQ ID NO: 543646 - RNA, 19 nt, Artificial Sequence
  Description of Artificial Sequence: Synthetic oligonucleotide
auaauuuggguugcggaga

SEQ ID NO: 543647 - RNA, 19 nt, Artificial Sequence
  Description of Artificial Sequence: Synthetic oligonucleotide
aaugauauacgaagugguu

SEQ ID NO: 543648 - RNA, 19 nt, Artificial Sequence
  Description of Artificial Sequence: Synthetic oligonucleotide
gacaagaaguuguguuacc

SEQ ID NO: 543649 - RNA, 19 nt, Artificial Sequence
  Description of Artificial Sequence: Synthetic oligonucleotide
uuggugugcaggguuauug

SEQ ID NO: 543650 - RNA, 19 nt, Artificial Sequence
  Description of Artificial Sequence: Synthetic oligonucleotide
cagcugagcguacaaauug

SEQ ID NO: 543651 - RNA, 19 nt, Artificial Sequence
  Description of Artificial Sequence: Synthetic oligonucleotide
auacgaagugguugagcuc

SEQ ID NO: 543652 - RNA, 19 nt, Artificial Sequence
  Description of Artificial Sequence: Synthetic oligonucleotide
agauauguuugaagaagag

SEQ ID NO: 543653 - RNA, 19 nt, Artificial Sequence
  Description of Artificial Sequence: Synthetic oligonucleotide
aagguucuuugagaugcuc

SEQ ID NO: 543654 - RNA, 19 nt, Artificial Sequence
  Description of Artificial Sequence: Synthetic oligonucleotide
auauaugguacgugccugu

SEQ ID NO: 543655 - RNA, 19 nt, Artificial Sequence
  Description of Artificial Sequence: Synthetic oligonucleotide
uauuaucuaggagaaguuu

SEQ ID NO: 543656 - RNA, 19 nt, Artificial Sequence
  Description of Artificial Sequence: Synthetic oligonucleotide
aaguucuacaaagcauucu

SEQ ID NO: 543657 - RNA, 19 nt, Artificial Sequence
  Description of Artificial Sequence: Synthetic oligonucleotide
agcaagaguugaucuguag

SEQ ID NO: 543658 - RNA, 19 nt, Artificial Sequence
  Description of Artificial Sequence: Synthetic oligonucleotide
acaauuuguacgguucaug

SEQ ID NO: 543659 - RNA, 19 nt, Artificial Sequence
  Description of Artificial Sequence: Synthetic oligonucleotide
gaacuauuaucuaggagaa

SEQ ID NO: 543660 - RNA, 19 nt, Artificial Sequence
  Description of Artificial Sequence: Synthetic oligonucleotide
guguagaaucaucuauacc

SEQ ID NO: 543661 - RNA, 19 nt, Artificial Sequence
  Description of Artificial Sequence: Synthetic oligonucleotide
gcaagaguugaucuguagc

SEQ ID NO: 543662 - RNA, 19 nt, Artificial Sequence
  Description of Artificial Sequence: Synthetic oligonucleotide
aagugguugagcuccgauu

SEQ ID NO: 543663 - RNA, 19 nt, Artificial Sequence
  Description of Artificial Sequence: Synthetic oligonucleotide
uggacuaucugggcaauga

SEQ ID NO: 543664 - RNA, 19 nt, Artificial Sequence
  Description of Artificial Sequence: Synthetic oligonucleotide
agggauuacaccauuuggu

SEQ ID NO: 543665 - RNA, 19 nt, Artificial Sequence
  Description of Artificial Sequence: Synthetic oligonucleotide
ucuaacccuagcuuuccuc

SEQ ID NO: 543666 - RNA, 19 nt, Artificial Sequence
  Description of Artificial Sequence: Synthetic oligonucleotide
gcuuaaaucuggcucauca

SEQ ID NO: 543667 - RNA, 19 nt, Artificial Sequence
  Description of Artificial Sequence: Synthetic oligonucleotide
gaucuguagcuaaguaucc

SEQ ID NO: 543668 - RNA, 19 nt, Artificial Sequence
  Description of Artificial Sequence: Synthetic oligonucleotide
auuaucuaggagaaguuua

SEQ ID NO: 543669 - RNA, 19 nt, Artificial Sequence
  Description of Artificial Sequence: Synthetic oligonucleotide
uauuuggugugcaggguua

SEQ ID NO: 543670 - RNA, 19 nt, Artificial Sequence
  Description of Artificial Sequence: Synthetic oligonucleotide
aucguugcuugcugucagc

SEQ ID NO: 543671 - RNA, 19 nt, Artificial Sequence
  Description of Artificial Sequence: Synthetic oligonucleotide
caucucacggaauaucuga

SEQ ID NO: 543672 - RNA, 19 nt, Artificial Sequence
  Description of Artificial Sequence: Synthetic oligonucleotide
uaauuuggguugcggagau

SEQ ID NO: 543673 - RNA, 19 nt, Artificial Sequence
  Description of Artificial Sequence: Synthetic oligonucleotide
caucuauacccaguugucc

SEQ ID NO: 543674 - RNA, 19 nt, Artificial Sequence
  Description of Artificial Sequence: Synthetic oligonucleotide
accgacaagaaguuguguu

SEQ ID NO: 543675 - RNA, 19 nt, Artificial Sequence
  Description of Artificial Sequence: Synthetic oligonucleotide
agagaguuguagccuagga

SEQ ID NO: 543676 - RNA, 19 nt, Artificial Sequence
  Description of Artificial Sequence: Synthetic oligonucleotide
aacccuagcuuuccucuga

SEQ ID NO: 543677 - RNA, 19 nt, Artificial Sequence
  Description of Artificial Sequence: Synthetic oligonucleotide
aaaccgacaagaaguugug

SEQ ID NO: 543678 - RNA, 19 nt, Artificial Sequence
  Description of Artificial Sequence: Synthetic oligonucleotide
aacuauuaucuaggagaag

SEQ ID NO: 543679 - RNA, 19 nt, Artificial Sequence
  Description of Artificial Sequence: Synthetic oligonucleotide
aguacggacguaucccgug

SEQ ID NO: 543680 - RNA, 19 nt, Artificial Sequence
  Description of Artificial Sequence: Synthetic oligonucleotide
ccaaccugauauuuuaaag

SEQ ID NO: 543681 - RNA, 19 nt, Artificial Sequence
  Description of Artificial Sequence: Synthetic oligonucleotide
ucacggaauaucugauaca

SEQ ID NO: 543682 - RNA, 19 nt, Artificial Sequence
  Description of Artificial Sequence: Synthetic oligonucleotide
caugcaagcgcaguauuug

SEQ ID NO: 543683 - RNA, 19 nt, Artificial Sequence
  Description of Artificial Sequence: Synthetic oligonucleotide
cauauaugguacgugccug

SEQ ID NO: 543684 - RNA, 19 nt, Artificial Sequence
  Description of Artificial Sequence: Synthetic oligonucleotide
ugcaagcgcaguauuuggu

SEQ ID NO: 543685 - RNA, 19 nt, Artificial Sequence
  Description of Artificial Sequence: Synthetic oligonucleotide
gagugacucaagucugacc

SEQ ID NO: 543686 - RNA, 19 nt, Artificial Sequence
  Description of Artificial Sequence: Synthetic oligonucleotide
ggauacucaguucagugca

SEQ ID NO: 543687 - RNA, 19 nt, Artificial Sequence
  Description of Artificial Sequence: Synthetic oligonucleotide
gcucggaaagcaaacacgg

SEQ ID NO: 543688 - RNA, 19 nt, Artificial Sequence
  Description of Artificial Sequence: Synthetic oligonucleotide
uguagccuaggauucuauc

SEQ ID NO: 543689 - RNA, 19 nt, Artificial Sequence
  Description of Artificial Sequence: Synthetic oligonucleotide
gauauguuugaagaagagu

SEQ ID NO: 543690 - RNA, 19 nt, Artificial Sequence
  Description of Artificial Sequence: Synthetic oligonucleotide
auuucgguggugaagcacu

SEQ ID NO: 543691 - RNA, 19 nt, Artificial Sequence
  Description of Artificial Sequence: Synthetic oligonucleotide
auaauacaggauguccuca

SEQ ID NO: 543692 - RNA, 19 nt, Artificial Sequence
  Description of Artificial Sequence: Synthetic oligonucleotide
cacucaaacacauuauaua

SEQ ID NO: 543693 - RNA, 19 nt, Artificial Sequence
  Description of Artificial Sequence: Synthetic oligonucleotide
caaaccgacaagaaguugu

SEQ ID NO: 543694 - RNA, 19 nt, Artificial Sequence
  Description of Artificial Sequence: Synthetic oligonucleotide
uucacugcucggaaagcaa

SEQ ID NO: 543695 - RNA, 19 nt, Artificial Sequence
  Description of Artificial Sequence: Synthetic oligonucleotide
gauauacgaagugguugag

SEQ ID NO: 543696 - RNA, 19 nt, Artificial Sequence
  Description of Artificial Sequence: Synthetic oligonucleotide
uggguugcggagauuaauu

SEQ ID NO: 543697 - RNA, 19 nt, Artificial Sequence
  Description of Artificial Sequence: Synthetic oligonucleotide
aagcggacguacaucucac

SEQ ID NO: 543698 - RNA, 19 nt, Artificial Sequence
  Description of Artificial Sequence: Synthetic oligonucleotide
cuguuacaaguuaggaauc

SEQ ID NO: 543699 - RNA, 19 nt, Artificial Sequence
  Description of Artificial Sequence: Synthetic oligonucleotide
gaagaucaggugacaguag

SEQ ID NO: 543700 - RNA, 19 nt, Artificial Sequence
  Description of Artificial Sequence: Synthetic oligonucleotide
guagaaucaucuauaccca

SEQ ID NO: 543701 - RNA, 19 nt, Artificial Sequence
  Description of Artificial Sequence: Synthetic oligonucleotide
cuauccugcugcaauagaa

SEQ ID NO: 543702 - RNA, 19 nt, Artificial Sequence
  Description of Artificial Sequence: Synthetic oligonucleotide
agcugagcguacaaauugg

SEQ ID NO: 543703 - RNA, 19 nt, Artificial Sequence
  Description of Artificial Sequence: Synthetic oligonucleotide
gcaacauacauggaaaauc

SEQ ID NO: 543704 - RNA, 19 nt, Artificial Sequence
  Description of Artificial Sequence: Synthetic oligonucleotide
guccuaucccaucauuggc

SEQ ID NO: 543705 - RNA, 19 nt, Artificial Sequence
  Description of Artificial Sequence: Synthetic oligonucleotide
agaaguuuacaaaccgaca

SEQ ID NO: 543706 - RNA, 19 nt, Artificial Sequence
  Description of Artificial Sequence: Synthetic oligonucleotide
ggggaagauauguuugaag

SEQ ID NO: 543707 - RNA, 19 nt, Artificial Sequence
  Description of Artificial Sequence: Synthetic oligonucleotide
uacuuaagccaaguucuac

SEQ ID NO: 543708 - RNA, 19 nt, Artificial Sequence
  Description of Artificial Sequence: Synthetic oligonucleotide
caguggugcaacauacaug

SEQ ID NO: 543709 - RNA, 19 nt, Artificial Sequence
  Description of Artificial Sequence: Synthetic oligonucleotide
uugcggagauuaauuaaua

SEQ ID NO: 543710 - RNA, 19 nt, Artificial Sequence
  Description of Artificial Sequence: Synthetic oligonucleotide
uauagugccuuuaguucuu

SEQ ID NO: 543711 - RNA, 19 nt, Artificial Sequence
  Description of Artificial Sequence: Synthetic oligonucleotide
aaaagcggacguacaucuc

SEQ ID NO: 543712 - RNA, 19 nt, Artificial Sequence
  Description of Artificial Sequence: Synthetic oligonucleotide
agcgcuauccugcugcaau

SEQ ID NO: 543713 - RNA, 19 nt, Artificial Sequence
  Description of Artificial Sequence: Synthetic oligonucleotide
uccuugucggauguacugc

SEQ ID NO: 543714 - RNA, 19 nt, Artificial Sequence
  Description of Artificial Sequence: Synthetic oligonucleotide
acguacaucucacggaaua

SEQ ID NO: 543715 - RNA, 19 nt, Artificial Sequence
  Description of Artificial Sequence: Synthetic oligonucleotide
uguaucacguuggucuuaa

SEQ ID NO: 543716 - RNA, 19 nt, Artificial Sequence
  Description of Artificial Sequence: Synthetic oligonucleotide
aagucugaccucgggucuc

SEQ ID NO: 543717 - RNA, 19 nt, Artificial Sequence
  Description of Artificial Sequence: Synthetic oligonucleotide
agaugucuauugcuucucu

SEQ ID NO: 543718 - RNA, 19 nt, Artificial Sequence
  Description of Artificial Sequence: Synthetic oligonucleotide
auguccuaucccaucauug

SEQ ID NO: 543719 - RNA, 19 nt, Artificial Sequence
  Description of Artificial Sequence: Synthetic oligonucleotide
augaugagagacagauccg

SEQ ID NO: 543720 - RNA, 19 nt, Artificial Sequence
  Description of Artificial Sequence: Synthetic oligonucleotide
agcguacaaauuggagccc

SEQ ID NO: 543721 - RNA, 19 nt, Artificial Sequence
  Description of Artificial Sequence: Synthetic oligonucleotide
uuucgguggugaagcacug

SEQ ID NO: 543722 - RNA, 19 nt, Artificial Sequence
  Description of Artificial Sequence: Synthetic oligonucleotide
cucggaaagcaaacacggc

SEQ ID NO: 543723 - RNA, 19 nt, Artificial Sequence
  Description of Artificial Sequence: Synthetic oligonucleotide
cuagauguguugucaguga

SEQ ID NO: 543724 - RNA, 19 nt, Artificial Sequence
  Description of Artificial Sequence: Synthetic oligonucleotide
gaugagagacagauccgac

SEQ ID NO: 543725 - RNA, 19 nt, Artificial Sequence
  Description of Artificial Sequence: Synthetic oligonucleotide
ugccuguuacaaguuagga

SEQ ID NO: 543726 - RNA, 19 nt, Artificial Sequence
  Description of Artificial Sequence: Synthetic oligonucleotide
gaggggcaauuuauaaaag

SEQ ID NO: 543727 - RNA, 19 nt, Artificial Sequence
  Description of Artificial Sequence: Synthetic oligonucleotide
gauuucgguggugaagcac

SEQ ID NO: 543728 - RNA, 19 nt, Artificial Sequence
  Description of Artificial Sequence: Synthetic oligonucleotide
aaagcucgaaccauccauu

SEQ ID NO: 543729 - RNA, 19 nt, Artificial Sequence
  Description of Artificial Sequence: Synthetic oligonucleotide
agugacccaguacggacgu

SEQ ID NO: 543730 - RNA, 19 nt, Artificial Sequence
  Description of Artificial Sequence: Synthetic oligonucleotide
guagcuaaguauccagaaa

SEQ ID NO: 543731 - RNA, 19 nt, Artificial Sequence
  Description of Artificial Sequence: Synthetic oligonucleotide
aagcucgaaccauccauuu

SEQ ID NO: 543732 - RNA, 19 nt, Artificial Sequence
  Description of Artificial Sequence: Synthetic oligonucleotide
augagaggagauggagugg

SEQ ID NO: 543733 - RNA, 19 nt, Artificial Sequence
  Description of Artificial Sequence: Synthetic oligonucleotide
cccaaaugaguccuaaaac

SEQ ID NO: 543734 - RNA, 19 nt, Artificial Sequence
  Description of Artificial Sequence: Synthetic oligonucleotide
gcggacguacaucucacgg

SEQ ID NO: 543735 - RNA, 19 nt, Artificial Sequence
  Description of Artificial Sequence: Synthetic oligonucleotide
aagaguuggggaagauaug

SEQ ID NO: 543736 - RNA, 19 nt, Artificial Sequence
  Description of Artificial Sequence: Synthetic oligonucleotide
aucaggugacaguagcaaa

SEQ ID NO: 543737 - RNA, 19 nt, Artificial Sequence
  Description of Artificial Sequence: Synthetic oligonucleotide
ugguacgugccuguuacaa

SEQ ID NO: 543738 - RNA, 19 nt, Artificial Sequence
  Description of Artificial Sequence: Synthetic oligonucleotide
ugcaggguuauuguuucaa

SEQ ID NO: 543739 - RNA, 19 nt, Artificial Sequence
  Description of Artificial Sequence: Synthetic oligonucleotide
cacggaauaucugauacaa

SEQ ID NO: 543740 - RNA, 19 nt, Artificial Sequence
  Description of Artificial Sequence: Synthetic oligonucleotide
ucucacggaauaucugaua

SEQ ID NO: 543741 - RNA, 19 nt, Artificial Sequence
  Description of Artificial Sequence: Synthetic oligonucleotide
uagugaggggcaauuuaua

SEQ ID NO: 543742 - RNA, 19 nt, Artificial Sequence
  Description of Artificial Sequence: Synthetic oligonucleotide
gugccuguuacaaguuagg

SEQ ID NO: 543743 - RNA, 19 nt, Artificial Sequence
  Description of Artificial Sequence: Synthetic oligonucleotide
ugauuucgguggugaagca

SEQ ID NO: 543744 - RNA, 19 nt, Artificial Sequence
  Description of Artificial Sequence: Synthetic oligonucleotide
uucuaacccuagcuuuccu

SEQ ID NO: 543745 - RNA, 19 nt, Artificial Sequence
  Description of Artificial Sequence: Synthetic oligonucleotide
guacgugccuguuacaagu

SEQ ID NO: 543746 - RNA, 19 nt, Artificial Sequence
  Description of Artificial Sequence: Synthetic oligonucleotide
agcggacguacaucucacg

SEQ ID NO: 543747 - RNA, 19 nt, Artificial Sequence
  Description of Artificial Sequence: Synthetic oligonucleotide
guaauaccugauauaaaua

SEQ ID NO: 543748 - RNA, 19 nt, Artificial Sequence
  Description of Artificial Sequence: Synthetic oligonucleotide
gcaagcgcaguauuuggug

SEQ ID NO: 543749 - RNA, 19 nt, Artificial Sequence
  Description of Artificial Sequence: Synthetic oligonucleotide
cuccaaccggucucuuucg

SEQ ID NO: 543750 - RNA, 19 nt, Artificial Sequence
  Description of Artificial Sequence: Synthetic oligonucleotide
agccuaggauucuauccca

SEQ ID NO: 543751 - RNA, 19 nt, Artificial Sequence
  Description of Artificial Sequence: Synthetic oligonucleotide
ccuuaauaucuucuuugag

SEQ ID NO: 543752 - RNA, 19 nt, Artificial Sequence
  Description of Artificial Sequence: Synthetic oligonucleotide
ugccgugggacuuccuugu

SEQ ID NO: 543753 - RNA, 19 nt, Artificial Sequence
  Description of Artificial Sequence: Synthetic oligonucleotide
cuguagcuaaguauccaga

SEQ ID NO: 543754 - RNA, 19 nt, Artificial Sequence
  Description of Artificial Sequence: Synthetic oligonucleotide
uacaauuuguacgguucau

SEQ ID NO: 543755 - RNA, 19 nt, Artificial Sequence
  Description of Artificial Sequence: Synthetic oligonucleotide
ccuguuacaaguuaggaau

SEQ ID NO: 543756 - RNA, 19 nt, Artificial Sequence
  Description of Artificial Sequence: Synthetic oligonucleotide
ugacccaguacggacguau

SEQ ID NO: 543757 - RNA, 19 nt, Artificial Sequence
  Description of Artificial Sequence: Synthetic oligonucleotide
gguacgugccuguuacaag

SEQ ID NO: 543758 - RNA, 19 nt, Artificial Sequence
  Description of Artificial Sequence: Synthetic oligonucleotide
acaaaccgacaagaaguug

SEQ ID NO: 543759 - RNA, 19 nt, Artificial Sequence
  Description of Artificial Sequence: Synthetic oligonucleotide
augaguccuaaaacuaaga

SEQ ID NO: 543760 - RNA, 19 nt, Artificial Sequence
  Description of Artificial Sequence: Synthetic oligonucleotide
gcucgaaccauccauuuaa

SEQ ID NO: 543761 - RNA, 19 nt, Artificial Sequence
  Description of Artificial Sequence: Synthetic oligonucleotide
ggucuuaagcugcucauaa

SEQ ID NO: 543762 - RNA, 19 nt, Artificial Sequence
  Description of Artificial Sequence: Synthetic oligonucleotide
gauguaugauuucgguggu

SEQ ID NO: 543763 - RNA, 19 nt, Artificial Sequence
  Description of Artificial Sequence: Synthetic oligonucleotide
caaauuggagcccuugagu

SEQ ID NO: 543764 - RNA, 19 nt, Artificial Sequence
  Description of Artificial Sequence: Synthetic oligonucleotide
guacaucucacggaauauc

SEQ ID NO: 543765 - RNA, 19 nt, Artificial Sequence
  Description of Artificial Sequence: Synthetic oligonucleotide
aggucaugcuguaucacgu

SEQ ID NO: 543766 - RNA, 19 nt, Artificial Sequence
  Description of Artificial Sequence: Synthetic oligonucleotide
aaccgacaagaaguugugu

SEQ ID NO: 543767 - RNA, 19 nt, Artificial Sequence
  Description of Artificial Sequence: Synthetic oligonucleotide
ccaccaaaaggucaugcug

SEQ ID NO: 543768 - RNA, 19 nt, Artificial Sequence
  Description of Artificial Sequence: Synthetic oligonucleotide
gcaaagugacccaguacgg

SEQ ID NO: 543769 - RNA, 19 nt, Artificial Sequence
  Description of Artificial Sequence: Synthetic oligonucleotide
agaucaggugacaguagca

SEQ ID NO: 543770 - RNA, 19 nt, Artificial Sequence
  Description of Artificial Sequence: Synthetic oligonucleotide
gaguggagucugaagaaaa

SEQ ID NO: 543771 - RNA, 19 nt, Artificial Sequence
  Description of Artificial Sequence: Synthetic oligonucleotide
auaugguacgugccuguua

SEQ ID NO: 543772 - RNA, 19 nt, Artificial Sequence
  Description of Artificial Sequence: Synthetic oligonucleotide
uuggguugcggagauuaau

SEQ ID NO: 543773 - RNA, 19 nt, Artificial Sequence
  Description of Artificial Sequence: Synthetic oligonucleotide
gacucaagucugaccucgg

SEQ ID NO: 543774 - RNA, 19 nt, Artificial Sequence
  Description of Artificial Sequence: Synthetic oligonucleotide
ccaguacggacguaucccg

SEQ ID NO: 543775 - RNA, 19 nt, Artificial Sequence
  Description of Artificial Sequence: Synthetic oligonucleotide
gugccgugggacuuccuug

SEQ ID NO: 543776 - RNA, 19 nt, Artificial Sequence
  Description of Artificial Sequence: Synthetic oligonucleotide
cauuggcuuuagugagggg

SEQ ID NO: 543777 - RNA, 19 nt, Artificial Sequence
  Description of Artificial Sequence: Synthetic oligonucleotide
uuguacgguucaugauaca

SEQ ID NO: 543778 - RNA, 19 nt, Artificial Sequence
  Description of Artificial Sequence: Synthetic oligonucleotide
caccauuugguggauaaaa

SEQ ID NO: 543779 - RNA, 19 nt, Artificial Sequence
  Description of Artificial Sequence: Synthetic oligonucleotide
ggacguacaucucacggaa

SEQ ID NO: 543780 - RNA, 19 nt, Artificial Sequence
  Description of Artificial Sequence: Synthetic oligonucleotide
gguugcggagauuaauuaa

SEQ ID NO: 543781 - RNA, 19 nt, Artificial Sequence
  Description of Artificial Sequence: Synthetic oligonucleotide
agaagaggcauaacuuuua

SEQ ID NO: 543782 - RNA, 19 nt, Artificial Sequence
  Description of Artificial Sequence: Synthetic oligonucleotide
uacggacguaucccgugaa

SEQ ID NO: 543783 - RNA, 19 nt, Artificial Sequence
  Description of Artificial Sequence: Synthetic oligonucleotide
acgcacaugcucauuuuca

SEQ ID NO: 543784 - RNA, 19 nt, Artificial Sequence
  Description of Artificial Sequence: Synthetic oligonucleotide
cggagauuaauuaauaccu

SEQ ID NO: 543785 - RNA, 19 nt, Artificial Sequence
  Description of Artificial Sequence: Synthetic oligonucleotide
auacgcacaugcucauuuu

SEQ ID NO: 543786 - RNA, 19 nt, Artificial Sequence
  Description of Artificial Sequence: Synthetic oligonucleotide
augggauacucaguucagu

SEQ ID NO: 543787 - RNA, 19 nt, Artificial Sequence
  Description of Artificial Sequence: Synthetic oligonucleotide
aguucaugauuaguugcua

SEQ ID NO: 543788 - RNA, 19 nt, Artificial Sequence
  Description of Artificial Sequence: Synthetic oligonucleotide
guugcggagauuaauuaau

SEQ ID NO: 543789 - RNA, 19 nt, Artificial Sequence
  Description of Artificial Sequence: Synthetic oligonucleotide
ggagaaguuuacaaaccga

SEQ ID NO: 543790 - RNA, 19 nt, Artificial Sequence
  Description of Artificial Sequence: Synthetic oligonucleotide
caaagugacccaguacgga

SEQ ID NO: 543791 - RNA, 19 nt, Artificial Sequence
  Description of Artificial Sequence: Synthetic oligonucleotide
uacgugccuguuacaaguu

SEQ ID NO: 543792 - RNA, 19 nt, Artificial Sequence
  Description of Artificial Sequence: Synthetic oligonucleotide
acauacuauuuaaacucuu

SEQ ID NO: 543793 - RNA, 19 nt, Artificial Sequence
  Description of Artificial Sequence: Synthetic oligonucleotide
aggugcauagacaggucga

SEQ ID NO: 543794 - RNA, 19 nt, Artificial Sequence
  Description of Artificial Sequence: Synthetic oligonucleotide
cgugccuguuacaaguuag

SEQ ID NO: 543795 - RNA, 19 nt, Artificial Sequence
  Description of Artificial Sequence: Synthetic oligonucleotide
guacggacguaucccguga

SEQ ID NO: 543796 - RNA, 19 nt, Artificial Sequence
  Description of Artificial Sequence: Synthetic oligonucleotide
guccuuaggugcauagaca

SEQ ID NO: 543797 - RNA, 19 nt, Artificial Sequence
  Description of Artificial Sequence: Synthetic oligonucleotide
agcucgaaccauccauuua

SEQ ID NO: 543798 - RNA, 19 nt, Artificial Sequence
  Description of Artificial Sequence: Synthetic oligonucleotide
gccuguuacaaguuaggaa

SEQ ID NO: 543799 - RNA, 19 nt, Artificial Sequence
  Description of Artificial Sequence: Synthetic oligonucleotide
uucuccaaccggucucuuu

SEQ ID NO: 543800 - RNA, 19 nt, Artificial Sequence
  Description of Artificial Sequence: Synthetic oligonucleotide
ugccuguaggaugcuuggc

SEQ ID NO: 543801 - RNA, 19 nt, Artificial Sequence
  Description of Artificial Sequence: Synthetic oligonucleotide
uuccagcugagcguacaaa

SEQ ID NO: 543802 - RNA, 19 nt, Artificial Sequence
  Description of Artificial Sequence: Synthetic oligonucleotide
aucucacggaauaucugau

SEQ ID NO: 543803 - RNA, 19 nt, Artificial Sequence
  Description of Artificial Sequence: Synthetic oligonucleotide
uauacccaguuguccugua

SEQ ID NO: 543804 - RNA, 19 nt, Artificial Sequence
  Description of Artificial Sequence: Synthetic oligonucleotide
ccaaagguucuuugagaug

SEQ ID NO: 543805 - RNA, 19 nt, Artificial Sequence
  Description of Artificial Sequence: Synthetic oligonucleotide
agaaaguccuuaggugcau

SEQ ID NO: 543806 - RNA, 19 nt, Artificial Sequence
  Description of Artificial Sequence: Synthetic oligonucleotide
gcauauaugguacgugccu

SEQ ID NO: 543807 - RNA, 19 nt, Artificial Sequence
  Description of Artificial Sequence: Synthetic oligonucleotide
cccaguacggacguauccc

SEQ ID NO: 543808 - RNA, 19 nt, Artificial Sequence
  Description of Artificial Sequence: Synthetic oligonucleotide
caagcgcaguauuuggugu

SEQ ID NO: 543809 - RNA, 19 nt, Artificial Sequence
  Description of Artificial Sequence: Synthetic oligonucleotide
agcuccgauuucucucaga

SEQ ID NO: 543810 - RNA, 19 nt, Artificial Sequence
  Description of Artificial Sequence: Synthetic oligonucleotide
gaagugguugagcuccgau

SEQ ID NO: 543811 - RNA, 19 nt, Artificial Sequence
  Description of Artificial Sequence: Synthetic oligonucleotide
guaucacguuggucuuaag

SEQ ID NO: 543812 - RNA, 19 nt, Artificial Sequence
  Description of Artificial Sequence: Synthetic oligonucleotide
auguacaccaaagguucuu

SEQ ID NO: 543813 - RNA, 19 nt, Artificial Sequence
  Description of Artificial Sequence: Synthetic oligonucleotide
augguacgugccuguuaca

SEQ ID NO: 543814 - RNA, 19 nt, Artificial Sequence
  Description of Artificial Sequence: Synthetic oligonucleotide
acggacguaucccgugaaa

SEQ ID NO: 543815 - RNA, 19 nt, Artificial Sequence
  Description of Artificial Sequence: Synthetic oligonucleotide
acgugccuguuacaaguua

SEQ ID NO: 543816 - RNA, 19 nt, Artificial Sequence
  Description of Artificial Sequence: Synthetic oligonucleotide
auuacaccauuugguggau

SEQ ID NO: 543817 - RNA, 19 nt, Artificial Sequence
  Description of Artificial Sequence: Synthetic oligonucleotide
cuuucgugccaaugggaua

SEQ ID NO: 543818 - RNA, 19 nt, Artificial Sequence
  Description of Artificial Sequence: Synthetic oligonucleotide
cucgaaccauccauuuaaa

SEQ ID NO: 543819 - RNA, 19 nt, Artificial Sequence
  Description of Artificial Sequence: Synthetic oligonucleotide
ucuggacuaucugggcaau

SEQ ID NO: 543820 - RNA, 19 nt, Artificial Sequence
  Description of Artificial Sequence: Synthetic oligonucleotide
accggucucuuucgugcca

SEQ ID NO: 543821 - RNA, 19 nt, Artificial Sequence
  Description of Artificial Sequence: Synthetic oligonucleotide
gccaaugggauacucaguu

SEQ ID NO: 543822 - RNA, 19 nt, Artificial Sequence
  Description of Artificial Sequence: Synthetic oligonucleotide
gcucauaauacaggauguc

SEQ ID NO: 543823 - RNA, 19 nt, Artificial Sequence
  Description of Artificial Sequence: Synthetic oligonucleotide
ccaaugggauacucaguuc

SEQ ID NO: 543824 - RNA, 19 nt, Artificial Sequence
  Description of Artificial Sequence: Synthetic oligonucleotide
aauuuggguugcggagauu

SEQ ID NO: 543825 - RNA, 19 nt, Artificial Sequence
  Description of Artificial Sequence: Synthetic oligonucleotide
cucagcucucagugccgug

SEQ ID NO: 543826 - RNA, 19 nt, Artificial Sequence
  Description of Artificial Sequence: Synthetic oligonucleotide
gacaaucaucaaucagcau

SEQ ID NO: 543827 - RNA, 19 nt, Artificial Sequence
  Description of Artificial Sequence: Synthetic oligonucleotide
uggcuuuagugaggggcaa

SEQ ID NO: 543828 - RNA, 19 nt, Artificial Sequence
  Description of Artificial Sequence: Synthetic oligonucleotide
ccagagaguuguagccuag

SEQ ID NO: 543829 - RNA, 19 nt, Artificial Sequence
  Description of Artificial Sequence: Synthetic oligonucleotide
uuacaccauuugguggaua

SEQ ID NO: 543830 - RNA, 19 nt, Artificial Sequence
  Description of Artificial Sequence: Synthetic oligonucleotide
ggguugcggagauuaauua

SEQ ID NO: 543831 - RNA, 19 nt, Artificial Sequence
  Description of Artificial Sequence: Synthetic oligonucleotide
cgacaagaaguuguguuac

SEQ ID NO: 543832 - RNA, 19 nt, Artificial Sequence
  Description of Artificial Sequence: Synthetic oligonucleotide
ccaaccggucucuuucgug

SEQ ID NO: 543833 - RNA, 19 nt, Artificial Sequence
  Description of Artificial Sequence: Synthetic oligonucleotide
acauguaaucccagcucuu

SEQ ID NO: 543834 - RNA, 19 nt, Artificial Sequence
  Description of Artificial Sequence: Synthetic oligonucleotide
guacuuaagccaaguucua

SEQ ID NO: 543835 - RNA, 19 nt, Artificial Sequence
  Description of Artificial Sequence: Synthetic oligonucleotide
acggaauaucugauacaau

SEQ ID NO: 543836 - RNA, 19 nt, Artificial Sequence
  Description of Artificial Sequence: Synthetic oligonucleotide
gcuccgauuucucucagau

SEQ ID NO: 543837 - RNA, 19 nt, Artificial Sequence
  Description of Artificial Sequence: Synthetic oligonucleotide
gcuauccugcugcaauaga

SEQ ID NO: 543838 - RNA, 19 nt, Artificial Sequence
  Description of Artificial Sequence: Synthetic oligonucleotide
gacccaguacggacguauc

SEQ ID NO: 543839 - RNA, 19 nt, Artificial Sequence
  Description of Artificial Sequence: Synthetic oligonucleotide
ucgugccaaugggauacuc

SEQ ID NO: 543840 - RNA, 19 nt, Artificial Sequence
  Description of Artificial Sequence: Synthetic oligonucleotide
cagguucacugcucggaaa

SEQ ID NO: 543841 - RNA, 19 nt, Artificial Sequence
  Description of Artificial Sequence: Synthetic oligonucleotide
aggcuuaaaucuggcucau

SEQ ID NO: 543842 - RNA, 19 nt, Artificial Sequence
  Description of Artificial Sequence: Synthetic oligonucleotide
uucgugccaaugggauacu

SEQ ID NO: 543843 - RNA, 19 nt, Artificial Sequence
  Description of Artificial Sequence: Synthetic oligonucleotide
cccaaccugauauuuuaaa

SEQ ID NO: 543844 - RNA, 19 nt, Artificial Sequence
  Description of Artificial Sequence: Synthetic oligonucleotide
ggugcauagacaggucgaa

SEQ ID NO: 543845 - RNA, 19 nt, Artificial Sequence
  Description of Artificial Sequence: Synthetic oligonucleotide
ccgacaagaaguuguguua

SEQ ID NO: 543846 - RNA, 19 nt, Artificial Sequence
  Description of Artificial Sequence: Synthetic oligonucleotide
gcugagcguacaaauugga

SEQ ID NO: 543847 - RNA, 19 nt, Artificial Sequence
  Description of Artificial Sequence: Synthetic oligonucleotide
ggauaaaagacagcauauu

SEQ ID NO: 543848 - RNA, 19 nt, Artificial Sequence
  Description of Artificial Sequence: Synthetic oligonucleotide
gugcauagacaggucgaaa

SEQ ID NO: 543849 - RNA, 19 nt, Artificial Sequence
  Description of Artificial Sequence: Synthetic oligonucleotide
cccacucaaacacauuaua

SEQ ID NO: 543850 - RNA, 19 nt, Artificial Sequence
  Description of Artificial Sequence: Synthetic oligonucleotide
gguugagcuccgauuucuc

SEQ ID NO: 543851 - RNA, 19 nt, Artificial Sequence
  Description of Artificial Sequence: Synthetic oligonucleotide
ggaaagggauuacaccauu

SEQ ID NO: 543852 - RNA, 19 nt, Artificial Sequence
  Description of Artificial Sequence: Synthetic oligonucleotide
cgugccaaugggauacuca

SEQ ID NO: 543853 - RNA, 19 nt, Artificial Sequence
  Description of Artificial Sequence: Synthetic oligonucleotide
auaccucaagaaaguccuu

SEQ ID NO: 543854 - RNA, 19 nt, Artificial Sequence
  Description of Artificial Sequence: Synthetic oligonucleotide
cugucagcuucacaucuuu

SEQ ID NO: 543855 - RNA, 19 nt, Artificial Sequence
  Description of Artificial Sequence: Synthetic oligonucleotide
guuaccucuugaaguuuau

SEQ ID NO: 543856 - RNA, 19 nt, Artificial Sequence
  Description of Artificial Sequence: Synthetic oligonucleotide
gguggauaaaagacagcau

SEQ ID NO: 543857 - RNA, 19 nt, Artificial Sequence
  Description of Artificial Sequence: Synthetic oligonucleotide
caguacggacguaucccgu

SEQ ID NO: 543858 - RNA, 19 nt, Artificial Sequence
  Description of Artificial Sequence: Synthetic oligonucleotide
cuuuagugaggggcaauuu

SEQ ID NO: 543859 - RNA, 19 nt, Artificial Sequence
  Description of Artificial Sequence: Synthetic oligonucleotide
cggacguacaucucacgga

SEQ ID NO: 543860 - RNA, 19 nt, Artificial Sequence
  Description of Artificial Sequence: Synthetic oligonucleotide
cgcuauccugcugcaauag

SEQ ID NO: 543861 - RNA, 19 nt, Artificial Sequence
  Description of Artificial Sequence: Synthetic oligonucleotide
gacguacaucucacggaau

SEQ ID NO: 543862 - RNA, 19 nt, Artificial Sequence
  Description of Artificial Sequence: Synthetic oligonucleotide
cuguaucacguuggucuua

SEQ ID NO: 543863 - RNA, 19 nt, Artificial Sequence
  Description of Artificial Sequence: Synthetic oligonucleotide
gcuguaucacguuggucuu

SEQ ID NO: 543864 - RNA, 19 nt, Artificial Sequence
  Description of Artificial Sequence: Synthetic oligonucleotide
ggcuuaaaucuggcucauc

SEQ ID NO: 543865 - RNA, 19 nt, Artificial Sequence
  Description of Artificial Sequence: Synthetic oligonucleotide
gcgcuauccugcugcaaua

SEQ ID NO: 543866 - RNA, 19 nt, Artificial Sequence
  Description of Artificial Sequence: Synthetic oligonucleotide
cggacguaucccgugaaaa

SEQ ID NO: 543867 - RNA, 19 nt, Artificial Sequence
  Description of Artificial Sequence: Synthetic oligonucleotide
gccgugggacuuccuuguc

SEQ ID NO: 543868 - RNA, 19 nt, Artificial Sequence
  Description of Artificial Sequence: Synthetic oligonucleotide
gcgcaguauuuggugugca

SEQ ID NO: 543869 - RNA, 19 nt, Artificial Sequence
  Description of Artificial Sequence: Synthetic oligonucleotide
caauacgcacaugcucauu

SEQ ID NO: 543870 - RNA, 19 nt, Artificial Sequence
  Description of Artificial Sequence: Synthetic oligonucleotide
cccaguuguccuguacuua

SEQ ID NO: 543871 - RNA, 19 nt, Artificial Sequence
  Description of Artificial Sequence: Synthetic oligonucleotide
ggcuuuagugaggggcaau

SEQ ID NO: 543872 - RNA, 19 nt, Artificial Sequence
  Description of Artificial Sequence: Synthetic oligonucleotide
gugacccaguacggacgua

SEQ ID NO: 543873 - RNA, 19 nt, Artificial Sequence
  Description of Artificial Sequence: Synthetic oligonucleotide
cguuggucuuaagcugcuc

SEQ ID NO: 543874 - RNA, 19 nt, Artificial Sequence
  Description of Artificial Sequence: Synthetic oligonucleotide
cguacaucucacggaauau

SEQ ID NO: 543875 - RNA, 19 nt, Artificial Sequence
  Description of Artificial Sequence: Synthetic oligonucleotide
ccggucucuuucgugccaa

SEQ ID NO: 543876 - RNA, 19 nt, Artificial Sequence
  Description of Artificial Sequence: Synthetic oligonucleotide
aaauggaucuuccuggacc

SEQ ID NO: 543877 - RNA, 19 nt, Artificial Sequence
  Description of Artificial Sequence: Synthetic oligonucleotide
aauggaucuuccuggaccc

SEQ ID NO: 543878 - RNA, 19 nt, Artificial Sequence
  Description of Artificial Sequence: Synthetic oligonucleotide
uucucaauaagcagcaucc

SEQ ID NO: 543879 - RNA, 19 nt, Artificial Sequence
  Description of Artificial Sequence: Synthetic oligonucleotide
ucaucagaaacacugggcc

SEQ ID NO: 543880 - RNA, 19 nt, Artificial Sequence
  Description of Artificial Sequence: Synthetic oligonucleotide
uacucgaucacacuguggc

SEQ ID NO: 543881 - RNA, 19 nt, Artificial Sequence
  Description of Artificial Sequence: Synthetic oligonucleotide
aggauaucuccauugggcc

SEQ ID NO: 543882 - RNA, 19 nt, Artificial Sequence
  Description of Artificial Sequence: Synthetic oligonucleotide
ucuucauggguccaauagg

SEQ ID NO: 543883 - RNA, 19 nt, Artificial Sequence
  Description of Artificial Sequence: Synthetic oligonucleotide
agggauguugagccgaugc

SEQ ID NO: 543884 - RNA, 19 nt, Artificial Sequence
  Description of Artificial Sequence: Synthetic oligonucleotide
uucacuguguaucgguagg

SEQ ID NO: 543885 - RNA, 19 nt, Artificial Sequence
  Description of Artificial Sequence: Synthetic oligonucleotide
cuucauggguccaauaggc

SEQ ID NO: 543886 - RNA, 19 nt, Artificial Sequence
  Description of Artificial Sequence: Synthetic oligonucleotide
ucuccauccacccggaaug

SEQ ID NO: 543887 - RNA, 19 nt, Artificial Sequence
  Description of Artificial Sequence: Synthetic oligonucleotide
acucggaacacauaggagu

SEQ ID NO: 543888 - RNA, 19 nt, Artificial Sequence
  Description of Artificial Sequence: Synthetic oligonucleotide
gagaacaccagccgagugg

SEQ ID NO: 543889 - RNA, 19 nt, Artificial Sequence
  Description of Artificial Sequence: Synthetic oligonucleotide
caguacuucacccuguacc

SEQ ID NO: 543890 - RNA, 19 nt, Artificial Sequence
  Description of Artificial Sequence: Synthetic oligonucleotide
uuucagguuuggaagaacu

SEQ ID NO: 543891 - RNA, 19 nt, Artificial Sequence
  Description of Artificial Sequence: Synthetic oligonucleotide
agaugugugccguaggcag

SEQ ID NO: 543892 - RNA, 19 nt, Artificial Sequence
  Description of Artificial Sequence: Synthetic oligonucleotide
uucguagucgcaauaggga

SEQ ID NO: 543893 - RNA, 19 nt, Artificial Sequence
  Description of Artificial Sequence: Synthetic oligonucleotide
uugaaagccagucgccccg

SEQ ID NO: 543894 - RNA, 19 nt, Artificial Sequence
  Description of Artificial Sequence: Synthetic oligonucleotide
uagggauacagguugguga

SEQ ID NO: 543895 - RNA, 19 nt, Artificial Sequence
  Description of Artificial Sequence: Synthetic oligonucleotide
uuuaguaguugguacucca

SEQ ID NO: 543896 - RNA, 19 nt, Artificial Sequence
  Description of Artificial Sequence: Synthetic oligonucleotide
ucuggugaaccccuggaug

SEQ ID NO: 543897 - RNA, 19 nt, Artificial Sequence
  Description of Artificial Sequence: Synthetic oligonucleotide
auuucguagucgcaauagg

SEQ ID NO: 543898 - RNA, 19 nt, Artificial Sequence
  Description of Artificial Sequence: Synthetic oligonucleotide
gucugugcgggucagagag

SEQ ID NO: 543899 - RNA, 19 nt, Artificial Sequence
  Description of Artificial Sequence: Synthetic oligonucleotide
agguuggugagcuccaccg

SEQ ID NO: 543900 - RNA, 19 nt, Artificial Sequence
  Description of Artificial Sequence: Synthetic oligonucleotide
guacucuccuugcagaggg

SEQ ID NO: 543901 - RNA, 19 nt, Artificial Sequence
  Description of Artificial Sequence: Synthetic oligonucleotide
gguuaguccgucuaugagg

SEQ ID NO: 543902 - RNA, 19 nt, Artificial Sequence
  Description of Artificial Sequence: Synthetic oligonucleotide
ugucagccggcucucaagg

SEQ ID NO: 543903 - RNA, 19 nt, Artificial Sequence
  Description of Artificial Sequence: Synthetic oligonucleotide
uaccccauuggcuugccgg

SEQ ID NO: 543904 - RNA, 19 nt, Artificial Sequence
  Description of Artificial Sequence: Synthetic oligonucleotide
uaugaggaaaggcuccgug

SEQ ID NO: 543905 - RNA, 19 nt, Artificial Sequence
  Description of Artificial Sequence: Synthetic oligonucleotide
cuccuaucuucccagauag

SEQ ID NO: 543906 - RNA, 19 nt, Artificial Sequence
  Description of Artificial Sequence: Synthetic oligonucleotide
ucuccauugggccuccgag

SEQ ID NO: 543907 - RNA, 19 nt, Artificial Sequence
  Description of Artificial Sequence: Synthetic oligonucleotide
augauagccucucucucgg

SEQ ID NO: 543908 - RNA, 19 nt, Artificial Sequence
  Description of Artificial Sequence: Synthetic oligonucleotide
ggauuauugagucugguga

SEQ ID NO: 543909 - RNA, 19 nt, Artificial Sequence
  Description of Artificial Sequence: Synthetic oligonucleotide
agagugguagucccgagug

SEQ ID NO: 543910 - RNA, 19 nt, Artificial Sequence
  Description of Artificial Sequence: Synthetic oligonucleotide
auuuaguaguugguacucc

SEQ ID NO: 543911 - RNA, 19 nt, Artificial Sequence
  Description of Artificial Sequence: Synthetic oligonucleotide
ugugccguaggcagcauug

SEQ ID NO: 543912 - RNA, 19 nt, Artificial Sequence
  Description of Artificial Sequence: Synthetic oligonucleotide
ucgcaauagggauacaggu

SEQ ID NO: 543913 - RNA, 19 nt, Artificial Sequence
  Description of Artificial Sequence: Synthetic oligonucleotide
acgacauugaaagccaguc

SEQ ID NO: 543914 - RNA, 19 nt, Artificial Sequence
  Description of Artificial Sequence: Synthetic oligonucleotide
uaguaguugguacuccaca

SEQ ID NO: 543915 - RNA, 19 nt, Artificial Sequence
  Description of Artificial Sequence: Synthetic oligonucleotide
aaggguccaagacagcgga

SEQ ID NO: 543916 - RNA, 19 nt, Artificial Sequence
  Description of Artificial Sequence: Synthetic oligonucleotide
gaacuguugguccauguga

SEQ ID NO: 543917 - RNA, 19 nt, Artificial Sequence
  Description of Artificial Sequence: Synthetic oligonucleotide
ucuaugaggaaaggcuccg

SEQ ID NO: 543918 - RNA, 19 nt, Artificial Sequence
  Description of Artificial Sequence: Synthetic oligonucleotide
aauaggccgguuguccucg

SEQ ID NO: 543919 - RNA, 19 nt, Artificial Sequence
  Description of Artificial Sequence: Synthetic oligonucleotide
ucguugaccaguccguagc

SEQ ID NO: 543920 - RNA, 19 nt, Artificial Sequence
  Description of Artificial Sequence: Synthetic oligonucleotide
aacgucgucacuguacaug

SEQ ID NO: 543921 - RNA, 19 nt, Artificial Sequence
  Description of Artificial Sequence: Synthetic oligonucleotide
aggauuauugagucuggug

SEQ ID NO: 543922 - RNA, 19 nt, Artificial Sequence
  Description of Artificial Sequence: Synthetic oligonucleotide
gaaccuucuucaugggucc

SEQ ID NO: 543923 - RNA, 19 nt, Artificial Sequence
  Description of Artificial Sequence: Synthetic oligonucleotide
auuauugagucuggugaac

SEQ ID NO: 543924 - RNA, 19 nt, Artificial Sequence
  Description of Artificial Sequence: Synthetic oligonucleotide
cuuucauagucuucgccac

SEQ ID NO: 543925 - RNA, 19 nt, Artificial Sequence
  Description of Artificial Sequence: Synthetic oligonucleotide
acaccuucauuucguaguc

SEQ ID NO: 543926 - RNA, 19 nt, Artificial Sequence
  Description of Artificial Sequence: Synthetic oligonucleotide
uguguaucgguagggcugg

SEQ ID NO: 543927 - RNA, 19 nt, Artificial Sequence
  Description of Artificial Sequence: Synthetic oligonucleotide
uuaguaguugguacuccac

SEQ ID NO: 543928 - RNA, 19 nt, Artificial Sequence
  Description of Artificial Sequence: Synthetic oligonucleotide
agaacgucgucacuguaca

SEQ ID NO: 543929 - RNA, 19 nt, Artificial Sequence
  Description of Artificial Sequence: Synthetic oligonucleotide
uguugguccaugugagugc

SEQ ID NO: 543930 - RNA, 19 nt, Artificial Sequence
  Description of Artificial Sequence: Synthetic oligonucleotide
cacuuucaaagauguaggc

SEQ ID NO: 543931 - RNA, 19 nt, Artificial Sequence
  Description of Artificial Sequence: Synthetic oligonucleotide
gauuauugagucuggugaa

SEQ ID NO: 543932 - RNA, 19 nt, Artificial Sequence
  Description of Artificial Sequence: Synthetic oligonucleotide
gggguuguccaccagaacc

SEQ ID NO: 543933 - RNA, 19 nt, Artificial Sequence
  Description of Artificial Sequence: Synthetic oligonucleotide
aucgguagggcugggauuc

SEQ ID NO: 543934 - RNA, 19 nt, Artificial Sequence
  Description of Artificial Sequence: Synthetic oligonucleotide
aagaacuguugguccaugu

SEQ ID NO: 543935 - RNA, 19 nt, Artificial Sequence
  Description of Artificial Sequence: Synthetic oligonucleotide
agcgagucugggcuuaggg

SEQ ID NO: 543936 - RNA, 19 nt, Artificial Sequence
  Description of Artificial Sequence: Synthetic oligonucleotide
uaguacucgaucacacugu

SEQ ID NO: 543937 - RNA, 19 nt, Artificial Sequence
  Description of Artificial Sequence: Synthetic oligonucleotide
cuguguaucgguagggcug

SEQ ID NO: 543938 - RNA, 19 nt, Artificial Sequence
  Description of Artificial Sequence: Synthetic oligonucleotide
uucauggguccaauaggcc

SEQ ID NO: 543939 - RNA, 19 nt, Artificial Sequence
  Description of Artificial Sequence: Synthetic oligonucleotide
cucggaacacauaggagug

SEQ ID NO: 543940 - RNA, 19 nt, Artificial Sequence
  Description of Artificial Sequence: Synthetic oligonucleotide
cauccugccccauuucgcg

SEQ ID NO: 543941 - RNA, 19 nt, Artificial Sequence
  Description of Artificial Sequence: Synthetic oligonucleotide
gacacccucucgcucacgg

SEQ ID NO: 543942 - RNA, 19 nt, Artificial Sequence
  Description of Artificial Sequence: Synthetic oligonucleotide
uguaaggaacauucucacu

SEQ ID NO: 543943 - RNA, 19 nt, Artificial Sequence
  Description of Artificial Sequence: Synthetic oligonucleotide
agucgcaauagggauacag

SEQ ID NO: 543944 - RNA, 19 nt, Artificial Sequence
  Description of Artificial Sequence: Synthetic oligonucleotide
cauuucguagucgcaauag

SEQ ID NO: 543945 - RNA, 19 nt, Artificial Sequence
  Description of Artificial Sequence: Synthetic oligonucleotide
uccacccggaauguggugg

SEQ ID NO: 543946 - RNA, 19 nt, Artificial Sequence
  Description of Artificial Sequence: Synthetic oligonucleotide
aguugaaauggaucuuccu

SEQ ID NO: 543947 - RNA, 19 nt, Artificial Sequence
  Description of Artificial Sequence: Synthetic oligonucleotide
gucgcaauagggauacagg

SEQ ID NO: 543948 - RNA, 19 nt, Artificial Sequence
  Description of Artificial Sequence: Synthetic oligonucleotide
uguacucuccuugcagagg

SEQ ID NO: 543949 - RNA, 19 nt, Artificial Sequence
  Description of Artificial Sequence: Synthetic oligonucleotide
ugagaccggguacugucag

SEQ ID NO: 543950 - RNA, 19 nt, Artificial Sequence
  Description of Artificial Sequence: Synthetic oligonucleotide
acuguguaucgguagggcu

SEQ ID NO: 543951 - RNA, 19 nt, Artificial Sequence
  Description of Artificial Sequence: Synthetic oligonucleotide
caaggguccaagacagcgg

SEQ ID NO: 543952 - RNA, 19 nt, Artificial Sequence
  Description of Artificial Sequence: Synthetic oligonucleotide
gcggaagugugccugagcg

SEQ ID NO: 543953 - RNA, 19 nt, Artificial Sequence
  Description of Artificial Sequence: Synthetic oligonucleotide
guuaguccgucuaugagga

SEQ ID NO: 543954 - RNA, 19 nt, Artificial Sequence
  Description of Artificial Sequence: Synthetic oligonucleotide
gguacccuucaucugagcc

SEQ ID NO: 543955 - RNA, 19 nt, Artificial Sequence
  Description of Artificial Sequence: Synthetic oligonucleotide
ucguagucgcaauagggau

SEQ ID NO: 543956 - RNA, 19 nt, Artificial Sequence
  Description of Artificial Sequence: Synthetic oligonucleotide
cagaacgucgucacuguac

SEQ ID NO: 543957 - RNA, 19 nt, Artificial Sequence
  Description of Artificial Sequence: Synthetic oligonucleotide
ucgcccuggauccaguacu

SEQ ID NO: 543958 - RNA, 19 nt, Artificial Sequence
  Description of Artificial Sequence: Synthetic oligonucleotide
auaggagugguugggcagg

SEQ ID NO: 543959 - RNA, 19 nt, Artificial Sequence
  Description of Artificial Sequence: Synthetic oligonucleotide
gucaccguagaagagacga

SEQ ID NO: 543960 - RNA, 19 nt, Artificial Sequence
  Description of Artificial Sequence: Synthetic oligonucleotide
agauucucaauaagcagca

SEQ ID NO: 543961 - RNA, 19 nt, Artificial Sequence
  Description of Artificial Sequence: Synthetic oligonucleotide
accgaggguaccuugcugu

SEQ ID NO: 543962 - RNA, 19 nt, Artificial Sequence
  Description of Artificial Sequence: Synthetic oligonucleotide
agucccgcggaagugugcc

SEQ ID NO: 543963 - RNA, 19 nt, Artificial Sequence
  Description of Artificial Sequence: Synthetic oligonucleotide
cugggaggaaacugaagug

SEQ ID NO: 543964 - RNA, 19 nt, Artificial Sequence
  Description of Artificial Sequence: Synthetic oligonucleotide
acgucgucacuguacauga

SEQ ID NO: 543965 - RNA, 19 nt, Artificial Sequence
  Description of Artificial Sequence: Synthetic oligonucleotide
ucgaucacacuguggcucc

SEQ ID NO: 543966 - RNA, 19 nt, Artificial Sequence
  Description of Artificial Sequence: Synthetic oligonucleotide
gaaggagcuagggagagaa

SEQ ID NO: 543967 - RNA, 19 nt, Artificial Sequence
  Description of Artificial Sequence: Synthetic oligonucleotide
guagucgcaauagggauac

SEQ ID NO: 543968 - RNA, 19 nt, Artificial Sequence
  Description of Artificial Sequence: Synthetic oligonucleotide
gauucucgaagauucucaa

SEQ ID NO: 543969 - RNA, 19 nt, Artificial Sequence
  Description of Artificial Sequence: Synthetic oligonucleotide
uaggcgcacaccuucauuu

SEQ ID NO: 543970 - RNA, 19 nt, Artificial Sequence
  Description of Artificial Sequence: Synthetic oligonucleotide
uccuaucuucccagauagg

SEQ ID NO: 543971 - RNA, 19 nt, Artificial Sequence
  Description of Artificial Sequence: Synthetic oligonucleotide
ugugucgggcacacccacg

SEQ ID NO: 543972 - RNA, 19 nt, Artificial Sequence
  Description of Artificial Sequence: Synthetic oligonucleotide
auaggagggaggcccuggg

SEQ ID NO: 543973 - RNA, 19 nt, Artificial Sequence
  Description of Artificial Sequence: Synthetic oligonucleotide
gugucgggcacacccacgg

SEQ ID NO: 543974 - RNA, 19 nt, Artificial Sequence
  Description of Artificial Sequence: Synthetic oligonucleotide
cuguugguccaugugagug

SEQ ID NO: 543975 - RNA, 19 nt, Artificial Sequence
  Description of Artificial Sequence: Synthetic oligonucleotide
gccgccauuuaguaguugg

SEQ ID NO: 543976 - RNA, 19 nt, Artificial Sequence
  Description of Artificial Sequence: Synthetic oligonucleotide
agcucacuuucaaagaugu

SEQ ID NO: 543977 - RNA, 19 nt, Artificial Sequence
  Description of Artificial Sequence: Synthetic oligonucleotide
gauaggagggaggcccugg

SEQ ID NO: 543978 - RNA, 19 nt, Artificial Sequence
  Description of Artificial Sequence: Synthetic oligonucleotide
uuuggccgggguuagggau

SEQ ID NO: 543979 - RNA, 19 nt, Artificial Sequence
  Description of Artificial Sequence: Synthetic oligonucleotide
ugugaguggugguuaugcu

SEQ ID NO: 543980 - RNA, 19 nt, Artificial Sequence
  Description of Artificial Sequence: Synthetic oligonucleotide
auccugccccauuucgcgc

SEQ ID NO: 543981 - RNA, 19 nt, Artificial Sequence
  Description of Artificial Sequence: Synthetic oligonucleotide
cacucggaacacauaggag

SEQ ID NO: 543982 - RNA, 19 nt, Artificial Sequence
  Description of Artificial Sequence: Synthetic oligonucleotide
cagccaguugaaauggauc

SEQ ID NO: 543983 - RNA, 19 nt, Artificial Sequence
  Description of Artificial Sequence: Synthetic oligonucleotide
auagggauacagguuggug

SEQ ID NO: 543984 - RNA, 19 nt, Artificial Sequence
  Description of Artificial Sequence: Synthetic oligonucleotide
ggucaaccugugcagagag

SEQ ID NO: 543985 - RNA, 19 nt, Artificial Sequence
  Description of Artificial Sequence: Synthetic oligonucleotide
cacccucucgcucacggcc

SEQ ID NO: 543986 - RNA, 19 nt, Artificial Sequence
  Description of Artificial Sequence: Synthetic oligonucleotide
aacucgccgccauuuagua

SEQ ID NO: 543987 - RNA, 19 nt, Artificial Sequence
  Description of Artificial Sequence: Synthetic oligonucleotide
guagucccgagugagggug

SEQ ID NO: 543988 - RNA, 19 nt, Artificial Sequence
  Description of Artificial Sequence: Synthetic oligonucleotide
caagguugucuccauccac

SEQ ID NO: 543989 - RNA, 19 nt, Artificial Sequence
  Description of Artificial Sequence: Synthetic oligonucleotide
gaaggcaaggaggggcccg

SEQ ID NO: 543990 - RNA, 19 nt, Artificial Sequence
  Description of Artificial Sequence: Synthetic oligonucleotide
aguccgucuaugaggaaag

SEQ ID NO: 543991 - RNA, 19 nt, Artificial Sequence
  Description of Artificial Sequence: Synthetic oligonucleotide
cacaaauucuugggugacg

SEQ ID NO: 543992 - RNA, 19 nt, Artificial Sequence
  Description of Artificial Sequence: Synthetic oligonucleotide
cauagucuucgccacccug

SEQ ID NO: 543993 - RNA, 19 nt, Artificial Sequence
  Description of Artificial Sequence: Synthetic oligonucleotide
auguugagccgaugcaacu

SEQ ID NO: 543994 - RNA, 19 nt, Artificial Sequence
  Description of Artificial Sequence: Synthetic oligonucleotide
ugagugcugagagauccac

SEQ ID NO: 543995 - RNA, 19 nt, Artificial Sequence
  Description of Artificial Sequence: Synthetic oligonucleotide
ugggcccgcacucggaaca

SEQ ID NO: 543996 - RNA, 19 nt, Artificial Sequence
  Description of Artificial Sequence: Synthetic oligonucleotide
auuucgcgccuucacugug

SEQ ID NO: 543997 - RNA, 19 nt, Artificial Sequence
  Description of Artificial Sequence: Synthetic oligonucleotide
ugauagccucucucucggg

SEQ ID NO: 543998 - RNA, 19 nt, Artificial Sequence
  Description of Artificial Sequence: Synthetic oligonucleotide
cauucucacugagaccggg

SEQ ID NO: 543999 - RNA, 19 nt, Artificial Sequence
  Description of Artificial Sequence: Synthetic oligonucleotide
ugugcgggucagagagugg

SEQ ID NO: 544000 - RNA, 19 nt, Artificial Sequence
  Description of Artificial Sequence: Synthetic oligonucleotide
aacugcgggaaagggccuc

SEQ ID NO: 544001 - RNA, 19 nt, Artificial Sequence
  Description of Artificial Sequence: Synthetic oligonucleotide
gggugugucgggcacaccc

SEQ ID NO: 544002 - RNA, 19 nt, Artificial Sequence
  Description of Artificial Sequence: Synthetic oligonucleotide
cucguugaccaguccguag

SEQ ID NO: 544003 - RNA, 19 nt, Artificial Sequence
  Description of Artificial Sequence: Synthetic oligonucleotide
ugggugacgugccggguga

SEQ ID NO: 544004 - RNA, 19 nt, Artificial Sequence
  Description of Artificial Sequence: Synthetic oligonucleotide
ucugcgggugcaccuguga

SEQ ID NO: 544005 - RNA, 19 nt, Artificial Sequence
  Description of Artificial Sequence: Synthetic oligonucleotide
uccugccccauuucgcgcc

SEQ ID NO: 544006 - RNA, 19 nt, Artificial Sequence
  Description of Artificial Sequence: Synthetic oligonucleotide
uuucgcgccuucacugugu

SEQ ID NO: 544007 - RNA, 19 nt, Artificial Sequence
  Description of Artificial Sequence: Synthetic oligonucleotide
cagcauccgguucuugggg

SEQ ID NO: 544008 - RNA, 19 nt, Artificial Sequence
  Description of Artificial Sequence: Synthetic oligonucleotide
ucaccguagaagagacgac

SEQ ID NO: 544009 - RNA, 19 nt, Artificial Sequence
  Description of Artificial Sequence: Synthetic oligonucleotide
acacccucucgcucacggc

SEQ ID NO: 544010 - RNA, 19 nt, Artificial Sequence
  Description of Artificial Sequence: Synthetic oligonucleotide
ugguuaugcugcuguacuc

SEQ ID NO: 544011 - RNA, 19 nt, Artificial Sequence
  Description of Artificial Sequence: Synthetic oligonucleotide
gugacgugccgggugaggg

SEQ ID NO: 544012 - RNA, 19 nt, Artificial Sequence
  Description of Artificial Sequence: Synthetic oligonucleotide
guuagggauguugagccga

SEQ ID NO: 544013 - RNA, 19 nt, Artificial Sequence
  Description of Artificial Sequence: Synthetic oligonucleotide
uagucccgagugagggugg

SEQ ID NO: 544014 - RNA, 19 nt, Artificial Sequence
  Description of Artificial Sequence: Synthetic oligonucleotide
aucugagcccggcuccagg

SEQ ID NO: 544015 - RNA, 19 nt, Artificial Sequence
  Description of Artificial Sequence: Synthetic oligonucleotide
guuaugcugcuguacucuc

SEQ ID NO: 544016 - RNA, 19 nt, Artificial Sequence
  Description of Artificial Sequence: Synthetic oligonucleotide
accugugacucaaugguga

SEQ ID NO: 544017 - RNA, 19 nt, Artificial Sequence
  Description of Artificial Sequence: Synthetic oligonucleotide
ucuguaccccuggagggug

SEQ ID NO: 544018 - RNA, 19 nt, Artificial Sequence
  Description of Artificial Sequence: Synthetic oligonucleotide
agccgagugggugugucgg

SEQ ID NO: 544019 - RNA, 19 nt, Artificial Sequence
  Description of Artificial Sequence: Synthetic oligonucleotide
gaccgcagaacgucgucac

SEQ ID NO: 544020 - RNA, 19 nt, Artificial Sequence
  Description of Artificial Sequence: Synthetic oligonucleotide
uuagggauguugagccgau

SEQ ID NO: 544021 - RNA, 19 nt, Artificial Sequence
  Description of Artificial Sequence: Synthetic oligonucleotide
cagaggguucuggaaaagc

SEQ ID NO: 544022 - RNA, 19 nt, Artificial Sequence
  Description of Artificial Sequence: Synthetic oligonucleotide
caaauucuugggugacgug

SEQ ID NO: 544023 - RNA, 19 nt, Artificial Sequence
  Description of Artificial Sequence: Synthetic oligonucleotide
ugaaagccagucgccccgg

SEQ ID NO: 544024 - RNA, 19 nt, Artificial Sequence
  Description of Artificial Sequence: Synthetic oligonucleotide
acugcgggaaagggccucc

SEQ ID NO: 544025 - RNA, 19 nt, Artificial Sequence
  Description of Artificial Sequence: Synthetic oligonucleotide
guacuccacacuguagccc

SEQ ID NO: 544026 - RNA, 19 nt, Artificial Sequence
  Description of Artificial Sequence: Synthetic oligonucleotide
gagagauccacuggcgguc

SEQ ID NO: 544027 - RNA, 19 nt, Artificial Sequence
  Description of Artificial Sequence: Synthetic oligonucleotide
ccguaggcagcauuggccg

SEQ ID NO: 544028 - RNA, 19 nt, Artificial Sequence
  Description of Artificial Sequence: Synthetic oligonucleotide
acucgccgccauuuaguag

SEQ ID NO: 544029 - RNA, 19 nt, Artificial Sequence
  Description of Artificial Sequence: Synthetic oligonucleotide
aggccgguuguccucguug

SEQ ID NO: 544030 - RNA, 19 nt, Artificial Sequence
  Description of Artificial Sequence: Synthetic oligonucleotide
gguuagggauguugagccg

SEQ ID NO: 544031 - RNA, 19 nt, Artificial Sequence
  Description of Artificial Sequence: Synthetic oligonucleotide
acucgaucacacuguggcu

SEQ ID NO: 544032 - RNA, 19 nt, Artificial Sequence
  Description of Artificial Sequence: Synthetic oligonucleotide
ggguuaguccgucuaugag

SEQ ID NO: 544033 - RNA, 19 nt, Artificial Sequence
  Description of Artificial Sequence: Synthetic oligonucleotide
gacgugccgggugagggag

SEQ ID NO: 544034 - RNA, 19 nt, Artificial Sequence
  Description of Artificial Sequence: Synthetic oligonucleotide
ggguagaguagucccgcgg

SEQ ID NO: 544035 - RNA, 19 nt, Artificial Sequence
  Description of Artificial Sequence: Synthetic oligonucleotide
guggucgugcugugagugg

SEQ ID NO: 544036 - RNA, 19 nt, Artificial Sequence
  Description of Artificial Sequence: Synthetic oligonucleotide
ggcgcacaccuucauuucg

SEQ ID NO: 544037 - RNA, 19 nt, Artificial Sequence
  Description of Artificial Sequence: Synthetic oligonucleotide
gguuuggccgggguuaggg

SEQ ID NO: 544038 - RNA, 19 nt, Artificial Sequence
  Description of Artificial Sequence: Synthetic oligonucleotide
cacuguguaucgguagggc

SEQ ID NO: 544039 - RNA, 19 nt, Artificial Sequence
  Description of Artificial Sequence: Synthetic oligonucleotide
cucgccgccauuuaguagu

SEQ ID NO: 544040 - RNA, 19 nt, Artificial Sequence
  Description of Artificial Sequence: Synthetic oligonucleotide
gccgugaucucuccauugg

SEQ ID NO: 544041 - RNA, 19 nt, Artificial Sequence
  Description of Artificial Sequence: Synthetic oligonucleotide
gguaccuugcuguccagca

SEQ ID NO: 544042 - RNA, 19 nt, Artificial Sequence
  Description of Artificial Sequence: Synthetic oligonucleotide
caaccugugcagagaguug

SEQ ID NO: 544043 - RNA, 19 nt, Artificial Sequence
  Description of Artificial Sequence: Synthetic oligonucleotide
gauagccucucucucgggu

SEQ ID NO: 544044 - RNA, 19 nt, Artificial Sequence
  Description of Artificial Sequence: Synthetic oligonucleotide
agucgccccggcucgcugg

SEQ ID NO: 544045 - RNA, 19 nt, Artificial Sequence
  Description of Artificial Sequence: Synthetic oligonucleotide
uucacgcucuggcccgaag

SEQ ID NO: 544046 - RNA, 19 nt, Artificial Sequence
  Description of Artificial Sequence: Synthetic oligonucleotide
cagugaacaccagcgggcc

SEQ ID NO: 544047 - RNA, 19 nt, Artificial Sequence
  Description of Artificial Sequence: Synthetic oligonucleotide
cugugcgggucagagagug

SEQ ID NO: 544048 - RNA, 19 nt, Artificial Sequence
  Description of Artificial Sequence: Synthetic oligonucleotide
uaucgguagggcugggauu

SEQ ID NO: 544049 - RNA, 19 nt, Artificial Sequence
  Description of Artificial Sequence: Synthetic oligonucleotide
uucgccacccugggcaucc

SEQ ID NO: 544050 - RNA, 19 nt, Artificial Sequence
  Description of Artificial Sequence: Synthetic oligonucleotide
caauaggccgguuguccuc

SEQ ID NO: 544051 - RNA, 19 nt, Artificial Sequence
  Description of Artificial Sequence: Synthetic oligonucleotide
guacucgaucacacugugg

SEQ ID NO: 544052 - RNA, 19 nt, Artificial Sequence
  Description of Artificial Sequence: Synthetic oligonucleotide
gagaccggguacugucagc

SEQ ID NO: 544053 - RNA, 19 nt, Artificial Sequence
  Description of Artificial Sequence: Synthetic oligonucleotide
ccauuucgcgccuucacug

SEQ ID NO: 544054 - RNA, 19 nt, Artificial Sequence
  Description of Artificial Sequence: Synthetic oligonucleotide
uguaucgguagggcuggga

SEQ ID NO: 544055 - RNA, 19 nt, Artificial Sequence
  Description of Artificial Sequence: Synthetic oligonucleotide
gcgagaguggucugugcgg

SEQ ID NO: 544056 - RNA, 19 nt, Artificial Sequence
  Description of Artificial Sequence: Synthetic oligonucleotide
ggagcuagggagagaaggc

SEQ ID NO: 544057 - RNA, 19 nt, Artificial Sequence
  Description of Artificial Sequence: Synthetic oligonucleotide
ggacccaaggguccaagac

SEQ ID NO: 544058 - RNA, 19 nt, Artificial Sequence
  Description of Artificial Sequence: Synthetic oligonucleotide
ggauucucgaagauucuca

SEQ ID NO: 544059 - RNA, 19 nt, Artificial Sequence
  Description of Artificial Sequence: Synthetic oligonucleotide
gcaacucgccgccauuuag

SEQ ID NO: 544060 - RNA, 19 nt, Artificial Sequence
  Description of Artificial Sequence: Synthetic oligonucleotide
ggacucaauggugaugaug

SEQ ID NO: 544061 - RNA, 19 nt, Artificial Sequence
  Description of Artificial Sequence: Synthetic oligonucleotide
cucgcuggguacuuccuga

SEQ ID NO: 544062 - RNA, 19 nt, Artificial Sequence
  Description of Artificial Sequence: Synthetic oligonucleotide
ccgcacucggaacacauag

SEQ ID NO: 544063 - RNA, 19 nt, Artificial Sequence
  Description of Artificial Sequence: Synthetic oligonucleotide
gaguagucccgcggaagug

SEQ ID NO: 544064 - RNA, 19 nt, Artificial Sequence
  Description of Artificial Sequence: Synthetic oligonucleotide
caccguagaagagacgaca

SEQ ID NO: 544065 - RNA, 19 nt, Artificial Sequence
  Description of Artificial Sequence: Synthetic oligonucleotide
ggguccaauaggccgguug

SEQ ID NO: 544066 - RNA, 19 nt, Artificial Sequence
  Description of Artificial Sequence: Synthetic oligonucleotide
ggacucuguaccccuggag

SEQ ID NO: 544067 - RNA, 19 nt, Artificial Sequence
  Description of Artificial Sequence: Synthetic oligonucleotide
ucugugcgggucagagagu

SEQ ID NO: 544068 - RNA, 19 nt, Artificial Sequence
  Description of Artificial Sequence: Synthetic oligonucleotide
ugucgggcacacccacggc

SEQ ID NO: 544069 - RNA, 19 nt, Artificial Sequence
  Description of Artificial Sequence: Synthetic oligonucleotide
aaggagcuagggagagaag

SEQ ID NO: 544070 - RNA, 19 nt, Artificial Sequence
  Description of Artificial Sequence: Synthetic oligonucleotide
agacgacauugaaagccag

SEQ ID NO: 544071 - RNA, 19 nt, Artificial Sequence
  Description of Artificial Sequence: Synthetic oligonucleotide
ggucagagagugguagucc

SEQ ID NO: 544072 - RNA, 19 nt, Artificial Sequence
  Description of Artificial Sequence: Synthetic oligonucleotide
agccaggauuauugagucu

SEQ ID NO: 544073 - RNA, 19 nt, Artificial Sequence
  Description of Artificial Sequence: Synthetic oligonucleotide
ugcaacucgccgccauuua

SEQ ID NO: 544074 - RNA, 19 nt, Artificial Sequence
  Description of Artificial Sequence: Synthetic oligonucleotide
guacuucacccuguacccc

SEQ ID NO: 544075 - RNA, 19 nt, Artificial Sequence
  Description of Artificial Sequence: Synthetic oligonucleotide
ggguuucagguuuggaaga

SEQ ID NO: 544076 - RNA, 19 nt, Artificial Sequence
  Description of Artificial Sequence: Synthetic oligonucleotide
cugcccaacugcgggaaag

SEQ ID NO: 544077 - RNA, 19 nt, Artificial Sequence
  Description of Artificial Sequence: Synthetic oligonucleotide
cagguagccaaggauaucu

SEQ ID NO: 544078 - RNA, 19 nt, Artificial Sequence
  Description of Artificial Sequence: Synthetic oligonucleotide
gcgccuucacuguguaucg

SEQ ID NO: 544079 - RNA, 19 nt, Artificial Sequence
  Description of Artificial Sequence: Synthetic oligonucleotide
ucggguccccauccugccc

SEQ ID NO: 544080 - RNA, 19 nt, Artificial Sequence
  Description of Artificial Sequence: Synthetic oligonucleotide
ucccgcggaagugugccug

SEQ ID NO: 544081 - RNA, 19 nt, Artificial Sequence
  Description of Artificial Sequence: Synthetic oligonucleotide
accguagaagagacgacau

SEQ ID NO: 544082 - RNA, 19 nt, Artificial Sequence
  Description of Artificial Sequence: Synthetic oligonucleotide
ucucucggguccccauccu

SEQ ID NO: 544083 - RNA, 19 nt, Artificial Sequence
  Description of Artificial Sequence: Synthetic oligonucleotide
cagccgagugggugugucg

SEQ ID NO: 544084 - RNA, 19 nt, Artificial Sequence
  Description of Artificial Sequence: Synthetic oligonucleotide
guaccccauuggcuugccg

SEQ ID NO: 544085 - RNA, 19 nt, Artificial Sequence
  Description of Artificial Sequence: Synthetic oligonucleotide
gccgcggucaaccugugca

SEQ ID NO: 544086 - RNA, 19 nt, Artificial Sequence
  Description of Artificial Sequence: Synthetic oligonucleotide
ggugguuaugcugcuguac

SEQ ID NO: 544087 - RNA, 19 nt, Artificial Sequence
  Description of Artificial Sequence: Synthetic oligonucleotide
ugcagagaguuggcacugc

SEQ ID NO: 544088 - RNA, 19 nt, Artificial Sequence
  Description of Artificial Sequence: Synthetic oligonucleotide
guaucgguagggcugggau

SEQ ID NO: 544089 - RNA, 19 nt, Artificial Sequence
  Description of Artificial Sequence: Synthetic oligonucleotide
uucgcgccuucacugugua

SEQ ID NO: 544090 - RNA, 19 nt, Artificial Sequence
  Description of Artificial Sequence: Synthetic oligonucleotide
caucagaaacacugggccu

SEQ ID NO: 544091 - RNA, 19 nt, Artificial Sequence
  Description of Artificial Sequence: Synthetic oligonucleotide
gggauguugagccgaugca

SEQ ID NO: 544092 - RNA, 19 nt, Artificial Sequence
  Description of Artificial Sequence: Synthetic oligonucleotide
gccguaggcagcauuggcc

SEQ ID NO: 544093 - RNA, 19 nt, Artificial Sequence
  Description of Artificial Sequence: Synthetic oligonucleotide
guagcccaguaguacucga

SEQ ID NO: 544094 - RNA, 19 nt, Artificial Sequence
  Description of Artificial Sequence: Synthetic oligonucleotide
aguggucugugcgggucag

SEQ ID NO: 544095 - RNA, 19 nt, Artificial Sequence
  Description of Artificial Sequence: Synthetic oligonucleotide
gugugucgggcacacccac

SEQ ID NO: 544096 - RNA, 19 nt, Artificial Sequence
  Description of Artificial Sequence: Synthetic oligonucleotide
ggccgcuugggcugugugg

SEQ ID NO: 544097 - RNA, 19 nt, Artificial Sequence
  Description of Artificial Sequence: Synthetic oligonucleotide
gucgcccuggauccaguac

SEQ ID NO: 544098 - RNA, 19 nt, Artificial Sequence
  Description of Artificial Sequence: Synthetic oligonucleotide
cugagaccggguacuguca

SEQ ID NO: 544099 - RNA, 19 nt, Artificial Sequence
  Description of Artificial Sequence: Synthetic oligonucleotide
cuguaccccauuggcuugc

SEQ ID NO: 544100 - RNA, 19 nt, Artificial Sequence
  Description of Artificial Sequence: Synthetic oligonucleotide
cuguaccccuggagggugc

SEQ ID NO: 544101 - RNA, 19 nt, Artificial Sequence
  Description of Artificial Sequence: Synthetic oligonucleotide
gaaugugguggcugauccu

SEQ ID NO: 544102 - RNA, 19 nt, Artificial Sequence
  Description of Artificial Sequence: Synthetic oligonucleotide
guuuggccgggguuaggga

SEQ ID NO: 544103 - RNA, 19 nt, Artificial Sequence
  Description of Artificial Sequence: Synthetic oligonucleotide
agccaaggauaucuccauu

SEQ ID NO: 544104 - RNA, 19 nt, Artificial Sequence
  Description of Artificial Sequence: Synthetic oligonucleotide
ucucgcucacggccccagc

SEQ ID NO: 544105 - RNA, 19 nt, Artificial Sequence
  Description of Artificial Sequence: Synthetic oligonucleotide
uggugguuaugcugcugua

SEQ ID NO: 544106 - RNA, 19 nt, Artificial Sequence
  Description of Artificial Sequence: Synthetic oligonucleotide
ucucgcuagaggggcuggc

SEQ ID NO: 544107 - RNA, 19 nt, Artificial Sequence
  Description of Artificial Sequence: Synthetic oligonucleotide
ccugcuucgaggcgcuggg

SEQ ID NO: 544108 - RNA, 19 nt, Artificial Sequence
  Description of Artificial Sequence: Synthetic oligonucleotide
ggccgugaucucuccauug

SEQ ID NO: 544109 - RNA, 19 nt, Artificial Sequence
  Description of Artificial Sequence: Synthetic oligonucleotide
uuaguccgucuaugaggaa

SEQ ID NO: 544110 - RNA, 19 nt, Artificial Sequence
  Description of Artificial Sequence: Synthetic oligonucleotide
gcggucaaccugugcagag

SEQ ID NO: 544111 - RNA, 19 nt, Artificial Sequence
  Description of Artificial Sequence: Synthetic oligonucleotide
cauccgguucuugggguug

SEQ ID NO: 544112 - RNA, 19 nt, Artificial Sequence
  Description of Artificial Sequence: Synthetic oligonucleotide
ucgcuggguacuuccugau

SEQ ID NO: 544113 - RNA, 19 nt, Artificial Sequence
  Description of Artificial Sequence: Synthetic oligonucleotide
caccgaggguaccuugcug

SEQ ID NO: 544114 - RNA, 19 nt, Artificial Sequence
  Description of Artificial Sequence: Synthetic oligonucleotide
cccaguaguacucgaucac

SEQ ID NO: 544115 - RNA, 19 nt, Artificial Sequence
  Description of Artificial Sequence: Synthetic oligonucleotide
acccggaaugugguggcug

SEQ ID NO: 544116 - RNA, 19 nt, Artificial Sequence
  Description of Artificial Sequence: Synthetic oligonucleotide
gcucucucgcuagaggggc

SEQ ID NO: 544117 - RNA, 19 nt, Artificial Sequence
  Description of Artificial Sequence: Synthetic oligonucleotide
gcggagaacaccagccgag

SEQ ID NO: 544118 - RNA, 19 nt, Artificial Sequence
  Description of Artificial Sequence: Synthetic oligonucleotide
ugcgggucagagaguggua

SEQ ID NO: 544119 - RNA, 19 nt, Artificial Sequence
  Description of Artificial Sequence: Synthetic oligonucleotide
agauccacuggcggucagu

SEQ ID NO: 544120 - RNA, 19 nt, Artificial Sequence
  Description of Artificial Sequence: Synthetic oligonucleotide
gggauucucgaagauucuc

SEQ ID NO: 544121 - RNA, 19 nt, Artificial Sequence
  Description of Artificial Sequence: Synthetic oligonucleotide
gaugugcucagcacucggu

SEQ ID NO: 544122 - RNA, 19 nt, Artificial Sequence
  Description of Artificial Sequence: Synthetic oligonucleotide
gugacucaauggugaugac

SEQ ID NO: 544123 - RNA, 19 nt, Artificial Sequence
  Description of Artificial Sequence: Synthetic oligonucleotide
gguccaugugagugcugag

SEQ ID NO: 544124 - RNA, 19 nt, Artificial Sequence
  Description of Artificial Sequence: Synthetic oligonucleotide
gacgacauugaaagccagu

SEQ ID NO: 544125 - RNA, 19 nt, Artificial Sequence
  Description of Artificial Sequence: Synthetic oligonucleotide
cucucgcuagaggggcugg

SEQ ID NO: 544126 - RNA, 19 nt, Artificial Sequence
  Description of Artificial Sequence: Synthetic oligonucleotide
ugccccauuucgcgccuuc

SEQ ID NO: 544127 - RNA, 19 nt, Artificial Sequence
  Description of Artificial Sequence: Synthetic oligonucleotide
guaggccgugaucucucca

SEQ ID NO: 544128 - RNA, 19 nt, Artificial Sequence
  Description of Artificial Sequence: Synthetic oligonucleotide
gguuaugcugcuguacucu

SEQ ID NO: 544129 - RNA, 19 nt, Artificial Sequence
  Description of Artificial Sequence: Synthetic oligonucleotide
caacucgccgccauuuagu

SEQ ID NO: 544130 - RNA, 19 nt, Artificial Sequence
  Description of Artificial Sequence: Synthetic oligonucleotide
ugacacccucucgcucacg

SEQ ID NO: 544131 - RNA, 19 nt, Artificial Sequence
  Description of Artificial Sequence: Synthetic oligonucleotide
augcaacucgccgccauuu

SEQ ID NO: 544132 - RNA, 19 nt, Artificial Sequence
  Description of Artificial Sequence: Synthetic oligonucleotide
guugguccaugugagugcu

SEQ ID NO: 544133 - RNA, 19 nt, Artificial Sequence
  Description of Artificial Sequence: Synthetic oligonucleotide
ugcgggaaagggccuccuu

SEQ ID NO: 544134 - RNA, 19 nt, Artificial Sequence
  Description of Artificial Sequence: Synthetic oligonucleotide
agaccucguaggccgugau

SEQ ID NO: 544135 - RNA, 19 nt, Artificial Sequence
  Description of Artificial Sequence: Synthetic oligonucleotide
gaagugugccugagcgaga

SEQ ID NO: 544136 - RNA, 19 nt, Artificial Sequence
  Description of Artificial Sequence: Synthetic oligonucleotide
gucgccccggcucgcuggg

SEQ ID NO: 544137 - RNA, 19 nt, Artificial Sequence
  Description of Artificial Sequence: Synthetic oligonucleotide
cacuggcggucaguguccg

SEQ ID NO: 544138 - RNA, 19 nt, Artificial Sequence
  Description of Artificial Sequence: Synthetic oligonucleotide
cauuucgcgccuucacugu

SEQ ID NO: 544139 - RNA, 19 nt, Artificial Sequence
  Description of Artificial Sequence: Synthetic oligonucleotide
ccgguuguccucguugacc

SEQ ID NO: 544140 - RNA, 19 nt, Artificial Sequence
  Description of Artificial Sequence: Synthetic oligonucleotide
cagagaguuggcacugccu

SEQ ID NO: 544141 - RNA, 19 nt, Artificial Sequence
  Description of Artificial Sequence: Synthetic oligonucleotide
cugggcccgcacucggaac

SEQ ID NO: 544142 - RNA, 19 nt, Artificial Sequence
  Description of Artificial Sequence: Synthetic oligonucleotide
ggugacgugccgggugagg

SEQ ID NO: 544143 - RNA, 19 nt, Artificial Sequence
  Description of Artificial Sequence: Synthetic oligonucleotide
ccacuggcggucagugucc

SEQ ID NO: 544144 - RNA, 19 nt, Artificial Sequence
  Description of Artificial Sequence: Synthetic oligonucleotide
cucugcgggugcaccugug

SEQ ID NO: 544145 - RNA, 19 nt, Artificial Sequence
  Description of Artificial Sequence: Synthetic oligonucleotide
aggccgugaucucuccauu

SEQ ID NO: 544146 - RNA, 19 nt, Artificial Sequence
  Description of Artificial Sequence: Synthetic oligonucleotide
ggcagcauuggccgcgguc

SEQ ID NO: 544147 - RNA, 19 nt, Artificial Sequence
  Description of Artificial Sequence: Synthetic oligonucleotide
cugcuguacucuccuugca

SEQ ID NO: 544148 - RNA, 19 nt, Artificial Sequence
  Description of Artificial Sequence: Synthetic oligonucleotide
gguuucagguuuggaagaa

SEQ ID NO: 544149 - RNA, 19 nt, Artificial Sequence
  Description of Artificial Sequence: Synthetic oligonucleotide
ggucaccguagaagagacg

SEQ ID NO: 544150 - RNA, 19 nt, Artificial Sequence
  Description of Artificial Sequence: Synthetic oligonucleotide
ccgcagaacgucgucacug

SEQ ID NO: 544151 - RNA, 19 nt, Artificial Sequence
  Description of Artificial Sequence: Synthetic oligonucleotide
gcccaacugcgggaaaggg

SEQ ID NO: 544152 - RNA, 19 nt, Artificial Sequence
  Description of Artificial Sequence: Synthetic oligonucleotide
agguuuggccgggguuagg

SEQ ID NO: 544153 - RNA, 19 nt, Artificial Sequence
  Description of Artificial Sequence: Synthetic oligonucleotide
gcgggugcaccugugacuc

SEQ ID NO: 544154 - RNA, 19 nt, Artificial Sequence
  Description of Artificial Sequence: Synthetic oligonucleotide
ccggguacugucagccggc

SEQ ID NO: 544155 - RNA, 19 nt, Artificial Sequence
  Description of Artificial Sequence: Synthetic oligonucleotide
uccggccguucaccaggug

SEQ ID NO: 544156 - RNA, 19 nt, Artificial Sequence
  Description of Artificial Sequence: Synthetic oligonucleotide
gcccgggugguuccugggg

SEQ ID NO: 544157 - RNA, 19 nt, Artificial Sequence
  Description of Artificial Sequence: Synthetic oligonucleotide
gugcgggucagagaguggu

SEQ ID NO: 544158 - RNA, 19 nt, Artificial Sequence
  Description of Artificial Sequence: Synthetic oligonucleotide
gggguacccuucaucugag

SEQ ID NO: 544159 - RNA, 19 nt, Artificial Sequence
  Description of Artificial Sequence: Synthetic oligonucleotide
gaugcaacucgccgccauu

SEQ ID NO: 544160 - RNA, 19 nt, Artificial Sequence
  Description of Artificial Sequence: Synthetic oligonucleotide
gccgagugggugugucggg

SEQ ID NO: 544161 - RNA, 19 nt, Artificial Sequence
  Description of Artificial Sequence: Synthetic oligonucleotide
ucgccgccauuuaguaguu

SEQ ID NO: 544162 - RNA, 19 nt, Artificial Sequence
  Description of Artificial Sequence: Synthetic oligonucleotide
auaggccgguuguccucgu

SEQ ID NO: 544163 - RNA, 19 nt, Artificial Sequence
  Description of Artificial Sequence: Synthetic oligonucleotide
augggacucuguaccccug

SEQ ID NO: 544164 - RNA, 19 nt, Artificial Sequence
  Description of Artificial Sequence: Synthetic oligonucleotide
ccaugggacucuguacccc

SEQ ID NO: 544165 - RNA, 19 nt, Artificial Sequence
  Description of Artificial Sequence: Synthetic oligonucleotide
ugugccccguaggcgcaca

SEQ ID NO: 544166 - RNA, 19 nt, Artificial Sequence
  Description of Artificial Sequence: Synthetic oligonucleotide
ccggcuccaggacccaagg

SEQ ID NO: 544167 - RNA, 19 nt, Artificial Sequence
  Description of Artificial Sequence: Synthetic oligonucleotide
cagcgagucugggcuuagg

SEQ ID NO: 544168 - RNA, 19 nt, Artificial Sequence
  Description of Artificial Sequence: Synthetic oligonucleotide
ggguacccuucaucugagc

SEQ ID NO: 544169 - RNA, 19 nt, Artificial Sequence
  Description of Artificial Sequence: Synthetic oligonucleotide
ccgggguuagggauguuga

SEQ ID NO: 544170 - RNA, 19 nt, Artificial Sequence
  Description of Artificial Sequence: Synthetic oligonucleotide
ggaccgcagaacgucguca

SEQ ID NO: 544171 - RNA, 19 nt, Artificial Sequence
  Description of Artificial Sequence: Synthetic oligonucleotide
ccgcggucaaccugugcag

SEQ ID NO: 544172 - RNA, 19 nt, Artificial Sequence
  Description of Artificial Sequence: Synthetic oligonucleotide
uaggccgguuguccucguu

SEQ ID NO: 544173 - RNA, 19 nt, Artificial Sequence
  Description of Artificial Sequence: Synthetic oligonucleotide
cguggucgugcugugagug

SEQ ID NO: 544174 - RNA, 19 nt, Artificial Sequence
  Description of Artificial Sequence: Synthetic oligonucleotide
ggugugucgggcacaccca

SEQ ID NO: 544175 - RNA, 19 nt, Artificial Sequence
  Description of Artificial Sequence: Synthetic oligonucleotide
ggucugugcgggucagaga

SEQ ID NO: 544176 - RNA, 19 nt, Artificial Sequence
  Description of Artificial Sequence: Synthetic oligonucleotide
uggccgcggucaaccugug

SEQ ID NO: 544177 - RNA, 19 nt, Artificial Sequence
  Description of Artificial Sequence: Synthetic oligonucleotide
gaacgucgucacuguacau

SEQ ID NO: 544178 - RNA, 19 nt, Artificial Sequence
  Description of Artificial Sequence: Synthetic oligonucleotide
aguccguagcagaccucgu

SEQ ID NO: 544179 - RNA, 19 nt, Artificial Sequence
  Description of Artificial Sequence: Synthetic oligonucleotide
ucgguagggcugggauucu

SEQ ID NO: 544180 - RNA, 19 nt, Artificial Sequence
  Description of Artificial Sequence: Synthetic oligonucleotide
aguguccggcucacaaauu

SEQ ID NO: 544181 - RNA, 19 nt, Artificial Sequence
  Description of Artificial Sequence: Synthetic oligonucleotide
ggcccgggugguuccuggg

SEQ ID NO: 544182 - RNA, 19 nt, Artificial Sequence
  Description of Artificial Sequence: Synthetic oligonucleotide
gugcugugaguggugguua

SEQ ID NO: 544183 - RNA, 19 nt, Artificial Sequence
  Description of Artificial Sequence: Synthetic oligonucleotide
caccagccgagugggugug

SEQ ID NO: 544184 - RNA, 19 nt, Artificial Sequence
  Description of Artificial Sequence: Synthetic oligonucleotide
cucguaggccgugaucucu

SEQ ID NO: 544185 - RNA, 19 nt, Artificial Sequence
  Description of Artificial Sequence: Synthetic oligonucleotide
gcggucaguguccggcuca

SEQ ID NO: 544186 - RNA, 19 nt, Artificial Sequence
  Description of Artificial Sequence: Synthetic oligonucleotide
uagucgcaauagggauaca

SEQ ID NO: 544187 - RNA, 19 nt, Artificial Sequence
  Description of Artificial Sequence: Synthetic oligonucleotide
ccgagugggugugucgggc

SEQ ID NO: 544188 - RNA, 19 nt, Artificial Sequence
  Description of Artificial Sequence: Synthetic oligonucleotide
gggaccgcagaacgucguc

SEQ ID NO: 544189 - RNA, 19 nt, Artificial Sequence
  Description of Artificial Sequence: Synthetic oligonucleotide
ugggugugucgggcacacc

SEQ ID NO: 544190 - RNA, 19 nt, Artificial Sequence
  Description of Artificial Sequence: Synthetic oligonucleotide
gugccugagcgagaguggu

SEQ ID NO: 544191 - RNA, 19 nt, Artificial Sequence
  Description of Artificial Sequence: Synthetic oligonucleotide
ggcucugcgggugcaccug

SEQ ID NO: 544192 - RNA, 19 nt, Artificial Sequence
  Description of Artificial Sequence: Synthetic oligonucleotide
cagaccucguaggccguga

SEQ ID NO: 544193 - RNA, 19 nt, Artificial Sequence
  Description of Artificial Sequence: Synthetic oligonucleotide
ccgaggguaccuugcuguc

SEQ ID NO: 544194 - RNA, 19 nt, Artificial Sequence
  Description of Artificial Sequence: Synthetic oligonucleotide
cuaugaggaaaggcuccgu

SEQ ID NO: 544195 - RNA, 19 nt, Artificial Sequence
  Description of Artificial Sequence: Synthetic oligonucleotide
ccaauaggccgguuguccu

SEQ ID NO: 544196 - RNA, 19 nt, Artificial Sequence
  Description of Artificial Sequence: Synthetic oligonucleotide
ggaaaggcuccguggucgu

SEQ ID NO: 544197 - RNA, 19 nt, Artificial Sequence
  Description of Artificial Sequence: Synthetic oligonucleotide
cguagucgcaauagggaua

SEQ ID NO: 544198 - RNA, 19 nt, Artificial Sequence
  Description of Artificial Sequence: Synthetic oligonucleotide
auccggccguucaccaggu

SEQ ID NO: 544199 - RNA, 19 nt, Artificial Sequence
  Description of Artificial Sequence: Synthetic oligonucleotide
gugccccguaggcgcacac

SEQ ID NO: 544200 - RNA, 19 nt, Artificial Sequence
  Description of Artificial Sequence: Synthetic oligonucleotide
cugagcgagaguggucugu

SEQ ID NO: 544201 - RNA, 19 nt, Artificial Sequence
  Description of Artificial Sequence: Synthetic oligonucleotide
cccgaagcccucaguuguc

SEQ ID NO: 544202 - RNA, 19 nt, Artificial Sequence
  Description of Artificial Sequence: Synthetic oligonucleotide
aggguccaagacagcggaa

SEQ ID NO: 544203 - RNA, 19 nt, Artificial Sequence
  Description of Artificial Sequence: Synthetic oligonucleotide
ccucguaggccgugaucuc

SEQ ID NO: 544204 - RNA, 19 nt, Artificial Sequence
  Description of Artificial Sequence: Synthetic oligonucleotide
gcuccguggucgugcugug

SEQ ID NO: 544205 - RNA, 19 nt, Artificial Sequence
  Description of Artificial Sequence: Synthetic oligonucleotide
cauuggccgcggucaaccu

SEQ ID NO: 544206 - RNA, 19 nt, Artificial Sequence
  Description of Artificial Sequence: Synthetic oligonucleotide
gcagaacgucgucacugua

SEQ ID NO: 544207 - RNA, 19 nt, Artificial Sequence
  Description of Artificial Sequence: Synthetic oligonucleotide
gucaaccugugcagagagu

SEQ ID NO: 544208 - RNA, 19 nt, Artificial Sequence
  Description of Artificial Sequence: Synthetic oligonucleotide
guccggcucacaaauucuu

SEQ ID NO: 544209 - RNA, 19 nt, Artificial Sequence
  Description of Artificial Sequence: Synthetic oligonucleotide
caacugcgggaaagggccu

SEQ ID NO: 544210 - RNA, 19 nt, Artificial Sequence
  Description of Artificial Sequence: Synthetic oligonucleotide
gcagaccucguaggccgug

SEQ ID NO: 544211 - RNA, 19 nt, Artificial Sequence
  Description of Artificial Sequence: Synthetic oligonucleotide
cucucucgcuagaggggcu

SEQ ID NO: 544212 - RNA, 19 nt, Artificial Sequence
  Description of Artificial Sequence: Synthetic oligonucleotide
cugugccccguaggcgcac

SEQ ID NO: 544213 - RNA, 19 nt, Artificial Sequence
  Description of Artificial Sequence: Synthetic oligonucleotide
gcagccaguugaaauggau

SEQ ID NO: 544214 - RNA, 19 nt, Artificial Sequence
  Description of Artificial Sequence: Synthetic oligonucleotide
gcagcgagucugggcuuag

SEQ ID NO: 544215 - RNA, 19 nt, Artificial Sequence
  Description of Artificial Sequence: Synthetic oligonucleotide
cccauuucgcgccuucacu

SEQ ID NO: 544216 - RNA, 19 nt, Artificial Sequence
  Description of Artificial Sequence: Synthetic oligonucleotide
accagccgagugggugugu

SEQ ID NO: 544217 - RNA, 19 nt, Artificial Sequence
  Description of Artificial Sequence: Synthetic oligonucleotide
ggccgcggucaaccugugc

SEQ ID NO: 544218 - RNA, 19 nt, Artificial Sequence
  Description of Artificial Sequence: Synthetic oligonucleotide
ccgcuugggcuguguggcc

SEQ ID NO: 544219 - RNA, 19 nt, Artificial Sequence
  Description of Artificial Sequence: Synthetic oligonucleotide
ggcucagaugugugccgua

SEQ ID NO: 544220 - RNA, 19 nt, Artificial Sequence
  Description of Artificial Sequence: Synthetic oligonucleotide
cuccguggucgugcuguga

SEQ ID NO: 544221 - RNA, 19 nt, Artificial Sequence
  Description of Artificial Sequence: Synthetic oligonucleotide
gggugacgugccgggugag

SEQ ID NO: 544222 - RNA, 19 nt, Artificial Sequence
  Description of Artificial Sequence: Synthetic oligonucleotide
cuccauccacccggaaugu

SEQ ID NO: 544223 - RNA, 19 nt, Artificial Sequence
  Description of Artificial Sequence: Synthetic oligonucleotide
cgcaauagggauacagguu

SEQ ID NO: 544224 - RNA, 19 nt, Artificial Sequence
  Description of Artificial Sequence: Synthetic oligonucleotide
gagucgcccuggauccagu

SEQ ID NO: 544225 - RNA, 19 nt, Artificial Sequence
  Description of Artificial Sequence: Synthetic oligonucleotide
gcucacuuucaaagaugua

SEQ ID NO: 544226 - RNA, 19 nt, Artificial Sequence
  Description of Artificial Sequence: Synthetic oligonucleotide
gcgcacaccuucauuucgu

SEQ ID NO: 544227 - RNA, 19 nt, Artificial Sequence
  Description of Artificial Sequence: Synthetic oligonucleotide
cgccauuuaguaguuggua

SEQ ID NO: 544228 - RNA, 19 nt, Artificial Sequence
  Description of Artificial Sequence: Synthetic oligonucleotide
gcacucggugggacaggug

SEQ ID NO: 544229 - RNA, 19 nt, Artificial Sequence
  Description of Artificial Sequence: Synthetic oligonucleotide
aggggcccgggugguuccu

SEQ ID NO: 544230 - RNA, 19 nt, Artificial Sequence
  Description of Artificial Sequence: Synthetic oligonucleotide
ggccguucaccaggugcuc

SEQ ID NO: 544231 - RNA, 19 nt, Artificial Sequence
  Description of Artificial Sequence: Synthetic oligonucleotide
gucccgcggaagugugccu

SEQ ID NO: 544232 - RNA, 19 nt, Artificial Sequence
  Description of Artificial Sequence: Synthetic oligonucleotide
cuggcccgaagcccucagu

SEQ ID NO: 544233 - RNA, 19 nt, Artificial Sequence
  Description of Artificial Sequence: Synthetic oligonucleotide
gggcccgcacucggaacac

SEQ ID NO: 544234 - RNA, 19 nt, Artificial Sequence
  Description of Artificial Sequence: Synthetic oligonucleotide
agcccggcuccaggaccca

SEQ ID NO: 544235 - RNA, 19 nt, Artificial Sequence
  Description of Artificial Sequence: Synthetic oligonucleotide
gccccauuucgcgccuuca

SEQ ID NO: 544236 - RNA, 19 nt, Artificial Sequence
  Description of Artificial Sequence: Synthetic oligonucleotide
ccaggguuaguccgucuau

SEQ ID NO: 544237 - RNA, 19 nt, Artificial Sequence
  Description of Artificial Sequence: Synthetic oligonucleotide
ucgccccggcucgcugggu

SEQ ID NO: 544238 - RNA, 19 nt, Artificial Sequence
  Description of Artificial Sequence: Synthetic oligonucleotide
gcucugcgggugcaccugu

SEQ ID NO: 544239 - RNA, 19 nt, Artificial Sequence
  Description of Artificial Sequence: Synthetic oligonucleotide
ggggcccgggugguuccug

SEQ ID NO: 544240 - RNA, 19 nt, Artificial Sequence
  Description of Artificial Sequence: Synthetic oligonucleotide
cgcacaccuucauuucgua

SEQ ID NO: 544241 - RNA, 19 nt, Artificial Sequence
  Description of Artificial Sequence: Synthetic oligonucleotide
cggucaaccugugcagaga

SEQ ID NO: 544242 - RNA, 19 nt, Artificial Sequence
  Description of Artificial Sequence: Synthetic oligonucleotide
ccucguugaccaguccgua

SEQ ID NO: 544243 - RNA, 19 nt, Artificial Sequence
  Description of Artificial Sequence: Synthetic oligonucleotide
ccguagaagagacgacauu

SEQ ID NO: 544244 - RNA, 19 nt, Artificial Sequence
  Description of Artificial Sequence: Synthetic oligonucleotide
cccgcacucggaacacaua

SEQ ID NO: 544245 - RNA, 19 nt, Artificial Sequence
  Description of Artificial Sequence: Synthetic oligonucleotide
ccugcaccuugaacuugua

SEQ ID NO: 544246 - RNA, 19 nt, Artificial Sequence
  Description of Artificial Sequence: Synthetic oligonucleotide
ccacggccccaugggacuc

SEQ ID NO: 544247 - RNA, 19 nt, Artificial Sequence
  Description of Artificial Sequence: Synthetic oligonucleotide
cacccggaaugugguggcu

SEQ ID NO: 544248 - RNA, 19 nt, Artificial Sequence
  Description of Artificial Sequence: Synthetic oligonucleotide
ccccauuggcuugccggga

SEQ ID NO: 544249 - RNA, 19 nt, Artificial Sequence
  Description of Artificial Sequence: Synthetic oligonucleotide
gcccgcacucggaacacau

SEQ ID NO: 544250 - RNA, 19 nt, Artificial Sequence
  Description of Artificial Sequence: Synthetic oligonucleotide
cugcgggaaagggccuccu

SEQ ID NO: 544251 - RNA, 19 nt, Artificial Sequence
  Description of Artificial Sequence: Synthetic oligonucleotide
cgcggucaaccugugcaga

SEQ ID NO: 544252 - RNA, 19 nt, Artificial Sequence
  Description of Artificial Sequence: Synthetic oligonucleotide
cgaugcaacucgccgccau

SEQ ID NO: 544253 - RNA, 19 nt, Artificial Sequence
  Description of Artificial Sequence: Synthetic oligonucleotide
ccgaugcaacucgccgcca

SEQ ID NO: 544254 - RNA, 19 nt, Artificial Sequence
  Description of Artificial Sequence: Synthetic oligonucleotide
gcuccaccgaggguaccuu

SEQ ID NO: 544255 - RNA, 19 nt, Artificial Sequence
  Description of Artificial Sequence: Synthetic oligonucleotide
ccccguaggcgcacaccuu

SEQ ID NO: 544256 - RNA, 19 nt, Artificial Sequence
  Description of Artificial Sequence: Synthetic oligonucleotide
cugccccauuucgcgccuu

SEQ ID NO: 544257 - RNA, 19 nt, Artificial Sequence
  Description of Artificial Sequence: Synthetic oligonucleotide
aauaaaaugggcuugacuc

SEQ ID NO: 544258 - RNA, 19 nt, Artificial Sequence
  Description of Artificial Sequence: Synthetic oligonucleotide
aacuuauuauaauuuaccc

SEQ ID NO: 544259 - RNA, 19 nt, Artificial Sequence
  Description of Artificial Sequence: Synthetic oligonucleotide
aaaguuaccaagccuaacc

SEQ ID NO: 544260 - RNA, 19 nt, Artificial Sequence
  Description of Artificial Sequence: Synthetic oligonucleotide
aaagcuaguagcuuguugg

SEQ ID NO: 544261 - RNA, 19 nt, Artificial Sequence
  Description of Artificial Sequence: Synthetic oligonucleotide
aaaucgaguauuuacuggc

SEQ ID NO: 544262 - RNA, 19 nt, Artificial Sequence
  Description of Artificial Sequence: Synthetic oligonucleotide
guuaguaucaauuacaaac

SEQ ID NO: 544263 - RNA, 19 nt, Artificial Sequence
  Description of Artificial Sequence: Synthetic oligonucleotide
ucuuauauagcccauagca

SEQ ID NO: 544264 - RNA, 19 nt, Artificial Sequence
  Description of Artificial Sequence: Synthetic oligonucleotide
aaucauaugucuuagauua

SEQ ID NO: 544265 - RNA, 19 nt, Artificial Sequence
  Description of Artificial Sequence: Synthetic oligonucleotide
uguagugacauuaaaauac

SEQ ID NO: 544266 - RNA, 19 nt, Artificial Sequence
  Description of Artificial Sequence: Synthetic oligonucleotide
agcaugaauacacugaagc

SEQ ID NO: 544267 - RNA, 19 nt, Artificial Sequence
  Description of Artificial Sequence: Synthetic oligonucleotide
ugagauaacaaacuuacug

SEQ ID NO: 544268 - RNA, 19 nt, Artificial Sequence
  Description of Artificial Sequence: Synthetic oligonucleotide
uccaguaucauuaauauaa

SEQ ID NO: 544269 - RNA, 19 nt, Artificial Sequence
  Description of Artificial Sequence: Synthetic oligonucleotide
aguaugacaauucugauga

SEQ ID NO: 544270 - RNA, 19 nt, Artificial Sequence
  Description of Artificial Sequence: Synthetic oligonucleotide
aauuccuguagauagaccu

SEQ ID NO: 544271 - RNA, 19 nt, Artificial Sequence
  Description of Artificial Sequence: Synthetic oligonucleotide
aaaaggccaugauuaaucc

SEQ ID NO: 544272 - RNA, 19 nt, Artificial Sequence
  Description of Artificial Sequence: Synthetic oligonucleotide
aaagugacuuacuaggcuc

SEQ ID NO: 544273 - RNA, 19 nt, Artificial Sequence
  Description of Artificial Sequence: Synthetic oligonucleotide
uauacauuaacucaagcau

SEQ ID NO: 544274 - RNA, 19 nt, Artificial Sequence
  Description of Artificial Sequence: Synthetic oligonucleotide
aguacugccauacagaacu

SEQ ID NO: 544275 - RNA, 19 nt, Artificial Sequence
  Description of Artificial Sequence: Synthetic oligonucleotide
aaagauccaauuuuaauau

SEQ ID NO: 544276 - RNA, 19 nt, Artificial Sequence
  Description of Artificial Sequence: Synthetic oligonucleotide
aauuaagccugccauagug

SEQ ID NO: 544277 - RNA, 19 nt, Artificial Sequence
  Description of Artificial Sequence: Synthetic oligonucleotide
agaacugacaauguuaugg

SEQ ID NO: 544278 - RNA, 19 nt, Artificial Sequence
  Description of Artificial Sequence: Synthetic oligonucleotide
auucugaugauuucauacc

SEQ ID NO: 544279 - RNA, 19 nt, Artificial Sequence
  Description of Artificial Sequence: Synthetic oligonucleotide
aauaucugcuucucagccc

SEQ ID NO: 544280 - RNA, 19 nt, Artificial Sequence
  Description of Artificial Sequence: Synthetic oligonucleotide
gauccguagacacagagcc

SEQ ID NO: 544281 - RNA, 19 nt, Artificial Sequence
  Description of Artificial Sequence: Synthetic oligonucleotide
aauucuaaguguuaggauu

SEQ ID NO: 544282 - RNA, 19 nt, Artificial Sequence
  Description of Artificial Sequence: Synthetic oligonucleotide
uacugguacuauaaaaugg

SEQ ID NO: 544283 - RNA, 19 nt, Artificial Sequence
  Description of Artificial Sequence: Synthetic oligonucleotide
agugagauaacaaacuuac

SEQ ID NO: 544284 - RNA, 19 nt, Artificial Sequence
  Description of Artificial Sequence: Synthetic oligonucleotide
gagcauuagaaauaaaaug

SEQ ID NO: 544285 - RNA, 19 nt, Artificial Sequence
  Description of Artificial Sequence: Synthetic oligonucleotide
aucuaaugggcauugcugc

SEQ ID NO: 544286 - RNA, 19 nt, Artificial Sequence
  Description of Artificial Sequence: Synthetic oligonucleotide
auaguauuuagcuugggcu

SEQ ID NO: 544287 - RNA, 19 nt, Artificial Sequence
  Description of Artificial Sequence: Synthetic oligonucleotide
uauuaauuaugcagcaugc

SEQ ID NO: 544288 - RNA, 19 nt, Artificial Sequence
  Description of Artificial Sequence: Synthetic oligonucleotide
agcauuaccaaucuggcug

SEQ ID NO: 544289 - RNA, 19 nt, Artificial Sequence
  Description of Artificial Sequence: Synthetic oligonucleotide
uuaaucauaugucuuagau

SEQ ID NO: 544290 - RNA, 19 nt, Artificial Sequence
  Description of Artificial Sequence: Synthetic oligonucleotide
ucauaauucucuaagccac

SEQ ID NO: 544291 - RNA, 19 nt, Artificial Sequence
  Description of Artificial Sequence: Synthetic oligonucleotide
uaaguuacaguauucguga

SEQ ID NO: 544292 - RNA, 19 nt, Artificial Sequence
  Description of Artificial Sequence: Synthetic oligonucleotide
uaugcagcaugcuuuaggg

SEQ ID NO: 544293 - RNA, 19 nt, Artificial Sequence
  Description of Artificial Sequence: Synthetic oligonucleotide
ugacaauuuaucaagcagu

SEQ ID NO: 544294 - RNA, 19 nt, Artificial Sequence
  Description of Artificial Sequence: Synthetic oligonucleotide
uaaaucgaguauuuacugg

SEQ ID NO: 544295 - RNA, 19 nt, Artificial Sequence
  Description of Artificial Sequence: Synthetic oligonucleotide
uuauacuggauuuaaagua

SEQ ID NO: 544296 - RNA, 19 nt, Artificial Sequence
  Description of Artificial Sequence: Synthetic oligonucleotide
agauaacaaacuuacuguc

SEQ ID NO: 544297 - RNA, 19 nt, Artificial Sequence
  Description of Artificial Sequence: Synthetic oligonucleotide
uuuacuagcucuucaaaac

SEQ ID NO: 544298 - RNA, 19 nt, Artificial Sequence
  Description of Artificial Sequence: Synthetic oligonucleotide
auguaaagagucuugcagg

SEQ ID NO: 544299 - RNA, 19 nt, Artificial Sequence
  Description of Artificial Sequence: Synthetic oligonucleotide
auuauacuggauuuaaagu

SEQ ID NO: 544300 - RNA, 19 nt, Artificial Sequence
  Description of Artificial Sequence: Synthetic oligonucleotide
aacucuuuuaaaucgagua

SEQ ID NO: 544301 - RNA, 19 nt, Artificial Sequence
  Description of Artificial Sequence: Synthetic oligonucleotide
ugaccuaacagucauagua

SEQ ID NO: 544302 - RNA, 19 nt, Artificial Sequence
  Description of Artificial Sequence: Synthetic oligonucleotide
uuaaaucgaguauuuacug

SEQ ID NO: 544303 - RNA, 19 nt, Artificial Sequence
  Description of Artificial Sequence: Synthetic oligonucleotide
aaguaugacaauucugaug

SEQ ID NO: 544304 - RNA, 19 nt, Artificial Sequence
  Description of Artificial Sequence: Synthetic oligonucleotide
auuuaaguuacaguauucg

SEQ ID NO: 544305 - RNA, 19 nt, Artificial Sequence
  Description of Artificial Sequence: Synthetic oligonucleotide
gagucuauggcuuaaucug

SEQ ID NO: 544306 - RNA, 19 nt, Artificial Sequence
  Description of Artificial Sequence: Synthetic oligonucleotide
caaagaaaugguuaagcag

SEQ ID NO: 544307 - RNA, 19 nt, Artificial Sequence
  Description of Artificial Sequence: Synthetic oligonucleotide
ucaaccuaauguaaugaag

SEQ ID NO: 544308 - RNA, 19 nt, Artificial Sequence
  Description of Artificial Sequence: Synthetic oligonucleotide
acuguugaaggauaaaugu

SEQ ID NO: 544309 - RNA, 19 nt, Artificial Sequence
  Description of Artificial Sequence: Synthetic oligonucleotide
uaaagagucuugcaggggc

SEQ ID NO: 544310 - RNA, 19 nt, Artificial Sequence
  Description of Artificial Sequence: Synthetic oligonucleotide
uugagaugaacauggauca

SEQ ID NO: 544311 - RNA, 19 nt, Artificial Sequence
  Description of Artificial Sequence: Synthetic oligonucleotide
auauagauguuucauaaau

SEQ ID NO: 544312 - RNA, 19 nt, Artificial Sequence
  Description of Artificial Sequence: Synthetic oligonucleotide
acuuauuauaauuuaccca

SEQ ID NO: 544313 - RNA, 19 nt, Artificial Sequence
  Description of Artificial Sequence: Synthetic oligonucleotide
uuaugcagcaugcuuuagg

SEQ ID NO: 544314 - RNA, 19 nt, Artificial Sequence
  Description of Artificial Sequence: Synthetic oligonucleotide
ugaagaaaauucuugcacu

SEQ ID NO: 544315 - RNA, 19 nt, Artificial Sequence
  Description of Artificial Sequence: Synthetic oligonucleotide
uaaaauggugacuaaucug

SEQ ID NO: 544316 - RNA, 19 nt, Artificial Sequence
  Description of Artificial Sequence: Synthetic oligonucleotide
uauuauaauuuacccagac

SEQ ID NO: 544317 - RNA, 19 nt, Artificial Sequence
  Description of Artificial Sequence: Synthetic oligonucleotide
auaaaauggugacuaaucu

SEQ ID NO: 544318 - RNA, 19 nt, Artificial Sequence
  Description of Artificial Sequence: Synthetic oligonucleotide
agcaucauccaauguauac

SEQ ID NO: 544319 - RNA, 19 nt, Artificial Sequence
  Description of Artificial Sequence: Synthetic oligonucleotide
ugcaguuauuauuuaauca

SEQ ID NO: 544320 - RNA, 19 nt, Artificial Sequence
  Description of Artificial Sequence: Synthetic oligonucleotide
uauacuggauuuaaaguaa

SEQ ID NO: 544321 - RNA, 19 nt, Artificial Sequence
  Description of Artificial Sequence: Synthetic oligonucleotide
uuagaacugacaauguuau

SEQ ID NO: 544322 - RNA, 19 nt, Artificial Sequence
  Description of Artificial Sequence: Synthetic oligonucleotide
uguagauagaccuccaauc

SEQ ID NO: 544323 - RNA, 19 nt, Artificial Sequence
  Description of Artificial Sequence: Synthetic oligonucleotide
ugauuaauccacuuaacua

SEQ ID NO: 544324 - RNA, 19 nt, Artificial Sequence
  Description of Artificial Sequence: Synthetic oligonucleotide
ugacuaaucugauauaauc

SEQ ID NO: 544325 - RNA, 19 nt, Artificial Sequence
  Description of Artificial Sequence: Synthetic oligonucleotide
agaauugaacaacacagga

SEQ ID NO: 544326 - RNA, 19 nt, Artificial Sequence
  Description of Artificial Sequence: Synthetic oligonucleotide
ucugucugcaguuuaacac

SEQ ID NO: 544327 - RNA, 19 nt, Artificial Sequence
  Description of Artificial Sequence: Synthetic oligonucleotide
aucuaauuagaacugacaa

SEQ ID NO: 544328 - RNA, 19 nt, Artificial Sequence
  Description of Artificial Sequence: Synthetic oligonucleotide
uuuacucacaaucuuucgu

SEQ ID NO: 544329 - RNA, 19 nt, Artificial Sequence
  Description of Artificial Sequence: Synthetic oligonucleotide
ugguuaagcaggcaaaugu

SEQ ID NO: 544330 - RNA, 19 nt, Artificial Sequence
  Description of Artificial Sequence: Synthetic oligonucleotide
auuaaaugccuuuaaucca

SEQ ID NO: 544331 - RNA, 19 nt, Artificial Sequence
  Description of Artificial Sequence: Synthetic oligonucleotide
uuggauguaggauaauuca

SEQ ID NO: 544332 - RNA, 19 nt, Artificial Sequence
  Description of Artificial Sequence: Synthetic oligonucleotide
ugguacuauaaaaugguga

SEQ ID NO: 544333 - RNA, 19 nt, Artificial Sequence
  Description of Artificial Sequence: Synthetic oligonucleotide
cacagugguaaauuaagcc

SEQ ID NO: 544334 - RNA, 19 nt, Artificial Sequence
  Description of Artificial Sequence: Synthetic oligonucleotide
uauaauuuacccagacugu

SEQ ID NO: 544335 - RNA, 19 nt, Artificial Sequence
  Description of Artificial Sequence: Synthetic oligonucleotide
uaucauucuuauauagccc

SEQ ID NO: 544336 - RNA, 19 nt, Artificial Sequence
  Description of Artificial Sequence: Synthetic oligonucleotide
uaauguaaugaagaaaccu

SEQ ID NO: 544337 - RNA, 19 nt, Artificial Sequence
  Description of Artificial Sequence: Synthetic oligonucleotide
cuuagugaagcuucaagug

SEQ ID NO: 544338 - RNA, 19 nt, Artificial Sequence
  Description of Artificial Sequence: Synthetic oligonucleotide
ggcaucauauuauuaaacg

SEQ ID NO: 544339 - RNA, 19 nt, Artificial Sequence
  Description of Artificial Sequence: Synthetic oligonucleotide
acuaggcucauucucacag

SEQ ID NO: 544340 - RNA, 19 nt, Artificial Sequence
  Description of Artificial Sequence: Synthetic oligonucleotide
acuuacuaggcucauucuc

SEQ ID NO: 544341 - RNA, 19 nt, Artificial Sequence
  Description of Artificial Sequence: Synthetic oligonucleotide
acuuagugaagcuucaagu

SEQ ID NO: 544342 - RNA, 19 nt, Artificial Sequence
  Description of Artificial Sequence: Synthetic oligonucleotide
cuguguacacaguauaugc

SEQ ID NO: 544343 - RNA, 19 nt, Artificial Sequence
  Description of Artificial Sequence: Synthetic oligonucleotide
ucaagugggagucuauggc

SEQ ID NO: 544344 - RNA, 19 nt, Artificial Sequence
  Description of Artificial Sequence: Synthetic oligonucleotide
uuaauuaugcagcaugcuu

SEQ ID NO: 544345 - RNA, 19 nt, Artificial Sequence
  Description of Artificial Sequence: Synthetic oligonucleotide
uuuggauguaggauaauuc

SEQ ID NO: 544346 - RNA, 19 nt, Artificial Sequence
  Description of Artificial Sequence: Synthetic oligonucleotide
ucugaguguagguucauug

SEQ ID NO: 544347 - RNA, 19 nt, Artificial Sequence
  Description of Artificial Sequence: Synthetic oligonucleotide
augacaagcacacagggaa

SEQ ID NO: 544348 - RNA, 19 nt, Artificial Sequence
  Description of Artificial Sequence: Synthetic oligonucleotide
aagauccaauuuuaauauc

SEQ ID NO: 544349 - RNA, 19 nt, Artificial Sequence
  Description of Artificial Sequence: Synthetic oligonucleotide
uaauuuacccagacuguag

SEQ ID NO: 544350 - RNA, 19 nt, Artificial Sequence
  Description of Artificial Sequence: Synthetic oligonucleotide
uucaagugggagucuaugg

SEQ ID NO: 544351 - RNA, 19 nt, Artificial Sequence
  Description of Artificial Sequence: Synthetic oligonucleotide
auggugacuaaucugauau

SEQ ID NO: 544352 - RNA, 19 nt, Artificial Sequence
  Description of Artificial Sequence: Synthetic oligonucleotide
auuucaaccuaauguaaug

SEQ ID NO: 544353 - RNA, 19 nt, Artificial Sequence
  Description of Artificial Sequence: Synthetic oligonucleotide
aaucuauucugguucuucu

SEQ ID NO: 544354 - RNA, 19 nt, Artificial Sequence
  Description of Artificial Sequence: Synthetic oligonucleotide
aucauauuauuaaacguuc

SEQ ID NO: 544355 - RNA, 19 nt, Artificial Sequence
  Description of Artificial Sequence: Synthetic oligonucleotide
uucugaugauuucauacca

SEQ ID NO: 544356 - RNA, 19 nt, Artificial Sequence
  Description of Artificial Sequence: Synthetic oligonucleotide
ucugaccuaacagucauag

SEQ ID NO: 544357 - RNA, 19 nt, Artificial Sequence
  Description of Artificial Sequence: Synthetic oligonucleotide
aguaucacagaaugcuuuc

SEQ ID NO: 544358 - RNA, 19 nt, Artificial Sequence
  Description of Artificial Sequence: Synthetic oligonucleotide
ugaacauggaucacagaca

SEQ ID NO: 544359 - RNA, 19 nt, Artificial Sequence
  Description of Artificial Sequence: Synthetic oligonucleotide
gauaacuagagcauuagaa

SEQ ID NO: 544360 - RNA, 19 nt, Artificial Sequence
  Description of Artificial Sequence: Synthetic oligonucleotide
uguuaggauuauuugcaag

SEQ ID NO: 544361 - RNA, 19 nt, Artificial Sequence
  Description of Artificial Sequence: Synthetic oligonucleotide
acuaaucugauauaaucaa

SEQ ID NO: 544362 - RNA, 19 nt, Artificial Sequence
  Description of Artificial Sequence: Synthetic oligonucleotide
uuauauagcccauagcauu

SEQ ID NO: 544363 - RNA, 19 nt, Artificial Sequence
  Description of Artificial Sequence: Synthetic oligonucleotide
uuauuuaaucauaugucuu

SEQ ID NO: 544364 - RNA, 19 nt, Artificial Sequence
  Description of Artificial Sequence: Synthetic oligonucleotide
aggaaaugacaauuuauca

SEQ ID NO: 544365 - RNA, 19 nt, Artificial Sequence
  Description of Artificial Sequence: Synthetic oligonucleotide
auuuacucacaaucuuucg

SEQ ID NO: 544366 - RNA, 19 nt, Artificial Sequence
  Description of Artificial Sequence: Synthetic oligonucleotide
uuccaaucuauucugguuc

SEQ ID NO: 544367 - RNA, 19 nt, Artificial Sequence
  Description of Artificial Sequence: Synthetic oligonucleotide
ucaagaucaggcacgaauc

SEQ ID NO: 544368 - RNA, 19 nt, Artificial Sequence
  Description of Artificial Sequence: Synthetic oligonucleotide
cuaaccaguaaguccaggc

SEQ ID NO: 544369 - RNA, 19 nt, Artificial Sequence
  Description of Artificial Sequence: Synthetic oligonucleotide
aauuagaacugacaauguu

SEQ ID NO: 544370 - RNA, 19 nt, Artificial Sequence
  Description of Artificial Sequence: Synthetic oligonucleotide
gguacuauaaaauggugac

SEQ ID NO: 544371 - RNA, 19 nt, Artificial Sequence
  Description of Artificial Sequence: Synthetic oligonucleotide
ugaagaaaccugaguuugg

SEQ ID NO: 544372 - RNA, 19 nt, Artificial Sequence
  Description of Artificial Sequence: Synthetic oligonucleotide
ugaguuuggauguaggaua

SEQ ID NO: 544373 - RNA, 19 nt, Artificial Sequence
  Description of Artificial Sequence: Synthetic oligonucleotide
cuagaguacugccauacag

SEQ ID NO: 544374 - RNA, 19 nt, Artificial Sequence
  Description of Artificial Sequence: Synthetic oligonucleotide
caauguauacauuaacuca

SEQ ID NO: 544375 - RNA, 19 nt, Artificial Sequence
  Description of Artificial Sequence: Synthetic oligonucleotide
ugauuucauaccaucauuu

SEQ ID NO: 544376 - RNA, 19 nt, Artificial Sequence
  Description of Artificial Sequence: Synthetic oligonucleotide
ucuaauuagaacugacaau

SEQ ID NO: 544377 - RNA, 19 nt, Artificial Sequence
  Description of Artificial Sequence: Synthetic oligonucleotide
aagcucaacucuuuuaaau

SEQ ID NO: 544378 - RNA, 19 nt, Artificial Sequence
  Description of Artificial Sequence: Synthetic oligonucleotide
gaauuggaacaucauuaag

SEQ ID NO: 544379 - RNA, 19 nt, Artificial Sequence
  Description of Artificial Sequence: Synthetic oligonucleotide
uguguacacaguauaugca

SEQ ID NO: 544380 - RNA, 19 nt, Artificial Sequence
  Description of Artificial Sequence: Synthetic oligonucleotide
caaagauccaauuuuaaua

SEQ ID NO: 544381 - RNA, 19 nt, Artificial Sequence
  Description of Artificial Sequence: Synthetic oligonucleotide
gcucaugugagucauacag

SEQ ID NO: 544382 - RNA, 19 nt, Artificial Sequence
  Description of Artificial Sequence: Synthetic oligonucleotide
caucucuacaguuaguauc

SEQ ID NO: 544383 - RNA, 19 nt, Artificial Sequence
  Description of Artificial Sequence: Synthetic oligonucleotide
cauaugucuuagauuauac

SEQ ID NO: 544384 - RNA, 19 nt, Artificial Sequence
  Description of Artificial Sequence: Synthetic oligonucleotide
agcccuauaucuccacucc

SEQ ID NO: 544385 - RNA, 19 nt, Artificial Sequence
  Description of Artificial Sequence: Synthetic oligonucleotide
aaucuaauuagaacugaca

SEQ ID NO: 544386 - RNA, 19 nt, Artificial Sequence
  Description of Artificial Sequence: Synthetic oligonucleotide
uaaagcuaguagcuuguug

SEQ ID NO: 544387 - RNA, 19 nt, Artificial Sequence
  Description of Artificial Sequence: Synthetic oligonucleotide
gagauaacaaacuuacugu

SEQ ID NO: 544388 - RNA, 19 nt, Artificial Sequence
  Description of Artificial Sequence: Synthetic oligonucleotide
ucacagugguaaauuaagc

SEQ ID NO: 544389 - RNA, 19 nt, Artificial Sequence
  Description of Artificial Sequence: Synthetic oligonucleotide
acuaauuuacucacaaucu

SEQ ID NO: 544390 - RNA, 19 nt, Artificial Sequence
  Description of Artificial Sequence: Synthetic oligonucleotide
uauagauguuucauaaauu

SEQ ID NO: 544391 - RNA, 19 nt, Artificial Sequence
  Description of Artificial Sequence: Synthetic oligonucleotide
uuagcuugggcugggaaag

SEQ ID NO: 544392 - RNA, 19 nt, Artificial Sequence
  Description of Artificial Sequence: Synthetic oligonucleotide
auaaaaugggcuugacucu

SEQ ID NO: 544393 - RNA, 19 nt, Artificial Sequence
  Description of Artificial Sequence: Synthetic oligonucleotide
caaccuaauguaaugaaga

SEQ ID NO: 544394 - RNA, 19 nt, Artificial Sequence
  Description of Artificial Sequence: Synthetic oligonucleotide
acuauuuacuagcauacuu

SEQ ID NO: 544395 - RNA, 19 nt, Artificial Sequence
  Description of Artificial Sequence: Synthetic oligonucleotide
cugaguguagguucauugg

SEQ ID NO: 544396 - RNA, 19 nt, Artificial Sequence
  Description of Artificial Sequence: Synthetic oligonucleotide
uucauguaaagagucuugc

SEQ ID NO: 544397 - RNA, 19 nt, Artificial Sequence
  Description of Artificial Sequence: Synthetic oligonucleotide
auuaagccugccauagugc

SEQ ID NO: 544398 - RNA, 19 nt, Artificial Sequence
  Description of Artificial Sequence: Synthetic oligonucleotide
uuacuagcauacuuuacaa

SEQ ID NO: 544399 - RNA, 19 nt, Artificial Sequence
  Description of Artificial Sequence: Synthetic oligonucleotide
aaagcaucauccaauguau

SEQ ID NO: 544400 - RNA, 19 nt, Artificial Sequence
  Description of Artificial Sequence: Synthetic oligonucleotide
uucuuauauagcccauagc

SEQ ID NO: 544401 - RNA, 19 nt, Artificial Sequence
  Description of Artificial Sequence: Synthetic oligonucleotide
aguguuaggauuauuugca

SEQ ID NO: 544402 - RNA, 19 nt, Artificial Sequence
  Description of Artificial Sequence: Synthetic oligonucleotide
uuucaaccuaauguaauga

SEQ ID NO: 544403 - RNA, 19 nt, Artificial Sequence
  Description of Artificial Sequence: Synthetic oligonucleotide
ugauaacuagagcauuaga

SEQ ID NO: 544404 - RNA, 19 nt, Artificial Sequence
  Description of Artificial Sequence: Synthetic oligonucleotide
cauaauucucuaagccacg

SEQ ID NO: 544405 - RNA, 19 nt, Artificial Sequence
  Description of Artificial Sequence: Synthetic oligonucleotide
uacacaaacuuauuauaau

SEQ ID NO: 544406 - RNA, 19 nt, Artificial Sequence
  Description of Artificial Sequence: Synthetic oligonucleotide
aauuucaaccuaauguaau

SEQ ID NO: 544407 - RNA, 19 nt, Artificial Sequence
  Description of Artificial Sequence: Synthetic oligonucleotide
uugauaacuagagcauuag

SEQ ID NO: 544408 - RNA, 19 nt, Artificial Sequence
  Description of Artificial Sequence: Synthetic oligonucleotide
guugggaacuaauuuacuc

SEQ ID NO: 544409 - RNA, 19 nt, Artificial Sequence
  Description of Artificial Sequence: Synthetic oligonucleotide
caauuuaucaagcagucua

SEQ ID NO: 544410 - RNA, 19 nt, Artificial Sequence
  Description of Artificial Sequence: Synthetic oligonucleotide
ugccauacagaacuuucca

SEQ ID NO: 544411 - RNA, 19 nt, Artificial Sequence
  Description of Artificial Sequence: Synthetic oligonucleotide
aguauuuagcuugggcugg

SEQ ID NO: 544412 - RNA, 19 nt, Artificial Sequence
  Description of Artificial Sequence: Synthetic oligonucleotide
uguagguucauugguuugc

SEQ ID NO: 544413 - RNA, 19 nt, Artificial Sequence
  Description of Artificial Sequence: Synthetic oligonucleotide
aaaggccaugauuaaucca

SEQ ID NO: 544414 - RNA, 19 nt, Artificial Sequence
  Description of Artificial Sequence: Synthetic oligonucleotide
uaucuccacuccaaaagcu

SEQ ID NO: 544415 - RNA, 19 nt, Artificial Sequence
  Description of Artificial Sequence: Synthetic oligonucleotide
uuacucacaaucuuucguu

SEQ ID NO: 544416 - RNA, 19 nt, Artificial Sequence
  Description of Artificial Sequence: Synthetic oligonucleotide
ucauccaaaaggcaucaua

SEQ ID NO: 544417 - RNA, 19 nt, Artificial Sequence
  Description of Artificial Sequence: Synthetic oligonucleotide
uucaaccuaauguaaugaa

SEQ ID NO: 544418 - RNA, 19 nt, Artificial Sequence
  Description of Artificial Sequence: Synthetic oligonucleotide
agcccuugauaacuagagc

SEQ ID NO: 544419 - RNA, 19 nt, Artificial Sequence
  Description of Artificial Sequence: Synthetic oligonucleotide
acucuuuuaaaucgaguau

SEQ ID NO: 544420 - RNA, 19 nt, Artificial Sequence
  Description of Artificial Sequence: Synthetic oligonucleotide
auaugcacugacuuuccca

SEQ ID NO: 544421 - RNA, 19 nt, Artificial Sequence
  Description of Artificial Sequence: Synthetic oligonucleotide
ugggcuugacucuagagua

SEQ ID NO: 544422 - RNA, 19 nt, Artificial Sequence
  Description of Artificial Sequence: Synthetic oligonucleotide
auacauuaacucaagcaug

SEQ ID NO: 544423 - RNA, 19 nt, Artificial Sequence
  Description of Artificial Sequence: Synthetic oligonucleotide
gagucauacagaauugaac

SEQ ID NO: 544424 - RNA, 19 nt, Artificial Sequence
  Description of Artificial Sequence: Synthetic oligonucleotide
acugguacuauaaaauggu

SEQ ID NO: 544425 - RNA, 19 nt, Artificial Sequence
  Description of Artificial Sequence: Synthetic oligonucleotide
uaagccacguuuauauaau

SEQ ID NO: 544426 - RNA, 19 nt, Artificial Sequence
  Description of Artificial Sequence: Synthetic oligonucleotide
ucgaguauuuacuggcugu

SEQ ID NO: 544427 - RNA, 19 nt, Artificial Sequence
  Description of Artificial Sequence: Synthetic oligonucleotide
guuaggauuauuugcaagu

SEQ ID NO: 544428 - RNA, 19 nt, Artificial Sequence
  Description of Artificial Sequence: Synthetic oligonucleotide
aguuauuauuuaaucauau

SEQ ID NO: 544429 - RNA, 19 nt, Artificial Sequence
  Description of Artificial Sequence: Synthetic oligonucleotide
ugacucuagaguacugcca

SEQ ID NO: 544430 - RNA, 19 nt, Artificial Sequence
  Description of Artificial Sequence: Synthetic oligonucleotide
auuagaacugacaauguua

SEQ ID NO: 544431 - RNA, 19 nt, Artificial Sequence
  Description of Artificial Sequence: Synthetic oligonucleotide
cacaacaggauccguagac

SEQ ID NO: 544432 - RNA, 19 nt, Artificial Sequence
  Description of Artificial Sequence: Synthetic oligonucleotide
caguaucauuaauauaaac

SEQ ID NO: 544433 - RNA, 19 nt, Artificial Sequence
  Description of Artificial Sequence: Synthetic oligonucleotide
ggaacuaaggaacaauguc

SEQ ID NO: 544434 - RNA, 19 nt, Artificial Sequence
  Description of Artificial Sequence: Synthetic oligonucleotide
guacacaguauaugcacug

SEQ ID NO: 544435 - RNA, 19 nt, Artificial Sequence
  Description of Artificial Sequence: Synthetic oligonucleotide
aaugguuaagcaggcaaau

SEQ ID NO: 544436 - RNA, 19 nt, Artificial Sequence
  Description of Artificial Sequence: Synthetic oligonucleotide
auugaacaacacaggaagg

SEQ ID NO: 544437 - RNA, 19 nt, Artificial Sequence
  Description of Artificial Sequence: Synthetic oligonucleotide
uucugugaauuuacaacaa

SEQ ID NO: 544438 - RNA, 19 nt, Artificial Sequence
  Description of Artificial Sequence: Synthetic oligonucleotide
auuuacccagacuguagug

SEQ ID NO: 544439 - RNA, 19 nt, Artificial Sequence
  Description of Artificial Sequence: Synthetic oligonucleotide
caccauuuaaaucucuuca

SEQ ID NO: 544440 - RNA, 19 nt, Artificial Sequence
  Description of Artificial Sequence: Synthetic oligonucleotide
aauggugacuaaucugaua

SEQ ID NO: 544441 - RNA, 19 nt, Artificial Sequence
  Description of Artificial Sequence: Synthetic oligonucleotide
uaggauaauucauucuuuu

SEQ ID NO: 544442 - RNA, 19 nt, Artificial Sequence
  Description of Artificial Sequence: Synthetic oligonucleotide
caggcacgaaucuaauggg

SEQ ID NO: 544443 - RNA, 19 nt, Artificial Sequence
  Description of Artificial Sequence: Synthetic oligonucleotide
ucugaugauuucauaccau

SEQ ID NO: 544444 - RNA, 19 nt, Artificial Sequence
  Description of Artificial Sequence: Synthetic oligonucleotide
acugccauacagaacuuuc

SEQ ID NO: 544445 - RNA, 19 nt, Artificial Sequence
  Description of Artificial Sequence: Synthetic oligonucleotide
agaugaacauggaucacag

SEQ ID NO: 544446 - RNA, 19 nt, Artificial Sequence
  Description of Artificial Sequence: Synthetic oligonucleotide
cagcccuugauaacuagag

SEQ ID NO: 544447 - RNA, 19 nt, Artificial Sequence
  Description of Artificial Sequence: Synthetic oligonucleotide
uauagcccauagcauuacc

SEQ ID NO: 544448 - RNA, 19 nt, Artificial Sequence
  Description of Artificial Sequence: Synthetic oligonucleotide
aucgaguauuuacuggcug

SEQ ID NO: 544449 - RNA, 19 nt, Artificial Sequence
  Description of Artificial Sequence: Synthetic oligonucleotide
cugggaaaguuaccaagcc

SEQ ID NO: 544450 - RNA, 19 nt, Artificial Sequence
  Description of Artificial Sequence: Synthetic oligonucleotide
augcuuuagggccaucucu

SEQ ID NO: 544451 - RNA, 19 nt, Artificial Sequence
  Description of Artificial Sequence: Synthetic oligonucleotide
augaauacacugaagcccu

SEQ ID NO: 544452 - RNA, 19 nt, Artificial Sequence
  Description of Artificial Sequence: Synthetic oligonucleotide
uggaucacagacacaccca

SEQ ID NO: 544453 - RNA, 19 nt, Artificial Sequence
  Description of Artificial Sequence: Synthetic oligonucleotide
auguaggauaauucauucu

SEQ ID NO: 544454 - RNA, 19 nt, Artificial Sequence
  Description of Artificial Sequence: Synthetic oligonucleotide
uguugggaacuaauuuacu

SEQ ID NO: 544455 - RNA, 19 nt, Artificial Sequence
  Description of Artificial Sequence: Synthetic oligonucleotide
auuaauuaugcagcaugcu

SEQ ID NO: 544456 - RNA, 19 nt, Artificial Sequence
  Description of Artificial Sequence: Synthetic oligonucleotide
aucuauucugguucuucug

SEQ ID NO: 544457 - RNA, 19 nt, Artificial Sequence
  Description of Artificial Sequence: Synthetic oligonucleotide
acuagagcauuagaaauaa

SEQ ID NO: 544458 - RNA, 19 nt, Artificial Sequence
  Description of Artificial Sequence: Synthetic oligonucleotide
uccaaucuauucugguucu

SEQ ID NO: 544459 - RNA, 19 nt, Artificial Sequence
  Description of Artificial Sequence: Synthetic oligonucleotide
acagaacuuuccaugaugu

SEQ ID NO: 544460 - RNA, 19 nt, Artificial Sequence
  Description of Artificial Sequence: Synthetic oligonucleotide
agccuaaccaguaagucca

SEQ ID NO: 544461 - RNA, 19 nt, Artificial Sequence
  Description of Artificial Sequence: Synthetic oligonucleotide
aaggaucaccaguuagcca

SEQ ID NO: 544462 - RNA, 19 nt, Artificial Sequence
  Description of Artificial Sequence: Synthetic oligonucleotide
ucuaaugggcauugcugcu

SEQ ID NO: 544463 - RNA, 19 nt, Artificial Sequence
  Description of Artificial Sequence: Synthetic oligonucleotide
ucuagaguacugccauaca

SEQ ID NO: 544464 - RNA, 19 nt, Artificial Sequence
  Description of Artificial Sequence: Synthetic oligonucleotide
acucacaaucuuucguucu

SEQ ID NO: 544465 - RNA, 19 nt, Artificial Sequence
  Description of Artificial Sequence: Synthetic oligonucleotide
aacuauuuacuagcauacu

SEQ ID NO: 544466 - RNA, 19 nt, Artificial Sequence
  Description of Artificial Sequence: Synthetic oligonucleotide
ugcagacucacagucuuug

SEQ ID NO: 544467 - RNA, 19 nt, Artificial Sequence
  Description of Artificial Sequence: Synthetic oligonucleotide
uuaccaagccuaaccagua

SEQ ID NO: 544468 - RNA, 19 nt, Artificial Sequence
  Description of Artificial Sequence: Synthetic oligonucleotide
gugcaguuauuauuuaauc

SEQ ID NO: 544469 - RNA, 19 nt, Artificial Sequence
  Description of Artificial Sequence: Synthetic oligonucleotide
aguguagguucauugguuu

SEQ ID NO: 544470 - RNA, 19 nt, Artificial Sequence
  Description of Artificial Sequence: Synthetic oligonucleotide
cugguacuauaaaauggug

SEQ ID NO: 544471 - RNA, 19 nt, Artificial Sequence
  Description of Artificial Sequence: Synthetic oligonucleotide
ucauaugucuuagauuaua

SEQ ID NO: 544472 - RNA, 19 nt, Artificial Sequence
  Description of Artificial Sequence: Synthetic oligonucleotide
ugaacaacacaggaaggau

SEQ ID NO: 544473 - RNA, 19 nt, Artificial Sequence
  Description of Artificial Sequence: Synthetic oligonucleotide
uguuaugguuagcucuuaa

SEQ ID NO: 544474 - RNA, 19 nt, Artificial Sequence
  Description of Artificial Sequence: Synthetic oligonucleotide
auccacuuaacuauuuacu

SEQ ID NO: 544475 - RNA, 19 nt, Artificial Sequence
  Description of Artificial Sequence: Synthetic oligonucleotide
uagcccauagcauuaccaa

SEQ ID NO: 544476 - RNA, 19 nt, Artificial Sequence
  Description of Artificial Sequence: Synthetic oligonucleotide
aguuaguaucaauuacaaa

SEQ ID NO: 544477 - RNA, 19 nt, Artificial Sequence
  Description of Artificial Sequence: Synthetic oligonucleotide
aggcacgaaucuaaugggc

SEQ ID NO: 544478 - RNA, 19 nt, Artificial Sequence
  Description of Artificial Sequence: Synthetic oligonucleotide
agugcaguuauuauuuaau

SEQ ID NO: 544479 - RNA, 19 nt, Artificial Sequence
  Description of Artificial Sequence: Synthetic oligonucleotide
aaucgaguauuuacuggcu

SEQ ID NO: 544480 - RNA, 19 nt, Artificial Sequence
  Description of Artificial Sequence: Synthetic oligonucleotide
auaauuuacccagacugua

SEQ ID NO: 544481 - RNA, 19 nt, Artificial Sequence
  Description of Artificial Sequence: Synthetic oligonucleotide
uacucacaaucuuucguuc

SEQ ID NO: 544482 - RNA, 19 nt, Artificial Sequence
  Description of Artificial Sequence: Synthetic oligonucleotide
uuaggauuauuugcaaguu

SEQ ID NO: 544483 - RNA, 19 nt, Artificial Sequence
  Description of Artificial Sequence: Synthetic oligonucleotide
ugacaauucugaugauuuc

SEQ ID NO: 544484 - RNA, 19 nt, Artificial Sequence
  Description of Artificial Sequence: Synthetic oligonucleotide
ucuauggcuuaaucugagu

SEQ ID NO: 544485 - RNA, 19 nt, Artificial Sequence
  Description of Artificial Sequence: Synthetic oligonucleotide
cuaguagcuuguugggaac

SEQ ID NO: 544486 - RNA, 19 nt, Artificial Sequence
  Description of Artificial Sequence: Synthetic oligonucleotide
gauaacaaacuuacugucu

SEQ ID NO: 544487 - RNA, 19 nt, Artificial Sequence
  Description of Artificial Sequence: Synthetic oligonucleotide
aucaggcacgaaucuaaug

SEQ ID NO: 544488 - RNA, 19 nt, Artificial Sequence
  Description of Artificial Sequence: Synthetic oligonucleotide
cuugauaacuagagcauua

SEQ ID NO: 544489 - RNA, 19 nt, Artificial Sequence
  Description of Artificial Sequence: Synthetic oligonucleotide
aguuagccacacugcacag

SEQ ID NO: 544490 - RNA, 19 nt, Artificial Sequence
  Description of Artificial Sequence: Synthetic oligonucleotide
uucucuaagccacguuuau

SEQ ID NO: 544491 - RNA, 19 nt, Artificial Sequence
  Description of Artificial Sequence: Synthetic oligonucleotide
uaaaaugggcuugacucua

SEQ ID NO: 544492 - RNA, 19 nt, Artificial Sequence
  Description of Artificial Sequence: Synthetic oligonucleotide
caguuaguaucaauuacaa

SEQ ID NO: 544493 - RNA, 19 nt, Artificial Sequence
  Description of Artificial Sequence: Synthetic oligonucleotide
uagcauuaccaaucuggcu

SEQ ID NO: 544494 - RNA, 19 nt, Artificial Sequence
  Description of Artificial Sequence: Synthetic oligonucleotide
ucauucuuauauagcccau

SEQ ID NO: 544495 - RNA, 19 nt, Artificial Sequence
  Description of Artificial Sequence: Synthetic oligonucleotide
auuccuguagauagaccuc

SEQ ID NO: 544496 - RNA, 19 nt, Artificial Sequence
  Description of Artificial Sequence: Synthetic oligonucleotide
aagugacuuacuaggcuca

SEQ ID NO: 544497 - RNA, 19 nt, Artificial Sequence
  Description of Artificial Sequence: Synthetic oligonucleotide
ucacaacaggauccguaga

SEQ ID NO: 544498 - RNA, 19 nt, Artificial Sequence
  Description of Artificial Sequence: Synthetic oligonucleotide
cuaacagucauaguauuua

SEQ ID NO: 544499 - RNA, 19 nt, Artificial Sequence
  Description of Artificial Sequence: Synthetic oligonucleotide
caguuagccacacugcaca

SEQ ID NO: 544500 - RNA, 19 nt, Artificial Sequence
  Description of Artificial Sequence: Synthetic oligonucleotide
acuuaacuauuuacuagca

SEQ ID NO: 544501 - RNA, 19 nt, Artificial Sequence
  Description of Artificial Sequence: Synthetic oligonucleotide
ugccauagugcaguuauua

SEQ ID NO: 544502 - RNA, 19 nt, Artificial Sequence
  Description of Artificial Sequence: Synthetic oligonucleotide
auagcccauagcauuacca

SEQ ID NO: 544503 - RNA, 19 nt, Artificial Sequence
  Description of Artificial Sequence: Synthetic oligonucleotide
cuauuuacuagcauacuuu

SEQ ID NO: 544504 - RNA, 19 nt, Artificial Sequence
  Description of Artificial Sequence: Synthetic oligonucleotide
acgaaucuaaugggcauug

SEQ ID NO: 544505 - RNA, 19 nt, Artificial Sequence
  Description of Artificial Sequence: Synthetic oligonucleotide
auucuaaguguuaggauua

SEQ ID NO: 544506 - RNA, 19 nt, Artificial Sequence
  Description of Artificial Sequence: Synthetic oligonucleotide
acaauuuaucaagcagucu

SEQ ID NO: 544507 - RNA, 19 nt, Artificial Sequence
  Description of Artificial Sequence: Synthetic oligonucleotide
gcaguuauuauuuaaucau

SEQ ID NO: 544508 - RNA, 19 nt, Artificial Sequence
  Description of Artificial Sequence: Synthetic oligonucleotide
gacucacagucuuugauau

SEQ ID NO: 544509 - RNA, 19 nt, Artificial Sequence
  Description of Artificial Sequence: Synthetic oligonucleotide
gaauucuaaguguuaggau

SEQ ID NO: 544510 - RNA, 19 nt, Artificial Sequence
  Description of Artificial Sequence: Synthetic oligonucleotide
caaucuauucugguucuuc

SEQ ID NO: 544511 - RNA, 19 nt, Artificial Sequence
  Description of Artificial Sequence: Synthetic oligonucleotide
cagucuauaucauccaugu

SEQ ID NO: 544512 - RNA, 19 nt, Artificial Sequence
  Description of Artificial Sequence: Synthetic oligonucleotide
guguagguucauugguuug

SEQ ID NO: 544513 - RNA, 19 nt, Artificial Sequence
  Description of Artificial Sequence: Synthetic oligonucleotide
cuauaucuccacuccaaaa

SEQ ID NO: 544514 - RNA, 19 nt, Artificial Sequence
  Description of Artificial Sequence: Synthetic oligonucleotide
aagccacguuuauauaaua

SEQ ID NO: 544515 - RNA, 19 nt, Artificial Sequence
  Description of Artificial Sequence: Synthetic oligonucleotide
gucuauggcuuaaucugag

SEQ ID NO: 544516 - RNA, 19 nt, Artificial Sequence
  Description of Artificial Sequence: Synthetic oligonucleotide
caucuucagccuacacucc

SEQ ID NO: 544517 - RNA, 19 nt, Artificial Sequence
  Description of Artificial Sequence: Synthetic oligonucleotide
uaauucucuaagccacguu

SEQ ID NO: 544518 - RNA, 19 nt, Artificial Sequence
  Description of Artificial Sequence: Synthetic oligonucleotide
cuguagugacauuaaaaua

SEQ ID NO: 544519 - RNA, 19 nt, Artificial Sequence
  Description of Artificial Sequence: Synthetic oligonucleotide
caguuauuauuuaaucaua

SEQ ID NO: 544520 - RNA, 19 nt, Artificial Sequence
  Description of Artificial Sequence: Synthetic oligonucleotide
cucaugugagucauacaga

SEQ ID NO: 544521 - RNA, 19 nt, Artificial Sequence
  Description of Artificial Sequence: Synthetic oligonucleotide
agucuauggcuuaaucuga

SEQ ID NO: 544522 - RNA, 19 nt, Artificial Sequence
  Description of Artificial Sequence: Synthetic oligonucleotide
aagaucaggcacgaaucua

SEQ ID NO: 544523 - RNA, 19 nt, Artificial Sequence
  Description of Artificial Sequence: Synthetic oligonucleotide
uccuguagauagaccucca

SEQ ID NO: 544524 - RNA, 19 nt, Artificial Sequence
  Description of Artificial Sequence: Synthetic oligonucleotide
acggucaccccgccucacc

SEQ ID NO: 544525 - RNA, 19 nt, Artificial Sequence
  Description of Artificial Sequence: Synthetic oligonucleotide
auccaaaaggcaucauauu

SEQ ID NO: 544526 - RNA, 19 nt, Artificial Sequence
  Description of Artificial Sequence: Synthetic oligonucleotide
ggugacuaaucugauauaa

SEQ ID NO: 544527 - RNA, 19 nt, Artificial Sequence
  Description of Artificial Sequence: Synthetic oligonucleotide
agcccauagcauuaccaau

SEQ ID NO: 544528 - RNA, 19 nt, Artificial Sequence
  Description of Artificial Sequence: Synthetic oligonucleotide
cagacggucaccccgccuc

SEQ ID NO: 544529 - RNA, 19 nt, Artificial Sequence
  Description of Artificial Sequence: Synthetic oligonucleotide
cagcccuauaucuccacuc

SEQ ID NO: 544530 - RNA, 19 nt, Artificial Sequence
  Description of Artificial Sequence: Synthetic oligonucleotide
cucagcccuugauaacuag

SEQ ID NO: 544531 - RNA, 19 nt, Artificial Sequence
  Description of Artificial Sequence: Synthetic oligonucleotide
uaccaagccuaaccaguaa

SEQ ID NO: 544532 - RNA, 19 nt, Artificial Sequence
  Description of Artificial Sequence: Synthetic oligonucleotide
ugggcauugcugcuacaau

SEQ ID NO: 544533 - RNA, 19 nt, Artificial Sequence
  Description of Artificial Sequence: Synthetic oligonucleotide
gcaucauauuauuaaacgu

SEQ ID NO: 544534 - RNA, 19 nt, Artificial Sequence
  Description of Artificial Sequence: Synthetic oligonucleotide
ggagucuauggcuuaaucu

SEQ ID NO: 544535 - RNA, 19 nt, Artificial Sequence
  Description of Artificial Sequence: Synthetic oligonucleotide
auuaccaaucuggcugaug

SEQ ID NO: 544536 - RNA, 19 nt, Artificial Sequence
  Description of Artificial Sequence: Synthetic oligonucleotide
agugagaaauaaagcaguu

SEQ ID NO: 544537 - RNA, 19 nt, Artificial Sequence
  Description of Artificial Sequence: Synthetic oligonucleotide
gccacguuuauauaauaaa

SEQ ID NO: 544538 - RNA, 19 nt, Artificial Sequence
  Description of Artificial Sequence: Synthetic oligonucleotide
ccaugauuaauccacuuaa

SEQ ID NO: 544539 - RNA, 19 nt, Artificial Sequence
  Description of Artificial Sequence: Synthetic oligonucleotide
aaugggcauugcugcuaca

SEQ ID NO: 544540 - RNA, 19 nt, Artificial Sequence
  Description of Artificial Sequence: Synthetic oligonucleotide
ggaacaaugucagaauucu

SEQ ID NO: 544541 - RNA, 19 nt, Artificial Sequence
  Description of Artificial Sequence: Synthetic oligonucleotide
guuaugguuagcucuuaau

SEQ ID NO: 544542 - RNA, 19 nt, Artificial Sequence
  Description of Artificial Sequence: Synthetic oligonucleotide
ccacguuuauauaauaaaa

SEQ ID NO: 544543 - RNA, 19 nt, Artificial Sequence
  Description of Artificial Sequence: Synthetic oligonucleotide
ccugagaauuggaacauca

SEQ ID NO: 544544 - RNA, 19 nt, Artificial Sequence
  Description of Artificial Sequence: Synthetic oligonucleotide
guagugacauuaaaauacu

SEQ ID NO: 544545 - RNA, 19 nt, Artificial Sequence
  Description of Artificial Sequence: Synthetic oligonucleotide
cauuaacucaagcaugaau

SEQ ID NO: 544546 - RNA, 19 nt, Artificial Sequence
  Description of Artificial Sequence: Synthetic oligonucleotide
ucucuaagccacguuuaua

SEQ ID NO: 544547 - RNA, 19 nt, Artificial Sequence
  Description of Artificial Sequence: Synthetic oligonucleotide
agauuauacuggauuuaaa

SEQ ID NO: 544548 - RNA, 19 nt, Artificial Sequence
  Description of Artificial Sequence: Synthetic oligonucleotide
agccacguuuauauaauaa

SEQ ID NO: 544549 - RNA, 19 nt, Artificial Sequence
  Description of Artificial Sequence: Synthetic oligonucleotide
uggugacuaaucugauaua

SEQ ID NO: 544550 - RNA, 19 nt, Artificial Sequence
  Description of Artificial Sequence: Synthetic oligonucleotide
ucuaaguguuaggauuauu

SEQ ID NO: 544551 - RNA, 19 nt, Artificial Sequence
  Description of Artificial Sequence: Synthetic oligonucleotide
aguuagcaaggaaaagcau

SEQ ID NO: 544552 - RNA, 19 nt, Artificial Sequence
  Description of Artificial Sequence: Synthetic oligonucleotide
guaucacagaaugcuuuca

SEQ ID NO: 544553 - RNA, 19 nt, Artificial Sequence
  Description of Artificial Sequence: Synthetic oligonucleotide
cagacuguagugacauuaa

SEQ ID NO: 544554 - RNA, 19 nt, Artificial Sequence
  Description of Artificial Sequence: Synthetic oligonucleotide
ggcauugcugcuacaauga

SEQ ID NO: 544555 - RNA, 19 nt, Artificial Sequence
  Description of Artificial Sequence: Synthetic oligonucleotide
cuuaacuauuuacuagcau

SEQ ID NO: 544556 - RNA, 19 nt, Artificial Sequence
  Description of Artificial Sequence: Synthetic oligonucleotide
aucaccaguuagccacacu

SEQ ID NO: 544557 - RNA, 19 nt, Artificial Sequence
  Description of Artificial Sequence: Synthetic oligonucleotide
gacuuacuaggcucauucu

SEQ ID NO: 544558 - RNA, 19 nt, Artificial Sequence
  Description of Artificial Sequence: Synthetic oligonucleotide
caagcucaacucuuuuaaa

SEQ ID NO: 544559 - RNA, 19 nt, Artificial Sequence
  Description of Artificial Sequence: Synthetic oligonucleotide
ggauccguagacacagagc

SEQ ID NO: 544560 - RNA, 19 nt, Artificial Sequence
  Description of Artificial Sequence: Synthetic oligonucleotide
gcaggcaaauguaauagaa

SEQ ID NO: 544561 - RNA, 19 nt, Artificial Sequence
  Description of Artificial Sequence: Synthetic oligonucleotide
uucugaccuaacagucaua

SEQ ID NO: 544562 - RNA, 19 nt, Artificial Sequence
  Description of Artificial Sequence: Synthetic oligonucleotide
agugaagcuucaaguggga

SEQ ID NO: 544563 - RNA, 19 nt, Artificial Sequence
  Description of Artificial Sequence: Synthetic oligonucleotide
aaaccugaguuuggaugua

SEQ ID NO: 544564 - RNA, 19 nt, Artificial Sequence
  Description of Artificial Sequence: Synthetic oligonucleotide
agcuuguugggaacuaauu

SEQ ID NO: 544565 - RNA, 19 nt, Artificial Sequence
  Description of Artificial Sequence: Synthetic oligonucleotide
caagaucaggcacgaaucu

SEQ ID NO: 544566 - RNA, 19 nt, Artificial Sequence
  Description of Artificial Sequence: Synthetic oligonucleotide
cuguagauagaccuccaau

SEQ ID NO: 544567 - RNA, 19 nt, Artificial Sequence
  Description of Artificial Sequence: Synthetic oligonucleotide
gguuagcucuuaauuccug

SEQ ID NO: 544568 - RNA, 19 nt, Artificial Sequence
  Description of Artificial Sequence: Synthetic oligonucleotide
auaaagcuaguagcuuguu

SEQ ID NO: 544569 - RNA, 19 nt, Artificial Sequence
  Description of Artificial Sequence: Synthetic oligonucleotide
gggagucuauggcuuaauc

SEQ ID NO: 544570 - RNA, 19 nt, Artificial Sequence
  Description of Artificial Sequence: Synthetic oligonucleotide
guuagccacacugcacaga

SEQ ID NO: 544571 - RNA, 19 nt, Artificial Sequence
  Description of Artificial Sequence: Synthetic oligonucleotide
gucagaauucuaaguguua

SEQ ID NO: 544572 - RNA, 19 nt, Artificial Sequence
  Description of Artificial Sequence: Synthetic oligonucleotide
aucauaugucuuagauuau

SEQ ID NO: 544573 - RNA, 19 nt, Artificial Sequence
  Description of Artificial Sequence: Synthetic oligonucleotide
cugaguuuggauguaggau

SEQ ID NO: 544574 - RNA, 19 nt, Artificial Sequence
  Description of Artificial Sequence: Synthetic oligonucleotide
ucccaugauuugagaugaa

SEQ ID NO: 544575 - RNA, 19 nt, Artificial Sequence
  Description of Artificial Sequence: Synthetic oligonucleotide
agacggucaccccgccuca

SEQ ID NO: 544576 - RNA, 19 nt, Artificial Sequence
  Description of Artificial Sequence: Synthetic oligonucleotide
agacuuagugaagcuucaa

SEQ ID NO: 544577 - RNA, 19 nt, Artificial Sequence
  Description of Artificial Sequence: Synthetic oligonucleotide
guaggauaauucauucuuu

SEQ ID NO: 544578 - RNA, 19 nt, Artificial Sequence
  Description of Artificial Sequence: Synthetic oligonucleotide
cagucauaguauuuagcuu

SEQ ID NO: 544579 - RNA, 19 nt, Artificial Sequence
  Description of Artificial Sequence: Synthetic oligonucleotide
caguauaugcacugacuuu

SEQ ID NO: 544580 - RNA, 19 nt, Artificial Sequence
  Description of Artificial Sequence: Synthetic oligonucleotide
gugacuaaucugauauaau

SEQ ID NO: 544581 - RNA, 19 nt, Artificial Sequence
  Description of Artificial Sequence: Synthetic oligonucleotide
gggaacuaauuuacucaca

SEQ ID NO: 544582 - RNA, 19 nt, Artificial Sequence
  Description of Artificial Sequence: Synthetic oligonucleotide
cugcuacaaugaagaccac

SEQ ID NO: 544583 - RNA, 19 nt, Artificial Sequence
  Description of Artificial Sequence: Synthetic oligonucleotide
ccauagcauuaccaaucug

SEQ ID NO: 544584 - RNA, 19 nt, Artificial Sequence
  Description of Artificial Sequence: Synthetic oligonucleotide
gugagauaacaaacuuacu

SEQ ID NO: 544585 - RNA, 19 nt, Artificial Sequence
  Description of Artificial Sequence: Synthetic oligonucleotide
cuauaucauccaugucacu

SEQ ID NO: 544586 - RNA, 19 nt, Artificial Sequence
  Description of Artificial Sequence: Synthetic oligonucleotide
agcuugggcugggaaaguu

SEQ ID NO: 544587 - RNA, 19 nt, Artificial Sequence
  Description of Artificial Sequence: Synthetic oligonucleotide
gcuugacucuagaguacug

SEQ ID NO: 544588 - RNA, 19 nt, Artificial Sequence
  Description of Artificial Sequence: Synthetic oligonucleotide
agccgcagucuugucugcu

SEQ ID NO: 544589 - RNA, 19 nt, Artificial Sequence
  Description of Artificial Sequence: Synthetic oligonucleotide
cagucuugucugcucugaa

SEQ ID NO: 544590 - RNA, 19 nt, Artificial Sequence
  Description of Artificial Sequence: Synthetic oligonucleotide
gauagaccuccaaucucuu

SEQ ID NO: 544591 - RNA, 19 nt, Artificial Sequence
  Description of Artificial Sequence: Synthetic oligonucleotide
gccauagugcaguuauuau

SEQ ID NO: 544592 - RNA, 19 nt, Artificial Sequence
  Description of Artificial Sequence: Synthetic oligonucleotide
gacggucaccccgccucac

SEQ ID NO: 544593 - RNA, 19 nt, Artificial Sequence
  Description of Artificial Sequence: Synthetic oligonucleotide
caggauccguagacacaga

SEQ ID NO: 544594 - RNA, 19 nt, Artificial Sequence
  Description of Artificial Sequence: Synthetic oligonucleotide
cccuugauaacuagagcau

SEQ ID NO: 544595 - RNA, 19 nt, Artificial Sequence
  Description of Artificial Sequence: Synthetic oligonucleotide
cccauagcauuaccaaucu

SEQ ID NO: 544596 - RNA, 19 nt, Artificial Sequence
  Description of Artificial Sequence: Synthetic oligonucleotide
ggucaccccgccucaccuc

SEQ ID NO: 544597 - RNA, 19 nt, Artificial Sequence
  Description of Artificial Sequence: Synthetic oligonucleotide
cgaaucuaaugggcauugc

SEQ ID NO: 544598 - RNA, 19 nt, Artificial Sequence
  Description of Artificial Sequence: Synthetic oligonucleotide
cacgaaucuaaugggcauu

SEQ ID NO: 544599 - RNA, 19 nt, Artificial Sequence
  Description of Artificial Sequence: Synthetic oligonucleotide
ggcuguguacacaguauau

SEQ ID NO: 544600 - RNA, 19 nt, Artificial Sequence
  Description of Artificial Sequence: Synthetic oligonucleotide
cgccucaccucuagcauca

SEQ ID NO: 544601 - RNA, 19 nt, Artificial Sequence
  Description of Artificial Sequence: Synthetic oligonucleotide
ggccaugauuaauccacuu

SEQ ID NO: 544602 - RNA, 19 nt, Artificial Sequence
  Description of Artificial Sequence: Synthetic oligonucleotide
gugacuuacuaggcucauu

SEQ ID NO: 544603 - RNA, 19 nt, Artificial Sequence
  Description of Artificial Sequence: Synthetic oligonucleotide
cguagacacagagcccuca

SEQ ID NO: 544604 - RNA, 19 nt, Artificial Sequence
  Description of Artificial Sequence: Synthetic oligonucleotide
gucugcaguuuaacaccau

SEQ ID NO: 544605 - RNA, 19 nt, Artificial Sequence
  Description of Artificial Sequence: Synthetic oligonucleotide
cauuaccaaucuggcugau

SEQ ID NO: 544606 - RNA, 19 nt, Artificial Sequence
  Description of Artificial Sequence: Synthetic oligonucleotide
gcuucaagugggagucuau

SEQ ID NO: 544607 - RNA, 19 nt, Artificial Sequence
  Description of Artificial Sequence: Synthetic oligonucleotide
gccugccauagugcaguua

SEQ ID NO: 544608 - RNA, 19 nt, Artificial Sequence
  Description of Artificial Sequence: Synthetic oligonucleotide
ccaaucuauucugguucuu

SEQ ID NO: 544609 - RNA, 19 nt, Artificial Sequence
  Description of Artificial Sequence: Synthetic oligonucleotide
cggucaccccgccucaccu

SEQ ID NO: 544610 - RNA, 19 nt, Artificial Sequence
  Description of Artificial Sequence: Synthetic oligonucleotide
uuuguaaagagaauaauga

SEQ ID NO: 544611 - RNA, 19 nt, Artificial Sequence
  Description of Artificial Sequence: Synthetic oligonucleotide
aauauuagacaucagcaca

SEQ ID NO: 544612 - RNA, 19 nt, Artificial Sequence
  Description of Artificial Sequence: Synthetic oligonucleotide
aacaucucgaauuguauuc

SEQ ID NO: 544613 - RNA, 19 nt, Artificial Sequence
  Description of Artificial Sequence: Synthetic oligonucleotide
aaacuauuugacaacaugg

SEQ ID NO: 544614 - RNA, 19 nt, Artificial Sequence
  Description of Artificial Sequence: Synthetic oligonucleotide
aauaaggcaauucaugcca

SEQ ID NO: 544615 - RNA, 19 nt, Artificial Sequence
  Description of Artificial Sequence: Synthetic oligonucleotide
uuaacuauuaauccuuuug

SEQ ID NO: 544616 - RNA, 19 nt, Artificial Sequence
  Description of Artificial Sequence: Synthetic oligonucleotide
auagcaaucagguaagauc

SEQ ID NO: 544617 - RNA, 19 nt, Artificial Sequence
  Description of Artificial Sequence: Synthetic oligonucleotide
aaaccgucaagugugaggc

SEQ ID NO: 544618 - RNA, 19 nt, Artificial Sequence
  Description of Artificial Sequence: Synthetic oligonucleotide
cucuaauauacuuucaagg

SEQ ID NO: 544619 - RNA, 19 nt, Artificial Sequence
  Description of Artificial Sequence: Synthetic oligonucleotide
aaguauacuauuaaucaac

SEQ ID NO: 544620 - RNA, 19 nt, Artificial Sequence
  Description of Artificial Sequence: Synthetic oligonucleotide
ugauuguuaaacuaaaguc

SEQ ID NO: 544621 - RNA, 19 nt, Artificial Sequence
  Description of Artificial Sequence: Synthetic oligonucleotide
ucuaaguauacuauuaauc

SEQ ID NO: 544622 - RNA, 19 nt, Artificial Sequence
  Description of Artificial Sequence: Synthetic oligonucleotide
ugagcaauccccaaggcag

SEQ ID NO: 544623 - RNA, 19 nt, Artificial Sequence
  Description of Artificial Sequence: Synthetic oligonucleotide
uucuuaacuacucuaagga

SEQ ID NO: 544624 - RNA, 19 nt, Artificial Sequence
  Description of Artificial Sequence: Synthetic oligonucleotide
gacugaugaagcuaggugg

SEQ ID NO: 544625 - RNA, 19 nt, Artificial Sequence
  Description of Artificial Sequence: Synthetic oligonucleotide
ugaauaaggcaauucaugc

SEQ ID NO: 544626 - RNA, 19 nt, Artificial Sequence
  Description of Artificial Sequence: Synthetic oligonucleotide
ucgaauuguauucaaagga

SEQ ID NO: 544627 - RNA, 19 nt, Artificial Sequence
  Description of Artificial Sequence: Synthetic oligonucleotide
uuuaaaagauuuuagcaaa

SEQ ID NO: 544628 - RNA, 19 nt, Artificial Sequence
  Description of Artificial Sequence: Synthetic oligonucleotide
uauucgaagagcugcaagg

SEQ ID NO: 544629 - RNA, 19 nt, Artificial Sequence
  Description of Artificial Sequence: Synthetic oligonucleotide
uggaugcuaauaaagaggc

SEQ ID NO: 544630 - RNA, 19 nt, Artificial Sequence
  Description of Artificial Sequence: Synthetic oligonucleotide
aaaaccgucaagugugagg

SEQ ID NO: 544631 - RNA, 19 nt, Artificial Sequence
  Description of Artificial Sequence: Synthetic oligonucleotide
augcguuaagaacugaagc

SEQ ID NO: 544632 - RNA, 19 nt, Artificial Sequence
  Description of Artificial Sequence: Synthetic oligonucleotide
uguauucaaaggaggauag

SEQ ID NO: 544633 - RNA, 19 nt, Artificial Sequence
  Description of Artificial Sequence: Synthetic oligonucleotide
cuuguuucgauacuugucc

SEQ ID NO: 544634 - RNA, 19 nt, Artificial Sequence
  Description of Artificial Sequence: Synthetic oligonucleotide
guagacauuaacaagauga

SEQ ID NO: 544635 - RNA, 19 nt, Artificial Sequence
  Description of Artificial Sequence: Synthetic oligonucleotide
ugauaaguuucucaguagc

SEQ ID NO: 544636 - RNA, 19 nt, Artificial Sequence
  Description of Artificial Sequence: Synthetic oligonucleotide
uauacgauaggcauaaauu

SEQ ID NO: 544637 - RNA, 19 nt, Artificial Sequence
  Description of Artificial Sequence: Synthetic oligonucleotide
uuaaacuaaagucaccuua

SEQ ID NO: 544638 - RNA, 19 nt, Artificial Sequence
  Description of Artificial Sequence: Synthetic oligonucleotide
gaagauaccugucaaaguc

SEQ ID NO: 544639 - RNA, 19 nt, Artificial Sequence
  Description of Artificial Sequence: Synthetic oligonucleotide
ugugucucaguccacaggc

SEQ ID NO: 544640 - RNA, 19 nt, Artificial Sequence
  Description of Artificial Sequence: Synthetic oligonucleotide
aaaagauuccaacccuuag

SEQ ID NO: 544641 - RNA, 19 nt, Artificial Sequence
  Description of Artificial Sequence: Synthetic oligonucleotide
aauagauaggaauucugaa

SEQ ID NO: 544642 - RNA, 19 nt, Artificial Sequence
  Description of Artificial Sequence: Synthetic oligonucleotide
uucaaaggaggauagaguc

SEQ ID NO: 544643 - RNA, 19 nt, Artificial Sequence
  Description of Artificial Sequence: Synthetic oligonucleotide
auuaucagugauaaguuuc

SEQ ID NO: 544644 - RNA, 19 nt, Artificial Sequence
  Description of Artificial Sequence: Synthetic oligonucleotide
aaugcauuccgauuggcaa

SEQ ID NO: 544645 - RNA, 19 nt, Artificial Sequence
  Description of Artificial Sequence: Synthetic oligonucleotide
aguuacacuacauuaauuu

SEQ ID NO: 544646 - RNA, 19 nt, Artificial Sequence
  Description of Artificial Sequence: Synthetic oligonucleotide
ucaaaggaggauagagucg

SEQ ID NO: 544647 - RNA, 19 nt, Artificial Sequence
  Description of Artificial Sequence: Synthetic oligonucleotide
aguaaaaguucagcuaugc

SEQ ID NO: 544648 - RNA, 19 nt, Artificial Sequence
  Description of Artificial Sequence: Synthetic oligonucleotide
acgaaaugcauuccgauug

SEQ ID NO: 544649 - RNA, 19 nt, Artificial Sequence
  Description of Artificial Sequence: Synthetic oligonucleotide
uauaauggaucuugaagca

SEQ ID NO: 544650 - RNA, 19 nt, Artificial Sequence
  Description of Artificial Sequence: Synthetic oligonucleotide
uuucaaugaaacaucucga

SEQ ID NO: 544651 - RNA, 19 nt, Artificial Sequence
  Description of Artificial Sequence: Synthetic oligonucleotide
gaauuguauucaaaggagg

SEQ ID NO: 544652 - RNA, 19 nt, Artificial Sequence
  Description of Artificial Sequence: Synthetic oligonucleotide
ucaagugugaggcuuacuc

SEQ ID NO: 544653 - RNA, 19 nt, Artificial Sequence
  Description of Artificial Sequence: Synthetic oligonucleotide
uauucuaaguauacuauua

SEQ ID NO: 544654 - RNA, 19 nt, Artificial Sequence
  Description of Artificial Sequence: Synthetic oligonucleotide
ugcguuaagaacugaagca

SEQ ID NO: 544655 - RNA, 19 nt, Artificial Sequence
  Description of Artificial Sequence: Synthetic oligonucleotide
uuacacuacauuaauuuau

SEQ ID NO: 544656 - RNA, 19 nt, Artificial Sequence
  Description of Artificial Sequence: Synthetic oligonucleotide
uuuugagucaaccaaccau

SEQ ID NO: 544657 - RNA, 19 nt, Artificial Sequence
  Description of Artificial Sequence: Synthetic oligonucleotide
ugaaguuacacuacauuaa

SEQ ID NO: 544658 - RNA, 19 nt, Artificial Sequence
  Description of Artificial Sequence: Synthetic oligonucleotide
cucgaauuguauucaaagg

SEQ ID NO: 544659 - RNA, 19 nt, Artificial Sequence
  Description of Artificial Sequence: Synthetic oligonucleotide
aaauagauaggaauucuga

SEQ ID NO: 544660 - RNA, 19 nt, Artificial Sequence
  Description of Artificial Sequence: Synthetic oligonucleotide
gaauaaggcaauucaugcc

SEQ ID NO: 544661 - RNA, 19 nt, Artificial Sequence
  Description of Artificial Sequence: Synthetic oligonucleotide
uucaagaucuuauuaguaa

SEQ ID NO: 544662 - RNA, 19 nt, Artificial Sequence
  Description of Artificial Sequence: Synthetic oligonucleotide
ucuaugcuuuaauaaaucu

SEQ ID NO: 544663 - RNA, 19 nt, Artificial Sequence
  Description of Artificial Sequence: Synthetic oligonucleotide
acucuaauauacuuucaag

SEQ ID NO: 544664 - RNA, 19 nt, Artificial Sequence
  Description of Artificial Sequence: Synthetic oligonucleotide
agugaugugucucagucca

SEQ ID NO: 544665 - RNA, 19 nt, Artificial Sequence
  Description of Artificial Sequence: Synthetic oligonucleotide
aagaugaaguuacacuaca

SEQ ID NO: 544666 - RNA, 19 nt, Artificial Sequence
  Description of Artificial Sequence: Synthetic oligonucleotide
uuugagucaaccaaccaua

SEQ ID NO: 544667 - RNA, 19 nt, Artificial Sequence
  Description of Artificial Sequence: Synthetic oligonucleotide
cacacuauaaaagagcuuc

SEQ ID NO: 544668 - RNA, 19 nt, Artificial Sequence
  Description of Artificial Sequence: Synthetic oligonucleotide
uguagcacuguucugcaga

SEQ ID NO: 544669 - RNA, 19 nt, Artificial Sequence
  Description of Artificial Sequence: Synthetic oligonucleotide
aauuguauucaaaggagga

SEQ ID NO: 544670 - RNA, 19 nt, Artificial Sequence
  Description of Artificial Sequence: Synthetic oligonucleotide
aggaggauagagucggccc

SEQ ID NO: 544671 - RNA, 19 nt, Artificial Sequence
  Description of Artificial Sequence: Synthetic oligonucleotide
auaccugucaaagucagag

SEQ ID NO: 544672 - RNA, 19 nt, Artificial Sequence
  Description of Artificial Sequence: Synthetic oligonucleotide
uuauucgaagagcugcaag

SEQ ID NO: 544673 - RNA, 19 nt, Artificial Sequence
  Description of Artificial Sequence: Synthetic oligonucleotide
uccgucagucaccacaacg

SEQ ID NO: 544674 - RNA, 19 nt, Artificial Sequence
  Description of Artificial Sequence: Synthetic oligonucleotide
acccuuagaaauuacaaaa

SEQ ID NO: 544675 - RNA, 19 nt, Artificial Sequence
  Description of Artificial Sequence: Synthetic oligonucleotide
aguuuacccacagggaugc

SEQ ID NO: 544676 - RNA, 19 nt, Artificial Sequence
  Description of Artificial Sequence: Synthetic oligonucleotide
aucagcacacuauaaaaga

SEQ ID NO: 544677 - RNA, 19 nt, Artificial Sequence
  Description of Artificial Sequence: Synthetic oligonucleotide
auagauaggaauucugaau

SEQ ID NO: 544678 - RNA, 19 nt, Artificial Sequence
  Description of Artificial Sequence: Synthetic oligonucleotide
ucaagaucuuauuaguaaa

SEQ ID NO: 544679 - RNA, 19 nt, Artificial Sequence
  Description of Artificial Sequence: Synthetic oligonucleotide
uuuacugacugacuuuggu

SEQ ID NO: 544680 - RNA, 19 nt, Artificial Sequence
  Description of Artificial Sequence: Synthetic oligonucleotide
uacucuaauauacuuucaa

SEQ ID NO: 544681 - RNA, 19 nt, Artificial Sequence
  Description of Artificial Sequence: Synthetic oligonucleotide
aacuacucuaaggaccugg

SEQ ID NO: 544682 - RNA, 19 nt, Artificial Sequence
  Description of Artificial Sequence: Synthetic oligonucleotide
gaggcuuacucuaauauac

SEQ ID NO: 544683 - RNA, 19 nt, Artificial Sequence
  Description of Artificial Sequence: Synthetic oligonucleotide
gacauuaacaagaugaagu

SEQ ID NO: 544684 - RNA, 19 nt, Artificial Sequence
  Description of Artificial Sequence: Synthetic oligonucleotide
uggccaugcguuaagaacu

SEQ ID NO: 544685 - RNA, 19 nt, Artificial Sequence
  Description of Artificial Sequence: Synthetic oligonucleotide
agaagcacgucccuuaacu

SEQ ID NO: 544686 - RNA, 19 nt, Artificial Sequence
  Description of Artificial Sequence: Synthetic oligonucleotide
auacgauaggcauaaauuu

SEQ ID NO: 544687 - RNA, 19 nt, Artificial Sequence
  Description of Artificial Sequence: Synthetic oligonucleotide
guggaugcuaauaaagagg

SEQ ID NO: 544688 - RNA, 19 nt, Artificial Sequence
  Description of Artificial Sequence: Synthetic oligonucleotide
gaaauagauaggaauucug

SEQ ID NO: 544689 - RNA, 19 nt, Artificial Sequence
  Description of Artificial Sequence: Synthetic oligonucleotide
ugguuauucgaagagcugc

SEQ ID NO: 544690 - RNA, 19 nt, Artificial Sequence
  Description of Artificial Sequence: Synthetic oligonucleotide
gauuccaacccuuagaaau

SEQ ID NO: 544691 - RNA, 19 nt, Artificial Sequence
  Description of Artificial Sequence: Synthetic oligonucleotide
ucaaugaaacaucucgaau

SEQ ID NO: 544692 - RNA, 19 nt, Artificial Sequence
  Description of Artificial Sequence: Synthetic oligonucleotide
uaagugaaacaaaaccguc

SEQ ID NO: 544693 - RNA, 19 nt, Artificial Sequence
  Description of Artificial Sequence: Synthetic oligonucleotide
aaacaucucgaauuguauu

SEQ ID NO: 544694 - RNA, 19 nt, Artificial Sequence
  Description of Artificial Sequence: Synthetic oligonucleotide
ugcccaucccauuacaacc

SEQ ID NO: 544695 - RNA, 19 nt, Artificial Sequence
  Description of Artificial Sequence: Synthetic oligonucleotide
uagaauacgcucuccguca

SEQ ID NO: 544696 - RNA, 19 nt, Artificial Sequence
  Description of Artificial Sequence: Synthetic oligonucleotide
gacuggaucaaaaggacug

SEQ ID NO: 544697 - RNA, 19 nt, Artificial Sequence
  Description of Artificial Sequence: Synthetic oligonucleotide
agauuuuagcaaaaugguc

SEQ ID NO: 544698 - RNA, 19 nt, Artificial Sequence
  Description of Artificial Sequence: Synthetic oligonucleotide
ucguggaugcuaauaaaga

SEQ ID NO: 544699 - RNA, 19 nt, Artificial Sequence
  Description of Artificial Sequence: Synthetic oligonucleotide
uagacauuaacaagaugaa

SEQ ID NO: 544700 - RNA, 19 nt, Artificial Sequence
  Description of Artificial Sequence: Synthetic oligonucleotide
auauacgauaggcauaaau

SEQ ID NO: 544701 - RNA, 19 nt, Artificial Sequence
  Description of Artificial Sequence: Synthetic oligonucleotide
gauaugaccucagcagugg

SEQ ID NO: 544702 - RNA, 19 nt, Artificial Sequence
  Description of Artificial Sequence: Synthetic oligonucleotide
acugaugaagcuagguggc

SEQ ID NO: 544703 - RNA, 19 nt, Artificial Sequence
  Description of Artificial Sequence: Synthetic oligonucleotide
caugcguuaagaacugaag

SEQ ID NO: 544704 - RNA, 19 nt, Artificial Sequence
  Description of Artificial Sequence: Synthetic oligonucleotide
ucauauucaggaccucuca

SEQ ID NO: 544705 - RNA, 19 nt, Artificial Sequence
  Description of Artificial Sequence: Synthetic oligonucleotide
agggcaguugguuuuaucu

SEQ ID NO: 544706 - RNA, 19 nt, Artificial Sequence
  Description of Artificial Sequence: Synthetic oligonucleotide
ucgauacuuguccaggaga

SEQ ID NO: 544707 - RNA, 19 nt, Artificial Sequence
  Description of Artificial Sequence: Synthetic oligonucleotide
acauuaacaagaugaaguu

SEQ ID NO: 544708 - RNA, 19 nt, Artificial Sequence
  Description of Artificial Sequence: Synthetic oligonucleotide
cugccgcuggcaaagaucg

SEQ ID NO: 544709 - RNA, 19 nt, Artificial Sequence
  Description of Artificial Sequence: Synthetic oligonucleotide
agaguaagugaaacaaaac

SEQ ID NO: 544710 - RNA, 19 nt, Artificial Sequence
  Description of Artificial Sequence: Synthetic oligonucleotide
uucgauacuuguccaggag

SEQ ID NO: 544711 - RNA, 19 nt, Artificial Sequence
  Description of Artificial Sequence: Synthetic oligonucleotide
caugcaagacccacagugg

SEQ ID NO: 544712 - RNA, 19 nt, Artificial Sequence
  Description of Artificial Sequence: Synthetic oligonucleotide
cuaggugcuuaucugacac

SEQ ID NO: 544713 - RNA, 19 nt, Artificial Sequence
  Description of Artificial Sequence: Synthetic oligonucleotide
uaauccuuuugagucaacc

SEQ ID NO: 544714 - RNA, 19 nt, Artificial Sequence
  Description of Artificial Sequence: Synthetic oligonucleotide
aagugaaacaaaaccguca

SEQ ID NO: 544715 - RNA, 19 nt, Artificial Sequence
  Description of Artificial Sequence: Synthetic oligonucleotide
uccuuuugagucaaccaac

SEQ ID NO: 544716 - RNA, 19 nt, Artificial Sequence
  Description of Artificial Sequence: Synthetic oligonucleotide
augcaagacccacaguggg

SEQ ID NO: 544717 - RNA, 19 nt, Artificial Sequence
  Description of Artificial Sequence: Synthetic oligonucleotide
uguuucgauacuuguccag

SEQ ID NO: 544718 - RNA, 19 nt, Artificial Sequence
  Description of Artificial Sequence: Synthetic oligonucleotide
gaugcuaauaaagaggccu

SEQ ID NO: 544719 - RNA, 19 nt, Artificial Sequence
  Description of Artificial Sequence: Synthetic oligonucleotide
uuagcaaaauggucaagaa

SEQ ID NO: 544720 - RNA, 19 nt, Artificial Sequence
  Description of Artificial Sequence: Synthetic oligonucleotide
uuguccaggagacgaaaug

SEQ ID NO: 544721 - RNA, 19 nt, Artificial Sequence
  Description of Artificial Sequence: Synthetic oligonucleotide
augcccaucccauuacaac

SEQ ID NO: 544722 - RNA, 19 nt, Artificial Sequence
  Description of Artificial Sequence: Synthetic oligonucleotide
uacgauaggcauaaauuuu

SEQ ID NO: 544723 - RNA, 19 nt, Artificial Sequence
  Description of Artificial Sequence: Synthetic oligonucleotide
uaaaagauuccaacccuua

SEQ ID NO: 544724 - RNA, 19 nt, Artificial Sequence
  Description of Artificial Sequence: Synthetic oligonucleotide
cuagaauacgcucuccguc

SEQ ID NO: 544725 - RNA, 19 nt, Artificial Sequence
  Description of Artificial Sequence: Synthetic oligonucleotide
auccuuuugagucaaccaa

SEQ ID NO: 544726 - RNA, 19 nt, Artificial Sequence
  Description of Artificial Sequence: Synthetic oligonucleotide
ugggaguauauacgauagg

SEQ ID NO: 544727 - RNA, 19 nt, Artificial Sequence
  Description of Artificial Sequence: Synthetic oligonucleotide
ugcaauacuuguuucgaua

SEQ ID NO: 544728 - RNA, 19 nt, Artificial Sequence
  Description of Artificial Sequence: Synthetic oligonucleotide
agauaggaauucugaaucu

SEQ ID NO: 544729 - RNA, 19 nt, Artificial Sequence
  Description of Artificial Sequence: Synthetic oligonucleotide
aauagcaaucagguaagau

SEQ ID NO: 544730 - RNA, 19 nt, Artificial Sequence
  Description of Artificial Sequence: Synthetic oligonucleotide
aaugugcccuuugucgugg

SEQ ID NO: 544731 - RNA, 19 nt, Artificial Sequence
  Description of Artificial Sequence: Synthetic oligonucleotide
uuuguagcacuguucugca

SEQ ID NO: 544732 - RNA, 19 nt, Artificial Sequence
  Description of Artificial Sequence: Synthetic oligonucleotide
auaacgaucaggugagcaa

SEQ ID NO: 544733 - RNA, 19 nt, Artificial Sequence
  Description of Artificial Sequence: Synthetic oligonucleotide
aagaucgcacgccccuugg

SEQ ID NO: 544734 - RNA, 19 nt, Artificial Sequence
  Description of Artificial Sequence: Synthetic oligonucleotide
gaguauauacgauaggcau

SEQ ID NO: 544735 - RNA, 19 nt, Artificial Sequence
  Description of Artificial Sequence: Synthetic oligonucleotide
aagaucuuauuaguaaauu

SEQ ID NO: 544736 - RNA, 19 nt, Artificial Sequence
  Description of Artificial Sequence: Synthetic oligonucleotide
aguauacuauuaaucaaca

SEQ ID NO: 544737 - RNA, 19 nt, Artificial Sequence
  Description of Artificial Sequence: Synthetic oligonucleotide
auaaauaaccagaguaagu

SEQ ID NO: 544738 - RNA, 19 nt, Artificial Sequence
  Description of Artificial Sequence: Synthetic oligonucleotide
uucagcuaugccuaaguuu

SEQ ID NO: 544739 - RNA, 19 nt, Artificial Sequence
  Description of Artificial Sequence: Synthetic oligonucleotide
uucuaggugcuuaucugac

SEQ ID NO: 544740 - RNA, 19 nt, Artificial Sequence
  Description of Artificial Sequence: Synthetic oligonucleotide
ggagacgaaaugcauuccg

SEQ ID NO: 544741 - RNA, 19 nt, Artificial Sequence
  Description of Artificial Sequence: Synthetic oligonucleotide
uggauuacucaaagcaaaa

SEQ ID NO: 544742 - RNA, 19 nt, Artificial Sequence
  Description of Artificial Sequence: Synthetic oligonucleotide
gugauaaguuucucaguag

SEQ ID NO: 544743 - RNA, 19 nt, Artificial Sequence
  Description of Artificial Sequence: Synthetic oligonucleotide
uugguuauucgaagagcug

SEQ ID NO: 544744 - RNA, 19 nt, Artificial Sequence
  Description of Artificial Sequence: Synthetic oligonucleotide
acuuguuucgauacuuguc

SEQ ID NO: 544745 - RNA, 19 nt, Artificial Sequence
  Description of Artificial Sequence: Synthetic oligonucleotide
ugacuggaucaaaaggacu

SEQ ID NO: 544746 - RNA, 19 nt, Artificial Sequence
  Description of Artificial Sequence: Synthetic oligonucleotide
accagaguaagugaaacaa

SEQ ID NO: 544747 - RNA, 19 nt, Artificial Sequence
  Description of Artificial Sequence: Synthetic oligonucleotide
gaugugucucaguccacag

SEQ ID NO: 544748 - RNA, 19 nt, Artificial Sequence
  Description of Artificial Sequence: Synthetic oligonucleotide
gggaguauauacgauaggc

SEQ ID NO: 544749 - RNA, 19 nt, Artificial Sequence
  Description of Artificial Sequence: Synthetic oligonucleotide
gauaaguuucucaguagca

SEQ ID NO: 544750 - RNA, 19 nt, Artificial Sequence
  Description of Artificial Sequence: Synthetic oligonucleotide
agugggaguauauacgaua

SEQ ID NO: 544751 - RNA, 19 nt, Artificial Sequence
  Description of Artificial Sequence: Synthetic oligonucleotide
aaaugcauuccgauuggca

SEQ ID NO: 544752 - RNA, 19 nt, Artificial Sequence
  Description of Artificial Sequence: Synthetic oligonucleotide
uuucgauacuuguccagga

SEQ ID NO: 544753 - RNA, 19 nt, Artificial Sequence
  Description of Artificial Sequence: Synthetic oligonucleotide
gucguggaugcuaauaaag

SEQ ID NO: 544754 - RNA, 19 nt, Artificial Sequence
  Description of Artificial Sequence: Synthetic oligonucleotide
gacacuugcugagauauga

SEQ ID NO: 544755 - RNA, 19 nt, Artificial Sequence
  Description of Artificial Sequence: Synthetic oligonucleotide
acguacaacagcuuuucaa

SEQ ID NO: 544756 - RNA, 19 nt, Artificial Sequence
  Description of Artificial Sequence: Synthetic oligonucleotide
acugucugaucagagagcu

SEQ ID NO: 544757 - RNA, 19 nt, Artificial Sequence
  Description of Artificial Sequence: Synthetic oligonucleotide
agccauaucuuugagaauu

SEQ ID NO: 544758 - RNA, 19 nt, Artificial Sequence
  Description of Artificial Sequence: Synthetic oligonucleotide
guauauacgauaggcauaa

SEQ ID NO: 544759 - RNA, 19 nt, Artificial Sequence
  Description of Artificial Sequence: Synthetic oligonucleotide
auuccgauuggcaaagucu

SEQ ID NO: 544760 - RNA, 19 nt, Artificial Sequence
  Description of Artificial Sequence: Synthetic oligonucleotide
ucuaaggaccuggaucucc

SEQ ID NO: 544761 - RNA, 19 nt, Artificial Sequence
  Description of Artificial Sequence: Synthetic oligonucleotide
acgaucaggugagcaaucc

SEQ ID NO: 544762 - RNA, 19 nt, Artificial Sequence
  Description of Artificial Sequence: Synthetic oligonucleotide
uccuacauuaucagugaua

SEQ ID NO: 544763 - RNA, 19 nt, Artificial Sequence
  Description of Artificial Sequence: Synthetic oligonucleotide
cuuccggccaagaauagca

SEQ ID NO: 544764 - RNA, 19 nt, Artificial Sequence
  Description of Artificial Sequence: Synthetic oligonucleotide
ucggcccucuucuaggugc

SEQ ID NO: 544765 - RNA, 19 nt, Artificial Sequence
  Description of Artificial Sequence: Synthetic oligonucleotide
ugaggcuuacucuaauaua

SEQ ID NO: 544766 - RNA, 19 nt, Artificial Sequence
  Description of Artificial Sequence: Synthetic oligonucleotide
auagguaaauacauucagu

SEQ ID NO: 544767 - RNA, 19 nt, Artificial Sequence
  Description of Artificial Sequence: Synthetic oligonucleotide
aaacuaaagucaccuuauu

SEQ ID NO: 544768 - RNA, 19 nt, Artificial Sequence
  Description of Artificial Sequence: Synthetic oligonucleotide
caacauggaaacagacaag

SEQ ID NO: 544769 - RNA, 19 nt, Artificial Sequence
  Description of Artificial Sequence: Synthetic oligonucleotide
ugcagaacacucugcuuug

SEQ ID NO: 544770 - RNA, 19 nt, Artificial Sequence
  Description of Artificial Sequence: Synthetic oligonucleotide
ugcauuccgauuggcaaag

SEQ ID NO: 544771 - RNA, 19 nt, Artificial Sequence
  Description of Artificial Sequence: Synthetic oligonucleotide
cuugcugagauaugaccuc

SEQ ID NO: 544772 - RNA, 19 nt, Artificial Sequence
  Description of Artificial Sequence: Synthetic oligonucleotide
uuguuucgauacuugucca

SEQ ID NO: 544773 - RNA, 19 nt, Artificial Sequence
  Description of Artificial Sequence: Synthetic oligonucleotide
ucugucgcagcccaaugua

SEQ ID NO: 544774 - RNA, 19 nt, Artificial Sequence
  Description of Artificial Sequence: Synthetic oligonucleotide
cuugguuauucgaagagcu

SEQ ID NO: 544775 - RNA, 19 nt, Artificial Sequence
  Description of Artificial Sequence: Synthetic oligonucleotide
ucuaggugcuuaucugaca

SEQ ID NO: 544776 - RNA, 19 nt, Artificial Sequence
  Description of Artificial Sequence: Synthetic oligonucleotide
ugcuuugcugguuggauua

SEQ ID NO: 544777 - RNA, 19 nt, Artificial Sequence
  Description of Artificial Sequence: Synthetic oligonucleotide
ggaguuguugccuuggcca

SEQ ID NO: 544778 - RNA, 19 nt, Artificial Sequence
  Description of Artificial Sequence: Synthetic oligonucleotide
gccaagaauagcaaucagg

SEQ ID NO: 544779 - RNA, 19 nt, Artificial Sequence
  Description of Artificial Sequence: Synthetic oligonucleotide
guuacacuacauuaauuua

SEQ ID NO: 544780 - RNA, 19 nt, Artificial Sequence
  Description of Artificial Sequence: Synthetic oligonucleotide
aauggaucuugaagcaacu

SEQ ID NO: 544781 - RNA, 19 nt, Artificial Sequence
  Description of Artificial Sequence: Synthetic oligonucleotide
acugcaauuuucaaugaaa

SEQ ID NO: 544782 - RNA, 19 nt, Artificial Sequence
  Description of Artificial Sequence: Synthetic oligonucleotide
uaugccuaaguuuguguuu

SEQ ID NO: 544783 - RNA, 19 nt, Artificial Sequence
  Description of Artificial Sequence: Synthetic oligonucleotide
ugcaagacccacaguggga

SEQ ID NO: 544784 - RNA, 19 nt, Artificial Sequence
  Description of Artificial Sequence: Synthetic oligonucleotide
ccauauuuggaagaaacug

SEQ ID NO: 544785 - RNA, 19 nt, Artificial Sequence
  Description of Artificial Sequence: Synthetic oligonucleotide
cauccaaaaugacagguaa

SEQ ID NO: 544786 - RNA, 19 nt, Artificial Sequence
  Description of Artificial Sequence: Synthetic oligonucleotide
ugaugugucucaguccaca

SEQ ID NO: 544787 - RNA, 19 nt, Artificial Sequence
  Description of Artificial Sequence: Synthetic oligonucleotide
aucuuauuaguaaauuaaa

SEQ ID NO: 544788 - RNA, 19 nt, Artificial Sequence
  Description of Artificial Sequence: Synthetic oligonucleotide
augcuaauaaagaggccuc

SEQ ID NO: 544789 - RNA, 19 nt, Artificial Sequence
  Description of Artificial Sequence: Synthetic oligonucleotide
agacaaauucuucuuuguu

SEQ ID NO: 544790 - RNA, 19 nt, Artificial Sequence
  Description of Artificial Sequence: Synthetic oligonucleotide
agacgaaaugcauuccgau

SEQ ID NO: 544791 - RNA, 19 nt, Artificial Sequence
  Description of Artificial Sequence: Synthetic oligonucleotide
caguuuacccacagggaug

SEQ ID NO: 544792 - RNA, 19 nt, Artificial Sequence
  Description of Artificial Sequence: Synthetic oligonucleotide
agaauacgcucuccgucag

SEQ ID NO: 544793 - RNA, 19 nt, Artificial Sequence
  Description of Artificial Sequence: Synthetic oligonucleotide
auuugauuguuaaacuaaa

SEQ ID NO: 544794 - RNA, 19 nt, Artificial Sequence
  Description of Artificial Sequence: Synthetic oligonucleotide
ucuguacugcaauuuucaa

SEQ ID NO: 544795 - RNA, 19 nt, Artificial Sequence
  Description of Artificial Sequence: Synthetic oligonucleotide
aaggagacccgcaacugca

SEQ ID NO: 544796 - RNA, 19 nt, Artificial Sequence
  Description of Artificial Sequence: Synthetic oligonucleotide
aucuguacugcaauuuuca

SEQ ID NO: 544797 - RNA, 19 nt, Artificial Sequence
  Description of Artificial Sequence: Synthetic oligonucleotide
caggguagagugucugucc

SEQ ID NO: 544798 - RNA, 19 nt, Artificial Sequence
  Description of Artificial Sequence: Synthetic oligonucleotide
gaugaaguuacacuacauu

SEQ ID NO: 544799 - RNA, 19 nt, Artificial Sequence
  Description of Artificial Sequence: Synthetic oligonucleotide
uugagucaaccaaccauau

SEQ ID NO: 544800 - RNA, 19 nt, Artificial Sequence
  Description of Artificial Sequence: Synthetic oligonucleotide
uucaaggauuugauuguua

SEQ ID NO: 544801 - RNA, 19 nt, Artificial Sequence
  Description of Artificial Sequence: Synthetic oligonucleotide
acugaauaaggcaauucau

SEQ ID NO: 544802 - RNA, 19 nt, Artificial Sequence
  Description of Artificial Sequence: Synthetic oligonucleotide
acagaagauaccugucaaa

SEQ ID NO: 544803 - RNA, 19 nt, Artificial Sequence
  Description of Artificial Sequence: Synthetic oligonucleotide
cuucuaggugcuuaucuga

SEQ ID NO: 544804 - RNA, 19 nt, Artificial Sequence
  Description of Artificial Sequence: Synthetic oligonucleotide
acugacugacuuuggucug

SEQ ID NO: 544805 - RNA, 19 nt, Artificial Sequence
  Description of Artificial Sequence: Synthetic oligonucleotide
aggccuagaauacgcucuc

SEQ ID NO: 544806 - RNA, 19 nt, Artificial Sequence
  Description of Artificial Sequence: Synthetic oligonucleotide
ugagucaaccaaccauauc

SEQ ID NO: 544807 - RNA, 19 nt, Artificial Sequence
  Description of Artificial Sequence: Synthetic oligonucleotide
cacugucugaucagagagc

SEQ ID NO: 544808 - RNA, 19 nt, Artificial Sequence
  Description of Artificial Sequence: Synthetic oligonucleotide
agauaugaccucagcagug

SEQ ID NO: 544809 - RNA, 19 nt, Artificial Sequence
  Description of Artificial Sequence: Synthetic oligonucleotide
aggagacgaaaugcauucc

SEQ ID NO: 544810 - RNA, 19 nt, Artificial Sequence
  Description of Artificial Sequence: Synthetic oligonucleotide
guuucucaguagcacguac

SEQ ID NO: 544811 - RNA, 19 nt, Artificial Sequence
  Description of Artificial Sequence: Synthetic oligonucleotide
uucaggcgcucaaaauucu

SEQ ID NO: 544812 - RNA, 19 nt, Artificial Sequence
  Description of Artificial Sequence: Synthetic oligonucleotide
auuaauccuuuugagucaa

SEQ ID NO: 544813 - RNA, 19 nt, Artificial Sequence
  Description of Artificial Sequence: Synthetic oligonucleotide
auucgaagagcugcaagga

SEQ ID NO: 544814 - RNA, 19 nt, Artificial Sequence
  Description of Artificial Sequence: Synthetic oligonucleotide
ugucguggaugcuaauaaa

SEQ ID NO: 544815 - RNA, 19 nt, Artificial Sequence
  Description of Artificial Sequence: Synthetic oligonucleotide
gaaaugcauuccgauuggc

SEQ ID NO: 544816 - RNA, 19 nt, Artificial Sequence
  Description of Artificial Sequence: Synthetic oligonucleotide
uagcacguacaacagcuuu

SEQ ID NO: 544817 - RNA, 19 nt, Artificial Sequence
  Description of Artificial Sequence: Synthetic oligonucleotide
aggguagagugucugucca

SEQ ID NO: 544818 - RNA, 19 nt, Artificial Sequence
  Description of Artificial Sequence: Synthetic oligonucleotide
agcaauccccaaggcagcc

SEQ ID NO: 544819 - RNA, 19 nt, Artificial Sequence
  Description of Artificial Sequence: Synthetic oligonucleotide
guaagaucuggucauaauu

SEQ ID NO: 544820 - RNA, 19 nt, Artificial Sequence
  Description of Artificial Sequence: Synthetic oligonucleotide
augggccguucguugaagg

SEQ ID NO: 544821 - RNA, 19 nt, Artificial Sequence
  Description of Artificial Sequence: Synthetic oligonucleotide
caacagacgcuguuccuug

SEQ ID NO: 544822 - RNA, 19 nt, Artificial Sequence
  Description of Artificial Sequence: Synthetic oligonucleotide
ugucgcagcccaauguaua

SEQ ID NO: 544823 - RNA, 19 nt, Artificial Sequence
  Description of Artificial Sequence: Synthetic oligonucleotide
agacccgcaacugcaacag

SEQ ID NO: 544824 - RNA, 19 nt, Artificial Sequence
  Description of Artificial Sequence: Synthetic oligonucleotide
acauuaucagugauaaguu

SEQ ID NO: 544825 - RNA, 19 nt, Artificial Sequence
  Description of Artificial Sequence: Synthetic oligonucleotide
ugcuaauaaagaggccucu

SEQ ID NO: 544826 - RNA, 19 nt, Artificial Sequence
  Description of Artificial Sequence: Synthetic oligonucleotide
guucaggcgcucaaaauuc

SEQ ID NO: 544827 - RNA, 19 nt, Artificial Sequence
  Description of Artificial Sequence: Synthetic oligonucleotide
gccuagaauacgcucuccg

SEQ ID NO: 544828 - RNA, 19 nt, Artificial Sequence
  Description of Artificial Sequence: Synthetic oligonucleotide
caucugucacaaucuguac

SEQ ID NO: 544829 - RNA, 19 nt, Artificial Sequence
  Description of Artificial Sequence: Synthetic oligonucleotide
uuacaaccaaggucuccca

SEQ ID NO: 544830 - RNA, 19 nt, Artificial Sequence
  Description of Artificial Sequence: Synthetic oligonucleotide
cuacauuaucagugauaag

SEQ ID NO: 544831 - RNA, 19 nt, Artificial Sequence
  Description of Artificial Sequence: Synthetic oligonucleotide
auaaaagauuccaacccuu

SEQ ID NO: 544832 - RNA, 19 nt, Artificial Sequence
  Description of Artificial Sequence: Synthetic oligonucleotide
gaucgcacgccccuugguc

SEQ ID NO: 544833 - RNA, 19 nt, Artificial Sequence
  Description of Artificial Sequence: Synthetic oligonucleotide
acacuugcugagauaugac

SEQ ID NO: 544834 - RNA, 19 nt, Artificial Sequence
  Description of Artificial Sequence: Synthetic oligonucleotide
agcuuccuacauuaucagu

SEQ ID NO: 544835 - RNA, 19 nt, Artificial Sequence
  Description of Artificial Sequence: Synthetic oligonucleotide
aguauauacgauaggcaua

SEQ ID NO: 544836 - RNA, 19 nt, Artificial Sequence
  Description of Artificial Sequence: Synthetic oligonucleotide
aucgcacgccccuugguca

SEQ ID NO: 544837 - RNA, 19 nt, Artificial Sequence
  Description of Artificial Sequence: Synthetic oligonucleotide
cacuauaaaagagcuucuc

SEQ ID NO: 544838 - RNA, 19 nt, Artificial Sequence
  Description of Artificial Sequence: Synthetic oligonucleotide
gaagcaaugugcccuuugu

SEQ ID NO: 544839 - RNA, 19 nt, Artificial Sequence
  Description of Artificial Sequence: Synthetic oligonucleotide
ucuucguguucuugggcaa

SEQ ID NO: 544840 - RNA, 19 nt, Artificial Sequence
  Description of Artificial Sequence: Synthetic oligonucleotide
uuccuacauuaucagugau

SEQ ID NO: 544841 - RNA, 19 nt, Artificial Sequence
  Description of Artificial Sequence: Synthetic oligonucleotide
ugggccguucguugaaggc

SEQ ID NO: 544842 - RNA, 19 nt, Artificial Sequence
  Description of Artificial Sequence: Synthetic oligonucleotide
gagacccgcaacugcaaca

SEQ ID NO: 544843 - RNA, 19 nt, Artificial Sequence
  Description of Artificial Sequence: Synthetic oligonucleotide
agguaagcacugcugugga

SEQ ID NO: 544844 - RNA, 19 nt, Artificial Sequence
  Description of Artificial Sequence: Synthetic oligonucleotide
gccauaacgaucaggugag

SEQ ID NO: 544845 - RNA, 19 nt, Artificial Sequence
  Description of Artificial Sequence: Synthetic oligonucleotide
cauaacgaucaggugagca

SEQ ID NO: 544846 - RNA, 19 nt, Artificial Sequence
  Description of Artificial Sequence: Synthetic oligonucleotide
acgucccuuaacuauuaau

SEQ ID NO: 544847 - RNA, 19 nt, Artificial Sequence
  Description of Artificial Sequence: Synthetic oligonucleotide
auaugaccucagcaguggu

SEQ ID NO: 544848 - RNA, 19 nt, Artificial Sequence
  Description of Artificial Sequence: Synthetic oligonucleotide
caccccaagagcaacucca

SEQ ID NO: 544849 - RNA, 19 nt, Artificial Sequence
  Description of Artificial Sequence: Synthetic oligonucleotide
ccaagaauagcaaucaggu

SEQ ID NO: 544850 - RNA, 19 nt, Artificial Sequence
  Description of Artificial Sequence: Synthetic oligonucleotide
caaugugcccuuugucgug

SEQ ID NO: 544851 - RNA, 19 nt, Artificial Sequence
  Description of Artificial Sequence: Synthetic oligonucleotide
cuuuugagucaaccaacca

SEQ ID NO: 544852 - RNA, 19 nt, Artificial Sequence
  Description of Artificial Sequence: Synthetic oligonucleotide
uuggaucuuccauuagcuu

SEQ ID NO: 544853 - RNA, 19 nt, Artificial Sequence
  Description of Artificial Sequence: Synthetic oligonucleotide
ucguugaaggcagccauau

SEQ ID NO: 544854 - RNA, 19 nt, Artificial Sequence
  Description of Artificial Sequence: Synthetic oligonucleotide
agcccaauguauaauggau

SEQ ID NO: 544855 - RNA, 19 nt, Artificial Sequence
  Description of Artificial Sequence: Synthetic oligonucleotide
ucuagcuguuguguuuacu

SEQ ID NO: 544856 - RNA, 19 nt, Artificial Sequence
  Description of Artificial Sequence: Synthetic oligonucleotide
ggaguauauacgauaggca

SEQ ID NO: 544857 - RNA, 19 nt, Artificial Sequence
  Description of Artificial Sequence: Synthetic oligonucleotide
agcuaugccuaaguuugug

SEQ ID NO: 544858 - RNA, 19 nt, Artificial Sequence
  Description of Artificial Sequence: Synthetic oligonucleotide
gaagcacgucccuuaacua

SEQ ID NO: 544859 - RNA, 19 nt, Artificial Sequence
  Description of Artificial Sequence: Synthetic oligonucleotide
uccggccaagaauagcaau

SEQ ID NO: 544860 - RNA, 19 nt, Artificial Sequence
  Description of Artificial Sequence: Synthetic oligonucleotide
ccuacauuaucagugauaa

SEQ ID NO: 544861 - RNA, 19 nt, Artificial Sequence
  Description of Artificial Sequence: Synthetic oligonucleotide
uaggugcuuaucugacacu

SEQ ID NO: 544862 - RNA, 19 nt, Artificial Sequence
  Description of Artificial Sequence: Synthetic oligonucleotide
cagauccaucaacagaaga

SEQ ID NO: 544863 - RNA, 19 nt, Artificial Sequence
  Description of Artificial Sequence: Synthetic oligonucleotide
uaaggcaauucaugccaua

SEQ ID NO: 544864 - RNA, 19 nt, Artificial Sequence
  Description of Artificial Sequence: Synthetic oligonucleotide
auaaccagaguaagugaaa

SEQ ID NO: 544865 - RNA, 19 nt, Artificial Sequence
  Description of Artificial Sequence: Synthetic oligonucleotide
acacuauaaaagagcuucu

SEQ ID NO: 544866 - RNA, 19 nt, Artificial Sequence
  Description of Artificial Sequence: Synthetic oligonucleotide
caagaucuuauuaguaaau

SEQ ID NO: 544867 - RNA, 19 nt, Artificial Sequence
  Description of Artificial Sequence: Synthetic oligonucleotide
augaaacaucucgaauugu

SEQ ID NO: 544868 - RNA, 19 nt, Artificial Sequence
  Description of Artificial Sequence: Synthetic oligonucleotide
aaccgucaagugugaggcu

SEQ ID NO: 544869 - RNA, 19 nt, Artificial Sequence
  Description of Artificial Sequence: Synthetic oligonucleotide
uuccggccaagaauagcaa

SEQ ID NO: 544870 - RNA, 19 nt, Artificial Sequence
  Description of Artificial Sequence: Synthetic oligonucleotide
uucguguucuugggcaaac

SEQ ID NO: 544871 - RNA, 19 nt, Artificial Sequence
  Description of Artificial Sequence: Synthetic oligonucleotide
gacgaaaugcauuccgauu

SEQ ID NO: 544872 - RNA, 19 nt, Artificial Sequence
  Description of Artificial Sequence: Synthetic oligonucleotide
uuauuauaguuuggaucuu

SEQ ID NO: 544873 - RNA, 19 nt, Artificial Sequence
  Description of Artificial Sequence: Synthetic oligonucleotide
caagaauagcaaucaggua

SEQ ID NO: 544874 - RNA, 19 nt, Artificial Sequence
  Description of Artificial Sequence: Synthetic oligonucleotide
cgauacuuguccaggagac

SEQ ID NO: 544875 - RNA, 19 nt, Artificial Sequence
  Description of Artificial Sequence: Synthetic oligonucleotide
guagcacuguucugcagaa

SEQ ID NO: 544876 - RNA, 19 nt, Artificial Sequence
  Description of Artificial Sequence: Synthetic oligonucleotide
caaaaccgucaagugugag

SEQ ID NO: 544877 - RNA, 19 nt, Artificial Sequence
  Description of Artificial Sequence: Synthetic oligonucleotide
caaacuguauugcuggcau

SEQ ID NO: 544878 - RNA, 19 nt, Artificial Sequence
  Description of Artificial Sequence: Synthetic oligonucleotide
aggcaauucaugccauauu

SEQ ID NO: 544879 - RNA, 19 nt, Artificial Sequence
  Description of Artificial Sequence: Synthetic oligonucleotide
agucggcccucuucuaggu

SEQ ID NO: 544880 - RNA, 19 nt, Artificial Sequence
  Description of Artificial Sequence: Synthetic oligonucleotide
uucuagcuguuguguuuac

SEQ ID NO: 544881 - RNA, 19 nt, Artificial Sequence
  Description of Artificial Sequence: Synthetic oligonucleotide
uucuggccaugcguuaaga

SEQ ID NO: 544882 - RNA, 19 nt, Artificial Sequence
  Description of Artificial Sequence: Synthetic oligonucleotide
gucgcagcccaauguauaa

SEQ ID NO: 544883 - RNA, 19 nt, Artificial Sequence
  Description of Artificial Sequence: Synthetic oligonucleotide
guucguugaaggcagccau

SEQ ID NO: 544884 - RNA, 19 nt, Artificial Sequence
  Description of Artificial Sequence: Synthetic oligonucleotide
aggcuuacucuaauauacu

SEQ ID NO: 544885 - RNA, 19 nt, Artificial Sequence
  Description of Artificial Sequence: Synthetic oligonucleotide
cuguacugcaauuuucaau

SEQ ID NO: 544886 - RNA, 19 nt, Artificial Sequence
  Description of Artificial Sequence: Synthetic oligonucleotide
ggccaagaauagcaaucag

SEQ ID NO: 544887 - RNA, 19 nt, Artificial Sequence
  Description of Artificial Sequence: Synthetic oligonucleotide
accgucaagugugaggcuu

SEQ ID NO: 544888 - RNA, 19 nt, Artificial Sequence
  Description of Artificial Sequence: Synthetic oligonucleotide
guuaaacuaaagucaccuu

SEQ ID NO: 544889 - RNA, 19 nt, Artificial Sequence
  Description of Artificial Sequence: Synthetic oligonucleotide
acaacggccuucacaacau

SEQ ID NO: 544890 - RNA, 19 nt, Artificial Sequence
  Description of Artificial Sequence: Synthetic oligonucleotide
acaaaaccgucaaguguga

SEQ ID NO: 544891 - RNA, 19 nt, Artificial Sequence
  Description of Artificial Sequence: Synthetic oligonucleotide
gcgcucaaaauucuuaacu

SEQ ID NO: 544892 - RNA, 19 nt, Artificial Sequence
  Description of Artificial Sequence: Synthetic oligonucleotide
acgccccuuggucacuuug

SEQ ID NO: 544893 - RNA, 19 nt, Artificial Sequence
  Description of Artificial Sequence: Synthetic oligonucleotide
ccggccaagaauagcaauc

SEQ ID NO: 544894 - RNA, 19 nt, Artificial Sequence
  Description of Artificial Sequence: Synthetic oligonucleotide
ggcgcucaaaauucuuaac

SEQ ID NO: 544895 - RNA, 19 nt, Artificial Sequence
  Description of Artificial Sequence: Synthetic oligonucleotide
cuaugccuaaguuuguguu

SEQ ID NO: 544896 - RNA, 19 nt, Artificial Sequence
  Description of Artificial Sequence: Synthetic oligonucleotide
caggccuagaauacgcucu

SEQ ID NO: 544897 - RNA, 19 nt, Artificial Sequence
  Description of Artificial Sequence: Synthetic oligonucleotide
gguuauucgaagagcugca

SEQ ID NO: 544898 - RNA, 19 nt, Artificial Sequence
  Description of Artificial Sequence: Synthetic oligonucleotide
agaucgcacgccccuuggu

SEQ ID NO: 544899 - RNA, 19 nt, Artificial Sequence
  Description of Artificial Sequence: Synthetic oligonucleotide
gguagagugucuguccauc

SEQ ID NO: 544900 - RNA, 19 nt, Artificial Sequence
  Description of Artificial Sequence: Synthetic oligonucleotide
ucguguucuugggcaaaca

SEQ ID NO: 544901 - RNA, 19 nt, Artificial Sequence
  Description of Artificial Sequence: Synthetic oligonucleotide
cauuaucagugauaaguuu

SEQ ID NO: 544902 - RNA, 19 nt, Artificial Sequence
  Description of Artificial Sequence: Synthetic oligonucleotide
cuaaggaccuggaucuccu

SEQ ID NO: 544903 - RNA, 19 nt, Artificial Sequence
  Description of Artificial Sequence: Synthetic oligonucleotide
uaacuacucuaaggaccug

SEQ ID NO: 544904 - RNA, 19 nt, Artificial Sequence
  Description of Artificial Sequence: Synthetic oligonucleotide
gcguuaagaacugaagcaa

SEQ ID NO: 544905 - RNA, 19 nt, Artificial Sequence
  Description of Artificial Sequence: Synthetic oligonucleotide
guuauucgaagagcugcaa

SEQ ID NO: 544906 - RNA, 19 nt, Artificial Sequence
  Description of Artificial Sequence: Synthetic oligonucleotide
agcacguacaacagcuuuu

SEQ ID NO: 544907 - RNA, 19 nt, Artificial Sequence
  Description of Artificial Sequence: Synthetic oligonucleotide
guaagcacugcuguggauu

SEQ ID NO: 544908 - RNA, 19 nt, Artificial Sequence
  Description of Artificial Sequence: Synthetic oligonucleotide
uccucugucgcagcccaau

SEQ ID NO: 544909 - RNA, 19 nt, Artificial Sequence
  Description of Artificial Sequence: Synthetic oligonucleotide
ggaugcuaauaaagaggcc

SEQ ID NO: 544910 - RNA, 19 nt, Artificial Sequence
  Description of Artificial Sequence: Synthetic oligonucleotide
ggccguucguugaaggcag

SEQ ID NO: 544911 - RNA, 19 nt, Artificial Sequence
  Description of Artificial Sequence: Synthetic oligonucleotide
cacaacaucuucuggccau

SEQ ID NO: 544912 - RNA, 19 nt, Artificial Sequence
  Description of Artificial Sequence: Synthetic oligonucleotide
uauauacgauaggcauaaa

SEQ ID NO: 544913 - RNA, 19 nt, Artificial Sequence
  Description of Artificial Sequence: Synthetic oligonucleotide
cuuaacuauuaauccuuuu

SEQ ID NO: 544914 - RNA, 19 nt, Artificial Sequence
  Description of Artificial Sequence: Synthetic oligonucleotide
ggaccucucacucuccucu

SEQ ID NO: 544915 - RNA, 19 nt, Artificial Sequence
  Description of Artificial Sequence: Synthetic oligonucleotide
ccugacugaugaagcuagg

SEQ ID NO: 544916 - RNA, 19 nt, Artificial Sequence
  Description of Artificial Sequence: Synthetic oligonucleotide
cgcagcccaauguauaaug

SEQ ID NO: 544917 - RNA, 19 nt, Artificial Sequence
  Description of Artificial Sequence: Synthetic oligonucleotide
ccaggccuagaauacgcuc

SEQ ID NO: 544918 - RNA, 19 nt, Artificial Sequence
  Description of Artificial Sequence: Synthetic oligonucleotide
ggagacccgcaacugcaac

SEQ ID NO: 544919 - RNA, 19 nt, Artificial Sequence
  Description of Artificial Sequence: Synthetic oligonucleotide
gaggccucuuggcuuccga

SEQ ID NO: 544920 - RNA, 19 nt, Artificial Sequence
  Description of Artificial Sequence: Synthetic oligonucleotide
ucgcagcccaauguauaau

SEQ ID NO: 544921 - RNA, 19 nt, Artificial Sequence
  Description of Artificial Sequence: Synthetic oligonucleotide
gggaugcccaucccauuac

SEQ ID NO: 544922 - RNA, 19 nt, Artificial Sequence
  Description of Artificial Sequence: Synthetic oligonucleotide
gucggcccucuucuaggug

SEQ ID NO: 544923 - RNA, 19 nt, Artificial Sequence
  Description of Artificial Sequence: Synthetic oligonucleotide
ccccuuggucacuuuguag

SEQ ID NO: 544924 - RNA, 19 nt, Artificial Sequence
  Description of Artificial Sequence: Synthetic oligonucleotide
cacguacaacagcuuuuca

SEQ ID NO: 544925 - RNA, 19 nt, Artificial Sequence
  Description of Artificial Sequence: Synthetic oligonucleotide
cugaugaagcuagguggca

SEQ ID NO: 544926 - RNA, 19 nt, Artificial Sequence
  Description of Artificial Sequence: Synthetic oligonucleotide
gguaagaucuggucauaau

SEQ ID NO: 544927 - RNA, 19 nt, Artificial Sequence
  Description of Artificial Sequence: Synthetic oligonucleotide
agaggccucuuggcuuccg

SEQ ID NO: 544928 - RNA, 19 nt, Artificial Sequence
  Description of Artificial Sequence: Synthetic oligonucleotide
gcuuccgaaaugccaaacu

SEQ ID NO: 544929 - RNA, 19 nt, Artificial Sequence
  Description of Artificial Sequence: Synthetic oligonucleotide
gcuaugccuaaguuugugu

SEQ ID NO: 544930 - RNA, 19 nt, Artificial Sequence
  Description of Artificial Sequence: Synthetic oligonucleotide
ggcuuacucuaauauacuu

SEQ ID NO: 544931 - RNA, 19 nt, Artificial Sequence
  Description of Artificial Sequence: Synthetic oligonucleotide
gaauacgcucuccgucagu

SEQ ID NO: 544932 - RNA, 19 nt, Artificial Sequence
  Description of Artificial Sequence: Synthetic oligonucleotide
ccaugcguuaagaacugaa

SEQ ID NO: 544933 - RNA, 19 nt, Artificial Sequence
  Description of Artificial Sequence: Synthetic oligonucleotide
caacggccuucacaacauc

SEQ ID NO: 544934 - RNA, 19 nt, Artificial Sequence
  Description of Artificial Sequence: Synthetic oligonucleotide
gugcaauacuuguuucgau

SEQ ID NO: 544935 - RNA, 19 nt, Artificial Sequence
  Description of Artificial Sequence: Synthetic oligonucleotide
cucuaaggaccuggaucuc

SEQ ID NO: 544936 - RNA, 19 nt, Artificial Sequence
  Description of Artificial Sequence: Synthetic oligonucleotide
cuaggcagccaaguagugu

SEQ ID NO: 544937 - RNA, 19 nt, Artificial Sequence
  Description of Artificial Sequence: Synthetic oligonucleotide
gacccgcaacugcaacaga

SEQ ID NO: 544938 - RNA, 19 nt, Artificial Sequence
  Description of Artificial Sequence: Synthetic oligonucleotide
gccauauuuggaagaaacu

SEQ ID NO: 544939 - RNA, 19 nt, Artificial Sequence
  Description of Artificial Sequence: Synthetic oligonucleotide
ccaccccaagagcaacucc

SEQ ID NO: 544940 - RNA, 19 nt, Artificial Sequence
  Description of Artificial Sequence: Synthetic oligonucleotide
cuccuuugacaaaccuucu

SEQ ID NO: 544941 - RNA, 19 nt, Artificial Sequence
  Description of Artificial Sequence: Synthetic oligonucleotide
ccauuacaaccaaggucuc

SEQ ID NO: 544942 - RNA, 19 nt, Artificial Sequence
  Description of Artificial Sequence: Synthetic oligonucleotide
acccacagugggaguauau

SEQ ID NO: 544943 - RNA, 19 nt, Artificial Sequence
  Description of Artificial Sequence: Synthetic oligonucleotide
cuucguguucuugggcaaa

SEQ ID NO: 544944 - RNA, 19 nt, Artificial Sequence
  Description of Artificial Sequence: Synthetic oligonucleotide
ccuagaauacgcucuccgu

SEQ ID NO: 544945 - RNA, 19 nt, Artificial Sequence
  Description of Artificial Sequence: Synthetic oligonucleotide
ccguucguugaaggcagcc

SEQ ID NO: 544946 - RNA, 19 nt, Artificial Sequence
  Description of Artificial Sequence: Synthetic oligonucleotide
ggccuagaauacgcucucc

SEQ ID NO: 544947 - RNA, 19 nt, Artificial Sequence
  Description of Artificial Sequence: Synthetic oligonucleotide
cugucgcagcccaauguau

SEQ ID NO: 544948 - RNA, 19 nt, Artificial Sequence
  Description of Artificial Sequence: Synthetic oligonucleotide
cugcuuugcugguuggauu

SEQ ID NO: 544949 - RNA, 19 nt, Artificial Sequence
  Description of Artificial Sequence: Synthetic oligonucleotide
cagugggaguauauacgau

SEQ ID NO: 544950 - RNA, 19 nt, Artificial Sequence
  Description of Artificial Sequence: Synthetic oligonucleotide
ccucugucgcagcccaaug

SEQ ID NO: 544951 - RNA, 19 nt, Artificial Sequence
  Description of Artificial Sequence: Synthetic oligonucleotide
ccaaguaguguuucuguuu

SEQ ID NO: 544952 - RNA, 19 nt, Artificial Sequence
  Description of Artificial Sequence: Synthetic oligonucleotide
gccucuuggcuuccgaaau

SEQ ID NO: 544953 - RNA, 19 nt, Artificial Sequence
  Description of Artificial Sequence: Synthetic oligonucleotide
gccaaguaguguuucuguu

SEQ ID NO: 544954 - RNA, 19 nt, Artificial Sequence
  Description of Artificial Sequence: Synthetic oligonucleotide
cagcuaugccuaaguuugu

SEQ ID NO: 544955 - RNA, 19 nt, Artificial Sequence
  Description of Artificial Sequence: Synthetic oligonucleotide
gcuaauaaagaggccucuu

SEQ ID NO: 544956 - RNA, 19 nt, Artificial Sequence
  Description of Artificial Sequence: Synthetic oligonucleotide
ccauaacgaucaggugagc

SEQ ID NO: 544957 - RNA, 19 nt, Artificial Sequence
  Description of Artificial Sequence: Synthetic oligonucleotide
ccaggagacgaaaugcauu

SEQ ID NO: 544958 - RNA, 19 nt, Artificial Sequence
  Description of Artificial Sequence: Synthetic oligonucleotide
gcaacagacgcuguuccuu

SEQ ID NO: 544959 - RNA, 19 nt, Artificial Sequence
  Description of Artificial Sequence: Synthetic oligonucleotide
gguaagcacugcuguggau

SEQ ID NO: 544960 - RNA, 19 nt, Artificial Sequence
  Description of Artificial Sequence: Synthetic oligonucleotide
cggccaagaauagcaauca

SEQ ID NO: 544961 - RNA, 19 nt, Artificial Sequence
  Description of Artificial Sequence: Synthetic oligonucleotide
cguucguugaaggcagcca

SEQ ID NO: 544962 - RNA, 19 nt, Artificial Sequence
  Description of Artificial Sequence: Synthetic oligonucleotide
ggguagagugucuguccau

SEQ ID NO: 544963 - RNA, 19 nt, Artificial Sequence
  Description of Artificial Sequence: Synthetic oligonucleotide
gccaugcguuaagaacuga

SEQ ID NO: 544964 - RNA, 19 nt, Artificial Sequence
  Description of Artificial Sequence: Synthetic oligonucleotide
ccgucaagugugaggcuua

SEQ ID NO: 544965 - RNA, 19 nt, Artificial Sequence
  Description of Artificial Sequence: Synthetic oligonucleotide
gccguucguugaaggcagc

SEQ ID NO: 544966 - RNA, 19 nt, Artificial Sequence
  Description of Artificial Sequence: Synthetic oligonucleotide
gcacacuauaaaagagcuu

SEQ ID NO: 544967 - RNA, 19 nt, Artificial Sequence
  Description of Artificial Sequence: Synthetic oligonucleotide
gguaaacaguggccaucuu

SEQ ID NO: 544968 - RNA, 19 nt, Artificial Sequence
  Description of Artificial Sequence: Synthetic oligonucleotide
ggacugccgcuggcaaaga

SEQ ID NO: 544969 - RNA, 19 nt, Artificial Sequence
  Description of Artificial Sequence: Synthetic oligonucleotide
cgcacgccccuuggucacu

SEQ ID NO: 544970 - RNA, 19 nt, Artificial Sequence
  Description of Artificial Sequence: Synthetic oligonucleotide
uuauuaucaaugaugacag

SEQ ID NO: 544971 - RNA, 19 nt, Artificial Sequence
  Description of Artificial Sequence: Synthetic oligonucleotide
uuauacuucgcuaauaggc

SEQ ID NO: 544972 - RNA, 19 nt, Artificial Sequence
  Description of Artificial Sequence: Synthetic oligonucleotide
uaaacuauaacagccaucc

SEQ ID NO: 544973 - RNA, 19 nt, Artificial Sequence
  Description of Artificial Sequence: Synthetic oligonucleotide
aacacaaggacccaccauc

SEQ ID NO: 544974 - RNA, 19 nt, Artificial Sequence
  Description of Artificial Sequence: Synthetic oligonucleotide
aacuauaacagccauccug

SEQ ID NO: 544975 - RNA, 19 nt, Artificial Sequence
  Description of Artificial Sequence: Synthetic oligonucleotide
aaaucuuaagaacucuauc

SEQ ID NO: 544976 - RNA, 19 nt, Artificial Sequence
  Description of Artificial Sequence: Synthetic oligonucleotide
ugagcuaugcuauuaaaag

SEQ ID NO: 544977 - RNA, 19 nt, Artificial Sequence
  Description of Artificial Sequence: Synthetic oligonucleotide
uaugcuauuaaaagucagg

SEQ ID NO: 544978 - RNA, 19 nt, Artificial Sequence
  Description of Artificial Sequence: Synthetic oligonucleotide
aauggaaggaguuccagug

SEQ ID NO: 544979 - RNA, 19 nt, Artificial Sequence
  Description of Artificial Sequence: Synthetic oligonucleotide
agagguaacgcuuauuauc

SEQ ID NO: 544980 - RNA, 19 nt, Artificial Sequence
  Description of Artificial Sequence: Synthetic oligonucleotide
aaagucaggacgucucccc

SEQ ID NO: 544981 - RNA, 19 nt, Artificial Sequence
  Description of Artificial Sequence: Synthetic oligonucleotide
uguuuauguauucuccugc

SEQ ID NO: 544982 - RNA, 19 nt, Artificial Sequence
  Description of Artificial Sequence: Synthetic oligonucleotide
uuauguauucuccugcuac

SEQ ID NO: 544983 - RNA, 19 nt, Artificial Sequence
  Description of Artificial Sequence: Synthetic oligonucleotide
aaugguaacuaaacgguuc

SEQ ID NO: 544984 - RNA, 19 nt, Artificial Sequence
  Description of Artificial Sequence: Synthetic oligonucleotide
uauacuucgcuaauaggca

SEQ ID NO: 544985 - RNA, 19 nt, Artificial Sequence
  Description of Artificial Sequence: Synthetic oligonucleotide
ugugcuuucaaagggaccc

SEQ ID NO: 544986 - RNA, 19 nt, Artificial Sequence
  Description of Artificial Sequence: Synthetic oligonucleotide
uaucauaagggccuucccc

SEQ ID NO: 544987 - RNA, 19 nt, Artificial Sequence
  Description of Artificial Sequence: Synthetic oligonucleotide
ugccccuaaacuauaacag

SEQ ID NO: 544988 - RNA, 19 nt, Artificial Sequence
  Description of Artificial Sequence: Synthetic oligonucleotide
uuaucaaugaugacaguuc

SEQ ID NO: 544989 - RNA, 19 nt, Artificial Sequence
  Description of Artificial Sequence: Synthetic oligonucleotide
aacaguaagccacgaggcg

SEQ ID NO: 544990 - RNA, 19 nt, Artificial Sequence
  Description of Artificial Sequence: Synthetic oligonucleotide
aaaauuauacuucgcuaau

SEQ ID NO: 544991 - RNA, 19 nt, Artificial Sequence
  Description of Artificial Sequence: Synthetic oligonucleotide
augguaacuaaacgguucg

SEQ ID NO: 544992 - RNA, 19 nt, Artificial Sequence
  Description of Artificial Sequence: Synthetic oligonucleotide
agcuaugcuauuaaaaguc

SEQ ID NO: 544993 - RNA, 19 nt, Artificial Sequence
  Description of Artificial Sequence: Synthetic oligonucleotide
aaugccgaagaaugccugg

SEQ ID NO: 544994 - RNA, 19 nt, Artificial Sequence
  Description of Artificial Sequence: Synthetic oligonucleotide
uuaaaagucaggacgucuc

SEQ ID NO: 544995 - RNA, 19 nt, Artificial Sequence
  Description of Artificial Sequence: Synthetic oligonucleotide
gaagaggcgaugcaugucc

SEQ ID NO: 544996 - RNA, 19 nt, Artificial Sequence
  Description of Artificial Sequence: Synthetic oligonucleotide
aagcaaaauauuggugggc

SEQ ID NO: 544997 - RNA, 19 nt, Artificial Sequence
  Description of Artificial Sequence: Synthetic oligonucleotide
ugaccuaaaauacacgguu

SEQ ID NO: 544998 - RNA, 19 nt, Artificial Sequence
  Description of Artificial Sequence: Synthetic oligonucleotide
uggaacaccauaucauaag

SEQ ID NO: 544999 - RNA, 19 nt, Artificial Sequence
  Description of Artificial Sequence: Synthetic oligonucleotide
gauggucuuucuuccaggg

SEQ ID NO: 545000 - RNA, 19 nt, Artificial Sequence
  Description of Artificial Sequence: Synthetic oligonucleotide
cuaauaggcacccuaggac

SEQ ID NO: 545001 - RNA, 19 nt, Artificial Sequence
  Description of Artificial Sequence: Synthetic oligonucleotide
uguucuaagcuacccaccu

SEQ ID NO: 545002 - RNA, 19 nt, Artificial Sequence
  Description of Artificial Sequence: Synthetic oligonucleotide
uugagcuaugcuauuaaaa

SEQ ID NO: 545003 - RNA, 19 nt, Artificial Sequence
  Description of Artificial Sequence: Synthetic oligonucleotide
ugucuaucuugcuuacugg

SEQ ID NO: 545004 - RNA, 19 nt, Artificial Sequence
  Description of Artificial Sequence: Synthetic oligonucleotide
auaucauaagggccuuccc

SEQ ID NO: 545005 - RNA, 19 nt, Artificial Sequence
  Description of Artificial Sequence: Synthetic oligonucleotide
auacuucgcuaauaggcac

SEQ ID NO: 545006 - RNA, 19 nt, Artificial Sequence
  Description of Artificial Sequence: Synthetic oligonucleotide
aagggaagcuuaaagaccu

SEQ ID NO: 545007 - RNA, 19 nt, Artificial Sequence
  Description of Artificial Sequence: Synthetic oligonucleotide
uauguauucuccugcuacc

SEQ ID NO: 545008 - RNA, 19 nt, Artificial Sequence
  Description of Artificial Sequence: Synthetic oligonucleotide
caugcuugauucauagacc

SEQ ID NO: 545009 - RNA, 19 nt, Artificial Sequence
  Description of Artificial Sequence: Synthetic oligonucleotide
caggauucgcuucagggcg

SEQ ID NO: 545010 - RNA, 19 nt, Artificial Sequence
  Description of Artificial Sequence: Synthetic oligonucleotide
uucuaagcuacccaccuuc

SEQ ID NO: 545011 - RNA, 19 nt, Artificial Sequence
  Description of Artificial Sequence: Synthetic oligonucleotide
cuaucuugcuuacuggggc

SEQ ID NO: 545012 - RNA, 19 nt, Artificial Sequence
  Description of Artificial Sequence: Synthetic oligonucleotide
ucaaacaguaagccacgag

SEQ ID NO: 545013 - RNA, 19 nt, Artificial Sequence
  Description of Artificial Sequence: Synthetic oligonucleotide
uugccccuaaacuauaaca

SEQ ID NO: 545014 - RNA, 19 nt, Artificial Sequence
  Description of Artificial Sequence: Synthetic oligonucleotide
guguccaucauguaacccc

SEQ ID NO: 545015 - RNA, 19 nt, Artificial Sequence
  Description of Artificial Sequence: Synthetic oligonucleotide
gaagagguaacgcuuauua

SEQ ID NO: 545016 - RNA, 19 nt, Artificial Sequence
  Description of Artificial Sequence: Synthetic oligonucleotide
cacccuaggacucagguug

SEQ ID NO: 545017 - RNA, 19 nt, Artificial Sequence
  Description of Artificial Sequence: Synthetic oligonucleotide
cuggaugcaugcuugauuc

SEQ ID NO: 545018 - RNA, 19 nt, Artificial Sequence
  Description of Artificial Sequence: Synthetic oligonucleotide
cagugcguggcccauaacg

SEQ ID NO: 545019 - RNA, 19 nt, Artificial Sequence
  Description of Artificial Sequence: Synthetic oligonucleotide
aacgcuuauuaucaaugau

SEQ ID NO: 545020 - RNA, 19 nt, Artificial Sequence
  Description of Artificial Sequence: Synthetic oligonucleotide
guaacuaaacgguucguuc

SEQ ID NO: 545021 - RNA, 19 nt, Artificial Sequence
  Description of Artificial Sequence: Synthetic oligonucleotide
guaacgcuuauuaucaaug

SEQ ID NO: 545022 - RNA, 19 nt, Artificial Sequence
  Description of Artificial Sequence: Synthetic oligonucleotide
uaacgcuuauuaucaauga

SEQ ID NO: 545023 - RNA, 19 nt, Artificial Sequence
  Description of Artificial Sequence: Synthetic oligonucleotide
ugcuauuaaaagucaggac

SEQ ID NO: 545024 - RNA, 19 nt, Artificial Sequence
  Description of Artificial Sequence: Synthetic oligonucleotide
auuaaaacuggcugccccu

SEQ ID NO: 545025 - RNA, 19 nt, Artificial Sequence
  Description of Artificial Sequence: Synthetic oligonucleotide
caaugaccuaaaauacacg

SEQ ID NO: 545026 - RNA, 19 nt, Artificial Sequence
  Description of Artificial Sequence: Synthetic oligonucleotide
uaagccacgaggcgaagga

SEQ ID NO: 545027 - RNA, 19 nt, Artificial Sequence
  Description of Artificial Sequence: Synthetic oligonucleotide
cugucuaucuugcuuacug

SEQ ID NO: 545028 - RNA, 19 nt, Artificial Sequence
  Description of Artificial Sequence: Synthetic oligonucleotide
cagaacaugaugugcgccc

SEQ ID NO: 545029 - RNA, 19 nt, Artificial Sequence
  Description of Artificial Sequence: Synthetic oligonucleotide
uucccaaaucagauuuggg

SEQ ID NO: 545030 - RNA, 19 nt, Artificial Sequence
  Description of Artificial Sequence: Synthetic oligonucleotide
gucgcaaugccgaagaaug

SEQ ID NO: 545031 - RNA, 19 nt, Artificial Sequence
  Description of Artificial Sequence: Synthetic oligonucleotide
ucacccuaggcuccuagcc

SEQ ID NO: 545032 - RNA, 19 nt, Artificial Sequence
  Description of Artificial Sequence: Synthetic oligonucleotide
gagguaacgcuuauuauca

SEQ ID NO: 545033 - RNA, 19 nt, Artificial Sequence
  Description of Artificial Sequence: Synthetic oligonucleotide
uguaccucucuugaagaag

SEQ ID NO: 545034 - RNA, 19 nt, Artificial Sequence
  Description of Artificial Sequence: Synthetic oligonucleotide
aaaauauuggugggcuuca

SEQ ID NO: 545035 - RNA, 19 nt, Artificial Sequence
  Description of Artificial Sequence: Synthetic oligonucleotide
cauaucauaagggccuucc

SEQ ID NO: 545036 - RNA, 19 nt, Artificial Sequence
  Description of Artificial Sequence: Synthetic oligonucleotide
uuggcaaaccugcugggcu

SEQ ID NO: 545037 - RNA, 19 nt, Artificial Sequence
  Description of Artificial Sequence: Synthetic oligonucleotide
aauaggcacccuaggacuc

SEQ ID NO: 545038 - RNA, 19 nt, Artificial Sequence
  Description of Artificial Sequence: Synthetic oligonucleotide
ucgcuaauaggcacccuag

SEQ ID NO: 545039 - RNA, 19 nt, Artificial Sequence
  Description of Artificial Sequence: Synthetic oligonucleotide
aaucagauuuggguggugu

SEQ ID NO: 545040 - RNA, 19 nt, Artificial Sequence
  Description of Artificial Sequence: Synthetic oligonucleotide
uacuucgcuaauaggcacc

SEQ ID NO: 545041 - RNA, 19 nt, Artificial Sequence
  Description of Artificial Sequence: Synthetic oligonucleotide
aguguaccucucuugaaga

SEQ ID NO: 545042 - RNA, 19 nt, Artificial Sequence
  Description of Artificial Sequence: Synthetic oligonucleotide
ucagauuuggguggugugc

SEQ ID NO: 545043 - RNA, 19 nt, Artificial Sequence
  Description of Artificial Sequence: Synthetic oligonucleotide
acgcuuauuaucaaugaug

SEQ ID NO: 545044 - RNA, 19 nt, Artificial Sequence
  Description of Artificial Sequence: Synthetic oligonucleotide
uauaacagccauccuggau

SEQ ID NO: 545045 - RNA, 19 nt, Artificial Sequence
  Description of Artificial Sequence: Synthetic oligonucleotide
uaacgucucagucauccuc

SEQ ID NO: 545046 - RNA, 19 nt, Artificial Sequence
  Description of Artificial Sequence: Synthetic oligonucleotide
ucuguguuggaugaucgac

SEQ ID NO: 545047 - RNA, 19 nt, Artificial Sequence
  Description of Artificial Sequence: Synthetic oligonucleotide
auuaaaagucaggacgucu

SEQ ID NO: 545048 - RNA, 19 nt, Artificial Sequence
  Description of Artificial Sequence: Synthetic oligonucleotide
uccacuagguccacauagc

SEQ ID NO: 545049 - RNA, 19 nt, Artificial Sequence
  Description of Artificial Sequence: Synthetic oligonucleotide
gauagaauggaaggaguuc

SEQ ID NO: 545050 - RNA, 19 nt, Artificial Sequence
  Description of Artificial Sequence: Synthetic oligonucleotide
acuucgcuaauaggcaccc

SEQ ID NO: 545051 - RNA, 19 nt, Artificial Sequence
  Description of Artificial Sequence: Synthetic oligonucleotide
ugugcgcauaaccuuuggc

SEQ ID NO: 545052 - RNA, 19 nt, Artificial Sequence
  Description of Artificial Sequence: Synthetic oligonucleotide
ugguuuugaccaagggaag

SEQ ID NO: 545053 - RNA, 19 nt, Artificial Sequence
  Description of Artificial Sequence: Synthetic oligonucleotide
cauagcugaacccacccuc

SEQ ID NO: 545054 - RNA, 19 nt, Artificial Sequence
  Description of Artificial Sequence: Synthetic oligonucleotide
agagcuagggccuggcgug

SEQ ID NO: 545055 - RNA, 19 nt, Artificial Sequence
  Description of Artificial Sequence: Synthetic oligonucleotide
agcaaaauauuggugggcu

SEQ ID NO: 545056 - RNA, 19 nt, Artificial Sequence
  Description of Artificial Sequence: Synthetic oligonucleotide
uucgcuaauaggcacccua

SEQ ID NO: 545057 - RNA, 19 nt, Artificial Sequence
  Description of Artificial Sequence: Synthetic oligonucleotide
agccauccuggauagaaug

SEQ ID NO: 545058 - RNA, 19 nt, Artificial Sequence
  Description of Artificial Sequence: Synthetic oligonucleotide
gacgucuccccucuguuug

SEQ ID NO: 545059 - RNA, 19 nt, Artificial Sequence
  Description of Artificial Sequence: Synthetic oligonucleotide
ccaaaucagauuugggugg

SEQ ID NO: 545060 - RNA, 19 nt, Artificial Sequence
  Description of Artificial Sequence: Synthetic oligonucleotide
caguguaccucucuugaag

SEQ ID NO: 545061 - RNA, 19 nt, Artificial Sequence
  Description of Artificial Sequence: Synthetic oligonucleotide
auagcugaacccacccucc

SEQ ID NO: 545062 - RNA, 19 nt, Artificial Sequence
  Description of Artificial Sequence: Synthetic oligonucleotide
aagaacucuaucugccuuu

SEQ ID NO: 545063 - RNA, 19 nt, Artificial Sequence
  Description of Artificial Sequence: Synthetic oligonucleotide
ugauccuacccuccgucgc

SEQ ID NO: 545064 - RNA, 19 nt, Artificial Sequence
  Description of Artificial Sequence: Synthetic oligonucleotide
ugggguggaagccugccug

SEQ ID NO: 545065 - RNA, 19 nt, Artificial Sequence
  Description of Artificial Sequence: Synthetic oligonucleotide
ugcgcauaaccuuuggcau

SEQ ID NO: 545066 - RNA, 19 nt, Artificial Sequence
  Description of Artificial Sequence: Synthetic oligonucleotide
uugagcccuacuuuguuuc

SEQ ID NO: 545067 - RNA, 19 nt, Artificial Sequence
  Description of Artificial Sequence: Synthetic oligonucleotide
uguaaccccuccacuaggu

SEQ ID NO: 545068 - RNA, 19 nt, Artificial Sequence
  Description of Artificial Sequence: Synthetic oligonucleotide
agaacuaguggagugugcu

SEQ ID NO: 545069 - RNA, 19 nt, Artificial Sequence
  Description of Artificial Sequence: Synthetic oligonucleotide
acucgagcccaccucuggc

SEQ ID NO: 545070 - RNA, 19 nt, Artificial Sequence
  Description of Artificial Sequence: Synthetic oligonucleotide
acuaguggagugugcuuuc

SEQ ID NO: 545071 - RNA, 19 nt, Artificial Sequence
  Description of Artificial Sequence: Synthetic oligonucleotide
ugccgaagaaugccugggg

SEQ ID NO: 545072 - RNA, 19 nt, Artificial Sequence
  Description of Artificial Sequence: Synthetic oligonucleotide
ucuaagcuacccaccuuca

SEQ ID NO: 545073 - RNA, 19 nt, Artificial Sequence
  Description of Artificial Sequence: Synthetic oligonucleotide
gauuuggaggcagaacaug

SEQ ID NO: 545074 - RNA, 19 nt, Artificial Sequence
  Description of Artificial Sequence: Synthetic oligonucleotide
caugcuuagcaccucguuc

SEQ ID NO: 545075 - RNA, 19 nt, Artificial Sequence
  Description of Artificial Sequence: Synthetic oligonucleotide
uagagccacccucacaaac

SEQ ID NO: 545076 - RNA, 19 nt, Artificial Sequence
  Description of Artificial Sequence: Synthetic oligonucleotide
uuuauguauucuccugcua

SEQ ID NO: 545077 - RNA, 19 nt, Artificial Sequence
  Description of Artificial Sequence: Synthetic oligonucleotide
agcugaacccacccucccc

SEQ ID NO: 545078 - RNA, 19 nt, Artificial Sequence
  Description of Artificial Sequence: Synthetic oligonucleotide
uagaauggaaggaguucca

SEQ ID NO: 545079 - RNA, 19 nt, Artificial Sequence
  Description of Artificial Sequence: Synthetic oligonucleotide
aacuaaacgguucguucuu

SEQ ID NO: 545080 - RNA, 19 nt, Artificial Sequence
  Description of Artificial Sequence: Synthetic oligonucleotide
auguaaccccuccacuagg

SEQ ID NO: 545081 - RNA, 19 nt, Artificial Sequence
  Description of Artificial Sequence: Synthetic oligonucleotide
aaacuauaacagccauccu

SEQ ID NO: 545082 - RNA, 19 nt, Artificial Sequence
  Description of Artificial Sequence: Synthetic oligonucleotide
uuucaaccccggcacaccu

SEQ ID NO: 545083 - RNA, 19 nt, Artificial Sequence
  Description of Artificial Sequence: Synthetic oligonucleotide
agaggcgaugcauguccgc

SEQ ID NO: 545084 - RNA, 19 nt, Artificial Sequence
  Description of Artificial Sequence: Synthetic oligonucleotide
uauucccuuggaaauggua

SEQ ID NO: 545085 - RNA, 19 nt, Artificial Sequence
  Description of Artificial Sequence: Synthetic oligonucleotide
uccaacugacugaggagga

SEQ ID NO: 545086 - RNA, 19 nt, Artificial Sequence
  Description of Artificial Sequence: Synthetic oligonucleotide
aacuaguggagugugcuuu

SEQ ID NO: 545087 - RNA, 19 nt, Artificial Sequence
  Description of Artificial Sequence: Synthetic oligonucleotide
ugcuugauucauagacccc

SEQ ID NO: 545088 - RNA, 19 nt, Artificial Sequence
  Description of Artificial Sequence: Synthetic oligonucleotide
cccaaaucagauuugggug

SEQ ID NO: 545089 - RNA, 19 nt, Artificial Sequence
  Description of Artificial Sequence: Synthetic oligonucleotide
augcauguccgccucucuc

SEQ ID NO: 545090 - RNA, 19 nt, Artificial Sequence
  Description of Artificial Sequence: Synthetic oligonucleotide
ccccuaaacuauaacagcc

SEQ ID NO: 545091 - RNA, 19 nt, Artificial Sequence
  Description of Artificial Sequence: Synthetic oligonucleotide
auuuggaggcagaacauga

SEQ ID NO: 545092 - RNA, 19 nt, Artificial Sequence
  Description of Artificial Sequence: Synthetic oligonucleotide
aacaacggaaggauuuggu

SEQ ID NO: 545093 - RNA, 19 nt, Artificial Sequence
  Description of Artificial Sequence: Synthetic oligonucleotide
gauccuacccuccgucgcc

SEQ ID NO: 545094 - RNA, 19 nt, Artificial Sequence
  Description of Artificial Sequence: Synthetic oligonucleotide
aaauauuggugggcuucag

SEQ ID NO: 545095 - RNA, 19 nt, Artificial Sequence
  Description of Artificial Sequence: Synthetic oligonucleotide
ucaguccgcucaucgauga

SEQ ID NO: 545096 - RNA, 19 nt, Artificial Sequence
  Description of Artificial Sequence: Synthetic oligonucleotide
ggauuuggucuucagucag

SEQ ID NO: 545097 - RNA, 19 nt, Artificial Sequence
  Description of Artificial Sequence: Synthetic oligonucleotide
aaaugguaacuaaacgguu

SEQ ID NO: 545098 - RNA, 19 nt, Artificial Sequence
  Description of Artificial Sequence: Synthetic oligonucleotide
acaccuucggccagguccc

SEQ ID NO: 545099 - RNA, 19 nt, Artificial Sequence
  Description of Artificial Sequence: Synthetic oligonucleotide
ucgcaaugccgaagaaugc

SEQ ID NO: 545100 - RNA, 19 nt, Artificial Sequence
  Description of Artificial Sequence: Synthetic oligonucleotide
cugauccuacccuccgucg

SEQ ID NO: 545101 - RNA, 19 nt, Artificial Sequence
  Description of Artificial Sequence: Synthetic oligonucleotide
cacuagguccacauagcug

SEQ ID NO: 545102 - RNA, 19 nt, Artificial Sequence
  Description of Artificial Sequence: Synthetic oligonucleotide
gacucgagcccaccucugg

SEQ ID NO: 545103 - RNA, 19 nt, Artificial Sequence
  Description of Artificial Sequence: Synthetic oligonucleotide
ucuggcugauccuacccuc

SEQ ID NO: 545104 - RNA, 19 nt, Artificial Sequence
  Description of Artificial Sequence: Synthetic oligonucleotide
guacacugaggguuuagga

SEQ ID NO: 545105 - RNA, 19 nt, Artificial Sequence
  Description of Artificial Sequence: Synthetic oligonucleotide
ucccacuucucaguacagg

SEQ ID NO: 545106 - RNA, 19 nt, Artificial Sequence
  Description of Artificial Sequence: Synthetic oligonucleotide
agauacccagcaacaacgg

SEQ ID NO: 545107 - RNA, 19 nt, Artificial Sequence
  Description of Artificial Sequence: Synthetic oligonucleotide
aggucccgcucucacgccc

SEQ ID NO: 545108 - RNA, 19 nt, Artificial Sequence
  Description of Artificial Sequence: Synthetic oligonucleotide
uggcaaaccugcugggcug

SEQ ID NO: 545109 - RNA, 19 nt, Artificial Sequence
  Description of Artificial Sequence: Synthetic oligonucleotide
uucaugcuuagcaccucgu

SEQ ID NO: 545110 - RNA, 19 nt, Artificial Sequence
  Description of Artificial Sequence: Synthetic oligonucleotide
caaugccgaagaaugccug

SEQ ID NO: 545111 - RNA, 19 nt, Artificial Sequence
  Description of Artificial Sequence: Synthetic oligonucleotide
cuaagcuacccaccuucag

SEQ ID NO: 545112 - RNA, 19 nt, Artificial Sequence
  Description of Artificial Sequence: Synthetic oligonucleotide
gcuauucccuuggaaaugg

SEQ ID NO: 545113 - RNA, 19 nt, Artificial Sequence
  Description of Artificial Sequence: Synthetic oligonucleotide
gaggugcgggacucgagcc

SEQ ID NO: 545114 - RNA, 19 nt, Artificial Sequence
  Description of Artificial Sequence: Synthetic oligonucleotide
gauacccagcaacaacgga

SEQ ID NO: 545115 - RNA, 19 nt, Artificial Sequence
  Description of Artificial Sequence: Synthetic oligonucleotide
auagaccccaaguccauua

SEQ ID NO: 545116 - RNA, 19 nt, Artificial Sequence
  Description of Artificial Sequence: Synthetic oligonucleotide
agaccugucugcugccaag

SEQ ID NO: 545117 - RNA, 19 nt, Artificial Sequence
  Description of Artificial Sequence: Synthetic oligonucleotide
caacaacggaaggauuugg

SEQ ID NO: 545118 - RNA, 19 nt, Artificial Sequence
  Description of Artificial Sequence: Synthetic oligonucleotide
cuugccccuaaacuauaac

SEQ ID NO: 545119 - RNA, 19 nt, Artificial Sequence
  Description of Artificial Sequence: Synthetic oligonucleotide
caguacaggcagaaaacca

SEQ ID NO: 545120 - RNA, 19 nt, Artificial Sequence
  Description of Artificial Sequence: Synthetic oligonucleotide
cacugaggguuuaggaaug

SEQ ID NO: 545121 - RNA, 19 nt, Artificial Sequence
  Description of Artificial Sequence: Synthetic oligonucleotide
cauagagcccaaaagcugu

SEQ ID NO: 545122 - RNA, 19 nt, Artificial Sequence
  Description of Artificial Sequence: Synthetic oligonucleotide
acaugaugugcgcccagca

SEQ ID NO: 545123 - RNA, 19 nt, Artificial Sequence
  Description of Artificial Sequence: Synthetic oligonucleotide
gguuguuugugccaucaca

SEQ ID NO: 545124 - RNA, 19 nt, Artificial Sequence
  Description of Artificial Sequence: Synthetic oligonucleotide
ucauagaccccaaguccau

SEQ ID NO: 545125 - RNA, 19 nt, Artificial Sequence
  Description of Artificial Sequence: Synthetic oligonucleotide
cacaguguaccucucuuga

SEQ ID NO: 545126 - RNA, 19 nt, Artificial Sequence
  Description of Artificial Sequence: Synthetic oligonucleotide
ucguucuuucaaacaguaa

SEQ ID NO: 545127 - RNA, 19 nt, Artificial Sequence
  Description of Artificial Sequence: Synthetic oligonucleotide
ugacgucagcauguagggg

SEQ ID NO: 545128 - RNA, 19 nt, Artificial Sequence
  Description of Artificial Sequence: Synthetic oligonucleotide
ucgggcaugggguggcugc

SEQ ID NO: 545129 - RNA, 19 nt, Artificial Sequence
  Description of Artificial Sequence: Synthetic oligonucleotide
gcuaauaggcacccuagga

SEQ ID NO: 545130 - RNA, 19 nt, Artificial Sequence
  Description of Artificial Sequence: Synthetic oligonucleotide
guuuauguauucuccugcu

SEQ ID NO: 545131 - RNA, 19 nt, Artificial Sequence
  Description of Artificial Sequence: Synthetic oligonucleotide
cacccuaggcuccuagccc

SEQ ID NO: 545132 - RNA, 19 nt, Artificial Sequence
  Description of Artificial Sequence: Synthetic oligonucleotide
uuagcaccucguucuuuca

SEQ ID NO: 545133 - RNA, 19 nt, Artificial Sequence
  Description of Artificial Sequence: Synthetic oligonucleotide
guagagcuagggccuggcg

SEQ ID NO: 545134 - RNA, 19 nt, Artificial Sequence
  Description of Artificial Sequence: Synthetic oligonucleotide
gacaggaaugugagggcgc

SEQ ID NO: 545135 - RNA, 19 nt, Artificial Sequence
  Description of Artificial Sequence: Synthetic oligonucleotide
acccuaggcuccuagccca

SEQ ID NO: 545136 - RNA, 19 nt, Artificial Sequence
  Description of Artificial Sequence: Synthetic oligonucleotide
uaagggccuuccccaaaca

SEQ ID NO: 545137 - RNA, 19 nt, Artificial Sequence
  Description of Artificial Sequence: Synthetic oligonucleotide
ugucgcaaugccgaagaau

SEQ ID NO: 545138 - RNA, 19 nt, Artificial Sequence
  Description of Artificial Sequence: Synthetic oligonucleotide
caugggguggcugcgcagg

SEQ ID NO: 545139 - RNA, 19 nt, Artificial Sequence
  Description of Artificial Sequence: Synthetic oligonucleotide
aaaucagauuuggguggug

SEQ ID NO: 545140 - RNA, 19 nt, Artificial Sequence
  Description of Artificial Sequence: Synthetic oligonucleotide
uagaccccaaguccauuaa

SEQ ID NO: 545141 - RNA, 19 nt, Artificial Sequence
  Description of Artificial Sequence: Synthetic oligonucleotide
ugagcccuacuuuguuuca

SEQ ID NO: 545142 - RNA, 19 nt, Artificial Sequence
  Description of Artificial Sequence: Synthetic oligonucleotide
guaggggugggcuuccauc

SEQ ID NO: 545143 - RNA, 19 nt, Artificial Sequence
  Description of Artificial Sequence: Synthetic oligonucleotide
guggaagaggcgaugcaug

SEQ ID NO: 545144 - RNA, 19 nt, Artificial Sequence
  Description of Artificial Sequence: Synthetic oligonucleotide
accccggcacaccuucggc

SEQ ID NO: 545145 - RNA, 19 nt, Artificial Sequence
  Description of Artificial Sequence: Synthetic oligonucleotide
cuggcgugagcccuccacc

SEQ ID NO: 545146 - RNA, 19 nt, Artificial Sequence
  Description of Artificial Sequence: Synthetic oligonucleotide
uccccucuguuuguguucc

SEQ ID NO: 545147 - RNA, 19 nt, Artificial Sequence
  Description of Artificial Sequence: Synthetic oligonucleotide
agcccuacuuuguuucacu

SEQ ID NO: 545148 - RNA, 19 nt, Artificial Sequence
  Description of Artificial Sequence: Synthetic oligonucleotide
agugcguggcccauaacgu

SEQ ID NO: 545149 - RNA, 19 nt, Artificial Sequence
  Description of Artificial Sequence: Synthetic oligonucleotide
aguccgcucaucgaugaca

SEQ ID NO: 545150 - RNA, 19 nt, Artificial Sequence
  Description of Artificial Sequence: Synthetic oligonucleotide
gaugggcgggaacaaggca

SEQ ID NO: 545151 - RNA, 19 nt, Artificial Sequence
  Description of Artificial Sequence: Synthetic oligonucleotide
gguuuugaccaagggaagc

SEQ ID NO: 545152 - RNA, 19 nt, Artificial Sequence
  Description of Artificial Sequence: Synthetic oligonucleotide
uuguacacugaggguuuag

SEQ ID NO: 545153 - RNA, 19 nt, Artificial Sequence
  Description of Artificial Sequence: Synthetic oligonucleotide
acucacccuaggcuccuag

SEQ ID NO: 545154 - RNA, 19 nt, Artificial Sequence
  Description of Artificial Sequence: Synthetic oligonucleotide
guuugugccaucacaccuc

SEQ ID NO: 545155 - RNA, 19 nt, Artificial Sequence
  Description of Artificial Sequence: Synthetic oligonucleotide
cucacccuaggcuccuagc

SEQ ID NO: 545156 - RNA, 19 nt, Artificial Sequence
  Description of Artificial Sequence: Synthetic oligonucleotide
uggaugcaugcuugauuca

SEQ ID NO: 545157 - RNA, 19 nt, Artificial Sequence
  Description of Artificial Sequence: Synthetic oligonucleotide
cuugagcuaugcuauuaaa

SEQ ID NO: 545158 - RNA, 19 nt, Artificial Sequence
  Description of Artificial Sequence: Synthetic oligonucleotide
cuuucaaccccggcacacc

SEQ ID NO: 545159 - RNA, 19 nt, Artificial Sequence
  Description of Artificial Sequence: Synthetic oligonucleotide
cucguucuuucaaacagua

SEQ ID NO: 545160 - RNA, 19 nt, Artificial Sequence
  Description of Artificial Sequence: Synthetic oligonucleotide
gaaguugccuugguccuuc

SEQ ID NO: 545161 - RNA, 19 nt, Artificial Sequence
  Description of Artificial Sequence: Synthetic oligonucleotide
gcuugauucauagacccca

SEQ ID NO: 545162 - RNA, 19 nt, Artificial Sequence
  Description of Artificial Sequence: Synthetic oligonucleotide
ucuugcuuacuggggcuug

SEQ ID NO: 545163 - RNA, 19 nt, Artificial Sequence
  Description of Artificial Sequence: Synthetic oligonucleotide
cuagggaccagacaucagu

SEQ ID NO: 545164 - RNA, 19 nt, Artificial Sequence
  Description of Artificial Sequence: Synthetic oligonucleotide
cgcuuauuaucaaugauga

SEQ ID NO: 545165 - RNA, 19 nt, Artificial Sequence
  Description of Artificial Sequence: Synthetic oligonucleotide
gcucaugacacaggauucg

SEQ ID NO: 545166 - RNA, 19 nt, Artificial Sequence
  Description of Artificial Sequence: Synthetic oligonucleotide
ggaggugcgggacucgagc

SEQ ID NO: 545167 - RNA, 19 nt, Artificial Sequence
  Description of Artificial Sequence: Synthetic oligonucleotide
guuccccgggagcagacac

SEQ ID NO: 545168 - RNA, 19 nt, Artificial Sequence
  Description of Artificial Sequence: Synthetic oligonucleotide
ggaugaucgacugcuuuug

SEQ ID NO: 545169 - RNA, 19 nt, Artificial Sequence
  Description of Artificial Sequence: Synthetic oligonucleotide
cauguccgccucucucugg

SEQ ID NO: 545170 - RNA, 19 nt, Artificial Sequence
  Description of Artificial Sequence: Synthetic oligonucleotide
auccuacccuccgucgccc

SEQ ID NO: 545171 - RNA, 19 nt, Artificial Sequence
  Description of Artificial Sequence: Synthetic oligonucleotide
uggcgugagcccuccaccu

SEQ ID NO: 545172 - RNA, 19 nt, Artificial Sequence
  Description of Artificial Sequence: Synthetic oligonucleotide
gguccacauagcugaaccc

SEQ ID NO: 545173 - RNA, 19 nt, Artificial Sequence
  Description of Artificial Sequence: Synthetic oligonucleotide
cugugcgcauaaccuuugg

SEQ ID NO: 545174 - RNA, 19 nt, Artificial Sequence
  Description of Artificial Sequence: Synthetic oligonucleotide
cuuacuggggcuugagcua

SEQ ID NO: 545175 - RNA, 19 nt, Artificial Sequence
  Description of Artificial Sequence: Synthetic oligonucleotide
ucgacugcuuuugcucuug

SEQ ID NO: 545176 - RNA, 19 nt, Artificial Sequence
  Description of Artificial Sequence: Synthetic oligonucleotide
auucgcuucagggcguaga

SEQ ID NO: 545177 - RNA, 19 nt, Artificial Sequence
  Description of Artificial Sequence: Synthetic oligonucleotide
cagugaaggaugaaaacuu

SEQ ID NO: 545178 - RNA, 19 nt, Artificial Sequence
  Description of Artificial Sequence: Synthetic oligonucleotide
ugguaacuaaacgguucgu

SEQ ID NO: 545179 - RNA, 19 nt, Artificial Sequence
  Description of Artificial Sequence: Synthetic oligonucleotide
gcuuauuaucaaugaugac

SEQ ID NO: 545180 - RNA, 19 nt, Artificial Sequence
  Description of Artificial Sequence: Synthetic oligonucleotide
agaccccaaguccauuaaa

SEQ ID NO: 545181 - RNA, 19 nt, Artificial Sequence
  Description of Artificial Sequence: Synthetic oligonucleotide
ugaagagguaacgcuuauu

SEQ ID NO: 545182 - RNA, 19 nt, Artificial Sequence
  Description of Artificial Sequence: Synthetic oligonucleotide
gcugucgcaaugccgaaga

SEQ ID NO: 545183 - RNA, 19 nt, Artificial Sequence
  Description of Artificial Sequence: Synthetic oligonucleotide
ggcguagaaguguccauca

SEQ ID NO: 545184 - RNA, 19 nt, Artificial Sequence
  Description of Artificial Sequence: Synthetic oligonucleotide
cguagaaguguccaucaug

SEQ ID NO: 545185 - RNA, 19 nt, Artificial Sequence
  Description of Artificial Sequence: Synthetic oligonucleotide
aucaguccgcucaucgaug

SEQ ID NO: 545186 - RNA, 19 nt, Artificial Sequence
  Description of Artificial Sequence: Synthetic oligonucleotide
ccgcucaucgaugacacag

SEQ ID NO: 545187 - RNA, 19 nt, Artificial Sequence
  Description of Artificial Sequence: Synthetic oligonucleotide
uccgccucucucugggccu

SEQ ID NO: 545188 - RNA, 19 nt, Artificial Sequence
  Description of Artificial Sequence: Synthetic oligonucleotide
gcuaugcuauuaaaaguca

SEQ ID NO: 545189 - RNA, 19 nt, Artificial Sequence
  Description of Artificial Sequence: Synthetic oligonucleotide
uccuacccuccgucgcccg

SEQ ID NO: 545190 - RNA, 19 nt, Artificial Sequence
  Description of Artificial Sequence: Synthetic oligonucleotide
guaaccccuccacuagguc

SEQ ID NO: 545191 - RNA, 19 nt, Artificial Sequence
  Description of Artificial Sequence: Synthetic oligonucleotide
ggaauggggacugggccag

SEQ ID NO: 545192 - RNA, 19 nt, Artificial Sequence
  Description of Artificial Sequence: Synthetic oligonucleotide
cuauaacagccauccugga

SEQ ID NO: 545193 - RNA, 19 nt, Artificial Sequence
  Description of Artificial Sequence: Synthetic oligonucleotide
agguaacgcuuauuaucaa

SEQ ID NO: 545194 - RNA, 19 nt, Artificial Sequence
  Description of Artificial Sequence: Synthetic oligonucleotide
cagccuagggaccagacau

SEQ ID NO: 545195 - RNA, 19 nt, Artificial Sequence
  Description of Artificial Sequence: Synthetic oligonucleotide
gaugcaugcuugauucaua

SEQ ID NO: 545196 - RNA, 19 nt, Artificial Sequence
  Description of Artificial Sequence: Synthetic oligonucleotide
aagcugucgcaaugccgaa

SEQ ID NO: 545197 - RNA, 19 nt, Artificial Sequence
  Description of Artificial Sequence: Synthetic oligonucleotide
gcgugagcccuccaccugg

SEQ ID NO: 545198 - RNA, 19 nt, Artificial Sequence
  Description of Artificial Sequence: Synthetic oligonucleotide
gcaacaacggaaggauuug

SEQ ID NO: 545199 - RNA, 19 nt, Artificial Sequence
  Description of Artificial Sequence: Synthetic oligonucleotide
ucucacgcccgucgggcau

SEQ ID NO: 545200 - RNA, 19 nt, Artificial Sequence
  Description of Artificial Sequence: Synthetic oligonucleotide
gccgcuucuuucaaccccg

SEQ ID NO: 545201 - RNA, 19 nt, Artificial Sequence
  Description of Artificial Sequence: Synthetic oligonucleotide
guguaccucucuugaagaa

SEQ ID NO: 545202 - RNA, 19 nt, Artificial Sequence
  Description of Artificial Sequence: Synthetic oligonucleotide
gguugacgucagcauguag

SEQ ID NO: 545203 - RNA, 19 nt, Artificial Sequence
  Description of Artificial Sequence: Synthetic oligonucleotide
ugcaggccgcuucuuucaa

SEQ ID NO: 545204 - RNA, 19 nt, Artificial Sequence
  Description of Artificial Sequence: Synthetic oligonucleotide
cagguugacgucagcaugu

SEQ ID NO: 545205 - RNA, 19 nt, Artificial Sequence
  Description of Artificial Sequence: Synthetic oligonucleotide
gcgcauaaccuuuggcaug

SEQ ID NO: 545206 - RNA, 19 nt, Artificial Sequence
  Description of Artificial Sequence: Synthetic oligonucleotide
agcugucgcaaugccgaag

SEQ ID NO: 545207 - RNA, 19 nt, Artificial Sequence
  Description of Artificial Sequence: Synthetic oligonucleotide
gagcccuacuuuguuucac

SEQ ID NO: 545208 - RNA, 19 nt, Artificial Sequence
  Description of Artificial Sequence: Synthetic oligonucleotide
ugcugccaagcagucaaau

SEQ ID NO: 545209 - RNA, 19 nt, Artificial Sequence
  Description of Artificial Sequence: Synthetic oligonucleotide
gcugauccuacccuccguc

SEQ ID NO: 545210 - RNA, 19 nt, Artificial Sequence
  Description of Artificial Sequence: Synthetic oligonucleotide
ggcuguucuaagcuaccca

SEQ ID NO: 545211 - RNA, 19 nt, Artificial Sequence
  Description of Artificial Sequence: Synthetic oligonucleotide
gcagaacaugaugugcgcc

SEQ ID NO: 545212 - RNA, 19 nt, Artificial Sequence
  Description of Artificial Sequence: Synthetic oligonucleotide
cuacccuccgucgcccggg

SEQ ID NO: 545213 - RNA, 19 nt, Artificial Sequence
  Description of Artificial Sequence: Synthetic oligonucleotide
agggcguagaaguguccau

SEQ ID NO: 545214 - RNA, 19 nt, Artificial Sequence
  Description of Artificial Sequence: Synthetic oligonucleotide
gugcguggcccauaacguc

SEQ ID NO: 545215 - RNA, 19 nt, Artificial Sequence
  Description of Artificial Sequence: Synthetic oligonucleotide
aggacgucuccccucuguu

SEQ ID NO: 545216 - RNA, 19 nt, Artificial Sequence
  Description of Artificial Sequence: Synthetic oligonucleotide
cccuaaacuauaacagcca

SEQ ID NO: 545217 - RNA, 19 nt, Artificial Sequence
  Description of Artificial Sequence: Synthetic oligonucleotide
uucaaccccggcacaccuu

SEQ ID NO: 545218 - RNA, 19 nt, Artificial Sequence
  Description of Artificial Sequence: Synthetic oligonucleotide
auggugcaccgcugggcug

SEQ ID NO: 545219 - RNA, 19 nt, Artificial Sequence
  Description of Artificial Sequence: Synthetic oligonucleotide
acuaaacgguucguucuuu

SEQ ID NO: 545220 - RNA, 19 nt, Artificial Sequence
  Description of Artificial Sequence: Synthetic oligonucleotide
gguaacgcuuauuaucaau

SEQ ID NO: 545221 - RNA, 19 nt, Artificial Sequence
  Description of Artificial Sequence: Synthetic oligonucleotide
gcaccucguucuuucaaac

SEQ ID NO: 545222 - RNA, 19 nt, Artificial Sequence
  Description of Artificial Sequence: Synthetic oligonucleotide
ccaaaguuccugggcauag

SEQ ID NO: 545223 - RNA, 19 nt, Artificial Sequence
  Description of Artificial Sequence: Synthetic oligonucleotide
gcuugagcuaugcuauuaa

SEQ ID NO: 545224 - RNA, 19 nt, Artificial Sequence
  Description of Artificial Sequence: Synthetic oligonucleotide
acgucagcauguaggggug

SEQ ID NO: 545225 - RNA, 19 nt, Artificial Sequence
  Description of Artificial Sequence: Synthetic oligonucleotide
aagccacgaggcgaaggau

SEQ ID NO: 545226 - RNA, 19 nt, Artificial Sequence
  Description of Artificial Sequence: Synthetic oligonucleotide
gauucgcuucagggcguag

SEQ ID NO: 545227 - RNA, 19 nt, Artificial Sequence
  Description of Artificial Sequence: Synthetic oligonucleotide
aucgacugcuuuugcucuu

SEQ ID NO: 545228 - RNA, 19 nt, Artificial Sequence
  Description of Artificial Sequence: Synthetic oligonucleotide
caucaguccgcucaucgau

SEQ ID NO: 545229 - RNA, 19 nt, Artificial Sequence
  Description of Artificial Sequence: Synthetic oligonucleotide
ggcaaaccugcugggcugg

SEQ ID NO: 545230 - RNA, 19 nt, Artificial Sequence
  Description of Artificial Sequence: Synthetic oligonucleotide
acgucuccccucuguuugu

SEQ ID NO: 545231 - RNA, 19 nt, Artificial Sequence
  Description of Artificial Sequence: Synthetic oligonucleotide
gaugcauguccgccucucu

SEQ ID NO: 545232 - RNA, 19 nt, Artificial Sequence
  Description of Artificial Sequence: Synthetic oligonucleotide
uccgcucaucgaugacaca

SEQ ID NO: 545233 - RNA, 19 nt, Artificial Sequence
  Description of Artificial Sequence: Synthetic oligonucleotide
cagggcguagaagugucca

SEQ ID NO: 545234 - RNA, 19 nt, Artificial Sequence
  Description of Artificial Sequence: Synthetic oligonucleotide
cuaucucauuccacagugu

SEQ ID NO: 545235 - RNA, 19 nt, Artificial Sequence
  Description of Artificial Sequence: Synthetic oligonucleotide
gaacuaguggagugugcuu

SEQ ID NO: 545236 - RNA, 19 nt, Artificial Sequence
  Description of Artificial Sequence: Synthetic oligonucleotide
cccagcggagcaugcaggc

SEQ ID NO: 545237 - RNA, 19 nt, Artificial Sequence
  Description of Artificial Sequence: Synthetic oligonucleotide
caguuccccgggagcagac

SEQ ID NO: 545238 - RNA, 19 nt, Artificial Sequence
  Description of Artificial Sequence: Synthetic oligonucleotide
cgcuaauaggcacccuagg

SEQ ID NO: 545239 - RNA, 19 nt, Artificial Sequence
  Description of Artificial Sequence: Synthetic oligonucleotide
caggucccgcucucacgcc

SEQ ID NO: 545240 - RNA, 19 nt, Artificial Sequence
  Description of Artificial Sequence: Synthetic oligonucleotide
cuugcuuacuggggcuuga

SEQ ID NO: 545241 - RNA, 19 nt, Artificial Sequence
  Description of Artificial Sequence: Synthetic oligonucleotide
uacccuccgucgcccggga

SEQ ID NO: 545242 - RNA, 19 nt, Artificial Sequence
  Description of Artificial Sequence: Synthetic oligonucleotide
aggauucgcuucagggcgu

SEQ ID NO: 545243 - RNA, 19 nt, Artificial Sequence
  Description of Artificial Sequence: Synthetic oligonucleotide
gcccuacuuuguuucacuc

SEQ ID NO: 545244 - RNA, 19 nt, Artificial Sequence
  Description of Artificial Sequence: Synthetic oligonucleotide
caaaucagauuuggguggu

SEQ ID NO: 545245 - RNA, 19 nt, Artificial Sequence
  Description of Artificial Sequence: Synthetic oligonucleotide
cuaaacgguucguucuuuu

SEQ ID NO: 545246 - RNA, 19 nt, Artificial Sequence
  Description of Artificial Sequence: Synthetic oligonucleotide
ggcccaagcuucguuguac

SEQ ID NO: 545247 - RNA, 19 nt, Artificial Sequence
  Description of Artificial Sequence: Synthetic oligonucleotide
cccgggaccgagcccaggg

SEQ ID NO: 545248 - RNA, 19 nt, Artificial Sequence
  Description of Artificial Sequence: Synthetic oligonucleotide
ugcgggacucgagcccacc

SEQ ID NO: 545249 - RNA, 19 nt, Artificial Sequence
  Description of Artificial Sequence: Synthetic oligonucleotide
gggcguagaaguguccauc

SEQ ID NO: 545250 - RNA, 19 nt, Artificial Sequence
  Description of Artificial Sequence: Synthetic oligonucleotide
cuagguccacauagcugaa

SEQ ID NO: 545251 - RNA, 19 nt, Artificial Sequence
  Description of Artificial Sequence: Synthetic oligonucleotide
gagccacccucacaaacuu

SEQ ID NO: 545252 - RNA, 19 nt, Artificial Sequence
  Description of Artificial Sequence: Synthetic oligonucleotide
caguccgcucaucgaugac

SEQ ID NO: 545253 - RNA, 19 nt, Artificial Sequence
  Description of Artificial Sequence: Synthetic oligonucleotide
cccgguaggagauggugca

SEQ ID NO: 545254 - RNA, 19 nt, Artificial Sequence
  Description of Artificial Sequence: Synthetic oligonucleotide
cccuccgucgcccgggacc

SEQ ID NO: 545255 - RNA, 19 nt, Artificial Sequence
  Description of Artificial Sequence: Synthetic oligonucleotide
gguaacuaaacgguucguu

SEQ ID NO: 545256 - RNA, 19 nt, Artificial Sequence
  Description of Artificial Sequence: Synthetic oligonucleotide
ccaagcagucaaaucuuaa

SEQ ID NO: 545257 - RNA, 19 nt, Artificial Sequence
  Description of Artificial Sequence: Synthetic oligonucleotide
acccuccgucgcccgggac

SEQ ID NO: 545258 - RNA, 19 nt, Artificial Sequence
  Description of Artificial Sequence: Synthetic oligonucleotide
aguuccccgggagcagaca

SEQ ID NO: 545259 - RNA, 19 nt, Artificial Sequence
  Description of Artificial Sequence: Synthetic oligonucleotide
cucuggcugauccuacccu

SEQ ID NO: 545260 - RNA, 19 nt, Artificial Sequence
  Description of Artificial Sequence: Synthetic oligonucleotide
cuucaaggauggucuuucu

SEQ ID NO: 545261 - RNA, 19 nt, Artificial Sequence
  Description of Artificial Sequence: Synthetic oligonucleotide
ggauagaauggaaggaguu

SEQ ID NO: 545262 - RNA, 19 nt, Artificial Sequence
  Description of Artificial Sequence: Synthetic oligonucleotide
ggcgugagcccuccaccug

SEQ ID NO: 545263 - RNA, 19 nt, Artificial Sequence
  Description of Artificial Sequence: Synthetic oligonucleotide
cccaagcuucguuguacac

SEQ ID NO: 545264 - RNA, 19 nt, Artificial Sequence
  Description of Artificial Sequence: Synthetic oligonucleotide
cucgagcccaccucuggcu

SEQ ID NO: 545265 - RNA, 19 nt, Artificial Sequence
  Description of Artificial Sequence: Synthetic oligonucleotide
ggucccgcucucacgcccg

SEQ ID NO: 545266 - RNA, 19 nt, Artificial Sequence
  Description of Artificial Sequence: Synthetic oligonucleotide
gcuaccagauuuggaggca

SEQ ID NO: 545267 - RNA, 19 nt, Artificial Sequence
  Description of Artificial Sequence: Synthetic oligonucleotide
gcccagcggagcaugcagg

SEQ ID NO: 545268 - RNA, 19 nt, Artificial Sequence
  Description of Artificial Sequence: Synthetic oligonucleotide
cccauaacgucucagucau

SEQ ID NO: 545269 - RNA, 19 nt, Artificial Sequence
  Description of Artificial Sequence: Synthetic oligonucleotide
ccccaauuucuggaugaag

SEQ ID NO: 545270 - RNA, 19 nt, Artificial Sequence
  Description of Artificial Sequence: Synthetic oligonucleotide
caucgaugacacaguggcu

SEQ ID NO: 545271 - RNA, 19 nt, Artificial Sequence
  Description of Artificial Sequence: Synthetic oligonucleotide
ccuaaacuauaacagccau

SEQ ID NO: 545272 - RNA, 19 nt, Artificial Sequence
  Description of Artificial Sequence: Synthetic oligonucleotide
acccuaggacucagguuga

SEQ ID NO: 545273 - RNA, 19 nt, Artificial Sequence
  Description of Artificial Sequence: Synthetic oligonucleotide
cucacgcccgucgggcaug

SEQ ID NO: 545274 - RNA, 19 nt, Artificial Sequence
  Description of Artificial Sequence: Synthetic oligonucleotide
guucuaagcuacccaccuu

SEQ ID NO: 545275 - RNA, 19 nt, Artificial Sequence
  Description of Artificial Sequence: Synthetic oligonucleotide
cagcauguaggggugggcu

SEQ ID NO: 545276 - RNA, 19 nt, Artificial Sequence
  Description of Artificial Sequence: Synthetic oligonucleotide
agguugacgucagcaugua

SEQ ID NO: 545277 - RNA, 19 nt, Artificial Sequence
  Description of Artificial Sequence: Synthetic oligonucleotide
ccuccgucgcccgggaccg

SEQ ID NO: 545278 - RNA, 19 nt, Artificial Sequence
  Description of Artificial Sequence: Synthetic oligonucleotide
ggaugcaugcuugauucau

SEQ ID NO: 545279 - RNA, 19 nt, Artificial Sequence
  Description of Artificial Sequence: Synthetic oligonucleotide
gggaagcuuaaagaccugu

SEQ ID NO: 545280 - RNA, 19 nt, Artificial Sequence
  Description of Artificial Sequence: Synthetic oligonucleotide
guuguacacugaggguuua

SEQ ID NO: 545281 - RNA, 19 nt, Artificial Sequence
  Description of Artificial Sequence: Synthetic oligonucleotide
gcaaugccgaagaaugccu

SEQ ID NO: 545282 - RNA, 19 nt, Artificial Sequence
  Description of Artificial Sequence: Synthetic oligonucleotide
ccuacccuccgucgcccgg

SEQ ID NO: 545283 - RNA, 19 nt, Artificial Sequence
  Description of Artificial Sequence: Synthetic oligonucleotide
gucgggcaugggguggcug

SEQ ID NO: 545284 - RNA, 19 nt, Artificial Sequence
  Description of Artificial Sequence: Synthetic oligonucleotide
cugucgcaaugccgaagaa

SEQ ID NO: 545285 - RNA, 19 nt, Artificial Sequence
  Description of Artificial Sequence: Synthetic oligonucleotide
gcaaaauauuggugggcuu

SEQ ID NO: 545286 - RNA, 19 nt, Artificial Sequence
  Description of Artificial Sequence: Synthetic oligonucleotide
ccgcuucuuucaaccccgg

SEQ ID NO: 545287 - RNA, 19 nt, Artificial Sequence
  Description of Artificial Sequence: Synthetic oligonucleotide
ggcugcgcaggaggugcgg

SEQ ID NO: 545288 - RNA, 19 nt, Artificial Sequence
  Description of Artificial Sequence: Synthetic oligonucleotide
ccaagcuucguuguacacu

SEQ ID NO: 545289 - RNA, 19 nt, Artificial Sequence
  Description of Artificial Sequence: Synthetic oligonucleotide
ccucguucuuucaaacagu

SEQ ID NO: 545290 - RNA, 19 nt, Artificial Sequence
  Description of Artificial Sequence: Synthetic oligonucleotide
ggaccgagcccagggucug

SEQ ID NO: 545291 - RNA, 19 nt, Artificial Sequence
  Description of Artificial Sequence: Synthetic oligonucleotide
ccagcggagcaugcaggcc

SEQ ID NO: 545292 - RNA, 19 nt, Artificial Sequence
  Description of Artificial Sequence: Synthetic oligonucleotide
cccuacuuuguuucacucu

SEQ ID NO: 545293 - RNA, 19 nt, Artificial Sequence
  Description of Artificial Sequence: Synthetic oligonucleotide
gcuuugagcccuacuuugu

SEQ ID NO: 545294 - RNA, 19 nt, Artificial Sequence
  Description of Artificial Sequence: Synthetic oligonucleotide
gcaccgcugggcugcccag

SEQ ID NO: 545295 - RNA, 19 nt, Artificial Sequence
  Description of Artificial Sequence: Synthetic oligonucleotide
gugcuuucaaagggacccu

SEQ ID NO: 545296 - RNA, 19 nt, Artificial Sequence
  Description of Artificial Sequence: Synthetic oligonucleotide
caccuucggccaggucccg

SEQ ID NO: 545297 - RNA, 19 nt, Artificial Sequence
  Description of Artificial Sequence: Synthetic oligonucleotide
ccuaggcuccuagcccagg

SEQ ID NO: 545298 - RNA, 19 nt, Artificial Sequence
  Description of Artificial Sequence: Synthetic oligonucleotide
ccauaucauaagggccuuc

SEQ ID NO: 545299 - RNA, 19 nt, Artificial Sequence
  Description of Artificial Sequence: Synthetic oligonucleotide
cgucgcccgggaccgagcc

SEQ ID NO: 545300 - RNA, 19 nt, Artificial Sequence
  Description of Artificial Sequence: Synthetic oligonucleotide
cgcucucacgcccgucggg

SEQ ID NO: 545301 - RNA, 19 nt, Artificial Sequence
  Description of Artificial Sequence: Synthetic oligonucleotide
ggcugauccuacccuccgu

SEQ ID NO: 545302 - RNA, 19 nt, Artificial Sequence
  Description of Artificial Sequence: Synthetic oligonucleotide
cagucccucuucccaggcu

SEQ ID NO: 545303 - RNA, 19 nt, Artificial Sequence
  Description of Artificial Sequence: Synthetic oligonucleotide
cauagaccccaaguccauu

SEQ ID NO: 545304 - RNA, 19 nt, Artificial Sequence
  Description of Artificial Sequence: Synthetic oligonucleotide
cgaugcauguccgccucuc

SEQ ID NO: 545305 - RNA, 19 nt, Artificial Sequence
  Description of Artificial Sequence: Synthetic oligonucleotide
gcguagaaguguccaucau

SEQ ID NO: 545306 - RNA, 19 nt, Artificial Sequence
  Description of Artificial Sequence: Synthetic oligonucleotide
ggcuccuagcccagguacu

SEQ ID NO: 545307 - RNA, 19 nt, Artificial Sequence
  Description of Artificial Sequence: Synthetic oligonucleotide
cccuaggacucagguugac

SEQ ID NO: 545308 - RNA, 19 nt, Artificial Sequence
  Description of Artificial Sequence: Synthetic oligonucleotide
ggauucgcuucagggcgua

SEQ ID NO: 545309 - RNA, 19 nt, Artificial Sequence
  Description of Artificial Sequence: Synthetic oligonucleotide
cuucgcuaauaggcacccu

SEQ ID NO: 545310 - RNA, 19 nt, Artificial Sequence
  Description of Artificial Sequence: Synthetic oligonucleotide
gugcgggacucgagcccac

SEQ ID NO: 545311 - RNA, 19 nt, Artificial Sequence
  Description of Artificial Sequence: Synthetic oligonucleotide
cccugugcgcauaaccuuu

SEQ ID NO: 545312 - RNA, 19 nt, Artificial Sequence
  Description of Artificial Sequence: Synthetic oligonucleotide
gcgggacucgagcccaccu

SEQ ID NO: 545313 - RNA, 19 nt, Artificial Sequence
  Description of Artificial Sequence: Synthetic oligonucleotide
cguuguacacugaggguuu

SEQ ID NO: 545314 - RNA, 19 nt, Artificial Sequence
  Description of Artificial Sequence: Synthetic oligonucleotide
gggcgggaacaaggcaauc

SEQ ID NO: 545315 - RNA, 19 nt, Artificial Sequence
  Description of Artificial Sequence: Synthetic oligonucleotide
gugcaccgcugggcugccc

SEQ ID NO: 545316 - RNA, 19 nt, Artificial Sequence
  Description of Artificial Sequence: Synthetic oligonucleotide
gcgaugcauguccgccucu

SEQ ID NO: 545317 - RNA, 19 nt, Artificial Sequence
  Description of Artificial Sequence: Synthetic oligonucleotide
cggaaggauuuggucuuca

SEQ ID NO: 545318 - RNA, 19 nt, Artificial Sequence
  Description of Artificial Sequence: Synthetic oligonucleotide
ccaucacaccagucccucu

SEQ ID NO: 545319 - RNA, 19 nt, Artificial Sequence
  Description of Artificial Sequence: Synthetic oligonucleotide
gcauaaccuuuggcaugaa

SEQ ID NO: 545320 - RNA, 19 nt, Artificial Sequence
  Description of Artificial Sequence: Synthetic oligonucleotide
gcgcaggaggugcgggacu

SEQ ID NO: 545321 - RNA, 19 nt, Artificial Sequence
  Description of Artificial Sequence: Synthetic oligonucleotide
gcccaguccuguagagcua

SEQ ID NO: 545322 - RNA, 19 nt, Artificial Sequence
  Description of Artificial Sequence: Synthetic oligonucleotide
cccucuguuuguguuccuu

SEQ ID NO: 545323 - RNA, 19 nt, Artificial Sequence
  Description of Artificial Sequence: Synthetic oligonucleotide
ccgggaccgagcccagggu

SEQ ID NO: 545324 - RNA, 19 nt, Artificial Sequence
  Description of Artificial Sequence: Synthetic oligonucleotide
cuccgucgcccgggaccga

SEQ ID NO: 545325 - RNA, 19 nt, Artificial Sequence
  Description of Artificial Sequence: Synthetic oligonucleotide
ggccuuccccaaacaucau

SEQ ID NO: 545326 - RNA, 19 nt, Artificial Sequence
  Description of Artificial Sequence: Synthetic oligonucleotide
aaugacaugguccagggca

SEQ ID NO: 545327 - RNA, 19 nt, Artificial Sequence
  Description of Artificial Sequence: Synthetic oligonucleotide
uuugaugccgaucugaugu

SEQ ID NO: 545328 - RNA, 19 nt, Artificial Sequence
  Description of Artificial Sequence: Synthetic oligonucleotide
aagacuaccgaguugacca

SEQ ID NO: 545329 - RNA, 19 nt, Artificial Sequence
  Description of Artificial Sequence: Synthetic oligonucleotide
aaugagugcaacaugcagc

SEQ ID NO: 545330 - RNA, 19 nt, Artificial Sequence
  Description of Artificial Sequence: Synthetic oligonucleotide
aacccaaacaguuaaugag

SEQ ID NO: 545331 - RNA, 19 nt, Artificial Sequence
  Description of Artificial Sequence: Synthetic oligonucleotide
acaagggcuacccuaaugc

SEQ ID NO: 545332 - RNA, 19 nt, Artificial Sequence
  Description of Artificial Sequence: Synthetic oligonucleotide
uguagcuccaguuguaugg

SEQ ID NO: 545333 - RNA, 19 nt, Artificial Sequence
  Description of Artificial Sequence: Synthetic oligonucleotide
uguuuauucauuaacccaa

SEQ ID NO: 545334 - RNA, 19 nt, Artificial Sequence
  Description of Artificial Sequence: Synthetic oligonucleotide
acauuauccaacaugugcc

SEQ ID NO: 545335 - RNA, 19 nt, Artificial Sequence
  Description of Artificial Sequence: Synthetic oligonucleotide
cuugguauggcccugggcc

SEQ ID NO: 545336 - RNA, 19 nt, Artificial Sequence
  Description of Artificial Sequence: Synthetic oligonucleotide
aguagcguaaaucaaauua

SEQ ID NO: 545337 - RNA, 19 nt, Artificial Sequence
  Description of Artificial Sequence: Synthetic oligonucleotide
uucauuaacccaaacaguu

SEQ ID NO: 545338 - RNA, 19 nt, Artificial Sequence
  Description of Artificial Sequence: Synthetic oligonucleotide
aagcacucaucauugggcg

SEQ ID NO: 545339 - RNA, 19 nt, Artificial Sequence
  Description of Artificial Sequence: Synthetic oligonucleotide
auuacuguacggauggugc

SEQ ID NO: 545340 - RNA, 19 nt, Artificial Sequence
  Description of Artificial Sequence: Synthetic oligonucleotide
cacauuauccaacaugugc

SEQ ID NO: 545341 - RNA, 19 nt, Artificial Sequence
  Description of Artificial Sequence: Synthetic oligonucleotide
agccaaacacaucauaggg

SEQ ID NO: 545342 - RNA, 19 nt, Artificial Sequence
  Description of Artificial Sequence: Synthetic oligonucleotide
guuaaugagugcaacaugc

SEQ ID NO: 545343 - RNA, 19 nt, Artificial Sequence
  Description of Artificial Sequence: Synthetic oligonucleotide
aaggagucuaggcugauga

SEQ ID NO: 545344 - RNA, 19 nt, Artificial Sequence
  Description of Artificial Sequence: Synthetic oligonucleotide
uccauaagaacucgucccg

SEQ ID NO: 545345 - RNA, 19 nt, Artificial Sequence
  Description of Artificial Sequence: Synthetic oligonucleotide
uaaugagugcaacaugcag

SEQ ID NO: 545346 - RNA, 19 nt, Artificial Sequence
  Description of Artificial Sequence: Synthetic oligonucleotide
ugggguaucauuuucccca

SEQ ID NO: 545347 - RNA, 19 nt, Artificial Sequence
  Description of Artificial Sequence: Synthetic oligonucleotide
aacagugcguggugaacgc

SEQ ID NO: 545348 - RNA, 19 nt, Artificial Sequence
  Description of Artificial Sequence: Synthetic oligonucleotide
aaagagccgcuuuaccacg

SEQ ID NO: 545349 - RNA, 19 nt, Artificial Sequence
  Description of Artificial Sequence: Synthetic oligonucleotide
agcaucacuacacucuggg

SEQ ID NO: 545350 - RNA, 19 nt, Artificial Sequence
  Description of Artificial Sequence: Synthetic oligonucleotide
uguauggccucauaucugc

SEQ ID NO: 545351 - RNA, 19 nt, Artificial Sequence
  Description of Artificial Sequence: Synthetic oligonucleotide
uaccgaguugaccacaucc

SEQ ID NO: 545352 - RNA, 19 nt, Artificial Sequence
  Description of Artificial Sequence: Synthetic oligonucleotide
aggccacucaaucaguagc

SEQ ID NO: 545353 - RNA, 19 nt, Artificial Sequence
  Description of Artificial Sequence: Synthetic oligonucleotide
ucgaacacuagcaagucaa

SEQ ID NO: 545354 - RNA, 19 nt, Artificial Sequence
  Description of Artificial Sequence: Synthetic oligonucleotide
cacaucacgagccaccugg

SEQ ID NO: 545355 - RNA, 19 nt, Artificial Sequence
  Description of Artificial Sequence: Synthetic oligonucleotide
ugcauguccauccaacaca

SEQ ID NO: 545356 - RNA, 19 nt, Artificial Sequence
  Description of Artificial Sequence: Synthetic oligonucleotide
uugaggucgaacacuagca

SEQ ID NO: 545357 - RNA, 19 nt, Artificial Sequence
  Description of Artificial Sequence: Synthetic oligonucleotide
caaucaguagcguaaauca

SEQ ID NO: 545358 - RNA, 19 nt, Artificial Sequence
  Description of Artificial Sequence: Synthetic oligonucleotide
uaaggcauuacugcuauga

SEQ ID NO: 545359 - RNA, 19 nt, Artificial Sequence
  Description of Artificial Sequence: Synthetic oligonucleotide
ucccauauaccccaagcug

SEQ ID NO: 545360 - RNA, 19 nt, Artificial Sequence
  Description of Artificial Sequence: Synthetic oligonucleotide
aaacacaucauagggcuug

SEQ ID NO: 545361 - RNA, 19 nt, Artificial Sequence
  Description of Artificial Sequence: Synthetic oligonucleotide
gaacgccaggcuuugauag

SEQ ID NO: 545362 - RNA, 19 nt, Artificial Sequence
  Description of Artificial Sequence: Synthetic oligonucleotide
ggugauaucuccaaugcgg

SEQ ID NO: 545363 - RNA, 19 nt, Artificial Sequence
  Description of Artificial Sequence: Synthetic oligonucleotide
gaggugauaucuccaaugc

SEQ ID NO: 545364 - RNA, 19 nt, Artificial Sequence
  Description of Artificial Sequence: Synthetic oligonucleotide
accagaggugugcaaaccc

SEQ ID NO: 545365 - RNA, 19 nt, Artificial Sequence
  Description of Artificial Sequence: Synthetic oligonucleotide
agcuacucugccccaaugc

SEQ ID NO: 545366 - RNA, 19 nt, Artificial Sequence
  Description of Artificial Sequence: Synthetic oligonucleotide
acacuagcaagucaaucuc

SEQ ID NO: 545367 - RNA, 19 nt, Artificial Sequence
  Description of Artificial Sequence: Synthetic oligonucleotide
cacgucaaugacauggucc

SEQ ID NO: 545368 - RNA, 19 nt, Artificial Sequence
  Description of Artificial Sequence: Synthetic oligonucleotide
aaauuaucagaggccagag

SEQ ID NO: 545369 - RNA, 19 nt, Artificial Sequence
  Description of Artificial Sequence: Synthetic oligonucleotide
aaggcauuacugcuaugag

SEQ ID NO: 545370 - RNA, 19 nt, Artificial Sequence
  Description of Artificial Sequence: Synthetic oligonucleotide
cuugaggucgaacacuagc

SEQ ID NO: 545371 - RNA, 19 nt, Artificial Sequence
  Description of Artificial Sequence: Synthetic oligonucleotide
cauuauccaacaugugccg

SEQ ID NO: 545372 - RNA, 19 nt, Artificial Sequence
  Description of Artificial Sequence: Synthetic oligonucleotide
aucacgagccaccugguag

SEQ ID NO: 545373 - RNA, 19 nt, Artificial Sequence
  Description of Artificial Sequence: Synthetic oligonucleotide
cauaucugcacugugcagc

SEQ ID NO: 545374 - RNA, 19 nt, Artificial Sequence
  Description of Artificial Sequence: Synthetic oligonucleotide
ugauggcuaagugagcagg

SEQ ID NO: 545375 - RNA, 19 nt, Artificial Sequence
  Description of Artificial Sequence: Synthetic oligonucleotide
gaagcacucaucauugggc

SEQ ID NO: 545376 - RNA, 19 nt, Artificial Sequence
  Description of Artificial Sequence: Synthetic oligonucleotide
agggcgaaggagucuaggc

SEQ ID NO: 545377 - RNA, 19 nt, Artificial Sequence
  Description of Artificial Sequence: Synthetic oligonucleotide
aaugcugagccugauggcu

SEQ ID NO: 545378 - RNA, 19 nt, Artificial Sequence
  Description of Artificial Sequence: Synthetic oligonucleotide
cucgggauauccaagggug

SEQ ID NO: 545379 - RNA, 19 nt, Artificial Sequence
  Description of Artificial Sequence: Synthetic oligonucleotide
gcguaaaucaaauuaucag

SEQ ID NO: 545380 - RNA, 19 nt, Artificial Sequence
  Description of Artificial Sequence: Synthetic oligonucleotide
aacaagggcuacccuaaug

SEQ ID NO: 545381 - RNA, 19 nt, Artificial Sequence
  Description of Artificial Sequence: Synthetic oligonucleotide
aagucaaucuccucugcaa

SEQ ID NO: 545382 - RNA, 19 nt, Artificial Sequence
  Description of Artificial Sequence: Synthetic oligonucleotide
ucaguagcguaaaucaaau

SEQ ID NO: 545383 - RNA, 19 nt, Artificial Sequence
  Description of Artificial Sequence: Synthetic oligonucleotide
uguagugacggucccagau

SEQ ID NO: 545384 - RNA, 19 nt, Artificial Sequence
  Description of Artificial Sequence: Synthetic oligonucleotide
agaucuucacugugcaguc

SEQ ID NO: 545385 - RNA, 19 nt, Artificial Sequence
  Description of Artificial Sequence: Synthetic oligonucleotide
cauaagaacucgucccggg

SEQ ID NO: 545386 - RNA, 19 nt, Artificial Sequence
  Description of Artificial Sequence: Synthetic oligonucleotide
aaugcggugcagguucccc

SEQ ID NO: 545387 - RNA, 19 nt, Artificial Sequence
  Description of Artificial Sequence: Synthetic oligonucleotide
ugcucccuccauaagaacu

SEQ ID NO: 545388 - RNA, 19 nt, Artificial Sequence
  Description of Artificial Sequence: Synthetic oligonucleotide
guaguaacgguagaacugc

SEQ ID NO: 545389 - RNA, 19 nt, Artificial Sequence
  Description of Artificial Sequence: Synthetic oligonucleotide
auuauccaacaugugccgc

SEQ ID NO: 545390 - RNA, 19 nt, Artificial Sequence
  Description of Artificial Sequence: Synthetic oligonucleotide
uguacggauggugcuagcg

SEQ ID NO: 545391 - RNA, 19 nt, Artificial Sequence
  Description of Artificial Sequence: Synthetic oligonucleotide
caugucauagagccgucgg

SEQ ID NO: 545392 - RNA, 19 nt, Artificial Sequence
  Description of Artificial Sequence: Synthetic oligonucleotide
uuuaccacguugacauucu

SEQ ID NO: 545393 - RNA, 19 nt, Artificial Sequence
  Description of Artificial Sequence: Synthetic oligonucleotide
auguccauccaacacauua

SEQ ID NO: 545394 - RNA, 19 nt, Artificial Sequence
  Description of Artificial Sequence: Synthetic oligonucleotide
ugauaguggcaucaucgcu

SEQ ID NO: 545395 - RNA, 19 nt, Artificial Sequence
  Description of Artificial Sequence: Synthetic oligonucleotide
aggugauaucuccaaugcg

SEQ ID NO: 545396 - RNA, 19 nt, Artificial Sequence
  Description of Artificial Sequence: Synthetic oligonucleotide
auggugcgcucgcagagcc

SEQ ID NO: 545397 - RNA, 19 nt, Artificial Sequence
  Description of Artificial Sequence: Synthetic oligonucleotide
gagauggucaggucauugc

SEQ ID NO: 545398 - RNA, 19 nt, Artificial Sequence
  Description of Artificial Sequence: Synthetic oligonucleotide
uaucaaagcggcugcaguc

SEQ ID NO: 545399 - RNA, 19 nt, Artificial Sequence
  Description of Artificial Sequence: Synthetic oligonucleotide
ugcuaugagcuacucugcc

SEQ ID NO: 545400 - RNA, 19 nt, Artificial Sequence
  Description of Artificial Sequence: Synthetic oligonucleotide
gaagcgaacugguacccug

SEQ ID NO: 545401 - RNA, 19 nt, Artificial Sequence
  Description of Artificial Sequence: Synthetic oligonucleotide
cuauggcuggcaaaccagg

SEQ ID NO: 545402 - RNA, 19 nt, Artificial Sequence
  Description of Artificial Sequence: Synthetic oligonucleotide
ugcaacaugcagcaccccu

SEQ ID NO: 545403 - RNA, 19 nt, Artificial Sequence
  Description of Artificial Sequence: Synthetic oligonucleotide
uccaacaugugccgcacac

SEQ ID NO: 545404 - RNA, 19 nt, Artificial Sequence
  Description of Artificial Sequence: Synthetic oligonucleotide
uuguauggccucauaucug

SEQ ID NO: 545405 - RNA, 19 nt, Artificial Sequence
  Description of Artificial Sequence: Synthetic oligonucleotide
agcaagucaaucuccucug

SEQ ID NO: 545406 - RNA, 19 nt, Artificial Sequence
  Description of Artificial Sequence: Synthetic oligonucleotide
accuaggucaaagacucgg

SEQ ID NO: 545407 - RNA, 19 nt, Artificial Sequence
  Description of Artificial Sequence: Synthetic oligonucleotide
ugugcauguccauccaaca

SEQ ID NO: 545408 - RNA, 19 nt, Artificial Sequence
  Description of Artificial Sequence: Synthetic oligonucleotide
uacccuaaugcugagccug

SEQ ID NO: 545409 - RNA, 19 nt, Artificial Sequence
  Description of Artificial Sequence: Synthetic oligonucleotide
ucauuaacccaaacaguua

SEQ ID NO: 545410 - RNA, 19 nt, Artificial Sequence
  Description of Artificial Sequence: Synthetic oligonucleotide
agaaccaugggguaucauu

SEQ ID NO: 545411 - RNA, 19 nt, Artificial Sequence
  Description of Artificial Sequence: Synthetic oligonucleotide
caucauugggcguguaggc

SEQ ID NO: 545412 - RNA, 19 nt, Artificial Sequence
  Description of Artificial Sequence: Synthetic oligonucleotide
auguuguagugacgguccc

SEQ ID NO: 545413 - RNA, 19 nt, Artificial Sequence
  Description of Artificial Sequence: Synthetic oligonucleotide
gcuacccuaaugcugagcc

SEQ ID NO: 545414 - RNA, 19 nt, Artificial Sequence
  Description of Artificial Sequence: Synthetic oligonucleotide
gugacggucccagauauag

SEQ ID NO: 545415 - RNA, 19 nt, Artificial Sequence
  Description of Artificial Sequence: Synthetic oligonucleotide
uagucuugaggucgaacac

SEQ ID NO: 545416 - RNA, 19 nt, Artificial Sequence
  Description of Artificial Sequence: Synthetic oligonucleotide
ggggcuaaagacuaccgag

SEQ ID NO: 545417 - RNA, 19 nt, Artificial Sequence
  Description of Artificial Sequence: Synthetic oligonucleotide
gagccuauggccugucacc

SEQ ID NO: 545418 - RNA, 19 nt, Artificial Sequence
  Description of Artificial Sequence: Synthetic oligonucleotide
guuguauggccucauaucu

SEQ ID NO: 545419 - RNA, 19 nt, Artificial Sequence
  Description of Artificial Sequence: Synthetic oligonucleotide
uggagcaggaagcgaacug

SEQ ID NO: 545420 - RNA, 19 nt, Artificial Sequence
  Description of Artificial Sequence: Synthetic oligonucleotide
auacagguaccuguuauca

SEQ ID NO: 545421 - RNA, 19 nt, Artificial Sequence
  Description of Artificial Sequence: Synthetic oligonucleotide
cccauauaccccaagcugg

SEQ ID NO: 545422 - RNA, 19 nt, Artificial Sequence
  Description of Artificial Sequence: Synthetic oligonucleotide
uaagaacucgucccgggau

SEQ ID NO: 545423 - RNA, 19 nt, Artificial Sequence
  Description of Artificial Sequence: Synthetic oligonucleotide
cacuagcaagucaaucucc

SEQ ID NO: 545424 - RNA, 19 nt, Artificial Sequence
  Description of Artificial Sequence: Synthetic oligonucleotide
uuguuucgaacacgggaca

SEQ ID NO: 545425 - RNA, 19 nt, Artificial Sequence
  Description of Artificial Sequence: Synthetic oligonucleotide
agcguaaaucaaauuauca

SEQ ID NO: 545426 - RNA, 19 nt, Artificial Sequence
  Description of Artificial Sequence: Synthetic oligonucleotide
guuguagugacggucccag

SEQ ID NO: 545427 - RNA, 19 nt, Artificial Sequence
  Description of Artificial Sequence: Synthetic oligonucleotide
cauuacugcuaugagcuac

SEQ ID NO: 545428 - RNA, 19 nt, Artificial Sequence
  Description of Artificial Sequence: Synthetic oligonucleotide
aacucgucccgggauacag

SEQ ID NO: 545429 - RNA, 19 nt, Artificial Sequence
  Description of Artificial Sequence: Synthetic oligonucleotide
auucauuaacccaaacagu

SEQ ID NO: 545430 - RNA, 19 nt, Artificial Sequence
  Description of Artificial Sequence: Synthetic oligonucleotide
aacgguagaacugcucccu

SEQ ID NO: 545431 - RNA, 19 nt, Artificial Sequence
  Description of Artificial Sequence: Synthetic oligonucleotide
cuuuaccacguugacauuc

SEQ ID NO: 545432 - RNA, 19 nt, Artificial Sequence
  Description of Artificial Sequence: Synthetic oligonucleotide
cugcauggggucaacuacc

SEQ ID NO: 545433 - RNA, 19 nt, Artificial Sequence
  Description of Artificial Sequence: Synthetic oligonucleotide
cuacucugccccaaugcag

SEQ ID NO: 545434 - RNA, 19 nt, Artificial Sequence
  Description of Artificial Sequence: Synthetic oligonucleotide
ggcacggcuauucacauac

SEQ ID NO: 545435 - RNA, 19 nt, Artificial Sequence
  Description of Artificial Sequence: Synthetic oligonucleotide
gucggaacuccucauacca

SEQ ID NO: 545436 - RNA, 19 nt, Artificial Sequence
  Description of Artificial Sequence: Synthetic oligonucleotide
aucgcuggcugucaacaag

SEQ ID NO: 545437 - RNA, 19 nt, Artificial Sequence
  Description of Artificial Sequence: Synthetic oligonucleotide
ugauaucuccaaugcggug

SEQ ID NO: 545438 - RNA, 19 nt, Artificial Sequence
  Description of Artificial Sequence: Synthetic oligonucleotide
ccucauaccaggauguggc

SEQ ID NO: 545439 - RNA, 19 nt, Artificial Sequence
  Description of Artificial Sequence: Synthetic oligonucleotide
uagugacggucccagauau

SEQ ID NO: 545440 - RNA, 19 nt, Artificial Sequence
  Description of Artificial Sequence: Synthetic oligonucleotide
agccuauggccugucaccc

SEQ ID NO: 545441 - RNA, 19 nt, Artificial Sequence
  Description of Artificial Sequence: Synthetic oligonucleotide
uaaugcugagccugauggc

SEQ ID NO: 545442 - RNA, 19 nt, Artificial Sequence
  Description of Artificial Sequence: Synthetic oligonucleotide
auaccagcccagcagccag

SEQ ID NO: 545443 - RNA, 19 nt, Artificial Sequence
  Description of Artificial Sequence: Synthetic oligonucleotide
ugccauuggcggcauacca

SEQ ID NO: 545444 - RNA, 19 nt, Artificial Sequence
  Description of Artificial Sequence: Synthetic oligonucleotide
ggucaacuaccacugagcc

SEQ ID NO: 545445 - RNA, 19 nt, Artificial Sequence
  Description of Artificial Sequence: Synthetic oligonucleotide
acagcaggccacucaauca

SEQ ID NO: 545446 - RNA, 19 nt, Artificial Sequence
  Description of Artificial Sequence: Synthetic oligonucleotide
ucaucgcuggcugucaaca

SEQ ID NO: 545447 - RNA, 19 nt, Artificial Sequence
  Description of Artificial Sequence: Synthetic oligonucleotide
uuacuguacggauggugcu

SEQ ID NO: 545448 - RNA, 19 nt, Artificial Sequence
  Description of Artificial Sequence: Synthetic oligonucleotide
caacaugcagcaccccugg

SEQ ID NO: 545449 - RNA, 19 nt, Artificial Sequence
  Description of Artificial Sequence: Synthetic oligonucleotide
acggcuauucacauacagg

SEQ ID NO: 545450 - RNA, 19 nt, Artificial Sequence
  Description of Artificial Sequence: Synthetic oligonucleotide
cauagggcuuguuucgaac

SEQ ID NO: 545451 - RNA, 19 nt, Artificial Sequence
  Description of Artificial Sequence: Synthetic oligonucleotide
gugugugugugugugagug

SEQ ID NO: 545452 - RNA, 19 nt, Artificial Sequence
  Description of Artificial Sequence: Synthetic oligonucleotide
ggaggacacgaacagugcg

SEQ ID NO: 545453 - RNA, 19 nt, Artificial Sequence
  Description of Artificial Sequence: Synthetic oligonucleotide
aggagucuaggcugaugac

SEQ ID NO: 545454 - RNA, 19 nt, Artificial Sequence
  Description of Artificial Sequence: Synthetic oligonucleotide
agcuaucucgccugaggag

SEQ ID NO: 545455 - RNA, 19 nt, Artificial Sequence
  Description of Artificial Sequence: Synthetic oligonucleotide
acucgggauauccaagggu

SEQ ID NO: 545456 - RNA, 19 nt, Artificial Sequence
  Description of Artificial Sequence: Synthetic oligonucleotide
cugugcauguccauccaac

SEQ ID NO: 545457 - RNA, 19 nt, Artificial Sequence
  Description of Artificial Sequence: Synthetic oligonucleotide
ugcauggggucaacuacca

SEQ ID NO: 545458 - RNA, 19 nt, Artificial Sequence
  Description of Artificial Sequence: Synthetic oligonucleotide
agacuaccgaguugaccac

SEQ ID NO: 545459 - RNA, 19 nt, Artificial Sequence
  Description of Artificial Sequence: Synthetic oligonucleotide
ucugcaaugggugguggcu

SEQ ID NO: 545460 - RNA, 19 nt, Artificial Sequence
  Description of Artificial Sequence: Synthetic oligonucleotide
aucaucgcuggcugucaac

SEQ ID NO: 545461 - RNA, 19 nt, Artificial Sequence
  Description of Artificial Sequence: Synthetic oligonucleotide
gaugccuucagcgccuaug

SEQ ID NO: 545462 - RNA, 19 nt, Artificial Sequence
  Description of Artificial Sequence: Synthetic oligonucleotide
cauuacuguacggauggug

SEQ ID NO: 545463 - RNA, 19 nt, Artificial Sequence
  Description of Artificial Sequence: Synthetic oligonucleotide
agucaaucuccucugcaau

SEQ ID NO: 545464 - RNA, 19 nt, Artificial Sequence
  Description of Artificial Sequence: Synthetic oligonucleotide
uauucacauacagguaccu

SEQ ID NO: 545465 - RNA, 19 nt, Artificial Sequence
  Description of Artificial Sequence: Synthetic oligonucleotide
ugugugugugugagugugc

SEQ ID NO: 545466 - RNA, 19 nt, Artificial Sequence
  Description of Artificial Sequence: Synthetic oligonucleotide
ugaugccgaucugaugugg

SEQ ID NO: 545467 - RNA, 19 nt, Artificial Sequence
  Description of Artificial Sequence: Synthetic oligonucleotide
gcuaucucgccugaggagg

SEQ ID NO: 545468 - RNA, 19 nt, Artificial Sequence
  Description of Artificial Sequence: Synthetic oligonucleotide
uauaccccaagcuggccaa

SEQ ID NO: 545469 - RNA, 19 nt, Artificial Sequence
  Description of Artificial Sequence: Synthetic oligonucleotide
cccagauauagccaugccg

SEQ ID NO: 545470 - RNA, 19 nt, Artificial Sequence
  Description of Artificial Sequence: Synthetic oligonucleotide
ccagauauagccaugccga

SEQ ID NO: 545471 - RNA, 19 nt, Artificial Sequence
  Description of Artificial Sequence: Synthetic oligonucleotide
uguugccaacuguuuauuc

SEQ ID NO: 545472 - RNA, 19 nt, Artificial Sequence
  Description of Artificial Sequence: Synthetic oligonucleotide
cguaaaucaaauuaucaga

SEQ ID NO: 545473 - RNA, 19 nt, Artificial Sequence
  Description of Artificial Sequence: Synthetic oligonucleotide
gaugacagcuaucucgccu

SEQ ID NO: 545474 - RNA, 19 nt, Artificial Sequence
  Description of Artificial Sequence: Synthetic oligonucleotide
caccauuacuguacggaug

SEQ ID NO: 545475 - RNA, 19 nt, Artificial Sequence
  Description of Artificial Sequence: Synthetic oligonucleotide
cuuugauaguggcaucauc

SEQ ID NO: 545476 - RNA, 19 nt, Artificial Sequence
  Description of Artificial Sequence: Synthetic oligonucleotide
uugguauggcccugggcca

SEQ ID NO: 545477 - RNA, 19 nt, Artificial Sequence
  Description of Artificial Sequence: Synthetic oligonucleotide
gcuuguuucgaacacggga

SEQ ID NO: 545478 - RNA, 19 nt, Artificial Sequence
  Description of Artificial Sequence: Synthetic oligonucleotide
cugcuaugagcuacucugc

SEQ ID NO: 545479 - RNA, 19 nt, Artificial Sequence
  Description of Artificial Sequence: Synthetic oligonucleotide
aacgccaggcuuugauagu

SEQ ID NO: 545480 - RNA, 19 nt, Artificial Sequence
  Description of Artificial Sequence: Synthetic oligonucleotide
ugcccgugcacgucaauga

SEQ ID NO: 545481 - RNA, 19 nt, Artificial Sequence
  Description of Artificial Sequence: Synthetic oligonucleotide
uugaugccgaucugaugug

SEQ ID NO: 545482 - RNA, 19 nt, Artificial Sequence
  Description of Artificial Sequence: Synthetic oligonucleotide
augcggugcagguuccccg

SEQ ID NO: 545483 - RNA, 19 nt, Artificial Sequence
  Description of Artificial Sequence: Synthetic oligonucleotide
ccaccuaggucaaagacuc

SEQ ID NO: 545484 - RNA, 19 nt, Artificial Sequence
  Description of Artificial Sequence: Synthetic oligonucleotide
ugugagccaacagccaaac

SEQ ID NO: 545485 - RNA, 19 nt, Artificial Sequence
  Description of Artificial Sequence: Synthetic oligonucleotide
ucccagauauagccaugcc

SEQ ID NO: 545486 - RNA, 19 nt, Artificial Sequence
  Description of Artificial Sequence: Synthetic oligonucleotide
uauccaaggguguggguuu

SEQ ID NO: 545487 - RNA, 19 nt, Artificial Sequence
  Description of Artificial Sequence: Synthetic oligonucleotide
acuguacggauggugcuag

SEQ ID NO: 545488 - RNA, 19 nt, Artificial Sequence
  Description of Artificial Sequence: Synthetic oligonucleotide
cucauaccaggauguggcc

SEQ ID NO: 545489 - RNA, 19 nt, Artificial Sequence
  Description of Artificial Sequence: Synthetic oligonucleotide
agucuugaggucgaacacu

SEQ ID NO: 545490 - RNA, 19 nt, Artificial Sequence
  Description of Artificial Sequence: Synthetic oligonucleotide
cuccacacaggguaccaug

SEQ ID NO: 545491 - RNA, 19 nt, Artificial Sequence
  Description of Artificial Sequence: Synthetic oligonucleotide
gugugugugugugugugag

SEQ ID NO: 545492 - RNA, 19 nt, Artificial Sequence
  Description of Artificial Sequence: Synthetic oligonucleotide
cuuggagcaggaagcgaac

SEQ ID NO: 545493 - RNA, 19 nt, Artificial Sequence
  Description of Artificial Sequence: Synthetic oligonucleotide
uguguguguguguguguga

SEQ ID NO: 545494 - RNA, 19 nt, Artificial Sequence
  Description of Artificial Sequence: Synthetic oligonucleotide
ucgggauauccaagggugu

SEQ ID NO: 545495 - RNA, 19 nt, Artificial Sequence
  Description of Artificial Sequence: Synthetic oligonucleotide
gugugugugugugagugug

SEQ ID NO: 545496 - RNA, 19 nt, Artificial Sequence
  Description of Artificial Sequence: Synthetic oligonucleotide
gaugugcccgugcacguca

SEQ ID NO: 545497 - RNA, 19 nt, Artificial Sequence
  Description of Artificial Sequence: Synthetic oligonucleotide
cauggggucaacuaccacu

SEQ ID NO: 545498 - RNA, 19 nt, Artificial Sequence
  Description of Artificial Sequence: Synthetic oligonucleotide
gugcauguccauccaacac

SEQ ID NO: 545499 - RNA, 19 nt, Artificial Sequence
  Description of Artificial Sequence: Synthetic oligonucleotide
cacucgggauauccaaggg

SEQ ID NO: 545500 - RNA, 19 nt, Artificial Sequence
  Description of Artificial Sequence: Synthetic oligonucleotide
agggcuuguuucgaacacg

SEQ ID NO: 545501 - RNA, 19 nt, Artificial Sequence
  Description of Artificial Sequence: Synthetic oligonucleotide
ugccgaucugaugugguga

SEQ ID NO: 545502 - RNA, 19 nt, Artificial Sequence
  Description of Artificial Sequence: Synthetic oligonucleotide
uacggauggugcuagcguu

SEQ ID NO: 545503 - RNA, 19 nt, Artificial Sequence
  Description of Artificial Sequence: Synthetic oligonucleotide
acguugacauucucugacu

SEQ ID NO: 545504 - RNA, 19 nt, Artificial Sequence
  Description of Artificial Sequence: Synthetic oligonucleotide
uugcgugugugugugugug

SEQ ID NO: 545505 - RNA, 19 nt, Artificial Sequence
  Description of Artificial Sequence: Synthetic oligonucleotide
auuacugcuaugagcuacu

SEQ ID NO: 545506 - RNA, 19 nt, Artificial Sequence
  Description of Artificial Sequence: Synthetic oligonucleotide
uaguaacgguagaacugcu

SEQ ID NO: 545507 - RNA, 19 nt, Artificial Sequence
  Description of Artificial Sequence: Synthetic oligonucleotide
ccuccauaagaacucgucc

SEQ ID NO: 545508 - RNA, 19 nt, Artificial Sequence
  Description of Artificial Sequence: Synthetic oligonucleotide
caaacccgggucaggggcc

SEQ ID NO: 545509 - RNA, 19 nt, Artificial Sequence
  Description of Artificial Sequence: Synthetic oligonucleotide
ucauagggcuuguuucgaa

SEQ ID NO: 545510 - RNA, 19 nt, Artificial Sequence
  Description of Artificial Sequence: Synthetic oligonucleotide
ugugugugugugugagugu

SEQ ID NO: 545511 - RNA, 19 nt, Artificial Sequence
  Description of Artificial Sequence: Synthetic oligonucleotide
gauguggccgcuggguggc

SEQ ID NO: 545512 - RNA, 19 nt, Artificial Sequence
  Description of Artificial Sequence: Synthetic oligonucleotide
gcuaugagcuacucugccc

SEQ ID NO: 545513 - RNA, 19 nt, Artificial Sequence
  Description of Artificial Sequence: Synthetic oligonucleotide
acgguagaacugcucccuc

SEQ ID NO: 545514 - RNA, 19 nt, Artificial Sequence
  Description of Artificial Sequence: Synthetic oligonucleotide
cccgcuggccacaaaaucc

SEQ ID NO: 545515 - RNA, 19 nt, Artificial Sequence
  Description of Artificial Sequence: Synthetic oligonucleotide
caggccacucaaucaguag

SEQ ID NO: 545516 - RNA, 19 nt, Artificial Sequence
  Description of Artificial Sequence: Synthetic oligonucleotide
acagugcguggugaacgcc

SEQ ID NO: 545517 - RNA, 19 nt, Artificial Sequence
  Description of Artificial Sequence: Synthetic oligonucleotide
cacacaggguaccauguca

SEQ ID NO: 545518 - RNA, 19 nt, Artificial Sequence
  Description of Artificial Sequence: Synthetic oligonucleotide
gucaacaagagcuccugcu

SEQ ID NO: 545519 - RNA, 19 nt, Artificial Sequence
  Description of Artificial Sequence: Synthetic oligonucleotide
agcgaacugguacccugag

SEQ ID NO: 545520 - RNA, 19 nt, Artificial Sequence
  Description of Artificial Sequence: Synthetic oligonucleotide
cauuggcggcauaccagcc

SEQ ID NO: 545521 - RNA, 19 nt, Artificial Sequence
  Description of Artificial Sequence: Synthetic oligonucleotide
guacacucgggauauccaa

SEQ ID NO: 545522 - RNA, 19 nt, Artificial Sequence
  Description of Artificial Sequence: Synthetic oligonucleotide
guagcguaaaucaaauuau

SEQ ID NO: 545523 - RNA, 19 nt, Artificial Sequence
  Description of Artificial Sequence: Synthetic oligonucleotide
ggcguguaggcauggugcg

SEQ ID NO: 545524 - RNA, 19 nt, Artificial Sequence
  Description of Artificial Sequence: Synthetic oligonucleotide
gugugugugugugugugug

SEQ ID NO: 545525 - RNA, 19 nt, Artificial Sequence
  Description of Artificial Sequence: Synthetic oligonucleotide
ggcuaagugagcagguugc

SEQ ID NO: 545526 - RNA, 19 nt, Artificial Sequence
  Description of Artificial Sequence: Synthetic oligonucleotide
guaggcauggugcgcucgc

SEQ ID NO: 545527 - RNA, 19 nt, Artificial Sequence
  Description of Artificial Sequence: Synthetic oligonucleotide
gcugcauggggucaacuac

SEQ ID NO: 545528 - RNA, 19 nt, Artificial Sequence
  Description of Artificial Sequence: Synthetic oligonucleotide
guguagcuccaguuguaug

SEQ ID NO: 545529 - RNA, 19 nt, Artificial Sequence
  Description of Artificial Sequence: Synthetic oligonucleotide
ugugugugugugugugagu

SEQ ID NO: 545530 - RNA, 19 nt, Artificial Sequence
  Description of Artificial Sequence: Synthetic oligonucleotide
cacaaaaucccugcugaca

SEQ ID NO: 545531 - RNA, 19 nt, Artificial Sequence
  Description of Artificial Sequence: Synthetic oligonucleotide
aucauugggcguguaggca

SEQ ID NO: 545532 - RNA, 19 nt, Artificial Sequence
  Description of Artificial Sequence: Synthetic oligonucleotide
gggcuuguuucgaacacgg

SEQ ID NO: 545533 - RNA, 19 nt, Artificial Sequence
  Description of Artificial Sequence: Synthetic oligonucleotide
ucgcagagcccgcuucacc

SEQ ID NO: 545534 - RNA, 19 nt, Artificial Sequence
  Description of Artificial Sequence: Synthetic oligonucleotide
gucaacuaccacugagcca

SEQ ID NO: 545535 - RNA, 19 nt, Artificial Sequence
  Description of Artificial Sequence: Synthetic oligonucleotide
caaugaugugcccgugcac

SEQ ID NO: 545536 - RNA, 19 nt, Artificial Sequence
  Description of Artificial Sequence: Synthetic oligonucleotide
uugacacggccagaaccag

SEQ ID NO: 545537 - RNA, 19 nt, Artificial Sequence
  Description of Artificial Sequence: Synthetic oligonucleotide
cagccaccauuacuguacg

SEQ ID NO: 545538 - RNA, 19 nt, Artificial Sequence
  Description of Artificial Sequence: Synthetic oligonucleotide
caaaaucccugcugacauc

SEQ ID NO: 545539 - RNA, 19 nt, Artificial Sequence
  Description of Artificial Sequence: Synthetic oligonucleotide
gaaggagucuaggcugaug

SEQ ID NO: 545540 - RNA, 19 nt, Artificial Sequence
  Description of Artificial Sequence: Synthetic oligonucleotide
cagcaucacuacacucugg

SEQ ID NO: 545541 - RNA, 19 nt, Artificial Sequence
  Description of Artificial Sequence: Synthetic oligonucleotide
cagaggccagagccuaugg

SEQ ID NO: 545542 - RNA, 19 nt, Artificial Sequence
  Description of Artificial Sequence: Synthetic oligonucleotide
ugagcuacucugccccaau

SEQ ID NO: 545543 - RNA, 19 nt, Artificial Sequence
  Description of Artificial Sequence: Synthetic oligonucleotide
caggguaccaugucauaga

SEQ ID NO: 545544 - RNA, 19 nt, Artificial Sequence
  Description of Artificial Sequence: Synthetic oligonucleotide
ugcggugcagguuccccga

SEQ ID NO: 545545 - RNA, 19 nt, Artificial Sequence
  Description of Artificial Sequence: Synthetic oligonucleotide
agcacucaucauugggcgu

SEQ ID NO: 545546 - RNA, 19 nt, Artificial Sequence
  Description of Artificial Sequence: Synthetic oligonucleotide
ccauauaccccaagcuggc

SEQ ID NO: 545547 - RNA, 19 nt, Artificial Sequence
  Description of Artificial Sequence: Synthetic oligonucleotide
guaccaugucauagagccg

SEQ ID NO: 545548 - RNA, 19 nt, Artificial Sequence
  Description of Artificial Sequence: Synthetic oligonucleotide
accgaguugaccacauccu

SEQ ID NO: 545549 - RNA, 19 nt, Artificial Sequence
  Description of Artificial Sequence: Synthetic oligonucleotide
ugugccgcacaccuuccuu

SEQ ID NO: 545550 - RNA, 19 nt, Artificial Sequence
  Description of Artificial Sequence: Synthetic oligonucleotide
cauauaccccaagcuggcc

SEQ ID NO: 545551 - RNA, 19 nt, Artificial Sequence
  Description of Artificial Sequence: Synthetic oligonucleotide
caugggaucucuggugcug

SEQ ID NO: 545552 - RNA, 19 nt, Artificial Sequence
  Description of Artificial Sequence: Synthetic oligonucleotide
aagcgaacugguacccuga

SEQ ID NO: 545553 - RNA, 19 nt, Artificial Sequence
  Description of Artificial Sequence: Synthetic oligonucleotide
cuauggccugucacccagg

SEQ ID NO: 545554 - RNA, 19 nt, Artificial Sequence
  Description of Artificial Sequence: Synthetic oligonucleotide
acaugggaucucuggugcu

SEQ ID NO: 545555 - RNA, 19 nt, Artificial Sequence
  Description of Artificial Sequence: Synthetic oligonucleotide
ggugcgcucgcagagcccg

SEQ ID NO: 545556 - RNA, 19 nt, Artificial Sequence
  Description of Artificial Sequence: Synthetic oligonucleotide
agagccgucggaacuccuc

SEQ ID NO: 545557 - RNA, 19 nt, Artificial Sequence
  Description of Artificial Sequence: Synthetic oligonucleotide
gagccaccugguaguaacg

SEQ ID NO: 545558 - RNA, 19 nt, Artificial Sequence
  Description of Artificial Sequence: Synthetic oligonucleotide
gggucaacuaccacugagc

SEQ ID NO: 545559 - RNA, 19 nt, Artificial Sequence
  Description of Artificial Sequence: Synthetic oligonucleotide
caacaugugccgcacaccu

SEQ ID NO: 545560 - RNA, 19 nt, Artificial Sequence
  Description of Artificial Sequence: Synthetic oligonucleotide
ccuaggucaaagacucggc

SEQ ID NO: 545561 - RNA, 19 nt, Artificial Sequence
  Description of Artificial Sequence: Synthetic oligonucleotide
cagcuaucucgccugagga

SEQ ID NO: 545562 - RNA, 19 nt, Artificial Sequence
  Description of Artificial Sequence: Synthetic oligonucleotide
aaggcauuguugagccaca

SEQ ID NO: 545563 - RNA, 19 nt, Artificial Sequence
  Description of Artificial Sequence: Synthetic oligonucleotide
acgaacagugcguggugaa

SEQ ID NO: 545564 - RNA, 19 nt, Artificial Sequence
  Description of Artificial Sequence: Synthetic oligonucleotide
acucgucccgggauacagc

SEQ ID NO: 545565 - RNA, 19 nt, Artificial Sequence
  Description of Artificial Sequence: Synthetic oligonucleotide
ggagucuaggcugaugaca

SEQ ID NO: 545566 - RNA, 19 nt, Artificial Sequence
  Description of Artificial Sequence: Synthetic oligonucleotide
gaaccaugggguaucauuu

SEQ ID NO: 545567 - RNA, 19 nt, Artificial Sequence
  Description of Artificial Sequence: Synthetic oligonucleotide
ugguauggcccugggccag

SEQ ID NO: 545568 - RNA, 19 nt, Artificial Sequence
  Description of Artificial Sequence: Synthetic oligonucleotide
gucccauauaccccaagcu

SEQ ID NO: 545569 - RNA, 19 nt, Artificial Sequence
  Description of Artificial Sequence: Synthetic oligonucleotide
acacauuauccaacaugug

SEQ ID NO: 545570 - RNA, 19 nt, Artificial Sequence
  Description of Artificial Sequence: Synthetic oligonucleotide
gcuacucugccccaaugca

SEQ ID NO: 545571 - RNA, 19 nt, Artificial Sequence
  Description of Artificial Sequence: Synthetic oligonucleotide
uacuguacggauggugcua

SEQ ID NO: 545572 - RNA, 19 nt, Artificial Sequence
  Description of Artificial Sequence: Synthetic oligonucleotide
gcuagcguugagguucugg

SEQ ID NO: 545573 - RNA, 19 nt, Artificial Sequence
  Description of Artificial Sequence: Synthetic oligonucleotide
ggguacacucgggauaucc

SEQ ID NO: 545574 - RNA, 19 nt, Artificial Sequence
  Description of Artificial Sequence: Synthetic oligonucleotide
agcugugcauguccaucca

SEQ ID NO: 545575 - RNA, 19 nt, Artificial Sequence
  Description of Artificial Sequence: Synthetic oligonucleotide
caccuaggucaaagacucg

SEQ ID NO: 545576 - RNA, 19 nt, Artificial Sequence
  Description of Artificial Sequence: Synthetic oligonucleotide
gguaaccagguagugguca

SEQ ID NO: 545577 - RNA, 19 nt, Artificial Sequence
  Description of Artificial Sequence: Synthetic oligonucleotide
uuguagugacggucccaga

SEQ ID NO: 545578 - RNA, 19 nt, Artificial Sequence
  Description of Artificial Sequence: Synthetic oligonucleotide
agccgcuuuaccacguuga

SEQ ID NO: 545579 - RNA, 19 nt, Artificial Sequence
  Description of Artificial Sequence: Synthetic oligonucleotide
gguugaacugggagaacug

SEQ ID NO: 545580 - RNA, 19 nt, Artificial Sequence
  Description of Artificial Sequence: Synthetic oligonucleotide
cauggugcgcucgcagagc

SEQ ID NO: 545581 - RNA, 19 nt, Artificial Sequence
  Description of Artificial Sequence: Synthetic oligonucleotide
gcuaagugagcagguugcg

SEQ ID NO: 545582 - RNA, 19 nt, Artificial Sequence
  Description of Artificial Sequence: Synthetic oligonucleotide
gccgaucugauguggugag

SEQ ID NO: 545583 - RNA, 19 nt, Artificial Sequence
  Description of Artificial Sequence: Synthetic oligonucleotide
ccuauggccugucacccag

SEQ ID NO: 545584 - RNA, 19 nt, Artificial Sequence
  Description of Artificial Sequence: Synthetic oligonucleotide
ugcgugugugugugugugu

SEQ ID NO: 545585 - RNA, 19 nt, Artificial Sequence
  Description of Artificial Sequence: Synthetic oligonucleotide
uaucucgccugaggaggag

SEQ ID NO: 545586 - RNA, 19 nt, Artificial Sequence
  Description of Artificial Sequence: Synthetic oligonucleotide
uggugaacgccaggcuuug

SEQ ID NO: 545587 - RNA, 19 nt, Artificial Sequence
  Description of Artificial Sequence: Synthetic oligonucleotide
uggggucaacuaccacuga

SEQ ID NO: 545588 - RNA, 19 nt, Artificial Sequence
  Description of Artificial Sequence: Synthetic oligonucleotide
ggugugcaaacccggguca

SEQ ID NO: 545589 - RNA, 19 nt, Artificial Sequence
  Description of Artificial Sequence: Synthetic oligonucleotide
agcgagauggucaggucau

SEQ ID NO: 545590 - RNA, 19 nt, Artificial Sequence
  Description of Artificial Sequence: Synthetic oligonucleotide
cuaucucgccugaggagga

SEQ ID NO: 545591 - RNA, 19 nt, Artificial Sequence
  Description of Artificial Sequence: Synthetic oligonucleotide
gggcuaucaaagcggcugc

SEQ ID NO: 545592 - RNA, 19 nt, Artificial Sequence
  Description of Artificial Sequence: Synthetic oligonucleotide
cagggcgaaggagucuagg

SEQ ID NO: 545593 - RNA, 19 nt, Artificial Sequence
  Description of Artificial Sequence: Synthetic oligonucleotide
gguugcgugugugugugug

SEQ ID NO: 545594 - RNA, 19 nt, Artificial Sequence
  Description of Artificial Sequence: Synthetic oligonucleotide
gccaaugaugugcccgugc

SEQ ID NO: 545595 - RNA, 19 nt, Artificial Sequence
  Description of Artificial Sequence: Synthetic oligonucleotide
gaggacacgaacagugcgu

SEQ ID NO: 545596 - RNA, 19 nt, Artificial Sequence
  Description of Artificial Sequence: Synthetic oligonucleotide
gugcccgugcacgucaaug

SEQ ID NO: 545597 - RNA, 19 nt, Artificial Sequence
  Description of Artificial Sequence: Synthetic oligonucleotide
uuacugcuaugagcuacuc

SEQ ID NO: 545598 - RNA, 19 nt, Artificial Sequence
  Description of Artificial Sequence: Synthetic oligonucleotide
agaacuggguguagcucca

SEQ ID NO: 545599 - RNA, 19 nt, Artificial Sequence
  Description of Artificial Sequence: Synthetic oligonucleotide
guacggauggugcuagcgu

SEQ ID NO: 545600 - RNA, 19 nt, Artificial Sequence
  Description of Artificial Sequence: Synthetic oligonucleotide
gugauaucuccaaugcggu

SEQ ID NO: 545601 - RNA, 19 nt, Artificial Sequence
  Description of Artificial Sequence: Synthetic oligonucleotide
ggcaucggagccccggccc

SEQ ID NO: 545602 - RNA, 19 nt, Artificial Sequence
  Description of Artificial Sequence: Synthetic oligonucleotide
ccauaagaacucgucccgg

SEQ ID NO: 545603 - RNA, 19 nt, Artificial Sequence
  Description of Artificial Sequence: Synthetic oligonucleotide
guacuuguuccugguguca

SEQ ID NO: 545604 - RNA, 19 nt, Artificial Sequence
  Description of Artificial Sequence: Synthetic oligonucleotide
gacuaccgaguugaccaca

SEQ ID NO: 545605 - RNA, 19 nt, Artificial Sequence
  Description of Artificial Sequence: Synthetic oligonucleotide
acggauggugcuagcguug

SEQ ID NO: 545606 - RNA, 19 nt, Artificial Sequence
  Description of Artificial Sequence: Synthetic oligonucleotide
acuaccgaguugaccacau

SEQ ID NO: 545607 - RNA, 19 nt, Artificial Sequence
  Description of Artificial Sequence: Synthetic oligonucleotide
ccugagugggagaagcuga

SEQ ID NO: 545608 - RNA, 19 nt, Artificial Sequence
  Description of Artificial Sequence: Synthetic oligonucleotide
gccauuggcggcauaccag

SEQ ID NO: 545609 - RNA, 19 nt, Artificial Sequence
  Description of Artificial Sequence: Synthetic oligonucleotide
gccaacaagggcuacccua

SEQ ID NO: 545610 - RNA, 19 nt, Artificial Sequence
  Description of Artificial Sequence: Synthetic oligonucleotide
cccuccauaagaacucguc

SEQ ID NO: 545611 - RNA, 19 nt, Artificial Sequence
  Description of Artificial Sequence: Synthetic oligonucleotide
gauauccaagggugugggu

SEQ ID NO: 545612 - RNA, 19 nt, Artificial Sequence
  Description of Artificial Sequence: Synthetic oligonucleotide
ucgucccgggauacagccu

SEQ ID NO: 545613 - RNA, 19 nt, Artificial Sequence
  Description of Artificial Sequence: Synthetic oligonucleotide
cuguacggauggugcuagc

SEQ ID NO: 545614 - RNA, 19 nt, Artificial Sequence
  Description of Artificial Sequence: Synthetic oligonucleotide
ggcggggcacaucacgagc

SEQ ID NO: 545615 - RNA, 19 nt, Artificial Sequence
  Description of Artificial Sequence: Synthetic oligonucleotide
uccaguuguauggccucau

SEQ ID NO: 545616 - RNA, 19 nt, Artificial Sequence
  Description of Artificial Sequence: Synthetic oligonucleotide
cugugagccaacagccaaa

SEQ ID NO: 545617 - RNA, 19 nt, Artificial Sequence
  Description of Artificial Sequence: Synthetic oligonucleotide
ugaugugcccgugcacguc

SEQ ID NO: 545618 - RNA, 19 nt, Artificial Sequence
  Description of Artificial Sequence: Synthetic oligonucleotide
ccccaagcuggccaagagg

SEQ ID NO: 545619 - RNA, 19 nt, Artificial Sequence
  Description of Artificial Sequence: Synthetic oligonucleotide
gguacccugagugggagaa

SEQ ID NO: 545620 - RNA, 19 nt, Artificial Sequence
  Description of Artificial Sequence: Synthetic oligonucleotide
auggccugucacccagggu

SEQ ID NO: 545621 - RNA, 19 nt, Artificial Sequence
  Description of Artificial Sequence: Synthetic oligonucleotide
caagggcuacccuaaugcu

SEQ ID NO: 545622 - RNA, 19 nt, Artificial Sequence
  Description of Artificial Sequence: Synthetic oligonucleotide
acggucccagauauagcca

SEQ ID NO: 545623 - RNA, 19 nt, Artificial Sequence
  Description of Artificial Sequence: Synthetic oligonucleotide
cuaccgaguugaccacauc

SEQ ID NO: 545624 - RNA, 19 nt, Artificial Sequence
  Description of Artificial Sequence: Synthetic oligonucleotide
ggcuuguuucgaacacggg

SEQ ID NO: 545625 - RNA, 19 nt, Artificial Sequence
  Description of Artificial Sequence: Synthetic oligonucleotide
ggucgaacacuagcaaguc

SEQ ID NO: 545626 - RNA, 19 nt, Artificial Sequence
  Description of Artificial Sequence: Synthetic oligonucleotide
gcgugugugugugugugug

SEQ ID NO: 545627 - RNA, 19 nt, Artificial Sequence
  Description of Artificial Sequence: Synthetic oligonucleotide
cacgaacagugcgugguga

SEQ ID NO: 545628 - RNA, 19 nt, Artificial Sequence
  Description of Artificial Sequence: Synthetic oligonucleotide
caaugcggugcagguuccc

SEQ ID NO: 545629 - RNA, 19 nt, Artificial Sequence
  Description of Artificial Sequence: Synthetic oligonucleotide
agcaggccacucaaucagu

SEQ ID NO: 545630 - RNA, 19 nt, Artificial Sequence
  Description of Artificial Sequence: Synthetic oligonucleotide
gugugugugugagugugcu

SEQ ID NO: 545631 - RNA, 19 nt, Artificial Sequence
  Description of Artificial Sequence: Synthetic oligonucleotide
acaucacgagccaccuggu

SEQ ID NO: 545632 - RNA, 19 nt, Artificial Sequence
  Description of Artificial Sequence: Synthetic oligonucleotide
ccgaguugaccacauccuc

SEQ ID NO: 545633 - RNA, 19 nt, Artificial Sequence
  Description of Artificial Sequence: Synthetic oligonucleotide
ugugcccgugcacgucaau

SEQ ID NO: 545634 - RNA, 19 nt, Artificial Sequence
  Description of Artificial Sequence: Synthetic oligonucleotide
guugcgugugugugugugu

SEQ ID NO: 545635 - RNA, 19 nt, Artificial Sequence
  Description of Artificial Sequence: Synthetic oligonucleotide
ccaacaugugccgcacacc

SEQ ID NO: 545636 - RNA, 19 nt, Artificial Sequence
  Description of Artificial Sequence: Synthetic oligonucleotide
gcggggcacaucacgagcc

SEQ ID NO: 545637 - RNA, 19 nt, Artificial Sequence
  Description of Artificial Sequence: Synthetic oligonucleotide
cgaguugaccacauccuca

SEQ ID NO: 545638 - RNA, 19 nt, Artificial Sequence
  Description of Artificial Sequence: Synthetic oligonucleotide
caguggugaagaugaggua

SEQ ID NO: 545639 - RNA, 19 nt, Artificial Sequence
  Description of Artificial Sequence: Synthetic oligonucleotide
gcagucagccaccauuacu

SEQ ID NO: 545640 - RNA, 19 nt, Artificial Sequence
  Description of Artificial Sequence: Synthetic oligonucleotide
acccuaaugcugagccuga

SEQ ID NO: 545641 - RNA, 19 nt, Artificial Sequence
  Description of Artificial Sequence: Synthetic oligonucleotide
cuaagugagcagguugcgu

SEQ ID NO: 545642 - RNA, 19 nt, Artificial Sequence
  Description of Artificial Sequence: Synthetic oligonucleotide
cucgcagagcccgcuucac

SEQ ID NO: 545643 - RNA, 19 nt, Artificial Sequence
  Description of Artificial Sequence: Synthetic oligonucleotide
ugccgaucuucagccccgc

SEQ ID NO: 545644 - RNA, 19 nt, Artificial Sequence
  Description of Artificial Sequence: Synthetic oligonucleotide
cgucccgggauacagccug

SEQ ID NO: 545645 - RNA, 19 nt, Artificial Sequence
  Description of Artificial Sequence: Synthetic oligonucleotide
caucgcuggcugucaacaa

SEQ ID NO: 545646 - RNA, 19 nt, Artificial Sequence
  Description of Artificial Sequence: Synthetic oligonucleotide
auaccaggauguggccgcu

SEQ ID NO: 545647 - RNA, 19 nt, Artificial Sequence
  Description of Artificial Sequence: Synthetic oligonucleotide
gcacgucaaugacaugguc

SEQ ID NO: 545648 - RNA, 19 nt, Artificial Sequence
  Description of Artificial Sequence: Synthetic oligonucleotide
agguugcgugugugugugu

SEQ ID NO: 545649 - RNA, 19 nt, Artificial Sequence
  Description of Artificial Sequence: Synthetic oligonucleotide
gaacucgucccgggauaca

SEQ ID NO: 545650 - RNA, 19 nt, Artificial Sequence
  Description of Artificial Sequence: Synthetic oligonucleotide
ccaccugguaguaacggua

SEQ ID NO: 545651 - RNA, 19 nt, Artificial Sequence
  Description of Artificial Sequence: Synthetic oligonucleotide
cccaccuaggucaaagacu

SEQ ID NO: 545652 - RNA, 19 nt, Artificial Sequence
  Description of Artificial Sequence: Synthetic oligonucleotide
gcccgugcacgucaaugac

SEQ ID NO: 545653 - RNA, 19 nt, Artificial Sequence
  Description of Artificial Sequence: Synthetic oligonucleotide
gggcuaaagacuaccgagu

SEQ ID NO: 545654 - RNA, 19 nt, Artificial Sequence
  Description of Artificial Sequence: Synthetic oligonucleotide
ggugcagguuccccgaaau

SEQ ID NO: 545655 - RNA, 19 nt, Artificial Sequence
  Description of Artificial Sequence: Synthetic oligonucleotide
caggguacacucgggauau

SEQ ID NO: 545656 - RNA, 19 nt, Artificial Sequence
  Description of Artificial Sequence: Synthetic oligonucleotide
cucugccccaaugcaguga

SEQ ID NO: 545657 - RNA, 19 nt, Artificial Sequence
  Description of Artificial Sequence: Synthetic oligonucleotide
gcauggggucaacuaccac

SEQ ID NO: 545658 - RNA, 19 nt, Artificial Sequence
  Description of Artificial Sequence: Synthetic oligonucleotide
caucacgagccaccuggua

SEQ ID NO: 545659 - RNA, 19 nt, Artificial Sequence
  Description of Artificial Sequence: Synthetic oligonucleotide
gcucgcagagcccgcuuca

SEQ ID NO: 545660 - RNA, 19 nt, Artificial Sequence
  Description of Artificial Sequence: Synthetic oligonucleotide
cagagccuauggccuguca

SEQ ID NO: 545661 - RNA, 19 nt, Artificial Sequence
  Description of Artificial Sequence: Synthetic oligonucleotide
ccaggguacacucgggaua

SEQ ID NO: 545662 - RNA, 19 nt, Artificial Sequence
  Description of Artificial Sequence: Synthetic oligonucleotide
guggugaacgccaggcuuu

SEQ ID NO: 545663 - RNA, 19 nt, Artificial Sequence
  Description of Artificial Sequence: Synthetic oligonucleotide
gcgaaggagucuaggcuga

SEQ ID NO: 545664 - RNA, 19 nt, Artificial Sequence
  Description of Artificial Sequence: Synthetic oligonucleotide
cccgugcacgucaaugaca

SEQ ID NO: 545665 - RNA, 19 nt, Artificial Sequence
  Description of Artificial Sequence: Synthetic oligonucleotide
ccacucaaucaguagcgua

SEQ ID NO: 545666 - RNA, 19 nt, Artificial Sequence
  Description of Artificial Sequence: Synthetic oligonucleotide
caguagcguaaaucaaauu

SEQ ID NO: 545667 - RNA, 19 nt, Artificial Sequence
  Description of Artificial Sequence: Synthetic oligonucleotide
agugacggucccagauaua

SEQ ID NO: 545668 - RNA, 19 nt, Artificial Sequence
  Description of Artificial Sequence: Synthetic oligonucleotide
ggcugguuucugugagcca

SEQ ID NO: 545669 - RNA, 19 nt, Artificial Sequence
  Description of Artificial Sequence: Synthetic oligonucleotide
ccgugcacgucaaugacau

SEQ ID NO: 545670 - RNA, 19 nt, Artificial Sequence
  Description of Artificial Sequence: Synthetic oligonucleotide
cacgggacagcagggcgaa

SEQ ID NO: 545671 - RNA, 19 nt, Artificial Sequence
  Description of Artificial Sequence: Synthetic oligonucleotide
gguauggcccugggccagc

SEQ ID NO: 545672 - RNA, 19 nt, Artificial Sequence
  Description of Artificial Sequence: Synthetic oligonucleotide
gccugauggcuaagugagc

SEQ ID NO: 545673 - RNA, 19 nt, Artificial Sequence
  Description of Artificial Sequence: Synthetic oligonucleotide
gguguagcuccaguuguau

SEQ ID NO: 545674 - RNA, 19 nt, Artificial Sequence
  Description of Artificial Sequence: Synthetic oligonucleotide
guauggcccugggccagca

SEQ ID NO: 545675 - RNA, 19 nt, Artificial Sequence
  Description of Artificial Sequence: Synthetic oligonucleotide
ugcuagcguugagguucug

SEQ ID NO: 545676 - RNA, 19 nt, Artificial Sequence
  Description of Artificial Sequence: Synthetic oligonucleotide
ccaccauuacuguacggau

SEQ ID NO: 545677 - RNA, 19 nt, Artificial Sequence
  Description of Artificial Sequence: Synthetic oligonucleotide
caucggagccccggcccuc

SEQ ID NO: 545678 - RNA, 19 nt, Artificial Sequence
  Description of Artificial Sequence: Synthetic oligonucleotide
gccuauggccugucaccca

SEQ ID NO: 545679 - RNA, 19 nt, Artificial Sequence
  Description of Artificial Sequence: Synthetic oligonucleotide
ccaguggguucaaauggcu

SEQ ID NO: 545680 - RNA, 19 nt, Artificial Sequence
  Description of Artificial Sequence: Synthetic oligonucleotide
cgaucugauguggugagua

SEQ ID NO: 545681 - RNA, 19 nt, Artificial Sequence
  Description of Artificial Sequence: Synthetic oligonucleotide
cgcauagucuugaggucga

SEQ ID NO: 545682 - RNA, 19 nt, Artificial Sequence
  Description of Artificial Sequence: Synthetic oligonucleotide
ggaccuggucggugugcuc

SEQ ID NO: 545683 - RNA, 19 nt, Artificial Sequence
  Description of Artificial Sequence: Synthetic oligonucleotide
ccgcuuuaccacguugaca

SEQ ID NO: 545684 - RNA, 19 nt, Artificial Sequence
  Description of Artificial Sequence: Synthetic oligonucleotide
augugcccgugcacgucaa

SEQ ID NO: 545685 - RNA, 19 nt, Artificial Sequence
  Description of Artificial Sequence: Synthetic oligonucleotide
gugcuagcguugagguucu

SEQ ID NO: 545686 - RNA, 19 nt, Artificial Sequence
  Description of Artificial Sequence: Synthetic oligonucleotide
caacaagggcuacccuaau

SEQ ID NO: 545687 - RNA, 19 nt, Artificial Sequence
  Description of Artificial Sequence: Synthetic oligonucleotide
gcgaacugguacccugagu

SEQ ID NO: 545688 - RNA, 19 nt, Artificial Sequence
  Description of Artificial Sequence: Synthetic oligonucleotide
ggguguagcuccaguugua

SEQ ID NO: 545689 - RNA, 19 nt, Artificial Sequence
  Description of Artificial Sequence: Synthetic oligonucleotide
ggaagcgaacugguacccu

SEQ ID NO: 545690 - RNA, 19 nt, Artificial Sequence
  Description of Artificial Sequence: Synthetic oligonucleotide
gcuuugauaguggcaucau

SEQ ID NO: 545691 - RNA, 19 nt, Artificial Sequence
  Description of Artificial Sequence: Synthetic oligonucleotide
ggccucauaucugcacugu

SEQ ID NO: 545692 - RNA, 19 nt, Artificial Sequence
  Description of Artificial Sequence: Synthetic oligonucleotide
gugcgcucgcagagcccgc

SEQ ID NO: 545693 - RNA, 19 nt, Artificial Sequence
  Description of Artificial Sequence: Synthetic oligonucleotide
cacgagccaccugguagua

SEQ ID NO: 545694 - RNA, 19 nt, Artificial Sequence
  Description of Artificial Sequence: Synthetic oligonucleotide
cccgggauacagccugcca

SEQ ID NO: 545695 - RNA, 19 nt, Artificial Sequence
  Description of Artificial Sequence: Synthetic oligonucleotide
gcaucggagccccggcccu

SEQ ID NO: 545696 - RNA, 19 nt, Artificial Sequence
  Description of Artificial Sequence: Synthetic oligonucleotide
cgcucgcagagcccgcuuc

SEQ ID NO: 545697 - RNA, 19 nt, Artificial Sequence
  Description of Artificial Sequence: Synthetic oligonucleotide
gcacggcuauucacauaca

SEQ ID NO: 545698 - RNA, 19 nt, Artificial Sequence
  Description of Artificial Sequence: Synthetic oligonucleotide
gcagcaccccugguccaca

SEQ ID NO: 545699 - RNA, 19 nt, Artificial Sequence
  Description of Artificial Sequence: Synthetic oligonucleotide
cggucccagauauagccau

SEQ ID NO: 545700 - RNA, 19 nt, Artificial Sequence
  Description of Artificial Sequence: Synthetic oligonucleotide
ccccuccuaaggcauuacu

SEQ ID NO: 545701 - RNA, 19 nt, Artificial Sequence
  Description of Artificial Sequence: Synthetic oligonucleotide
cgugugugugugugugugu

SEQ ID NO: 545702 - RNA, 19 nt, Artificial Sequence
  Description of Artificial Sequence: Synthetic oligonucleotide
ccgcuggguggcggggcac

SEQ ID NO: 545703 - RNA, 19 nt, Artificial Sequence
  Description of Artificial Sequence: Synthetic oligonucleotide
ccgaucugauguggugagu

SEQ ID NO: 545704 - RNA, 19 nt, Artificial Sequence
  Description of Artificial Sequence: Synthetic oligonucleotide
gcgcucgcagagcccgcuu

SEQ ID NO: 545705 - RNA, 19 nt, Artificial Sequence
  Description of Artificial Sequence: Synthetic oligonucleotide
guuauuguaagccacacag

SEQ ID NO: 545706 - RNA, 19 nt, Artificial Sequence
  Description of Artificial Sequence: Synthetic oligonucleotide
aauuaaagaaacguacucg

SEQ ID NO: 545707 - RNA, 19 nt, Artificial Sequence
  Description of Artificial Sequence: Synthetic oligonucleotide
auucagaucauacacgugg

SEQ ID NO: 545708 - RNA, 19 nt, Artificial Sequence
  Description of Artificial Sequence: Synthetic oligonucleotide
ugauggaacauaauuaaag

SEQ ID NO: 545709 - RNA, 19 nt, Artificial Sequence
  Description of Artificial Sequence: Synthetic oligonucleotide
aaguguagauccuagucuc

SEQ ID NO: 545710 - RNA, 19 nt, Artificial Sequence
  Description of Artificial Sequence: Synthetic oligonucleotide
uauguuuagugccuguagg

SEQ ID NO: 545711 - RNA, 19 nt, Artificial Sequence
  Description of Artificial Sequence: Synthetic oligonucleotide
gagaggacgaauaacaagg

SEQ ID NO: 545712 - RNA, 19 nt, Artificial Sequence
  Description of Artificial Sequence: Synthetic oligonucleotide
ugcaauauggguaccagca

SEQ ID NO: 545713 - RNA, 19 nt, Artificial Sequence
  Description of Artificial Sequence: Synthetic oligonucleotide
gacagcaauagacuguacg

SEQ ID NO: 545714 - RNA, 19 nt, Artificial Sequence
  Description of Artificial Sequence: Synthetic oligonucleotide
aaugcaugggccgugcgcc

SEQ ID NO: 545715 - RNA, 19 nt, Artificial Sequence
  Description of Artificial Sequence: Synthetic oligonucleotide
agaucauacacguggacuc

SEQ ID NO: 545716 - RNA, 19 nt, Artificial Sequence
  Description of Artificial Sequence: Synthetic oligonucleotide
auaacugcaccuuuccaac

SEQ ID NO: 545717 - RNA, 19 nt, Artificial Sequence
  Description of Artificial Sequence: Synthetic oligonucleotide
uacaucgugagugugaugc

SEQ ID NO: 545718 - RNA, 19 nt, Artificial Sequence
  Description of Artificial Sequence: Synthetic oligonucleotide
aauaggcuauccaacuucc

SEQ ID NO: 545719 - RNA, 19 nt, Artificial Sequence
  Description of Artificial Sequence: Synthetic oligonucleotide
aaagaggguagacaguuca

SEQ ID NO: 545720 - RNA, 19 nt, Artificial Sequence
  Description of Artificial Sequence: Synthetic oligonucleotide
auaccuguuggucagaaug

SEQ ID NO: 545721 - RNA, 19 nt, Artificial Sequence
  Description of Artificial Sequence: Synthetic oligonucleotide
cauguucauauuucaaucg

SEQ ID NO: 545722 - RNA, 19 nt, Artificial Sequence
  Description of Artificial Sequence: Synthetic oligonucleotide
uccaaacgcauccagagca

SEQ ID NO: 545723 - RNA, 19 nt, Artificial Sequence
  Description of Artificial Sequence: Synthetic oligonucleotide
uuaacaagugucccaguag

SEQ ID NO: 545724 - RNA, 19 nt, Artificial Sequence
  Description of Artificial Sequence: Synthetic oligonucleotide
uuucaaucgauagagaaaa

SEQ ID NO: 545725 - RNA, 19 nt, Artificial Sequence
  Description of Artificial Sequence: Synthetic oligonucleotide
gauuugacaucaaacacgc

SEQ ID NO: 545726 - RNA, 19 nt, Artificial Sequence
  Description of Artificial Sequence: Synthetic oligonucleotide
ucagaaugggcaaugacaa

SEQ ID NO: 545727 - RNA, 19 nt, Artificial Sequence
  Description of Artificial Sequence: Synthetic oligonucleotide
ucaaauaccuguuggucag

SEQ ID NO: 545728 - RNA, 19 nt, Artificial Sequence
  Description of Artificial Sequence: Synthetic oligonucleotide
uuguaagccacacagcgga

SEQ ID NO: 545729 - RNA, 19 nt, Artificial Sequence
  Description of Artificial Sequence: Synthetic oligonucleotide
gauggaacauaauuaaaga

SEQ ID NO: 545730 - RNA, 19 nt, Artificial Sequence
  Description of Artificial Sequence: Synthetic oligonucleotide
aguaagggcuuauauaucu

SEQ ID NO: 545731 - RNA, 19 nt, Artificial Sequence
  Description of Artificial Sequence: Synthetic oligonucleotide
caucuuacgaauaaugcuc

SEQ ID NO: 545732 - RNA, 19 nt, Artificial Sequence
  Description of Artificial Sequence: Synthetic oligonucleotide
gaugcagcuagccaauucc

SEQ ID NO: 545733 - RNA, 19 nt, Artificial Sequence
  Description of Artificial Sequence: Synthetic oligonucleotide
uggauuauagagcacaguu

SEQ ID NO: 545734 - RNA, 19 nt, Artificial Sequence
  Description of Artificial Sequence: Synthetic oligonucleotide
acgaauaacaaggugagug

SEQ ID NO: 545735 - RNA, 19 nt, Artificial Sequence
  Description of Artificial Sequence: Synthetic oligonucleotide
guaugcaagugcuugaagc

SEQ ID NO: 545736 - RNA, 19 nt, Artificial Sequence
  Description of Artificial Sequence: Synthetic oligonucleotide
uuacgaauaaugcucccug

SEQ ID NO: 545737 - RNA, 19 nt, Artificial Sequence
  Description of Artificial Sequence: Synthetic oligonucleotide
uugggaugaaagcugaugu

SEQ ID NO: 545738 - RNA, 19 nt, Artificial Sequence
  Description of Artificial Sequence: Synthetic oligonucleotide
ugauucagaucauacacgu

SEQ ID NO: 545739 - RNA, 19 nt, Artificial Sequence
  Description of Artificial Sequence: Synthetic oligonucleotide
ugagauggcucuuaacaag

SEQ ID NO: 545740 - RNA, 19 nt, Artificial Sequence
  Description of Artificial Sequence: Synthetic oligonucleotide
agugccgucagacaagaag

SEQ ID NO: 545741 - RNA, 19 nt, Artificial Sequence
  Description of Artificial Sequence: Synthetic oligonucleotide
ccuuucauccaaaagaucc

SEQ ID NO: 545742 - RNA, 19 nt, Artificial Sequence
  Description of Artificial Sequence: Synthetic oligonucleotide
uggaaaguaugcaagugcu

SEQ ID NO: 545743 - RNA, 19 nt, Artificial Sequence
  Description of Artificial Sequence: Synthetic oligonucleotide
ucaaacacgcuaauguagu

SEQ ID NO: 545744 - RNA, 19 nt, Artificial Sequence
  Description of Artificial Sequence: Synthetic oligonucleotide
gugaugagcaaacuggaag

SEQ ID NO: 545745 - RNA, 19 nt, Artificial Sequence
  Description of Artificial Sequence: Synthetic oligonucleotide
guuauaaauuuccaccgug

SEQ ID NO: 545746 - RNA, 19 nt, Artificial Sequence
  Description of Artificial Sequence: Synthetic oligonucleotide
ugagaggacgaauaacaag

SEQ ID NO: 545747 - RNA, 19 nt, Artificial Sequence
  Description of Artificial Sequence: Synthetic oligonucleotide
ucgugaaacagccaaucug

SEQ ID NO: 545748 - RNA, 19 nt, Artificial Sequence
  Description of Artificial Sequence: Synthetic oligonucleotide
gaaaagacacagaaagugc

SEQ ID NO: 545749 - RNA, 19 nt, Artificial Sequence
  Description of Artificial Sequence: Synthetic oligonucleotide
accaucuuacgaauaaugc

SEQ ID NO: 545750 - RNA, 19 nt, Artificial Sequence
  Description of Artificial Sequence: Synthetic oligonucleotide
ucguucuacagccacaagu

SEQ ID NO: 545751 - RNA, 19 nt, Artificial Sequence
  Description of Artificial Sequence: Synthetic oligonucleotide
uaggucauacucaagaauu

SEQ ID NO: 545752 - RNA, 19 nt, Artificial Sequence
  Description of Artificial Sequence: Synthetic oligonucleotide
guaggcaucauggaggagg

SEQ ID NO: 545753 - RNA, 19 nt, Artificial Sequence
  Description of Artificial Sequence: Synthetic oligonucleotide
aucuguucgugaaacagcc

SEQ ID NO: 545754 - RNA, 19 nt, Artificial Sequence
  Description of Artificial Sequence: Synthetic oligonucleotide
uucgaacaggaaaugagac

SEQ ID NO: 545755 - RNA, 19 nt, Artificial Sequence
  Description of Artificial Sequence: Synthetic oligonucleotide
uguacgucagcauuugcga

SEQ ID NO: 545756 - RNA, 19 nt, Artificial Sequence
  Description of Artificial Sequence: Synthetic oligonucleotide
uaaauuuccaccgugccau

SEQ ID NO: 545757 - RNA, 19 nt, Artificial Sequence
  Description of Artificial Sequence: Synthetic oligonucleotide
cuguacgucagcauuugcg

SEQ ID NO: 545758 - RNA, 19 nt, Artificial Sequence
  Description of Artificial Sequence: Synthetic oligonucleotide
aaaguaugcaagugcuuga

SEQ ID NO: 545759 - RNA, 19 nt, Artificial Sequence
  Description of Artificial Sequence: Synthetic oligonucleotide
uacucgauggaccuuaaau

SEQ ID NO: 545760 - RNA, 19 nt, Artificial Sequence
  Description of Artificial Sequence: Synthetic oligonucleotide
ugcuggaaugguuuggucc

SEQ ID NO: 545761 - RNA, 19 nt, Artificial Sequence
  Description of Artificial Sequence: Synthetic oligonucleotide
augauucugggaaacaaac

SEQ ID NO: 545762 - RNA, 19 nt, Artificial Sequence
  Description of Artificial Sequence: Synthetic oligonucleotide
aggaaguggauuauagagc

SEQ ID NO: 545763 - RNA, 19 nt, Artificial Sequence
  Description of Artificial Sequence: Synthetic oligonucleotide
caugagaggacgaauaaca

SEQ ID NO: 545764 - RNA, 19 nt, Artificial Sequence
  Description of Artificial Sequence: Synthetic oligonucleotide
uuugcugacaaguuauaaa

SEQ ID NO: 545765 - RNA, 19 nt, Artificial Sequence
  Description of Artificial Sequence: Synthetic oligonucleotide
acugacugccaaaagacac

SEQ ID NO: 545766 - RNA, 19 nt, Artificial Sequence
  Description of Artificial Sequence: Synthetic oligonucleotide
aagaguaagggcuuauaua

SEQ ID NO: 545767 - RNA, 19 nt, Artificial Sequence
  Description of Artificial Sequence: Synthetic oligonucleotide
caauauggguaccagcagg

SEQ ID NO: 545768 - RNA, 19 nt, Artificial Sequence
  Description of Artificial Sequence: Synthetic oligonucleotide
agugcguacaucgugagug

SEQ ID NO: 545769 - RNA, 19 nt, Artificial Sequence
  Description of Artificial Sequence: Synthetic oligonucleotide
uauccaacuuccacacugg

SEQ ID NO: 545770 - RNA, 19 nt, Artificial Sequence
  Description of Artificial Sequence: Synthetic oligonucleotide
uguagcccgagacucauga

SEQ ID NO: 545771 - RNA, 19 nt, Artificial Sequence
  Description of Artificial Sequence: Synthetic oligonucleotide
acacgauacaccuugacuu

SEQ ID NO: 545772 - RNA, 19 nt, Artificial Sequence
  Description of Artificial Sequence: Synthetic oligonucleotide
ugaucagcgacagcaauag

SEQ ID NO: 545773 - RNA, 19 nt, Artificial Sequence
  Description of Artificial Sequence: Synthetic oligonucleotide
uuauagagcacaguuuugu

SEQ ID NO: 545774 - RNA, 19 nt, Artificial Sequence
  Description of Artificial Sequence: Synthetic oligonucleotide
agaaacguacucgauggac

SEQ ID NO: 545775 - RNA, 19 nt, Artificial Sequence
  Description of Artificial Sequence: Synthetic oligonucleotide
cuagccaauucccaucugg

SEQ ID NO: 545776 - RNA, 19 nt, Artificial Sequence
  Description of Artificial Sequence: Synthetic oligonucleotide
cuggaaaguaugcaagugc

SEQ ID NO: 545777 - RNA, 19 nt, Artificial Sequence
  Description of Artificial Sequence: Synthetic oligonucleotide
uccuagucuccaaaguucc

SEQ ID NO: 545778 - RNA, 19 nt, Artificial Sequence
  Description of Artificial Sequence: Synthetic oligonucleotide
agcaauagacuguacguca

SEQ ID NO: 545779 - RNA, 19 nt, Artificial Sequence
  Description of Artificial Sequence: Synthetic oligonucleotide
aauagacuguacgucagca

SEQ ID NO: 545780 - RNA, 19 nt, Artificial Sequence
  Description of Artificial Sequence: Synthetic oligonucleotide
auaauuaaagaaacguacu

SEQ ID NO: 545781 - RNA, 19 nt, Artificial Sequence
  Description of Artificial Sequence: Synthetic oligonucleotide
auaaauuuccaccgugcca

SEQ ID NO: 545782 - RNA, 19 nt, Artificial Sequence
  Description of Artificial Sequence: Synthetic oligonucleotide
aucuuacgaauaaugcucc

SEQ ID NO: 545783 - RNA, 19 nt, Artificial Sequence
  Description of Artificial Sequence: Synthetic oligonucleotide
auggaacauaauuaaagaa

SEQ ID NO: 545784 - RNA, 19 nt, Artificial Sequence
  Description of Artificial Sequence: Synthetic oligonucleotide
cucgauggaccuuaaauuc

SEQ ID NO: 545785 - RNA, 19 nt, Artificial Sequence
  Description of Artificial Sequence: Synthetic oligonucleotide
ugugccuucggcuguaccc

SEQ ID NO: 545786 - RNA, 19 nt, Artificial Sequence
  Description of Artificial Sequence: Synthetic oligonucleotide
uaugcagagacccuugauu

SEQ ID NO: 545787 - RNA, 19 nt, Artificial Sequence
  Description of Artificial Sequence: Synthetic oligonucleotide
ucuggagugaccucaaaua

SEQ ID NO: 545788 - RNA, 19 nt, Artificial Sequence
  Description of Artificial Sequence: Synthetic oligonucleotide
uugaguccagcacuaaaga

SEQ ID NO: 545789 - RNA, 19 nt, Artificial Sequence
  Description of Artificial Sequence: Synthetic oligonucleotide
caaaauauggagggcagag

SEQ ID NO: 545790 - RNA, 19 nt, Artificial Sequence
  Description of Artificial Sequence: Synthetic oligonucleotide
aaccaucuuacgaauaaug

SEQ ID NO: 545791 - RNA, 19 nt, Artificial Sequence
  Description of Artificial Sequence: Synthetic oligonucleotide
uacuuuauguuuagugccu

SEQ ID NO: 545792 - RNA, 19 nt, Artificial Sequence
  Description of Artificial Sequence: Synthetic oligonucleotide
uguuggaagucacggagac

SEQ ID NO: 545793 - RNA, 19 nt, Artificial Sequence
  Description of Artificial Sequence: Synthetic oligonucleotide
aaagagcuuuguugaaucu

SEQ ID NO: 545794 - RNA, 19 nt, Artificial Sequence
  Description of Artificial Sequence: Synthetic oligonucleotide
gaaacguacucgauggacc

SEQ ID NO: 545795 - RNA, 19 nt, Artificial Sequence
  Description of Artificial Sequence: Synthetic oligonucleotide
acgcuaauguagucuaugg

SEQ ID NO: 545796 - RNA, 19 nt, Artificial Sequence
  Description of Artificial Sequence: Synthetic oligonucleotide
agguacugugcagugaagc

SEQ ID NO: 545797 - RNA, 19 nt, Artificial Sequence
  Description of Artificial Sequence: Synthetic oligonucleotide
agagccgcuguccuucugc

SEQ ID NO: 545798 - RNA, 19 nt, Artificial Sequence
  Description of Artificial Sequence: Synthetic oligonucleotide
cucaagaauuucuccauug

SEQ ID NO: 545799 - RNA, 19 nt, Artificial Sequence
  Description of Artificial Sequence: Synthetic oligonucleotide
uggaccuuaaauucaccca

SEQ ID NO: 545800 - RNA, 19 nt, Artificial Sequence
  Description of Artificial Sequence: Synthetic oligonucleotide
aggacgaauaacaagguga

SEQ ID NO: 545801 - RNA, 19 nt, Artificial Sequence
  Description of Artificial Sequence: Synthetic oligonucleotide
aauagguccuccaaacgca

SEQ ID NO: 545802 - RNA, 19 nt, Artificial Sequence
  Description of Artificial Sequence: Synthetic oligonucleotide
aacacgcuaauguagucua

SEQ ID NO: 545803 - RNA, 19 nt, Artificial Sequence
  Description of Artificial Sequence: Synthetic oligonucleotide
gggaguaucccuuuggagc

SEQ ID NO: 545804 - RNA, 19 nt, Artificial Sequence
  Description of Artificial Sequence: Synthetic oligonucleotide
ggaugcugaacucaaauac

SEQ ID NO: 545805 - RNA, 19 nt, Artificial Sequence
  Description of Artificial Sequence: Synthetic oligonucleotide
aaugagacgucgaugggga

SEQ ID NO: 545806 - RNA, 19 nt, Artificial Sequence
  Description of Artificial Sequence: Synthetic oligonucleotide
ugccgaucaaaauuucuug

SEQ ID NO: 545807 - RNA, 19 nt, Artificial Sequence
  Description of Artificial Sequence: Synthetic oligonucleotide
uggaaaguuguaagcaggu

SEQ ID NO: 545808 - RNA, 19 nt, Artificial Sequence
  Description of Artificial Sequence: Synthetic oligonucleotide
uucuacagccacaaguguc

SEQ ID NO: 545809 - RNA, 19 nt, Artificial Sequence
  Description of Artificial Sequence: Synthetic oligonucleotide
uaggcuauccaacuuccac

SEQ ID NO: 545810 - RNA, 19 nt, Artificial Sequence
  Description of Artificial Sequence: Synthetic oligonucleotide
gaaaugagacgucgauggg

SEQ ID NO: 545811 - RNA, 19 nt, Artificial Sequence
  Description of Artificial Sequence: Synthetic oligonucleotide
ucgauggaccuuaaauuca

SEQ ID NO: 545812 - RNA, 19 nt, Artificial Sequence
  Description of Artificial Sequence: Synthetic oligonucleotide
uguucauauuucaaucgau

SEQ ID NO: 545813 - RNA, 19 nt, Artificial Sequence
  Description of Artificial Sequence: Synthetic oligonucleotide
ugcagauaauguucucagg

SEQ ID NO: 545814 - RNA, 19 nt, Artificial Sequence
  Description of Artificial Sequence: Synthetic oligonucleotide
gauuauagagcacaguuuu

SEQ ID NO: 545815 - RNA, 19 nt, Artificial Sequence
  Description of Artificial Sequence: Synthetic oligonucleotide
aacaccccacacgauacac

SEQ ID NO: 545816 - RNA, 19 nt, Artificial Sequence
  Description of Artificial Sequence: Synthetic oligonucleotide
aaacacgcuaauguagucu

SEQ ID NO: 545817 - RNA, 19 nt, Artificial Sequence
  Description of Artificial Sequence: Synthetic oligonucleotide
uugucauguucauauuuca

SEQ ID NO: 545818 - RNA, 19 nt, Artificial Sequence
  Description of Artificial Sequence: Synthetic oligonucleotide
auaacaaggugagugucag

SEQ ID NO: 545819 - RNA, 19 nt, Artificial Sequence
  Description of Artificial Sequence: Synthetic oligonucleotide
uuaaagaaacguacucgau

SEQ ID NO: 545820 - RNA, 19 nt, Artificial Sequence
  Description of Artificial Sequence: Synthetic oligonucleotide
augauucagaucauacacg

SEQ ID NO: 545821 - RNA, 19 nt, Artificial Sequence
  Description of Artificial Sequence: Synthetic oligonucleotide
ucacagaaccaucuucaca

SEQ ID NO: 545822 - RNA, 19 nt, Artificial Sequence
  Description of Artificial Sequence: Synthetic oligonucleotide
aagggcuuauauaucuuag

SEQ ID NO: 545823 - RNA, 19 nt, Artificial Sequence
  Description of Artificial Sequence: Synthetic oligonucleotide
augacaagauuguugguau

SEQ ID NO: 545824 - RNA, 19 nt, Artificial Sequence
  Description of Artificial Sequence: Synthetic oligonucleotide
aguagcugagucccauaac

SEQ ID NO: 545825 - RNA, 19 nt, Artificial Sequence
  Description of Artificial Sequence: Synthetic oligonucleotide
uagucuauggagccagcug

SEQ ID NO: 545826 - RNA, 19 nt, Artificial Sequence
  Description of Artificial Sequence: Synthetic oligonucleotide
ugucauuuggaaguggcaa

SEQ ID NO: 545827 - RNA, 19 nt, Artificial Sequence
  Description of Artificial Sequence: Synthetic oligonucleotide
gugccgucagacaagaagg

SEQ ID NO: 545828 - RNA, 19 nt, Artificial Sequence
  Description of Artificial Sequence: Synthetic oligonucleotide
uggacuccagcacugguac

SEQ ID NO: 545829 - RNA, 19 nt, Artificial Sequence
  Description of Artificial Sequence: Synthetic oligonucleotide
aguggcaaggacuugucaa

SEQ ID NO: 545830 - RNA, 19 nt, Artificial Sequence
  Description of Artificial Sequence: Synthetic oligonucleotide
auacacguggacuccagca

SEQ ID NO: 545831 - RNA, 19 nt, Artificial Sequence
  Description of Artificial Sequence: Synthetic oligonucleotide
uuuuaaaugcaugggccgu

SEQ ID NO: 545832 - RNA, 19 nt, Artificial Sequence
  Description of Artificial Sequence: Synthetic oligonucleotide
acucgauggaccuuaaauu

SEQ ID NO: 545833 - RNA, 19 nt, Artificial Sequence
  Description of Artificial Sequence: Synthetic oligonucleotide
cacagcggaugccugaugg

SEQ ID NO: 545834 - RNA, 19 nt, Artificial Sequence
  Description of Artificial Sequence: Synthetic oligonucleotide
guuuagugccuguagguca

SEQ ID NO: 545835 - RNA, 19 nt, Artificial Sequence
  Description of Artificial Sequence: Synthetic oligonucleotide
uucgugaaacagccaaucu

SEQ ID NO: 545836 - RNA, 19 nt, Artificial Sequence
  Description of Artificial Sequence: Synthetic oligonucleotide
ugggaugcugaacucaaau

SEQ ID NO: 545837 - RNA, 19 nt, Artificial Sequence
  Description of Artificial Sequence: Synthetic oligonucleotide
ugggaguaucccuuuggag

SEQ ID NO: 545838 - RNA, 19 nt, Artificial Sequence
  Description of Artificial Sequence: Synthetic oligonucleotide
uuaucaugauucugggaaa

SEQ ID NO: 545839 - RNA, 19 nt, Artificial Sequence
  Description of Artificial Sequence: Synthetic oligonucleotide
aaucccugcuucuggacau

SEQ ID NO: 545840 - RNA, 19 nt, Artificial Sequence
  Description of Artificial Sequence: Synthetic oligonucleotide
ggaugauaugcagagaccc

SEQ ID NO: 545841 - RNA, 19 nt, Artificial Sequence
  Description of Artificial Sequence: Synthetic oligonucleotide
gaggacgaauaacaaggug

SEQ ID NO: 545842 - RNA, 19 nt, Artificial Sequence
  Description of Artificial Sequence: Synthetic oligonucleotide
aguaugcaagugcuugaag

SEQ ID NO: 545843 - RNA, 19 nt, Artificial Sequence
  Description of Artificial Sequence: Synthetic oligonucleotide
aaauuuccaccgugccauc

SEQ ID NO: 545844 - RNA, 19 nt, Artificial Sequence
  Description of Artificial Sequence: Synthetic oligonucleotide
uugucauuuggaaguggca

SEQ ID NO: 545845 - RNA, 19 nt, Artificial Sequence
  Description of Artificial Sequence: Synthetic oligonucleotide
uauagagcacaguuuuguc

SEQ ID NO: 545846 - RNA, 19 nt, Artificial Sequence
  Description of Artificial Sequence: Synthetic oligonucleotide
ugccugucuaaaaccaucu

SEQ ID NO: 545847 - RNA, 19 nt, Artificial Sequence
  Description of Artificial Sequence: Synthetic oligonucleotide
uuuaaaugcaugggccgug

SEQ ID NO: 545848 - RNA, 19 nt, Artificial Sequence
  Description of Artificial Sequence: Synthetic oligonucleotide
aaaagaggguagacaguuc

SEQ ID NO: 545849 - RNA, 19 nt, Artificial Sequence
  Description of Artificial Sequence: Synthetic oligonucleotide
ggagccagcugcaauaugg

SEQ ID NO: 545850 - RNA, 19 nt, Artificial Sequence
  Description of Artificial Sequence: Synthetic oligonucleotide
ugcugaacucaaauaccug

SEQ ID NO: 545851 - RNA, 19 nt, Artificial Sequence
  Description of Artificial Sequence: Synthetic oligonucleotide
auccuagucuccaaaguuc

SEQ ID NO: 545852 - RNA, 19 nt, Artificial Sequence
  Description of Artificial Sequence: Synthetic oligonucleotide
gauacagaacauguaggca

SEQ ID NO: 545853 - RNA, 19 nt, Artificial Sequence
  Description of Artificial Sequence: Synthetic oligonucleotide
uuuagugccuguaggucau

SEQ ID NO: 545854 - RNA, 19 nt, Artificial Sequence
  Description of Artificial Sequence: Synthetic oligonucleotide
uccaugagaggacgaauaa

SEQ ID NO: 545855 - RNA, 19 nt, Artificial Sequence
  Description of Artificial Sequence: Synthetic oligonucleotide
aaaccgagaugcuguagaa

SEQ ID NO: 545856 - RNA, 19 nt, Artificial Sequence
  Description of Artificial Sequence: Synthetic oligonucleotide
gcggucauacuccaaauag

SEQ ID NO: 545857 - RNA, 19 nt, Artificial Sequence
  Description of Artificial Sequence: Synthetic oligonucleotide
cugaugugugugaugggag

SEQ ID NO: 545858 - RNA, 19 nt, Artificial Sequence
  Description of Artificial Sequence: Synthetic oligonucleotide
agauccuagucuccaaagu

SEQ ID NO: 545859 - RNA, 19 nt, Artificial Sequence
  Description of Artificial Sequence: Synthetic oligonucleotide
agagcagucacuggaaagu

SEQ ID NO: 545860 - RNA, 19 nt, Artificial Sequence
  Description of Artificial Sequence: Synthetic oligonucleotide
aacagccaaucuguuugac

SEQ ID NO: 545861 - RNA, 19 nt, Artificial Sequence
  Description of Artificial Sequence: Synthetic oligonucleotide
ucuuacgaauaaugcuccc

SEQ ID NO: 545862 - RNA, 19 nt, Artificial Sequence
  Description of Artificial Sequence: Synthetic oligonucleotide
aagaaacguacucgaugga

SEQ ID NO: 545863 - RNA, 19 nt, Artificial Sequence
  Description of Artificial Sequence: Synthetic oligonucleotide
uacgaauaaugcucccuga

SEQ ID NO: 545864 - RNA, 19 nt, Artificial Sequence
  Description of Artificial Sequence: Synthetic oligonucleotide
uaucaugauucugggaaac

SEQ ID NO: 545865 - RNA, 19 nt, Artificial Sequence
  Description of Artificial Sequence: Synthetic oligonucleotide
guguugccugucuaaaacc

SEQ ID NO: 545866 - RNA, 19 nt, Artificial Sequence
  Description of Artificial Sequence: Synthetic oligonucleotide
ucauacacguggacuccag

SEQ ID NO: 545867 - RNA, 19 nt, Artificial Sequence
  Description of Artificial Sequence: Synthetic oligonucleotide
ugagacucaggauccgacu

SEQ ID NO: 545868 - RNA, 19 nt, Artificial Sequence
  Description of Artificial Sequence: Synthetic oligonucleotide
ugucaaugauacagaacau

SEQ ID NO: 545869 - RNA, 19 nt, Artificial Sequence
  Description of Artificial Sequence: Synthetic oligonucleotide
uuagagaguggaagaguau

SEQ ID NO: 545870 - RNA, 19 nt, Artificial Sequence
  Description of Artificial Sequence: Synthetic oligonucleotide
uaaugcucccugauuugac

SEQ ID NO: 545871 - RNA, 19 nt, Artificial Sequence
  Description of Artificial Sequence: Synthetic oligonucleotide
auuucaaucgauagagaaa

SEQ ID NO: 545872 - RNA, 19 nt, Artificial Sequence
  Description of Artificial Sequence: Synthetic oligonucleotide
uggauuuucucuggaguga

SEQ ID NO: 545873 - RNA, 19 nt, Artificial Sequence
  Description of Artificial Sequence: Synthetic oligonucleotide
gaugccagcugagacucag

SEQ ID NO: 545874 - RNA, 19 nt, Artificial Sequence
  Description of Artificial Sequence: Synthetic oligonucleotide
auuugcgaugagauggcuc

SEQ ID NO: 545875 - RNA, 19 nt, Artificial Sequence
  Description of Artificial Sequence: Synthetic oligonucleotide
gguguugccugucuaaaac

SEQ ID NO: 545876 - RNA, 19 nt, Artificial Sequence
  Description of Artificial Sequence: Synthetic oligonucleotide
uaccugaugcagcuagcca

SEQ ID NO: 545877 - RNA, 19 nt, Artificial Sequence
  Description of Artificial Sequence: Synthetic oligonucleotide
ugaugcagcuagccaauuc

SEQ ID NO: 545878 - RNA, 19 nt, Artificial Sequence
  Description of Artificial Sequence: Synthetic oligonucleotide
acgaauaaugcucccugau

SEQ ID NO: 545879 - RNA, 19 nt, Artificial Sequence
  Description of Artificial Sequence: Synthetic oligonucleotide
acgucgauggggaaaagug

SEQ ID NO: 545880 - RNA, 19 nt, Artificial Sequence
  Description of Artificial Sequence: Synthetic oligonucleotide
aacucuuuggaggcuuaug

SEQ ID NO: 545881 - RNA, 19 nt, Artificial Sequence
  Description of Artificial Sequence: Synthetic oligonucleotide
ugcagagacccuugauuug

SEQ ID NO: 545882 - RNA, 19 nt, Artificial Sequence
  Description of Artificial Sequence: Synthetic oligonucleotide
aucgugagugugaugcugg

SEQ ID NO: 545883 - RNA, 19 nt, Artificial Sequence
  Description of Artificial Sequence: Synthetic oligonucleotide
ccugauugaggcuggaaag

SEQ ID NO: 545884 - RNA, 19 nt, Artificial Sequence
  Description of Artificial Sequence: Synthetic oligonucleotide
aauaccuguuggucagaau

SEQ ID NO: 545885 - RNA, 19 nt, Artificial Sequence
  Description of Artificial Sequence: Synthetic oligonucleotide
caauagacuguacgucagc

SEQ ID NO: 545886 - RNA, 19 nt, Artificial Sequence
  Description of Artificial Sequence: Synthetic oligonucleotide
gaucauacacguggacucc

SEQ ID NO: 545887 - RNA, 19 nt, Artificial Sequence
  Description of Artificial Sequence: Synthetic oligonucleotide
cuucuguagcccgagacuc

SEQ ID NO: 545888 - RNA, 19 nt, Artificial Sequence
  Description of Artificial Sequence: Synthetic oligonucleotide
gaagaguaagggcuuauau

SEQ ID NO: 545889 - RNA, 19 nt, Artificial Sequence
  Description of Artificial Sequence: Synthetic oligonucleotide
augcugaacucaaauaccu

SEQ ID NO: 545890 - RNA, 19 nt, Artificial Sequence
  Description of Artificial Sequence: Synthetic oligonucleotide
uguucgugaaacagccaau

SEQ ID NO: 545891 - RNA, 19 nt, Artificial Sequence
  Description of Artificial Sequence: Synthetic oligonucleotide
ggacgaauaacaaggugag

SEQ ID NO: 545892 - RNA, 19 nt, Artificial Sequence
  Description of Artificial Sequence: Synthetic oligonucleotide
ugcaaguguagauccuagu

SEQ ID NO: 545893 - RNA, 19 nt, Artificial Sequence
  Description of Artificial Sequence: Synthetic oligonucleotide
aacgcauccagagcauacu

SEQ ID NO: 545894 - RNA, 19 nt, Artificial Sequence
  Description of Artificial Sequence: Synthetic oligonucleotide
ugggccgugcgccucagga

SEQ ID NO: 545895 - RNA, 19 nt, Artificial Sequence
  Description of Artificial Sequence: Synthetic oligonucleotide
cacuaaagagccgcugucc

SEQ ID NO: 545896 - RNA, 19 nt, Artificial Sequence
  Description of Artificial Sequence: Synthetic oligonucleotide
agcacugguaccugaugca

SEQ ID NO: 545897 - RNA, 19 nt, Artificial Sequence
  Description of Artificial Sequence: Synthetic oligonucleotide
ugcaccuuuccaacagagu

SEQ ID NO: 545898 - RNA, 19 nt, Artificial Sequence
  Description of Artificial Sequence: Synthetic oligonucleotide
aaugggcaaugacaagauu

SEQ ID NO: 545899 - RNA, 19 nt, Artificial Sequence
  Description of Artificial Sequence: Synthetic oligonucleotide
cacacugggaaacacaacu

SEQ ID NO: 545900 - RNA, 19 nt, Artificial Sequence
  Description of Artificial Sequence: Synthetic oligonucleotide
cugagacucaggauccgac

SEQ ID NO: 545901 - RNA, 19 nt, Artificial Sequence
  Description of Artificial Sequence: Synthetic oligonucleotide
acuuugucacucccaggug

SEQ ID NO: 545902 - RNA, 19 nt, Artificial Sequence
  Description of Artificial Sequence: Synthetic oligonucleotide
ucgacuccacucuguauac

SEQ ID NO: 545903 - RNA, 19 nt, Artificial Sequence
  Description of Artificial Sequence: Synthetic oligonucleotide
gcaaguguagauccuaguc

SEQ ID NO: 545904 - RNA, 19 nt, Artificial Sequence
  Description of Artificial Sequence: Synthetic oligonucleotide
ucuguucgugaaacagcca

SEQ ID NO: 545905 - RNA, 19 nt, Artificial Sequence
  Description of Artificial Sequence: Synthetic oligonucleotide
ccaauucccaucuggacug

SEQ ID NO: 545906 - RNA, 19 nt, Artificial Sequence
  Description of Artificial Sequence: Synthetic oligonucleotide
auagacuguacgucagcau

SEQ ID NO: 545907 - RNA, 19 nt, Artificial Sequence
  Description of Artificial Sequence: Synthetic oligonucleotide
cuucacaaccaaccacaag

SEQ ID NO: 545908 - RNA, 19 nt, Artificial Sequence
  Description of Artificial Sequence: Synthetic oligonucleotide
ugcuguuggaagucacgga

SEQ ID NO: 545909 - RNA, 19 nt, Artificial Sequence
  Description of Artificial Sequence: Synthetic oligonucleotide
acuuuauguuuagugccug

SEQ ID NO: 545910 - RNA, 19 nt, Artificial Sequence
  Description of Artificial Sequence: Synthetic oligonucleotide
uucuguagcccgagacuca

SEQ ID NO: 545911 - RNA, 19 nt, Artificial Sequence
  Description of Artificial Sequence: Synthetic oligonucleotide
agagcauacuuuauguuua

SEQ ID NO: 545912 - RNA, 19 nt, Artificial Sequence
  Description of Artificial Sequence: Synthetic oligonucleotide
cuccguucuugccuguugc

SEQ ID NO: 545913 - RNA, 19 nt, Artificial Sequence
  Description of Artificial Sequence: Synthetic oligonucleotide
gauucagaucauacacgug

SEQ ID NO: 545914 - RNA, 19 nt, Artificial Sequence
  Description of Artificial Sequence: Synthetic oligonucleotide
uugguccguacccacugcu

SEQ ID NO: 545915 - RNA, 19 nt, Artificial Sequence
  Description of Artificial Sequence: Synthetic oligonucleotide
gaugccugauggaacauaa

SEQ ID NO: 545916 - RNA, 19 nt, Artificial Sequence
  Description of Artificial Sequence: Synthetic oligonucleotide
cuguucgugaaacagccaa

SEQ ID NO: 545917 - RNA, 19 nt, Artificial Sequence
  Description of Artificial Sequence: Synthetic oligonucleotide
ccuccaaacgcauccagag

SEQ ID NO: 545918 - RNA, 19 nt, Artificial Sequence
  Description of Artificial Sequence: Synthetic oligonucleotide
auauggagggcagagcgaa

SEQ ID NO: 545919 - RNA, 19 nt, Artificial Sequence
  Description of Artificial Sequence: Synthetic oligonucleotide
ugauugaggcuggaaagua

SEQ ID NO: 545920 - RNA, 19 nt, Artificial Sequence
  Description of Artificial Sequence: Synthetic oligonucleotide
gcuuauguugucauguuca

SEQ ID NO: 545921 - RNA, 19 nt, Artificial Sequence
  Description of Artificial Sequence: Synthetic oligonucleotide
cuccaaacgcauccagagc

SEQ ID NO: 545922 - RNA, 19 nt, Artificial Sequence
  Description of Artificial Sequence: Synthetic oligonucleotide
caaguguagauccuagucu

SEQ ID NO: 545923 - RNA, 19 nt, Artificial Sequence
  Description of Artificial Sequence: Synthetic oligonucleotide
cauacacguggacuccagc

SEQ ID NO: 545924 - RNA, 19 nt, Artificial Sequence
  Description of Artificial Sequence: Synthetic oligonucleotide
caaacacgcuaauguaguc

SEQ ID NO: 545925 - RNA, 19 nt, Artificial Sequence
  Description of Artificial Sequence: Synthetic oligonucleotide
aggugcaguagauggucug

SEQ ID NO: 545926 - RNA, 19 nt, Artificial Sequence
  Description of Artificial Sequence: Synthetic oligonucleotide
aguaucccuuuggagccac

SEQ ID NO: 545927 - RNA, 19 nt, Artificial Sequence
  Description of Artificial Sequence: Synthetic oligonucleotide
cccugauuugacaucaaac

SEQ ID NO: 545928 - RNA, 19 nt, Artificial Sequence
  Description of Artificial Sequence: Synthetic oligonucleotide
gauccuagucuccaaaguu

SEQ ID NO: 545929 - RNA, 19 nt, Artificial Sequence
  Description of Artificial Sequence: Synthetic oligonucleotide
cacagugcguacaucguga

SEQ ID NO: 545930 - RNA, 19 nt, Artificial Sequence
  Description of Artificial Sequence: Synthetic oligonucleotide
ccaagugaugagcaaacug

SEQ ID NO: 545931 - RNA, 19 nt, Artificial Sequence
  Description of Artificial Sequence: Synthetic oligonucleotide
guaccugaugcagcuagcc

SEQ ID NO: 545932 - RNA, 19 nt, Artificial Sequence
  Description of Artificial Sequence: Synthetic oligonucleotide
guucgugaaacagccaauc

SEQ ID NO: 545933 - RNA, 19 nt, Artificial Sequence
  Description of Artificial Sequence: Synthetic oligonucleotide
aaagagccgcuguccuucu

SEQ ID NO: 545934 - RNA, 19 nt, Artificial Sequence
  Description of Artificial Sequence: Synthetic oligonucleotide
cguucuacagccacaagug

SEQ ID NO: 545935 - RNA, 19 nt, Artificial Sequence
  Description of Artificial Sequence: Synthetic oligonucleotide
acaccccacacgauacacc

SEQ ID NO: 545936 - RNA, 19 nt, Artificial Sequence
  Description of Artificial Sequence: Synthetic oligonucleotide
cacgcuaauguagucuaug

SEQ ID NO: 545937 - RNA, 19 nt, Artificial Sequence
  Description of Artificial Sequence: Synthetic oligonucleotide
ugccuucuuuucgaacagg

SEQ ID NO: 545938 - RNA, 19 nt, Artificial Sequence
  Description of Artificial Sequence: Synthetic oligonucleotide
caaaagauccaugaagagu

SEQ ID NO: 545939 - RNA, 19 nt, Artificial Sequence
  Description of Artificial Sequence: Synthetic oligonucleotide
agugccuguaggucauacu

SEQ ID NO: 545940 - RNA, 19 nt, Artificial Sequence
  Description of Artificial Sequence: Synthetic oligonucleotide
ccacacuuaugacagugcc

SEQ ID NO: 545941 - RNA, 19 nt, Artificial Sequence
  Description of Artificial Sequence: Synthetic oligonucleotide
cugauggaacauaauuaaa

SEQ ID NO: 545942 - RNA, 19 nt, Artificial Sequence
  Description of Artificial Sequence: Synthetic oligonucleotide
guacccaccacaaaacugu

SEQ ID NO: 545943 - RNA, 19 nt, Artificial Sequence
  Description of Artificial Sequence: Synthetic oligonucleotide
acaaaagaggguagacagu

SEQ ID NO: 545944 - RNA, 19 nt, Artificial Sequence
  Description of Artificial Sequence: Synthetic oligonucleotide
aggacuugucaaugauaca

SEQ ID NO: 545945 - RNA, 19 nt, Artificial Sequence
  Description of Artificial Sequence: Synthetic oligonucleotide
caucgugagugugaugcug

SEQ ID NO: 545946 - RNA, 19 nt, Artificial Sequence
  Description of Artificial Sequence: Synthetic oligonucleotide
aaagauccaugaagaguaa

SEQ ID NO: 545947 - RNA, 19 nt, Artificial Sequence
  Description of Artificial Sequence: Synthetic oligonucleotide
acgucagcauuugcgauga

SEQ ID NO: 545948 - RNA, 19 nt, Artificial Sequence
  Description of Artificial Sequence: Synthetic oligonucleotide
gaguaagggcuuauauauc

SEQ ID NO: 545949 - RNA, 19 nt, Artificial Sequence
  Description of Artificial Sequence: Synthetic oligonucleotide
gugcccuguuuuaaguucc

SEQ ID NO: 545950 - RNA, 19 nt, Artificial Sequence
  Description of Artificial Sequence: Synthetic oligonucleotide
agaggacgaauaacaaggu

SEQ ID NO: 545951 - RNA, 19 nt, Artificial Sequence
  Description of Artificial Sequence: Synthetic oligonucleotide
guaccagcaggaugccagc

SEQ ID NO: 545952 - RNA, 19 nt, Artificial Sequence
  Description of Artificial Sequence: Synthetic oligonucleotide
gacccuugauuugaugcca

SEQ ID NO: 545953 - RNA, 19 nt, Artificial Sequence
  Description of Artificial Sequence: Synthetic oligonucleotide
gagauggcucuuaacaagu

SEQ ID NO: 545954 - RNA, 19 nt, Artificial Sequence
  Description of Artificial Sequence: Synthetic oligonucleotide
cuuugucacucccaggugu

SEQ ID NO: 545955 - RNA, 19 nt, Artificial Sequence
  Description of Artificial Sequence: Synthetic oligonucleotide
agcccgagacucaugaccu

SEQ ID NO: 545956 - RNA, 19 nt, Artificial Sequence
  Description of Artificial Sequence: Synthetic oligonucleotide
gaaguggauuauagagcac

SEQ ID NO: 545957 - RNA, 19 nt, Artificial Sequence
  Description of Artificial Sequence: Synthetic oligonucleotide
gagacgucgauggggaaaa

SEQ ID NO: 545958 - RNA, 19 nt, Artificial Sequence
  Description of Artificial Sequence: Synthetic oligonucleotide
acccuugauuugaugccac

SEQ ID NO: 545959 - RNA, 19 nt, Artificial Sequence
  Description of Artificial Sequence: Synthetic oligonucleotide
ucuguagcccgagacucau

SEQ ID NO: 545960 - RNA, 19 nt, Artificial Sequence
  Description of Artificial Sequence: Synthetic oligonucleotide
cuccaugagaggacgaaua

SEQ ID NO: 545961 - RNA, 19 nt, Artificial Sequence
  Description of Artificial Sequence: Synthetic oligonucleotide
agugaagcuuuagaugauu

SEQ ID NO: 545962 - RNA, 19 nt, Artificial Sequence
  Description of Artificial Sequence: Synthetic oligonucleotide
ugacaagauuguugguauu

SEQ ID NO: 545963 - RNA, 19 nt, Artificial Sequence
  Description of Artificial Sequence: Synthetic oligonucleotide
acaucgugagugugaugcu

SEQ ID NO: 545964 - RNA, 19 nt, Artificial Sequence
  Description of Artificial Sequence: Synthetic oligonucleotide
ugcguacaucgugagugug

SEQ ID NO: 545965 - RNA, 19 nt, Artificial Sequence
  Description of Artificial Sequence: Synthetic oligonucleotide
agacucaggauccgacuuu

SEQ ID NO: 545966 - RNA, 19 nt, Artificial Sequence
  Description of Artificial Sequence: Synthetic oligonucleotide
ucgugagugugaugcugga

SEQ ID NO: 545967 - RNA, 19 nt, Artificial Sequence
  Description of Artificial Sequence: Synthetic oligonucleotide
acagcggaugccugaugga

SEQ ID NO: 545968 - RNA, 19 nt, Artificial Sequence
  Description of Artificial Sequence: Synthetic oligonucleotide
ggucagaaugggcaaugac

SEQ ID NO: 545969 - RNA, 19 nt, Artificial Sequence
  Description of Artificial Sequence: Synthetic oligonucleotide
acaggaaaugagacgucga

SEQ ID NO: 545970 - RNA, 19 nt, Artificial Sequence
  Description of Artificial Sequence: Synthetic oligonucleotide
caccucuacuuucuccaug

SEQ ID NO: 545971 - RNA, 19 nt, Artificial Sequence
  Description of Artificial Sequence: Synthetic oligonucleotide
gaaguggcaaggacuuguc

SEQ ID NO: 545972 - RNA, 19 nt, Artificial Sequence
  Description of Artificial Sequence: Synthetic oligonucleotide
cauaggucucuugggauga

SEQ ID NO: 545973 - RNA, 19 nt, Artificial Sequence
  Description of Artificial Sequence: Synthetic oligonucleotide
agguguugccugucuaaaa

SEQ ID NO: 545974 - RNA, 19 nt, Artificial Sequence
  Description of Artificial Sequence: Synthetic oligonucleotide
gugcagugaagcuuuagau

SEQ ID NO: 545975 - RNA, 19 nt, Artificial Sequence
  Description of Artificial Sequence: Synthetic oligonucleotide
cuugccuguugcaagugua

SEQ ID NO: 545976 - RNA, 19 nt, Artificial Sequence
  Description of Artificial Sequence: Synthetic oligonucleotide
cggucauacuccaaauagg

SEQ ID NO: 545977 - RNA, 19 nt, Artificial Sequence
  Description of Artificial Sequence: Synthetic oligonucleotide
cauugaguccagcacuaaa

SEQ ID NO: 545978 - RNA, 19 nt, Artificial Sequence
  Description of Artificial Sequence: Synthetic oligonucleotide
uggucagaaugggcaauga

SEQ ID NO: 545979 - RNA, 19 nt, Artificial Sequence
  Description of Artificial Sequence: Synthetic oligonucleotide
ggccgugcgccucaggaag

SEQ ID NO: 545980 - RNA, 19 nt, Artificial Sequence
  Description of Artificial Sequence: Synthetic oligonucleotide
cacacgauacaccuugacu

SEQ ID NO: 545981 - RNA, 19 nt, Artificial Sequence
  Description of Artificial Sequence: Synthetic oligonucleotide
ggcuuauguugucauguuc

SEQ ID NO: 545982 - RNA, 19 nt, Artificial Sequence
  Description of Artificial Sequence: Synthetic oligonucleotide
ggucauacucaagaauuuc

SEQ ID NO: 545983 - RNA, 19 nt, Artificial Sequence
  Description of Artificial Sequence: Synthetic oligonucleotide
caaaagaggguagacaguu

SEQ ID NO: 545984 - RNA, 19 nt, Artificial Sequence
  Description of Artificial Sequence: Synthetic oligonucleotide
cuccauugaguccagcacu

SEQ ID NO: 545985 - RNA, 19 nt, Artificial Sequence
  Description of Artificial Sequence: Synthetic oligonucleotide
acgcauccagagcauacuu

SEQ ID NO: 545986 - RNA, 19 nt, Artificial Sequence
  Description of Artificial Sequence: Synthetic oligonucleotide
uggcggucauacuccaaau

SEQ ID NO: 545987 - RNA, 19 nt, Artificial Sequence
  Description of Artificial Sequence: Synthetic oligonucleotide
ccgagaugcuguagaauag

SEQ ID NO: 545988 - RNA, 19 nt, Artificial Sequence
  Description of Artificial Sequence: Synthetic oligonucleotide
ggaccuuaaauucacccau

SEQ ID NO: 545989 - RNA, 19 nt, Artificial Sequence
  Description of Artificial Sequence: Synthetic oligonucleotide
gagacucaggauccgacuu

SEQ ID NO: 545990 - RNA, 19 nt, Artificial Sequence
  Description of Artificial Sequence: Synthetic oligonucleotide
augcuguagaauaggcuau

SEQ ID NO: 545991 - RNA, 19 nt, Artificial Sequence
  Description of Artificial Sequence: Synthetic oligonucleotide
cuuacgaauaaugcucccu

SEQ ID NO: 545992 - RNA, 19 nt, Artificial Sequence
  Description of Artificial Sequence: Synthetic oligonucleotide
ugcgaugagauggcucuua

SEQ ID NO: 545993 - RNA, 19 nt, Artificial Sequence
  Description of Artificial Sequence: Synthetic oligonucleotide
gguccguacccacugcuuc

SEQ ID NO: 545994 - RNA, 19 nt, Artificial Sequence
  Description of Artificial Sequence: Synthetic oligonucleotide
gucguucuacagccacaag

SEQ ID NO: 545995 - RNA, 19 nt, Artificial Sequence
  Description of Artificial Sequence: Synthetic oligonucleotide
cugcccaacacagggcuuc

SEQ ID NO: 545996 - RNA, 19 nt, Artificial Sequence
  Description of Artificial Sequence: Synthetic oligonucleotide
ugguccguacccacugcuu

SEQ ID NO: 545997 - RNA, 19 nt, Artificial Sequence
  Description of Artificial Sequence: Synthetic oligonucleotide
uggaaguggcaaggacuug

SEQ ID NO: 545998 - RNA, 19 nt, Artificial Sequence
  Description of Artificial Sequence: Synthetic oligonucleotide
gaaugggcaaugacaagau

SEQ ID NO: 545999 - RNA, 19 nt, Artificial Sequence
  Description of Artificial Sequence: Synthetic oligonucleotide
cuuuauguuuagugccugu

SEQ ID NO: 546000 - RNA, 19 nt, Artificial Sequence
  Description of Artificial Sequence: Synthetic oligonucleotide
guacaucgugagugugaug

SEQ ID NO: 546001 - RNA, 19 nt, Artificial Sequence
  Description of Artificial Sequence: Synthetic oligonucleotide
ccaucuuacgaauaaugcu

SEQ ID NO: 546002 - RNA, 19 nt, Artificial Sequence
  Description of Artificial Sequence: Synthetic oligonucleotide
ggcaacaccccacacgaua

SEQ ID NO: 546003 - RNA, 19 nt, Artificial Sequence
  Description of Artificial Sequence: Synthetic oligonucleotide
guagcccgagacucaugac

SEQ ID NO: 546004 - RNA, 19 nt, Artificial Sequence
  Description of Artificial Sequence: Synthetic oligonucleotide
cgauggaccuuaaauucac

SEQ ID NO: 546005 - RNA, 19 nt, Artificial Sequence
  Description of Artificial Sequence: Synthetic oligonucleotide
cugugcagugaagcuuuag

SEQ ID NO: 546006 - RNA, 19 nt, Artificial Sequence
  Description of Artificial Sequence: Synthetic oligonucleotide
gggaugcugaacucaaaua

SEQ ID NO: 546007 - RNA, 19 nt, Artificial Sequence
  Description of Artificial Sequence: Synthetic oligonucleotide
gauggggaaaagugauuuu

SEQ ID NO: 546008 - RNA, 19 nt, Artificial Sequence
  Description of Artificial Sequence: Synthetic oligonucleotide
auaggcuauccaacuucca

SEQ ID NO: 546009 - RNA, 19 nt, Artificial Sequence
  Description of Artificial Sequence: Synthetic oligonucleotide
cugugccuucggcuguacc

SEQ ID NO: 546010 - RNA, 19 nt, Artificial Sequence
  Description of Artificial Sequence: Synthetic oligonucleotide
auauggguaccagcaggau

SEQ ID NO: 546011 - RNA, 19 nt, Artificial Sequence
  Description of Artificial Sequence: Synthetic oligonucleotide
cagcacuaaagagccgcug

SEQ ID NO: 546012 - RNA, 19 nt, Artificial Sequence
  Description of Artificial Sequence: Synthetic oligonucleotide
caggaugccagcugagacu

SEQ ID NO: 546013 - RNA, 19 nt, Artificial Sequence
  Description of Artificial Sequence: Synthetic oligonucleotide
cgucagacaagaaggcaac

SEQ ID NO: 546014 - RNA, 19 nt, Artificial Sequence
  Description of Artificial Sequence: Synthetic oligonucleotide
aacguacucgauggaccuu

SEQ ID NO: 546015 - RNA, 19 nt, Artificial Sequence
  Description of Artificial Sequence: Synthetic oligonucleotide
ccgaucaaaauuucuugaa

SEQ ID NO: 546016 - RNA, 19 nt, Artificial Sequence
  Description of Artificial Sequence: Synthetic oligonucleotide
cgugaaacagccaaucugu

SEQ ID NO: 546017 - RNA, 19 nt, Artificial Sequence
  Description of Artificial Sequence: Synthetic oligonucleotide
gugccuucggcuguaccca

SEQ ID NO: 546018 - RNA, 19 nt, Artificial Sequence
  Description of Artificial Sequence: Synthetic oligonucleotide
gaaacucuuuggaggcuua

SEQ ID NO: 546019 - RNA, 19 nt, Artificial Sequence
  Description of Artificial Sequence: Synthetic oligonucleotide
uccguacccacugcuucuc

SEQ ID NO: 546020 - RNA, 19 nt, Artificial Sequence
  Description of Artificial Sequence: Synthetic oligonucleotide
ugccuucggcuguacccac

SEQ ID NO: 546021 - RNA, 19 nt, Artificial Sequence
  Description of Artificial Sequence: Synthetic oligonucleotide
gacgucgauggggaaaagu

SEQ ID NO: 546022 - RNA, 19 nt, Artificial Sequence
  Description of Artificial Sequence: Synthetic oligonucleotide
uacagccacaaguguccuu

SEQ ID NO: 546023 - RNA, 19 nt, Artificial Sequence
  Description of Artificial Sequence: Synthetic oligonucleotide
ccgucagacaagaaggcaa

SEQ ID NO: 546024 - RNA, 19 nt, Artificial Sequence
  Description of Artificial Sequence: Synthetic oligonucleotide
cugauugaggcuggaaagu

SEQ ID NO: 546025 - RNA, 19 nt, Artificial Sequence
  Description of Artificial Sequence: Synthetic oligonucleotide
ccacagugcguacaucgug

SEQ ID NO: 546026 - RNA, 19 nt, Artificial Sequence
  Description of Artificial Sequence: Synthetic oligonucleotide
cccgagacucaugaccugg

SEQ ID NO: 546027 - RNA, 19 nt, Artificial Sequence
  Description of Artificial Sequence: Synthetic oligonucleotide
auuugacaucaaacacgcu

SEQ ID NO: 546028 - RNA, 19 nt, Artificial Sequence
  Description of Artificial Sequence: Synthetic oligonucleotide
caggaaaugagacgucgau

SEQ ID NO: 546029 - RNA, 19 nt, Artificial Sequence
  Description of Artificial Sequence: Synthetic oligonucleotide
cucuggagugaccucaaau

SEQ ID NO: 546030 - RNA, 19 nt, Artificial Sequence
  Description of Artificial Sequence: Synthetic oligonucleotide
augcaugggccgugcgccu

SEQ ID NO: 546031 - RNA, 19 nt, Artificial Sequence
  Description of Artificial Sequence: Synthetic oligonucleotide
ggaaguggcaaggacuugu

SEQ ID NO: 546032 - RNA, 19 nt, Artificial Sequence
  Description of Artificial Sequence: Synthetic oligonucleotide
cuguagcccgagacucaug

SEQ ID NO: 546033 - RNA, 19 nt, Artificial Sequence
  Description of Artificial Sequence: Synthetic oligonucleotide
augagacgucgauggggaa

SEQ ID NO: 546034 - RNA, 19 nt, Artificial Sequence
  Description of Artificial Sequence: Synthetic oligonucleotide
gguaccugaugcagcuagc

SEQ ID NO: 546035 - RNA, 19 nt, Artificial Sequence
  Description of Artificial Sequence: Synthetic oligonucleotide
guacgucagcauuugcgau

SEQ ID NO: 546036 - RNA, 19 nt, Artificial Sequence
  Description of Artificial Sequence: Synthetic oligonucleotide
ggucguucuacagccacaa

SEQ ID NO: 546037 - RNA, 19 nt, Artificial Sequence
  Description of Artificial Sequence: Synthetic oligonucleotide
gaguaucccuuuggagcca

SEQ ID NO: 546038 - RNA, 19 nt, Artificial Sequence
  Description of Artificial Sequence: Synthetic oligonucleotide
gacgaauaacaaggugagu

SEQ ID NO: 546039 - RNA, 19 nt, Artificial Sequence
  Description of Artificial Sequence: Synthetic oligonucleotide
cacgauacaccuugacuuu

SEQ ID NO: 546040 - RNA, 19 nt, Artificial Sequence
  Description of Artificial Sequence: Synthetic oligonucleotide
guggauuauagagcacagu

SEQ ID NO: 546041 - RNA, 19 nt, Artificial Sequence
  Description of Artificial Sequence: Synthetic oligonucleotide
guacucgauggaccuuaaa

SEQ ID NO: 546042 - RNA, 19 nt, Artificial Sequence
  Description of Artificial Sequence: Synthetic oligonucleotide
ggauuauagagcacaguuu

SEQ ID NO: 546043 - RNA, 19 nt, Artificial Sequence
  Description of Artificial Sequence: Synthetic oligonucleotide
ccacacgauacaccuugac

SEQ ID NO: 546044 - RNA, 19 nt, Artificial Sequence
  Description of Artificial Sequence: Synthetic oligonucleotide
ggcggucauacuccaaaua

SEQ ID NO: 546045 - RNA, 19 nt, Artificial Sequence
  Description of Artificial Sequence: Synthetic oligonucleotide
agacgucgauggggaaaag

SEQ ID NO: 546046 - RNA, 19 nt, Artificial Sequence
  Description of Artificial Sequence: Synthetic oligonucleotide
cuauggagccagcugcaau

SEQ ID NO: 546047 - RNA, 19 nt, Artificial Sequence
  Description of Artificial Sequence: Synthetic oligonucleotide
gugcguacaucgugagugu

SEQ ID NO: 546048 - RNA, 19 nt, Artificial Sequence
  Description of Artificial Sequence: Synthetic oligonucleotide
gcgacagcaauagacugua

SEQ ID NO: 546049 - RNA, 19 nt, Artificial Sequence
  Description of Artificial Sequence: Synthetic oligonucleotide
gcuagccaauucccaucug

SEQ ID NO: 546050 - RNA, 19 nt, Artificial Sequence
  Description of Artificial Sequence: Synthetic oligonucleotide
gacucaggauccgacuuuu

SEQ ID NO: 546051 - RNA, 19 nt, Artificial Sequence
  Description of Artificial Sequence: Synthetic oligonucleotide
cgucgauggggaaaaguga

SEQ ID NO: 546052 - RNA, 19 nt, Artificial Sequence
  Description of Artificial Sequence: Synthetic oligonucleotide
caaacgcauccagagcaua

SEQ ID NO: 546053 - RNA, 19 nt, Artificial Sequence
  Description of Artificial Sequence: Synthetic oligonucleotide
cgaugagauggcucuuaac

SEQ ID NO: 546054 - RNA, 19 nt, Artificial Sequence
  Description of Artificial Sequence: Synthetic oligonucleotide
acacgcuaauguagucuau

SEQ ID NO: 546055 - RNA, 19 nt, Artificial Sequence
  Description of Artificial Sequence: Synthetic oligonucleotide
gcguacaucgugaguguga

SEQ ID NO: 546056 - RNA, 19 nt, Artificial Sequence
  Description of Artificial Sequence: Synthetic oligonucleotide
uugcgaugagauggcucuu

SEQ ID NO: 546057 - RNA, 19 nt, Artificial Sequence
  Description of Artificial Sequence: Synthetic oligonucleotide
ccuucggcuguacccacca

SEQ ID NO: 546058 - RNA, 19 nt, Artificial Sequence
  Description of Artificial Sequence: Synthetic oligonucleotide
ggaaacucuuuggaggcuu

SEQ ID NO: 546059 - RNA, 19 nt, Artificial Sequence
  Description of Artificial Sequence: Synthetic oligonucleotide
cauuugcgaugagauggcu

SEQ ID NO: 546060 - RNA, 19 nt, Artificial Sequence
  Description of Artificial Sequence: Synthetic oligonucleotide
gcccgagacucaugaccug

SEQ ID NO: 546061 - RNA, 19 nt, Artificial Sequence
  Description of Artificial Sequence: Synthetic oligonucleotide
gggucguucuacagccaca

SEQ ID NO: 546062 - RNA, 19 nt, Artificial Sequence
  Description of Artificial Sequence: Synthetic oligonucleotide
cccuugauuugaugccaca

SEQ ID NO: 546063 - RNA, 19 nt, Artificial Sequence
  Description of Artificial Sequence: Synthetic oligonucleotide
ggaaaguaugcaagugcuu

SEQ ID NO: 546064 - RNA, 19 nt, Artificial Sequence
  Description of Artificial Sequence: Synthetic oligonucleotide
cagagacccuugauuugau

SEQ ID NO: 546065 - RNA, 19 nt, Artificial Sequence
  Description of Artificial Sequence: Synthetic oligonucleotide
cccaacacagggcuucugu

SEQ ID NO: 546066 - RNA, 19 nt, Artificial Sequence
  Description of Artificial Sequence: Synthetic oligonucleotide
gccuucggcuguacccacc

SEQ ID NO: 546067 - RNA, 19 nt, Artificial Sequence
  Description of Artificial Sequence: Synthetic oligonucleotide
aggcaacaccccacacgau

SEQ ID NO: 546068 - RNA, 19 nt, Artificial Sequence
  Description of Artificial Sequence: Synthetic oligonucleotide
gucccugauugaggcugga

SEQ ID NO: 546069 - RNA, 19 nt, Artificial Sequence
  Description of Artificial Sequence: Synthetic oligonucleotide
cagugccgucagacaagaa

SEQ ID NO: 546070 - RNA, 19 nt, Artificial Sequence
  Description of Artificial Sequence: Synthetic oligonucleotide
cgaauaaugcucccugauu

SEQ ID NO: 546071 - RNA, 19 nt, Artificial Sequence
  Description of Artificial Sequence: Synthetic oligonucleotide
cugguaccugaugcagcua

SEQ ID NO: 546072 - RNA, 19 nt, Artificial Sequence
  Description of Artificial Sequence: Synthetic oligonucleotide
ccagcacuaaagagccgcu

SEQ ID NO: 546073 - RNA, 19 nt, Artificial Sequence
  Description of Artificial Sequence: Synthetic oligonucleotide
ccaaacgcauccagagcau

SEQ ID NO: 546074 - RNA, 19 nt, Artificial Sequence
  Description of Artificial Sequence: Synthetic oligonucleotide
gccugucuaaaaccaucuu

SEQ ID NO: 546075 - RNA, 19 nt, Artificial Sequence
  Description of Artificial Sequence: Synthetic oligonucleotide
ccgugcgccucaggaagac

SEQ ID NO: 546076 - RNA, 19 nt, Artificial Sequence
  Description of Artificial Sequence: Synthetic oligonucleotide
gcgaaggaaugcuggcauu

SEQ ID NO: 546077 - RNA, 19 nt, Artificial Sequence
  Description of Artificial Sequence: Synthetic oligonucleotide
cccagguguugccugucua

SEQ ID NO: 546078 - RNA, 19 nt, Artificial Sequence
  Description of Artificial Sequence: Synthetic oligonucleotide
cguacaucgugagugugau

SEQ ID NO: 546079 - RNA, 19 nt, Artificial Sequence
  Description of Artificial Sequence: Synthetic oligonucleotide
gccgugcgccucaggaaga

SEQ ID NO: 546080 - RNA, 19 nt, Artificial Sequence
  Description of Artificial Sequence: Synthetic oligonucleotide
ccauugaguccagcacuaa

SEQ ID NO: 546081 - RNA, 19 nt, Artificial Sequence
  Description of Artificial Sequence: Synthetic oligonucleotide
ccguacccacugcuucuca

SEQ ID NO: 546082 - RNA, 19 nt, Artificial Sequence
  Description of Artificial Sequence: Synthetic oligonucleotide
ccgugccaucuguucguga

SEQ ID NO: 546083 - RNA, 19 nt, Artificial Sequence
  Description of Artificial Sequence: Synthetic oligonucleotide
cguacucgauggaccuuaa

SEQ ID NO: 546084 - RNA, 19 nt, Artificial Sequence
  Description of Artificial Sequence: Synthetic oligonucleotide
aagggauaaauuuuguacc

SEQ ID NO: 546085 - RNA, 19 nt, Artificial Sequence
  Description of Artificial Sequence: Synthetic oligonucleotide
agugauuucauuucuagac

SEQ ID NO: 546086 - RNA, 19 nt, Artificial Sequence
  Description of Artificial Sequence: Synthetic oligonucleotide
aaaccuuagggacagaguc

SEQ ID NO: 546087 - RNA, 19 nt, Artificial Sequence
  Description of Artificial Sequence: Synthetic oligonucleotide
uaaaggauaaccuuuaagu

SEQ ID NO: 546088 - RNA, 19 nt, Artificial Sequence
  Description of Artificial Sequence: Synthetic oligonucleotide
uugacaauaacauaagucu

SEQ ID NO: 546089 - RNA, 19 nt, Artificial Sequence
  Description of Artificial Sequence: Synthetic oligonucleotide
agauuguauuacuugaucc

SEQ ID NO: 546090 - RNA, 19 nt, Artificial Sequence
  Description of Artificial Sequence: Synthetic oligonucleotide
uagacaagaaaucucaaag

SEQ ID NO: 546091 - RNA, 19 nt, Artificial Sequence
  Description of Artificial Sequence: Synthetic oligonucleotide
uccuuuaacauccaggaca

SEQ ID NO: 546092 - RNA, 19 nt, Artificial Sequence
  Description of Artificial Sequence: Synthetic oligonucleotide
uucuaauacacacugguga

SEQ ID NO: 546093 - RNA, 19 nt, Artificial Sequence
  Description of Artificial Sequence: Synthetic oligonucleotide
aagauuguauuacuugauc

SEQ ID NO: 546094 - RNA, 19 nt, Artificial Sequence
  Description of Artificial Sequence: Synthetic oligonucleotide
ucuaaaguuucucuguaag

SEQ ID NO: 546095 - RNA, 19 nt, Artificial Sequence
  Description of Artificial Sequence: Synthetic oligonucleotide
ucaucgucaggauaaaagg

SEQ ID NO: 546096 - RNA, 19 nt, Artificial Sequence
  Description of Artificial Sequence: Synthetic oligonucleotide
ucuguaagcguucugacac

SEQ ID NO: 546097 - RNA, 19 nt, Artificial Sequence
  Description of Artificial Sequence: Synthetic oligonucleotide
cauuuaaugccccacaagc

SEQ ID NO: 546098 - RNA, 19 nt, Artificial Sequence
  Description of Artificial Sequence: Synthetic oligonucleotide
aaacagaauucacagcguc

SEQ ID NO: 546099 - RNA, 19 nt, Artificial Sequence
  Description of Artificial Sequence: Synthetic oligonucleotide
uucaucgucaggauaaaag

SEQ ID NO: 546100 - RNA, 19 nt, Artificial Sequence
  Description of Artificial Sequence: Synthetic oligonucleotide
ucauaggacggacagaacc

SEQ ID NO: 546101 - RNA, 19 nt, Artificial Sequence
  Description of Artificial Sequence: Synthetic oligonucleotide
aaccaaucguuuuccaccc

SEQ ID NO: 546102 - RNA, 19 nt, Artificial Sequence
  Description of Artificial Sequence: Synthetic oligonucleotide
aauugauccaaugccacgg

SEQ ID NO: 546103 - RNA, 19 nt, Artificial Sequence
  Description of Artificial Sequence: Synthetic oligonucleotide
auugacaauaacauaaguc

SEQ ID NO: 546104 - RNA, 19 nt, Artificial Sequence
  Description of Artificial Sequence: Synthetic oligonucleotide
uaaccuuuaaguucauagg

SEQ ID NO: 546105 - RNA, 19 nt, Artificial Sequence
  Description of Artificial Sequence: Synthetic oligonucleotide
aaagcauuuguauuuuccu

SEQ ID NO: 546106 - RNA, 19 nt, Artificial Sequence
  Description of Artificial Sequence: Synthetic oligonucleotide
ucauaagcuauccauaauc

SEQ ID NO: 546107 - RNA, 19 nt, Artificial Sequence
  Description of Artificial Sequence: Synthetic oligonucleotide
uauccauacagacugggug

SEQ ID NO: 546108 - RNA, 19 nt, Artificial Sequence
  Description of Artificial Sequence: Synthetic oligonucleotide
ucuagacuagacaagaaau

SEQ ID NO: 546109 - RNA, 19 nt, Artificial Sequence
  Description of Artificial Sequence: Synthetic oligonucleotide
uuuuaaaaccuuagggaca

SEQ ID NO: 546110 - RNA, 19 nt, Artificial Sequence
  Description of Artificial Sequence: Synthetic oligonucleotide
aaauacucauccugggcuc

SEQ ID NO: 546111 - RNA, 19 nt, Artificial Sequence
  Description of Artificial Sequence: Synthetic oligonucleotide
aaagccaauuucuucuaag

SEQ ID NO: 546112 - RNA, 19 nt, Artificial Sequence
  Description of Artificial Sequence: Synthetic oligonucleotide
uguaaugucaaugaacuuc

SEQ ID NO: 546113 - RNA, 19 nt, Artificial Sequence
  Description of Artificial Sequence: Synthetic oligonucleotide
aaugacacgaauugaucca

SEQ ID NO: 546114 - RNA, 19 nt, Artificial Sequence
  Description of Artificial Sequence: Synthetic oligonucleotide
cauaagcuauccauaaucc

SEQ ID NO: 546115 - RNA, 19 nt, Artificial Sequence
  Description of Artificial Sequence: Synthetic oligonucleotide
uuuaaugccccacaagcac

SEQ ID NO: 546116 - RNA, 19 nt, Artificial Sequence
  Description of Artificial Sequence: Synthetic oligonucleotide
uucauuucuagacuagaca

SEQ ID NO: 546117 - RNA, 19 nt, Artificial Sequence
  Description of Artificial Sequence: Synthetic oligonucleotide
gucagauucaaacagugug

SEQ ID NO: 546118 - RNA, 19 nt, Artificial Sequence
  Description of Artificial Sequence: Synthetic oligonucleotide
aaaggauaaccuuuaaguu

SEQ ID NO: 546119 - RNA, 19 nt, Artificial Sequence
  Description of Artificial Sequence: Synthetic oligonucleotide
uguucaguccacaaggcca

SEQ ID NO: 546120 - RNA, 19 nt, Artificial Sequence
  Description of Artificial Sequence: Synthetic oligonucleotide
ucuucaagaaguaacucuc

SEQ ID NO: 546121 - RNA, 19 nt, Artificial Sequence
  Description of Artificial Sequence: Synthetic oligonucleotide
caaugacacgaauugaucc

SEQ ID NO: 546122 - RNA, 19 nt, Artificial Sequence
  Description of Artificial Sequence: Synthetic oligonucleotide
acauuguucgugcaucagc

SEQ ID NO: 546123 - RNA, 19 nt, Artificial Sequence
  Description of Artificial Sequence: Synthetic oligonucleotide
acaagauuguauuacuuga

SEQ ID NO: 546124 - RNA, 19 nt, Artificial Sequence
  Description of Artificial Sequence: Synthetic oligonucleotide
ucauuaggcauaaggagga

SEQ ID NO: 546125 - RNA, 19 nt, Artificial Sequence
  Description of Artificial Sequence: Synthetic oligonucleotide
cacgaauugauccaaugcc

SEQ ID NO: 546126 - RNA, 19 nt, Artificial Sequence
  Description of Artificial Sequence: Synthetic oligonucleotide
uucauaaaggauaaccuuu

SEQ ID NO: 546127 - RNA, 19 nt, Artificial Sequence
  Description of Artificial Sequence: Synthetic oligonucleotide
uucucuaagauguacuggu

SEQ ID NO: 546128 - RNA, 19 nt, Artificial Sequence
  Description of Artificial Sequence: Synthetic oligonucleotide
ugugagauccgauuucugc

SEQ ID NO: 546129 - RNA, 19 nt, Artificial Sequence
  Description of Artificial Sequence: Synthetic oligonucleotide
aacccuuucccgaagcugc

SEQ ID NO: 546130 - RNA, 19 nt, Artificial Sequence
  Description of Artificial Sequence: Synthetic oligonucleotide
ucaaguaggaauugcuggc

SEQ ID NO: 546131 - RNA, 19 nt, Artificial Sequence
  Description of Artificial Sequence: Synthetic oligonucleotide
auaaggaggauuugccuuc

SEQ ID NO: 546132 - RNA, 19 nt, Artificial Sequence
  Description of Artificial Sequence: Synthetic oligonucleotide
ucgugcaucagcuagguuc

SEQ ID NO: 546133 - RNA, 19 nt, Artificial Sequence
  Description of Artificial Sequence: Synthetic oligonucleotide
agaaccaaucguuuuccac

SEQ ID NO: 546134 - RNA, 19 nt, Artificial Sequence
  Description of Artificial Sequence: Synthetic oligonucleotide
uuguucgugcaucagcuag

SEQ ID NO: 546135 - RNA, 19 nt, Artificial Sequence
  Description of Artificial Sequence: Synthetic oligonucleotide
cuacauguucacuaaauuc

SEQ ID NO: 546136 - RNA, 19 nt, Artificial Sequence
  Description of Artificial Sequence: Synthetic oligonucleotide
cuuugagcaaauguggagg

SEQ ID NO: 546137 - RNA, 19 nt, Artificial Sequence
  Description of Artificial Sequence: Synthetic oligonucleotide
guaccggaaagcaugaugg

SEQ ID NO: 546138 - RNA, 19 nt, Artificial Sequence
  Description of Artificial Sequence: Synthetic oligonucleotide
aaggugacacgcucccucc

SEQ ID NO: 546139 - RNA, 19 nt, Artificial Sequence
  Description of Artificial Sequence: Synthetic oligonucleotide
aaauuagccuguagguacc

SEQ ID NO: 546140 - RNA, 19 nt, Artificial Sequence
  Description of Artificial Sequence: Synthetic oligonucleotide
gauaagagcugaugguucc

SEQ ID NO: 546141 - RNA, 19 nt, Artificial Sequence
  Description of Artificial Sequence: Synthetic oligonucleotide
aacguagaggccuucuucu

SEQ ID NO: 546142 - RNA, 19 nt, Artificial Sequence
  Description of Artificial Sequence: Synthetic oligonucleotide
ugauccaaugccacggaag

SEQ ID NO: 546143 - RNA, 19 nt, Artificial Sequence
  Description of Artificial Sequence: Synthetic oligonucleotide
gaugguaggcacuuuucag

SEQ ID NO: 546144 - RNA, 19 nt, Artificial Sequence
  Description of Artificial Sequence: Synthetic oligonucleotide
gaauugauccaaugccacg

SEQ ID NO: 546145 - RNA, 19 nt, Artificial Sequence
  Description of Artificial Sequence: Synthetic oligonucleotide
aaaucuaugcacucgccuu

SEQ ID NO: 546146 - RNA, 19 nt, Artificial Sequence
  Description of Artificial Sequence: Synthetic oligonucleotide
aaaacguagucaaugggcu

SEQ ID NO: 546147 - RNA, 19 nt, Artificial Sequence
  Description of Artificial Sequence: Synthetic oligonucleotide
aacucucaacccuuucccg

SEQ ID NO: 546148 - RNA, 19 nt, Artificial Sequence
  Description of Artificial Sequence: Synthetic oligonucleotide
ugagauaagagcugauggu

SEQ ID NO: 546149 - RNA, 19 nt, Artificial Sequence
  Description of Artificial Sequence: Synthetic oligonucleotide
auuguccucccaucgaagg

SEQ ID NO: 546150 - RNA, 19 nt, Artificial Sequence
  Description of Artificial Sequence: Synthetic oligonucleotide
uuugagcaaauguggaggc

SEQ ID NO: 546151 - RNA, 19 nt, Artificial Sequence
  Description of Artificial Sequence: Synthetic oligonucleotide
uagacuagacaagaaaucu

SEQ ID NO: 546152 - RNA, 19 nt, Artificial Sequence
  Description of Artificial Sequence: Synthetic oligonucleotide
gaaauuuccugauuuguaa

SEQ ID NO: 546153 - RNA, 19 nt, Artificial Sequence
  Description of Artificial Sequence: Synthetic oligonucleotide
auuguauuacuugauccuc

SEQ ID NO: 546154 - RNA, 19 nt, Artificial Sequence
  Description of Artificial Sequence: Synthetic oligonucleotide
agacaagaaaucucaaaga

SEQ ID NO: 546155 - RNA, 19 nt, Artificial Sequence
  Description of Artificial Sequence: Synthetic oligonucleotide
gaauugcuggccuuugaag

SEQ ID NO: 546156 - RNA, 19 nt, Artificial Sequence
  Description of Artificial Sequence: Synthetic oligonucleotide
uguucgugcaucagcuagg

SEQ ID NO: 546157 - RNA, 19 nt, Artificial Sequence
  Description of Artificial Sequence: Synthetic oligonucleotide
ugauggggccauuuaaugc

SEQ ID NO: 546158 - RNA, 19 nt, Artificial Sequence
  Description of Artificial Sequence: Synthetic oligonucleotide
acagaaccaaucguuuucc

SEQ ID NO: 546159 - RNA, 19 nt, Artificial Sequence
  Description of Artificial Sequence: Synthetic oligonucleotide
uguagggagaaaugcacac

SEQ ID NO: 546160 - RNA, 19 nt, Artificial Sequence
  Description of Artificial Sequence: Synthetic oligonucleotide
cuagacuagacaagaaauc

SEQ ID NO: 546161 - RNA, 19 nt, Artificial Sequence
  Description of Artificial Sequence: Synthetic oligonucleotide
aguagugccagaucugugu

SEQ ID NO: 546162 - RNA, 19 nt, Artificial Sequence
  Description of Artificial Sequence: Synthetic oligonucleotide
agcgucuucaagaaguaac

SEQ ID NO: 546163 - RNA, 19 nt, Artificial Sequence
  Description of Artificial Sequence: Synthetic oligonucleotide
augcacucgccuuggaagc

SEQ ID NO: 546164 - RNA, 19 nt, Artificial Sequence
  Description of Artificial Sequence: Synthetic oligonucleotide
agaugugagauccgauuuc

SEQ ID NO: 546165 - RNA, 19 nt, Artificial Sequence
  Description of Artificial Sequence: Synthetic oligonucleotide
uccgauuucugcagaagug

SEQ ID NO: 546166 - RNA, 19 nt, Artificial Sequence
  Description of Artificial Sequence: Synthetic oligonucleotide
aucucacaagauuucaaug

SEQ ID NO: 546167 - RNA, 19 nt, Artificial Sequence
  Description of Artificial Sequence: Synthetic oligonucleotide
cuucaagaaguaacucucg

SEQ ID NO: 546168 - RNA, 19 nt, Artificial Sequence
  Description of Artificial Sequence: Synthetic oligonucleotide
uucaagaaguaacucucgu

SEQ ID NO: 546169 - RNA, 19 nt, Artificial Sequence
  Description of Artificial Sequence: Synthetic oligonucleotide
ucgucaggauaaaagguga

SEQ ID NO: 546170 - RNA, 19 nt, Artificial Sequence
  Description of Artificial Sequence: Synthetic oligonucleotide
gauagcggauucuauaaaa

SEQ ID NO: 546171 - RNA, 19 nt, Artificial Sequence
  Description of Artificial Sequence: Synthetic oligonucleotide
uguaagcguucugacaccg

SEQ ID NO: 546172 - RNA, 19 nt, Artificial Sequence
  Description of Artificial Sequence: Synthetic oligonucleotide
uuaaugccccacaagcacu

SEQ ID NO: 546173 - RNA, 19 nt, Artificial Sequence
  Description of Artificial Sequence: Synthetic oligonucleotide
ugauccuccccaaucaaaa

SEQ ID NO: 546174 - RNA, 19 nt, Artificial Sequence
  Description of Artificial Sequence: Synthetic oligonucleotide
ugugauagcggauucuaua

SEQ ID NO: 546175 - RNA, 19 nt, Artificial Sequence
  Description of Artificial Sequence: Synthetic oligonucleotide
uaagcguucugacaccgac

SEQ ID NO: 546176 - RNA, 19 nt, Artificial Sequence
  Description of Artificial Sequence: Synthetic oligonucleotide
gaccucgcuggauaggacg

SEQ ID NO: 546177 - RNA, 19 nt, Artificial Sequence
  Description of Artificial Sequence: Synthetic oligonucleotide
gacuagacaagaaaucuca

SEQ ID NO: 546178 - RNA, 19 nt, Artificial Sequence
  Description of Artificial Sequence: Synthetic oligonucleotide
ugcaaguacugaugguagg

SEQ ID NO: 546179 - RNA, 19 nt, Artificial Sequence
  Description of Artificial Sequence: Synthetic oligonucleotide
caagaaugaggucagguca

SEQ ID NO: 546180 - RNA, 19 nt, Artificial Sequence
  Description of Artificial Sequence: Synthetic oligonucleotide
guagguaccggaaagcaug

SEQ ID NO: 546181 - RNA, 19 nt, Artificial Sequence
  Description of Artificial Sequence: Synthetic oligonucleotide
gaggauuugccuucccaag

SEQ ID NO: 546182 - RNA, 19 nt, Artificial Sequence
  Description of Artificial Sequence: Synthetic oligonucleotide
ugucaaugaacuucccacu

SEQ ID NO: 546183 - RNA, 19 nt, Artificial Sequence
  Description of Artificial Sequence: Synthetic oligonucleotide
gacacgaauugauccaaug

SEQ ID NO: 546184 - RNA, 19 nt, Artificial Sequence
  Description of Artificial Sequence: Synthetic oligonucleotide
gacagaaccaaucguuuuc

SEQ ID NO: 546185 - RNA, 19 nt, Artificial Sequence
  Description of Artificial Sequence: Synthetic oligonucleotide
uguuucccagccaaagcca

SEQ ID NO: 546186 - RNA, 19 nt, Artificial Sequence
  Description of Artificial Sequence: Synthetic oligonucleotide
agcguucugacaccgacug

SEQ ID NO: 546187 - RNA, 19 nt, Artificial Sequence
  Description of Artificial Sequence: Synthetic oligonucleotide
acggaagugagacuuuuca

SEQ ID NO: 546188 - RNA, 19 nt, Artificial Sequence
  Description of Artificial Sequence: Synthetic oligonucleotide
caacucucaacccuuuccc

SEQ ID NO: 546189 - RNA, 19 nt, Artificial Sequence
  Description of Artificial Sequence: Synthetic oligonucleotide
gaauugcccauguucaguc

SEQ ID NO: 546190 - RNA, 19 nt, Artificial Sequence
  Description of Artificial Sequence: Synthetic oligonucleotide
caguaggcaacccauacuc

SEQ ID NO: 546191 - RNA, 19 nt, Artificial Sequence
  Description of Artificial Sequence: Synthetic oligonucleotide
aauguguccuggaagucug

SEQ ID NO: 546192 - RNA, 19 nt, Artificial Sequence
  Description of Artificial Sequence: Synthetic oligonucleotide
aagcccgguuugcugaagg

SEQ ID NO: 546193 - RNA, 19 nt, Artificial Sequence
  Description of Artificial Sequence: Synthetic oligonucleotide
agauaagagcugaugguuc

SEQ ID NO: 546194 - RNA, 19 nt, Artificial Sequence
  Description of Artificial Sequence: Synthetic oligonucleotide
cuuguuucccagccaaagc

SEQ ID NO: 546195 - RNA, 19 nt, Artificial Sequence
  Description of Artificial Sequence: Synthetic oligonucleotide
gauuggucggauugacaag

SEQ ID NO: 546196 - RNA, 19 nt, Artificial Sequence
  Description of Artificial Sequence: Synthetic oligonucleotide
ggauaaaaggugauggaag

SEQ ID NO: 546197 - RNA, 19 nt, Artificial Sequence
  Description of Artificial Sequence: Synthetic oligonucleotide
uucugaauuguccucccau

SEQ ID NO: 546198 - RNA, 19 nt, Artificial Sequence
  Description of Artificial Sequence: Synthetic oligonucleotide
ggucggauugacaagauug

SEQ ID NO: 546199 - RNA, 19 nt, Artificial Sequence
  Description of Artificial Sequence: Synthetic oligonucleotide
ccaccaaucacaucgagac

SEQ ID NO: 546200 - RNA, 19 nt, Artificial Sequence
  Description of Artificial Sequence: Synthetic oligonucleotide
uccauaauccacucuuuau

SEQ ID NO: 546201 - RNA, 19 nt, Artificial Sequence
  Description of Artificial Sequence: Synthetic oligonucleotide
cauguucaguccacaaggc

SEQ ID NO: 546202 - RNA, 19 nt, Artificial Sequence
  Description of Artificial Sequence: Synthetic oligonucleotide
aauuagccuguagguaccg

SEQ ID NO: 546203 - RNA, 19 nt, Artificial Sequence
  Description of Artificial Sequence: Synthetic oligonucleotide
aggcaacccacacuccacc

SEQ ID NO: 546204 - RNA, 19 nt, Artificial Sequence
  Description of Artificial Sequence: Synthetic oligonucleotide
uugccuucccaagaaauug

SEQ ID NO: 546205 - RNA, 19 nt, Artificial Sequence
  Description of Artificial Sequence: Synthetic oligonucleotide
uacuugauccuccccaauc

SEQ ID NO: 546206 - RNA, 19 nt, Artificial Sequence
  Description of Artificial Sequence: Synthetic oligonucleotide
aaucguuuuccacccacua

SEQ ID NO: 546207 - RNA, 19 nt, Artificial Sequence
  Description of Artificial Sequence: Synthetic oligonucleotide
ggaagcaaggucaacguag

SEQ ID NO: 546208 - RNA, 19 nt, Artificial Sequence
  Description of Artificial Sequence: Synthetic oligonucleotide
aaggaggauuugccuuccc

SEQ ID NO: 546209 - RNA, 19 nt, Artificial Sequence
  Description of Artificial Sequence: Synthetic oligonucleotide
aagucugcaaguacugaug

SEQ ID NO: 546210 - RNA, 19 nt, Artificial Sequence
  Description of Artificial Sequence: Synthetic oligonucleotide
cugcaaguacugaugguag

SEQ ID NO: 546211 - RNA, 19 nt, Artificial Sequence
  Description of Artificial Sequence: Synthetic oligonucleotide
cuuuauccauacagacugg

SEQ ID NO: 546212 - RNA, 19 nt, Artificial Sequence
  Description of Artificial Sequence: Synthetic oligonucleotide
agacuagacaagaaaucuc

SEQ ID NO: 546213 - RNA, 19 nt, Artificial Sequence
  Description of Artificial Sequence: Synthetic oligonucleotide
auaauagucuccuccuuua

SEQ ID NO: 546214 - RNA, 19 nt, Artificial Sequence
  Description of Artificial Sequence: Synthetic oligonucleotide
aucgucaggauaaaaggug

SEQ ID NO: 546215 - RNA, 19 nt, Artificial Sequence
  Description of Artificial Sequence: Synthetic oligonucleotide
aagcuauccauaauccacu

SEQ ID NO: 546216 - RNA, 19 nt, Artificial Sequence
  Description of Artificial Sequence: Synthetic oligonucleotide
auccgauuucugcagaagu

SEQ ID NO: 546217 - RNA, 19 nt, Artificial Sequence
  Description of Artificial Sequence: Synthetic oligonucleotide
auuggucggauugacaaga

SEQ ID NO: 546218 - RNA, 19 nt, Artificial Sequence
  Description of Artificial Sequence: Synthetic oligonucleotide
aggcuuugagcaaaugugg

SEQ ID NO: 546219 - RNA, 19 nt, Artificial Sequence
  Description of Artificial Sequence: Synthetic oligonucleotide
ugacucuagcugaugggca

SEQ ID NO: 546220 - RNA, 19 nt, Artificial Sequence
  Description of Artificial Sequence: Synthetic oligonucleotide
uguaccuuuuggcuuccac

SEQ ID NO: 546221 - RNA, 19 nt, Artificial Sequence
  Description of Artificial Sequence: Synthetic oligonucleotide
gccacggaaguccuuaucg

SEQ ID NO: 546222 - RNA, 19 nt, Artificial Sequence
  Description of Artificial Sequence: Synthetic oligonucleotide
gaaggugacacgcucccuc

SEQ ID NO: 546223 - RNA, 19 nt, Artificial Sequence
  Description of Artificial Sequence: Synthetic oligonucleotide
ugguaauacaggagccagc

SEQ ID NO: 546224 - RNA, 19 nt, Artificial Sequence
  Description of Artificial Sequence: Synthetic oligonucleotide
uuguccucccaucgaaggc

SEQ ID NO: 546225 - RNA, 19 nt, Artificial Sequence
  Description of Artificial Sequence: Synthetic oligonucleotide
ggaaaggacagacgaaggc

SEQ ID NO: 546226 - RNA, 19 nt, Artificial Sequence
  Description of Artificial Sequence: Synthetic oligonucleotide
cugacucuagcugaugggc

SEQ ID NO: 546227 - RNA, 19 nt, Artificial Sequence
  Description of Artificial Sequence: Synthetic oligonucleotide
ugcagauuggaggucguug

SEQ ID NO: 546228 - RNA, 19 nt, Artificial Sequence
  Description of Artificial Sequence: Synthetic oligonucleotide
cacaucgagacauguauca

SEQ ID NO: 546229 - RNA, 19 nt, Artificial Sequence
  Description of Artificial Sequence: Synthetic oligonucleotide
accggaaagcaugaugggg

SEQ ID NO: 546230 - RNA, 19 nt, Artificial Sequence
  Description of Artificial Sequence: Synthetic oligonucleotide
uaccggaaagcaugauggg

SEQ ID NO: 546231 - RNA, 19 nt, Artificial Sequence
  Description of Artificial Sequence: Synthetic oligonucleotide
gcagauuggaggucguugg

SEQ ID NO: 546232 - RNA, 19 nt, Artificial Sequence
  Description of Artificial Sequence: Synthetic oligonucleotide
uguccucccaucgaaggcc

SEQ ID NO: 546233 - RNA, 19 nt, Artificial Sequence
  Description of Artificial Sequence: Synthetic oligonucleotide
acagacgaaggcugguuug

SEQ ID NO: 546234 - RNA, 19 nt, Artificial Sequence
  Description of Artificial Sequence: Synthetic oligonucleotide
aagcaaggucaacguagag

SEQ ID NO: 546235 - RNA, 19 nt, Artificial Sequence
  Description of Artificial Sequence: Synthetic oligonucleotide
aggauaaaaggugauggaa

SEQ ID NO: 546236 - RNA, 19 nt, Artificial Sequence
  Description of Artificial Sequence: Synthetic oligonucleotide
uccuuucaacucucaaccc

SEQ ID NO: 546237 - RNA, 19 nt, Artificial Sequence
  Description of Artificial Sequence: Synthetic oligonucleotide
cauaggacggacagaacca

SEQ ID NO: 546238 - RNA, 19 nt, Artificial Sequence
  Description of Artificial Sequence: Synthetic oligonucleotide
cuguucaucgucaggauaa

SEQ ID NO: 546239 - RNA, 19 nt, Artificial Sequence
  Description of Artificial Sequence: Synthetic oligonucleotide
auuuaaugccccacaagca

SEQ ID NO: 546240 - RNA, 19 nt, Artificial Sequence
  Description of Artificial Sequence: Synthetic oligonucleotide
ugaauugcccauguucagu

SEQ ID NO: 546241 - RNA, 19 nt, Artificial Sequence
  Description of Artificial Sequence: Synthetic oligonucleotide
uugguauguccacggaagu

SEQ ID NO: 546242 - RNA, 19 nt, Artificial Sequence
  Description of Artificial Sequence: Synthetic oligonucleotide
aggauuugccuucccaaga

SEQ ID NO: 546243 - RNA, 19 nt, Artificial Sequence
  Description of Artificial Sequence: Synthetic oligonucleotide
uugcacucucccuugauuu

SEQ ID NO: 546244 - RNA, 19 nt, Artificial Sequence
  Description of Artificial Sequence: Synthetic oligonucleotide
ucacaucgagacauguauc

SEQ ID NO: 546245 - RNA, 19 nt, Artificial Sequence
  Description of Artificial Sequence: Synthetic oligonucleotide
cuagcugaugggcagccac

SEQ ID NO: 546246 - RNA, 19 nt, Artificial Sequence
  Description of Artificial Sequence: Synthetic oligonucleotide
ggacggacagaaccaaucg

SEQ ID NO: 546247 - RNA, 19 nt, Artificial Sequence
  Description of Artificial Sequence: Synthetic oligonucleotide
cuucuaagucugaaauuuc

SEQ ID NO: 546248 - RNA, 19 nt, Artificial Sequence
  Description of Artificial Sequence: Synthetic oligonucleotide
acaucgagacauguaucac

SEQ ID NO: 546249 - RNA, 19 nt, Artificial Sequence
  Description of Artificial Sequence: Synthetic oligonucleotide
acucucaacccuuucccga

SEQ ID NO: 546250 - RNA, 19 nt, Artificial Sequence
  Description of Artificial Sequence: Synthetic oligonucleotide
ucauagggcuuggagauuc

SEQ ID NO: 546251 - RNA, 19 nt, Artificial Sequence
  Description of Artificial Sequence: Synthetic oligonucleotide
ugacaccgacugcaggagg

SEQ ID NO: 546252 - RNA, 19 nt, Artificial Sequence
  Description of Artificial Sequence: Synthetic oligonucleotide
aaugccacggaaguccuua

SEQ ID NO: 546253 - RNA, 19 nt, Artificial Sequence
  Description of Artificial Sequence: Synthetic oligonucleotide
gagagaccucgcuggauag

SEQ ID NO: 546254 - RNA, 19 nt, Artificial Sequence
  Description of Artificial Sequence: Synthetic oligonucleotide
ugauuucguggagccaugg

SEQ ID NO: 546255 - RNA, 19 nt, Artificial Sequence
  Description of Artificial Sequence: Synthetic oligonucleotide
uagcggauucuauaaaauu

SEQ ID NO: 546256 - RNA, 19 nt, Artificial Sequence
  Description of Artificial Sequence: Synthetic oligonucleotide
aaggucagauucaaacagu

SEQ ID NO: 546257 - RNA, 19 nt, Artificial Sequence
  Description of Artificial Sequence: Synthetic oligonucleotide
aaaucucaaagagccccug

SEQ ID NO: 546258 - RNA, 19 nt, Artificial Sequence
  Description of Artificial Sequence: Synthetic oligonucleotide
caaguaggaauugcuggcc

SEQ ID NO: 546259 - RNA, 19 nt, Artificial Sequence
  Description of Artificial Sequence: Synthetic oligonucleotide
ucucuaagauguacugguc

SEQ ID NO: 546260 - RNA, 19 nt, Artificial Sequence
  Description of Artificial Sequence: Synthetic oligonucleotide
cuagacaagaaaucucaaa

SEQ ID NO: 546261 - RNA, 19 nt, Artificial Sequence
  Description of Artificial Sequence: Synthetic oligonucleotide
cacacagacauuguucgug

SEQ ID NO: 546262 - RNA, 19 nt, Artificial Sequence
  Description of Artificial Sequence: Synthetic oligonucleotide
acaagauuucaauguccca

SEQ ID NO: 546263 - RNA, 19 nt, Artificial Sequence
  Description of Artificial Sequence: Synthetic oligonucleotide
cugaauugcccauguucag

SEQ ID NO: 546264 - RNA, 19 nt, Artificial Sequence
  Description of Artificial Sequence: Synthetic oligonucleotide
aggacggacagaaccaauc

SEQ ID NO: 546265 - RNA, 19 nt, Artificial Sequence
  Description of Artificial Sequence: Synthetic oligonucleotide
aagugguuccagcuggauu

SEQ ID NO: 546266 - RNA, 19 nt, Artificial Sequence
  Description of Artificial Sequence: Synthetic oligonucleotide
gguaccggaaagcaugaug

SEQ ID NO: 546267 - RNA, 19 nt, Artificial Sequence
  Description of Artificial Sequence: Synthetic oligonucleotide
uagguaccggaaagcauga

SEQ ID NO: 546268 - RNA, 19 nt, Artificial Sequence
  Description of Artificial Sequence: Synthetic oligonucleotide
acgaauugauccaaugcca

SEQ ID NO: 546269 - RNA, 19 nt, Artificial Sequence
  Description of Artificial Sequence: Synthetic oligonucleotide
gugacugucaaauacucau

SEQ ID NO: 546270 - RNA, 19 nt, Artificial Sequence
  Description of Artificial Sequence: Synthetic oligonucleotide
agcccgguuugcugaaggc

SEQ ID NO: 546271 - RNA, 19 nt, Artificial Sequence
  Description of Artificial Sequence: Synthetic oligonucleotide
agcggauucuauaaaauua

SEQ ID NO: 546272 - RNA, 19 nt, Artificial Sequence
  Description of Artificial Sequence: Synthetic oligonucleotide
aacccauacuccacucuuc

SEQ ID NO: 546273 - RNA, 19 nt, Artificial Sequence
  Description of Artificial Sequence: Synthetic oligonucleotide
acugaugguaggcacuuuu

SEQ ID NO: 546274 - RNA, 19 nt, Artificial Sequence
  Description of Artificial Sequence: Synthetic oligonucleotide
gaggucguugguucacugc

SEQ ID NO: 546275 - RNA, 19 nt, Artificial Sequence
  Description of Artificial Sequence: Synthetic oligonucleotide
acccacuaaaugcugucca

SEQ ID NO: 546276 - RNA, 19 nt, Artificial Sequence
  Description of Artificial Sequence: Synthetic oligonucleotide
cacuccaccaaugacacga

SEQ ID NO: 546277 - RNA, 19 nt, Artificial Sequence
  Description of Artificial Sequence: Synthetic oligonucleotide
ggauuggucggauugacaa

SEQ ID NO: 546278 - RNA, 19 nt, Artificial Sequence
  Description of Artificial Sequence: Synthetic oligonucleotide
agacauuguucgugcauca

SEQ ID NO: 546279 - RNA, 19 nt, Artificial Sequence
  Description of Artificial Sequence: Synthetic oligonucleotide
cacucuuuauccauacaga

SEQ ID NO: 546280 - RNA, 19 nt, Artificial Sequence
  Description of Artificial Sequence: Synthetic oligonucleotide
aucuaaaguuucucuguaa

SEQ ID NO: 546281 - RNA, 19 nt, Artificial Sequence
  Description of Artificial Sequence: Synthetic oligonucleotide
ucauaauagucuccuccuu

SEQ ID NO: 546282 - RNA, 19 nt, Artificial Sequence
  Description of Artificial Sequence: Synthetic oligonucleotide
acggagaaccuugaaggag

SEQ ID NO: 546283 - RNA, 19 nt, Artificial Sequence
  Description of Artificial Sequence: Synthetic oligonucleotide
ucaguccgcccauuuggag

SEQ ID NO: 546284 - RNA, 19 nt, Artificial Sequence
  Description of Artificial Sequence: Synthetic oligonucleotide
gauccgauuucugcagaag

SEQ ID NO: 546285 - RNA, 19 nt, Artificial Sequence
  Description of Artificial Sequence: Synthetic oligonucleotide
acagacauuguucgugcau

SEQ ID NO: 546286 - RNA, 19 nt, Artificial Sequence
  Description of Artificial Sequence: Synthetic oligonucleotide
guggaggcucauuuuauuc

SEQ ID NO: 546287 - RNA, 19 nt, Artificial Sequence
  Description of Artificial Sequence: Synthetic oligonucleotide
gcggauucuauaaaauuag

SEQ ID NO: 546288 - RNA, 19 nt, Artificial Sequence
  Description of Artificial Sequence: Synthetic oligonucleotide
auugauccaaugccacgga

SEQ ID NO: 546289 - RNA, 19 nt, Artificial Sequence
  Description of Artificial Sequence: Synthetic oligonucleotide
guauuacuugauccucccc

SEQ ID NO: 546290 - RNA, 19 nt, Artificial Sequence
  Description of Artificial Sequence: Synthetic oligonucleotide
ugguauguccacggaagug

SEQ ID NO: 546291 - RNA, 19 nt, Artificial Sequence
  Description of Artificial Sequence: Synthetic oligonucleotide
ucucaacccuuucccgaag

SEQ ID NO: 546292 - RNA, 19 nt, Artificial Sequence
  Description of Artificial Sequence: Synthetic oligonucleotide
gaguccucggcaguagugc

SEQ ID NO: 546293 - RNA, 19 nt, Artificial Sequence
  Description of Artificial Sequence: Synthetic oligonucleotide
aggaggauuugccuuccca

SEQ ID NO: 546294 - RNA, 19 nt, Artificial Sequence
  Description of Artificial Sequence: Synthetic oligonucleotide
uugauccaaugccacggaa

SEQ ID NO: 546295 - RNA, 19 nt, Artificial Sequence
  Description of Artificial Sequence: Synthetic oligonucleotide
cuaagggauaaauuuugua

SEQ ID NO: 546296 - RNA, 19 nt, Artificial Sequence
  Description of Artificial Sequence: Synthetic oligonucleotide
ccauaauccacucuuuauc

SEQ ID NO: 546297 - RNA, 19 nt, Artificial Sequence
  Description of Artificial Sequence: Synthetic oligonucleotide
gucauaauagucuccuccu

SEQ ID NO: 546298 - RNA, 19 nt, Artificial Sequence
  Description of Artificial Sequence: Synthetic oligonucleotide
guacacugcaggcugcuuc

SEQ ID NO: 546299 - RNA, 19 nt, Artificial Sequence
  Description of Artificial Sequence: Synthetic oligonucleotide
gaagcaaggucaacguaga

SEQ ID NO: 546300 - RNA, 19 nt, Artificial Sequence
  Description of Artificial Sequence: Synthetic oligonucleotide
aucguuuuccacccacuaa

SEQ ID NO: 546301 - RNA, 19 nt, Artificial Sequence
  Description of Artificial Sequence: Synthetic oligonucleotide
cauuguucgugcaucagcu

SEQ ID NO: 546302 - RNA, 19 nt, Artificial Sequence
  Description of Artificial Sequence: Synthetic oligonucleotide
ggcuaagggauaaauuuug

SEQ ID NO: 546303 - RNA, 19 nt, Artificial Sequence
  Description of Artificial Sequence: Synthetic oligonucleotide
cucaacccuuucccgaagc

SEQ ID NO: 546304 - RNA, 19 nt, Artificial Sequence
  Description of Artificial Sequence: Synthetic oligonucleotide
cuguaagcguucugacacc

SEQ ID NO: 546305 - RNA, 19 nt, Artificial Sequence
  Description of Artificial Sequence: Synthetic oligonucleotide
gcuagguucccagugacug

SEQ ID NO: 546306 - RNA, 19 nt, Artificial Sequence
  Description of Artificial Sequence: Synthetic oligonucleotide
gacgaaggcugguuugcac

SEQ ID NO: 546307 - RNA, 19 nt, Artificial Sequence
  Description of Artificial Sequence: Synthetic oligonucleotide
gacauuguucgugcaucag

SEQ ID NO: 546308 - RNA, 19 nt, Artificial Sequence
  Description of Artificial Sequence: Synthetic oligonucleotide
auagcggauucuauaaaau

SEQ ID NO: 546309 - RNA, 19 nt, Artificial Sequence
  Description of Artificial Sequence: Synthetic oligonucleotide
ugccagaucuguguguccu

SEQ ID NO: 546310 - RNA, 19 nt, Artificial Sequence
  Description of Artificial Sequence: Synthetic oligonucleotide
uggugaccaggagagaccu

SEQ ID NO: 546311 - RNA, 19 nt, Artificial Sequence
  Description of Artificial Sequence: Synthetic oligonucleotide
uaaggaggauuugccuucc

SEQ ID NO: 546312 - RNA, 19 nt, Artificial Sequence
  Description of Artificial Sequence: Synthetic oligonucleotide
guaacucucgucccucaca

SEQ ID NO: 546313 - RNA, 19 nt, Artificial Sequence
  Description of Artificial Sequence: Synthetic oligonucleotide
cuauccauaauccacucuu

SEQ ID NO: 546314 - RNA, 19 nt, Artificial Sequence
  Description of Artificial Sequence: Synthetic oligonucleotide
gguauguccacggaaguga

SEQ ID NO: 546315 - RNA, 19 nt, Artificial Sequence
  Description of Artificial Sequence: Synthetic oligonucleotide
agugugauagcggauucua

SEQ ID NO: 546316 - RNA, 19 nt, Artificial Sequence
  Description of Artificial Sequence: Synthetic oligonucleotide
ucggccacuugucugucau

SEQ ID NO: 546317 - RNA, 19 nt, Artificial Sequence
  Description of Artificial Sequence: Synthetic oligonucleotide
cuuugguauguccacggaa

SEQ ID NO: 546318 - RNA, 19 nt, Artificial Sequence
  Description of Artificial Sequence: Synthetic oligonucleotide
auuagccuguagguaccgg

SEQ ID NO: 546319 - RNA, 19 nt, Artificial Sequence
  Description of Artificial Sequence: Synthetic oligonucleotide
ugucccggccaccaaucac

SEQ ID NO: 546320 - RNA, 19 nt, Artificial Sequence
  Description of Artificial Sequence: Synthetic oligonucleotide
ucgcugagauaagagcuga

SEQ ID NO: 546321 - RNA, 19 nt, Artificial Sequence
  Description of Artificial Sequence: Synthetic oligonucleotide
uuacuugauccuccccaau

SEQ ID NO: 546322 - RNA, 19 nt, Artificial Sequence
  Description of Artificial Sequence: Synthetic oligonucleotide
caaggucaacguagaggcc

SEQ ID NO: 546323 - RNA, 19 nt, Artificial Sequence
  Description of Artificial Sequence: Synthetic oligonucleotide
gcaacuuagaugugagauc

SEQ ID NO: 546324 - RNA, 19 nt, Artificial Sequence
  Description of Artificial Sequence: Synthetic oligonucleotide
cagacgaaggcugguuugc

SEQ ID NO: 546325 - RNA, 19 nt, Artificial Sequence
  Description of Artificial Sequence: Synthetic oligonucleotide
uucguggagccauggugac

SEQ ID NO: 546326 - RNA, 19 nt, Artificial Sequence
  Description of Artificial Sequence: Synthetic oligonucleotide
guaccuuuuggcuuccacu

SEQ ID NO: 546327 - RNA, 19 nt, Artificial Sequence
  Description of Artificial Sequence: Synthetic oligonucleotide
gagaccucgcuggauagga

SEQ ID NO: 546328 - RNA, 19 nt, Artificial Sequence
  Description of Artificial Sequence: Synthetic oligonucleotide
ugacacgaauugauccaau

SEQ ID NO: 546329 - RNA, 19 nt, Artificial Sequence
  Description of Artificial Sequence: Synthetic oligonucleotide
uaggcauaaggaggauuug

SEQ ID NO: 546330 - RNA, 19 nt, Artificial Sequence
  Description of Artificial Sequence: Synthetic oligonucleotide
acccacacuccaccaauga

SEQ ID NO: 546331 - RNA, 19 nt, Artificial Sequence
  Description of Artificial Sequence: Synthetic oligonucleotide
ucagggaggagugcaacuu

SEQ ID NO: 546332 - RNA, 19 nt, Artificial Sequence
  Description of Artificial Sequence: Synthetic oligonucleotide
ggcaguaggcaacccauac

SEQ ID NO: 546333 - RNA, 19 nt, Artificial Sequence
  Description of Artificial Sequence: Synthetic oligonucleotide
cucgcuggauaggacgucc

SEQ ID NO: 546334 - RNA, 19 nt, Artificial Sequence
  Description of Artificial Sequence: Synthetic oligonucleotide
accuuuuggcuuccacuga

SEQ ID NO: 546335 - RNA, 19 nt, Artificial Sequence
  Description of Artificial Sequence: Synthetic oligonucleotide
ucguugguucacugcacuc

SEQ ID NO: 546336 - RNA, 19 nt, Artificial Sequence
  Description of Artificial Sequence: Synthetic oligonucleotide
ggcucgguuucuuauucug

SEQ ID NO: 546337 - RNA, 19 nt, Artificial Sequence
  Description of Artificial Sequence: Synthetic oligonucleotide
gagauaagagcugaugguu

SEQ ID NO: 546338 - RNA, 19 nt, Artificial Sequence
  Description of Artificial Sequence: Synthetic oligonucleotide
aaaaugggacucagggcua

SEQ ID NO: 546339 - RNA, 19 nt, Artificial Sequence
  Description of Artificial Sequence: Synthetic oligonucleotide
ccauuuaaugccccacaag

SEQ ID NO: 546340 - RNA, 19 nt, Artificial Sequence
  Description of Artificial Sequence: Synthetic oligonucleotide
ugcaucagcuagguuccca

SEQ ID NO: 546341 - RNA, 19 nt, Artificial Sequence
  Description of Artificial Sequence: Synthetic oligonucleotide
caucuaaaguuucucugua

SEQ ID NO: 546342 - RNA, 19 nt, Artificial Sequence
  Description of Artificial Sequence: Synthetic oligonucleotide
acggacagaaccaaucguu

SEQ ID NO: 546343 - RNA, 19 nt, Artificial Sequence
  Description of Artificial Sequence: Synthetic oligonucleotide
gggcugauugacaauaaca

SEQ ID NO: 546344 - RNA, 19 nt, Artificial Sequence
  Description of Artificial Sequence: Synthetic oligonucleotide
agcaugauggggccauuua

SEQ ID NO: 546345 - RNA, 19 nt, Artificial Sequence
  Description of Artificial Sequence: Synthetic oligonucleotide
aacccacacuccaccaaug

SEQ ID NO: 546346 - RNA, 19 nt, Artificial Sequence
  Description of Artificial Sequence: Synthetic oligonucleotide
auacuccacucuucacaug

SEQ ID NO: 546347 - RNA, 19 nt, Artificial Sequence
  Description of Artificial Sequence: Synthetic oligonucleotide
ggauggaucuuguuuccca

SEQ ID NO: 546348 - RNA, 19 nt, Artificial Sequence
  Description of Artificial Sequence: Synthetic oligonucleotide
augacacgaauugauccaa

SEQ ID NO: 546349 - RNA, 19 nt, Artificial Sequence
  Description of Artificial Sequence: Synthetic oligonucleotide
auaagagcugaugguucca

SEQ ID NO: 546350 - RNA, 19 nt, Artificial Sequence
  Description of Artificial Sequence: Synthetic oligonucleotide
cccuugauuucguggagcc

SEQ ID NO: 546351 - RNA, 19 nt, Artificial Sequence
  Description of Artificial Sequence: Synthetic oligonucleotide
caucgagacauguaucacu

SEQ ID NO: 546352 - RNA, 19 nt, Artificial Sequence
  Description of Artificial Sequence: Synthetic oligonucleotide
aagcguucugacaccgacu

SEQ ID NO: 546353 - RNA, 19 nt, Artificial Sequence
  Description of Artificial Sequence: Synthetic oligonucleotide
uuggucggauugacaagau

SEQ ID NO: 546354 - RNA, 19 nt, Artificial Sequence
  Description of Artificial Sequence: Synthetic oligonucleotide
ucaguccacaaggccaccu

SEQ ID NO: 546355 - RNA, 19 nt, Artificial Sequence
  Description of Artificial Sequence: Synthetic oligonucleotide
cugacaccgacugcaggag

SEQ ID NO: 546356 - RNA, 19 nt, Artificial Sequence
  Description of Artificial Sequence: Synthetic oligonucleotide
ucggauugacaagauugua

SEQ ID NO: 546357 - RNA, 19 nt, Artificial Sequence
  Description of Artificial Sequence: Synthetic oligonucleotide
uaggacggacagaaccaau

SEQ ID NO: 546358 - RNA, 19 nt, Artificial Sequence
  Description of Artificial Sequence: Synthetic oligonucleotide
guaucacuggccuuggauu

SEQ ID NO: 546359 - RNA, 19 nt, Artificial Sequence
  Description of Artificial Sequence: Synthetic oligonucleotide
caaguacugaugguaggca

SEQ ID NO: 546360 - RNA, 19 nt, Artificial Sequence
  Description of Artificial Sequence: Synthetic oligonucleotide
guagggagaaaugcacaca

SEQ ID NO: 546361 - RNA, 19 nt, Artificial Sequence
  Description of Artificial Sequence: Synthetic oligonucleotide
cuguagguaccggaaagca

SEQ ID NO: 546362 - RNA, 19 nt, Artificial Sequence
  Description of Artificial Sequence: Synthetic oligonucleotide
gacggacagaaccaaucgu

SEQ ID NO: 546363 - RNA, 19 nt, Artificial Sequence
  Description of Artificial Sequence: Synthetic oligonucleotide
cgaauugauccaaugccac

SEQ ID NO: 546364 - RNA, 19 nt, Artificial Sequence
  Description of Artificial Sequence: Synthetic oligonucleotide
auuguucgugcaucagcua

SEQ ID NO: 546365 - RNA, 19 nt, Artificial Sequence
  Description of Artificial Sequence: Synthetic oligonucleotide
cagaauucacagcgucuuc

SEQ ID NO: 546366 - RNA, 19 nt, Artificial Sequence
  Description of Artificial Sequence: Synthetic oligonucleotide
acuagacaagaaaucucaa

SEQ ID NO: 546367 - RNA, 19 nt, Artificial Sequence
  Description of Artificial Sequence: Synthetic oligonucleotide
uggucggauugacaagauu

SEQ ID NO: 546368 - RNA, 19 nt, Artificial Sequence
  Description of Artificial Sequence: Synthetic oligonucleotide
ugcacucgccuuggaagcc

SEQ ID NO: 546369 - RNA, 19 nt, Artificial Sequence
  Description of Artificial Sequence: Synthetic oligonucleotide
uguucaucgucaggauaaa

SEQ ID NO: 546370 - RNA, 19 nt, Artificial Sequence
  Description of Artificial Sequence: Synthetic oligonucleotide
acguccuccugugagcugu

SEQ ID NO: 546371 - RNA, 19 nt, Artificial Sequence
  Description of Artificial Sequence: Synthetic oligonucleotide
caagauuguauuacuugau

SEQ ID NO: 546372 - RNA, 19 nt, Artificial Sequence
  Description of Artificial Sequence: Synthetic oligonucleotide
ugccacggaaguccuuauc

SEQ ID NO: 546373 - RNA, 19 nt, Artificial Sequence
  Description of Artificial Sequence: Synthetic oligonucleotide
aguucaucgcugagauaag

SEQ ID NO: 546374 - RNA, 19 nt, Artificial Sequence
  Description of Artificial Sequence: Synthetic oligonucleotide
ucccaucgaaggccucacc

SEQ ID NO: 546375 - RNA, 19 nt, Artificial Sequence
  Description of Artificial Sequence: Synthetic oligonucleotide
cacggaagugagacuuuuc

SEQ ID NO: 546376 - RNA, 19 nt, Artificial Sequence
  Description of Artificial Sequence: Synthetic oligonucleotide
agauuggaggucguugguu

SEQ ID NO: 546377 - RNA, 19 nt, Artificial Sequence
  Description of Artificial Sequence: Synthetic oligonucleotide
auaggacguccuccuguga

SEQ ID NO: 546378 - RNA, 19 nt, Artificial Sequence
  Description of Artificial Sequence: Synthetic oligonucleotide
cggauucuauaaaauuagc

SEQ ID NO: 546379 - RNA, 19 nt, Artificial Sequence
  Description of Artificial Sequence: Synthetic oligonucleotide
ccaaucguuuuccacccac

SEQ ID NO: 546380 - RNA, 19 nt, Artificial Sequence
  Description of Artificial Sequence: Synthetic oligonucleotide
gauuucguggagccauggu

SEQ ID NO: 546381 - RNA, 19 nt, Artificial Sequence
  Description of Artificial Sequence: Synthetic oligonucleotide
uccgcccauuuggagagga

SEQ ID NO: 546382 - RNA, 19 nt, Artificial Sequence
  Description of Artificial Sequence: Synthetic oligonucleotide
cuaugcacucgccuuggaa

SEQ ID NO: 546383 - RNA, 19 nt, Artificial Sequence
  Description of Artificial Sequence: Synthetic oligonucleotide
cccacuaaaugcuguccag

SEQ ID NO: 546384 - RNA, 19 nt, Artificial Sequence
  Description of Artificial Sequence: Synthetic oligonucleotide
uggcaguaggcaacccaua

SEQ ID NO: 546385 - RNA, 19 nt, Artificial Sequence
  Description of Artificial Sequence: Synthetic oligonucleotide
acggaaguccuuaucgauu

SEQ ID NO: 546386 - RNA, 19 nt, Artificial Sequence
  Description of Artificial Sequence: Synthetic oligonucleotide
gugcaacuuagaugugaga

SEQ ID NO: 546387 - RNA, 19 nt, Artificial Sequence
  Description of Artificial Sequence: Synthetic oligonucleotide
cugaggaauguguccugga

SEQ ID NO: 546388 - RNA, 19 nt, Artificial Sequence
  Description of Artificial Sequence: Synthetic oligonucleotide
accaaucguuuuccaccca

SEQ ID NO: 546389 - RNA, 19 nt, Artificial Sequence
  Description of Artificial Sequence: Synthetic oligonucleotide
gccuuggauuuaaagaguc

SEQ ID NO: 546390 - RNA, 19 nt, Artificial Sequence
  Description of Artificial Sequence: Synthetic oligonucleotide
cuuagaugugagauccgau

SEQ ID NO: 546391 - RNA, 19 nt, Artificial Sequence
  Description of Artificial Sequence: Synthetic oligonucleotide
ggggcugauugacaauaac

SEQ ID NO: 546392 - RNA, 19 nt, Artificial Sequence
  Description of Artificial Sequence: Synthetic oligonucleotide
cagaaccaaucguuuucca

SEQ ID NO: 546393 - RNA, 19 nt, Artificial Sequence
  Description of Artificial Sequence: Synthetic oligonucleotide
guagaggccuucuucuaau

SEQ ID NO: 546394 - RNA, 19 nt, Artificial Sequence
  Description of Artificial Sequence: Synthetic oligonucleotide
uggaggucguugguucacu

SEQ ID NO: 546395 - RNA, 19 nt, Artificial Sequence
  Description of Artificial Sequence: Synthetic oligonucleotide
ggaggucguugguucacug

SEQ ID NO: 546396 - RNA, 19 nt, Artificial Sequence
  Description of Artificial Sequence: Synthetic oligonucleotide
gucggauugacaagauugu

SEQ ID NO: 546397 - RNA, 19 nt, Artificial Sequence
  Description of Artificial Sequence: Synthetic oligonucleotide
accucgcuggauaggacgu

SEQ ID NO: 546398 - RNA, 19 nt, Artificial Sequence
  Description of Artificial Sequence: Synthetic oligonucleotide
gaccgagcugcagauugga

SEQ ID NO: 546399 - RNA, 19 nt, Artificial Sequence
  Description of Artificial Sequence: Synthetic oligonucleotide
gugccagaucugugugucc

SEQ ID NO: 546400 - RNA, 19 nt, Artificial Sequence
  Description of Artificial Sequence: Synthetic oligonucleotide
gaagcccgguuugcugaag

SEQ ID NO: 546401 - RNA, 19 nt, Artificial Sequence
  Description of Artificial Sequence: Synthetic oligonucleotide
gccauuuaaugccccacaa

SEQ ID NO: 546402 - RNA, 19 nt, Artificial Sequence
  Description of Artificial Sequence: Synthetic oligonucleotide
cacuaaaugcuguccaguu

SEQ ID NO: 546403 - RNA, 19 nt, Artificial Sequence
  Description of Artificial Sequence: Synthetic oligonucleotide
acguagucaaugggcuuga

SEQ ID NO: 546404 - RNA, 19 nt, Artificial Sequence
  Description of Artificial Sequence: Synthetic oligonucleotide
cguugguucacugcacucc

SEQ ID NO: 546405 - RNA, 19 nt, Artificial Sequence
  Description of Artificial Sequence: Synthetic oligonucleotide
aggugugucccggccacca

SEQ ID NO: 546406 - RNA, 19 nt, Artificial Sequence
  Description of Artificial Sequence: Synthetic oligonucleotide
ccgcuguagggagaaaugc

SEQ ID NO: 546407 - RNA, 19 nt, Artificial Sequence
  Description of Artificial Sequence: Synthetic oligonucleotide
cugauguacacugcaggcu

SEQ ID NO: 546408 - RNA, 19 nt, Artificial Sequence
  Description of Artificial Sequence: Synthetic oligonucleotide
caccaaucacaucgagaca

SEQ ID NO: 546409 - RNA, 19 nt, Artificial Sequence
  Description of Artificial Sequence: Synthetic oligonucleotide
cccgcuguagggagaaaug

SEQ ID NO: 546410 - RNA, 19 nt, Artificial Sequence
  Description of Artificial Sequence: Synthetic oligonucleotide
caaucguuuuccacccacu

SEQ ID NO: 546411 - RNA, 19 nt, Artificial Sequence
  Description of Artificial Sequence: Synthetic oligonucleotide
uucgugcaucagcuagguu

SEQ ID NO: 546412 - RNA, 19 nt, Artificial Sequence
  Description of Artificial Sequence: Synthetic oligonucleotide
cagauucaaacagugugau

SEQ ID NO: 546413 - RNA, 19 nt, Artificial Sequence
  Description of Artificial Sequence: Synthetic oligonucleotide
gaccaggagagaccucgcu

SEQ ID NO: 546414 - RNA, 19 nt, Artificial Sequence
  Description of Artificial Sequence: Synthetic oligonucleotide
guucaucgucaggauaaaa

SEQ ID NO: 546415 - RNA, 19 nt, Artificial Sequence
  Description of Artificial Sequence: Synthetic oligonucleotide
gacauguaucacuggccuu

SEQ ID NO: 546416 - RNA, 19 nt, Artificial Sequence
  Description of Artificial Sequence: Synthetic oligonucleotide
augccacggaaguccuuau

SEQ ID NO: 546417 - RNA, 19 nt, Artificial Sequence
  Description of Artificial Sequence: Synthetic oligonucleotide
guccacggaagugagacuu

SEQ ID NO: 546418 - RNA, 19 nt, Artificial Sequence
  Description of Artificial Sequence: Synthetic oligonucleotide
agccagcagccacggagaa

SEQ ID NO: 546419 - RNA, 19 nt, Artificial Sequence
  Description of Artificial Sequence: Synthetic oligonucleotide
gucugcaaguacugauggu

SEQ ID NO: 546420 - RNA, 19 nt, Artificial Sequence
  Description of Artificial Sequence: Synthetic oligonucleotide
guaagcguucugacaccga

SEQ ID NO: 546421 - RNA, 19 nt, Artificial Sequence
  Description of Artificial Sequence: Synthetic oligonucleotide
agcaaauguggaggcucau

SEQ ID NO: 546422 - RNA, 19 nt, Artificial Sequence
  Description of Artificial Sequence: Synthetic oligonucleotide
gguuccauuucuguucagu

SEQ ID NO: 546423 - RNA, 19 nt, Artificial Sequence
  Description of Artificial Sequence: Synthetic oligonucleotide
ccuuucaacucucaacccu

SEQ ID NO: 546424 - RNA, 19 nt, Artificial Sequence
  Description of Artificial Sequence: Synthetic oligonucleotide
aucuuguuucccagccaaa

SEQ ID NO: 546425 - RNA, 19 nt, Artificial Sequence
  Description of Artificial Sequence: Synthetic oligonucleotide
guucgugcaucagcuaggu

SEQ ID NO: 546426 - RNA, 19 nt, Artificial Sequence
  Description of Artificial Sequence: Synthetic oligonucleotide
gguuugcacucucccuuga

SEQ ID NO: 546427 - RNA, 19 nt, Artificial Sequence
  Description of Artificial Sequence: Synthetic oligonucleotide
cagggcuaagggauaaauu

SEQ ID NO: 546428 - RNA, 19 nt, Artificial Sequence
  Description of Artificial Sequence: Synthetic oligonucleotide
guaggaauugcuggccuuu

SEQ ID NO: 546429 - RNA, 19 nt, Artificial Sequence
  Description of Artificial Sequence: Synthetic oligonucleotide
gcuauccauaauccacucu

SEQ ID NO: 546430 - RNA, 19 nt, Artificial Sequence
  Description of Artificial Sequence: Synthetic oligonucleotide
aggggcugauugacaauaa

SEQ ID NO: 546431 - RNA, 19 nt, Artificial Sequence
  Description of Artificial Sequence: Synthetic oligonucleotide
gggccauuuaaugccccac

SEQ ID NO: 546432 - RNA, 19 nt, Artificial Sequence
  Description of Artificial Sequence: Synthetic oligonucleotide
gcgucuucaagaaguaacu

SEQ ID NO: 546433 - RNA, 19 nt, Artificial Sequence
  Description of Artificial Sequence: Synthetic oligonucleotide
ccucauaaaaugggacuca

SEQ ID NO: 546434 - RNA, 19 nt, Artificial Sequence
  Description of Artificial Sequence: Synthetic oligonucleotide
gcuaagggauaaauuuugu

SEQ ID NO: 546435 - RNA, 19 nt, Artificial Sequence
  Description of Artificial Sequence: Synthetic oligonucleotide
uccucccaucgaaggccuc

SEQ ID NO: 546436 - RNA, 19 nt, Artificial Sequence
  Description of Artificial Sequence: Synthetic oligonucleotide
guacugaugguaggcacuu

SEQ ID NO: 546437 - RNA, 19 nt, Artificial Sequence
  Description of Artificial Sequence: Synthetic oligonucleotide
cagauuggaggucguuggu

SEQ ID NO: 546438 - RNA, 19 nt, Artificial Sequence
  Description of Artificial Sequence: Synthetic oligonucleotide
gcuucauaggacggacaga

SEQ ID NO: 546439 - RNA, 19 nt, Artificial Sequence
  Description of Artificial Sequence: Synthetic oligonucleotide
cucgucccucacagugcuc

SEQ ID NO: 546440 - RNA, 19 nt, Artificial Sequence
  Description of Artificial Sequence: Synthetic oligonucleotide
gcguucugacaccgacugc

SEQ ID NO: 546441 - RNA, 19 nt, Artificial Sequence
  Description of Artificial Sequence: Synthetic oligonucleotide
gcacucgccuuggaagccc

SEQ ID NO: 546442 - RNA, 19 nt, Artificial Sequence
  Description of Artificial Sequence: Synthetic oligonucleotide
cucggccacuugucuguca

SEQ ID NO: 546443 - RNA, 19 nt, Artificial Sequence
  Description of Artificial Sequence: Synthetic oligonucleotide
gcaacccauacuccacucu

SEQ ID NO: 546444 - RNA, 19 nt, Artificial Sequence
  Description of Artificial Sequence: Synthetic oligonucleotide
ccauacagacuggguguag

SEQ ID NO: 546445 - RNA, 19 nt, Artificial Sequence
  Description of Artificial Sequence: Synthetic oligonucleotide
cgcccauuuggagaggaug

SEQ ID NO: 546446 - RNA, 19 nt, Artificial Sequence
  Description of Artificial Sequence: Synthetic oligonucleotide
cagagucuacauguucacu

SEQ ID NO: 546447 - RNA, 19 nt, Artificial Sequence
  Description of Artificial Sequence: Synthetic oligonucleotide
agguaccggaaagcaugau

SEQ ID NO: 546448 - RNA, 19 nt, Artificial Sequence
  Description of Artificial Sequence: Synthetic oligonucleotide
cuguccaguuagggauuuc

SEQ ID NO: 546449 - RNA, 19 nt, Artificial Sequence
  Description of Artificial Sequence: Synthetic oligonucleotide
gcccauguucaguccacaa

SEQ ID NO: 546450 - RNA, 19 nt, Artificial Sequence
  Description of Artificial Sequence: Synthetic oligonucleotide
ggaagcccgguuugcugaa

SEQ ID NO: 546451 - RNA, 19 nt, Artificial Sequence
  Description of Artificial Sequence: Synthetic oligonucleotide
gggcuaagggauaaauuuu

SEQ ID NO: 546452 - RNA, 19 nt, Artificial Sequence
  Description of Artificial Sequence: Synthetic oligonucleotide
guccgcccauuuggagagg

SEQ ID NO: 546453 - RNA, 19 nt, Artificial Sequence
  Description of Artificial Sequence: Synthetic oligonucleotide
gugugauagcggauucuau

SEQ ID NO: 546454 - RNA, 19 nt, Artificial Sequence
  Description of Artificial Sequence: Synthetic oligonucleotide
cagugugauagcggauucu

SEQ ID NO: 546455 - RNA, 19 nt, Artificial Sequence
  Description of Artificial Sequence: Synthetic oligonucleotide
caccgacugcaggagggaa

SEQ ID NO: 546456 - RNA, 19 nt, Artificial Sequence
  Description of Artificial Sequence: Synthetic oligonucleotide
cauuaggcauaaggaggau

SEQ ID NO: 546457 - RNA, 19 nt, Artificial Sequence
  Description of Artificial Sequence: Synthetic oligonucleotide
gggcucgguuucuuauucu

SEQ ID NO: 546458 - RNA, 19 nt, Artificial Sequence
  Description of Artificial Sequence: Synthetic oligonucleotide
cucgccuuggaagcccggu

SEQ ID NO: 546459 - RNA, 19 nt, Artificial Sequence
  Description of Artificial Sequence: Synthetic oligonucleotide
ccacuaaaugcuguccagu

SEQ ID NO: 546460 - RNA, 19 nt, Artificial Sequence
  Description of Artificial Sequence: Synthetic oligonucleotide
caagugguuccagcuggau

SEQ ID NO: 546461 - RNA, 19 nt, Artificial Sequence
  Description of Artificial Sequence: Synthetic oligonucleotide
cggaaguccuuaucgauuu

SEQ ID NO: 546462 - RNA, 19 nt, Artificial Sequence
  Description of Artificial Sequence: Synthetic oligonucleotide
gcccgguuugcugaaggcu

SEQ ID NO: 546463 - RNA, 19 nt, Artificial Sequence
  Description of Artificial Sequence: Synthetic oligonucleotide
ccucgcuggauaggacguc

SEQ ID NO: 546464 - RNA, 19 nt, Artificial Sequence
  Description of Artificial Sequence: Synthetic oligonucleotide
cguuuuccacccacuaaau

SEQ ID NO: 546465 - RNA, 19 nt, Artificial Sequence
  Description of Artificial Sequence: Synthetic oligonucleotide
cugcagauuggaggucguu

SEQ ID NO: 546466 - RNA, 19 nt, Artificial Sequence
  Description of Artificial Sequence: Synthetic oligonucleotide
ccucggccacuugucuguc

SEQ ID NO: 546467 - RNA, 19 nt, Artificial Sequence
  Description of Artificial Sequence: Synthetic oligonucleotide
cccaagaaauuggauccuu

SEQ ID NO: 546468 - RNA, 19 nt, Artificial Sequence
  Description of Artificial Sequence: Synthetic oligonucleotide
ccgguuugcugaaggcuuu

SEQ ID NO: 546469 - RNA, 19 nt, Artificial Sequence
  Description of Artificial Sequence: Synthetic oligonucleotide
ccacggaagugagacuuuu

SEQ ID NO: 546470 - RNA, 19 nt, Artificial Sequence
  Description of Artificial Sequence: Synthetic oligonucleotide
ccgcccauuuggagaggau

SEQ ID NO: 546471 - RNA, 19 nt, Artificial Sequence
  Description of Artificial Sequence: Synthetic oligonucleotide
aaaaggaaucaccauauac

SEQ ID NO: 546472 - RNA, 19 nt, Artificial Sequence
  Description of Artificial Sequence: Synthetic oligonucleotide
uaaaccaagggcaagaccc

SEQ ID NO: 546473 - RNA, 19 nt, Artificial Sequence
  Description of Artificial Sequence: Synthetic oligonucleotide
aaugaguaaacugauaaag

SEQ ID NO: 546474 - RNA, 19 nt, Artificial Sequence
  Description of Artificial Sequence: Synthetic oligonucleotide
gaaccaauggcucaaaggg

SEQ ID NO: 546475 - RNA, 19 nt, Artificial Sequence
  Description of Artificial Sequence: Synthetic oligonucleotide
aacguauuuugacaguggc

SEQ ID NO: 546476 - RNA, 19 nt, Artificial Sequence
  Description of Artificial Sequence: Synthetic oligonucleotide
aaaacugacccuuuaggag

SEQ ID NO: 546477 - RNA, 19 nt, Artificial Sequence
  Description of Artificial Sequence: Synthetic oligonucleotide
uguuguguaacaaaacuga

SEQ ID NO: 546478 - RNA, 19 nt, Artificial Sequence
  Description of Artificial Sequence: Synthetic oligonucleotide
aaguaacguauuuugacag

SEQ ID NO: 546479 - RNA, 19 nt, Artificial Sequence
  Description of Artificial Sequence: Synthetic oligonucleotide
uuaagaguaaacgagauua

SEQ ID NO: 546480 - RNA, 19 nt, Artificial Sequence
  Description of Artificial Sequence: Synthetic oligonucleotide
uguguauacaugauguccc

SEQ ID NO: 546481 - RNA, 19 nt, Artificial Sequence
  Description of Artificial Sequence: Synthetic oligonucleotide
uacacguauaauacaacgg

SEQ ID NO: 546482 - RNA, 19 nt, Artificial Sequence
  Description of Artificial Sequence: Synthetic oligonucleotide
uucguuagaaaucuuucag

SEQ ID NO: 546483 - RNA, 19 nt, Artificial Sequence
  Description of Artificial Sequence: Synthetic oligonucleotide
uaauugaugaaaaugucau

SEQ ID NO: 546484 - RNA, 19 nt, Artificial Sequence
  Description of Artificial Sequence: Synthetic oligonucleotide
uguguuguguaacaaaacu

SEQ ID NO: 546485 - RNA, 19 nt, Artificial Sequence
  Description of Artificial Sequence: Synthetic oligonucleotide
aaaguauuuacaugugagu

SEQ ID NO: 546486 - RNA, 19 nt, Artificial Sequence
  Description of Artificial Sequence: Synthetic oligonucleotide
aguaaacgagauuauuugg

SEQ ID NO: 546487 - RNA, 19 nt, Artificial Sequence
  Description of Artificial Sequence: Synthetic oligonucleotide
ugucauuugagaaucuuga

SEQ ID NO: 546488 - RNA, 19 nt, Artificial Sequence
  Description of Artificial Sequence: Synthetic oligonucleotide
acaaaacugacccuuuagg

SEQ ID NO: 546489 - RNA, 19 nt, Artificial Sequence
  Description of Artificial Sequence: Synthetic oligonucleotide
uggaauaaaugcaaguaac

SEQ ID NO: 546490 - RNA, 19 nt, Artificial Sequence
  Description of Artificial Sequence: Synthetic oligonucleotide
gaguaaacgagauuauuug

SEQ ID NO: 546491 - RNA, 19 nt, Artificial Sequence
  Description of Artificial Sequence: Synthetic oligonucleotide
uucucauguaaauaaacac

SEQ ID NO: 546492 - RNA, 19 nt, Artificial Sequence
  Description of Artificial Sequence: Synthetic oligonucleotide
aacgagauuauuuggaaua

SEQ ID NO: 546493 - RNA, 19 nt, Artificial Sequence
  Description of Artificial Sequence: Synthetic oligonucleotide
uugacuuaacacaaacgcc

SEQ ID NO: 546494 - RNA, 19 nt, Artificial Sequence
  Description of Artificial Sequence: Synthetic oligonucleotide
ucguuagaaaucuuucagg

SEQ ID NO: 546495 - RNA, 19 nt, Artificial Sequence
  Description of Artificial Sequence: Synthetic oligonucleotide
gauaaaggguuuaacauac

SEQ ID NO: 546496 - RNA, 19 nt, Artificial Sequence
  Description of Artificial Sequence: Synthetic oligonucleotide
ucuccuacuaggcaacagg

SEQ ID NO: 546497 - RNA, 19 nt, Artificial Sequence
  Description of Artificial Sequence: Synthetic oligonucleotide
uguucaaccaagcaccaga

SEQ ID NO: 546498 - RNA, 19 nt, Artificial Sequence
  Description of Artificial Sequence: Synthetic oligonucleotide
uugaguagcagaguaagcc

SEQ ID NO: 546499 - RNA, 19 nt, Artificial Sequence
  Description of Artificial Sequence: Synthetic oligonucleotide
aaacgcuguguauacauga

SEQ ID NO: 546500 - RNA, 19 nt, Artificial Sequence
  Description of Artificial Sequence: Synthetic oligonucleotide
acaguuaagaguaaacgag

SEQ ID NO: 546501 - RNA, 19 nt, Artificial Sequence
  Description of Artificial Sequence: Synthetic oligonucleotide
uuggaauaaaugcaaguaa

SEQ ID NO: 546502 - RNA, 19 nt, Artificial Sequence
  Description of Artificial Sequence: Synthetic oligonucleotide
gauuucuaagcacucgagc

SEQ ID NO: 546503 - RNA, 19 nt, Artificial Sequence
  Description of Artificial Sequence: Synthetic oligonucleotide
agugcuagaccuaaggagg

SEQ ID NO: 546504 - RNA, 19 nt, Artificial Sequence
  Description of Artificial Sequence: Synthetic oligonucleotide
acaauuggaggaugggugg

SEQ ID NO: 546505 - RNA, 19 nt, Artificial Sequence
  Description of Artificial Sequence: Synthetic oligonucleotide
acacguauaauacaacggu

SEQ ID NO: 546506 - RNA, 19 nt, Artificial Sequence
  Description of Artificial Sequence: Synthetic oligonucleotide
gcuaagacgauauuuuggg

SEQ ID NO: 546507 - RNA, 19 nt, Artificial Sequence
  Description of Artificial Sequence: Synthetic oligonucleotide
uccaacuaaaucauuuagu

SEQ ID NO: 546508 - RNA, 19 nt, Artificial Sequence
  Description of Artificial Sequence: Synthetic oligonucleotide
ggguuuaacauacagggag

SEQ ID NO: 546509 - RNA, 19 nt, Artificial Sequence
  Description of Artificial Sequence: Synthetic oligonucleotide
gagaaucuugacuuaacac

SEQ ID NO: 546510 - RNA, 19 nt, Artificial Sequence
  Description of Artificial Sequence: Synthetic oligonucleotide
ucuugaguagcagaguaag

SEQ ID NO: 546511 - RNA, 19 nt, Artificial Sequence
  Description of Artificial Sequence: Synthetic oligonucleotide
auuagcagcagcguaggac

SEQ ID NO: 546512 - RNA, 19 nt, Artificial Sequence
  Description of Artificial Sequence: Synthetic oligonucleotide
uuagcagcagcguaggacu

SEQ ID NO: 546513 - RNA, 19 nt, Artificial Sequence
  Description of Artificial Sequence: Synthetic oligonucleotide
uaacguauuuugacagugg

SEQ ID NO: 546514 - RNA, 19 nt, Artificial Sequence
  Description of Artificial Sequence: Synthetic oligonucleotide
aucguauugucauuagcag

SEQ ID NO: 546515 - RNA, 19 nt, Artificial Sequence
  Description of Artificial Sequence: Synthetic oligonucleotide
uaagccaucguauugucau

SEQ ID NO: 546516 - RNA, 19 nt, Artificial Sequence
  Description of Artificial Sequence: Synthetic oligonucleotide
uuuggaauaaaugcaagua

SEQ ID NO: 546517 - RNA, 19 nt, Artificial Sequence
  Description of Artificial Sequence: Synthetic oligonucleotide
aauaacucaugagaugaca

SEQ ID NO: 546518 - RNA, 19 nt, Artificial Sequence
  Description of Artificial Sequence: Synthetic oligonucleotide
augcaaguaacguauuuug

SEQ ID NO: 546519 - RNA, 19 nt, Artificial Sequence
  Description of Artificial Sequence: Synthetic oligonucleotide
aagacaaccagcagguaag

SEQ ID NO: 546520 - RNA, 19 nt, Artificial Sequence
  Description of Artificial Sequence: Synthetic oligonucleotide
aacugauaaaggguuuaac

SEQ ID NO: 546521 - RNA, 19 nt, Artificial Sequence
  Description of Artificial Sequence: Synthetic oligonucleotide
ugauaaaggguuuaacaua

SEQ ID NO: 546522 - RNA, 19 nt, Artificial Sequence
  Description of Artificial Sequence: Synthetic oligonucleotide
uaacucaugagaugacaag

SEQ ID NO: 546523 - RNA, 19 nt, Artificial Sequence
  Description of Artificial Sequence: Synthetic oligonucleotide
ucauaaugcccauggguag

SEQ ID NO: 546524 - RNA, 19 nt, Artificial Sequence
  Description of Artificial Sequence: Synthetic oligonucleotide
ucaugagaugacaagcccu

SEQ ID NO: 546525 - RNA, 19 nt, Artificial Sequence
  Description of Artificial Sequence: Synthetic oligonucleotide
gagucaacagccaacauga

SEQ ID NO: 546526 - RNA, 19 nt, Artificial Sequence
  Description of Artificial Sequence: Synthetic oligonucleotide
cacaauuggaggaugggug

SEQ ID NO: 546527 - RNA, 19 nt, Artificial Sequence
  Description of Artificial Sequence: Synthetic oligonucleotide
agacccacgucauucuggc

SEQ ID NO: 546528 - RNA, 19 nt, Artificial Sequence
  Description of Artificial Sequence: Synthetic oligonucleotide
ucguauugucauuagcagc

SEQ ID NO: 546529 - RNA, 19 nt, Artificial Sequence
  Description of Artificial Sequence: Synthetic oligonucleotide
ucaaucgcuaagacgauau

SEQ ID NO: 546530 - RNA, 19 nt, Artificial Sequence
  Description of Artificial Sequence: Synthetic oligonucleotide
uaaacgagauuauuuggaa

SEQ ID NO: 546531 - RNA, 19 nt, Artificial Sequence
  Description of Artificial Sequence: Synthetic oligonucleotide
caucguauugucauuagca

SEQ ID NO: 546532 - RNA, 19 nt, Artificial Sequence
  Description of Artificial Sequence: Synthetic oligonucleotide
ugaguagcagaguaagcca

SEQ ID NO: 546533 - RNA, 19 nt, Artificial Sequence
  Description of Artificial Sequence: Synthetic oligonucleotide
uauacacguauaauacaac

SEQ ID NO: 546534 - RNA, 19 nt, Artificial Sequence
  Description of Artificial Sequence: Synthetic oligonucleotide
agcacucgagcacuuaggg

SEQ ID NO: 546535 - RNA, 19 nt, Artificial Sequence
  Description of Artificial Sequence: Synthetic oligonucleotide
aaacgagauuauuuggaau

SEQ ID NO: 546536 - RNA, 19 nt, Artificial Sequence
  Description of Artificial Sequence: Synthetic oligonucleotide
uuugcuguacaagaugcug

SEQ ID NO: 546537 - RNA, 19 nt, Artificial Sequence
  Description of Artificial Sequence: Synthetic oligonucleotide
ggaggaauaacucaugaga

SEQ ID NO: 546538 - RNA, 19 nt, Artificial Sequence
  Description of Artificial Sequence: Synthetic oligonucleotide
ugcaaguaacguauuuuga

SEQ ID NO: 546539 - RNA, 19 nt, Artificial Sequence
  Description of Artificial Sequence: Synthetic oligonucleotide
agaggggauuucuaagcac

SEQ ID NO: 546540 - RNA, 19 nt, Artificial Sequence
  Description of Artificial Sequence: Synthetic oligonucleotide
cuccuacuaggcaacaggg

SEQ ID NO: 546541 - RNA, 19 nt, Artificial Sequence
  Description of Artificial Sequence: Synthetic oligonucleotide
cuaguucuguaugaaaagc

SEQ ID NO: 546542 - RNA, 19 nt, Artificial Sequence
  Description of Artificial Sequence: Synthetic oligonucleotide
gguuugaagccacauaccc

SEQ ID NO: 546543 - RNA, 19 nt, Artificial Sequence
  Description of Artificial Sequence: Synthetic oligonucleotide
ucaccauauacacguauaa

SEQ ID NO: 546544 - RNA, 19 nt, Artificial Sequence
  Description of Artificial Sequence: Synthetic oligonucleotide
aaaugcaaguaacguauuu

SEQ ID NO: 546545 - RNA, 19 nt, Artificial Sequence
  Description of Artificial Sequence: Synthetic oligonucleotide
accuuauacaauuugcaua

SEQ ID NO: 546546 - RNA, 19 nt, Artificial Sequence
  Description of Artificial Sequence: Synthetic oligonucleotide
uuaggagacaaggucauaa

SEQ ID NO: 546547 - RNA, 19 nt, Artificial Sequence
  Description of Artificial Sequence: Synthetic oligonucleotide
aaaagcaggguguccgagu

SEQ ID NO: 546548 - RNA, 19 nt, Artificial Sequence
  Description of Artificial Sequence: Synthetic oligonucleotide
aguucuguaugaaaagcag

SEQ ID NO: 546549 - RNA, 19 nt, Artificial Sequence
  Description of Artificial Sequence: Synthetic oligonucleotide
auauacacguauaauacaa

SEQ ID NO: 546550 - RNA, 19 nt, Artificial Sequence
  Description of Artificial Sequence: Synthetic oligonucleotide
uguuaggacuagagcagag

SEQ ID NO: 546551 - RNA, 19 nt, Artificial Sequence
  Description of Artificial Sequence: Synthetic oligonucleotide
cacaagacgcuucuguccc

SEQ ID NO: 546552 - RNA, 19 nt, Artificial Sequence
  Description of Artificial Sequence: Synthetic oligonucleotide
ggauacuccaaguaggaac

SEQ ID NO: 546553 - RNA, 19 nt, Artificial Sequence
  Description of Artificial Sequence: Synthetic oligonucleotide
ggagacaaggucauaaugc

SEQ ID NO: 546554 - RNA, 19 nt, Artificial Sequence
  Description of Artificial Sequence: Synthetic oligonucleotide
guaacguauuuugacagug

SEQ ID NO: 546555 - RNA, 19 nt, Artificial Sequence
  Description of Artificial Sequence: Synthetic oligonucleotide
caaguaacguauuuugaca

SEQ ID NO: 546556 - RNA, 19 nt, Artificial Sequence
  Description of Artificial Sequence: Synthetic oligonucleotide
aaucgcuaagacgauauuu

SEQ ID NO: 546557 - RNA, 19 nt, Artificial Sequence
  Description of Artificial Sequence: Synthetic oligonucleotide
cacguauaauacaacggug

SEQ ID NO: 546558 - RNA, 19 nt, Artificial Sequence
  Description of Artificial Sequence: Synthetic oligonucleotide
aacggggccagugcuagac

SEQ ID NO: 546559 - RNA, 19 nt, Artificial Sequence
  Description of Artificial Sequence: Synthetic oligonucleotide
ucaaaggggcccaaucacu

SEQ ID NO: 546560 - RNA, 19 nt, Artificial Sequence
  Description of Artificial Sequence: Synthetic oligonucleotide
ugcccuguuaggacuagag

SEQ ID NO: 546561 - RNA, 19 nt, Artificial Sequence
  Description of Artificial Sequence: Synthetic oligonucleotide
cucaugagaugacaagccc

SEQ ID NO: 546562 - RNA, 19 nt, Artificial Sequence
  Description of Artificial Sequence: Synthetic oligonucleotide
ugugaucuucucauguaaa

SEQ ID NO: 546563 - RNA, 19 nt, Artificial Sequence
  Description of Artificial Sequence: Synthetic oligonucleotide
ggaaucaccauauacacgu

SEQ ID NO: 546564 - RNA, 19 nt, Artificial Sequence
  Description of Artificial Sequence: Synthetic oligonucleotide
aggauagaaauaaugagua

SEQ ID NO: 546565 - RNA, 19 nt, Artificial Sequence
  Description of Artificial Sequence: Synthetic oligonucleotide
ggaauaacucaugagauga

SEQ ID NO: 546566 - RNA, 19 nt, Artificial Sequence
  Description of Artificial Sequence: Synthetic oligonucleotide
uugagaaucuugacuuaac

SEQ ID NO: 546567 - RNA, 19 nt, Artificial Sequence
  Description of Artificial Sequence: Synthetic oligonucleotide
guaaacgagauuauuugga

SEQ ID NO: 546568 - RNA, 19 nt, Artificial Sequence
  Description of Artificial Sequence: Synthetic oligonucleotide
aaagcaggguguccgaguu

SEQ ID NO: 546569 - RNA, 19 nt, Artificial Sequence
  Description of Artificial Sequence: Synthetic oligonucleotide
uuagcaguccccaguugca

SEQ ID NO: 546570 - RNA, 19 nt, Artificial Sequence
  Description of Artificial Sequence: Synthetic oligonucleotide
cuauggagaugggaaaucc

SEQ ID NO: 546571 - RNA, 19 nt, Artificial Sequence
  Description of Artificial Sequence: Synthetic oligonucleotide
gcaaguaacguauuuugac

SEQ ID NO: 546572 - RNA, 19 nt, Artificial Sequence
  Description of Artificial Sequence: Synthetic oligonucleotide
uguccccucuggcagauga

SEQ ID NO: 546573 - RNA, 19 nt, Artificial Sequence
  Description of Artificial Sequence: Synthetic oligonucleotide
guuaggacuagagcagagg

SEQ ID NO: 546574 - RNA, 19 nt, Artificial Sequence
  Description of Artificial Sequence: Synthetic oligonucleotide
ucgcuaagacgauauuuug

SEQ ID NO: 546575 - RNA, 19 nt, Artificial Sequence
  Description of Artificial Sequence: Synthetic oligonucleotide
uucccuucguuagaaaucu

SEQ ID NO: 546576 - RNA, 19 nt, Artificial Sequence
  Description of Artificial Sequence: Synthetic oligonucleotide
aguaacguauuuugacagu

SEQ ID NO: 546577 - RNA, 19 nt, Artificial Sequence
  Description of Artificial Sequence: Synthetic oligonucleotide
acguauaauacaacggugu

SEQ ID NO: 546578 - RNA, 19 nt, Artificial Sequence
  Description of Artificial Sequence: Synthetic oligonucleotide
ugaugucccuuuugcauug

SEQ ID NO: 546579 - RNA, 19 nt, Artificial Sequence
  Description of Artificial Sequence: Synthetic oligonucleotide
uucaggcauuuauuaaaca

SEQ ID NO: 546580 - RNA, 19 nt, Artificial Sequence
  Description of Artificial Sequence: Synthetic oligonucleotide
ggaggauacuccaaguagg

SEQ ID NO: 546581 - RNA, 19 nt, Artificial Sequence
  Description of Artificial Sequence: Synthetic oligonucleotide
uugucuacugggaaaucau

SEQ ID NO: 546582 - RNA, 19 nt, Artificial Sequence
  Description of Artificial Sequence: Synthetic oligonucleotide
auacccgccgcccucugcg

SEQ ID NO: 546583 - RNA, 19 nt, Artificial Sequence
  Description of Artificial Sequence: Synthetic oligonucleotide
agcagaguaagccaucgua

SEQ ID NO: 546584 - RNA, 19 nt, Artificial Sequence
  Description of Artificial Sequence: Synthetic oligonucleotide
uguaccugcacaagccauc

SEQ ID NO: 546585 - RNA, 19 nt, Artificial Sequence
  Description of Artificial Sequence: Synthetic oligonucleotide
cucaaaggggcccaaucac

SEQ ID NO: 546586 - RNA, 19 nt, Artificial Sequence
  Description of Artificial Sequence: Synthetic oligonucleotide
accgauggugaccagggcu

SEQ ID NO: 546587 - RNA, 19 nt, Artificial Sequence
  Description of Artificial Sequence: Synthetic oligonucleotide
aaaacgcuguguauacaug

SEQ ID NO: 546588 - RNA, 19 nt, Artificial Sequence
  Description of Artificial Sequence: Synthetic oligonucleotide
aaugucauuugagaaucuu

SEQ ID NO: 546589 - RNA, 19 nt, Artificial Sequence
  Description of Artificial Sequence: Synthetic oligonucleotide
auacagggagagucaacag

SEQ ID NO: 546590 - RNA, 19 nt, Artificial Sequence
  Description of Artificial Sequence: Synthetic oligonucleotide
cuucguuagaaaucuuuca

SEQ ID NO: 546591 - RNA, 19 nt, Artificial Sequence
  Description of Artificial Sequence: Synthetic oligonucleotide
ugacaagcccuucccagac

SEQ ID NO: 546592 - RNA, 19 nt, Artificial Sequence
  Description of Artificial Sequence: Synthetic oligonucleotide
gguuugcuguacaagaugc

SEQ ID NO: 546593 - RNA, 19 nt, Artificial Sequence
  Description of Artificial Sequence: Synthetic oligonucleotide
gacuuaacacaaacgcccc

SEQ ID NO: 546594 - RNA, 19 nt, Artificial Sequence
  Description of Artificial Sequence: Synthetic oligonucleotide
gcauaagaaaccuuauaca

SEQ ID NO: 546595 - RNA, 19 nt, Artificial Sequence
  Description of Artificial Sequence: Synthetic oligonucleotide
uccuacuaggcaacaggga

SEQ ID NO: 546596 - RNA, 19 nt, Artificial Sequence
  Description of Artificial Sequence: Synthetic oligonucleotide
accuaaggaggucaggaaa

SEQ ID NO: 546597 - RNA, 19 nt, Artificial Sequence
  Description of Artificial Sequence: Synthetic oligonucleotide
aagcacucgagcacuuagg

SEQ ID NO: 546598 - RNA, 19 nt, Artificial Sequence
  Description of Artificial Sequence: Synthetic oligonucleotide
uucuaagcacucgagcacu

SEQ ID NO: 546599 - RNA, 19 nt, Artificial Sequence
  Description of Artificial Sequence: Synthetic oligonucleotide
cauacagggagagucaaca

SEQ ID NO: 546600 - RNA, 19 nt, Artificial Sequence
  Description of Artificial Sequence: Synthetic oligonucleotide
gauacuccaaguaggaacu

SEQ ID NO: 546601 - RNA, 19 nt, Artificial Sequence
  Description of Artificial Sequence: Synthetic oligonucleotide
acguucucaggccguggcc

SEQ ID NO: 546602 - RNA, 19 nt, Artificial Sequence
  Description of Artificial Sequence: Synthetic oligonucleotide
cuuccuaauggggagccag

SEQ ID NO: 546603 - RNA, 19 nt, Artificial Sequence
  Description of Artificial Sequence: Synthetic oligonucleotide
cugauaaaggguuuaacau

SEQ ID NO: 546604 - RNA, 19 nt, Artificial Sequence
  Description of Artificial Sequence: Synthetic oligonucleotide
uccucccuuucucugaaaa

SEQ ID NO: 546605 - RNA, 19 nt, Artificial Sequence
  Description of Artificial Sequence: Synthetic oligonucleotide
cucuguugcagacagcgca

SEQ ID NO: 546606 - RNA, 19 nt, Artificial Sequence
  Description of Artificial Sequence: Synthetic oligonucleotide
ucccuuguucaaccaagca

SEQ ID NO: 546607 - RNA, 19 nt, Artificial Sequence
  Description of Artificial Sequence: Synthetic oligonucleotide
cucugcgcacgcauggagg

SEQ ID NO: 546608 - RNA, 19 nt, Artificial Sequence
  Description of Artificial Sequence: Synthetic oligonucleotide
aggaaucaccauauacacg

SEQ ID NO: 546609 - RNA, 19 nt, Artificial Sequence
  Description of Artificial Sequence: Synthetic oligonucleotide
ggcagauucaaucgcuaag

SEQ ID NO: 546610 - RNA, 19 nt, Artificial Sequence
  Description of Artificial Sequence: Synthetic oligonucleotide
auaacggggccagugcuag

SEQ ID NO: 546611 - RNA, 19 nt, Artificial Sequence
  Description of Artificial Sequence: Synthetic oligonucleotide
cagauucaaucgcuaagac

SEQ ID NO: 546612 - RNA, 19 nt, Artificial Sequence
  Description of Artificial Sequence: Synthetic oligonucleotide
aguuaagaguaaacgagau

SEQ ID NO: 546613 - RNA, 19 nt, Artificial Sequence
  Description of Artificial Sequence: Synthetic oligonucleotide
caggguuugcuguacaaga

SEQ ID NO: 546614 - RNA, 19 nt, Artificial Sequence
  Description of Artificial Sequence: Synthetic oligonucleotide
gaguaaacugauaaagggu

SEQ ID NO: 546615 - RNA, 19 nt, Artificial Sequence
  Description of Artificial Sequence: Synthetic oligonucleotide
guaggucuagcuauggaga

SEQ ID NO: 546616 - RNA, 19 nt, Artificial Sequence
  Description of Artificial Sequence: Synthetic oligonucleotide
ugcauacaaguuucauaac

SEQ ID NO: 546617 - RNA, 19 nt, Artificial Sequence
  Description of Artificial Sequence: Synthetic oligonucleotide
gucauaaugcccaugggua

SEQ ID NO: 546618 - RNA, 19 nt, Artificial Sequence
  Description of Artificial Sequence: Synthetic oligonucleotide
uaggucuagcuauggagau

SEQ ID NO: 546619 - RNA, 19 nt, Artificial Sequence
  Description of Artificial Sequence: Synthetic oligonucleotide
aaugaguguuauugcuguu

SEQ ID NO: 546620 - RNA, 19 nt, Artificial Sequence
  Description of Artificial Sequence: Synthetic oligonucleotide
ccuguuaggacuagagcag

SEQ ID NO: 546621 - RNA, 19 nt, Artificial Sequence
  Description of Artificial Sequence: Synthetic oligonucleotide
uccaugcauacaaguuuca

SEQ ID NO: 546622 - RNA, 19 nt, Artificial Sequence
  Description of Artificial Sequence: Synthetic oligonucleotide
uaaaugcaaguaacguauu

SEQ ID NO: 546623 - RNA, 19 nt, Artificial Sequence
  Description of Artificial Sequence: Synthetic oligonucleotide
ucucuguugcagacagcgc

SEQ ID NO: 546624 - RNA, 19 nt, Artificial Sequence
  Description of Artificial Sequence: Synthetic oligonucleotide
agaugacaagcccuuccca

SEQ ID NO: 546625 - RNA, 19 nt, Artificial Sequence
  Description of Artificial Sequence: Synthetic oligonucleotide
uagcuauggagaugggaaa

SEQ ID NO: 546626 - RNA, 19 nt, Artificial Sequence
  Description of Artificial Sequence: Synthetic oligonucleotide
cucggcaccgaaugucagg

SEQ ID NO: 546627 - RNA, 19 nt, Artificial Sequence
  Description of Artificial Sequence: Synthetic oligonucleotide
ugucuacugggaaaucauu

SEQ ID NO: 546628 - RNA, 19 nt, Artificial Sequence
  Description of Artificial Sequence: Synthetic oligonucleotide
guggccucuugucuacugg

SEQ ID NO: 546629 - RNA, 19 nt, Artificial Sequence
  Description of Artificial Sequence: Synthetic oligonucleotide
aucgcuaagacgauauuuu

SEQ ID NO: 546630 - RNA, 19 nt, Artificial Sequence
  Description of Artificial Sequence: Synthetic oligonucleotide
ugcgcacgcauggaggucc

SEQ ID NO: 546631 - RNA, 19 nt, Artificial Sequence
  Description of Artificial Sequence: Synthetic oligonucleotide
uccuaauggggagccaggc

SEQ ID NO: 546632 - RNA, 19 nt, Artificial Sequence
  Description of Artificial Sequence: Synthetic oligonucleotide
cuacuaggcaacagggaca

SEQ ID NO: 546633 - RNA, 19 nt, Artificial Sequence
  Description of Artificial Sequence: Synthetic oligonucleotide
uagaccuaaggaggucagg

SEQ ID NO: 546634 - RNA, 19 nt, Artificial Sequence
  Description of Artificial Sequence: Synthetic oligonucleotide
ccaaguaggaacugggguc

SEQ ID NO: 546635 - RNA, 19 nt, Artificial Sequence
  Description of Artificial Sequence: Synthetic oligonucleotide
accaagggcaagacccugc

SEQ ID NO: 546636 - RNA, 19 nt, Artificial Sequence
  Description of Artificial Sequence: Synthetic oligonucleotide
gaggaauaacucaugagau

SEQ ID NO: 546637 - RNA, 19 nt, Artificial Sequence
  Description of Artificial Sequence: Synthetic oligonucleotide
gaggauacuccaaguagga

SEQ ID NO: 546638 - RNA, 19 nt, Artificial Sequence
  Description of Artificial Sequence: Synthetic oligonucleotide
gucguuuguaccugcacaa

SEQ ID NO: 546639 - RNA, 19 nt, Artificial Sequence
  Description of Artificial Sequence: Synthetic oligonucleotide
uccgaguuagcugcucacc

SEQ ID NO: 546640 - RNA, 19 nt, Artificial Sequence
  Description of Artificial Sequence: Synthetic oligonucleotide
uggguaggucuagcuaugg

SEQ ID NO: 546641 - RNA, 19 nt, Artificial Sequence
  Description of Artificial Sequence: Synthetic oligonucleotide
aaaccaagggcaagacccu

SEQ ID NO: 546642 - RNA, 19 nt, Artificial Sequence
  Description of Artificial Sequence: Synthetic oligonucleotide
ucguuuguaccugcacaag

SEQ ID NO: 546643 - RNA, 19 nt, Artificial Sequence
  Description of Artificial Sequence: Synthetic oligonucleotide
gacgcuucuguccccucug

SEQ ID NO: 546644 - RNA, 19 nt, Artificial Sequence
  Description of Artificial Sequence: Synthetic oligonucleotide
aagacgcuucuguccccuc

SEQ ID NO: 546645 - RNA, 19 nt, Artificial Sequence
  Description of Artificial Sequence: Synthetic oligonucleotide
uggcagauucaaucgcuaa

SEQ ID NO: 546646 - RNA, 19 nt, Artificial Sequence
  Description of Artificial Sequence: Synthetic oligonucleotide
uugaggucguuuguaccug

SEQ ID NO: 546647 - RNA, 19 nt, Artificial Sequence
  Description of Artificial Sequence: Synthetic oligonucleotide
aagcuuugcuccaacuaaa

SEQ ID NO: 546648 - RNA, 19 nt, Artificial Sequence
  Description of Artificial Sequence: Synthetic oligonucleotide
cagccuuccuaauggggag

SEQ ID NO: 546649 - RNA, 19 nt, Artificial Sequence
  Description of Artificial Sequence: Synthetic oligonucleotide
ucccauaacggggccagug

SEQ ID NO: 546650 - RNA, 19 nt, Artificial Sequence
  Description of Artificial Sequence: Synthetic oligonucleotide
guaugaaaagcaggguguc

SEQ ID NO: 546651 - RNA, 19 nt, Artificial Sequence
  Description of Artificial Sequence: Synthetic oligonucleotide
uuguucaaccaagcaccag

SEQ ID NO: 546652 - RNA, 19 nt, Artificial Sequence
  Description of Artificial Sequence: Synthetic oligonucleotide
ccuucguuagaaaucuuuc

SEQ ID NO: 546653 - RNA, 19 nt, Artificial Sequence
  Description of Artificial Sequence: Synthetic oligonucleotide
ggguuugcuguacaagaug

SEQ ID NO: 546654 - RNA, 19 nt, Artificial Sequence
  Description of Artificial Sequence: Synthetic oligonucleotide
cacguucucaggccguggc

SEQ ID NO: 546655 - RNA, 19 nt, Artificial Sequence
  Description of Artificial Sequence: Synthetic oligonucleotide
agccuuccuaauggggagc

SEQ ID NO: 546656 - RNA, 19 nt, Artificial Sequence
  Description of Artificial Sequence: Synthetic oligonucleotide
cccucagcaggucagcucg

SEQ ID NO: 546657 - RNA, 19 nt, Artificial Sequence
  Description of Artificial Sequence: Synthetic oligonucleotide
ucgccacccacguucucag

SEQ ID NO: 546658 - RNA, 19 nt, Artificial Sequence
  Description of Artificial Sequence: Synthetic oligonucleotide
cuuguucaaccaagcacca

SEQ ID NO: 546659 - RNA, 19 nt, Artificial Sequence
  Description of Artificial Sequence: Synthetic oligonucleotide
cgcuaagacgauauuuugg

SEQ ID NO: 546660 - RNA, 19 nt, Artificial Sequence
  Description of Artificial Sequence: Synthetic oligonucleotide
acgagauuauuuggaauaa

SEQ ID NO: 546661 - RNA, 19 nt, Artificial Sequence
  Description of Artificial Sequence: Synthetic oligonucleotide
ggucguuuguaccugcaca

SEQ ID NO: 546662 - RNA, 19 nt, Artificial Sequence
  Description of Artificial Sequence: Synthetic oligonucleotide
acggggccagugcuagacc

SEQ ID NO: 546663 - RNA, 19 nt, Artificial Sequence
  Description of Artificial Sequence: Synthetic oligonucleotide
gacaagcccuucccagacc

SEQ ID NO: 546664 - RNA, 19 nt, Artificial Sequence
  Description of Artificial Sequence: Synthetic oligonucleotide
ggauuucuaagcacucgag

SEQ ID NO: 546665 - RNA, 19 nt, Artificial Sequence
  Description of Artificial Sequence: Synthetic oligonucleotide
cauggguaggucuagcuau

SEQ ID NO: 546666 - RNA, 19 nt, Artificial Sequence
  Description of Artificial Sequence: Synthetic oligonucleotide
ggucauaaugcccaugggu

SEQ ID NO: 546667 - RNA, 19 nt, Artificial Sequence
  Description of Artificial Sequence: Synthetic oligonucleotide
cacucgagcacuuaggguu

SEQ ID NO: 546668 - RNA, 19 nt, Artificial Sequence
  Description of Artificial Sequence: Synthetic oligonucleotide
acguauuuugacaguggca

SEQ ID NO: 546669 - RNA, 19 nt, Artificial Sequence
  Description of Artificial Sequence: Synthetic oligonucleotide
gcagauucaaucgcuaaga

SEQ ID NO: 546670 - RNA, 19 nt, Artificial Sequence
  Description of Artificial Sequence: Synthetic oligonucleotide
uagcagaguaagccaucgu

SEQ ID NO: 546671 - RNA, 19 nt, Artificial Sequence
  Description of Artificial Sequence: Synthetic oligonucleotide
agcuauggagaugggaaau

SEQ ID NO: 546672 - RNA, 19 nt, Artificial Sequence
  Description of Artificial Sequence: Synthetic oligonucleotide
agcaccagaggggauuucu

SEQ ID NO: 546673 - RNA, 19 nt, Artificial Sequence
  Description of Artificial Sequence: Synthetic oligonucleotide
auaaugcccauggguaggu

SEQ ID NO: 546674 - RNA, 19 nt, Artificial Sequence
  Description of Artificial Sequence: Synthetic oligonucleotide
ucuaagcacucgagcacuu

SEQ ID NO: 546675 - RNA, 19 nt, Artificial Sequence
  Description of Artificial Sequence: Synthetic oligonucleotide
uucaaucgcuaagacgaua

SEQ ID NO: 546676 - RNA, 19 nt, Artificial Sequence
  Description of Artificial Sequence: Synthetic oligonucleotide
aagccaucguauugucauu

SEQ ID NO: 546677 - RNA, 19 nt, Artificial Sequence
  Description of Artificial Sequence: Synthetic oligonucleotide
caauuugcauaaacaguua

SEQ ID NO: 546678 - RNA, 19 nt, Artificial Sequence
  Description of Artificial Sequence: Synthetic oligonucleotide
caguaaaccaagggcaaga

SEQ ID NO: 546679 - RNA, 19 nt, Artificial Sequence
  Description of Artificial Sequence: Synthetic oligonucleotide
ggauagaaauaaugaguaa

SEQ ID NO: 546680 - RNA, 19 nt, Artificial Sequence
  Description of Artificial Sequence: Synthetic oligonucleotide
cguauaauacaacggugug

SEQ ID NO: 546681 - RNA, 19 nt, Artificial Sequence
  Description of Artificial Sequence: Synthetic oligonucleotide
gcucaaaggggcccaauca

SEQ ID NO: 546682 - RNA, 19 nt, Artificial Sequence
  Description of Artificial Sequence: Synthetic oligonucleotide
aggguuuaacauacaggga

SEQ ID NO: 546683 - RNA, 19 nt, Artificial Sequence
  Description of Artificial Sequence: Synthetic oligonucleotide
guuaagaguaaacgagauu

SEQ ID NO: 546684 - RNA, 19 nt, Artificial Sequence
  Description of Artificial Sequence: Synthetic oligonucleotide
agcguaggacuggagggug

SEQ ID NO: 546685 - RNA, 19 nt, Artificial Sequence
  Description of Artificial Sequence: Synthetic oligonucleotide
auaaaggguuuaacauaca

SEQ ID NO: 546686 - RNA, 19 nt, Artificial Sequence
  Description of Artificial Sequence: Synthetic oligonucleotide
gccaacaugauggaaaccu

SEQ ID NO: 546687 - RNA, 19 nt, Artificial Sequence
  Description of Artificial Sequence: Synthetic oligonucleotide
augucccuuuugcauugca

SEQ ID NO: 546688 - RNA, 19 nt, Artificial Sequence
  Description of Artificial Sequence: Synthetic oligonucleotide
aggucuagcuauggagaug

SEQ ID NO: 546689 - RNA, 19 nt, Artificial Sequence
  Description of Artificial Sequence: Synthetic oligonucleotide
gguccugcagcaagcaagc

SEQ ID NO: 546690 - RNA, 19 nt, Artificial Sequence
  Description of Artificial Sequence: Synthetic oligonucleotide
gaccucggcaccgaauguc

SEQ ID NO: 546691 - RNA, 19 nt, Artificial Sequence
  Description of Artificial Sequence: Synthetic oligonucleotide
uaugaagguugaggugggu

SEQ ID NO: 546692 - RNA, 19 nt, Artificial Sequence
  Description of Artificial Sequence: Synthetic oligonucleotide
ccaacuaaaucauuuaguu

SEQ ID NO: 546693 - RNA, 19 nt, Artificial Sequence
  Description of Artificial Sequence: Synthetic oligonucleotide
guccgaguuagcugcucac

SEQ ID NO: 546694 - RNA, 19 nt, Artificial Sequence
  Description of Artificial Sequence: Synthetic oligonucleotide
ccccucaguaaaccaaggg

SEQ ID NO: 546695 - RNA, 19 nt, Artificial Sequence
  Description of Artificial Sequence: Synthetic oligonucleotide
guaagccaucguauuguca

SEQ ID NO: 546696 - RNA, 19 nt, Artificial Sequence
  Description of Artificial Sequence: Synthetic oligonucleotide
gaugucccuuuugcauugc

SEQ ID NO: 546697 - RNA, 19 nt, Artificial Sequence
  Description of Artificial Sequence: Synthetic oligonucleotide
caaggucauaaugcccaug

SEQ ID NO: 546698 - RNA, 19 nt, Artificial Sequence
  Description of Artificial Sequence: Synthetic oligonucleotide
auggguaggucuagcuaug

SEQ ID NO: 546699 - RNA, 19 nt, Artificial Sequence
  Description of Artificial Sequence: Synthetic oligonucleotide
agccaucguauugucauua

SEQ ID NO: 546700 - RNA, 19 nt, Artificial Sequence
  Description of Artificial Sequence: Synthetic oligonucleotide
agacaaccagcagguaaga

SEQ ID NO: 546701 - RNA, 19 nt, Artificial Sequence
  Description of Artificial Sequence: Synthetic oligonucleotide
gcuagaccuaaggagguca

SEQ ID NO: 546702 - RNA, 19 nt, Artificial Sequence
  Description of Artificial Sequence: Synthetic oligonucleotide
aggauacuccaaguaggaa

SEQ ID NO: 546703 - RNA, 19 nt, Artificial Sequence
  Description of Artificial Sequence: Synthetic oligonucleotide
ugcuagaccuaaggagguc

SEQ ID NO: 546704 - RNA, 19 nt, Artificial Sequence
  Description of Artificial Sequence: Synthetic oligonucleotide
gaggaugggugguggccuc

SEQ ID NO: 546705 - RNA, 19 nt, Artificial Sequence
  Description of Artificial Sequence: Synthetic oligonucleotide
cauacccgccgcccucugc

SEQ ID NO: 546706 - RNA, 19 nt, Artificial Sequence
  Description of Artificial Sequence: Synthetic oligonucleotide
cuguuaggacuagagcaga

SEQ ID NO: 546707 - RNA, 19 nt, Artificial Sequence
  Description of Artificial Sequence: Synthetic oligonucleotide
cauaacggggccagugcua

SEQ ID NO: 546708 - RNA, 19 nt, Artificial Sequence
  Description of Artificial Sequence: Synthetic oligonucleotide
cccauaacggggccagugc

SEQ ID NO: 546709 - RNA, 19 nt, Artificial Sequence
  Description of Artificial Sequence: Synthetic oligonucleotide
ggaacuggggucaaugggu

SEQ ID NO: 546710 - RNA, 19 nt, Artificial Sequence
  Description of Artificial Sequence: Synthetic oligonucleotide
gggagagucaacagccaac

SEQ ID NO: 546711 - RNA, 19 nt, Artificial Sequence
  Description of Artificial Sequence: Synthetic oligonucleotide
accucggcaccgaauguca

SEQ ID NO: 546712 - RNA, 19 nt, Artificial Sequence
  Description of Artificial Sequence: Synthetic oligonucleotide
ccugcagucgaccucggca

SEQ ID NO: 546713 - RNA, 19 nt, Artificial Sequence
  Description of Artificial Sequence: Synthetic oligonucleotide
agugccccuggaaccaaug

SEQ ID NO: 546714 - RNA, 19 nt, Artificial Sequence
  Description of Artificial Sequence: Synthetic oligonucleotide
auucaaucgcuaagacgau

SEQ ID NO: 546715 - RNA, 19 nt, Artificial Sequence
  Description of Artificial Sequence: Synthetic oligonucleotide
ggcaguuaugaagguugag

SEQ ID NO: 546716 - RNA, 19 nt, Artificial Sequence
  Description of Artificial Sequence: Synthetic oligonucleotide
gcuauggagaugggaaauc

SEQ ID NO: 546717 - RNA, 19 nt, Artificial Sequence
  Description of Artificial Sequence: Synthetic oligonucleotide
ccacccacguucucaggcc

SEQ ID NO: 546718 - RNA, 19 nt, Artificial Sequence
  Description of Artificial Sequence: Synthetic oligonucleotide
gucaauggguggccaugga

SEQ ID NO: 546719 - RNA, 19 nt, Artificial Sequence
  Description of Artificial Sequence: Synthetic oligonucleotide
ggcaccgaaugucagggcu

SEQ ID NO: 546720 - RNA, 19 nt, Artificial Sequence
  Description of Artificial Sequence: Synthetic oligonucleotide
ucgagcacuuaggguuuga

SEQ ID NO: 546721 - RNA, 19 nt, Artificial Sequence
  Description of Artificial Sequence: Synthetic oligonucleotide
gcccucgccacccacguuc

SEQ ID NO: 546722 - RNA, 19 nt, Artificial Sequence
  Description of Artificial Sequence: Synthetic oligonucleotide
cuuucccauaacggggcca

SEQ ID NO: 546723 - RNA, 19 nt, Artificial Sequence
  Description of Artificial Sequence: Synthetic oligonucleotide
gucuagcuauggagauggg

SEQ ID NO: 546724 - RNA, 19 nt, Artificial Sequence
  Description of Artificial Sequence: Synthetic oligonucleotide
ccucaguccaugucagguc

SEQ ID NO: 546725 - RNA, 19 nt, Artificial Sequence
  Description of Artificial Sequence: Synthetic oligonucleotide
gcagucgaccucggcaccg

SEQ ID NO: 546726 - RNA, 19 nt, Artificial Sequence
  Description of Artificial Sequence: Synthetic oligonucleotide
uaacggggccagugcuaga

SEQ ID NO: 546727 - RNA, 19 nt, Artificial Sequence
  Description of Artificial Sequence: Synthetic oligonucleotide
acauacccgccgcccucug

SEQ ID NO: 546728 - RNA, 19 nt, Artificial Sequence
  Description of Artificial Sequence: Synthetic oligonucleotide
cucuugucuacugggaaau

SEQ ID NO: 546729 - RNA, 19 nt, Artificial Sequence
  Description of Artificial Sequence: Synthetic oligonucleotide
guaccugcacaagccaucu

SEQ ID NO: 546730 - RNA, 19 nt, Artificial Sequence
  Description of Artificial Sequence: Synthetic oligonucleotide
gagggacccaggaggaaua

SEQ ID NO: 546731 - RNA, 19 nt, Artificial Sequence
  Description of Artificial Sequence: Synthetic oligonucleotide
ucccuucguuagaaaucuu

SEQ ID NO: 546732 - RNA, 19 nt, Artificial Sequence
  Description of Artificial Sequence: Synthetic oligonucleotide
cauccacggcagcagcaca

SEQ ID NO: 546733 - RNA, 19 nt, Artificial Sequence
  Description of Artificial Sequence: Synthetic oligonucleotide
acucgagcacuuaggguuu

SEQ ID NO: 546734 - RNA, 19 nt, Artificial Sequence
  Description of Artificial Sequence: Synthetic oligonucleotide
ccgaguuagcugcucacca

SEQ ID NO: 546735 - RNA, 19 nt, Artificial Sequence
  Description of Artificial Sequence: Synthetic oligonucleotide
ccucugcgcacgcauggag

SEQ ID NO: 546736 - RNA, 19 nt, Artificial Sequence
  Description of Artificial Sequence: Synthetic oligonucleotide
agcgcacuucuuucccaua

SEQ ID NO: 546737 - RNA, 19 nt, Artificial Sequence
  Description of Artificial Sequence: Synthetic oligonucleotide
guggcagauucaaucgcua

SEQ ID NO: 546738 - RNA, 19 nt, Artificial Sequence
  Description of Artificial Sequence: Synthetic oligonucleotide
cucgagcacuuaggguuug

SEQ ID NO: 546739 - RNA, 19 nt, Artificial Sequence
  Description of Artificial Sequence: Synthetic oligonucleotide
gcgcacuucuuucccauaa

SEQ ID NO: 546740 - RNA, 19 nt, Artificial Sequence
  Description of Artificial Sequence: Synthetic oligonucleotide
cccucccagcccuagggug

SEQ ID NO: 546741 - RNA, 19 nt, Artificial Sequence
  Description of Artificial Sequence: Synthetic oligonucleotide
agucgaccucggcaccgaa

SEQ ID NO: 546742 - RNA, 19 nt, Artificial Sequence
  Description of Artificial Sequence: Synthetic oligonucleotide
gugcuagaccuaaggaggu

SEQ ID NO: 546743 - RNA, 19 nt, Artificial Sequence
  Description of Artificial Sequence: Synthetic oligonucleotide
cccaggcuagggauccagc

SEQ ID NO: 546744 - RNA, 19 nt, Artificial Sequence
  Description of Artificial Sequence: Synthetic oligonucleotide
cuugggcauaagaaaccuu

SEQ ID NO: 546745 - RNA, 19 nt, Artificial Sequence
  Description of Artificial Sequence: Synthetic oligonucleotide
gcagacagcgcacuucuuu

SEQ ID NO: 546746 - RNA, 19 nt, Artificial Sequence
  Description of Artificial Sequence: Synthetic oligonucleotide
agggacccaggaggaauaa

SEQ ID NO: 546747 - RNA, 19 nt, Artificial Sequence
  Description of Artificial Sequence: Synthetic oligonucleotide
uucccauaacggggccagu

SEQ ID NO: 546748 - RNA, 19 nt, Artificial Sequence
  Description of Artificial Sequence: Synthetic oligonucleotide
ccucggcaccgaaugucag

SEQ ID NO: 546749 - RNA, 19 nt, Artificial Sequence
  Description of Artificial Sequence: Synthetic oligonucleotide
caauuggaggauggguggu

SEQ ID NO: 546750 - RNA, 19 nt, Artificial Sequence
  Description of Artificial Sequence: Synthetic oligonucleotide
gggcaguuaugaagguuga

SEQ ID NO: 546751 - RNA, 19 nt, Artificial Sequence
  Description of Artificial Sequence: Synthetic oligonucleotide
gggcuuagcaguccccagu

SEQ ID NO: 546752 - RNA, 19 nt, Artificial Sequence
  Description of Artificial Sequence: Synthetic oligonucleotide
guguccgaguuagcugcuc

SEQ ID NO: 546753 - RNA, 19 nt, Artificial Sequence
  Description of Artificial Sequence: Synthetic oligonucleotide
gcuagggauccagcucagc

SEQ ID NO: 546754 - RNA, 19 nt, Artificial Sequence
  Description of Artificial Sequence: Synthetic oligonucleotide
gcacucgagcacuuagggu

SEQ ID NO: 546755 - RNA, 19 nt, Artificial Sequence
  Description of Artificial Sequence: Synthetic oligonucleotide
ggcuuagcaguccccaguu

SEQ ID NO: 546756 - RNA, 19 nt, Artificial Sequence
  Description of Artificial Sequence: Synthetic oligonucleotide
cugcgcacgcauggagguc

SEQ ID NO: 546757 - RNA, 19 nt, Artificial Sequence
  Description of Artificial Sequence: Synthetic oligonucleotide
cagcgcacuucuuucccau

SEQ ID NO: 546758 - RNA, 19 nt, Artificial Sequence
  Description of Artificial Sequence: Synthetic oligonucleotide
cagcguaggacuggagggu

SEQ ID NO: 546759 - RNA, 19 nt, Artificial Sequence
  Description of Artificial Sequence: Synthetic oligonucleotide
caaucgcuaagacgauauu

SEQ ID NO: 546760 - RNA, 19 nt, Artificial Sequence
  Description of Artificial Sequence: Synthetic oligonucleotide
cccuucguuagaaaucuuu

SEQ ID NO: 546761 - RNA, 19 nt, Artificial Sequence
  Description of Artificial Sequence: Synthetic oligonucleotide
ccauaacggggccagugcu

SEQ ID NO: 546762 - RNA, 19 nt, Artificial Sequence
  Description of Artificial Sequence: Synthetic oligonucleotide
cgaguuagcugcucaccaa

SEQ ID NO: 546763 - RNA, 19 nt, Artificial Sequence
  Description of Artificial Sequence: Synthetic oligonucleotide
cagucgaccucggcaccga

SEQ ID NO: 546764 - RNA, 19 nt, Artificial Sequence
  Description of Artificial Sequence: Synthetic oligonucleotide
ccaugcauacaaguuucau

SEQ ID NO: 546765 - RNA, 19 nt, Artificial Sequence
  Description of Artificial Sequence: Synthetic oligonucleotide
ccuuccuaauggggagcca

SEQ ID NO: 546766 - RNA, 19 nt, Artificial Sequence
  Description of Artificial Sequence: Synthetic oligonucleotide
ggacuagagcagagggcuu

SEQ ID NO: 546767 - RNA, 19 nt, Artificial Sequence
  Description of Artificial Sequence: Synthetic oligonucleotide
cccucugcgcacgcaugga

SEQ ID NO: 546768 - RNA, 19 nt, Artificial Sequence
  Description of Artificial Sequence: Synthetic oligonucleotide
cgaccucggcaccgaaugu

SEQ ID NO: 546769 - RNA, 19 nt, Artificial Sequence
  Description of Artificial Sequence: Synthetic oligonucleotide
cgccgcccucugcgcacgc

SEQ ID NO: 546770 - RNA, 19 nt, Artificial Sequence
  Description of Artificial Sequence: Synthetic oligonucleotide
cgcacgcauggagguccau

SEQ ID NO: 546771 - RNA, 19 nt, Artificial Sequence
  Description of Artificial Sequence: Synthetic oligonucleotide
aaaccaaggaagcugagac

SEQ ID NO: 546772 - RNA, 19 nt, Artificial Sequence
  Description of Artificial Sequence: Synthetic oligonucleotide
acauguaucagugaguucc

SEQ ID NO: 546773 - RNA, 19 nt, Artificial Sequence
  Description of Artificial Sequence: Synthetic oligonucleotide
aaaugucgaaguuugaucu

SEQ ID NO: 546774 - RNA, 19 nt, Artificial Sequence
  Description of Artificial Sequence: Synthetic oligonucleotide
uguucugagacuuuauucc

SEQ ID NO: 546775 - RNA, 19 nt, Artificial Sequence
  Description of Artificial Sequence: Synthetic oligonucleotide
uuuacaugaaccuuccaug

SEQ ID NO: 546776 - RNA, 19 nt, Artificial Sequence
  Description of Artificial Sequence: Synthetic oligonucleotide
aacgucaguguccaaaauc

SEQ ID NO: 546777 - RNA, 19 nt, Artificial Sequence
  Description of Artificial Sequence: Synthetic oligonucleotide
ugugucucaaccaggagag

SEQ ID NO: 546778 - RNA, 19 nt, Artificial Sequence
  Description of Artificial Sequence: Synthetic oligonucleotide
ucucuguuguucuagagcc

SEQ ID NO: 546779 - RNA, 19 nt, Artificial Sequence
  Description of Artificial Sequence: Synthetic oligonucleotide
uaagcuagaggcccaaggg

SEQ ID NO: 546780 - RNA, 19 nt, Artificial Sequence
  Description of Artificial Sequence: Synthetic oligonucleotide
uguacgacuuccaacaugu

SEQ ID NO: 546781 - RNA, 19 nt, Artificial Sequence
  Description of Artificial Sequence: Synthetic oligonucleotide
aacgcaacgguacucauca

SEQ ID NO: 546782 - RNA, 19 nt, Artificial Sequence
  Description of Artificial Sequence: Synthetic oligonucleotide
uuucaaaugaucagggcac

SEQ ID NO: 546783 - RNA, 19 nt, Artificial Sequence
  Description of Artificial Sequence: Synthetic oligonucleotide
uuuuacaugaaccuuccau

SEQ ID NO: 546784 - RNA, 19 nt, Artificial Sequence
  Description of Artificial Sequence: Synthetic oligonucleotide
ugagacacaagucuugcca

SEQ ID NO: 546785 - RNA, 19 nt, Artificial Sequence
  Description of Artificial Sequence: Synthetic oligonucleotide
ucaacaucauuacagugga

SEQ ID NO: 546786 - RNA, 19 nt, Artificial Sequence
  Description of Artificial Sequence: Synthetic oligonucleotide
aauuuucaagguauggguc

SEQ ID NO: 546787 - RNA, 19 nt, Artificial Sequence
  Description of Artificial Sequence: Synthetic oligonucleotide
uuuauuccaaucauccacu

SEQ ID NO: 546788 - RNA, 19 nt, Artificial Sequence
  Description of Artificial Sequence: Synthetic oligonucleotide
cugaguaccagcuaaggac

SEQ ID NO: 546789 - RNA, 19 nt, Artificial Sequence
  Description of Artificial Sequence: Synthetic oligonucleotide
auguucugagacuuuauuc

SEQ ID NO: 546790 - RNA, 19 nt, Artificial Sequence
  Description of Artificial Sequence: Synthetic oligonucleotide
ugcgcuucaacuaauucca

SEQ ID NO: 546791 - RNA, 19 nt, Artificial Sequence
  Description of Artificial Sequence: Synthetic oligonucleotide
auuacaguggacccaagug

SEQ ID NO: 546792 - RNA, 19 nt, Artificial Sequence
  Description of Artificial Sequence: Synthetic oligonucleotide
aagcuagaggcccaagggg

SEQ ID NO: 546793 - RNA, 19 nt, Artificial Sequence
  Description of Artificial Sequence: Synthetic oligonucleotide
uuuauugguaggagcaucu

SEQ ID NO: 546794 - RNA, 19 nt, Artificial Sequence
  Description of Artificial Sequence: Synthetic oligonucleotide
aaugucgaaguuugaucuc

SEQ ID NO: 546795 - RNA, 19 nt, Artificial Sequence
  Description of Artificial Sequence: Synthetic oligonucleotide
uguuccauguggaaguucu

SEQ ID NO: 546796 - RNA, 19 nt, Artificial Sequence
  Description of Artificial Sequence: Synthetic oligonucleotide
caagccauaggucggaucc

SEQ ID NO: 546797 - RNA, 19 nt, Artificial Sequence
  Description of Artificial Sequence: Synthetic oligonucleotide
acgucaguguccaaaaucc

SEQ ID NO: 546798 - RNA, 19 nt, Artificial Sequence
  Description of Artificial Sequence: Synthetic oligonucleotide
uuacaguggacccaagugu

SEQ ID NO: 546799 - RNA, 19 nt, Artificial Sequence
  Description of Artificial Sequence: Synthetic oligonucleotide
uuugacgugcgcuucaacu

SEQ ID NO: 546800 - RNA, 19 nt, Artificial Sequence
  Description of Artificial Sequence: Synthetic oligonucleotide
uguaccaccaguccagcca

SEQ ID NO: 546801 - RNA, 19 nt, Artificial Sequence
  Description of Artificial Sequence: Synthetic oligonucleotide
agcaucugcaugaacauac

SEQ ID NO: 546802 - RNA, 19 nt, Artificial Sequence
  Description of Artificial Sequence: Synthetic oligonucleotide
uuuacauguaucagugagu

SEQ ID NO: 546803 - RNA, 19 nt, Artificial Sequence
  Description of Artificial Sequence: Synthetic oligonucleotide
auuccagugguacuucuuc

SEQ ID NO: 546804 - RNA, 19 nt, Artificial Sequence
  Description of Artificial Sequence: Synthetic oligonucleotide
uauugguaggagcaucugc

SEQ ID NO: 546805 - RNA, 19 nt, Artificial Sequence
  Description of Artificial Sequence: Synthetic oligonucleotide
aaucaugcggccuggcaug

SEQ ID NO: 546806 - RNA, 19 nt, Artificial Sequence
  Description of Artificial Sequence: Synthetic oligonucleotide
gguaguuuggugaagcugg

SEQ ID NO: 546807 - RNA, 19 nt, Artificial Sequence
  Description of Artificial Sequence: Synthetic oligonucleotide
cacacuagucaccacaggc

SEQ ID NO: 546808 - RNA, 19 nt, Artificial Sequence
  Description of Artificial Sequence: Synthetic oligonucleotide
guaagcuagaggcccaagg

SEQ ID NO: 546809 - RNA, 19 nt, Artificial Sequence
  Description of Artificial Sequence: Synthetic oligonucleotide
ccagcuaaggacuugauac

SEQ ID NO: 546810 - RNA, 19 nt, Artificial Sequence
  Description of Artificial Sequence: Synthetic oligonucleotide
cuugccauccccauuucag

SEQ ID NO: 546811 - RNA, 19 nt, Artificial Sequence
  Description of Artificial Sequence: Synthetic oligonucleotide
augucgaaguuugaucucc

SEQ ID NO: 546812 - RNA, 19 nt, Artificial Sequence
  Description of Artificial Sequence: Synthetic oligonucleotide
gaagcugagacacaagucu

SEQ ID NO: 546813 - RNA, 19 nt, Artificial Sequence
  Description of Artificial Sequence: Synthetic oligonucleotide
uugauauccucacuaacuu

SEQ ID NO: 546814 - RNA, 19 nt, Artificial Sequence
  Description of Artificial Sequence: Synthetic oligonucleotide
aacuaauuccagugguacu

SEQ ID NO: 546815 - RNA, 19 nt, Artificial Sequence
  Description of Artificial Sequence: Synthetic oligonucleotide
cauugaaaacgucaguguc

SEQ ID NO: 546816 - RNA, 19 nt, Artificial Sequence
  Description of Artificial Sequence: Synthetic oligonucleotide
uucaacuguuccaugugga

SEQ ID NO: 546817 - RNA, 19 nt, Artificial Sequence
  Description of Artificial Sequence: Synthetic oligonucleotide
cuuuucaaaugaucagggc

SEQ ID NO: 546818 - RNA, 19 nt, Artificial Sequence
  Description of Artificial Sequence: Synthetic oligonucleotide
gugcgcuucaacuaauucc

SEQ ID NO: 546819 - RNA, 19 nt, Artificial Sequence
  Description of Artificial Sequence: Synthetic oligonucleotide
uugaaaacgucagugucca

SEQ ID NO: 546820 - RNA, 19 nt, Artificial Sequence
  Description of Artificial Sequence: Synthetic oligonucleotide
uacgacuuccaacauguuc

SEQ ID NO: 546821 - RNA, 19 nt, Artificial Sequence
  Description of Artificial Sequence: Synthetic oligonucleotide
uucguucauccauucauug

SEQ ID NO: 546822 - RNA, 19 nt, Artificial Sequence
  Description of Artificial Sequence: Synthetic oligonucleotide
acgcucaguaagcaacugc

SEQ ID NO: 546823 - RNA, 19 nt, Artificial Sequence
  Description of Artificial Sequence: Synthetic oligonucleotide
aguggagagacaugggacu

SEQ ID NO: 546824 - RNA, 19 nt, Artificial Sequence
  Description of Artificial Sequence: Synthetic oligonucleotide
gacccuucaagcuucucug

SEQ ID NO: 546825 - RNA, 19 nt, Artificial Sequence
  Description of Artificial Sequence: Synthetic oligonucleotide
uuguucuagagccucuuuc

SEQ ID NO: 546826 - RNA, 19 nt, Artificial Sequence
  Description of Artificial Sequence: Synthetic oligonucleotide
acgacuuccaacauguucu

SEQ ID NO: 546827 - RNA, 19 nt, Artificial Sequence
  Description of Artificial Sequence: Synthetic oligonucleotide
uuacauguaucagugaguu

SEQ ID NO: 546828 - RNA, 19 nt, Artificial Sequence
  Description of Artificial Sequence: Synthetic oligonucleotide
cuguguacgacuuccaaca

SEQ ID NO: 546829 - RNA, 19 nt, Artificial Sequence
  Description of Artificial Sequence: Synthetic oligonucleotide
ucccucagaaaucucgugu

SEQ ID NO: 546830 - RNA, 19 nt, Artificial Sequence
  Description of Artificial Sequence: Synthetic oligonucleotide
ucgcaccgaauccagcugg

SEQ ID NO: 546831 - RNA, 19 nt, Artificial Sequence
  Description of Artificial Sequence: Synthetic oligonucleotide
aagcuguaccaccagucca

SEQ ID NO: 546832 - RNA, 19 nt, Artificial Sequence
  Description of Artificial Sequence: Synthetic oligonucleotide
uggguaaaagccccagugu

SEQ ID NO: 546833 - RNA, 19 nt, Artificial Sequence
  Description of Artificial Sequence: Synthetic oligonucleotide
ucaguaagcaacugcuguc

SEQ ID NO: 546834 - RNA, 19 nt, Artificial Sequence
  Description of Artificial Sequence: Synthetic oligonucleotide
auagcugucuggguaaaag

SEQ ID NO: 546835 - RNA, 19 nt, Artificial Sequence
  Description of Artificial Sequence: Synthetic oligonucleotide
aguaggaugaaugcuggcu

SEQ ID NO: 546836 - RNA, 19 nt, Artificial Sequence
  Description of Artificial Sequence: Synthetic oligonucleotide
uggaauugguggaucuuca

SEQ ID NO: 546837 - RNA, 19 nt, Artificial Sequence
  Description of Artificial Sequence: Synthetic oligonucleotide
gguccuaagauguuuccag

SEQ ID NO: 546838 - RNA, 19 nt, Artificial Sequence
  Description of Artificial Sequence: Synthetic oligonucleotide
ucaacuaauuccaguggua

SEQ ID NO: 546839 - RNA, 19 nt, Artificial Sequence
  Description of Artificial Sequence: Synthetic oligonucleotide
uccgaauuuucaagguaug

SEQ ID NO: 546840 - RNA, 19 nt, Artificial Sequence
  Description of Artificial Sequence: Synthetic oligonucleotide
auugguaggagcaucugca

SEQ ID NO: 546841 - RNA, 19 nt, Artificial Sequence
  Description of Artificial Sequence: Synthetic oligonucleotide
uccagguuaaggaguggcc

SEQ ID NO: 546842 - RNA, 19 nt, Artificial Sequence
  Description of Artificial Sequence: Synthetic oligonucleotide
gaaguucugacgcucagua

SEQ ID NO: 546843 - RNA, 19 nt, Artificial Sequence
  Description of Artificial Sequence: Synthetic oligonucleotide
uccaacauguucugagacu

SEQ ID NO: 546844 - RNA, 19 nt, Artificial Sequence
  Description of Artificial Sequence: Synthetic oligonucleotide
ucacugaguaccagcuaag

SEQ ID NO: 546845 - RNA, 19 nt, Artificial Sequence
  Description of Artificial Sequence: Synthetic oligonucleotide
aaccaaggaagcugagaca

SEQ ID NO: 546846 - RNA, 19 nt, Artificial Sequence
  Description of Artificial Sequence: Synthetic oligonucleotide
uagcugucuggguaaaagc

SEQ ID NO: 546847 - RNA, 19 nt, Artificial Sequence
  Description of Artificial Sequence: Synthetic oligonucleotide
cuaaggacuugauacaaaa

SEQ ID NO: 546848 - RNA, 19 nt, Artificial Sequence
  Description of Artificial Sequence: Synthetic oligonucleotide
guuaaggaguggccgaggc

SEQ ID NO: 546849 - RNA, 19 nt, Artificial Sequence
  Description of Artificial Sequence: Synthetic oligonucleotide
guccuaagauguuuccagg

SEQ ID NO: 546850 - RNA, 19 nt, Artificial Sequence
  Description of Artificial Sequence: Synthetic oligonucleotide
ucggacccgagaaaacucc

SEQ ID NO: 546851 - RNA, 19 nt, Artificial Sequence
  Description of Artificial Sequence: Synthetic oligonucleotide
aucgcuuucucuuucuuua

SEQ ID NO: 546852 - RNA, 19 nt, Artificial Sequence
  Description of Artificial Sequence: Synthetic oligonucleotide
agugcuuuauugguaggag

SEQ ID NO: 546853 - RNA, 19 nt, Artificial Sequence
  Description of Artificial Sequence: Synthetic oligonucleotide
uucagacccuucaagcuuc

SEQ ID NO: 546854 - RNA, 19 nt, Artificial Sequence
  Description of Artificial Sequence: Synthetic oligonucleotide
auccucacuaacuucacua

SEQ ID NO: 546855 - RNA, 19 nt, Artificial Sequence
  Description of Artificial Sequence: Synthetic oligonucleotide
ugagggguacccugggucc

SEQ ID NO: 546856 - RNA, 19 nt, Artificial Sequence
  Description of Artificial Sequence: Synthetic oligonucleotide
acuggguuuccagacuggc

SEQ ID NO: 546857 - RNA, 19 nt, Artificial Sequence
  Description of Artificial Sequence: Synthetic oligonucleotide
accgaauccagcugggaca

SEQ ID NO: 546858 - RNA, 19 nt, Artificial Sequence
  Description of Artificial Sequence: Synthetic oligonucleotide
ucguucauccauucauuga

SEQ ID NO: 546859 - RNA, 19 nt, Artificial Sequence
  Description of Artificial Sequence: Synthetic oligonucleotide
ugguaggagcaucugcaug

SEQ ID NO: 546860 - RNA, 19 nt, Artificial Sequence
  Description of Artificial Sequence: Synthetic oligonucleotide
uccucaaugggaagccuac

SEQ ID NO: 546861 - RNA, 19 nt, Artificial Sequence
  Description of Artificial Sequence: Synthetic oligonucleotide
aaacgcaacgguacucauc

SEQ ID NO: 546862 - RNA, 19 nt, Artificial Sequence
  Description of Artificial Sequence: Synthetic oligonucleotide
ucuuuccucaucacugguc

SEQ ID NO: 546863 - RNA, 19 nt, Artificial Sequence
  Description of Artificial Sequence: Synthetic oligonucleotide
ucgagcucguagcucagca

SEQ ID NO: 546864 - RNA, 19 nt, Artificial Sequence
  Description of Artificial Sequence: Synthetic oligonucleotide
accugcuuaucuuuccuca

SEQ ID NO: 546865 - RNA, 19 nt, Artificial Sequence
  Description of Artificial Sequence: Synthetic oligonucleotide
uucuggaauugguggaucu

SEQ ID NO: 546866 - RNA, 19 nt, Artificial Sequence
  Description of Artificial Sequence: Synthetic oligonucleotide
ucucgcagcuuccuguacu

SEQ ID NO: 546867 - RNA, 19 nt, Artificial Sequence
  Description of Artificial Sequence: Synthetic oligonucleotide
uacccuggguccuaagaug

SEQ ID NO: 546868 - RNA, 19 nt, Artificial Sequence
  Description of Artificial Sequence: Synthetic oligonucleotide
uuaaggaguggccgaggcu

SEQ ID NO: 546869 - RNA, 19 nt, Artificial Sequence
  Description of Artificial Sequence: Synthetic oligonucleotide
cauaccaggaggggcaggg

SEQ ID NO: 546870 - RNA, 19 nt, Artificial Sequence
  Description of Artificial Sequence: Synthetic oligonucleotide
acucgcaccgaauccagcu

SEQ ID NO: 546871 - RNA, 19 nt, Artificial Sequence
  Description of Artificial Sequence: Synthetic oligonucleotide
caggagagcuaccagggac

SEQ ID NO: 546872 - RNA, 19 nt, Artificial Sequence
  Description of Artificial Sequence: Synthetic oligonucleotide
uugacgugcgcuucaacua

SEQ ID NO: 546873 - RNA, 19 nt, Artificial Sequence
  Description of Artificial Sequence: Synthetic oligonucleotide
ucccaaacuugcuggccgg

SEQ ID NO: 546874 - RNA, 19 nt, Artificial Sequence
  Description of Artificial Sequence: Synthetic oligonucleotide
aaaacgcaacgguacucau

SEQ ID NO: 546875 - RNA, 19 nt, Artificial Sequence
  Description of Artificial Sequence: Synthetic oligonucleotide
ugacgugcgcuucaacuaa

SEQ ID NO: 546876 - RNA, 19 nt, Artificial Sequence
  Description of Artificial Sequence: Synthetic oligonucleotide
ugacgcucaguaagcaacu

SEQ ID NO: 546877 - RNA, 19 nt, Artificial Sequence
  Description of Artificial Sequence: Synthetic oligonucleotide
acaugggacucaugcuugg

SEQ ID NO: 546878 - RNA, 19 nt, Artificial Sequence
  Description of Artificial Sequence: Synthetic oligonucleotide
cucguguuccacuuucuuc

SEQ ID NO: 546879 - RNA, 19 nt, Artificial Sequence
  Description of Artificial Sequence: Synthetic oligonucleotide
uuauuccaaucauccacuc

SEQ ID NO: 546880 - RNA, 19 nt, Artificial Sequence
  Description of Artificial Sequence: Synthetic oligonucleotide
guugauauccucacuaacu

SEQ ID NO: 546881 - RNA, 19 nt, Artificial Sequence
  Description of Artificial Sequence: Synthetic oligonucleotide
ugucgaaguuugaucucca

SEQ ID NO: 546882 - RNA, 19 nt, Artificial Sequence
  Description of Artificial Sequence: Synthetic oligonucleotide
cauuuggugcugugagggg

SEQ ID NO: 546883 - RNA, 19 nt, Artificial Sequence
  Description of Artificial Sequence: Synthetic oligonucleotide
ucucucuguccauaauagu

SEQ ID NO: 546884 - RNA, 19 nt, Artificial Sequence
  Description of Artificial Sequence: Synthetic oligonucleotide
gugggaaucaugcggccug

SEQ ID NO: 546885 - RNA, 19 nt, Artificial Sequence
  Description of Artificial Sequence: Synthetic oligonucleotide
caacgguacucaucacugg

SEQ ID NO: 546886 - RNA, 19 nt, Artificial Sequence
  Description of Artificial Sequence: Synthetic oligonucleotide
aaacgucaguguccaaaau

SEQ ID NO: 546887 - RNA, 19 nt, Artificial Sequence
  Description of Artificial Sequence: Synthetic oligonucleotide
gaggcauaccaggaggggc

SEQ ID NO: 546888 - RNA, 19 nt, Artificial Sequence
  Description of Artificial Sequence: Synthetic oligonucleotide
acgcgagagcagcugcugc

SEQ ID NO: 546889 - RNA, 19 nt, Artificial Sequence
  Description of Artificial Sequence: Synthetic oligonucleotide
uuccagugguacuucuucu

SEQ ID NO: 546890 - RNA, 19 nt, Artificial Sequence
  Description of Artificial Sequence: Synthetic oligonucleotide
auggucaccguccgucguc

SEQ ID NO: 546891 - RNA, 19 nt, Artificial Sequence
  Description of Artificial Sequence: Synthetic oligonucleotide
uguggaaguucugacgcuc

SEQ ID NO: 546892 - RNA, 19 nt, Artificial Sequence
  Description of Artificial Sequence: Synthetic oligonucleotide
uccagugguacuucuucuc

SEQ ID NO: 546893 - RNA, 19 nt, Artificial Sequence
  Description of Artificial Sequence: Synthetic oligonucleotide
auccgaauuuucaagguau

SEQ ID NO: 546894 - RNA, 19 nt, Artificial Sequence
  Description of Artificial Sequence: Synthetic oligonucleotide
uuauugguaggagcaucug

SEQ ID NO: 546895 - RNA, 19 nt, Artificial Sequence
  Description of Artificial Sequence: Synthetic oligonucleotide
aggucggauccaccuuucc

SEQ ID NO: 546896 - RNA, 19 nt, Artificial Sequence
  Description of Artificial Sequence: Synthetic oligonucleotide
agguaguuuggugaagcug

SEQ ID NO: 546897 - RNA, 19 nt, Artificial Sequence
  Description of Artificial Sequence: Synthetic oligonucleotide
cucacugaguaccagcuaa

SEQ ID NO: 546898 - RNA, 19 nt, Artificial Sequence
  Description of Artificial Sequence: Synthetic oligonucleotide
guguacgacuuccaacaug

SEQ ID NO: 546899 - RNA, 19 nt, Artificial Sequence
  Description of Artificial Sequence: Synthetic oligonucleotide
aaugccgcuuuugcugcag

SEQ ID NO: 546900 - RNA, 19 nt, Artificial Sequence
  Description of Artificial Sequence: Synthetic oligonucleotide
aaucauccacucggcguuc

SEQ ID NO: 546901 - RNA, 19 nt, Artificial Sequence
  Description of Artificial Sequence: Synthetic oligonucleotide
ccauuuggugcugugaggg

SEQ ID NO: 546902 - RNA, 19 nt, Artificial Sequence
  Description of Artificial Sequence: Synthetic oligonucleotide
ggauccaccuuuccagagg

SEQ ID NO: 546903 - RNA, 19 nt, Artificial Sequence
  Description of Artificial Sequence: Synthetic oligonucleotide
ucccguucucacccgcgcg

SEQ ID NO: 546904 - RNA, 19 nt, Artificial Sequence
  Description of Artificial Sequence: Synthetic oligonucleotide
uucccucagaaaucucgug

SEQ ID NO: 546905 - RNA, 19 nt, Artificial Sequence
  Description of Artificial Sequence: Synthetic oligonucleotide
ucucaaccaggagagcuac

SEQ ID NO: 546906 - RNA, 19 nt, Artificial Sequence
  Description of Artificial Sequence: Synthetic oligonucleotide
ucuucucggacccgagaaa

SEQ ID NO: 546907 - RNA, 19 nt, Artificial Sequence
  Description of Artificial Sequence: Synthetic oligonucleotide
uccgucgucuccaccgccc

SEQ ID NO: 546908 - RNA, 19 nt, Artificial Sequence
  Description of Artificial Sequence: Synthetic oligonucleotide
uccuguguacgacuuccaa

SEQ ID NO: 546909 - RNA, 19 nt, Artificial Sequence
  Description of Artificial Sequence: Synthetic oligonucleotide
cgaauuuucaagguauggg

SEQ ID NO: 546910 - RNA, 19 nt, Artificial Sequence
  Description of Artificial Sequence: Synthetic oligonucleotide
cacugaguaccagcuaagg

SEQ ID NO: 546911 - RNA, 19 nt, Artificial Sequence
  Description of Artificial Sequence: Synthetic oligonucleotide
gguggcaucagagggguag

SEQ ID NO: 546912 - RNA, 19 nt, Artificial Sequence
  Description of Artificial Sequence: Synthetic oligonucleotide
cauucauccuguguacgac

SEQ ID NO: 546913 - RNA, 19 nt, Artificial Sequence
  Description of Artificial Sequence: Synthetic oligonucleotide
uuuugacgugcgcuucaac

SEQ ID NO: 546914 - RNA, 19 nt, Artificial Sequence
  Description of Artificial Sequence: Synthetic oligonucleotide
ucaaaugaucagggcacac

SEQ ID NO: 546915 - RNA, 19 nt, Artificial Sequence
  Description of Artificial Sequence: Synthetic oligonucleotide
caccgaauccagcugggac

SEQ ID NO: 546916 - RNA, 19 nt, Artificial Sequence
  Description of Artificial Sequence: Synthetic oligonucleotide
gucgaaguuugaucuccag

SEQ ID NO: 546917 - RNA, 19 nt, Artificial Sequence
  Description of Artificial Sequence: Synthetic oligonucleotide
uccuccgguacacggccag

SEQ ID NO: 546918 - RNA, 19 nt, Artificial Sequence
  Description of Artificial Sequence: Synthetic oligonucleotide
ucggauccaccuuuccaga

SEQ ID NO: 546919 - RNA, 19 nt, Artificial Sequence
  Description of Artificial Sequence: Synthetic oligonucleotide
ggcaacauuucccucagaa

SEQ ID NO: 546920 - RNA, 19 nt, Artificial Sequence
  Description of Artificial Sequence: Synthetic oligonucleotide
gaaucaugcggccuggcau

SEQ ID NO: 546921 - RNA, 19 nt, Artificial Sequence
  Description of Artificial Sequence: Synthetic oligonucleotide
uguguacgacuuccaacau

SEQ ID NO: 546922 - RNA, 19 nt, Artificial Sequence
  Description of Artificial Sequence: Synthetic oligonucleotide
uccauuugcugucgagcuc

SEQ ID NO: 546923 - RNA, 19 nt, Artificial Sequence
  Description of Artificial Sequence: Synthetic oligonucleotide
ccauuugcugucgagcucg

SEQ ID NO: 546924 - RNA, 19 nt, Artificial Sequence
  Description of Artificial Sequence: Synthetic oligonucleotide
uguccgggcucucccaaac

SEQ ID NO: 546925 - RNA, 19 nt, Artificial Sequence
  Description of Artificial Sequence: Synthetic oligonucleotide
ggcguuccuguucucaucc

SEQ ID NO: 546926 - RNA, 19 nt, Artificial Sequence
  Description of Artificial Sequence: Synthetic oligonucleotide
gaauugguggaucuucaau

SEQ ID NO: 546927 - RNA, 19 nt, Artificial Sequence
  Description of Artificial Sequence: Synthetic oligonucleotide
agcuagaggcccaagggga

SEQ ID NO: 546928 - RNA, 19 nt, Artificial Sequence
  Description of Artificial Sequence: Synthetic oligonucleotide
uucucggacccgagaaaac

SEQ ID NO: 546929 - RNA, 19 nt, Artificial Sequence
  Description of Artificial Sequence: Synthetic oligonucleotide
uccgguacacggccaggcc

SEQ ID NO: 546930 - RNA, 19 nt, Artificial Sequence
  Description of Artificial Sequence: Synthetic oligonucleotide
aaacuccuccaaugccgcu

SEQ ID NO: 546931 - RNA, 19 nt, Artificial Sequence
  Description of Artificial Sequence: Synthetic oligonucleotide
aucaugccggggugggccg

SEQ ID NO: 546932 - RNA, 19 nt, Artificial Sequence
  Description of Artificial Sequence: Synthetic oligonucleotide
ucccaguaggaugaaugcu

SEQ ID NO: 546933 - RNA, 19 nt, Artificial Sequence
  Description of Artificial Sequence: Synthetic oligonucleotide
ucucguguuccacuuucuu

SEQ ID NO: 546934 - RNA, 19 nt, Artificial Sequence
  Description of Artificial Sequence: Synthetic oligonucleotide
cugcaauacagcugcucuc

SEQ ID NO: 546935 - RNA, 19 nt, Artificial Sequence
  Description of Artificial Sequence: Synthetic oligonucleotide
caucagacuuccuguuuuc

SEQ ID NO: 546936 - RNA, 19 nt, Artificial Sequence
  Description of Artificial Sequence: Synthetic oligonucleotide
cugcugaccaucagacuuc

SEQ ID NO: 546937 - RNA, 19 nt, Artificial Sequence
  Description of Artificial Sequence: Synthetic oligonucleotide
cucaaugggaagccuacaa

SEQ ID NO: 546938 - RNA, 19 nt, Artificial Sequence
  Description of Artificial Sequence: Synthetic oligonucleotide
uacauguaucagugaguuc

SEQ ID NO: 546939 - RNA, 19 nt, Artificial Sequence
  Description of Artificial Sequence: Synthetic oligonucleotide
agguuaaggaguggccgag

SEQ ID NO: 546940 - RNA, 19 nt, Artificial Sequence
  Description of Artificial Sequence: Synthetic oligonucleotide
acaagucuugccaucccca

SEQ ID NO: 546941 - RNA, 19 nt, Artificial Sequence
  Description of Artificial Sequence: Synthetic oligonucleotide
ccagguuaaggaguggccg

SEQ ID NO: 546942 - RNA, 19 nt, Artificial Sequence
  Description of Artificial Sequence: Synthetic oligonucleotide
uggugcgcugcugugcugc

SEQ ID NO: 546943 - RNA, 19 nt, Artificial Sequence
  Description of Artificial Sequence: Synthetic oligonucleotide
agaugccacacgaggauca

SEQ ID NO: 546944 - RNA, 19 nt, Artificial Sequence
  Description of Artificial Sequence: Synthetic oligonucleotide
aguaccagcuaaggacuug

SEQ ID NO: 546945 - RNA, 19 nt, Artificial Sequence
  Description of Artificial Sequence: Synthetic oligonucleotide
ucucacugaguaccagcua

SEQ ID NO: 546946 - RNA, 19 nt, Artificial Sequence
  Description of Artificial Sequence: Synthetic oligonucleotide
uccgggcucucccaaacuu

SEQ ID NO: 546947 - RNA, 19 nt, Artificial Sequence
  Description of Artificial Sequence: Synthetic oligonucleotide
cagcuaaggacuugauaca

SEQ ID NO: 546948 - RNA, 19 nt, Artificial Sequence
  Description of Artificial Sequence: Synthetic oligonucleotide
ucgucaggaccugugccug

SEQ ID NO: 546949 - RNA, 19 nt, Artificial Sequence
  Description of Artificial Sequence: Synthetic oligonucleotide
ccuguguacgacuuccaac

SEQ ID NO: 546950 - RNA, 19 nt, Artificial Sequence
  Description of Artificial Sequence: Synthetic oligonucleotide
aggagagcuaccagggacu

SEQ ID NO: 546951 - RNA, 19 nt, Artificial Sequence
  Description of Artificial Sequence: Synthetic oligonucleotide
ggugcugugagggguaccc

SEQ ID NO: 546952 - RNA, 19 nt, Artificial Sequence
  Description of Artificial Sequence: Synthetic oligonucleotide
agcugagacacaagucuug

SEQ ID NO: 546953 - RNA, 19 nt, Artificial Sequence
  Description of Artificial Sequence: Synthetic oligonucleotide
gucaccguccgucgucucc

SEQ ID NO: 546954 - RNA, 19 nt, Artificial Sequence
  Description of Artificial Sequence: Synthetic oligonucleotide
aucauggagccagggcccg

SEQ ID NO: 546955 - RNA, 19 nt, Artificial Sequence
  Description of Artificial Sequence: Synthetic oligonucleotide
ucaccguccgucgucucca

SEQ ID NO: 546956 - RNA, 19 nt, Artificial Sequence
  Description of Artificial Sequence: Synthetic oligonucleotide
ggaucaaccacagacgcua

SEQ ID NO: 546957 - RNA, 19 nt, Artificial Sequence
  Description of Artificial Sequence: Synthetic oligonucleotide
ccgaauuuucaagguaugg

SEQ ID NO: 546958 - RNA, 19 nt, Artificial Sequence
  Description of Artificial Sequence: Synthetic oligonucleotide
gcguuucccguucucaccc

SEQ ID NO: 546959 - RNA, 19 nt, Artificial Sequence
  Description of Artificial Sequence: Synthetic oligonucleotide
cagguuaaggaguggccga

SEQ ID NO: 546960 - RNA, 19 nt, Artificial Sequence
  Description of Artificial Sequence: Synthetic oligonucleotide
aggaggauacaugccauuu

SEQ ID NO: 546961 - RNA, 19 nt, Artificial Sequence
  Description of Artificial Sequence: Synthetic oligonucleotide
acuggcugaaagggacagg

SEQ ID NO: 546962 - RNA, 19 nt, Artificial Sequence
  Description of Artificial Sequence: Synthetic oligonucleotide
aggcauaccaggaggggca

SEQ ID NO: 546963 - RNA, 19 nt, Artificial Sequence
  Description of Artificial Sequence: Synthetic oligonucleotide
caacaucauuacaguggac

SEQ ID NO: 546964 - RNA, 19 nt, Artificial Sequence
  Description of Artificial Sequence: Synthetic oligonucleotide
ccuccaaugccgcuuuugc

SEQ ID NO: 546965 - RNA, 19 nt, Artificial Sequence
  Description of Artificial Sequence: Synthetic oligonucleotide
uggacccaagugucauagc

SEQ ID NO: 546966 - RNA, 19 nt, Artificial Sequence
  Description of Artificial Sequence: Synthetic oligonucleotide
aggaccugugccugcaaua

SEQ ID NO: 546967 - RNA, 19 nt, Artificial Sequence
  Description of Artificial Sequence: Synthetic oligonucleotide
uguuguucuagagccucuu

SEQ ID NO: 546968 - RNA, 19 nt, Artificial Sequence
  Description of Artificial Sequence: Synthetic oligonucleotide
guaagcaacugcugucucu

SEQ ID NO: 546969 - RNA, 19 nt, Artificial Sequence
  Description of Artificial Sequence: Synthetic oligonucleotide
acccuggguccuaagaugu

SEQ ID NO: 546970 - RNA, 19 nt, Artificial Sequence
  Description of Artificial Sequence: Synthetic oligonucleotide
accguccgucgucuccacc

SEQ ID NO: 546971 - RNA, 19 nt, Artificial Sequence
  Description of Artificial Sequence: Synthetic oligonucleotide
ucccgguaucgcuuucucu

SEQ ID NO: 546972 - RNA, 19 nt, Artificial Sequence
  Description of Artificial Sequence: Synthetic oligonucleotide
ggcacacuagucaccacag

SEQ ID NO: 546973 - RNA, 19 nt, Artificial Sequence
  Description of Artificial Sequence: Synthetic oligonucleotide
ucagacccuucaagcuucu

SEQ ID NO: 546974 - RNA, 19 nt, Artificial Sequence
  Description of Artificial Sequence: Synthetic oligonucleotide
cauccgaauuuucaaggua

SEQ ID NO: 546975 - RNA, 19 nt, Artificial Sequence
  Description of Artificial Sequence: Synthetic oligonucleotide
acacgaggaucaaccacag

SEQ ID NO: 546976 - RNA, 19 nt, Artificial Sequence
  Description of Artificial Sequence: Synthetic oligonucleotide
caucauuacaguggaccca

SEQ ID NO: 546977 - RNA, 19 nt, Artificial Sequence
  Description of Artificial Sequence: Synthetic oligonucleotide
cuccauuugcugucgagcu

SEQ ID NO: 546978 - RNA, 19 nt, Artificial Sequence
  Description of Artificial Sequence: Synthetic oligonucleotide
caugcuuggggcugugaaa

SEQ ID NO: 546979 - RNA, 19 nt, Artificial Sequence
  Description of Artificial Sequence: Synthetic oligonucleotide
augccacacgaggaucaac

SEQ ID NO: 546980 - RNA, 19 nt, Artificial Sequence
  Description of Artificial Sequence: Synthetic oligonucleotide
cagcugacgcgagagcagc

SEQ ID NO: 546981 - RNA, 19 nt, Artificial Sequence
  Description of Artificial Sequence: Synthetic oligonucleotide
uaguuuggugaagcugggu

SEQ ID NO: 546982 - RNA, 19 nt, Artificial Sequence
  Description of Artificial Sequence: Synthetic oligonucleotide
cuucucggacccgagaaaa

SEQ ID NO: 546983 - RNA, 19 nt, Artificial Sequence
  Description of Artificial Sequence: Synthetic oligonucleotide
cagugcuuuauugguagga

SEQ ID NO: 546984 - RNA, 19 nt, Artificial Sequence
  Description of Artificial Sequence: Synthetic oligonucleotide
agacucgcaccgaauccag

SEQ ID NO: 546985 - RNA, 19 nt, Artificial Sequence
  Description of Artificial Sequence: Synthetic oligonucleotide
acgcaacgguacucaucac

SEQ ID NO: 546986 - RNA, 19 nt, Artificial Sequence
  Description of Artificial Sequence: Synthetic oligonucleotide
cauuacaguggacccaagu

SEQ ID NO: 546987 - RNA, 19 nt, Artificial Sequence
  Description of Artificial Sequence: Synthetic oligonucleotide
uaccagcuaaggacuugau

SEQ ID NO: 546988 - RNA, 19 nt, Artificial Sequence
  Description of Artificial Sequence: Synthetic oligonucleotide
ggucggauccaccuuucca

SEQ ID NO: 546989 - RNA, 19 nt, Artificial Sequence
  Description of Artificial Sequence: Synthetic oligonucleotide
gguuaaggaguggccgagg

SEQ ID NO: 546990 - RNA, 19 nt, Artificial Sequence
  Description of Artificial Sequence: Synthetic oligonucleotide
cagcuuguggugggugugg

SEQ ID NO: 546991 - RNA, 19 nt, Artificial Sequence
  Description of Artificial Sequence: Synthetic oligonucleotide
acgguacucaucacugggu

SEQ ID NO: 546992 - RNA, 19 nt, Artificial Sequence
  Description of Artificial Sequence: Synthetic oligonucleotide
gucgucuccaccgcccggc

SEQ ID NO: 546993 - RNA, 19 nt, Artificial Sequence
  Description of Artificial Sequence: Synthetic oligonucleotide
ccaguguaccagcaccugc

SEQ ID NO: 546994 - RNA, 19 nt, Artificial Sequence
  Description of Artificial Sequence: Synthetic oligonucleotide
caguguaccagcaccugcu

SEQ ID NO: 546995 - RNA, 19 nt, Artificial Sequence
  Description of Artificial Sequence: Synthetic oligonucleotide
cagacucgcaccgaaucca

SEQ ID NO: 546996 - RNA, 19 nt, Artificial Sequence
  Description of Artificial Sequence: Synthetic oligonucleotide
ggaccugugccugcaauac

SEQ ID NO: 546997 - RNA, 19 nt, Artificial Sequence
  Description of Artificial Sequence: Synthetic oligonucleotide
aggaucaaccacagacgcu

SEQ ID NO: 546998 - RNA, 19 nt, Artificial Sequence
  Description of Artificial Sequence: Synthetic oligonucleotide
guacccuggguccuaagau

SEQ ID NO: 546999 - RNA, 19 nt, Artificial Sequence
  Description of Artificial Sequence: Synthetic oligonucleotide
gcugucgcggccaugguca

SEQ ID NO: 547000 - RNA, 19 nt, Artificial Sequence
  Description of Artificial Sequence: Synthetic oligonucleotide
uuucaagguauggguccuc

SEQ ID NO: 547001 - RNA, 19 nt, Artificial Sequence
  Description of Artificial Sequence: Synthetic oligonucleotide
cagcaucaacaucauuaca

SEQ ID NO: 547002 - RNA, 19 nt, Artificial Sequence
  Description of Artificial Sequence: Synthetic oligonucleotide
uggucaccguccgucgucu

SEQ ID NO: 547003 - RNA, 19 nt, Artificial Sequence
  Description of Artificial Sequence: Synthetic oligonucleotide
ugaaaacgucaguguccaa

SEQ ID NO: 547004 - RNA, 19 nt, Artificial Sequence
  Description of Artificial Sequence: Synthetic oligonucleotide
ccauaauaguuuccagcuc

SEQ ID NO: 547005 - RNA, 19 nt, Artificial Sequence
  Description of Artificial Sequence: Synthetic oligonucleotide
ggcccgguaucugaccugg

SEQ ID NO: 547006 - RNA, 19 nt, Artificial Sequence
  Description of Artificial Sequence: Synthetic oligonucleotide
aguggacccaagugucaua

SEQ ID NO: 547007 - RNA, 19 nt, Artificial Sequence
  Description of Artificial Sequence: Synthetic oligonucleotide
ucuggcucgucaggaccug

SEQ ID NO: 547008 - RNA, 19 nt, Artificial Sequence
  Description of Artificial Sequence: Synthetic oligonucleotide
cuaacuucacuaucuuguu

SEQ ID NO: 547009 - RNA, 19 nt, Artificial Sequence
  Description of Artificial Sequence: Synthetic oligonucleotide
gacucgcaccgaauccagc

SEQ ID NO: 547010 - RNA, 19 nt, Artificial Sequence
  Description of Artificial Sequence: Synthetic oligonucleotide
ggcucgucaggaccugugc

SEQ ID NO: 547011 - RNA, 19 nt, Artificial Sequence
  Description of Artificial Sequence: Synthetic oligonucleotide
caaaugaucagggcacacu

SEQ ID NO: 547012 - RNA, 19 nt, Artificial Sequence
  Description of Artificial Sequence: Synthetic oligonucleotide
cagggcccgguaucugacc

SEQ ID NO: 547013 - RNA, 19 nt, Artificial Sequence
  Description of Artificial Sequence: Synthetic oligonucleotide
cucgucaggaccugugccu

SEQ ID NO: 547014 - RNA, 19 nt, Artificial Sequence
  Description of Artificial Sequence: Synthetic oligonucleotide
ggaauugguggaucuucaa

SEQ ID NO: 547015 - RNA, 19 nt, Artificial Sequence
  Description of Artificial Sequence: Synthetic oligonucleotide
cauguaucagugaguuccu

SEQ ID NO: 547016 - RNA, 19 nt, Artificial Sequence
  Description of Artificial Sequence: Synthetic oligonucleotide
ccauccccauuucagcuug

SEQ ID NO: 547017 - RNA, 19 nt, Artificial Sequence
  Description of Artificial Sequence: Synthetic oligonucleotide
cccagccagacucgcaccg

SEQ ID NO: 547018 - RNA, 19 nt, Artificial Sequence
  Description of Artificial Sequence: Synthetic oligonucleotide
ucucacccgcgcgcgcgcg

SEQ ID NO: 547019 - RNA, 19 nt, Artificial Sequence
  Description of Artificial Sequence: Synthetic oligonucleotide
agcucguagcucagcauau

SEQ ID NO: 547020 - RNA, 19 nt, Artificial Sequence
  Description of Artificial Sequence: Synthetic oligonucleotide
agggccacucccaguagga

SEQ ID NO: 547021 - RNA, 19 nt, Artificial Sequence
  Description of Artificial Sequence: Synthetic oligonucleotide
cagccagugcuuuauuggu

SEQ ID NO: 547022 - RNA, 19 nt, Artificial Sequence
  Description of Artificial Sequence: Synthetic oligonucleotide
uuggugcugugagggguac

SEQ ID NO: 547023 - RNA, 19 nt, Artificial Sequence
  Description of Artificial Sequence: Synthetic oligonucleotide
cucgcggcguuucccguuc

SEQ ID NO: 547024 - RNA, 19 nt, Artificial Sequence
  Description of Artificial Sequence: Synthetic oligonucleotide
gcggccauggucaccgucc

SEQ ID NO: 547025 - RNA, 19 nt, Artificial Sequence
  Description of Artificial Sequence: Synthetic oligonucleotide
cugggacaccguguccggg

SEQ ID NO: 547026 - RNA, 19 nt, Artificial Sequence
  Description of Artificial Sequence: Synthetic oligonucleotide
uuggugaagcuggguuggu

SEQ ID NO: 547027 - RNA, 19 nt, Artificial Sequence
  Description of Artificial Sequence: Synthetic oligonucleotide
gccauggucaccguccguc

SEQ ID NO: 547028 - RNA, 19 nt, Artificial Sequence
  Description of Artificial Sequence: Synthetic oligonucleotide
gaugccacacgaggaucaa

SEQ ID NO: 547029 - RNA, 19 nt, Artificial Sequence
  Description of Artificial Sequence: Synthetic oligonucleotide
guccgucgucuccaccgcc

SEQ ID NO: 547030 - RNA, 19 nt, Artificial Sequence
  Description of Artificial Sequence: Synthetic oligonucleotide
gucucaaccaggagagcua

SEQ ID NO: 547031 - RNA, 19 nt, Artificial Sequence
  Description of Artificial Sequence: Synthetic oligonucleotide
gaucaaccacagacgcuaa

SEQ ID NO: 547032 - RNA, 19 nt, Artificial Sequence
  Description of Artificial Sequence: Synthetic oligonucleotide
caugaaccuuccauggcuu

SEQ ID NO: 547033 - RNA, 19 nt, Artificial Sequence
  Description of Artificial Sequence: Synthetic oligonucleotide
uggcccucgcggcguuucc

SEQ ID NO: 547034 - RNA, 19 nt, Artificial Sequence
  Description of Artificial Sequence: Synthetic oligonucleotide
cccgcugucgcggccaugg

SEQ ID NO: 547035 - RNA, 19 nt, Artificial Sequence
  Description of Artificial Sequence: Synthetic oligonucleotide
gcauccgaauuuucaaggu

SEQ ID NO: 547036 - RNA, 19 nt, Artificial Sequence
  Description of Artificial Sequence: Synthetic oligonucleotide
gacaggcugguaagcuaga

SEQ ID NO: 547037 - RNA, 19 nt, Artificial Sequence
  Description of Artificial Sequence: Synthetic oligonucleotide
acucggcguuccuguucuc

SEQ ID NO: 547038 - RNA, 19 nt, Artificial Sequence
  Description of Artificial Sequence: Synthetic oligonucleotide
gcccucgcggcguuucccg

SEQ ID NO: 547039 - RNA, 19 nt, Artificial Sequence
  Description of Artificial Sequence: Synthetic oligonucleotide
gucgagcucguagcucagc

SEQ ID NO: 547040 - RNA, 19 nt, Artificial Sequence
  Description of Artificial Sequence: Synthetic oligonucleotide
gguaucgcuuucucuuucu

SEQ ID NO: 547041 - RNA, 19 nt, Artificial Sequence
  Description of Artificial Sequence: Synthetic oligonucleotide
uccaagccauaggucggau

SEQ ID NO: 547042 - RNA, 19 nt, Artificial Sequence
  Description of Artificial Sequence: Synthetic oligonucleotide
guccucaaugggaagccua

SEQ ID NO: 547043 - RNA, 19 nt, Artificial Sequence
  Description of Artificial Sequence: Synthetic oligonucleotide
uccacucggcguuccuguu

SEQ ID NO: 547044 - RNA, 19 nt, Artificial Sequence
  Description of Artificial Sequence: Synthetic oligonucleotide
gacaccguguccgggcucu

SEQ ID NO: 547045 - RNA, 19 nt, Artificial Sequence
  Description of Artificial Sequence: Synthetic oligonucleotide
cucguagcucagcauauuu

SEQ ID NO: 547046 - RNA, 19 nt, Artificial Sequence
  Description of Artificial Sequence: Synthetic oligonucleotide
cccguucucacccgcgcgc

SEQ ID NO: 547047 - RNA, 19 nt, Artificial Sequence
  Description of Artificial Sequence: Synthetic oligonucleotide
ugucgcggccauggucacc

SEQ ID NO: 547048 - RNA, 19 nt, Artificial Sequence
  Description of Artificial Sequence: Synthetic oligonucleotide
guccuuccuccgguacacg

SEQ ID NO: 547049 - RNA, 19 nt, Artificial Sequence
  Description of Artificial Sequence: Synthetic oligonucleotide
agccagugcuuuauuggua

SEQ ID NO: 547050 - RNA, 19 nt, Artificial Sequence
  Description of Artificial Sequence: Synthetic oligonucleotide
ccgaauccagcugggacac

SEQ ID NO: 547051 - RNA, 19 nt, Artificial Sequence
  Description of Artificial Sequence: Synthetic oligonucleotide
ucaugccggggugggccgc

SEQ ID NO: 547052 - RNA, 19 nt, Artificial Sequence
  Description of Artificial Sequence: Synthetic oligonucleotide
ccaaggggaagcauccgaa

SEQ ID NO: 547053 - RNA, 19 nt, Artificial Sequence
  Description of Artificial Sequence: Synthetic oligonucleotide
caagucuugccauccccau

SEQ ID NO: 547054 - RNA, 19 nt, Artificial Sequence
  Description of Artificial Sequence: Synthetic oligonucleotide
guuguucuagagccucuuu

SEQ ID NO: 547055 - RNA, 19 nt, Artificial Sequence
  Description of Artificial Sequence: Synthetic oligonucleotide
ccgggcucucccaaacuug

SEQ ID NO: 547056 - RNA, 19 nt, Artificial Sequence
  Description of Artificial Sequence: Synthetic oligonucleotide
cugucgcggccauggucac

SEQ ID NO: 547057 - RNA, 19 nt, Artificial Sequence
  Description of Artificial Sequence: Synthetic oligonucleotide
ggcauaccaggaggggcag

SEQ ID NO: 547058 - RNA, 19 nt, Artificial Sequence
  Description of Artificial Sequence: Synthetic oligonucleotide
gcuugcccagccagacucg

SEQ ID NO: 547059 - RNA, 19 nt, Artificial Sequence
  Description of Artificial Sequence: Synthetic oligonucleotide
ccaagccauaggucggauc

SEQ ID NO: 547060 - RNA, 19 nt, Artificial Sequence
  Description of Artificial Sequence: Synthetic oligonucleotide
cuccaagccauaggucgga

SEQ ID NO: 547061 - RNA, 19 nt, Artificial Sequence
  Description of Artificial Sequence: Synthetic oligonucleotide
cacccgcggcgccugcugc

SEQ ID NO: 547062 - RNA, 19 nt, Artificial Sequence
  Description of Artificial Sequence: Synthetic oligonucleotide
cucaaccacucuucauccu

SEQ ID NO: 547063 - RNA, 19 nt, Artificial Sequence
  Description of Artificial Sequence: Synthetic oligonucleotide
cgugcgcuucaacuaauuc

SEQ ID NO: 547064 - RNA, 19 nt, Artificial Sequence
  Description of Artificial Sequence: Synthetic oligonucleotide
ccauaggucggauccaccu

SEQ ID NO: 547065 - RNA, 19 nt, Artificial Sequence
  Description of Artificial Sequence: Synthetic oligonucleotide
caaugccgcuuuugcugca

SEQ ID NO: 547066 - RNA, 19 nt, Artificial Sequence
  Description of Artificial Sequence: Synthetic oligonucleotide
ggcucucgcagcuuccugu

SEQ ID NO: 547067 - RNA, 19 nt, Artificial Sequence
  Description of Artificial Sequence: Synthetic oligonucleotide
cucacccgcgcgcgcgcgc

SEQ ID NO: 547068 - RNA, 19 nt, Artificial Sequence
  Description of Artificial Sequence: Synthetic oligonucleotide
guaucgcuuucucuuucuu

SEQ ID NO: 547069 - RNA, 19 nt, Artificial Sequence
  Description of Artificial Sequence: Synthetic oligonucleotide
cggauccaccuuuccagag

SEQ ID NO: 547070 - RNA, 19 nt, Artificial Sequence
  Description of Artificial Sequence: Synthetic oligonucleotide
ucgcggcguuucccguucu

SEQ ID NO: 547071 - RNA, 19 nt, Artificial Sequence
  Description of Artificial Sequence: Synthetic oligonucleotide
cccaaggggaagcauccga

SEQ ID NO: 547072 - RNA, 19 nt, Artificial Sequence
  Description of Artificial Sequence: Synthetic oligonucleotide
cauaggucggauccaccuu

SEQ ID NO: 547073 - RNA, 19 nt, Artificial Sequence
  Description of Artificial Sequence: Synthetic oligonucleotide
gccauaggucggauccacc

SEQ ID NO: 547074 - RNA, 19 nt, Artificial Sequence
  Description of Artificial Sequence: Synthetic oligonucleotide
guacacggccaggcccgag

SEQ ID NO: 547075 - RNA, 19 nt, Artificial Sequence
  Description of Artificial Sequence: Synthetic oligonucleotide
ccaccgcccggccuggccc

SEQ ID NO: 547076 - RNA, 19 nt, Artificial Sequence
  Description of Artificial Sequence: Synthetic oligonucleotide
cguuucccguucucacccg

SEQ ID NO: 547077 - RNA, 19 nt, Artificial Sequence
  Description of Artificial Sequence: Synthetic oligonucleotide
ccgucgucuccaccgcccg

SEQ ID NO: 547078 - RNA, 19 nt, Artificial Sequence
  Description of Artificial Sequence: Synthetic oligonucleotide
gggaagcauccgaauuuuc

SEQ ID NO: 547079 - RNA, 19 nt, Artificial Sequence
  Description of Artificial Sequence: Synthetic oligonucleotide
cuggcccucgcggcguuuc

SEQ ID NO: 547080 - RNA, 19 nt, Artificial Sequence
  Description of Artificial Sequence: Synthetic oligonucleotide
acgugcgcuucaacuaauu

SEQ ID NO: 547081 - RNA, 19 nt, Artificial Sequence
  Description of Artificial Sequence: Synthetic oligonucleotide
caccguccgucgucuccac

SEQ ID NO: 547082 - RNA, 19 nt, Artificial Sequence
  Description of Artificial Sequence: Synthetic oligonucleotide
ugcacccgcggcgccugcu

SEQ ID NO: 547083 - RNA, 19 nt, Artificial Sequence
  Description of Artificial Sequence: Synthetic oligonucleotide
gcccaaggggaagcauccg

SEQ ID NO: 547084 - RNA, 19 nt, Artificial Sequence
  Description of Artificial Sequence: Synthetic oligonucleotide
guguccgggcucucccaaa

SEQ ID NO: 547085 - RNA, 19 nt, Artificial Sequence
  Description of Artificial Sequence: Synthetic oligonucleotide
ggucucaaccacucuucau

SEQ ID NO: 547086 - RNA, 19 nt, Artificial Sequence
  Description of Artificial Sequence: Synthetic oligonucleotide
cccgguaucgcuuucucuu

SEQ ID NO: 547087 - RNA, 19 nt, Artificial Sequence
  Description of Artificial Sequence: Synthetic oligonucleotide
gggaaucaugcggccuggc

SEQ ID NO: 547088 - RNA, 19 nt, Artificial Sequence
  Description of Artificial Sequence: Synthetic oligonucleotide
ccguucucacccgcgcgcg

SEQ ID NO: 547089 - RNA, 19 nt, Artificial Sequence
  Description of Artificial Sequence: Synthetic oligonucleotide
gagggguacccuggguccu

SEQ ID NO: 547090 - RNA, 19 nt, Artificial Sequence
  Description of Artificial Sequence: Synthetic oligonucleotide
caguccagccagugcuuua

SEQ ID NO: 547091 - RNA, 19 nt, Artificial Sequence
  Description of Artificial Sequence: Synthetic oligonucleotide
gaguaccagcuaaggacuu

SEQ ID NO: 547092 - RNA, 19 nt, Artificial Sequence
  Description of Artificial Sequence: Synthetic oligonucleotide
cgucaguguccaaaaucca

SEQ ID NO: 547093 - RNA, 19 nt, Artificial Sequence
  Description of Artificial Sequence: Synthetic oligonucleotide
cagacccuucaagcuucuc

SEQ ID NO: 547094 - RNA, 19 nt, Artificial Sequence
  Description of Artificial Sequence: Synthetic oligonucleotide
gacgugcgcuucaacuaau

SEQ ID NO: 547095 - RNA, 19 nt, Artificial Sequence
  Description of Artificial Sequence: Synthetic oligonucleotide
ggaccgccgcccgcugucg

SEQ ID NO: 547096 - RNA, 19 nt, Artificial Sequence
  Description of Artificial Sequence: Synthetic oligonucleotide
guccgggcucucccaaacu

SEQ ID NO: 547097 - RNA, 19 nt, Artificial Sequence
  Description of Artificial Sequence: Synthetic oligonucleotide
cgguaucgcuuucucuuuc

SEQ ID NO: 547098 - RNA, 19 nt, Artificial Sequence
  Description of Artificial Sequence: Synthetic oligonucleotide
cguccgucgucuccaccgc

SEQ ID NO: 547099 - RNA, 19 nt, Artificial Sequence
  Description of Artificial Sequence: Synthetic oligonucleotide
ggacaccguguccgggcuc

SEQ ID NO: 547100 - RNA, 19 nt, Artificial Sequence
  Description of Artificial Sequence: Synthetic oligonucleotide
cgcaacgguacucaucacu

SEQ ID NO: 547101 - RNA, 19 nt, Artificial Sequence
  Description of Artificial Sequence: Synthetic oligonucleotide
ccuccgguacacggccagg

SEQ ID NO: 547102 - RNA, 19 nt, Artificial Sequence
  Description of Artificial Sequence: Synthetic oligonucleotide
ggcccucgcggcguuuccc

SEQ ID NO: 547103 - RNA, 19 nt, Artificial Sequence
  Description of Artificial Sequence: Synthetic oligonucleotide
cauccccauuucagcuugu

SEQ ID NO: 547104 - RNA, 19 nt, Artificial Sequence
  Description of Artificial Sequence: Synthetic oligonucleotide
ggugggccgcugcaccgaa

SEQ ID NO: 547105 - RNA, 19 nt, Artificial Sequence
  Description of Artificial Sequence: Synthetic oligonucleotide
ggucaccguccgucgucuc

SEQ ID NO: 547106 - RNA, 19 nt, Artificial Sequence
  Description of Artificial Sequence: Synthetic oligonucleotide
cgcugucgcggccaugguc

SEQ ID NO: 547107 - RNA, 19 nt, Artificial Sequence
  Description of Artificial Sequence: Synthetic oligonucleotide
cccgguaucugaccuggcu

SEQ ID NO: 547108 - RNA, 19 nt, Artificial Sequence
  Description of Artificial Sequence: Synthetic oligonucleotide
ccgcagagugcuggugcgc

SEQ ID NO: 547109 - RNA, 19 nt, Artificial Sequence
  Description of Artificial Sequence: Synthetic oligonucleotide
cgucgucuccaccgcccgg

SEQ ID NO: 547110 - RNA, 19 nt, Artificial Sequence
  Description of Artificial Sequence: Synthetic oligonucleotide
cggcguuccuguucucauc

SEQ ID NO: 547111 - RNA, 19 nt, Artificial Sequence
  Description of Artificial Sequence: Synthetic oligonucleotide
ggggaggagugggguggug

SEQ ID NO: 547112 - RNA, 19 nt, Artificial Sequence
  Description of Artificial Sequence: Synthetic oligonucleotide
ggagagcuaccagggacuu

SEQ ID NO: 547113 - RNA, 19 nt, Artificial Sequence
  Description of Artificial Sequence: Synthetic oligonucleotide
ggugcgcugcugugcugcu

SEQ ID NO: 547114 - RNA, 19 nt, Artificial Sequence
  Description of Artificial Sequence: Synthetic oligonucleotide
guacgacuuccaacauguu

SEQ ID NO: 547115 - RNA, 19 nt, Artificial Sequence
  Description of Artificial Sequence: Synthetic oligonucleotide
ccguguccgggcucuccca

SEQ ID NO: 547116 - RNA, 19 nt, Artificial Sequence
  Description of Artificial Sequence: Synthetic oligonucleotide
cuggcucgucaggaccugu

SEQ ID NO: 547117 - RNA, 19 nt, Artificial Sequence
  Description of Artificial Sequence: Synthetic oligonucleotide
cggaccgccgcccgcuguc

SEQ ID NO: 547118 - RNA, 19 nt, Artificial Sequence
  Description of Artificial Sequence: Synthetic oligonucleotide
gcccgguaucugaccuggc

SEQ ID NO: 547119 - RNA, 19 nt, Artificial Sequence
  Description of Artificial Sequence: Synthetic oligonucleotide
caccgcccggccuggcccu

SEQ ID NO: 547120 - RNA, 19 nt, Artificial Sequence
  Description of Artificial Sequence: Synthetic oligonucleotide
ccgguaucgcuuucucuuu

SEQ ID NO: 547121 - RNA, 19 nt, Artificial Sequence
  Description of Artificial Sequence: Synthetic oligonucleotide
cgaauccagcugggacacc

SEQ ID NO: 547122 - RNA, 19 nt, Artificial Sequence
  Description of Artificial Sequence: Synthetic oligonucleotide
caugccggggugggccgcu

SEQ ID NO: 547123 - RNA, 19 nt, Artificial Sequence
  Description of Artificial Sequence: Synthetic oligonucleotide
cggacccgagaaaacuccu

SEQ ID NO: 547124 - RNA, 19 nt, Artificial Sequence
  Description of Artificial Sequence: Synthetic oligonucleotide
gcucguagcucagcauauu

SEQ ID NO: 547125 - RNA, 19 nt, Artificial Sequence
  Description of Artificial Sequence: Synthetic oligonucleotide
cccggaccgccgcccgcug

SEQ ID NO: 547126 - RNA, 19 nt, Artificial Sequence
  Description of Artificial Sequence: Synthetic oligonucleotide
ccggaccgccgcccgcugu

SEQ ID NO: 547127 - RNA, 19 nt, Artificial Sequence
  Description of Artificial Sequence: Synthetic oligonucleotide
gccuggcccucgcggcguu

SEQ ID NO: 547128 - RNA, 19 nt, Artificial Sequence
  Description of Artificial Sequence: Synthetic oligonucleotide
ccuggcccucgcggcguuu

SEQ ID NO: 547129 - RNA, 19 nt, Artificial Sequence
  Description of Artificial Sequence: Synthetic oligonucleotide
cgcccgcugucgcggccau

SEQ ID NO: 547130 - RNA, 19 nt, Artificial Sequence
  Description of Artificial Sequence: Synthetic oligonucleotide
aguucugaaaaguagaagc

SEQ ID NO: 547131 - RNA, 19 nt, Artificial Sequence
  Description of Artificial Sequence: Synthetic oligonucleotide
uuucuauugauuucaaacg

SEQ ID NO: 547132 - RNA, 19 nt, Artificial Sequence
  Description of Artificial Sequence: Synthetic oligonucleotide
aauauagagcucucggagc

SEQ ID NO: 547133 - RNA, 19 nt, Artificial Sequence
  Description of Artificial Sequence: Synthetic oligonucleotide
uuucaaagaggaaagaggc

SEQ ID NO: 547134 - RNA, 19 nt, Artificial Sequence
  Description of Artificial Sequence: Synthetic oligonucleotide
auauacaguacucagauca

SEQ ID NO: 547135 - RNA, 19 nt, Artificial Sequence
  Description of Artificial Sequence: Synthetic oligonucleotide
acuaacauccaacaccucc

SEQ ID NO: 547136 - RNA, 19 nt, Artificial Sequence
  Description of Artificial Sequence: Synthetic oligonucleotide
uaauucuggagacuuagcg

SEQ ID NO: 547137 - RNA, 19 nt, Artificial Sequence
  Description of Artificial Sequence: Synthetic oligonucleotide
uucuauugauuucaaacgg

SEQ ID NO: 547138 - RNA, 19 nt, Artificial Sequence
  Description of Artificial Sequence: Synthetic oligonucleotide
guuacuaacauccaacacc

SEQ ID NO: 547139 - RNA, 19 nt, Artificial Sequence
  Description of Artificial Sequence: Synthetic oligonucleotide
uaaaacuuucgucagugag

SEQ ID NO: 547140 - RNA, 19 nt, Artificial Sequence
  Description of Artificial Sequence: Synthetic oligonucleotide
caaauuuucgcugaggucc

SEQ ID NO: 547141 - RNA, 19 nt, Artificial Sequence
  Description of Artificial Sequence: Synthetic oligonucleotide
uauucaagcuugcucaggg

SEQ ID NO: 547142 - RNA, 19 nt, Artificial Sequence
  Description of Artificial Sequence: Synthetic oligonucleotide
aauagagucgaugauguug

SEQ ID NO: 547143 - RNA, 19 nt, Artificial Sequence
  Description of Artificial Sequence: Synthetic oligonucleotide
uuacuaacauccaacaccu

SEQ ID NO: 547144 - RNA, 19 nt, Artificial Sequence
  Description of Artificial Sequence: Synthetic oligonucleotide
aaaaugaguagaaucuggg

SEQ ID NO: 547145 - RNA, 19 nt, Artificial Sequence
  Description of Artificial Sequence: Synthetic oligonucleotide
ucaaagagccugaaguggg

SEQ ID NO: 547146 - RNA, 19 nt, Artificial Sequence
  Description of Artificial Sequence: Synthetic oligonucleotide
aaacgcaucuuuccuggcc

SEQ ID NO: 547147 - RNA, 19 nt, Artificial Sequence
  Description of Artificial Sequence: Synthetic oligonucleotide
aguguaacgcaacagcuuc

SEQ ID NO: 547148 - RNA, 19 nt, Artificial Sequence
  Description of Artificial Sequence: Synthetic oligonucleotide
ucaauagagucgaugaugu

SEQ ID NO: 547149 - RNA, 19 nt, Artificial Sequence
  Description of Artificial Sequence: Synthetic oligonucleotide
gaaccuaggacuuuauagc

SEQ ID NO: 547150 - RNA, 19 nt, Artificial Sequence
  Description of Artificial Sequence: Synthetic oligonucleotide
aaucagacugacuuaggug

SEQ ID NO: 547151 - RNA, 19 nt, Artificial Sequence
  Description of Artificial Sequence: Synthetic oligonucleotide
uucucaauagagucgauga

SEQ ID NO: 547152 - RNA, 19 nt, Artificial Sequence
  Description of Artificial Sequence: Synthetic oligonucleotide
aaaaucgcccacuccauug

SEQ ID NO: 547153 - RNA, 19 nt, Artificial Sequence
  Description of Artificial Sequence: Synthetic oligonucleotide
agaaaacgaaaugagauug

SEQ ID NO: 547154 - RNA, 19 nt, Artificial Sequence
  Description of Artificial Sequence: Synthetic oligonucleotide
uccuauaaggauuucccag

SEQ ID NO: 547155 - RNA, 19 nt, Artificial Sequence
  Description of Artificial Sequence: Synthetic oligonucleotide
aauauucaagcuugcucag

SEQ ID NO: 547156 - RNA, 19 nt, Artificial Sequence
  Description of Artificial Sequence: Synthetic oligonucleotide
aaaggcaucauagcaaaug

SEQ ID NO: 547157 - RNA, 19 nt, Artificial Sequence
  Description of Artificial Sequence: Synthetic oligonucleotide
cacuaguagagucuggugg

SEQ ID NO: 547158 - RNA, 19 nt, Artificial Sequence
  Description of Artificial Sequence: Synthetic oligonucleotide
cucgcuguaggaaacaaag

SEQ ID NO: 547159 - RNA, 19 nt, Artificial Sequence
  Description of Artificial Sequence: Synthetic oligonucleotide
uacucagaucauaaaauga

SEQ ID NO: 547160 - RNA, 19 nt, Artificial Sequence
  Description of Artificial Sequence: Synthetic oligonucleotide
auucucuuaacuuucucca

SEQ ID NO: 547161 - RNA, 19 nt, Artificial Sequence
  Description of Artificial Sequence: Synthetic oligonucleotide
aaggcaucauagcaaaugu

SEQ ID NO: 547162 - RNA, 19 nt, Artificial Sequence
  Description of Artificial Sequence: Synthetic oligonucleotide
uggaguguaacgcaacagc

SEQ ID NO: 547163 - RNA, 19 nt, Artificial Sequence
  Description of Artificial Sequence: Synthetic oligonucleotide
agacuuagcgcuuugauuu

SEQ ID NO: 547164 - RNA, 19 nt, Artificial Sequence
  Description of Artificial Sequence: Synthetic oligonucleotide
aggacaagaguucacagga

SEQ ID NO: 547165 - RNA, 19 nt, Artificial Sequence
  Description of Artificial Sequence: Synthetic oligonucleotide
auuauuagcguuucuacuu

SEQ ID NO: 547166 - RNA, 19 nt, Artificial Sequence
  Description of Artificial Sequence: Synthetic oligonucleotide
aaguacuuauggcauucuc

SEQ ID NO: 547167 - RNA, 19 nt, Artificial Sequence
  Description of Artificial Sequence: Synthetic oligonucleotide
uaacgcaacagcuucagaa

SEQ ID NO: 547168 - RNA, 19 nt, Artificial Sequence
  Description of Artificial Sequence: Synthetic oligonucleotide
aaaaccaggaugccggcgu

SEQ ID NO: 547169 - RNA, 19 nt, Artificial Sequence
  Description of Artificial Sequence: Synthetic oligonucleotide
auagcuugaagggagguuc

SEQ ID NO: 547170 - RNA, 19 nt, Artificial Sequence
  Description of Artificial Sequence: Synthetic oligonucleotide
ucaguucuaaauaucccac

SEQ ID NO: 547171 - RNA, 19 nt, Artificial Sequence
  Description of Artificial Sequence: Synthetic oligonucleotide
aaauaucccacagaacuca

SEQ ID NO: 547172 - RNA, 19 nt, Artificial Sequence
  Description of Artificial Sequence: Synthetic oligonucleotide
ucgacugugauucucuuaa

SEQ ID NO: 547173 - RNA, 19 nt, Artificial Sequence
  Description of Artificial Sequence: Synthetic oligonucleotide
gacaagaguucacaggagc

SEQ ID NO: 547174 - RNA, 19 nt, Artificial Sequence
  Description of Artificial Sequence: Synthetic oligonucleotide
ggagacauagcuugaaggg

SEQ ID NO: 547175 - RNA, 19 nt, Artificial Sequence
  Description of Artificial Sequence: Synthetic oligonucleotide
auccgcagguaccauagcc

SEQ ID NO: 547176 - RNA, 19 nt, Artificial Sequence
  Description of Artificial Sequence: Synthetic oligonucleotide
uggauaagugauuaucaga

SEQ ID NO: 547177 - RNA, 19 nt, Artificial Sequence
  Description of Artificial Sequence: Synthetic oligonucleotide
uggacugcagacuuccggg

SEQ ID NO: 547178 - RNA, 19 nt, Artificial Sequence
  Description of Artificial Sequence: Synthetic oligonucleotide
aggaagauagguuggauaa

SEQ ID NO: 547179 - RNA, 19 nt, Artificial Sequence
  Description of Artificial Sequence: Synthetic oligonucleotide
acucagaucauaaaaugag

SEQ ID NO: 547180 - RNA, 19 nt, Artificial Sequence
  Description of Artificial Sequence: Synthetic oligonucleotide
uuguuacuaacauccaaca

SEQ ID NO: 547181 - RNA, 19 nt, Artificial Sequence
  Description of Artificial Sequence: Synthetic oligonucleotide
aaaacuuucgucagugaga

SEQ ID NO: 547182 - RNA, 19 nt, Artificial Sequence
  Description of Artificial Sequence: Synthetic oligonucleotide
agauagguuggauaaguga

SEQ ID NO: 547183 - RNA, 19 nt, Artificial Sequence
  Description of Artificial Sequence: Synthetic oligonucleotide
uccgaauucuccaacugcu

SEQ ID NO: 547184 - RNA, 19 nt, Artificial Sequence
  Description of Artificial Sequence: Synthetic oligonucleotide
auaucaagggcccggaggu

SEQ ID NO: 547185 - RNA, 19 nt, Artificial Sequence
  Description of Artificial Sequence: Synthetic oligonucleotide
uguuacuaacauccaacac

SEQ ID NO: 547186 - RNA, 19 nt, Artificial Sequence
  Description of Artificial Sequence: Synthetic oligonucleotide
uguugaucccacuggacug

SEQ ID NO: 547187 - RNA, 19 nt, Artificial Sequence
  Description of Artificial Sequence: Synthetic oligonucleotide
auauagagcucucggagca

SEQ ID NO: 547188 - RNA, 19 nt, Artificial Sequence
  Description of Artificial Sequence: Synthetic oligonucleotide
ucuaccuccaacaguucug

SEQ ID NO: 547189 - RNA, 19 nt, Artificial Sequence
  Description of Artificial Sequence: Synthetic oligonucleotide
agacucaccaguuugggaa

SEQ ID NO: 547190 - RNA, 19 nt, Artificial Sequence
  Description of Artificial Sequence: Synthetic oligonucleotide
uuccgaauucuccaacugc

SEQ ID NO: 547191 - RNA, 19 nt, Artificial Sequence
  Description of Artificial Sequence: Synthetic oligonucleotide
uguuguuacuaacauccaa

SEQ ID NO: 547192 - RNA, 19 nt, Artificial Sequence
  Description of Artificial Sequence: Synthetic oligonucleotide
ugcaauaucaagggcccgg

SEQ ID NO: 547193 - RNA, 19 nt, Artificial Sequence
  Description of Artificial Sequence: Synthetic oligonucleotide
cuguaaaugugugagguug

SEQ ID NO: 547194 - RNA, 19 nt, Artificial Sequence
  Description of Artificial Sequence: Synthetic oligonucleotide
guuguuacuaacauccaac

SEQ ID NO: 547195 - RNA, 19 nt, Artificial Sequence
  Description of Artificial Sequence: Synthetic oligonucleotide
aaacgguucugccucaaaa

SEQ ID NO: 547196 - RNA, 19 nt, Artificial Sequence
  Description of Artificial Sequence: Synthetic oligonucleotide
uggaaauauagagcucucg

SEQ ID NO: 547197 - RNA, 19 nt, Artificial Sequence
  Description of Artificial Sequence: Synthetic oligonucleotide
uccgggcucauaauucugg

SEQ ID NO: 547198 - RNA, 19 nt, Artificial Sequence
  Description of Artificial Sequence: Synthetic oligonucleotide
cuaagggucuguaaaugug

SEQ ID NO: 547199 - RNA, 19 nt, Artificial Sequence
  Description of Artificial Sequence: Synthetic oligonucleotide
caucaagagaagucagucc

SEQ ID NO: 547200 - RNA, 19 nt, Artificial Sequence
  Description of Artificial Sequence: Synthetic oligonucleotide
aaacgaaaugagauuguug

SEQ ID NO: 547201 - RNA, 19 nt, Artificial Sequence
  Description of Artificial Sequence: Synthetic oligonucleotide
uaaggauuucccagcaagu

SEQ ID NO: 547202 - RNA, 19 nt, Artificial Sequence
  Description of Artificial Sequence: Synthetic oligonucleotide
aacgguucugccucaaaau

SEQ ID NO: 547203 - RNA, 19 nt, Artificial Sequence
  Description of Artificial Sequence: Synthetic oligonucleotide
ucuccaggaggguauauac

SEQ ID NO: 547204 - RNA, 19 nt, Artificial Sequence
  Description of Artificial Sequence: Synthetic oligonucleotide
uacccaaaacacuuccugc

SEQ ID NO: 547205 - RNA, 19 nt, Artificial Sequence
  Description of Artificial Sequence: Synthetic oligonucleotide
uugaauggacugcagacuu

SEQ ID NO: 547206 - RNA, 19 nt, Artificial Sequence
  Description of Artificial Sequence: Synthetic oligonucleotide
auggacugcagacuuccgg

SEQ ID NO: 547207 - RNA, 19 nt, Artificial Sequence
  Description of Artificial Sequence: Synthetic oligonucleotide
agcgcuuugauuucaaguu

SEQ ID NO: 547208 - RNA, 19 nt, Artificial Sequence
  Description of Artificial Sequence: Synthetic oligonucleotide
ucgcuguaggaaacaaagg

SEQ ID NO: 547209 - RNA, 19 nt, Artificial Sequence
  Description of Artificial Sequence: Synthetic oligonucleotide
uguaucccuguacuggaca

SEQ ID NO: 547210 - RNA, 19 nt, Artificial Sequence
  Description of Artificial Sequence: Synthetic oligonucleotide
cucaauagagucgaugaug

SEQ ID NO: 547211 - RNA, 19 nt, Artificial Sequence
  Description of Artificial Sequence: Synthetic oligonucleotide
auuaucuugcgaagcuugc

SEQ ID NO: 547212 - RNA, 19 nt, Artificial Sequence
  Description of Artificial Sequence: Synthetic oligonucleotide
auuagcguuucuacuuugc

SEQ ID NO: 547213 - RNA, 19 nt, Artificial Sequence
  Description of Artificial Sequence: Synthetic oligonucleotide
gacaccagacacuaguaga

SEQ ID NO: 547214 - RNA, 19 nt, Artificial Sequence
  Description of Artificial Sequence: Synthetic oligonucleotide
gacuuuauagcaguucuca

SEQ ID NO: 547215 - RNA, 19 nt, Artificial Sequence
  Description of Artificial Sequence: Synthetic oligonucleotide
ggaaacgcaucuuuccugg

SEQ ID NO: 547216 - RNA, 19 nt, Artificial Sequence
  Description of Artificial Sequence: Synthetic oligonucleotide
uacccuaagggucuguaaa

SEQ ID NO: 547217 - RNA, 19 nt, Artificial Sequence
  Description of Artificial Sequence: Synthetic oligonucleotide
ucaucggugaauucauuuc

SEQ ID NO: 547218 - RNA, 19 nt, Artificial Sequence
  Description of Artificial Sequence: Synthetic oligonucleotide
aaccuugcuguucucgacu

SEQ ID NO: 547219 - RNA, 19 nt, Artificial Sequence
  Description of Artificial Sequence: Synthetic oligonucleotide
uccaaauauucaagcuugc

SEQ ID NO: 547220 - RNA, 19 nt, Artificial Sequence
  Description of Artificial Sequence: Synthetic oligonucleotide
uuccggcugauaucaaggg

SEQ ID NO: 547221 - RNA, 19 nt, Artificial Sequence
  Description of Artificial Sequence: Synthetic oligonucleotide
aaaucgcccacuccauuga

SEQ ID NO: 547222 - RNA, 19 nt, Artificial Sequence
  Description of Artificial Sequence: Synthetic oligonucleotide
agacaccagacacuaguag

SEQ ID NO: 547223 - RNA, 19 nt, Artificial Sequence
  Description of Artificial Sequence: Synthetic oligonucleotide
ucaaauuuucgcugagguc

SEQ ID NO: 547224 - RNA, 19 nt, Artificial Sequence
  Description of Artificial Sequence: Synthetic oligonucleotide
uguuccggcugauaucaag

SEQ ID NO: 547225 - RNA, 19 nt, Artificial Sequence
  Description of Artificial Sequence: Synthetic oligonucleotide
uguaacgcaacagcuucag

SEQ ID NO: 547226 - RNA, 19 nt, Artificial Sequence
  Description of Artificial Sequence: Synthetic oligonucleotide
uuuuacugccuguaucccu

SEQ ID NO: 547227 - RNA, 19 nt, Artificial Sequence
  Description of Artificial Sequence: Synthetic oligonucleotide
uagcgcuuugauuucaagu

SEQ ID NO: 547228 - RNA, 19 nt, Artificial Sequence
  Description of Artificial Sequence: Synthetic oligonucleotide
ucguuguucucaucaaaga

SEQ ID NO: 547229 - RNA, 19 nt, Artificial Sequence
  Description of Artificial Sequence: Synthetic oligonucleotide
aaaacgaaaugagauuguu

SEQ ID NO: 547230 - RNA, 19 nt, Artificial Sequence
  Description of Artificial Sequence: Synthetic oligonucleotide
aaaugagauuguuguuacu

SEQ ID NO: 547231 - RNA, 19 nt, Artificial Sequence
  Description of Artificial Sequence: Synthetic oligonucleotide
agcguuucuacuuugccua

SEQ ID NO: 547232 - RNA, 19 nt, Artificial Sequence
  Description of Artificial Sequence: Synthetic oligonucleotide
uuauuagcguuucuacuuu

SEQ ID NO: 547233 - RNA, 19 nt, Artificial Sequence
  Description of Artificial Sequence: Synthetic oligonucleotide
aguacuuauggcauucucu

SEQ ID NO: 547234 - RNA, 19 nt, Artificial Sequence
  Description of Artificial Sequence: Synthetic oligonucleotide
uggagcuuguuccuggaaa

SEQ ID NO: 547235 - RNA, 19 nt, Artificial Sequence
  Description of Artificial Sequence: Synthetic oligonucleotide
auagagucgaugauguugu

SEQ ID NO: 547236 - RNA, 19 nt, Artificial Sequence
  Description of Artificial Sequence: Synthetic oligonucleotide
aacucagaguaucuucaaa

SEQ ID NO: 547237 - RNA, 19 nt, Artificial Sequence
  Description of Artificial Sequence: Synthetic oligonucleotide
aaacaggguuuuguggcuc

SEQ ID NO: 547238 - RNA, 19 nt, Artificial Sequence
  Description of Artificial Sequence: Synthetic oligonucleotide
uagcguuucuacuuugccu

SEQ ID NO: 547239 - RNA, 19 nt, Artificial Sequence
  Description of Artificial Sequence: Synthetic oligonucleotide
guauccuauaaggauuucc

SEQ ID NO: 547240 - RNA, 19 nt, Artificial Sequence
  Description of Artificial Sequence: Synthetic oligonucleotide
aucauagcaaaugucccug

SEQ ID NO: 547241 - RNA, 19 nt, Artificial Sequence
  Description of Artificial Sequence: Synthetic oligonucleotide
gucguuguucucaucaaag

SEQ ID NO: 547242 - RNA, 19 nt, Artificial Sequence
  Description of Artificial Sequence: Synthetic oligonucleotide
ucagacagguccaaauauu

SEQ ID NO: 547243 - RNA, 19 nt, Artificial Sequence
  Description of Artificial Sequence: Synthetic oligonucleotide
aaaccaggaugccggcguc

SEQ ID NO: 547244 - RNA, 19 nt, Artificial Sequence
  Description of Artificial Sequence: Synthetic oligonucleotide
agaaucuggggaugugcag

SEQ ID NO: 547245 - RNA, 19 nt, Artificial Sequence
  Description of Artificial Sequence: Synthetic oligonucleotide
aagauagguuggauaagug

SEQ ID NO: 547246 - RNA, 19 nt, Artificial Sequence
  Description of Artificial Sequence: Synthetic oligonucleotide
aaucgcccacuccauugag

SEQ ID NO: 547247 - RNA, 19 nt, Artificial Sequence
  Description of Artificial Sequence: Synthetic oligonucleotide
aagucccgcuuguggagac

SEQ ID NO: 547248 - RNA, 19 nt, Artificial Sequence
  Description of Artificial Sequence: Synthetic oligonucleotide
uuagcgcuuugauuucaag

SEQ ID NO: 547249 - RNA, 19 nt, Artificial Sequence
  Description of Artificial Sequence: Synthetic oligonucleotide
ucucaauagagucgaugau

SEQ ID NO: 547250 - RNA, 19 nt, Artificial Sequence
  Description of Artificial Sequence: Synthetic oligonucleotide
uaccauagcccauggaaau

SEQ ID NO: 547251 - RNA, 19 nt, Artificial Sequence
  Description of Artificial Sequence: Synthetic oligonucleotide
gguaccauagcccauggaa

SEQ ID NO: 547252 - RNA, 19 nt, Artificial Sequence
  Description of Artificial Sequence: Synthetic oligonucleotide
uauaaggauuucccagcaa

SEQ ID NO: 547253 - RNA, 19 nt, Artificial Sequence
  Description of Artificial Sequence: Synthetic oligonucleotide
gauagguuggauaagugau

SEQ ID NO: 547254 - RNA, 19 nt, Artificial Sequence
  Description of Artificial Sequence: Synthetic oligonucleotide
uucauccguggacaguucu

SEQ ID NO: 547255 - RNA, 19 nt, Artificial Sequence
  Description of Artificial Sequence: Synthetic oligonucleotide
uauauacaguacucagauc

SEQ ID NO: 547256 - RNA, 19 nt, Artificial Sequence
  Description of Artificial Sequence: Synthetic oligonucleotide
agguuccgaauucuccaac

SEQ ID NO: 547257 - RNA, 19 nt, Artificial Sequence
  Description of Artificial Sequence: Synthetic oligonucleotide
ucgcugagguccaagaauu

SEQ ID NO: 547258 - RNA, 19 nt, Artificial Sequence
  Description of Artificial Sequence: Synthetic oligonucleotide
gaacuaaguuggucuuuag

SEQ ID NO: 547259 - RNA, 19 nt, Artificial Sequence
  Description of Artificial Sequence: Synthetic oligonucleotide
auauucaagcuugcucagg

SEQ ID NO: 547260 - RNA, 19 nt, Artificial Sequence
  Description of Artificial Sequence: Synthetic oligonucleotide
acuuccgggcucauaauuc

SEQ ID NO: 547261 - RNA, 19 nt, Artificial Sequence
  Description of Artificial Sequence: Synthetic oligonucleotide
cucacuacgucugacucug

SEQ ID NO: 547262 - RNA, 19 nt, Artificial Sequence
  Description of Artificial Sequence: Synthetic oligonucleotide
caaagucccgcuuguggag

SEQ ID NO: 547263 - RNA, 19 nt, Artificial Sequence
  Description of Artificial Sequence: Synthetic oligonucleotide
caagaguucacaggagcag

SEQ ID NO: 547264 - RNA, 19 nt, Artificial Sequence
  Description of Artificial Sequence: Synthetic oligonucleotide
guuccgaauucuccaacug

SEQ ID NO: 547265 - RNA, 19 nt, Artificial Sequence
  Description of Artificial Sequence: Synthetic oligonucleotide
ugcguucuucaaauauucu

SEQ ID NO: 547266 - RNA, 19 nt, Artificial Sequence
  Description of Artificial Sequence: Synthetic oligonucleotide
ucucacuacgucugacucu

SEQ ID NO: 547267 - RNA, 19 nt, Artificial Sequence
  Description of Artificial Sequence: Synthetic oligonucleotide
uuaucuugcgaagcuugca

SEQ ID NO: 547268 - RNA, 19 nt, Artificial Sequence
  Description of Artificial Sequence: Synthetic oligonucleotide
gaggguauauacaguacuc

SEQ ID NO: 547269 - RNA, 19 nt, Artificial Sequence
  Description of Artificial Sequence: Synthetic oligonucleotide
gaggaagauagguuggaua

SEQ ID NO: 547270 - RNA, 19 nt, Artificial Sequence
  Description of Artificial Sequence: Synthetic oligonucleotide
aguagagucugguggcacu

SEQ ID NO: 547271 - RNA, 19 nt, Artificial Sequence
  Description of Artificial Sequence: Synthetic oligonucleotide
aaauuuucgcugaggucca

SEQ ID NO: 547272 - RNA, 19 nt, Artificial Sequence
  Description of Artificial Sequence: Synthetic oligonucleotide
ugaguagaaucuggggaug

SEQ ID NO: 547273 - RNA, 19 nt, Artificial Sequence
  Description of Artificial Sequence: Synthetic oligonucleotide
acuuaggugaaagguuaag

SEQ ID NO: 547274 - RNA, 19 nt, Artificial Sequence
  Description of Artificial Sequence: Synthetic oligonucleotide
cugaaagcuguuccggcug

SEQ ID NO: 547275 - RNA, 19 nt, Artificial Sequence
  Description of Artificial Sequence: Synthetic oligonucleotide
ucgcuccgcacaaaguucu

SEQ ID NO: 547276 - RNA, 19 nt, Artificial Sequence
  Description of Artificial Sequence: Synthetic oligonucleotide
ccacuugccaggaacaaag

SEQ ID NO: 547277 - RNA, 19 nt, Artificial Sequence
  Description of Artificial Sequence: Synthetic oligonucleotide
ucaacaguacaagggcaca

SEQ ID NO: 547278 - RNA, 19 nt, Artificial Sequence
  Description of Artificial Sequence: Synthetic oligonucleotide
caggccaccuaugagcagg

SEQ ID NO: 547279 - RNA, 19 nt, Artificial Sequence
  Description of Artificial Sequence: Synthetic oligonucleotide
caucggugaauucauuuca

SEQ ID NO: 547280 - RNA, 19 nt, Artificial Sequence
  Description of Artificial Sequence: Synthetic oligonucleotide
cuuuagagaaaguacuuau

SEQ ID NO: 547281 - RNA, 19 nt, Artificial Sequence
  Description of Artificial Sequence: Synthetic oligonucleotide
acucgcuccgcacaaaguu

SEQ ID NO: 547282 - RNA, 19 nt, Artificial Sequence
  Description of Artificial Sequence: Synthetic oligonucleotide
ucauaauucuggagacuua

SEQ ID NO: 547283 - RNA, 19 nt, Artificial Sequence
  Description of Artificial Sequence: Synthetic oligonucleotide
acaagaguucacaggagca

SEQ ID NO: 547284 - RNA, 19 nt, Artificial Sequence
  Description of Artificial Sequence: Synthetic oligonucleotide
caucgggagaguguggagc

SEQ ID NO: 547285 - RNA, 19 nt, Artificial Sequence
  Description of Artificial Sequence: Synthetic oligonucleotide
guaaaugugugagguugag

SEQ ID NO: 547286 - RNA, 19 nt, Artificial Sequence
  Description of Artificial Sequence: Synthetic oligonucleotide
ucgucagugagaucugcau

SEQ ID NO: 547287 - RNA, 19 nt, Artificial Sequence
  Description of Artificial Sequence: Synthetic oligonucleotide
ucccagcaaguuuagguau

SEQ ID NO: 547288 - RNA, 19 nt, Artificial Sequence
  Description of Artificial Sequence: Synthetic oligonucleotide
cgcuguaggaaacaaaggc

SEQ ID NO: 547289 - RNA, 19 nt, Artificial Sequence
  Description of Artificial Sequence: Synthetic oligonucleotide
gggcucauaauucuggaga

SEQ ID NO: 547290 - RNA, 19 nt, Artificial Sequence
  Description of Artificial Sequence: Synthetic oligonucleotide
aggaggguauauacaguac

SEQ ID NO: 547291 - RNA, 19 nt, Artificial Sequence
  Description of Artificial Sequence: Synthetic oligonucleotide
ucggugaauucauuucauc

SEQ ID NO: 547292 - RNA, 19 nt, Artificial Sequence
  Description of Artificial Sequence: Synthetic oligonucleotide
cuuugccuagcucucucac

SEQ ID NO: 547293 - RNA, 19 nt, Artificial Sequence
  Description of Artificial Sequence: Synthetic oligonucleotide
ugaauggacugcagacuuc

SEQ ID NO: 547294 - RNA, 19 nt, Artificial Sequence
  Description of Artificial Sequence: Synthetic oligonucleotide
aauggacugcagacuuccg

SEQ ID NO: 547295 - RNA, 19 nt, Artificial Sequence
  Description of Artificial Sequence: Synthetic oligonucleotide
cggugaauucauuucaucc

SEQ ID NO: 547296 - RNA, 19 nt, Artificial Sequence
  Description of Artificial Sequence: Synthetic oligonucleotide
agugauuaucagacagguc

SEQ ID NO: 547297 - RNA, 19 nt, Artificial Sequence
  Description of Artificial Sequence: Synthetic oligonucleotide
aacuuucgucagugagauc

SEQ ID NO: 547298 - RNA, 19 nt, Artificial Sequence
  Description of Artificial Sequence: Synthetic oligonucleotide
cagcaaaaccaggaugccg

SEQ ID NO: 547299 - RNA, 19 nt, Artificial Sequence
  Description of Artificial Sequence: Synthetic oligonucleotide
agguucacacaccccgaag

SEQ ID NO: 547300 - RNA, 19 nt, Artificial Sequence
  Description of Artificial Sequence: Synthetic oligonucleotide
cacuacgucugacucugag

SEQ ID NO: 547301 - RNA, 19 nt, Artificial Sequence
  Description of Artificial Sequence: Synthetic oligonucleotide
acgucugacucugagggcu

SEQ ID NO: 547302 - RNA, 19 nt, Artificial Sequence
  Description of Artificial Sequence: Synthetic oligonucleotide
acgguucugccucaaaauu

SEQ ID NO: 547303 - RNA, 19 nt, Artificial Sequence
  Description of Artificial Sequence: Synthetic oligonucleotide
ggcucauaauucuggagac

SEQ ID NO: 547304 - RNA, 19 nt, Artificial Sequence
  Description of Artificial Sequence: Synthetic oligonucleotide
cuagcucucucacuacguc

SEQ ID NO: 547305 - RNA, 19 nt, Artificial Sequence
  Description of Artificial Sequence: Synthetic oligonucleotide
uacuugcaccacucgcucc

SEQ ID NO: 547306 - RNA, 19 nt, Artificial Sequence
  Description of Artificial Sequence: Synthetic oligonucleotide
agccuccguauuauuagcg

SEQ ID NO: 547307 - RNA, 19 nt, Artificial Sequence
  Description of Artificial Sequence: Synthetic oligonucleotide
uuccgggcucauaauucug

SEQ ID NO: 547308 - RNA, 19 nt, Artificial Sequence
  Description of Artificial Sequence: Synthetic oligonucleotide
agggucuguaaauguguga

SEQ ID NO: 547309 - RNA, 19 nt, Artificial Sequence
  Description of Artificial Sequence: Synthetic oligonucleotide
aaccaggaugccggcgucg

SEQ ID NO: 547310 - RNA, 19 nt, Artificial Sequence
  Description of Artificial Sequence: Synthetic oligonucleotide
guugaucccacuggacugc

SEQ ID NO: 547311 - RNA, 19 nt, Artificial Sequence
  Description of Artificial Sequence: Synthetic oligonucleotide
aagggagguuccgaauucu

SEQ ID NO: 547312 - RNA, 19 nt, Artificial Sequence
  Description of Artificial Sequence: Synthetic oligonucleotide
agaacuaaguuggucuuua

SEQ ID NO: 547313 - RNA, 19 nt, Artificial Sequence
  Description of Artificial Sequence: Synthetic oligonucleotide
aggcaucauagcaaauguc

SEQ ID NO: 547314 - RNA, 19 nt, Artificial Sequence
  Description of Artificial Sequence: Synthetic oligonucleotide
cuugaagggagguuccgaa

SEQ ID NO: 547315 - RNA, 19 nt, Artificial Sequence
  Description of Artificial Sequence: Synthetic oligonucleotide
uacgucugacucugagggc

SEQ ID NO: 547316 - RNA, 19 nt, Artificial Sequence
  Description of Artificial Sequence: Synthetic oligonucleotide
uaucccuguacuggacaag

SEQ ID NO: 547317 - RNA, 19 nt, Artificial Sequence
  Description of Artificial Sequence: Synthetic oligonucleotide
cacagguaacugucuggcc

SEQ ID NO: 547318 - RNA, 19 nt, Artificial Sequence
  Description of Artificial Sequence: Synthetic oligonucleotide
uucaaacgguucugccuca

SEQ ID NO: 547319 - RNA, 19 nt, Artificial Sequence
  Description of Artificial Sequence: Synthetic oligonucleotide
uccguauuauuagcguuuc

SEQ ID NO: 547320 - RNA, 19 nt, Artificial Sequence
  Description of Artificial Sequence: Synthetic oligonucleotide
cuuucgucagugagaucug

SEQ ID NO: 547321 - RNA, 19 nt, Artificial Sequence
  Description of Artificial Sequence: Synthetic oligonucleotide
acccuaagggucuguaaau

SEQ ID NO: 547322 - RNA, 19 nt, Artificial Sequence
  Description of Artificial Sequence: Synthetic oligonucleotide
accuaggacuuuauagcag

SEQ ID NO: 547323 - RNA, 19 nt, Artificial Sequence
  Description of Artificial Sequence: Synthetic oligonucleotide
cagccuccguauuauuagc

SEQ ID NO: 547324 - RNA, 19 nt, Artificial Sequence
  Description of Artificial Sequence: Synthetic oligonucleotide
gacuuagcgcuuugauuuc

SEQ ID NO: 547325 - RNA, 19 nt, Artificial Sequence
  Description of Artificial Sequence: Synthetic oligonucleotide
aacuuucuccaggagggua

SEQ ID NO: 547326 - RNA, 19 nt, Artificial Sequence
  Description of Artificial Sequence: Synthetic oligonucleotide
cucgcuccgcacaaaguuc

SEQ ID NO: 547327 - RNA, 19 nt, Artificial Sequence
  Description of Artificial Sequence: Synthetic oligonucleotide
auuuucgcugagguccaag

SEQ ID NO: 547328 - RNA, 19 nt, Artificial Sequence
  Description of Artificial Sequence: Synthetic oligonucleotide
gccuguaucccuguacugg

SEQ ID NO: 547329 - RNA, 19 nt, Artificial Sequence
  Description of Artificial Sequence: Synthetic oligonucleotide
acgcaucuuuccuggccac

SEQ ID NO: 547330 - RNA, 19 nt, Artificial Sequence
  Description of Artificial Sequence: Synthetic oligonucleotide
cuccaacaguucuggagug

SEQ ID NO: 547331 - RNA, 19 nt, Artificial Sequence
  Description of Artificial Sequence: Synthetic oligonucleotide
cacaggccaccuaugagca

SEQ ID NO: 547332 - RNA, 19 nt, Artificial Sequence
  Description of Artificial Sequence: Synthetic oligonucleotide
acaggcugcguucuucaaa

SEQ ID NO: 547333 - RNA, 19 nt, Artificial Sequence
  Description of Artificial Sequence: Synthetic oligonucleotide
acgaaaugagauuguuguu

SEQ ID NO: 547334 - RNA, 19 nt, Artificial Sequence
  Description of Artificial Sequence: Synthetic oligonucleotide
gaacucagaguaucuucaa

SEQ ID NO: 547335 - RNA, 19 nt, Artificial Sequence
  Description of Artificial Sequence: Synthetic oligonucleotide
aucccuguacuggacaagu

SEQ ID NO: 547336 - RNA, 19 nt, Artificial Sequence
  Description of Artificial Sequence: Synthetic oligonucleotide
gacacuaguagagucuggu

SEQ ID NO: 547337 - RNA, 19 nt, Artificial Sequence
  Description of Artificial Sequence: Synthetic oligonucleotide
ugucccugcaaggagcuuu

SEQ ID NO: 547338 - RNA, 19 nt, Artificial Sequence
  Description of Artificial Sequence: Synthetic oligonucleotide
cagagucugagggaugcac

SEQ ID NO: 547339 - RNA, 19 nt, Artificial Sequence
  Description of Artificial Sequence: Synthetic oligonucleotide
gaaaacgaaaugagauugu

SEQ ID NO: 547340 - RNA, 19 nt, Artificial Sequence
  Description of Artificial Sequence: Synthetic oligonucleotide
accauagcccauggaaaug

SEQ ID NO: 547341 - RNA, 19 nt, Artificial Sequence
  Description of Artificial Sequence: Synthetic oligonucleotide
cagguaccauagcccaugg

SEQ ID NO: 547342 - RNA, 19 nt, Artificial Sequence
  Description of Artificial Sequence: Synthetic oligonucleotide
ggucuuuagagaaaguacu

SEQ ID NO: 547343 - RNA, 19 nt, Artificial Sequence
  Description of Artificial Sequence: Synthetic oligonucleotide
gcugaaaaucgcccacucc

SEQ ID NO: 547344 - RNA, 19 nt, Artificial Sequence
  Description of Artificial Sequence: Synthetic oligonucleotide
auuaucagacagguccaaa

SEQ ID NO: 547345 - RNA, 19 nt, Artificial Sequence
  Description of Artificial Sequence: Synthetic oligonucleotide
gagucaggcauagacugaa

SEQ ID NO: 547346 - RNA, 19 nt, Artificial Sequence
  Description of Artificial Sequence: Synthetic oligonucleotide
guaccauagcccauggaaa

SEQ ID NO: 547347 - RNA, 19 nt, Artificial Sequence
  Description of Artificial Sequence: Synthetic oligonucleotide
gagacuuagcgcuuugauu

SEQ ID NO: 547348 - RNA, 19 nt, Artificial Sequence
  Description of Artificial Sequence: Synthetic oligonucleotide
cggagguucacacaccccg

SEQ ID NO: 547349 - RNA, 19 nt, Artificial Sequence
  Description of Artificial Sequence: Synthetic oligonucleotide
ucucggagcagaggcaaaa

SEQ ID NO: 547350 - RNA, 19 nt, Artificial Sequence
  Description of Artificial Sequence: Synthetic oligonucleotide
caggaugccggcgucguug

SEQ ID NO: 547351 - RNA, 19 nt, Artificial Sequence
  Description of Artificial Sequence: Synthetic oligonucleotide
agagucugagggaugcaca

SEQ ID NO: 547352 - RNA, 19 nt, Artificial Sequence
  Description of Artificial Sequence: Synthetic oligonucleotide
cuuaggugaaagguuaagu

SEQ ID NO: 547353 - RNA, 19 nt, Artificial Sequence
  Description of Artificial Sequence: Synthetic oligonucleotide
gagguuccgaauucuccaa

SEQ ID NO: 547354 - RNA, 19 nt, Artificial Sequence
  Description of Artificial Sequence: Synthetic oligonucleotide
ggaggguauauacaguacu

SEQ ID NO: 547355 - RNA, 19 nt, Artificial Sequence
  Description of Artificial Sequence: Synthetic oligonucleotide
aggucuugguguucauuau

SEQ ID NO: 547356 - RNA, 19 nt, Artificial Sequence
  Description of Artificial Sequence: Synthetic oligonucleotide
gccuagcucucucacuacg

SEQ ID NO: 547357 - RNA, 19 nt, Artificial Sequence
  Description of Artificial Sequence: Synthetic oligonucleotide
gaucugcauuuuggaaugc

SEQ ID NO: 547358 - RNA, 19 nt, Artificial Sequence
  Description of Artificial Sequence: Synthetic oligonucleotide
uggagacuuagcgcuuuga

SEQ ID NO: 547359 - RNA, 19 nt, Artificial Sequence
  Description of Artificial Sequence: Synthetic oligonucleotide
auagguuggauaagugauu

SEQ ID NO: 547360 - RNA, 19 nt, Artificial Sequence
  Description of Artificial Sequence: Synthetic oligonucleotide
acagaacucagaguaucuu

SEQ ID NO: 547361 - RNA, 19 nt, Artificial Sequence
  Description of Artificial Sequence: Synthetic oligonucleotide
acuuagcgcuuugauuuca

SEQ ID NO: 547362 - RNA, 19 nt, Artificial Sequence
  Description of Artificial Sequence: Synthetic oligonucleotide
uguucucgacugugauucu

SEQ ID NO: 547363 - RNA, 19 nt, Artificial Sequence
  Description of Artificial Sequence: Synthetic oligonucleotide
gcaaaugucccugcaagga

SEQ ID NO: 547364 - RNA, 19 nt, Artificial Sequence
  Description of Artificial Sequence: Synthetic oligonucleotide
agacacuaguagagucugg

SEQ ID NO: 547365 - RNA, 19 nt, Artificial Sequence
  Description of Artificial Sequence: Synthetic oligonucleotide
ggacccucuggccacgcag

SEQ ID NO: 547366 - RNA, 19 nt, Artificial Sequence
  Description of Artificial Sequence: Synthetic oligonucleotide
cauuuccuacccuaagggu

SEQ ID NO: 547367 - RNA, 19 nt, Artificial Sequence
  Description of Artificial Sequence: Synthetic oligonucleotide
cuccaggaggguauauaca

SEQ ID NO: 547368 - RNA, 19 nt, Artificial Sequence
  Description of Artificial Sequence: Synthetic oligonucleotide
ggacugcaauaucaagggc

SEQ ID NO: 547369 - RNA, 19 nt, Artificial Sequence
  Description of Artificial Sequence: Synthetic oligonucleotide
cugugauucucuuaacuuu

SEQ ID NO: 547370 - RNA, 19 nt, Artificial Sequence
  Description of Artificial Sequence: Synthetic oligonucleotide
cugccucaaaauuaaaguu

SEQ ID NO: 547371 - RNA, 19 nt, Artificial Sequence
  Description of Artificial Sequence: Synthetic oligonucleotide
gagguucacacaccccgaa

SEQ ID NO: 547372 - RNA, 19 nt, Artificial Sequence
  Description of Artificial Sequence: Synthetic oligonucleotide
cucauaauucuggagacuu

SEQ ID NO: 547373 - RNA, 19 nt, Artificial Sequence
  Description of Artificial Sequence: Synthetic oligonucleotide
ugccuagcucucucacuac

SEQ ID NO: 547374 - RNA, 19 nt, Artificial Sequence
  Description of Artificial Sequence: Synthetic oligonucleotide
agaguucacaggagcagau

SEQ ID NO: 547375 - RNA, 19 nt, Artificial Sequence
  Description of Artificial Sequence: Synthetic oligonucleotide
cugcaauaucaagggcccg

SEQ ID NO: 547376 - RNA, 19 nt, Artificial Sequence
  Description of Artificial Sequence: Synthetic oligonucleotide
ggcccggagguucacacac

SEQ ID NO: 547377 - RNA, 19 nt, Artificial Sequence
  Description of Artificial Sequence: Synthetic oligonucleotide
aggaugccggcgucguugu

SEQ ID NO: 547378 - RNA, 19 nt, Artificial Sequence
  Description of Artificial Sequence: Synthetic oligonucleotide
guagagucugguggcacuc

SEQ ID NO: 547379 - RNA, 19 nt, Artificial Sequence
  Description of Artificial Sequence: Synthetic oligonucleotide
ugcccucacaggcugcguu

SEQ ID NO: 547380 - RNA, 19 nt, Artificial Sequence
  Description of Artificial Sequence: Synthetic oligonucleotide
agucgaugauguugucaau

SEQ ID NO: 547381 - RNA, 19 nt, Artificial Sequence
  Description of Artificial Sequence: Synthetic oligonucleotide
aucggugaauucauuucau

SEQ ID NO: 547382 - RNA, 19 nt, Artificial Sequence
  Description of Artificial Sequence: Synthetic oligonucleotide
ugcucgcuguaggaaacaa

SEQ ID NO: 547383 - RNA, 19 nt, Artificial Sequence
  Description of Artificial Sequence: Synthetic oligonucleotide
cuuagcgcuuugauuucaa

SEQ ID NO: 547384 - RNA, 19 nt, Artificial Sequence
  Description of Artificial Sequence: Synthetic oligonucleotide
guaacgcaacagcuucaga

SEQ ID NO: 547385 - RNA, 19 nt, Artificial Sequence
  Description of Artificial Sequence: Synthetic oligonucleotide
gcagguaccauagcccaug

SEQ ID NO: 547386 - RNA, 19 nt, Artificial Sequence
  Description of Artificial Sequence: Synthetic oligonucleotide
uugcaccacucgcuccgca

SEQ ID NO: 547387 - RNA, 19 nt, Artificial Sequence
  Description of Artificial Sequence: Synthetic oligonucleotide
agguaccauagcccaugga

SEQ ID NO: 547388 - RNA, 19 nt, Artificial Sequence
  Description of Artificial Sequence: Synthetic oligonucleotide
guucucgacugugauucuc

SEQ ID NO: 547389 - RNA, 19 nt, Artificial Sequence
  Description of Artificial Sequence: Synthetic oligonucleotide
ggacaagaguucacaggag

SEQ ID NO: 547390 - RNA, 19 nt, Artificial Sequence
  Description of Artificial Sequence: Synthetic oligonucleotide
guucuggaguguaacgcaa

SEQ ID NO: 547391 - RNA, 19 nt, Artificial Sequence
  Description of Artificial Sequence: Synthetic oligonucleotide
ucaaacgguucugccucaa

SEQ ID NO: 547392 - RNA, 19 nt, Artificial Sequence
  Description of Artificial Sequence: Synthetic oligonucleotide
gacugagggccgggcaucc

SEQ ID NO: 547393 - RNA, 19 nt, Artificial Sequence
  Description of Artificial Sequence: Synthetic oligonucleotide
cauccgcagguaccauagc

SEQ ID NO: 547394 - RNA, 19 nt, Artificial Sequence
  Description of Artificial Sequence: Synthetic oligonucleotide
cacuccauugagggugcag

SEQ ID NO: 547395 - RNA, 19 nt, Artificial Sequence
  Description of Artificial Sequence: Synthetic oligonucleotide
gaaaaucgcccacuccauu

SEQ ID NO: 547396 - RNA, 19 nt, Artificial Sequence
  Description of Artificial Sequence: Synthetic oligonucleotide
cuuccgggcucauaauucu

SEQ ID NO: 547397 - RNA, 19 nt, Artificial Sequence
  Description of Artificial Sequence: Synthetic oligonucleotide
gacuuccgggcucauaauu

SEQ ID NO: 547398 - RNA, 19 nt, Artificial Sequence
  Description of Artificial Sequence: Synthetic oligonucleotide
cuacccuaagggucuguaa

SEQ ID NO: 547399 - RNA, 19 nt, Artificial Sequence
  Description of Artificial Sequence: Synthetic oligonucleotide
aauuuucgcugagguccaa

SEQ ID NO: 547400 - RNA, 19 nt, Artificial Sequence
  Description of Artificial Sequence: Synthetic oligonucleotide
auccguggacaguucugaa

SEQ ID NO: 547401 - RNA, 19 nt, Artificial Sequence
  Description of Artificial Sequence: Synthetic oligonucleotide
caggcugcguucuucaaau

SEQ ID NO: 547402 - RNA, 19 nt, Artificial Sequence
  Description of Artificial Sequence: Synthetic oligonucleotide
cuccacccaguaggaaucc

SEQ ID NO: 547403 - RNA, 19 nt, Artificial Sequence
  Description of Artificial Sequence: Synthetic oligonucleotide
gcucagggaagaaaaggca

SEQ ID NO: 547404 - RNA, 19 nt, Artificial Sequence
  Description of Artificial Sequence: Synthetic oligonucleotide
ccagacucaccaguuuggg

SEQ ID NO: 547405 - RNA, 19 nt, Artificial Sequence
  Description of Artificial Sequence: Synthetic oligonucleotide
ggaacaaagucccgcuugu

SEQ ID NO: 547406 - RNA, 19 nt, Artificial Sequence
  Description of Artificial Sequence: Synthetic oligonucleotide
cugccuguaucccuguacu

SEQ ID NO: 547407 - RNA, 19 nt, Artificial Sequence
  Description of Artificial Sequence: Synthetic oligonucleotide
ucacuacgucugacucuga

SEQ ID NO: 547408 - RNA, 19 nt, Artificial Sequence
  Description of Artificial Sequence: Synthetic oligonucleotide
ccgaauucuccaacugcug

SEQ ID NO: 547409 - RNA, 19 nt, Artificial Sequence
  Description of Artificial Sequence: Synthetic oligonucleotide
gcguuucuacuuugccuag

SEQ ID NO: 547410 - RNA, 19 nt, Artificial Sequence
  Description of Artificial Sequence: Synthetic oligonucleotide
ccugcucgcuguaggaaac

SEQ ID NO: 547411 - RNA, 19 nt, Artificial Sequence
  Description of Artificial Sequence: Synthetic oligonucleotide
guugagaaacagugguguu

SEQ ID NO: 547412 - RNA, 19 nt, Artificial Sequence
  Description of Artificial Sequence: Synthetic oligonucleotide
guuaagugauggaugcuuu

SEQ ID NO: 547413 - RNA, 19 nt, Artificial Sequence
  Description of Artificial Sequence: Synthetic oligonucleotide
ccuguaucccuguacugga

SEQ ID NO: 547414 - RNA, 19 nt, Artificial Sequence
  Description of Artificial Sequence: Synthetic oligonucleotide
cccauggaaaugguggcac

SEQ ID NO: 547415 - RNA, 19 nt, Artificial Sequence
  Description of Artificial Sequence: Synthetic oligonucleotide
ggagagucacacagguaac

SEQ ID NO: 547416 - RNA, 19 nt, Artificial Sequence
  Description of Artificial Sequence: Synthetic oligonucleotide
cagcaaguuuagguauuuc

SEQ ID NO: 547417 - RNA, 19 nt, Artificial Sequence
  Description of Artificial Sequence: Synthetic oligonucleotide
cucgacugugauucucuua

SEQ ID NO: 547418 - RNA, 19 nt, Artificial Sequence
  Description of Artificial Sequence: Synthetic oligonucleotide
gaagucaguccagcaaaau

SEQ ID NO: 547419 - RNA, 19 nt, Artificial Sequence
  Description of Artificial Sequence: Synthetic oligonucleotide
cccuaagggucuguaaaug

SEQ ID NO: 547420 - RNA, 19 nt, Artificial Sequence
  Description of Artificial Sequence: Synthetic oligonucleotide
gguuaagugauggaugcuu

SEQ ID NO: 547421 - RNA, 19 nt, Artificial Sequence
  Description of Artificial Sequence: Synthetic oligonucleotide
ccucuaugguguugauccc

SEQ ID NO: 547422 - RNA, 19 nt, Artificial Sequence
  Description of Artificial Sequence: Synthetic oligonucleotide
ggagacuuagcgcuuugau

SEQ ID NO: 547423 - RNA, 19 nt, Artificial Sequence
  Description of Artificial Sequence: Synthetic oligonucleotide
ugggugcuccaaggugaag

SEQ ID NO: 547424 - RNA, 19 nt, Artificial Sequence
  Description of Artificial Sequence: Synthetic oligonucleotide
guucucagauuuacccaaa

SEQ ID NO: 547425 - RNA, 19 nt, Artificial Sequence
  Description of Artificial Sequence: Synthetic oligonucleotide
ggcugcguucuucaaauau

SEQ ID NO: 547426 - RNA, 19 nt, Artificial Sequence
  Description of Artificial Sequence: Synthetic oligonucleotide
agcucucggagcagaggca

SEQ ID NO: 547427 - RNA, 19 nt, Artificial Sequence
  Description of Artificial Sequence: Synthetic oligonucleotide
ccuaagggucuguaaaugu

SEQ ID NO: 547428 - RNA, 19 nt, Artificial Sequence
  Description of Artificial Sequence: Synthetic oligonucleotide
gcaauaucaagggcccgga

SEQ ID NO: 547429 - RNA, 19 nt, Artificial Sequence
  Description of Artificial Sequence: Synthetic oligonucleotide
gcgggagggagagucacac

SEQ ID NO: 547430 - RNA, 19 nt, Artificial Sequence
  Description of Artificial Sequence: Synthetic oligonucleotide
cauagcccauggaaauggu

SEQ ID NO: 547431 - RNA, 19 nt, Artificial Sequence
  Description of Artificial Sequence: Synthetic oligonucleotide
caaacgguucugccucaaa

SEQ ID NO: 547432 - RNA, 19 nt, Artificial Sequence
  Description of Artificial Sequence: Synthetic oligonucleotide
gucccugcaaggagcuuuc

SEQ ID NO: 547433 - RNA, 19 nt, Artificial Sequence
  Description of Artificial Sequence: Synthetic oligonucleotide
ccagacacuaguagagucu

SEQ ID NO: 547434 - RNA, 19 nt, Artificial Sequence
  Description of Artificial Sequence: Synthetic oligonucleotide
cgggcucauaauucuggag

SEQ ID NO: 547435 - RNA, 19 nt, Artificial Sequence
  Description of Artificial Sequence: Synthetic oligonucleotide
gcaccacucgcuccgcaca

SEQ ID NO: 547436 - RNA, 19 nt, Artificial Sequence
  Description of Artificial Sequence: Synthetic oligonucleotide
ucccgcuuguggagacaua

SEQ ID NO: 547437 - RNA, 19 nt, Artificial Sequence
  Description of Artificial Sequence: Synthetic oligonucleotide
cagacugacuuaggugaaa

SEQ ID NO: 547438 - RNA, 19 nt, Artificial Sequence
  Description of Artificial Sequence: Synthetic oligonucleotide
aggcugcguucuucaaaua

SEQ ID NO: 547439 - RNA, 19 nt, Artificial Sequence
  Description of Artificial Sequence: Synthetic oligonucleotide
gccuccguauuauuagcgu

SEQ ID NO: 547440 - RNA, 19 nt, Artificial Sequence
  Description of Artificial Sequence: Synthetic oligonucleotide
agucccgcuuguggagaca

SEQ ID NO: 547441 - RNA, 19 nt, Artificial Sequence
  Description of Artificial Sequence: Synthetic oligonucleotide
cuaugguguugaucccacu

SEQ ID NO: 547442 - RNA, 19 nt, Artificial Sequence
  Description of Artificial Sequence: Synthetic oligonucleotide
ucccugcaaggagcuuucu

SEQ ID NO: 547443 - RNA, 19 nt, Artificial Sequence
  Description of Artificial Sequence: Synthetic oligonucleotide
gcccucacaggcugcguuc

SEQ ID NO: 547444 - RNA, 19 nt, Artificial Sequence
  Description of Artificial Sequence: Synthetic oligonucleotide
caccacucgcuccgcacaa

SEQ ID NO: 547445 - RNA, 19 nt, Artificial Sequence
  Description of Artificial Sequence: Synthetic oligonucleotide
ccauggaaaugguggcaca

SEQ ID NO: 547446 - RNA, 19 nt, Artificial Sequence
  Description of Artificial Sequence: Synthetic oligonucleotide
cacucgcuccgcacaaagu

SEQ ID NO: 547447 - RNA, 19 nt, Artificial Sequence
  Description of Artificial Sequence: Synthetic oligonucleotide
ccaaauauucaagcuugcu

SEQ ID NO: 547448 - RNA, 19 nt, Artificial Sequence
  Description of Artificial Sequence: Synthetic oligonucleotide
gcgucguuguucucaucaa

SEQ ID NO: 547449 - RNA, 19 nt, Artificial Sequence
  Description of Artificial Sequence: Synthetic oligonucleotide
caccagacacuaguagagu

SEQ ID NO: 547450 - RNA, 19 nt, Artificial Sequence
  Description of Artificial Sequence: Synthetic oligonucleotide
gcugcguucuucaaauauu

SEQ ID NO: 547451 - RNA, 19 nt, Artificial Sequence
  Description of Artificial Sequence: Synthetic oligonucleotide
gggccauuccagguagguc

SEQ ID NO: 547452 - RNA, 19 nt, Artificial Sequence
  Description of Artificial Sequence: Synthetic oligonucleotide
ggaacuggguggagaaccu

SEQ ID NO: 547453 - RNA, 19 nt, Artificial Sequence
  Description of Artificial Sequence: Synthetic oligonucleotide
gcuguucucgacugugauu

SEQ ID NO: 547454 - RNA, 19 nt, Artificial Sequence
  Description of Artificial Sequence: Synthetic oligonucleotide
gucccgcuuguggagacau

SEQ ID NO: 547455 - RNA, 19 nt, Artificial Sequence
  Description of Artificial Sequence: Synthetic oligonucleotide
caccuaugagcaggaucaa

SEQ ID NO: 547456 - RNA, 19 nt, Artificial Sequence
  Description of Artificial Sequence: Synthetic oligonucleotide
ccuccguauuauuagcguu

SEQ ID NO: 547457 - RNA, 19 nt, Artificial Sequence
  Description of Artificial Sequence: Synthetic oligonucleotide
ggcaagagucaggcauaga

SEQ ID NO: 547458 - RNA, 19 nt, Artificial Sequence
  Description of Artificial Sequence: Synthetic oligonucleotide
gggcugaaaaucgcccacu

SEQ ID NO: 547459 - RNA, 19 nt, Artificial Sequence
  Description of Artificial Sequence: Synthetic oligonucleotide
ccuacccuaagggucugua

SEQ ID NO: 547460 - RNA, 19 nt, Artificial Sequence
  Description of Artificial Sequence: Synthetic oligonucleotide
cgcccacaucauccgcagg

SEQ ID NO: 547461 - RNA, 19 nt, Artificial Sequence
  Description of Artificial Sequence: Synthetic oligonucleotide
cccagcaaguuuagguauu

SEQ ID NO: 547462 - RNA, 19 nt, Artificial Sequence
  Description of Artificial Sequence: Synthetic oligonucleotide
caucauccgcagguaccau

SEQ ID NO: 547463 - RNA, 19 nt, Artificial Sequence
  Description of Artificial Sequence: Synthetic oligonucleotide
ccguauuauuagcguuucu

SEQ ID NO: 547464 - RNA, 19 nt, Artificial Sequence
  Description of Artificial Sequence: Synthetic oligonucleotide
cgcuccgcacaaaguucuc

SEQ ID NO: 547465 - RNA, 19 nt, Artificial Sequence
  Description of Artificial Sequence: Synthetic oligonucleotide
ccagcaaguuuagguauuu

SEQ ID NO: 547466 - RNA, 19 nt, Artificial Sequence
  Description of Artificial Sequence: Synthetic oligonucleotide
gccacgcaggcgggaggga

SEQ ID NO: 547467 - RNA, 19 nt, Artificial Sequence
  Description of Artificial Sequence: Synthetic oligonucleotide
ccaggaugccggcgucguu

SEQ ID NO: 547468 - RNA, 19 nt, Artificial Sequence
  Description of Artificial Sequence: Synthetic oligonucleotide
aagaagaugagccaauacc

SEQ ID NO: 547469 - RNA, 19 nt, Artificial Sequence
  Description of Artificial Sequence: Synthetic oligonucleotide
uuuaaaacuucuuuaaccg

SEQ ID NO: 547470 - RNA, 19 nt, Artificial Sequence
  Description of Artificial Sequence: Synthetic oligonucleotide
gauucauugaaauaggucc

SEQ ID NO: 547471 - RNA, 19 nt, Artificial Sequence
  Description of Artificial Sequence: Synthetic oligonucleotide
uuuagaaggaccaauagug

SEQ ID NO: 547472 - RNA, 19 nt, Artificial Sequence
  Description of Artificial Sequence: Synthetic oligonucleotide
aaagauagagguuuaacca

SEQ ID NO: 547473 - RNA, 19 nt, Artificial Sequence
  Description of Artificial Sequence: Synthetic oligonucleotide
aauugcaccaauagcaucc

SEQ ID NO: 547474 - RNA, 19 nt, Artificial Sequence
  Description of Artificial Sequence: Synthetic oligonucleotide
aagauagagguuuaaccac

SEQ ID NO: 547475 - RNA, 19 nt, Artificial Sequence
  Description of Artificial Sequence: Synthetic oligonucleotide
gaaagauagagguuuaacc

SEQ ID NO: 547476 - RNA, 19 nt, Artificial Sequence
  Description of Artificial Sequence: Synthetic oligonucleotide
auauccaagaagaugagcc

SEQ ID NO: 547477 - RNA, 19 nt, Artificial Sequence
  Description of Artificial Sequence: Synthetic oligonucleotide
aaaggaauaacaacgcuuc

SEQ ID NO: 547478 - RNA, 19 nt, Artificial Sequence
  Description of Artificial Sequence: Synthetic oligonucleotide
cauaccaucugaaagaaac

SEQ ID NO: 547479 - RNA, 19 nt, Artificial Sequence
  Description of Artificial Sequence: Synthetic oligonucleotide
cauaauaaacucauucagg

SEQ ID NO: 547480 - RNA, 19 nt, Artificial Sequence
  Description of Artificial Sequence: Synthetic oligonucleotide
ugcaagucgaacaacauac

SEQ ID NO: 547481 - RNA, 19 nt, Artificial Sequence
  Description of Artificial Sequence: Synthetic oligonucleotide
uuucauuccauacgaaugc

SEQ ID NO: 547482 - RNA, 19 nt, Artificial Sequence
  Description of Artificial Sequence: Synthetic oligonucleotide
guacaucugaaacugaggg

SEQ ID NO: 547483 - RNA, 19 nt, Artificial Sequence
  Description of Artificial Sequence: Synthetic oligonucleotide
auacugauaccacuuagac

SEQ ID NO: 547484 - RNA, 19 nt, Artificial Sequence
  Description of Artificial Sequence: Synthetic oligonucleotide
aaauaggucccaauaauuc

SEQ ID NO: 547485 - RNA, 19 nt, Artificial Sequence
  Description of Artificial Sequence: Synthetic oligonucleotide
aauagugauguccaacugu

SEQ ID NO: 547486 - RNA, 19 nt, Artificial Sequence
  Description of Artificial Sequence: Synthetic oligonucleotide
agcaguaagcuccugcucc

SEQ ID NO: 547487 - RNA, 19 nt, Artificial Sequence
  Description of Artificial Sequence: Synthetic oligonucleotide
aagucgaacaacauacggc

SEQ ID NO: 547488 - RNA, 19 nt, Artificial Sequence
  Description of Artificial Sequence: Synthetic oligonucleotide
uguggucuguucuagagag

SEQ ID NO: 547489 - RNA, 19 nt, Artificial Sequence
  Description of Artificial Sequence: Synthetic oligonucleotide
ugucguaaguucuuugugg

SEQ ID NO: 547490 - RNA, 19 nt, Artificial Sequence
  Description of Artificial Sequence: Synthetic oligonucleotide
aaguuuugcaagucgaaca

SEQ ID NO: 547491 - RNA, 19 nt, Artificial Sequence
  Description of Artificial Sequence: Synthetic oligonucleotide
ucuuaaaaguaauacucug

SEQ ID NO: 547492 - RNA, 19 nt, Artificial Sequence
  Description of Artificial Sequence: Synthetic oligonucleotide
aacggaugcagaugcagcg

SEQ ID NO: 547493 - RNA, 19 nt, Artificial Sequence
  Description of Artificial Sequence: Synthetic oligonucleotide
uuuuagaaggaccaauagu

SEQ ID NO: 547494 - RNA, 19 nt, Artificial Sequence
  Description of Artificial Sequence: Synthetic oligonucleotide
caaacggagacucucaacc

SEQ ID NO: 547495 - RNA, 19 nt, Artificial Sequence
  Description of Artificial Sequence: Synthetic oligonucleotide
uuaaccgucuggauaacag

SEQ ID NO: 547496 - RNA, 19 nt, Artificial Sequence
  Description of Artificial Sequence: Synthetic oligonucleotide
uuccauacgaaugcaaugg

SEQ ID NO: 547497 - RNA, 19 nt, Artificial Sequence
  Description of Artificial Sequence: Synthetic oligonucleotide
aaaauagcgaaggccaauc

SEQ ID NO: 547498 - RNA, 19 nt, Artificial Sequence
  Description of Artificial Sequence: Synthetic oligonucleotide
gaaaaccauauccaagaag

SEQ ID NO: 547499 - RNA, 19 nt, Artificial Sequence
  Description of Artificial Sequence: Synthetic oligonucleotide
agaaucuuuuagaaggacc

SEQ ID NO: 547500 - RNA, 19 nt, Artificial Sequence
  Description of Artificial Sequence: Synthetic oligonucleotide
gucaucaaaucucugaaug

SEQ ID NO: 547501 - RNA, 19 nt, Artificial Sequence
  Description of Artificial Sequence: Synthetic oligonucleotide
ucgagcuucaaauaagugu

SEQ ID NO: 547502 - RNA, 19 nt, Artificial Sequence
  Description of Artificial Sequence: Synthetic oligonucleotide
agucgaacaacauacggcu

SEQ ID NO: 547503 - RNA, 19 nt, Artificial Sequence
  Description of Artificial Sequence: Synthetic oligonucleotide
ugacagcauaucuucaacg

SEQ ID NO: 547504 - RNA, 19 nt, Artificial Sequence
  Description of Artificial Sequence: Synthetic oligonucleotide
uugauugugguaacggaug

SEQ ID NO: 547505 - RNA, 19 nt, Artificial Sequence
  Description of Artificial Sequence: Synthetic oligonucleotide
agguuuaaccaccucuggc

SEQ ID NO: 547506 - RNA, 19 nt, Artificial Sequence
  Description of Artificial Sequence: Synthetic oligonucleotide
uacuaguaaaaguuguucu

SEQ ID NO: 547507 - RNA, 19 nt, Artificial Sequence
  Description of Artificial Sequence: Synthetic oligonucleotide
ucuccguguauacugauac

SEQ ID NO: 547508 - RNA, 19 nt, Artificial Sequence
  Description of Artificial Sequence: Synthetic oligonucleotide
auacgaaugcaauggcagc

SEQ ID NO: 547509 - RNA, 19 nt, Artificial Sequence
  Description of Artificial Sequence: Synthetic oligonucleotide
aaggccaaucuuuugagaa

SEQ ID NO: 547510 - RNA, 19 nt, Artificial Sequence
  Description of Artificial Sequence: Synthetic oligonucleotide
uugagguuuccauugcagg

SEQ ID NO: 547511 - RNA, 19 nt, Artificial Sequence
  Description of Artificial Sequence: Synthetic oligonucleotide
uuucgucggagccaugugg

SEQ ID NO: 547512 - RNA, 19 nt, Artificial Sequence
  Description of Artificial Sequence: Synthetic oligonucleotide
uagagguuuaaccaccucu

SEQ ID NO: 547513 - RNA, 19 nt, Artificial Sequence
  Description of Artificial Sequence: Synthetic oligonucleotide
ugaaugucgucuuaucaug

SEQ ID NO: 547514 - RNA, 19 nt, Artificial Sequence
  Description of Artificial Sequence: Synthetic oligonucleotide
agcaauugcaccaauagca

SEQ ID NO: 547515 - RNA, 19 nt, Artificial Sequence
  Description of Artificial Sequence: Synthetic oligonucleotide
cuuuugagaagcauggcuc

SEQ ID NO: 547516 - RNA, 19 nt, Artificial Sequence
  Description of Artificial Sequence: Synthetic oligonucleotide
ugguaacggaugcagaugc

SEQ ID NO: 547517 - RNA, 19 nt, Artificial Sequence
  Description of Artificial Sequence: Synthetic oligonucleotide
acguggagaagccauuacc

SEQ ID NO: 547518 - RNA, 19 nt, Artificial Sequence
  Description of Artificial Sequence: Synthetic oligonucleotide
ucaugugucaucagguugu

SEQ ID NO: 547519 - RNA, 19 nt, Artificial Sequence
  Description of Artificial Sequence: Synthetic oligonucleotide
cugaaagaaacugggaucc

SEQ ID NO: 547520 - RNA, 19 nt, Artificial Sequence
  Description of Artificial Sequence: Synthetic oligonucleotide
cagaacuccaaauugguuc

SEQ ID NO: 547521 - RNA, 19 nt, Artificial Sequence
  Description of Artificial Sequence: Synthetic oligonucleotide
gacuucaagguuucgucgg

SEQ ID NO: 547522 - RNA, 19 nt, Artificial Sequence
  Description of Artificial Sequence: Synthetic oligonucleotide
uuuugugagucacauccug

SEQ ID NO: 547523 - RNA, 19 nt, Artificial Sequence
  Description of Artificial Sequence: Synthetic oligonucleotide
gagggaguuauguuugagg

SEQ ID NO: 547524 - RNA, 19 nt, Artificial Sequence
  Description of Artificial Sequence: Synthetic oligonucleotide
gcucucaugacgcugaugg

SEQ ID NO: 547525 - RNA, 19 nt, Artificial Sequence
  Description of Artificial Sequence: Synthetic oligonucleotide
ugacuucaagguuucgucg

SEQ ID NO: 547526 - RNA, 19 nt, Artificial Sequence
  Description of Artificial Sequence: Synthetic oligonucleotide
uauagguugucuccagacc

SEQ ID NO: 547527 - RNA, 19 nt, Artificial Sequence
  Description of Artificial Sequence: Synthetic oligonucleotide
auagguugucuccagacca

SEQ ID NO: 547528 - RNA, 19 nt, Artificial Sequence
  Description of Artificial Sequence: Synthetic oligonucleotide
auugaaauaggucccaaua

SEQ ID NO: 547529 - RNA, 19 nt, Artificial Sequence
  Description of Artificial Sequence: Synthetic oligonucleotide
aauaucuucaucagcagua

SEQ ID NO: 547530 - RNA, 19 nt, Artificial Sequence
  Description of Artificial Sequence: Synthetic oligonucleotide
gaaucuuuuagaaggacca

SEQ ID NO: 547531 - RNA, 19 nt, Artificial Sequence
  Description of Artificial Sequence: Synthetic oligonucleotide
gauuuguugucguaaguuc

SEQ ID NO: 547532 - RNA, 19 nt, Artificial Sequence
  Description of Artificial Sequence: Synthetic oligonucleotide
guuugaguagaggacaggg

SEQ ID NO: 547533 - RNA, 19 nt, Artificial Sequence
  Description of Artificial Sequence: Synthetic oligonucleotide
caagucgaacaacauacgg

SEQ ID NO: 547534 - RNA, 19 nt, Artificial Sequence
  Description of Artificial Sequence: Synthetic oligonucleotide
uauaaaggcccaucgguac

SEQ ID NO: 547535 - RNA, 19 nt, Artificial Sequence
  Description of Artificial Sequence: Synthetic oligonucleotide
agauagagguuuaaccacc

SEQ ID NO: 547536 - RNA, 19 nt, Artificial Sequence
  Description of Artificial Sequence: Synthetic oligonucleotide
agggaguuauguuugaggu

SEQ ID NO: 547537 - RNA, 19 nt, Artificial Sequence
  Description of Artificial Sequence: Synthetic oligonucleotide
ucaagguuucgucggagcc

SEQ ID NO: 547538 - RNA, 19 nt, Artificial Sequence
  Description of Artificial Sequence: Synthetic oligonucleotide
agauugauugugguaacgg

SEQ ID NO: 547539 - RNA, 19 nt, Artificial Sequence
  Description of Artificial Sequence: Synthetic oligonucleotide
aaugucgucuuaucaugug

SEQ ID NO: 547540 - RNA, 19 nt, Artificial Sequence
  Description of Artificial Sequence: Synthetic oligonucleotide
ucuuuuagaaggaccaaua

SEQ ID NO: 547541 - RNA, 19 nt, Artificial Sequence
  Description of Artificial Sequence: Synthetic oligonucleotide
cuuaaaaguaauacucuga

SEQ ID NO: 547542 - RNA, 19 nt, Artificial Sequence
  Description of Artificial Sequence: Synthetic oligonucleotide
ucuucaacgucagaacucc

SEQ ID NO: 547543 - RNA, 19 nt, Artificial Sequence
  Description of Artificial Sequence: Synthetic oligonucleotide
aguucuacuaguaaaaguu

SEQ ID NO: 547544 - RNA, 19 nt, Artificial Sequence
  Description of Artificial Sequence: Synthetic oligonucleotide
auagugauguccaacuguc

SEQ ID NO: 547545 - RNA, 19 nt, Artificial Sequence
  Description of Artificial Sequence: Synthetic oligonucleotide
ugauguccgugaaauaucu

SEQ ID NO: 547546 - RNA, 19 nt, Artificial Sequence
  Description of Artificial Sequence: Synthetic oligonucleotide
aaagauugagagaacugcu

SEQ ID NO: 547547 - RNA, 19 nt, Artificial Sequence
  Description of Artificial Sequence: Synthetic oligonucleotide
aacgucagaacuccaaauu

SEQ ID NO: 547548 - RNA, 19 nt, Artificial Sequence
  Description of Artificial Sequence: Synthetic oligonucleotide
ugcaccaauagcauccacu

SEQ ID NO: 547549 - RNA, 19 nt, Artificial Sequence
  Description of Artificial Sequence: Synthetic oligonucleotide
ugaguaacaagugccccgg

SEQ ID NO: 547550 - RNA, 19 nt, Artificial Sequence
  Description of Artificial Sequence: Synthetic oligonucleotide
uccaaauugguuccaucca

SEQ ID NO: 547551 - RNA, 19 nt, Artificial Sequence
  Description of Artificial Sequence: Synthetic oligonucleotide
uucuagagaggaaccagca

SEQ ID NO: 547552 - RNA, 19 nt, Artificial Sequence
  Description of Artificial Sequence: Synthetic oligonucleotide
aagggucggcaccuggggc

SEQ ID NO: 547553 - RNA, 19 nt, Artificial Sequence
  Description of Artificial Sequence: Synthetic oligonucleotide
guauacugauaccacuuag

SEQ ID NO: 547554 - RNA, 19 nt, Artificial Sequence
  Description of Artificial Sequence: Synthetic oligonucleotide
uuugugagucacauccuga

SEQ ID NO: 547555 - RNA, 19 nt, Artificial Sequence
  Description of Artificial Sequence: Synthetic oligonucleotide
gcuguauagaaucuuuuag

SEQ ID NO: 547556 - RNA, 19 nt, Artificial Sequence
  Description of Artificial Sequence: Synthetic oligonucleotide
aggaaccagcaauugcacc

SEQ ID NO: 547557 - RNA, 19 nt, Artificial Sequence
  Description of Artificial Sequence: Synthetic oligonucleotide
uccguguauacugauacca

SEQ ID NO: 547558 - RNA, 19 nt, Artificial Sequence
  Description of Artificial Sequence: Synthetic oligonucleotide
aauagcgaaggccaaucuu

SEQ ID NO: 547559 - RNA, 19 nt, Artificial Sequence
  Description of Artificial Sequence: Synthetic oligonucleotide
ucugauguaugcccugucu

SEQ ID NO: 547560 - RNA, 19 nt, Artificial Sequence
  Description of Artificial Sequence: Synthetic oligonucleotide
acgucagaacuccaaauug

SEQ ID NO: 547561 - RNA, 19 nt, Artificial Sequence
  Description of Artificial Sequence: Synthetic oligonucleotide
caucaguaagaacaccugc

SEQ ID NO: 547562 - RNA, 19 nt, Artificial Sequence
  Description of Artificial Sequence: Synthetic oligonucleotide
ugagggagauuuucugagg

SEQ ID NO: 547563 - RNA, 19 nt, Artificial Sequence
  Description of Artificial Sequence: Synthetic oligonucleotide
acggcuuaaauucucucug

SEQ ID NO: 547564 - RNA, 19 nt, Artificial Sequence
  Description of Artificial Sequence: Synthetic oligonucleotide
ucaucacuguaagaaaacc

SEQ ID NO: 547565 - RNA, 19 nt, Artificial Sequence
  Description of Artificial Sequence: Synthetic oligonucleotide
uaacggaugcagaugcagc

SEQ ID NO: 547566 - RNA, 19 nt, Artificial Sequence
  Description of Artificial Sequence: Synthetic oligonucleotide
gaggauuccaccucgagcu

SEQ ID NO: 547567 - RNA, 19 nt, Artificial Sequence
  Description of Artificial Sequence: Synthetic oligonucleotide
ucggagguaggguacaaca

SEQ ID NO: 547568 - RNA, 19 nt, Artificial Sequence
  Description of Artificial Sequence: Synthetic oligonucleotide
uguaggacguggagaagcc

SEQ ID NO: 547569 - RNA, 19 nt, Artificial Sequence
  Description of Artificial Sequence: Synthetic oligonucleotide
aaacggagacucucaacca

SEQ ID NO: 547570 - RNA, 19 nt, Artificial Sequence
  Description of Artificial Sequence: Synthetic oligonucleotide
guuucugcucucaugacgc

SEQ ID NO: 547571 - RNA, 19 nt, Artificial Sequence
  Description of Artificial Sequence: Synthetic oligonucleotide
uacggcuuaaauucucucu

SEQ ID NO: 547572 - RNA, 19 nt, Artificial Sequence
  Description of Artificial Sequence: Synthetic oligonucleotide
gucguaaguucuuuguggc

SEQ ID NO: 547573 - RNA, 19 nt, Artificial Sequence
  Description of Artificial Sequence: Synthetic oligonucleotide
cuucugaccuccaagccug

SEQ ID NO: 547574 - RNA, 19 nt, Artificial Sequence
  Description of Artificial Sequence: Synthetic oligonucleotide
uuguuugggaaggaguuug

SEQ ID NO: 547575 - RNA, 19 nt, Artificial Sequence
  Description of Artificial Sequence: Synthetic oligonucleotide
gauugauugugguaacgga

SEQ ID NO: 547576 - RNA, 19 nt, Artificial Sequence
  Description of Artificial Sequence: Synthetic oligonucleotide
ccaugaaaaggucaaaggc

SEQ ID NO: 547577 - RNA, 19 nt, Artificial Sequence
  Description of Artificial Sequence: Synthetic oligonucleotide
cucaugacgcugauggagc

SEQ ID NO: 547578 - RNA, 19 nt, Artificial Sequence
  Description of Artificial Sequence: Synthetic oligonucleotide
gagguuuaaccaccucugg

SEQ ID NO: 547579 - RNA, 19 nt, Artificial Sequence
  Description of Artificial Sequence: Synthetic oligonucleotide
acucgagucaucaaaucuc

SEQ ID NO: 547580 - RNA, 19 nt, Artificial Sequence
  Description of Artificial Sequence: Synthetic oligonucleotide
uacgaaugcaauggcagcc

SEQ ID NO: 547581 - RNA, 19 nt, Artificial Sequence
  Description of Artificial Sequence: Synthetic oligonucleotide
agagagagauguuucuugu

SEQ ID NO: 547582 - RNA, 19 nt, Artificial Sequence
  Description of Artificial Sequence: Synthetic oligonucleotide
gugauuaacacaggaagac

SEQ ID NO: 547583 - RNA, 19 nt, Artificial Sequence
  Description of Artificial Sequence: Synthetic oligonucleotide
ugucgucuuaucauguguc

SEQ ID NO: 547584 - RNA, 19 nt, Artificial Sequence
  Description of Artificial Sequence: Synthetic oligonucleotide
ucgaacaacauacggcuua

SEQ ID NO: 547585 - RNA, 19 nt, Artificial Sequence
  Description of Artificial Sequence: Synthetic oligonucleotide
uacugauaccacuuagacu

SEQ ID NO: 547586 - RNA, 19 nt, Artificial Sequence
  Description of Artificial Sequence: Synthetic oligonucleotide
agaggaaccagcaauugca

SEQ ID NO: 547587 - RNA, 19 nt, Artificial Sequence
  Description of Artificial Sequence: Synthetic oligonucleotide
uccauacgaaugcaauggc

SEQ ID NO: 547588 - RNA, 19 nt, Artificial Sequence
  Description of Artificial Sequence: Synthetic oligonucleotide
uggauaacaguuucugcuc

SEQ ID NO: 547589 - RNA, 19 nt, Artificial Sequence
  Description of Artificial Sequence: Synthetic oligonucleotide
uguauacugauaccacuua

SEQ ID NO: 547590 - RNA, 19 nt, Artificial Sequence
  Description of Artificial Sequence: Synthetic oligonucleotide
gaaguuuugcaagucgaac

SEQ ID NO: 547591 - RNA, 19 nt, Artificial Sequence
  Description of Artificial Sequence: Synthetic oligonucleotide
ucaugacgcugauggagcg

SEQ ID NO: 547592 - RNA, 19 nt, Artificial Sequence
  Description of Artificial Sequence: Synthetic oligonucleotide
uguguagcagcaucagaac

SEQ ID NO: 547593 - RNA, 19 nt, Artificial Sequence
  Description of Artificial Sequence: Synthetic oligonucleotide
uguaugucuggaagguacu

SEQ ID NO: 547594 - RNA, 19 nt, Artificial Sequence
  Description of Artificial Sequence: Synthetic oligonucleotide
uguccacuaaauugggcac

SEQ ID NO: 547595 - RNA, 19 nt, Artificial Sequence
  Description of Artificial Sequence: Synthetic oligonucleotide
aaggaauaacaacgcuucu

SEQ ID NO: 547596 - RNA, 19 nt, Artificial Sequence
  Description of Artificial Sequence: Synthetic oligonucleotide
auacggcuuaaauucucuc

SEQ ID NO: 547597 - RNA, 19 nt, Artificial Sequence
  Description of Artificial Sequence: Synthetic oligonucleotide
cuacuaguaaaaguuguuc

SEQ ID NO: 547598 - RNA, 19 nt, Artificial Sequence
  Description of Artificial Sequence: Synthetic oligonucleotide
augcucuccguguauacug

SEQ ID NO: 547599 - RNA, 19 nt, Artificial Sequence
  Description of Artificial Sequence: Synthetic oligonucleotide
uaggucccaauaauuccag

SEQ ID NO: 547600 - RNA, 19 nt, Artificial Sequence
  Description of Artificial Sequence: Synthetic oligonucleotide
agcuucaaauaaguguuuc

SEQ ID NO: 547601 - RNA, 19 nt, Artificial Sequence
  Description of Artificial Sequence: Synthetic oligonucleotide
uguugucguaaguucuuug

SEQ ID NO: 547602 - RNA, 19 nt, Artificial Sequence
  Description of Artificial Sequence: Synthetic oligonucleotide
guuuaaccaccucuggcug

SEQ ID NO: 547603 - RNA, 19 nt, Artificial Sequence
  Description of Artificial Sequence: Synthetic oligonucleotide
gaagggucggcaccugggg

SEQ ID NO: 547604 - RNA, 19 nt, Artificial Sequence
  Description of Artificial Sequence: Synthetic oligonucleotide
ugcucuccagugauuaaca

SEQ ID NO: 547605 - RNA, 19 nt, Artificial Sequence
  Description of Artificial Sequence: Synthetic oligonucleotide
agauugagagaacugcuuu

SEQ ID NO: 547606 - RNA, 19 nt, Artificial Sequence
  Description of Artificial Sequence: Synthetic oligonucleotide
aggauugagaggauuccac

SEQ ID NO: 547607 - RNA, 19 nt, Artificial Sequence
  Description of Artificial Sequence: Synthetic oligonucleotide
aacggagacucucaaccaa

SEQ ID NO: 547608 - RNA, 19 nt, Artificial Sequence
  Description of Artificial Sequence: Synthetic oligonucleotide
gaagacauaccaucugaaa

SEQ ID NO: 547609 - RNA, 19 nt, Artificial Sequence
  Description of Artificial Sequence: Synthetic oligonucleotide
aggccuuagcuacucgugg

SEQ ID NO: 547610 - RNA, 19 nt, Artificial Sequence
  Description of Artificial Sequence: Synthetic oligonucleotide
guaaguucuuuguggcucc

SEQ ID NO: 547611 - RNA, 19 nt, Artificial Sequence
  Description of Artificial Sequence: Synthetic oligonucleotide
aguaacaagugccccggcu

SEQ ID NO: 547612 - RNA, 19 nt, Artificial Sequence
  Description of Artificial Sequence: Synthetic oligonucleotide
ucucaaccaaccucucuug

SEQ ID NO: 547613 - RNA, 19 nt, Artificial Sequence
  Description of Artificial Sequence: Synthetic oligonucleotide
uucgucggagccauguggu

SEQ ID NO: 547614 - RNA, 19 nt, Artificial Sequence
  Description of Artificial Sequence: Synthetic oligonucleotide
guucuacuaguaaaaguug

SEQ ID NO: 547615 - RNA, 19 nt, Artificial Sequence
  Description of Artificial Sequence: Synthetic oligonucleotide
aaccaaccucucuuguaug

SEQ ID NO: 547616 - RNA, 19 nt, Artificial Sequence
  Description of Artificial Sequence: Synthetic oligonucleotide
caugcuucgcauugugcag

SEQ ID NO: 547617 - RNA, 19 nt, Artificial Sequence
  Description of Artificial Sequence: Synthetic oligonucleotide
uugcaagucgaacaacaua

SEQ ID NO: 547618 - RNA, 19 nt, Artificial Sequence
  Description of Artificial Sequence: Synthetic oligonucleotide
aaggauugagaggauucca

SEQ ID NO: 547619 - RNA, 19 nt, Artificial Sequence
  Description of Artificial Sequence: Synthetic oligonucleotide
uaacucggggcauuaugug

SEQ ID NO: 547620 - RNA, 19 nt, Artificial Sequence
  Description of Artificial Sequence: Synthetic oligonucleotide
agagguuuaaccaccucug

SEQ ID NO: 547621 - RNA, 19 nt, Artificial Sequence
  Description of Artificial Sequence: Synthetic oligonucleotide
auagagguuuaaccaccuc

SEQ ID NO: 547622 - RNA, 19 nt, Artificial Sequence
  Description of Artificial Sequence: Synthetic oligonucleotide
uguaugcccugucuucuga

SEQ ID NO: 547623 - RNA, 19 nt, Artificial Sequence
  Description of Artificial Sequence: Synthetic oligonucleotide
ugagaagcauggcucucug

SEQ ID NO: 547624 - RNA, 19 nt, Artificial Sequence
  Description of Artificial Sequence: Synthetic oligonucleotide
ucccaauaauuccaggauu

SEQ ID NO: 547625 - RNA, 19 nt, Artificial Sequence
  Description of Artificial Sequence: Synthetic oligonucleotide
agcuacucgagucaucaaa

SEQ ID NO: 547626 - RNA, 19 nt, Artificial Sequence
  Description of Artificial Sequence: Synthetic oligonucleotide
cauccugaaggucucuuug

SEQ ID NO: 547627 - RNA, 19 nt, Artificial Sequence
  Description of Artificial Sequence: Synthetic oligonucleotide
guaacggaugcagaugcag

SEQ ID NO: 547628 - RNA, 19 nt, Artificial Sequence
  Description of Artificial Sequence: Synthetic oligonucleotide
gauugagaggauuccaccu

SEQ ID NO: 547629 - RNA, 19 nt, Artificial Sequence
  Description of Artificial Sequence: Synthetic oligonucleotide
agcgaaccaguucuacuag

SEQ ID NO: 547630 - RNA, 19 nt, Artificial Sequence
  Description of Artificial Sequence: Synthetic oligonucleotide
uaaccgucuggauaacagu

SEQ ID NO: 547631 - RNA, 19 nt, Artificial Sequence
  Description of Artificial Sequence: Synthetic oligonucleotide
acagcuacucgagucauca

SEQ ID NO: 547632 - RNA, 19 nt, Artificial Sequence
  Description of Artificial Sequence: Synthetic oligonucleotide
uuuaaccaccucuggcugu

SEQ ID NO: 547633 - RNA, 19 nt, Artificial Sequence
  Description of Artificial Sequence: Synthetic oligonucleotide
guaacaagugccccggcuc

SEQ ID NO: 547634 - RNA, 19 nt, Artificial Sequence
  Description of Artificial Sequence: Synthetic oligonucleotide
augucgucuuaucaugugu

SEQ ID NO: 547635 - RNA, 19 nt, Artificial Sequence
  Description of Artificial Sequence: Synthetic oligonucleotide
auaaaggcccaucgguaca

SEQ ID NO: 547636 - RNA, 19 nt, Artificial Sequence
  Description of Artificial Sequence: Synthetic oligonucleotide
aagccauuaccuccaguau

SEQ ID NO: 547637 - RNA, 19 nt, Artificial Sequence
  Description of Artificial Sequence: Synthetic oligonucleotide
cacaggcucgguaacucgg

SEQ ID NO: 547638 - RNA, 19 nt, Artificial Sequence
  Description of Artificial Sequence: Synthetic oligonucleotide
auugauugugguaacggau

SEQ ID NO: 547639 - RNA, 19 nt, Artificial Sequence
  Description of Artificial Sequence: Synthetic oligonucleotide
aguauagguugucuccaga

SEQ ID NO: 547640 - RNA, 19 nt, Artificial Sequence
  Description of Artificial Sequence: Synthetic oligonucleotide
agacucucaaccaaccucu

SEQ ID NO: 547641 - RNA, 19 nt, Artificial Sequence
  Description of Artificial Sequence: Synthetic oligonucleotide
auaggucccaauaauucca

SEQ ID NO: 547642 - RNA, 19 nt, Artificial Sequence
  Description of Artificial Sequence: Synthetic oligonucleotide
guucugugaucaugguagg

SEQ ID NO: 547643 - RNA, 19 nt, Artificial Sequence
  Description of Artificial Sequence: Synthetic oligonucleotide
agccaauaccucagaaagc

SEQ ID NO: 547644 - RNA, 19 nt, Artificial Sequence
  Description of Artificial Sequence: Synthetic oligonucleotide
gagaggauuccaccucgag

SEQ ID NO: 547645 - RNA, 19 nt, Artificial Sequence
  Description of Artificial Sequence: Synthetic oligonucleotide
ggauugagaggauuccacc

SEQ ID NO: 547646 - RNA, 19 nt, Artificial Sequence
  Description of Artificial Sequence: Synthetic oligonucleotide
uucgcauugugcagagggu

SEQ ID NO: 547647 - RNA, 19 nt, Artificial Sequence
  Description of Artificial Sequence: Synthetic oligonucleotide
auagaaucuuuuagaagga

SEQ ID NO: 547648 - RNA, 19 nt, Artificial Sequence
  Description of Artificial Sequence: Synthetic oligonucleotide
gacgcugauggagcgaacc

SEQ ID NO: 547649 - RNA, 19 nt, Artificial Sequence
  Description of Artificial Sequence: Synthetic oligonucleotide
ugagagugaagggucggca

SEQ ID NO: 547650 - RNA, 19 nt, Artificial Sequence
  Description of Artificial Sequence: Synthetic oligonucleotide
ucaaccaaccucucuugua

SEQ ID NO: 547651 - RNA, 19 nt, Artificial Sequence
  Description of Artificial Sequence: Synthetic oligonucleotide
ucgcauugugcagagggug

SEQ ID NO: 547652 - RNA, 19 nt, Artificial Sequence
  Description of Artificial Sequence: Synthetic oligonucleotide
aaucuuuuagaaggaccaa

SEQ ID NO: 547653 - RNA, 19 nt, Artificial Sequence
  Description of Artificial Sequence: Synthetic oligonucleotide
uuuaaccgucuggauaaca

SEQ ID NO: 547654 - RNA, 19 nt, Artificial Sequence
  Description of Artificial Sequence: Synthetic oligonucleotide
ucagguauaaaggcccauc

SEQ ID NO: 547655 - RNA, 19 nt, Artificial Sequence
  Description of Artificial Sequence: Synthetic oligonucleotide
gaaggaccaauagugaugu

SEQ ID NO: 547656 - RNA, 19 nt, Artificial Sequence
  Description of Artificial Sequence: Synthetic oligonucleotide
cucgagcuucaaauaagug

SEQ ID NO: 547657 - RNA, 19 nt, Artificial Sequence
  Description of Artificial Sequence: Synthetic oligonucleotide
aguuugaguagaggacagg

SEQ ID NO: 547658 - RNA, 19 nt, Artificial Sequence
  Description of Artificial Sequence: Synthetic oligonucleotide
accaucuuaucugaggcau

SEQ ID NO: 547659 - RNA, 19 nt, Artificial Sequence
  Description of Artificial Sequence: Synthetic oligonucleotide
agcgaccaccaucuuaucu

SEQ ID NO: 547660 - RNA, 19 nt, Artificial Sequence
  Description of Artificial Sequence: Synthetic oligonucleotide
cagauugauugugguaacg

SEQ ID NO: 547661 - RNA, 19 nt, Artificial Sequence
  Description of Artificial Sequence: Synthetic oligonucleotide
guuuguguagcagcaucag

SEQ ID NO: 547662 - RNA, 19 nt, Artificial Sequence
  Description of Artificial Sequence: Synthetic oligonucleotide
gauuucggagguaggguac

SEQ ID NO: 547663 - RNA, 19 nt, Artificial Sequence
  Description of Artificial Sequence: Synthetic oligonucleotide
gagcgaaccaguucuacua

SEQ ID NO: 547664 - RNA, 19 nt, Artificial Sequence
  Description of Artificial Sequence: Synthetic oligonucleotide
acauacggcuuaaauucuc

SEQ ID NO: 547665 - RNA, 19 nt, Artificial Sequence
  Description of Artificial Sequence: Synthetic oligonucleotide
ggcucucuguucuagcucc

SEQ ID NO: 547666 - RNA, 19 nt, Artificial Sequence
  Description of Artificial Sequence: Synthetic oligonucleotide
acaggaagacauaccaucu

SEQ ID NO: 547667 - RNA, 19 nt, Artificial Sequence
  Description of Artificial Sequence: Synthetic oligonucleotide
gguaacucggggcauuaug

SEQ ID NO: 547668 - RNA, 19 nt, Artificial Sequence
  Description of Artificial Sequence: Synthetic oligonucleotide
ucguaaguucuuuguggcu

SEQ ID NO: 547669 - RNA, 19 nt, Artificial Sequence
  Description of Artificial Sequence: Synthetic oligonucleotide
cuaaauugggcacuggaau

SEQ ID NO: 547670 - RNA, 19 nt, Artificial Sequence
  Description of Artificial Sequence: Synthetic oligonucleotide
gcgaccaccaucuuaucug

SEQ ID NO: 547671 - RNA, 19 nt, Artificial Sequence
  Description of Artificial Sequence: Synthetic oligonucleotide
gguauaaaggcccaucggu

SEQ ID NO: 547672 - RNA, 19 nt, Artificial Sequence
  Description of Artificial Sequence: Synthetic oligonucleotide
ggucccaauaauuccagga

SEQ ID NO: 547673 - RNA, 19 nt, Artificial Sequence
  Description of Artificial Sequence: Synthetic oligonucleotide
aaccgucuggauaacaguu

SEQ ID NO: 547674 - RNA, 19 nt, Artificial Sequence
  Description of Artificial Sequence: Synthetic oligonucleotide
aagguuucgucggagccau

SEQ ID NO: 547675 - RNA, 19 nt, Artificial Sequence
  Description of Artificial Sequence: Synthetic oligonucleotide
agguuuccauugcagguga

SEQ ID NO: 547676 - RNA, 19 nt, Artificial Sequence
  Description of Artificial Sequence: Synthetic oligonucleotide
ugcucuccguguauacuga

SEQ ID NO: 547677 - RNA, 19 nt, Artificial Sequence
  Description of Artificial Sequence: Synthetic oligonucleotide
ccauaauugcucuccagug

SEQ ID NO: 547678 - RNA, 19 nt, Artificial Sequence
  Description of Artificial Sequence: Synthetic oligonucleotide
cuacucgagucaucaaauc

SEQ ID NO: 547679 - RNA, 19 nt, Artificial Sequence
  Description of Artificial Sequence: Synthetic oligonucleotide
agccauuaccuccaguaua

SEQ ID NO: 547680 - RNA, 19 nt, Artificial Sequence
  Description of Artificial Sequence: Synthetic oligonucleotide
ucgagucaucaaaucucug

SEQ ID NO: 547681 - RNA, 19 nt, Artificial Sequence
  Description of Artificial Sequence: Synthetic oligonucleotide
uugcaagcagaaagauaga

SEQ ID NO: 547682 - RNA, 19 nt, Artificial Sequence
  Description of Artificial Sequence: Synthetic oligonucleotide
ccgugaaauaucuucauca

SEQ ID NO: 547683 - RNA, 19 nt, Artificial Sequence
  Description of Artificial Sequence: Synthetic oligonucleotide
guugucguaaguucuuugu

SEQ ID NO: 547684 - RNA, 19 nt, Artificial Sequence
  Description of Artificial Sequence: Synthetic oligonucleotide
acggagacucucaaccaac

SEQ ID NO: 547685 - RNA, 19 nt, Artificial Sequence
  Description of Artificial Sequence: Synthetic oligonucleotide
aaggaccaauagugauguc

SEQ ID NO: 547686 - RNA, 19 nt, Artificial Sequence
  Description of Artificial Sequence: Synthetic oligonucleotide
auaccucagaaagcaaugu

SEQ ID NO: 547687 - RNA, 19 nt, Artificial Sequence
  Description of Artificial Sequence: Synthetic oligonucleotide
caggaagacauaccaucug

SEQ ID NO: 547688 - RNA, 19 nt, Artificial Sequence
  Description of Artificial Sequence: Synthetic oligonucleotide
gacauaccaucugaaagaa

SEQ ID NO: 547689 - RNA, 19 nt, Artificial Sequence
  Description of Artificial Sequence: Synthetic oligonucleotide
aaccucucuuguaugucug

SEQ ID NO: 547690 - RNA, 19 nt, Artificial Sequence
  Description of Artificial Sequence: Synthetic oligonucleotide
gccauuaccuccaguauag

SEQ ID NO: 547691 - RNA, 19 nt, Artificial Sequence
  Description of Artificial Sequence: Synthetic oligonucleotide
aucaugugaaggauugaga

SEQ ID NO: 547692 - RNA, 19 nt, Artificial Sequence
  Description of Artificial Sequence: Synthetic oligonucleotide
cgucagaacuccaaauugg

SEQ ID NO: 547693 - RNA, 19 nt, Artificial Sequence
  Description of Artificial Sequence: Synthetic oligonucleotide
caguauagguugucuccag

SEQ ID NO: 547694 - RNA, 19 nt, Artificial Sequence
  Description of Artificial Sequence: Synthetic oligonucleotide
ugcagcgaccaccaucuua

SEQ ID NO: 547695 - RNA, 19 nt, Artificial Sequence
  Description of Artificial Sequence: Synthetic oligonucleotide
aggaauaacaacgcuucuu

SEQ ID NO: 547696 - RNA, 19 nt, Artificial Sequence
  Description of Artificial Sequence: Synthetic oligonucleotide
caggaccccaaguauaaga

SEQ ID NO: 547697 - RNA, 19 nt, Artificial Sequence
  Description of Artificial Sequence: Synthetic oligonucleotide
caggccuuagcuacucgug

SEQ ID NO: 547698 - RNA, 19 nt, Artificial Sequence
  Description of Artificial Sequence: Synthetic oligonucleotide
gacguggagaagccauuac

SEQ ID NO: 547699 - RNA, 19 nt, Artificial Sequence
  Description of Artificial Sequence: Synthetic oligonucleotide
acucucaaccaaccucucu

SEQ ID NO: 547700 - RNA, 19 nt, Artificial Sequence
  Description of Artificial Sequence: Synthetic oligonucleotide
cuccguguauacugauacc

SEQ ID NO: 547701 - RNA, 19 nt, Artificial Sequence
  Description of Artificial Sequence: Synthetic oligonucleotide
augucagugcaugaacacu

SEQ ID NO: 547702 - RNA, 19 nt, Artificial Sequence
  Description of Artificial Sequence: Synthetic oligonucleotide
cacugacagaguccugugc

SEQ ID NO: 547703 - RNA, 19 nt, Artificial Sequence
  Description of Artificial Sequence: Synthetic oligonucleotide
ggaguuugaguagaggaca

SEQ ID NO: 547704 - RNA, 19 nt, Artificial Sequence
  Description of Artificial Sequence: Synthetic oligonucleotide
ggccaaucuuuugagaagc

SEQ ID NO: 547705 - RNA, 19 nt, Artificial Sequence
  Description of Artificial Sequence: Synthetic oligonucleotide
agcgaaggccaaucuuuug

SEQ ID NO: 547706 - RNA, 19 nt, Artificial Sequence
  Description of Artificial Sequence: Synthetic oligonucleotide
accucgagcuucaaauaag

SEQ ID NO: 547707 - RNA, 19 nt, Artificial Sequence
  Description of Artificial Sequence: Synthetic oligonucleotide
gaucaugguaggccagaga

SEQ ID NO: 547708 - RNA, 19 nt, Artificial Sequence
  Description of Artificial Sequence: Synthetic oligonucleotide
gucgucuuaucauguguca

SEQ ID NO: 547709 - RNA, 19 nt, Artificial Sequence
  Description of Artificial Sequence: Synthetic oligonucleotide
agggucggcaccuggggca

SEQ ID NO: 547710 - RNA, 19 nt, Artificial Sequence
  Description of Artificial Sequence: Synthetic oligonucleotide
ucgguacaucugaaacuga

SEQ ID NO: 547711 - RNA, 19 nt, Artificial Sequence
  Description of Artificial Sequence: Synthetic oligonucleotide
aagcuguauagaaucuuuu

SEQ ID NO: 547712 - RNA, 19 nt, Artificial Sequence
  Description of Artificial Sequence: Synthetic oligonucleotide
ucccagauugauuguggua

SEQ ID NO: 547713 - RNA, 19 nt, Artificial Sequence
  Description of Artificial Sequence: Synthetic oligonucleotide
aaaggcccaucgguacauc

SEQ ID NO: 547714 - RNA, 19 nt, Artificial Sequence
  Description of Artificial Sequence: Synthetic oligonucleotide
ugauaccacuuagacugcu

SEQ ID NO: 547715 - RNA, 19 nt, Artificial Sequence
  Description of Artificial Sequence: Synthetic oligonucleotide
agaaguuuugcaagucgaa

SEQ ID NO: 547716 - RNA, 19 nt, Artificial Sequence
  Description of Artificial Sequence: Synthetic oligonucleotide
guauaaaggcccaucggua

SEQ ID NO: 547717 - RNA, 19 nt, Artificial Sequence
  Description of Artificial Sequence: Synthetic oligonucleotide
guuucgucggagccaugug

SEQ ID NO: 547718 - RNA, 19 nt, Artificial Sequence
  Description of Artificial Sequence: Synthetic oligonucleotide
ucgucuuaucaugugucau

SEQ ID NO: 547719 - RNA, 19 nt, Artificial Sequence
  Description of Artificial Sequence: Synthetic oligonucleotide
accggcuugugacuuugcu

SEQ ID NO: 547720 - RNA, 19 nt, Artificial Sequence
  Description of Artificial Sequence: Synthetic oligonucleotide
agcuacucgugguucucca

SEQ ID NO: 547721 - RNA, 19 nt, Artificial Sequence
  Description of Artificial Sequence: Synthetic oligonucleotide
uaaacucauucaggacccc

SEQ ID NO: 547722 - RNA, 19 nt, Artificial Sequence
  Description of Artificial Sequence: Synthetic oligonucleotide
acgcugauggagcgaacca

SEQ ID NO: 547723 - RNA, 19 nt, Artificial Sequence
  Description of Artificial Sequence: Synthetic oligonucleotide
gaucaccuugguucgggaa

SEQ ID NO: 547724 - RNA, 19 nt, Artificial Sequence
  Description of Artificial Sequence: Synthetic oligonucleotide
aggaccccaaguauaagaa

SEQ ID NO: 547725 - RNA, 19 nt, Artificial Sequence
  Description of Artificial Sequence: Synthetic oligonucleotide
uccccgaacugucuuccuc

SEQ ID NO: 547726 - RNA, 19 nt, Artificial Sequence
  Description of Artificial Sequence: Synthetic oligonucleotide
agacuaagcuguauagaau

SEQ ID NO: 547727 - RNA, 19 nt, Artificial Sequence
  Description of Artificial Sequence: Synthetic oligonucleotide
ucaggaccccaaguauaag

SEQ ID NO: 547728 - RNA, 19 nt, Artificial Sequence
  Description of Artificial Sequence: Synthetic oligonucleotide
uuucugcucucaugacgcu

SEQ ID NO: 547729 - RNA, 19 nt, Artificial Sequence
  Description of Artificial Sequence: Synthetic oligonucleotide
cauuaccuccaguauaggu

SEQ ID NO: 547730 - RNA, 19 nt, Artificial Sequence
  Description of Artificial Sequence: Synthetic oligonucleotide
ggaauaacaacgcuucuuu

SEQ ID NO: 547731 - RNA, 19 nt, Artificial Sequence
  Description of Artificial Sequence: Synthetic oligonucleotide
acgaaugcaauggcagcca

SEQ ID NO: 547732 - RNA, 19 nt, Artificial Sequence
  Description of Artificial Sequence: Synthetic oligonucleotide
guaacucggggcauuaugu

SEQ ID NO: 547733 - RNA, 19 nt, Artificial Sequence
  Description of Artificial Sequence: Synthetic oligonucleotide
cagguuguccauaauugcu

SEQ ID NO: 547734 - RNA, 19 nt, Artificial Sequence
  Description of Artificial Sequence: Synthetic oligonucleotide
auggcccugauguccguga

SEQ ID NO: 547735 - RNA, 19 nt, Artificial Sequence
  Description of Artificial Sequence: Synthetic oligonucleotide
gcgaaggccaaucuuuuga

SEQ ID NO: 547736 - RNA, 19 nt, Artificial Sequence
  Description of Artificial Sequence: Synthetic oligonucleotide
auuucggagguaggguaca

SEQ ID NO: 547737 - RNA, 19 nt, Artificial Sequence
  Description of Artificial Sequence: Synthetic oligonucleotide
auugcaccaauagcaucca

SEQ ID NO: 547738 - RNA, 19 nt, Artificial Sequence
  Description of Artificial Sequence: Synthetic oligonucleotide
uuaaccaccucuggcuguu

SEQ ID NO: 547739 - RNA, 19 nt, Artificial Sequence
  Description of Artificial Sequence: Synthetic oligonucleotide
gcaagucgaacaacauacg

SEQ ID NO: 547740 - RNA, 19 nt, Artificial Sequence
  Description of Artificial Sequence: Synthetic oligonucleotide
uagcuacucgugguucucc

SEQ ID NO: 547741 - RNA, 19 nt, Artificial Sequence
  Description of Artificial Sequence: Synthetic oligonucleotide
caggcucgguaacucgggg

SEQ ID NO: 547742 - RNA, 19 nt, Artificial Sequence
  Description of Artificial Sequence: Synthetic oligonucleotide
uggagcgaaccaguucuac

SEQ ID NO: 547743 - RNA, 19 nt, Artificial Sequence
  Description of Artificial Sequence: Synthetic oligonucleotide
augacgcugauggagcgaa

SEQ ID NO: 547744 - RNA, 19 nt, Artificial Sequence
  Description of Artificial Sequence: Synthetic oligonucleotide
ggcauuaugugcacuguga

SEQ ID NO: 547745 - RNA, 19 nt, Artificial Sequence
  Description of Artificial Sequence: Synthetic oligonucleotide
gaacaccugcacaaguucu

SEQ ID NO: 547746 - RNA, 19 nt, Artificial Sequence
  Description of Artificial Sequence: Synthetic oligonucleotide
cauacggcuuaaauucucu

SEQ ID NO: 547747 - RNA, 19 nt, Artificial Sequence
  Description of Artificial Sequence: Synthetic oligonucleotide
caccucgagcuucaaauaa

SEQ ID NO: 547748 - RNA, 19 nt, Artificial Sequence
  Description of Artificial Sequence: Synthetic oligonucleotide
uccgcaccggcuugugacu

SEQ ID NO: 547749 - RNA, 19 nt, Artificial Sequence
  Description of Artificial Sequence: Synthetic oligonucleotide
uaccuccaguauagguugu

SEQ ID NO: 547750 - RNA, 19 nt, Artificial Sequence
  Description of Artificial Sequence: Synthetic oligonucleotide
uucggagguaggguacaac

SEQ ID NO: 547751 - RNA, 19 nt, Artificial Sequence
  Description of Artificial Sequence: Synthetic oligonucleotide
ggguacaacauaaugcaua

SEQ ID NO: 547752 - RNA, 19 nt, Artificial Sequence
  Description of Artificial Sequence: Synthetic oligonucleotide
ggcucgguaacucggggca

SEQ ID NO: 547753 - RNA, 19 nt, Artificial Sequence
  Description of Artificial Sequence: Synthetic oligonucleotide
uucagguauaaaggcccau

SEQ ID NO: 547754 - RNA, 19 nt, Artificial Sequence
  Description of Artificial Sequence: Synthetic oligonucleotide
cuggaagguacuucuggua

SEQ ID NO: 547755 - RNA, 19 nt, Artificial Sequence
  Description of Artificial Sequence: Synthetic oligonucleotide
caagguuucgucggagcca

SEQ ID NO: 547756 - RNA, 19 nt, Artificial Sequence
  Description of Artificial Sequence: Synthetic oligonucleotide
agccauguggucuguucua

SEQ ID NO: 547757 - RNA, 19 nt, Artificial Sequence
  Description of Artificial Sequence: Synthetic oligonucleotide
acaccaugauucauugaaa

SEQ ID NO: 547758 - RNA, 19 nt, Artificial Sequence
  Description of Artificial Sequence: Synthetic oligonucleotide
gagagagguaagguguugu

SEQ ID NO: 547759 - RNA, 19 nt, Artificial Sequence
  Description of Artificial Sequence: Synthetic oligonucleotide
caucagguuguccauaauu

SEQ ID NO: 547760 - RNA, 19 nt, Artificial Sequence
  Description of Artificial Sequence: Synthetic oligonucleotide
uccaugcucuccguguaua

SEQ ID NO: 547761 - RNA, 19 nt, Artificial Sequence
  Description of Artificial Sequence: Synthetic oligonucleotide
gcaaacggagacucucaac

SEQ ID NO: 547762 - RNA, 19 nt, Artificial Sequence
  Description of Artificial Sequence: Synthetic oligonucleotide
caaccaaccucucuuguau

SEQ ID NO: 547763 - RNA, 19 nt, Artificial Sequence
  Description of Artificial Sequence: Synthetic oligonucleotide
uucugaccuccaagccuga

SEQ ID NO: 547764 - RNA, 19 nt, Artificial Sequence
  Description of Artificial Sequence: Synthetic oligonucleotide
ccguguauacugauaccac

SEQ ID NO: 547765 - RNA, 19 nt, Artificial Sequence
  Description of Artificial Sequence: Synthetic oligonucleotide
ucggcaccuggggcaaacg

SEQ ID NO: 547766 - RNA, 19 nt, Artificial Sequence
  Description of Artificial Sequence: Synthetic oligonucleotide
cgagucaucaaaucucuga

SEQ ID NO: 547767 - RNA, 19 nt, Artificial Sequence
  Description of Artificial Sequence: Synthetic oligonucleotide
caaccucucuuguaugucu

SEQ ID NO: 547768 - RNA, 19 nt, Artificial Sequence
  Description of Artificial Sequence: Synthetic oligonucleotide
cuuuaaccgucuggauaac

SEQ ID NO: 547769 - RNA, 19 nt, Artificial Sequence
  Description of Artificial Sequence: Synthetic oligonucleotide
ccacuuagacugcugagca

SEQ ID NO: 547770 - RNA, 19 nt, Artificial Sequence
  Description of Artificial Sequence: Synthetic oligonucleotide
cauucaggaccccaaguau

SEQ ID NO: 547771 - RNA, 19 nt, Artificial Sequence
  Description of Artificial Sequence: Synthetic oligonucleotide
ccauacgaaugcaauggca

SEQ ID NO: 547772 - RNA, 19 nt, Artificial Sequence
  Description of Artificial Sequence: Synthetic oligonucleotide
ggauaacaguuucugcucu

SEQ ID NO: 547773 - RNA, 19 nt, Artificial Sequence
  Description of Artificial Sequence: Synthetic oligonucleotide
ggcccaucgguacaucuga

SEQ ID NO: 547774 - RNA, 19 nt, Artificial Sequence
  Description of Artificial Sequence: Synthetic oligonucleotide
gggauccaugaaaagguca

SEQ ID NO: 547775 - RNA, 19 nt, Artificial Sequence
  Description of Artificial Sequence: Synthetic oligonucleotide
uuucggagguaggguacaa

SEQ ID NO: 547776 - RNA, 19 nt, Artificial Sequence
  Description of Artificial Sequence: Synthetic oligonucleotide
cauugaaauaggucccaau

SEQ ID NO: 547777 - RNA, 19 nt, Artificial Sequence
  Description of Artificial Sequence: Synthetic oligonucleotide
gguuguccauaauugcucu

SEQ ID NO: 547778 - RNA, 19 nt, Artificial Sequence
  Description of Artificial Sequence: Synthetic oligonucleotide
aggcccaucgguacaucug

SEQ ID NO: 547779 - RNA, 19 nt, Artificial Sequence
  Description of Artificial Sequence: Synthetic oligonucleotide
guguauacugauaccacuu

SEQ ID NO: 547780 - RNA, 19 nt, Artificial Sequence
  Description of Artificial Sequence: Synthetic oligonucleotide
aggguacaacauaaugcau

SEQ ID NO: 547781 - RNA, 19 nt, Artificial Sequence
  Description of Artificial Sequence: Synthetic oligonucleotide
ucgucggagccaugugguc

SEQ ID NO: 547782 - RNA, 19 nt, Artificial Sequence
  Description of Artificial Sequence: Synthetic oligonucleotide
ugacgcugauggagcgaac

SEQ ID NO: 547783 - RNA, 19 nt, Artificial Sequence
  Description of Artificial Sequence: Synthetic oligonucleotide
cuugguucgggaaggguuu

SEQ ID NO: 547784 - RNA, 19 nt, Artificial Sequence
  Description of Artificial Sequence: Synthetic oligonucleotide
augucuuguuugggaagga

SEQ ID NO: 547785 - RNA, 19 nt, Artificial Sequence
  Description of Artificial Sequence: Synthetic oligonucleotide
agggaucaccuugguucgg

SEQ ID NO: 547786 - RNA, 19 nt, Artificial Sequence
  Description of Artificial Sequence: Synthetic oligonucleotide
cuucaacgucagaacucca

SEQ ID NO: 547787 - RNA, 19 nt, Artificial Sequence
  Description of Artificial Sequence: Synthetic oligonucleotide
ccgucuggauaacaguuuc

SEQ ID NO: 547788 - RNA, 19 nt, Artificial Sequence
  Description of Artificial Sequence: Synthetic oligonucleotide
cuggcuguuguaggacgug

SEQ ID NO: 547789 - RNA, 19 nt, Artificial Sequence
  Description of Artificial Sequence: Synthetic oligonucleotide
gccauguggucuguucuag

SEQ ID NO: 547790 - RNA, 19 nt, Artificial Sequence
  Description of Artificial Sequence: Synthetic oligonucleotide
caacgucagaacuccaaau

SEQ ID NO: 547791 - RNA, 19 nt, Artificial Sequence
  Description of Artificial Sequence: Synthetic oligonucleotide
gcaguaagcuccugcucca

SEQ ID NO: 547792 - RNA, 19 nt, Artificial Sequence
  Description of Artificial Sequence: Synthetic oligonucleotide
caccauuauuuugggagaa

SEQ ID NO: 547793 - RNA, 19 nt, Artificial Sequence
  Description of Artificial Sequence: Synthetic oligonucleotide
ccaccauuauuuugggaga

SEQ ID NO: 547794 - RNA, 19 nt, Artificial Sequence
  Description of Artificial Sequence: Synthetic oligonucleotide
agaacugcuuugggccaca

SEQ ID NO: 547795 - RNA, 19 nt, Artificial Sequence
  Description of Artificial Sequence: Synthetic oligonucleotide
ggauuuguugucguaaguu

SEQ ID NO: 547796 - RNA, 19 nt, Artificial Sequence
  Description of Artificial Sequence: Synthetic oligonucleotide
aguuggacacaggcucggu

SEQ ID NO: 547797 - RNA, 19 nt, Artificial Sequence
  Description of Artificial Sequence: Synthetic oligonucleotide
ucgguaacucggggcauua

SEQ ID NO: 547798 - RNA, 19 nt, Artificial Sequence
  Description of Artificial Sequence: Synthetic oligonucleotide
cucuccguguauacugaua

SEQ ID NO: 547799 - RNA, 19 nt, Artificial Sequence
  Description of Artificial Sequence: Synthetic oligonucleotide
guaggacguggagaagcca

SEQ ID NO: 547800 - RNA, 19 nt, Artificial Sequence
  Description of Artificial Sequence: Synthetic oligonucleotide
gacucucaaccaaccucuc

SEQ ID NO: 547801 - RNA, 19 nt, Artificial Sequence
  Description of Artificial Sequence: Synthetic oligonucleotide
acauaccaucugaaagaaa

SEQ ID NO: 547802 - RNA, 19 nt, Artificial Sequence
  Description of Artificial Sequence: Synthetic oligonucleotide
ggagcgaaccaguucuacu

SEQ ID NO: 547803 - RNA, 19 nt, Artificial Sequence
  Description of Artificial Sequence: Synthetic oligonucleotide
ggcaaacggagacucucaa

SEQ ID NO: 547804 - RNA, 19 nt, Artificial Sequence
  Description of Artificial Sequence: Synthetic oligonucleotide
ucggggcauuaugugcacu

SEQ ID NO: 547805 - RNA, 19 nt, Artificial Sequence
  Description of Artificial Sequence: Synthetic oligonucleotide
cucccugaguggccuccgc

SEQ ID NO: 547806 - RNA, 19 nt, Artificial Sequence
  Description of Artificial Sequence: Synthetic oligonucleotide
guaagguguuguggagaca

SEQ ID NO: 547807 - RNA, 19 nt, Artificial Sequence
  Description of Artificial Sequence: Synthetic oligonucleotide
agguaggguacaacauaau

SEQ ID NO: 547808 - RNA, 19 nt, Artificial Sequence
  Description of Artificial Sequence: Synthetic oligonucleotide
ccgaacugucuuccucugg

SEQ ID NO: 547809 - RNA, 19 nt, Artificial Sequence
  Description of Artificial Sequence: Synthetic oligonucleotide
cucaaccaaccucucuugu

SEQ ID NO: 547810 - RNA, 19 nt, Artificial Sequence
  Description of Artificial Sequence: Synthetic oligonucleotide
caccggcuugugacuuugc

SEQ ID NO: 547811 - RNA, 19 nt, Artificial Sequence
  Description of Artificial Sequence: Synthetic oligonucleotide
cugaccuccaagccugagu

SEQ ID NO: 547812 - RNA, 19 nt, Artificial Sequence
  Description of Artificial Sequence: Synthetic oligonucleotide
ccuuagcuacucgugguuc

SEQ ID NO: 547813 - RNA, 19 nt, Artificial Sequence
  Description of Artificial Sequence: Synthetic oligonucleotide
ccaucuuaucugaggcauc

SEQ ID NO: 547814 - RNA, 19 nt, Artificial Sequence
  Description of Artificial Sequence: Synthetic oligonucleotide
caugacgcugauggagcga

SEQ ID NO: 547815 - RNA, 19 nt, Artificial Sequence
  Description of Artificial Sequence: Synthetic oligonucleotide
cccaauaauuccaggauuu

SEQ ID NO: 547816 - RNA, 19 nt, Artificial Sequence
  Description of Artificial Sequence: Synthetic oligonucleotide
gcaugcagacuuccagaga

SEQ ID NO: 547817 - RNA, 19 nt, Artificial Sequence
  Description of Artificial Sequence: Synthetic oligonucleotide
uugguucgggaaggguuuu

SEQ ID NO: 547818 - RNA, 19 nt, Artificial Sequence
  Description of Artificial Sequence: Synthetic oligonucleotide
gcuugacuucaagguuucg

SEQ ID NO: 547819 - RNA, 19 nt, Artificial Sequence
  Description of Artificial Sequence: Synthetic oligonucleotide
caggaacacuugagaguga

SEQ ID NO: 547820 - RNA, 19 nt, Artificial Sequence
  Description of Artificial Sequence: Synthetic oligonucleotide
cguggagaagccauuaccu

SEQ ID NO: 547821 - RNA, 19 nt, Artificial Sequence
  Description of Artificial Sequence: Synthetic oligonucleotide
gguguuguggagacauucu

SEQ ID NO: 547822 - RNA, 19 nt, Artificial Sequence
  Description of Artificial Sequence: Synthetic oligonucleotide
gguuucgucggagccaugu

SEQ ID NO: 547823 - RNA, 19 nt, Artificial Sequence
  Description of Artificial Sequence: Synthetic oligonucleotide
gcuacucgagucaucaaau

SEQ ID NO: 547824 - RNA, 19 nt, Artificial Sequence
  Description of Artificial Sequence: Synthetic oligonucleotide
gguaacggaugcagaugca

SEQ ID NO: 547825 - RNA, 19 nt, Artificial Sequence
  Description of Artificial Sequence: Synthetic oligonucleotide
cggaugcagaugcagcgac

SEQ ID NO: 547826 - RNA, 19 nt, Artificial Sequence
  Description of Artificial Sequence: Synthetic oligonucleotide
ccuccccgaacugucuucc

SEQ ID NO: 547827 - RNA, 19 nt, Artificial Sequence
  Description of Artificial Sequence: Synthetic oligonucleotide
caugcucuccguguauacu

SEQ ID NO: 547828 - RNA, 19 nt, Artificial Sequence
  Description of Artificial Sequence: Synthetic oligonucleotide
ccaaccucucuuguauguc

SEQ ID NO: 547829 - RNA, 19 nt, Artificial Sequence
  Description of Artificial Sequence: Synthetic oligonucleotide
gugcuguacccacuaggau

SEQ ID NO: 547830 - RNA, 19 nt, Artificial Sequence
  Description of Artificial Sequence: Synthetic oligonucleotide
ccucgagcuucaaauaagu

SEQ ID NO: 547831 - RNA, 19 nt, Artificial Sequence
  Description of Artificial Sequence: Synthetic oligonucleotide
ggccuuagcuacucguggu

SEQ ID NO: 547832 - RNA, 19 nt, Artificial Sequence
  Description of Artificial Sequence: Synthetic oligonucleotide
cccgaacugucuuccucug

SEQ ID NO: 547833 - RNA, 19 nt, Artificial Sequence
  Description of Artificial Sequence: Synthetic oligonucleotide
cagcgaccaccaucuuauc

SEQ ID NO: 547834 - RNA, 19 nt, Artificial Sequence
  Description of Artificial Sequence: Synthetic oligonucleotide
cguguauacugauaccacu

SEQ ID NO: 547835 - RNA, 19 nt, Artificial Sequence
  Description of Artificial Sequence: Synthetic oligonucleotide
gggcaaacggagacucuca

SEQ ID NO: 547836 - RNA, 19 nt, Artificial Sequence
  Description of Artificial Sequence: Synthetic oligonucleotide
guaugucuggaagguacuu

SEQ ID NO: 547837 - RNA, 19 nt, Artificial Sequence
  Description of Artificial Sequence: Synthetic oligonucleotide
gcacugugauuucggaggu

SEQ ID NO: 547838 - RNA, 19 nt, Artificial Sequence
  Description of Artificial Sequence: Synthetic oligonucleotide
cgaaccaguucuacuagua

SEQ ID NO: 547839 - RNA, 19 nt, Artificial Sequence
  Description of Artificial Sequence: Synthetic oligonucleotide
gauguccgugaaauaucuu

SEQ ID NO: 547840 - RNA, 19 nt, Artificial Sequence
  Description of Artificial Sequence: Synthetic oligonucleotide
ucggagccauguggucugu

SEQ ID NO: 547841 - RNA, 19 nt, Artificial Sequence
  Description of Artificial Sequence: Synthetic oligonucleotide
ccuugguucgggaaggguu

SEQ ID NO: 547842 - RNA, 19 nt, Artificial Sequence
  Description of Artificial Sequence: Synthetic oligonucleotide
ggacguggagaagccauua

SEQ ID NO: 547843 - RNA, 19 nt, Artificial Sequence
  Description of Artificial Sequence: Synthetic oligonucleotide
gcgaaccaguucuacuagu

SEQ ID NO: 547844 - RNA, 19 nt, Artificial Sequence
  Description of Artificial Sequence: Synthetic oligonucleotide
ccauguggucuguucuaga

SEQ ID NO: 547845 - RNA, 19 nt, Artificial Sequence
  Description of Artificial Sequence: Synthetic oligonucleotide
agccgcagauggcccugau

SEQ ID NO: 547846 - RNA, 19 nt, Artificial Sequence
  Description of Artificial Sequence: Synthetic oligonucleotide
ccucucuuguaugucugga

SEQ ID NO: 547847 - RNA, 19 nt, Artificial Sequence
  Description of Artificial Sequence: Synthetic oligonucleotide
cauugugcagagggugagu

SEQ ID NO: 547848 - RNA, 19 nt, Artificial Sequence
  Description of Artificial Sequence: Synthetic oligonucleotide
ccaagaagaugagccaaua

SEQ ID NO: 547849 - RNA, 19 nt, Artificial Sequence
  Description of Artificial Sequence: Synthetic oligonucleotide
ccaccucgagcuucaaaua

SEQ ID NO: 547850 - RNA, 19 nt, Artificial Sequence
  Description of Artificial Sequence: Synthetic oligonucleotide
gucgaacaacauacggcuu

SEQ ID NO: 547851 - RNA, 19 nt, Artificial Sequence
  Description of Artificial Sequence: Synthetic oligonucleotide
cuagcuccacaucccgauu

SEQ ID NO: 547852 - RNA, 19 nt, Artificial Sequence
  Description of Artificial Sequence: Synthetic oligonucleotide
augcagcgaccaccaucuu

SEQ ID NO: 547853 - RNA, 19 nt, Artificial Sequence
  Description of Artificial Sequence: Synthetic oligonucleotide
cacugugauuucggaggua

SEQ ID NO: 547854 - RNA, 19 nt, Artificial Sequence
  Description of Artificial Sequence: Synthetic oligonucleotide
cgaacaacauacggcuuaa

SEQ ID NO: 547855 - RNA, 19 nt, Artificial Sequence
  Description of Artificial Sequence: Synthetic oligonucleotide
agguuucgucggagccaug

SEQ ID NO: 547856 - RNA, 19 nt, Artificial Sequence
  Description of Artificial Sequence: Synthetic oligonucleotide
cuccccgaacugucuuccu

SEQ ID NO: 547857 - RNA, 19 nt, Artificial Sequence
  Description of Artificial Sequence: Synthetic oligonucleotide
gcucuccguguauacugau

SEQ ID NO: 547858 - RNA, 19 nt, Artificial Sequence
  Description of Artificial Sequence: Synthetic oligonucleotide
caguaagcuccugcuccau

SEQ ID NO: 547859 - RNA, 19 nt, Artificial Sequence
  Description of Artificial Sequence: Synthetic oligonucleotide
cggagguaggguacaacau

SEQ ID NO: 547860 - RNA, 19 nt, Artificial Sequence
  Description of Artificial Sequence: Synthetic oligonucleotide
gcucgguaacucggggcau

SEQ ID NO: 547861 - RNA, 19 nt, Artificial Sequence
  Description of Artificial Sequence: Synthetic oligonucleotide
ccgcaccggcuugugacuu

SEQ ID NO: 547862 - RNA, 19 nt, Artificial Sequence
  Description of Artificial Sequence: Synthetic oligonucleotide
cggagccauguggucuguu

SEQ ID NO: 547863 - RNA, 19 nt, Artificial Sequence
  Description of Artificial Sequence: Synthetic oligonucleotide
aaugagauagagcuugccc

SEQ ID NO: 547864 - RNA, 19 nt, Artificial Sequence
  Description of Artificial Sequence: Synthetic oligonucleotide
agaaagugguucuagaacc

SEQ ID NO: 547865 - RNA, 19 nt, Artificial Sequence
  Description of Artificial Sequence: Synthetic oligonucleotide
uaugucacagccuucaucg

SEQ ID NO: 547866 - RNA, 19 nt, Artificial Sequence
  Description of Artificial Sequence: Synthetic oligonucleotide
aucacugaaaacuaaguuc

SEQ ID NO: 547867 - RNA, 19 nt, Artificial Sequence
  Description of Artificial Sequence: Synthetic oligonucleotide
aaauggaguauauccugcc

SEQ ID NO: 547868 - RNA, 19 nt, Artificial Sequence
  Description of Artificial Sequence: Synthetic oligonucleotide
uggauuguaaguuuauuag

SEQ ID NO: 547869 - RNA, 19 nt, Artificial Sequence
  Description of Artificial Sequence: Synthetic oligonucleotide
ucuccuuuaccacauagcc

SEQ ID NO: 547870 - RNA, 19 nt, Artificial Sequence
  Description of Artificial Sequence: Synthetic oligonucleotide
gaauggacuucucacacgg

SEQ ID NO: 547871 - RNA, 19 nt, Artificial Sequence
  Description of Artificial Sequence: Synthetic oligonucleotide
uucaucguagccuugacgu

SEQ ID NO: 547872 - RNA, 19 nt, Artificial Sequence
  Description of Artificial Sequence: Synthetic oligonucleotide
uuggcugucucugagaccg

SEQ ID NO: 547873 - RNA, 19 nt, Artificial Sequence
  Description of Artificial Sequence: Synthetic oligonucleotide
uaaguuuauuagaaaggcc

SEQ ID NO: 547874 - RNA, 19 nt, Artificial Sequence
  Description of Artificial Sequence: Synthetic oligonucleotide
guaaguuuauuagaaaggc

SEQ ID NO: 547875 - RNA, 19 nt, Artificial Sequence
  Description of Artificial Sequence: Synthetic oligonucleotide
uuagaaaggcaaauggauc

SEQ ID NO: 547876 - RNA, 19 nt, Artificial Sequence
  Description of Artificial Sequence: Synthetic oligonucleotide
aguauauccugccagcaug

SEQ ID NO: 547877 - RNA, 19 nt, Artificial Sequence
  Description of Artificial Sequence: Synthetic oligonucleotide
uucuagaaccccagaauag

SEQ ID NO: 547878 - RNA, 19 nt, Artificial Sequence
  Description of Artificial Sequence: Synthetic oligonucleotide
gaaugggugguucacauca

SEQ ID NO: 547879 - RNA, 19 nt, Artificial Sequence
  Description of Artificial Sequence: Synthetic oligonucleotide
aaagugguucuagaacccc

SEQ ID NO: 547880 - RNA, 19 nt, Artificial Sequence
  Description of Artificial Sequence: Synthetic oligonucleotide
augcaaguauuccacaguc

SEQ ID NO: 547881 - RNA, 19 nt, Artificial Sequence
  Description of Artificial Sequence: Synthetic oligonucleotide
uggggugcugcccauaccg

SEQ ID NO: 547882 - RNA, 19 nt, Artificial Sequence
  Description of Artificial Sequence: Synthetic oligonucleotide
uggguuuggagcuauugag

SEQ ID NO: 547883 - RNA, 19 nt, Artificial Sequence
  Description of Artificial Sequence: Synthetic oligonucleotide
agcgcuuacacacagagua

SEQ ID NO: 547884 - RNA, 19 nt, Artificial Sequence
  Description of Artificial Sequence: Synthetic oligonucleotide
augagauagagcuugcccu

SEQ ID NO: 547885 - RNA, 19 nt, Artificial Sequence
  Description of Artificial Sequence: Synthetic oligonucleotide
uguccgauccgacugcagg

SEQ ID NO: 547886 - RNA, 19 nt, Artificial Sequence
  Description of Artificial Sequence: Synthetic oligonucleotide
gaagaaggcacuucacacc

SEQ ID NO: 547887 - RNA, 19 nt, Artificial Sequence
  Description of Artificial Sequence: Synthetic oligonucleotide
agaguaggagcccacgccg

SEQ ID NO: 547888 - RNA, 19 nt, Artificial Sequence
  Description of Artificial Sequence: Synthetic oligonucleotide
guguucgugauucucaggc

SEQ ID NO: 547889 - RNA, 19 nt, Artificial Sequence
  Description of Artificial Sequence: Synthetic oligonucleotide
uuuggagcuauugagugca

SEQ ID NO: 547890 - RNA, 19 nt, Artificial Sequence
  Description of Artificial Sequence: Synthetic oligonucleotide
uugucuuucugggugaucc

SEQ ID NO: 547891 - RNA, 19 nt, Artificial Sequence
  Description of Artificial Sequence: Synthetic oligonucleotide
aaguuggcuguguagcaag

SEQ ID NO: 547892 - RNA, 19 nt, Artificial Sequence
  Description of Artificial Sequence: Synthetic oligonucleotide
aaccuuccacugccgaucc

SEQ ID NO: 547893 - RNA, 19 nt, Artificial Sequence
  Description of Artificial Sequence: Synthetic oligonucleotide
auggaguauauccugccag

SEQ ID NO: 547894 - RNA, 19 nt, Artificial Sequence
  Description of Artificial Sequence: Synthetic oligonucleotide
cucgauuggcuucagcugg

SEQ ID NO: 547895 - RNA, 19 nt, Artificial Sequence
  Description of Artificial Sequence: Synthetic oligonucleotide
ugugaacucuguccagugg

SEQ ID NO: 547896 - RNA, 19 nt, Artificial Sequence
  Description of Artificial Sequence: Synthetic oligonucleotide
ggauagaugacucgauugg

SEQ ID NO: 547897 - RNA, 19 nt, Artificial Sequence
  Description of Artificial Sequence: Synthetic oligonucleotide
uuugagagucgugugaaca

SEQ ID NO: 547898 - RNA, 19 nt, Artificial Sequence
  Description of Artificial Sequence: Synthetic oligonucleotide
ugaauggacuucucacacg

SEQ ID NO: 547899 - RNA, 19 nt, Artificial Sequence
  Description of Artificial Sequence: Synthetic oligonucleotide
agcucugcggaauagccag

SEQ ID NO: 547900 - RNA, 19 nt, Artificial Sequence
  Description of Artificial Sequence: Synthetic oligonucleotide
auggacuucucacacggag

SEQ ID NO: 547901 - RNA, 19 nt, Artificial Sequence
  Description of Artificial Sequence: Synthetic oligonucleotide
uugagagucgugugaacag

SEQ ID NO: 547902 - RNA, 19 nt, Artificial Sequence
  Description of Artificial Sequence: Synthetic oligonucleotide
gaugguaugcaggacgaag

SEQ ID NO: 547903 - RNA, 19 nt, Artificial Sequence
  Description of Artificial Sequence: Synthetic oligonucleotide
cuauugagugcagaguacg

SEQ ID NO: 547904 - RNA, 19 nt, Artificial Sequence
  Description of Artificial Sequence: Synthetic oligonucleotide
agugaauggacuucucaca

SEQ ID NO: 547905 - RNA, 19 nt, Artificial Sequence
  Description of Artificial Sequence: Synthetic oligonucleotide
acaugaccuccuuugagag

SEQ ID NO: 547906 - RNA, 19 nt, Artificial Sequence
  Description of Artificial Sequence: Synthetic oligonucleotide
ugggaaugcaaguauucca

SEQ ID NO: 547907 - RNA, 19 nt, Artificial Sequence
  Description of Artificial Sequence: Synthetic oligonucleotide
uuuuacuggauuguaaguu

SEQ ID NO: 547908 - RNA, 19 nt, Artificial Sequence
  Description of Artificial Sequence: Synthetic oligonucleotide
acucaggguucccagacuc

SEQ ID NO: 547909 - RNA, 19 nt, Artificial Sequence
  Description of Artificial Sequence: Synthetic oligonucleotide
uuuacuggauuguaaguuu

SEQ ID NO: 547910 - RNA, 19 nt, Artificial Sequence
  Description of Artificial Sequence: Synthetic oligonucleotide
ugugacucggugcuccucc

SEQ ID NO: 547911 - RNA, 19 nt, Artificial Sequence
  Description of Artificial Sequence: Synthetic oligonucleotide
caagcucugcggaauagcc

SEQ ID NO: 547912 - RNA, 19 nt, Artificial Sequence
  Description of Artificial Sequence: Synthetic oligonucleotide
ucuagaaccccagaauaga

SEQ ID NO: 547913 - RNA, 19 nt, Artificial Sequence
  Description of Artificial Sequence: Synthetic oligonucleotide
uucacagggugguggacgg

SEQ ID NO: 547914 - RNA, 19 nt, Artificial Sequence
  Description of Artificial Sequence: Synthetic oligonucleotide
ugagggugaaccuuccacu

SEQ ID NO: 547915 - RNA, 19 nt, Artificial Sequence
  Description of Artificial Sequence: Synthetic oligonucleotide
agcuauugagugcagagua

SEQ ID NO: 547916 - RNA, 19 nt, Artificial Sequence
  Description of Artificial Sequence: Synthetic oligonucleotide
gaguuaccagcugaggagg

SEQ ID NO: 547917 - RNA, 19 nt, Artificial Sequence
  Description of Artificial Sequence: Synthetic oligonucleotide
cugccguaggaucuuaucc

SEQ ID NO: 547918 - RNA, 19 nt, Artificial Sequence
  Description of Artificial Sequence: Synthetic oligonucleotide
ugagagucgugugaacagg

SEQ ID NO: 547919 - RNA, 19 nt, Artificial Sequence
  Description of Artificial Sequence: Synthetic oligonucleotide
uccuuugagagucguguga

SEQ ID NO: 547920 - RNA, 19 nt, Artificial Sequence
  Description of Artificial Sequence: Synthetic oligonucleotide
aguuugucugcacuguggu

SEQ ID NO: 547921 - RNA, 19 nt, Artificial Sequence
  Description of Artificial Sequence: Synthetic oligonucleotide
cugcggaauagccaguggg

SEQ ID NO: 547922 - RNA, 19 nt, Artificial Sequence
  Description of Artificial Sequence: Synthetic oligonucleotide
ucugagaccguguuccagu

SEQ ID NO: 547923 - RNA, 19 nt, Artificial Sequence
  Description of Artificial Sequence: Synthetic oligonucleotide
uucgugauucucaggcuug

SEQ ID NO: 547924 - RNA, 19 nt, Artificial Sequence
  Description of Artificial Sequence: Synthetic oligonucleotide
gagaccguguuccaguuuc

SEQ ID NO: 547925 - RNA, 19 nt, Artificial Sequence
  Description of Artificial Sequence: Synthetic oligonucleotide
aucuuagauaccaaguccu

SEQ ID NO: 547926 - RNA, 19 nt, Artificial Sequence
  Description of Artificial Sequence: Synthetic oligonucleotide
agggugaaccuuccacugc

SEQ ID NO: 547927 - RNA, 19 nt, Artificial Sequence
  Description of Artificial Sequence: Synthetic oligonucleotide
uauugagugcagaguacgu

SEQ ID NO: 547928 - RNA, 19 nt, Artificial Sequence
  Description of Artificial Sequence: Synthetic oligonucleotide
ggaagaaggcacuucacac

SEQ ID NO: 547929 - RNA, 19 nt, Artificial Sequence
  Description of Artificial Sequence: Synthetic oligonucleotide
uccggugugucgcugggcc

SEQ ID NO: 547930 - RNA, 19 nt, Artificial Sequence
  Description of Artificial Sequence: Synthetic oligonucleotide
ggagcuauugagugcagag

SEQ ID NO: 547931 - RNA, 19 nt, Artificial Sequence
  Description of Artificial Sequence: Synthetic oligonucleotide
uggaugggcaauguggaug

SEQ ID NO: 547932 - RNA, 19 nt, Artificial Sequence
  Description of Artificial Sequence: Synthetic oligonucleotide
acucgauuggcuucagcug

SEQ ID NO: 547933 - RNA, 19 nt, Artificial Sequence
  Description of Artificial Sequence: Synthetic oligonucleotide
ucugcggaauagccagugg

SEQ ID NO: 547934 - RNA, 19 nt, Artificial Sequence
  Description of Artificial Sequence: Synthetic oligonucleotide
agucgugugaacaggucac

SEQ ID NO: 547935 - RNA, 19 nt, Artificial Sequence
  Description of Artificial Sequence: Synthetic oligonucleotide
uguacagugaauggacuuc

SEQ ID NO: 547936 - RNA, 19 nt, Artificial Sequence
  Description of Artificial Sequence: Synthetic oligonucleotide
uuacuggauuguaaguuua

SEQ ID NO: 547937 - RNA, 19 nt, Artificial Sequence
  Description of Artificial Sequence: Synthetic oligonucleotide
gagggugaaccuuccacug

SEQ ID NO: 547938 - RNA, 19 nt, Artificial Sequence
  Description of Artificial Sequence: Synthetic oligonucleotide
guauauccugccagcaugg

SEQ ID NO: 547939 - RNA, 19 nt, Artificial Sequence
  Description of Artificial Sequence: Synthetic oligonucleotide
caaugcuuaggggagggcc

SEQ ID NO: 547940 - RNA, 19 nt, Artificial Sequence
  Description of Artificial Sequence: Synthetic oligonucleotide
aauagccagugggugacug

SEQ ID NO: 547941 - RNA, 19 nt, Artificial Sequence
  Description of Artificial Sequence: Synthetic oligonucleotide
caaguauuccacagucuug

SEQ ID NO: 547942 - RNA, 19 nt, Artificial Sequence
  Description of Artificial Sequence: Synthetic oligonucleotide
gacucgauuggcuucagcu

SEQ ID NO: 547943 - RNA, 19 nt, Artificial Sequence
  Description of Artificial Sequence: Synthetic oligonucleotide
ucgauuggcuucagcuggg

SEQ ID NO: 547944 - RNA, 19 nt, Artificial Sequence
  Description of Artificial Sequence: Synthetic oligonucleotide
cacggaacagcugaugagc

SEQ ID NO: 547945 - RNA, 19 nt, Artificial Sequence
  Description of Artificial Sequence: Synthetic oligonucleotide
gagucgugugaacagguca

SEQ ID NO: 547946 - RNA, 19 nt, Artificial Sequence
  Description of Artificial Sequence: Synthetic oligonucleotide
auauccugccagcauggug

SEQ ID NO: 547947 - RNA, 19 nt, Artificial Sequence
  Description of Artificial Sequence: Synthetic oligonucleotide
agaagaacuucugccguag

SEQ ID NO: 547948 - RNA, 19 nt, Artificial Sequence
  Description of Artificial Sequence: Synthetic oligonucleotide
uucacacccucucuugggu

SEQ ID NO: 547949 - RNA, 19 nt, Artificial Sequence
  Description of Artificial Sequence: Synthetic oligonucleotide
cugagggugaaccuuccac

SEQ ID NO: 547950 - RNA, 19 nt, Artificial Sequence
  Description of Artificial Sequence: Synthetic oligonucleotide
ugcuucgcaaagccaaagu

SEQ ID NO: 547951 - RNA, 19 nt, Artificial Sequence
  Description of Artificial Sequence: Synthetic oligonucleotide
ggauuguaaguuuauuaga

SEQ ID NO: 547952 - RNA, 19 nt, Artificial Sequence
  Description of Artificial Sequence: Synthetic oligonucleotide
cugaguuaccagcugagga

SEQ ID NO: 547953 - RNA, 19 nt, Artificial Sequence
  Description of Artificial Sequence: Synthetic oligonucleotide
cacgaaguuggcuguguag

SEQ ID NO: 547954 - RNA, 19 nt, Artificial Sequence
  Description of Artificial Sequence: Synthetic oligonucleotide
gagagucucuggguguucg

SEQ ID NO: 547955 - RNA, 19 nt, Artificial Sequence
  Description of Artificial Sequence: Synthetic oligonucleotide
ggaugggcaauguggaugc

SEQ ID NO: 547956 - RNA, 19 nt, Artificial Sequence
  Description of Artificial Sequence: Synthetic oligonucleotide
gaaugagauagagcuugcc

SEQ ID NO: 547957 - RNA, 19 nt, Artificial Sequence
  Description of Artificial Sequence: Synthetic oligonucleotide
caauguggaugcuggugcc

SEQ ID NO: 547958 - RNA, 19 nt, Artificial Sequence
  Description of Artificial Sequence: Synthetic oligonucleotide
auaccaaguccuuggcugu

SEQ ID NO: 547959 - RNA, 19 nt, Artificial Sequence
  Description of Artificial Sequence: Synthetic oligonucleotide
uguucgugauucucaggcu

SEQ ID NO: 547960 - RNA, 19 nt, Artificial Sequence
  Description of Artificial Sequence: Synthetic oligonucleotide
aacccugaguuaccagcug

SEQ ID NO: 547961 - RNA, 19 nt, Artificial Sequence
  Description of Artificial Sequence: Synthetic oligonucleotide
ugggcgaggauagaugacu

SEQ ID NO: 547962 - RNA, 19 nt, Artificial Sequence
  Description of Artificial Sequence: Synthetic oligonucleotide
ggugccuggagccaagagc

SEQ ID NO: 547963 - RNA, 19 nt, Artificial Sequence
  Description of Artificial Sequence: Synthetic oligonucleotide
uaccgcagaagaaucucaa

SEQ ID NO: 547964 - RNA, 19 nt, Artificial Sequence
  Description of Artificial Sequence: Synthetic oligonucleotide
gaugaccuugacagcauac

SEQ ID NO: 547965 - RNA, 19 nt, Artificial Sequence
  Description of Artificial Sequence: Synthetic oligonucleotide
cagacucguccacauacag

SEQ ID NO: 547966 - RNA, 19 nt, Artificial Sequence
  Description of Artificial Sequence: Synthetic oligonucleotide
uuuggaggcguguguagau

SEQ ID NO: 547967 - RNA, 19 nt, Artificial Sequence
  Description of Artificial Sequence: Synthetic oligonucleotide
uaugcaggacgaagcuggc

SEQ ID NO: 547968 - RNA, 19 nt, Artificial Sequence
  Description of Artificial Sequence: Synthetic oligonucleotide
uacuggauuguaaguuuau

SEQ ID NO: 547969 - RNA, 19 nt, Artificial Sequence
  Description of Artificial Sequence: Synthetic oligonucleotide
gaugacucgauuggcuuca

SEQ ID NO: 547970 - RNA, 19 nt, Artificial Sequence
  Description of Artificial Sequence: Synthetic oligonucleotide
agcaaggcgucaugagaag

SEQ ID NO: 547971 - RNA, 19 nt, Artificial Sequence
  Description of Artificial Sequence: Synthetic oligonucleotide
agccuuguggacacagcgc

SEQ ID NO: 547972 - RNA, 19 nt, Artificial Sequence
  Description of Artificial Sequence: Synthetic oligonucleotide
cacagccaaugcuuagggg

SEQ ID NO: 547973 - RNA, 19 nt, Artificial Sequence
  Description of Artificial Sequence: Synthetic oligonucleotide
auacuccauguugguagcc

SEQ ID NO: 547974 - RNA, 19 nt, Artificial Sequence
  Description of Artificial Sequence: Synthetic oligonucleotide
acgaaugggugguucacau

SEQ ID NO: 547975 - RNA, 19 nt, Artificial Sequence
  Description of Artificial Sequence: Synthetic oligonucleotide
ucugccguaggaucuuauc

SEQ ID NO: 547976 - RNA, 19 nt, Artificial Sequence
  Description of Artificial Sequence: Synthetic oligonucleotide
ugaaccuuccacugccgau

SEQ ID NO: 547977 - RNA, 19 nt, Artificial Sequence
  Description of Artificial Sequence: Synthetic oligonucleotide
cugggugauccaugggugc

SEQ ID NO: 547978 - RNA, 19 nt, Artificial Sequence
  Description of Artificial Sequence: Synthetic oligonucleotide
agauagagcuugcccucag

SEQ ID NO: 547979 - RNA, 19 nt, Artificial Sequence
  Description of Artificial Sequence: Synthetic oligonucleotide
aaugggugguucacaucag

SEQ ID NO: 547980 - RNA, 19 nt, Artificial Sequence
  Description of Artificial Sequence: Synthetic oligonucleotide
cucaggguucccagacucg

SEQ ID NO: 547981 - RNA, 19 nt, Artificial Sequence
  Description of Artificial Sequence: Synthetic oligonucleotide
aagugguucuagaacccca

SEQ ID NO: 547982 - RNA, 19 nt, Artificial Sequence
  Description of Artificial Sequence: Synthetic oligonucleotide
acggaacagcugaugagcg

SEQ ID NO: 547983 - RNA, 19 nt, Artificial Sequence
  Description of Artificial Sequence: Synthetic oligonucleotide
gaugaacccugaguuacca

SEQ ID NO: 547984 - RNA, 19 nt, Artificial Sequence
  Description of Artificial Sequence: Synthetic oligonucleotide
cuuugagagucgugugaac

SEQ ID NO: 547985 - RNA, 19 nt, Artificial Sequence
  Description of Artificial Sequence: Synthetic oligonucleotide
gaacagcugaugagcgccg

SEQ ID NO: 547986 - RNA, 19 nt, Artificial Sequence
  Description of Artificial Sequence: Synthetic oligonucleotide
ugaccuccuuugagagucg

SEQ ID NO: 547987 - RNA, 19 nt, Artificial Sequence
  Description of Artificial Sequence: Synthetic oligonucleotide
acccugaguuaccagcuga

SEQ ID NO: 547988 - RNA, 19 nt, Artificial Sequence
  Description of Artificial Sequence: Synthetic oligonucleotide
aguauuccacagucuugcu

SEQ ID NO: 547989 - RNA, 19 nt, Artificial Sequence
  Description of Artificial Sequence: Synthetic oligonucleotide
uccuccggugugucgcugg

SEQ ID NO: 547990 - RNA, 19 nt, Artificial Sequence
  Description of Artificial Sequence: Synthetic oligonucleotide
ggaagucugccgaaaagug

SEQ ID NO: 547991 - RNA, 19 nt, Artificial Sequence
  Description of Artificial Sequence: Synthetic oligonucleotide
ugucuuucugggugaucca

SEQ ID NO: 547992 - RNA, 19 nt, Artificial Sequence
  Description of Artificial Sequence: Synthetic oligonucleotide
cuccuuuaccacauagcca

SEQ ID NO: 547993 - RNA, 19 nt, Artificial Sequence
  Description of Artificial Sequence: Synthetic oligonucleotide
ugaugagcgccggcgcugg

SEQ ID NO: 547994 - RNA, 19 nt, Artificial Sequence
  Description of Artificial Sequence: Synthetic oligonucleotide
uggacggcagcuuccucac

SEQ ID NO: 547995 - RNA, 19 nt, Artificial Sequence
  Description of Artificial Sequence: Synthetic oligonucleotide
gauccgacugcaggggccc

SEQ ID NO: 547996 - RNA, 19 nt, Artificial Sequence
  Description of Artificial Sequence: Synthetic oligonucleotide
ggcccauuggcaaauggag

SEQ ID NO: 547997 - RNA, 19 nt, Artificial Sequence
  Description of Artificial Sequence: Synthetic oligonucleotide
ccgaaaagugcucucugcc

SEQ ID NO: 547998 - RNA, 19 nt, Artificial Sequence
  Description of Artificial Sequence: Synthetic oligonucleotide
cuguagcagaaagugguuc

SEQ ID NO: 547999 - RNA, 19 nt, Artificial Sequence
  Description of Artificial Sequence: Synthetic oligonucleotide
uccauaugucacagccuuc

SEQ ID NO: 548000 - RNA, 19 nt, Artificial Sequence
  Description of Artificial Sequence: Synthetic oligonucleotide
agagucgugugaacagguc

SEQ ID NO: 548001 - RNA, 19 nt, Artificial Sequence
  Description of Artificial Sequence: Synthetic oligonucleotide
ggcgaggauagaugacucg

SEQ ID NO: 548002 - RNA, 19 nt, Artificial Sequence
  Description of Artificial Sequence: Synthetic oligonucleotide
gcaaugguuagaaaggcaa

SEQ ID NO: 548003 - RNA, 19 nt, Artificial Sequence
  Description of Artificial Sequence: Synthetic oligonucleotide
auagccagugggugacuga

SEQ ID NO: 548004 - RNA, 19 nt, Artificial Sequence
  Description of Artificial Sequence: Synthetic oligonucleotide
aucguagccuugacguuuc

SEQ ID NO: 548005 - RNA, 19 nt, Artificial Sequence
  Description of Artificial Sequence: Synthetic oligonucleotide
gagaagaacuucugccgua

SEQ ID NO: 548006 - RNA, 19 nt, Artificial Sequence
  Description of Artificial Sequence: Synthetic oligonucleotide
gccuuggacagaugaaccc

SEQ ID NO: 548007 - RNA, 19 nt, Artificial Sequence
  Description of Artificial Sequence: Synthetic oligonucleotide
aaagugcucucugccuccu

SEQ ID NO: 548008 - RNA, 19 nt, Artificial Sequence
  Description of Artificial Sequence: Synthetic oligonucleotide
uguggacacagcgcuuaca

SEQ ID NO: 548009 - RNA, 19 nt, Artificial Sequence
  Description of Artificial Sequence: Synthetic oligonucleotide
gauccgggugaggaucucc

SEQ ID NO: 548010 - RNA, 19 nt, Artificial Sequence
  Description of Artificial Sequence: Synthetic oligonucleotide
uuguggacacagcgcuuac

SEQ ID NO: 548011 - RNA, 19 nt, Artificial Sequence
  Description of Artificial Sequence: Synthetic oligonucleotide
gaccguguuccaguuuccc

SEQ ID NO: 548012 - RNA, 19 nt, Artificial Sequence
  Description of Artificial Sequence: Synthetic oligonucleotide
cagaugcgcaggcacucag

SEQ ID NO: 548013 - RNA, 19 nt, Artificial Sequence
  Description of Artificial Sequence: Synthetic oligonucleotide
guacacguguuugccauca

SEQ ID NO: 548014 - RNA, 19 nt, Artificial Sequence
  Description of Artificial Sequence: Synthetic oligonucleotide
gaguccauccuggggaaga

SEQ ID NO: 548015 - RNA, 19 nt, Artificial Sequence
  Description of Artificial Sequence: Synthetic oligonucleotide
aguugcuguaccaccgagu

SEQ ID NO: 548016 - RNA, 19 nt, Artificial Sequence
  Description of Artificial Sequence: Synthetic oligonucleotide
ugugguucacaggguggug

SEQ ID NO: 548017 - RNA, 19 nt, Artificial Sequence
  Description of Artificial Sequence: Synthetic oligonucleotide
ucaucguagccuugacguu

SEQ ID NO: 548018 - RNA, 19 nt, Artificial Sequence
  Description of Artificial Sequence: Synthetic oligonucleotide
uauauccugccagcauggu

SEQ ID NO: 548019 - RNA, 19 nt, Artificial Sequence
  Description of Artificial Sequence: Synthetic oligonucleotide
augcccaagcugugcaggu

SEQ ID NO: 548020 - RNA, 19 nt, Artificial Sequence
  Description of Artificial Sequence: Synthetic oligonucleotide
gcugggcgaggauagauga

SEQ ID NO: 548021 - RNA, 19 nt, Artificial Sequence
  Description of Artificial Sequence: Synthetic oligonucleotide
ucgugauucucaggcuuga

SEQ ID NO: 548022 - RNA, 19 nt, Artificial Sequence
  Description of Artificial Sequence: Synthetic oligonucleotide
guuuggaggcguguguaga

SEQ ID NO: 548023 - RNA, 19 nt, Artificial Sequence
  Description of Artificial Sequence: Synthetic oligonucleotide
ccugggaaugcaaguauuc

SEQ ID NO: 548024 - RNA, 19 nt, Artificial Sequence
  Description of Artificial Sequence: Synthetic oligonucleotide
agaaaggcaaauggaucuu

SEQ ID NO: 548025 - RNA, 19 nt, Artificial Sequence
  Description of Artificial Sequence: Synthetic oligonucleotide
ggcguguguagauggcucc

SEQ ID NO: 548026 - RNA, 19 nt, Artificial Sequence
  Description of Artificial Sequence: Synthetic oligonucleotide
cucugcggaauagccagug

SEQ ID NO: 548027 - RNA, 19 nt, Artificial Sequence
  Description of Artificial Sequence: Synthetic oligonucleotide
acgaagcugaagccacgga

SEQ ID NO: 548028 - RNA, 19 nt, Artificial Sequence
  Description of Artificial Sequence: Synthetic oligonucleotide
gugccuggagccaagagcu

SEQ ID NO: 548029 - RNA, 19 nt, Artificial Sequence
  Description of Artificial Sequence: Synthetic oligonucleotide
gagauagagcuugcccuca

SEQ ID NO: 548030 - RNA, 19 nt, Artificial Sequence
  Description of Artificial Sequence: Synthetic oligonucleotide
auacaggauguuacugggu

SEQ ID NO: 548031 - RNA, 19 nt, Artificial Sequence
  Description of Artificial Sequence: Synthetic oligonucleotide
gaggauagaugacucgauu

SEQ ID NO: 548032 - RNA, 19 nt, Artificial Sequence
  Description of Artificial Sequence: Synthetic oligonucleotide
cugcuucgcaaagccaaag

SEQ ID NO: 548033 - RNA, 19 nt, Artificial Sequence
  Description of Artificial Sequence: Synthetic oligonucleotide
cuucccguggaguugcugu

SEQ ID NO: 548034 - RNA, 19 nt, Artificial Sequence
  Description of Artificial Sequence: Synthetic oligonucleotide
uccucugagggaucccguu

SEQ ID NO: 548035 - RNA, 19 nt, Artificial Sequence
  Description of Artificial Sequence: Synthetic oligonucleotide
uuccacugccgauccgggu

SEQ ID NO: 548036 - RNA, 19 nt, Artificial Sequence
  Description of Artificial Sequence: Synthetic oligonucleotide
caaggaguuugucugcacu

SEQ ID NO: 548037 - RNA, 19 nt, Artificial Sequence
  Description of Artificial Sequence: Synthetic oligonucleotide
gggacugcaaugguuagaa

SEQ ID NO: 548038 - RNA, 19 nt, Artificial Sequence
  Description of Artificial Sequence: Synthetic oligonucleotide
gccacggaacagcugauga

SEQ ID NO: 548039 - RNA, 19 nt, Artificial Sequence
  Description of Artificial Sequence: Synthetic oligonucleotide
ugacccaggucugcucucu

SEQ ID NO: 548040 - RNA, 19 nt, Artificial Sequence
  Description of Artificial Sequence: Synthetic oligonucleotide
uucucacacggagcccgag

SEQ ID NO: 548041 - RNA, 19 nt, Artificial Sequence
  Description of Artificial Sequence: Synthetic oligonucleotide
uucccguggaguugcugua

SEQ ID NO: 548042 - RNA, 19 nt, Artificial Sequence
  Description of Artificial Sequence: Synthetic oligonucleotide
guucgugauucucaggcuu

SEQ ID NO: 548043 - RNA, 19 nt, Artificial Sequence
  Description of Artificial Sequence: Synthetic oligonucleotide
caggacgaagcuggccucc

SEQ ID NO: 548044 - RNA, 19 nt, Artificial Sequence
  Description of Artificial Sequence: Synthetic oligonucleotide
gcuauugagugcagaguac

SEQ ID NO: 548045 - RNA, 19 nt, Artificial Sequence
  Description of Artificial Sequence: Synthetic oligonucleotide
cuuguggacacagcgcuua

SEQ ID NO: 548046 - RNA, 19 nt, Artificial Sequence
  Description of Artificial Sequence: Synthetic oligonucleotide
ggugguggacggcagcuuc

SEQ ID NO: 548047 - RNA, 19 nt, Artificial Sequence
  Description of Artificial Sequence: Synthetic oligonucleotide
ccacggaacagcugaugag

SEQ ID NO: 548048 - RNA, 19 nt, Artificial Sequence
  Description of Artificial Sequence: Synthetic oligonucleotide
guaggagcccacgccgacc

SEQ ID NO: 548049 - RNA, 19 nt, Artificial Sequence
  Description of Artificial Sequence: Synthetic oligonucleotide
ccgaccgucuccuuuacca

SEQ ID NO: 548050 - RNA, 19 nt, Artificial Sequence
  Description of Artificial Sequence: Synthetic oligonucleotide
ggugggacaacuggcucug

SEQ ID NO: 548051 - RNA, 19 nt, Artificial Sequence
  Description of Artificial Sequence: Synthetic oligonucleotide
uggcguccuuggcuguagc

SEQ ID NO: 548052 - RNA, 19 nt, Artificial Sequence
  Description of Artificial Sequence: Synthetic oligonucleotide
gagcuauugagugcagagu

SEQ ID NO: 548053 - RNA, 19 nt, Artificial Sequence
  Description of Artificial Sequence: Synthetic oligonucleotide
aguuaccagcugaggagga

SEQ ID NO: 548054 - RNA, 19 nt, Artificial Sequence
  Description of Artificial Sequence: Synthetic oligonucleotide
gaugagcgccggcgcuggg

SEQ ID NO: 548055 - RNA, 19 nt, Artificial Sequence
  Description of Artificial Sequence: Synthetic oligonucleotide
ugaugguaugcaggacgaa

SEQ ID NO: 548056 - RNA, 19 nt, Artificial Sequence
  Description of Artificial Sequence: Synthetic oligonucleotide
cuugacguuucagcaccuc

SEQ ID NO: 548057 - RNA, 19 nt, Artificial Sequence
  Description of Artificial Sequence: Synthetic oligonucleotide
cuguccgauccgacugcag

SEQ ID NO: 548058 - RNA, 19 nt, Artificial Sequence
  Description of Artificial Sequence: Synthetic oligonucleotide
uacacguguuugccaucau

SEQ ID NO: 548059 - RNA, 19 nt, Artificial Sequence
  Description of Artificial Sequence: Synthetic oligonucleotide
gagagucgugugaacaggu

SEQ ID NO: 548060 - RNA, 19 nt, Artificial Sequence
  Description of Artificial Sequence: Synthetic oligonucleotide
aagcccauucucagcccga

SEQ ID NO: 548061 - RNA, 19 nt, Artificial Sequence
  Description of Artificial Sequence: Synthetic oligonucleotide
gcggaauagccagugggug

SEQ ID NO: 548062 - RNA, 19 nt, Artificial Sequence
  Description of Artificial Sequence: Synthetic oligonucleotide
ccaugugacucggugcucc

SEQ ID NO: 548063 - RNA, 19 nt, Artificial Sequence
  Description of Artificial Sequence: Synthetic oligonucleotide
gcgaggauagaugacucga

SEQ ID NO: 548064 - RNA, 19 nt, Artificial Sequence
  Description of Artificial Sequence: Synthetic oligonucleotide
ucccguggaguugcuguac

SEQ ID NO: 548065 - RNA, 19 nt, Artificial Sequence
  Description of Artificial Sequence: Synthetic oligonucleotide
acagaugcgcaggcacuca

SEQ ID NO: 548066 - RNA, 19 nt, Artificial Sequence
  Description of Artificial Sequence: Synthetic oligonucleotide
cacggggcuguccgauccg

SEQ ID NO: 548067 - RNA, 19 nt, Artificial Sequence
  Description of Artificial Sequence: Synthetic oligonucleotide
ccauaugucacagccuuca

SEQ ID NO: 548068 - RNA, 19 nt, Artificial Sequence
  Description of Artificial Sequence: Synthetic oligonucleotide
ucguagccuugacguuuca

SEQ ID NO: 548069 - RNA, 19 nt, Artificial Sequence
  Description of Artificial Sequence: Synthetic oligonucleotide
uccucacccgccgcugggc

SEQ ID NO: 548070 - RNA, 19 nt, Artificial Sequence
  Description of Artificial Sequence: Synthetic oligonucleotide
uggcccacuccccgguguc

SEQ ID NO: 548071 - RNA, 19 nt, Artificial Sequence
  Description of Artificial Sequence: Synthetic oligonucleotide
ggacgaagcuggccucccg

SEQ ID NO: 548072 - RNA, 19 nt, Artificial Sequence
  Description of Artificial Sequence: Synthetic oligonucleotide
ugccgauccgggugaggau

SEQ ID NO: 548073 - RNA, 19 nt, Artificial Sequence
  Description of Artificial Sequence: Synthetic oligonucleotide
cacgaaugggugguucaca

SEQ ID NO: 548074 - RNA, 19 nt, Artificial Sequence
  Description of Artificial Sequence: Synthetic oligonucleotide
gggcccauuguggaugggc

SEQ ID NO: 548075 - RNA, 19 nt, Artificial Sequence
  Description of Artificial Sequence: Synthetic oligonucleotide
gcgcuuacacacagaguag

SEQ ID NO: 548076 - RNA, 19 nt, Artificial Sequence
  Description of Artificial Sequence: Synthetic oligonucleotide
gguacacguguuugccauc

SEQ ID NO: 548077 - RNA, 19 nt, Artificial Sequence
  Description of Artificial Sequence: Synthetic oligonucleotide
cuguuuggaggcgugugua

SEQ ID NO: 548078 - RNA, 19 nt, Artificial Sequence
  Description of Artificial Sequence: Synthetic oligonucleotide
gggugcugcccauaccgca

SEQ ID NO: 548079 - RNA, 19 nt, Artificial Sequence
  Description of Artificial Sequence: Synthetic oligonucleotide
cagcccgaagcugcuucgc

SEQ ID NO: 548080 - RNA, 19 nt, Artificial Sequence
  Description of Artificial Sequence: Synthetic oligonucleotide
ggcccauuguggaugggca

SEQ ID NO: 548081 - RNA, 19 nt, Artificial Sequence
  Description of Artificial Sequence: Synthetic oligonucleotide
cccgagcccagaagagucc

SEQ ID NO: 548082 - RNA, 19 nt, Artificial Sequence
  Description of Artificial Sequence: Synthetic oligonucleotide
gucucuggguguucgugau

SEQ ID NO: 548083 - RNA, 19 nt, Artificial Sequence
  Description of Artificial Sequence: Synthetic oligonucleotide
ggcguccuuggcuguagca

SEQ ID NO: 548084 - RNA, 19 nt, Artificial Sequence
  Description of Artificial Sequence: Synthetic oligonucleotide
cacuccccgguguccugug

SEQ ID NO: 548085 - RNA, 19 nt, Artificial Sequence
  Description of Artificial Sequence: Synthetic oligonucleotide
caucguagccuugacguuu

SEQ ID NO: 548086 - RNA, 19 nt, Artificial Sequence
  Description of Artificial Sequence: Synthetic oligonucleotide
agcuugcccucagucugga

SEQ ID NO: 548087 - RNA, 19 nt, Artificial Sequence
  Description of Artificial Sequence: Synthetic oligonucleotide
ccuuugagagucgugugaa

SEQ ID NO: 548088 - RNA, 19 nt, Artificial Sequence
  Description of Artificial Sequence: Synthetic oligonucleotide
gccuucaucguagccuuga

SEQ ID NO: 548089 - RNA, 19 nt, Artificial Sequence
  Description of Artificial Sequence: Synthetic oligonucleotide
ccucacccgccgcugggcg

SEQ ID NO: 548090 - RNA, 19 nt, Artificial Sequence
  Description of Artificial Sequence: Synthetic oligonucleotide
gccaguucagccagguaaa

SEQ ID NO: 548091 - RNA, 19 nt, Artificial Sequence
  Description of Artificial Sequence: Synthetic oligonucleotide
gggcgaggauagaugacuc

SEQ ID NO: 548092 - RNA, 19 nt, Artificial Sequence
  Description of Artificial Sequence: Synthetic oligonucleotide
ccgcugagggugaaccuuc

SEQ ID NO: 548093 - RNA, 19 nt, Artificial Sequence
  Description of Artificial Sequence: Synthetic oligonucleotide
gcccgagcccagaagaguc

SEQ ID NO: 548094 - RNA, 19 nt, Artificial Sequence
  Description of Artificial Sequence: Synthetic oligonucleotide
cguuugcucuugucgauga

SEQ ID NO: 548095 - RNA, 19 nt, Artificial Sequence
  Description of Artificial Sequence: Synthetic oligonucleotide
uccgacugcaggggcccau

SEQ ID NO: 548096 - RNA, 19 nt, Artificial Sequence
  Description of Artificial Sequence: Synthetic oligonucleotide
ccuccuuugagagucgugu

SEQ ID NO: 548097 - RNA, 19 nt, Artificial Sequence
  Description of Artificial Sequence: Synthetic oligonucleotide
cggaauagccaguggguga

SEQ ID NO: 548098 - RNA, 19 nt, Artificial Sequence
  Description of Artificial Sequence: Synthetic oligonucleotide
acacccucucuugggugau

SEQ ID NO: 548099 - RNA, 19 nt, Artificial Sequence
  Description of Artificial Sequence: Synthetic oligonucleotide
ccacgaaugggugguucac

SEQ ID NO: 548100 - RNA, 19 nt, Artificial Sequence
  Description of Artificial Sequence: Synthetic oligonucleotide
cgcugggcgaggauagaug

SEQ ID NO: 548101 - RNA, 19 nt, Artificial Sequence
  Description of Artificial Sequence: Synthetic oligonucleotide
ccguuugcucuugucgaug

SEQ ID NO: 548102 - RNA, 19 nt, Artificial Sequence
  Description of Artificial Sequence: Synthetic oligonucleotide
ccaaugcuuaggggagggc

SEQ ID NO: 548103 - RNA, 19 nt, Artificial Sequence
  Description of Artificial Sequence: Synthetic oligonucleotide
cuguguagcaaggcgucau

SEQ ID NO: 548104 - RNA, 19 nt, Artificial Sequence
  Description of Artificial Sequence: Synthetic oligonucleotide
ggagcccacgccgaccguc

SEQ ID NO: 548105 - RNA, 19 nt, Artificial Sequence
  Description of Artificial Sequence: Synthetic oligonucleotide
cgaaugggugguucacauc

SEQ ID NO: 548106 - RNA, 19 nt, Artificial Sequence
  Description of Artificial Sequence: Synthetic oligonucleotide
aggagcccacgccgaccgu

SEQ ID NO: 548107 - RNA, 19 nt, Artificial Sequence
  Description of Artificial Sequence: Synthetic oligonucleotide
ggacugcaaugguuagaaa

SEQ ID NO: 548108 - RNA, 19 nt, Artificial Sequence
  Description of Artificial Sequence: Synthetic oligonucleotide
cagcgcuuacacacagagu

SEQ ID NO: 548109 - RNA, 19 nt, Artificial Sequence
  Description of Artificial Sequence: Synthetic oligonucleotide
ccggugugucgcugggccc

SEQ ID NO: 548110 - RNA, 19 nt, Artificial Sequence
  Description of Artificial Sequence: Synthetic oligonucleotide
cugagaccguguuccaguu

SEQ ID NO: 548111 - RNA, 19 nt, Artificial Sequence
  Description of Artificial Sequence: Synthetic oligonucleotide
gccgaccgucuccuuuacc

SEQ ID NO: 548112 - RNA, 19 nt, Artificial Sequence
  Description of Artificial Sequence: Synthetic oligonucleotide
cacugccgauccgggugag

SEQ ID NO: 548113 - RNA, 19 nt, Artificial Sequence
  Description of Artificial Sequence: Synthetic oligonucleotide
cuccuccggugugucgcug

SEQ ID NO: 548114 - RNA, 19 nt, Artificial Sequence
  Description of Artificial Sequence: Synthetic oligonucleotide
gcguguguagauggcucca

SEQ ID NO: 548115 - RNA, 19 nt, Artificial Sequence
  Description of Artificial Sequence: Synthetic oligonucleotide
ggccacgaaguuggcugug

SEQ ID NO: 548116 - RNA, 19 nt, Artificial Sequence
  Description of Artificial Sequence: Synthetic oligonucleotide
ggagagucucuggguguuc

SEQ ID NO: 548117 - RNA, 19 nt, Artificial Sequence
  Description of Artificial Sequence: Synthetic oligonucleotide
cugagggaucccguuugcu

SEQ ID NO: 548118 - RNA, 19 nt, Artificial Sequence
  Description of Artificial Sequence: Synthetic oligonucleotide
gggaucccguuugcucuug

SEQ ID NO: 548119 - RNA, 19 nt, Artificial Sequence
  Description of Artificial Sequence: Synthetic oligonucleotide
gcaggaccugcuuggcugu

SEQ ID NO: 548120 - RNA, 19 nt, Artificial Sequence
  Description of Artificial Sequence: Synthetic oligonucleotide
ccguggaguugcuguacca

SEQ ID NO: 548121 - RNA, 19 nt, Artificial Sequence
  Description of Artificial Sequence: Synthetic oligonucleotide
auccgacugcaggggccca

SEQ ID NO: 548122 - RNA, 19 nt, Artificial Sequence
  Description of Artificial Sequence: Synthetic oligonucleotide
ccacugccgauccggguga

SEQ ID NO: 548123 - RNA, 19 nt, Artificial Sequence
  Description of Artificial Sequence: Synthetic oligonucleotide
ccgagcccagaagagucca

SEQ ID NO: 548124 - RNA, 19 nt, Artificial Sequence
  Description of Artificial Sequence: Synthetic oligonucleotide
ggggcccauuguggauggg

SEQ ID NO: 548125 - RNA, 19 nt, Artificial Sequence
  Description of Artificial Sequence: Synthetic oligonucleotide
cgaggauagaugacucgau

SEQ ID NO: 548126 - RNA, 19 nt, Artificial Sequence
  Description of Artificial Sequence: Synthetic oligonucleotide
acccgccgcugggcgagga

SEQ ID NO: 548127 - RNA, 19 nt, Artificial Sequence
  Description of Artificial Sequence: Synthetic oligonucleotide
cuccacggggcuguccgau

SEQ ID NO: 548128 - RNA, 19 nt, Artificial Sequence
  Description of Artificial Sequence: Synthetic oligonucleotide
cccugggaaugcaaguauu

SEQ ID NO: 548129 - RNA, 19 nt, Artificial Sequence
  Description of Artificial Sequence: Synthetic oligonucleotide
cacccgccgcugggcgagg

SEQ ID NO: 548130 - RNA, 19 nt, Artificial Sequence
  Description of Artificial Sequence: Synthetic oligonucleotide
gggccaagcucugcggaau

SEQ ID NO: 548131 - RNA, 19 nt, Artificial Sequence
  Description of Artificial Sequence: Synthetic oligonucleotide
cggugugucgcugggccca

SEQ ID NO: 548132 - RNA, 19 nt, Artificial Sequence
  Description of Artificial Sequence: Synthetic oligonucleotide
cccgccccucaucagcucu

SEQ ID NO: 548133 - RNA, 19 nt, Artificial Sequence
  Description of Artificial Sequence: Synthetic oligonucleotide
gcucugcggaauagccagu

SEQ ID NO: 548134 - RNA, 19 nt, Artificial Sequence
  Description of Artificial Sequence: Synthetic oligonucleotide
ccccgcugagggugaaccu

SEQ ID NO: 548135 - RNA, 19 nt, Artificial Sequence
  Description of Artificial Sequence: Synthetic oligonucleotide
ggugugucgcugggcccau

SEQ ID NO: 548136 - RNA, 19 nt, Artificial Sequence
  Description of Artificial Sequence: Synthetic oligonucleotide
ccgucuccuuuaccacaua

SEQ ID NO: 548137 - RNA, 19 nt, Artificial Sequence
  Description of Artificial Sequence: Synthetic oligonucleotide
ccgcugggcgaggauagau

SEQ ID NO: 548138 - RNA, 19 nt, Artificial Sequence
  Description of Artificial Sequence: Synthetic oligonucleotide
ccacuccccgguguccugu

SEQ ID NO: 548139 - RNA, 19 nt, Artificial Sequence
  Description of Artificial Sequence: Synthetic oligonucleotide
gguccacauggagcaucuu

SEQ ID NO: 548140 - RNA, 19 nt, Artificial Sequence
  Description of Artificial Sequence: Synthetic oligonucleotide
gugugucgcugggcccauu

SEQ ID NO: 548141 - RNA, 19 nt, Artificial Sequence
  Description of Artificial Sequence: Synthetic oligonucleotide
ccgacugcaggggcccauu

SEQ ID NO: 548142 - RNA, 19 nt, Artificial Sequence
  Description of Artificial Sequence: Synthetic oligonucleotide
aguagagugaaacagaacg

SEQ ID NO: 548143 - RNA, 19 nt, Artificial Sequence
  Description of Artificial Sequence: Synthetic oligonucleotide
aagucuacaaaaccaaacc

SEQ ID NO: 548144 - RNA, 19 nt, Artificial Sequence
  Description of Artificial Sequence: Synthetic oligonucleotide
aauuauucaaacuucgucu

SEQ ID NO: 548145 - RNA, 19 nt, Artificial Sequence
  Description of Artificial Sequence: Synthetic oligonucleotide
aagcaaauucuauaaacgc

SEQ ID NO: 548146 - RNA, 19 nt, Artificial Sequence
  Description of Artificial Sequence: Synthetic oligonucleotide
auucuauaaacgcauaccc

SEQ ID NO: 548147 - RNA, 19 nt, Artificial Sequence
  Description of Artificial Sequence: Synthetic oligonucleotide
uuuagauuugcccuguugg

SEQ ID NO: 548148 - RNA, 19 nt, Artificial Sequence
  Description of Artificial Sequence: Synthetic oligonucleotide
aaaugauucuuuuaagguc

SEQ ID NO: 548149 - RNA, 19 nt, Artificial Sequence
  Description of Artificial Sequence: Synthetic oligonucleotide
aaauucuauaaacgcauac

SEQ ID NO: 548150 - RNA, 19 nt, Artificial Sequence
  Description of Artificial Sequence: Synthetic oligonucleotide
aguguaaaaccccagaguc

SEQ ID NO: 548151 - RNA, 19 nt, Artificial Sequence
  Description of Artificial Sequence: Synthetic oligonucleotide
uguuacaggaauuuaaagc

SEQ ID NO: 548152 - RNA, 19 nt, Artificial Sequence
  Description of Artificial Sequence: Synthetic oligonucleotide
agucuacaaaaccaaaccc

SEQ ID NO: 548153 - RNA, 19 nt, Artificial Sequence
  Description of Artificial Sequence: Synthetic oligonucleotide
uuaagguuuccaaugaaca

SEQ ID NO: 548154 - RNA, 19 nt, Artificial Sequence
  Description of Artificial Sequence: Synthetic oligonucleotide
uuacuuaaaaccaaaguuu

SEQ ID NO: 548155 - RNA, 19 nt, Artificial Sequence
  Description of Artificial Sequence: Synthetic oligonucleotide
uuuauucccaucaaucucu

SEQ ID NO: 548156 - RNA, 19 nt, Artificial Sequence
  Description of Artificial Sequence: Synthetic oligonucleotide
uggcuaaccaaucugaucu

SEQ ID NO: 548157 - RNA, 19 nt, Artificial Sequence
  Description of Artificial Sequence: Synthetic oligonucleotide
uucaaaugaagcaaauucu

SEQ ID NO: 548158 - RNA, 19 nt, Artificial Sequence
  Description of Artificial Sequence: Synthetic oligonucleotide
auacccuuuagauuugccc

SEQ ID NO: 548159 - RNA, 19 nt, Artificial Sequence
  Description of Artificial Sequence: Synthetic oligonucleotide
uuagguuuggcccagucca

SEQ ID NO: 548160 - RNA, 19 nt, Artificial Sequence
  Description of Artificial Sequence: Synthetic oligonucleotide
ggaaagguuacuuaaaacc

SEQ ID NO: 548161 - RNA, 19 nt, Artificial Sequence
  Description of Artificial Sequence: Synthetic oligonucleotide
guguaguugauucugaacc

SEQ ID NO: 548162 - RNA, 19 nt, Artificial Sequence
  Description of Artificial Sequence: Synthetic oligonucleotide
ucagcaacagacuuguuug

SEQ ID NO: 548163 - RNA, 19 nt, Artificial Sequence
  Description of Artificial Sequence: Synthetic oligonucleotide
ugauucaccacuccaagug

SEQ ID NO: 548164 - RNA, 19 nt, Artificial Sequence
  Description of Artificial Sequence: Synthetic oligonucleotide
uugccaaacacuuucaaac

SEQ ID NO: 548165 - RNA, 19 nt, Artificial Sequence
  Description of Artificial Sequence: Synthetic oligonucleotide
auauaagcaaucccuuuac

SEQ ID NO: 548166 - RNA, 19 nt, Artificial Sequence
  Description of Artificial Sequence: Synthetic oligonucleotide
uuagcaucuucaaaugaag

SEQ ID NO: 548167 - RNA, 19 nt, Artificial Sequence
  Description of Artificial Sequence: Synthetic oligonucleotide
uauaguagagugaaacaga

SEQ ID NO: 548168 - RNA, 19 nt, Artificial Sequence
  Description of Artificial Sequence: Synthetic oligonucleotide
caaugaacagauugaaagg

SEQ ID NO: 548169 - RNA, 19 nt, Artificial Sequence
  Description of Artificial Sequence: Synthetic oligonucleotide
uccuauuuguaccaguucu

SEQ ID NO: 548170 - RNA, 19 nt, Artificial Sequence
  Description of Artificial Sequence: Synthetic oligonucleotide
aaggaauuauucaaacuuc

SEQ ID NO: 548171 - RNA, 19 nt, Artificial Sequence
  Description of Artificial Sequence: Synthetic oligonucleotide
ugaaagguguaguugauuc

SEQ ID NO: 548172 - RNA, 19 nt, Artificial Sequence
  Description of Artificial Sequence: Synthetic oligonucleotide
aaacgcauacccuuuagau

SEQ ID NO: 548173 - RNA, 19 nt, Artificial Sequence
  Description of Artificial Sequence: Synthetic oligonucleotide
uuucaaaccggugagcucc

SEQ ID NO: 548174 - RNA, 19 nt, Artificial Sequence
  Description of Artificial Sequence: Synthetic oligonucleotide
uuaauuucauugccaaaca

SEQ ID NO: 548175 - RNA, 19 nt, Artificial Sequence
  Description of Artificial Sequence: Synthetic oligonucleotide
ugaacagauugaaaggugu

SEQ ID NO: 548176 - RNA, 19 nt, Artificial Sequence
  Description of Artificial Sequence: Synthetic oligonucleotide
ugacucaaaguccacauaa

SEQ ID NO: 548177 - RNA, 19 nt, Artificial Sequence
  Description of Artificial Sequence: Synthetic oligonucleotide
aggaaagguuacuuaaaac

SEQ ID NO: 548178 - RNA, 19 nt, Artificial Sequence
  Description of Artificial Sequence: Synthetic oligonucleotide
guauaguagagugaaacag

SEQ ID NO: 548179 - RNA, 19 nt, Artificial Sequence
  Description of Artificial Sequence: Synthetic oligonucleotide
uguucugcccucaauuucc

SEQ ID NO: 548180 - RNA, 19 nt, Artificial Sequence
  Description of Artificial Sequence: Synthetic oligonucleotide
auuuguaccaguucugaca

SEQ ID NO: 548181 - RNA, 19 nt, Artificial Sequence
  Description of Artificial Sequence: Synthetic oligonucleotide
ccaaugaacagauugaaag

SEQ ID NO: 548182 - RNA, 19 nt, Artificial Sequence
  Description of Artificial Sequence: Synthetic oligonucleotide
aaaguugcuuucucaaaca

SEQ ID NO: 548183 - RNA, 19 nt, Artificial Sequence
  Description of Artificial Sequence: Synthetic oligonucleotide
aauguccuuaaaaggcucc

SEQ ID NO: 548184 - RNA, 19 nt, Artificial Sequence
  Description of Artificial Sequence: Synthetic oligonucleotide
agaguccuuucuuuaaaac

SEQ ID NO: 548185 - RNA, 19 nt, Artificial Sequence
  Description of Artificial Sequence: Synthetic oligonucleotide
agauuugcccuguugguuc

SEQ ID NO: 548186 - RNA, 19 nt, Artificial Sequence
  Description of Artificial Sequence: Synthetic oligonucleotide
guuacaggaauuuaaagcu

SEQ ID NO: 548187 - RNA, 19 nt, Artificial Sequence
  Description of Artificial Sequence: Synthetic oligonucleotide
acaguguaaaaccccagag

SEQ ID NO: 548188 - RNA, 19 nt, Artificial Sequence
  Description of Artificial Sequence: Synthetic oligonucleotide
cuaccaaugcuuuugcuug

SEQ ID NO: 548189 - RNA, 19 nt, Artificial Sequence
  Description of Artificial Sequence: Synthetic oligonucleotide
uaauucagcaacagacuug

SEQ ID NO: 548190 - RNA, 19 nt, Artificial Sequence
  Description of Artificial Sequence: Synthetic oligonucleotide
aacaguguaaaaccccaga

SEQ ID NO: 548191 - RNA, 19 nt, Artificial Sequence
  Description of Artificial Sequence: Synthetic oligonucleotide
gaaagguuacuuaaaacca

SEQ ID NO: 548192 - RNA, 19 nt, Artificial Sequence
  Description of Artificial Sequence: Synthetic oligonucleotide
aaaguaacuuuauucccau

SEQ ID NO: 548193 - RNA, 19 nt, Artificial Sequence
  Description of Artificial Sequence: Synthetic oligonucleotide
ucacccuuagguuuggccc

SEQ ID NO: 548194 - RNA, 19 nt, Artificial Sequence
  Description of Artificial Sequence: Synthetic oligonucleotide
uguccuugcagcucgaacu

SEQ ID NO: 548195 - RNA, 19 nt, Artificial Sequence
  Description of Artificial Sequence: Synthetic oligonucleotide
aguauaguagagugaaaca

SEQ ID NO: 548196 - RNA, 19 nt, Artificial Sequence
  Description of Artificial Sequence: Synthetic oligonucleotide
auccacaacagcaagauca

SEQ ID NO: 548197 - RNA, 19 nt, Artificial Sequence
  Description of Artificial Sequence: Synthetic oligonucleotide
gguauccucagacagaccc

SEQ ID NO: 548198 - RNA, 19 nt, Artificial Sequence
  Description of Artificial Sequence: Synthetic oligonucleotide
aaaggcuccgucauuuaac

SEQ ID NO: 548199 - RNA, 19 nt, Artificial Sequence
  Description of Artificial Sequence: Synthetic oligonucleotide
uucuauaaacgcauacccu

SEQ ID NO: 548200 - RNA, 19 nt, Artificial Sequence
  Description of Artificial Sequence: Synthetic oligonucleotide
aaccugauuguucugcccu

SEQ ID NO: 548201 - RNA, 19 nt, Artificial Sequence
  Description of Artificial Sequence: Synthetic oligonucleotide
uaauuucauugccaaacac

SEQ ID NO: 548202 - RNA, 19 nt, Artificial Sequence
  Description of Artificial Sequence: Synthetic oligonucleotide
uacccuuuagauuugcccu

SEQ ID NO: 548203 - RNA, 19 nt, Artificial Sequence
  Description of Artificial Sequence: Synthetic oligonucleotide
aguaacagcagcuuucuua

SEQ ID NO: 548204 - RNA, 19 nt, Artificial Sequence
  Description of Artificial Sequence: Synthetic oligonucleotide
guuacuuaaaaccaaaguu

SEQ ID NO: 548205 - RNA, 19 nt, Artificial Sequence
  Description of Artificial Sequence: Synthetic oligonucleotide
ucuugcacgaacagagccc

SEQ ID NO: 548206 - RNA, 19 nt, Artificial Sequence
  Description of Artificial Sequence: Synthetic oligonucleotide
uuggauggcugacuucucg

SEQ ID NO: 548207 - RNA, 19 nt, Artificial Sequence
  Description of Artificial Sequence: Synthetic oligonucleotide
uuguuuuccuuucacuacu

SEQ ID NO: 548208 - RNA, 19 nt, Artificial Sequence
  Description of Artificial Sequence: Synthetic oligonucleotide
ucaauauaagcaaucccuu

SEQ ID NO: 548209 - RNA, 19 nt, Artificial Sequence
  Description of Artificial Sequence: Synthetic oligonucleotide
agacagacccuugacaaac

SEQ ID NO: 548210 - RNA, 19 nt, Artificial Sequence
  Description of Artificial Sequence: Synthetic oligonucleotide
aaauguccuuaaaaggcuc

SEQ ID NO: 548211 - RNA, 19 nt, Artificial Sequence
  Description of Artificial Sequence: Synthetic oligonucleotide
aacgcccaucaauuucugc

SEQ ID NO: 548212 - RNA, 19 nt, Artificial Sequence
  Description of Artificial Sequence: Synthetic oligonucleotide
agacccuugacaaacagug

SEQ ID NO: 548213 - RNA, 19 nt, Artificial Sequence
  Description of Artificial Sequence: Synthetic oligonucleotide
gaagucuacaaaaccaaac

SEQ ID NO: 548214 - RNA, 19 nt, Artificial Sequence
  Description of Artificial Sequence: Synthetic oligonucleotide
uuaacagguaacaguguaa

SEQ ID NO: 548215 - RNA, 19 nt, Artificial Sequence
  Description of Artificial Sequence: Synthetic oligonucleotide
caguauaguagagugaaac

SEQ ID NO: 548216 - RNA, 19 nt, Artificial Sequence
  Description of Artificial Sequence: Synthetic oligonucleotide
aaggcuccgucauuuaaca

SEQ ID NO: 548217 - RNA, 19 nt, Artificial Sequence
  Description of Artificial Sequence: Synthetic oligonucleotide
uuuaccagggguugcuacc

SEQ ID NO: 548218 - RNA, 19 nt, Artificial Sequence
  Description of Artificial Sequence: Synthetic oligonucleotide
ucuuaccauucuuagcccc

SEQ ID NO: 548219 - RNA, 19 nt, Artificial Sequence
  Description of Artificial Sequence: Synthetic oligonucleotide
uaaacgcauacccuuuaga

SEQ ID NO: 548220 - RNA, 19 nt, Artificial Sequence
  Description of Artificial Sequence: Synthetic oligonucleotide
uccuuucuuuaaaacgaag

SEQ ID NO: 548221 - RNA, 19 nt, Artificial Sequence
  Description of Artificial Sequence: Synthetic oligonucleotide
uuuggguuaagguuuccaa

SEQ ID NO: 548222 - RNA, 19 nt, Artificial Sequence
  Description of Artificial Sequence: Synthetic oligonucleotide
ucuuuaaaacgaaguggga

SEQ ID NO: 548223 - RNA, 19 nt, Artificial Sequence
  Description of Artificial Sequence: Synthetic oligonucleotide
gauucaccacuccaagugc

SEQ ID NO: 548224 - RNA, 19 nt, Artificial Sequence
  Description of Artificial Sequence: Synthetic oligonucleotide
agggaugacaaccucuucu

SEQ ID NO: 548225 - RNA, 19 nt, Artificial Sequence
  Description of Artificial Sequence: Synthetic oligonucleotide
uuagauuugcccuguuggu

SEQ ID NO: 548226 - RNA, 19 nt, Artificial Sequence
  Description of Artificial Sequence: Synthetic oligonucleotide
ggcacuuugauaaaaguug

SEQ ID NO: 548227 - RNA, 19 nt, Artificial Sequence
  Description of Artificial Sequence: Synthetic oligonucleotide
acuccaaccugauuguucu

SEQ ID NO: 548228 - RNA, 19 nt, Artificial Sequence
  Description of Artificial Sequence: Synthetic oligonucleotide
caaaguaacuuuauuccca

SEQ ID NO: 548229 - RNA, 19 nt, Artificial Sequence
  Description of Artificial Sequence: Synthetic oligonucleotide
aguccuuucuuuaaaacga

SEQ ID NO: 548230 - RNA, 19 nt, Artificial Sequence
  Description of Artificial Sequence: Synthetic oligonucleotide
ugacuauucuugcacgaac

SEQ ID NO: 548231 - RNA, 19 nt, Artificial Sequence
  Description of Artificial Sequence: Synthetic oligonucleotide
uccuuaaaaggcuccguca

SEQ ID NO: 548232 - RNA, 19 nt, Artificial Sequence
  Description of Artificial Sequence: Synthetic oligonucleotide
ugguguaacugccuucuug

SEQ ID NO: 548233 - RNA, 19 nt, Artificial Sequence
  Description of Artificial Sequence: Synthetic oligonucleotide
uuuccuauuuguaccaguu

SEQ ID NO: 548234 - RNA, 19 nt, Artificial Sequence
  Description of Artificial Sequence: Synthetic oligonucleotide
agacuuaaauucaauauaa

SEQ ID NO: 548235 - RNA, 19 nt, Artificial Sequence
  Description of Artificial Sequence: Synthetic oligonucleotide
gacuuaaauucaauauaag

SEQ ID NO: 548236 - RNA, 19 nt, Artificial Sequence
  Description of Artificial Sequence: Synthetic oligonucleotide
aacgcauacccuuuagauu

SEQ ID NO: 548237 - RNA, 19 nt, Artificial Sequence
  Description of Artificial Sequence: Synthetic oligonucleotide
gaucagugacuauucuugc

SEQ ID NO: 548238 - RNA, 19 nt, Artificial Sequence
  Description of Artificial Sequence: Synthetic oligonucleotide
aguugauucugaaccuucc

SEQ ID NO: 548239 - RNA, 19 nt, Artificial Sequence
  Description of Artificial Sequence: Synthetic oligonucleotide
aaaaggcuccgucauuuaa

SEQ ID NO: 548240 - RNA, 19 nt, Artificial Sequence
  Description of Artificial Sequence: Synthetic oligonucleotide
aacaacuuuugcaggagcu

SEQ ID NO: 548241 - RNA, 19 nt, Artificial Sequence
  Description of Artificial Sequence: Synthetic oligonucleotide
agauugaaagguguaguug

SEQ ID NO: 548242 - RNA, 19 nt, Artificial Sequence
  Description of Artificial Sequence: Synthetic oligonucleotide
aggaacaacuuuugcagga

SEQ ID NO: 548243 - RNA, 19 nt, Artificial Sequence
  Description of Artificial Sequence: Synthetic oligonucleotide
uccguuuuccaggugcugg

SEQ ID NO: 548244 - RNA, 19 nt, Artificial Sequence
  Description of Artificial Sequence: Synthetic oligonucleotide
uccuucuuccguuuuccag

SEQ ID NO: 548245 - RNA, 19 nt, Artificial Sequence
  Description of Artificial Sequence: Synthetic oligonucleotide
ccaaauuuccuauuuguac

SEQ ID NO: 548246 - RNA, 19 nt, Artificial Sequence
  Description of Artificial Sequence: Synthetic oligonucleotide
uggggcacuuugauaaaag

SEQ ID NO: 548247 - RNA, 19 nt, Artificial Sequence
  Description of Artificial Sequence: Synthetic oligonucleotide
uucacugauggcaacuuuu

SEQ ID NO: 548248 - RNA, 19 nt, Artificial Sequence
  Description of Artificial Sequence: Synthetic oligonucleotide
agcaaauucuauaaacgca

SEQ ID NO: 548249 - RNA, 19 nt, Artificial Sequence
  Description of Artificial Sequence: Synthetic oligonucleotide
acgcccaucaauuucugcu

SEQ ID NO: 548250 - RNA, 19 nt, Artificial Sequence
  Description of Artificial Sequence: Synthetic oligonucleotide
acgaacagagcccucaaau

SEQ ID NO: 548251 - RNA, 19 nt, Artificial Sequence
  Description of Artificial Sequence: Synthetic oligonucleotide
aagauugggaaggaauuau

SEQ ID NO: 548252 - RNA, 19 nt, Artificial Sequence
  Description of Artificial Sequence: Synthetic oligonucleotide
aacagaacgcccaucaauu

SEQ ID NO: 548253 - RNA, 19 nt, Artificial Sequence
  Description of Artificial Sequence: Synthetic oligonucleotide
uguuuuggauggcugacuu

SEQ ID NO: 548254 - RNA, 19 nt, Artificial Sequence
  Description of Artificial Sequence: Synthetic oligonucleotide
uuuuaccagggguugcuac

SEQ ID NO: 548255 - RNA, 19 nt, Artificial Sequence
  Description of Artificial Sequence: Synthetic oligonucleotide
cucaauuuccauuuuguua

SEQ ID NO: 548256 - RNA, 19 nt, Artificial Sequence
  Description of Artificial Sequence: Synthetic oligonucleotide
gucauuuaacagguaacag

SEQ ID NO: 548257 - RNA, 19 nt, Artificial Sequence
  Description of Artificial Sequence: Synthetic oligonucleotide
guagagugaaacagaacgc

SEQ ID NO: 548258 - RNA, 19 nt, Artificial Sequence
  Description of Artificial Sequence: Synthetic oligonucleotide
uucuucgucuuucacuauc

SEQ ID NO: 548259 - RNA, 19 nt, Artificial Sequence
  Description of Artificial Sequence: Synthetic oligonucleotide
uccaaugaacagauugaaa

SEQ ID NO: 548260 - RNA, 19 nt, Artificial Sequence
  Description of Artificial Sequence: Synthetic oligonucleotide
gacuucucgcauugggucc

SEQ ID NO: 548261 - RNA, 19 nt, Artificial Sequence
  Description of Artificial Sequence: Synthetic oligonucleotide
cagugacuauucuugcacg

SEQ ID NO: 548262 - RNA, 19 nt, Artificial Sequence
  Description of Artificial Sequence: Synthetic oligonucleotide
uuccuuguggcuugaaguc

SEQ ID NO: 548263 - RNA, 19 nt, Artificial Sequence
  Description of Artificial Sequence: Synthetic oligonucleotide
aacuuuugcaggagcuuuc

SEQ ID NO: 548264 - RNA, 19 nt, Artificial Sequence
  Description of Artificial Sequence: Synthetic oligonucleotide
agugacuauucuugcacga

SEQ ID NO: 548265 - RNA, 19 nt, Artificial Sequence
  Description of Artificial Sequence: Synthetic oligonucleotide
uuuggcccaguccaaagua

SEQ ID NO: 548266 - RNA, 19 nt, Artificial Sequence
  Description of Artificial Sequence: Synthetic oligonucleotide
ugauggcaacuuuuaauuc

SEQ ID NO: 548267 - RNA, 19 nt, Artificial Sequence
  Description of Artificial Sequence: Synthetic oligonucleotide
auuuccuauuuguaccagu

SEQ ID NO: 548268 - RNA, 19 nt, Artificial Sequence
  Description of Artificial Sequence: Synthetic oligonucleotide
uucgucuucuuuccuugug

SEQ ID NO: 548269 - RNA, 19 nt, Artificial Sequence
  Description of Artificial Sequence: Synthetic oligonucleotide
uuggguuaagguuuccaau

SEQ ID NO: 548270 - RNA, 19 nt, Artificial Sequence
  Description of Artificial Sequence: Synthetic oligonucleotide
acuuugauaaaaguugcuu

SEQ ID NO: 548271 - RNA, 19 nt, Artificial Sequence
  Description of Artificial Sequence: Synthetic oligonucleotide
aaacaguguuuuggauggc

SEQ ID NO: 548272 - RNA, 19 nt, Artificial Sequence
  Description of Artificial Sequence: Synthetic oligonucleotide
uuagaggaaccaguuuccc

SEQ ID NO: 548273 - RNA, 19 nt, Artificial Sequence
  Description of Artificial Sequence: Synthetic oligonucleotide
aagguuacuuaaaaccaaa

SEQ ID NO: 548274 - RNA, 19 nt, Artificial Sequence
  Description of Artificial Sequence: Synthetic oligonucleotide
auaguagagugaaacagaa

SEQ ID NO: 548275 - RNA, 19 nt, Artificial Sequence
  Description of Artificial Sequence: Synthetic oligonucleotide
gcauucuuaccauucuuag

SEQ ID NO: 548276 - RNA, 19 nt, Artificial Sequence
  Description of Artificial Sequence: Synthetic oligonucleotide
agguguugcaacugcuuug

SEQ ID NO: 548277 - RNA, 19 nt, Artificial Sequence
  Description of Artificial Sequence: Synthetic oligonucleotide
accacuccaagugcuauuc

SEQ ID NO: 548278 - RNA, 19 nt, Artificial Sequence
  Description of Artificial Sequence: Synthetic oligonucleotide
cuugacaaacaguguuuug

SEQ ID NO: 548279 - RNA, 19 nt, Artificial Sequence
  Description of Artificial Sequence: Synthetic oligonucleotide
uaaccaaucugaucuccaa

SEQ ID NO: 548280 - RNA, 19 nt, Artificial Sequence
  Description of Artificial Sequence: Synthetic oligonucleotide
uuccuauuuguaccaguuc

SEQ ID NO: 548281 - RNA, 19 nt, Artificial Sequence
  Description of Artificial Sequence: Synthetic oligonucleotide
ucgcauuggguccuuguaa

SEQ ID NO: 548282 - RNA, 19 nt, Artificial Sequence
  Description of Artificial Sequence: Synthetic oligonucleotide
guucugacauccacaacag

SEQ ID NO: 548283 - RNA, 19 nt, Artificial Sequence
  Description of Artificial Sequence: Synthetic oligonucleotide
acccuugacaaacaguguu

SEQ ID NO: 548284 - RNA, 19 nt, Artificial Sequence
  Description of Artificial Sequence: Synthetic oligonucleotide
gguguugcaacugcuuugg

SEQ ID NO: 548285 - RNA, 19 nt, Artificial Sequence
  Description of Artificial Sequence: Synthetic oligonucleotide
ucuucaaaugaagcaaauu

SEQ ID NO: 548286 - RNA, 19 nt, Artificial Sequence
  Description of Artificial Sequence: Synthetic oligonucleotide
auguccuuaaaaggcuccg

SEQ ID NO: 548287 - RNA, 19 nt, Artificial Sequence
  Description of Artificial Sequence: Synthetic oligonucleotide
gaaauguccuuaaaaggcu

SEQ ID NO: 548288 - RNA, 19 nt, Artificial Sequence
  Description of Artificial Sequence: Synthetic oligonucleotide
agguuacuuaaaaccaaag

SEQ ID NO: 548289 - RNA, 19 nt, Artificial Sequence
  Description of Artificial Sequence: Synthetic oligonucleotide
accugauuguucugcccuc

SEQ ID NO: 548290 - RNA, 19 nt, Artificial Sequence
  Description of Artificial Sequence: Synthetic oligonucleotide
cucggaagccuccucuacc

SEQ ID NO: 548291 - RNA, 19 nt, Artificial Sequence
  Description of Artificial Sequence: Synthetic oligonucleotide
gaagugggaaagauuggga

SEQ ID NO: 548292 - RNA, 19 nt, Artificial Sequence
  Description of Artificial Sequence: Synthetic oligonucleotide
caaccugauuguucugccc

SEQ ID NO: 548293 - RNA, 19 nt, Artificial Sequence
  Description of Artificial Sequence: Synthetic oligonucleotide
cuggcuaaccaaucugauc

SEQ ID NO: 548294 - RNA, 19 nt, Artificial Sequence
  Description of Artificial Sequence: Synthetic oligonucleotide
gaaccaguuucccgaucag

SEQ ID NO: 548295 - RNA, 19 nt, Artificial Sequence
  Description of Artificial Sequence: Synthetic oligonucleotide
cagaacgcccaucaauuuc

SEQ ID NO: 548296 - RNA, 19 nt, Artificial Sequence
  Description of Artificial Sequence: Synthetic oligonucleotide
guccuuaaaaggcuccguc

SEQ ID NO: 548297 - RNA, 19 nt, Artificial Sequence
  Description of Artificial Sequence: Synthetic oligonucleotide
cagggguugcuaccaaugc

SEQ ID NO: 548298 - RNA, 19 nt, Artificial Sequence
  Description of Artificial Sequence: Synthetic oligonucleotide
gguguaguugauucugaac

SEQ ID NO: 548299 - RNA, 19 nt, Artificial Sequence
  Description of Artificial Sequence: Synthetic oligonucleotide
ugauuguucugcccucaau

SEQ ID NO: 548300 - RNA, 19 nt, Artificial Sequence
  Description of Artificial Sequence: Synthetic oligonucleotide
cuaaccaaucugaucucca

SEQ ID NO: 548301 - RNA, 19 nt, Artificial Sequence
  Description of Artificial Sequence: Synthetic oligonucleotide
guuugugaaacaaccaccu

SEQ ID NO: 548302 - RNA, 19 nt, Artificial Sequence
  Description of Artificial Sequence: Synthetic oligonucleotide
uuggcccaguccaaaguaa

SEQ ID NO: 548303 - RNA, 19 nt, Artificial Sequence
  Description of Artificial Sequence: Synthetic oligonucleotide
uucccgaucagugacuauu

SEQ ID NO: 548304 - RNA, 19 nt, Artificial Sequence
  Description of Artificial Sequence: Synthetic oligonucleotide
uuggcaggugugaucucca

SEQ ID NO: 548305 - RNA, 19 nt, Artificial Sequence
  Description of Artificial Sequence: Synthetic oligonucleotide
gaaagguguaguugauucu

SEQ ID NO: 548306 - RNA, 19 nt, Artificial Sequence
  Description of Artificial Sequence: Synthetic oligonucleotide
ucccgaucagugacuauuc

SEQ ID NO: 548307 - RNA, 19 nt, Artificial Sequence
  Description of Artificial Sequence: Synthetic oligonucleotide
ggaaccaguuucccgauca

SEQ ID NO: 548308 - RNA, 19 nt, Artificial Sequence
  Description of Artificial Sequence: Synthetic oligonucleotide
agcuucagacuuaaauuca

SEQ ID NO: 548309 - RNA, 19 nt, Artificial Sequence
  Description of Artificial Sequence: Synthetic oligonucleotide
gaaagauugggaaggaauu

SEQ ID NO: 548310 - RNA, 19 nt, Artificial Sequence
  Description of Artificial Sequence: Synthetic oligonucleotide
guccuuguaacuccaaccu

SEQ ID NO: 548311 - RNA, 19 nt, Artificial Sequence
  Description of Artificial Sequence: Synthetic oligonucleotide
aagguguaguugauucuga

SEQ ID NO: 548312 - RNA, 19 nt, Artificial Sequence
  Description of Artificial Sequence: Synthetic oligonucleotide
gcacuuugauaaaaguugc

SEQ ID NO: 548313 - RNA, 19 nt, Artificial Sequence
  Description of Artificial Sequence: Synthetic oligonucleotide
agcagcuaccuuuccuugu

SEQ ID NO: 548314 - RNA, 19 nt, Artificial Sequence
  Description of Artificial Sequence: Synthetic oligonucleotide
aaacgaagugggaaagauu

SEQ ID NO: 548315 - RNA, 19 nt, Artificial Sequence
  Description of Artificial Sequence: Synthetic oligonucleotide
cuugagggaugacaaccuc

SEQ ID NO: 548316 - RNA, 19 nt, Artificial Sequence
  Description of Artificial Sequence: Synthetic oligonucleotide
uagauuugcccuguugguu

SEQ ID NO: 548317 - RNA, 19 nt, Artificial Sequence
  Description of Artificial Sequence: Synthetic oligonucleotide
ugcuuuggcugguguaacu

SEQ ID NO: 548318 - RNA, 19 nt, Artificial Sequence
  Description of Artificial Sequence: Synthetic oligonucleotide
uguccuuaaaaggcuccgu

SEQ ID NO: 548319 - RNA, 19 nt, Artificial Sequence
  Description of Artificial Sequence: Synthetic oligonucleotide
uuugcuuguguggcucccc

SEQ ID NO: 548320 - RNA, 19 nt, Artificial Sequence
  Description of Artificial Sequence: Synthetic oligonucleotide
ccuucuuagcauucuuacc

SEQ ID NO: 548321 - RNA, 19 nt, Artificial Sequence
  Description of Artificial Sequence: Synthetic oligonucleotide
uucaaaccggugagcucca

SEQ ID NO: 548322 - RNA, 19 nt, Artificial Sequence
  Description of Artificial Sequence: Synthetic oligonucleotide
caaucccuuuacucuuccc

SEQ ID NO: 548323 - RNA, 19 nt, Artificial Sequence
  Description of Artificial Sequence: Synthetic oligonucleotide
aggaaccaguuucccgauc

SEQ ID NO: 548324 - RNA, 19 nt, Artificial Sequence
  Description of Artificial Sequence: Synthetic oligonucleotide
agguguaguugauucugaa

SEQ ID NO: 548325 - RNA, 19 nt, Artificial Sequence
  Description of Artificial Sequence: Synthetic oligonucleotide
uguguggcuccccuucuuu

SEQ ID NO: 548326 - RNA, 19 nt, Artificial Sequence
  Description of Artificial Sequence: Synthetic oligonucleotide
acgaagugggaaagauugg

SEQ ID NO: 548327 - RNA, 19 nt, Artificial Sequence
  Description of Artificial Sequence: Synthetic oligonucleotide
agugguauccucagacaga

SEQ ID NO: 548328 - RNA, 19 nt, Artificial Sequence
  Description of Artificial Sequence: Synthetic oligonucleotide
caguguuuuggauggcuga

SEQ ID NO: 548329 - RNA, 19 nt, Artificial Sequence
  Description of Artificial Sequence: Synthetic oligonucleotide
agcuaccuuuccuuguuuu

SEQ ID NO: 548330 - RNA, 19 nt, Artificial Sequence
  Description of Artificial Sequence: Synthetic oligonucleotide
acagaacgcccaucaauuu

SEQ ID NO: 548331 - RNA, 19 nt, Artificial Sequence
  Description of Artificial Sequence: Synthetic oligonucleotide
guaggaaagguuacuuaaa

SEQ ID NO: 548332 - RNA, 19 nt, Artificial Sequence
  Description of Artificial Sequence: Synthetic oligonucleotide
guguccuugcagcucgaac

SEQ ID NO: 548333 - RNA, 19 nt, Artificial Sequence
  Description of Artificial Sequence: Synthetic oligonucleotide
ugguauccucagacagacc

SEQ ID NO: 548334 - RNA, 19 nt, Artificial Sequence
  Description of Artificial Sequence: Synthetic oligonucleotide
cuuucacuacugguggcuc

SEQ ID NO: 548335 - RNA, 19 nt, Artificial Sequence
  Description of Artificial Sequence: Synthetic oligonucleotide
uuguaacuccaaccugauu

SEQ ID NO: 548336 - RNA, 19 nt, Artificial Sequence
  Description of Artificial Sequence: Synthetic oligonucleotide
cgaagugggaaagauuggg

SEQ ID NO: 548337 - RNA, 19 nt, Artificial Sequence
  Description of Artificial Sequence: Synthetic oligonucleotide
ccgucauuuaacagguaac

SEQ ID NO: 548338 - RNA, 19 nt, Artificial Sequence
  Description of Artificial Sequence: Synthetic oligonucleotide
gcuaaccaaucugaucucc

SEQ ID NO: 548339 - RNA, 19 nt, Artificial Sequence
  Description of Artificial Sequence: Synthetic oligonucleotide
ccaaccugauuguucugcc

SEQ ID NO: 548340 - RNA, 19 nt, Artificial Sequence
  Description of Artificial Sequence: Synthetic oligonucleotide
caguguaaaaccccagagu

SEQ ID NO: 548341 - RNA, 19 nt, Artificial Sequence
  Description of Artificial Sequence: Synthetic oligonucleotide
uuucuucgucuuucacuau

SEQ ID NO: 548342 - RNA, 19 nt, Artificial Sequence
  Description of Artificial Sequence: Synthetic oligonucleotide
cacccuuagguuuggccca

SEQ ID NO: 548343 - RNA, 19 nt, Artificial Sequence
  Description of Artificial Sequence: Synthetic oligonucleotide
aguucacugauggcaacuu

SEQ ID NO: 548344 - RNA, 19 nt, Artificial Sequence
  Description of Artificial Sequence: Synthetic oligonucleotide
ucaccacuccaagugcuau

SEQ ID NO: 548345 - RNA, 19 nt, Artificial Sequence
  Description of Artificial Sequence: Synthetic oligonucleotide
ggaaagauugggaaggaau

SEQ ID NO: 548346 - RNA, 19 nt, Artificial Sequence
  Description of Artificial Sequence: Synthetic oligonucleotide
gcuaccuuuccuuguuuuc

SEQ ID NO: 548347 - RNA, 19 nt, Artificial Sequence
  Description of Artificial Sequence: Synthetic oligonucleotide
auccuccuccuccuccucu

SEQ ID NO: 548348 - RNA, 19 nt, Artificial Sequence
  Description of Artificial Sequence: Synthetic oligonucleotide
caauauaagcaaucccuuu

SEQ ID NO: 548349 - RNA, 19 nt, Artificial Sequence
  Description of Artificial Sequence: Synthetic oligonucleotide
ccagggguugcuaccaaug

SEQ ID NO: 548350 - RNA, 19 nt, Artificial Sequence
  Description of Artificial Sequence: Synthetic oligonucleotide
gauuugcccuguugguucu

SEQ ID NO: 548351 - RNA, 19 nt, Artificial Sequence
  Description of Artificial Sequence: Synthetic oligonucleotide
gcccucaauuuccauuuug

SEQ ID NO: 548352 - RNA, 19 nt, Artificial Sequence
  Description of Artificial Sequence: Synthetic oligonucleotide
gauggcugacuucucgcau

SEQ ID NO: 548353 - RNA, 19 nt, Artificial Sequence
  Description of Artificial Sequence: Synthetic oligonucleotide
guuuggcccaguccaaagu

SEQ ID NO: 548354 - RNA, 19 nt, Artificial Sequence
  Description of Artificial Sequence: Synthetic oligonucleotide
gacagacccuugacaaaca

SEQ ID NO: 548355 - RNA, 19 nt, Artificial Sequence
  Description of Artificial Sequence: Synthetic oligonucleotide
ccccaaaaccuccucugcc

SEQ ID NO: 548356 - RNA, 19 nt, Artificial Sequence
  Description of Artificial Sequence: Synthetic oligonucleotide
aaagccgccccggccucug

SEQ ID NO: 548357 - RNA, 19 nt, Artificial Sequence
  Description of Artificial Sequence: Synthetic oligonucleotide
cgcauuggguccuuguaac

SEQ ID NO: 548358 - RNA, 19 nt, Artificial Sequence
  Description of Artificial Sequence: Synthetic oligonucleotide
gcuaccaaugcuuuugcuu

SEQ ID NO: 548359 - RNA, 19 nt, Artificial Sequence
  Description of Artificial Sequence: Synthetic oligonucleotide
cccaguauaguagagugaa

SEQ ID NO: 548360 - RNA, 19 nt, Artificial Sequence
  Description of Artificial Sequence: Synthetic oligonucleotide
uuucccgaucagugacuau

SEQ ID NO: 548361 - RNA, 19 nt, Artificial Sequence
  Description of Artificial Sequence: Synthetic oligonucleotide
cuugcacgaacagagcccu

SEQ ID NO: 548362 - RNA, 19 nt, Artificial Sequence
  Description of Artificial Sequence: Synthetic oligonucleotide
uaccagggguugcuaccaa

SEQ ID NO: 548363 - RNA, 19 nt, Artificial Sequence
  Description of Artificial Sequence: Synthetic oligonucleotide
ccucuaccuccaaagccgc

SEQ ID NO: 548364 - RNA, 19 nt, Artificial Sequence
  Description of Artificial Sequence: Synthetic oligonucleotide
cuuguaacuccaaccugau

SEQ ID NO: 548365 - RNA, 19 nt, Artificial Sequence
  Description of Artificial Sequence: Synthetic oligonucleotide
ggaauuauucaaacuucgu

SEQ ID NO: 548366 - RNA, 19 nt, Artificial Sequence
  Description of Artificial Sequence: Synthetic oligonucleotide
uccuccuccuccuccucuu

SEQ ID NO: 548367 - RNA, 19 nt, Artificial Sequence
  Description of Artificial Sequence: Synthetic oligonucleotide
cucgcauuggguccuugua

SEQ ID NO: 548368 - RNA, 19 nt, Artificial Sequence
  Description of Artificial Sequence: Synthetic oligonucleotide
guuucccgaucagugacua

SEQ ID NO: 548369 - RNA, 19 nt, Artificial Sequence
  Description of Artificial Sequence: Synthetic oligonucleotide
cugacucaaaguccacaua

SEQ ID NO: 548370 - RNA, 19 nt, Artificial Sequence
  Description of Artificial Sequence: Synthetic oligonucleotide
cuuuggcaggugugaucuc

SEQ ID NO: 548371 - RNA, 19 nt, Artificial Sequence
  Description of Artificial Sequence: Synthetic oligonucleotide
ggcuaaccaaucugaucuc

SEQ ID NO: 548372 - RNA, 19 nt, Artificial Sequence
  Description of Artificial Sequence: Synthetic oligonucleotide
ugcccucaauuuccauuuu

SEQ ID NO: 548373 - RNA, 19 nt, Artificial Sequence
  Description of Artificial Sequence: Synthetic oligonucleotide
cgucauuuaacagguaaca

SEQ ID NO: 548374 - RNA, 19 nt, Artificial Sequence
  Description of Artificial Sequence: Synthetic oligonucleotide
ugcuuguguggcuccccuu

SEQ ID NO: 548375 - RNA, 19 nt, Artificial Sequence
  Description of Artificial Sequence: Synthetic oligonucleotide
cuucggacauuuucuucgu

SEQ ID NO: 548376 - RNA, 19 nt, Artificial Sequence
  Description of Artificial Sequence: Synthetic oligonucleotide
cuuagcuggugugggaacu

SEQ ID NO: 548377 - RNA, 19 nt, Artificial Sequence
  Description of Artificial Sequence: Synthetic oligonucleotide
ccaguuucccgaucaguga

SEQ ID NO: 548378 - RNA, 19 nt, Artificial Sequence
  Description of Artificial Sequence: Synthetic oligonucleotide
ggggcacuuugauaaaagu

SEQ ID NO: 548379 - RNA, 19 nt, Artificial Sequence
  Description of Artificial Sequence: Synthetic oligonucleotide
caucuucggacauuuucuu

SEQ ID NO: 548380 - RNA, 19 nt, Artificial Sequence
  Description of Artificial Sequence: Synthetic oligonucleotide
caccuucacccuuagguuu

SEQ ID NO: 548381 - RNA, 19 nt, Artificial Sequence
  Description of Artificial Sequence: Synthetic oligonucleotide
gaggaaccaguuucccgau

SEQ ID NO: 548382 - RNA, 19 nt, Artificial Sequence
  Description of Artificial Sequence: Synthetic oligonucleotide
guguuuuggauggcugacu

SEQ ID NO: 548383 - RNA, 19 nt, Artificial Sequence
  Description of Artificial Sequence: Synthetic oligonucleotide
cuggaguaacagcagcuuu

SEQ ID NO: 548384 - RNA, 19 nt, Artificial Sequence
  Description of Artificial Sequence: Synthetic oligonucleotide
cauccuccuccuccuccuc

SEQ ID NO: 548385 - RNA, 19 nt, Artificial Sequence
  Description of Artificial Sequence: Synthetic oligonucleotide
ucaaaccggugagcuccaa

SEQ ID NO: 548386 - RNA, 19 nt, Artificial Sequence
  Description of Artificial Sequence: Synthetic oligonucleotide
ccuuaaaaggcuccgucau

SEQ ID NO: 548387 - RNA, 19 nt, Artificial Sequence
  Description of Artificial Sequence: Synthetic oligonucleotide
cgcccaucaauuucugcuc

SEQ ID NO: 548388 - RNA, 19 nt, Artificial Sequence
  Description of Artificial Sequence: Synthetic oligonucleotide
ccagaguccuuucuuuaaa

SEQ ID NO: 548389 - RNA, 19 nt, Artificial Sequence
  Description of Artificial Sequence: Synthetic oligonucleotide
cacuguaggaaagguuacu

SEQ ID NO: 548390 - RNA, 19 nt, Artificial Sequence
  Description of Artificial Sequence: Synthetic oligonucleotide
cccucaaaugauucuuuua

SEQ ID NO: 548391 - RNA, 19 nt, Artificial Sequence
  Description of Artificial Sequence: Synthetic oligonucleotide
cacuacugguggcucaaau

SEQ ID NO: 548392 - RNA, 19 nt, Artificial Sequence
  Description of Artificial Sequence: Synthetic oligonucleotide
ggagugacagcuccccuuu

SEQ ID NO: 548393 - RNA, 19 nt, Artificial Sequence
  Description of Artificial Sequence: Synthetic oligonucleotide
gcauuggguccuuguaacu

SEQ ID NO: 548394 - RNA, 19 nt, Artificial Sequence
  Description of Artificial Sequence: Synthetic oligonucleotide
ccucacuguugaagucuac

SEQ ID NO: 548395 - RNA, 19 nt, Artificial Sequence
  Description of Artificial Sequence: Synthetic oligonucleotide
gugaucuccauagcuucuu

SEQ ID NO: 548396 - RNA, 19 nt, Artificial Sequence
  Description of Artificial Sequence: Synthetic oligonucleotide
ccgccaaauccaccucggc

SEQ ID NO: 548397 - RNA, 19 nt, Artificial Sequence
  Description of Artificial Sequence: Synthetic oligonucleotide
ggugugggaacugcaacuu

SEQ ID NO: 548398 - RNA, 19 nt, Artificial Sequence
  Description of Artificial Sequence: Synthetic oligonucleotide
cuggagugacagcuccccu

SEQ ID NO: 548399 - RNA, 19 nt, Artificial Sequence
  Description of Artificial Sequence: Synthetic oligonucleotide
ccugauuguucugcccuca

SEQ ID NO: 548400 - RNA, 19 nt, Artificial Sequence
  Description of Artificial Sequence: Synthetic oligonucleotide
gguugcuaccaaugcuuuu

SEQ ID NO: 548401 - RNA, 19 nt, Artificial Sequence
  Description of Artificial Sequence: Synthetic oligonucleotide
cccuuuagaggaaccaguu

SEQ ID NO: 548402 - RNA, 19 nt, Artificial Sequence
  Description of Artificial Sequence: Synthetic oligonucleotide
cuccgucauuuaacaggua

SEQ ID NO: 548403 - RNA, 19 nt, Artificial Sequence
  Description of Artificial Sequence: Synthetic oligonucleotide
ccgaucagugacuauucuu

SEQ ID NO: 548404 - RNA, 19 nt, Artificial Sequence
  Description of Artificial Sequence: Synthetic oligonucleotide
ccuggcuaaccaaucugau

SEQ ID NO: 548405 - RNA, 19 nt, Artificial Sequence
  Description of Artificial Sequence: Synthetic oligonucleotide
ccccagaguccuuucuuua

SEQ ID NO: 548406 - RNA, 19 nt, Artificial Sequence
  Description of Artificial Sequence: Synthetic oligonucleotide
gaguugcuguagccuucuu

SEQ ID NO: 548407 - RNA, 19 nt, Artificial Sequence
  Description of Artificial Sequence: Synthetic oligonucleotide
ccccuuggcuggagugaca

SEQ ID NO: 548408 - RNA, 19 nt, Artificial Sequence
  Description of Artificial Sequence: Synthetic oligonucleotide
aaguuuauauuucaucacc

SEQ ID NO: 548409 - RNA, 19 nt, Artificial Sequence
  Description of Artificial Sequence: Synthetic oligonucleotide
acuauaauuccuugaaccc

SEQ ID NO: 548410 - RNA, 19 nt, Artificial Sequence
  Description of Artificial Sequence: Synthetic oligonucleotide
auaggaguaaaagagaagg

SEQ ID NO: 548411 - RNA, 19 nt, Artificial Sequence
  Description of Artificial Sequence: Synthetic oligonucleotide
ugaccugagaucuaaagag

SEQ ID NO: 548412 - RNA, 19 nt, Artificial Sequence
  Description of Artificial Sequence: Synthetic oligonucleotide
uauucaguggguuacaaac

SEQ ID NO: 548413 - RNA, 19 nt, Artificial Sequence
  Description of Artificial Sequence: Synthetic oligonucleotide
ucuaaagagagacauuuac

SEQ ID NO: 548414 - RNA, 19 nt, Artificial Sequence
  Description of Artificial Sequence: Synthetic oligonucleotide
aaggagauauaauggcccc

SEQ ID NO: 548415 - RNA, 19 nt, Artificial Sequence
  Description of Artificial Sequence: Synthetic oligonucleotide
uguuucaucaccaaggauu

SEQ ID NO: 548416 - RNA, 19 nt, Artificial Sequence
  Description of Artificial Sequence: Synthetic oligonucleotide
ucuaaggagauauaauggc

SEQ ID NO: 548417 - RNA, 19 nt, Artificial Sequence
  Description of Artificial Sequence: Synthetic oligonucleotide
uuauauuucaucaccgcac

SEQ ID NO: 548418 - RNA, 19 nt, Artificial Sequence
  Description of Artificial Sequence: Synthetic oligonucleotide
aucaacucucuccaggucc

SEQ ID NO: 548419 - RNA, 19 nt, Artificial Sequence
  Description of Artificial Sequence: Synthetic oligonucleotide
uaaggagauauaauggccc

SEQ ID NO: 548420 - RNA, 19 nt, Artificial Sequence
  Description of Artificial Sequence: Synthetic oligonucleotide
aacggcuuuauuuuccuag

SEQ ID NO: 548421 - RNA, 19 nt, Artificial Sequence
  Description of Artificial Sequence: Synthetic oligonucleotide
cagauuaucaacucucucc

SEQ ID NO: 548422 - RNA, 19 nt, Artificial Sequence
  Description of Artificial Sequence: Synthetic oligonucleotide
aaaggucuagaaugccugc

SEQ ID NO: 548423 - RNA, 19 nt, Artificial Sequence
  Description of Artificial Sequence: Synthetic oligonucleotide
uugaaauucaauugcuccc

SEQ ID NO: 548424 - RNA, 19 nt, Artificial Sequence
  Description of Artificial Sequence: Synthetic oligonucleotide
uauaauuccuugaacccug

SEQ ID NO: 548425 - RNA, 19 nt, Artificial Sequence
  Description of Artificial Sequence: Synthetic oligonucleotide
uggguuacaaacuggaugu

SEQ ID NO: 548426 - RNA, 19 nt, Artificial Sequence
  Description of Artificial Sequence: Synthetic oligonucleotide
aauggccccauuucauacc

SEQ ID NO: 548427 - RNA, 19 nt, Artificial Sequence
  Description of Artificial Sequence: Synthetic oligonucleotide
aacgccgucucaugggucc

SEQ ID NO: 548428 - RNA, 19 nt, Artificial Sequence
  Description of Artificial Sequence: Synthetic oligonucleotide
caucaacucgaacagaagg

SEQ ID NO: 548429 - RNA, 19 nt, Artificial Sequence
  Description of Artificial Sequence: Synthetic oligonucleotide
uucgcaaacaccagguccc

SEQ ID NO: 548430 - RNA, 19 nt, Artificial Sequence
  Description of Artificial Sequence: Synthetic oligonucleotide
agggauaggaguaaaagag

SEQ ID NO: 548431 - RNA, 19 nt, Artificial Sequence
  Description of Artificial Sequence: Synthetic oligonucleotide
aacucccaagucuugaugu

SEQ ID NO: 548432 - RNA, 19 nt, Artificial Sequence
  Description of Artificial Sequence: Synthetic oligonucleotide
aguuuauauuucaucaccg

SEQ ID NO: 548433 - RNA, 19 nt, Artificial Sequence
  Description of Artificial Sequence: Synthetic oligonucleotide
gagucaauccuucagauua

SEQ ID NO: 548434 - RNA, 19 nt, Artificial Sequence
  Description of Artificial Sequence: Synthetic oligonucleotide
uguuaaacuauaauuccuu

SEQ ID NO: 548435 - RNA, 19 nt, Artificial Sequence
  Description of Artificial Sequence: Synthetic oligonucleotide
uugacuguaggguuguucu

SEQ ID NO: 548436 - RNA, 19 nt, Artificial Sequence
  Description of Artificial Sequence: Synthetic oligonucleotide
aaacauugguggcuacagg

SEQ ID NO: 548437 - RNA, 19 nt, Artificial Sequence
  Description of Artificial Sequence: Synthetic oligonucleotide
uaaucaacggcuuuauuuu

SEQ ID NO: 548438 - RNA, 19 nt, Artificial Sequence
  Description of Artificial Sequence: Synthetic oligonucleotide
aggaccaaccucuggaagg

SEQ ID NO: 548439 - RNA, 19 nt, Artificial Sequence
  Description of Artificial Sequence: Synthetic oligonucleotide
cugagaucuaaagagagac

SEQ ID NO: 548440 - RNA, 19 nt, Artificial Sequence
  Description of Artificial Sequence: Synthetic oligonucleotide
aagccaaucuccaagggug

SEQ ID NO: 548441 - RNA, 19 nt, Artificial Sequence
  Description of Artificial Sequence: Synthetic oligonucleotide
uuggaucgcgacauggcgg

SEQ ID NO: 548442 - RNA, 19 nt, Artificial Sequence
  Description of Artificial Sequence: Synthetic oligonucleotide
aacucgggcucuuccacac

SEQ ID NO: 548443 - RNA, 19 nt, Artificial Sequence
  Description of Artificial Sequence: Synthetic oligonucleotide
cuucgcaaacaccaggucc

SEQ ID NO: 548444 - RNA, 19 nt, Artificial Sequence
  Description of Artificial Sequence: Synthetic oligonucleotide
auauaauggccccauuuca

SEQ ID NO: 548445 - RNA, 19 nt, Artificial Sequence
  Description of Artificial Sequence: Synthetic oligonucleotide
cagagcuacacuuccaaag

SEQ ID NO: 548446 - RNA, 19 nt, Artificial Sequence
  Description of Artificial Sequence: Synthetic oligonucleotide
ugggugauauaucugacua

SEQ ID NO: 548447 - RNA, 19 nt, Artificial Sequence
  Description of Artificial Sequence: Synthetic oligonucleotide
aacucaaauugucuauggu

SEQ ID NO: 548448 - RNA, 19 nt, Artificial Sequence
  Description of Artificial Sequence: Synthetic oligonucleotide
uuaucaacucucuccaggu

SEQ ID NO: 548449 - RNA, 19 nt, Artificial Sequence
  Description of Artificial Sequence: Synthetic oligonucleotide
aacccacucaaguuuauau

SEQ ID NO: 548450 - RNA, 19 nt, Artificial Sequence
  Description of Artificial Sequence: Synthetic oligonucleotide
guggguuacaaacuggaug

SEQ ID NO: 548451 - RNA, 19 nt, Artificial Sequence
  Description of Artificial Sequence: Synthetic oligonucleotide
gaaacauugguggcuacag

SEQ ID NO: 548452 - RNA, 19 nt, Artificial Sequence
  Description of Artificial Sequence: Synthetic oligonucleotide
ucgucgaugaccaguuucc

SEQ ID NO: 548453 - RNA, 19 nt, Artificial Sequence
  Description of Artificial Sequence: Synthetic oligonucleotide
gaugagucaauccuucaga

SEQ ID NO: 548454 - RNA, 19 nt, Artificial Sequence
  Description of Artificial Sequence: Synthetic oligonucleotide
uuuaguuaaucaacggcuu

SEQ ID NO: 548455 - RNA, 19 nt, Artificial Sequence
  Description of Artificial Sequence: Synthetic oligonucleotide
aucaacucgaacagaaggg

SEQ ID NO: 548456 - RNA, 19 nt, Artificial Sequence
  Description of Artificial Sequence: Synthetic oligonucleotide
aucaccgcacuccugcccc

SEQ ID NO: 548457 - RNA, 19 nt, Artificial Sequence
  Description of Artificial Sequence: Synthetic oligonucleotide
uccucagcgagagaggccg

SEQ ID NO: 548458 - RNA, 19 nt, Artificial Sequence
  Description of Artificial Sequence: Synthetic oligonucleotide
guuggaucgcgacauggcg

SEQ ID NO: 548459 - RNA, 19 nt, Artificial Sequence
  Description of Artificial Sequence: Synthetic oligonucleotide
ucuuaucaccaucacccgc

SEQ ID NO: 548460 - RNA, 19 nt, Artificial Sequence
  Description of Artificial Sequence: Synthetic oligonucleotide
uuuaggggaguccuccagc

SEQ ID NO: 548461 - RNA, 19 nt, Artificial Sequence
  Description of Artificial Sequence: Synthetic oligonucleotide
uggaucgcgacauggcggg

SEQ ID NO: 548462 - RNA, 19 nt, Artificial Sequence
  Description of Artificial Sequence: Synthetic oligonucleotide
gauaggaguaaaagagaag

SEQ ID NO: 548463 - RNA, 19 nt, Artificial Sequence
  Description of Artificial Sequence: Synthetic oligonucleotide
ugccagaggaccaaccucu

SEQ ID NO: 548464 - RNA, 19 nt, Artificial Sequence
  Description of Artificial Sequence: Synthetic oligonucleotide
ugagaucuaaagagagaca

SEQ ID NO: 548465 - RNA, 19 nt, Artificial Sequence
  Description of Artificial Sequence: Synthetic oligonucleotide
guuacaaacuggaugugug

SEQ ID NO: 548466 - RNA, 19 nt, Artificial Sequence
  Description of Artificial Sequence: Synthetic oligonucleotide
auauaucugacuagaagcu

SEQ ID NO: 548467 - RNA, 19 nt, Artificial Sequence
  Description of Artificial Sequence: Synthetic oligonucleotide
uccuagaacucaaauuguc

SEQ ID NO: 548468 - RNA, 19 nt, Artificial Sequence
  Description of Artificial Sequence: Synthetic oligonucleotide
uuaugucugggugauauau

SEQ ID NO: 548469 - RNA, 19 nt, Artificial Sequence
  Description of Artificial Sequence: Synthetic oligonucleotide
uauaucugacuagaagcug

SEQ ID NO: 548470 - RNA, 19 nt, Artificial Sequence
  Description of Artificial Sequence: Synthetic oligonucleotide
agaugccacucagaaaccc

SEQ ID NO: 548471 - RNA, 19 nt, Artificial Sequence
  Description of Artificial Sequence: Synthetic oligonucleotide
acguuuaggggaguccucc

SEQ ID NO: 548472 - RNA, 19 nt, Artificial Sequence
  Description of Artificial Sequence: Synthetic oligonucleotide
uuccuagaacucaaauugu

SEQ ID NO: 548473 - RNA, 19 nt, Artificial Sequence
  Description of Artificial Sequence: Synthetic oligonucleotide
ucucaucaauccgagccgg

SEQ ID NO: 548474 - RNA, 19 nt, Artificial Sequence
  Description of Artificial Sequence: Synthetic oligonucleotide
ugggaaaauaaguguggga

SEQ ID NO: 548475 - RNA, 19 nt, Artificial Sequence
  Description of Artificial Sequence: Synthetic oligonucleotide
cauuaccccaucucugacc

SEQ ID NO: 548476 - RNA, 19 nt, Artificial Sequence
  Description of Artificial Sequence: Synthetic oligonucleotide
uuaguuaaucaacggcuuu

SEQ ID NO: 548477 - RNA, 19 nt, Artificial Sequence
  Description of Artificial Sequence: Synthetic oligonucleotide
agaacucaaauugucuaug

SEQ ID NO: 548478 - RNA, 19 nt, Artificial Sequence
  Description of Artificial Sequence: Synthetic oligonucleotide
auuuauggaugggagccuc

SEQ ID NO: 548479 - RNA, 19 nt, Artificial Sequence
  Description of Artificial Sequence: Synthetic oligonucleotide
ucgaugaccaguuucccuu

SEQ ID NO: 548480 - RNA, 19 nt, Artificial Sequence
  Description of Artificial Sequence: Synthetic oligonucleotide
agcgagagaggccgcuucc

SEQ ID NO: 548481 - RNA, 19 nt, Artificial Sequence
  Description of Artificial Sequence: Synthetic oligonucleotide
ucugggugauauaucugac

SEQ ID NO: 548482 - RNA, 19 nt, Artificial Sequence
  Description of Artificial Sequence: Synthetic oligonucleotide
uggcuacaggcucucauga

SEQ ID NO: 548483 - RNA, 19 nt, Artificial Sequence
  Description of Artificial Sequence: Synthetic oligonucleotide
aaagugagugaaggaggag

SEQ ID NO: 548484 - RNA, 19 nt, Artificial Sequence
  Description of Artificial Sequence: Synthetic oligonucleotide
aggaacgccgucucauggg

SEQ ID NO: 548485 - RNA, 19 nt, Artificial Sequence
  Description of Artificial Sequence: Synthetic oligonucleotide
agaagggagccucccuugg

SEQ ID NO: 548486 - RNA, 19 nt, Artificial Sequence
  Description of Artificial Sequence: Synthetic oligonucleotide
augagucaauccuucagau

SEQ ID NO: 548487 - RNA, 19 nt, Artificial Sequence
  Description of Artificial Sequence: Synthetic oligonucleotide
gaaagugagugaaggagga

SEQ ID NO: 548488 - RNA, 19 nt, Artificial Sequence
  Description of Artificial Sequence: Synthetic oligonucleotide
caacucgaacagaagggag

SEQ ID NO: 548489 - RNA, 19 nt, Artificial Sequence
  Description of Artificial Sequence: Synthetic oligonucleotide
auaagugugggagcaggag

SEQ ID NO: 548490 - RNA, 19 nt, Artificial Sequence
  Description of Artificial Sequence: Synthetic oligonucleotide
cuagaacucaaauugucua

SEQ ID NO: 548491 - RNA, 19 nt, Artificial Sequence
  Description of Artificial Sequence: Synthetic oligonucleotide
accugagaucuaaagagag

SEQ ID NO: 548492 - RNA, 19 nt, Artificial Sequence
  Description of Artificial Sequence: Synthetic oligonucleotide
aaguuugcgcgugcggcgg

SEQ ID NO: 548493 - RNA, 19 nt, Artificial Sequence
  Description of Artificial Sequence: Synthetic oligonucleotide
aucgcgacauggcggggcc

SEQ ID NO: 548494 - RNA, 19 nt, Artificial Sequence
  Description of Artificial Sequence: Synthetic oligonucleotide
ggaucuucccacauuaccc

SEQ ID NO: 548495 - RNA, 19 nt, Artificial Sequence
  Description of Artificial Sequence: Synthetic oligonucleotide
gaggaccaaccucuggaag

SEQ ID NO: 548496 - RNA, 19 nt, Artificial Sequence
  Description of Artificial Sequence: Synthetic oligonucleotide
gugggcaacgcucggcucg

SEQ ID NO: 548497 - RNA, 19 nt, Artificial Sequence
  Description of Artificial Sequence: Synthetic oligonucleotide
auugucuaugguucucaga

SEQ ID NO: 548498 - RNA, 19 nt, Artificial Sequence
  Description of Artificial Sequence: Synthetic oligonucleotide
gaagggagccucccuuggg

SEQ ID NO: 548499 - RNA, 19 nt, Artificial Sequence
  Description of Artificial Sequence: Synthetic oligonucleotide
auggaugagucaauccuuc

SEQ ID NO: 548500 - RNA, 19 nt, Artificial Sequence
  Description of Artificial Sequence: Synthetic oligonucleotide
ucaucaauccgagccggcc

SEQ ID NO: 548501 - RNA, 19 nt, Artificial Sequence
  Description of Artificial Sequence: Synthetic oligonucleotide
ggaugagucaauccuucag

SEQ ID NO: 548502 - RNA, 19 nt, Artificial Sequence
  Description of Artificial Sequence: Synthetic oligonucleotide
ggagggauaggaguaaaag

SEQ ID NO: 548503 - RNA, 19 nt, Artificial Sequence
  Description of Artificial Sequence: Synthetic oligonucleotide
gacuccuugggacguuuag

SEQ ID NO: 548504 - RNA, 19 nt, Artificial Sequence
  Description of Artificial Sequence: Synthetic oligonucleotide
uuuauggaugggagccucu

SEQ ID NO: 548505 - RNA, 19 nt, Artificial Sequence
  Description of Artificial Sequence: Synthetic oligonucleotide
acuagaagcuggccuugag

SEQ ID NO: 548506 - RNA, 19 nt, Artificial Sequence
  Description of Artificial Sequence: Synthetic oligonucleotide
caccaaggauuuauggaug

SEQ ID NO: 548507 - RNA, 19 nt, Artificial Sequence
  Description of Artificial Sequence: Synthetic oligonucleotide
gacaagucuaaggagauau

SEQ ID NO: 548508 - RNA, 19 nt, Artificial Sequence
  Description of Artificial Sequence: Synthetic oligonucleotide
cugaccugagaucuaaaga

SEQ ID NO: 548509 - RNA, 19 nt, Artificial Sequence
  Description of Artificial Sequence: Synthetic oligonucleotide
uaggguuguucucaaucuc

SEQ ID NO: 548510 - RNA, 19 nt, Artificial Sequence
  Description of Artificial Sequence: Synthetic oligonucleotide
uaguuaaucaacggcuuua

SEQ ID NO: 548511 - RNA, 19 nt, Artificial Sequence
  Description of Artificial Sequence: Synthetic oligonucleotide
ggugauauaucugacuaga

SEQ ID NO: 548512 - RNA, 19 nt, Artificial Sequence
  Description of Artificial Sequence: Synthetic oligonucleotide
caggaacgccgucucaugg

SEQ ID NO: 548513 - RNA, 19 nt, Artificial Sequence
  Description of Artificial Sequence: Synthetic oligonucleotide
uccaacucgggcucuucca

SEQ ID NO: 548514 - RNA, 19 nt, Artificial Sequence
  Description of Artificial Sequence: Synthetic oligonucleotide
cucgucgaugaccaguuuc

SEQ ID NO: 548515 - RNA, 19 nt, Artificial Sequence
  Description of Artificial Sequence: Synthetic oligonucleotide
auccgagccggccagugug

SEQ ID NO: 548516 - RNA, 19 nt, Artificial Sequence
  Description of Artificial Sequence: Synthetic oligonucleotide
guuugcaggccauggccag

SEQ ID NO: 548517 - RNA, 19 nt, Artificial Sequence
  Description of Artificial Sequence: Synthetic oligonucleotide
ucauaagggaagaggucuu

SEQ ID NO: 548518 - RNA, 19 nt, Artificial Sequence
  Description of Artificial Sequence: Synthetic oligonucleotide
acggcuuuauuuuccuaga

SEQ ID NO: 548519 - RNA, 19 nt, Artificial Sequence
  Description of Artificial Sequence: Synthetic oligonucleotide
uaucaacucucuccagguc

SEQ ID NO: 548520 - RNA, 19 nt, Artificial Sequence
  Description of Artificial Sequence: Synthetic oligonucleotide
ucuucgcaaacaccagguc

SEQ ID NO: 548521 - RNA, 19 nt, Artificial Sequence
  Description of Artificial Sequence: Synthetic oligonucleotide
ugguauuuauuggcuguug

SEQ ID NO: 548522 - RNA, 19 nt, Artificial Sequence
  Description of Artificial Sequence: Synthetic oligonucleotide
uguauucaguggguuacaa

SEQ ID NO: 548523 - RNA, 19 nt, Artificial Sequence
  Description of Artificial Sequence: Synthetic oligonucleotide
caacgcucggcucggcucg

SEQ ID NO: 548524 - RNA, 19 nt, Artificial Sequence
  Description of Artificial Sequence: Synthetic oligonucleotide
aagcgcgagcccaaguuug

SEQ ID NO: 548525 - RNA, 19 nt, Artificial Sequence
  Description of Artificial Sequence: Synthetic oligonucleotide
cuugauguuaaacuauaau

SEQ ID NO: 548526 - RNA, 19 nt, Artificial Sequence
  Description of Artificial Sequence: Synthetic oligonucleotide
ggaagugagggccaagcca

SEQ ID NO: 548527 - RNA, 19 nt, Artificial Sequence
  Description of Artificial Sequence: Synthetic oligonucleotide
cagaggaccaaccucugga

SEQ ID NO: 548528 - RNA, 19 nt, Artificial Sequence
  Description of Artificial Sequence: Synthetic oligonucleotide
aguuaaucaacggcuuuau

SEQ ID NO: 548529 - RNA, 19 nt, Artificial Sequence
  Description of Artificial Sequence: Synthetic oligonucleotide
aucuucgcaaacaccaggu

SEQ ID NO: 548530 - RNA, 19 nt, Artificial Sequence
  Description of Artificial Sequence: Synthetic oligonucleotide
caguggguuacaaacugga

SEQ ID NO: 548531 - RNA, 19 nt, Artificial Sequence
  Description of Artificial Sequence: Synthetic oligonucleotide
uccgagccggccagugugg

SEQ ID NO: 548532 - RNA, 19 nt, Artificial Sequence
  Description of Artificial Sequence: Synthetic oligonucleotide
aaagagucaucaacucgaa

SEQ ID NO: 548533 - RNA, 19 nt, Artificial Sequence
  Description of Artificial Sequence: Synthetic oligonucleotide
uccuuuaugucugggugau

SEQ ID NO: 548534 - RNA, 19 nt, Artificial Sequence
  Description of Artificial Sequence: Synthetic oligonucleotide
cacauaguguccccuuuuc

SEQ ID NO: 548535 - RNA, 19 nt, Artificial Sequence
  Description of Artificial Sequence: Synthetic oligonucleotide
ugcgcuccggcccucgcgc

SEQ ID NO: 548536 - RNA, 19 nt, Artificial Sequence
  Description of Artificial Sequence: Synthetic oligonucleotide
uuuaugucugggugauaua

SEQ ID NO: 548537 - RNA, 19 nt, Artificial Sequence
  Description of Artificial Sequence: Synthetic oligonucleotide
agcucaggagaugccacuc

SEQ ID NO: 548538 - RNA, 19 nt, Artificial Sequence
  Description of Artificial Sequence: Synthetic oligonucleotide
caaaguccuaggagacaag

SEQ ID NO: 548539 - RNA, 19 nt, Artificial Sequence
  Description of Artificial Sequence: Synthetic oligonucleotide
cucauaagggaagaggucu

SEQ ID NO: 548540 - RNA, 19 nt, Artificial Sequence
  Description of Artificial Sequence: Synthetic oligonucleotide
agcccaaguuugcgcgugc

SEQ ID NO: 548541 - RNA, 19 nt, Artificial Sequence
  Description of Artificial Sequence: Synthetic oligonucleotide
gguacagggaccuggaagu

SEQ ID NO: 548542 - RNA, 19 nt, Artificial Sequence
  Description of Artificial Sequence: Synthetic oligonucleotide
cccaacacaaaguccuagg

SEQ ID NO: 548543 - RNA, 19 nt, Artificial Sequence
  Description of Artificial Sequence: Synthetic oligonucleotide
gaaggccagagguguugag

SEQ ID NO: 548544 - RNA, 19 nt, Artificial Sequence
  Description of Artificial Sequence: Synthetic oligonucleotide
uguggcgccgcugcgcucc

SEQ ID NO: 548545 - RNA, 19 nt, Artificial Sequence
  Description of Artificial Sequence: Synthetic oligonucleotide
gaacagaagggagccuccc

SEQ ID NO: 548546 - RNA, 19 nt, Artificial Sequence
  Description of Artificial Sequence: Synthetic oligonucleotide
ggauaggaguaaaagagaa

SEQ ID NO: 548547 - RNA, 19 nt, Artificial Sequence
  Description of Artificial Sequence: Synthetic oligonucleotide
auuccucauaagggaagag

SEQ ID NO: 548548 - RNA, 19 nt, Artificial Sequence
  Description of Artificial Sequence: Synthetic oligonucleotide
ugacuagaagcuggccuug

SEQ ID NO: 548549 - RNA, 19 nt, Artificial Sequence
  Description of Artificial Sequence: Synthetic oligonucleotide
cucaucaauccgagccggc

SEQ ID NO: 548550 - RNA, 19 nt, Artificial Sequence
  Description of Artificial Sequence: Synthetic oligonucleotide
uuauggaugggagccucuc

SEQ ID NO: 548551 - RNA, 19 nt, Artificial Sequence
  Description of Artificial Sequence: Synthetic oligonucleotide
uugaaacauugguggcuac

SEQ ID NO: 548552 - RNA, 19 nt, Artificial Sequence
  Description of Artificial Sequence: Synthetic oligonucleotide
aggcaucucaucaauccga

SEQ ID NO: 548553 - RNA, 19 nt, Artificial Sequence
  Description of Artificial Sequence: Synthetic oligonucleotide
gaucgcgacauggcggggc

SEQ ID NO: 548554 - RNA, 19 nt, Artificial Sequence
  Description of Artificial Sequence: Synthetic oligonucleotide
ugacuguaggguuguucuc

SEQ ID NO: 548555 - RNA, 19 nt, Artificial Sequence
  Description of Artificial Sequence: Synthetic oligonucleotide
guauucaguggguuacaaa

SEQ ID NO: 548556 - RNA, 19 nt, Artificial Sequence
  Description of Artificial Sequence: Synthetic oligonucleotide
ucugccgguuggaucgcga

SEQ ID NO: 548557 - RNA, 19 nt, Artificial Sequence
  Description of Artificial Sequence: Synthetic oligonucleotide
agagagcacuuuucccugu

SEQ ID NO: 548558 - RNA, 19 nt, Artificial Sequence
  Description of Artificial Sequence: Synthetic oligonucleotide
cacauggcccugacuuagg

SEQ ID NO: 548559 - RNA, 19 nt, Artificial Sequence
  Description of Artificial Sequence: Synthetic oligonucleotide
gagaugccacucagaaacc

SEQ ID NO: 548560 - RNA, 19 nt, Artificial Sequence
  Description of Artificial Sequence: Synthetic oligonucleotide
ucgugcaguuguuuguguu

SEQ ID NO: 548561 - RNA, 19 nt, Artificial Sequence
  Description of Artificial Sequence: Synthetic oligonucleotide
agcaggagacaggagcuca

SEQ ID NO: 548562 - RNA, 19 nt, Artificial Sequence
  Description of Artificial Sequence: Synthetic oligonucleotide
cucagagcuacacuuccaa

SEQ ID NO: 548563 - RNA, 19 nt, Artificial Sequence
  Description of Artificial Sequence: Synthetic oligonucleotide
cauggcccugacuuagguc

SEQ ID NO: 548564 - RNA, 19 nt, Artificial Sequence
  Description of Artificial Sequence: Synthetic oligonucleotide
agcgcgagcccaaguuugc

SEQ ID NO: 548565 - RNA, 19 nt, Artificial Sequence
  Description of Artificial Sequence: Synthetic oligonucleotide
aguguggguaucccuucau

SEQ ID NO: 548566 - RNA, 19 nt, Artificial Sequence
  Description of Artificial Sequence: Synthetic oligonucleotide
guagccagaggccuugacu

SEQ ID NO: 548567 - RNA, 19 nt, Artificial Sequence
  Description of Artificial Sequence: Synthetic oligonucleotide
gcuacacuuccaaagcuac

SEQ ID NO: 548568 - RNA, 19 nt, Artificial Sequence
  Description of Artificial Sequence: Synthetic oligonucleotide
caucaauccgagccggcca

SEQ ID NO: 548569 - RNA, 19 nt, Artificial Sequence
  Description of Artificial Sequence: Synthetic oligonucleotide
agagucuggcucagagggg

SEQ ID NO: 548570 - RNA, 19 nt, Artificial Sequence
  Description of Artificial Sequence: Synthetic oligonucleotide
uggcucgucgaugaccagu

SEQ ID NO: 548571 - RNA, 19 nt, Artificial Sequence
  Description of Artificial Sequence: Synthetic oligonucleotide
ucugcguccgcgcgccgcu

SEQ ID NO: 548572 - RNA, 19 nt, Artificial Sequence
  Description of Artificial Sequence: Synthetic oligonucleotide
cauuucauaccagggcaca

SEQ ID NO: 548573 - RNA, 19 nt, Artificial Sequence
  Description of Artificial Sequence: Synthetic oligonucleotide
agcuacagucagcaauuuu

SEQ ID NO: 548574 - RNA, 19 nt, Artificial Sequence
  Description of Artificial Sequence: Synthetic oligonucleotide
ggguaucccuucaucuucg

SEQ ID NO: 548575 - RNA, 19 nt, Artificial Sequence
  Description of Artificial Sequence: Synthetic oligonucleotide
guguggguaucccuucauc

SEQ ID NO: 548576 - RNA, 19 nt, Artificial Sequence
  Description of Artificial Sequence: Synthetic oligonucleotide
agcauccccuucucauucu

SEQ ID NO: 548577 - RNA, 19 nt, Artificial Sequence
  Description of Artificial Sequence: Synthetic oligonucleotide
gacaaugccagaggaccaa

SEQ ID NO: 548578 - RNA, 19 nt, Artificial Sequence
  Description of Artificial Sequence: Synthetic oligonucleotide
ccacucaaguuuauauuuc

SEQ ID NO: 548579 - RNA, 19 nt, Artificial Sequence
  Description of Artificial Sequence: Synthetic oligonucleotide
acucccaagucuugauguu

SEQ ID NO: 548580 - RNA, 19 nt, Artificial Sequence
  Description of Artificial Sequence: Synthetic oligonucleotide
agcuacacuuccaaagcua

SEQ ID NO: 548581 - RNA, 19 nt, Artificial Sequence
  Description of Artificial Sequence: Synthetic oligonucleotide
gaggucuuuggggcccagg

SEQ ID NO: 548582 - RNA, 19 nt, Artificial Sequence
  Description of Artificial Sequence: Synthetic oligonucleotide
gggauaggaguaaaagaga

SEQ ID NO: 548583 - RNA, 19 nt, Artificial Sequence
  Description of Artificial Sequence: Synthetic oligonucleotide
uggccccauuucauaccag

SEQ ID NO: 548584 - RNA, 19 nt, Artificial Sequence
  Description of Artificial Sequence: Synthetic oligonucleotide
ggugggaaaaggauuccca

SEQ ID NO: 548585 - RNA, 19 nt, Artificial Sequence
  Description of Artificial Sequence: Synthetic oligonucleotide
cucacccuccaagguagcc

SEQ ID NO: 548586 - RNA, 19 nt, Artificial Sequence
  Description of Artificial Sequence: Synthetic oligonucleotide
caagccaaucuccaagggu

SEQ ID NO: 548587 - RNA, 19 nt, Artificial Sequence
  Description of Artificial Sequence: Synthetic oligonucleotide
auaauuccuugaacccuga

SEQ ID NO: 548588 - RNA, 19 nt, Artificial Sequence
  Description of Artificial Sequence: Synthetic oligonucleotide
gagcccaaguuugcgcgug

SEQ ID NO: 548589 - RNA, 19 nt, Artificial Sequence
  Description of Artificial Sequence: Synthetic oligonucleotide
ucgggcucuuccacacaac

SEQ ID NO: 548590 - RNA, 19 nt, Artificial Sequence
  Description of Artificial Sequence: Synthetic oligonucleotide
ucgcaaacaccaggucccc

SEQ ID NO: 548591 - RNA, 19 nt, Artificial Sequence
  Description of Artificial Sequence: Synthetic oligonucleotide
uacaggcucucaugaucuc

SEQ ID NO: 548592 - RNA, 19 nt, Artificial Sequence
  Description of Artificial Sequence: Synthetic oligonucleotide
aguggguuacaaacuggau

SEQ ID NO: 548593 - RNA, 19 nt, Artificial Sequence
  Description of Artificial Sequence: Synthetic oligonucleotide
aucuaaagagagacauuua

SEQ ID NO: 548594 - RNA, 19 nt, Artificial Sequence
  Description of Artificial Sequence: Synthetic oligonucleotide
uucugccgguuggaucgcg

SEQ ID NO: 548595 - RNA, 19 nt, Artificial Sequence
  Description of Artificial Sequence: Synthetic oligonucleotide
accgcacuccugccccaac

SEQ ID NO: 548596 - RNA, 19 nt, Artificial Sequence
  Description of Artificial Sequence: Synthetic oligonucleotide
agucaauccuucagauuau

SEQ ID NO: 548597 - RNA, 19 nt, Artificial Sequence
  Description of Artificial Sequence: Synthetic oligonucleotide
cugggugauauaucugacu

SEQ ID NO: 548598 - RNA, 19 nt, Artificial Sequence
  Description of Artificial Sequence: Synthetic oligonucleotide
uuugcgcgugcggcgguug

SEQ ID NO: 548599 - RNA, 19 nt, Artificial Sequence
  Description of Artificial Sequence: Synthetic oligonucleotide
ugggacguuuaggggaguc

SEQ ID NO: 548600 - RNA, 19 nt, Artificial Sequence
  Description of Artificial Sequence: Synthetic oligonucleotide
gguaucccuucaucuucgc

SEQ ID NO: 548601 - RNA, 19 nt, Artificial Sequence
  Description of Artificial Sequence: Synthetic oligonucleotide
caacccggcccaaaggucu

SEQ ID NO: 548602 - RNA, 19 nt, Artificial Sequence
  Description of Artificial Sequence: Synthetic oligonucleotide
aacgcucggcucggcucgg

SEQ ID NO: 548603 - RNA, 19 nt, Artificial Sequence
  Description of Artificial Sequence: Synthetic oligonucleotide
caauccgagccggccagug

SEQ ID NO: 548604 - RNA, 19 nt, Artificial Sequence
  Description of Artificial Sequence: Synthetic oligonucleotide
aucuccaagggugggcuua

SEQ ID NO: 548605 - RNA, 19 nt, Artificial Sequence
  Description of Artificial Sequence: Synthetic oligonucleotide
gacuagaagcuggccuuga

SEQ ID NO: 548606 - RNA, 19 nt, Artificial Sequence
  Description of Artificial Sequence: Synthetic oligonucleotide
ccugagaucuaaagagaga

SEQ ID NO: 548607 - RNA, 19 nt, Artificial Sequence
  Description of Artificial Sequence: Synthetic oligonucleotide
gaagcgcgagcccaaguuu

SEQ ID NO: 548608 - RNA, 19 nt, Artificial Sequence
  Description of Artificial Sequence: Synthetic oligonucleotide
ucugacgcccugggcuuca

SEQ ID NO: 548609 - RNA, 19 nt, Artificial Sequence
  Description of Artificial Sequence: Synthetic oligonucleotide
ccaacucgggcucuuccac

SEQ ID NO: 548610 - RNA, 19 nt, Artificial Sequence
  Description of Artificial Sequence: Synthetic oligonucleotide
aguuugcgcgugcggcggu

SEQ ID NO: 548611 - RNA, 19 nt, Artificial Sequence
  Description of Artificial Sequence: Synthetic oligonucleotide
gagcucaggagaugccacu

SEQ ID NO: 548612 - RNA, 19 nt, Artificial Sequence
  Description of Artificial Sequence: Synthetic oligonucleotide
ccaguuuccccaguagcac

SEQ ID NO: 548613 - RNA, 19 nt, Artificial Sequence
  Description of Artificial Sequence: Synthetic oligonucleotide
gggacguuuaggggagucc

SEQ ID NO: 548614 - RNA, 19 nt, Artificial Sequence
  Description of Artificial Sequence: Synthetic oligonucleotide
uugcgcgugcggcgguugu

SEQ ID NO: 548615 - RNA, 19 nt, Artificial Sequence
  Description of Artificial Sequence: Synthetic oligonucleotide
ccaaucuccaagggugggc

SEQ ID NO: 548616 - RNA, 19 nt, Artificial Sequence
  Description of Artificial Sequence: Synthetic oligonucleotide
cauguccccugcucuccuc

SEQ ID NO: 548617 - RNA, 19 nt, Artificial Sequence
  Description of Artificial Sequence: Synthetic oligonucleotide
ucaccgcacuccugcccca

SEQ ID NO: 548618 - RNA, 19 nt, Artificial Sequence
  Description of Artificial Sequence: Synthetic oligonucleotide
gcaacgcucggcucggcuc

SEQ ID NO: 548619 - RNA, 19 nt, Artificial Sequence
  Description of Artificial Sequence: Synthetic oligonucleotide
gcgcucgugcaguuguuug

SEQ ID NO: 548620 - RNA, 19 nt, Artificial Sequence
  Description of Artificial Sequence: Synthetic oligonucleotide
ucaauccgagccggccagu

SEQ ID NO: 548621 - RNA, 19 nt, Artificial Sequence
  Description of Artificial Sequence: Synthetic oligonucleotide
guuaaucaacggcuuuauu

SEQ ID NO: 548622 - RNA, 19 nt, Artificial Sequence
  Description of Artificial Sequence: Synthetic oligonucleotide
caaucuccaagggugggcu

SEQ ID NO: 548623 - RNA, 19 nt, Artificial Sequence
  Description of Artificial Sequence: Synthetic oligonucleotide
uccccgcauuuguacuccu

SEQ ID NO: 548624 - RNA, 19 nt, Artificial Sequence
  Description of Artificial Sequence: Synthetic oligonucleotide
gaacgccgucucauggguc

SEQ ID NO: 548625 - RNA, 19 nt, Artificial Sequence
  Description of Artificial Sequence: Synthetic oligonucleotide
ucgcgacauggcggggccg

SEQ ID NO: 548626 - RNA, 19 nt, Artificial Sequence
  Description of Artificial Sequence: Synthetic oligonucleotide
gguagccagaggccuugac

SEQ ID NO: 548627 - RNA, 19 nt, Artificial Sequence
  Description of Artificial Sequence: Synthetic oligonucleotide
ccaaaggucuagaaugccu

SEQ ID NO: 548628 - RNA, 19 nt, Artificial Sequence
  Description of Artificial Sequence: Synthetic oligonucleotide
ugcgcgugcggcgguugug

SEQ ID NO: 548629 - RNA, 19 nt, Artificial Sequence
  Description of Artificial Sequence: Synthetic oligonucleotide
ggguuacaaacuggaugug

SEQ ID NO: 548630 - RNA, 19 nt, Artificial Sequence
  Description of Artificial Sequence: Synthetic oligonucleotide
gcgugcggcgguuguggcg

SEQ ID NO: 548631 - RNA, 19 nt, Artificial Sequence
  Description of Artificial Sequence: Synthetic oligonucleotide
cccacauuaccccaucucu

SEQ ID NO: 548632 - RNA, 19 nt, Artificial Sequence
  Description of Artificial Sequence: Synthetic oligonucleotide
ggaacgccgucucaugggu

SEQ ID NO: 548633 - RNA, 19 nt, Artificial Sequence
  Description of Artificial Sequence: Synthetic oligonucleotide
ggacguuuaggggaguccu

SEQ ID NO: 548634 - RNA, 19 nt, Artificial Sequence
  Description of Artificial Sequence: Synthetic oligonucleotide
ggaagcgcgagcccaaguu

SEQ ID NO: 548635 - RNA, 19 nt, Artificial Sequence
  Description of Artificial Sequence: Synthetic oligonucleotide
ccgggcuccgcgccgagcc

SEQ ID NO: 548636 - RNA, 19 nt, Artificial Sequence
  Description of Artificial Sequence: Synthetic oligonucleotide
gcccugacuuaggucacag

SEQ ID NO: 548637 - RNA, 19 nt, Artificial Sequence
  Description of Artificial Sequence: Synthetic oligonucleotide
gcccaaguuugcgcgugcg

SEQ ID NO: 548638 - RNA, 19 nt, Artificial Sequence
  Description of Artificial Sequence: Synthetic oligonucleotide
caacggcuuuauuuuccua

SEQ ID NO: 548639 - RNA, 19 nt, Artificial Sequence
  Description of Artificial Sequence: Synthetic oligonucleotide
ccccaacccggcccaaagg

SEQ ID NO: 548640 - RNA, 19 nt, Artificial Sequence
  Description of Artificial Sequence: Synthetic oligonucleotide
uugggacguuuaggggagu

SEQ ID NO: 548641 - RNA, 19 nt, Artificial Sequence
  Description of Artificial Sequence: Synthetic oligonucleotide
ugcaggccauggccaguuu

SEQ ID NO: 548642 - RNA, 19 nt, Artificial Sequence
  Description of Artificial Sequence: Synthetic oligonucleotide
gcgcgugcggcgguugugg

SEQ ID NO: 548643 - RNA, 19 nt, Artificial Sequence
  Description of Artificial Sequence: Synthetic oligonucleotide
cagccacggcgucugcguc

SEQ ID NO: 548644 - RNA, 19 nt, Artificial Sequence
  Description of Artificial Sequence: Synthetic oligonucleotide
cucggacggggcgggcgcg

SEQ ID NO: 548645 - RNA, 19 nt, Artificial Sequence
  Description of Artificial Sequence: Synthetic oligonucleotide
cccggcgcgagcuccggag

SEQ ID NO: 548646 - RNA, 19 nt, Artificial Sequence
  Description of Artificial Sequence: Synthetic oligonucleotide
gcucggacggggcgggcgc

SEQ ID NO: 548647 - RNA, 19 nt, Artificial Sequence
  Description of Artificial Sequence: Synthetic oligonucleotide
cucgugcaguuguuugugu

SEQ ID NO: 548648 - RNA, 19 nt, Artificial Sequence
  Description of Artificial Sequence: Synthetic oligonucleotide
ggugggcaacgcucggcuc

SEQ ID NO: 548649 - RNA, 19 nt, Artificial Sequence
  Description of Artificial Sequence: Synthetic oligonucleotide
ggcacauggcccugacuua

SEQ ID NO: 548650 - RNA, 19 nt, Artificial Sequence
  Description of Artificial Sequence: Synthetic oligonucleotide
ugguggcuacaggcucuca

SEQ ID NO: 548651 - RNA, 19 nt, Artificial Sequence
  Description of Artificial Sequence: Synthetic oligonucleotide
gcgcggugggcaacgcucg

SEQ ID NO: 548652 - RNA, 19 nt, Artificial Sequence
  Description of Artificial Sequence: Synthetic oligonucleotide
gcgcgagcccaaguuugcg

SEQ ID NO: 548653 - RNA, 19 nt, Artificial Sequence
  Description of Artificial Sequence: Synthetic oligonucleotide
uuguggcgccgcugcgcuc

SEQ ID NO: 548654 - RNA, 19 nt, Artificial Sequence
  Description of Artificial Sequence: Synthetic oligonucleotide
cuccgggcgcgcucgugca

SEQ ID NO: 548655 - RNA, 19 nt, Artificial Sequence
  Description of Artificial Sequence: Synthetic oligonucleotide
ggcgcgcucgugcaguugu

SEQ ID NO: 548656 - RNA, 19 nt, Artificial Sequence
  Description of Artificial Sequence: Synthetic oligonucleotide
ggaucgcgacauggcgggg

SEQ ID NO: 548657 - RNA, 19 nt, Artificial Sequence
  Description of Artificial Sequence: Synthetic oligonucleotide
ggcgcgagcuccggagcag

SEQ ID NO: 548658 - RNA, 19 nt, Artificial Sequence
  Description of Artificial Sequence: Synthetic oligonucleotide
gcagccacggcgucugcgu

SEQ ID NO: 548659 - RNA, 19 nt, Artificial Sequence
  Description of Artificial Sequence: Synthetic oligonucleotide
gccagaggaccaaccucug

SEQ ID NO: 548660 - RNA, 19 nt, Artificial Sequence
  Description of Artificial Sequence: Synthetic oligonucleotide
gcuacccucugcauugccu

SEQ ID NO: 548661 - RNA, 19 nt, Artificial Sequence
  Description of Artificial Sequence: Synthetic oligonucleotide
cccaacccggcccaaaggu

SEQ ID NO: 548662 - RNA, 19 nt, Artificial Sequence
  Description of Artificial Sequence: Synthetic oligonucleotide
ggcgguuguggcgccgcug

SEQ ID NO: 548663 - RNA, 19 nt, Artificial Sequence
  Description of Artificial Sequence: Synthetic oligonucleotide
cugacgcccugggcuucag

SEQ ID NO: 548664 - RNA, 19 nt, Artificial Sequence
  Description of Artificial Sequence: Synthetic oligonucleotide
gcggugggcaacgcucggc

SEQ ID NO: 548665 - RNA, 19 nt, Artificial Sequence
  Description of Artificial Sequence: Synthetic oligonucleotide
gccgguuggaucgcgacau

SEQ ID NO: 548666 - RNA, 19 nt, Artificial Sequence
  Description of Artificial Sequence: Synthetic oligonucleotide
agccccucgcugaacccuu

SEQ ID NO: 548667 - RNA, 19 nt, Artificial Sequence
  Description of Artificial Sequence: Synthetic oligonucleotide
caucacccgcaggggcuuc

SEQ ID NO: 548668 - RNA, 19 nt, Artificial Sequence
  Description of Artificial Sequence: Synthetic oligonucleotide
cuccgcgccgagccgggaa

SEQ ID NO: 548669 - RNA, 19 nt, Artificial Sequence
  Description of Artificial Sequence: Synthetic oligonucleotide
cucagcgagagaggccgcu

SEQ ID NO: 548670 - RNA, 19 nt, Artificial Sequence
  Description of Artificial Sequence: Synthetic oligonucleotide
ccggcgcgagcuccggagc

SEQ ID NO: 548671 - RNA, 19 nt, Artificial Sequence
  Description of Artificial Sequence: Synthetic oligonucleotide
gcgcuccggcccucgcgcg

SEQ ID NO: 548672 - RNA, 19 nt, Artificial Sequence
  Description of Artificial Sequence: Synthetic oligonucleotide
cucccacauaguguccccu

SEQ ID NO: 548673 - RNA, 19 nt, Artificial Sequence
  Description of Artificial Sequence: Synthetic oligonucleotide
ccgagccggccaguguggg

SEQ ID NO: 548674 - RNA, 19 nt, Artificial Sequence
  Description of Artificial Sequence: Synthetic oligonucleotide
gggaagcgcgagcccaagu

SEQ ID NO: 548675 - RNA, 19 nt, Artificial Sequence
  Description of Artificial Sequence: Synthetic oligonucleotide
ccggcccaaaggucuagaa

SEQ ID NO: 548676 - RNA, 19 nt, Artificial Sequence
  Description of Artificial Sequence: Synthetic oligonucleotide
cgugcaguuguuuguguuu

SEQ ID NO: 548677 - RNA, 19 nt, Artificial Sequence
  Description of Artificial Sequence: Synthetic oligonucleotide
cggcgucugcguccgcgcg

SEQ ID NO: 548678 - RNA, 19 nt, Artificial Sequence
  Description of Artificial Sequence: Synthetic oligonucleotide
ccccucgcugaacccuuuc

SEQ ID NO: 548679 - RNA, 19 nt, Artificial Sequence
  Description of Artificial Sequence: Synthetic oligonucleotide
cgcgugcggcgguuguggc

SEQ ID NO: 548680 - RNA, 19 nt, Artificial Sequence
  Description of Artificial Sequence: Synthetic oligonucleotide
ggagccucccuuggguuuu

SEQ ID NO: 548681 - RNA, 19 nt, Artificial Sequence
  Description of Artificial Sequence: Synthetic oligonucleotide
cuccaagggugggcuuaaa

SEQ ID NO: 548682 - RNA, 19 nt, Artificial Sequence
  Description of Artificial Sequence: Synthetic oligonucleotide
gcgagagaggccgcuuccu

SEQ ID NO: 548683 - RNA, 19 nt, Artificial Sequence
  Description of Artificial Sequence: Synthetic oligonucleotide
ccgccucgaugguggcccc

SEQ ID NO: 548684 - RNA, 19 nt, Artificial Sequence
  Description of Artificial Sequence: Synthetic oligonucleotide
caccgcacuccugccccaa

SEQ ID NO: 548685 - RNA, 19 nt, Artificial Sequence
  Description of Artificial Sequence: Synthetic oligonucleotide
cugcguccgcgcgccgcuc

SEQ ID NO: 548686 - RNA, 19 nt, Artificial Sequence
  Description of Artificial Sequence: Synthetic oligonucleotide
ccgagccgggaagcgcgag

SEQ ID NO: 548687 - RNA, 19 nt, Artificial Sequence
  Description of Artificial Sequence: Synthetic oligonucleotide
guuugcgcgugcggcgguu

SEQ ID NO: 548688 - RNA, 19 nt, Artificial Sequence
  Description of Artificial Sequence: Synthetic oligonucleotide
cgggaagcgcgagcccaag

SEQ ID NO: 548689 - RNA, 19 nt, Artificial Sequence
  Description of Artificial Sequence: Synthetic oligonucleotide
gggcaacgcucggcucggc

SEQ ID NO: 548690 - RNA, 19 nt, Artificial Sequence
  Description of Artificial Sequence: Synthetic oligonucleotide
cggugggcaacgcucggcu

SEQ ID NO: 548691 - RNA, 19 nt, Artificial Sequence
  Description of Artificial Sequence: Synthetic oligonucleotide
gggcgcggugggcaacgcu

SEQ ID NO: 548692 - RNA, 19 nt, Artificial Sequence
  Description of Artificial Sequence: Synthetic oligonucleotide
cccggcccaaaggucuaga

SEQ ID NO: 548693 - RNA, 19 nt, Artificial Sequence
  Description of Artificial Sequence: Synthetic oligonucleotide
cggcgcgagcuccggagca

SEQ ID NO: 548694 - RNA, 19 nt, Artificial Sequence
  Description of Artificial Sequence: Synthetic oligonucleotide
gcucgucgaugaccaguuu

SEQ ID NO: 548695 - RNA, 19 nt, Artificial Sequence
  Description of Artificial Sequence: Synthetic oligonucleotide
gccggccaguguggguauc

SEQ ID NO: 548696 - RNA, 19 nt, Artificial Sequence
  Description of Artificial Sequence: Synthetic oligonucleotide
ccccgggcuccgcgccgag

SEQ ID NO: 548697 - RNA, 19 nt, Artificial Sequence
  Description of Artificial Sequence: Synthetic oligonucleotide
ccccgcauuuguacuccuu

SEQ ID NO: 548698 - RNA, 19 nt, Artificial Sequence
  Description of Artificial Sequence: Synthetic oligonucleotide
ccgcucggacggggcgggc

SEQ ID NO: 548699 - RNA, 19 nt, Artificial Sequence
  Description of Artificial Sequence: Synthetic oligonucleotide
ccgggcgcgcucgugcagu

SEQ ID NO: 548700 - RNA, 19 nt, Artificial Sequence
  Description of Artificial Sequence: Synthetic oligonucleotide
cggagcagccacggcgucu

SEQ ID NO: 548701 - RNA, 19 nt, Artificial Sequence
  Description of Artificial Sequence: Synthetic oligonucleotide
ccagacuccuugggacguu

SEQ ID NO: 548702 - RNA, 19 nt, Artificial Sequence
  Description of Artificial Sequence: Synthetic oligonucleotide
cguccgcgcgccgcucgga

SEQ ID NO: 548703 - RNA, 19 nt, Artificial Sequence
  Description of Artificial Sequence: Synthetic oligonucleotide
cgcgcucgugcaguuguuu

SEQ ID NO: 548704 - RNA, 19 nt, Artificial Sequence
  Description of Artificial Sequence: Synthetic oligonucleotide
gcgcgcucgugcaguuguu

SEQ ID NO: 548705 - RNA, 19 nt, Artificial Sequence
  Description of Artificial Sequence: Synthetic oligonucleotide
gccccucgcugaacccuuu

SEQ ID NO: 548706 - RNA, 19 nt, Artificial Sequence
  Description of Artificial Sequence: Synthetic oligonucleotide
cggcgguuguggcgccgcu

SEQ ID NO: 548707 - RNA, 19 nt, Artificial Sequence
  Description of Artificial Sequence: Synthetic oligonucleotide
cgggcgcgcucgugcaguu

SEQ ID NO: 548708 - RNA, 19 nt, Artificial Sequence
  Description of Artificial Sequence: Synthetic oligonucleotide
cuuagcaacauuuagaugg

SEQ ID NO: 548709 - RNA, 19 nt, Artificial Sequence
  Description of Artificial Sequence: Synthetic oligonucleotide
aacacuaagauccuaacac

SEQ ID NO: 548710 - RNA, 19 nt, Artificial Sequence
  Description of Artificial Sequence: Synthetic oligonucleotide
ucuuagaucgaucugaucg

SEQ ID NO: 548711 - RNA, 19 nt, Artificial Sequence
  Description of Artificial Sequence: Synthetic oligonucleotide
aaagugaguagucacagcc

SEQ ID NO: 548712 - RNA, 19 nt, Artificial Sequence
  Description of Artificial Sequence: Synthetic oligonucleotide
ucaacaauuaguuuuauag

SEQ ID NO: 548713 - RNA, 19 nt, Artificial Sequence
  Description of Artificial Sequence: Synthetic oligonucleotide
agcauaaagauacaaaagc

SEQ ID NO: 548714 - RNA, 19 nt, Artificial Sequence
  Description of Artificial Sequence: Synthetic oligonucleotide
aauguaauuagccaucguc

SEQ ID NO: 548715 - RNA, 19 nt, Artificial Sequence
  Description of Artificial Sequence: Synthetic oligonucleotide
aauucuaaccagcuguuac

SEQ ID NO: 548716 - RNA, 19 nt, Artificial Sequence
  Description of Artificial Sequence: Synthetic oligonucleotide
uccacaauuauguuuaggg

SEQ ID NO: 548717 - RNA, 19 nt, Artificial Sequence
  Description of Artificial Sequence: Synthetic oligonucleotide
uuugauauagugcucuggg

SEQ ID NO: 548718 - RNA, 19 nt, Artificial Sequence
  Description of Artificial Sequence: Synthetic oligonucleotide
aaugggaccgcuuuucuac

SEQ ID NO: 548719 - RNA, 19 nt, Artificial Sequence
  Description of Artificial Sequence: Synthetic oligonucleotide
uuauaguccacaauuaugu

SEQ ID NO: 548720 - RNA, 19 nt, Artificial Sequence
  Description of Artificial Sequence: Synthetic oligonucleotide
aaaucuaguugucuaaaag

SEQ ID NO: 548721 - RNA, 19 nt, Artificial Sequence
  Description of Artificial Sequence: Synthetic oligonucleotide
aacaaauugaccaauauaa

SEQ ID NO: 548722 - RNA, 19 nt, Artificial Sequence
  Description of Artificial Sequence: Synthetic oligonucleotide
aaaauuaccaaagaaugca

SEQ ID NO: 548723 - RNA, 19 nt, Artificial Sequence
  Description of Artificial Sequence: Synthetic oligonucleotide
aaucuaguugucuaaaaga

SEQ ID NO: 548724 - RNA, 19 nt, Artificial Sequence
  Description of Artificial Sequence: Synthetic oligonucleotide
uguauaaagcccaaaaguc

SEQ ID NO: 548725 - RNA, 19 nt, Artificial Sequence
  Description of Artificial Sequence: Synthetic oligonucleotide
aguuuaacuacauauguga

SEQ ID NO: 548726 - RNA, 19 nt, Artificial Sequence
  Description of Artificial Sequence: Synthetic oligonucleotide
uacuguaauucuuugauug

SEQ ID NO: 548727 - RNA, 19 nt, Artificial Sequence
  Description of Artificial Sequence: Synthetic oligonucleotide
aaugaaaugcauaaauuug

SEQ ID NO: 548728 - RNA, 19 nt, Artificial Sequence
  Description of Artificial Sequence: Synthetic oligonucleotide
auuauuuaaccuaagacug

SEQ ID NO: 548729 - RNA, 19 nt, Artificial Sequence
  Description of Artificial Sequence: Synthetic oligonucleotide
uuuaaccuaagacugaaaa

SEQ ID NO: 548730 - RNA, 19 nt, Artificial Sequence
  Description of Artificial Sequence: Synthetic oligonucleotide
aauguuaucaaggagggaa

SEQ ID NO: 548731 - RNA, 19 nt, Artificial Sequence
  Description of Artificial Sequence: Synthetic oligonucleotide
uuuagauggaaucaaacuu

SEQ ID NO: 548732 - RNA, 19 nt, Artificial Sequence
  Description of Artificial Sequence: Synthetic oligonucleotide
uaagguaacagaaaugcaa

SEQ ID NO: 548733 - RNA, 19 nt, Artificial Sequence
  Description of Artificial Sequence: Synthetic oligonucleotide
cuaauguuaucaaggaggg

SEQ ID NO: 548734 - RNA, 19 nt, Artificial Sequence
  Description of Artificial Sequence: Synthetic oligonucleotide
acauacuaauucuagguag

SEQ ID NO: 548735 - RNA, 19 nt, Artificial Sequence
  Description of Artificial Sequence: Synthetic oligonucleotide
uaugguuguauaaagccca

SEQ ID NO: 548736 - RNA, 19 nt, Artificial Sequence
  Description of Artificial Sequence: Synthetic oligonucleotide
auguuuagggaucacacag

SEQ ID NO: 548737 - RNA, 19 nt, Artificial Sequence
  Description of Artificial Sequence: Synthetic oligonucleotide
guuuguucaauguaauuag

SEQ ID NO: 548738 - RNA, 19 nt, Artificial Sequence
  Description of Artificial Sequence: Synthetic oligonucleotide
uuauguuuagggaucacac

SEQ ID NO: 548739 - RNA, 19 nt, Artificial Sequence
  Description of Artificial Sequence: Synthetic oligonucleotide
auuuagauggaaucaaacu

SEQ ID NO: 548740 - RNA, 19 nt, Artificial Sequence
  Description of Artificial Sequence: Synthetic oligonucleotide
aucacuaauguuaucaagg

SEQ ID NO: 548741 - RNA, 19 nt, Artificial Sequence
  Description of Artificial Sequence: Synthetic oligonucleotide
ugucuuaauaugaauggga

SEQ ID NO: 548742 - RNA, 19 nt, Artificial Sequence
  Description of Artificial Sequence: Synthetic oligonucleotide
aaguacagauuccuucuac

SEQ ID NO: 548743 - RNA, 19 nt, Artificial Sequence
  Description of Artificial Sequence: Synthetic oligonucleotide
auggugauacaccaaaauc

SEQ ID NO: 548744 - RNA, 19 nt, Artificial Sequence
  Description of Artificial Sequence: Synthetic oligonucleotide
auguaauuagccaucgucc

SEQ ID NO: 548745 - RNA, 19 nt, Artificial Sequence
  Description of Artificial Sequence: Synthetic oligonucleotide
uaaacuagugcuccaaacu

SEQ ID NO: 548746 - RNA, 19 nt, Artificial Sequence
  Description of Artificial Sequence: Synthetic oligonucleotide
aaagacaauucacuguaca

SEQ ID NO: 548747 - RNA, 19 nt, Artificial Sequence
  Description of Artificial Sequence: Synthetic oligonucleotide
aaacuuagagaucaaccga

SEQ ID NO: 548748 - RNA, 19 nt, Artificial Sequence
  Description of Artificial Sequence: Synthetic oligonucleotide
uguaucaugguaauucuaa

SEQ ID NO: 548749 - RNA, 19 nt, Artificial Sequence
  Description of Artificial Sequence: Synthetic oligonucleotide
aaaagauagccacaucagu

SEQ ID NO: 548750 - RNA, 19 nt, Artificial Sequence
  Description of Artificial Sequence: Synthetic oligonucleotide
cuacauaugugauacuacc

SEQ ID NO: 548751 - RNA, 19 nt, Artificial Sequence
  Description of Artificial Sequence: Synthetic oligonucleotide
gaccgaaacaaauugacca

SEQ ID NO: 548752 - RNA, 19 nt, Artificial Sequence
  Description of Artificial Sequence: Synthetic oligonucleotide
acuaauucuagguaggaau

SEQ ID NO: 548753 - RNA, 19 nt, Artificial Sequence
  Description of Artificial Sequence: Synthetic oligonucleotide
aaauuaccaaagaaugcac

SEQ ID NO: 548754 - RNA, 19 nt, Artificial Sequence
  Description of Artificial Sequence: Synthetic oligonucleotide
ugugccuuaacuuuauuaa

SEQ ID NO: 548755 - RNA, 19 nt, Artificial Sequence
  Description of Artificial Sequence: Synthetic oligonucleotide
aauugauacaaggaaagaa

SEQ ID NO: 548756 - RNA, 19 nt, Artificial Sequence
  Description of Artificial Sequence: Synthetic oligonucleotide
cauacuaauucuagguagg

SEQ ID NO: 548757 - RNA, 19 nt, Artificial Sequence
  Description of Artificial Sequence: Synthetic oligonucleotide
ugaacacaaagguacaaga

SEQ ID NO: 548758 - RNA, 19 nt, Artificial Sequence
  Description of Artificial Sequence: Synthetic oligonucleotide
aaaugagguugcuagaaaa

SEQ ID NO: 548759 - RNA, 19 nt, Artificial Sequence
  Description of Artificial Sequence: Synthetic oligonucleotide
ugucuaaaagacaauucac

SEQ ID NO: 548760 - RNA, 19 nt, Artificial Sequence
  Description of Artificial Sequence: Synthetic oligonucleotide
uucuuaaacaacaaaccua

SEQ ID NO: 548761 - RNA, 19 nt, Artificial Sequence
  Description of Artificial Sequence: Synthetic oligonucleotide
auaacacuaagauccuaac

SEQ ID NO: 548762 - RNA, 19 nt, Artificial Sequence
  Description of Artificial Sequence: Synthetic oligonucleotide
aauggugauacaccaaaau

SEQ ID NO: 548763 - RNA, 19 nt, Artificial Sequence
  Description of Artificial Sequence: Synthetic oligonucleotide
gauauagugcucuggguug

SEQ ID NO: 548764 - RNA, 19 nt, Artificial Sequence
  Description of Artificial Sequence: Synthetic oligonucleotide
uuucgaauacuguggaaag

SEQ ID NO: 548765 - RNA, 19 nt, Artificial Sequence
  Description of Artificial Sequence: Synthetic oligonucleotide
auagccacuguucuuauca

SEQ ID NO: 548766 - RNA, 19 nt, Artificial Sequence
  Description of Artificial Sequence: Synthetic oligonucleotide
auaugguuguauaaagccc

SEQ ID NO: 548767 - RNA, 19 nt, Artificial Sequence
  Description of Artificial Sequence: Synthetic oligonucleotide
acaguaucaaacuuagaga

SEQ ID NO: 548768 - RNA, 19 nt, Artificial Sequence
  Description of Artificial Sequence: Synthetic oligonucleotide
aaagaaugcacaaauuuaa

SEQ ID NO: 548769 - RNA, 19 nt, Artificial Sequence
  Description of Artificial Sequence: Synthetic oligonucleotide
auugggauaguggacacac

SEQ ID NO: 548770 - RNA, 19 nt, Artificial Sequence
  Description of Artificial Sequence: Synthetic oligonucleotide
uggauaugguuguauaaag

SEQ ID NO: 548771 - RNA, 19 nt, Artificial Sequence
  Description of Artificial Sequence: Synthetic oligonucleotide
acgaaguacagauuccuuc

SEQ ID NO: 548772 - RNA, 19 nt, Artificial Sequence
  Description of Artificial Sequence: Synthetic oligonucleotide
cauaggcucaauaccaucc

SEQ ID NO: 548773 - RNA, 19 nt, Artificial Sequence
  Description of Artificial Sequence: Synthetic oligonucleotide
uuaaccuaagacugaaaac

SEQ ID NO: 548774 - RNA, 19 nt, Artificial Sequence
  Description of Artificial Sequence: Synthetic oligonucleotide
caaucacuaucuuuggagg

SEQ ID NO: 548775 - RNA, 19 nt, Artificial Sequence
  Description of Artificial Sequence: Synthetic oligonucleotide
uuuuauaguccacaauuau

SEQ ID NO: 548776 - RNA, 19 nt, Artificial Sequence
  Description of Artificial Sequence: Synthetic oligonucleotide
ugauaaccaaucacuaucu

SEQ ID NO: 548777 - RNA, 19 nt, Artificial Sequence
  Description of Artificial Sequence: Synthetic oligonucleotide
uguaauucuuugauuggga

SEQ ID NO: 548778 - RNA, 19 nt, Artificial Sequence
  Description of Artificial Sequence: Synthetic oligonucleotide
aggaauguaauuauggugu

SEQ ID NO: 548779 - RNA, 19 nt, Artificial Sequence
  Description of Artificial Sequence: Synthetic oligonucleotide
ugauacaccaaaaucccaa

SEQ ID NO: 548780 - RNA, 19 nt, Artificial Sequence
  Description of Artificial Sequence: Synthetic oligonucleotide
gaucugaucgcacaaccgc

SEQ ID NO: 548781 - RNA, 19 nt, Artificial Sequence
  Description of Artificial Sequence: Synthetic oligonucleotide
cauuauuuaaccuaagacu

SEQ ID NO: 548782 - RNA, 19 nt, Artificial Sequence
  Description of Artificial Sequence: Synthetic oligonucleotide
uguacacugucuuaauaug

SEQ ID NO: 548783 - RNA, 19 nt, Artificial Sequence
  Description of Artificial Sequence: Synthetic oligonucleotide
acagucgccaucuuagauc

SEQ ID NO: 548784 - RNA, 19 nt, Artificial Sequence
  Description of Artificial Sequence: Synthetic oligonucleotide
uaugugauacuaccuauuc

SEQ ID NO: 548785 - RNA, 19 nt, Artificial Sequence
  Description of Artificial Sequence: Synthetic oligonucleotide
acauagaucacugauuuga

SEQ ID NO: 548786 - RNA, 19 nt, Artificial Sequence
  Description of Artificial Sequence: Synthetic oligonucleotide
cugauaaccaaucacuauc

SEQ ID NO: 548787 - RNA, 19 nt, Artificial Sequence
  Description of Artificial Sequence: Synthetic oligonucleotide
aaucacuaucuuuggagga

SEQ ID NO: 548788 - RNA, 19 nt, Artificial Sequence
  Description of Artificial Sequence: Synthetic oligonucleotide
ucuuaucaaauggugauac

SEQ ID NO: 548789 - RNA, 19 nt, Artificial Sequence
  Description of Artificial Sequence: Synthetic oligonucleotide
ucaauguaauuagccaucg

SEQ ID NO: 548790 - RNA, 19 nt, Artificial Sequence
  Description of Artificial Sequence: Synthetic oligonucleotide
ugauauagugcucuggguu

SEQ ID NO: 548791 - RNA, 19 nt, Artificial Sequence
  Description of Artificial Sequence: Synthetic oligonucleotide
uauugcuaucuuaucaccu

SEQ ID NO: 548792 - RNA, 19 nt, Artificial Sequence
  Description of Artificial Sequence: Synthetic oligonucleotide
aucgaggucacuucgucuc

SEQ ID NO: 548793 - RNA, 19 nt, Artificial Sequence
  Description of Artificial Sequence: Synthetic oligonucleotide
guaauacaaaguguuaaag

SEQ ID NO: 548794 - RNA, 19 nt, Artificial Sequence
  Description of Artificial Sequence: Synthetic oligonucleotide
uuauuuaaccuaagacuga

SEQ ID NO: 548795 - RNA, 19 nt, Artificial Sequence
  Description of Artificial Sequence: Synthetic oligonucleotide
aaacuagugcuccaaacuu

SEQ ID NO: 548796 - RNA, 19 nt, Artificial Sequence
  Description of Artificial Sequence: Synthetic oligonucleotide
uaacacuaagauccuaaca

SEQ ID NO: 548797 - RNA, 19 nt, Artificial Sequence
  Description of Artificial Sequence: Synthetic oligonucleotide
uauacccucccuaugugug

SEQ ID NO: 548798 - RNA, 19 nt, Artificial Sequence
  Description of Artificial Sequence: Synthetic oligonucleotide
uucucuuauaucuuagcaa

SEQ ID NO: 548799 - RNA, 19 nt, Artificial Sequence
  Description of Artificial Sequence: Synthetic oligonucleotide
agacccuauaagaagacac

SEQ ID NO: 548800 - RNA, 19 nt, Artificial Sequence
  Description of Artificial Sequence: Synthetic oligonucleotide
cuuagaucgaucugaucgc

SEQ ID NO: 548801 - RNA, 19 nt, Artificial Sequence
  Description of Artificial Sequence: Synthetic oligonucleotide
uaauuagccaucguccucc

SEQ ID NO: 548802 - RNA, 19 nt, Artificial Sequence
  Description of Artificial Sequence: Synthetic oligonucleotide
accuauucaauuuauuaaa

SEQ ID NO: 548803 - RNA, 19 nt, Artificial Sequence
  Description of Artificial Sequence: Synthetic oligonucleotide
aaguccuaaccuuuccuug

SEQ ID NO: 548804 - RNA, 19 nt, Artificial Sequence
  Description of Artificial Sequence: Synthetic oligonucleotide
accgcuuuucuacuugagc

SEQ ID NO: 548805 - RNA, 19 nt, Artificial Sequence
  Description of Artificial Sequence: Synthetic oligonucleotide
uguaauuaugguguuacau

SEQ ID NO: 548806 - RNA, 19 nt, Artificial Sequence
  Description of Artificial Sequence: Synthetic oligonucleotide
uccugugagaauacucagg

SEQ ID NO: 548807 - RNA, 19 nt, Artificial Sequence
  Description of Artificial Sequence: Synthetic oligonucleotide
uuguagcaaagcuuuguag

SEQ ID NO: 548808 - RNA, 19 nt, Artificial Sequence
  Description of Artificial Sequence: Synthetic oligonucleotide
cacucagucguccauauug

SEQ ID NO: 548809 - RNA, 19 nt, Artificial Sequence
  Description of Artificial Sequence: Synthetic oligonucleotide
cuaucuuuggaggaagucc

SEQ ID NO: 548810 - RNA, 19 nt, Artificial Sequence
  Description of Artificial Sequence: Synthetic oligonucleotide
uuugauugggauaguggac

SEQ ID NO: 548811 - RNA, 19 nt, Artificial Sequence
  Description of Artificial Sequence: Synthetic oligonucleotide
uucaccaauguuacaugag

SEQ ID NO: 548812 - RNA, 19 nt, Artificial Sequence
  Description of Artificial Sequence: Synthetic oligonucleotide
gauccuaacacacgucccc

SEQ ID NO: 548813 - RNA, 19 nt, Artificial Sequence
  Description of Artificial Sequence: Synthetic oligonucleotide
gcuaagguaacagaaaugc

SEQ ID NO: 548814 - RNA, 19 nt, Artificial Sequence
  Description of Artificial Sequence: Synthetic oligonucleotide
ucuacuugagccauuugua

SEQ ID NO: 548815 - RNA, 19 nt, Artificial Sequence
  Description of Artificial Sequence: Synthetic oligonucleotide
cuuugauugggauagugga

SEQ ID NO: 548816 - RNA, 19 nt, Artificial Sequence
  Description of Artificial Sequence: Synthetic oligonucleotide
acugaaaucagaaucacua

SEQ ID NO: 548817 - RNA, 19 nt, Artificial Sequence
  Description of Artificial Sequence: Synthetic oligonucleotide
gugucucuagccaaaagcg

SEQ ID NO: 548818 - RNA, 19 nt, Artificial Sequence
  Description of Artificial Sequence: Synthetic oligonucleotide
aauuagccaucguccuccc

SEQ ID NO: 548819 - RNA, 19 nt, Artificial Sequence
  Description of Artificial Sequence: Synthetic oligonucleotide
aaagauagccacaucaguu

SEQ ID NO: 548820 - RNA, 19 nt, Artificial Sequence
  Description of Artificial Sequence: Synthetic oligonucleotide
aggcauuaaauuacuagac

SEQ ID NO: 548821 - RNA, 19 nt, Artificial Sequence
  Description of Artificial Sequence: Synthetic oligonucleotide
agcccaaaagucuucaaca

SEQ ID NO: 548822 - RNA, 19 nt, Artificial Sequence
  Description of Artificial Sequence: Synthetic oligonucleotide
uugauugggauaguggaca

SEQ ID NO: 548823 - RNA, 19 nt, Artificial Sequence
  Description of Artificial Sequence: Synthetic oligonucleotide
cugucauauuccuggaucc

SEQ ID NO: 548824 - RNA, 19 nt, Artificial Sequence
  Description of Artificial Sequence: Synthetic oligonucleotide
ucgaucugaucgcacaacc

SEQ ID NO: 548825 - RNA, 19 nt, Artificial Sequence
  Description of Artificial Sequence: Synthetic oligonucleotide
uguguaucaugguaauucu

SEQ ID NO: 548826 - RNA, 19 nt, Artificial Sequence
  Description of Artificial Sequence: Synthetic oligonucleotide
uauguuuagggaucacaca

SEQ ID NO: 548827 - RNA, 19 nt, Artificial Sequence
  Description of Artificial Sequence: Synthetic oligonucleotide
aauuaccaaagaaugcaca

SEQ ID NO: 548828 - RNA, 19 nt, Artificial Sequence
  Description of Artificial Sequence: Synthetic oligonucleotide
ugauuugaaugaaaugcau

SEQ ID NO: 548829 - RNA, 19 nt, Artificial Sequence
  Description of Artificial Sequence: Synthetic oligonucleotide
aacuacauaugugauacua

SEQ ID NO: 548830 - RNA, 19 nt, Artificial Sequence
  Description of Artificial Sequence: Synthetic oligonucleotide
uuagcaacauuuagaugga

SEQ ID NO: 548831 - RNA, 19 nt, Artificial Sequence
  Description of Artificial Sequence: Synthetic oligonucleotide
gauugcgugacgcagucuc

SEQ ID NO: 548832 - RNA, 19 nt, Artificial Sequence
  Description of Artificial Sequence: Synthetic oligonucleotide
ugcuaagguaacagaaaug

SEQ ID NO: 548833 - RNA, 19 nt, Artificial Sequence
  Description of Artificial Sequence: Synthetic oligonucleotide
aguccacucugcuuggacg

SEQ ID NO: 548834 - RNA, 19 nt, Artificial Sequence
  Description of Artificial Sequence: Synthetic oligonucleotide
acuacauaugugauacuac

SEQ ID NO: 548835 - RNA, 19 nt, Artificial Sequence
  Description of Artificial Sequence: Synthetic oligonucleotide
uccugcuaagguaacagaa

SEQ ID NO: 548836 - RNA, 19 nt, Artificial Sequence
  Description of Artificial Sequence: Synthetic oligonucleotide
uuaauguuuauuccaccuu

SEQ ID NO: 548837 - RNA, 19 nt, Artificial Sequence
  Description of Artificial Sequence: Synthetic oligonucleotide
cuguaauucuuugauuggg

SEQ ID NO: 548838 - RNA, 19 nt, Artificial Sequence
  Description of Artificial Sequence: Synthetic oligonucleotide
caaacuuaggcugugcaug

SEQ ID NO: 548839 - RNA, 19 nt, Artificial Sequence
  Description of Artificial Sequence: Synthetic oligonucleotide
aguacagauuccuucuaca

SEQ ID NO: 548840 - RNA, 19 nt, Artificial Sequence
  Description of Artificial Sequence: Synthetic oligonucleotide
acaucugcggguucugggg

SEQ ID NO: 548841 - RNA, 19 nt, Artificial Sequence
  Description of Artificial Sequence: Synthetic oligonucleotide
auucuaaccagcuguuaca

SEQ ID NO: 548842 - RNA, 19 nt, Artificial Sequence
  Description of Artificial Sequence: Synthetic oligonucleotide
agaucaaccgaagguuugc

SEQ ID NO: 548843 - RNA, 19 nt, Artificial Sequence
  Description of Artificial Sequence: Synthetic oligonucleotide
acaaaggcgaaugagacuu

SEQ ID NO: 548844 - RNA, 19 nt, Artificial Sequence
  Description of Artificial Sequence: Synthetic oligonucleotide
acauaugugauacuaccua

SEQ ID NO: 548845 - RNA, 19 nt, Artificial Sequence
  Description of Artificial Sequence: Synthetic oligonucleotide
ucuuauaucuuagcaacau

SEQ ID NO: 548846 - RNA, 19 nt, Artificial Sequence
  Description of Artificial Sequence: Synthetic oligonucleotide
uucgaauacuguggaaagg

SEQ ID NO: 548847 - RNA, 19 nt, Artificial Sequence
  Description of Artificial Sequence: Synthetic oligonucleotide
acuaaguaauacaaagugu

SEQ ID NO: 548848 - RNA, 19 nt, Artificial Sequence
  Description of Artificial Sequence: Synthetic oligonucleotide
agaccgaaacaaauugacc

SEQ ID NO: 548849 - RNA, 19 nt, Artificial Sequence
  Description of Artificial Sequence: Synthetic oligonucleotide
aguacauuauuuaaccuaa

SEQ ID NO: 548850 - RNA, 19 nt, Artificial Sequence
  Description of Artificial Sequence: Synthetic oligonucleotide
aagcgaucgaggucacuuc

SEQ ID NO: 548851 - RNA, 19 nt, Artificial Sequence
  Description of Artificial Sequence: Synthetic oligonucleotide
guugcuagaaaacuguacu

SEQ ID NO: 548852 - RNA, 19 nt, Artificial Sequence
  Description of Artificial Sequence: Synthetic oligonucleotide
aacuuagagaucaaccgaa

SEQ ID NO: 548853 - RNA, 19 nt, Artificial Sequence
  Description of Artificial Sequence: Synthetic oligonucleotide
auaguggacacacuagcaa

SEQ ID NO: 548854 - RNA, 19 nt, Artificial Sequence
  Description of Artificial Sequence: Synthetic oligonucleotide
guguguaucaugguaauuc

SEQ ID NO: 548855 - RNA, 19 nt, Artificial Sequence
  Description of Artificial Sequence: Synthetic oligonucleotide
uuggcaaccuccugauuag

SEQ ID NO: 548856 - RNA, 19 nt, Artificial Sequence
  Description of Artificial Sequence: Synthetic oligonucleotide
acuagacaacuggauaugg

SEQ ID NO: 548857 - RNA, 19 nt, Artificial Sequence
  Description of Artificial Sequence: Synthetic oligonucleotide
cuaaguaauacaaaguguu

SEQ ID NO: 548858 - RNA, 19 nt, Artificial Sequence
  Description of Artificial Sequence: Synthetic oligonucleotide
ucuuagcaacauuuagaug

SEQ ID NO: 548859 - RNA, 19 nt, Artificial Sequence
  Description of Artificial Sequence: Synthetic oligonucleotide
ugguaauucuaaccagcug

SEQ ID NO: 548860 - RNA, 19 nt, Artificial Sequence
  Description of Artificial Sequence: Synthetic oligonucleotide
agcgaucgaggucacuucg

SEQ ID NO: 548861 - RNA, 19 nt, Artificial Sequence
  Description of Artificial Sequence: Synthetic oligonucleotide
aucaaugucucaaguuuac

SEQ ID NO: 548862 - RNA, 19 nt, Artificial Sequence
  Description of Artificial Sequence: Synthetic oligonucleotide
uccuucaccaauguuacau

SEQ ID NO: 548863 - RNA, 19 nt, Artificial Sequence
  Description of Artificial Sequence: Synthetic oligonucleotide
guuugauauagugcucugg

SEQ ID NO: 548864 - RNA, 19 nt, Artificial Sequence
  Description of Artificial Sequence: Synthetic oligonucleotide
cugucuuaauaugaauggg

SEQ ID NO: 548865 - RNA, 19 nt, Artificial Sequence
  Description of Artificial Sequence: Synthetic oligonucleotide
aauuaaacucuagcagcca

SEQ ID NO: 548866 - RNA, 19 nt, Artificial Sequence
  Description of Artificial Sequence: Synthetic oligonucleotide
aacuggauaugguuguaua

SEQ ID NO: 548867 - RNA, 19 nt, Artificial Sequence
  Description of Artificial Sequence: Synthetic oligonucleotide
gguaauucuaaccagcugu

SEQ ID NO: 548868 - RNA, 19 nt, Artificial Sequence
  Description of Artificial Sequence: Synthetic oligonucleotide
cuucucuuauaucuuagca

SEQ ID NO: 548869 - RNA, 19 nt, Artificial Sequence
  Description of Artificial Sequence: Synthetic oligonucleotide
agaucgaucugaucgcaca

SEQ ID NO: 548870 - RNA, 19 nt, Artificial Sequence
  Description of Artificial Sequence: Synthetic oligonucleotide
uacagagauggagaaauaa

SEQ ID NO: 548871 - RNA, 19 nt, Artificial Sequence
  Description of Artificial Sequence: Synthetic oligonucleotide
auaugaaugggaccgcuuu

SEQ ID NO: 548872 - RNA, 19 nt, Artificial Sequence
  Description of Artificial Sequence: Synthetic oligonucleotide
uugcuagaaaacuguacuc

SEQ ID NO: 548873 - RNA, 19 nt, Artificial Sequence
  Description of Artificial Sequence: Synthetic oligonucleotide
acucagucguccauauugc

SEQ ID NO: 548874 - RNA, 19 nt, Artificial Sequence
  Description of Artificial Sequence: Synthetic oligonucleotide
uuagugguggagccgcucu

SEQ ID NO: 548875 - RNA, 19 nt, Artificial Sequence
  Description of Artificial Sequence: Synthetic oligonucleotide
ucuccuuaagcuaguuuuc

SEQ ID NO: 548876 - RNA, 19 nt, Artificial Sequence
  Description of Artificial Sequence: Synthetic oligonucleotide
uugauauagugcucugggu

SEQ ID NO: 548877 - RNA, 19 nt, Artificial Sequence
  Description of Artificial Sequence: Synthetic oligonucleotide
uugcuugccaaguuuugcu

SEQ ID NO: 548878 - RNA, 19 nt, Artificial Sequence
  Description of Artificial Sequence: Synthetic oligonucleotide
uuaauaugaaugggaccgc

SEQ ID NO: 548879 - RNA, 19 nt, Artificial Sequence
  Description of Artificial Sequence: Synthetic oligonucleotide
uccuuaagcuaguuuucug

SEQ ID NO: 548880 - RNA, 19 nt, Artificial Sequence
  Description of Artificial Sequence: Synthetic oligonucleotide
agauccuaacacacguccc

SEQ ID NO: 548881 - RNA, 19 nt, Artificial Sequence
  Description of Artificial Sequence: Synthetic oligonucleotide
gacaaaucuaguugucuaa

SEQ ID NO: 548882 - RNA, 19 nt, Artificial Sequence
  Description of Artificial Sequence: Synthetic oligonucleotide
ggugauacaccaaaauccc

SEQ ID NO: 548883 - RNA, 19 nt, Artificial Sequence
  Description of Artificial Sequence: Synthetic oligonucleotide
gaaucacuaauguuaucaa

SEQ ID NO: 548884 - RNA, 19 nt, Artificial Sequence
  Description of Artificial Sequence: Synthetic oligonucleotide
ucuagguaggaauguaauu

SEQ ID NO: 548885 - RNA, 19 nt, Artificial Sequence
  Description of Artificial Sequence: Synthetic oligonucleotide
uaauucuagguaggaaugu

SEQ ID NO: 548886 - RNA, 19 nt, Artificial Sequence
  Description of Artificial Sequence: Synthetic oligonucleotide
acuagugcuccaaacuuag

SEQ ID NO: 548887 - RNA, 19 nt, Artificial Sequence
  Description of Artificial Sequence: Synthetic oligonucleotide
augaaugggaccgcuuuuc

SEQ ID NO: 548888 - RNA, 19 nt, Artificial Sequence
  Description of Artificial Sequence: Synthetic oligonucleotide
cucccuaugugugugacug

SEQ ID NO: 548889 - RNA, 19 nt, Artificial Sequence
  Description of Artificial Sequence: Synthetic oligonucleotide
guucuggggugacagauac

SEQ ID NO: 548890 - RNA, 19 nt, Artificial Sequence
  Description of Artificial Sequence: Synthetic oligonucleotide
aguccuaaccuuuccuugu

SEQ ID NO: 548891 - RNA, 19 nt, Artificial Sequence
  Description of Artificial Sequence: Synthetic oligonucleotide
guaucaugguaauucuaac

SEQ ID NO: 548892 - RNA, 19 nt, Artificial Sequence
  Description of Artificial Sequence: Synthetic oligonucleotide
ugacgcagucuccugugag

SEQ ID NO: 548893 - RNA, 19 nt, Artificial Sequence
  Description of Artificial Sequence: Synthetic oligonucleotide
uagagaucaaccgaagguu

SEQ ID NO: 548894 - RNA, 19 nt, Artificial Sequence
  Description of Artificial Sequence: Synthetic oligonucleotide
cucuagccaaaagcgaucg

SEQ ID NO: 548895 - RNA, 19 nt, Artificial Sequence
  Description of Artificial Sequence: Synthetic oligonucleotide
ugggacugauaaccaauca

SEQ ID NO: 548896 - RNA, 19 nt, Artificial Sequence
  Description of Artificial Sequence: Synthetic oligonucleotide
ucucgauugcgugacgcag

SEQ ID NO: 548897 - RNA, 19 nt, Artificial Sequence
  Description of Artificial Sequence: Synthetic oligonucleotide
ucagucguccauauugcua

SEQ ID NO: 548898 - RNA, 19 nt, Artificial Sequence
  Description of Artificial Sequence: Synthetic oligonucleotide
caaauggugauacaccaaa

SEQ ID NO: 548899 - RNA, 19 nt, Artificial Sequence
  Description of Artificial Sequence: Synthetic oligonucleotide
uaagauccuaacacacguc

SEQ ID NO: 548900 - RNA, 19 nt, Artificial Sequence
  Description of Artificial Sequence: Synthetic oligonucleotide
cuagguaggaauguaauua

SEQ ID NO: 548901 - RNA, 19 nt, Artificial Sequence
  Description of Artificial Sequence: Synthetic oligonucleotide
agacaacuggauaugguug

SEQ ID NO: 548902 - RNA, 19 nt, Artificial Sequence
  Description of Artificial Sequence: Synthetic oligonucleotide
ugaaugggaccgcuuuucu

SEQ ID NO: 548903 - RNA, 19 nt, Artificial Sequence
  Description of Artificial Sequence: Synthetic oligonucleotide
gacauagaucacugauuug

SEQ ID NO: 548904 - RNA, 19 nt, Artificial Sequence
  Description of Artificial Sequence: Synthetic oligonucleotide
auaggcucaauaccauccu

SEQ ID NO: 548905 - RNA, 19 nt, Artificial Sequence
  Description of Artificial Sequence: Synthetic oligonucleotide
aauucuagguaggaaugua

SEQ ID NO: 548906 - RNA, 19 nt, Artificial Sequence
  Description of Artificial Sequence: Synthetic oligonucleotide
aaaggcgaaugagacuucu

SEQ ID NO: 548907 - RNA, 19 nt, Artificial Sequence
  Description of Artificial Sequence: Synthetic oligonucleotide
ccgcuuuucuacuugagcc

SEQ ID NO: 548908 - RNA, 19 nt, Artificial Sequence
  Description of Artificial Sequence: Synthetic oligonucleotide
caguaucaaacuuagagau

SEQ ID NO: 548909 - RNA, 19 nt, Artificial Sequence
  Description of Artificial Sequence: Synthetic oligonucleotide
accgaaacaaauugaccaa

SEQ ID NO: 548910 - RNA, 19 nt, Artificial Sequence
  Description of Artificial Sequence: Synthetic oligonucleotide
auagaucacugauuugaau

SEQ ID NO: 548911 - RNA, 19 nt, Artificial Sequence
  Description of Artificial Sequence: Synthetic oligonucleotide
uuaguaguaggggugguuu

SEQ ID NO: 548912 - RNA, 19 nt, Artificial Sequence
  Description of Artificial Sequence: Synthetic oligonucleotide
ucucuagccaaaagcgauc

SEQ ID NO: 548913 - RNA, 19 nt, Artificial Sequence
  Description of Artificial Sequence: Synthetic oligonucleotide
auacgaaguacagauuccu

SEQ ID NO: 548914 - RNA, 19 nt, Artificial Sequence
  Description of Artificial Sequence: Synthetic oligonucleotide
aacugaaaucagaaucacu

SEQ ID NO: 548915 - RNA, 19 nt, Artificial Sequence
  Description of Artificial Sequence: Synthetic oligonucleotide
cacaauuauguuuagggau

SEQ ID NO: 548916 - RNA, 19 nt, Artificial Sequence
  Description of Artificial Sequence: Synthetic oligonucleotide
uuagaucgaucugaucgca

SEQ ID NO: 548917 - RNA, 19 nt, Artificial Sequence
  Description of Artificial Sequence: Synthetic oligonucleotide
uccugauuagauucuguuu

SEQ ID NO: 548918 - RNA, 19 nt, Artificial Sequence
  Description of Artificial Sequence: Synthetic oligonucleotide
gaguggaacagaaacaggu

SEQ ID NO: 548919 - RNA, 19 nt, Artificial Sequence
  Description of Artificial Sequence: Synthetic oligonucleotide
ucugaucgcacaaccgcuc

SEQ ID NO: 548920 - RNA, 19 nt, Artificial Sequence
  Description of Artificial Sequence: Synthetic oligonucleotide
ggcaauacgaaguacagau

SEQ ID NO: 548921 - RNA, 19 nt, Artificial Sequence
  Description of Artificial Sequence: Synthetic oligonucleotide
auaaagcccaaaagucuuc

SEQ ID NO: 548922 - RNA, 19 nt, Artificial Sequence
  Description of Artificial Sequence: Synthetic oligonucleotide
acuucgucucugcuguuug

SEQ ID NO: 548923 - RNA, 19 nt, Artificial Sequence
  Description of Artificial Sequence: Synthetic oligonucleotide
cuuguauacccucccuaug

SEQ ID NO: 548924 - RNA, 19 nt, Artificial Sequence
  Description of Artificial Sequence: Synthetic oligonucleotide
ucaugaauuuuaacauauu

SEQ ID NO: 548925 - RNA, 19 nt, Artificial Sequence
  Description of Artificial Sequence: Synthetic oligonucleotide
ccuaagacugaaaacugug

SEQ ID NO: 548926 - RNA, 19 nt, Artificial Sequence
  Description of Artificial Sequence: Synthetic oligonucleotide
uggacgaggcuuugguuca

SEQ ID NO: 548927 - RNA, 19 nt, Artificial Sequence
  Description of Artificial Sequence: Synthetic oligonucleotide
aagacccuauaagaagaca

SEQ ID NO: 548928 - RNA, 19 nt, Artificial Sequence
  Description of Artificial Sequence: Synthetic oligonucleotide
gccacaucaguuuaacuac

SEQ ID NO: 548929 - RNA, 19 nt, Artificial Sequence
  Description of Artificial Sequence: Synthetic oligonucleotide
ugauugggauaguggacac

SEQ ID NO: 548930 - RNA, 19 nt, Artificial Sequence
  Description of Artificial Sequence: Synthetic oligonucleotide
cuccugugagaauacucag

SEQ ID NO: 548931 - RNA, 19 nt, Artificial Sequence
  Description of Artificial Sequence: Synthetic oligonucleotide
cuaagguaacagaaaugca

SEQ ID NO: 548932 - RNA, 19 nt, Artificial Sequence
  Description of Artificial Sequence: Synthetic oligonucleotide
uacucaggugucuucuuaa

SEQ ID NO: 548933 - RNA, 19 nt, Artificial Sequence
  Description of Artificial Sequence: Synthetic oligonucleotide
uaugaaugggaccgcuuuu

SEQ ID NO: 548934 - RNA, 19 nt, Artificial Sequence
  Description of Artificial Sequence: Synthetic oligonucleotide
aucgaucugaucgcacaac

SEQ ID NO: 548935 - RNA, 19 nt, Artificial Sequence
  Description of Artificial Sequence: Synthetic oligonucleotide
ggcauuaaauuacuagaca

SEQ ID NO: 548936 - RNA, 19 nt, Artificial Sequence
  Description of Artificial Sequence: Synthetic oligonucleotide
uauaguccacaauuauguu

SEQ ID NO: 548937 - RNA, 19 nt, Artificial Sequence
  Description of Artificial Sequence: Synthetic oligonucleotide
ggauuaguaguaggggugg

SEQ ID NO: 548938 - RNA, 19 nt, Artificial Sequence
  Description of Artificial Sequence: Synthetic oligonucleotide
uguuacaaugcgggccagg

SEQ ID NO: 548939 - RNA, 19 nt, Artificial Sequence
  Description of Artificial Sequence: Synthetic oligonucleotide
gagaucaaccgaagguuug

SEQ ID NO: 548940 - RNA, 19 nt, Artificial Sequence
  Description of Artificial Sequence: Synthetic oligonucleotide
gggacugauaaccaaucac

SEQ ID NO: 548941 - RNA, 19 nt, Artificial Sequence
  Description of Artificial Sequence: Synthetic oligonucleotide
aagugaguagucacagcca

SEQ ID NO: 548942 - RNA, 19 nt, Artificial Sequence
  Description of Artificial Sequence: Synthetic oligonucleotide
uuccugcuaagguaacaga

SEQ ID NO: 548943 - RNA, 19 nt, Artificial Sequence
  Description of Artificial Sequence: Synthetic oligonucleotide
uaguaggggugguuuccgg

SEQ ID NO: 548944 - RNA, 19 nt, Artificial Sequence
  Description of Artificial Sequence: Synthetic oligonucleotide
uacuaauucuagguaggaa

SEQ ID NO: 548945 - RNA, 19 nt, Artificial Sequence
  Description of Artificial Sequence: Synthetic oligonucleotide
guaauuagccaucguccuc

SEQ ID NO: 548946 - RNA, 19 nt, Artificial Sequence
  Description of Artificial Sequence: Synthetic oligonucleotide
cucucaccagcaaaacaug

SEQ ID NO: 548947 - RNA, 19 nt, Artificial Sequence
  Description of Artificial Sequence: Synthetic oligonucleotide
aggacaaaucuaguugucu

SEQ ID NO: 548948 - RNA, 19 nt, Artificial Sequence
  Description of Artificial Sequence: Synthetic oligonucleotide
augguaauucuaaccagcu

SEQ ID NO: 548949 - RNA, 19 nt, Artificial Sequence
  Description of Artificial Sequence: Synthetic oligonucleotide
cacucugcuuggacgaggc

SEQ ID NO: 548950 - RNA, 19 nt, Artificial Sequence
  Description of Artificial Sequence: Synthetic oligonucleotide
aaauggugauacaccaaaa

SEQ ID NO: 548951 - RNA, 19 nt, Artificial Sequence
  Description of Artificial Sequence: Synthetic oligonucleotide
cuagugcuccaaacuuagg

SEQ ID NO: 548952 - RNA, 19 nt, Artificial Sequence
  Description of Artificial Sequence: Synthetic oligonucleotide
uagaucgaucugaucgcac

SEQ ID NO: 548953 - RNA, 19 nt, Artificial Sequence
  Description of Artificial Sequence: Synthetic oligonucleotide
auguaauuaugguguuaca

SEQ ID NO: 548954 - RNA, 19 nt, Artificial Sequence
  Description of Artificial Sequence: Synthetic oligonucleotide
agacucucaccagcaaaac

SEQ ID NO: 548955 - RNA, 19 nt, Artificial Sequence
  Description of Artificial Sequence: Synthetic oligonucleotide
auacuaauucuagguagga

SEQ ID NO: 548956 - RNA, 19 nt, Artificial Sequence
  Description of Artificial Sequence: Synthetic oligonucleotide
acaaauugaccaauauaaa

SEQ ID NO: 548957 - RNA, 19 nt, Artificial Sequence
  Description of Artificial Sequence: Synthetic oligonucleotide
gucuaaaagacaauucacu

SEQ ID NO: 548958 - RNA, 19 nt, Artificial Sequence
  Description of Artificial Sequence: Synthetic oligonucleotide
ucgauugcgugacgcaguc

SEQ ID NO: 548959 - RNA, 19 nt, Artificial Sequence
  Description of Artificial Sequence: Synthetic oligonucleotide
gacccuauaagaagacaca

SEQ ID NO: 548960 - RNA, 19 nt, Artificial Sequence
  Description of Artificial Sequence: Synthetic oligonucleotide
auugcgugacgcagucucc

SEQ ID NO: 548961 - RNA, 19 nt, Artificial Sequence
  Description of Artificial Sequence: Synthetic oligonucleotide
auacaccaaaaucccaauu

SEQ ID NO: 548962 - RNA, 19 nt, Artificial Sequence
  Description of Artificial Sequence: Synthetic oligonucleotide
ggcaaauguguguaucaug

SEQ ID NO: 548963 - RNA, 19 nt, Artificial Sequence
  Description of Artificial Sequence: Synthetic oligonucleotide
guaguaggggugguuuccg

SEQ ID NO: 548964 - RNA, 19 nt, Artificial Sequence
  Description of Artificial Sequence: Synthetic oligonucleotide
aacuagugcuccaaacuua

SEQ ID NO: 548965 - RNA, 19 nt, Artificial Sequence
  Description of Artificial Sequence: Synthetic oligonucleotide
cuacuugagccauuuguaa

SEQ ID NO: 548966 - RNA, 19 nt, Artificial Sequence
  Description of Artificial Sequence: Synthetic oligonucleotide
aauaugaaugggaccgcuu

SEQ ID NO: 548967 - RNA, 19 nt, Artificial Sequence
  Description of Artificial Sequence: Synthetic oligonucleotide
uuacaaugcgggccaggaa

SEQ ID NO: 548968 - RNA, 19 nt, Artificial Sequence
  Description of Artificial Sequence: Synthetic oligonucleotide
cucuuauaucuuagcaaca

SEQ ID NO: 548969 - RNA, 19 nt, Artificial Sequence
  Description of Artificial Sequence: Synthetic oligonucleotide
guuacaaugcgggccagga

SEQ ID NO: 548970 - RNA, 19 nt, Artificial Sequence
  Description of Artificial Sequence: Synthetic oligonucleotide
aaacuucagugcaguccac

SEQ ID NO: 548971 - RNA, 19 nt, Artificial Sequence
  Description of Artificial Sequence: Synthetic oligonucleotide
gaucgaucugaucgcacaa

SEQ ID NO: 548972 - RNA, 19 nt, Artificial Sequence
  Description of Artificial Sequence: Synthetic oligonucleotide
ggauccuucaccaauguua

SEQ ID NO: 548973 - RNA, 19 nt, Artificial Sequence
  Description of Artificial Sequence: Synthetic oligonucleotide
uaauguuaucaaggaggga

SEQ ID NO: 548974 - RNA, 19 nt, Artificial Sequence
  Description of Artificial Sequence: Synthetic oligonucleotide
uggcaauacgaaguacaga

SEQ ID NO: 548975 - RNA, 19 nt, Artificial Sequence
  Description of Artificial Sequence: Synthetic oligonucleotide
gggauuaguaguaggggug

SEQ ID NO: 548976 - RNA, 19 nt, Artificial Sequence
  Description of Artificial Sequence: Synthetic oligonucleotide
cauagaucacugauuugaa

SEQ ID NO: 548977 - RNA, 19 nt, Artificial Sequence
  Description of Artificial Sequence: Synthetic oligonucleotide
gacgcagucuccugugaga

SEQ ID NO: 548978 - RNA, 19 nt, Artificial Sequence
  Description of Artificial Sequence: Synthetic oligonucleotide
uuauagccacuguucuuau

SEQ ID NO: 548979 - RNA, 19 nt, Artificial Sequence
  Description of Artificial Sequence: Synthetic oligonucleotide
uuuuagugguggagccgcu

SEQ ID NO: 548980 - RNA, 19 nt, Artificial Sequence
  Description of Artificial Sequence: Synthetic oligonucleotide
gagacugccuuggcaauac

SEQ ID NO: 548981 - RNA, 19 nt, Artificial Sequence
  Description of Artificial Sequence: Synthetic oligonucleotide
uccuaaccuuuccuuguau

SEQ ID NO: 548982 - RNA, 19 nt, Artificial Sequence
  Description of Artificial Sequence: Synthetic oligonucleotide
uaauaacacuaagauccua

SEQ ID NO: 548983 - RNA, 19 nt, Artificial Sequence
  Description of Artificial Sequence: Synthetic oligonucleotide
aaugcgggccaggaacaca

SEQ ID NO: 548984 - RNA, 19 nt, Artificial Sequence
  Description of Artificial Sequence: Synthetic oligonucleotide
auaacucuuaauacuuguu

SEQ ID NO: 548985 - RNA, 19 nt, Artificial Sequence
  Description of Artificial Sequence: Synthetic oligonucleotide
auacccucccuaugugugu

SEQ ID NO: 548986 - RNA, 19 nt, Artificial Sequence
  Description of Artificial Sequence: Synthetic oligonucleotide
agucguccauauugcuauc

SEQ ID NO: 548987 - RNA, 19 nt, Artificial Sequence
  Description of Artificial Sequence: Synthetic oligonucleotide
ucguccauauugcuaucuu

SEQ ID NO: 548988 - RNA, 19 nt, Artificial Sequence
  Description of Artificial Sequence: Synthetic oligonucleotide
cugugccuuaacuuuauua

SEQ ID NO: 548989 - RNA, 19 nt, Artificial Sequence
  Description of Artificial Sequence: Synthetic oligonucleotide
gcuguuacaaugcgggcca

SEQ ID NO: 548990 - RNA, 19 nt, Artificial Sequence
  Description of Artificial Sequence: Synthetic oligonucleotide
gagguugcuagaaaacugu

SEQ ID NO: 548991 - RNA, 19 nt, Artificial Sequence
  Description of Artificial Sequence: Synthetic oligonucleotide
ugcuugccaaguuuugcuu

SEQ ID NO: 548992 - RNA, 19 nt, Artificial Sequence
  Description of Artificial Sequence: Synthetic oligonucleotide
ucgucucugcuguuuguuc

SEQ ID NO: 548993 - RNA, 19 nt, Artificial Sequence
  Description of Artificial Sequence: Synthetic oligonucleotide
gugagaauacucagguguc

SEQ ID NO: 548994 - RNA, 19 nt, Artificial Sequence
  Description of Artificial Sequence: Synthetic oligonucleotide
ucgaggucacuucgucucu

SEQ ID NO: 548995 - RNA, 19 nt, Artificial Sequence
  Description of Artificial Sequence: Synthetic oligonucleotide
gaaguccuaaccuuuccuu

SEQ ID NO: 548996 - RNA, 19 nt, Artificial Sequence
  Description of Artificial Sequence: Synthetic oligonucleotide
gacaaaggcgaaugagacu

SEQ ID NO: 548997 - RNA, 19 nt, Artificial Sequence
  Description of Artificial Sequence: Synthetic oligonucleotide
cauaugugauacuaccuau

SEQ ID NO: 548998 - RNA, 19 nt, Artificial Sequence
  Description of Artificial Sequence: Synthetic oligonucleotide
aucugaucgcacaaccgcu

SEQ ID NO: 548999 - RNA, 19 nt, Artificial Sequence
  Description of Artificial Sequence: Synthetic oligonucleotide
uaggcucaauaccauccuu

SEQ ID NO: 549000 - RNA, 19 nt, Artificial Sequence
  Description of Artificial Sequence: Synthetic oligonucleotide
cacaagagacugccuuggc

SEQ ID NO: 549001 - RNA, 19 nt, Artificial Sequence
  Description of Artificial Sequence: Synthetic oligonucleotide
auaugugauacuaccuauu

SEQ ID NO: 549002 - RNA, 19 nt, Artificial Sequence
  Description of Artificial Sequence: Synthetic oligonucleotide
ugcuuggacgaggcuuugg

SEQ ID NO: 549003 - RNA, 19 nt, Artificial Sequence
  Description of Artificial Sequence: Synthetic oligonucleotide
aaccuccugauuagauucu

SEQ ID NO: 549004 - RNA, 19 nt, Artificial Sequence
  Description of Artificial Sequence: Synthetic oligonucleotide
aguacagcauaaagauaca

SEQ ID NO: 549005 - RNA, 19 nt, Artificial Sequence
  Description of Artificial Sequence: Synthetic oligonucleotide
cagcuguuacaaugcgggc

SEQ ID NO: 549006 - RNA, 19 nt, Artificial Sequence
  Description of Artificial Sequence: Synthetic oligonucleotide
ggacaaaucuaguugucua

SEQ ID NO: 549007 - RNA, 19 nt, Artificial Sequence
  Description of Artificial Sequence: Synthetic oligonucleotide
gggauaguggacacacuag

SEQ ID NO: 549008 - RNA, 19 nt, Artificial Sequence
  Description of Artificial Sequence: Synthetic oligonucleotide
acgaggcuuugguucagcu

SEQ ID NO: 549009 - RNA, 19 nt, Artificial Sequence
  Description of Artificial Sequence: Synthetic oligonucleotide
cauggggaagacccuauaa

SEQ ID NO: 549010 - RNA, 19 nt, Artificial Sequence
  Description of Artificial Sequence: Synthetic oligonucleotide
uuuagugguggagccgcuc

SEQ ID NO: 549011 - RNA, 19 nt, Artificial Sequence
  Description of Artificial Sequence: Synthetic oligonucleotide
gaaugggaccgcuuuucua

SEQ ID NO: 549012 - RNA, 19 nt, Artificial Sequence
  Description of Artificial Sequence: Synthetic oligonucleotide
ugguuuccgguuccacagu

SEQ ID NO: 549013 - RNA, 19 nt, Artificial Sequence
  Description of Artificial Sequence: Synthetic oligonucleotide
uccugcagaguggaacaga

SEQ ID NO: 549014 - RNA, 19 nt, Artificial Sequence
  Description of Artificial Sequence: Synthetic oligonucleotide
gauagccacaucaguuuaa

SEQ ID NO: 549015 - RNA, 19 nt, Artificial Sequence
  Description of Artificial Sequence: Synthetic oligonucleotide
auuaguaguaggggugguu

SEQ ID NO: 549016 - RNA, 19 nt, Artificial Sequence
  Description of Artificial Sequence: Synthetic oligonucleotide
ggacugauaaccaaucacu

SEQ ID NO: 549017 - RNA, 19 nt, Artificial Sequence
  Description of Artificial Sequence: Synthetic oligonucleotide
auacuguggaaaggcaaau

SEQ ID NO: 549018 - RNA, 19 nt, Artificial Sequence
  Description of Artificial Sequence: Synthetic oligonucleotide
aucugcggguucuggggug

SEQ ID NO: 549019 - RNA, 19 nt, Artificial Sequence
  Description of Artificial Sequence: Synthetic oligonucleotide
ugcgugacgcagucuccug

SEQ ID NO: 549020 - RNA, 19 nt, Artificial Sequence
  Description of Artificial Sequence: Synthetic oligonucleotide
ucgccaucuuagaucgauc

SEQ ID NO: 549021 - RNA, 19 nt, Artificial Sequence
  Description of Artificial Sequence: Synthetic oligonucleotide
gaucgaggucacuucgucu

SEQ ID NO: 549022 - RNA, 19 nt, Artificial Sequence
  Description of Artificial Sequence: Synthetic oligonucleotide
ggugguuuccgguuccaca

SEQ ID NO: 549023 - RNA, 19 nt, Artificial Sequence
  Description of Artificial Sequence: Synthetic oligonucleotide
uugcgugacgcagucuccu

SEQ ID NO: 549024 - RNA, 19 nt, Artificial Sequence
  Description of Artificial Sequence: Synthetic oligonucleotide
uacccucccuaugugugug

SEQ ID NO: 549025 - RNA, 19 nt, Artificial Sequence
  Description of Artificial Sequence: Synthetic oligonucleotide
acuaccuauucaauuuauu

SEQ ID NO: 549026 - RNA, 19 nt, Artificial Sequence
  Description of Artificial Sequence: Synthetic oligonucleotide
cagucguccauauugcuau

SEQ ID NO: 549027 - RNA, 19 nt, Artificial Sequence
  Description of Artificial Sequence: Synthetic oligonucleotide
uucuggggugacagauacu

SEQ ID NO: 549028 - RNA, 19 nt, Artificial Sequence
  Description of Artificial Sequence: Synthetic oligonucleotide
cuagacaacuggauauggu

SEQ ID NO: 549029 - RNA, 19 nt, Artificial Sequence
  Description of Artificial Sequence: Synthetic oligonucleotide
ucacacucagucguccaua

SEQ ID NO: 549030 - RNA, 19 nt, Artificial Sequence
  Description of Artificial Sequence: Synthetic oligonucleotide
gauugggauaguggacaca

SEQ ID NO: 549031 - RNA, 19 nt, Artificial Sequence
  Description of Artificial Sequence: Synthetic oligonucleotide
uugagccauuuguaaccaa

SEQ ID NO: 549032 - RNA, 19 nt, Artificial Sequence
  Description of Artificial Sequence: Synthetic oligonucleotide
ccacaauuauguuuaggga

SEQ ID NO: 549033 - RNA, 19 nt, Artificial Sequence
  Description of Artificial Sequence: Synthetic oligonucleotide
guuuucacacucagucguc

SEQ ID NO: 549034 - RNA, 19 nt, Artificial Sequence
  Description of Artificial Sequence: Synthetic oligonucleotide
uucgucucugcuguuuguu

SEQ ID NO: 549035 - RNA, 19 nt, Artificial Sequence
  Description of Artificial Sequence: Synthetic oligonucleotide
guauacccucccuaugugu

SEQ ID NO: 549036 - RNA, 19 nt, Artificial Sequence
  Description of Artificial Sequence: Synthetic oligonucleotide
gucucgauugcgugacgca

SEQ ID NO: 549037 - RNA, 19 nt, Artificial Sequence
  Description of Artificial Sequence: Synthetic oligonucleotide
gugauacaccaaaauccca

SEQ ID NO: 549038 - RNA, 19 nt, Artificial Sequence
  Description of Artificial Sequence: Synthetic oligonucleotide
aggaacacaucugcggguu

SEQ ID NO: 549039 - RNA, 19 nt, Artificial Sequence
  Description of Artificial Sequence: Synthetic oligonucleotide
cgaucugaucgcacaaccg

SEQ ID NO: 549040 - RNA, 19 nt, Artificial Sequence
  Description of Artificial Sequence: Synthetic oligonucleotide
accuccugauuagauucug

SEQ ID NO: 549041 - RNA, 19 nt, Artificial Sequence
  Description of Artificial Sequence: Synthetic oligonucleotide
gcgaaugagacuucucuua

SEQ ID NO: 549042 - RNA, 19 nt, Artificial Sequence
  Description of Artificial Sequence: Synthetic oligonucleotide
aggcucaauaccauccuua

SEQ ID NO: 549043 - RNA, 19 nt, Artificial Sequence
  Description of Artificial Sequence: Synthetic oligonucleotide
gauaaccaaucacuaucuu

SEQ ID NO: 549044 - RNA, 19 nt, Artificial Sequence
  Description of Artificial Sequence: Synthetic oligonucleotide
gguuuccgguuccacaguc

SEQ ID NO: 549045 - RNA, 19 nt, Artificial Sequence
  Description of Artificial Sequence: Synthetic oligonucleotide
ggcucaauaccauccuuaa

SEQ ID NO: 549046 - RNA, 19 nt, Artificial Sequence
  Description of Artificial Sequence: Synthetic oligonucleotide
gacagauacuguaauucuu

SEQ ID NO: 549047 - RNA, 19 nt, Artificial Sequence
  Description of Artificial Sequence: Synthetic oligonucleotide
gaacacaucugcggguucu

SEQ ID NO: 549048 - RNA, 19 nt, Artificial Sequence
  Description of Artificial Sequence: Synthetic oligonucleotide
gugugugacugcgucucug

SEQ ID NO: 549049 - RNA, 19 nt, Artificial Sequence
  Description of Artificial Sequence: Synthetic oligonucleotide
auagugcucuggguuggca

SEQ ID NO: 549050 - RNA, 19 nt, Artificial Sequence
  Description of Artificial Sequence: Synthetic oligonucleotide
gacgaggcuuugguucagc

SEQ ID NO: 549051 - RNA, 19 nt, Artificial Sequence
  Description of Artificial Sequence: Synthetic oligonucleotide
agccaggcauuaaauuacu

SEQ ID NO: 549052 - RNA, 19 nt, Artificial Sequence
  Description of Artificial Sequence: Synthetic oligonucleotide
ccugauuagauucuguuuu

SEQ ID NO: 549053 - RNA, 19 nt, Artificial Sequence
  Description of Artificial Sequence: Synthetic oligonucleotide
uagcaacauuuagauggaa

SEQ ID NO: 549054 - RNA, 19 nt, Artificial Sequence
  Description of Artificial Sequence: Synthetic oligonucleotide
cugcgucucuguuuucaca

SEQ ID NO: 549055 - RNA, 19 nt, Artificial Sequence
  Description of Artificial Sequence: Synthetic oligonucleotide
ccagaccgaaacaaauuga

SEQ ID NO: 549056 - RNA, 19 nt, Artificial Sequence
  Description of Artificial Sequence: Synthetic oligonucleotide
gguggagccgcucuuugua

SEQ ID NO: 549057 - RNA, 19 nt, Artificial Sequence
  Description of Artificial Sequence: Synthetic oligonucleotide
cagucucgauugcgugacg

SEQ ID NO: 549058 - RNA, 19 nt, Artificial Sequence
  Description of Artificial Sequence: Synthetic oligonucleotide
augguuguauaaagcccaa

SEQ ID NO: 549059 - RNA, 19 nt, Artificial Sequence
  Description of Artificial Sequence: Synthetic oligonucleotide
guguaucaugguaauucua

SEQ ID NO: 549060 - RNA, 19 nt, Artificial Sequence
  Description of Artificial Sequence: Synthetic oligonucleotide
ccagucucgauugcgugac

SEQ ID NO: 549061 - RNA, 19 nt, Artificial Sequence
  Description of Artificial Sequence: Synthetic oligonucleotide
acaacuggauaugguugua

SEQ ID NO: 549062 - RNA, 19 nt, Artificial Sequence
  Description of Artificial Sequence: Synthetic oligonucleotide
guccuaaccuuuccuugua

SEQ ID NO: 549063 - RNA, 19 nt, Artificial Sequence
  Description of Artificial Sequence: Synthetic oligonucleotide
gauuaguaguagggguggu

SEQ ID NO: 549064 - RNA, 19 nt, Artificial Sequence
  Description of Artificial Sequence: Synthetic oligonucleotide
ggaccgcuuuucuacuuga

SEQ ID NO: 549065 - RNA, 19 nt, Artificial Sequence
  Description of Artificial Sequence: Synthetic oligonucleotide
cucgauugcgugacgcagu

SEQ ID NO: 549066 - RNA, 19 nt, Artificial Sequence
  Description of Artificial Sequence: Synthetic oligonucleotide
acacucagucguccauauu

SEQ ID NO: 549067 - RNA, 19 nt, Artificial Sequence
  Description of Artificial Sequence: Synthetic oligonucleotide
ggugacagauacuguaauu

SEQ ID NO: 549068 - RNA, 19 nt, Artificial Sequence
  Description of Artificial Sequence: Synthetic oligonucleotide
cucagucguccauauugcu

SEQ ID NO: 549069 - RNA, 19 nt, Artificial Sequence
  Description of Artificial Sequence: Synthetic oligonucleotide
cuccuuaagcuaguuuucu

SEQ ID NO: 549070 - RNA, 19 nt, Artificial Sequence
  Description of Artificial Sequence: Synthetic oligonucleotide
ccacaucaguuuaacuaca

SEQ ID NO: 549071 - RNA, 19 nt, Artificial Sequence
  Description of Artificial Sequence: Synthetic oligonucleotide
acccucccuauguguguga

SEQ ID NO: 549072 - RNA, 19 nt, Artificial Sequence
  Description of Artificial Sequence: Synthetic oligonucleotide
cccaccuguucuguagagg

SEQ ID NO: 549073 - RNA, 19 nt, Artificial Sequence
  Description of Artificial Sequence: Synthetic oligonucleotide
gcccaccuguucuguagag

SEQ ID NO: 549074 - RNA, 19 nt, Artificial Sequence
  Description of Artificial Sequence: Synthetic oligonucleotide
gcuuggacgaggcuuuggu

SEQ ID NO: 549075 - RNA, 19 nt, Artificial Sequence
  Description of Artificial Sequence: Synthetic oligonucleotide
gucgccaucuuagaucgau

SEQ ID NO: 549076 - RNA, 19 nt, Artificial Sequence
  Description of Artificial Sequence: Synthetic oligonucleotide
cuuaaacaacaaaccuauu

SEQ ID NO: 549077 - RNA, 19 nt, Artificial Sequence
  Description of Artificial Sequence: Synthetic oligonucleotide
ggaauguaauuaugguguu

SEQ ID NO: 549078 - RNA, 19 nt, Artificial Sequence
  Description of Artificial Sequence: Synthetic oligonucleotide
gucguccauauugcuaucu

SEQ ID NO: 549079 - RNA, 19 nt, Artificial Sequence
  Description of Artificial Sequence: Synthetic oligonucleotide
agcuaguuuucuggccuuu

SEQ ID NO: 549080 - RNA, 19 nt, Artificial Sequence
  Description of Artificial Sequence: Synthetic oligonucleotide
cgugacgcagucuccugug

SEQ ID NO: 549081 - RNA, 19 nt, Artificial Sequence
  Description of Artificial Sequence: Synthetic oligonucleotide
cuuggacgaggcuuugguu

SEQ ID NO: 549082 - RNA, 19 nt, Artificial Sequence
  Description of Artificial Sequence: Synthetic oligonucleotide
caucugcggguucuggggu

SEQ ID NO: 549083 - RNA, 19 nt, Artificial Sequence
  Description of Artificial Sequence: Synthetic oligonucleotide
ccccuauauucuccuuaag

SEQ ID NO: 549084 - RNA, 19 nt, Artificial Sequence
  Description of Artificial Sequence: Synthetic oligonucleotide
ccgaagguuugcuugccaa

SEQ ID NO: 549085 - RNA, 19 nt, Artificial Sequence
  Description of Artificial Sequence: Synthetic oligonucleotide
gugcauggggaagacccua

SEQ ID NO: 549086 - RNA, 19 nt, Artificial Sequence
  Description of Artificial Sequence: Synthetic oligonucleotide
cccaaaagucuucaacagu

SEQ ID NO: 549087 - RNA, 19 nt, Artificial Sequence
  Description of Artificial Sequence: Synthetic oligonucleotide
cugcuuggacgaggcuuug

SEQ ID NO: 549088 - RNA, 19 nt, Artificial Sequence
  Description of Artificial Sequence: Synthetic oligonucleotide
gggaucacacagacauaga

SEQ ID NO: 549089 - RNA, 19 nt, Artificial Sequence
  Description of Artificial Sequence: Synthetic oligonucleotide
gcaaagcuuuguaguuaca

SEQ ID NO: 549090 - RNA, 19 nt, Artificial Sequence
  Description of Artificial Sequence: Synthetic oligonucleotide
ggcaaccuccugauuagau

SEQ ID NO: 549091 - RNA, 19 nt, Artificial Sequence
  Description of Artificial Sequence: Synthetic oligonucleotide
cccucccuaugugugugac

SEQ ID NO: 549092 - RNA, 19 nt, Artificial Sequence
  Description of Artificial Sequence: Synthetic oligonucleotide
agucgccaucuuagaucga

SEQ ID NO: 549093 - RNA, 19 nt, Artificial Sequence
  Description of Artificial Sequence: Synthetic oligonucleotide
gcgugacgcagucuccugu

SEQ ID NO: 549094 - RNA, 19 nt, Artificial Sequence
  Description of Artificial Sequence: Synthetic oligonucleotide
ccuccugauuagauucugu

SEQ ID NO: 549095 - RNA, 19 nt, Artificial Sequence
  Description of Artificial Sequence: Synthetic oligonucleotide
gcgucucuguuuucacacu

SEQ ID NO: 549096 - RNA, 19 nt, Artificial Sequence
  Description of Artificial Sequence: Synthetic oligonucleotide
gcaauacgaaguacagauu

SEQ ID NO: 549097 - RNA, 19 nt, Artificial Sequence
  Description of Artificial Sequence: Synthetic oligonucleotide
ccgaaacaaauugaccaau

SEQ ID NO: 549098 - RNA, 19 nt, Artificial Sequence
  Description of Artificial Sequence: Synthetic oligonucleotide
caucguccuccccguuugu

SEQ ID NO: 549099 - RNA, 19 nt, Artificial Sequence
  Description of Artificial Sequence: Synthetic oligonucleotide
cguccuccccguuuguucu

SEQ ID NO: 549100 - RNA, 19 nt, Artificial Sequence
  Description of Artificial Sequence: Synthetic oligonucleotide
gcgaucgaggucacuucgu

SEQ ID NO: 549101 - RNA, 19 nt, Artificial Sequence
  Description of Artificial Sequence: Synthetic oligonucleotide
ccucccuaugugugugacu

SEQ ID NO: 549102 - RNA, 19 nt, Artificial Sequence
  Description of Artificial Sequence: Synthetic oligonucleotide
cgguuccacagucgccauc

SEQ ID NO: 549103 - RNA, 19 nt, Artificial Sequence
  Description of Artificial Sequence: Synthetic oligonucleotide
ccgcucuuuguagcugugu

SEQ ID NO: 549104 - RNA, 19 nt, Artificial Sequence
  Description of Artificial Sequence: Synthetic oligonucleotide
ccgguuccacagucgccau

SEQ ID NO: 549105 - RNA, 19 nt, Artificial Sequence
  Description of Artificial Sequence: Synthetic oligonucleotide
cgauugcgugacgcagucu

SEQ ID NO: 549106 - RNA, 19 nt, Artificial Sequence
  Description of Artificial Sequence: Synthetic oligonucleotide
auagaaugaaaauaagugc

SEQ ID NO: 549107 - RNA, 19 nt, Artificial Sequence
  Description of Artificial Sequence: Synthetic oligonucleotide
aaguguacuccucauaggg

SEQ ID NO: 549108 - RNA, 19 nt, Artificial Sequence
  Description of Artificial Sequence: Synthetic oligonucleotide
aauaagauaaaaugacaca

SEQ ID NO: 549109 - RNA, 19 nt, Artificial Sequence
  Description of Artificial Sequence: Synthetic oligonucleotide
ugaacauggagcaacuacg

SEQ ID NO: 549110 - RNA, 19 nt, Artificial Sequence
  Description of Artificial Sequence: Synthetic oligonucleotide
ugaacgaugggcaucuugg

SEQ ID NO: 549111 - RNA, 19 nt, Artificial Sequence
  Description of Artificial Sequence: Synthetic oligonucleotide
agagagucuauccggaugc

SEQ ID NO: 549112 - RNA, 19 nt, Artificial Sequence
  Description of Artificial Sequence: Synthetic oligonucleotide
gaauaagauaaaaugacac

SEQ ID NO: 549113 - RNA, 19 nt, Artificial Sequence
  Description of Artificial Sequence: Synthetic oligonucleotide
gugaaaucacuuuugaacc

SEQ ID NO: 549114 - RNA, 19 nt, Artificial Sequence
  Description of Artificial Sequence: Synthetic oligonucleotide
acauggagcaacuacgggg

SEQ ID NO: 549115 - RNA, 19 nt, Artificial Sequence
  Description of Artificial Sequence: Synthetic oligonucleotide
ugacacaaacaaaacaagc

SEQ ID NO: 549116 - RNA, 19 nt, Artificial Sequence
  Description of Artificial Sequence: Synthetic oligonucleotide
cauacuauucauauuuuac

SEQ ID NO: 549117 - RNA, 19 nt, Artificial Sequence
  Description of Artificial Sequence: Synthetic oligonucleotide
caggcaacaggucaaaucg

SEQ ID NO: 549118 - RNA, 19 nt, Artificial Sequence
  Description of Artificial Sequence: Synthetic oligonucleotide
uccuauuuuaauacaugag

SEQ ID NO: 549119 - RNA, 19 nt, Artificial Sequence
  Description of Artificial Sequence: Synthetic oligonucleotide
auacuauucauauuuuaca

SEQ ID NO: 549120 - RNA, 19 nt, Artificial Sequence
  Description of Artificial Sequence: Synthetic oligonucleotide
uuuauuugaucuacuagau

SEQ ID NO: 549121 - RNA, 19 nt, Artificial Sequence
  Description of Artificial Sequence: Synthetic oligonucleotide
ugugcauucacauuccuau

SEQ ID NO: 549122 - RNA, 19 nt, Artificial Sequence
  Description of Artificial Sequence: Synthetic oligonucleotide
uggcauagaaugaaaauaa

SEQ ID NO: 549123 - RNA, 19 nt, Artificial Sequence
  Description of Artificial Sequence: Synthetic oligonucleotide
gaacuuagcucccuagccg

SEQ ID NO: 549124 - RNA, 19 nt, Artificial Sequence
  Description of Artificial Sequence: Synthetic oligonucleotide
ugcaaugauugucaagugc

SEQ ID NO: 549125 - RNA, 19 nt, Artificial Sequence
  Description of Artificial Sequence: Synthetic oligonucleotide
uugucaagugcuaaugcug

SEQ ID NO: 549126 - RNA, 19 nt, Artificial Sequence
  Description of Artificial Sequence: Synthetic oligonucleotide
ucacuuuugaacccuagaa

SEQ ID NO: 549127 - RNA, 19 nt, Artificial Sequence
  Description of Artificial Sequence: Synthetic oligonucleotide
aguauggcuauagauagag

SEQ ID NO: 549128 - RNA, 19 nt, Artificial Sequence
  Description of Artificial Sequence: Synthetic oligonucleotide
agcuaaauuuccccggaac

SEQ ID NO: 549129 - RNA, 19 nt, Artificial Sequence
  Description of Artificial Sequence: Synthetic oligonucleotide
aacauggagcaacuacggg

SEQ ID NO: 549130 - RNA, 19 nt, Artificial Sequence
  Description of Artificial Sequence: Synthetic oligonucleotide
aguagcaugacacuguguu

SEQ ID NO: 549131 - RNA, 19 nt, Artificial Sequence
  Description of Artificial Sequence: Synthetic oligonucleotide
uuauuugaucuacuagaug

SEQ ID NO: 549132 - RNA, 19 nt, Artificial Sequence
  Description of Artificial Sequence: Synthetic oligonucleotide
aaagcuaaauuuccccgga

SEQ ID NO: 549133 - RNA, 19 nt, Artificial Sequence
  Description of Artificial Sequence: Synthetic oligonucleotide
gauaucaugaagaaagcaa

SEQ ID NO: 549134 - RNA, 19 nt, Artificial Sequence
  Description of Artificial Sequence: Synthetic oligonucleotide
agaguagugaacaaaguca

SEQ ID NO: 549135 - RNA, 19 nt, Artificial Sequence
  Description of Artificial Sequence: Synthetic oligonucleotide
uguucagcgagccaucuuc

SEQ ID NO: 549136 - RNA, 19 nt, Artificial Sequence
  Description of Artificial Sequence: Synthetic oligonucleotide
ugagcgaugccccuggcca

SEQ ID NO: 549137 - RNA, 19 nt, Artificial Sequence
  Description of Artificial Sequence: Synthetic oligonucleotide
ugcuguucccaccuguccg

SEQ ID NO: 549138 - RNA, 19 nt, Artificial Sequence
  Description of Artificial Sequence: Synthetic oligonucleotide
uaguggaccaguauucuac

SEQ ID NO: 549139 - RNA, 19 nt, Artificial Sequence
  Description of Artificial Sequence: Synthetic oligonucleotide
ggaaguguacuccucauag

SEQ ID NO: 549140 - RNA, 19 nt, Artificial Sequence
  Description of Artificial Sequence: Synthetic oligonucleotide
aacuuagcucccuagccga

SEQ ID NO: 549141 - RNA, 19 nt, Artificial Sequence
  Description of Artificial Sequence: Synthetic oligonucleotide
uuaauacaugaguauggcu

SEQ ID NO: 549142 - RNA, 19 nt, Artificial Sequence
  Description of Artificial Sequence: Synthetic oligonucleotide
aaagcggcccuuccccacc

SEQ ID NO: 549143 - RNA, 19 nt, Artificial Sequence
  Description of Artificial Sequence: Synthetic oligonucleotide
gaaguguacuccucauagg

SEQ ID NO: 549144 - RNA, 19 nt, Artificial Sequence
  Description of Artificial Sequence: Synthetic oligonucleotide
gcgaacaacagcuauuggg

SEQ ID NO: 549145 - RNA, 19 nt, Artificial Sequence
  Description of Artificial Sequence: Synthetic oligonucleotide
auugcaacgggaugucauc

SEQ ID NO: 549146 - RNA, 19 nt, Artificial Sequence
  Description of Artificial Sequence: Synthetic oligonucleotide
agggugauuauugcaaaac

SEQ ID NO: 549147 - RNA, 19 nt, Artificial Sequence
  Description of Artificial Sequence: Synthetic oligonucleotide
ugaugacaugccuuguaag

SEQ ID NO: 549148 - RNA, 19 nt, Artificial Sequence
  Description of Artificial Sequence: Synthetic oligonucleotide
gaacauggagcaacuacgg

SEQ ID NO: 549149 - RNA, 19 nt, Artificial Sequence
  Description of Artificial Sequence: Synthetic oligonucleotide
uuuuguggccaaagcaggc

SEQ ID NO: 549150 - RNA, 19 nt, Artificial Sequence
  Description of Artificial Sequence: Synthetic oligonucleotide
ugauaucaugaagaaagca

SEQ ID NO: 549151 - RNA, 19 nt, Artificial Sequence
  Description of Artificial Sequence: Synthetic oligonucleotide
ugcaaagcggcccuucccc

SEQ ID NO: 549152 - RNA, 19 nt, Artificial Sequence
  Description of Artificial Sequence: Synthetic oligonucleotide
augauaucaugaagaaagc

SEQ ID NO: 549153 - RNA, 19 nt, Artificial Sequence
  Description of Artificial Sequence: Synthetic oligonucleotide
gaagugaaaucacuuuuga

SEQ ID NO: 549154 - RNA, 19 nt, Artificial Sequence
  Description of Artificial Sequence: Synthetic oligonucleotide
cagaguagugaacaaaguc

SEQ ID NO: 549155 - RNA, 19 nt, Artificial Sequence
  Description of Artificial Sequence: Synthetic oligonucleotide
uggaacuuagcucccuagc

SEQ ID NO: 549156 - RNA, 19 nt, Artificial Sequence
  Description of Artificial Sequence: Synthetic oligonucleotide
ucccuaugaacgaugggca

SEQ ID NO: 549157 - RNA, 19 nt, Artificial Sequence
  Description of Artificial Sequence: Synthetic oligonucleotide
ugauugucaagugcuaaug

SEQ ID NO: 549158 - RNA, 19 nt, Artificial Sequence
  Description of Artificial Sequence: Synthetic oligonucleotide
ucgcaugcaaugauuguca

SEQ ID NO: 549159 - RNA, 19 nt, Artificial Sequence
  Description of Artificial Sequence: Synthetic oligonucleotide
acaugaguauggcugaagu

SEQ ID NO: 549160 - RNA, 19 nt, Artificial Sequence
  Description of Artificial Sequence: Synthetic oligonucleotide
ucaagugcuaaugcugucc

SEQ ID NO: 549161 - RNA, 19 nt, Artificial Sequence
  Description of Artificial Sequence: Synthetic oligonucleotide
uggauucuagaaccucagg

SEQ ID NO: 549162 - RNA, 19 nt, Artificial Sequence
  Description of Artificial Sequence: Synthetic oligonucleotide
agcaauguuauuccuuggu

SEQ ID NO: 549163 - RNA, 19 nt, Artificial Sequence
  Description of Artificial Sequence: Synthetic oligonucleotide
acaggggugcuccuucacc

SEQ ID NO: 549164 - RNA, 19 nt, Artificial Sequence
  Description of Artificial Sequence: Synthetic oligonucleotide
aucgcaugcaaugauuguc

SEQ ID NO: 549165 - RNA, 19 nt, Artificial Sequence
  Description of Artificial Sequence: Synthetic oligonucleotide
ucgaugauaucaugaagaa

SEQ ID NO: 549166 - RNA, 19 nt, Artificial Sequence
  Description of Artificial Sequence: Synthetic oligonucleotide
agguugaugucugagaaga

SEQ ID NO: 549167 - RNA, 19 nt, Artificial Sequence
  Description of Artificial Sequence: Synthetic oligonucleotide
agaaaucccacuaguggac

SEQ ID NO: 549168 - RNA, 19 nt, Artificial Sequence
  Description of Artificial Sequence: Synthetic oligonucleotide
uuuaugcagaguagugaac

SEQ ID NO: 549169 - RNA, 19 nt, Artificial Sequence
  Description of Artificial Sequence: Synthetic oligonucleotide
ugggguuugaaugucgaug

SEQ ID NO: 549170 - RNA, 19 nt, Artificial Sequence
  Description of Artificial Sequence: Synthetic oligonucleotide
aagguguuaaguggguuug

SEQ ID NO: 549171 - RNA, 19 nt, Artificial Sequence
  Description of Artificial Sequence: Synthetic oligonucleotide
gucccuaugaacgaugggc

SEQ ID NO: 549172 - RNA, 19 nt, Artificial Sequence
  Description of Artificial Sequence: Synthetic oligonucleotide
guuuuguggccaaagcagg

SEQ ID NO: 549173 - RNA, 19 nt, Artificial Sequence
  Description of Artificial Sequence: Synthetic oligonucleotide
uucccuuuaugcagaguag

SEQ ID NO: 549174 - RNA, 19 nt, Artificial Sequence
  Description of Artificial Sequence: Synthetic oligonucleotide
ugauguuguuggcacacgu

SEQ ID NO: 549175 - RNA, 19 nt, Artificial Sequence
  Description of Artificial Sequence: Synthetic oligonucleotide
aaugauugucaagugcuaa

SEQ ID NO: 549176 - RNA, 19 nt, Artificial Sequence
  Description of Artificial Sequence: Synthetic oligonucleotide
uuauugcaaaacagagugu

SEQ ID NO: 549177 - RNA, 19 nt, Artificial Sequence
  Description of Artificial Sequence: Synthetic oligonucleotide
gugauuauugcaaaacaga

SEQ ID NO: 549178 - RNA, 19 nt, Artificial Sequence
  Description of Artificial Sequence: Synthetic oligonucleotide
guggagaugagcgaugccc

SEQ ID NO: 549179 - RNA, 19 nt, Artificial Sequence
  Description of Artificial Sequence: Synthetic oligonucleotide
ugaacccuagaaaucccac

SEQ ID NO: 549180 - RNA, 19 nt, Artificial Sequence
  Description of Artificial Sequence: Synthetic oligonucleotide
aaguguuuugcuucagcuu

SEQ ID NO: 549181 - RNA, 19 nt, Artificial Sequence
  Description of Artificial Sequence: Synthetic oligonucleotide
uuggaacuuagcucccuag

SEQ ID NO: 549182 - RNA, 19 nt, Artificial Sequence
  Description of Artificial Sequence: Synthetic oligonucleotide
ugugggguuugaaugucga

SEQ ID NO: 549183 - RNA, 19 nt, Artificial Sequence
  Description of Artificial Sequence: Synthetic oligonucleotide
uaaggcauggauccuucuc

SEQ ID NO: 549184 - RNA, 19 nt, Artificial Sequence
  Description of Artificial Sequence: Synthetic oligonucleotide
aacgggaugucaucuccca

SEQ ID NO: 549185 - RNA, 19 nt, Artificial Sequence
  Description of Artificial Sequence: Synthetic oligonucleotide
agucacacaggcaacaggu

SEQ ID NO: 549186 - RNA, 19 nt, Artificial Sequence
  Description of Artificial Sequence: Synthetic oligonucleotide
aggucaaaucguucuucac

SEQ ID NO: 549187 - RNA, 19 nt, Artificial Sequence
  Description of Artificial Sequence: Synthetic oligonucleotide
aagcuauuugguaguguuc

SEQ ID NO: 549188 - RNA, 19 nt, Artificial Sequence
  Description of Artificial Sequence: Synthetic oligonucleotide
ucccuagccgaaagcaucc

SEQ ID NO: 549189 - RNA, 19 nt, Artificial Sequence
  Description of Artificial Sequence: Synthetic oligonucleotide
ugucuuccgcuccucagca

SEQ ID NO: 549190 - RNA, 19 nt, Artificial Sequence
  Description of Artificial Sequence: Synthetic oligonucleotide
ggaacuuagcucccuagcc

SEQ ID NO: 549191 - RNA, 19 nt, Artificial Sequence
  Description of Artificial Sequence: Synthetic oligonucleotide
ucaaaucguucuucacgag

SEQ ID NO: 549192 - RNA, 19 nt, Artificial Sequence
  Description of Artificial Sequence: Synthetic oligonucleotide
aucacuuuugaacccuaga

SEQ ID NO: 549193 - RNA, 19 nt, Artificial Sequence
  Description of Artificial Sequence: Synthetic oligonucleotide
caggauaauggcacaguug

SEQ ID NO: 549194 - RNA, 19 nt, Artificial Sequence
  Description of Artificial Sequence: Synthetic oligonucleotide
ucuauccggaugcuccagc

SEQ ID NO: 549195 - RNA, 19 nt, Artificial Sequence
  Description of Artificial Sequence: Synthetic oligonucleotide
ucgaucucucagcacguug

SEQ ID NO: 549196 - RNA, 19 nt, Artificial Sequence
  Description of Artificial Sequence: Synthetic oligonucleotide
cacuaguggaccaguauuc

SEQ ID NO: 549197 - RNA, 19 nt, Artificial Sequence
  Description of Artificial Sequence: Synthetic oligonucleotide
ugagucgggccucaggauc

SEQ ID NO: 549198 - RNA, 19 nt, Artificial Sequence
  Description of Artificial Sequence: Synthetic oligonucleotide
gaucagccaguacugcuug

SEQ ID NO: 549199 - RNA, 19 nt, Artificial Sequence
  Description of Artificial Sequence: Synthetic oligonucleotide
uguaaggcauggauccuuc

SEQ ID NO: 549200 - RNA, 19 nt, Artificial Sequence
  Description of Artificial Sequence: Synthetic oligonucleotide
ggauuuccggccuuccucg

SEQ ID NO: 549201 - RNA, 19 nt, Artificial Sequence
  Description of Artificial Sequence: Synthetic oligonucleotide
auguagagggugauuauug

SEQ ID NO: 549202 - RNA, 19 nt, Artificial Sequence
  Description of Artificial Sequence: Synthetic oligonucleotide
cagaguauggcuauagaua

SEQ ID NO: 549203 - RNA, 19 nt, Artificial Sequence
  Description of Artificial Sequence: Synthetic oligonucleotide
augaacgaugggcaucuug

SEQ ID NO: 549204 - RNA, 19 nt, Artificial Sequence
  Description of Artificial Sequence: Synthetic oligonucleotide
augauugucaagugcuaau

SEQ ID NO: 549205 - RNA, 19 nt, Artificial Sequence
  Description of Artificial Sequence: Synthetic oligonucleotide
cuagccgaaagcauccuca

SEQ ID NO: 549206 - RNA, 19 nt, Artificial Sequence
  Description of Artificial Sequence: Synthetic oligonucleotide
ucaugcaacuguccccggc

SEQ ID NO: 549207 - RNA, 19 nt, Artificial Sequence
  Description of Artificial Sequence: Synthetic oligonucleotide
ugaucagccaguacugcuu

SEQ ID NO: 549208 - RNA, 19 nt, Artificial Sequence
  Description of Artificial Sequence: Synthetic oligonucleotide
uggcugaaguguucgauaa

SEQ ID NO: 549209 - RNA, 19 nt, Artificial Sequence
  Description of Artificial Sequence: Synthetic oligonucleotide
ugucucgcacacgaucugg

SEQ ID NO: 549210 - RNA, 19 nt, Artificial Sequence
  Description of Artificial Sequence: Synthetic oligonucleotide
gugacaagucagauguggg

SEQ ID NO: 549211 - RNA, 19 nt, Artificial Sequence
  Description of Artificial Sequence: Synthetic oligonucleotide
agugcuaaugcugucccga

SEQ ID NO: 549212 - RNA, 19 nt, Artificial Sequence
  Description of Artificial Sequence: Synthetic oligonucleotide
gaaaucccacuaguggacc

SEQ ID NO: 549213 - RNA, 19 nt, Artificial Sequence
  Description of Artificial Sequence: Synthetic oligonucleotide
uuugaucuacuagauguuu

SEQ ID NO: 549214 - RNA, 19 nt, Artificial Sequence
  Description of Artificial Sequence: Synthetic oligonucleotide
cucaggaucauggucccag

SEQ ID NO: 549215 - RNA, 19 nt, Artificial Sequence
  Description of Artificial Sequence: Synthetic oligonucleotide
accgccacggucucaaacu

SEQ ID NO: 549216 - RNA, 19 nt, Artificial Sequence
  Description of Artificial Sequence: Synthetic oligonucleotide
guuugaaugucgaugauau

SEQ ID NO: 549217 - RNA, 19 nt, Artificial Sequence
  Description of Artificial Sequence: Synthetic oligonucleotide
ugacaugccuuguaaggua

SEQ ID NO: 549218 - RNA, 19 nt, Artificial Sequence
  Description of Artificial Sequence: Synthetic oligonucleotide
ugguuucccggaagcauca

SEQ ID NO: 549219 - RNA, 19 nt, Artificial Sequence
  Description of Artificial Sequence: Synthetic oligonucleotide
aguggaccaguauucuaca

SEQ ID NO: 549220 - RNA, 19 nt, Artificial Sequence
  Description of Artificial Sequence: Synthetic oligonucleotide
ucacgaggauguuggagcu

SEQ ID NO: 549221 - RNA, 19 nt, Artificial Sequence
  Description of Artificial Sequence: Synthetic oligonucleotide
agcuauugggagggcaucg

SEQ ID NO: 549222 - RNA, 19 nt, Artificial Sequence
  Description of Artificial Sequence: Synthetic oligonucleotide
ugugaucagccaguacugc

SEQ ID NO: 549223 - RNA, 19 nt, Artificial Sequence
  Description of Artificial Sequence: Synthetic oligonucleotide
agugucucgcacacgaucu

SEQ ID NO: 549224 - RNA, 19 nt, Artificial Sequence
  Description of Artificial Sequence: Synthetic oligonucleotide
cuauugggagggcaucggc

SEQ ID NO: 549225 - RNA, 19 nt, Artificial Sequence
  Description of Artificial Sequence: Synthetic oligonucleotide
ucccuuuaugcagaguagu

SEQ ID NO: 549226 - RNA, 19 nt, Artificial Sequence
  Description of Artificial Sequence: Synthetic oligonucleotide
gcccuaagguguuaagugg

SEQ ID NO: 549227 - RNA, 19 nt, Artificial Sequence
  Description of Artificial Sequence: Synthetic oligonucleotide
aagcuaaauuuccccggaa

SEQ ID NO: 549228 - RNA, 19 nt, Artificial Sequence
  Description of Artificial Sequence: Synthetic oligonucleotide
gcaucggcaagcccuaagg

SEQ ID NO: 549229 - RNA, 19 nt, Artificial Sequence
  Description of Artificial Sequence: Synthetic oligonucleotide
cucccuagccgaaagcauc

SEQ ID NO: 549230 - RNA, 19 nt, Artificial Sequence
  Description of Artificial Sequence: Synthetic oligonucleotide
cucgcacacgaucuggaug

SEQ ID NO: 549231 - RNA, 19 nt, Artificial Sequence
  Description of Artificial Sequence: Synthetic oligonucleotide
agggcggcgaacaacagcu

SEQ ID NO: 549232 - RNA, 19 nt, Artificial Sequence
  Description of Artificial Sequence: Synthetic oligonucleotide
gggguuugaaugucgauga

SEQ ID NO: 549233 - RNA, 19 nt, Artificial Sequence
  Description of Artificial Sequence: Synthetic oligonucleotide
cagguugaugucugagaag

SEQ ID NO: 549234 - RNA, 19 nt, Artificial Sequence
  Description of Artificial Sequence: Synthetic oligonucleotide
uuugaaugucgaugauauc

SEQ ID NO: 549235 - RNA, 19 nt, Artificial Sequence
  Description of Artificial Sequence: Synthetic oligonucleotide
ucauguagagggugauuau

SEQ ID NO: 549236 - RNA, 19 nt, Artificial Sequence
  Description of Artificial Sequence: Synthetic oligonucleotide
cccuaagguguuaaguggg

SEQ ID NO: 549237 - RNA, 19 nt, Artificial Sequence
  Description of Artificial Sequence: Synthetic oligonucleotide
ugucuccuugcagaguaug

SEQ ID NO: 549238 - RNA, 19 nt, Artificial Sequence
  Description of Artificial Sequence: Synthetic oligonucleotide
agagucuauccggaugcuc

SEQ ID NO: 549239 - RNA, 19 nt, Artificial Sequence
  Description of Artificial Sequence: Synthetic oligonucleotide
ugcuaaugcugucccgagu

SEQ ID NO: 549240 - RNA, 19 nt, Artificial Sequence
  Description of Artificial Sequence: Synthetic oligonucleotide
aguguucgauaaaagaaua

SEQ ID NO: 549241 - RNA, 19 nt, Artificial Sequence
  Description of Artificial Sequence: Synthetic oligonucleotide
aggcuguaaggcauggauc

SEQ ID NO: 549242 - RNA, 19 nt, Artificial Sequence
  Description of Artificial Sequence: Synthetic oligonucleotide
cuuggcguggaaugcugug

SEQ ID NO: 549243 - RNA, 19 nt, Artificial Sequence
  Description of Artificial Sequence: Synthetic oligonucleotide
acuaguggaccaguauucu

SEQ ID NO: 549244 - RNA, 19 nt, Artificial Sequence
  Description of Artificial Sequence: Synthetic oligonucleotide
gguguuaaguggguuuggg

SEQ ID NO: 549245 - RNA, 19 nt, Artificial Sequence
  Description of Artificial Sequence: Synthetic oligonucleotide
agccaguacugcuugccca

SEQ ID NO: 549246 - RNA, 19 nt, Artificial Sequence
  Description of Artificial Sequence: Synthetic oligonucleotide
uucagcgagccaucuucug

SEQ ID NO: 549247 - RNA, 19 nt, Artificial Sequence
  Description of Artificial Sequence: Synthetic oligonucleotide
agucuauccggaugcucca

SEQ ID NO: 549248 - RNA, 19 nt, Artificial Sequence
  Description of Artificial Sequence: Synthetic oligonucleotide
uguuauuccuuggucuuuu

SEQ ID NO: 549249 - RNA, 19 nt, Artificial Sequence
  Description of Artificial Sequence: Synthetic oligonucleotide
gcaauguuauuccuugguc

SEQ ID NO: 549250 - RNA, 19 nt, Artificial Sequence
  Description of Artificial Sequence: Synthetic oligonucleotide
gacaagucagauguggggu

SEQ ID NO: 549251 - RNA, 19 nt, Artificial Sequence
  Description of Artificial Sequence: Synthetic oligonucleotide
guagcaugacacuguguuc

SEQ ID NO: 549252 - RNA, 19 nt, Artificial Sequence
  Description of Artificial Sequence: Synthetic oligonucleotide
acaagucagaugugggguu

SEQ ID NO: 549253 - RNA, 19 nt, Artificial Sequence
  Description of Artificial Sequence: Synthetic oligonucleotide
uugcaacgggaugucaucu

SEQ ID NO: 549254 - RNA, 19 nt, Artificial Sequence
  Description of Artificial Sequence: Synthetic oligonucleotide
uuggcguggaaugcuguga

SEQ ID NO: 549255 - RNA, 19 nt, Artificial Sequence
  Description of Artificial Sequence: Synthetic oligonucleotide
ggugagucgggccucagga

SEQ ID NO: 549256 - RNA, 19 nt, Artificial Sequence
  Description of Artificial Sequence: Synthetic oligonucleotide
cuguggagaugagcgaugc

SEQ ID NO: 549257 - RNA, 19 nt, Artificial Sequence
  Description of Artificial Sequence: Synthetic oligonucleotide
aggucccuaugaacgaugg

SEQ ID NO: 549258 - RNA, 19 nt, Artificial Sequence
  Description of Artificial Sequence: Synthetic oligonucleotide
cucaccacuagagggcggc

SEQ ID NO: 549259 - RNA, 19 nt, Artificial Sequence
  Description of Artificial Sequence: Synthetic oligonucleotide
uggcguggaaugcugugau

SEQ ID NO: 549260 - RNA, 19 nt, Artificial Sequence
  Description of Artificial Sequence: Synthetic oligonucleotide
caugccuuguaagguauuc

SEQ ID NO: 549261 - RNA, 19 nt, Artificial Sequence
  Description of Artificial Sequence: Synthetic oligonucleotide
aagucagaugugggguuug

SEQ ID NO: 549262 - RNA, 19 nt, Artificial Sequence
  Description of Artificial Sequence: Synthetic oligonucleotide
cagugucucgcacacgauc

SEQ ID NO: 549263 - RNA, 19 nt, Artificial Sequence
  Description of Artificial Sequence: Synthetic oligonucleotide
acagaguguuuuguggcca

SEQ ID NO: 549264 - RNA, 19 nt, Artificial Sequence
  Description of Artificial Sequence: Synthetic oligonucleotide
uccgucuuccaggaagugu

SEQ ID NO: 549265 - RNA, 19 nt, Artificial Sequence
  Description of Artificial Sequence: Synthetic oligonucleotide
uauccggaugcuccagcuc

SEQ ID NO: 549266 - RNA, 19 nt, Artificial Sequence
  Description of Artificial Sequence: Synthetic oligonucleotide
caacaggucaaaucguucu

SEQ ID NO: 549267 - RNA, 19 nt, Artificial Sequence
  Description of Artificial Sequence: Synthetic oligonucleotide
gaugugggguuugaauguc

SEQ ID NO: 549268 - RNA, 19 nt, Artificial Sequence
  Description of Artificial Sequence: Synthetic oligonucleotide
gugcuaaugcugucccgag

SEQ ID NO: 549269 - RNA, 19 nt, Artificial Sequence
  Description of Artificial Sequence: Synthetic oligonucleotide
uuuccccggaacguuuuga

SEQ ID NO: 549270 - RNA, 19 nt, Artificial Sequence
  Description of Artificial Sequence: Synthetic oligonucleotide
ugcaacuguccccggcaac

SEQ ID NO: 549271 - RNA, 19 nt, Artificial Sequence
  Description of Artificial Sequence: Synthetic oligonucleotide
gcaacgggaugucaucucc

SEQ ID NO: 549272 - RNA, 19 nt, Artificial Sequence
  Description of Artificial Sequence: Synthetic oligonucleotide
acgggaugucaucucccag

SEQ ID NO: 549273 - RNA, 19 nt, Artificial Sequence
  Description of Artificial Sequence: Synthetic oligonucleotide
ugcaacgggaugucaucuc

SEQ ID NO: 549274 - RNA, 19 nt, Artificial Sequence
  Description of Artificial Sequence: Synthetic oligonucleotide
cugcaaagcggcccuuccc

SEQ ID NO: 549275 - RNA, 19 nt, Artificial Sequence
  Description of Artificial Sequence: Synthetic oligonucleotide
ucuucacgaggauguugga

SEQ ID NO: 549276 - RNA, 19 nt, Artificial Sequence
  Description of Artificial Sequence: Synthetic oligonucleotide
cuuccucgaucucucagca

SEQ ID NO: 549277 - RNA, 19 nt, Artificial Sequence
  Description of Artificial Sequence: Synthetic oligonucleotide
gccgaaagcauccucaugu

SEQ ID NO: 549278 - RNA, 19 nt, Artificial Sequence
  Description of Artificial Sequence: Synthetic oligonucleotide
agguguuaaguggguuugg

SEQ ID NO: 549279 - RNA, 19 nt, Artificial Sequence
  Description of Artificial Sequence: Synthetic oligonucleotide
cuagagggcggcgaacaac

SEQ ID NO: 549280 - RNA, 19 nt, Artificial Sequence
  Description of Artificial Sequence: Synthetic oligonucleotide
cuuggccuagccugcccag

SEQ ID NO: 549281 - RNA, 19 nt, Artificial Sequence
  Description of Artificial Sequence: Synthetic oligonucleotide
uuccccggaacguuuugau

SEQ ID NO: 549282 - RNA, 19 nt, Artificial Sequence
  Description of Artificial Sequence: Synthetic oligonucleotide
auggcuauagauagagaua

SEQ ID NO: 549283 - RNA, 19 nt, Artificial Sequence
  Description of Artificial Sequence: Synthetic oligonucleotide
cgaacaacagcuauuggga

SEQ ID NO: 549284 - RNA, 19 nt, Artificial Sequence
  Description of Artificial Sequence: Synthetic oligonucleotide
uccccggcaaccccacucu

SEQ ID NO: 549285 - RNA, 19 nt, Artificial Sequence
  Description of Artificial Sequence: Synthetic oligonucleotide
gaccgccacggucucaaac

SEQ ID NO: 549286 - RNA, 19 nt, Artificial Sequence
  Description of Artificial Sequence: Synthetic oligonucleotide
agugcugcugcugcugcug

SEQ ID NO: 549287 - RNA, 19 nt, Artificial Sequence
  Description of Artificial Sequence: Synthetic oligonucleotide
guaguguucagcgagccau

SEQ ID NO: 549288 - RNA, 19 nt, Artificial Sequence
  Description of Artificial Sequence: Synthetic oligonucleotide
uugaccgccacggucucaa

SEQ ID NO: 549289 - RNA, 19 nt, Artificial Sequence
  Description of Artificial Sequence: Synthetic oligonucleotide
ugcugugaucagccaguac

SEQ ID NO: 549290 - RNA, 19 nt, Artificial Sequence
  Description of Artificial Sequence: Synthetic oligonucleotide
uagccgaaagcauccucau

SEQ ID NO: 549291 - RNA, 19 nt, Artificial Sequence
  Description of Artificial Sequence: Synthetic oligonucleotide
gcuauuugguaguguucag

SEQ ID NO: 549292 - RNA, 19 nt, Artificial Sequence
  Description of Artificial Sequence: Synthetic oligonucleotide
gcaucgcaugcaaugauug

SEQ ID NO: 549293 - RNA, 19 nt, Artificial Sequence
  Description of Artificial Sequence: Synthetic oligonucleotide
uuccggccuuccucgaucu

SEQ ID NO: 549294 - RNA, 19 nt, Artificial Sequence
  Description of Artificial Sequence: Synthetic oligonucleotide
ucugaccggucaucuucca

SEQ ID NO: 549295 - RNA, 19 nt, Artificial Sequence
  Description of Artificial Sequence: Synthetic oligonucleotide
gaccuggaagugaaaucac

SEQ ID NO: 549296 - RNA, 19 nt, Artificial Sequence
  Description of Artificial Sequence: Synthetic oligonucleotide
aguguucagcgagccaucu

SEQ ID NO: 549297 - RNA, 19 nt, Artificial Sequence
  Description of Artificial Sequence: Synthetic oligonucleotide
ucaccacuagagggcggcg

SEQ ID NO: 549298 - RNA, 19 nt, Artificial Sequence
  Description of Artificial Sequence: Synthetic oligonucleotide
guguucgauaaaagaauaa

SEQ ID NO: 549299 - RNA, 19 nt, Artificial Sequence
  Description of Artificial Sequence: Synthetic oligonucleotide
cccuuuaugcagaguagug

SEQ ID NO: 549300 - RNA, 19 nt, Artificial Sequence
  Description of Artificial Sequence: Synthetic oligonucleotide
gugguagguuggaacuuag

SEQ ID NO: 549301 - RNA, 19 nt, Artificial Sequence
  Description of Artificial Sequence: Synthetic oligonucleotide
accuguccgcuguuggcca

SEQ ID NO: 549302 - RNA, 19 nt, Artificial Sequence
  Description of Artificial Sequence: Synthetic oligonucleotide
ggcgaacaacagcuauugg

SEQ ID NO: 549303 - RNA, 19 nt, Artificial Sequence
  Description of Artificial Sequence: Synthetic oligonucleotide
guuucagguugaugucuga

SEQ ID NO: 549304 - RNA, 19 nt, Artificial Sequence
  Description of Artificial Sequence: Synthetic oligonucleotide
cuaugaacgaugggcaucu

SEQ ID NO: 549305 - RNA, 19 nt, Artificial Sequence
  Description of Artificial Sequence: Synthetic oligonucleotide
cucaugcaacuguccccgg

SEQ ID NO: 549306 - RNA, 19 nt, Artificial Sequence
  Description of Artificial Sequence: Synthetic oligonucleotide
ggucccuaugaacgauggg

SEQ ID NO: 549307 - RNA, 19 nt, Artificial Sequence
  Description of Artificial Sequence: Synthetic oligonucleotide
cccggaagcaucagucagg

SEQ ID NO: 549308 - RNA, 19 nt, Artificial Sequence
  Description of Artificial Sequence: Synthetic oligonucleotide
gugaucagccaguacugcu

SEQ ID NO: 549309 - RNA, 19 nt, Artificial Sequence
  Description of Artificial Sequence: Synthetic oligonucleotide
uuccucgaucucucagcac

SEQ ID NO: 549310 - RNA, 19 nt, Artificial Sequence
  Description of Artificial Sequence: Synthetic oligonucleotide
acuagagggcggcgaacaa

SEQ ID NO: 549311 - RNA, 19 nt, Artificial Sequence
  Description of Artificial Sequence: Synthetic oligonucleotide
cuuccgcuccucagcaguc

SEQ ID NO: 549312 - RNA, 19 nt, Artificial Sequence
  Description of Artificial Sequence: Synthetic oligonucleotide
ucuugaccgccacggucuc

SEQ ID NO: 549313 - RNA, 19 nt, Artificial Sequence
  Description of Artificial Sequence: Synthetic oligonucleotide
agaguuggguccaggcgca

SEQ ID NO: 549314 - RNA, 19 nt, Artificial Sequence
  Description of Artificial Sequence: Synthetic oligonucleotide
gcuauugggagggcaucgg

SEQ ID NO: 549315 - RNA, 19 nt, Artificial Sequence
  Description of Artificial Sequence: Synthetic oligonucleotide
cuaguggaccaguauucua

SEQ ID NO: 549316 - RNA, 19 nt, Artificial Sequence
  Description of Artificial Sequence: Synthetic oligonucleotide
gugucucgcacacgaucug

SEQ ID NO: 549317 - RNA, 19 nt, Artificial Sequence
  Description of Artificial Sequence: Synthetic oligonucleotide
cauugcaacgggaugucau

SEQ ID NO: 549318 - RNA, 19 nt, Artificial Sequence
  Description of Artificial Sequence: Synthetic oligonucleotide
cccgagucccuucugcucc

SEQ ID NO: 549319 - RNA, 19 nt, Artificial Sequence
  Description of Artificial Sequence: Synthetic oligonucleotide
ucccacuaguggaccagua

SEQ ID NO: 549320 - RNA, 19 nt, Artificial Sequence
  Description of Artificial Sequence: Synthetic oligonucleotide
caacuguccccggcaaccc

SEQ ID NO: 549321 - RNA, 19 nt, Artificial Sequence
  Description of Artificial Sequence: Synthetic oligonucleotide
gauuuccggccuuccucga

SEQ ID NO: 549322 - RNA, 19 nt, Artificial Sequence
  Description of Artificial Sequence: Synthetic oligonucleotide
uugucuccuugcagaguau

SEQ ID NO: 549323 - RNA, 19 nt, Artificial Sequence
  Description of Artificial Sequence: Synthetic oligonucleotide
uccucauguagagggugau

SEQ ID NO: 549324 - RNA, 19 nt, Artificial Sequence
  Description of Artificial Sequence: Synthetic oligonucleotide
aggagggagcaaguccuug

SEQ ID NO: 549325 - RNA, 19 nt, Artificial Sequence
  Description of Artificial Sequence: Synthetic oligonucleotide
uggggauuuccggccuucc

SEQ ID NO: 549326 - RNA, 19 nt, Artificial Sequence
  Description of Artificial Sequence: Synthetic oligonucleotide
gguuugaaugucgaugaua

SEQ ID NO: 549327 - RNA, 19 nt, Artificial Sequence
  Description of Artificial Sequence: Synthetic oligonucleotide
cacuagagggcggcgaaca

SEQ ID NO: 549328 - RNA, 19 nt, Artificial Sequence
  Description of Artificial Sequence: Synthetic oligonucleotide
cacugggcggugagucggg

SEQ ID NO: 549329 - RNA, 19 nt, Artificial Sequence
  Description of Artificial Sequence: Synthetic oligonucleotide
gucuauccggaugcuccag

SEQ ID NO: 549330 - RNA, 19 nt, Artificial Sequence
  Description of Artificial Sequence: Synthetic oligonucleotide
ggcaucggcaagcccuaag

SEQ ID NO: 549331 - RNA, 19 nt, Artificial Sequence
  Description of Artificial Sequence: Synthetic oligonucleotide
caucuugggccucccacaa

SEQ ID NO: 549332 - RNA, 19 nt, Artificial Sequence
  Description of Artificial Sequence: Synthetic oligonucleotide
guauggcuauagauagaga

SEQ ID NO: 549333 - RNA, 19 nt, Artificial Sequence
  Description of Artificial Sequence: Synthetic oligonucleotide
ugcugcugcugcugcugcu

SEQ ID NO: 549334 - RNA, 19 nt, Artificial Sequence
  Description of Artificial Sequence: Synthetic oligonucleotide
gugcugcugcugcugcugc

SEQ ID NO: 549335 - RNA, 19 nt, Artificial Sequence
  Description of Artificial Sequence: Synthetic oligonucleotide
aagcgcucugccacacacu

SEQ ID NO: 549336 - RNA, 19 nt, Artificial Sequence
  Description of Artificial Sequence: Synthetic oligonucleotide
cuauccggaugcuccagcu

SEQ ID NO: 549337 - RNA, 19 nt, Artificial Sequence
  Description of Artificial Sequence: Synthetic oligonucleotide
ccuaugaacgaugggcauc

SEQ ID NO: 549338 - RNA, 19 nt, Artificial Sequence
  Description of Artificial Sequence: Synthetic oligonucleotide
guuucccggaagcaucagu

SEQ ID NO: 549339 - RNA, 19 nt, Artificial Sequence
  Description of Artificial Sequence: Synthetic oligonucleotide
gcaacaggucaaaucguuc

SEQ ID NO: 549340 - RNA, 19 nt, Artificial Sequence
  Description of Artificial Sequence: Synthetic oligonucleotide
ucucguguuucagguugau

SEQ ID NO: 549341 - RNA, 19 nt, Artificial Sequence
  Description of Artificial Sequence: Synthetic oligonucleotide
cagaguguuuuguggccaa

SEQ ID NO: 549342 - RNA, 19 nt, Artificial Sequence
  Description of Artificial Sequence: Synthetic oligonucleotide
caucgcaugcaaugauugu

SEQ ID NO: 549343 - RNA, 19 nt, Artificial Sequence
  Description of Artificial Sequence: Synthetic oligonucleotide
gucucgcacacgaucugga

SEQ ID NO: 549344 - RNA, 19 nt, Artificial Sequence
  Description of Artificial Sequence: Synthetic oligonucleotide
ggugguugagccagaagcu

SEQ ID NO: 549345 - RNA, 19 nt, Artificial Sequence
  Description of Artificial Sequence: Synthetic oligonucleotide
guaaggcauggauccuucu

SEQ ID NO: 549346 - RNA, 19 nt, Artificial Sequence
  Description of Artificial Sequence: Synthetic oligonucleotide
agagggcggcgaacaacag

SEQ ID NO: 549347 - RNA, 19 nt, Artificial Sequence
  Description of Artificial Sequence: Synthetic oligonucleotide
cuguccccggcaaccccac

SEQ ID NO: 549348 - RNA, 19 nt, Artificial Sequence
  Description of Artificial Sequence: Synthetic oligonucleotide
cuuagcucccuagccgaaa

SEQ ID NO: 549349 - RNA, 19 nt, Artificial Sequence
  Description of Artificial Sequence: Synthetic oligonucleotide
gcugcugcugcugcugcug

SEQ ID NO: 549350 - RNA, 19 nt, Artificial Sequence
  Description of Artificial Sequence: Synthetic oligonucleotide
ccuagccgaaagcauccuc

SEQ ID NO: 549351 - RNA, 19 nt, Artificial Sequence
  Description of Artificial Sequence: Synthetic oligonucleotide
caacagcuauugggagggc

SEQ ID NO: 549352 - RNA, 19 nt, Artificial Sequence
  Description of Artificial Sequence: Synthetic oligonucleotide
ggggcaucgcaugcaauga

SEQ ID NO: 549353 - RNA, 19 nt, Artificial Sequence
  Description of Artificial Sequence: Synthetic oligonucleotide
acuuagcucccuagccgaa

SEQ ID NO: 549354 - RNA, 19 nt, Artificial Sequence
  Description of Artificial Sequence: Synthetic oligonucleotide
ugcugcugcugcugcuguu

SEQ ID NO: 549355 - RNA, 19 nt, Artificial Sequence
  Description of Artificial Sequence: Synthetic oligonucleotide
cggcgaacaacagcuauug

SEQ ID NO: 549356 - RNA, 19 nt, Artificial Sequence
  Description of Artificial Sequence: Synthetic oligonucleotide
guucagcgagccaucuucu

SEQ ID NO: 549357 - RNA, 19 nt, Artificial Sequence
  Description of Artificial Sequence: Synthetic oligonucleotide
gguuucccggaagcaucag

SEQ ID NO: 549358 - RNA, 19 nt, Artificial Sequence
  Description of Artificial Sequence: Synthetic oligonucleotide
gagagucuauccggaugcu

SEQ ID NO: 549359 - RNA, 19 nt, Artificial Sequence
  Description of Artificial Sequence: Synthetic oligonucleotide
uaugaacgaugggcaucuu

SEQ ID NO: 549360 - RNA, 19 nt, Artificial Sequence
  Description of Artificial Sequence: Synthetic oligonucleotide
gugggguuugaaugucgau

SEQ ID NO: 549361 - RNA, 19 nt, Artificial Sequence
  Description of Artificial Sequence: Synthetic oligonucleotide
ccgccacggucucaaacug

SEQ ID NO: 549362 - RNA, 19 nt, Artificial Sequence
  Description of Artificial Sequence: Synthetic oligonucleotide
aguugucgcugaacuccau

SEQ ID NO: 549363 - RNA, 19 nt, Artificial Sequence
  Description of Artificial Sequence: Synthetic oligonucleotide
gugagucgggccucaggau

SEQ ID NO: 549364 - RNA, 19 nt, Artificial Sequence
  Description of Artificial Sequence: Synthetic oligonucleotide
ccggaagcaucagucagga

SEQ ID NO: 549365 - RNA, 19 nt, Artificial Sequence
  Description of Artificial Sequence: Synthetic oligonucleotide
gcaagcccuaagguguuaa

SEQ ID NO: 549366 - RNA, 19 nt, Artificial Sequence
  Description of Artificial Sequence: Synthetic oligonucleotide
ggcaacaggucaaaucguu

SEQ ID NO: 549367 - RNA, 19 nt, Artificial Sequence
  Description of Artificial Sequence: Synthetic oligonucleotide
cggaugcuccagcucacug

SEQ ID NO: 549368 - RNA, 19 nt, Artificial Sequence
  Description of Artificial Sequence: Synthetic oligonucleotide
ccacuaguggaccaguauu

SEQ ID NO: 549369 - RNA, 19 nt, Artificial Sequence
  Description of Artificial Sequence: Synthetic oligonucleotide
caagucagaugugggguuu

SEQ ID NO: 549370 - RNA, 19 nt, Artificial Sequence
  Description of Artificial Sequence: Synthetic oligonucleotide
ccgaaagcauccucaugua

SEQ ID NO: 549371 - RNA, 19 nt, Artificial Sequence
  Description of Artificial Sequence: Synthetic oligonucleotide
ggggauuuccggccuuccu

SEQ ID NO: 549372 - RNA, 19 nt, Artificial Sequence
  Description of Artificial Sequence: Synthetic oligonucleotide
agucgggccucaggaucau

SEQ ID NO: 549373 - RNA, 19 nt, Artificial Sequence
  Description of Artificial Sequence: Synthetic oligonucleotide
cggugagucgggccucagg

SEQ ID NO: 549374 - RNA, 19 nt, Artificial Sequence
  Description of Artificial Sequence: Synthetic oligonucleotide
ccuugcagaguauggcuau

SEQ ID NO: 549375 - RNA, 19 nt, Artificial Sequence
  Description of Artificial Sequence: Synthetic oligonucleotide
guguucagcgagccaucuu

SEQ ID NO: 549376 - RNA, 19 nt, Artificial Sequence
  Description of Artificial Sequence: Synthetic oligonucleotide
ggcaucgcaugcaaugauu

SEQ ID NO: 549377 - RNA, 19 nt, Artificial Sequence
  Description of Artificial Sequence: Synthetic oligonucleotide
gaguuggguccaggcgcaa

SEQ ID NO: 549378 - RNA, 19 nt, Artificial Sequence
  Description of Artificial Sequence: Synthetic oligonucleotide
ggccauguaucuugcuguu

SEQ ID NO: 549379 - RNA, 19 nt, Artificial Sequence
  Description of Artificial Sequence: Synthetic oligonucleotide
ggguuugaaugucgaugau

SEQ ID NO: 549380 - RNA, 19 nt, Artificial Sequence
  Description of Artificial Sequence: Synthetic oligonucleotide
cugcugcugcugcugcugu

SEQ ID NO: 549381 - RNA, 19 nt, Artificial Sequence
  Description of Artificial Sequence: Synthetic oligonucleotide
cggcaaccccacucugggg

SEQ ID NO: 549382 - RNA, 19 nt, Artificial Sequence
  Description of Artificial Sequence: Synthetic oligonucleotide
cccacuaguggaccaguau

SEQ ID NO: 549383 - RNA, 19 nt, Artificial Sequence
  Description of Artificial Sequence: Synthetic oligonucleotide
cuguucccaccuguccgcu

SEQ ID NO: 549384 - RNA, 19 nt, Artificial Sequence
  Description of Artificial Sequence: Synthetic oligonucleotide
cccuaugaacgaugggcau

SEQ ID NO: 549385 - RNA, 19 nt, Artificial Sequence
  Description of Artificial Sequence: Synthetic oligonucleotide
gcgagccaucuucuggaau

SEQ ID NO: 549386 - RNA, 19 nt, Artificial Sequence
  Description of Artificial Sequence: Synthetic oligonucleotide
cggaagcaucagucaggac

SEQ ID NO: 549387 - RNA, 19 nt, Artificial Sequence
  Description of Artificial Sequence: Synthetic oligonucleotide
ccccggcaaccccacucug

SEQ ID NO: 549388 - RNA, 19 nt, Artificial Sequence
  Description of Artificial Sequence: Synthetic oligonucleotide
cucgaucucucagcacguu

SEQ ID NO: 549389 - RNA, 19 nt, Artificial Sequence
  Description of Artificial Sequence: Synthetic oligonucleotide
gcggcgaacaacagcuauu

SEQ ID NO: 549390 - RNA, 19 nt, Artificial Sequence
  Description of Artificial Sequence: Synthetic oligonucleotide
ggcaagcccuaagguguua

SEQ ID NO: 549391 - RNA, 19 nt, Artificial Sequence
  Description of Artificial Sequence: Synthetic oligonucleotide
ccuguccgcuguuggccaa

SEQ ID NO: 549392 - RNA, 19 nt, Artificial Sequence
  Description of Artificial Sequence: Synthetic oligonucleotide
gggcaucggcaagcccuaa

SEQ ID NO: 549393 - RNA, 19 nt, Artificial Sequence
  Description of Artificial Sequence: Synthetic oligonucleotide
cccuagccgaaagcauccu

SEQ ID NO: 549394 - RNA, 19 nt, Artificial Sequence
  Description of Artificial Sequence: Synthetic oligonucleotide
ccggaugcuccagcucacu

SEQ ID NO: 549395 - RNA, 19 nt, Artificial Sequence
  Description of Artificial Sequence: Synthetic oligonucleotide
ccggaacguuuugaucuuu

SEQ ID NO: 549396 - RNA, 19 nt, Artificial Sequence
  Description of Artificial Sequence: Synthetic oligonucleotide
uguuaaacggcuuuaaucu

SEQ ID NO: 549397 - RNA, 19 nt, Artificial Sequence
  Description of Artificial Sequence: Synthetic oligonucleotide
aaaucaccuucuuagaaag

SEQ ID NO: 549398 - RNA, 19 nt, Artificial Sequence
  Description of Artificial Sequence: Synthetic oligonucleotide
uuaaacggcuuuaaucucg

SEQ ID NO: 549399 - RNA, 19 nt, Artificial Sequence
  Description of Artificial Sequence: Synthetic oligonucleotide
uuaaucucggucauugcgg

SEQ ID NO: 549400 - RNA, 19 nt, Artificial Sequence
  Description of Artificial Sequence: Synthetic oligonucleotide
aguaaagaaauauugcaca

SEQ ID NO: 549401 - RNA, 19 nt, Artificial Sequence
  Description of Artificial Sequence: Synthetic oligonucleotide
cucugcauaaaguacacgg

SEQ ID NO: 549402 - RNA, 19 nt, Artificial Sequence
  Description of Artificial Sequence: Synthetic oligonucleotide
uguacaagagcucugugga

SEQ ID NO: 549403 - RNA, 19 nt, Artificial Sequence
  Description of Artificial Sequence: Synthetic oligonucleotide
aacggcuuuaaucucgguc

SEQ ID NO: 549404 - RNA, 19 nt, Artificial Sequence
  Description of Artificial Sequence: Synthetic oligonucleotide
ucuucuugcgauaggagcc

SEQ ID NO: 549405 - RNA, 19 nt, Artificial Sequence
  Description of Artificial Sequence: Synthetic oligonucleotide
aagaacauauacaagggga

SEQ ID NO: 549406 - RNA, 19 nt, Artificial Sequence
  Description of Artificial Sequence: Synthetic oligonucleotide
guaacuaucccacugucug

SEQ ID NO: 549407 - RNA, 19 nt, Artificial Sequence
  Description of Artificial Sequence: Synthetic oligonucleotide
ucuacuguccauauccuga

SEQ ID NO: 549408 - RNA, 19 nt, Artificial Sequence
  Description of Artificial Sequence: Synthetic oligonucleotide
gaccggaaaggacaaaugg

SEQ ID NO: 549409 - RNA, 19 nt, Artificial Sequence
  Description of Artificial Sequence: Synthetic oligonucleotide
ucagguuauguacaagagc

SEQ ID NO: 549410 - RNA, 19 nt, Artificial Sequence
  Description of Artificial Sequence: Synthetic oligonucleotide
aacuaaccugaguccagcc

SEQ ID NO: 549411 - RNA, 19 nt, Artificial Sequence
  Description of Artificial Sequence: Synthetic oligonucleotide
augaacuccccacuacucc

SEQ ID NO: 549412 - RNA, 19 nt, Artificial Sequence
  Description of Artificial Sequence: Synthetic oligonucleotide
uaaaguacacgggaaaagc

SEQ ID NO: 549413 - RNA, 19 nt, Artificial Sequence
  Description of Artificial Sequence: Synthetic oligonucleotide
uucagguuauguacaagag

SEQ ID NO: 549414 - RNA, 19 nt, Artificial Sequence
  Description of Artificial Sequence: Synthetic oligonucleotide
acuaaccugaguccagccc

SEQ ID NO: 549415 - RNA, 19 nt, Artificial Sequence
  Description of Artificial Sequence: Synthetic oligonucleotide
aaacuaaccugaguccagc

SEQ ID NO: 549416 - RNA, 19 nt, Artificial Sequence
  Description of Artificial Sequence: Synthetic oligonucleotide
cacacuucagguuauguac

SEQ ID NO: 549417 - RNA, 19 nt, Artificial Sequence
  Description of Artificial Sequence: Synthetic oligonucleotide
uuucaagagccucucaccu

SEQ ID NO: 549418 - RNA, 19 nt, Artificial Sequence
  Description of Artificial Sequence: Synthetic oligonucleotide
auaggagccaaggauggcc

SEQ ID NO: 549419 - RNA, 19 nt, Artificial Sequence
  Description of Artificial Sequence: Synthetic oligonucleotide
uaaacggcuuuaaucucgg

SEQ ID NO: 549420 - RNA, 19 nt, Artificial Sequence
  Description of Artificial Sequence: Synthetic oligonucleotide
ggggaaaucaccuucuuag

SEQ ID NO: 549421 - RNA, 19 nt, Artificial Sequence
  Description of Artificial Sequence: Synthetic oligonucleotide
ugccugacucaaaagaccc

SEQ ID NO: 549422 - RNA, 19 nt, Artificial Sequence
  Description of Artificial Sequence: Synthetic oligonucleotide
acggcuuuaaucucgguca

SEQ ID NO: 549423 - RNA, 19 nt, Artificial Sequence
  Description of Artificial Sequence: Synthetic oligonucleotide
cuaaccugaguccagcccc

SEQ ID NO: 549424 - RNA, 19 nt, Artificial Sequence
  Description of Artificial Sequence: Synthetic oligonucleotide
ugcgauaggagccaaggau

SEQ ID NO: 549425 - RNA, 19 nt, Artificial Sequence
  Description of Artificial Sequence: Synthetic oligonucleotide
cucuucuugcgauaggagc

SEQ ID NO: 549426 - RNA, 19 nt, Artificial Sequence
  Description of Artificial Sequence: Synthetic oligonucleotide
uacaacccaaguugggagg

SEQ ID NO: 549427 - RNA, 19 nt, Artificial Sequence
  Description of Artificial Sequence: Synthetic oligonucleotide
guguuaaacggcuuuaauc

SEQ ID NO: 549428 - RNA, 19 nt, Artificial Sequence
  Description of Artificial Sequence: Synthetic oligonucleotide
uggugccugacucaaaaga

SEQ ID NO: 549429 - RNA, 19 nt, Artificial Sequence
  Description of Artificial Sequence: Synthetic oligonucleotide
ucaacauguucuguucugg

SEQ ID NO: 549430 - RNA, 19 nt, Artificial Sequence
  Description of Artificial Sequence: Synthetic oligonucleotide
agaaaguacaacccaaguu

SEQ ID NO: 549431 - RNA, 19 nt, Artificial Sequence
  Description of Artificial Sequence: Synthetic oligonucleotide
auaaaguacacgggaaaag

SEQ ID NO: 549432 - RNA, 19 nt, Artificial Sequence
  Description of Artificial Sequence: Synthetic oligonucleotide
uguugcucccacuagggac

SEQ ID NO: 549433 - RNA, 19 nt, Artificial Sequence
  Description of Artificial Sequence: Synthetic oligonucleotide
aaggccgacccaguggugc

SEQ ID NO: 549434 - RNA, 19 nt, Artificial Sequence
  Description of Artificial Sequence: Synthetic oligonucleotide
ugcauaaaguacacgggaa

SEQ ID NO: 549435 - RNA, 19 nt, Artificial Sequence
  Description of Artificial Sequence: Synthetic oligonucleotide
agaguccagagacugucgg

SEQ ID NO: 549436 - RNA, 19 nt, Artificial Sequence
  Description of Artificial Sequence: Synthetic oligonucleotide
ucaaaagaccccacgggaa

SEQ ID NO: 549437 - RNA, 19 nt, Artificial Sequence
  Description of Artificial Sequence: Synthetic oligonucleotide
uaacuaucccacugucugg

SEQ ID NO: 549438 - RNA, 19 nt, Artificial Sequence
  Description of Artificial Sequence: Synthetic oligonucleotide
aaauggcuuacuggggagg

SEQ ID NO: 549439 - RNA, 19 nt, Artificial Sequence
  Description of Artificial Sequence: Synthetic oligonucleotide
uccaaggccgacccagugg

SEQ ID NO: 549440 - RNA, 19 nt, Artificial Sequence
  Description of Artificial Sequence: Synthetic oligonucleotide
cuucagguuauguacaaga

SEQ ID NO: 549441 - RNA, 19 nt, Artificial Sequence
  Description of Artificial Sequence: Synthetic oligonucleotide
agaaccagucacuuccuug

SEQ ID NO: 549442 - RNA, 19 nt, Artificial Sequence
  Description of Artificial Sequence: Synthetic oligonucleotide
gguguaagguccaaggccg

SEQ ID NO: 549443 - RNA, 19 nt, Artificial Sequence
  Description of Artificial Sequence: Synthetic oligonucleotide
ggaagaacauauacaaggg

SEQ ID NO: 549444 - RNA, 19 nt, Artificial Sequence
  Description of Artificial Sequence: Synthetic oligonucleotide
ugaucaacauguucuguuc

SEQ ID NO: 549445 - RNA, 19 nt, Artificial Sequence
  Description of Artificial Sequence: Synthetic oligonucleotide
uaaucucggucauugcggc

SEQ ID NO: 549446 - RNA, 19 nt, Artificial Sequence
  Description of Artificial Sequence: Synthetic oligonucleotide
ugucggaccucucggaucu

SEQ ID NO: 549447 - RNA, 19 nt, Artificial Sequence
  Description of Artificial Sequence: Synthetic oligonucleotide
aguccagagacugucgggg

SEQ ID NO: 549448 - RNA, 19 nt, Artificial Sequence
  Description of Artificial Sequence: Synthetic oligonucleotide
agucucagggccuuuggug

SEQ ID NO: 549449 - RNA, 19 nt, Artificial Sequence
  Description of Artificial Sequence: Synthetic oligonucleotide
ugaacuccccacuacucca

SEQ ID NO: 549450 - RNA, 19 nt, Artificial Sequence
  Description of Artificial Sequence: Synthetic oligonucleotide
aaccagucacuuccuugcg

SEQ ID NO: 549451 - RNA, 19 nt, Artificial Sequence
  Description of Artificial Sequence: Synthetic oligonucleotide
acugucgggguguaagguc

SEQ ID NO: 549452 - RNA, 19 nt, Artificial Sequence
  Description of Artificial Sequence: Synthetic oligonucleotide
aucaacauguucuguucug

SEQ ID NO: 549453 - RNA, 19 nt, Artificial Sequence
  Description of Artificial Sequence: Synthetic oligonucleotide
uugcgcuugggcgaggugg

SEQ ID NO: 549454 - RNA, 19 nt, Artificial Sequence
  Description of Artificial Sequence: Synthetic oligonucleotide
uccucuggccgaaacucgg

SEQ ID NO: 549455 - RNA, 19 nt, Artificial Sequence
  Description of Artificial Sequence: Synthetic oligonucleotide
uguguuaaacggcuuuaau

SEQ ID NO: 549456 - RNA, 19 nt, Artificial Sequence
  Description of Artificial Sequence: Synthetic oligonucleotide
uggcacuagggaaaggacu

SEQ ID NO: 549457 - RNA, 19 nt, Artificial Sequence
  Description of Artificial Sequence: Synthetic oligonucleotide
ugaaggucacacacuucag

SEQ ID NO: 549458 - RNA, 19 nt, Artificial Sequence
  Description of Artificial Sequence: Synthetic oligonucleotide
ugaggaguagggcacuuuc

SEQ ID NO: 549459 - RNA, 19 nt, Artificial Sequence
  Description of Artificial Sequence: Synthetic oligonucleotide
uauugcacaugaucaacau

SEQ ID NO: 549460 - RNA, 19 nt, Artificial Sequence
  Description of Artificial Sequence: Synthetic oligonucleotide
aaguacaacccaaguuggg

SEQ ID NO: 549461 - RNA, 19 nt, Artificial Sequence
  Description of Artificial Sequence: Synthetic oligonucleotide
caaacuaaccugaguccag

SEQ ID NO: 549462 - RNA, 19 nt, Artificial Sequence
  Description of Artificial Sequence: Synthetic oligonucleotide
cugucgggguguaaggucc

SEQ ID NO: 549463 - RNA, 19 nt, Artificial Sequence
  Description of Artificial Sequence: Synthetic oligonucleotide
cuacuguccauauccugag

SEQ ID NO: 549464 - RNA, 19 nt, Artificial Sequence
  Description of Artificial Sequence: Synthetic oligonucleotide
cuauuauccuccagcucgc

SEQ ID NO: 549465 - RNA, 19 nt, Artificial Sequence
  Description of Artificial Sequence: Synthetic oligonucleotide
uggcuuacuggggaggagg

SEQ ID NO: 549466 - RNA, 19 nt, Artificial Sequence
  Description of Artificial Sequence: Synthetic oligonucleotide
gguuccgagcuacagcucg

SEQ ID NO: 549467 - RNA, 19 nt, Artificial Sequence
  Description of Artificial Sequence: Synthetic oligonucleotide
aguacaacccaaguuggga

SEQ ID NO: 549468 - RNA, 19 nt, Artificial Sequence
  Description of Artificial Sequence: Synthetic oligonucleotide
gaccccacgggaaugcugg

SEQ ID NO: 549469 - RNA, 19 nt, Artificial Sequence
  Description of Artificial Sequence: Synthetic oligonucleotide
ugccugugcggucaaaggu

SEQ ID NO: 549470 - RNA, 19 nt, Artificial Sequence
  Description of Artificial Sequence: Synthetic oligonucleotide
aaaagaccccacgggaaug

SEQ ID NO: 549471 - RNA, 19 nt, Artificial Sequence
  Description of Artificial Sequence: Synthetic oligonucleotide
ugcaugaacuccccacuac

SEQ ID NO: 549472 - RNA, 19 nt, Artificial Sequence
  Description of Artificial Sequence: Synthetic oligonucleotide
ugggcagaaugguagcagc

SEQ ID NO: 549473 - RNA, 19 nt, Artificial Sequence
  Description of Artificial Sequence: Synthetic oligonucleotide
agacugucgggguguaagg

SEQ ID NO: 549474 - RNA, 19 nt, Artificial Sequence
  Description of Artificial Sequence: Synthetic oligonucleotide
ugugcggucaaaggugaag

SEQ ID NO: 549475 - RNA, 19 nt, Artificial Sequence
  Description of Artificial Sequence: Synthetic oligonucleotide
gucauugcggcuucucggc

SEQ ID NO: 549476 - RNA, 19 nt, Artificial Sequence
  Description of Artificial Sequence: Synthetic oligonucleotide
uccacgccagaccggaaag

SEQ ID NO: 549477 - RNA, 19 nt, Artificial Sequence
  Description of Artificial Sequence: Synthetic oligonucleotide
uucucggcacaguaaagaa

SEQ ID NO: 549478 - RNA, 19 nt, Artificial Sequence
  Description of Artificial Sequence: Synthetic oligonucleotide
aauggcuuacuggggagga

SEQ ID NO: 549479 - RNA, 19 nt, Artificial Sequence
  Description of Artificial Sequence: Synthetic oligonucleotide
ggucauugcggcuucucgg

SEQ ID NO: 549480 - RNA, 19 nt, Artificial Sequence
  Description of Artificial Sequence: Synthetic oligonucleotide
aaaggguggggaaaauccu

SEQ ID NO: 549481 - RNA, 19 nt, Artificial Sequence
  Description of Artificial Sequence: Synthetic oligonucleotide
uccugggaucuuuucaaga

SEQ ID NO: 549482 - RNA, 19 nt, Artificial Sequence
  Description of Artificial Sequence: Synthetic oligonucleotide
caguggaggggaaaucacc

SEQ ID NO: 549483 - RNA, 19 nt, Artificial Sequence
  Description of Artificial Sequence: Synthetic oligonucleotide
cucaaaagaccccacggga

SEQ ID NO: 549484 - RNA, 19 nt, Artificial Sequence
  Description of Artificial Sequence: Synthetic oligonucleotide
guuaaacggcuuuaaucuc

SEQ ID NO: 549485 - RNA, 19 nt, Artificial Sequence
  Description of Artificial Sequence: Synthetic oligonucleotide
acaacccaaguugggaggg

SEQ ID NO: 549486 - RNA, 19 nt, Artificial Sequence
  Description of Artificial Sequence: Synthetic oligonucleotide
agaacauauacaaggggaa

SEQ ID NO: 549487 - RNA, 19 nt, Artificial Sequence
  Description of Artificial Sequence: Synthetic oligonucleotide
uguggcccaaggcucacac

SEQ ID NO: 549488 - RNA, 19 nt, Artificial Sequence
  Description of Artificial Sequence: Synthetic oligonucleotide
cacuuggcacucuucgggg

SEQ ID NO: 549489 - RNA, 19 nt, Artificial Sequence
  Description of Artificial Sequence: Synthetic oligonucleotide
guagcagccaugccaguug

SEQ ID NO: 549490 - RNA, 19 nt, Artificial Sequence
  Description of Artificial Sequence: Synthetic oligonucleotide
ccgagcuacagcucgaacg

SEQ ID NO: 549491 - RNA, 19 nt, Artificial Sequence
  Description of Artificial Sequence: Synthetic oligonucleotide
uucucgggcugcaccagag

SEQ ID NO: 549492 - RNA, 19 nt, Artificial Sequence
  Description of Artificial Sequence: Synthetic oligonucleotide
uccagagacugucggggug

SEQ ID NO: 549493 - RNA, 19 nt, Artificial Sequence
  Description of Artificial Sequence: Synthetic oligonucleotide
aguacacgggaaaagcucu

SEQ ID NO: 549494 - RNA, 19 nt, Artificial Sequence
  Description of Artificial Sequence: Synthetic oligonucleotide
cuugcgcucaggugugucc

SEQ ID NO: 549495 - RNA, 19 nt, Artificial Sequence
  Description of Artificial Sequence: Synthetic oligonucleotide
ggagccacucugcauaaag

SEQ ID NO: 549496 - RNA, 19 nt, Artificial Sequence
  Description of Artificial Sequence: Synthetic oligonucleotide
uacuguagguccugggauc

SEQ ID NO: 549497 - RNA, 19 nt, Artificial Sequence
  Description of Artificial Sequence: Synthetic oligonucleotide
uacagcucgaacgucuccu

SEQ ID NO: 549498 - RNA, 19 nt, Artificial Sequence
  Description of Artificial Sequence: Synthetic oligonucleotide
ucuggccgaaacucgggca

SEQ ID NO: 549499 - RNA, 19 nt, Artificial Sequence
  Description of Artificial Sequence: Synthetic oligonucleotide
uugcgauaggagccaagga

SEQ ID NO: 549500 - RNA, 19 nt, Artificial Sequence
  Description of Artificial Sequence: Synthetic oligonucleotide
acuagggaaaggacuagug

SEQ ID NO: 549501 - RNA, 19 nt, Artificial Sequence
  Description of Artificial Sequence: Synthetic oligonucleotide
guuauguacaagagcucug

SEQ ID NO: 549502 - RNA, 19 nt, Artificial Sequence
  Description of Artificial Sequence: Synthetic oligonucleotide
guagggcacuuucucauac

SEQ ID NO: 549503 - RNA, 19 nt, Artificial Sequence
  Description of Artificial Sequence: Synthetic oligonucleotide
aguggaggggaaaucaccu

SEQ ID NO: 549504 - RNA, 19 nt, Artificial Sequence
  Description of Artificial Sequence: Synthetic oligonucleotide
cuguaggucauggagccug

SEQ ID NO: 549505 - RNA, 19 nt, Artificial Sequence
  Description of Artificial Sequence: Synthetic oligonucleotide
guagaccaggcuuggagga

SEQ ID NO: 549506 - RNA, 19 nt, Artificial Sequence
  Description of Artificial Sequence: Synthetic oligonucleotide
acaguggaggggaaaucac

SEQ ID NO: 549507 - RNA, 19 nt, Artificial Sequence
  Description of Artificial Sequence: Synthetic oligonucleotide
cuggccgaaacucgggcag

SEQ ID NO: 549508 - RNA, 19 nt, Artificial Sequence
  Description of Artificial Sequence: Synthetic oligonucleotide
cacuacugccacucgcugc

SEQ ID NO: 549509 - RNA, 19 nt, Artificial Sequence
  Description of Artificial Sequence: Synthetic oligonucleotide
acuagggacugucgcagga

SEQ ID NO: 549510 - RNA, 19 nt, Artificial Sequence
  Description of Artificial Sequence: Synthetic oligonucleotide
uucacagaaccagucacuu

SEQ ID NO: 549511 - RNA, 19 nt, Artificial Sequence
  Description of Artificial Sequence: Synthetic oligonucleotide
cucauacuccagcuccccg

SEQ ID NO: 549512 - RNA, 19 nt, Artificial Sequence
  Description of Artificial Sequence: Synthetic oligonucleotide
ugugggaguggcugccugc

SEQ ID NO: 549513 - RNA, 19 nt, Artificial Sequence
  Description of Artificial Sequence: Synthetic oligonucleotide
ucugucggaccucucggau

SEQ ID NO: 549514 - RNA, 19 nt, Artificial Sequence
  Description of Artificial Sequence: Synthetic oligonucleotide
agugccugugcggucaaag

SEQ ID NO: 549515 - RNA, 19 nt, Artificial Sequence
  Description of Artificial Sequence: Synthetic oligonucleotide
gaaaauccuccccaugccu

SEQ ID NO: 549516 - RNA, 19 nt, Artificial Sequence
  Description of Artificial Sequence: Synthetic oligonucleotide
gugccugugcggucaaagg

SEQ ID NO: 549517 - RNA, 19 nt, Artificial Sequence
  Description of Artificial Sequence: Synthetic oligonucleotide
uccagggugcgccgcaaug

SEQ ID NO: 549518 - RNA, 19 nt, Artificial Sequence
  Description of Artificial Sequence: Synthetic oligonucleotide
cauaaaguacacgggaaaa

SEQ ID NO: 549519 - RNA, 19 nt, Artificial Sequence
  Description of Artificial Sequence: Synthetic oligonucleotide
uccucaggcgccgagucca

SEQ ID NO: 549520 - RNA, 19 nt, Artificial Sequence
  Description of Artificial Sequence: Synthetic oligonucleotide
ccccaaacuaaccugaguc

SEQ ID NO: 549521 - RNA, 19 nt, Artificial Sequence
  Description of Artificial Sequence: Synthetic oligonucleotide
ugcgccgcaaugaggagua

SEQ ID NO: 549522 - RNA, 19 nt, Artificial Sequence
  Description of Artificial Sequence: Synthetic oligonucleotide
ucauugcggcuucucggca

SEQ ID NO: 549523 - RNA, 19 nt, Artificial Sequence
  Description of Artificial Sequence: Synthetic oligonucleotide
ggaaaucaccuucuuagaa

SEQ ID NO: 549524 - RNA, 19 nt, Artificial Sequence
  Description of Artificial Sequence: Synthetic oligonucleotide
uaaccugaguccagccccu

SEQ ID NO: 549525 - RNA, 19 nt, Artificial Sequence
  Description of Artificial Sequence: Synthetic oligonucleotide
cccaaacuaaccugagucc

SEQ ID NO: 549526 - RNA, 19 nt, Artificial Sequence
  Description of Artificial Sequence: Synthetic oligonucleotide
aggccgacccaguggugcc

SEQ ID NO: 549527 - RNA, 19 nt, Artificial Sequence
  Description of Artificial Sequence: Synthetic oligonucleotide
gugccugacucaaaagacc

SEQ ID NO: 549528 - RNA, 19 nt, Artificial Sequence
  Description of Artificial Sequence: Synthetic oligonucleotide
agguuauguacaagagcuc

SEQ ID NO: 549529 - RNA, 19 nt, Artificial Sequence
  Description of Artificial Sequence: Synthetic oligonucleotide
guuggguuccgagcuacag

SEQ ID NO: 549530 - RNA, 19 nt, Artificial Sequence
  Description of Artificial Sequence: Synthetic oligonucleotide
gguacuguagguccuggga

SEQ ID NO: 549531 - RNA, 19 nt, Artificial Sequence
  Description of Artificial Sequence: Synthetic oligonucleotide
acuucagguuauguacaag

SEQ ID NO: 549532 - RNA, 19 nt, Artificial Sequence
  Description of Artificial Sequence: Synthetic oligonucleotide
guaagguccaaggccgacc

SEQ ID NO: 549533 - RNA, 19 nt, Artificial Sequence
  Description of Artificial Sequence: Synthetic oligonucleotide
ccugcguugguccagggug

SEQ ID NO: 549534 - RNA, 19 nt, Artificial Sequence
  Description of Artificial Sequence: Synthetic oligonucleotide
gccgcaaugaggaguaggg

SEQ ID NO: 549535 - RNA, 19 nt, Artificial Sequence
  Description of Artificial Sequence: Synthetic oligonucleotide
ggaggagguaacuauccca

SEQ ID NO: 549536 - RNA, 19 nt, Artificial Sequence
  Description of Artificial Sequence: Synthetic oligonucleotide
ucuucgggguguuggguuc

SEQ ID NO: 549537 - RNA, 19 nt, Artificial Sequence
  Description of Artificial Sequence: Synthetic oligonucleotide
gagguaacuaucccacugu

SEQ ID NO: 549538 - RNA, 19 nt, Artificial Sequence
  Description of Artificial Sequence: Synthetic oligonucleotide
cauugcggcuucucggcac

SEQ ID NO: 549539 - RNA, 19 nt, Artificial Sequence
  Description of Artificial Sequence: Synthetic oligonucleotide
cucgggcugcaccagaguc

SEQ ID NO: 549540 - RNA, 19 nt, Artificial Sequence
  Description of Artificial Sequence: Synthetic oligonucleotide
cucuggccgaaacucgggc

SEQ ID NO: 549541 - RNA, 19 nt, Artificial Sequence
  Description of Artificial Sequence: Synthetic oligonucleotide
aggagccaaggauggcccg

SEQ ID NO: 549542 - RNA, 19 nt, Artificial Sequence
  Description of Artificial Sequence: Synthetic oligonucleotide
cuucucggcacaguaaaga

SEQ ID NO: 549543 - RNA, 19 nt, Artificial Sequence
  Description of Artificial Sequence: Synthetic oligonucleotide
uccccgagcacguccucag

SEQ ID NO: 549544 - RNA, 19 nt, Artificial Sequence
  Description of Artificial Sequence: Synthetic oligonucleotide
gaauuugcuggcagucuca

SEQ ID NO: 549545 - RNA, 19 nt, Artificial Sequence
  Description of Artificial Sequence: Synthetic oligonucleotide
uugcgcucagguguguccc

SEQ ID NO: 549546 - RNA, 19 nt, Artificial Sequence
  Description of Artificial Sequence: Synthetic oligonucleotide
auugcggcuucucggcaca

SEQ ID NO: 549547 - RNA, 19 nt, Artificial Sequence
  Description of Artificial Sequence: Synthetic oligonucleotide
acacuucagguuauguaca

SEQ ID NO: 549548 - RNA, 19 nt, Artificial Sequence
  Description of Artificial Sequence: Synthetic oligonucleotide
aaacggcuuuaaucucggu

SEQ ID NO: 549549 - RNA, 19 nt, Artificial Sequence
  Description of Artificial Sequence: Synthetic oligonucleotide
cacuauuauccuccagcuc

SEQ ID NO: 549550 - RNA, 19 nt, Artificial Sequence
  Description of Artificial Sequence: Synthetic oligonucleotide
agcuacagcucgaacgucu

SEQ ID NO: 549551 - RNA, 19 nt, Artificial Sequence
  Description of Artificial Sequence: Synthetic oligonucleotide
uguaagguccaaggccgac

SEQ ID NO: 549552 - RNA, 19 nt, Artificial Sequence
  Description of Artificial Sequence: Synthetic oligonucleotide
gcgauaggagccaaggaug

SEQ ID NO: 549553 - RNA, 19 nt, Artificial Sequence
  Description of Artificial Sequence: Synthetic oligonucleotide
cucccacuagggacugucg

SEQ ID NO: 549554 - RNA, 19 nt, Artificial Sequence
  Description of Artificial Sequence: Synthetic oligonucleotide
aggggaaaucaccuucuua

SEQ ID NO: 549555 - RNA, 19 nt, Artificial Sequence
  Description of Artificial Sequence: Synthetic oligonucleotide
ugcggucaaaggugaagau

SEQ ID NO: 549556 - RNA, 19 nt, Artificial Sequence
  Description of Artificial Sequence: Synthetic oligonucleotide
aggagguaacuaucccacu

SEQ ID NO: 549557 - RNA, 19 nt, Artificial Sequence
  Description of Artificial Sequence: Synthetic oligonucleotide
agaccggaaaggacaaaug

SEQ ID NO: 549558 - RNA, 19 nt, Artificial Sequence
  Description of Artificial Sequence: Synthetic oligonucleotide
accccaaacuaaccugagu

SEQ ID NO: 549559 - RNA, 19 nt, Artificial Sequence
  Description of Artificial Sequence: Synthetic oligonucleotide
gggguguaagguccaaggc

SEQ ID NO: 549560 - RNA, 19 nt, Artificial Sequence
  Description of Artificial Sequence: Synthetic oligonucleotide
cacuagggacugucgcagg

SEQ ID NO: 549561 - RNA, 19 nt, Artificial Sequence
  Description of Artificial Sequence: Synthetic oligonucleotide
ucgggcagcucagcaaacc

SEQ ID NO: 549562 - RNA, 19 nt, Artificial Sequence
  Description of Artificial Sequence: Synthetic oligonucleotide
ucgaacgucuccucaucuu

SEQ ID NO: 549563 - RNA, 19 nt, Artificial Sequence
  Description of Artificial Sequence: Synthetic oligonucleotide
gcauaaaguacacgggaaa

SEQ ID NO: 549564 - RNA, 19 nt, Artificial Sequence
  Description of Artificial Sequence: Synthetic oligonucleotide
ggcagaaugguagcagcag

SEQ ID NO: 549565 - RNA, 19 nt, Artificial Sequence
  Description of Artificial Sequence: Synthetic oligonucleotide
ugucgggguguaaggucca

SEQ ID NO: 549566 - RNA, 19 nt, Artificial Sequence
  Description of Artificial Sequence: Synthetic oligonucleotide
uccgagcuacagcucgaac

SEQ ID NO: 549567 - RNA, 19 nt, Artificial Sequence
  Description of Artificial Sequence: Synthetic oligonucleotide
gguuauguacaagagcucu

SEQ ID NO: 549568 - RNA, 19 nt, Artificial Sequence
  Description of Artificial Sequence: Synthetic oligonucleotide
ugcguugguccagggugcg

SEQ ID NO: 549569 - RNA, 19 nt, Artificial Sequence
  Description of Artificial Sequence: Synthetic oligonucleotide
ugguccggggagaggggcc

SEQ ID NO: 549570 - RNA, 19 nt, Artificial Sequence
  Description of Artificial Sequence: Synthetic oligonucleotide
cagggugcgccgcaaugag

SEQ ID NO: 549571 - RNA, 19 nt, Artificial Sequence
  Description of Artificial Sequence: Synthetic oligonucleotide
aguagggcacuuucucaua

SEQ ID NO: 549572 - RNA, 19 nt, Artificial Sequence
  Description of Artificial Sequence: Synthetic oligonucleotide
ggaguagggcacuuucuca

SEQ ID NO: 549573 - RNA, 19 nt, Artificial Sequence
  Description of Artificial Sequence: Synthetic oligonucleotide
uauuauccuccagcucgca

SEQ ID NO: 549574 - RNA, 19 nt, Artificial Sequence
  Description of Artificial Sequence: Synthetic oligonucleotide
cugucggaccucucggauc

SEQ ID NO: 549575 - RNA, 19 nt, Artificial Sequence
  Description of Artificial Sequence: Synthetic oligonucleotide
aauccuccccaugccugug

SEQ ID NO: 549576 - RNA, 19 nt, Artificial Sequence
  Description of Artificial Sequence: Synthetic oligonucleotide
ggcagugccagaguccgag

SEQ ID NO: 549577 - RNA, 19 nt, Artificial Sequence
  Description of Artificial Sequence: Synthetic oligonucleotide
ucgggguguaagguccaag

SEQ ID NO: 549578 - RNA, 19 nt, Artificial Sequence
  Description of Artificial Sequence: Synthetic oligonucleotide
gagccacuaagcuguaggu

SEQ ID NO: 549579 - RNA, 19 nt, Artificial Sequence
  Description of Artificial Sequence: Synthetic oligonucleotide
guacuguagguccugggau

SEQ ID NO: 549580 - RNA, 19 nt, Artificial Sequence
  Description of Artificial Sequence: Synthetic oligonucleotide
aggagcgggaggcucccca

SEQ ID NO: 549581 - RNA, 19 nt, Artificial Sequence
  Description of Artificial Sequence: Synthetic oligonucleotide
accccacgggaaugcuggc

SEQ ID NO: 549582 - RNA, 19 nt, Artificial Sequence
  Description of Artificial Sequence: Synthetic oligonucleotide
cuuggaugggaagaugucu

SEQ ID NO: 549583 - RNA, 19 nt, Artificial Sequence
  Description of Artificial Sequence: Synthetic oligonucleotide
ucggcacaguaaagaaaua

SEQ ID NO: 549584 - RNA, 19 nt, Artificial Sequence
  Description of Artificial Sequence: Synthetic oligonucleotide
aaccugaguccagccccuc

SEQ ID NO: 549585 - RNA, 19 nt, Artificial Sequence
  Description of Artificial Sequence: Synthetic oligonucleotide
aggggccggagggaggugg

SEQ ID NO: 549586 - RNA, 19 nt, Artificial Sequence
  Description of Artificial Sequence: Synthetic oligonucleotide
caucuugcgcuugggcgag

SEQ ID NO: 549587 - RNA, 19 nt, Artificial Sequence
  Description of Artificial Sequence: Synthetic oligonucleotide
ccucucaccugccuguggc

SEQ ID NO: 549588 - RNA, 19 nt, Artificial Sequence
  Description of Artificial Sequence: Synthetic oligonucleotide
guggcacuagggaaaggac

SEQ ID NO: 549589 - RNA, 19 nt, Artificial Sequence
  Description of Artificial Sequence: Synthetic oligonucleotide
ucugcauagcgggcuugga

SEQ ID NO: 549590 - RNA, 19 nt, Artificial Sequence
  Description of Artificial Sequence: Synthetic oligonucleotide
ugcgcucaggugugucccc

SEQ ID NO: 549591 - RNA, 19 nt, Artificial Sequence
  Description of Artificial Sequence: Synthetic oligonucleotide
guacacgggaaaagcucug

SEQ ID NO: 549592 - RNA, 19 nt, Artificial Sequence
  Description of Artificial Sequence: Synthetic oligonucleotide
gccacucugcauaaaguac

SEQ ID NO: 549593 - RNA, 19 nt, Artificial Sequence
  Description of Artificial Sequence: Synthetic oligonucleotide
gcggucaaaggugaagaug

SEQ ID NO: 549594 - RNA, 19 nt, Artificial Sequence
  Description of Artificial Sequence: Synthetic oligonucleotide
guugcucccacuagggacu

SEQ ID NO: 549595 - RNA, 19 nt, Artificial Sequence
  Description of Artificial Sequence: Synthetic oligonucleotide
auggcuuacuggggaggag

SEQ ID NO: 549596 - RNA, 19 nt, Artificial Sequence
  Description of Artificial Sequence: Synthetic oligonucleotide
cccaccccaaacuaaccug

SEQ ID NO: 549597 - RNA, 19 nt, Artificial Sequence
  Description of Artificial Sequence: Synthetic oligonucleotide
gccugugcggucaaaggug

SEQ ID NO: 549598 - RNA, 19 nt, Artificial Sequence
  Description of Artificial Sequence: Synthetic oligonucleotide
cugggcugaugggaagaag

SEQ ID NO: 549599 - RNA, 19 nt, Artificial Sequence
  Description of Artificial Sequence: Synthetic oligonucleotide
guccacgccagaccggaaa

SEQ ID NO: 549600 - RNA, 19 nt, Artificial Sequence
  Description of Artificial Sequence: Synthetic oligonucleotide
cacgccagaccggaaagga

SEQ ID NO: 549601 - RNA, 19 nt, Artificial Sequence
  Description of Artificial Sequence: Synthetic oligonucleotide
gggugcgccgcaaugagga

SEQ ID NO: 549602 - RNA, 19 nt, Artificial Sequence
  Description of Artificial Sequence: Synthetic oligonucleotide
agggugcgccgcaaugagg

SEQ ID NO: 549603 - RNA, 19 nt, Artificial Sequence
  Description of Artificial Sequence: Synthetic oligonucleotide
ggggaauuugcuggcaguc

SEQ ID NO: 549604 - RNA, 19 nt, Artificial Sequence
  Description of Artificial Sequence: Synthetic oligonucleotide
ggugcugaggugggugcgg

SEQ ID NO: 549605 - RNA, 19 nt, Artificial Sequence
  Description of Artificial Sequence: Synthetic oligonucleotide
ccacuagggacugucgcag

SEQ ID NO: 549606 - RNA, 19 nt, Artificial Sequence
  Description of Artificial Sequence: Synthetic oligonucleotide
uuccgagcuacagcucgaa

SEQ ID NO: 549607 - RNA, 19 nt, Artificial Sequence
  Description of Artificial Sequence: Synthetic oligonucleotide
cagucacuuccuugcgcuc

SEQ ID NO: 549608 - RNA, 19 nt, Artificial Sequence
  Description of Artificial Sequence: Synthetic oligonucleotide
cacuacuccacaggcaucu

SEQ ID NO: 549609 - RNA, 19 nt, Artificial Sequence
  Description of Artificial Sequence: Synthetic oligonucleotide
gugguccggggagaggggc

SEQ ID NO: 549610 - RNA, 19 nt, Artificial Sequence
  Description of Artificial Sequence: Synthetic oligonucleotide
cuuugggcuggcccucuga

SEQ ID NO: 549611 - RNA, 19 nt, Artificial Sequence
  Description of Artificial Sequence: Synthetic oligonucleotide
ucggaccucucggaucuuc

SEQ ID NO: 549612 - RNA, 19 nt, Artificial Sequence
  Description of Artificial Sequence: Synthetic oligonucleotide
cacuaagcuguaggucaug

SEQ ID NO: 549613 - RNA, 19 nt, Artificial Sequence
  Description of Artificial Sequence: Synthetic oligonucleotide
cacgggaaugcuggcgaug

SEQ ID NO: 549614 - RNA, 19 nt, Artificial Sequence
  Description of Artificial Sequence: Synthetic oligonucleotide
uucuugcgauaggagccaa

SEQ ID NO: 549615 - RNA, 19 nt, Artificial Sequence
  Description of Artificial Sequence: Synthetic oligonucleotide
uugcucccacuagggacug

SEQ ID NO: 549616 - RNA, 19 nt, Artificial Sequence
  Description of Artificial Sequence: Synthetic oligonucleotide
ucgucuccgccccgcccgc

SEQ ID NO: 549617 - RNA, 19 nt, Artificial Sequence
  Description of Artificial Sequence: Synthetic oligonucleotide
agaccccacgggaaugcug

SEQ ID NO: 549618 - RNA, 19 nt, Artificial Sequence
  Description of Artificial Sequence: Synthetic oligonucleotide
gcaugaacuccccacuacu

SEQ ID NO: 549619 - RNA, 19 nt, Artificial Sequence
  Description of Artificial Sequence: Synthetic oligonucleotide
ggggcggccagucgucucc

SEQ ID NO: 549620 - RNA, 19 nt, Artificial Sequence
  Description of Artificial Sequence: Synthetic oligonucleotide
gacugucgggguguaaggu

SEQ ID NO: 549621 - RNA, 19 nt, Artificial Sequence
  Description of Artificial Sequence: Synthetic oligonucleotide
gugggguccucaggcgccg

SEQ ID NO: 549622 - RNA, 19 nt, Artificial Sequence
  Description of Artificial Sequence: Synthetic oligonucleotide
ugggaguggcugccugcau

SEQ ID NO: 549623 - RNA, 19 nt, Artificial Sequence
  Description of Artificial Sequence: Synthetic oligonucleotide
ccaugccuguggcaaagug

SEQ ID NO: 549624 - RNA, 19 nt, Artificial Sequence
  Description of Artificial Sequence: Synthetic oligonucleotide
cgaaacucgggcagcucag

SEQ ID NO: 549625 - RNA, 19 nt, Artificial Sequence
  Description of Artificial Sequence: Synthetic oligonucleotide
ccaccccaaacuaaccuga

SEQ ID NO: 549626 - RNA, 19 nt, Artificial Sequence
  Description of Artificial Sequence: Synthetic oligonucleotide
gcuucucggcacaguaaag

SEQ ID NO: 549627 - RNA, 19 nt, Artificial Sequence
  Description of Artificial Sequence: Synthetic oligonucleotide
caaggccgacccaguggug

SEQ ID NO: 549628 - RNA, 19 nt, Artificial Sequence
  Description of Artificial Sequence: Synthetic oligonucleotide
guaggucauggagccugug

SEQ ID NO: 549629 - RNA, 19 nt, Artificial Sequence
  Description of Artificial Sequence: Synthetic oligonucleotide
cggucauugcggcuucucg

SEQ ID NO: 549630 - RNA, 19 nt, Artificial Sequence
  Description of Artificial Sequence: Synthetic oligonucleotide
caguccacgccagaccgga

SEQ ID NO: 549631 - RNA, 19 nt, Artificial Sequence
  Description of Artificial Sequence: Synthetic oligonucleotide
cagcucgaacgucuccuca

SEQ ID NO: 549632 - RNA, 19 nt, Artificial Sequence
  Description of Artificial Sequence: Synthetic oligonucleotide
gagcuacagcucgaacguc

SEQ ID NO: 549633 - RNA, 19 nt, Artificial Sequence
  Description of Artificial Sequence: Synthetic oligonucleotide
gaggugggaucaggacccc

SEQ ID NO: 549634 - RNA, 19 nt, Artificial Sequence
  Description of Artificial Sequence: Synthetic oligonucleotide
gcucagguguguccccagc

SEQ ID NO: 549635 - RNA, 19 nt, Artificial Sequence
  Description of Artificial Sequence: Synthetic oligonucleotide
ccgaaacucgggcagcuca

SEQ ID NO: 549636 - RNA, 19 nt, Artificial Sequence
  Description of Artificial Sequence: Synthetic oligonucleotide
cucagguguguccccagcu

SEQ ID NO: 549637 - RNA, 19 nt, Artificial Sequence
  Description of Artificial Sequence: Synthetic oligonucleotide
ggugcgccgcaaugaggag

SEQ ID NO: 549638 - RNA, 19 nt, Artificial Sequence
  Description of Artificial Sequence: Synthetic oligonucleotide
cagaccggaaaggacaaau

SEQ ID NO: 549639 - RNA, 19 nt, Artificial Sequence
  Description of Artificial Sequence: Synthetic oligonucleotide
ccugugcggucaaagguga

SEQ ID NO: 549640 - RNA, 19 nt, Artificial Sequence
  Description of Artificial Sequence: Synthetic oligonucleotide
cucaggcgccgaguccagg

SEQ ID NO: 549641 - RNA, 19 nt, Artificial Sequence
  Description of Artificial Sequence: Synthetic oligonucleotide
agcuccccgagcacguccu

SEQ ID NO: 549642 - RNA, 19 nt, Artificial Sequence
  Description of Artificial Sequence: Synthetic oligonucleotide
guuccgagcuacagcucga

SEQ ID NO: 549643 - RNA, 19 nt, Artificial Sequence
  Description of Artificial Sequence: Synthetic oligonucleotide
cccacuagggacugucgca

SEQ ID NO: 549644 - RNA, 19 nt, Artificial Sequence
  Description of Artificial Sequence: Synthetic oligonucleotide
cgccagaccggaaaggaca

SEQ ID NO: 549645 - RNA, 19 nt, Artificial Sequence
  Description of Artificial Sequence: Synthetic oligonucleotide
guguaagguccaaggccga

SEQ ID NO: 549646 - RNA, 19 nt, Artificial Sequence
  Description of Artificial Sequence: Synthetic oligonucleotide
ggagcgggaggcuccccac

SEQ ID NO: 549647 - RNA, 19 nt, Artificial Sequence
  Description of Artificial Sequence: Synthetic oligonucleotide
gggaaugcuggcgauggcu

SEQ ID NO: 549648 - RNA, 19 nt, Artificial Sequence
  Description of Artificial Sequence: Synthetic oligonucleotide
cccgagcacguccucaguc

SEQ ID NO: 549649 - RNA, 19 nt, Artificial Sequence
  Description of Artificial Sequence: Synthetic oligonucleotide
gcaaaccgcucuucaaagu

SEQ ID NO: 549650 - RNA, 19 nt, Artificial Sequence
  Description of Artificial Sequence: Synthetic oligonucleotide
gcggccagucgucuccgcc

SEQ ID NO: 549651 - RNA, 19 nt, Artificial Sequence
  Description of Artificial Sequence: Synthetic oligonucleotide
agggagggaagaacauaua

SEQ ID NO: 549652 - RNA, 19 nt, Artificial Sequence
  Description of Artificial Sequence: Synthetic oligonucleotide
guccagagacugucggggu

SEQ ID NO: 549653 - RNA, 19 nt, Artificial Sequence
  Description of Artificial Sequence: Synthetic oligonucleotide
gcucccacuagggacuguc

SEQ ID NO: 549654 - RNA, 19 nt, Artificial Sequence
  Description of Artificial Sequence: Synthetic oligonucleotide
cacgacucuccaggcccag

SEQ ID NO: 549655 - RNA, 19 nt, Artificial Sequence
  Description of Artificial Sequence: Synthetic oligonucleotide
cugcagacacaccuuggau

SEQ ID NO: 549656 - RNA, 19 nt, Artificial Sequence
  Description of Artificial Sequence: Synthetic oligonucleotide
gcuacagcucgaacgucuc

SEQ ID NO: 549657 - RNA, 19 nt, Artificial Sequence
  Description of Artificial Sequence: Synthetic oligonucleotide
gaggggaaaucaccuucuu

SEQ ID NO: 549658 - RNA, 19 nt, Artificial Sequence
  Description of Artificial Sequence: Synthetic oligonucleotide
ccgcaaugaggaguagggc

SEQ ID NO: 549659 - RNA, 19 nt, Artificial Sequence
  Description of Artificial Sequence: Synthetic oligonucleotide
cccacgggaaugcuggcga

SEQ ID NO: 549660 - RNA, 19 nt, Artificial Sequence
  Description of Artificial Sequence: Synthetic oligonucleotide
cccgaggcgagguggccag

SEQ ID NO: 549661 - RNA, 19 nt, Artificial Sequence
  Description of Artificial Sequence: Synthetic oligonucleotide
acccaaguugggagggcaa

SEQ ID NO: 549662 - RNA, 19 nt, Artificial Sequence
  Description of Artificial Sequence: Synthetic oligonucleotide
ucgggguguuggguuccga

SEQ ID NO: 549663 - RNA, 19 nt, Artificial Sequence
  Description of Artificial Sequence: Synthetic oligonucleotide
cgggguguuggguuccgag

SEQ ID NO: 549664 - RNA, 19 nt, Artificial Sequence
  Description of Artificial Sequence: Synthetic oligonucleotide
ccacgccagaccggaaagg

SEQ ID NO: 549665 - RNA, 19 nt, Artificial Sequence
  Description of Artificial Sequence: Synthetic oligonucleotide
uccuugcgcucaggugugu

SEQ ID NO: 549666 - RNA, 19 nt, Artificial Sequence
  Description of Artificial Sequence: Synthetic oligonucleotide
gagggagucugugccugcu

SEQ ID NO: 549667 - RNA, 19 nt, Artificial Sequence
  Description of Artificial Sequence: Synthetic oligonucleotide
gguguuggguuccgagcua

SEQ ID NO: 549668 - RNA, 19 nt, Artificial Sequence
  Description of Artificial Sequence: Synthetic oligonucleotide
gggaauuugcuggcagucu

SEQ ID NO: 549669 - RNA, 19 nt, Artificial Sequence
  Description of Artificial Sequence: Synthetic oligonucleotide
cgagcuacagcucgaacgu

SEQ ID NO: 549670 - RNA, 19 nt, Artificial Sequence
  Description of Artificial Sequence: Synthetic oligonucleotide
ccaaggccgacccaguggu

SEQ ID NO: 549671 - RNA, 19 nt, Artificial Sequence
  Description of Artificial Sequence: Synthetic oligonucleotide
gggagccacuaagcuguag

SEQ ID NO: 549672 - RNA, 19 nt, Artificial Sequence
  Description of Artificial Sequence: Synthetic oligonucleotide
ccccacgggaaugcuggcg

SEQ ID NO: 549673 - RNA, 19 nt, Artificial Sequence
  Description of Artificial Sequence: Synthetic oligonucleotide
cgccgcaaugaggaguagg

SEQ ID NO: 549674 - RNA, 19 nt, Artificial Sequence
  Description of Artificial Sequence: Synthetic oligonucleotide
gugcgccgcaaugaggagu

SEQ ID NO: 549675 - RNA, 19 nt, Artificial Sequence
  Description of Artificial Sequence: Synthetic oligonucleotide
cccacuacugccacucgcu

SEQ ID NO: 549676 - RNA, 19 nt, Artificial Sequence
  Description of Artificial Sequence: Synthetic oligonucleotide
ccagucgucuccgccccgc

SEQ ID NO: 549677 - RNA, 19 nt, Artificial Sequence
  Description of Artificial Sequence: Synthetic oligonucleotide
cccaaggcucacacuauua

SEQ ID NO: 549678 - RNA, 19 nt, Artificial Sequence
  Description of Artificial Sequence: Synthetic oligonucleotide
caucucccuguggcccaag

SEQ ID NO: 549679 - RNA, 19 nt, Artificial Sequence
  Description of Artificial Sequence: Synthetic oligonucleotide
ccccaugccuguggcaaag

SEQ ID NO: 549680 - RNA, 19 nt, Artificial Sequence
  Description of Artificial Sequence: Synthetic oligonucleotide
gccagaccggaaaggacaa

SEQ ID NO: 549681 - RNA, 19 nt, Artificial Sequence
  Description of Artificial Sequence: Synthetic oligonucleotide
ugggguccucaggcgccga

SEQ ID NO: 549682 - RNA, 19 nt, Artificial Sequence
  Description of Artificial Sequence: Synthetic oligonucleotide
ccagggugcgccgcaauga

SEQ ID NO: 549683 - RNA, 19 nt, Artificial Sequence
  Description of Artificial Sequence: Synthetic oligonucleotide
caguggugccugacucaaa

SEQ ID NO: 549684 - RNA, 19 nt, Artificial Sequence
  Description of Artificial Sequence: Synthetic oligonucleotide
gggacugcuccgggcagca

SEQ ID NO: 549685 - RNA, 19 nt, Artificial Sequence
  Description of Artificial Sequence: Synthetic oligonucleotide
ccucaggcgccgaguccag

SEQ ID NO: 549686 - RNA, 19 nt, Artificial Sequence
  Description of Artificial Sequence: Synthetic oligonucleotide
ggcuuacuggggaggaggu

SEQ ID NO: 549687 - RNA, 19 nt, Artificial Sequence
  Description of Artificial Sequence: Synthetic oligonucleotide
gcccugcguugguccaggg

SEQ ID NO: 549688 - RNA, 19 nt, Artificial Sequence
  Description of Artificial Sequence: Synthetic oligonucleotide
gcgggaggcuccccacgac

SEQ ID NO: 549689 - RNA, 19 nt, Artificial Sequence
  Description of Artificial Sequence: Synthetic oligonucleotide
gccgacccaguggugccug

SEQ ID NO: 549690 - RNA, 19 nt, Artificial Sequence
  Description of Artificial Sequence: Synthetic oligonucleotide
cgaggcgagguggccagag

SEQ ID NO: 549691 - RNA, 19 nt, Artificial Sequence
  Description of Artificial Sequence: Synthetic oligonucleotide
ccuugcgcucagguguguc

SEQ ID NO: 549692 - RNA, 19 nt, Artificial Sequence
  Description of Artificial Sequence: Synthetic oligonucleotide
aguccacgccagaccggaa

SEQ ID NO: 549693 - RNA, 19 nt, Artificial Sequence
  Description of Artificial Sequence: Synthetic oligonucleotide
ccacgacucuccaggccca

SEQ ID NO: 549694 - RNA, 19 nt, Artificial Sequence
  Description of Artificial Sequence: Synthetic oligonucleotide
ggguuccgagcuacagcuc

SEQ ID NO: 549695 - RNA, 19 nt, Artificial Sequence
  Description of Artificial Sequence: Synthetic oligonucleotide
ugggugcggggcggccagu

SEQ ID NO: 549696 - RNA, 19 nt, Artificial Sequence
  Description of Artificial Sequence: Synthetic oligonucleotide
cccaaguugggagggcaaa

SEQ ID NO: 549697 - RNA, 19 nt, Artificial Sequence
  Description of Artificial Sequence: Synthetic oligonucleotide
gcgcuugggcgaggugggg

SEQ ID NO: 549698 - RNA, 19 nt, Artificial Sequence
  Description of Artificial Sequence: Synthetic oligonucleotide
cggaccucucggaucuuca

SEQ ID NO: 549699 - RNA, 19 nt, Artificial Sequence
  Description of Artificial Sequence: Synthetic oligonucleotide
cagagacugucggggugua

SEQ ID NO: 549700 - RNA, 19 nt, Artificial Sequence
  Description of Artificial Sequence: Synthetic oligonucleotide
gccgaaacucgggcagcuc

SEQ ID NO: 549701 - RNA, 19 nt, Artificial Sequence
  Description of Artificial Sequence: Synthetic oligonucleotide
ggccgaaacucgggcagcu

SEQ ID NO: 549702 - RNA, 19 nt, Artificial Sequence
  Description of Artificial Sequence: Synthetic oligonucleotide
gcccaaggcucacacuauu

SEQ ID NO: 549703 - RNA, 19 nt, Artificial Sequence
  Description of Artificial Sequence: Synthetic oligonucleotide
ccugggcugaugggaagaa

SEQ ID NO: 549704 - RNA, 19 nt, Artificial Sequence
  Description of Artificial Sequence: Synthetic oligonucleotide
gguccaaggccgacccagu

SEQ ID NO: 549705 - RNA, 19 nt, Artificial Sequence
  Description of Artificial Sequence: Synthetic oligonucleotide
ccccucaagcucugauucu

SEQ ID NO: 549706 - RNA, 19 nt, Artificial Sequence
  Description of Artificial Sequence: Synthetic oligonucleotide
cggcuucucggcacaguaa

SEQ ID NO: 549707 - RNA, 19 nt, Artificial Sequence
  Description of Artificial Sequence: Synthetic oligonucleotide
gcgccgcaaugaggaguag

SEQ ID NO: 549708 - RNA, 19 nt, Artificial Sequence
  Description of Artificial Sequence: Synthetic oligonucleotide
cccugcguugguccagggu

SEQ ID NO: 549709 - RNA, 19 nt, Artificial Sequence
  Description of Artificial Sequence: Synthetic oligonucleotide
ccagaccggaaaggacaaa

SEQ ID NO: 549710 - RNA, 19 nt, Artificial Sequence
  Description of Artificial Sequence: Synthetic oligonucleotide
cggggcggccagucgucuc

SEQ ID NO: 549711 - RNA, 19 nt, Artificial Sequence
  Description of Artificial Sequence: Synthetic oligonucleotide
ggccgacccaguggugccu

SEQ ID NO: 549712 - RNA, 19 nt, Artificial Sequence
  Description of Artificial Sequence: Synthetic oligonucleotide
ccacgggaaugcuggcgau

SEQ ID NO: 549713 - RNA, 19 nt, Artificial Sequence
  Description of Artificial Sequence: Synthetic oligonucleotide
cggcuuuaaucucggucau

SEQ ID NO: 549714 - RNA, 19 nt, Artificial Sequence
  Description of Artificial Sequence: Synthetic oligonucleotide
cgcuugggcgagguggggu

SEQ ID NO: 549715 - RNA, 19 nt, Artificial Sequence
  Description of Artificial Sequence: Synthetic oligonucleotide
gucggaccucucggaucuu

SEQ ID NO: 549716 - RNA, 19 nt, Artificial Sequence
  Description of Artificial Sequence: Synthetic oligonucleotide
gcggggcggccagucgucu

SEQ ID NO: 549717 - RNA, 19 nt, Artificial Sequence
  Description of Artificial Sequence: Synthetic oligonucleotide
ccccgagcacguccucagu

SEQ ID NO: 549718 - RNA, 19 nt, Artificial Sequence
  Description of Artificial Sequence: Synthetic oligonucleotide
ccgaggcgagguggccaga

SEQ ID NO: 549719 - RNA, 19 nt, Artificial Sequence
  Description of Artificial Sequence: Synthetic oligonucleotide
aauaaaucgcuucugauac

SEQ ID NO: 549720 - RNA, 19 nt, Artificial Sequence
  Description of Artificial Sequence: Synthetic oligonucleotide
aaacacuagaguuucaugc

SEQ ID NO: 549721 - RNA, 19 nt, Artificial Sequence
  Description of Artificial Sequence: Synthetic oligonucleotide
aaucuugcgaugcaaaauc

SEQ ID NO: 549722 - RNA, 19 nt, Artificial Sequence
  Description of Artificial Sequence: Synthetic oligonucleotide
gaauagauaaugcaugucc

SEQ ID NO: 549723 - RNA, 19 nt, Artificial Sequence
  Description of Artificial Sequence: Synthetic oligonucleotide
ugggauauagaauaggagc

SEQ ID NO: 549724 - RNA, 19 nt, Artificial Sequence
  Description of Artificial Sequence: Synthetic oligonucleotide
gugaauaaaauccaugccc

SEQ ID NO: 549725 - RNA, 19 nt, Artificial Sequence
  Description of Artificial Sequence: Synthetic oligonucleotide
uuguuuaaugccuucgacg

SEQ ID NO: 549726 - RNA, 19 nt, Artificial Sequence
  Description of Artificial Sequence: Synthetic oligonucleotide
aauaggagcggauguaguc

SEQ ID NO: 549727 - RNA, 19 nt, Artificial Sequence
  Description of Artificial Sequence: Synthetic oligonucleotide
uucagguuuucauucaugg

SEQ ID NO: 549728 - RNA, 19 nt, Artificial Sequence
  Description of Artificial Sequence: Synthetic oligonucleotide
agaacagagacccacgauc

SEQ ID NO: 549729 - RNA, 19 nt, Artificial Sequence
  Description of Artificial Sequence: Synthetic oligonucleotide
ugaauaaaauccaugcccu

SEQ ID NO: 549730 - RNA, 19 nt, Artificial Sequence
  Description of Artificial Sequence: Synthetic oligonucleotide
uguuuaaugccuucgacga

SEQ ID NO: 549731 - RNA, 19 nt, Artificial Sequence
  Description of Artificial Sequence: Synthetic oligonucleotide
agauaaugcauguccaugg

SEQ ID NO: 549732 - RNA, 19 nt, Artificial Sequence
  Description of Artificial Sequence: Synthetic oligonucleotide
acguauuugucucuauucc

SEQ ID NO: 549733 - RNA, 19 nt, Artificial Sequence
  Description of Artificial Sequence: Synthetic oligonucleotide
auauuauucaauuguccuc

SEQ ID NO: 549734 - RNA, 19 nt, Artificial Sequence
  Description of Artificial Sequence: Synthetic oligonucleotide
gauguuuggucuuuuguag

SEQ ID NO: 549735 - RNA, 19 nt, Artificial Sequence
  Description of Artificial Sequence: Synthetic oligonucleotide
guacugaucguucagcugg

SEQ ID NO: 549736 - RNA, 19 nt, Artificial Sequence
  Description of Artificial Sequence: Synthetic oligonucleotide
uauaagaaaaguuccuaga

SEQ ID NO: 549737 - RNA, 19 nt, Artificial Sequence
  Description of Artificial Sequence: Synthetic oligonucleotide
aagacaaguaggugaaaag

SEQ ID NO: 549738 - RNA, 19 nt, Artificial Sequence
  Description of Artificial Sequence: Synthetic oligonucleotide
caugguacaaaauuaccag

SEQ ID NO: 549739 - RNA, 19 nt, Artificial Sequence
  Description of Artificial Sequence: Synthetic oligonucleotide
ugaguauaugcacacacac

SEQ ID NO: 549740 - RNA, 19 nt, Artificial Sequence
  Description of Artificial Sequence: Synthetic oligonucleotide
uauuucucgauuucuucgg

SEQ ID NO: 549741 - RNA, 19 nt, Artificial Sequence
  Description of Artificial Sequence: Synthetic oligonucleotide
aaugauaguuucuaacuuu

SEQ ID NO: 549742 - RNA, 19 nt, Artificial Sequence
  Description of Artificial Sequence: Synthetic oligonucleotide
ugcaaaaucgcuauuucuc

SEQ ID NO: 549743 - RNA, 19 nt, Artificial Sequence
  Description of Artificial Sequence: Synthetic oligonucleotide
uuuaaacuccugcuccugg

SEQ ID NO: 549744 - RNA, 19 nt, Artificial Sequence
  Description of Artificial Sequence: Synthetic oligonucleotide
ucugaauuaaugauaguuu

SEQ ID NO: 549745 - RNA, 19 nt, Artificial Sequence
  Description of Artificial Sequence: Synthetic oligonucleotide
ugaauuaaugauaguuucu

SEQ ID NO: 549746 - RNA, 19 nt, Artificial Sequence
  Description of Artificial Sequence: Synthetic oligonucleotide
aagcggaucuuauacagcu

SEQ ID NO: 549747 - RNA, 19 nt, Artificial Sequence
  Description of Artificial Sequence: Synthetic oligonucleotide
aaaguuccuagacauggca

SEQ ID NO: 549748 - RNA, 19 nt, Artificial Sequence
  Description of Artificial Sequence: Synthetic oligonucleotide
aggcagacguaucacaagc

SEQ ID NO: 549749 - RNA, 19 nt, Artificial Sequence
  Description of Artificial Sequence: Synthetic oligonucleotide
uugugaaaaguucucguga

SEQ ID NO: 549750 - RNA, 19 nt, Artificial Sequence
  Description of Artificial Sequence: Synthetic oligonucleotide
uuccagauaaacuuuccug

SEQ ID NO: 549751 - RNA, 19 nt, Artificial Sequence
  Description of Artificial Sequence: Synthetic oligonucleotide
gacgauuuguuccaucugc

SEQ ID NO: 549752 - RNA, 19 nt, Artificial Sequence
  Description of Artificial Sequence: Synthetic oligonucleotide
ucugcaaaaugccccauug

SEQ ID NO: 549753 - RNA, 19 nt, Artificial Sequence
  Description of Artificial Sequence: Synthetic oligonucleotide
ugugcuuuaaacuccugcu

SEQ ID NO: 549754 - RNA, 19 nt, Artificial Sequence
  Description of Artificial Sequence: Synthetic oligonucleotide
guuucaugcauguuugugc

SEQ ID NO: 549755 - RNA, 19 nt, Artificial Sequence
  Description of Artificial Sequence: Synthetic oligonucleotide
uuaaccauguggcuccaag

SEQ ID NO: 549756 - RNA, 19 nt, Artificial Sequence
  Description of Artificial Sequence: Synthetic oligonucleotide
aauagauaaugcaugucca

SEQ ID NO: 549757 - RNA, 19 nt, Artificial Sequence
  Description of Artificial Sequence: Synthetic oligonucleotide
uuuguuuaaugccuucgac

SEQ ID NO: 549758 - RNA, 19 nt, Artificial Sequence
  Description of Artificial Sequence: Synthetic oligonucleotide
uauagaauaggagcggaug

SEQ ID NO: 549759 - RNA, 19 nt, Artificial Sequence
  Description of Artificial Sequence: Synthetic oligonucleotide
ugguacaaaauuaccagaa

SEQ ID NO: 549760 - RNA, 19 nt, Artificial Sequence
  Description of Artificial Sequence: Synthetic oligonucleotide
augagcuuccguuuucucg

SEQ ID NO: 549761 - RNA, 19 nt, Artificial Sequence
  Description of Artificial Sequence: Synthetic oligonucleotide
agcaauacauauccagguc

SEQ ID NO: 549762 - RNA, 19 nt, Artificial Sequence
  Description of Artificial Sequence: Synthetic oligonucleotide
aaugccuucgacgauuugu

SEQ ID NO: 549763 - RNA, 19 nt, Artificial Sequence
  Description of Artificial Sequence: Synthetic oligonucleotide
aaagcguggagugggacuc

SEQ ID NO: 549764 - RNA, 19 nt, Artificial Sequence
  Description of Artificial Sequence: Synthetic oligonucleotide
cugauacuguaucagcucg

SEQ ID NO: 549765 - RNA, 19 nt, Artificial Sequence
  Description of Artificial Sequence: Synthetic oligonucleotide
agucuugaaguagagccgc

SEQ ID NO: 549766 - RNA, 19 nt, Artificial Sequence
  Description of Artificial Sequence: Synthetic oligonucleotide
acaccuacaacacacguau

SEQ ID NO: 549767 - RNA, 19 nt, Artificial Sequence
  Description of Artificial Sequence: Synthetic oligonucleotide
auagaauaggagcggaugu

SEQ ID NO: 549768 - RNA, 19 nt, Artificial Sequence
  Description of Artificial Sequence: Synthetic oligonucleotide
uccaugguacaaaauuacc

SEQ ID NO: 549769 - RNA, 19 nt, Artificial Sequence
  Description of Artificial Sequence: Synthetic oligonucleotide
cauaucuccugccauauuc

SEQ ID NO: 549770 - RNA, 19 nt, Artificial Sequence
  Description of Artificial Sequence: Synthetic oligonucleotide
aaaaucgcuauuucucgau

SEQ ID NO: 549771 - RNA, 19 nt, Artificial Sequence
  Description of Artificial Sequence: Synthetic oligonucleotide
aagagccguuuucuugucc

SEQ ID NO: 549772 - RNA, 19 nt, Artificial Sequence
  Description of Artificial Sequence: Synthetic oligonucleotide
aaaucugacgguagaguuc

SEQ ID NO: 549773 - RNA, 19 nt, Artificial Sequence
  Description of Artificial Sequence: Synthetic oligonucleotide
ugcaaaaugccccauugua

SEQ ID NO: 549774 - RNA, 19 nt, Artificial Sequence
  Description of Artificial Sequence: Synthetic oligonucleotide
aacugaguuaagcaggcua

SEQ ID NO: 549775 - RNA, 19 nt, Artificial Sequence
  Description of Artificial Sequence: Synthetic oligonucleotide
uaaaucgcuucugauacug

SEQ ID NO: 549776 - RNA, 19 nt, Artificial Sequence
  Description of Artificial Sequence: Synthetic oligonucleotide
cuugugaaaaguucucgug

SEQ ID NO: 549777 - RNA, 19 nt, Artificial Sequence
  Description of Artificial Sequence: Synthetic oligonucleotide
uuuccgcugaugaaguuga

SEQ ID NO: 549778 - RNA, 19 nt, Artificial Sequence
  Description of Artificial Sequence: Synthetic oligonucleotide
agauaaacuuuccugucgu

SEQ ID NO: 549779 - RNA, 19 nt, Artificial Sequence
  Description of Artificial Sequence: Synthetic oligonucleotide
aacugggauauagaauagg

SEQ ID NO: 549780 - RNA, 19 nt, Artificial Sequence
  Description of Artificial Sequence: Synthetic oligonucleotide
ugcguacucagacacaauc

SEQ ID NO: 549781 - RNA, 19 nt, Artificial Sequence
  Description of Artificial Sequence: Synthetic oligonucleotide
uuuuccauguuguaccguc

SEQ ID NO: 549782 - RNA, 19 nt, Artificial Sequence
  Description of Artificial Sequence: Synthetic oligonucleotide
ugugaaaaguucucgugaa

SEQ ID NO: 549783 - RNA, 19 nt, Artificial Sequence
  Description of Artificial Sequence: Synthetic oligonucleotide
cacuuaaccauguggcucc

SEQ ID NO: 549784 - RNA, 19 nt, Artificial Sequence
  Description of Artificial Sequence: Synthetic oligonucleotide
ucuugcgaugcaaaaucgc

SEQ ID NO: 549785 - RNA, 19 nt, Artificial Sequence
  Description of Artificial Sequence: Synthetic oligonucleotide
ucgugaacugaguuaagca

SEQ ID NO: 549786 - RNA, 19 nt, Artificial Sequence
  Description of Artificial Sequence: Synthetic oligonucleotide
ucugcuuauucaaggaaau

SEQ ID NO: 549787 - RNA, 19 nt, Artificial Sequence
  Description of Artificial Sequence: Synthetic oligonucleotide
gcaaaaucgcuauuucucg

SEQ ID NO: 549788 - RNA, 19 nt, Artificial Sequence
  Description of Artificial Sequence: Synthetic oligonucleotide
cugggauauagaauaggag

SEQ ID NO: 549789 - RNA, 19 nt, Artificial Sequence
  Description of Artificial Sequence: Synthetic oligonucleotide
acuagaguuucaugcaugu

SEQ ID NO: 549790 - RNA, 19 nt, Artificial Sequence
  Description of Artificial Sequence: Synthetic oligonucleotide
aucgcuauuucucgauuuc

SEQ ID NO: 549791 - RNA, 19 nt, Artificial Sequence
  Description of Artificial Sequence: Synthetic oligonucleotide
ucgacgauuuguuccaucu

SEQ ID NO: 549792 - RNA, 19 nt, Artificial Sequence
  Description of Artificial Sequence: Synthetic oligonucleotide
gaguucaauaaaucgcuuc

SEQ ID NO: 549793 - RNA, 19 nt, Artificial Sequence
  Description of Artificial Sequence: Synthetic oligonucleotide
auacaaaagacaaguaggu

SEQ ID NO: 549794 - RNA, 19 nt, Artificial Sequence
  Description of Artificial Sequence: Synthetic oligonucleotide
aaacuuuccugucguccag

SEQ ID NO: 549795 - RNA, 19 nt, Artificial Sequence
  Description of Artificial Sequence: Synthetic oligonucleotide
gaauaaaauccaugcccug

SEQ ID NO: 549796 - RNA, 19 nt, Artificial Sequence
  Description of Artificial Sequence: Synthetic oligonucleotide
uccguuuucucgguggccg

SEQ ID NO: 549797 - RNA, 19 nt, Artificial Sequence
  Description of Artificial Sequence: Synthetic oligonucleotide
aaucgcuauuucucgauuu

SEQ ID NO: 549798 - RNA, 19 nt, Artificial Sequence
  Description of Artificial Sequence: Synthetic oligonucleotide
agacaaguaggugaaaagu

SEQ ID NO: 549799 - RNA, 19 nt, Artificial Sequence
  Description of Artificial Sequence: Synthetic oligonucleotide
uguagaaugcucgggucag

SEQ ID NO: 549800 - RNA, 19 nt, Artificial Sequence
  Description of Artificial Sequence: Synthetic oligonucleotide
guaccgucuguccaggucc

SEQ ID NO: 549801 - RNA, 19 nt, Artificial Sequence
  Description of Artificial Sequence: Synthetic oligonucleotide
uaucagcucggcucgacug

SEQ ID NO: 549802 - RNA, 19 nt, Artificial Sequence
  Description of Artificial Sequence: Synthetic oligonucleotide
uuggacuugugguauacau

SEQ ID NO: 549803 - RNA, 19 nt, Artificial Sequence
  Description of Artificial Sequence: Synthetic oligonucleotide
aaucgcuucugauacugua

SEQ ID NO: 549804 - RNA, 19 nt, Artificial Sequence
  Description of Artificial Sequence: Synthetic oligonucleotide
ugcgaugcaaaaucgcuau

SEQ ID NO: 549805 - RNA, 19 nt, Artificial Sequence
  Description of Artificial Sequence: Synthetic oligonucleotide
agaguuucaugcauguuug

SEQ ID NO: 549806 - RNA, 19 nt, Artificial Sequence
  Description of Artificial Sequence: Synthetic oligonucleotide
uucgucaaucuugcgaugc

SEQ ID NO: 549807 - RNA, 19 nt, Artificial Sequence
  Description of Artificial Sequence: Synthetic oligonucleotide
gugugcuuuaaacuccugc

SEQ ID NO: 549808 - RNA, 19 nt, Artificial Sequence
  Description of Artificial Sequence: Synthetic oligonucleotide
acgauuuguuccaucugcc

SEQ ID NO: 549809 - RNA, 19 nt, Artificial Sequence
  Description of Artificial Sequence: Synthetic oligonucleotide
caaacacuagaguuucaug

SEQ ID NO: 549810 - RNA, 19 nt, Artificial Sequence
  Description of Artificial Sequence: Synthetic oligonucleotide
caacacacguauuugucuc

SEQ ID NO: 549811 - RNA, 19 nt, Artificial Sequence
  Description of Artificial Sequence: Synthetic oligonucleotide
ccauauuccaaaagcgugg

SEQ ID NO: 549812 - RNA, 19 nt, Artificial Sequence
  Description of Artificial Sequence: Synthetic oligonucleotide
cuugcgacggggcuuguag

SEQ ID NO: 549813 - RNA, 19 nt, Artificial Sequence
  Description of Artificial Sequence: Synthetic oligonucleotide
acugggauauagaauagga

SEQ ID NO: 549814 - RNA, 19 nt, Artificial Sequence
  Description of Artificial Sequence: Synthetic oligonucleotide
ucuguacuugcgacggggc

SEQ ID NO: 549815 - RNA, 19 nt, Artificial Sequence
  Description of Artificial Sequence: Synthetic oligonucleotide
accuacaacacacguauuu

SEQ ID NO: 549816 - RNA, 19 nt, Artificial Sequence
  Description of Artificial Sequence: Synthetic oligonucleotide
aucagcucggcucgacugg

SEQ ID NO: 549817 - RNA, 19 nt, Artificial Sequence
  Description of Artificial Sequence: Synthetic oligonucleotide
aaaucgcuauuucucgauu

SEQ ID NO: 549818 - RNA, 19 nt, Artificial Sequence
  Description of Artificial Sequence: Synthetic oligonucleotide
uuccccugcguacucagac

SEQ ID NO: 549819 - RNA, 19 nt, Artificial Sequence
  Description of Artificial Sequence: Synthetic oligonucleotide
acguaucacaagcauuugu

SEQ ID NO: 549820 - RNA, 19 nt, Artificial Sequence
  Description of Artificial Sequence: Synthetic oligonucleotide
aggucaauaauggucuuga

SEQ ID NO: 549821 - RNA, 19 nt, Artificial Sequence
  Description of Artificial Sequence: Synthetic oligonucleotide
cucgugaacugaguuaagc

SEQ ID NO: 549822 - RNA, 19 nt, Artificial Sequence
  Description of Artificial Sequence: Synthetic oligonucleotide
ggauauagaauaggagcgg

SEQ ID NO: 549823 - RNA, 19 nt, Artificial Sequence
  Description of Artificial Sequence: Synthetic oligonucleotide
ugaauagauaaugcauguc

SEQ ID NO: 549824 - RNA, 19 nt, Artificial Sequence
  Description of Artificial Sequence: Synthetic oligonucleotide
uccaagaucugugaacauc

SEQ ID NO: 549825 - RNA, 19 nt, Artificial Sequence
  Description of Artificial Sequence: Synthetic oligonucleotide
cacuagaguuucaugcaug

SEQ ID NO: 549826 - RNA, 19 nt, Artificial Sequence
  Description of Artificial Sequence: Synthetic oligonucleotide
uguaccgucuguccagguc

SEQ ID NO: 549827 - RNA, 19 nt, Artificial Sequence
  Description of Artificial Sequence: Synthetic oligonucleotide
cuagauguuuggucuuuug

SEQ ID NO: 549828 - RNA, 19 nt, Artificial Sequence
  Description of Artificial Sequence: Synthetic oligonucleotide
agacguaucacaagcauuu

SEQ ID NO: 549829 - RNA, 19 nt, Artificial Sequence
  Description of Artificial Sequence: Synthetic oligonucleotide
uuccaaaagcguggagugg

SEQ ID NO: 549830 - RNA, 19 nt, Artificial Sequence
  Description of Artificial Sequence: Synthetic oligonucleotide
aucuugcgaugcaaaaucg

SEQ ID NO: 549831 - RNA, 19 nt, Artificial Sequence
  Description of Artificial Sequence: Synthetic oligonucleotide
ucagacucuguagaaugcu

SEQ ID NO: 549832 - RNA, 19 nt, Artificial Sequence
  Description of Artificial Sequence: Synthetic oligonucleotide
uguauacguuucucuucag

SEQ ID NO: 549833 - RNA, 19 nt, Artificial Sequence
  Description of Artificial Sequence: Synthetic oligonucleotide
uggcuuggaggcuggaaug

SEQ ID NO: 549834 - RNA, 19 nt, Artificial Sequence
  Description of Artificial Sequence: Synthetic oligonucleotide
uggacuugugguauacaua

SEQ ID NO: 549835 - RNA, 19 nt, Artificial Sequence
  Description of Artificial Sequence: Synthetic oligonucleotide
uugcgaugcaaaaucgcua

SEQ ID NO: 549836 - RNA, 19 nt, Artificial Sequence
  Description of Artificial Sequence: Synthetic oligonucleotide
auaggagcggauguaguca

SEQ ID NO: 549837 - RNA, 19 nt, Artificial Sequence
  Description of Artificial Sequence: Synthetic oligonucleotide
agcaagcggaucuuauaca

SEQ ID NO: 549838 - RNA, 19 nt, Artificial Sequence
  Description of Artificial Sequence: Synthetic oligonucleotide
caagaucugugaacauccc

SEQ ID NO: 549839 - RNA, 19 nt, Artificial Sequence
  Description of Artificial Sequence: Synthetic oligonucleotide
agugcucucagacucugua

SEQ ID NO: 549840 - RNA, 19 nt, Artificial Sequence
  Description of Artificial Sequence: Synthetic oligonucleotide
ucuuggacagcaguagcuc

SEQ ID NO: 549841 - RNA, 19 nt, Artificial Sequence
  Description of Artificial Sequence: Synthetic oligonucleotide
auaaaucgcuucugauacu

SEQ ID NO: 549842 - RNA, 19 nt, Artificial Sequence
  Description of Artificial Sequence: Synthetic oligonucleotide
uugcgacggggcuuguagg

SEQ ID NO: 549843 - RNA, 19 nt, Artificial Sequence
  Description of Artificial Sequence: Synthetic oligonucleotide
cagagacccacgaucuggc

SEQ ID NO: 549844 - RNA, 19 nt, Artificial Sequence
  Description of Artificial Sequence: Synthetic oligonucleotide
ucguccaggguguuauaca

SEQ ID NO: 549845 - RNA, 19 nt, Artificial Sequence
  Description of Artificial Sequence: Synthetic oligonucleotide
ucgucaaucuugcgaugca

SEQ ID NO: 549846 - RNA, 19 nt, Artificial Sequence
  Description of Artificial Sequence: Synthetic oligonucleotide
aagucauucccaccuucuu

SEQ ID NO: 549847 - RNA, 19 nt, Artificial Sequence
  Description of Artificial Sequence: Synthetic oligonucleotide
uccguuuuguuguggcgac

SEQ ID NO: 549848 - RNA, 19 nt, Artificial Sequence
  Description of Artificial Sequence: Synthetic oligonucleotide
gucucuauuccaaacacua

SEQ ID NO: 549849 - RNA, 19 nt, Artificial Sequence
  Description of Artificial Sequence: Synthetic oligonucleotide
guccaugguacaaaauuac

SEQ ID NO: 549850 - RNA, 19 nt, Artificial Sequence
  Description of Artificial Sequence: Synthetic oligonucleotide
gacucgggacuccucgucc

SEQ ID NO: 549851 - RNA, 19 nt, Artificial Sequence
  Description of Artificial Sequence: Synthetic oligonucleotide
ccccacuuaaccauguggc

SEQ ID NO: 549852 - RNA, 19 nt, Artificial Sequence
  Description of Artificial Sequence: Synthetic oligonucleotide
guuguggcgacugaaucca

SEQ ID NO: 549853 - RNA, 19 nt, Artificial Sequence
  Description of Artificial Sequence: Synthetic oligonucleotide
cgugaacugaguuaagcag

SEQ ID NO: 549854 - RNA, 19 nt, Artificial Sequence
  Description of Artificial Sequence: Synthetic oligonucleotide
gccuucgacgauuuguucc

SEQ ID NO: 549855 - RNA, 19 nt, Artificial Sequence
  Description of Artificial Sequence: Synthetic oligonucleotide
cauaugcauacacacaccu

SEQ ID NO: 549856 - RNA, 19 nt, Artificial Sequence
  Description of Artificial Sequence: Synthetic oligonucleotide
caaaaucgcuauuucucga

SEQ ID NO: 549857 - RNA, 19 nt, Artificial Sequence
  Description of Artificial Sequence: Synthetic oligonucleotide
gugaaaaguucucgugaac

SEQ ID NO: 549858 - RNA, 19 nt, Artificial Sequence
  Description of Artificial Sequence: Synthetic oligonucleotide
cagccuaccagggacaauc

SEQ ID NO: 549859 - RNA, 19 nt, Artificial Sequence
  Description of Artificial Sequence: Synthetic oligonucleotide
ucucgugaacugaguuaag

SEQ ID NO: 549860 - RNA, 19 nt, Artificial Sequence
  Description of Artificial Sequence: Synthetic oligonucleotide
aaaugacuuuccgcugaug

SEQ ID NO: 549861 - RNA, 19 nt, Artificial Sequence
  Description of Artificial Sequence: Synthetic oligonucleotide
ugcgacggggcuuguaggu

SEQ ID NO: 549862 - RNA, 19 nt, Artificial Sequence
  Description of Artificial Sequence: Synthetic oligonucleotide
ucgggccuguagcaagcgg

SEQ ID NO: 549863 - RNA, 19 nt, Artificial Sequence
  Description of Artificial Sequence: Synthetic oligonucleotide
ccaugguacaaaauuacca

SEQ ID NO: 549864 - RNA, 19 nt, Artificial Sequence
  Description of Artificial Sequence: Synthetic oligonucleotide
acacguauuugucucuauu

SEQ ID NO: 549865 - RNA, 19 nt, Artificial Sequence
  Description of Artificial Sequence: Synthetic oligonucleotide
uagaauaggagcggaugua

SEQ ID NO: 549866 - RNA, 19 nt, Artificial Sequence
  Description of Artificial Sequence: Synthetic oligonucleotide
cuucgggccuguagcaagc

SEQ ID NO: 549867 - RNA, 19 nt, Artificial Sequence
  Description of Artificial Sequence: Synthetic oligonucleotide
gcuauuucucgauuucuuc

SEQ ID NO: 549868 - RNA, 19 nt, Artificial Sequence
  Description of Artificial Sequence: Synthetic oligonucleotide
accaagguugccagccuac

SEQ ID NO: 549869 - RNA, 19 nt, Artificial Sequence
  Description of Artificial Sequence: Synthetic oligonucleotide
aucuuggacagcaguagcu

SEQ ID NO: 549870 - RNA, 19 nt, Artificial Sequence
  Description of Artificial Sequence: Synthetic oligonucleotide
uccauaucuccugccauau

SEQ ID NO: 549871 - RNA, 19 nt, Artificial Sequence
  Description of Artificial Sequence: Synthetic oligonucleotide
cugacgguagaguucaaua

SEQ ID NO: 549872 - RNA, 19 nt, Artificial Sequence
  Description of Artificial Sequence: Synthetic oligonucleotide
uacugaucguucagcuggu

SEQ ID NO: 549873 - RNA, 19 nt, Artificial Sequence
  Description of Artificial Sequence: Synthetic oligonucleotide
ugccgucuguacuugcgac

SEQ ID NO: 549874 - RNA, 19 nt, Artificial Sequence
  Description of Artificial Sequence: Synthetic oligonucleotide
gguacugaucguucagcug

SEQ ID NO: 549875 - RNA, 19 nt, Artificial Sequence
  Description of Artificial Sequence: Synthetic oligonucleotide
ugcagguuuguagcucugc

SEQ ID NO: 549876 - RNA, 19 nt, Artificial Sequence
  Description of Artificial Sequence: Synthetic oligonucleotide
uugucuaguuucucaccau

SEQ ID NO: 549877 - RNA, 19 nt, Artificial Sequence
  Description of Artificial Sequence: Synthetic oligonucleotide
ggcgacugaauccauaucu

SEQ ID NO: 549878 - RNA, 19 nt, Artificial Sequence
  Description of Artificial Sequence: Synthetic oligonucleotide
uguacuugcgacggggcuu

SEQ ID NO: 549879 - RNA, 19 nt, Artificial Sequence
  Description of Artificial Sequence: Synthetic oligonucleotide
uguggcgacugaauccaua

SEQ ID NO: 549880 - RNA, 19 nt, Artificial Sequence
  Description of Artificial Sequence: Synthetic oligonucleotide
acugggcacuucgucaauc

SEQ ID NO: 549881 - RNA, 19 nt, Artificial Sequence
  Description of Artificial Sequence: Synthetic oligonucleotide
gaaugcucgggucagcuuu

SEQ ID NO: 549882 - RNA, 19 nt, Artificial Sequence
  Description of Artificial Sequence: Synthetic oligonucleotide
ggcucgacugggcacuucg

SEQ ID NO: 549883 - RNA, 19 nt, Artificial Sequence
  Description of Artificial Sequence: Synthetic oligonucleotide
gcaauacauauccaggucu

SEQ ID NO: 549884 - RNA, 19 nt, Artificial Sequence
  Description of Artificial Sequence: Synthetic oligonucleotide
ugcuugaucucagcagaac

SEQ ID NO: 549885 - RNA, 19 nt, Artificial Sequence
  Description of Artificial Sequence: Synthetic oligonucleotide
uauccaggucuauucuuuu

SEQ ID NO: 549886 - RNA, 19 nt, Artificial Sequence
  Description of Artificial Sequence: Synthetic oligonucleotide
gcuaaucuccuuuuccaga

SEQ ID NO: 549887 - RNA, 19 nt, Artificial Sequence
  Description of Artificial Sequence: Synthetic oligonucleotide
cauauuccaaaagcgugga

SEQ ID NO: 549888 - RNA, 19 nt, Artificial Sequence
  Description of Artificial Sequence: Synthetic oligonucleotide
aaguaggugaaaagucauu

SEQ ID NO: 549889 - RNA, 19 nt, Artificial Sequence
  Description of Artificial Sequence: Synthetic oligonucleotide
gcugaugaaguugagaagu

SEQ ID NO: 549890 - RNA, 19 nt, Artificial Sequence
  Description of Artificial Sequence: Synthetic oligonucleotide
gacguaucacaagcauuug

SEQ ID NO: 549891 - RNA, 19 nt, Artificial Sequence
  Description of Artificial Sequence: Synthetic oligonucleotide
auauccaggucuauucuuu

SEQ ID NO: 549892 - RNA, 19 nt, Artificial Sequence
  Description of Artificial Sequence: Synthetic oligonucleotide
ggacaaucugggcacgggc

SEQ ID NO: 549893 - RNA, 19 nt, Artificial Sequence
  Description of Artificial Sequence: Synthetic oligonucleotide
uucgacgauuuguuccauc

SEQ ID NO: 549894 - RNA, 19 nt, Artificial Sequence
  Description of Artificial Sequence: Synthetic oligonucleotide
auauagaauaggagcggau

SEQ ID NO: 549895 - RNA, 19 nt, Artificial Sequence
  Description of Artificial Sequence: Synthetic oligonucleotide
ucugacgguagaguucaau

SEQ ID NO: 549896 - RNA, 19 nt, Artificial Sequence
  Description of Artificial Sequence: Synthetic oligonucleotide
cuacaacacacguauuugu

SEQ ID NO: 549897 - RNA, 19 nt, Artificial Sequence
  Description of Artificial Sequence: Synthetic oligonucleotide
cagguuuguagcucugcca

SEQ ID NO: 549898 - RNA, 19 nt, Artificial Sequence
  Description of Artificial Sequence: Synthetic oligonucleotide
uaaugccuucgacgauuug

SEQ ID NO: 549899 - RNA, 19 nt, Artificial Sequence
  Description of Artificial Sequence: Synthetic oligonucleotide
cucgacugggcacuucguc

SEQ ID NO: 549900 - RNA, 19 nt, Artificial Sequence
  Description of Artificial Sequence: Synthetic oligonucleotide
cuucgucaaucuugcgaug

SEQ ID NO: 549901 - RNA, 19 nt, Artificial Sequence
  Description of Artificial Sequence: Synthetic oligonucleotide
uccccugcguacucagaca

SEQ ID NO: 549902 - RNA, 19 nt, Artificial Sequence
  Description of Artificial Sequence: Synthetic oligonucleotide
ugccagccuaccagggaca

SEQ ID NO: 549903 - RNA, 19 nt, Artificial Sequence
  Description of Artificial Sequence: Synthetic oligonucleotide
uggcuaccagugcucucag

SEQ ID NO: 549904 - RNA, 19 nt, Artificial Sequence
  Description of Artificial Sequence: Synthetic oligonucleotide
aaguucucgugaacugagu

SEQ ID NO: 549905 - RNA, 19 nt, Artificial Sequence
  Description of Artificial Sequence: Synthetic oligonucleotide
uucucacccgguguucucu

SEQ ID NO: 549906 - RNA, 19 nt, Artificial Sequence
  Description of Artificial Sequence: Synthetic oligonucleotide
caggucuauucuuuuaacu

SEQ ID NO: 549907 - RNA, 19 nt, Artificial Sequence
  Description of Artificial Sequence: Synthetic oligonucleotide
caccguguggcucuccauc

SEQ ID NO: 549908 - RNA, 19 nt, Artificial Sequence
  Description of Artificial Sequence: Synthetic oligonucleotide
ggguguuauacaaagugaa

SEQ ID NO: 549909 - RNA, 19 nt, Artificial Sequence
  Description of Artificial Sequence: Synthetic oligonucleotide
cuggucccgggaagcaggg

SEQ ID NO: 549910 - RNA, 19 nt, Artificial Sequence
  Description of Artificial Sequence: Synthetic oligonucleotide
gcagugugcuuuaaacucc

SEQ ID NO: 549911 - RNA, 19 nt, Artificial Sequence
  Description of Artificial Sequence: Synthetic oligonucleotide
guacuugcgacggggcuug

SEQ ID NO: 549912 - RNA, 19 nt, Artificial Sequence
  Description of Artificial Sequence: Synthetic oligonucleotide
agcaggcuaaucuccuuuu

SEQ ID NO: 549913 - RNA, 19 nt, Artificial Sequence
  Description of Artificial Sequence: Synthetic oligonucleotide
uaagcaggcuaaucuccuu

SEQ ID NO: 549914 - RNA, 19 nt, Artificial Sequence
  Description of Artificial Sequence: Synthetic oligonucleotide
ccuacaacacacguauuug

SEQ ID NO: 549915 - RNA, 19 nt, Artificial Sequence
  Description of Artificial Sequence: Synthetic oligonucleotide
gcuccaagaucugugaaca

SEQ ID NO: 549916 - RNA, 19 nt, Artificial Sequence
  Description of Artificial Sequence: Synthetic oligonucleotide
cucuuuaugaagucaucau

SEQ ID NO: 549917 - RNA, 19 nt, Artificial Sequence
  Description of Artificial Sequence: Synthetic oligonucleotide
gccgucuguacuugcgacg

SEQ ID NO: 549918 - RNA, 19 nt, Artificial Sequence
  Description of Artificial Sequence: Synthetic oligonucleotide
aagcguggagugggacucg

SEQ ID NO: 549919 - RNA, 19 nt, Artificial Sequence
  Description of Artificial Sequence: Synthetic oligonucleotide
uaggugucugagaggucaa

SEQ ID NO: 549920 - RNA, 19 nt, Artificial Sequence
  Description of Artificial Sequence: Synthetic oligonucleotide
uucuagauguuuggucuuu

SEQ ID NO: 549921 - RNA, 19 nt, Artificial Sequence
  Description of Artificial Sequence: Synthetic oligonucleotide
uguaggugucugagagguc

SEQ ID NO: 549922 - RNA, 19 nt, Artificial Sequence
  Description of Artificial Sequence: Synthetic oligonucleotide
uggcgacugaauccauauc

SEQ ID NO: 549923 - RNA, 19 nt, Artificial Sequence
  Description of Artificial Sequence: Synthetic oligonucleotide
aucgcuucugauacuguau

SEQ ID NO: 549924 - RNA, 19 nt, Artificial Sequence
  Description of Artificial Sequence: Synthetic oligonucleotide
cccuguucugaauuaauga

SEQ ID NO: 549925 - RNA, 19 nt, Artificial Sequence
  Description of Artificial Sequence: Synthetic oligonucleotide
agggacaaucugggcacgg

SEQ ID NO: 549926 - RNA, 19 nt, Artificial Sequence
  Description of Artificial Sequence: Synthetic oligonucleotide
cgacugaauccauaucucc

SEQ ID NO: 549927 - RNA, 19 nt, Artificial Sequence
  Description of Artificial Sequence: Synthetic oligonucleotide
cuccguuuuguuguggcga

SEQ ID NO: 549928 - RNA, 19 nt, Artificial Sequence
  Description of Artificial Sequence: Synthetic oligonucleotide
gucguccaggguguuauac

SEQ ID NO: 549929 - RNA, 19 nt, Artificial Sequence
  Description of Artificial Sequence: Synthetic oligonucleotide
ggucagggcaccguguggc

SEQ ID NO: 549930 - RNA, 19 nt, Artificial Sequence
  Description of Artificial Sequence: Synthetic oligonucleotide
acauggcacugcugguuca

SEQ ID NO: 549931 - RNA, 19 nt, Artificial Sequence
  Description of Artificial Sequence: Synthetic oligonucleotide
ucgguggccgacagcccug

SEQ ID NO: 549932 - RNA, 19 nt, Artificial Sequence
  Description of Artificial Sequence: Synthetic oligonucleotide
ugccuucgacgauuuguuc

SEQ ID NO: 549933 - RNA, 19 nt, Artificial Sequence
  Description of Artificial Sequence: Synthetic oligonucleotide
aucagugacuguauacguu

SEQ ID NO: 549934 - RNA, 19 nt, Artificial Sequence
  Description of Artificial Sequence: Synthetic oligonucleotide
aggagcggauguagucacc

SEQ ID NO: 549935 - RNA, 19 nt, Artificial Sequence
  Description of Artificial Sequence: Synthetic oligonucleotide
gagcuugcagugaggcggc

SEQ ID NO: 549936 - RNA, 19 nt, Artificial Sequence
  Description of Artificial Sequence: Synthetic oligonucleotide
ggcggcucuccucauuugc

SEQ ID NO: 549937 - RNA, 19 nt, Artificial Sequence
  Description of Artificial Sequence: Synthetic oligonucleotide
agcuuccguuuucucggug

SEQ ID NO: 549938 - RNA, 19 nt, Artificial Sequence
  Description of Artificial Sequence: Synthetic oligonucleotide
ccccuguucugaauuaaug

SEQ ID NO: 549939 - RNA, 19 nt, Artificial Sequence
  Description of Artificial Sequence: Synthetic oligonucleotide
ucucacccgguguucucuc

SEQ ID NO: 549940 - RNA, 19 nt, Artificial Sequence
  Description of Artificial Sequence: Synthetic oligonucleotide
ccgucuguacuugcgacgg

SEQ ID NO: 549941 - RNA, 19 nt, Artificial Sequence
  Description of Artificial Sequence: Synthetic oligonucleotide
guagccgagccaucuccuc

SEQ ID NO: 549942 - RNA, 19 nt, Artificial Sequence
  Description of Artificial Sequence: Synthetic oligonucleotide
guagaaugcucgggucagc

SEQ ID NO: 549943 - RNA, 19 nt, Artificial Sequence
  Description of Artificial Sequence: Synthetic oligonucleotide
augccuucgacgauuuguu

SEQ ID NO: 549944 - RNA, 19 nt, Artificial Sequence
  Description of Artificial Sequence: Synthetic oligonucleotide
guggcgacugaauccauau

SEQ ID NO: 549945 - RNA, 19 nt, Artificial Sequence
  Description of Artificial Sequence: Synthetic oligonucleotide
ccacuuaaccauguggcuc

SEQ ID NO: 549946 - RNA, 19 nt, Artificial Sequence
  Description of Artificial Sequence: Synthetic oligonucleotide
cauggcuaccagugcucuc

SEQ ID NO: 549947 - RNA, 19 nt, Artificial Sequence
  Description of Artificial Sequence: Synthetic oligonucleotide
ccuucgacgauuuguucca

SEQ ID NO: 549948 - RNA, 19 nt, Artificial Sequence
  Description of Artificial Sequence: Synthetic oligonucleotide
gggacaaucugggcacggg

SEQ ID NO: 549949 - RNA, 19 nt, Artificial Sequence
  Description of Artificial Sequence: Synthetic oligonucleotide
acuuuccgcugaugaaguu

SEQ ID NO: 549950 - RNA, 19 nt, Artificial Sequence
  Description of Artificial Sequence: Synthetic oligonucleotide
cauauccaggucuauucuu

SEQ ID NO: 549951 - RNA, 19 nt, Artificial Sequence
  Description of Artificial Sequence: Synthetic oligonucleotide
ccccauuguagagaugggc

SEQ ID NO: 549952 - RNA, 19 nt, Artificial Sequence
  Description of Artificial Sequence: Synthetic oligonucleotide
cugagaggucaauaauggu

SEQ ID NO: 549953 - RNA, 19 nt, Artificial Sequence
  Description of Artificial Sequence: Synthetic oligonucleotide
gggucagggcaccgugugg

SEQ ID NO: 549954 - RNA, 19 nt, Artificial Sequence
  Description of Artificial Sequence: Synthetic oligonucleotide
cagggacaaucugggcacg

SEQ ID NO: 549955 - RNA, 19 nt, Artificial Sequence
  Description of Artificial Sequence: Synthetic oligonucleotide
ccuguucugaauuaaugau

SEQ ID NO: 549956 - RNA, 19 nt, Artificial Sequence
  Description of Artificial Sequence: Synthetic oligonucleotide
uuguggcgacugaauccau

SEQ ID NO: 549957 - RNA, 19 nt, Artificial Sequence
  Description of Artificial Sequence: Synthetic oligonucleotide
guuuaaugccuucgacgau

SEQ ID NO: 549958 - RNA, 19 nt, Artificial Sequence
  Description of Artificial Sequence: Synthetic oligonucleotide
gugugaguauaugcacaca

SEQ ID NO: 549959 - RNA, 19 nt, Artificial Sequence
  Description of Artificial Sequence: Synthetic oligonucleotide
gcuuuaaacuccugcuccu

SEQ ID NO: 549960 - RNA, 19 nt, Artificial Sequence
  Description of Artificial Sequence: Synthetic oligonucleotide
uccggcccuccucuuugaa

SEQ ID NO: 549961 - RNA, 19 nt, Artificial Sequence
  Description of Artificial Sequence: Synthetic oligonucleotide
cugccgucuguacuugcga

SEQ ID NO: 549962 - RNA, 19 nt, Artificial Sequence
  Description of Artificial Sequence: Synthetic oligonucleotide
cagacguaucacaagcauu

SEQ ID NO: 549963 - RNA, 19 nt, Artificial Sequence
  Description of Artificial Sequence: Synthetic oligonucleotide
gacuccucguccagcagcu

SEQ ID NO: 549964 - RNA, 19 nt, Artificial Sequence
  Description of Artificial Sequence: Synthetic oligonucleotide
gcgacugaauccauaucuc

SEQ ID NO: 549965 - RNA, 19 nt, Artificial Sequence
  Description of Artificial Sequence: Synthetic oligonucleotide
gaucguucagcuggucccu

SEQ ID NO: 549966 - RNA, 19 nt, Artificial Sequence
  Description of Artificial Sequence: Synthetic oligonucleotide
acuuaaccauguggcucca

SEQ ID NO: 549967 - RNA, 19 nt, Artificial Sequence
  Description of Artificial Sequence: Synthetic oligonucleotide
gcacuucgucaaucuugcg

SEQ ID NO: 549968 - RNA, 19 nt, Artificial Sequence
  Description of Artificial Sequence: Synthetic oligonucleotide
ggcagacguaucacaagca

SEQ ID NO: 549969 - RNA, 19 nt, Artificial Sequence
  Description of Artificial Sequence: Synthetic oligonucleotide
accccuguucugaauuaau

SEQ ID NO: 549970 - RNA, 19 nt, Artificial Sequence
  Description of Artificial Sequence: Synthetic oligonucleotide
ggacucgggacuccucguc

SEQ ID NO: 549971 - RNA, 19 nt, Artificial Sequence
  Description of Artificial Sequence: Synthetic oligonucleotide
caacagggaauaugugaau

SEQ ID NO: 549972 - RNA, 19 nt, Artificial Sequence
  Description of Artificial Sequence: Synthetic oligonucleotide
ccaagguugccagccuacc

SEQ ID NO: 549973 - RNA, 19 nt, Artificial Sequence
  Description of Artificial Sequence: Synthetic oligonucleotide
cuguacuugcgacggggcu

SEQ ID NO: 549974 - RNA, 19 nt, Artificial Sequence
  Description of Artificial Sequence: Synthetic oligonucleotide
cucacccgguguucucuca

SEQ ID NO: 549975 - RNA, 19 nt, Artificial Sequence
  Description of Artificial Sequence: Synthetic oligonucleotide
ggcuuggaggcuggaauga

SEQ ID NO: 549976 - RNA, 19 nt, Artificial Sequence
  Description of Artificial Sequence: Synthetic oligonucleotide
ccugcguacucagacacaa

SEQ ID NO: 549977 - RNA, 19 nt, Artificial Sequence
  Description of Artificial Sequence: Synthetic oligonucleotide
cggagcuugcagugaggcg

SEQ ID NO: 549978 - RNA, 19 nt, Artificial Sequence
  Description of Artificial Sequence: Synthetic oligonucleotide
cagggcaccguguggcucu

SEQ ID NO: 549979 - RNA, 19 nt, Artificial Sequence
  Description of Artificial Sequence: Synthetic oligonucleotide
cgacgauuuguuccaucug

SEQ ID NO: 549980 - RNA, 19 nt, Artificial Sequence
  Description of Artificial Sequence: Synthetic oligonucleotide
ccggcccuccucuuugaac

SEQ ID NO: 549981 - RNA, 19 nt, Artificial Sequence
  Description of Artificial Sequence: Synthetic oligonucleotide
ccaaaagcguggaguggga

SEQ ID NO: 549982 - RNA, 19 nt, Artificial Sequence
  Description of Artificial Sequence: Synthetic oligonucleotide
acccacgaucuggcccacg

SEQ ID NO: 549983 - RNA, 19 nt, Artificial Sequence
  Description of Artificial Sequence: Synthetic oligonucleotide
agggcaccguguggcucuc

SEQ ID NO: 549984 - RNA, 19 nt, Artificial Sequence
  Description of Artificial Sequence: Synthetic oligonucleotide
caccccuguucugaauuaa

SEQ ID NO: 549985 - RNA, 19 nt, Artificial Sequence
  Description of Artificial Sequence: Synthetic oligonucleotide
ccucauuugccauggcagu

SEQ ID NO: 549986 - RNA, 19 nt, Artificial Sequence
  Description of Artificial Sequence: Synthetic oligonucleotide
cuguagcaagcggaucuua

SEQ ID NO: 549987 - RNA, 19 nt, Artificial Sequence
  Description of Artificial Sequence: Synthetic oligonucleotide
gcgacggggcuuguaggug

SEQ ID NO: 549988 - RNA, 19 nt, Artificial Sequence
  Description of Artificial Sequence: Synthetic oligonucleotide
cucggcucgacugggcacu

SEQ ID NO: 549989 - RNA, 19 nt, Artificial Sequence
  Description of Artificial Sequence: Synthetic oligonucleotide
acuugcgacggggcuugua

SEQ ID NO: 549990 - RNA, 19 nt, Artificial Sequence
  Description of Artificial Sequence: Synthetic oligonucleotide
cuuaaccauguggcuccaa

SEQ ID NO: 549991 - RNA, 19 nt, Artificial Sequence
  Description of Artificial Sequence: Synthetic oligonucleotide
cccacuuaaccauguggcu

SEQ ID NO: 549992 - RNA, 19 nt, Artificial Sequence
  Description of Artificial Sequence: Synthetic oligonucleotide
cugccaucacugcaugguu

SEQ ID NO: 549993 - RNA, 19 nt, Artificial Sequence
  Description of Artificial Sequence: Synthetic oligonucleotide
ggcuaccagugcucucaga

SEQ ID NO: 549994 - RNA, 19 nt, Artificial Sequence
  Description of Artificial Sequence: Synthetic oligonucleotide
agcuugcagugaggcggcu

SEQ ID NO: 549995 - RNA, 19 nt, Artificial Sequence
  Description of Artificial Sequence: Synthetic oligonucleotide
gugggacucgggacuccuc

SEQ ID NO: 549996 - RNA, 19 nt, Artificial Sequence
  Description of Artificial Sequence: Synthetic oligonucleotide
cuguaucagcucggcucga

SEQ ID NO: 549997 - RNA, 19 nt, Artificial Sequence
  Description of Artificial Sequence: Synthetic oligonucleotide
cacaagcauuugugugagu

SEQ ID NO: 549998 - RNA, 19 nt, Artificial Sequence
  Description of Artificial Sequence: Synthetic oligonucleotide
uccugucguccaggguguu

SEQ ID NO: 549999 - RNA, 19 nt, Artificial Sequence
  Description of Artificial Sequence: Synthetic oligonucleotide
ucggcucgacugggcacuu

SEQ ID NO: 550000 - RNA, 19 nt, Artificial Sequence
  Description of Artificial Sequence: Synthetic oligonucleotide
cugcguacucagacacaau

SEQ ID NO: 550001 - RNA, 19 nt, Artificial Sequence
  Description of Artificial Sequence: Synthetic oligonucleotide
ccccagcaauacauaucca

SEQ ID NO: 550002 - RNA, 19 nt, Artificial Sequence
  Description of Artificial Sequence: Synthetic oligonucleotide
ccguuuucucgguggccga

SEQ ID NO: 550003 - RNA, 19 nt, Artificial Sequence
  Description of Artificial Sequence: Synthetic oligonucleotide
cccugcguacucagacaca

SEQ ID NO: 550004 - RNA, 19 nt, Artificial Sequence
  Description of Artificial Sequence: Synthetic oligonucleotide
aucugacgguagaguucaa

SEQ ID NO: 550005 - RNA, 19 nt, Artificial Sequence
  Description of Artificial Sequence: Synthetic oligonucleotide
caccuacaacacacguauu

SEQ ID NO: 550006 - RNA, 19 nt, Artificial Sequence
  Description of Artificial Sequence: Synthetic oligonucleotide
gaucuggcccacggagcuu

SEQ ID NO: 550007 - RNA, 19 nt, Artificial Sequence
  Description of Artificial Sequence: Synthetic oligonucleotide
gccagccuaccagggacaa

SEQ ID NO: 550008 - RNA, 19 nt, Artificial Sequence
  Description of Artificial Sequence: Synthetic oligonucleotide
cuucgacgauuuguuccau

SEQ ID NO: 550009 - RNA, 19 nt, Artificial Sequence
  Description of Artificial Sequence: Synthetic oligonucleotide
gcggauguagucacccauu

SEQ ID NO: 550010 - RNA, 19 nt, Artificial Sequence
  Description of Artificial Sequence: Synthetic oligonucleotide
cgacggggcuuguaggugu

SEQ ID NO: 550011 - RNA, 19 nt, Artificial Sequence
  Description of Artificial Sequence: Synthetic oligonucleotide
gcucgacugggcacuucgu

SEQ ID NO: 550012 - RNA, 19 nt, Artificial Sequence
  Description of Artificial Sequence: Synthetic oligonucleotide
gggcaccguguggcucucc

SEQ ID NO: 550013 - RNA, 19 nt, Artificial Sequence
  Description of Artificial Sequence: Synthetic oligonucleotide
ccuguagcaagcggaucuu

SEQ ID NO: 550014 - RNA, 19 nt, Artificial Sequence
  Description of Artificial Sequence: Synthetic oligonucleotide
ccguuuuguuguggcgacu

SEQ ID NO: 550015 - RNA, 19 nt, Artificial Sequence
  Description of Artificial Sequence: Synthetic oligonucleotide
ccagccuaccagggacaau

SEQ ID NO: 550016 - RNA, 19 nt, Artificial Sequence
  Description of Artificial Sequence: Synthetic oligonucleotide
ucaucuuucaaguacaggg

SEQ ID NO: 550017 - RNA, 19 nt, Artificial Sequence
  Description of Artificial Sequence: Synthetic oligonucleotide
aaagaugacugauauuuac

SEQ ID NO: 550018 - RNA, 19 nt, Artificial Sequence
  Description of Artificial Sequence: Synthetic oligonucleotide
aaugcaucgacuuccauug

SEQ ID NO: 550019 - RNA, 19 nt, Artificial Sequence
  Description of Artificial Sequence: Synthetic oligonucleotide
cuuaaauugaguuuccacc

SEQ ID NO: 550020 - RNA, 19 nt, Artificial Sequence
  Description of Artificial Sequence: Synthetic oligonucleotide
uuaguaugagaauaugugg

SEQ ID NO: 550021 - RNA, 19 nt, Artificial Sequence
  Description of Artificial Sequence: Synthetic oligonucleotide
uccucugugauacagagcc

SEQ ID NO: 550022 - RNA, 19 nt, Artificial Sequence
  Description of Artificial Sequence: Synthetic oligonucleotide
acuuccauugcauuaaaac

SEQ ID NO: 550023 - RNA, 19 nt, Artificial Sequence
  Description of Artificial Sequence: Synthetic oligonucleotide
ugguuuguugaacacaucg

SEQ ID NO: 550024 - RNA, 19 nt, Artificial Sequence
  Description of Artificial Sequence: Synthetic oligonucleotide
  modified_base (8)..(8): a, c, u, g, unknown or other
  modified_base (17)..(17): a, c, u, g, unknown or other
ucuggcanagcauacanag

SEQ ID NO: 550025 - RNA, 19 nt, Artificial Sequence
  Description of Artificial Sequence: Synthetic oligonucleotide
aaugcauuguugaugagac

SEQ ID NO: 550026 - RNA, 19 nt, Artificial Sequence
  Description of Artificial Sequence: Synthetic oligonucleotide
  modified_base (2)..(2): a, c, u, g, unknown or other
  modified_base (11)..(11): a, c, u, g, unknown or other
anagcauacanagaaaccu

SEQ ID NO: 550027 - RNA, 19 nt, Artificial Sequence
  Description of Artificial Sequence: Synthetic oligonucleotide
uuaaauuugauccacucua

SEQ ID NO: 550028 - RNA, 19 nt, Artificial Sequence
  Description of Artificial Sequence: Synthetic oligonucleotide
aacacaucggagcugagag

SEQ ID NO: 550029 - RNA, 19 nt, Artificial Sequence
  Description of Artificial Sequence: Synthetic oligonucleotide
aauauguggaaauuccuga

SEQ ID NO: 550030 - RNA, 19 nt, Artificial Sequence
  Description of Artificial Sequence: Synthetic oligonucleotide
caaaccuuggaauacaggc

SEQ ID NO: 550031 - RNA, 19 nt, Artificial Sequence
  Description of Artificial Sequence: Synthetic oligonucleotide
uuacuauaaagaaaauccc

SEQ ID NO: 550032 - RNA, 19 nt, Artificial Sequence
  Description of Artificial Sequence: Synthetic oligonucleotide
aggaacaugccacagguac

SEQ ID NO: 550033 - RNA, 19 nt, Artificial Sequence
  Description of Artificial Sequence: Synthetic oligonucleotide
uauaacuauacuucugaag

SEQ ID NO: 550034 - RNA, 19 nt, Artificial Sequence
  Description of Artificial Sequence: Synthetic oligonucleotide
aaagucaggaauugcagca

SEQ ID NO: 550035 - RNA, 19 nt, Artificial Sequence
  Description of Artificial Sequence: Synthetic oligonucleotide
ugaaguaauccucauagaa

SEQ ID NO: 550036 - RNA, 19 nt, Artificial Sequence
  Description of Artificial Sequence: Synthetic oligonucleotide
agcuaaagaauccuuuuac

SEQ ID NO: 550037 - RNA, 19 nt, Artificial Sequence
  Description of Artificial Sequence: Synthetic oligonucleotide
ucgacagggagacucaugg

SEQ ID NO: 550038 - RNA, 19 nt, Artificial Sequence
  Description of Artificial Sequence: Synthetic oligonucleotide
auguaauagccauucauuc

SEQ ID NO: 550039 - RNA, 19 nt, Artificial Sequence
  Description of Artificial Sequence: Synthetic oligonucleotide
uaguaugagaauaugugga

SEQ ID NO: 550040 - RNA, 19 nt, Artificial Sequence
  Description of Artificial Sequence: Synthetic oligonucleotide
uuugcaugccaucuguggg

SEQ ID NO: 550041 - RNA, 19 nt, Artificial Sequence
  Description of Artificial Sequence: Synthetic oligonucleotide
auaaucucuuagcauauuc

SEQ ID NO: 550042 - RNA, 19 nt, Artificial Sequence
  Description of Artificial Sequence: Synthetic oligonucleotide
ucuggacugacuuugaccu

SEQ ID NO: 550043 - RNA, 19 nt, Artificial Sequence
  Description of Artificial Sequence: Synthetic oligonucleotide
guaauagccauucauuccc

SEQ ID NO: 550044 - RNA, 19 nt, Artificial Sequence
  Description of Artificial Sequence: Synthetic oligonucleotide
ucucuuagcauauucagaa

SEQ ID NO: 550045 - RNA, 19 nt, Artificial Sequence
  Description of Artificial Sequence: Synthetic oligonucleotide
aaacuuucgucuagaagcc

SEQ ID NO: 550046 - RNA, 19 nt, Artificial Sequence
  Description of Artificial Sequence: Synthetic oligonucleotide
auagguaucaguucauuca

SEQ ID NO: 550047 - RNA, 19 nt, Artificial Sequence
  Description of Artificial Sequence: Synthetic oligonucleotide
uaagauauggucguugagc

SEQ ID NO: 550048 - RNA, 19 nt, Artificial Sequence
  Description of Artificial Sequence: Synthetic oligonucleotide
auuaguaugagaauaugug

SEQ ID NO: 550049 - RNA, 19 nt, Artificial Sequence
  Description of Artificial Sequence: Synthetic oligonucleotide
guaggaaggccuuaaauug

SEQ ID NO: 550050 - RNA, 19 nt, Artificial Sequence
  Description of Artificial Sequence: Synthetic oligonucleotide
caaguacaggguuaaaucc

SEQ ID NO: 550051 - RNA, 19 nt, Artificial Sequence
  Description of Artificial Sequence: Synthetic oligonucleotide
uuuuaccucuuccagacgu

SEQ ID NO: 550052 - RNA, 19 nt, Artificial Sequence
  Description of Artificial Sequence: Synthetic oligonucleotide
aauuaguaugagaauaugu

SEQ ID NO: 550053 - RNA, 19 nt, Artificial Sequence
  Description of Artificial Sequence: Synthetic oligonucleotide
ucaaguacaggguuaaauc

SEQ ID NO: 550054 - RNA, 19 nt, Artificial Sequence
  Description of Artificial Sequence: Synthetic oligonucleotide
  modified_base (6)..(6): a, c, u, g, unknown or other
  modified_base (15)..(15): a, c, u, g, unknown or other
uggcanagcauacanagaa

SEQ ID NO: 550055 - RNA, 19 nt, Artificial Sequence
  Description of Artificial Sequence: Synthetic oligonucleotide
cuauaaagaaaaucccagc

SEQ ID NO: 550056 - RNA, 19 nt, Artificial Sequence
  Description of Artificial Sequence: Synthetic oligonucleotide
uaaagauauggaauacuga

SEQ ID NO: 550057 - RNA, 19 nt, Artificial Sequence
  Description of Artificial Sequence: Synthetic oligonucleotide
auaaagaaaaucccagccu

SEQ ID NO: 550058 - RNA, 19 nt, Artificial Sequence
  Description of Artificial Sequence: Synthetic oligonucleotide
  modified_base (3)..(3): a, c, u, g, unknown or other
  modified_base (12)..(12): a, c, u, g, unknown or other
canagcauacanagaaacc

SEQ ID NO: 550059 - RNA, 19 nt, Artificial Sequence
  Description of Artificial Sequence: Synthetic oligonucleotide
cauauaacagagaggauuc

SEQ ID NO: 550060 - RNA, 19 nt, Artificial Sequence
  Description of Artificial Sequence: Synthetic oligonucleotide
uaaucucuuagcauauuca

SEQ ID NO: 550061 - RNA, 19 nt, Artificial Sequence
  Description of Artificial Sequence: Synthetic oligonucleotide
aaaaccucuggacugacuu

SEQ ID NO: 550062 - RNA, 19 nt, Artificial Sequence
  Description of Artificial Sequence: Synthetic oligonucleotide
cuuagcauauucagaauac

SEQ ID NO: 550063 - RNA, 19 nt, Artificial Sequence
  Description of Artificial Sequence: Synthetic oligonucleotide
uaaucugcuugauuuaucu

SEQ ID NO: 550064 - RNA, 19 nt, Artificial Sequence
  Description of Artificial Sequence: Synthetic oligonucleotide
aaucugugcaggauucucc

SEQ ID NO: 550065 - RNA, 19 nt, Artificial Sequence
  Description of Artificial Sequence: Synthetic oligonucleotide
ucaugguuccauuggaugc

SEQ ID NO: 550066 - RNA, 19 nt, Artificial Sequence
  Description of Artificial Sequence: Synthetic oligonucleotide
uucucagacaugaucaagu

SEQ ID NO: 550067 - RNA, 19 nt, Artificial Sequence
  Description of Artificial Sequence: Synthetic oligonucleotide
acaaauacucgccaugcug

SEQ ID NO: 550068 - RNA, 19 nt, Artificial Sequence
  Description of Artificial Sequence: Synthetic oligonucleotide
ucauauaacagagaggauu

SEQ ID NO: 550069 - RNA, 19 nt, Artificial Sequence
  Description of Artificial Sequence: Synthetic oligonucleotide
aaugucagaggaacaugcc

SEQ ID NO: 550070 - RNA, 19 nt, Artificial Sequence
  Description of Artificial Sequence: Synthetic oligonucleotide
acuauacuucugaagauac

SEQ ID NO: 550071 - RNA, 19 nt, Artificial Sequence
  Description of Artificial Sequence: Synthetic oligonucleotide
uucagaacccuucauguaa

SEQ ID NO: 550072 - RNA, 19 nt, Artificial Sequence
  Description of Artificial Sequence: Synthetic oligonucleotide
ucaaggagcuaaagaaucc

SEQ ID NO: 550073 - RNA, 19 nt, Artificial Sequence
  Description of Artificial Sequence: Synthetic oligonucleotide
ugagccaaaggucauucca

SEQ ID NO: 550074 - RNA, 19 nt, Artificial Sequence
  Description of Artificial Sequence: Synthetic oligonucleotide
  modified_base (7)..(7): a, c, u, g, unknown or other
cauacanagaaaccuugac

SEQ ID NO: 550075 - RNA, 19 nt, Artificial Sequence
  Description of Artificial Sequence: Synthetic oligonucleotide
uguaagauauggucguuga

SEQ ID NO: 550076 - RNA, 19 nt, Artificial Sequence
  Description of Artificial Sequence: Synthetic oligonucleotide
uauacauagguaucaguuc

SEQ ID NO: 550077 - RNA, 19 nt, Artificial Sequence
  Description of Artificial Sequence: Synthetic oligonucleotide
uugcauuaaaacacuugcc

SEQ ID NO: 550078 - RNA, 19 nt, Artificial Sequence
  Description of Artificial Sequence: Synthetic oligonucleotide
aacuuauacauagguauca

SEQ ID NO: 550079 - RNA, 19 nt, Artificial Sequence
  Description of Artificial Sequence: Synthetic oligonucleotide
aagauauggaauacugaag

SEQ ID NO: 550080 - RNA, 19 nt, Artificial Sequence
  Description of Artificial Sequence: Synthetic oligonucleotide
auauguggaaauuccugag

SEQ ID NO: 550081 - RNA, 19 nt, Artificial Sequence
  Description of Artificial Sequence: Synthetic oligonucleotide
aauguaauagccauucauu

SEQ ID NO: 550082 - RNA, 19 nt, Artificial Sequence
  Description of Artificial Sequence: Synthetic oligonucleotide
aaaauuuugcugauuguaa

SEQ ID NO: 550083 - RNA, 19 nt, Artificial Sequence
  Description of Artificial Sequence: Synthetic oligonucleotide
ugauuuaucuugucuggca

SEQ ID NO: 550084 - RNA, 19 nt, Artificial Sequence
  Description of Artificial Sequence: Synthetic oligonucleotide
ucaucuguccauaucugcu

SEQ ID NO: 550085 - RNA, 19 nt, Artificial Sequence
  Description of Artificial Sequence: Synthetic oligonucleotide
uaucaauaagguccuucag

SEQ ID NO: 550086 - RNA, 19 nt, Artificial Sequence
  Description of Artificial Sequence: Synthetic oligonucleotide
aaugguuuguugaacacau

SEQ ID NO: 550087 - RNA, 19 nt, Artificial Sequence
  Description of Artificial Sequence: Synthetic oligonucleotide
gauaacuucccaaugcuga

SEQ ID NO: 550088 - RNA, 19 nt, Artificial Sequence
  Description of Artificial Sequence: Synthetic oligonucleotide
cauuaaauuugauccacuc

SEQ ID NO: 550089 - RNA, 19 nt, Artificial Sequence
  Description of Artificial Sequence: Synthetic oligonucleotide
uagcauauucagaauacaa

SEQ ID NO: 550090 - RNA, 19 nt, Artificial Sequence
  Description of Artificial Sequence: Synthetic oligonucleotide
ugacugauauuuacuauaa

SEQ ID NO: 550091 - RNA, 19 nt, Artificial Sequence
  Description of Artificial Sequence: Synthetic oligonucleotide
acaugcaaggaggaggagc

SEQ ID NO: 550092 - RNA, 19 nt, Artificial Sequence
  Description of Artificial Sequence: Synthetic oligonucleotide
cucauagugaacaauguaa

SEQ ID NO: 550093 - RNA, 19 nt, Artificial Sequence
  Description of Artificial Sequence: Synthetic oligonucleotide
agacaaagaugacugauau

SEQ ID NO: 550094 - RNA, 19 nt, Artificial Sequence
  Description of Artificial Sequence: Synthetic oligonucleotide
ucuagaagccacugaagcu

SEQ ID NO: 550095 - RNA, 19 nt, Artificial Sequence
  Description of Artificial Sequence: Synthetic oligonucleotide
aagaaaugcucuucaacuu

SEQ ID NO: 550096 - RNA, 19 nt, Artificial Sequence
  Description of Artificial Sequence: Synthetic oligonucleotide
acucagagagucccaaccg

SEQ ID NO: 550097 - RNA, 19 nt, Artificial Sequence
  Description of Artificial Sequence: Synthetic oligonucleotide
uucuagaagagugacugca

SEQ ID NO: 550098 - RNA, 19 nt, Artificial Sequence
  Description of Artificial Sequence: Synthetic oligonucleotide
acauuucgcccucuuacgg

SEQ ID NO: 550099 - RNA, 19 nt, Artificial Sequence
  Description of Artificial Sequence: Synthetic oligonucleotide
agcacaucggucuuugucu

SEQ ID NO: 550100 - RNA, 19 nt, Artificial Sequence
  Description of Artificial Sequence: Synthetic oligonucleotide
uccauugcauuaaaacacu

SEQ ID NO: 550101 - RNA, 19 nt, Artificial Sequence
  Description of Artificial Sequence: Synthetic oligonucleotide
uggucguugagccaaguuc

SEQ ID NO: 550102 - RNA, 19 nt, Artificial Sequence
  Description of Artificial Sequence: Synthetic oligonucleotide
uccagacgugcucuggugg

SEQ ID NO: 550103 - RNA, 19 nt, Artificial Sequence
  Description of Artificial Sequence: Synthetic oligonucleotide
auaagguccuucagcagcc

SEQ ID NO: 550104 - RNA, 19 nt, Artificial Sequence
  Description of Artificial Sequence: Synthetic oligonucleotide
augacugauauuuacuaua

SEQ ID NO: 550105 - RNA, 19 nt, Artificial Sequence
  Description of Artificial Sequence: Synthetic oligonucleotide
cugccaauuaguaugagaa

SEQ ID NO: 550106 - RNA, 19 nt, Artificial Sequence
  Description of Artificial Sequence: Synthetic oligonucleotide
uagguaucaguucauucaa

SEQ ID NO: 550107 - RNA, 19 nt, Artificial Sequence
  Description of Artificial Sequence: Synthetic oligonucleotide
cuugcgcacacaugcaagg

SEQ ID NO: 550108 - RNA, 19 nt, Artificial Sequence
  Description of Artificial Sequence: Synthetic oligonucleotide
uccauaucugcuuaucaau

SEQ ID NO: 550109 - RNA, 19 nt, Artificial Sequence
  Description of Artificial Sequence: Synthetic oligonucleotide
uuauaacuauacuucugaa

SEQ ID NO: 550110 - RNA, 19 nt, Artificial Sequence
  Description of Artificial Sequence: Synthetic oligonucleotide
uaggaaggccuuaaauuga

SEQ ID NO: 550111 - RNA, 19 nt, Artificial Sequence
  Description of Artificial Sequence: Synthetic oligonucleotide
cacaucggagcugagagcc

SEQ ID NO: 550112 - RNA, 19 nt, Artificial Sequence
  Description of Artificial Sequence: Synthetic oligonucleotide
aaccgucauccucauagug

SEQ ID NO: 550113 - RNA, 19 nt, Artificial Sequence
  Description of Artificial Sequence: Synthetic oligonucleotide
agagggcaaauucaauuug

SEQ ID NO: 550114 - RNA, 19 nt, Artificial Sequence
  Description of Artificial Sequence: Synthetic oligonucleotide
agggcugauacuugcgcac

SEQ ID NO: 550115 - RNA, 19 nt, Artificial Sequence
  Description of Artificial Sequence: Synthetic oligonucleotide
  modified_base (19)..(19): a, c, u, g, unknown or other
gauuuaucuugucuggcan

SEQ ID NO: 550116 - RNA, 19 nt, Artificial Sequence
  Description of Artificial Sequence: Synthetic oligonucleotide
aaguacaggguuaaaucca

SEQ ID NO: 550117 - RNA, 19 nt, Artificial Sequence
  Description of Artificial Sequence: Synthetic oligonucleotide
uuaaaugugucugcaccca

SEQ ID NO: 550118 - RNA, 19 nt, Artificial Sequence
  Description of Artificial Sequence: Synthetic oligonucleotide
aaaccuuggaauacaggca

SEQ ID NO: 550119 - RNA, 19 nt, Artificial Sequence
  Description of Artificial Sequence: Synthetic oligonucleotide
cuggauuccugccaauuag

SEQ ID NO: 550120 - RNA, 19 nt, Artificial Sequence
  Description of Artificial Sequence: Synthetic oligonucleotide
ugcaucgacuuccauugca

SEQ ID NO: 550121 - RNA, 19 nt, Artificial Sequence
  Description of Artificial Sequence: Synthetic oligonucleotide
gagacucaugguuccauug

SEQ ID NO: 550122 - RNA, 19 nt, Artificial Sequence
  Description of Artificial Sequence: Synthetic oligonucleotide
ugauccacucuacugcuuc

SEQ ID NO: 550123 - RNA, 19 nt, Artificial Sequence
  Description of Artificial Sequence: Synthetic oligonucleotide
cauuggaugccuuccacuc

SEQ ID NO: 550124 - RNA, 19 nt, Artificial Sequence
  Description of Artificial Sequence: Synthetic oligonucleotide
auugugaugccaaguuuac

SEQ ID NO: 550125 - RNA, 19 nt, Artificial Sequence
  Description of Artificial Sequence: Synthetic oligonucleotide
uccuuuuaccucuuccaga

SEQ ID NO: 550126 - RNA, 19 nt, Artificial Sequence
  Description of Artificial Sequence: Synthetic oligonucleotide
aacuauacuucugaagaua

SEQ ID NO: 550127 - RNA, 19 nt, Artificial Sequence
  Description of Artificial Sequence: Synthetic oligonucleotide
acuuucgucuagaagccac

SEQ ID NO: 550128 - RNA, 19 nt, Artificial Sequence
  Description of Artificial Sequence: Synthetic oligonucleotide
auacagagcccucaucugu

SEQ ID NO: 550129 - RNA, 19 nt, Artificial Sequence
  Description of Artificial Sequence: Synthetic oligonucleotide
uuucucagacaugaucaag

SEQ ID NO: 550130 - RNA, 19 nt, Artificial Sequence
  Description of Artificial Sequence: Synthetic oligonucleotide
gcuaaagaauccuuuuacc

SEQ ID NO: 550131 - RNA, 19 nt, Artificial Sequence
  Description of Artificial Sequence: Synthetic oligonucleotide
ugcugacaagcugaaaugc

SEQ ID NO: 550132 - RNA, 19 nt, Artificial Sequence
  Description of Artificial Sequence: Synthetic oligonucleotide
cuuacggugaugguuauca

SEQ ID NO: 550133 - RNA, 19 nt, Artificial Sequence
  Description of Artificial Sequence: Synthetic oligonucleotide
auuacugcugaucgucgug

SEQ ID NO: 550134 - RNA, 19 nt, Artificial Sequence
  Description of Artificial Sequence: Synthetic oligonucleotide
cuugcuuggguaaagauau

SEQ ID NO: 550135 - RNA, 19 nt, Artificial Sequence
  Description of Artificial Sequence: Synthetic oligonucleotide
uuuaccucuuccagacgug

SEQ ID NO: 550136 - RNA, 19 nt, Artificial Sequence
  Description of Artificial Sequence: Synthetic oligonucleotide
augucagaggaacaugcca

SEQ ID NO: 550137 - RNA, 19 nt, Artificial Sequence
  Description of Artificial Sequence: Synthetic oligonucleotide
aaugaaugucagaggaaca

SEQ ID NO: 550138 - RNA, 19 nt, Artificial Sequence
  Description of Artificial Sequence: Synthetic oligonucleotide
ugauacuugcgcacacaug

SEQ ID NO: 550139 - RNA, 19 nt, Artificial Sequence
  Description of Artificial Sequence: Synthetic oligonucleotide
auuucgcccucuuacggug

SEQ ID NO: 550140 - RNA, 19 nt, Artificial Sequence
  Description of Artificial Sequence: Synthetic oligonucleotide
uggauagcccacuggauuc

SEQ ID NO: 550141 - RNA, 19 nt, Artificial Sequence
  Description of Artificial Sequence: Synthetic oligonucleotide
ugaaugucagaggaacaug

SEQ ID NO: 550142 - RNA, 19 nt, Artificial Sequence
  Description of Artificial Sequence: Synthetic oligonucleotide
uaacuauacuucugaagau

SEQ ID NO: 550143 - RNA, 19 nt, Artificial Sequence
  Description of Artificial Sequence: Synthetic oligonucleotide
uggacugacuuugaccugc

SEQ ID NO: 550144 - RNA, 19 nt, Artificial Sequence
  Description of Artificial Sequence: Synthetic oligonucleotide
cauucaaaccuuggaauac

SEQ ID NO: 550145 - RNA, 19 nt, Artificial Sequence
  Description of Artificial Sequence: Synthetic oligonucleotide
acaucuaugccuuccugau

SEQ ID NO: 550146 - RNA, 19 nt, Artificial Sequence
  Description of Artificial Sequence: Synthetic oligonucleotide
cauucauaucucuuuucuc

SEQ ID NO: 550147 - RNA, 19 nt, Artificial Sequence
  Description of Artificial Sequence: Synthetic oligonucleotide
gaugagacuugcccgguca

SEQ ID NO: 550148 - RNA, 19 nt, Artificial Sequence
  Description of Artificial Sequence: Synthetic oligonucleotide
uaauagccauucauuccca

SEQ ID NO: 550149 - RNA, 19 nt, Artificial Sequence
  Description of Artificial Sequence: Synthetic oligonucleotide
  modified_base (12)..(12): a, c, u, g, unknown or other
cuugucuggcanagcauac

SEQ ID NO: 550150 - RNA, 19 nt, Artificial Sequence
  Description of Artificial Sequence: Synthetic oligonucleotide
aagcugaaaugcauuguug

SEQ ID NO: 550151 - RNA, 19 nt, Artificial Sequence
  Description of Artificial Sequence: Synthetic oligonucleotide
auuaacuuauacauaggua

SEQ ID NO: 550152 - RNA, 19 nt, Artificial Sequence
  Description of Artificial Sequence: Synthetic oligonucleotide
  modified_base (4)..(4): a, c, u, g, unknown or other
  modified_base (13)..(13): a, c, u, g, unknown or other
gcanagcauacanagaaac

SEQ ID NO: 550153 - RNA, 19 nt, Artificial Sequence
  Description of Artificial Sequence: Synthetic oligonucleotide
caauggauagcccacugga

SEQ ID NO: 550154 - RNA, 19 nt, Artificial Sequence
  Description of Artificial Sequence: Synthetic oligonucleotide
uccacagguguggauacag

SEQ ID NO: 550155 - RNA, 19 nt, Artificial Sequence
  Description of Artificial Sequence: Synthetic oligonucleotide
aguaacagacaaagaugac

SEQ ID NO: 550156 - RNA, 19 nt, Artificial Sequence
  Description of Artificial Sequence: Synthetic oligonucleotide
aagcacccuuuucauaaga

SEQ ID NO: 550157 - RNA, 19 nt, Artificial Sequence
  Description of Artificial Sequence: Synthetic oligonucleotide
aguacaggguuaaauccag

SEQ ID NO: 550158 - RNA, 19 nt, Artificial Sequence
  Description of Artificial Sequence: Synthetic oligonucleotide
gauauggaauacugaagua

SEQ ID NO: 550159 - RNA, 19 nt, Artificial Sequence
  Description of Artificial Sequence: Synthetic oligonucleotide
ucauugugaugccaaguuu

SEQ ID NO: 550160 - RNA, 19 nt, Artificial Sequence
  Description of Artificial Sequence: Synthetic oligonucleotide
gucacaucgacagggagac

SEQ ID NO: 550161 - RNA, 19 nt, Artificial Sequence
  Description of Artificial Sequence: Synthetic oligonucleotide
cucccuugaaacuuucguc

SEQ ID NO: 550162 - RNA, 19 nt, Artificial Sequence
  Description of Artificial Sequence: Synthetic oligonucleotide
uucccaguaccauguaaga

SEQ ID NO: 550163 - RNA, 19 nt, Artificial Sequence
  Description of Artificial Sequence: Synthetic oligonucleotide
auugucauauuuccagcuu

SEQ ID NO: 550164 - RNA, 19 nt, Artificial Sequence
  Description of Artificial Sequence: Synthetic oligonucleotide
caggggaaagcccuucugc

SEQ ID NO: 550165 - RNA, 19 nt, Artificial Sequence
  Description of Artificial Sequence: Synthetic oligonucleotide
auaaucugcuugauuuauc

SEQ ID NO: 550166 - RNA, 19 nt, Artificial Sequence
  Description of Artificial Sequence: Synthetic oligonucleotide
ugacaagcugaaaugcauu

SEQ ID NO: 550167 - RNA, 19 nt, Artificial Sequence
  Description of Artificial Sequence: Synthetic oligonucleotide
ucaggggaaagcccuucug

SEQ ID NO: 550168 - RNA, 19 nt, Artificial Sequence
  Description of Artificial Sequence: Synthetic oligonucleotide
caugguuccauuggaugcc

SEQ ID NO: 550169 - RNA, 19 nt, Artificial Sequence
  Description of Artificial Sequence: Synthetic oligonucleotide
cacaucgacagggagacuc

SEQ ID NO: 550170 - RNA, 19 nt, Artificial Sequence
  Description of Artificial Sequence: Synthetic oligonucleotide
ugcccggucauuacugcug

SEQ ID NO: 550171 - RNA, 19 nt, Artificial Sequence
  Description of Artificial Sequence: Synthetic oligonucleotide
cucauucauaucucuuuuc

SEQ ID NO: 550172 - RNA, 19 nt, Artificial Sequence
  Description of Artificial Sequence: Synthetic oligonucleotide
auguaagauauggucguug

SEQ ID NO: 550173 - RNA, 19 nt, Artificial Sequence
  Description of Artificial Sequence: Synthetic oligonucleotide
  modified_base (7)..(7): a, c, u, g, unknown or other
  modified_base (16)..(16): a, c, u, g, unknown or other
cuggcanagcauacanaga

SEQ ID NO: 550174 - RNA, 19 nt, Artificial Sequence
  Description of Artificial Sequence: Synthetic oligonucleotide
uucuuucaaggagcuaaag

SEQ ID NO: 550175 - RNA, 19 nt, Artificial Sequence
  Description of Artificial Sequence: Synthetic oligonucleotide
caaaauuuugcugauugua

SEQ ID NO: 550176 - RNA, 19 nt, Artificial Sequence
  Description of Artificial Sequence: Synthetic oligonucleotide
uuccauuggaugccuucca

SEQ ID NO: 550177 - RNA, 19 nt, Artificial Sequence
  Description of Artificial Sequence: Synthetic oligonucleotide
guaacagacaaagaugacu

SEQ ID NO: 550178 - RNA, 19 nt, Artificial Sequence
  Description of Artificial Sequence: Synthetic oligonucleotide
aaauacucgccaugcuguu

SEQ ID NO: 550179 - RNA, 19 nt, Artificial Sequence
  Description of Artificial Sequence: Synthetic oligonucleotide
uacuugcgcacacaugcaa

SEQ ID NO: 550180 - RNA, 19 nt, Artificial Sequence
  Description of Artificial Sequence: Synthetic oligonucleotide
uugaaacuuucgucuagaa

SEQ ID NO: 550181 - RNA, 19 nt, Artificial Sequence
  Description of Artificial Sequence: Synthetic oligonucleotide
cuuuaucauauaacagaga

SEQ ID NO: 550182 - RNA, 19 nt, Artificial Sequence
  Description of Artificial Sequence: Synthetic oligonucleotide
cauccaucguauguuuucc

SEQ ID NO: 550183 - RNA, 19 nt, Artificial Sequence
  Description of Artificial Sequence: Synthetic oligonucleotide
aucgacuuccauugcauua

SEQ ID NO: 550184 - RNA, 19 nt, Artificial Sequence
  Description of Artificial Sequence: Synthetic oligonucleotide
cauucauucccacauuaaa

SEQ ID NO: 550185 - RNA, 19 nt, Artificial Sequence
  Description of Artificial Sequence: Synthetic oligonucleotide
agacuugcccggucauuac

SEQ ID NO: 550186 - RNA, 19 nt, Artificial Sequence
  Description of Artificial Sequence: Synthetic oligonucleotide
ucgacuuccauugcauuaa

SEQ ID NO: 550187 - RNA, 19 nt, Artificial Sequence
  Description of Artificial Sequence: Synthetic oligonucleotide
gauccacucuacugcuucc

SEQ ID NO: 550188 - RNA, 19 nt, Artificial Sequence
  Description of Artificial Sequence: Synthetic oligonucleotide
gacucaugguuccauugga

SEQ ID NO: 550189 - RNA, 19 nt, Artificial Sequence
  Description of Artificial Sequence: Synthetic oligonucleotide
ggauacagggugugaagag

SEQ ID NO: 550190 - RNA, 19 nt, Artificial Sequence
  Description of Artificial Sequence: Synthetic oligonucleotide
uuacugcugaucgucgugu

SEQ ID NO: 550191 - RNA, 19 nt, Artificial Sequence
  Description of Artificial Sequence: Synthetic oligonucleotide
auuggaugccuuccacucu

SEQ ID NO: 550192 - RNA, 19 nt, Artificial Sequence
  Description of Artificial Sequence: Synthetic oligonucleotide
uuucgucuagaagccacug

SEQ ID NO: 550193 - RNA, 19 nt, Artificial Sequence
  Description of Artificial Sequence: Synthetic oligonucleotide
uugagccaaaggucauucc

SEQ ID NO: 550194 - RNA, 19 nt, Artificial Sequence
  Description of Artificial Sequence: Synthetic oligonucleotide
caaauacucgccaugcugu

SEQ ID NO: 550195 - RNA, 19 nt, Artificial Sequence
  Description of Artificial Sequence: Synthetic oligonucleotide
guacccagucucugggagg

SEQ ID NO: 550196 - RNA, 19 nt, Artificial Sequence
  Description of Artificial Sequence: Synthetic oligonucleotide
caggaauugcagcaagauc

SEQ ID NO: 550197 - RNA, 19 nt, Artificial Sequence
  Description of Artificial Sequence: Synthetic oligonucleotide
gaaguaauccucauagaau

SEQ ID NO: 550198 - RNA, 19 nt, Artificial Sequence
  Description of Artificial Sequence: Synthetic oligonucleotide
aaaccucuggacugacuuu

SEQ ID NO: 550199 - RNA, 19 nt, Artificial Sequence
  Description of Artificial Sequence: Synthetic oligonucleotide
ugcagccauaaucggauuu

SEQ ID NO: 550200 - RNA, 19 nt, Artificial Sequence
  Description of Artificial Sequence: Synthetic oligonucleotide
cagggagacucaugguucc

SEQ ID NO: 550201 - RNA, 19 nt, Artificial Sequence
  Description of Artificial Sequence: Synthetic oligonucleotide
aauggauagcccacuggau

SEQ ID NO: 550202 - RNA, 19 nt, Artificial Sequence
  Description of Artificial Sequence: Synthetic oligonucleotide
ugccaauuaguaugagaau

SEQ ID NO: 550203 - RNA, 19 nt, Artificial Sequence
  Description of Artificial Sequence: Synthetic oligonucleotide
augcaucgacuuccauugc

SEQ ID NO: 550204 - RNA, 19 nt, Artificial Sequence
  Description of Artificial Sequence: Synthetic oligonucleotide
gaugacugauauuuacuau

SEQ ID NO: 550205 - RNA, 19 nt, Artificial Sequence
  Description of Artificial Sequence: Synthetic oligonucleotide
cuugcccggucauuacugc

SEQ ID NO: 550206 - RNA, 19 nt, Artificial Sequence
  Description of Artificial Sequence: Synthetic oligonucleotide
gaaucugugcaggauucuc

SEQ ID NO: 550207 - RNA, 19 nt, Artificial Sequence
  Description of Artificial Sequence: Synthetic oligonucleotide
ccuuuucauaagaaacacc

SEQ ID NO: 550208 - RNA, 19 nt, Artificial Sequence
  Description of Artificial Sequence: Synthetic oligonucleotide
augaucaagugcaaugaaa

SEQ ID NO: 550209 - RNA, 19 nt, Artificial Sequence
  Description of Artificial Sequence: Synthetic oligonucleotide
  modified_base (11)..(11): a, c, u, g, unknown or other
uugucuggcanagcauaca

SEQ ID NO: 550210 - RNA, 19 nt, Artificial Sequence
  Description of Artificial Sequence: Synthetic oligonucleotide
ucugugauacagagcccuc

SEQ ID NO: 550211 - RNA, 19 nt, Artificial Sequence
  Description of Artificial Sequence: Synthetic oligonucleotide
augugcacauuucgcccuc

SEQ ID NO: 550212 - RNA, 19 nt, Artificial Sequence
  Description of Artificial Sequence: Synthetic oligonucleotide
cauagugaacaauguaaua

SEQ ID NO: 550213 - RNA, 19 nt, Artificial Sequence
  Description of Artificial Sequence: Synthetic oligonucleotide
aagaucuugcuuggguaaa

SEQ ID NO: 550214 - RNA, 19 nt, Artificial Sequence
  Description of Artificial Sequence: Synthetic oligonucleotide
ucuaugccuuccugaugcc

SEQ ID NO: 550215 - RNA, 19 nt, Artificial Sequence
  Description of Artificial Sequence: Synthetic oligonucleotide
caugcaaggaggaggagcu

SEQ ID NO: 550216 - RNA, 19 nt, Artificial Sequence
  Description of Artificial Sequence: Synthetic oligonucleotide
acuugcgcacacaugcaag

SEQ ID NO: 550217 - RNA, 19 nt, Artificial Sequence
  Description of Artificial Sequence: Synthetic oligonucleotide
cugcugaucgucgugugug

SEQ ID NO: 550218 - RNA, 19 nt, Artificial Sequence
  Description of Artificial Sequence: Synthetic oligonucleotide
accgucauccucauaguga

SEQ ID NO: 550219 - RNA, 19 nt, Artificial Sequence
  Description of Artificial Sequence: Synthetic oligonucleotide
gaacccuucauguaauguu

SEQ ID NO: 550220 - RNA, 19 nt, Artificial Sequence
  Description of Artificial Sequence: Synthetic oligonucleotide
agauaaucucuuagcauau

SEQ ID NO: 550221 - RNA, 19 nt, Artificial Sequence
  Description of Artificial Sequence: Synthetic oligonucleotide
cauccauuguuugcaugcc

SEQ ID NO: 550222 - RNA, 19 nt, Artificial Sequence
  Description of Artificial Sequence: Synthetic oligonucleotide
caagcacccuuuucauaag

SEQ ID NO: 550223 - RNA, 19 nt, Artificial Sequence
  Description of Artificial Sequence: Synthetic oligonucleotide
cacucuacugcuuccggga

SEQ ID NO: 550224 - RNA, 19 nt, Artificial Sequence
  Description of Artificial Sequence: Synthetic oligonucleotide
acugcugaucgucgugugu

SEQ ID NO: 550225 - RNA, 19 nt, Artificial Sequence
  Description of Artificial Sequence: Synthetic oligonucleotide
agaauacaagcacccuuuu

SEQ ID NO: 550226 - RNA, 19 nt, Artificial Sequence
  Description of Artificial Sequence: Synthetic oligonucleotide
auauaacagagaggauucu

SEQ ID NO: 550227 - RNA, 19 nt, Artificial Sequence
  Description of Artificial Sequence: Synthetic oligonucleotide
uacugcugaucgucgugug

SEQ ID NO: 550228 - RNA, 19 nt, Artificial Sequence
  Description of Artificial Sequence: Synthetic oligonucleotide
gaacacaucggagcugaga

SEQ ID NO: 550229 - RNA, 19 nt, Artificial Sequence
  Description of Artificial Sequence: Synthetic oligonucleotide
gaguugaaugcaucgacuu

SEQ ID NO: 550230 - RNA, 19 nt, Artificial Sequence
  Description of Artificial Sequence: Synthetic oligonucleotide
auccaucguauguuuuccu

SEQ ID NO: 550231 - RNA, 19 nt, Artificial Sequence
  Description of Artificial Sequence: Synthetic oligonucleotide
uuccugaugccagugugau

SEQ ID NO: 550232 - RNA, 19 nt, Artificial Sequence
  Description of Artificial Sequence: Synthetic oligonucleotide
caucuaugccuuccugaug

SEQ ID NO: 550233 - RNA, 19 nt, Artificial Sequence
  Description of Artificial Sequence: Synthetic oligonucleotide
cugaaguaauccucauaga

SEQ ID NO: 550234 - RNA, 19 nt, Artificial Sequence
  Description of Artificial Sequence: Synthetic oligonucleotide
uuucgcccucuuacgguga

SEQ ID NO: 550235 - RNA, 19 nt, Artificial Sequence
  Description of Artificial Sequence: Synthetic oligonucleotide
uugcuuggguaaagauaug

SEQ ID NO: 550236 - RNA, 19 nt, Artificial Sequence
  Description of Artificial Sequence: Synthetic oligonucleotide
uccauguguucaucauggu

SEQ ID NO: 550237 - RNA, 19 nt, Artificial Sequence
  Description of Artificial Sequence: Synthetic oligonucleotide
cagacaaagaugacugaua

SEQ ID NO: 550238 - RNA, 19 nt, Artificial Sequence
  Description of Artificial Sequence: Synthetic oligonucleotide
ugaugagacuugcccgguc

SEQ ID NO: 550239 - RNA, 19 nt, Artificial Sequence
  Description of Artificial Sequence: Synthetic oligonucleotide
acuugcccggucauuacug

SEQ ID NO: 550240 - RNA, 19 nt, Artificial Sequence
  Description of Artificial Sequence: Synthetic oligonucleotide
ggucguugagccaaguuca

SEQ ID NO: 550241 - RNA, 19 nt, Artificial Sequence
  Description of Artificial Sequence: Synthetic oligonucleotide
ugaucgucgugugugcgau

SEQ ID NO: 550242 - RNA, 19 nt, Artificial Sequence
  Description of Artificial Sequence: Synthetic oligonucleotide
gauacagggugugaagagu

SEQ ID NO: 550243 - RNA, 19 nt, Artificial Sequence
  Description of Artificial Sequence: Synthetic oligonucleotide
caauggauaacuucccaau

SEQ ID NO: 550244 - RNA, 19 nt, Artificial Sequence
  Description of Artificial Sequence: Synthetic oligonucleotide
ucccaguaccauguaagau

SEQ ID NO: 550245 - RNA, 19 nt, Artificial Sequence
  Description of Artificial Sequence: Synthetic oligonucleotide
guaaugaaugucagaggaa

SEQ ID NO: 550246 - RNA, 19 nt, Artificial Sequence
  Description of Artificial Sequence: Synthetic oligonucleotide
ccaauggauagcccacugg

SEQ ID NO: 550247 - RNA, 19 nt, Artificial Sequence
  Description of Artificial Sequence: Synthetic oligonucleotide
cagagagucccaaccguca

SEQ ID NO: 550248 - RNA, 19 nt, Artificial Sequence
  Description of Artificial Sequence: Synthetic oligonucleotide
auacagggugugaagaguu

SEQ ID NO: 550249 - RNA, 19 nt, Artificial Sequence
  Description of Artificial Sequence: Synthetic oligonucleotide
caugaucaagugcaaugaa

SEQ ID NO: 550250 - RNA, 19 nt, Artificial Sequence
  Description of Artificial Sequence: Synthetic oligonucleotide
caaagaugacugauauuua

SEQ ID NO: 550251 - RNA, 19 nt, Artificial Sequence
  Description of Artificial Sequence: Synthetic oligonucleotide
ccaaguuuacuggaugcag

SEQ ID NO: 550252 - RNA, 19 nt, Artificial Sequence
  Description of Artificial Sequence: Synthetic oligonucleotide
gcgcacacaugcaaggagg

SEQ ID NO: 550253 - RNA, 19 nt, Artificial Sequence
  Description of Artificial Sequence: Synthetic oligonucleotide
uugaugagacuugcccggu

SEQ ID NO: 550254 - RNA, 19 nt, Artificial Sequence
  Description of Artificial Sequence: Synthetic oligonucleotide
cagaauacaagcacccuuu

SEQ ID NO: 550255 - RNA, 19 nt, Artificial Sequence
  Description of Artificial Sequence: Synthetic oligonucleotide
auacugcacaauuccucuu

SEQ ID NO: 550256 - RNA, 19 nt, Artificial Sequence
  Description of Artificial Sequence: Synthetic oligonucleotide
cccagauaaucucuuagca

SEQ ID NO: 550257 - RNA, 19 nt, Artificial Sequence
  Description of Artificial Sequence: Synthetic oligonucleotide
ccauccaucguauguuuuc

SEQ ID NO: 550258 - RNA, 19 nt, Artificial Sequence
  Description of Artificial Sequence: Synthetic oligonucleotide
auggucguugagccaaguu

SEQ ID NO: 550259 - RNA, 19 nt, Artificial Sequence
  Description of Artificial Sequence: Synthetic oligonucleotide
agagcauaaucugcuugau

SEQ ID NO: 550260 - RNA, 19 nt, Artificial Sequence
  Description of Artificial Sequence: Synthetic oligonucleotide
cagggcugauacuugcgca

SEQ ID NO: 550261 - RNA, 19 nt, Artificial Sequence
  Description of Artificial Sequence: Synthetic oligonucleotide
  modified_base (5)..(5): a, c, u, g, unknown or other
  modified_base (14)..(14): a, c, u, g, unknown or other
ggcanagcauacanagaaa

SEQ ID NO: 550262 - RNA, 19 nt, Artificial Sequence
  Description of Artificial Sequence: Synthetic oligonucleotide
gcacaauuccucuuuuaaa

SEQ ID NO: 550263 - RNA, 19 nt, Artificial Sequence
  Description of Artificial Sequence: Synthetic oligonucleotide
aucgucgugugugcgauuu

SEQ ID NO: 550264 - RNA, 19 nt, Artificial Sequence
  Description of Artificial Sequence: Synthetic oligonucleotide
aggauucuccacaggugug

SEQ ID NO: 550265 - RNA, 19 nt, Artificial Sequence
  Description of Artificial Sequence: Synthetic oligonucleotide
cugaucgucgugugugcga

SEQ ID NO: 550266 - RNA, 19 nt, Artificial Sequence
  Description of Artificial Sequence: Synthetic oligonucleotide
ucguugagccaaguucaaa

SEQ ID NO: 550267 - RNA, 19 nt, Artificial Sequence
  Description of Artificial Sequence: Synthetic oligonucleotide
aggguuaaauccagggcuu

SEQ ID NO: 550268 - RNA, 19 nt, Artificial Sequence
  Description of Artificial Sequence: Synthetic oligonucleotide
cacagguacccagucucug

SEQ ID NO: 550269 - RNA, 19 nt, Artificial Sequence
  Description of Artificial Sequence: Synthetic oligonucleotide
cuauacuucugaagauacu

SEQ ID NO: 550270 - RNA, 19 nt, Artificial Sequence
  Description of Artificial Sequence: Synthetic oligonucleotide
  modified_base (8)..(8): a, c, u, g, unknown or other
gcauacanagaaaccuuga

SEQ ID NO: 550271 - RNA, 19 nt, Artificial Sequence
  Description of Artificial Sequence: Synthetic oligonucleotide
auacuugcgcacacaugca

SEQ ID NO: 550272 - RNA, 19 nt, Artificial Sequence
  Description of Artificial Sequence: Synthetic oligonucleotide
uccugccaauuaguaugag

SEQ ID NO: 550273 - RNA, 19 nt, Artificial Sequence
  Description of Artificial Sequence: Synthetic oligonucleotide
ccgaaucugugcaggauuc

SEQ ID NO: 550274 - RNA, 19 nt, Artificial Sequence
  Description of Artificial Sequence: Synthetic oligonucleotide
cagagggcaaauucaauuu

SEQ ID NO: 550275 - RNA, 19 nt, Artificial Sequence
  Description of Artificial Sequence: Synthetic oligonucleotide
gacaaagaugacugauauu

SEQ ID NO: 550276 - RNA, 19 nt, Artificial Sequence
  Description of Artificial Sequence: Synthetic oligonucleotide
aucauauaacagagaggau

SEQ ID NO: 550277 - RNA, 19 nt, Artificial Sequence
  Description of Artificial Sequence: Synthetic oligonucleotide
uucgcccucuuacggugau

SEQ ID NO: 550278 - RNA, 19 nt, Artificial Sequence
  Description of Artificial Sequence: Synthetic oligonucleotide
acaucgacagggagacuca

SEQ ID NO: 550279 - RNA, 19 nt, Artificial Sequence
  Description of Artificial Sequence: Synthetic oligonucleotide
ucuuacggugaugguuauc

SEQ ID NO: 550280 - RNA, 19 nt, Artificial Sequence
  Description of Artificial Sequence: Synthetic oligonucleotide
ucggagcugagagccauuu

SEQ ID NO: 550281 - RNA, 19 nt, Artificial Sequence
  Description of Artificial Sequence: Synthetic oligonucleotide
aucgacagggagacucaug

SEQ ID NO: 550282 - RNA, 19 nt, Artificial Sequence
  Description of Artificial Sequence: Synthetic oligonucleotide
aaguagcccucugcccucu

SEQ ID NO: 550283 - RNA, 19 nt, Artificial Sequence
  Description of Artificial Sequence: Synthetic oligonucleotide
gacuugcccggucauuacu

SEQ ID NO: 550284 - RNA, 19 nt, Artificial Sequence
  Description of Artificial Sequence: Synthetic oligonucleotide
cauuucgcccucuuacggu

SEQ ID NO: 550285 - RNA, 19 nt, Artificial Sequence
  Description of Artificial Sequence: Synthetic oligonucleotide
cuuucgucuagaagccacu

SEQ ID NO: 550286 - RNA, 19 nt, Artificial Sequence
  Description of Artificial Sequence: Synthetic oligonucleotide
gggcaaauucaauuuggcu

SEQ ID NO: 550287 - RNA, 19 nt, Artificial Sequence
  Description of Artificial Sequence: Synthetic oligonucleotide
gcugaucgucgugugugcg

SEQ ID NO: 550288 - RNA, 19 nt, Artificial Sequence
  Description of Artificial Sequence: Synthetic oligonucleotide
ccucuuacggugaugguua

SEQ ID NO: 550289 - RNA, 19 nt, Artificial Sequence
  Description of Artificial Sequence: Synthetic oligonucleotide
ugugcacauuucgcccucu

SEQ ID NO: 550290 - RNA, 19 nt, Artificial Sequence
  Description of Artificial Sequence: Synthetic oligonucleotide
ccugccaauuaguaugaga

SEQ ID NO: 550291 - RNA, 19 nt, Artificial Sequence
  Description of Artificial Sequence: Synthetic oligonucleotide
ccauaucugcuuaucaaua

SEQ ID NO: 550292 - RNA, 19 nt, Artificial Sequence
  Description of Artificial Sequence: Synthetic oligonucleotide
cucagagagucccaaccgu

SEQ ID NO: 550293 - RNA, 19 nt, Artificial Sequence
  Description of Artificial Sequence: Synthetic oligonucleotide
gcauaaucugcuugauuua

SEQ ID NO: 550294 - RNA, 19 nt, Artificial Sequence
  Description of Artificial Sequence: Synthetic oligonucleotide
cagcaagaucuugcuuggg

SEQ ID NO: 550295 - RNA, 19 nt, Artificial Sequence
  Description of Artificial Sequence: Synthetic oligonucleotide
cauuacugcugaucgucgu

SEQ ID NO: 550296 - RNA, 19 nt, Artificial Sequence
  Description of Artificial Sequence: Synthetic oligonucleotide
ggauagcccacuggauucc

SEQ ID NO: 550297 - RNA, 19 nt, Artificial Sequence
  Description of Artificial Sequence: Synthetic oligonucleotide
guaccauguaagauauggu

SEQ ID NO: 550298 - RNA, 19 nt, Artificial Sequence
  Description of Artificial Sequence: Synthetic oligonucleotide
cgucuagaagccacugaag

SEQ ID NO: 550299 - RNA, 19 nt, Artificial Sequence
  Description of Artificial Sequence: Synthetic oligonucleotide
ccauguaagauauggucgu

SEQ ID NO: 550300 - RNA, 19 nt, Artificial Sequence
  Description of Artificial Sequence: Synthetic oligonucleotide
gagcauaaucugcuugauu

SEQ ID NO: 550301 - RNA, 19 nt, Artificial Sequence
  Description of Artificial Sequence: Synthetic oligonucleotide
agguaucaguucauucaaa

SEQ ID NO: 550302 - RNA, 19 nt, Artificial Sequence
  Description of Artificial Sequence: Synthetic oligonucleotide
uugcagccauaaucggauu

SEQ ID NO: 550303 - RNA, 19 nt, Artificial Sequence
  Description of Artificial Sequence: Synthetic oligonucleotide
ggccuuaaauugaguuucc

SEQ ID NO: 550304 - RNA, 19 nt, Artificial Sequence
  Description of Artificial Sequence: Synthetic oligonucleotide
  modified_base (9)..(9): a, c, u, g, unknown or other
  modified_base (18)..(18): a, c, u, g, unknown or other
gucuggcanagcauacana

SEQ ID NO: 550305 - RNA, 19 nt, Artificial Sequence
  Description of Artificial Sequence: Synthetic oligonucleotide
cauaucucuuuucuccauu

SEQ ID NO: 550306 - RNA, 19 nt, Artificial Sequence
  Description of Artificial Sequence: Synthetic oligonucleotide
gauaaucucuuagcauauu

SEQ ID NO: 550307 - RNA, 19 nt, Artificial Sequence
  Description of Artificial Sequence: Synthetic oligonucleotide
caccaucuuuaguuugaaa

SEQ ID NO: 550308 - RNA, 19 nt, Artificial Sequence
  Description of Artificial Sequence: Synthetic oligonucleotide
cgcccucuuacggugaugg

SEQ ID NO: 550309 - RNA, 19 nt, Artificial Sequence
  Description of Artificial Sequence: Synthetic oligonucleotide
ugguuccauuggaugccuu

SEQ ID NO: 550310 - RNA, 19 nt, Artificial Sequence
  Description of Artificial Sequence: Synthetic oligonucleotide
cugcacccagauaaucucu

SEQ ID NO: 550311 - RNA, 19 nt, Artificial Sequence
  Description of Artificial Sequence: Synthetic oligonucleotide
ccacucucugaaguagccc

SEQ ID NO: 550312 - RNA, 19 nt, Artificial Sequence
  Description of Artificial Sequence: Synthetic oligonucleotide
ucgucgugugugcgauuuu

SEQ ID NO: 550313 - RNA, 19 nt, Artificial Sequence
  Description of Artificial Sequence: Synthetic oligonucleotide
gcugauacuugcgcacaca

SEQ ID NO: 550314 - RNA, 19 nt, Artificial Sequence
  Description of Artificial Sequence: Synthetic oligonucleotide
ccaggccaauggauagccc

SEQ ID NO: 550315 - RNA, 19 nt, Artificial Sequence
  Description of Artificial Sequence: Synthetic oligonucleotide
caaccgucauccucauagu

SEQ ID NO: 550316 - RNA, 19 nt, Artificial Sequence
  Description of Artificial Sequence: Synthetic oligonucleotide
ucacaucgacagggagacu

SEQ ID NO: 550317 - RNA, 19 nt, Artificial Sequence
  Description of Artificial Sequence: Synthetic oligonucleotide
gucguugagccaaguucaa

SEQ ID NO: 550318 - RNA, 19 nt, Artificial Sequence
  Description of Artificial Sequence: Synthetic oligonucleotide
ccagacgugcucuggugga

SEQ ID NO: 550319 - RNA, 19 nt, Artificial Sequence
  Description of Artificial Sequence: Synthetic oligonucleotide
caucgacuuccauugcauu

SEQ ID NO: 550320 - RNA, 19 nt, Artificial Sequence
  Description of Artificial Sequence: Synthetic oligonucleotide
gggcugauacuugcgcaca

SEQ ID NO: 550321 - RNA, 19 nt, Artificial Sequence
  Description of Artificial Sequence: Synthetic oligonucleotide
cugcuuccgggaggaugag

SEQ ID NO: 550322 - RNA, 19 nt, Artificial Sequence
  Description of Artificial Sequence: Synthetic oligonucleotide
cauguaagauauggucguu

SEQ ID NO: 550323 - RNA, 19 nt, Artificial Sequence
  Description of Artificial Sequence: Synthetic oligonucleotide
cagacgugcucugguggaa

SEQ ID NO: 550324 - RNA, 19 nt, Artificial Sequence
  Description of Artificial Sequence: Synthetic oligonucleotide
gcaucgacuuccauugcau

SEQ ID NO: 550325 - RNA, 19 nt, Artificial Sequence
  Description of Artificial Sequence: Synthetic oligonucleotide
cucuuacggugaugguuau

SEQ ID NO: 550326 - RNA, 19 nt, Artificial Sequence
  Description of Artificial Sequence: Synthetic oligonucleotide
aucggagcugagagccauu

SEQ ID NO: 550327 - RNA, 19 nt, Artificial Sequence
  Description of Artificial Sequence: Synthetic oligonucleotide
ggaugagcacaucggucuu

SEQ ID NO: 550328 - RNA, 19 nt, Artificial Sequence
  Description of Artificial Sequence: Synthetic oligonucleotide
gaucgucgugugugcgauu

SEQ ID NO: 550329 - RNA, 19 nt, Artificial Sequence
  Description of Artificial Sequence: Synthetic oligonucleotide
caucgacagggagacucau

SEQ ID NO: 550330 - RNA, 19 nt, Artificial Sequence
  Description of Artificial Sequence: Synthetic oligonucleotide
ccacagguacccagucucu

SEQ ID NO: 550331 - RNA, 19 nt, Artificial Sequence
  Description of Artificial Sequence: Synthetic oligonucleotide
ggguuaaauccagggcuuu

SEQ ID NO: 550332 - RNA, 19 nt, Artificial Sequence
  Description of Artificial Sequence: Synthetic oligonucleotide
cccucuuacggugaugguu

SEQ ID NO: 550333 - RNA, 19 nt, Artificial Sequence
  Description of Artificial Sequence: Synthetic oligonucleotide
cgacuuccauugcauuaaa

SEQ ID NO: 550334 - RNA, 19 nt, Artificial Sequence
  Description of Artificial Sequence: Synthetic oligonucleotide
gcccucuuacggugauggu

SEQ ID NO: 550335 - RNA, 19 nt, Artificial Sequence
  Description of Artificial Sequence: Synthetic oligonucleotide
ccgggaggaugagcacauc

SEQ ID NO: 550336 - RNA, 19 nt, Artificial Sequence
  Description of Artificial Sequence: Synthetic oligonucleotide
cgaaucugugcaggauucu

SEQ ID NO: 550337 - RNA, 19 nt, Artificial Sequence
  Description of Artificial Sequence: Synthetic oligonucleotide
cggagcugagagccauuuu

SEQ ID NO: 550338 - RNA, 19 nt, Artificial Sequence
  Description of Artificial Sequence: Synthetic oligonucleotide
ucaauuauaacucuuaagg

SEQ ID NO: 550339 - RNA, 19 nt, Artificial Sequence
  Description of Artificial Sequence: Synthetic oligonucleotide
aauuauaacucuuaaggcg

SEQ ID NO: 550340 - RNA, 19 nt, Artificial Sequence
  Description of Artificial Sequence: Synthetic oligonucleotide
aaugguaacguucaaauga

SEQ ID NO: 550341 - RNA, 19 nt, Artificial Sequence
  Description of Artificial Sequence: Synthetic oligonucleotide
aauugguuggauauaaggc

SEQ ID NO: 550342 - RNA, 19 nt, Artificial Sequence
  Description of Artificial Sequence: Synthetic oligonucleotide
ucuuagaugacauaggacu

SEQ ID NO: 550343 - RNA, 19 nt, Artificial Sequence
  Description of Artificial Sequence: Synthetic oligonucleotide
aguagauuggaucucauuc

SEQ ID NO: 550344 - RNA, 19 nt, Artificial Sequence
  Description of Artificial Sequence: Synthetic oligonucleotide
acucaaacauucuagaggg

SEQ ID NO: 550345 - RNA, 19 nt, Artificial Sequence
  Description of Artificial Sequence: Synthetic oligonucleotide
gaugacauaggacuguucg

SEQ ID NO: 550346 - RNA, 19 nt, Artificial Sequence
  Description of Artificial Sequence: Synthetic oligonucleotide
aacacuaugaagugaaucu

SEQ ID NO: 550347 - RNA, 19 nt, Artificial Sequence
  Description of Artificial Sequence: Synthetic oligonucleotide
aaagagugcagguuuuggc

SEQ ID NO: 550348 - RNA, 19 nt, Artificial Sequence
  Description of Artificial Sequence: Synthetic oligonucleotide
uuaaguaguugucaaaagc

SEQ ID NO: 550349 - RNA, 19 nt, Artificial Sequence
  Description of Artificial Sequence: Synthetic oligonucleotide
cuuuagauauuccugauag

SEQ ID NO: 550350 - RNA, 19 nt, Artificial Sequence
  Description of Artificial Sequence: Synthetic oligonucleotide
ucccuuaacgcccacaugg

SEQ ID NO: 550351 - RNA, 19 nt, Artificial Sequence
  Description of Artificial Sequence: Synthetic oligonucleotide
cuaaaaguccucuacgugg

SEQ ID NO: 550352 - RNA, 19 nt, Artificial Sequence
  Description of Artificial Sequence: Synthetic oligonucleotide
agauagagaauccaauugg

SEQ ID NO: 550353 - RNA, 19 nt, Artificial Sequence
  Description of Artificial Sequence: Synthetic oligonucleotide
ugguuauuaaguaguaagg

SEQ ID NO: 550354 - RNA, 19 nt, Artificial Sequence
  Description of Artificial Sequence: Synthetic oligonucleotide
uuuaacaucacuuuuccua

SEQ ID NO: 550355 - RNA, 19 nt, Artificial Sequence
  Description of Artificial Sequence: Synthetic oligonucleotide
ucuaugggacacaauaagg

SEQ ID NO: 550356 - RNA, 19 nt, Artificial Sequence
  Description of Artificial Sequence: Synthetic oligonucleotide
cauucauaaagucugcugg

SEQ ID NO: 550357 - RNA, 19 nt, Artificial Sequence
  Description of Artificial Sequence: Synthetic oligonucleotide
uaauaagaagccaucagcu

SEQ ID NO: 550358 - RNA, 19 nt, Artificial Sequence
  Description of Artificial Sequence: Synthetic oligonucleotide
uaaguuaccuaaauagcag

SEQ ID NO: 550359 - RNA, 19 nt, Artificial Sequence
  Description of Artificial Sequence: Synthetic oligonucleotide
acagcuagaaaugauuacc

SEQ ID NO: 550360 - RNA, 19 nt, Artificial Sequence
  Description of Artificial Sequence: Synthetic oligonucleotide
aaacuuucggaccuccuuc

SEQ ID NO: 550361 - RNA, 19 nt, Artificial Sequence
  Description of Artificial Sequence: Synthetic oligonucleotide
uuagguuugugaaugaguc

SEQ ID NO: 550362 - RNA, 19 nt, Artificial Sequence
  Description of Artificial Sequence: Synthetic oligonucleotide
uuaaguaguaaggaggcag

SEQ ID NO: 550363 - RNA, 19 nt, Artificial Sequence
  Description of Artificial Sequence: Synthetic oligonucleotide
caagaugggaaccaggagg

SEQ ID NO: 550364 - RNA, 19 nt, Artificial Sequence
  Description of Artificial Sequence: Synthetic oligonucleotide
auugcaugguuuaaaaggc

SEQ ID NO: 550365 - RNA, 19 nt, Artificial Sequence
  Description of Artificial Sequence: Synthetic oligonucleotide
caauugguuggauauaagg

SEQ ID NO: 550366 - RNA, 19 nt, Artificial Sequence
  Description of Artificial Sequence: Synthetic oligonucleotide
aaaccuugcagcuuccuug

SEQ ID NO: 550367 - RNA, 19 nt, Artificial Sequence
  Description of Artificial Sequence: Synthetic oligonucleotide
aagguacugaauuaagacu

SEQ ID NO: 550368 - RNA, 19 nt, Artificial Sequence
  Description of Artificial Sequence: Synthetic oligonucleotide
ugagaguggucccuuaacg

SEQ ID NO: 550369 - RNA, 19 nt, Artificial Sequence
  Description of Artificial Sequence: Synthetic oligonucleotide
cuaguauucgaucugacuc

SEQ ID NO: 550370 - RNA, 19 nt, Artificial Sequence
  Description of Artificial Sequence: Synthetic oligonucleotide
auacuuucaauuauaacuc

SEQ ID NO: 550371 - RNA, 19 nt, Artificial Sequence
  Description of Artificial Sequence: Synthetic oligonucleotide
ucuacagaaagagugcagg

SEQ ID NO: 550372 - RNA, 19 nt, Artificial Sequence
  Description of Artificial Sequence: Synthetic oligonucleotide
agaguggucccuuaacgcc

SEQ ID NO: 550373 - RNA, 19 nt, Artificial Sequence
  Description of Artificial Sequence: Synthetic oligonucleotide
aaggcgaaagcccagauuu

SEQ ID NO: 550374 - RNA, 19 nt, Artificial Sequence
  Description of Artificial Sequence: Synthetic oligonucleotide
uucuagagggcuuaauuag

SEQ ID NO: 550375 - RNA, 19 nt, Artificial Sequence
  Description of Artificial Sequence: Synthetic oligonucleotide
gauaguugcccauuugugc

SEQ ID NO: 550376 - RNA, 19 nt, Artificial Sequence
  Description of Artificial Sequence: Synthetic oligonucleotide
uguucgguucuccaggacg

SEQ ID NO: 550377 - RNA, 19 nt, Artificial Sequence
  Description of Artificial Sequence: Synthetic oligonucleotide
gauucuacaugcuuacuug

SEQ ID NO: 550378 - RNA, 19 nt, Artificial Sequence
  Description of Artificial Sequence: Synthetic oligonucleotide
auucuacaugcuuacuugc

SEQ ID NO: 550379 - RNA, 19 nt, Artificial Sequence
  Description of Artificial Sequence: Synthetic oligonucleotide
ucuagagggcuuaauuagg

SEQ ID NO: 550380 - RNA, 19 nt, Artificial Sequence
  Description of Artificial Sequence: Synthetic oligonucleotide
aaaugucagaggauagugc

SEQ ID NO: 550381 - RNA, 19 nt, Artificial Sequence
  Description of Artificial Sequence: Synthetic oligonucleotide
auauaaggcugucuccugc

SEQ ID NO: 550382 - RNA, 19 nt, Artificial Sequence
  Description of Artificial Sequence: Synthetic oligonucleotide
cuuacuugcucuaugggac

SEQ ID NO: 550383 - RNA, 19 nt, Artificial Sequence
  Description of Artificial Sequence: Synthetic oligonucleotide
uggucaacuggucuaaaag

SEQ ID NO: 550384 - RNA, 19 nt, Artificial Sequence
  Description of Artificial Sequence: Synthetic oligonucleotide
ucucuuagaugacauagga

SEQ ID NO: 550385 - RNA, 19 nt, Artificial Sequence
  Description of Artificial Sequence: Synthetic oligonucleotide
ucuggaaugguaacguuca

SEQ ID NO: 550386 - RNA, 19 nt, Artificial Sequence
  Description of Artificial Sequence: Synthetic oligonucleotide
uccuauaaguauauuauua

SEQ ID NO: 550387 - RNA, 19 nt, Artificial Sequence
  Description of Artificial Sequence: Synthetic oligonucleotide
uauaucagcauugaugccu

SEQ ID NO: 550388 - RNA, 19 nt, Artificial Sequence
  Description of Artificial Sequence: Synthetic oligonucleotide
uuggauauaaggcugucuc

SEQ ID NO: 550389 - RNA, 19 nt, Artificial Sequence
  Description of Artificial Sequence: Synthetic oligonucleotide
ucuaaaaguccucuacgug

SEQ ID NO: 550390 - RNA, 19 nt, Artificial Sequence
  Description of Artificial Sequence: Synthetic oligonucleotide
ucuuucaacagcuuucuaa

SEQ ID NO: 550391 - RNA, 19 nt, Artificial Sequence
  Description of Artificial Sequence: Synthetic oligonucleotide
cuuaauuaggucccauucc

SEQ ID NO: 550392 - RNA, 19 nt, Artificial Sequence
  Description of Artificial Sequence: Synthetic oligonucleotide
uuuggcuccuccuauaagu

SEQ ID NO: 550393 - RNA, 19 nt, Artificial Sequence
  Description of Artificial Sequence: Synthetic oligonucleotide
caugguuaguuacaguagg

SEQ ID NO: 550394 - RNA, 19 nt, Artificial Sequence
  Description of Artificial Sequence: Synthetic oligonucleotide
uccucuacguggaauauca

SEQ ID NO: 550395 - RNA, 19 nt, Artificial Sequence
  Description of Artificial Sequence: Synthetic oligonucleotide
uucucuuagaugacauagg

SEQ ID NO: 550396 - RNA, 19 nt, Artificial Sequence
  Description of Artificial Sequence: Synthetic oligonucleotide
uacguggaauaucauaagc

SEQ ID NO: 550397 - RNA, 19 nt, Artificial Sequence
  Description of Artificial Sequence: Synthetic oligonucleotide
agcagauuuuaauaagaag

SEQ ID NO: 550398 - RNA, 19 nt, Artificial Sequence
  Description of Artificial Sequence: Synthetic oligonucleotide
cuucacucaaacauucuag

SEQ ID NO: 550399 - RNA, 19 nt, Artificial Sequence
  Description of Artificial Sequence: Synthetic oligonucleotide
ugcucuaugggacacaaua

SEQ ID NO: 550400 - RNA, 19 nt, Artificial Sequence
  Description of Artificial Sequence: Synthetic oligonucleotide
uagugaacucaacaaacug

SEQ ID NO: 550401 - RNA, 19 nt, Artificial Sequence
  Description of Artificial Sequence: Synthetic oligonucleotide
uuagauauuccugauaguu

SEQ ID NO: 550402 - RNA, 19 nt, Artificial Sequence
  Description of Artificial Sequence: Synthetic oligonucleotide
uuaaacggauugccgaaag

SEQ ID NO: 550403 - RNA, 19 nt, Artificial Sequence
  Description of Artificial Sequence: Synthetic oligonucleotide
uuaacaucacuuuuccuaa

SEQ ID NO: 550404 - RNA, 19 nt, Artificial Sequence
  Description of Artificial Sequence: Synthetic oligonucleotide
uuguaauguuuauagacaa

SEQ ID NO: 550405 - RNA, 19 nt, Artificial Sequence
  Description of Artificial Sequence: Synthetic oligonucleotide
cuuucguccaaacuuucgg

SEQ ID NO: 550406 - RNA, 19 nt, Artificial Sequence
  Description of Artificial Sequence: Synthetic oligonucleotide
auaaguuaccuaaauagca

SEQ ID NO: 550407 - RNA, 19 nt, Artificial Sequence
  Description of Artificial Sequence: Synthetic oligonucleotide
auuugugcaacuggaacac

SEQ ID NO: 550408 - RNA, 19 nt, Artificial Sequence
  Description of Artificial Sequence: Synthetic oligonucleotide
ugauaguugcccauuugug

SEQ ID NO: 550409 - RNA, 19 nt, Artificial Sequence
  Description of Artificial Sequence: Synthetic oligonucleotide
agauugguugguuacucuc

SEQ ID NO: 550410 - RNA, 19 nt, Artificial Sequence
  Description of Artificial Sequence: Synthetic oligonucleotide
auuauaacucuuaaggcga

SEQ ID NO: 550411 - RNA, 19 nt, Artificial Sequence
  Description of Artificial Sequence: Synthetic oligonucleotide
ucauaaagucugcuggagc

SEQ ID NO: 550412 - RNA, 19 nt, Artificial Sequence
  Description of Artificial Sequence: Synthetic oligonucleotide
agguagauugguugguuac

SEQ ID NO: 550413 - RNA, 19 nt, Artificial Sequence
  Description of Artificial Sequence: Synthetic oligonucleotide
aguauauuauuauuagguu

SEQ ID NO: 550414 - RNA, 19 nt, Artificial Sequence
  Description of Artificial Sequence: Synthetic oligonucleotide
gguuaguuacaguaggagg

SEQ ID NO: 550415 - RNA, 19 nt, Artificial Sequence
  Description of Artificial Sequence: Synthetic oligonucleotide
caauaaggacauuaagcag

SEQ ID NO: 550416 - RNA, 19 nt, Artificial Sequence
  Description of Artificial Sequence: Synthetic oligonucleotide
ugcuuaaacggauugccga

SEQ ID NO: 550417 - RNA, 19 nt, Artificial Sequence
  Description of Artificial Sequence: Synthetic oligonucleotide
ugaugcuaguauucgaucu

SEQ ID NO: 550418 - RNA, 19 nt, Artificial Sequence
  Description of Artificial Sequence: Synthetic oligonucleotide
auauugcaugguuuaaaag

SEQ ID NO: 550419 - RNA, 19 nt, Artificial Sequence
  Description of Artificial Sequence: Synthetic oligonucleotide
uucacuuuguuuugcggcc

SEQ ID NO: 550420 - RNA, 19 nt, Artificial Sequence
  Description of Artificial Sequence: Synthetic oligonucleotide
acuuuccguugucacaugc

SEQ ID NO: 550421 - RNA, 19 nt, Artificial Sequence
  Description of Artificial Sequence: Synthetic oligonucleotide
uguuuugcggcccuacuac

SEQ ID NO: 550422 - RNA, 19 nt, Artificial Sequence
  Description of Artificial Sequence: Synthetic oligonucleotide
uccguugucacaugcaaga

SEQ ID NO: 550423 - RNA, 19 nt, Artificial Sequence
  Description of Artificial Sequence: Synthetic oligonucleotide
uucacucaaacauucuaga

SEQ ID NO: 550424 - RNA, 19 nt, Artificial Sequence
  Description of Artificial Sequence: Synthetic oligonucleotide
acauucauaaagucugcug

SEQ ID NO: 550425 - RNA, 19 nt, Artificial Sequence
  Description of Artificial Sequence: Synthetic oligonucleotide
cuugcuuaaacggauugcc

SEQ ID NO: 550426 - RNA, 19 nt, Artificial Sequence
  Description of Artificial Sequence: Synthetic oligonucleotide
uuaacgcccacaugguuag

SEQ ID NO: 550427 - RNA, 19 nt, Artificial Sequence
  Description of Artificial Sequence: Synthetic oligonucleotide
uuaucuugcuuaaacggau

SEQ ID NO: 550428 - RNA, 19 nt, Artificial Sequence
  Description of Artificial Sequence: Synthetic oligonucleotide
uauucgaucugacucuagu

SEQ ID NO: 550429 - RNA, 19 nt, Artificial Sequence
  Description of Artificial Sequence: Synthetic oligonucleotide
uaaguaguaaggaggcaga

SEQ ID NO: 550430 - RNA, 19 nt, Artificial Sequence
  Description of Artificial Sequence: Synthetic oligonucleotide
cagauagagaauccaauug

SEQ ID NO: 550431 - RNA, 19 nt, Artificial Sequence
  Description of Artificial Sequence: Synthetic oligonucleotide
uuucacuuugauaccaauc

SEQ ID NO: 550432 - RNA, 19 nt, Artificial Sequence
  Description of Artificial Sequence: Synthetic oligonucleotide
aacucuguuagcuguagua

SEQ ID NO: 550433 - RNA, 19 nt, Artificial Sequence
  Description of Artificial Sequence: Synthetic oligonucleotide
uguacaagucuaccugaag

SEQ ID NO: 550434 - RNA, 19 nt, Artificial Sequence
  Description of Artificial Sequence: Synthetic oligonucleotide
uugauauuaacaugaugau

SEQ ID NO: 550435 - RNA, 19 nt, Artificial Sequence
  Description of Artificial Sequence: Synthetic oligonucleotide
cagauuuggcuuaagcuug

SEQ ID NO: 550436 - RNA, 19 nt, Artificial Sequence
  Description of Artificial Sequence: Synthetic oligonucleotide
ucgaucugacucuaguuug

SEQ ID NO: 550437 - RNA, 19 nt, Artificial Sequence
  Description of Artificial Sequence: Synthetic oligonucleotide
gaugcuaguauucgaucug

SEQ ID NO: 550438 - RNA, 19 nt, Artificial Sequence
  Description of Artificial Sequence: Synthetic oligonucleotide
cucuaugggacacaauaag

SEQ ID NO: 550439 - RNA, 19 nt, Artificial Sequence
  Description of Artificial Sequence: Synthetic oligonucleotide
augacugaacucuguuagc

SEQ ID NO: 550440 - RNA, 19 nt, Artificial Sequence
  Description of Artificial Sequence: Synthetic oligonucleotide
cucuguuagcuguaguagg

SEQ ID NO: 550441 - RNA, 19 nt, Artificial Sequence
  Description of Artificial Sequence: Synthetic oligonucleotide
uguuagcuguaguaggagc

SEQ ID NO: 550442 - RNA, 19 nt, Artificial Sequence
  Description of Artificial Sequence: Synthetic oligonucleotide
aagacuuuccguugucaca

SEQ ID NO: 550443 - RNA, 19 nt, Artificial Sequence
  Description of Artificial Sequence: Synthetic oligonucleotide
ugcuuacuugcucuauggg

SEQ ID NO: 550444 - RNA, 19 nt, Artificial Sequence
  Description of Artificial Sequence: Synthetic oligonucleotide
aaaugacugaacucuguua

SEQ ID NO: 550445 - RNA, 19 nt, Artificial Sequence
  Description of Artificial Sequence: Synthetic oligonucleotide
cauaaagucugcuggagca

SEQ ID NO: 550446 - RNA, 19 nt, Artificial Sequence
  Description of Artificial Sequence: Synthetic oligonucleotide
uuaccuaaauagcagcuuu

SEQ ID NO: 550447 - RNA, 19 nt, Artificial Sequence
  Description of Artificial Sequence: Synthetic oligonucleotide
ugggacacaauaaggacau

SEQ ID NO: 550448 - RNA, 19 nt, Artificial Sequence
  Description of Artificial Sequence: Synthetic oligonucleotide
aucuugucccacaauaaac

SEQ ID NO: 550449 - RNA, 19 nt, Artificial Sequence
  Description of Artificial Sequence: Synthetic oligonucleotide
uaguauucgaucugacucu

SEQ ID NO: 550450 - RNA, 19 nt, Artificial Sequence
  Description of Artificial Sequence: Synthetic oligonucleotide
agagugcagguuuuggcuc

SEQ ID NO: 550451 - RNA, 19 nt, Artificial Sequence
  Description of Artificial Sequence: Synthetic oligonucleotide
gagaguggucccuuaacgc

SEQ ID NO: 550452 - RNA, 19 nt, Artificial Sequence
  Description of Artificial Sequence: Synthetic oligonucleotide
guacaagucuaccugaaga

SEQ ID NO: 550453 - RNA, 19 nt, Artificial Sequence
  Description of Artificial Sequence: Synthetic oligonucleotide
cuaugggacacaauaagga

SEQ ID NO: 550454 - RNA, 19 nt, Artificial Sequence
  Description of Artificial Sequence: Synthetic oligonucleotide
uucgaucugacucuaguuu

SEQ ID NO: 550455 - RNA, 19 nt, Artificial Sequence
  Description of Artificial Sequence: Synthetic oligonucleotide
acguucaaaugacugaacu

SEQ ID NO: 550456 - RNA, 19 nt, Artificial Sequence
  Description of Artificial Sequence: Synthetic oligonucleotide
ucucucguaguggagaagc

SEQ ID NO: 550457 - RNA, 19 nt, Artificial Sequence
  Description of Artificial Sequence: Synthetic oligonucleotide
guuuuaugaggucuggaca

SEQ ID NO: 550458 - RNA, 19 nt, Artificial Sequence
  Description of Artificial Sequence: Synthetic oligonucleotide
uauuagguuugugaaugag

SEQ ID NO: 550459 - RNA, 19 nt, Artificial Sequence
  Description of Artificial Sequence: Synthetic oligonucleotide
ucuacaugcuuacuugcuc

SEQ ID NO: 550460 - RNA, 19 nt, Artificial Sequence
  Description of Artificial Sequence: Synthetic oligonucleotide
gauugccgaaaguaugcag

SEQ ID NO: 550461 - RNA, 19 nt, Artificial Sequence
  Description of Artificial Sequence: Synthetic oligonucleotide
cuuaucuugcuuaaacgga

SEQ ID NO: 550462 - RNA, 19 nt, Artificial Sequence
  Description of Artificial Sequence: Synthetic oligonucleotide
ugauauuaacaugaugauc

SEQ ID NO: 550463 - RNA, 19 nt, Artificial Sequence
  Description of Artificial Sequence: Synthetic oligonucleotide
aucaaucucucguagugga

SEQ ID NO: 550464 - RNA, 19 nt, Artificial Sequence
  Description of Artificial Sequence: Synthetic oligonucleotide
auuggaucucauucugguc

SEQ ID NO: 550465 - RNA, 19 nt, Artificial Sequence
  Description of Artificial Sequence: Synthetic oligonucleotide
ugcacuuuccccuaugauu

SEQ ID NO: 550466 - RNA, 19 nt, Artificial Sequence
  Description of Artificial Sequence: Synthetic oligonucleotide
uaggucauucccuucacuc

SEQ ID NO: 550467 - RNA, 19 nt, Artificial Sequence
  Description of Artificial Sequence: Synthetic oligonucleotide
cucguaguggagaagccag

SEQ ID NO: 550468 - RNA, 19 nt, Artificial Sequence
  Description of Artificial Sequence: Synthetic oligonucleotide
ugaaugaguccaucuuucc

SEQ ID NO: 550469 - RNA, 19 nt, Artificial Sequence
  Description of Artificial Sequence: Synthetic oligonucleotide
gaucaaucucucguagugg

SEQ ID NO: 550470 - RNA, 19 nt, Artificial Sequence
  Description of Artificial Sequence: Synthetic oligonucleotide
uucauaaagucugcuggag

SEQ ID NO: 550471 - RNA, 19 nt, Artificial Sequence
  Description of Artificial Sequence: Synthetic oligonucleotide
cauugcaggagugauuugc

SEQ ID NO: 550472 - RNA, 19 nt, Artificial Sequence
  Description of Artificial Sequence: Synthetic oligonucleotide
uuuccguugucacaugcaa

SEQ ID NO: 550473 - RNA, 19 nt, Artificial Sequence
  Description of Artificial Sequence: Synthetic oligonucleotide
ugguugguuacucucccug

SEQ ID NO: 550474 - RNA, 19 nt, Artificial Sequence
  Description of Artificial Sequence: Synthetic oligonucleotide
uuucguccaaacuuucgga

SEQ ID NO: 550475 - RNA, 19 nt, Artificial Sequence
  Description of Artificial Sequence: Synthetic oligonucleotide
caacuauccugaauauugc

SEQ ID NO: 550476 - RNA, 19 nt, Artificial Sequence
  Description of Artificial Sequence: Synthetic oligonucleotide
ugacauaggacuguucggu

SEQ ID NO: 550477 - RNA, 19 nt, Artificial Sequence
  Description of Artificial Sequence: Synthetic oligonucleotide
uuaguuacaguaggaggug

SEQ ID NO: 550478 - RNA, 19 nt, Artificial Sequence
  Description of Artificial Sequence: Synthetic oligonucleotide
uuuagauauuccugauagu

SEQ ID NO: 550479 - RNA, 19 nt, Artificial Sequence
  Description of Artificial Sequence: Synthetic oligonucleotide
gauugguugguuacucucc

SEQ ID NO: 550480 - RNA, 19 nt, Artificial Sequence
  Description of Artificial Sequence: Synthetic oligonucleotide
auuaccacuuggauucuac

SEQ ID NO: 550481 - RNA, 19 nt, Artificial Sequence
  Description of Artificial Sequence: Synthetic oligonucleotide
ugguugaucuggaucaauc

SEQ ID NO: 550482 - RNA, 19 nt, Artificial Sequence
  Description of Artificial Sequence: Synthetic oligonucleotide
uaacguucaaaugacugaa

SEQ ID NO: 550483 - RNA, 19 nt, Artificial Sequence
  Description of Artificial Sequence: Synthetic oligonucleotide
ucuuaaggcgaaagcccag

SEQ ID NO: 550484 - RNA, 19 nt, Artificial Sequence
  Description of Artificial Sequence: Synthetic oligonucleotide
ucguccaaacuuucggacc

SEQ ID NO: 550485 - RNA, 19 nt, Artificial Sequence
  Description of Artificial Sequence: Synthetic oligonucleotide
agauuuuaauaagaagcca

SEQ ID NO: 550486 - RNA, 19 nt, Artificial Sequence
  Description of Artificial Sequence: Synthetic oligonucleotide
uucguccaaacuuucggac

SEQ ID NO: 550487 - RNA, 19 nt, Artificial Sequence
  Description of Artificial Sequence: Synthetic oligonucleotide
ucaaucucucguaguggag

SEQ ID NO: 550488 - RNA, 19 nt, Artificial Sequence
  Description of Artificial Sequence: Synthetic oligonucleotide
aaucucucguaguggagaa

SEQ ID NO: 550489 - RNA, 19 nt, Artificial Sequence
  Description of Artificial Sequence: Synthetic oligonucleotide
uuauaucagcauugaugcc

SEQ ID NO: 550490 - RNA, 19 nt, Artificial Sequence
  Description of Artificial Sequence: Synthetic oligonucleotide
gauuuuaauaagaagccau

SEQ ID NO: 550491 - RNA, 19 nt, Artificial Sequence
  Description of Artificial Sequence: Synthetic oligonucleotide
aacguucaaaugacugaac

SEQ ID NO: 550492 - RNA, 19 nt, Artificial Sequence
  Description of Artificial Sequence: Synthetic oligonucleotide
cucuuagaugacauaggac

SEQ ID NO: 550493 - RNA, 19 nt, Artificial Sequence
  Description of Artificial Sequence: Synthetic oligonucleotide
gaacacuaugaagugaauc

SEQ ID NO: 550494 - RNA, 19 nt, Artificial Sequence
  Description of Artificial Sequence: Synthetic oligonucleotide
aacugaugcuuuauaucag

SEQ ID NO: 550495 - RNA, 19 nt, Artificial Sequence
  Description of Artificial Sequence: Synthetic oligonucleotide
uuccguugucacaugcaag

SEQ ID NO: 550496 - RNA, 19 nt, Artificial Sequence
  Description of Artificial Sequence: Synthetic oligonucleotide
uugguuacucucccugccc

SEQ ID NO: 550497 - RNA, 19 nt, Artificial Sequence
  Description of Artificial Sequence: Synthetic oligonucleotide
uugcaugguuuaaaaggca

SEQ ID NO: 550498 - RNA, 19 nt, Artificial Sequence
  Description of Artificial Sequence: Synthetic oligonucleotide
cacuaugaagugaaucuuc

SEQ ID NO: 550499 - RNA, 19 nt, Artificial Sequence
  Description of Artificial Sequence: Synthetic oligonucleotide
caaggguggguuuuaugag

SEQ ID NO: 550500 - RNA, 19 nt, Artificial Sequence
  Description of Artificial Sequence: Synthetic oligonucleotide
ugaugcuuuauaucagcau

SEQ ID NO: 550501 - RNA, 19 nt, Artificial Sequence
  Description of Artificial Sequence: Synthetic oligonucleotide
guauauuauuauuagguuu

SEQ ID NO: 550502 - RNA, 19 nt, Artificial Sequence
  Description of Artificial Sequence: Synthetic oligonucleotide
auugccgaaaguaugcagu

SEQ ID NO: 550503 - RNA, 19 nt, Artificial Sequence
  Description of Artificial Sequence: Synthetic oligonucleotide
gaugcuuuauaucagcauu

SEQ ID NO: 550504 - RNA, 19 nt, Artificial Sequence
  Description of Artificial Sequence: Synthetic oligonucleotide
gguaacguucaaaugacug

SEQ ID NO: 550505 - RNA, 19 nt, Artificial Sequence
  Description of Artificial Sequence: Synthetic oligonucleotide
uucaguagauuggaucuca

SEQ ID NO: 550506 - RNA, 19 nt, Artificial Sequence
  Description of Artificial Sequence: Synthetic oligonucleotide
uuuguuuugcggcccuacu

SEQ ID NO: 550507 - RNA, 19 nt, Artificial Sequence
  Description of Artificial Sequence: Synthetic oligonucleotide
guuaguuacaguaggaggu

SEQ ID NO: 550508 - RNA, 19 nt, Artificial Sequence
  Description of Artificial Sequence: Synthetic oligonucleotide
auuuaacaucacuuuuccu

SEQ ID NO: 550509 - RNA, 19 nt, Artificial Sequence
  Description of Artificial Sequence: Synthetic oligonucleotide
aucaaucaucauucccuuc

SEQ ID NO: 550510 - RNA, 19 nt, Artificial Sequence
  Description of Artificial Sequence: Synthetic oligonucleotide
gaacaaaugucagaggaua

SEQ ID NO: 550511 - RNA, 19 nt, Artificial Sequence
  Description of Artificial Sequence: Synthetic oligonucleotide
uaaacggauugccgaaagu

SEQ ID NO: 550512 - RNA, 19 nt, Artificial Sequence
  Description of Artificial Sequence: Synthetic oligonucleotide
uuauaacucuuaaggcgaa

SEQ ID NO: 550513 - RNA, 19 nt, Artificial Sequence
  Description of Artificial Sequence: Synthetic oligonucleotide
auuagguuugugaaugagu

SEQ ID NO: 550514 - RNA, 19 nt, Artificial Sequence
  Description of Artificial Sequence: Synthetic oligonucleotide
ucagucucggugcacuuuc

SEQ ID NO: 550515 - RNA, 19 nt, Artificial Sequence
  Description of Artificial Sequence: Synthetic oligonucleotide
uuuaugaggucuggacaag

SEQ ID NO: 550516 - RNA, 19 nt, Artificial Sequence
  Description of Artificial Sequence: Synthetic oligonucleotide
guugguuacucucccugcc

SEQ ID NO: 550517 - RNA, 19 nt, Artificial Sequence
  Description of Artificial Sequence: Synthetic oligonucleotide
ccuacuacaaacucaucug

SEQ ID NO: 550518 - RNA, 19 nt, Artificial Sequence
  Description of Artificial Sequence: Synthetic oligonucleotide
acuaugaagugaaucuuca

SEQ ID NO: 550519 - RNA, 19 nt, Artificial Sequence
  Description of Artificial Sequence: Synthetic oligonucleotide
uuaccacuuggauucuaca

SEQ ID NO: 550520 - RNA, 19 nt, Artificial Sequence
  Description of Artificial Sequence: Synthetic oligonucleotide
guaguaaggaggcagaguu

SEQ ID NO: 550521 - RNA, 19 nt, Artificial Sequence
  Description of Artificial Sequence: Synthetic oligonucleotide
cugaauauugcaugguuua

SEQ ID NO: 550522 - RNA, 19 nt, Artificial Sequence
  Description of Artificial Sequence: Synthetic oligonucleotide
ugaacucuguuagcuguag

SEQ ID NO: 550523 - RNA, 19 nt, Artificial Sequence
  Description of Artificial Sequence: Synthetic oligonucleotide
ccuaugauuucuuucaaca

SEQ ID NO: 550524 - RNA, 19 nt, Artificial Sequence
  Description of Artificial Sequence: Synthetic oligonucleotide
gcuuaauuaggucccauuc

SEQ ID NO: 550525 - RNA, 19 nt, Artificial Sequence
  Description of Artificial Sequence: Synthetic oligonucleotide
uuuugcggcccuacuacaa

SEQ ID NO: 550526 - RNA, 19 nt, Artificial Sequence
  Description of Artificial Sequence: Synthetic oligonucleotide
uuguuuugcggcccuacua

SEQ ID NO: 550527 - RNA, 19 nt, Artificial Sequence
  Description of Artificial Sequence: Synthetic oligonucleotide
uucauacuuucguccaaac

SEQ ID NO: 550528 - RNA, 19 nt, Artificial Sequence
  Description of Artificial Sequence: Synthetic oligonucleotide
cuggaucaaucucucguag

SEQ ID NO: 550529 - RNA, 19 nt, Artificial Sequence
  Description of Artificial Sequence: Synthetic oligonucleotide
acucuuugauuccaacuau

SEQ ID NO: 550530 - RNA, 19 nt, Artificial Sequence
  Description of Artificial Sequence: Synthetic oligonucleotide
aguuaccuaaauagcagcu

SEQ ID NO: 550531 - RNA, 19 nt, Artificial Sequence
  Description of Artificial Sequence: Synthetic oligonucleotide
caugcuuacuugcucuaug

SEQ ID NO: 550532 - RNA, 19 nt, Artificial Sequence
  Description of Artificial Sequence: Synthetic oligonucleotide
ugguuggauauaaggcugu

SEQ ID NO: 550533 - RNA, 19 nt, Artificial Sequence
  Description of Artificial Sequence: Synthetic oligonucleotide
augcuuuauaucagcauug

SEQ ID NO: 550534 - RNA, 19 nt, Artificial Sequence
  Description of Artificial Sequence: Synthetic oligonucleotide
gacacaauaaggacauuaa

SEQ ID NO: 550535 - RNA, 19 nt, Artificial Sequence
  Description of Artificial Sequence: Synthetic oligonucleotide
aacuuccguguuuucagua

SEQ ID NO: 550536 - RNA, 19 nt, Artificial Sequence
  Description of Artificial Sequence: Synthetic oligonucleotide
cuuaacgcccacaugguua

SEQ ID NO: 550537 - RNA, 19 nt, Artificial Sequence
  Description of Artificial Sequence: Synthetic oligonucleotide
uagauugguugguuacucu

SEQ ID NO: 550538 - RNA, 19 nt, Artificial Sequence
  Description of Artificial Sequence: Synthetic oligonucleotide
acguuucacuuuguuuugc

SEQ ID NO: 550539 - RNA, 19 nt, Artificial Sequence
  Description of Artificial Sequence: Synthetic oligonucleotide
uacaaggguggguuuuaug

SEQ ID NO: 550540 - RNA, 19 nt, Artificial Sequence
  Description of Artificial Sequence: Synthetic oligonucleotide
guagauuggaucucauucu

SEQ ID NO: 550541 - RNA, 19 nt, Artificial Sequence
  Description of Artificial Sequence: Synthetic oligonucleotide
gaauccaauugguuggaua

SEQ ID NO: 550542 - RNA, 19 nt, Artificial Sequence
  Description of Artificial Sequence: Synthetic oligonucleotide
ucucguaguggagaagcca

SEQ ID NO: 550543 - RNA, 19 nt, Artificial Sequence
  Description of Artificial Sequence: Synthetic oligonucleotide
cagcuagaaaugauuacca

SEQ ID NO: 550544 - RNA, 19 nt, Artificial Sequence
  Description of Artificial Sequence: Synthetic oligonucleotide
acuuucguccaaacuuucg

SEQ ID NO: 550545 - RNA, 19 nt, Artificial Sequence
  Description of Artificial Sequence: Synthetic oligonucleotide
uuaugaggucuggacaaga

SEQ ID NO: 550546 - RNA, 19 nt, Artificial Sequence
  Description of Artificial Sequence: Synthetic oligonucleotide
auucuggucaacuggucua

SEQ ID NO: 550547 - RNA, 19 nt, Artificial Sequence
  Description of Artificial Sequence: Synthetic oligonucleotide
auucgaucugacucuaguu

SEQ ID NO: 550548 - RNA, 19 nt, Artificial Sequence
  Description of Artificial Sequence: Synthetic oligonucleotide
uuugcggcccuacuacaaa

SEQ ID NO: 550549 - RNA, 19 nt, Artificial Sequence
  Description of Artificial Sequence: Synthetic oligonucleotide
guuaagaagguggugggaa

SEQ ID NO: 550550 - RNA, 19 nt, Artificial Sequence
  Description of Artificial Sequence: Synthetic oligonucleotide
cucuuaaggcgaaagccca

SEQ ID NO: 550551 - RNA, 19 nt, Artificial Sequence
  Description of Artificial Sequence: Synthetic oligonucleotide
uguuaagaaggugguggga

SEQ ID NO: 550552 - RNA, 19 nt, Artificial Sequence
  Description of Artificial Sequence: Synthetic oligonucleotide
cugaugcuaguauucgauc

SEQ ID NO: 550553 - RNA, 19 nt, Artificial Sequence
  Description of Artificial Sequence: Synthetic oligonucleotide
cuuugugauuuaacaucac

SEQ ID NO: 550554 - RNA, 19 nt, Artificial Sequence
  Description of Artificial Sequence: Synthetic oligonucleotide
uuaaggcgaaagcccagau

SEQ ID NO: 550555 - RNA, 19 nt, Artificial Sequence
  Description of Artificial Sequence: Synthetic oligonucleotide
uguuugugguuuccucaac

SEQ ID NO: 550556 - RNA, 19 nt, Artificial Sequence
  Description of Artificial Sequence: Synthetic oligonucleotide
uggaaugguaacguucaaa

SEQ ID NO: 550557 - RNA, 19 nt, Artificial Sequence
  Description of Artificial Sequence: Synthetic oligonucleotide
caucagauagagaauccaa

SEQ ID NO: 550558 - RNA, 19 nt, Artificial Sequence
  Description of Artificial Sequence: Synthetic oligonucleotide
ugguaacguucaaaugacu

SEQ ID NO: 550559 - RNA, 19 nt, Artificial Sequence
  Description of Artificial Sequence: Synthetic oligonucleotide
ugcuaguauucgaucugac

SEQ ID NO: 550560 - RNA, 19 nt, Artificial Sequence
  Description of Artificial Sequence: Synthetic oligonucleotide
ucguaguggagaagccagc

SEQ ID NO: 550561 - RNA, 19 nt, Artificial Sequence
  Description of Artificial Sequence: Synthetic oligonucleotide
gaguggucccuuaacgccc

SEQ ID NO: 550562 - RNA, 19 nt, Artificial Sequence
  Description of Artificial Sequence: Synthetic oligonucleotide
ccguguuuucaguagauug

SEQ ID NO: 550563 - RNA, 19 nt, Artificial Sequence
  Description of Artificial Sequence: Synthetic oligonucleotide
uucccuucacucaaacauu

SEQ ID NO: 550564 - RNA, 19 nt, Artificial Sequence
  Description of Artificial Sequence: Synthetic oligonucleotide
aguaguaaggaggcagagu

SEQ ID NO: 550565 - RNA, 19 nt, Artificial Sequence
  Description of Artificial Sequence: Synthetic oligonucleotide
cugaugcuuuauaucagca

SEQ ID NO: 550566 - RNA, 19 nt, Artificial Sequence
  Description of Artificial Sequence: Synthetic oligonucleotide
uaaggcgaaagcccagauu

SEQ ID NO: 550567 - RNA, 19 nt, Artificial Sequence
  Description of Artificial Sequence: Synthetic oligonucleotide
aguaccuucucaagguacu

SEQ ID NO: 550568 - RNA, 19 nt, Artificial Sequence
  Description of Artificial Sequence: Synthetic oligonucleotide
uuccaacuauccugaauau

SEQ ID NO: 550569 - RNA, 19 nt, Artificial Sequence
  Description of Artificial Sequence: Synthetic oligonucleotide
gcuuacuugcucuauggga

SEQ ID NO: 550570 - RNA, 19 nt, Artificial Sequence
  Description of Artificial Sequence: Synthetic oligonucleotide
caugaugaucugcuguuga

SEQ ID NO: 550571 - RNA, 19 nt, Artificial Sequence
  Description of Artificial Sequence: Synthetic oligonucleotide
auuccugauaguugcccau

SEQ ID NO: 550572 - RNA, 19 nt, Artificial Sequence
  Description of Artificial Sequence: Synthetic oligonucleotide
ggaaugguaacguucaaau

SEQ ID NO: 550573 - RNA, 19 nt, Artificial Sequence
  Description of Artificial Sequence: Synthetic oligonucleotide
ugcggcccuacuacaaacu

SEQ ID NO: 550574 - RNA, 19 nt, Artificial Sequence
  Description of Artificial Sequence: Synthetic oligonucleotide
aguugcccauuugugcaac

SEQ ID NO: 550575 - RNA, 19 nt, Artificial Sequence
  Description of Artificial Sequence: Synthetic oligonucleotide
uuccguguuuucaguagau

SEQ ID NO: 550576 - RNA, 19 nt, Artificial Sequence
  Description of Artificial Sequence: Synthetic oligonucleotide
ucacuuuguuuugcggccc

SEQ ID NO: 550577 - RNA, 19 nt, Artificial Sequence
  Description of Artificial Sequence: Synthetic oligonucleotide
cucucguaguggagaagcc

SEQ ID NO: 550578 - RNA, 19 nt, Artificial Sequence
  Description of Artificial Sequence: Synthetic oligonucleotide
guagauugguugguuacuc

SEQ ID NO: 550579 - RNA, 19 nt, Artificial Sequence
  Description of Artificial Sequence: Synthetic oligonucleotide
auugaauuuggcacaguuu

SEQ ID NO: 550580 - RNA, 19 nt, Artificial Sequence
  Description of Artificial Sequence: Synthetic oligonucleotide
cugagaguggucccuuaac

SEQ ID NO: 550581 - RNA, 19 nt, Artificial Sequence
  Description of Artificial Sequence: Synthetic oligonucleotide
uucugucagucucggugca

SEQ ID NO: 550582 - RNA, 19 nt, Artificial Sequence
  Description of Artificial Sequence: Synthetic oligonucleotide
uuucaguagauuggaucuc

SEQ ID NO: 550583 - RNA, 19 nt, Artificial Sequence
  Description of Artificial Sequence: Synthetic oligonucleotide
agucuaccugaagacuuuc

SEQ ID NO: 550584 - RNA, 19 nt, Artificial Sequence
  Description of Artificial Sequence: Synthetic oligonucleotide
acucuaguuugguuauuaa

SEQ ID NO: 550585 - RNA, 19 nt, Artificial Sequence
  Description of Artificial Sequence: Synthetic oligonucleotide
ggaagagcacuggagguag

SEQ ID NO: 550586 - RNA, 19 nt, Artificial Sequence
  Description of Artificial Sequence: Synthetic oligonucleotide
uugcggcccuacuacaaac

SEQ ID NO: 550587 - RNA, 19 nt, Artificial Sequence
  Description of Artificial Sequence: Synthetic oligonucleotide
auacuuucguccaaacuuu

SEQ ID NO: 550588 - RNA, 19 nt, Artificial Sequence
  Description of Artificial Sequence: Synthetic oligonucleotide
gcuuugugauuuaacauca

SEQ ID NO: 550589 - RNA, 19 nt, Artificial Sequence
  Description of Artificial Sequence: Synthetic oligonucleotide
gaaagcccagauuuuacuu

SEQ ID NO: 550590 - RNA, 19 nt, Artificial Sequence
  Description of Artificial Sequence: Synthetic oligonucleotide
aucagcauugaugccuugu

SEQ ID NO: 550591 - RNA, 19 nt, Artificial Sequence
  Description of Artificial Sequence: Synthetic oligonucleotide
uaguuacaguaggaggugu

SEQ ID NO: 550592 - RNA, 19 nt, Artificial Sequence
  Description of Artificial Sequence: Synthetic oligonucleotide
caucuugucccacaauaaa

SEQ ID NO: 550593 - RNA, 19 nt, Artificial Sequence
  Description of Artificial Sequence: Synthetic oligonucleotide
ggacguuucacuuuguuuu

SEQ ID NO: 550594 - RNA, 19 nt, Artificial Sequence
  Description of Artificial Sequence: Synthetic oligonucleotide
uacaugcuuacuugcucua

SEQ ID NO: 550595 - RNA, 19 nt, Artificial Sequence
  Description of Artificial Sequence: Synthetic oligonucleotide
uauaacucuuaaggcgaaa

SEQ ID NO: 550596 - RNA, 19 nt, Artificial Sequence
  Description of Artificial Sequence: Synthetic oligonucleotide
cucuacguggaauaucaua

SEQ ID NO: 550597 - RNA, 19 nt, Artificial Sequence
  Description of Artificial Sequence: Synthetic oligonucleotide
gagguagauugguugguua

SEQ ID NO: 550598 - RNA, 19 nt, Artificial Sequence
  Description of Artificial Sequence: Synthetic oligonucleotide
caaucucucguaguggaga

SEQ ID NO: 550599 - RNA, 19 nt, Artificial Sequence
  Description of Artificial Sequence: Synthetic oligonucleotide
cuacaugcuuacuugcucu

SEQ ID NO: 550600 - RNA, 19 nt, Artificial Sequence
  Description of Artificial Sequence: Synthetic oligonucleotide
uugguugguuacucucccu

SEQ ID NO: 550601 - RNA, 19 nt, Artificial Sequence
  Description of Artificial Sequence: Synthetic oligonucleotide
acacuaugaagugaaucuu

SEQ ID NO: 550602 - RNA, 19 nt, Artificial Sequence
  Description of Artificial Sequence: Synthetic oligonucleotide
agaugacauaggacuguuc

SEQ ID NO: 550603 - RNA, 19 nt, Artificial Sequence
  Description of Artificial Sequence: Synthetic oligonucleotide
uuuccccuaugauuucuuu

SEQ ID NO: 550604 - RNA, 19 nt, Artificial Sequence
  Description of Artificial Sequence: Synthetic oligonucleotide
gauuccaacuauccugaau

SEQ ID NO: 550605 - RNA, 19 nt, Artificial Sequence
  Description of Artificial Sequence: Synthetic oligonucleotide
ggacuguucgguucuccag

SEQ ID NO: 550606 - RNA, 19 nt, Artificial Sequence
  Description of Artificial Sequence: Synthetic oligonucleotide
aacgcccacaugguuaguu

SEQ ID NO: 550607 - RNA, 19 nt, Artificial Sequence
  Description of Artificial Sequence: Synthetic oligonucleotide
cuuccguguuuucaguaga

SEQ ID NO: 550608 - RNA, 19 nt, Artificial Sequence
  Description of Artificial Sequence: Synthetic oligonucleotide
uugcaggagugauuugcau

SEQ ID NO: 550609 - RNA, 19 nt, Artificial Sequence
  Description of Artificial Sequence: Synthetic oligonucleotide
uccaacuauccugaauauu

SEQ ID NO: 550610 - RNA, 19 nt, Artificial Sequence
  Description of Artificial Sequence: Synthetic oligonucleotide
gacucuaguuugguuauua

SEQ ID NO: 550611 - RNA, 19 nt, Artificial Sequence
  Description of Artificial Sequence: Synthetic oligonucleotide
ugcccacucugaaaacauc

SEQ ID NO: 550612 - RNA, 19 nt, Artificial Sequence
  Description of Artificial Sequence: Synthetic oligonucleotide
guuuugcggcccuacuaca

SEQ ID NO: 550613 - RNA, 19 nt, Artificial Sequence
  Description of Artificial Sequence: Synthetic oligonucleotide
ggacaagaugggaaccagg

SEQ ID NO: 550614 - RNA, 19 nt, Artificial Sequence
  Description of Artificial Sequence: Synthetic oligonucleotide
uggcuccuccuauaaguau

SEQ ID NO: 550615 - RNA, 19 nt, Artificial Sequence
  Description of Artificial Sequence: Synthetic oligonucleotide
uuugugcaacuggaacacu

SEQ ID NO: 550616 - RNA, 19 nt, Artificial Sequence
  Description of Artificial Sequence: Synthetic oligonucleotide
cauugaauuuggcacaguu

SEQ ID NO: 550617 - RNA, 19 nt, Artificial Sequence
  Description of Artificial Sequence: Synthetic oligonucleotide
ugccgaaaguaugcagucu

SEQ ID NO: 550618 - RNA, 19 nt, Artificial Sequence
  Description of Artificial Sequence: Synthetic oligonucleotide
cuuaaggcgaaagcccaga

SEQ ID NO: 550619 - RNA, 19 nt, Artificial Sequence
  Description of Artificial Sequence: Synthetic oligonucleotide
cauucuagagggcuuaauu

SEQ ID NO: 550620 - RNA, 19 nt, Artificial Sequence
  Description of Artificial Sequence: Synthetic oligonucleotide
gacuuuccguugucacaug

SEQ ID NO: 550621 - RNA, 19 nt, Artificial Sequence
  Description of Artificial Sequence: Synthetic oligonucleotide
uggauucuacaugcuuacu

SEQ ID NO: 550622 - RNA, 19 nt, Artificial Sequence
  Description of Artificial Sequence: Synthetic oligonucleotide
cccacugaugcuaguauuc

SEQ ID NO: 550623 - RNA, 19 nt, Artificial Sequence
  Description of Artificial Sequence: Synthetic oligonucleotide
cacugaugcuaguauucga

SEQ ID NO: 550624 - RNA, 19 nt, Artificial Sequence
  Description of Artificial Sequence: Synthetic oligonucleotide
aguauucgaucugacucua

SEQ ID NO: 550625 - RNA, 19 nt, Artificial Sequence
  Description of Artificial Sequence: Synthetic oligonucleotide
ugccauugcaggagugauu

SEQ ID NO: 550626 - RNA, 19 nt, Artificial Sequence
  Description of Artificial Sequence: Synthetic oligonucleotide
ucgccacuucagauuuggc

SEQ ID NO: 550627 - RNA, 19 nt, Artificial Sequence
  Description of Artificial Sequence: Synthetic oligonucleotide
gguugaucuggaucaaucu

SEQ ID NO: 550628 - RNA, 19 nt, Artificial Sequence
  Description of Artificial Sequence: Synthetic oligonucleotide
ugucgccacuucagauuug

SEQ ID NO: 550629 - RNA, 19 nt, Artificial Sequence
  Description of Artificial Sequence: Synthetic oligonucleotide
auuaagcagugcucuccuu

SEQ ID NO: 550630 - RNA, 19 nt, Artificial Sequence
  Description of Artificial Sequence: Synthetic oligonucleotide
ggauauaaggcugucuccu

SEQ ID NO: 550631 - RNA, 19 nt, Artificial Sequence
  Description of Artificial Sequence: Synthetic oligonucleotide
guauucgaucugacucuag

SEQ ID NO: 550632 - RNA, 19 nt, Artificial Sequence
  Description of Artificial Sequence: Synthetic oligonucleotide
gcuuaaacggauugccgaa

SEQ ID NO: 550633 - RNA, 19 nt, Artificial Sequence
  Description of Artificial Sequence: Synthetic oligonucleotide
agauuuggcuuaagcuugu

SEQ ID NO: 550634 - RNA, 19 nt, Artificial Sequence
  Description of Artificial Sequence: Synthetic oligonucleotide
ccuauaaguauauuauuau

SEQ ID NO: 550635 - RNA, 19 nt, Artificial Sequence
  Description of Artificial Sequence: Synthetic oligonucleotide
cuggucaacuggucuaaaa

SEQ ID NO: 550636 - RNA, 19 nt, Artificial Sequence
  Description of Artificial Sequence: Synthetic oligonucleotide
uugguugaucuggaucaau

SEQ ID NO: 550637 - RNA, 19 nt, Artificial Sequence
  Description of Artificial Sequence: Synthetic oligonucleotide
cagucucggugcacuuucc

SEQ ID NO: 550638 - RNA, 19 nt, Artificial Sequence
  Description of Artificial Sequence: Synthetic oligonucleotide
gcauuucuguaugucugag

SEQ ID NO: 550639 - RNA, 19 nt, Artificial Sequence
  Description of Artificial Sequence: Synthetic oligonucleotide
cuugcucuaugggacacaa

SEQ ID NO: 550640 - RNA, 19 nt, Artificial Sequence
  Description of Artificial Sequence: Synthetic oligonucleotide
ggauucuacaugcuuacuu

SEQ ID NO: 550641 - RNA, 19 nt, Artificial Sequence
  Description of Artificial Sequence: Synthetic oligonucleotide
auguacaagucuaccugaa

SEQ ID NO: 550642 - RNA, 19 nt, Artificial Sequence
  Description of Artificial Sequence: Synthetic oligonucleotide
gucccuuaacgcccacaug

SEQ ID NO: 550643 - RNA, 19 nt, Artificial Sequence
  Description of Artificial Sequence: Synthetic oligonucleotide
cuuaaacggauugccgaaa

SEQ ID NO: 550644 - RNA, 19 nt, Artificial Sequence
  Description of Artificial Sequence: Synthetic oligonucleotide
gcuaguauucgaucugacu

SEQ ID NO: 550645 - RNA, 19 nt, Artificial Sequence
  Description of Artificial Sequence: Synthetic oligonucleotide
cuccgccuucucuuagaug

SEQ ID NO: 550646 - RNA, 19 nt, Artificial Sequence
  Description of Artificial Sequence: Synthetic oligonucleotide
caaacauucuagagggcuu

SEQ ID NO: 550647 - RNA, 19 nt, Artificial Sequence
  Description of Artificial Sequence: Synthetic oligonucleotide
cccuacuacaaacucaucu

SEQ ID NO: 550648 - RNA, 19 nt, Artificial Sequence
  Description of Artificial Sequence: Synthetic oligonucleotide
gacauaggacuguucgguu

SEQ ID NO: 550649 - RNA, 19 nt, Artificial Sequence
  Description of Artificial Sequence: Synthetic oligonucleotide
cuugucccacaauaaacuu

SEQ ID NO: 550650 - RNA, 19 nt, Artificial Sequence
  Description of Artificial Sequence: Synthetic oligonucleotide
guuaccuaaauagcagcuu

SEQ ID NO: 550651 - RNA, 19 nt, Artificial Sequence
  Description of Artificial Sequence: Synthetic oligonucleotide
ggucccugcacuucuucaa

SEQ ID NO: 550652 - RNA, 19 nt, Artificial Sequence
  Description of Artificial Sequence: Synthetic oligonucleotide
gcgaaagcccagauuuuac

SEQ ID NO: 550653 - RNA, 19 nt, Artificial Sequence
  Description of Artificial Sequence: Synthetic oligonucleotide
gcaaagugaaaaucucuuu

SEQ ID NO: 550654 - RNA, 19 nt, Artificial Sequence
  Description of Artificial Sequence: Synthetic oligonucleotide
gcucuaugggacacaauaa

SEQ ID NO: 550655 - RNA, 19 nt, Artificial Sequence
  Description of Artificial Sequence: Synthetic oligonucleotide
cacauucauaaagucugcu

SEQ ID NO: 550656 - RNA, 19 nt, Artificial Sequence
  Description of Artificial Sequence: Synthetic oligonucleotide
gaagagcacuggagguaga

SEQ ID NO: 550657 - RNA, 19 nt, Artificial Sequence
  Description of Artificial Sequence: Synthetic oligonucleotide
gguagauugguugguuacu

SEQ ID NO: 550658 - RNA, 19 nt, Artificial Sequence
  Description of Artificial Sequence: Synthetic oligonucleotide
ugacucuaguuugguuauu

SEQ ID NO: 550659 - RNA, 19 nt, Artificial Sequence
  Description of Artificial Sequence: Synthetic oligonucleotide
gcggcccuacuacaaacuc

SEQ ID NO: 550660 - RNA, 19 nt, Artificial Sequence
  Description of Artificial Sequence: Synthetic oligonucleotide
ggucccuuaacgcccacau

SEQ ID NO: 550661 - RNA, 19 nt, Artificial Sequence
  Description of Artificial Sequence: Synthetic oligonucleotide
ggcuccuccuauaaguaua

SEQ ID NO: 550662 - RNA, 19 nt, Artificial Sequence
  Description of Artificial Sequence: Synthetic oligonucleotide
cugucgccacuucagauuu

SEQ ID NO: 550663 - RNA, 19 nt, Artificial Sequence
  Description of Artificial Sequence: Synthetic oligonucleotide
ggcgaaagcccagauuuua

SEQ ID NO: 550664 - RNA, 19 nt, Artificial Sequence
  Description of Artificial Sequence: Synthetic oligonucleotide
cagaaagagugcagguuuu

SEQ ID NO: 550665 - RNA, 19 nt, Artificial Sequence
  Description of Artificial Sequence: Synthetic oligonucleotide
gccauugcaggagugauuu

SEQ ID NO: 550666 - RNA, 19 nt, Artificial Sequence
  Description of Artificial Sequence: Synthetic oligonucleotide
ccugaauauugcaugguuu

SEQ ID NO: 550667 - RNA, 19 nt, Artificial Sequence
  Description of Artificial Sequence: Synthetic oligonucleotide
cauugaugccuugugccau

SEQ ID NO: 550668 - RNA, 19 nt, Artificial Sequence
  Description of Artificial Sequence: Synthetic oligonucleotide
caguagauuggaucucauu

SEQ ID NO: 550669 - RNA, 19 nt, Artificial Sequence
  Description of Artificial Sequence: Synthetic oligonucleotide
uucgguucuccaggacguu

SEQ ID NO: 550670 - RNA, 19 nt, Artificial Sequence
  Description of Artificial Sequence: Synthetic oligonucleotide
ggcccuacuacaaacucau

SEQ ID NO: 550671 - RNA, 19 nt, Artificial Sequence
  Description of Artificial Sequence: Synthetic oligonucleotide
caggagugauuugcauuga

SEQ ID NO: 550672 - RNA, 19 nt, Artificial Sequence
  Description of Artificial Sequence: Synthetic oligonucleotide
cacuuggauucuacaugcu

SEQ ID NO: 550673 - RNA, 19 nt, Artificial Sequence
  Description of Artificial Sequence: Synthetic oligonucleotide
uaacgcccacaugguuagu

SEQ ID NO: 550674 - RNA, 19 nt, Artificial Sequence
  Description of Artificial Sequence: Synthetic oligonucleotide
cugcuccauauaaacuuuu

SEQ ID NO: 550675 - RNA, 19 nt, Artificial Sequence
  Description of Artificial Sequence: Synthetic oligonucleotide
ccauugcaggagugauuug

SEQ ID NO: 550676 - RNA, 19 nt, Artificial Sequence
  Description of Artificial Sequence: Synthetic oligonucleotide
ggggucccugcacuucuuc

SEQ ID NO: 550677 - RNA, 19 nt, Artificial Sequence
  Description of Artificial Sequence: Synthetic oligonucleotide
cuccaggacguuucacuuu

SEQ ID NO: 550678 - RNA, 19 nt, Artificial Sequence
  Description of Artificial Sequence: Synthetic oligonucleotide
cgaaagcccagauuuuacu

SEQ ID NO: 550679 - RNA, 19 nt, Artificial Sequence
  Description of Artificial Sequence: Synthetic oligonucleotide
guacaaggguggguuuuau

SEQ ID NO: 550680 - RNA, 19 nt, Artificial Sequence
  Description of Artificial Sequence: Synthetic oligonucleotide
cggcccuacuacaaacuca

SEQ ID NO: 550681 - RNA, 19 nt, Artificial Sequence
  Description of Artificial Sequence: Synthetic oligonucleotide
gcuccuccuauaaguauau

SEQ ID NO: 550682 - RNA, 19 nt, Artificial Sequence
  Description of Artificial Sequence: Synthetic oligonucleotide
ggcugagaguggucccuua

SEQ ID NO: 550683 - RNA, 19 nt, Artificial Sequence
  Description of Artificial Sequence: Synthetic oligonucleotide
cccuuaacgcccacauggu

SEQ ID NO: 550684 - RNA, 19 nt, Artificial Sequence
  Description of Artificial Sequence: Synthetic oligonucleotide
ccgaaaguaugcagucuuu

SEQ ID NO: 550685 - RNA, 19 nt, Artificial Sequence
  Description of Artificial Sequence: Synthetic oligonucleotide
gcccuacuacaaacucauc

SEQ ID NO: 550686 - RNA, 19 nt, Artificial Sequence
  Description of Artificial Sequence: Synthetic oligonucleotide
ccccacugaugcuaguauu

SEQ ID NO: 550687 - RNA, 19 nt, Artificial Sequence
  Description of Artificial Sequence: Synthetic oligonucleotide
cuccuccuauaaguauauu

SEQ ID NO: 550688 - RNA, 19 nt, Artificial Sequence
  Description of Artificial Sequence: Synthetic oligonucleotide
uagauauucacccugauca

SEQ ID NO: 550689 - RNA, 19 nt, Artificial Sequence
  Description of Artificial Sequence: Synthetic oligonucleotide
uuauuugggauccaagacg

SEQ ID NO: 550690 - RNA, 19 nt, Artificial Sequence
  Description of Artificial Sequence: Synthetic oligonucleotide
auuucuaacaccccagggc

SEQ ID NO: 550691 - RNA, 19 nt, Artificial Sequence
  Description of Artificial Sequence: Synthetic oligonucleotide
acuacucuccaccacaagc

SEQ ID NO: 550692 - RNA, 19 nt, Artificial Sequence
  Description of Artificial Sequence: Synthetic oligonucleotide
aauggaugaggauucgauc

SEQ ID NO: 550693 - RNA, 19 nt, Artificial Sequence
  Description of Artificial Sequence: Synthetic oligonucleotide
cuugcuagaugaaugaccc

SEQ ID NO: 550694 - RNA, 19 nt, Artificial Sequence
  Description of Artificial Sequence: Synthetic oligonucleotide
uugacgaagauguucagcc

SEQ ID NO: 550695 - RNA, 19 nt, Artificial Sequence
  Description of Artificial Sequence: Synthetic oligonucleotide
ucuacgaccagcucagugg

SEQ ID NO: 550696 - RNA, 19 nt, Artificial Sequence
  Description of Artificial Sequence: Synthetic oligonucleotide
ugcucgaacacucuggugc

SEQ ID NO: 550697 - RNA, 19 nt, Artificial Sequence
  Description of Artificial Sequence: Synthetic oligonucleotide
aaauguccgguccagcuuc

SEQ ID NO: 550698 - RNA, 19 nt, Artificial Sequence
  Description of Artificial Sequence: Synthetic oligonucleotide
uuuguaagcuuuccgaaca

SEQ ID NO: 550699 - RNA, 19 nt, Artificial Sequence
  Description of Artificial Sequence: Synthetic oligonucleotide
aggaaaauagccgagucac

SEQ ID NO: 550700 - RNA, 19 nt, Artificial Sequence
  Description of Artificial Sequence: Synthetic oligonucleotide
ucuuauuucuaacacccca

SEQ ID NO: 550701 - RNA, 19 nt, Artificial Sequence
  Description of Artificial Sequence: Synthetic oligonucleotide
uuauuucuaacaccccagg

SEQ ID NO: 550702 - RNA, 19 nt, Artificial Sequence
  Description of Artificial Sequence: Synthetic oligonucleotide
auuuguaagcuuuccgaac

SEQ ID NO: 550703 - RNA, 19 nt, Artificial Sequence
  Description of Artificial Sequence: Synthetic oligonucleotide
uuucuaacaccccagggcu

SEQ ID NO: 550704 - RNA, 19 nt, Artificial Sequence
  Description of Artificial Sequence: Synthetic oligonucleotide
aaccauuucaaugcugugg

SEQ ID NO: 550705 - RNA, 19 nt, Artificial Sequence
  Description of Artificial Sequence: Synthetic oligonucleotide
agagagagaguugauuucc

SEQ ID NO: 550706 - RNA, 19 nt, Artificial Sequence
  Description of Artificial Sequence: Synthetic oligonucleotide
uagaugaaugacccgcugg

SEQ ID NO: 550707 - RNA, 19 nt, Artificial Sequence
  Description of Artificial Sequence: Synthetic oligonucleotide
uccgacaagaucuuaguga

SEQ ID NO: 550708 - RNA, 19 nt, Artificial Sequence
  Description of Artificial Sequence: Synthetic oligonucleotide
guaaacuucucugaauggg

SEQ ID NO: 550709 - RNA, 19 nt, Artificial Sequence
  Description of Artificial Sequence: Synthetic oligonucleotide
acuugcuagaugaaugacc

SEQ ID NO: 550710 - RNA, 19 nt, Artificial Sequence
  Description of Artificial Sequence: Synthetic oligonucleotide
auagccaagcuaccaaagg

SEQ ID NO: 550711 - RNA, 19 nt, Artificial Sequence
  Description of Artificial Sequence: Synthetic oligonucleotide
aagcuagauauucacccug

SEQ ID NO: 550712 - RNA, 19 nt, Artificial Sequence
  Description of Artificial Sequence: Synthetic oligonucleotide
gacgaagauguucagccag

SEQ ID NO: 550713 - RNA, 19 nt, Artificial Sequence
  Description of Artificial Sequence: Synthetic oligonucleotide
uaggagacuuccaucgggg

SEQ ID NO: 550714 - RNA, 19 nt, Artificial Sequence
  Description of Artificial Sequence: Synthetic oligonucleotide
aggacugaucacucgaagg

SEQ ID NO: 550715 - RNA, 19 nt, Artificial Sequence
  Description of Artificial Sequence: Synthetic oligonucleotide
uccgggauuaaaaucccag

SEQ ID NO: 550716 - RNA, 19 nt, Artificial Sequence
  Description of Artificial Sequence: Synthetic oligonucleotide
aaaauagccgagucaccug

SEQ ID NO: 550717 - RNA, 19 nt, Artificial Sequence
  Description of Artificial Sequence: Synthetic oligonucleotide
ugauguucgaggagugagg

SEQ ID NO: 550718 - RNA, 19 nt, Artificial Sequence
  Description of Artificial Sequence: Synthetic oligonucleotide
ucucuuuuauuugggaucc

SEQ ID NO: 550719 - RNA, 19 nt, Artificial Sequence
  Description of Artificial Sequence: Synthetic oligonucleotide
aauaaacuguggccaagcu

SEQ ID NO: 550720 - RNA, 19 nt, Artificial Sequence
  Description of Artificial Sequence: Synthetic oligonucleotide
uucucuuuuauuugggauc

SEQ ID NO: 550721 - RNA, 19 nt, Artificial Sequence
  Description of Artificial Sequence: Synthetic oligonucleotide
uuagcguccuugaacacga

SEQ ID NO: 550722 - RNA, 19 nt, Artificial Sequence
  Description of Artificial Sequence: Synthetic oligonucleotide
gaagcgggagccuuugggg

SEQ ID NO: 550723 - RNA, 19 nt, Artificial Sequence
  Description of Artificial Sequence: Synthetic oligonucleotide
uauuuguaagcuuuccgaa

SEQ ID NO: 550724 - RNA, 19 nt, Artificial Sequence
  Description of Artificial Sequence: Synthetic oligonucleotide
  modified_base (2)..(2): a, c, u, g, unknown or other
anaguaggacugaucacuc

SEQ ID NO: 550725 - RNA, 19 nt, Artificial Sequence
  Description of Artificial Sequence: Synthetic oligonucleotide
ugcuagaugaaugacccgc

SEQ ID NO: 550726 - RNA, 19 nt, Artificial Sequence
  Description of Artificial Sequence: Synthetic oligonucleotide
uaccuauagaagaacuucu

SEQ ID NO: 550727 - RNA, 19 nt, Artificial Sequence
  Description of Artificial Sequence: Synthetic oligonucleotide
uuauagacuuccuccuucc

SEQ ID NO: 550728 - RNA, 19 nt, Artificial Sequence
  Description of Artificial Sequence: Synthetic oligonucleotide
uggaugaggauucgaucgg

SEQ ID NO: 550729 - RNA, 19 nt, Artificial Sequence
  Description of Artificial Sequence: Synthetic oligonucleotide
uuaccuauagaagaacuuc

SEQ ID NO: 550730 - RNA, 19 nt, Artificial Sequence
  Description of Artificial Sequence: Synthetic oligonucleotide
uuuaccuauagaagaacuu

SEQ ID NO: 550731 - RNA, 19 nt, Artificial Sequence
  Description of Artificial Sequence: Synthetic oligonucleotide
guucugauagccaagcuac

SEQ ID NO: 550732 - RNA, 19 nt, Artificial Sequence
  Description of Artificial Sequence: Synthetic oligonucleotide
cgaauuucccucaugaugg

SEQ ID NO: 550733 - RNA, 19 nt, Artificial Sequence
  Description of Artificial Sequence: Synthetic oligonucleotide
ugacuugcuagaugaauga

SEQ ID NO: 550734 - RNA, 19 nt, Artificial Sequence
  Description of Artificial Sequence: Synthetic oligonucleotide
ugguggaguggaaugacug

SEQ ID NO: 550735 - RNA, 19 nt, Artificial Sequence
  Description of Artificial Sequence: Synthetic oligonucleotide
aguaggacugaucacucga

SEQ ID NO: 550736 - RNA, 19 nt, Artificial Sequence
  Description of Artificial Sequence: Synthetic oligonucleotide
gaguucgaaggagaggugg

SEQ ID NO: 550737 - RNA, 19 nt, Artificial Sequence
  Description of Artificial Sequence: Synthetic oligonucleotide
gauacgcccagguccaugc

SEQ ID NO: 550738 - RNA, 19 nt, Artificial Sequence
  Description of Artificial Sequence: Synthetic oligonucleotide
ucuaacaccccagggcugg

SEQ ID NO: 550739 - RNA, 19 nt, Artificial Sequence
  Description of Artificial Sequence: Synthetic oligonucleotide
aacacgaguucaucaguca

SEQ ID NO: 550740 - RNA, 19 nt, Artificial Sequence
  Description of Artificial Sequence: Synthetic oligonucleotide
cucugaaugggugaagcgg

SEQ ID NO: 550741 - RNA, 19 nt, Artificial Sequence
  Description of Artificial Sequence: Synthetic oligonucleotide
acccugaucaaacauggga

SEQ ID NO: 550742 - RNA, 19 nt, Artificial Sequence
  Description of Artificial Sequence: Synthetic oligonucleotide
cuaggagacuuccaucggg

SEQ ID NO: 550743 - RNA, 19 nt, Artificial Sequence
  Description of Artificial Sequence: Synthetic oligonucleotide
uuugacgaagauguucagc

SEQ ID NO: 550744 - RNA, 19 nt, Artificial Sequence
  Description of Artificial Sequence: Synthetic oligonucleotide
aguggugaaagcucgcaga

SEQ ID NO: 550745 - RNA, 19 nt, Artificial Sequence
  Description of Artificial Sequence: Synthetic oligonucleotide
cuggguguaggccagccgg

SEQ ID NO: 550746 - RNA, 19 nt, Artificial Sequence
  Description of Artificial Sequence: Synthetic oligonucleotide
  modified_base (15)..(15): a, c, u, g, unknown or other
gaggcuagagcccanagua

SEQ ID NO: 550747 - RNA, 19 nt, Artificial Sequence
  Description of Artificial Sequence: Synthetic oligonucleotide
ugaucacucgaaggcaucg

SEQ ID NO: 550748 - RNA, 19 nt, Artificial Sequence
  Description of Artificial Sequence: Synthetic oligonucleotide
gaaccaaccugguggagug

SEQ ID NO: 550749 - RNA, 19 nt, Artificial Sequence
  Description of Artificial Sequence: Synthetic oligonucleotide
ugaacacgaguucaucagu

SEQ ID NO: 550750 - RNA, 19 nt, Artificial Sequence
  Description of Artificial Sequence: Synthetic oligonucleotide
gcuaccaaaggauacgccc

SEQ ID NO: 550751 - RNA, 19 nt, Artificial Sequence
  Description of Artificial Sequence: Synthetic oligonucleotide
uguuuaggcacugucucca

SEQ ID NO: 550752 - RNA, 19 nt, Artificial Sequence
  Description of Artificial Sequence: Synthetic oligonucleotide
  modified_base (10)..(10): a, c, u, g, unknown or other
uagagcccanaguaggacu

SEQ ID NO: 550753 - RNA, 19 nt, Artificial Sequence
  Description of Artificial Sequence: Synthetic oligonucleotide
cuuagcguccuugaacacg

SEQ ID NO: 550754 - RNA, 19 nt, Artificial Sequence
  Description of Artificial Sequence: Synthetic oligonucleotide
uaggacugaucacucgaag

SEQ ID NO: 550755 - RNA, 19 nt, Artificial Sequence
  Description of Artificial Sequence: Synthetic oligonucleotide
gaguuuucggagguggcgg

SEQ ID NO: 550756 - RNA, 19 nt, Artificial Sequence
  Description of Artificial Sequence: Synthetic oligonucleotide
aguucugauagccaagcua

SEQ ID NO: 550757 - RNA, 19 nt, Artificial Sequence
  Description of Artificial Sequence: Synthetic oligonucleotide
uugcucagagucuucuugc

SEQ ID NO: 550758 - RNA, 19 nt, Artificial Sequence
  Description of Artificial Sequence: Synthetic oligonucleotide
caagcuaccaaaggauacg

SEQ ID NO: 550759 - RNA, 19 nt, Artificial Sequence
  Description of Artificial Sequence: Synthetic oligonucleotide
gaaugggugaagcgggagc

SEQ ID NO: 550760 - RNA, 19 nt, Artificial Sequence
  Description of Artificial Sequence: Synthetic oligonucleotide
ucccucaugauggugcccg

SEQ ID NO: 550761 - RNA, 19 nt, Artificial Sequence
  Description of Artificial Sequence: Synthetic oligonucleotide
ugcauaagguugauuccca

SEQ ID NO: 550762 - RNA, 19 nt, Artificial Sequence
  Description of Artificial Sequence: Synthetic oligonucleotide
agcuagauauuuguaagcu

SEQ ID NO: 550763 - RNA, 19 nt, Artificial Sequence
  Description of Artificial Sequence: Synthetic oligonucleotide
uagauauuuguaagcuuuc

SEQ ID NO: 550764 - RNA, 19 nt, Artificial Sequence
  Description of Artificial Sequence: Synthetic oligonucleotide
cacucgaaggcaucggacc

SEQ ID NO: 550765 - RNA, 19 nt, Artificial Sequence
  Description of Artificial Sequence: Synthetic oligonucleotide
cagcuagauauuuguaagc

SEQ ID NO: 550766 - RNA, 19 nt, Artificial Sequence
  Description of Artificial Sequence: Synthetic oligonucleotide
uucaauaaacuguggccaa

SEQ ID NO: 550767 - RNA, 19 nt, Artificial Sequence
  Description of Artificial Sequence: Synthetic oligonucleotide
agauaagcaggcauccggg

SEQ ID NO: 550768 - RNA, 19 nt, Artificial Sequence
  Description of Artificial Sequence: Synthetic oligonucleotide
ggacugaucacucgaaggc

SEQ ID NO: 550769 - RNA, 19 nt, Artificial Sequence
  Description of Artificial Sequence: Synthetic oligonucleotide
cuagauauucacccugauc

SEQ ID NO: 550770 - RNA, 19 nt, Artificial Sequence
  Description of Artificial Sequence: Synthetic oligonucleotide
uuuaggcacugucuccagc

SEQ ID NO: 550771 - RNA, 19 nt, Artificial Sequence
  Description of Artificial Sequence: Synthetic oligonucleotide
ggugaaagcucgcagaguc

SEQ ID NO: 550772 - RNA, 19 nt, Artificial Sequence
  Description of Artificial Sequence: Synthetic oligonucleotide
ugauagccaagcuaccaaa

SEQ ID NO: 550773 - RNA, 19 nt, Artificial Sequence
  Description of Artificial Sequence: Synthetic oligonucleotide
ugugcagucguugcugugc

SEQ ID NO: 550774 - RNA, 19 nt, Artificial Sequence
  Description of Artificial Sequence: Synthetic oligonucleotide
auggcaugauguucgagga

SEQ ID NO: 550775 - RNA, 19 nt, Artificial Sequence
  Description of Artificial Sequence: Synthetic oligonucleotide
ugaucaaacaugggaccag

SEQ ID NO: 550776 - RNA, 19 nt, Artificial Sequence
  Description of Artificial Sequence: Synthetic oligonucleotide
ucggcaagaagcgggaccc

SEQ ID NO: 550777 - RNA, 19 nt, Artificial Sequence
  Description of Artificial Sequence: Synthetic oligonucleotide
cugggcacuacucuccacc

SEQ ID NO: 550778 - RNA, 19 nt, Artificial Sequence
  Description of Artificial Sequence: Synthetic oligonucleotide
auuaaaaucccagcaggau

SEQ ID NO: 550779 - RNA, 19 nt, Artificial Sequence
  Description of Artificial Sequence: Synthetic oligonucleotide
ccauucaauaaacuguggc

SEQ ID NO: 550780 - RNA, 19 nt, Artificial Sequence
  Description of Artificial Sequence: Synthetic oligonucleotide
uggcgcaaggaauggauga

SEQ ID NO: 550781 - RNA, 19 nt, Artificial Sequence
  Description of Artificial Sequence: Synthetic oligonucleotide
uguagcuaggagacuucca

SEQ ID NO: 550782 - RNA, 19 nt, Artificial Sequence
  Description of Artificial Sequence: Synthetic oligonucleotide
ucgacacucuguuuccacc

SEQ ID NO: 550783 - RNA, 19 nt, Artificial Sequence
  Description of Artificial Sequence: Synthetic oligonucleotide
uagccgagucaccugcagg

SEQ ID NO: 550784 - RNA, 19 nt, Artificial Sequence
  Description of Artificial Sequence: Synthetic oligonucleotide
ucuccgcacaagcuggggc

SEQ ID NO: 550785 - RNA, 19 nt, Artificial Sequence
  Description of Artificial Sequence: Synthetic oligonucleotide
ucacuuugucgacacucug

SEQ ID NO: 550786 - RNA, 19 nt, Artificial Sequence
  Description of Artificial Sequence: Synthetic oligonucleotide
guacucggcaagaagcggg

SEQ ID NO: 550787 - RNA, 19 nt, Artificial Sequence
  Description of Artificial Sequence: Synthetic oligonucleotide
gcauccgggauuaaaaucc

SEQ ID NO: 550788 - RNA, 19 nt, Artificial Sequence
  Description of Artificial Sequence: Synthetic oligonucleotide
gaaaauagccgagucaccu

SEQ ID NO: 550789 - RNA, 19 nt, Artificial Sequence
  Description of Artificial Sequence: Synthetic oligonucleotide
ucacucgaaggcaucggac

SEQ ID NO: 550790 - RNA, 19 nt, Artificial Sequence
  Description of Artificial Sequence: Synthetic oligonucleotide
uggagguacugcagcuugg

SEQ ID NO: 550791 - RNA, 19 nt, Artificial Sequence
  Description of Artificial Sequence: Synthetic oligonucleotide
uguaagcuuuccgaacagc

SEQ ID NO: 550792 - RNA, 19 nt, Artificial Sequence
  Description of Artificial Sequence: Synthetic oligonucleotide
accuauagaagaacuucuc

SEQ ID NO: 550793 - RNA, 19 nt, Artificial Sequence
  Description of Artificial Sequence: Synthetic oligonucleotide
uuucccucaugauggugcc

SEQ ID NO: 550794 - RNA, 19 nt, Artificial Sequence
  Description of Artificial Sequence: Synthetic oligonucleotide
uacgcccagguccaugcag

SEQ ID NO: 550795 - RNA, 19 nt, Artificial Sequence
  Description of Artificial Sequence: Synthetic oligonucleotide
uaagcaggcauccgggauu

SEQ ID NO: 550796 - RNA, 19 nt, Artificial Sequence
  Description of Artificial Sequence: Synthetic oligonucleotide
ugcuagucuuauuucuaac

SEQ ID NO: 550797 - RNA, 19 nt, Artificial Sequence
  Description of Artificial Sequence: Synthetic oligonucleotide
uugcuagaugaaugacccg

SEQ ID NO: 550798 - RNA, 19 nt, Artificial Sequence
  Description of Artificial Sequence: Synthetic oligonucleotide
gugcccguguccucaaugg

SEQ ID NO: 550799 - RNA, 19 nt, Artificial Sequence
  Description of Artificial Sequence: Synthetic oligonucleotide
uauagacuuccuccuuccu

SEQ ID NO: 550800 - RNA, 19 nt, Artificial Sequence
  Description of Artificial Sequence: Synthetic oligonucleotide
cuuccaucggggcucuagg

SEQ ID NO: 550801 - RNA, 19 nt, Artificial Sequence
  Description of Artificial Sequence: Synthetic oligonucleotide
acgaguucaucagucacug

SEQ ID NO: 550802 - RNA, 19 nt, Artificial Sequence
  Description of Artificial Sequence: Synthetic oligonucleotide
caggucucgaauuucccuc

SEQ ID NO: 550803 - RNA, 19 nt, Artificial Sequence
  Description of Artificial Sequence: Synthetic oligonucleotide
caguuggaagguaaacuuc

SEQ ID NO: 550804 - RNA, 19 nt, Artificial Sequence
  Description of Artificial Sequence: Synthetic oligonucleotide
uccaggucucgaauuuccc

SEQ ID NO: 550805 - RNA, 19 nt, Artificial Sequence
  Description of Artificial Sequence: Synthetic oligonucleotide
cauccgggauuaaaauccc

SEQ ID NO: 550806 - RNA, 19 nt, Artificial Sequence
  Description of Artificial Sequence: Synthetic oligonucleotide
ugacgaagauguucagcca

SEQ ID NO: 550807 - RNA, 19 nt, Artificial Sequence
  Description of Artificial Sequence: Synthetic oligonucleotide
aauguccgguccagcuucc

SEQ ID NO: 550808 - RNA, 19 nt, Artificial Sequence
  Description of Artificial Sequence: Synthetic oligonucleotide
uggcccgaaggaaaauagc

SEQ ID NO: 550809 - RNA, 19 nt, Artificial Sequence
  Description of Artificial Sequence: Synthetic oligonucleotide
cuaccaaaggauacgccca

SEQ ID NO: 550810 - RNA, 19 nt, Artificial Sequence
  Description of Artificial Sequence: Synthetic oligonucleotide
aguucgaaggagagguggg

SEQ ID NO: 550811 - RNA, 19 nt, Artificial Sequence
  Description of Artificial Sequence: Synthetic oligonucleotide
gaacacgaguucaucaguc

SEQ ID NO: 550812 - RNA, 19 nt, Artificial Sequence
  Description of Artificial Sequence: Synthetic oligonucleotide
uggccaagcuagauauuca

SEQ ID NO: 550813 - RNA, 19 nt, Artificial Sequence
  Description of Artificial Sequence: Synthetic oligonucleotide
ugaaugggugaagcgggag

SEQ ID NO: 550814 - RNA, 19 nt, Artificial Sequence
  Description of Artificial Sequence: Synthetic oligonucleotide
cucggcaagaagcgggacc

SEQ ID NO: 550815 - RNA, 19 nt, Artificial Sequence
  Description of Artificial Sequence: Synthetic oligonucleotide
gaucacucgaaggcaucgg

SEQ ID NO: 550816 - RNA, 19 nt, Artificial Sequence
  Description of Artificial Sequence: Synthetic oligonucleotide
agccccaucaggcagcaau

SEQ ID NO: 550817 - RNA, 19 nt, Artificial Sequence
  Description of Artificial Sequence: Synthetic oligonucleotide
aucacucgaaggcaucgga

SEQ ID NO: 550818 - RNA, 19 nt, Artificial Sequence
  Description of Artificial Sequence: Synthetic oligonucleotide
gaugaaugacccgcugggc

SEQ ID NO: 550819 - RNA, 19 nt, Artificial Sequence
  Description of Artificial Sequence: Synthetic oligonucleotide
auagccgagucaccugcag

SEQ ID NO: 550820 - RNA, 19 nt, Artificial Sequence
  Description of Artificial Sequence: Synthetic oligonucleotide
ucggagguggcgguacucg

SEQ ID NO: 550821 - RNA, 19 nt, Artificial Sequence
  Description of Artificial Sequence: Synthetic oligonucleotide
acgccuugguccccagugc

SEQ ID NO: 550822 - RNA, 19 nt, Artificial Sequence
  Description of Artificial Sequence: Synthetic oligonucleotide
aauggcccgaaggaaaaua

SEQ ID NO: 550823 - RNA, 19 nt, Artificial Sequence
  Description of Artificial Sequence: Synthetic oligonucleotide
uacucggcaagaagcggga

SEQ ID NO: 550824 - RNA, 19 nt, Artificial Sequence
  Description of Artificial Sequence: Synthetic oligonucleotide
ggauuuggcucccaauggc

SEQ ID NO: 550825 - RNA, 19 nt, Artificial Sequence
  Description of Artificial Sequence: Synthetic oligonucleotide
cuagaugaaugacccgcug

SEQ ID NO: 550826 - RNA, 19 nt, Artificial Sequence
  Description of Artificial Sequence: Synthetic oligonucleotide
ucuccuggcgaagggcucg

SEQ ID NO: 550827 - RNA, 19 nt, Artificial Sequence
  Description of Artificial Sequence: Synthetic oligonucleotide
  modified_base (13)..(13): a, c, u, g, unknown or other
ggcuagagcccanaguagg

SEQ ID NO: 550828 - RNA, 19 nt, Artificial Sequence
  Description of Artificial Sequence: Synthetic oligonucleotide
ucaguggugaaagcucgca

SEQ ID NO: 550829 - RNA, 19 nt, Artificial Sequence
  Description of Artificial Sequence: Synthetic oligonucleotide
  modified_base (3)..(3): a, c, u, g, unknown or other
canaguaggacugaucacu

SEQ ID NO: 550830 - RNA, 19 nt, Artificial Sequence
  Description of Artificial Sequence: Synthetic oligonucleotide
agcuaccaaaggauacgcc

SEQ ID NO: 550831 - RNA, 19 nt, Artificial Sequence
  Description of Artificial Sequence: Synthetic oligonucleotide
  modified_base (5)..(5): a, c, u, g, unknown or other
cccanaguaggacugauca

SEQ ID NO: 550832 - RNA, 19 nt, Artificial Sequence
  Description of Artificial Sequence: Synthetic oligonucleotide
ggaagugcuagaacaagug

SEQ ID NO: 550833 - RNA, 19 nt, Artificial Sequence
  Description of Artificial Sequence: Synthetic oligonucleotide
gacccgauguuucucccac

SEQ ID NO: 550834 - RNA, 19 nt, Artificial Sequence
  Description of Artificial Sequence: Synthetic oligonucleotide
cuuugacgaagauguucag

SEQ ID NO: 550835 - RNA, 19 nt, Artificial Sequence
  Description of Artificial Sequence: Synthetic oligonucleotide
ugcccguguguccuguuca

SEQ ID NO: 550836 - RNA, 19 nt, Artificial Sequence
  Description of Artificial Sequence: Synthetic oligonucleotide
uuccaucggggcucuaggc

SEQ ID NO: 550837 - RNA, 19 nt, Artificial Sequence
  Description of Artificial Sequence: Synthetic oligonucleotide
agacggugugcccagcaca

SEQ ID NO: 550838 - RNA, 19 nt, Artificial Sequence
  Description of Artificial Sequence: Synthetic oligonucleotide
guccgacaagaucuuagug

SEQ ID NO: 550839 - RNA, 19 nt, Artificial Sequence
  Description of Artificial Sequence: Synthetic oligonucleotide
gagggugacugguacaucu

SEQ ID NO: 550840 - RNA, 19 nt, Artificial Sequence
  Description of Artificial Sequence: Synthetic oligonucleotide
  modified_base (9)..(9): a, c, u, g, unknown or other
agagcccanaguaggacug

SEQ ID NO: 550841 - RNA, 19 nt, Artificial Sequence
  Description of Artificial Sequence: Synthetic oligonucleotide
  modified_base (11)..(11): a, c, u, g, unknown or other
cuagagcccanaguaggac

SEQ ID NO: 550842 - RNA, 19 nt, Artificial Sequence
  Description of Artificial Sequence: Synthetic oligonucleotide
gaccagauaagcaggcauc

SEQ ID NO: 550843 - RNA, 19 nt, Artificial Sequence
  Description of Artificial Sequence: Synthetic oligonucleotide
agugcuagaacaaguguuu

SEQ ID NO: 550844 - RNA, 19 nt, Artificial Sequence
  Description of Artificial Sequence: Synthetic oligonucleotide
cucuacgaccagcucagug

SEQ ID NO: 550845 - RNA, 19 nt, Artificial Sequence
  Description of Artificial Sequence: Synthetic oligonucleotide
guccgguccagcuucccag

SEQ ID NO: 550846 - RNA, 19 nt, Artificial Sequence
  Description of Artificial Sequence: Synthetic oligonucleotide
ucgaacacucuggugcagc

SEQ ID NO: 550847 - RNA, 19 nt, Artificial Sequence
  Description of Artificial Sequence: Synthetic oligonucleotide
auggcccgaaggaaaauag

SEQ ID NO: 550848 - RNA, 19 nt, Artificial Sequence
  Description of Artificial Sequence: Synthetic oligonucleotide
agucguugcugugcagccc

SEQ ID NO: 550849 - RNA, 19 nt, Artificial Sequence
  Description of Artificial Sequence: Synthetic oligonucleotide
  modified_base (14)..(14): a, c, u, g, unknown or other
aggcuagagcccanaguag

SEQ ID NO: 550850 - RNA, 19 nt, Artificial Sequence
  Description of Artificial Sequence: Synthetic oligonucleotide
ugcccugcucuucaagcgu

SEQ ID NO: 550851 - RNA, 19 nt, Artificial Sequence
  Description of Artificial Sequence: Synthetic oligonucleotide
uccugcgagccucuuccgc

SEQ ID NO: 550852 - RNA, 19 nt, Artificial Sequence
  Description of Artificial Sequence: Synthetic oligonucleotide
ggcccgaaggaaaauagcc

SEQ ID NO: 550853 - RNA, 19 nt, Artificial Sequence
  Description of Artificial Sequence: Synthetic oligonucleotide
aggucucgaauuucccuca

SEQ ID NO: 550854 - RNA, 19 nt, Artificial Sequence
  Description of Artificial Sequence: Synthetic oligonucleotide
uguccgguccagcuuccca

SEQ ID NO: 550855 - RNA, 19 nt, Artificial Sequence
  Description of Artificial Sequence: Synthetic oligonucleotide
gacuugcuagaugaaugac

SEQ ID NO: 550856 - RNA, 19 nt, Artificial Sequence
  Description of Artificial Sequence: Synthetic oligonucleotide
ccagccgucgagaugauuc

SEQ ID NO: 550857 - RNA, 19 nt, Artificial Sequence
  Description of Artificial Sequence: Synthetic oligonucleotide
aagcgggacccgauguuuc

SEQ ID NO: 550858 - RNA, 19 nt, Artificial Sequence
  Description of Artificial Sequence: Synthetic oligonucleotide
aguuuucggagguggcggu

SEQ ID NO: 550859 - RNA, 19 nt, Artificial Sequence
  Description of Artificial Sequence: Synthetic oligonucleotide
gacugaucacucgaaggca

SEQ ID NO: 550860 - RNA, 19 nt, Artificial Sequence
  Description of Artificial Sequence: Synthetic oligonucleotide
cucaguggugaaagcucgc

SEQ ID NO: 550861 - RNA, 19 nt, Artificial Sequence
  Description of Artificial Sequence: Synthetic oligonucleotide
ccaagcuaccaaaggauac

SEQ ID NO: 550862 - RNA, 19 nt, Artificial Sequence
  Description of Artificial Sequence: Synthetic oligonucleotide
ucuuagcguccuugaacac

SEQ ID NO: 550863 - RNA, 19 nt, Artificial Sequence
  Description of Artificial Sequence: Synthetic oligonucleotide
agccgggacacaucuuuug

SEQ ID NO: 550864 - RNA, 19 nt, Artificial Sequence
  Description of Artificial Sequence: Synthetic oligonucleotide
acgaccagcucagugguga

SEQ ID NO: 550865 - RNA, 19 nt, Artificial Sequence
  Description of Artificial Sequence: Synthetic oligonucleotide
aggcauccgggauuaaaau

SEQ ID NO: 550866 - RNA, 19 nt, Artificial Sequence
  Description of Artificial Sequence: Synthetic oligonucleotide
cuacucuccaccacaagcu

SEQ ID NO: 550867 - RNA, 19 nt, Artificial Sequence
  Description of Artificial Sequence: Synthetic oligonucleotide
cagccgucgagaugauucc

SEQ ID NO: 550868 - RNA, 19 nt, Artificial Sequence
  Description of Artificial Sequence: Synthetic oligonucleotide
ucggacuugcgucgaggcu

SEQ ID NO: 550869 - RNA, 19 nt, Artificial Sequence
  Description of Artificial Sequence: Synthetic oligonucleotide
  modified_base (17)..(17): a, c, u, g, unknown or other
cugaggcuagagcccanag

SEQ ID NO: 550870 - RNA, 19 nt, Artificial Sequence
  Description of Artificial Sequence: Synthetic oligonucleotide
cugaucaaacaugggacca

SEQ ID NO: 550871 - RNA, 19 nt, Artificial Sequence
  Description of Artificial Sequence: Synthetic oligonucleotide
uccccagugcccauucaau

SEQ ID NO: 550872 - RNA, 19 nt, Artificial Sequence
  Description of Artificial Sequence: Synthetic oligonucleotide
gaaagcucgcagagucugc

SEQ ID NO: 550873 - RNA, 19 nt, Artificial Sequence
  Description of Artificial Sequence: Synthetic oligonucleotide
aacugccgugcccgccugg

SEQ ID NO: 550874 - RNA, 19 nt, Artificial Sequence
  Description of Artificial Sequence: Synthetic oligonucleotide
caugcaggccugacgccag

SEQ ID NO: 550875 - RNA, 19 nt, Artificial Sequence
  Description of Artificial Sequence: Synthetic oligonucleotide
acugccgugcccgccuggc

SEQ ID NO: 550876 - RNA, 19 nt, Artificial Sequence
  Description of Artificial Sequence: Synthetic oligonucleotide
ugcagcuugggaguucgaa

SEQ ID NO: 550877 - RNA, 19 nt, Artificial Sequence
  Description of Artificial Sequence: Synthetic oligonucleotide
ggccaagcuagauauucac

SEQ ID NO: 550878 - RNA, 19 nt, Artificial Sequence
  Description of Artificial Sequence: Synthetic oligonucleotide
gcgucgaggcuccaagugg

SEQ ID NO: 550879 - RNA, 19 nt, Artificial Sequence
  Description of Artificial Sequence: Synthetic oligonucleotide
gcccgaaggaaaauagccg

SEQ ID NO: 550880 - RNA, 19 nt, Artificial Sequence
  Description of Artificial Sequence: Synthetic oligonucleotide
ucgaggcuccaagugggcc

SEQ ID NO: 550881 - RNA, 19 nt, Artificial Sequence
  Description of Artificial Sequence: Synthetic oligonucleotide
gcgguacucggcaagaagc

SEQ ID NO: 550882 - RNA, 19 nt, Artificial Sequence
  Description of Artificial Sequence: Synthetic oligonucleotide
ggagugaggcugcucuccg

SEQ ID NO: 550883 - RNA, 19 nt, Artificial Sequence
  Description of Artificial Sequence: Synthetic oligonucleotide
agccaagcuaccaaaggau

SEQ ID NO: 550884 - RNA, 19 nt, Artificial Sequence
  Description of Artificial Sequence: Synthetic oligonucleotide
ggcauccgggauuaaaauc

SEQ ID NO: 550885 - RNA, 19 nt, Artificial Sequence
  Description of Artificial Sequence: Synthetic oligonucleotide
gucgacacucuguuuccac

SEQ ID NO: 550886 - RNA, 19 nt, Artificial Sequence
  Description of Artificial Sequence: Synthetic oligonucleotide
gccgggacacaucuuuugg

SEQ ID NO: 550887 - RNA, 19 nt, Artificial Sequence
  Description of Artificial Sequence: Synthetic oligonucleotide
aauagccgagucaccugca

SEQ ID NO: 550888 - RNA, 19 nt, Artificial Sequence
  Description of Artificial Sequence: Synthetic oligonucleotide
cacccugaucaaacauggg

SEQ ID NO: 550889 - RNA, 19 nt, Artificial Sequence
  Description of Artificial Sequence: Synthetic oligonucleotide
agcuagauauucacccuga

SEQ ID NO: 550890 - RNA, 19 nt, Artificial Sequence
  Description of Artificial Sequence: Synthetic oligonucleotide
gugcuagucuuauuucuaa

SEQ ID NO: 550891 - RNA, 19 nt, Artificial Sequence
  Description of Artificial Sequence: Synthetic oligonucleotide
acugaucacucgaaggcau

SEQ ID NO: 550892 - RNA, 19 nt, Artificial Sequence
  Description of Artificial Sequence: Synthetic oligonucleotide
ccggauuuggcucccaaug

SEQ ID NO: 550893 - RNA, 19 nt, Artificial Sequence
  Description of Artificial Sequence: Synthetic oligonucleotide
ccgggauuaaaaucccagc

SEQ ID NO: 550894 - RNA, 19 nt, Artificial Sequence
  Description of Artificial Sequence: Synthetic oligonucleotide
agaaugcgcuggguguagg

SEQ ID NO: 550895 - RNA, 19 nt, Artificial Sequence
  Description of Artificial Sequence: Synthetic oligonucleotide
gguacucggcaagaagcgg

SEQ ID NO: 550896 - RNA, 19 nt, Artificial Sequence
  Description of Artificial Sequence: Synthetic oligonucleotide
auguucgaggagugaggcu

SEQ ID NO: 550897 - RNA, 19 nt, Artificial Sequence
  Description of Artificial Sequence: Synthetic oligonucleotide
auccucagaggcaucggug

SEQ ID NO: 550898 - RNA, 19 nt, Artificial Sequence
  Description of Artificial Sequence: Synthetic oligonucleotide
ucgguggguagccgcucag

SEQ ID NO: 550899 - RNA, 19 nt, Artificial Sequence
  Description of Artificial Sequence: Synthetic oligonucleotide
gugacugguacaucuggua

SEQ ID NO: 550900 - RNA, 19 nt, Artificial Sequence
  Description of Artificial Sequence: Synthetic oligonucleotide
cccgaagggacucuaacuc

SEQ ID NO: 550901 - RNA, 19 nt, Artificial Sequence
  Description of Artificial Sequence: Synthetic oligonucleotide
guguaggccagccgggaca

SEQ ID NO: 550902 - RNA, 19 nt, Artificial Sequence
  Description of Artificial Sequence: Synthetic oligonucleotide
caaggaauggaugaggauu

SEQ ID NO: 550903 - RNA, 19 nt, Artificial Sequence
  Description of Artificial Sequence: Synthetic oligonucleotide
cuccgcacaagcuggggca

SEQ ID NO: 550904 - RNA, 19 nt, Artificial Sequence
  Description of Artificial Sequence: Synthetic oligonucleotide
  modified_base (4)..(4): a, c, u, g, unknown or other
ccanaguaggacugaucac

SEQ ID NO: 550905 - RNA, 19 nt, Artificial Sequence
  Description of Artificial Sequence: Synthetic oligonucleotide
cagcaagugacugaggcua

SEQ ID NO: 550906 - RNA, 19 nt, Artificial Sequence
  Description of Artificial Sequence: Synthetic oligonucleotide
cuguggccaagcuagauau

SEQ ID NO: 550907 - RNA, 19 nt, Artificial Sequence
  Description of Artificial Sequence: Synthetic oligonucleotide
uacgaccagcucaguggug

SEQ ID NO: 550908 - RNA, 19 nt, Artificial Sequence
  Description of Artificial Sequence: Synthetic oligonucleotide
gacgccaggcucauagcca

SEQ ID NO: 550909 - RNA, 19 nt, Artificial Sequence
  Description of Artificial Sequence: Synthetic oligonucleotide
agguugcucagagucuucu

SEQ ID NO: 550910 - RNA, 19 nt, Artificial Sequence
  Description of Artificial Sequence: Synthetic oligonucleotide
agaagcgggacccgauguu

SEQ ID NO: 550911 - RNA, 19 nt, Artificial Sequence
  Description of Artificial Sequence: Synthetic oligonucleotide
ugucgacacucuguuucca

SEQ ID NO: 550912 - RNA, 19 nt, Artificial Sequence
  Description of Artificial Sequence: Synthetic oligonucleotide
uuguguccgacaagaucuu

SEQ ID NO: 550913 - RNA, 19 nt, Artificial Sequence
  Description of Artificial Sequence: Synthetic oligonucleotide
caagcuagauauucacccu

SEQ ID NO: 550914 - RNA, 19 nt, Artificial Sequence
  Description of Artificial Sequence: Synthetic oligonucleotide
cacuacucuccaccacaag

SEQ ID NO: 550915 - RNA, 19 nt, Artificial Sequence
  Description of Artificial Sequence: Synthetic oligonucleotide
ggaaaauagccgagucacc

SEQ ID NO: 550916 - RNA, 19 nt, Artificial Sequence
  Description of Artificial Sequence: Synthetic oligonucleotide
gugaagcgggagccuuugg

SEQ ID NO: 550917 - RNA, 19 nt, Artificial Sequence
  Description of Artificial Sequence: Synthetic oligonucleotide
cugcaaauguccgguccag

SEQ ID NO: 550918 - RNA, 19 nt, Artificial Sequence
  Description of Artificial Sequence: Synthetic oligonucleotide
ccgaaggaaaauagccgag

SEQ ID NO: 550919 - RNA, 19 nt, Artificial Sequence
  Description of Artificial Sequence: Synthetic oligonucleotide
agcgggacccgauguuucu

SEQ ID NO: 550920 - RNA, 19 nt, Artificial Sequence
  Description of Artificial Sequence: Synthetic oligonucleotide
ggcaucgguggguagccgc

SEQ ID NO: 550921 - RNA, 19 nt, Artificial Sequence
  Description of Artificial Sequence: Synthetic oligonucleotide
acgaagauguucagccaga

SEQ ID NO: 550922 - RNA, 19 nt, Artificial Sequence
  Description of Artificial Sequence: Synthetic oligonucleotide
agcaagugacugaggcuag

SEQ ID NO: 550923 - RNA, 19 nt, Artificial Sequence
  Description of Artificial Sequence: Synthetic oligonucleotide
acucggcaagaagcgggac

SEQ ID NO: 550924 - RNA, 19 nt, Artificial Sequence
  Description of Artificial Sequence: Synthetic oligonucleotide
cuggagcaucucuccuagg

SEQ ID NO: 550925 - RNA, 19 nt, Artificial Sequence
  Description of Artificial Sequence: Synthetic oligonucleotide
gccucuacgaccagcucag

SEQ ID NO: 550926 - RNA, 19 nt, Artificial Sequence
  Description of Artificial Sequence: Synthetic oligonucleotide
cucgguaguccucacagau

SEQ ID NO: 550927 - RNA, 19 nt, Artificial Sequence
  Description of Artificial Sequence: Synthetic oligonucleotide
gccaagcuagauauucacc

SEQ ID NO: 550928 - RNA, 19 nt, Artificial Sequence
  Description of Artificial Sequence: Synthetic oligonucleotide
uguggccaagcuagauauu

SEQ ID NO: 550929 - RNA, 19 nt, Artificial Sequence
  Description of Artificial Sequence: Synthetic oligonucleotide
gccagcauucuccuggcga

SEQ ID NO: 550930 - RNA, 19 nt, Artificial Sequence
  Description of Artificial Sequence: Synthetic oligonucleotide
cugaaugggugaagcggga

SEQ ID NO: 550931 - RNA, 19 nt, Artificial Sequence
  Description of Artificial Sequence: Synthetic oligonucleotide
guucgaggagugaggcugc

SEQ ID NO: 550932 - RNA, 19 nt, Artificial Sequence
  Description of Artificial Sequence: Synthetic oligonucleotide
acggugugcccagcacacc

SEQ ID NO: 550933 - RNA, 19 nt, Artificial Sequence
  Description of Artificial Sequence: Synthetic oligonucleotide
cgucgaggcuccaaguggg

SEQ ID NO: 550934 - RNA, 19 nt, Artificial Sequence
  Description of Artificial Sequence: Synthetic oligonucleotide
ucccggacccggcccaaga

SEQ ID NO: 550935 - RNA, 19 nt, Artificial Sequence
  Description of Artificial Sequence: Synthetic oligonucleotide
guacaucugguaucugggu

SEQ ID NO: 550936 - RNA, 19 nt, Artificial Sequence
  Description of Artificial Sequence: Synthetic oligonucleotide
cagaaugcgcuggguguag

SEQ ID NO: 550937 - RNA, 19 nt, Artificial Sequence
  Description of Artificial Sequence: Synthetic oligonucleotide
ggcgcaaggaauggaugag

SEQ ID NO: 550938 - RNA, 19 nt, Artificial Sequence
  Description of Artificial Sequence: Synthetic oligonucleotide
cucgaaggcaucggaccac

SEQ ID NO: 550939 - RNA, 19 nt, Artificial Sequence
  Description of Artificial Sequence: Synthetic oligonucleotide
gcgcaaggaauggaugagg

SEQ ID NO: 550940 - RNA, 19 nt, Artificial Sequence
  Description of Artificial Sequence: Synthetic oligonucleotide
ucccggauuuggcucccaa

SEQ ID NO: 550941 - RNA, 19 nt, Artificial Sequence
  Description of Artificial Sequence: Synthetic oligonucleotide
uagcguccuugaacacgag

SEQ ID NO: 550942 - RNA, 19 nt, Artificial Sequence
  Description of Artificial Sequence: Synthetic oligonucleotide
cucuaacuccugcucuuga

SEQ ID NO: 550943 - RNA, 19 nt, Artificial Sequence
  Description of Artificial Sequence: Synthetic oligonucleotide
gcuugggaguucgaaggag

SEQ ID NO: 550944 - RNA, 19 nt, Artificial Sequence
  Description of Artificial Sequence: Synthetic oligonucleotide
gaaguuccuuuguguccga

SEQ ID NO: 550945 - RNA, 19 nt, Artificial Sequence
  Description of Artificial Sequence: Synthetic oligonucleotide
auguccgguccagcuuccc

SEQ ID NO: 550946 - RNA, 19 nt, Artificial Sequence
  Description of Artificial Sequence: Synthetic oligonucleotide
guaggacugaucacucgaa

SEQ ID NO: 550947 - RNA, 19 nt, Artificial Sequence
  Description of Artificial Sequence: Synthetic oligonucleotide
gacucuaacuccugcucuu

SEQ ID NO: 550948 - RNA, 19 nt, Artificial Sequence
  Description of Artificial Sequence: Synthetic oligonucleotide
agggugacugguacaucug

SEQ ID NO: 550949 - RNA, 19 nt, Artificial Sequence
  Description of Artificial Sequence: Synthetic oligonucleotide
agccgcucagccaggaaga

SEQ ID NO: 550950 - RNA, 19 nt, Artificial Sequence
  Description of Artificial Sequence: Synthetic oligonucleotide
ggggugcuagucuuauuuc

SEQ ID NO: 550951 - RNA, 19 nt, Artificial Sequence
  Description of Artificial Sequence: Synthetic oligonucleotide
gggauagaggaaguucuga

SEQ ID NO: 550952 - RNA, 19 nt, Artificial Sequence
  Description of Artificial Sequence: Synthetic oligonucleotide
ggcaucggaccacagccuc

SEQ ID NO: 550953 - RNA, 19 nt, Artificial Sequence
  Description of Artificial Sequence: Synthetic oligonucleotide
cuucaagcguagggccugc

SEQ ID NO: 550954 - RNA, 19 nt, Artificial Sequence
  Description of Artificial Sequence: Synthetic oligonucleotide
  modified_base (7)..(7): a, c, u, g, unknown or other
agcccanaguaggacugau

SEQ ID NO: 550955 - RNA, 19 nt, Artificial Sequence
  Description of Artificial Sequence: Synthetic oligonucleotide
cuaggucucggacuugcgu

SEQ ID NO: 550956 - RNA, 19 nt, Artificial Sequence
  Description of Artificial Sequence: Synthetic oligonucleotide
auacgcccagguccaugca

SEQ ID NO: 550957 - RNA, 19 nt, Artificial Sequence
  Description of Artificial Sequence: Synthetic oligonucleotide
cuacgaccagcucaguggu

SEQ ID NO: 550958 - RNA, 19 nt, Artificial Sequence
  Description of Artificial Sequence: Synthetic oligonucleotide
  modified_base (8)..(8): a, c, u, g, unknown or other
gagcccanaguaggacuga

SEQ ID NO: 550959 - RNA, 19 nt, Artificial Sequence
  Description of Artificial Sequence: Synthetic oligonucleotide
gagagagaguugauuuccu

SEQ ID NO: 550960 - RNA, 19 nt, Artificial Sequence
  Description of Artificial Sequence: Synthetic oligonucleotide
ccgucgagaugauuccagc

SEQ ID NO: 550961 - RNA, 19 nt, Artificial Sequence
  Description of Artificial Sequence: Synthetic oligonucleotide
ccuauagaagaacuucucu

SEQ ID NO: 550962 - RNA, 19 nt, Artificial Sequence
  Description of Artificial Sequence: Synthetic oligonucleotide
ggugaagcgggagccuuug

SEQ ID NO: 550963 - RNA, 19 nt, Artificial Sequence
  Description of Artificial Sequence: Synthetic oligonucleotide
cucgaacacucuggugcag

SEQ ID NO: 550964 - RNA, 19 nt, Artificial Sequence
  Description of Artificial Sequence: Synthetic oligonucleotide
  modified_base (12)..(12): a, c, u, g, unknown or other
gcuagagcccanaguagga

SEQ ID NO: 550965 - RNA, 19 nt, Artificial Sequence
  Description of Artificial Sequence: Synthetic oligonucleotide
cuguuuccaccugcauaag

SEQ ID NO: 550966 - RNA, 19 nt, Artificial Sequence
  Description of Artificial Sequence: Synthetic oligonucleotide
caucggggcucuaggccuc

SEQ ID NO: 550967 - RNA, 19 nt, Artificial Sequence
  Description of Artificial Sequence: Synthetic oligonucleotide
ggcggaaccgggcagacau

SEQ ID NO: 550968 - RNA, 19 nt, Artificial Sequence
  Description of Artificial Sequence: Synthetic oligonucleotide
ggaauggaugaggauucga

SEQ ID NO: 550969 - RNA, 19 nt, Artificial Sequence
  Description of Artificial Sequence: Synthetic oligonucleotide
ggagacuuccaucggggcu

SEQ ID NO: 550970 - RNA, 19 nt, Artificial Sequence
  Description of Artificial Sequence: Synthetic oligonucleotide
ggacucuaacuccugcucu

SEQ ID NO: 550971 - RNA, 19 nt, Artificial Sequence
  Description of Artificial Sequence: Synthetic oligonucleotide
ggaccagauaagcaggcau

SEQ ID NO: 550972 - RNA, 19 nt, Artificial Sequence
  Description of Artificial Sequence: Synthetic oligonucleotide
gccgucgagaugauuccag

SEQ ID NO: 550973 - RNA, 19 nt, Artificial Sequence
  Description of Artificial Sequence: Synthetic oligonucleotide
uuccugccuguagcuagga

SEQ ID NO: 550974 - RNA, 19 nt, Artificial Sequence
  Description of Artificial Sequence: Synthetic oligonucleotide
cugcccguguguccuguuc

SEQ ID NO: 550975 - RNA, 19 nt, Artificial Sequence
  Description of Artificial Sequence: Synthetic oligonucleotide
guguaggggcugguagcag

SEQ ID NO: 550976 - RNA, 19 nt, Artificial Sequence
  Description of Artificial Sequence: Synthetic oligonucleotide
ggccccagcuuugacgaag

SEQ ID NO: 550977 - RNA, 19 nt, Artificial Sequence
  Description of Artificial Sequence: Synthetic oligonucleotide
gaagggcucgguaguccuc

SEQ ID NO: 550978 - RNA, 19 nt, Artificial Sequence
  Description of Artificial Sequence: Synthetic oligonucleotide
gggacccgauguuucuccc

SEQ ID NO: 550979 - RNA, 19 nt, Artificial Sequence
  Description of Artificial Sequence: Synthetic oligonucleotide
gagaugauuccagcucccu

SEQ ID NO: 550980 - RNA, 19 nt, Artificial Sequence
  Description of Artificial Sequence: Synthetic oligonucleotide
ggugcuagucuuauuucua

SEQ ID NO: 550981 - RNA, 19 nt, Artificial Sequence
  Description of Artificial Sequence: Synthetic oligonucleotide
gauguucagccagaugcuu

SEQ ID NO: 550982 - RNA, 19 nt, Artificial Sequence
  Description of Artificial Sequence: Synthetic oligonucleotide
agccgucgagaugauucca

SEQ ID NO: 550983 - RNA, 19 nt, Artificial Sequence
  Description of Artificial Sequence: Synthetic oligonucleotide
uucaagcguagggccugcu

SEQ ID NO: 550984 - RNA, 19 nt, Artificial Sequence
  Description of Artificial Sequence: Synthetic oligonucleotide
ggacuugcgucgaggcucc

SEQ ID NO: 550985 - RNA, 19 nt, Artificial Sequence
  Description of Artificial Sequence: Synthetic oligonucleotide
cucgacagcugcucccgaa

SEQ ID NO: 550986 - RNA, 19 nt, Artificial Sequence
  Description of Artificial Sequence: Synthetic oligonucleotide
ggagacggugugcccagca

SEQ ID NO: 550987 - RNA, 19 nt, Artificial Sequence
  Description of Artificial Sequence: Synthetic oligonucleotide
aucucccgggcaaucccug

SEQ ID NO: 550988 - RNA, 19 nt, Artificial Sequence
  Description of Artificial Sequence: Synthetic oligonucleotide
aggcaucgguggguagccg

SEQ ID NO: 550989 - RNA, 19 nt, Artificial Sequence
  Description of Artificial Sequence: Synthetic oligonucleotide
aggcaucggaccacagccu

SEQ ID NO: 550990 - RNA, 19 nt, Artificial Sequence
  Description of Artificial Sequence: Synthetic oligonucleotide
ccgacaagaucuuagugau

SEQ ID NO: 550991 - RNA, 19 nt, Artificial Sequence
  Description of Artificial Sequence: Synthetic oligonucleotide
ccgccuggcgcaaggaaug

SEQ ID NO: 550992 - RNA, 19 nt, Artificial Sequence
  Description of Artificial Sequence: Synthetic oligonucleotide
gaagcgggacccgauguuu

SEQ ID NO: 550993 - RNA, 19 nt, Artificial Sequence
  Description of Artificial Sequence: Synthetic oligonucleotide
guguguccuguucaggcuu

SEQ ID NO: 550994 - RNA, 19 nt, Artificial Sequence
  Description of Artificial Sequence: Synthetic oligonucleotide
caaugcugugguucacacu

SEQ ID NO: 550995 - RNA, 19 nt, Artificial Sequence
  Description of Artificial Sequence: Synthetic oligonucleotide
acuugcgucgaggcuccaa

SEQ ID NO: 550996 - RNA, 19 nt, Artificial Sequence
  Description of Artificial Sequence: Synthetic oligonucleotide
ggacccgauguuucuccca

SEQ ID NO: 550997 - RNA, 19 nt, Artificial Sequence
  Description of Artificial Sequence: Synthetic oligonucleotide
agacuuccaucggggcucu

SEQ ID NO: 550998 - RNA, 19 nt, Artificial Sequence
  Description of Artificial Sequence: Synthetic oligonucleotide
ggauacgcccagguccaug

SEQ ID NO: 550999 - RNA, 19 nt, Artificial Sequence
  Description of Artificial Sequence: Synthetic oligonucleotide
ccugguggaguggaaugac

SEQ ID NO: 551000 - RNA, 19 nt, Artificial Sequence
  Description of Artificial Sequence: Synthetic oligonucleotide
ccugcucuucaagcguagg

SEQ ID NO: 551001 - RNA, 19 nt, Artificial Sequence
  Description of Artificial Sequence: Synthetic oligonucleotide
cggacuugcgucgaggcuc

SEQ ID NO: 551002 - RNA, 19 nt, Artificial Sequence
  Description of Artificial Sequence: Synthetic oligonucleotide
gcgaagggcucgguagucc

SEQ ID NO: 551003 - RNA, 19 nt, Artificial Sequence
  Description of Artificial Sequence: Synthetic oligonucleotide
cgggacccgauguuucucc

SEQ ID NO: 551004 - RNA, 19 nt, Artificial Sequence
  Description of Artificial Sequence: Synthetic oligonucleotide
cugguacaucugguaucug

SEQ ID NO: 551005 - RNA, 19 nt, Artificial Sequence
  Description of Artificial Sequence: Synthetic oligonucleotide
ccagugcccauucaauaaa

SEQ ID NO: 551006 - RNA, 19 nt, Artificial Sequence
  Description of Artificial Sequence: Synthetic oligonucleotide
gugaaagcucgcagagucu

SEQ ID NO: 551007 - RNA, 19 nt, Artificial Sequence
  Description of Artificial Sequence: Synthetic oligonucleotide
gccaagcuaccaaaggaua

SEQ ID NO: 551008 - RNA, 19 nt, Artificial Sequence
  Description of Artificial Sequence: Synthetic oligonucleotide
caucgguggguagccgcuc

SEQ ID NO: 551009 - RNA, 19 nt, Artificial Sequence
  Description of Artificial Sequence: Synthetic oligonucleotide
caucggaccacagccucua

SEQ ID NO: 551010 - RNA, 19 nt, Artificial Sequence
  Description of Artificial Sequence: Synthetic oligonucleotide
caggcggaaccgggcagac

SEQ ID NO: 551011 - RNA, 19 nt, Artificial Sequence
  Description of Artificial Sequence: Synthetic oligonucleotide
gcucuccgcacaagcuggg

SEQ ID NO: 551012 - RNA, 19 nt, Artificial Sequence
  Description of Artificial Sequence: Synthetic oligonucleotide
uggugcccguguccucaau

SEQ ID NO: 551013 - RNA, 19 nt, Artificial Sequence
  Description of Artificial Sequence: Synthetic oligonucleotide
gcaaggaauggaugaggau

SEQ ID NO: 551014 - RNA, 19 nt, Artificial Sequence
  Description of Artificial Sequence: Synthetic oligonucleotide
gcucgguaguccucacaga

SEQ ID NO: 551015 - RNA, 19 nt, Artificial Sequence
  Description of Artificial Sequence: Synthetic oligonucleotide
gaacucccauggcucuccu

SEQ ID NO: 551016 - RNA, 19 nt, Artificial Sequence
  Description of Artificial Sequence: Synthetic oligonucleotide
gcucuccuuuggaacugag

SEQ ID NO: 551017 - RNA, 19 nt, Artificial Sequence
  Description of Artificial Sequence: Synthetic oligonucleotide
gcuagaugaaugacccgcu

SEQ ID NO: 551018 - RNA, 19 nt, Artificial Sequence
  Description of Artificial Sequence: Synthetic oligonucleotide
gggaccagauaagcaggca

SEQ ID NO: 551019 - RNA, 19 nt, Artificial Sequence
  Description of Artificial Sequence: Synthetic oligonucleotide
ggauucgaucggccucuuc

SEQ ID NO: 551020 - RNA, 19 nt, Artificial Sequence
  Description of Artificial Sequence: Synthetic oligonucleotide
cccguguccucaauggucu

SEQ ID NO: 551021 - RNA, 19 nt, Artificial Sequence
  Description of Artificial Sequence: Synthetic oligonucleotide
gcuuauagacuuccuccuu

SEQ ID NO: 551022 - RNA, 19 nt, Artificial Sequence
  Description of Artificial Sequence: Synthetic oligonucleotide
  modified_base (6)..(6): a, c, u, g, unknown or other
gcccanaguaggacugauc

SEQ ID NO: 551023 - RNA, 19 nt, Artificial Sequence
  Description of Artificial Sequence: Synthetic oligonucleotide
gcuagauauucacccugau

SEQ ID NO: 551024 - RNA, 19 nt, Artificial Sequence
  Description of Artificial Sequence: Synthetic oligonucleotide
ugccagccgucgagaugau

SEQ ID NO: 551025 - RNA, 19 nt, Artificial Sequence
  Description of Artificial Sequence: Synthetic oligonucleotide
ggcgaagggcucgguaguc

SEQ ID NO: 551026 - RNA, 19 nt, Artificial Sequence
  Description of Artificial Sequence: Synthetic oligonucleotide
ccgauguuucucccacuga

SEQ ID NO: 551027 - RNA, 19 nt, Artificial Sequence
  Description of Artificial Sequence: Synthetic oligonucleotide
cuaacaccccagggcugga

SEQ ID NO: 551028 - RNA, 19 nt, Artificial Sequence
  Description of Artificial Sequence: Synthetic oligonucleotide
ccuggcgcaaggaauggau

SEQ ID NO: 551029 - RNA, 19 nt, Artificial Sequence
  Description of Artificial Sequence: Synthetic oligonucleotide
ccccagugcccauucaaua

SEQ ID NO: 551030 - RNA, 19 nt, Artificial Sequence
  Description of Artificial Sequence: Synthetic oligonucleotide
uggcucccaauggcccgaa

SEQ ID NO: 551031 - RNA, 19 nt, Artificial Sequence
  Description of Artificial Sequence: Synthetic oligonucleotide
gcucgcagagucugcacuu

SEQ ID NO: 551032 - RNA, 19 nt, Artificial Sequence
  Description of Artificial Sequence: Synthetic oligonucleotide
cgucgagaugauuccagcu

SEQ ID NO: 551033 - RNA, 19 nt, Artificial Sequence
  Description of Artificial Sequence: Synthetic oligonucleotide
ccagaaugcgcugggugua

SEQ ID NO: 551034 - RNA, 19 nt, Artificial Sequence
  Description of Artificial Sequence: Synthetic oligonucleotide
gccgugcccgccuggcgca

SEQ ID NO: 551035 - RNA, 19 nt, Artificial Sequence
  Description of Artificial Sequence: Synthetic oligonucleotide
ggucucgaauuucccucau

SEQ ID NO: 551036 - RNA, 19 nt, Artificial Sequence
  Description of Artificial Sequence: Synthetic oligonucleotide
cccgggcaaucccugcuca

SEQ ID NO: 551037 - RNA, 19 nt, Artificial Sequence
  Description of Artificial Sequence: Synthetic oligonucleotide
gcggaaccgggcagacaug

SEQ ID NO: 551038 - RNA, 19 nt, Artificial Sequence
  Description of Artificial Sequence: Synthetic oligonucleotide
gcgggacccgauguuucuc

SEQ ID NO: 551039 - RNA, 19 nt, Artificial Sequence
  Description of Artificial Sequence: Synthetic oligonucleotide
gcaucgguggguagccgcu

SEQ ID NO: 551040 - RNA, 19 nt, Artificial Sequence
  Description of Artificial Sequence: Synthetic oligonucleotide
gcaagaagcgggacccgau

SEQ ID NO: 551041 - RNA, 19 nt, Artificial Sequence
  Description of Artificial Sequence: Synthetic oligonucleotide
gacuugcgucgaggcucca

SEQ ID NO: 551042 - RNA, 19 nt, Artificial Sequence
  Description of Artificial Sequence: Synthetic oligonucleotide
cagcacacccggucuucau

SEQ ID NO: 551043 - RNA, 19 nt, Artificial Sequence
  Description of Artificial Sequence: Synthetic oligonucleotide
cgccuggcgcaaggaaugg

SEQ ID NO: 551044 - RNA, 19 nt, Artificial Sequence
  Description of Artificial Sequence: Synthetic oligonucleotide
gccuggcgcaaggaaugga

SEQ ID NO: 551045 - RNA, 19 nt, Artificial Sequence
  Description of Artificial Sequence: Synthetic oligonucleotide
gcccugcucuucaagcgua

SEQ ID NO: 551046 - RNA, 19 nt, Artificial Sequence
  Description of Artificial Sequence: Synthetic oligonucleotide
cgaagggcucgguaguccu

SEQ ID NO: 551047 - RNA, 19 nt, Artificial Sequence
  Description of Artificial Sequence: Synthetic oligonucleotide
gcaucggaccacagccucu

SEQ ID NO: 551048 - RNA, 19 nt, Artificial Sequence
  Description of Artificial Sequence: Synthetic oligonucleotide
cccggauuuggcucccaau

SEQ ID NO: 551049 - RNA, 19 nt, Artificial Sequence
  Description of Artificial Sequence: Synthetic oligonucleotide
gggccccagcuuugacgaa

SEQ ID NO: 551050 - RNA, 19 nt, Artificial Sequence
  Description of Artificial Sequence: Synthetic oligonucleotide
gacuuccaucggggcucua

SEQ ID NO: 551051 - RNA, 19 nt, Artificial Sequence
  Description of Artificial Sequence: Synthetic oligonucleotide
cucggaggucaggcucacu

SEQ ID NO: 551052 - RNA, 19 nt, Artificial Sequence
  Description of Artificial Sequence: Synthetic oligonucleotide
gcugcccguguguccuguu

SEQ ID NO: 551053 - RNA, 19 nt, Artificial Sequence
  Description of Artificial Sequence: Synthetic oligonucleotide
ggccugacgccaggcucau

SEQ ID NO: 551054 - RNA, 19 nt, Artificial Sequence
  Description of Artificial Sequence: Synthetic oligonucleotide
gccagccgucgagaugauu

SEQ ID NO: 551055 - RNA, 19 nt, Artificial Sequence
  Description of Artificial Sequence: Synthetic oligonucleotide
ccucuacgaccagcucagu

SEQ ID NO: 551056 - RNA, 19 nt, Artificial Sequence
  Description of Artificial Sequence: Synthetic oligonucleotide
gccugacgccaggcucaua

SEQ ID NO: 551057 - RNA, 19 nt, Artificial Sequence
  Description of Artificial Sequence: Synthetic oligonucleotide
ccgugcccgccuggcgcaa

SEQ ID NO: 551058 - RNA, 19 nt, Artificial Sequence
  Description of Artificial Sequence: Synthetic oligonucleotide
uauauaucaggccauaagg

SEQ ID NO: 551059 - RNA, 19 nt, Artificial Sequence
  Description of Artificial Sequence: Synthetic oligonucleotide
aaguuuaucuccuauuggg

SEQ ID NO: 551060 - RNA, 19 nt, Artificial Sequence
  Description of Artificial Sequence: Synthetic oligonucleotide
aauguaagcaaguacaaau

SEQ ID NO: 551061 - RNA, 19 nt, Artificial Sequence
  Description of Artificial Sequence: Synthetic oligonucleotide
uguauuagcguaaacauaa

SEQ ID NO: 551062 - RNA, 19 nt, Artificial Sequence
  Description of Artificial Sequence: Synthetic oligonucleotide
auagguaugaaucgcauuc

SEQ ID NO: 551063 - RNA, 19 nt, Artificial Sequence
  Description of Artificial Sequence: Synthetic oligonucleotide
uggaacuugcaauagacgg

SEQ ID NO: 551064 - RNA, 19 nt, Artificial Sequence
  Description of Artificial Sequence: Synthetic oligonucleotide
uacaaaucaaccuauguga

SEQ ID NO: 551065 - RNA, 19 nt, Artificial Sequence
  Description of Artificial Sequence: Synthetic oligonucleotide
uaaaugauugcuaagcccu

SEQ ID NO: 551066 - RNA, 19 nt, Artificial Sequence
  Description of Artificial Sequence: Synthetic oligonucleotide
uuaaguuuaucuccuauug

SEQ ID NO: 551067 - RNA, 19 nt, Artificial Sequence
  Description of Artificial Sequence: Synthetic oligonucleotide
ucuguuuaagaccaguuug

SEQ ID NO: 551068 - RNA, 19 nt, Artificial Sequence
  Description of Artificial Sequence: Synthetic oligonucleotide
augaaucgcauucuuaggc

SEQ ID NO: 551069 - RNA, 19 nt, Artificial Sequence
  Description of Artificial Sequence: Synthetic oligonucleotide
auugcuauuauucacucug

SEQ ID NO: 551070 - RNA, 19 nt, Artificial Sequence
  Description of Artificial Sequence: Synthetic oligonucleotide
aguaguuuggagcaccacc

SEQ ID NO: 551071 - RNA, 19 nt, Artificial Sequence
  Description of Artificial Sequence: Synthetic oligonucleotide
uuaucuuaucuaaucaaag

SEQ ID NO: 551072 - RNA, 19 nt, Artificial Sequence
  Description of Artificial Sequence: Synthetic oligonucleotide
gcauuaaccagcuugaacg

SEQ ID NO: 551073 - RNA, 19 nt, Artificial Sequence
  Description of Artificial Sequence: Synthetic oligonucleotide
ucccugaugaagaaaauag

SEQ ID NO: 551074 - RNA, 19 nt, Artificial Sequence
  Description of Artificial Sequence: Synthetic oligonucleotide
uguugcuugggucaaaagc

SEQ ID NO: 551075 - RNA, 19 nt, Artificial Sequence
  Description of Artificial Sequence: Synthetic oligonucleotide
aagaggauaguccugguga

SEQ ID NO: 551076 - RNA, 19 nt, Artificial Sequence
  Description of Artificial Sequence: Synthetic oligonucleotide
aaggacggaaacaauaugg

SEQ ID NO: 551077 - RNA, 19 nt, Artificial Sequence
  Description of Artificial Sequence: Synthetic oligonucleotide
uauaagaggauaguccugg

SEQ ID NO: 551078 - RNA, 19 nt, Artificial Sequence
  Description of Artificial Sequence: Synthetic oligonucleotide
uaucuuaucuaaucaaagc

SEQ ID NO: 551079 - RNA, 19 nt, Artificial Sequence
  Description of Artificial Sequence: Synthetic oligonucleotide
uugucgugcaugcacaugg

SEQ ID NO: 551080 - RNA, 19 nt, Artificial Sequence
  Description of Artificial Sequence: Synthetic oligonucleotide
ugguauaagaggauagucc

SEQ ID NO: 551081 - RNA, 19 nt, Artificial Sequence
  Description of Artificial Sequence: Synthetic oligonucleotide
auaaucgggaucuuccugg

SEQ ID NO: 551082 - RNA, 19 nt, Artificial Sequence
  Description of Artificial Sequence: Synthetic oligonucleotide
ucagcaaaguaauuaacug

SEQ ID NO: 551083 - RNA, 19 nt, Artificial Sequence
  Description of Artificial Sequence: Synthetic oligonucleotide
uguaagcaaguacaaauca

SEQ ID NO: 551084 - RNA, 19 nt, Artificial Sequence
  Description of Artificial Sequence: Synthetic oligonucleotide
guaugaaucgcauucuuag

SEQ ID NO: 551085 - RNA, 19 nt, Artificial Sequence
  Description of Artificial Sequence: Synthetic oligonucleotide
aaguaauuaacuggguuuc

SEQ ID NO: 551086 - RNA, 19 nt, Artificial Sequence
  Description of Artificial Sequence: Synthetic oligonucleotide
aaucuaacggcaaugggag

SEQ ID NO: 551087 - RNA, 19 nt, Artificial Sequence
  Description of Artificial Sequence: Synthetic oligonucleotide
uuugccuuacaguaccugg

SEQ ID NO: 551088 - RNA, 19 nt, Artificial Sequence
  Description of Artificial Sequence: Synthetic oligonucleotide
cacauccugaaccagaagg

SEQ ID NO: 551089 - RNA, 19 nt, Artificial Sequence
  Description of Artificial Sequence: Synthetic oligonucleotide
uuagcguaaacauaauuuc

SEQ ID NO: 551090 - RNA, 19 nt, Artificial Sequence
  Description of Artificial Sequence: Synthetic oligonucleotide
gguaucuggagauaguugg

SEQ ID NO: 551091 - RNA, 19 nt, Artificial Sequence
  Description of Artificial Sequence: Synthetic oligonucleotide
aaauggauuaaaugggaaa

SEQ ID NO: 551092 - RNA, 19 nt, Artificial Sequence
  Description of Artificial Sequence: Synthetic oligonucleotide
uccucauuuaacaccuucg

SEQ ID NO: 551093 - RNA, 19 nt, Artificial Sequence
  Description of Artificial Sequence: Synthetic oligonucleotide
aaaucaaccuaugugaaau

SEQ ID NO: 551094 - RNA, 19 nt, Artificial Sequence
  Description of Artificial Sequence: Synthetic oligonucleotide
ucuuaucuaaucaaagcau

SEQ ID NO: 551095 - RNA, 19 nt, Artificial Sequence
  Description of Artificial Sequence: Synthetic oligonucleotide
aucaaauggauuaaauggg

SEQ ID NO: 551096 - RNA, 19 nt, Artificial Sequence
  Description of Artificial Sequence: Synthetic oligonucleotide
ugcguauagguaugaaucg

SEQ ID NO: 551097 - RNA, 19 nt, Artificial Sequence
  Description of Artificial Sequence: Synthetic oligonucleotide
cuuaucuaaucaaagcaug

SEQ ID NO: 551098 - RNA, 19 nt, Artificial Sequence
  Description of Artificial Sequence: Synthetic oligonucleotide
uuugccaacugguauaaga

SEQ ID NO: 551099 - RNA, 19 nt, Artificial Sequence
  Description of Artificial Sequence: Synthetic oligonucleotide
uccguuugcauuaaccagc

SEQ ID NO: 551100 - RNA, 19 nt, Artificial Sequence
  Description of Artificial Sequence: Synthetic oligonucleotide
cucggcauuauauuugucc

SEQ ID NO: 551101 - RNA, 19 nt, Artificial Sequence
  Description of Artificial Sequence: Synthetic oligonucleotide
uguguaauguauauauauc

SEQ ID NO: 551102 - RNA, 19 nt, Artificial Sequence
  Description of Artificial Sequence: Synthetic oligonucleotide
uucacugcaaacccacggg

SEQ ID NO: 551103 - RNA, 19 nt, Artificial Sequence
  Description of Artificial Sequence: Synthetic oligonucleotide
cuucguauagaaauuccgc

SEQ ID NO: 551104 - RNA, 19 nt, Artificial Sequence
  Description of Artificial Sequence: Synthetic oligonucleotide
aauuccgcaccugagugac

SEQ ID NO: 551105 - RNA, 19 nt, Artificial Sequence
  Description of Artificial Sequence: Synthetic oligonucleotide
aaugggaaaguuucugccu

SEQ ID NO: 551106 - RNA, 19 nt, Artificial Sequence
  Description of Artificial Sequence: Synthetic oligonucleotide
uaugaaucgcauucuuagg

SEQ ID NO: 551107 - RNA, 19 nt, Artificial Sequence
  Description of Artificial Sequence: Synthetic oligonucleotide
uguucuguuaaaugauugc

SEQ ID NO: 551108 - RNA, 19 nt, Artificial Sequence
  Description of Artificial Sequence: Synthetic oligonucleotide
uucguauagaaauuccgca

SEQ ID NO: 551109 - RNA, 19 nt, Artificial Sequence
  Description of Artificial Sequence: Synthetic oligonucleotide
aagaaaauagggguguugu

SEQ ID NO: 551110 - RNA, 19 nt, Artificial Sequence
  Description of Artificial Sequence: Synthetic oligonucleotide
aacagcauuaaaagcauug

SEQ ID NO: 551111 - RNA, 19 nt, Artificial Sequence
  Description of Artificial Sequence: Synthetic oligonucleotide
aacaccuuugccuuacagu

SEQ ID NO: 551112 - RNA, 19 nt, Artificial Sequence
  Description of Artificial Sequence: Synthetic oligonucleotide
aaucaaccuaugugaaauc

SEQ ID NO: 551113 - RNA, 19 nt, Artificial Sequence
  Description of Artificial Sequence: Synthetic oligonucleotide
ucggguuucugcaaggacc

SEQ ID NO: 551114 - RNA, 19 nt, Artificial Sequence
  Description of Artificial Sequence: Synthetic oligonucleotide
ugugccgauguccaucugg

SEQ ID NO: 551115 - RNA, 19 nt, Artificial Sequence
  Description of Artificial Sequence: Synthetic oligonucleotide
acagcauuaaaagcauugc

SEQ ID NO: 551116 - RNA, 19 nt, Artificial Sequence
  Description of Artificial Sequence: Synthetic oligonucleotide
aaagcauguuucuggcuag

SEQ ID NO: 551117 - RNA, 19 nt, Artificial Sequence
  Description of Artificial Sequence: Synthetic oligonucleotide
uugaagagaucacggaggc

SEQ ID NO: 551118 - RNA, 19 nt, Artificial Sequence
  Description of Artificial Sequence: Synthetic oligonucleotide
uuaaccagcuugaacgugu

SEQ ID NO: 551119 - RNA, 19 nt, Artificial Sequence
  Description of Artificial Sequence: Synthetic oligonucleotide
aauagggguguuguucccc

SEQ ID NO: 551120 - RNA, 19 nt, Artificial Sequence
  Description of Artificial Sequence: Synthetic oligonucleotide
guugcuugggucaaaagcc

SEQ ID NO: 551121 - RNA, 19 nt, Artificial Sequence
  Description of Artificial Sequence: Synthetic oligonucleotide
cuguuuaagaccaguuugc

SEQ ID NO: 551122 - RNA, 19 nt, Artificial Sequence
  Description of Artificial Sequence: Synthetic oligonucleotide
gacuguggagaaucuaacg

SEQ ID NO: 551123 - RNA, 19 nt, Artificial Sequence
  Description of Artificial Sequence: Synthetic oligonucleotide
agcaaguacaaaucaaccu

SEQ ID NO: 551124 - RNA, 19 nt, Artificial Sequence
  Description of Artificial Sequence: Synthetic oligonucleotide
acggaaacaauauggcauc

SEQ ID NO: 551125 - RNA, 19 nt, Artificial Sequence
  Description of Artificial Sequence: Synthetic oligonucleotide
aguacaaaucaaccuaugu

SEQ ID NO: 551126 - RNA, 19 nt, Artificial Sequence
  Description of Artificial Sequence: Synthetic oligonucleotide
agcccuaaccuuuaauuuc

SEQ ID NO: 551127 - RNA, 19 nt, Artificial Sequence
  Description of Artificial Sequence: Synthetic oligonucleotide
ucuccguuugcauuaacca

SEQ ID NO: 551128 - RNA, 19 nt, Artificial Sequence
  Description of Artificial Sequence: Synthetic oligonucleotide
ugguguaggauuucggagc

SEQ ID NO: 551129 - RNA, 19 nt, Artificial Sequence
  Description of Artificial Sequence: Synthetic oligonucleotide
aaaguauccaaaggcaccu

SEQ ID NO: 551130 - RNA, 19 nt, Artificial Sequence
  Description of Artificial Sequence: Synthetic oligonucleotide
ugagugaccucaaaguauc

SEQ ID NO: 551131 - RNA, 19 nt, Artificial Sequence
  Description of Artificial Sequence: Synthetic oligonucleotide
gaaucuaacggcaauggga

SEQ ID NO: 551132 - RNA, 19 nt, Artificial Sequence
  Description of Artificial Sequence: Synthetic oligonucleotide
aucacggaggccauaaucg

SEQ ID NO: 551133 - RNA, 19 nt, Artificial Sequence
  Description of Artificial Sequence: Synthetic oligonucleotide
ucggcauuauauuugucca

SEQ ID NO: 551134 - RNA, 19 nt, Artificial Sequence
  Description of Artificial Sequence: Synthetic oligonucleotide
cauguuucuggcuagaaaa

SEQ ID NO: 551135 - RNA, 19 nt, Artificial Sequence
  Description of Artificial Sequence: Synthetic oligonucleotide
gaacuugcaauagacggcc

SEQ ID NO: 551136 - RNA, 19 nt, Artificial Sequence
  Description of Artificial Sequence: Synthetic oligonucleotide
acucgagcacgauagggac

SEQ ID NO: 551137 - RNA, 19 nt, Artificial Sequence
  Description of Artificial Sequence: Synthetic oligonucleotide
cuguggagaaucuaacggc

SEQ ID NO: 551138 - RNA, 19 nt, Artificial Sequence
  Description of Artificial Sequence: Synthetic oligonucleotide
ucggucacugaacaagaag

SEQ ID NO: 551139 - RNA, 19 nt, Artificial Sequence
  Description of Artificial Sequence: Synthetic oligonucleotide
auuagcguaaacauaauuu

SEQ ID NO: 551140 - RNA, 19 nt, Artificial Sequence
  Description of Artificial Sequence: Synthetic oligonucleotide
gguaagaucaaauggauua

SEQ ID NO: 551141 - RNA, 19 nt, Artificial Sequence
  Description of Artificial Sequence: Synthetic oligonucleotide
ugagccguagccauucaug

SEQ ID NO: 551142 - RNA, 19 nt, Artificial Sequence
  Description of Artificial Sequence: Synthetic oligonucleotide
cuugaaagucaugacuugg

SEQ ID NO: 551143 - RNA, 19 nt, Artificial Sequence
  Description of Artificial Sequence: Synthetic oligonucleotide
ugcauuaaccagcuugaac

SEQ ID NO: 551144 - RNA, 19 nt, Artificial Sequence
  Description of Artificial Sequence: Synthetic oligonucleotide
gaccucaaaguauccaaag

SEQ ID NO: 551145 - RNA, 19 nt, Artificial Sequence
  Description of Artificial Sequence: Synthetic oligonucleotide
uguuguuccccacaagauc

SEQ ID NO: 551146 - RNA, 19 nt, Artificial Sequence
  Description of Artificial Sequence: Synthetic oligonucleotide
ucuuguaauggaacuugca

SEQ ID NO: 551147 - RNA, 19 nt, Artificial Sequence
  Description of Artificial Sequence: Synthetic oligonucleotide
agugacguugucuucauua

SEQ ID NO: 551148 - RNA, 19 nt, Artificial Sequence
  Description of Artificial Sequence: Synthetic oligonucleotide
aggacggaaacaauauggc

SEQ ID NO: 551149 - RNA, 19 nt, Artificial Sequence
  Description of Artificial Sequence: Synthetic oligonucleotide
ucaaccuaugugaaaucac

SEQ ID NO: 551150 - RNA, 19 nt, Artificial Sequence
  Description of Artificial Sequence: Synthetic oligonucleotide
ugauugucgugcaugcaca

SEQ ID NO: 551151 - RNA, 19 nt, Artificial Sequence
  Description of Artificial Sequence: Synthetic oligonucleotide
aacgugugugagccguagc

SEQ ID NO: 551152 - RNA, 19 nt, Artificial Sequence
  Description of Artificial Sequence: Synthetic oligonucleotide
agaccaguuugccaacugg

SEQ ID NO: 551153 - RNA, 19 nt, Artificial Sequence
  Description of Artificial Sequence: Synthetic oligonucleotide
aaugggaguccucuuucca

SEQ ID NO: 551154 - RNA, 19 nt, Artificial Sequence
  Description of Artificial Sequence: Synthetic oligonucleotide
ugcauguaccacucucucg

SEQ ID NO: 551155 - RNA, 19 nt, Artificial Sequence
  Description of Artificial Sequence: Synthetic oligonucleotide
ccgauuaucacuuuaaaga

SEQ ID NO: 551156 - RNA, 19 nt, Artificial Sequence
  Description of Artificial Sequence: Synthetic oligonucleotide
agucuauguagauccaugu

SEQ ID NO: 551157 - RNA, 19 nt, Artificial Sequence
  Description of Artificial Sequence: Synthetic oligonucleotide
uucacagguaucuggagau

SEQ ID NO: 551158 - RNA, 19 nt, Artificial Sequence
  Description of Artificial Sequence: Synthetic oligonucleotide
uguagauccauguucuguu

SEQ ID NO: 551159 - RNA, 19 nt, Artificial Sequence
  Description of Artificial Sequence: Synthetic oligonucleotide
uccuauuggguucccgucc

SEQ ID NO: 551160 - RNA, 19 nt, Artificial Sequence
  Description of Artificial Sequence: Synthetic oligonucleotide
agcuugaacgugugugagc

SEQ ID NO: 551161 - RNA, 19 nt, Artificial Sequence
  Description of Artificial Sequence: Synthetic oligonucleotide
aaauuccgcaccugaguga

SEQ ID NO: 551162 - RNA, 19 nt, Artificial Sequence
  Description of Artificial Sequence: Synthetic oligonucleotide
ucacggaggccauaaucgg

SEQ ID NO: 551163 - RNA, 19 nt, Artificial Sequence
  Description of Artificial Sequence: Synthetic oligonucleotide
guaguuuggagcaccaccc

SEQ ID NO: 551164 - RNA, 19 nt, Artificial Sequence
  Description of Artificial Sequence: Synthetic oligonucleotide
ugcuauuauucacucugga

SEQ ID NO: 551165 - RNA, 19 nt, Artificial Sequence
  Description of Artificial Sequence: Synthetic oligonucleotide
gauugugugugugugugug

SEQ ID NO: 551166 - RNA, 19 nt, Artificial Sequence
  Description of Artificial Sequence: Synthetic oligonucleotide
ucgcucucugucaaaaugu

SEQ ID NO: 551167 - RNA, 19 nt, Artificial Sequence
  Description of Artificial Sequence: Synthetic oligonucleotide
gaaggacggaaacaauaug

SEQ ID NO: 551168 - RNA, 19 nt, Artificial Sequence
  Description of Artificial Sequence: Synthetic oligonucleotide
cugauugucgugcaugcac

SEQ ID NO: 551169 - RNA, 19 nt, Artificial Sequence
  Description of Artificial Sequence: Synthetic oligonucleotide
ccugguaaugucaugagug

SEQ ID NO: 551170 - RNA, 19 nt, Artificial Sequence
  Description of Artificial Sequence: Synthetic oligonucleotide
ugaguguccggauaagcaa

SEQ ID NO: 551171 - RNA, 19 nt, Artificial Sequence
  Description of Artificial Sequence: Synthetic oligonucleotide
ucgagcacgauagggacag

SEQ ID NO: 551172 - RNA, 19 nt, Artificial Sequence
  Description of Artificial Sequence: Synthetic oligonucleotide
aagucuauguagauccaug

SEQ ID NO: 551173 - RNA, 19 nt, Artificial Sequence
  Description of Artificial Sequence: Synthetic oligonucleotide
cuggcuauggaugaaggac

SEQ ID NO: 551174 - RNA, 19 nt, Artificial Sequence
  Description of Artificial Sequence: Synthetic oligonucleotide
gaggccaaaucuugguaag

SEQ ID NO: 551175 - RNA, 19 nt, Artificial Sequence
  Description of Artificial Sequence: Synthetic oligonucleotide
gaucacggaggccauaauc

SEQ ID NO: 551176 - RNA, 19 nt, Artificial Sequence
  Description of Artificial Sequence: Synthetic oligonucleotide
gacaucggguuucugcaag

SEQ ID NO: 551177 - RNA, 19 nt, Artificial Sequence
  Description of Artificial Sequence: Synthetic oligonucleotide
ucuaacggcaaugggaguc

SEQ ID NO: 551178 - RNA, 19 nt, Artificial Sequence
  Description of Artificial Sequence: Synthetic oligonucleotide
gaacugugucagcugagcc

SEQ ID NO: 551179 - RNA, 19 nt, Artificial Sequence
  Description of Artificial Sequence: Synthetic oligonucleotide
uaaucgggaucuuccuggg

SEQ ID NO: 551180 - RNA, 19 nt, Artificial Sequence
  Description of Artificial Sequence: Synthetic oligonucleotide
uggugaggccaaaucuugg

SEQ ID NO: 551181 - RNA, 19 nt, Artificial Sequence
  Description of Artificial Sequence: Synthetic oligonucleotide
acguugucuucauuagcac

SEQ ID NO: 551182 - RNA, 19 nt, Artificial Sequence
  Description of Artificial Sequence: Synthetic oligonucleotide
gguaacuacaggugcaccc

SEQ ID NO: 551183 - RNA, 19 nt, Artificial Sequence
  Description of Artificial Sequence: Synthetic oligonucleotide
aaucccucggucacugaac

SEQ ID NO: 551184 - RNA, 19 nt, Artificial Sequence
  Description of Artificial Sequence: Synthetic oligonucleotide
cuccguuugcauuaaccag

SEQ ID NO: 551185 - RNA, 19 nt, Artificial Sequence
  Description of Artificial Sequence: Synthetic oligonucleotide
caauauggcaucccugaug

SEQ ID NO: 551186 - RNA, 19 nt, Artificial Sequence
  Description of Artificial Sequence: Synthetic oligonucleotide
auuaacuggguuucuguuu

SEQ ID NO: 551187 - RNA, 19 nt, Artificial Sequence
  Description of Artificial Sequence: Synthetic oligonucleotide
ucuccuauuggguucccgu

SEQ ID NO: 551188 - RNA, 19 nt, Artificial Sequence
  Description of Artificial Sequence: Synthetic oligonucleotide
accuucguauagaaauucc

SEQ ID NO: 551189 - RNA, 19 nt, Artificial Sequence
  Description of Artificial Sequence: Synthetic oligonucleotide
guggacgucagugaaauuc

SEQ ID NO: 551190 - RNA, 19 nt, Artificial Sequence
  Description of Artificial Sequence: Synthetic oligonucleotide
aaaaggcgacccugaagca

SEQ ID NO: 551191 - RNA, 19 nt, Artificial Sequence
  Description of Artificial Sequence: Synthetic oligonucleotide
uuaucuccuauuggguucc

SEQ ID NO: 551192 - RNA, 19 nt, Artificial Sequence
  Description of Artificial Sequence: Synthetic oligonucleotide
gcauucuuaggcuucucgg

SEQ ID NO: 551193 - RNA, 19 nt, Artificial Sequence
  Description of Artificial Sequence: Synthetic oligonucleotide
ucuggcuauggaugaagga

SEQ ID NO: 551194 - RNA, 19 nt, Artificial Sequence
  Description of Artificial Sequence: Synthetic oligonucleotide
uugccuuacaguaccuggu

SEQ ID NO: 551195 - RNA, 19 nt, Artificial Sequence
  Description of Artificial Sequence: Synthetic oligonucleotide
agcauuaaaagcauugcua

SEQ ID NO: 551196 - RNA, 19 nt, Artificial Sequence
  Description of Artificial Sequence: Synthetic oligonucleotide
ccuucguauagaaauuccg

SEQ ID NO: 551197 - RNA, 19 nt, Artificial Sequence
  Description of Artificial Sequence: Synthetic oligonucleotide
ugaccucaaaguauccaaa

SEQ ID NO: 551198 - RNA, 19 nt, Artificial Sequence
  Description of Artificial Sequence: Synthetic oligonucleotide
uauagaaauuccgcaccug

SEQ ID NO: 551199 - RNA, 19 nt, Artificial Sequence
  Description of Artificial Sequence: Synthetic oligonucleotide
ucugucaaaaugugccauc

SEQ ID NO: 551200 - RNA, 19 nt, Artificial Sequence
  Description of Artificial Sequence: Synthetic oligonucleotide
guaguuggccacucgagca

SEQ ID NO: 551201 - RNA, 19 nt, Artificial Sequence
  Description of Artificial Sequence: Synthetic oligonucleotide
guaauuaacuggguuucug

SEQ ID NO: 551202 - RNA, 19 nt, Artificial Sequence
  Description of Artificial Sequence: Synthetic oligonucleotide
uccgccaugguguaggauu

SEQ ID NO: 551203 - RNA, 19 nt, Artificial Sequence
  Description of Artificial Sequence: Synthetic oligonucleotide
uauauauaucaggccauaa

SEQ ID NO: 551204 - RNA, 19 nt, Artificial Sequence
  Description of Artificial Sequence: Synthetic oligonucleotide
uguguguguguguguaaug

SEQ ID NO: 551205 - RNA, 19 nt, Artificial Sequence
  Description of Artificial Sequence: Synthetic oligonucleotide
uagacggccucuccguuug

SEQ ID NO: 551206 - RNA, 19 nt, Artificial Sequence
  Description of Artificial Sequence: Synthetic oligonucleotide
uauguagauccauguucug

SEQ ID NO: 551207 - RNA, 19 nt, Artificial Sequence
  Description of Artificial Sequence: Synthetic oligonucleotide
ucugauugugugugugugu

SEQ ID NO: 551208 - RNA, 19 nt, Artificial Sequence
  Description of Artificial Sequence: Synthetic oligonucleotide
aguuuggagcaccacccug

SEQ ID NO: 551209 - RNA, 19 nt, Artificial Sequence
  Description of Artificial Sequence: Synthetic oligonucleotide
uugugugugugugugugug

SEQ ID NO: 551210 - RNA, 19 nt, Artificial Sequence
  Description of Artificial Sequence: Synthetic oligonucleotide
auggaacuugcaauagacg

SEQ ID NO: 551211 - RNA, 19 nt, Artificial Sequence
  Description of Artificial Sequence: Synthetic oligonucleotide
uugaacgugugugagccgu

SEQ ID NO: 551212 - RNA, 19 nt, Artificial Sequence
  Description of Artificial Sequence: Synthetic oligonucleotide
acaucggguuucugcaagg

SEQ ID NO: 551213 - RNA, 19 nt, Artificial Sequence
  Description of Artificial Sequence: Synthetic oligonucleotide
gguaaugucaugagugacc

SEQ ID NO: 551214 - RNA, 19 nt, Artificial Sequence
  Description of Artificial Sequence: Synthetic oligonucleotide
uccuccgguggucaggaca

SEQ ID NO: 551215 - RNA, 19 nt, Artificial Sequence
  Description of Artificial Sequence: Synthetic oligonucleotide
gguauaagaggauaguccu

SEQ ID NO: 551216 - RNA, 19 nt, Artificial Sequence
  Description of Artificial Sequence: Synthetic oligonucleotide
aaguacaaaucaaccuaug

SEQ ID NO: 551217 - RNA, 19 nt, Artificial Sequence
  Description of Artificial Sequence: Synthetic oligonucleotide
ggugcgcugaagcuguugg

SEQ ID NO: 551218 - RNA, 19 nt, Artificial Sequence
  Description of Artificial Sequence: Synthetic oligonucleotide
cugauugugugugugugug

SEQ ID NO: 551219 - RNA, 19 nt, Artificial Sequence
  Description of Artificial Sequence: Synthetic oligonucleotide
cacggaggccauaaucggg

SEQ ID NO: 551220 - RNA, 19 nt, Artificial Sequence
  Description of Artificial Sequence: Synthetic oligonucleotide
uggguuucucuucuggcua

SEQ ID NO: 551221 - RNA, 19 nt, Artificial Sequence
  Description of Artificial Sequence: Synthetic oligonucleotide
gacgucagugaaauucuug

SEQ ID NO: 551222 - RNA, 19 nt, Artificial Sequence
  Description of Artificial Sequence: Synthetic oligonucleotide
aucugauugugugugugug

SEQ ID NO: 551223 - RNA, 19 nt, Artificial Sequence
  Description of Artificial Sequence: Synthetic oligonucleotide
aggauggauaguugccuug

SEQ ID NO: 551224 - RNA, 19 nt, Artificial Sequence
  Description of Artificial Sequence: Synthetic oligonucleotide
acugguauaagaggauagu

SEQ ID NO: 551225 - RNA, 19 nt, Artificial Sequence
  Description of Artificial Sequence: Synthetic oligonucleotide
agccucacagguuagcuuu

SEQ ID NO: 551226 - RNA, 19 nt, Artificial Sequence
  Description of Artificial Sequence: Synthetic oligonucleotide
uaguuggccacucgagcac

SEQ ID NO: 551227 - RNA, 19 nt, Artificial Sequence
  Description of Artificial Sequence: Synthetic oligonucleotide
auggauuaaaugggaaagu

SEQ ID NO: 551228 - RNA, 19 nt, Artificial Sequence
  Description of Artificial Sequence: Synthetic oligonucleotide
caaagcauguuucuggcua

SEQ ID NO: 551229 - RNA, 19 nt, Artificial Sequence
  Description of Artificial Sequence: Synthetic oligonucleotide
gacggaaacaauauggcau

SEQ ID NO: 551230 - RNA, 19 nt, Artificial Sequence
  Description of Artificial Sequence: Synthetic oligonucleotide
aguccucuuuccaauaugu

SEQ ID NO: 551231 - RNA, 19 nt, Artificial Sequence
  Description of Artificial Sequence: Synthetic oligonucleotide
gcaaguacaaaucaaccua

SEQ ID NO: 551232 - RNA, 19 nt, Artificial Sequence
  Description of Artificial Sequence: Synthetic oligonucleotide
aucgggaucuuccugggua

SEQ ID NO: 551233 - RNA, 19 nt, Artificial Sequence
  Description of Artificial Sequence: Synthetic oligonucleotide
caagugagagcccgcuugc

SEQ ID NO: 551234 - RNA, 19 nt, Artificial Sequence
  Description of Artificial Sequence: Synthetic oligonucleotide
auguagauccauguucugu

SEQ ID NO: 551235 - RNA, 19 nt, Artificial Sequence
  Description of Artificial Sequence: Synthetic oligonucleotide
uucaggugaguuugugggu

SEQ ID NO: 551236 - RNA, 19 nt, Artificial Sequence
  Description of Artificial Sequence: Synthetic oligonucleotide
gcguaaacauaauuucaag

SEQ ID NO: 551237 - RNA, 19 nt, Artificial Sequence
  Description of Artificial Sequence: Synthetic oligonucleotide
cacucucucgggaauucgc

SEQ ID NO: 551238 - RNA, 19 nt, Artificial Sequence
  Description of Artificial Sequence: Synthetic oligonucleotide
ugguaaugucaugagugac

SEQ ID NO: 551239 - RNA, 19 nt, Artificial Sequence
  Description of Artificial Sequence: Synthetic oligonucleotide
gguaguuggccacucgagc

SEQ ID NO: 551240 - RNA, 19 nt, Artificial Sequence
  Description of Artificial Sequence: Synthetic oligonucleotide
agugagagcccgcuugcgu

SEQ ID NO: 551241 - RNA, 19 nt, Artificial Sequence
  Description of Artificial Sequence: Synthetic oligonucleotide
uaaaagcauugcuauuauu

SEQ ID NO: 551242 - RNA, 19 nt, Artificial Sequence
  Description of Artificial Sequence: Synthetic oligonucleotide
cccgauuaucacuuuaaag

SEQ ID NO: 551243 - RNA, 19 nt, Artificial Sequence
  Description of Artificial Sequence: Synthetic oligonucleotide
uguguguguguguaaugua

SEQ ID NO: 551244 - RNA, 19 nt, Artificial Sequence
  Description of Artificial Sequence: Synthetic oligonucleotide
gaggccauaaucgggaucu

SEQ ID NO: 551245 - RNA, 19 nt, Artificial Sequence
  Description of Artificial Sequence: Synthetic oligonucleotide
agauccauguucuguuaaa

SEQ ID NO: 551246 - RNA, 19 nt, Artificial Sequence
  Description of Artificial Sequence: Synthetic oligonucleotide
auuaaccagcuugaacgug

SEQ ID NO: 551247 - RNA, 19 nt, Artificial Sequence
  Description of Artificial Sequence: Synthetic oligonucleotide
auucaugugccgaugucca

SEQ ID NO: 551248 - RNA, 19 nt, Artificial Sequence
  Description of Artificial Sequence: Synthetic oligonucleotide
uagguaugaaucgcauucu

SEQ ID NO: 551249 - RNA, 19 nt, Artificial Sequence
  Description of Artificial Sequence: Synthetic oligonucleotide
gugaccucaaaguauccaa

SEQ ID NO: 551250 - RNA, 19 nt, Artificial Sequence
  Description of Artificial Sequence: Synthetic oligonucleotide
cacgauagggacaguucac

SEQ ID NO: 551251 - RNA, 19 nt, Artificial Sequence
  Description of Artificial Sequence: Synthetic oligonucleotide
aagugagagcccgcuugcg

SEQ ID NO: 551252 - RNA, 19 nt, Artificial Sequence
  Description of Artificial Sequence: Synthetic oligonucleotide
auagggguguuguucccca

SEQ ID NO: 551253 - RNA, 19 nt, Artificial Sequence
  Description of Artificial Sequence: Synthetic oligonucleotide
gaagggguccucgggaccc

SEQ ID NO: 551254 - RNA, 19 nt, Artificial Sequence
  Description of Artificial Sequence: Synthetic oligonucleotide
uaguuuggagcaccacccu

SEQ ID NO: 551255 - RNA, 19 nt, Artificial Sequence
  Description of Artificial Sequence: Synthetic oligonucleotide
cuaacggcaaugggagucc

SEQ ID NO: 551256 - RNA, 19 nt, Artificial Sequence
  Description of Artificial Sequence: Synthetic oligonucleotide
guauaagaggauaguccug

SEQ ID NO: 551257 - RNA, 19 nt, Artificial Sequence
  Description of Artificial Sequence: Synthetic oligonucleotide
auguugcuugggucaaaag

SEQ ID NO: 551258 - RNA, 19 nt, Artificial Sequence
  Description of Artificial Sequence: Synthetic oligonucleotide
aaucgggaucuuccugggu

SEQ ID NO: 551259 - RNA, 19 nt, Artificial Sequence
  Description of Artificial Sequence: Synthetic oligonucleotide
auugugugugugugugugu

SEQ ID NO: 551260 - RNA, 19 nt, Artificial Sequence
  Description of Artificial Sequence: Synthetic oligonucleotide
gaaucccucggucacugaa

SEQ ID NO: 551261 - RNA, 19 nt, Artificial Sequence
  Description of Artificial Sequence: Synthetic oligonucleotide
augagugaccucaaaguau

SEQ ID NO: 551262 - RNA, 19 nt, Artificial Sequence
  Description of Artificial Sequence: Synthetic oligonucleotide
aguaauuaacuggguuucu

SEQ ID NO: 551263 - RNA, 19 nt, Artificial Sequence
  Description of Artificial Sequence: Synthetic oligonucleotide
ucaugugccgauguccauc

SEQ ID NO: 551264 - RNA, 19 nt, Artificial Sequence
  Description of Artificial Sequence: Synthetic oligonucleotide
gguaguaguuuggagcacc

SEQ ID NO: 551265 - RNA, 19 nt, Artificial Sequence
  Description of Artificial Sequence: Synthetic oligonucleotide
ugccuuacaguaccuggua

SEQ ID NO: 551266 - RNA, 19 nt, Artificial Sequence
  Description of Artificial Sequence: Synthetic oligonucleotide
ugauugugugugugugugu

SEQ ID NO: 551267 - RNA, 19 nt, Artificial Sequence
  Description of Artificial Sequence: Synthetic oligonucleotide
ucgggaauucgcucucugu

SEQ ID NO: 551268 - RNA, 19 nt, Artificial Sequence
  Description of Artificial Sequence: Synthetic oligonucleotide
cugagcccgacucuccagc

SEQ ID NO: 551269 - RNA, 19 nt, Artificial Sequence
  Description of Artificial Sequence: Synthetic oligonucleotide
cugaacagaagucuaugua

SEQ ID NO: 551270 - RNA, 19 nt, Artificial Sequence
  Description of Artificial Sequence: Synthetic oligonucleotide
ccauaagguaacaugaaaa

SEQ ID NO: 551271 - RNA, 19 nt, Artificial Sequence
  Description of Artificial Sequence: Synthetic oligonucleotide
ugugugugugugugugugu

SEQ ID NO: 551272 - RNA, 19 nt, Artificial Sequence
  Description of Artificial Sequence: Synthetic oligonucleotide
aguuggccacucgagcacg

SEQ ID NO: 551273 - RNA, 19 nt, Artificial Sequence
  Description of Artificial Sequence: Synthetic oligonucleotide
caaccuaugugaaaucacu

SEQ ID NO: 551274 - RNA, 19 nt, Artificial Sequence
  Description of Artificial Sequence: Synthetic oligonucleotide
acgauagggacaguucaca

SEQ ID NO: 551275 - RNA, 19 nt, Artificial Sequence
  Description of Artificial Sequence: Synthetic oligonucleotide
aagcccgauuaucacuuua

SEQ ID NO: 551276 - RNA, 19 nt, Artificial Sequence
  Description of Artificial Sequence: Synthetic oligonucleotide
gaacgugugugagccguag

SEQ ID NO: 551277 - RNA, 19 nt, Artificial Sequence
  Description of Artificial Sequence: Synthetic oligonucleotide
ugaagagaucacggaggcc

SEQ ID NO: 551278 - RNA, 19 nt, Artificial Sequence
  Description of Artificial Sequence: Synthetic oligonucleotide
caaaucaaccuaugugaaa

SEQ ID NO: 551279 - RNA, 19 nt, Artificial Sequence
  Description of Artificial Sequence: Synthetic oligonucleotide
acggcaaugggaguccucu

SEQ ID NO: 551280 - RNA, 19 nt, Artificial Sequence
  Description of Artificial Sequence: Synthetic oligonucleotide
gugaguguccggauaagca

SEQ ID NO: 551281 - RNA, 19 nt, Artificial Sequence
  Description of Artificial Sequence: Synthetic oligonucleotide
ggaaaccugauggagggac

SEQ ID NO: 551282 - RNA, 19 nt, Artificial Sequence
  Description of Artificial Sequence: Synthetic oligonucleotide
gugugugugugugugugug

SEQ ID NO: 551283 - RNA, 19 nt, Artificial Sequence
  Description of Artificial Sequence: Synthetic oligonucleotide
agguaucuggagauaguug

SEQ ID NO: 551284 - RNA, 19 nt, Artificial Sequence
  Description of Artificial Sequence: Synthetic oligonucleotide
cuugccgccucugcaacag

SEQ ID NO: 551285 - RNA, 19 nt, Artificial Sequence
  Description of Artificial Sequence: Synthetic oligonucleotide
uguguguguguguguguaa

SEQ ID NO: 551286 - RNA, 19 nt, Artificial Sequence
  Description of Artificial Sequence: Synthetic oligonucleotide
ggucaaaagccaucuguuc

SEQ ID NO: 551287 - RNA, 19 nt, Artificial Sequence
  Description of Artificial Sequence: Synthetic oligonucleotide
ucgggaucuuccuggguaa

SEQ ID NO: 551288 - RNA, 19 nt, Artificial Sequence
  Description of Artificial Sequence: Synthetic oligonucleotide
cuccuauuggguucccguc

SEQ ID NO: 551289 - RNA, 19 nt, Artificial Sequence
  Description of Artificial Sequence: Synthetic oligonucleotide
agguaugaaucgcauucuu

SEQ ID NO: 551290 - RNA, 19 nt, Artificial Sequence
  Description of Artificial Sequence: Synthetic oligonucleotide
acccugauugucgugcaug

SEQ ID NO: 551291 - RNA, 19 nt, Artificial Sequence
  Description of Artificial Sequence: Synthetic oligonucleotide
agucaugacuuggauguaa

SEQ ID NO: 551292 - RNA, 19 nt, Artificial Sequence
  Description of Artificial Sequence: Synthetic oligonucleotide
agccguagccauucaugug

SEQ ID NO: 551293 - RNA, 19 nt, Artificial Sequence
  Description of Artificial Sequence: Synthetic oligonucleotide
ggacggaaacaauauggca

SEQ ID NO: 551294 - RNA, 19 nt, Artificial Sequence
  Description of Artificial Sequence: Synthetic oligonucleotide
aguuugccaacugguauaa

SEQ ID NO: 551295 - RNA, 19 nt, Artificial Sequence
  Description of Artificial Sequence: Synthetic oligonucleotide
agcccgcuugcguauaggu

SEQ ID NO: 551296 - RNA, 19 nt, Artificial Sequence
  Description of Artificial Sequence: Synthetic oligonucleotide
agcaugagcuugugcuuca

SEQ ID NO: 551297 - RNA, 19 nt, Artificial Sequence
  Description of Artificial Sequence: Synthetic oligonucleotide
ugagugacguugucuucau

SEQ ID NO: 551298 - RNA, 19 nt, Artificial Sequence
  Description of Artificial Sequence: Synthetic oligonucleotide
caccuucguauagaaauuc

SEQ ID NO: 551299 - RNA, 19 nt, Artificial Sequence
  Description of Artificial Sequence: Synthetic oligonucleotide
cucauuuaacaccuucgua

SEQ ID NO: 551300 - RNA, 19 nt, Artificial Sequence
  Description of Artificial Sequence: Synthetic oligonucleotide
gagccguagccauucaugu

SEQ ID NO: 551301 - RNA, 19 nt, Artificial Sequence
  Description of Artificial Sequence: Synthetic oligonucleotide
aaaugauugcuaagcccua

SEQ ID NO: 551302 - RNA, 19 nt, Artificial Sequence
  Description of Artificial Sequence: Synthetic oligonucleotide
ccaagugagagcccgcuug

SEQ ID NO: 551303 - RNA, 19 nt, Artificial Sequence
  Description of Artificial Sequence: Synthetic oligonucleotide
guccagggguaacuacagg

SEQ ID NO: 551304 - RNA, 19 nt, Artificial Sequence
  Description of Artificial Sequence: Synthetic oligonucleotide
ccuaaccuuuaauuucccc

SEQ ID NO: 551305 - RNA, 19 nt, Artificial Sequence
  Description of Artificial Sequence: Synthetic oligonucleotide
aaggcgacccugaagcauu

SEQ ID NO: 551306 - RNA, 19 nt, Artificial Sequence
  Description of Artificial Sequence: Synthetic oligonucleotide
agggguguuguuccccaca

SEQ ID NO: 551307 - RNA, 19 nt, Artificial Sequence
  Description of Artificial Sequence: Synthetic oligonucleotide
caaaagccaucuguucaac

SEQ ID NO: 551308 - RNA, 19 nt, Artificial Sequence
  Description of Artificial Sequence: Synthetic oligonucleotide
auugucgugcaugcacaug

SEQ ID NO: 551309 - RNA, 19 nt, Artificial Sequence
  Description of Artificial Sequence: Synthetic oligonucleotide
gagaucacggaggccauaa

SEQ ID NO: 551310 - RNA, 19 nt, Artificial Sequence
  Description of Artificial Sequence: Synthetic oligonucleotide
gcacgauagggacaguuca

SEQ ID NO: 551311 - RNA, 19 nt, Artificial Sequence
  Description of Artificial Sequence: Synthetic oligonucleotide
gggaauucgcucucuguca

SEQ ID NO: 551312 - RNA, 19 nt, Artificial Sequence
  Description of Artificial Sequence: Synthetic oligonucleotide
ugugagccguagccauuca

SEQ ID NO: 551313 - RNA, 19 nt, Artificial Sequence
  Description of Artificial Sequence: Synthetic oligonucleotide
aucuaacggcaaugggagu

SEQ ID NO: 551314 - RNA, 19 nt, Artificial Sequence
  Description of Artificial Sequence: Synthetic oligonucleotide
aucuccuauuggguucccg

SEQ ID NO: 551315 - RNA, 19 nt, Artificial Sequence
  Description of Artificial Sequence: Synthetic oligonucleotide
gagugaccucaaaguaucc

SEQ ID NO: 551316 - RNA, 19 nt, Artificial Sequence
  Description of Artificial Sequence: Synthetic oligonucleotide
cauuaaccagcuugaacgu

SEQ ID NO: 551317 - RNA, 19 nt, Artificial Sequence
  Description of Artificial Sequence: Synthetic oligonucleotide
cagcauuaaaagcauugcu

SEQ ID NO: 551318 - RNA, 19 nt, Artificial Sequence
  Description of Artificial Sequence: Synthetic oligonucleotide
ucgggacccagcagucaug

SEQ ID NO: 551319 - RNA, 19 nt, Artificial Sequence
  Description of Artificial Sequence: Synthetic oligonucleotide
ucucggcauuauauuuguc

SEQ ID NO: 551320 - RNA, 19 nt, Artificial Sequence
  Description of Artificial Sequence: Synthetic oligonucleotide
caucccgcugguaguuggc

SEQ ID NO: 551321 - RNA, 19 nt, Artificial Sequence
  Description of Artificial Sequence: Synthetic oligonucleotide
uaguaguuuggagcaccac

SEQ ID NO: 551322 - RNA, 19 nt, Artificial Sequence
  Description of Artificial Sequence: Synthetic oligonucleotide
cccguagucaggguggacg

SEQ ID NO: 551323 - RNA, 19 nt, Artificial Sequence
  Description of Artificial Sequence: Synthetic oligonucleotide
gaaucgcauucuuaggcuu

SEQ ID NO: 551324 - RNA, 19 nt, Artificial Sequence
  Description of Artificial Sequence: Synthetic oligonucleotide
guguauuagcguaaacaua

SEQ ID NO: 551325 - RNA, 19 nt, Artificial Sequence
  Description of Artificial Sequence: Synthetic oligonucleotide
ucacucuggaagcccgauu

SEQ ID NO: 551326 - RNA, 19 nt, Artificial Sequence
  Description of Artificial Sequence: Synthetic oligonucleotide
gcguauagguaugaaucgc

SEQ ID NO: 551327 - RNA, 19 nt, Artificial Sequence
  Description of Artificial Sequence: Synthetic oligonucleotide
cucgggaauucgcucucug

SEQ ID NO: 551328 - RNA, 19 nt, Artificial Sequence
  Description of Artificial Sequence: Synthetic oligonucleotide
cuggcuagaaaaccuuucu

SEQ ID NO: 551329 - RNA, 19 nt, Artificial Sequence
  Description of Artificial Sequence: Synthetic oligonucleotide
ugaacgugugugagccgua

SEQ ID NO: 551330 - RNA, 19 nt, Artificial Sequence
  Description of Artificial Sequence: Synthetic oligonucleotide
guaguaguuuggagcacca

SEQ ID NO: 551331 - RNA, 19 nt, Artificial Sequence
  Description of Artificial Sequence: Synthetic oligonucleotide
gcgacccugaagcauuuug

SEQ ID NO: 551332 - RNA, 19 nt, Artificial Sequence
  Description of Artificial Sequence: Synthetic oligonucleotide
uucaugugccgauguccau

SEQ ID NO: 551333 - RNA, 19 nt, Artificial Sequence
  Description of Artificial Sequence: Synthetic oligonucleotide
cccugauugucgugcaugc

SEQ ID NO: 551334 - RNA, 19 nt, Artificial Sequence
  Description of Artificial Sequence: Synthetic oligonucleotide
uggccacucgagcacgaua

SEQ ID NO: 551335 - RNA, 19 nt, Artificial Sequence
  Description of Artificial Sequence: Synthetic oligonucleotide
guguguguguguguaaugu

SEQ ID NO: 551336 - RNA, 19 nt, Artificial Sequence
  Description of Artificial Sequence: Synthetic oligonucleotide
acauggggccaucccgcug

SEQ ID NO: 551337 - RNA, 19 nt, Artificial Sequence
  Description of Artificial Sequence: Synthetic oligonucleotide
uugcauuaaccagcuugaa

SEQ ID NO: 551338 - RNA, 19 nt, Artificial Sequence
  Description of Artificial Sequence: Synthetic oligonucleotide
gaccaguuugccaacuggu

SEQ ID NO: 551339 - RNA, 19 nt, Artificial Sequence
  Description of Artificial Sequence: Synthetic oligonucleotide
gaauucgcucucugucaaa

SEQ ID NO: 551340 - RNA, 19 nt, Artificial Sequence
  Description of Artificial Sequence: Synthetic oligonucleotide
ggaauucgcucucugucaa

SEQ ID NO: 551341 - RNA, 19 nt, Artificial Sequence
  Description of Artificial Sequence: Synthetic oligonucleotide
ggaucuuccuggguaaguc

SEQ ID NO: 551342 - RNA, 19 nt, Artificial Sequence
  Description of Artificial Sequence: Synthetic oligonucleotide
cugagccucacagguuagc

SEQ ID NO: 551343 - RNA, 19 nt, Artificial Sequence
  Description of Artificial Sequence: Synthetic oligonucleotide
agcccgauuaucacuuuaa

SEQ ID NO: 551344 - RNA, 19 nt, Artificial Sequence
  Description of Artificial Sequence: Synthetic oligonucleotide
gaagucuauguagauccau

SEQ ID NO: 551345 - RNA, 19 nt, Artificial Sequence
  Description of Artificial Sequence: Synthetic oligonucleotide
gacggaggcuccagaaguc

SEQ ID NO: 551346 - RNA, 19 nt, Artificial Sequence
  Description of Artificial Sequence: Synthetic oligonucleotide
gggucacgaacugugucag

SEQ ID NO: 551347 - RNA, 19 nt, Artificial Sequence
  Description of Artificial Sequence: Synthetic oligonucleotide
gucaugacuuggauguaaa

SEQ ID NO: 551348 - RNA, 19 nt, Artificial Sequence
  Description of Artificial Sequence: Synthetic oligonucleotide
acgaacugugucagcugag

SEQ ID NO: 551349 - RNA, 19 nt, Artificial Sequence
  Description of Artificial Sequence: Synthetic oligonucleotide
uggguaagucuugccgccu

SEQ ID NO: 551350 - RNA, 19 nt, Artificial Sequence
  Description of Artificial Sequence: Synthetic oligonucleotide
cucgagcacgauagggaca

SEQ ID NO: 551351 - RNA, 19 nt, Artificial Sequence
  Description of Artificial Sequence: Synthetic oligonucleotide
acaccuucguauagaaauu

SEQ ID NO: 551352 - RNA, 19 nt, Artificial Sequence
  Description of Artificial Sequence: Synthetic oligonucleotide
cccucggucacugaacaag

SEQ ID NO: 551353 - RNA, 19 nt, Artificial Sequence
  Description of Artificial Sequence: Synthetic oligonucleotide
ccacucgagcacgauaggg

SEQ ID NO: 551354 - RNA, 19 nt, Artificial Sequence
  Description of Artificial Sequence: Synthetic oligonucleotide
cagucaugauauuaaguuu

SEQ ID NO: 551355 - RNA, 19 nt, Artificial Sequence
  Description of Artificial Sequence: Synthetic oligonucleotide
aggccaaaucuugguaaga

SEQ ID NO: 551356 - RNA, 19 nt, Artificial Sequence
  Description of Artificial Sequence: Synthetic oligonucleotide
caugugccgauguccaucu

SEQ ID NO: 551357 - RNA, 19 nt, Artificial Sequence
  Description of Artificial Sequence: Synthetic oligonucleotide
gauugucgugcaugcacau

SEQ ID NO: 551358 - RNA, 19 nt, Artificial Sequence
  Description of Artificial Sequence: Synthetic oligonucleotide
gagcccgcuugcguauagg

SEQ ID NO: 551359 - RNA, 19 nt, Artificial Sequence
  Description of Artificial Sequence: Synthetic oligonucleotide
cauuaaaagcauugcuauu

SEQ ID NO: 551360 - RNA, 19 nt, Artificial Sequence
  Description of Artificial Sequence: Synthetic oligonucleotide
cguauagguaugaaucgca

SEQ ID NO: 551361 - RNA, 19 nt, Artificial Sequence
  Description of Artificial Sequence: Synthetic oligonucleotide
gguguaggauuucggagcu

SEQ ID NO: 551362 - RNA, 19 nt, Artificial Sequence
  Description of Artificial Sequence: Synthetic oligonucleotide
cauguugcuugggucaaaa

SEQ ID NO: 551363 - RNA, 19 nt, Artificial Sequence
  Description of Artificial Sequence: Synthetic oligonucleotide
agaucacggaggccauaau

SEQ ID NO: 551364 - RNA, 19 nt, Artificial Sequence
  Description of Artificial Sequence: Synthetic oligonucleotide
guguguguguguaauguau

SEQ ID NO: 551365 - RNA, 19 nt, Artificial Sequence
  Description of Artificial Sequence: Synthetic oligonucleotide
cgauagggacaguucacag

SEQ ID NO: 551366 - RNA, 19 nt, Artificial Sequence
  Description of Artificial Sequence: Synthetic oligonucleotide
guuugccaacugguauaag

SEQ ID NO: 551367 - RNA, 19 nt, Artificial Sequence
  Description of Artificial Sequence: Synthetic oligonucleotide
gguaugaaucgcauucuua

SEQ ID NO: 551368 - RNA, 19 nt, Artificial Sequence
  Description of Artificial Sequence: Synthetic oligonucleotide
ggccccguagucagggugg

SEQ ID NO: 551369 - RNA, 19 nt, Artificial Sequence
  Description of Artificial Sequence: Synthetic oligonucleotide
ggacggaggcuccagaagu

SEQ ID NO: 551370 - RNA, 19 nt, Artificial Sequence
  Description of Artificial Sequence: Synthetic oligonucleotide
uaacggcaaugggaguccu

SEQ ID NO: 551371 - RNA, 19 nt, Artificial Sequence
  Description of Artificial Sequence: Synthetic oligonucleotide
gugugugugugugugugua

SEQ ID NO: 551372 - RNA, 19 nt, Artificial Sequence
  Description of Artificial Sequence: Synthetic oligonucleotide
cuugagcaauggcauugaa

SEQ ID NO: 551373 - RNA, 19 nt, Artificial Sequence
  Description of Artificial Sequence: Synthetic oligonucleotide
ucccucggucacugaacaa

SEQ ID NO: 551374 - RNA, 19 nt, Artificial Sequence
  Description of Artificial Sequence: Synthetic oligonucleotide
auauggcaucccugaugaa

SEQ ID NO: 551375 - RNA, 19 nt, Artificial Sequence
  Description of Artificial Sequence: Synthetic oligonucleotide
gcgacuguggagaaucuaa

SEQ ID NO: 551376 - RNA, 19 nt, Artificial Sequence
  Description of Artificial Sequence: Synthetic oligonucleotide
ccggcuguccgccauggug

SEQ ID NO: 551377 - RNA, 19 nt, Artificial Sequence
  Description of Artificial Sequence: Synthetic oligonucleotide
gccacucgagcacgauagg

SEQ ID NO: 551378 - RNA, 19 nt, Artificial Sequence
  Description of Artificial Sequence: Synthetic oligonucleotide
caucggguuucugcaagga

SEQ ID NO: 551379 - RNA, 19 nt, Artificial Sequence
  Description of Artificial Sequence: Synthetic oligonucleotide
auuccgcaccugagugacg

SEQ ID NO: 551380 - RNA, 19 nt, Artificial Sequence
  Description of Artificial Sequence: Synthetic oligonucleotide
gggccccguagucagggug

SEQ ID NO: 551381 - RNA, 19 nt, Artificial Sequence
  Description of Artificial Sequence: Synthetic oligonucleotide
agcgacuguggagaaucua

SEQ ID NO: 551382 - RNA, 19 nt, Artificial Sequence
  Description of Artificial Sequence: Synthetic oligonucleotide
gggguguuguuccccacaa

SEQ ID NO: 551383 - RNA, 19 nt, Artificial Sequence
  Description of Artificial Sequence: Synthetic oligonucleotide
gcggugaguguccggauaa

SEQ ID NO: 551384 - RNA, 19 nt, Artificial Sequence
  Description of Artificial Sequence: Synthetic oligonucleotide
cacuguguauuagcguaaa

SEQ ID NO: 551385 - RNA, 19 nt, Artificial Sequence
  Description of Artificial Sequence: Synthetic oligonucleotide
agaucccaguuaccaucuu

SEQ ID NO: 551386 - RNA, 19 nt, Artificial Sequence
  Description of Artificial Sequence: Synthetic oligonucleotide
aagggguccucgggaccca

SEQ ID NO: 551387 - RNA, 19 nt, Artificial Sequence
  Description of Artificial Sequence: Synthetic oligonucleotide
uccagcgacuguggagaau

SEQ ID NO: 551388 - RNA, 19 nt, Artificial Sequence
  Description of Artificial Sequence: Synthetic oligonucleotide
caccacccugauugucgug

SEQ ID NO: 551389 - RNA, 19 nt, Artificial Sequence
  Description of Artificial Sequence: Synthetic oligonucleotide
guguguguguguguguaau

SEQ ID NO: 551390 - RNA, 19 nt, Artificial Sequence
  Description of Artificial Sequence: Synthetic oligonucleotide
cagguaucuggagauaguu

SEQ ID NO: 551391 - RNA, 19 nt, Artificial Sequence
  Description of Artificial Sequence: Synthetic oligonucleotide
ccgcuguuccuuccagugc

SEQ ID NO: 551392 - RNA, 19 nt, Artificial Sequence
  Description of Artificial Sequence: Synthetic oligonucleotide
gcccgauuaucacuuuaaa

SEQ ID NO: 551393 - RNA, 19 nt, Artificial Sequence
  Description of Artificial Sequence: Synthetic oligonucleotide
guauuagcguaaacauaau

SEQ ID NO: 551394 - RNA, 19 nt, Artificial Sequence
  Description of Artificial Sequence: Synthetic oligonucleotide
cccgcuugcguauagguau

SEQ ID NO: 551395 - RNA, 19 nt, Artificial Sequence
  Description of Artificial Sequence: Synthetic oligonucleotide
gcccuggucggucuuguaa

SEQ ID NO: 551396 - RNA, 19 nt, Artificial Sequence
  Description of Artificial Sequence: Synthetic oligonucleotide
ccacucucucgggaauucg

SEQ ID NO: 551397 - RNA, 19 nt, Artificial Sequence
  Description of Artificial Sequence: Synthetic oligonucleotide
agagaucacggaggccaua

SEQ ID NO: 551398 - RNA, 19 nt, Artificial Sequence
  Description of Artificial Sequence: Synthetic oligonucleotide
caggauggauaguugccuu

SEQ ID NO: 551399 - RNA, 19 nt, Artificial Sequence
  Description of Artificial Sequence: Synthetic oligonucleotide
ggccaaaucuugguaagau

SEQ ID NO: 551400 - RNA, 19 nt, Artificial Sequence
  Description of Artificial Sequence: Synthetic oligonucleotide
ccgcuugcguauagguaug

SEQ ID NO: 551401 - RNA, 19 nt, Artificial Sequence
  Description of Artificial Sequence: Synthetic oligonucleotide
cagaccaugucaggguccu

SEQ ID NO: 551402 - RNA, 19 nt, Artificial Sequence
  Description of Artificial Sequence: Synthetic oligonucleotide
cucgggacccagcagucau

SEQ ID NO: 551403 - RNA, 19 nt, Artificial Sequence
  Description of Artificial Sequence: Synthetic oligonucleotide
ccgcaccugagugacguug

SEQ ID NO: 551404 - RNA, 19 nt, Artificial Sequence
  Description of Artificial Sequence: Synthetic oligonucleotide
ggguggacgucagugaaau

SEQ ID NO: 551405 - RNA, 19 nt, Artificial Sequence
  Description of Artificial Sequence: Synthetic oligonucleotide
gaagcccgauuaucacuuu

SEQ ID NO: 551406 - RNA, 19 nt, Artificial Sequence
  Description of Artificial Sequence: Synthetic oligonucleotide
uccgcaccugagugacguu

SEQ ID NO: 551407 - RNA, 19 nt, Artificial Sequence
  Description of Artificial Sequence: Synthetic oligonucleotide
caacuucagcaaaguaauu

SEQ ID NO: 551408 - RNA, 19 nt, Artificial Sequence
  Description of Artificial Sequence: Synthetic oligonucleotide
ggcaucccugaugaagaaa

SEQ ID NO: 551409 - RNA, 19 nt, Artificial Sequence
  Description of Artificial Sequence: Synthetic oligonucleotide
ggcggugaguguccggaua

SEQ ID NO: 551410 - RNA, 19 nt, Artificial Sequence
  Description of Artificial Sequence: Synthetic oligonucleotide
gcuauggaugaaggacgga

SEQ ID NO: 551411 - RNA, 19 nt, Artificial Sequence
  Description of Artificial Sequence: Synthetic oligonucleotide
ggaaucccucggucacuga

SEQ ID NO: 551412 - RNA, 19 nt, Artificial Sequence
  Description of Artificial Sequence: Synthetic oligonucleotide
cacauggggccaucccgcu

SEQ ID NO: 551413 - RNA, 19 nt, Artificial Sequence
  Description of Artificial Sequence: Synthetic oligonucleotide
ccguuugcauuaaccagcu

SEQ ID NO: 551414 - RNA, 19 nt, Artificial Sequence
  Description of Artificial Sequence: Synthetic oligonucleotide
gcuugcguauagguaugaa

SEQ ID NO: 551415 - RNA, 19 nt, Artificial Sequence
  Description of Artificial Sequence: Synthetic oligonucleotide
ccuauuggguucccguccu

SEQ ID NO: 551416 - RNA, 19 nt, Artificial Sequence
  Description of Artificial Sequence: Synthetic oligonucleotide
ggguuucugcaaggaccgc

SEQ ID NO: 551417 - RNA, 19 nt, Artificial Sequence
  Description of Artificial Sequence: Synthetic oligonucleotide
gagugacguugucuucauu

SEQ ID NO: 551418 - RNA, 19 nt, Artificial Sequence
  Description of Artificial Sequence: Synthetic oligonucleotide
ggagcaccacccugauugu

SEQ ID NO: 551419 - RNA, 19 nt, Artificial Sequence
  Description of Artificial Sequence: Synthetic oligonucleotide
gcaaggaccgcuguuccuu

SEQ ID NO: 551420 - RNA, 19 nt, Artificial Sequence
  Description of Artificial Sequence: Synthetic oligonucleotide
gcuguccgccaugguguag

SEQ ID NO: 551421 - RNA, 19 nt, Artificial Sequence
  Description of Artificial Sequence: Synthetic oligonucleotide
gcgguggcggugagugucc

SEQ ID NO: 551422 - RNA, 19 nt, Artificial Sequence
  Description of Artificial Sequence: Synthetic oligonucleotide
guccuccgguggucaggac

SEQ ID NO: 551423 - RNA, 19 nt, Artificial Sequence
  Description of Artificial Sequence: Synthetic oligonucleotide
cagcgacuguggagaaucu

SEQ ID NO: 551424 - RNA, 19 nt, Artificial Sequence
  Description of Artificial Sequence: Synthetic oligonucleotide
gcagguccagggguaacua

SEQ ID NO: 551425 - RNA, 19 nt, Artificial Sequence
  Description of Artificial Sequence: Synthetic oligonucleotide
ccugauugucgugcaugca

SEQ ID NO: 551426 - RNA, 19 nt, Artificial Sequence
  Description of Artificial Sequence: Synthetic oligonucleotide
ccguagucaggguggacgu

SEQ ID NO: 551427 - RNA, 19 nt, Artificial Sequence
  Description of Artificial Sequence: Synthetic oligonucleotide
cccuggucggucuuguaau

SEQ ID NO: 551428 - RNA, 19 nt, Artificial Sequence
  Description of Artificial Sequence: Synthetic oligonucleotide
cuccgguggucaggacauc

SEQ ID NO: 551429 - RNA, 19 nt, Artificial Sequence
  Description of Artificial Sequence: Synthetic oligonucleotide
ccgccucugcaacaggcaa

SEQ ID NO: 551430 - RNA, 19 nt, Artificial Sequence
  Description of Artificial Sequence: Synthetic oligonucleotide
cccguccuccgguggucag

SEQ ID NO: 551431 - RNA, 19 nt, Artificial Sequence
  Description of Artificial Sequence: Synthetic oligonucleotide
cggugaguguccggauaag

SEQ ID NO: 551432 - RNA, 19 nt, Artificial Sequence
  Description of Artificial Sequence: Synthetic oligonucleotide
cgcugaagcuguuggggua

SEQ ID NO: 551433 - RNA, 19 nt, Artificial Sequence
  Description of Artificial Sequence: Synthetic oligonucleotide
gcauguugcuugggucaaa

SEQ ID NO: 551434 - RNA, 19 nt, Artificial Sequence
  Description of Artificial Sequence: Synthetic oligonucleotide
ggacgucagugaaauucuu

SEQ ID NO: 551435 - RNA, 19 nt, Artificial Sequence
  Description of Artificial Sequence: Synthetic oligonucleotide
gguggacgucagugaaauu

SEQ ID NO: 551436 - RNA, 19 nt, Artificial Sequence
  Description of Artificial Sequence: Synthetic oligonucleotide
gccaagugagagcccgcuu

SEQ ID NO: 551437 - RNA, 19 nt, Artificial Sequence
  Description of Artificial Sequence: Synthetic oligonucleotide
ccgccaugguguaggauuu

SEQ ID NO: 551438 - RNA, 19 nt, Artificial Sequence
  Description of Artificial Sequence: Synthetic oligonucleotide
ccccguagucaggguggac

SEQ ID NO: 551439 - RNA, 19 nt, Artificial Sequence
  Description of Artificial Sequence: Synthetic oligonucleotide
cgcuugcguauagguauga

SEQ ID NO: 551440 - RNA, 19 nt, Artificial Sequence
  Description of Artificial Sequence: Synthetic oligonucleotide
ggcgacccugaagcauuuu

SEQ ID NO: 551441 - RNA, 19 nt, Artificial Sequence
  Description of Artificial Sequence: Synthetic oligonucleotide
cguuugcauuaaccagcuu

SEQ ID NO: 551442 - RNA, 19 nt, Artificial Sequence
  Description of Artificial Sequence: Synthetic oligonucleotide
ccaggcgguggcggugagu

SEQ ID NO: 551443 - RNA, 19 nt, Artificial Sequence
  Description of Artificial Sequence: Synthetic oligonucleotide
cgggccccguagucagggu

SEQ ID NO: 551444 - RNA, 19 nt, Artificial Sequence
  Description of Artificial Sequence: Synthetic oligonucleotide
cgagcacgauagggacagu

SEQ ID NO: 551445 - RNA, 19 nt, Artificial Sequence
  Description of Artificial Sequence: Synthetic oligonucleotide
aaaaggucaaagucgaagg

SEQ ID NO: 551446 - RNA, 19 nt, Artificial Sequence
  Description of Artificial Sequence: Synthetic oligonucleotide
aaguucaaagacuugauca

SEQ ID NO: 551447 - RNA, 19 nt, Artificial Sequence
  Description of Artificial Sequence: Synthetic oligonucleotide
uaaaaugcgggacaaacag

SEQ ID NO: 551448 - RNA, 19 nt, Artificial Sequence
  Description of Artificial Sequence: Synthetic oligonucleotide
aaaugcgggacaaacagcc

SEQ ID NO: 551449 - RNA, 19 nt, Artificial Sequence
  Description of Artificial Sequence: Synthetic oligonucleotide
acaacuacaagccagcuug

SEQ ID NO: 551450 - RNA, 19 nt, Artificial Sequence
  Description of Artificial Sequence: Synthetic oligonucleotide
aaaaguuuaaaaugcggga

SEQ ID NO: 551451 - RNA, 19 nt, Artificial Sequence
  Description of Artificial Sequence: Synthetic oligonucleotide
aaugccagggccuucugac

SEQ ID NO: 551452 - RNA, 19 nt, Artificial Sequence
  Description of Artificial Sequence: Synthetic oligonucleotide
cuuccuauggacuaguccc

SEQ ID NO: 551453 - RNA, 19 nt, Artificial Sequence
  Description of Artificial Sequence: Synthetic oligonucleotide
aagaauggcacccugggcu

SEQ ID NO: 551454 - RNA, 19 nt, Artificial Sequence
  Description of Artificial Sequence: Synthetic oligonucleotide
auuucgcucgcgcagagcc

SEQ ID NO: 551455 - RNA, 19 nt, Artificial Sequence
  Description of Artificial Sequence: Synthetic oligonucleotide
guacacucaauacacaagg

SEQ ID NO: 551456 - RNA, 19 nt, Artificial Sequence
  Description of Artificial Sequence: Synthetic oligonucleotide
uggacuagucccuagagcc

SEQ ID NO: 551457 - RNA, 19 nt, Artificial Sequence
  Description of Artificial Sequence: Synthetic oligonucleotide
ugaacugcauggaagacug

SEQ ID NO: 551458 - RNA, 19 nt, Artificial Sequence
  Description of Artificial Sequence: Synthetic oligonucleotide
acuauugucgcuuucgcug

SEQ ID NO: 551459 - RNA, 19 nt, Artificial Sequence
  Description of Artificial Sequence: Synthetic oligonucleotide
cagcucauuacaaacacgg

SEQ ID NO: 551460 - RNA, 19 nt, Artificial Sequence
  Description of Artificial Sequence: Synthetic oligonucleotide
auccaauaccuuuugcacc

SEQ ID NO: 551461 - RNA, 19 nt, Artificial Sequence
  Description of Artificial Sequence: Synthetic oligonucleotide
uuuaaaaugcgggacaaac

SEQ ID NO: 551462 - RNA, 19 nt, Artificial Sequence
  Description of Artificial Sequence: Synthetic oligonucleotide
ugaccuuccggccagagga

SEQ ID NO: 551463 - RNA, 19 nt, Artificial Sequence
  Description of Artificial Sequence: Synthetic oligonucleotide
aguucaaagacuugaucag

SEQ ID NO: 551464 - RNA, 19 nt, Artificial Sequence
  Description of Artificial Sequence: Synthetic oligonucleotide
aguauugucggccugucug

SEQ ID NO: 551465 - RNA, 19 nt, Artificial Sequence
  Description of Artificial Sequence: Synthetic oligonucleotide
uccucgaucagguugacga

SEQ ID NO: 551466 - RNA, 19 nt, Artificial Sequence
  Description of Artificial Sequence: Synthetic oligonucleotide
acuacaagccagcuugggc

SEQ ID NO: 551467 - RNA, 19 nt, Artificial Sequence
  Description of Artificial Sequence: Synthetic oligonucleotide
uuaaaaugcgggacaaaca

SEQ ID NO: 551468 - RNA, 19 nt, Artificial Sequence
  Description of Artificial Sequence: Synthetic oligonucleotide
uauccaauaccuuuugcac

SEQ ID NO: 551469 - RNA, 19 nt, Artificial Sequence
  Description of Artificial Sequence: Synthetic oligonucleotide
acaaacacggcucucuuug

SEQ ID NO: 551470 - RNA, 19 nt, Artificial Sequence
  Description of Artificial Sequence: Synthetic oligonucleotide
cagaguacacucaauacac

SEQ ID NO: 551471 - RNA, 19 nt, Artificial Sequence
  Description of Artificial Sequence: Synthetic oligonucleotide
aacugagaugggugggugc

SEQ ID NO: 551472 - RNA, 19 nt, Artificial Sequence
  Description of Artificial Sequence: Synthetic oligonucleotide
aaagacuugaucagcaaga

SEQ ID NO: 551473 - RNA, 19 nt, Artificial Sequence
  Description of Artificial Sequence: Synthetic oligonucleotide
aacacugacaacaacugga

SEQ ID NO: 551474 - RNA, 19 nt, Artificial Sequence
  Description of Artificial Sequence: Synthetic oligonucleotide
gucacugaagcuuagccug

SEQ ID NO: 551475 - RNA, 19 nt, Artificial Sequence
  Description of Artificial Sequence: Synthetic oligonucleotide
agugucaugagcugguuca

SEQ ID NO: 551476 - RNA, 19 nt, Artificial Sequence
  Description of Artificial Sequence: Synthetic oligonucleotide
agcacagggacucacgaag

SEQ ID NO: 551477 - RNA, 19 nt, Artificial Sequence
  Description of Artificial Sequence: Synthetic oligonucleotide
uauggacuagucccuagag

SEQ ID NO: 551478 - RNA, 19 nt, Artificial Sequence
  Description of Artificial Sequence: Synthetic oligonucleotide
ugaagcuuagccuggacuc

SEQ ID NO: 551479 - RNA, 19 nt, Artificial Sequence
  Description of Artificial Sequence: Synthetic oligonucleotide
ugaucacgcugauagaccc

SEQ ID NO: 551480 - RNA, 19 nt, Artificial Sequence
  Description of Artificial Sequence: Synthetic oligonucleotide
uggguugccuugauggugg

SEQ ID NO: 551481 - RNA, 19 nt, Artificial Sequence
  Description of Artificial Sequence: Synthetic oligonucleotide
uugguuggggcacaaacac

SEQ ID NO: 551482 - RNA, 19 nt, Artificial Sequence
  Description of Artificial Sequence: Synthetic oligonucleotide
auaauuucacaaguuaaca

SEQ ID NO: 551483 - RNA, 19 nt, Artificial Sequence
  Description of Artificial Sequence: Synthetic oligonucleotide
guuggugacguugaagugg

SEQ ID NO: 551484 - RNA, 19 nt, Artificial Sequence
  Description of Artificial Sequence: Synthetic oligonucleotide
ugguggagaguauugucgg

SEQ ID NO: 551485 - RNA, 19 nt, Artificial Sequence
  Description of Artificial Sequence: Synthetic oligonucleotide
cauauuuggcaaaagcuca

SEQ ID NO: 551486 - RNA, 19 nt, Artificial Sequence
  Description of Artificial Sequence: Synthetic oligonucleotide
aagccuuagaggcuggggu

SEQ ID NO: 551487 - RNA, 19 nt, Artificial Sequence
  Description of Artificial Sequence: Synthetic oligonucleotide
gguaagggaagccuuagag

SEQ ID NO: 551488 - RNA, 19 nt, Artificial Sequence
  Description of Artificial Sequence: Synthetic oligonucleotide
auaaaacuccuccauaauu

SEQ ID NO: 551489 - RNA, 19 nt, Artificial Sequence
  Description of Artificial Sequence: Synthetic oligonucleotide
cugaugaugagucauccuc

SEQ ID NO: 551490 - RNA, 19 nt, Artificial Sequence
  Description of Artificial Sequence: Synthetic oligonucleotide
agguaacugagaugggugg

SEQ ID NO: 551491 - RNA, 19 nt, Artificial Sequence
  Description of Artificial Sequence: Synthetic oligonucleotide
ugcagcucauuacaaacac

SEQ ID NO: 551492 - RNA, 19 nt, Artificial Sequence
  Description of Artificial Sequence: Synthetic oligonucleotide
caaagacuugaucagcaag

SEQ ID NO: 551493 - RNA, 19 nt, Artificial Sequence
  Description of Artificial Sequence: Synthetic oligonucleotide
auuguaguguucacuggcc

SEQ ID NO: 551494 - RNA, 19 nt, Artificial Sequence
  Description of Artificial Sequence: Synthetic oligonucleotide
ugggaucuagagaagagau

SEQ ID NO: 551495 - RNA, 19 nt, Artificial Sequence
  Description of Artificial Sequence: Synthetic oligonucleotide
agggacagguauccaauac

SEQ ID NO: 551496 - RNA, 19 nt, Artificial Sequence
  Description of Artificial Sequence: Synthetic oligonucleotide
agagacaacuacaagccag

SEQ ID NO: 551497 - RNA, 19 nt, Artificial Sequence
  Description of Artificial Sequence: Synthetic oligonucleotide
uuucccugggguaagggaa

SEQ ID NO: 551498 - RNA, 19 nt, Artificial Sequence
  Description of Artificial Sequence: Synthetic oligonucleotide
auuuggcaaaagcucaugu

SEQ ID NO: 551499 - RNA, 19 nt, Artificial Sequence
  Description of Artificial Sequence: Synthetic oligonucleotide
acagguauccaauaccuuu

SEQ ID NO: 551500 - RNA, 19 nt, Artificial Sequence
  Description of Artificial Sequence: Synthetic oligonucleotide
acugcaagaggaagaaugg

SEQ ID NO: 551501 - RNA, 19 nt, Artificial Sequence
  Description of Artificial Sequence: Synthetic oligonucleotide
uguaguguucacuggccug

SEQ ID NO: 551502 - RNA, 19 nt, Artificial Sequence
  Description of Artificial Sequence: Synthetic oligonucleotide
agcacuauugucgcuuucg

SEQ ID NO: 551503 - RNA, 19 nt, Artificial Sequence
  Description of Artificial Sequence: Synthetic oligonucleotide
ucacugaagcuuagccugg

SEQ ID NO: 551504 - RNA, 19 nt, Artificial Sequence
  Description of Artificial Sequence: Synthetic oligonucleotide
uuuacagggcaaaggucca

SEQ ID NO: 551505 - RNA, 19 nt, Artificial Sequence
  Description of Artificial Sequence: Synthetic oligonucleotide
guauugucggccugucugg

SEQ ID NO: 551506 - RNA, 19 nt, Artificial Sequence
  Description of Artificial Sequence: Synthetic oligonucleotide
ucuauaguggcggccgggg

SEQ ID NO: 551507 - RNA, 19 nt, Artificial Sequence
  Description of Artificial Sequence: Synthetic oligonucleotide
accguccuaucauauuugg

SEQ ID NO: 551508 - RNA, 19 nt, Artificial Sequence
  Description of Artificial Sequence: Synthetic oligonucleotide
aaugcgggacaaacagccc

SEQ ID NO: 551509 - RNA, 19 nt, Artificial Sequence
  Description of Artificial Sequence: Synthetic oligonucleotide
guaguguucacuggccugg

SEQ ID NO: 551510 - RNA, 19 nt, Artificial Sequence
  Description of Artificial Sequence: Synthetic oligonucleotide
ugaggcugcaguacgccug

SEQ ID NO: 551511 - RNA, 19 nt, Artificial Sequence
  Description of Artificial Sequence: Synthetic oligonucleotide
acuugaucagcaagagagc

SEQ ID NO: 551512 - RNA, 19 nt, Artificial Sequence
  Description of Artificial Sequence: Synthetic oligonucleotide
gacgugucuauuccuggag

SEQ ID NO: 551513 - RNA, 19 nt, Artificial Sequence
  Description of Artificial Sequence: Synthetic oligonucleotide
agagagaggccugugaacu

SEQ ID NO: 551514 - RNA, 19 nt, Artificial Sequence
  Description of Artificial Sequence: Synthetic oligonucleotide
gcccugaucacgcugauag

SEQ ID NO: 551515 - RNA, 19 nt, Artificial Sequence
  Description of Artificial Sequence: Synthetic oligonucleotide
aacuacaagccagcuuggg

SEQ ID NO: 551516 - RNA, 19 nt, Artificial Sequence
  Description of Artificial Sequence: Synthetic oligonucleotide
gagguaacugagaugggug

SEQ ID NO: 551517 - RNA, 19 nt, Artificial Sequence
  Description of Artificial Sequence: Synthetic oligonucleotide
aggagucagcacuauuguc

SEQ ID NO: 551518 - RNA, 19 nt, Artificial Sequence
  Description of Artificial Sequence: Synthetic oligonucleotide
gccuggguugccuugaugg

SEQ ID NO: 551519 - RNA, 19 nt, Artificial Sequence
  Description of Artificial Sequence: Synthetic oligonucleotide
aguacacucaauacacaag

SEQ ID NO: 551520 - RNA, 19 nt, Artificial Sequence
  Description of Artificial Sequence: Synthetic oligonucleotide
auggcuagcccugaucacg

SEQ ID NO: 551521 - RNA, 19 nt, Artificial Sequence
  Description of Artificial Sequence: Synthetic oligonucleotide
gcacauuccauguggaugc

SEQ ID NO: 551522 - RNA, 19 nt, Artificial Sequence
  Description of Artificial Sequence: Synthetic oligonucleotide
uucgcugucacugaagcuu

SEQ ID NO: 551523 - RNA, 19 nt, Artificial Sequence
  Description of Artificial Sequence: Synthetic oligonucleotide
aaacaccuugguuggggca

SEQ ID NO: 551524 - RNA, 19 nt, Artificial Sequence
  Description of Artificial Sequence: Synthetic oligonucleotide
agccuuagaggcugggguc

SEQ ID NO: 551525 - RNA, 19 nt, Artificial Sequence
  Description of Artificial Sequence: Synthetic oligonucleotide
aguuuacagggcaaagguc

SEQ ID NO: 551526 - RNA, 19 nt, Artificial Sequence
  Description of Artificial Sequence: Synthetic oligonucleotide
agccuugucguagguagcc

SEQ ID NO: 551527 - RNA, 19 nt, Artificial Sequence
  Description of Artificial Sequence: Synthetic oligonucleotide
cugacaacaacuggaguug

SEQ ID NO: 551528 - RNA, 19 nt, Artificial Sequence
  Description of Artificial Sequence: Synthetic oligonucleotide
caccagggcaccaugguug

SEQ ID NO: 551529 - RNA, 19 nt, Artificial Sequence
  Description of Artificial Sequence: Synthetic oligonucleotide
cuuguggacccaagacucg

SEQ ID NO: 551530 - RNA, 19 nt, Artificial Sequence
  Description of Artificial Sequence: Synthetic oligonucleotide
auggcucuauaguggcggc

SEQ ID NO: 551531 - RNA, 19 nt, Artificial Sequence
  Description of Artificial Sequence: Synthetic oligonucleotide
acccuugagucuaggaggc

SEQ ID NO: 551532 - RNA, 19 nt, Artificial Sequence
  Description of Artificial Sequence: Synthetic oligonucleotide
uauuuggcaaaagcucaug

SEQ ID NO: 551533 - RNA, 19 nt, Artificial Sequence
  Description of Artificial Sequence: Synthetic oligonucleotide
gaagccuuagaggcugggg

SEQ ID NO: 551534 - RNA, 19 nt, Artificial Sequence
  Description of Artificial Sequence: Synthetic oligonucleotide
ugauagacccuugagucua

SEQ ID NO: 551535 - RNA, 19 nt, Artificial Sequence
  Description of Artificial Sequence: Synthetic oligonucleotide
uaccuuuugcacccagugu

SEQ ID NO: 551536 - RNA, 19 nt, Artificial Sequence
  Description of Artificial Sequence: Synthetic oligonucleotide
cuugcgaacggugcucucg

SEQ ID NO: 551537 - RNA, 19 nt, Artificial Sequence
  Description of Artificial Sequence: Synthetic oligonucleotide
acaccguccuaucauauuu

SEQ ID NO: 551538 - RNA, 19 nt, Artificial Sequence
  Description of Artificial Sequence: Synthetic oligonucleotide
uucccugggguaagggaag

SEQ ID NO: 551539 - RNA, 19 nt, Artificial Sequence
  Description of Artificial Sequence: Synthetic oligonucleotide
agcucauuacaaacacggc

SEQ ID NO: 551540 - RNA, 19 nt, Artificial Sequence
  Description of Artificial Sequence: Synthetic oligonucleotide
aagcuuagccuggacucuc

SEQ ID NO: 551541 - RNA, 19 nt, Artificial Sequence
  Description of Artificial Sequence: Synthetic oligonucleotide
uuccuauggacuagucccu

SEQ ID NO: 551542 - RNA, 19 nt, Artificial Sequence
  Description of Artificial Sequence: Synthetic oligonucleotide
gaugggugggugcuuccag

SEQ ID NO: 551543 - RNA, 19 nt, Artificial Sequence
  Description of Artificial Sequence: Synthetic oligonucleotide
cucucggccaggcaggcag

SEQ ID NO: 551544 - RNA, 19 nt, Artificial Sequence
  Description of Artificial Sequence: Synthetic oligonucleotide
cuguuuggggcccuggcac

SEQ ID NO: 551545 - RNA, 19 nt, Artificial Sequence
  Description of Artificial Sequence: Synthetic oligonucleotide
aguuuaaaaugcgggacaa

SEQ ID NO: 551546 - RNA, 19 nt, Artificial Sequence
  Description of Artificial Sequence: Synthetic oligonucleotide
cuuagccuggacucucggc

SEQ ID NO: 551547 - RNA, 19 nt, Artificial Sequence
  Description of Artificial Sequence: Synthetic oligonucleotide
agcacauuucgcucgcgca

SEQ ID NO: 551548 - RNA, 19 nt, Artificial Sequence
  Description of Artificial Sequence: Synthetic oligonucleotide
gggacaaacagcccugcag

SEQ ID NO: 551549 - RNA, 19 nt, Artificial Sequence
  Description of Artificial Sequence: Synthetic oligonucleotide
ugcgggacaaacagcccug

SEQ ID NO: 551550 - RNA, 19 nt, Artificial Sequence
  Description of Artificial Sequence: Synthetic oligonucleotide
cuugaucagcaagagagca

SEQ ID NO: 551551 - RNA, 19 nt, Artificial Sequence
  Description of Artificial Sequence: Synthetic oligonucleotide
uuuugcacccagugucaug

SEQ ID NO: 551552 - RNA, 19 nt, Artificial Sequence
  Description of Artificial Sequence: Synthetic oligonucleotide
aagccuugucguagguagc

SEQ ID NO: 551553 - RNA, 19 nt, Artificial Sequence
  Description of Artificial Sequence: Synthetic oligonucleotide
guggagaguauugucggcc

SEQ ID NO: 551554 - RNA, 19 nt, Artificial Sequence
  Description of Artificial Sequence: Synthetic oligonucleotide
uauugucggccugucuggg

SEQ ID NO: 551555 - RNA, 19 nt, Artificial Sequence
  Description of Artificial Sequence: Synthetic oligonucleotide
caggcuugggcaugggaag

SEQ ID NO: 551556 - RNA, 19 nt, Artificial Sequence
  Description of Artificial Sequence: Synthetic oligonucleotide
agcucguccguguaagccu

SEQ ID NO: 551557 - RNA, 19 nt, Artificial Sequence
  Description of Artificial Sequence: Synthetic oligonucleotide
uccuaucauauuuggcaaa

SEQ ID NO: 551558 - RNA, 19 nt, Artificial Sequence
  Description of Artificial Sequence: Synthetic oligonucleotide
agccuuggaacugugggug

SEQ ID NO: 551559 - RNA, 19 nt, Artificial Sequence
  Description of Artificial Sequence: Synthetic oligonucleotide
ugcagcacauuucgcucgc

SEQ ID NO: 551560 - RNA, 19 nt, Artificial Sequence
  Description of Artificial Sequence: Synthetic oligonucleotide
uugucggccugucugggaa

SEQ ID NO: 551561 - RNA, 19 nt, Artificial Sequence
  Description of Artificial Sequence: Synthetic oligonucleotide
uggugugaccuuccggcca

SEQ ID NO: 551562 - RNA, 19 nt, Artificial Sequence
  Description of Artificial Sequence: Synthetic oligonucleotide
cuacaagccagcuugggcu

SEQ ID NO: 551563 - RNA, 19 nt, Artificial Sequence
  Description of Artificial Sequence: Synthetic oligonucleotide
ucucuuuucccugggguaa

SEQ ID NO: 551564 - RNA, 19 nt, Artificial Sequence
  Description of Artificial Sequence: Synthetic oligonucleotide
agacuugaucagcaagaga

SEQ ID NO: 551565 - RNA, 19 nt, Artificial Sequence
  Description of Artificial Sequence: Synthetic oligonucleotide
uuacaaacacggcucucuu

SEQ ID NO: 551566 - RNA, 19 nt, Artificial Sequence
  Description of Artificial Sequence: Synthetic oligonucleotide
acgcugauagacccuugag

SEQ ID NO: 551567 - RNA, 19 nt, Artificial Sequence
  Description of Artificial Sequence: Synthetic oligonucleotide
uggacccaagacucgugcc

SEQ ID NO: 551568 - RNA, 19 nt, Artificial Sequence
  Description of Artificial Sequence: Synthetic oligonucleotide
ugucugggaagaggugugg

SEQ ID NO: 551569 - RNA, 19 nt, Artificial Sequence
  Description of Artificial Sequence: Synthetic oligonucleotide
uagacccuugagucuagga

SEQ ID NO: 551570 - RNA, 19 nt, Artificial Sequence
  Description of Artificial Sequence: Synthetic oligonucleotide
aacaucagagagacaacua

SEQ ID NO: 551571 - RNA, 19 nt, Artificial Sequence
  Description of Artificial Sequence: Synthetic oligonucleotide
acgugucuauuccuggaga

SEQ ID NO: 551572 - RNA, 19 nt, Artificial Sequence
  Description of Artificial Sequence: Synthetic oligonucleotide
gagagacaacuacaagcca

SEQ ID NO: 551573 - RNA, 19 nt, Artificial Sequence
  Description of Artificial Sequence: Synthetic oligonucleotide
agcagagagaggccuguga

SEQ ID NO: 551574 - RNA, 19 nt, Artificial Sequence
  Description of Artificial Sequence: Synthetic oligonucleotide
uuucgcugucacugaagcu

SEQ ID NO: 551575 - RNA, 19 nt, Artificial Sequence
  Description of Artificial Sequence: Synthetic oligonucleotide
uugcgaacggugcucucgu

SEQ ID NO: 551576 - RNA, 19 nt, Artificial Sequence
  Description of Artificial Sequence: Synthetic oligonucleotide
ugcauggaagacugugguc

SEQ ID NO: 551577 - RNA, 19 nt, Artificial Sequence
  Description of Artificial Sequence: Synthetic oligonucleotide
ucuuuucccugggguaagg

SEQ ID NO: 551578 - RNA, 19 nt, Artificial Sequence
  Description of Artificial Sequence: Synthetic oligonucleotide
acgucuuguaaagcccugg

SEQ ID NO: 551579 - RNA, 19 nt, Artificial Sequence
  Description of Artificial Sequence: Synthetic oligonucleotide
gguaacugagauggguggg

SEQ ID NO: 551580 - RNA, 19 nt, Artificial Sequence
  Description of Artificial Sequence: Synthetic oligonucleotide
agggcaccaugguugagcu

SEQ ID NO: 551581 - RNA, 19 nt, Artificial Sequence
  Description of Artificial Sequence: Synthetic oligonucleotide
cauuccauguggaugccaa

SEQ ID NO: 551582 - RNA, 19 nt, Artificial Sequence
  Description of Artificial Sequence: Synthetic oligonucleotide
gguauccaauaccuuuugc

SEQ ID NO: 551583 - RNA, 19 nt, Artificial Sequence
  Description of Artificial Sequence: Synthetic oligonucleotide
cugcaagaggaagaauggc

SEQ ID NO: 551584 - RNA, 19 nt, Artificial Sequence
  Description of Artificial Sequence: Synthetic oligonucleotide
gagacacgucuuguaaagc

SEQ ID NO: 551585 - RNA, 19 nt, Artificial Sequence
  Description of Artificial Sequence: Synthetic oligonucleotide
cagccuccgguguagcucc

SEQ ID NO: 551586 - RNA, 19 nt, Artificial Sequence
  Description of Artificial Sequence: Synthetic oligonucleotide
agaguauugucggccuguc

SEQ ID NO: 551587 - RNA, 19 nt, Artificial Sequence
  Description of Artificial Sequence: Synthetic oligonucleotide
caguacgccugguggagag

SEQ ID NO: 551588 - RNA, 19 nt, Artificial Sequence
  Description of Artificial Sequence: Synthetic oligonucleotide
cucucaaggcccacaugug

SEQ ID NO: 551589 - RNA, 19 nt, Artificial Sequence
  Description of Artificial Sequence: Synthetic oligonucleotide
caauaccuuuugcacccag

SEQ ID NO: 551590 - RNA, 19 nt, Artificial Sequence
  Description of Artificial Sequence: Synthetic oligonucleotide
ucuaggaggcaggccagca

SEQ ID NO: 551591 - RNA, 19 nt, Artificial Sequence
  Description of Artificial Sequence: Synthetic oligonucleotide
caguuuacagggcaaaggu

SEQ ID NO: 551592 - RNA, 19 nt, Artificial Sequence
  Description of Artificial Sequence: Synthetic oligonucleotide
caccguccuaucauauuug

SEQ ID NO: 551593 - RNA, 19 nt, Artificial Sequence
  Description of Artificial Sequence: Synthetic oligonucleotide
uccaggcuugggcauggga

SEQ ID NO: 551594 - RNA, 19 nt, Artificial Sequence
  Description of Artificial Sequence: Synthetic oligonucleotide
cagcacauuucgcucgcgc

SEQ ID NO: 551595 - RNA, 19 nt, Artificial Sequence
  Description of Artificial Sequence: Synthetic oligonucleotide
gagccagaacccugcuucc

SEQ ID NO: 551596 - RNA, 19 nt, Artificial Sequence
  Description of Artificial Sequence: Synthetic oligonucleotide
accagcucguccguguaag

SEQ ID NO: 551597 - RNA, 19 nt, Artificial Sequence
  Description of Artificial Sequence: Synthetic oligonucleotide
cagggcaccaugguugagc

SEQ ID NO: 551598 - RNA, 19 nt, Artificial Sequence
  Description of Artificial Sequence: Synthetic oligonucleotide
gcacauuucgcucgcgcag

SEQ ID NO: 551599 - RNA, 19 nt, Artificial Sequence
  Description of Artificial Sequence: Synthetic oligonucleotide
gcucauuacaaacacggcu

SEQ ID NO: 551600 - RNA, 19 nt, Artificial Sequence
  Description of Artificial Sequence: Synthetic oligonucleotide
ugcuggacacacccagagu

SEQ ID NO: 551601 - RNA, 19 nt, Artificial Sequence
  Description of Artificial Sequence: Synthetic oligonucleotide
cucugcagcuugcgaacgg

SEQ ID NO: 551602 - RNA, 19 nt, Artificial Sequence
  Description of Artificial Sequence: Synthetic oligonucleotide
ccuuccuauggacuagucc

SEQ ID NO: 551603 - RNA, 19 nt, Artificial Sequence
  Description of Artificial Sequence: Synthetic oligonucleotide
uuucgcucgcgcagagcca

SEQ ID NO: 551604 - RNA, 19 nt, Artificial Sequence
  Description of Artificial Sequence: Synthetic oligonucleotide
gggucgacaagggagggag

SEQ ID NO: 551605 - RNA, 19 nt, Artificial Sequence
  Description of Artificial Sequence: Synthetic oligonucleotide
ugagaugggugggugcuuc

SEQ ID NO: 551606 - RNA, 19 nt, Artificial Sequence
  Description of Artificial Sequence: Synthetic oligonucleotide
uugucgcuuucgcugucac

SEQ ID NO: 551607 - RNA, 19 nt, Artificial Sequence
  Description of Artificial Sequence: Synthetic oligonucleotide
cauguggaugccaauggcu

SEQ ID NO: 551608 - RNA, 19 nt, Artificial Sequence
  Description of Artificial Sequence: Synthetic oligonucleotide
gauagacccuugagucuag

SEQ ID NO: 551609 - RNA, 19 nt, Artificial Sequence
  Description of Artificial Sequence: Synthetic oligonucleotide
guaccggggagugggagcc

SEQ ID NO: 551610 - RNA, 19 nt, Artificial Sequence
  Description of Artificial Sequence: Synthetic oligonucleotide
cagcucguccguguaagcc

SEQ ID NO: 551611 - RNA, 19 nt, Artificial Sequence
  Description of Artificial Sequence: Synthetic oligonucleotide
cauggcuagcccugaucac

SEQ ID NO: 551612 - RNA, 19 nt, Artificial Sequence
  Description of Artificial Sequence: Synthetic oligonucleotide
cccagaguacacucaauac

SEQ ID NO: 551613 - RNA, 19 nt, Artificial Sequence
  Description of Artificial Sequence: Synthetic oligonucleotide
ccugaucacgcugauagac

SEQ ID NO: 551614 - RNA, 19 nt, Artificial Sequence
  Description of Artificial Sequence: Synthetic oligonucleotide
cuggguugccuugauggug

SEQ ID NO: 551615 - RNA, 19 nt, Artificial Sequence
  Description of Artificial Sequence: Synthetic oligonucleotide
gagaugggugggugcuucc

SEQ ID NO: 551616 - RNA, 19 nt, Artificial Sequence
  Description of Artificial Sequence: Synthetic oligonucleotide
ggugugaccuuccggccag

SEQ ID NO: 551617 - RNA, 19 nt, Artificial Sequence
  Description of Artificial Sequence: Synthetic oligonucleotide
cagaacccugcuuccuccc

SEQ ID NO: 551618 - RNA, 19 nt, Artificial Sequence
  Description of Artificial Sequence: Synthetic oligonucleotide
uaagccuccccagcugcug

SEQ ID NO: 551619 - RNA, 19 nt, Artificial Sequence
  Description of Artificial Sequence: Synthetic oligonucleotide
cucuauaguggcggccggg

SEQ ID NO: 551620 - RNA, 19 nt, Artificial Sequence
  Description of Artificial Sequence: Synthetic oligonucleotide
acacgucuuguaaagcccu

SEQ ID NO: 551621 - RNA, 19 nt, Artificial Sequence
  Description of Artificial Sequence: Synthetic oligonucleotide
auagacccuugagucuagg

SEQ ID NO: 551622 - RNA, 19 nt, Artificial Sequence
  Description of Artificial Sequence: Synthetic oligonucleotide
auaguggcggccgggguca

SEQ ID NO: 551623 - RNA, 19 nt, Artificial Sequence
  Description of Artificial Sequence: Synthetic oligonucleotide
ggacucucggccuggguug

SEQ ID NO: 551624 - RNA, 19 nt, Artificial Sequence
  Description of Artificial Sequence: Synthetic oligonucleotide
auugucggccugucuggga

SEQ ID NO: 551625 - RNA, 19 nt, Artificial Sequence
  Description of Artificial Sequence: Synthetic oligonucleotide
agaguacacucaauacaca

SEQ ID NO: 551626 - RNA, 19 nt, Artificial Sequence
  Description of Artificial Sequence: Synthetic oligonucleotide
ccugggaucuagagaagag

SEQ ID NO: 551627 - RNA, 19 nt, Artificial Sequence
  Description of Artificial Sequence: Synthetic oligonucleotide
ggugccaccccuuccuaug

SEQ ID NO: 551628 - RNA, 19 nt, Artificial Sequence
  Description of Artificial Sequence: Synthetic oligonucleotide
cuggagacacgucuuguaa

SEQ ID NO: 551629 - RNA, 19 nt, Artificial Sequence
  Description of Artificial Sequence: Synthetic oligonucleotide
ucacgcugauagacccuug

SEQ ID NO: 551630 - RNA, 19 nt, Artificial Sequence
  Description of Artificial Sequence: Synthetic oligonucleotide
ggcccuggcacauuccaug

SEQ ID NO: 551631 - RNA, 19 nt, Artificial Sequence
  Description of Artificial Sequence: Synthetic oligonucleotide
gugcccauuguaguguuca

SEQ ID NO: 551632 - RNA, 19 nt, Artificial Sequence
  Description of Artificial Sequence: Synthetic oligonucleotide
cagguuugcugcagggcuc

SEQ ID NO: 551633 - RNA, 19 nt, Artificial Sequence
  Description of Artificial Sequence: Synthetic oligonucleotide
acguugaaguggccagucu

SEQ ID NO: 551634 - RNA, 19 nt, Artificial Sequence
  Description of Artificial Sequence: Synthetic oligonucleotide
uggggucgacaagggaggg

SEQ ID NO: 551635 - RNA, 19 nt, Artificial Sequence
  Description of Artificial Sequence: Synthetic oligonucleotide
ggcacauggcuacagaggu

SEQ ID NO: 551636 - RNA, 19 nt, Artificial Sequence
  Description of Artificial Sequence: Synthetic oligonucleotide
gguggagaguauugucggc

SEQ ID NO: 551637 - RNA, 19 nt, Artificial Sequence
  Description of Artificial Sequence: Synthetic oligonucleotide
gcacuauugucgcuuucgc

SEQ ID NO: 551638 - RNA, 19 nt, Artificial Sequence
  Description of Artificial Sequence: Synthetic oligonucleotide
ugucgcuuucgcugucacu

SEQ ID NO: 551639 - RNA, 19 nt, Artificial Sequence
  Description of Artificial Sequence: Synthetic oligonucleotide
gucuccucgaucagguuga

SEQ ID NO: 551640 - RNA, 19 nt, Artificial Sequence
  Description of Artificial Sequence: Synthetic oligonucleotide
uggcacauuccauguggau

SEQ ID NO: 551641 - RNA, 19 nt, Artificial Sequence
  Description of Artificial Sequence: Synthetic oligonucleotide
gcagcucauuacaaacacg

SEQ ID NO: 551642 - RNA, 19 nt, Artificial Sequence
  Description of Artificial Sequence: Synthetic oligonucleotide
agaguggcucuggaggaca

SEQ ID NO: 551643 - RNA, 19 nt, Artificial Sequence
  Description of Artificial Sequence: Synthetic oligonucleotide
gcgaacggugcucucgucc

SEQ ID NO: 551644 - RNA, 19 nt, Artificial Sequence
  Description of Artificial Sequence: Synthetic oligonucleotide
guagccuucuucagaaucu

SEQ ID NO: 551645 - RNA, 19 nt, Artificial Sequence
  Description of Artificial Sequence: Synthetic oligonucleotide
auuccauguggaugccaau

SEQ ID NO: 551646 - RNA, 19 nt, Artificial Sequence
  Description of Artificial Sequence: Synthetic oligonucleotide
agacaacuacaagccagcu

SEQ ID NO: 551647 - RNA, 19 nt, Artificial Sequence
  Description of Artificial Sequence: Synthetic oligonucleotide
ggugacguugaaguggcca

SEQ ID NO: 551648 - RNA, 19 nt, Artificial Sequence
  Description of Artificial Sequence: Synthetic oligonucleotide
cuuggcuggcacauggcua

SEQ ID NO: 551649 - RNA, 19 nt, Artificial Sequence
  Description of Artificial Sequence: Synthetic oligonucleotide
auugucgcuuucgcuguca

SEQ ID NO: 551650 - RNA, 19 nt, Artificial Sequence
  Description of Artificial Sequence: Synthetic oligonucleotide
uggcaguuuacagggcaaa

SEQ ID NO: 551651 - RNA, 19 nt, Artificial Sequence
  Description of Artificial Sequence: Synthetic oligonucleotide
cuauugucgcuuucgcugu

SEQ ID NO: 551652 - RNA, 19 nt, Artificial Sequence
  Description of Artificial Sequence: Synthetic oligonucleotide
accuuccggccagaggagg

SEQ ID NO: 551653 - RNA, 19 nt, Artificial Sequence
  Description of Artificial Sequence: Synthetic oligonucleotide
agcuuagccuggacucucg

SEQ ID NO: 551654 - RNA, 19 nt, Artificial Sequence
  Description of Artificial Sequence: Synthetic oligonucleotide
uucgcucgcgcagagccau

SEQ ID NO: 551655 - RNA, 19 nt, Artificial Sequence
  Description of Artificial Sequence: Synthetic oligonucleotide
caucucacuuuauuuucua

SEQ ID NO: 551656 - RNA, 19 nt, Artificial Sequence
  Description of Artificial Sequence: Synthetic oligonucleotide
gccuuagaggcuggggucg

SEQ ID NO: 551657 - RNA, 19 nt, Artificial Sequence
  Description of Artificial Sequence: Synthetic oligonucleotide
ccuggcgacugcaagagga

SEQ ID NO: 551658 - RNA, 19 nt, Artificial Sequence
  Description of Artificial Sequence: Synthetic oligonucleotide
agucagcacuauugucgcu

SEQ ID NO: 551659 - RNA, 19 nt, Artificial Sequence
  Description of Artificial Sequence: Synthetic oligonucleotide
ccuugagucuaggaggcag

SEQ ID NO: 551660 - RNA, 19 nt, Artificial Sequence
  Description of Artificial Sequence: Synthetic oligonucleotide
ccagaacccugcuuccucc

SEQ ID NO: 551661 - RNA, 19 nt, Artificial Sequence
  Description of Artificial Sequence: Synthetic oligonucleotide
cucuuuucccugggguaag

SEQ ID NO: 551662 - RNA, 19 nt, Artificial Sequence
  Description of Artificial Sequence: Synthetic oligonucleotide
cacgcugauagacccuuga

SEQ ID NO: 551663 - RNA, 19 nt, Artificial Sequence
  Description of Artificial Sequence: Synthetic oligonucleotide
ugccaccccuuccuaugga

SEQ ID NO: 551664 - RNA, 19 nt, Artificial Sequence
  Description of Artificial Sequence: Synthetic oligonucleotide
gacaacuacaagccagcuu

SEQ ID NO: 551665 - RNA, 19 nt, Artificial Sequence
  Description of Artificial Sequence: Synthetic oligonucleotide
gaacugugggugcuuggcu

SEQ ID NO: 551666 - RNA, 19 nt, Artificial Sequence
  Description of Artificial Sequence: Synthetic oligonucleotide
gcuagcccugaucacgcug

SEQ ID NO: 551667 - RNA, 19 nt, Artificial Sequence
  Description of Artificial Sequence: Synthetic oligonucleotide
gggugaacccacacugggg

SEQ ID NO: 551668 - RNA, 19 nt, Artificial Sequence
  Description of Artificial Sequence: Synthetic oligonucleotide
caaagccucucaaggccca

SEQ ID NO: 551669 - RNA, 19 nt, Artificial Sequence
  Description of Artificial Sequence: Synthetic oligonucleotide
cucgucugggccggugacg

SEQ ID NO: 551670 - RNA, 19 nt, Artificial Sequence
  Description of Artificial Sequence: Synthetic oligonucleotide
cugauagacccuugagucu

SEQ ID NO: 551671 - RNA, 19 nt, Artificial Sequence
  Description of Artificial Sequence: Synthetic oligonucleotide
ggagaguauugucggccug

SEQ ID NO: 551672 - RNA, 19 nt, Artificial Sequence
  Description of Artificial Sequence: Synthetic oligonucleotide
gagaguauugucggccugu

SEQ ID NO: 551673 - RNA, 19 nt, Artificial Sequence
  Description of Artificial Sequence: Synthetic oligonucleotide
gcacagggacucacgaagg

SEQ ID NO: 551674 - RNA, 19 nt, Artificial Sequence
  Description of Artificial Sequence: Synthetic oligonucleotide
ccugguggagaguauuguc

SEQ ID NO: 551675 - RNA, 19 nt, Artificial Sequence
  Description of Artificial Sequence: Synthetic oligonucleotide
gaccuuccggccagaggag

SEQ ID NO: 551676 - RNA, 19 nt, Artificial Sequence
  Description of Artificial Sequence: Synthetic oligonucleotide
acauuccauguggaugcca

SEQ ID NO: 551677 - RNA, 19 nt, Artificial Sequence
  Description of Artificial Sequence: Synthetic oligonucleotide
aggagguaacugagauggg

SEQ ID NO: 551678 - RNA, 19 nt, Artificial Sequence
  Description of Artificial Sequence: Synthetic oligonucleotide
ccggugacgugucuauucc

SEQ ID NO: 551679 - RNA, 19 nt, Artificial Sequence
  Description of Artificial Sequence: Synthetic oligonucleotide
cgucuuguaaagcccuggg

SEQ ID NO: 551680 - RNA, 19 nt, Artificial Sequence
  Description of Artificial Sequence: Synthetic oligonucleotide
gaagcuuagccuggacucu

SEQ ID NO: 551681 - RNA, 19 nt, Artificial Sequence
  Description of Artificial Sequence: Synthetic oligonucleotide
ucugggccggugacguguc

SEQ ID NO: 551682 - RNA, 19 nt, Artificial Sequence
  Description of Artificial Sequence: Synthetic oligonucleotide
ccaagacucgugcccauug

SEQ ID NO: 551683 - RNA, 19 nt, Artificial Sequence
  Description of Artificial Sequence: Synthetic oligonucleotide
uccggccagaggagguaac

SEQ ID NO: 551684 - RNA, 19 nt, Artificial Sequence
  Description of Artificial Sequence: Synthetic oligonucleotide
cauuucgcucgcgcagagc

SEQ ID NO: 551685 - RNA, 19 nt, Artificial Sequence
  Description of Artificial Sequence: Synthetic oligonucleotide
uggugacguugaaguggcc

SEQ ID NO: 551686 - RNA, 19 nt, Artificial Sequence
  Description of Artificial Sequence: Synthetic oligonucleotide
uccuauggacuagucccua

SEQ ID NO: 551687 - RNA, 19 nt, Artificial Sequence
  Description of Artificial Sequence: Synthetic oligonucleotide
ggcugccacaaugccaggg

SEQ ID NO: 551688 - RNA, 19 nt, Artificial Sequence
  Description of Artificial Sequence: Synthetic oligonucleotide
ccguccuaucauauuuggc

SEQ ID NO: 551689 - RNA, 19 nt, Artificial Sequence
  Description of Artificial Sequence: Synthetic oligonucleotide
uggugccaccccuuccuau

SEQ ID NO: 551690 - RNA, 19 nt, Artificial Sequence
  Description of Artificial Sequence: Synthetic oligonucleotide
ggacuagucccuagagccc

SEQ ID NO: 551691 - RNA, 19 nt, Artificial Sequence
  Description of Artificial Sequence: Synthetic oligonucleotide
gacacacccagaguacacu

SEQ ID NO: 551692 - RNA, 19 nt, Artificial Sequence
  Description of Artificial Sequence: Synthetic oligonucleotide
guaacugagaugggugggu

SEQ ID NO: 551693 - RNA, 19 nt, Artificial Sequence
  Description of Artificial Sequence: Synthetic oligonucleotide
gacucucggccuggguugc

SEQ ID NO: 551694 - RNA, 19 nt, Artificial Sequence
  Description of Artificial Sequence: Synthetic oligonucleotide
cacacaccguccuaucaua

SEQ ID NO: 551695 - RNA, 19 nt, Artificial Sequence
  Description of Artificial Sequence: Synthetic oligonucleotide
cguguaagccuugucguag

SEQ ID NO: 551696 - RNA, 19 nt, Artificial Sequence
  Description of Artificial Sequence: Synthetic oligonucleotide
gcucuauaguggcggccgg

SEQ ID NO: 551697 - RNA, 19 nt, Artificial Sequence
  Description of Artificial Sequence: Synthetic oligonucleotide
ccuccggccagacaccuug

SEQ ID NO: 551698 - RNA, 19 nt, Artificial Sequence
  Description of Artificial Sequence: Synthetic oligonucleotide
caggagucagcacuauugu

SEQ ID NO: 551699 - RNA, 19 nt, Artificial Sequence
  Description of Artificial Sequence: Synthetic oligonucleotide
uacgccugguggagaguau

SEQ ID NO: 551700 - RNA, 19 nt, Artificial Sequence
  Description of Artificial Sequence: Synthetic oligonucleotide
cacuauugucgcuuucgcu

SEQ ID NO: 551701 - RNA, 19 nt, Artificial Sequence
  Description of Artificial Sequence: Synthetic oligonucleotide
gucauguggccacggccuc

SEQ ID NO: 551702 - RNA, 19 nt, Artificial Sequence
  Description of Artificial Sequence: Synthetic oligonucleotide
cacauuucgcucgcgcaga

SEQ ID NO: 551703 - RNA, 19 nt, Artificial Sequence
  Description of Artificial Sequence: Synthetic oligonucleotide
agaaaaggucaaagucgaa

SEQ ID NO: 551704 - RNA, 19 nt, Artificial Sequence
  Description of Artificial Sequence: Synthetic oligonucleotide
gucgacaagggagggagcu

SEQ ID NO: 551705 - RNA, 19 nt, Artificial Sequence
  Description of Artificial Sequence: Synthetic oligonucleotide
gccggugacgugucuauuc

SEQ ID NO: 551706 - RNA, 19 nt, Artificial Sequence
  Description of Artificial Sequence: Synthetic oligonucleotide
ucguccguguaagccuugu

SEQ ID NO: 551707 - RNA, 19 nt, Artificial Sequence
  Description of Artificial Sequence: Synthetic oligonucleotide
cagguauccaauaccuuuu

SEQ ID NO: 551708 - RNA, 19 nt, Artificial Sequence
  Description of Artificial Sequence: Synthetic oligonucleotide
ccucucaaggcccacaugu

SEQ ID NO: 551709 - RNA, 19 nt, Artificial Sequence
  Description of Artificial Sequence: Synthetic oligonucleotide
ggaagccuuagaggcuggg

SEQ ID NO: 551710 - RNA, 19 nt, Artificial Sequence
  Description of Artificial Sequence: Synthetic oligonucleotide
ccauggcucuauaguggcg

SEQ ID NO: 551711 - RNA, 19 nt, Artificial Sequence
  Description of Artificial Sequence: Synthetic oligonucleotide
ggcgacugcaagaggaaga

SEQ ID NO: 551712 - RNA, 19 nt, Artificial Sequence
  Description of Artificial Sequence: Synthetic oligonucleotide
uuccggccagaggagguaa

SEQ ID NO: 551713 - RNA, 19 nt, Artificial Sequence
  Description of Artificial Sequence: Synthetic oligonucleotide
gggaucuagagaagagauc

SEQ ID NO: 551714 - RNA, 19 nt, Artificial Sequence
  Description of Artificial Sequence: Synthetic oligonucleotide
ggagguaacugagaugggu

SEQ ID NO: 551715 - RNA, 19 nt, Artificial Sequence
  Description of Artificial Sequence: Synthetic oligonucleotide
cuggcgacugcaagaggaa

SEQ ID NO: 551716 - RNA, 19 nt, Artificial Sequence
  Description of Artificial Sequence: Synthetic oligonucleotide
acacaccguccuaucauau

SEQ ID NO: 551717 - RNA, 19 nt, Artificial Sequence
  Description of Artificial Sequence: Synthetic oligonucleotide
gaguauugucggccugucu

SEQ ID NO: 551718 - RNA, 19 nt, Artificial Sequence
  Description of Artificial Sequence: Synthetic oligonucleotide
guaagccuugucguaggua

SEQ ID NO: 551719 - RNA, 19 nt, Artificial Sequence
  Description of Artificial Sequence: Synthetic oligonucleotide
agccagaacccugcuuccu

SEQ ID NO: 551720 - RNA, 19 nt, Artificial Sequence
  Description of Artificial Sequence: Synthetic oligonucleotide
gcccauggggaaugguggc

SEQ ID NO: 551721 - RNA, 19 nt, Artificial Sequence
  Description of Artificial Sequence: Synthetic oligonucleotide
guacgccugguggagagua

SEQ ID NO: 551722 - RNA, 19 nt, Artificial Sequence
  Description of Artificial Sequence: Synthetic oligonucleotide
gcucugcagcuugcgaacg

SEQ ID NO: 551723 - RNA, 19 nt, Artificial Sequence
  Description of Artificial Sequence: Synthetic oligonucleotide
ugcgaacggugcucucguc

SEQ ID NO: 551724 - RNA, 19 nt, Artificial Sequence
  Description of Artificial Sequence: Synthetic oligonucleotide
cagcuugcgaacggugcuc

SEQ ID NO: 551725 - RNA, 19 nt, Artificial Sequence
  Description of Artificial Sequence: Synthetic oligonucleotide
gccuuggaacugugggugc

SEQ ID NO: 551726 - RNA, 19 nt, Artificial Sequence
  Description of Artificial Sequence: Synthetic oligonucleotide
gaauggcacccugggcuga

SEQ ID NO: 551727 - RNA, 19 nt, Artificial Sequence
  Description of Artificial Sequence: Synthetic oligonucleotide
uagcccugaucacgcugau

SEQ ID NO: 551728 - RNA, 19 nt, Artificial Sequence
  Description of Artificial Sequence: Synthetic oligonucleotide
gaacggugcucucguccaa

SEQ ID NO: 551729 - RNA, 19 nt, Artificial Sequence
  Description of Artificial Sequence: Synthetic oligonucleotide
cuguuugcaagcugcuuuu

SEQ ID NO: 551730 - RNA, 19 nt, Artificial Sequence
  Description of Artificial Sequence: Synthetic oligonucleotide
cucguccguguaagccuug

SEQ ID NO: 551731 - RNA, 19 nt, Artificial Sequence
  Description of Artificial Sequence: Synthetic oligonucleotide
gcuacagagguggcccuug

SEQ ID NO: 551732 - RNA, 19 nt, Artificial Sequence
  Description of Artificial Sequence: Synthetic oligonucleotide
ugggccggugacgugucua

SEQ ID NO: 551733 - RNA, 19 nt, Artificial Sequence
  Description of Artificial Sequence: Synthetic oligonucleotide
ggguaagggaagccuuaga

SEQ ID NO: 551734 - RNA, 19 nt, Artificial Sequence
  Description of Artificial Sequence: Synthetic oligonucleotide
cauguggccacggccucca

SEQ ID NO: 551735 - RNA, 19 nt, Artificial Sequence
  Description of Artificial Sequence: Synthetic oligonucleotide
aagcaacaucagagagaca

SEQ ID NO: 551736 - RNA, 19 nt, Artificial Sequence
  Description of Artificial Sequence: Synthetic oligonucleotide
ggccuucugaccaaaggcu

SEQ ID NO: 551737 - RNA, 19 nt, Artificial Sequence
  Description of Artificial Sequence: Synthetic oligonucleotide
caagacucgugcccauugu

SEQ ID NO: 551738 - RNA, 19 nt, Artificial Sequence
  Description of Artificial Sequence: Synthetic oligonucleotide
gaucacgcugauagacccu

SEQ ID NO: 551739 - RNA, 19 nt, Artificial Sequence
  Description of Artificial Sequence: Synthetic oligonucleotide
acccaagacucgugcccau

SEQ ID NO: 551740 - RNA, 19 nt, Artificial Sequence
  Description of Artificial Sequence: Synthetic oligonucleotide
caaacacggcucucuuugu

SEQ ID NO: 551741 - RNA, 19 nt, Artificial Sequence
  Description of Artificial Sequence: Synthetic oligonucleotide
ggcucaggccucuuucaaa

SEQ ID NO: 551742 - RNA, 19 nt, Artificial Sequence
  Description of Artificial Sequence: Synthetic oligonucleotide
gggugguacuccaggcuug

SEQ ID NO: 551743 - RNA, 19 nt, Artificial Sequence
  Description of Artificial Sequence: Synthetic oligonucleotide
gccagccuuggaacugugg

SEQ ID NO: 551744 - RNA, 19 nt, Artificial Sequence
  Description of Artificial Sequence: Synthetic oligonucleotide
gggcccgccucgcacacac

SEQ ID NO: 551745 - RNA, 19 nt, Artificial Sequence
  Description of Artificial Sequence: Synthetic oligonucleotide
gcgacugcaagaggaagaa

SEQ ID NO: 551746 - RNA, 19 nt, Artificial Sequence
  Description of Artificial Sequence: Synthetic oligonucleotide
acgccugguggagaguauu

SEQ ID NO: 551747 - RNA, 19 nt, Artificial Sequence
  Description of Artificial Sequence: Synthetic oligonucleotide
cugggcccgccucgcacac

SEQ ID NO: 551748 - RNA, 19 nt, Artificial Sequence
  Description of Artificial Sequence: Synthetic oligonucleotide
ggggaaugguggcccagga

SEQ ID NO: 551749 - RNA, 19 nt, Artificial Sequence
  Description of Artificial Sequence: Synthetic oligonucleotide
gacagguauccaauaccuu

SEQ ID NO: 551750 - RNA, 19 nt, Artificial Sequence
  Description of Artificial Sequence: Synthetic oligonucleotide
gccugugaacugcauggaa

SEQ ID NO: 551751 - RNA, 19 nt, Artificial Sequence
  Description of Artificial Sequence: Synthetic oligonucleotide
cuuggcccuuggcaguuua

SEQ ID NO: 551752 - RNA, 19 nt, Artificial Sequence
  Description of Artificial Sequence: Synthetic oligonucleotide
aguggcauccugggaucua

SEQ ID NO: 551753 - RNA, 19 nt, Artificial Sequence
  Description of Artificial Sequence: Synthetic oligonucleotide
gucugggccggugacgugu

SEQ ID NO: 551754 - RNA, 19 nt, Artificial Sequence
  Description of Artificial Sequence: Synthetic oligonucleotide
cccauggggaaugguggcc

SEQ ID NO: 551755 - RNA, 19 nt, Artificial Sequence
  Description of Artificial Sequence: Synthetic oligonucleotide
ccagcucguccguguaagc

SEQ ID NO: 551756 - RNA, 19 nt, Artificial Sequence
  Description of Artificial Sequence: Synthetic oligonucleotide
cacugaagcuuagccugga

SEQ ID NO: 551757 - RNA, 19 nt, Artificial Sequence
  Description of Artificial Sequence: Synthetic oligonucleotide
cucgugcccauuguagugu

SEQ ID NO: 551758 - RNA, 19 nt, Artificial Sequence
  Description of Artificial Sequence: Synthetic oligonucleotide
cugggguaagggaagccuu

SEQ ID NO: 551759 - RNA, 19 nt, Artificial Sequence
  Description of Artificial Sequence: Synthetic oligonucleotide
cuagggacagaggcagucu

SEQ ID NO: 551760 - RNA, 19 nt, Artificial Sequence
  Description of Artificial Sequence: Synthetic oligonucleotide
caaagucgaaggugguguu

SEQ ID NO: 551761 - RNA, 19 nt, Artificial Sequence
  Description of Artificial Sequence: Synthetic oligonucleotide
cuauaguggcggccggggu

SEQ ID NO: 551762 - RNA, 19 nt, Artificial Sequence
  Description of Artificial Sequence: Synthetic oligonucleotide
gcacacaccguccuaucau

SEQ ID NO: 551763 - RNA, 19 nt, Artificial Sequence
  Description of Artificial Sequence: Synthetic oligonucleotide
gcagcacauuucgcucgcg

SEQ ID NO: 551764 - RNA, 19 nt, Artificial Sequence
  Description of Artificial Sequence: Synthetic oligonucleotide
ggcucgucugggccgguga

SEQ ID NO: 551765 - RNA, 19 nt, Artificial Sequence
  Description of Artificial Sequence: Synthetic oligonucleotide
caccaaccacugaggggca

SEQ ID NO: 551766 - RNA, 19 nt, Artificial Sequence
  Description of Artificial Sequence: Synthetic oligonucleotide
cgaacggugcucucgucca

SEQ ID NO: 551767 - RNA, 19 nt, Artificial Sequence
  Description of Artificial Sequence: Synthetic oligonucleotide
accggggagugggagccau

SEQ ID NO: 551768 - RNA, 19 nt, Artificial Sequence
  Description of Artificial Sequence: Synthetic oligonucleotide
ggggugguacuccaggcuu

SEQ ID NO: 551769 - RNA, 19 nt, Artificial Sequence
  Description of Artificial Sequence: Synthetic oligonucleotide
cagagaggcacaggcgugu

SEQ ID NO: 551770 - RNA, 19 nt, Artificial Sequence
  Description of Artificial Sequence: Synthetic oligonucleotide
ucgcucgcgcagagccauc

SEQ ID NO: 551771 - RNA, 19 nt, Artificial Sequence
  Description of Artificial Sequence: Synthetic oligonucleotide
caguccuggugccaccccu

SEQ ID NO: 551772 - RNA, 19 nt, Artificial Sequence
  Description of Artificial Sequence: Synthetic oligonucleotide
cacaccguccuaucauauu

SEQ ID NO: 551773 - RNA, 19 nt, Artificial Sequence
  Description of Artificial Sequence: Synthetic oligonucleotide
guaaagcccuggggaggga

SEQ ID NO: 551774 - RNA, 19 nt, Artificial Sequence
  Description of Artificial Sequence: Synthetic oligonucleotide
uaccggggagugggagcca

SEQ ID NO: 551775 - RNA, 19 nt, Artificial Sequence
  Description of Artificial Sequence: Synthetic oligonucleotide
gcgggacaaacagcccugc

SEQ ID NO: 551776 - RNA, 19 nt, Artificial Sequence
  Description of Artificial Sequence: Synthetic oligonucleotide
ggcuggacaccaaggccca

SEQ ID NO: 551777 - RNA, 19 nt, Artificial Sequence
  Description of Artificial Sequence: Synthetic oligonucleotide
gggugguaccggggagugg

SEQ ID NO: 551778 - RNA, 19 nt, Artificial Sequence
  Description of Artificial Sequence: Synthetic oligonucleotide
ccuagagcccucggggcuc

SEQ ID NO: 551779 - RNA, 19 nt, Artificial Sequence
  Description of Artificial Sequence: Synthetic oligonucleotide
ccgccucgcacacaccguc

SEQ ID NO: 551780 - RNA, 19 nt, Artificial Sequence
  Description of Artificial Sequence: Synthetic oligonucleotide
gccaucagccuccggugua

SEQ ID NO: 551781 - RNA, 19 nt, Artificial Sequence
  Description of Artificial Sequence: Synthetic oligonucleotide
agcccugaucacgcugaua

SEQ ID NO: 551782 - RNA, 19 nt, Artificial Sequence
  Description of Artificial Sequence: Synthetic oligonucleotide
ccugaugaugagucauccu

SEQ ID NO: 551783 - RNA, 19 nt, Artificial Sequence
  Description of Artificial Sequence: Synthetic oligonucleotide
cccuggcgacugcaagagg

SEQ ID NO: 551784 - RNA, 19 nt, Artificial Sequence
  Description of Artificial Sequence: Synthetic oligonucleotide
aguggcggccggggucaug

SEQ ID NO: 551785 - RNA, 19 nt, Artificial Sequence
  Description of Artificial Sequence: Synthetic oligonucleotide
ggccagacaccuugcugcu

SEQ ID NO: 551786 - RNA, 19 nt, Artificial Sequence
  Description of Artificial Sequence: Synthetic oligonucleotide
ugggcccgccucgcacaca

SEQ ID NO: 551787 - RNA, 19 nt, Artificial Sequence
  Description of Artificial Sequence: Synthetic oligonucleotide
ggggucgacaagggaggga

SEQ ID NO: 551788 - RNA, 19 nt, Artificial Sequence
  Description of Artificial Sequence: Synthetic oligonucleotide
ccguguaagccuugucgua

SEQ ID NO: 551789 - RNA, 19 nt, Artificial Sequence
  Description of Artificial Sequence: Synthetic oligonucleotide
ccugggguaagggaagccu

SEQ ID NO: 551790 - RNA, 19 nt, Artificial Sequence
  Description of Artificial Sequence: Synthetic oligonucleotide
cgcacacaccguccuauca

SEQ ID NO: 551791 - RNA, 19 nt, Artificial Sequence
  Description of Artificial Sequence: Synthetic oligonucleotide
ccaggggugaacccacacu

SEQ ID NO: 551792 - RNA, 19 nt, Artificial Sequence
  Description of Artificial Sequence: Synthetic oligonucleotide
ggggcucuguuugcaagcu

SEQ ID NO: 551793 - RNA, 19 nt, Artificial Sequence
  Description of Artificial Sequence: Synthetic oligonucleotide
cggccagaggagguaacug

SEQ ID NO: 551794 - RNA, 19 nt, Artificial Sequence
  Description of Artificial Sequence: Synthetic oligonucleotide
ccccuccccgugcccaugc

SEQ ID NO: 551795 - RNA, 19 nt, Artificial Sequence
  Description of Artificial Sequence: Synthetic oligonucleotide
gccucgcacacaccguccu

SEQ ID NO: 551796 - RNA, 19 nt, Artificial Sequence
  Description of Artificial Sequence: Synthetic oligonucleotide
ccaccccuuccuauggacu

SEQ ID NO: 551797 - RNA, 19 nt, Artificial Sequence
  Description of Artificial Sequence: Synthetic oligonucleotide
ggcaggagucagcacuauu

SEQ ID NO: 551798 - RNA, 19 nt, Artificial Sequence
  Description of Artificial Sequence: Synthetic oligonucleotide
ccuugucguagguagccuu

SEQ ID NO: 551799 - RNA, 19 nt, Artificial Sequence
  Description of Artificial Sequence: Synthetic oligonucleotide
cgugcccauuguaguguuc

SEQ ID NO: 551800 - RNA, 19 nt, Artificial Sequence
  Description of Artificial Sequence: Synthetic oligonucleotide
cguccguguaagccuuguc

SEQ ID NO: 551801 - RNA, 19 nt, Artificial Sequence
  Description of Artificial Sequence: Synthetic oligonucleotide
ccggggucauguggccacg

SEQ ID NO: 551802 - RNA, 19 nt, Artificial Sequence
  Description of Artificial Sequence: Synthetic oligonucleotide
gggccggugacgugucuau

SEQ ID NO: 551803 - RNA, 19 nt, Artificial Sequence
  Description of Artificial Sequence: Synthetic oligonucleotide
ccggggagugggagccaug

SEQ ID NO: 551804 - RNA, 19 nt, Artificial Sequence
  Description of Artificial Sequence: Synthetic oligonucleotide
ccccgugcccaugcccacc

SEQ ID NO: 551805 - RNA, 19 nt, Artificial Sequence
  Description of Artificial Sequence: Synthetic oligonucleotide
agccuccgguguagcucca

SEQ ID NO: 551806 - RNA, 19 nt, Artificial Sequence
  Description of Artificial Sequence: Synthetic oligonucleotide
gccuugucguagguagccu

SEQ ID NO: 551807 - RNA, 19 nt, Artificial Sequence
  Description of Artificial Sequence: Synthetic oligonucleotide
cugagaugggugggugcuu

SEQ ID NO: 551808 - RNA, 19 nt, Artificial Sequence
  Description of Artificial Sequence: Synthetic oligonucleotide
gcucguccguguaagccuu

SEQ ID NO: 551809 - RNA, 19 nt, Artificial Sequence
  Description of Artificial Sequence: Synthetic oligonucleotide
agggcucgucugggccggu

SEQ ID NO: 551810 - RNA, 19 nt, Artificial Sequence
  Description of Artificial Sequence: Synthetic oligonucleotide
cacaggcguguggcccaca

SEQ ID NO: 551811 - RNA, 19 nt, Artificial Sequence
  Description of Artificial Sequence: Synthetic oligonucleotide
cugggccggugacgugucu

SEQ ID NO: 551812 - RNA, 19 nt, Artificial Sequence
  Description of Artificial Sequence: Synthetic oligonucleotide
cgucugggccggugacgug

SEQ ID NO: 551813 - RNA, 19 nt, Artificial Sequence
  Description of Artificial Sequence: Synthetic oligonucleotide
cggugacgugucuauuccu

SEQ ID NO: 551814 - RNA, 19 nt, Artificial Sequence
  Description of Artificial Sequence: Synthetic oligonucleotide
cgcgcagagccaucagccu

SEQ ID NO: 551815 - RNA, 19 nt, Artificial Sequence
  Description of Artificial Sequence: Synthetic oligonucleotide
gccccuccccgugcccaug

SEQ ID NO: 551816 - RNA, 19 nt, Artificial Sequence
  Description of Artificial Sequence: Synthetic oligonucleotide
cccgccucgcacacaccgu

SEQ ID NO: 551817 - RNA, 19 nt, Artificial Sequence
  Description of Artificial Sequence: Synthetic oligonucleotide
ggccggugacgugucuauu

SEQ ID NO: 551818 - RNA, 19 nt, Artificial Sequence
  Description of Artificial Sequence: Synthetic oligonucleotide
cgacugcaagaggaagaau

SEQ ID NO: 551819 - RNA, 19 nt, Artificial Sequence
  Description of Artificial Sequence: Synthetic oligonucleotide
ccgugcccaugcccaccau

SEQ ID NO: 551820 - RNA, 19 nt, Artificial Sequence
  Description of Artificial Sequence: Synthetic oligonucleotide
ucuuauagaucagagcugg

SEQ ID NO: 551821 - RNA, 19 nt, Artificial Sequence
  Description of Artificial Sequence: Synthetic oligonucleotide
ucaaagcugauaaugacuc

SEQ ID NO: 551822 - RNA, 19 nt, Artificial Sequence
  Description of Artificial Sequence: Synthetic oligonucleotide
aacugucuaauuugccggc

SEQ ID NO: 551823 - RNA, 19 nt, Artificial Sequence
  Description of Artificial Sequence: Synthetic oligonucleotide
gaaucggaggcucauggcg

SEQ ID NO: 551824 - RNA, 19 nt, Artificial Sequence
  Description of Artificial Sequence: Synthetic oligonucleotide
gagugaagcacccuucugg

SEQ ID NO: 551825 - RNA, 19 nt, Artificial Sequence
  Description of Artificial Sequence: Synthetic oligonucleotide
auuuccacgagcuuccuug

SEQ ID NO: 551826 - RNA, 19 nt, Artificial Sequence
  Description of Artificial Sequence: Synthetic oligonucleotide
aauaucggcaccagcggcc

SEQ ID NO: 551827 - RNA, 19 nt, Artificial Sequence
  Description of Artificial Sequence: Synthetic oligonucleotide
aggacccuuaaucugggcc

SEQ ID NO: 551828 - RNA, 19 nt, Artificial Sequence
  Description of Artificial Sequence: Synthetic oligonucleotide
ucaccuguacguuaggcag

SEQ ID NO: 551829 - RNA, 19 nt, Artificial Sequence
  Description of Artificial Sequence: Synthetic oligonucleotide
ucuucgcucacagacaggg

SEQ ID NO: 551830 - RNA, 19 nt, Artificial Sequence
  Description of Artificial Sequence: Synthetic oligonucleotide
aauuugccggcuguguacc

SEQ ID NO: 551831 - RNA, 19 nt, Artificial Sequence
  Description of Artificial Sequence: Synthetic oligonucleotide
aaauugcuucucuggacuc

SEQ ID NO: 551832 - RNA, 19 nt, Artificial Sequence
  Description of Artificial Sequence: Synthetic oligonucleotide
ucuugugccaaguccagag

SEQ ID NO: 551833 - RNA, 19 nt, Artificial Sequence
  Description of Artificial Sequence: Synthetic oligonucleotide
uggacugacagcugggccg

SEQ ID NO: 551834 - RNA, 19 nt, Artificial Sequence
  Description of Artificial Sequence: Synthetic oligonucleotide
uccacuuuaaucccgcccu

SEQ ID NO: 551835 - RNA, 19 nt, Artificial Sequence
  Description of Artificial Sequence: Synthetic oligonucleotide
gaggucauucaccuguacg

SEQ ID NO: 551836 - RNA, 19 nt, Artificial Sequence
  Description of Artificial Sequence: Synthetic oligonucleotide
ucuugcugaaaccuggccu

SEQ ID NO: 551837 - RNA, 19 nt, Artificial Sequence
  Description of Artificial Sequence: Synthetic oligonucleotide
ucauucaccuguacguuag

SEQ ID NO: 551838 - RNA, 19 nt, Artificial Sequence
  Description of Artificial Sequence: Synthetic oligonucleotide
uuuagucugggccccuugg

SEQ ID NO: 551839 - RNA, 19 nt, Artificial Sequence
  Description of Artificial Sequence: Synthetic oligonucleotide
agguaugugaaccccuugg

SEQ ID NO: 551840 - RNA, 19 nt, Artificial Sequence
  Description of Artificial Sequence: Synthetic oligonucleotide
uuauagaucagagcugggc

SEQ ID NO: 551841 - RNA, 19 nt, Artificial Sequence
  Description of Artificial Sequence: Synthetic oligonucleotide
cucaguuuagucugggccc

SEQ ID NO: 551842 - RNA, 19 nt, Artificial Sequence
  Description of Artificial Sequence: Synthetic oligonucleotide
uuaccucugggugagaacc

SEQ ID NO: 551843 - RNA, 19 nt, Artificial Sequence
  Description of Artificial Sequence: Synthetic oligonucleotide
ugugcgagagccuccagcc

SEQ ID NO: 551844 - RNA, 19 nt, Artificial Sequence
  Description of Artificial Sequence: Synthetic oligonucleotide
gucccuaggagccaggucc

SEQ ID NO: 551845 - RNA, 19 nt, Artificial Sequence
  Description of Artificial Sequence: Synthetic oligonucleotide
uguacguuaggcagggagu

SEQ ID NO: 551846 - RNA, 19 nt, Artificial Sequence
  Description of Artificial Sequence: Synthetic oligonucleotide
ucaucugccuucauccacc

SEQ ID NO: 551847 - RNA, 19 nt, Artificial Sequence
  Description of Artificial Sequence: Synthetic oligonucleotide
aggucauucaccuguacgu

SEQ ID NO: 551848 - RNA, 19 nt, Artificial Sequence
  Description of Artificial Sequence: Synthetic oligonucleotide
uccucucucaguuuagucu

SEQ ID NO: 551849 - RNA, 19 nt, Artificial Sequence
  Description of Artificial Sequence: Synthetic oligonucleotide
gcaacugucuaauuugccg

SEQ ID NO: 551850 - RNA, 19 nt, Artificial Sequence
  Description of Artificial Sequence: Synthetic oligonucleotide
cugaguaccgccaucccag

SEQ ID NO: 551851 - RNA, 19 nt, Artificial Sequence
  Description of Artificial Sequence: Synthetic oligonucleotide
aaugccuugaccagggcga

SEQ ID NO: 551852 - RNA, 19 nt, Artificial Sequence
  Description of Artificial Sequence: Synthetic oligonucleotide
uuagucugggccccuuggg

SEQ ID NO: 551853 - RNA, 19 nt, Artificial Sequence
  Description of Artificial Sequence: Synthetic oligonucleotide
ucaccaacguugcucuccg

SEQ ID NO: 551854 - RNA, 19 nt, Artificial Sequence
  Description of Artificial Sequence: Synthetic oligonucleotide
cucgguaucuccucgccgg

SEQ ID NO: 551855 - RNA, 19 nt, Artificial Sequence
  Description of Artificial Sequence: Synthetic oligonucleotide
uucaccuguacguuaggca

SEQ ID NO: 551856 - RNA, 19 nt, Artificial Sequence
  Description of Artificial Sequence: Synthetic oligonucleotide
aaucggaggcucauggcgg

SEQ ID NO: 551857 - RNA, 19 nt, Artificial Sequence
  Description of Artificial Sequence: Synthetic oligonucleotide
caggcacugaccuuugugc

SEQ ID NO: 551858 - RNA, 19 nt, Artificial Sequence
  Description of Artificial Sequence: Synthetic oligonucleotide
uuuuggaauaucggcacca

SEQ ID NO: 551859 - RNA, 19 nt, Artificial Sequence
  Description of Artificial Sequence: Synthetic oligonucleotide
gaacccugaccuuugucag

SEQ ID NO: 551860 - RNA, 19 nt, Artificial Sequence
  Description of Artificial Sequence: Synthetic oligonucleotide
gaauaucggcaccagcggc

SEQ ID NO: 551861 - RNA, 19 nt, Artificial Sequence
  Description of Artificial Sequence: Synthetic oligonucleotide
ucugaguaccgccauccca

SEQ ID NO: 551862 - RNA, 19 nt, Artificial Sequence
  Description of Artificial Sequence: Synthetic oligonucleotide
auucaccuguacguuaggc

SEQ ID NO: 551863 - RNA, 19 nt, Artificial Sequence
  Description of Artificial Sequence: Synthetic oligonucleotide
cugaccuuugugcaggaag

SEQ ID NO: 551864 - RNA, 19 nt, Artificial Sequence
  Description of Artificial Sequence: Synthetic oligonucleotide
cuguacguuaggcagggag

SEQ ID NO: 551865 - RNA, 19 nt, Artificial Sequence
  Description of Artificial Sequence: Synthetic oligonucleotide
cuccgggucaauuuccacg

SEQ ID NO: 551866 - RNA, 19 nt, Artificial Sequence
  Description of Artificial Sequence: Synthetic oligonucleotide
auggcggugggccucgccc

SEQ ID NO: 551867 - RNA, 19 nt, Artificial Sequence
  Description of Artificial Sequence: Synthetic oligonucleotide
acuucuuaccucuggguga

SEQ ID NO: 551868 - RNA, 19 nt, Artificial Sequence
  Description of Artificial Sequence: Synthetic oligonucleotide
aagggaaccuccaccaaag

SEQ ID NO: 551869 - RNA, 19 nt, Artificial Sequence
  Description of Artificial Sequence: Synthetic oligonucleotide
gaucccgucgucuccugcg

SEQ ID NO: 551870 - RNA, 19 nt, Artificial Sequence
  Description of Artificial Sequence: Synthetic oligonucleotide
cugauaaugacucuguccu

SEQ ID NO: 551871 - RNA, 19 nt, Artificial Sequence
  Description of Artificial Sequence: Synthetic oligonucleotide
guagugacugugcugacca

SEQ ID NO: 551872 - RNA, 19 nt, Artificial Sequence
  Description of Artificial Sequence: Synthetic oligonucleotide
agggcgauccagcugugcg

SEQ ID NO: 551873 - RNA, 19 nt, Artificial Sequence
  Description of Artificial Sequence: Synthetic oligonucleotide
uggguuuggcauucucugg

SEQ ID NO: 551874 - RNA, 19 nt, Artificial Sequence
  Description of Artificial Sequence: Synthetic oligonucleotide
gcugauaaugacucugucc

SEQ ID NO: 551875 - RNA, 19 nt, Artificial Sequence
  Description of Artificial Sequence: Synthetic oligonucleotide
cucgacucuuccuuccugg

SEQ ID NO: 551876 - RNA, 19 nt, Artificial Sequence
  Description of Artificial Sequence: Synthetic oligonucleotide
cuguguaccaccuguacca

SEQ ID NO: 551877 - RNA, 19 nt, Artificial Sequence
  Description of Artificial Sequence: Synthetic oligonucleotide
cuagccugggcgcagaauc

SEQ ID NO: 551878 - RNA, 19 nt, Artificial Sequence
  Description of Artificial Sequence: Synthetic oligonucleotide
uugugcgagagccuccagc

SEQ ID NO: 551879 - RNA, 19 nt, Artificial Sequence
  Description of Artificial Sequence: Synthetic oligonucleotide
acgagcuuccuugggaccc

SEQ ID NO: 551880 - RNA, 19 nt, Artificial Sequence
  Description of Artificial Sequence: Synthetic oligonucleotide
uccacgagcuuccuuggga

SEQ ID NO: 551881 - RNA, 19 nt, Artificial Sequence
  Description of Artificial Sequence: Synthetic oligonucleotide
ucucgguuggguuuggcau

SEQ ID NO: 551882 - RNA, 19 nt, Artificial Sequence
  Description of Artificial Sequence: Synthetic oligonucleotide
uccucuagaucuccaggca

SEQ ID NO: 551883 - RNA, 19 nt, Artificial Sequence
  Description of Artificial Sequence: Synthetic oligonucleotide
ggaauaucggcaccagcgg

SEQ ID NO: 551884 - RNA, 19 nt, Artificial Sequence
  Description of Artificial Sequence: Synthetic oligonucleotide
gcuauccucagcaacaacc

SEQ ID NO: 551885 - RNA, 19 nt, Artificial Sequence
  Description of Artificial Sequence: Synthetic oligonucleotide
ugagugaagcacccuucug

SEQ ID NO: 551886 - RNA, 19 nt, Artificial Sequence
  Description of Artificial Sequence: Synthetic oligonucleotide
aguccagaggggcuucuuc

SEQ ID NO: 551887 - RNA, 19 nt, Artificial Sequence
  Description of Artificial Sequence: Synthetic oligonucleotide
cuugagugaagcacccuuc

SEQ ID NO: 551888 - RNA, 19 nt, Artificial Sequence
  Description of Artificial Sequence: Synthetic oligonucleotide
caccacuuugucaugagga

SEQ ID NO: 551889 - RNA, 19 nt, Artificial Sequence
  Description of Artificial Sequence: Synthetic oligonucleotide
aggaucuggccucuuguug

SEQ ID NO: 551890 - RNA, 19 nt, Artificial Sequence
  Description of Artificial Sequence: Synthetic oligonucleotide
uguaccugcugcucuuuga

SEQ ID NO: 551891 - RNA, 19 nt, Artificial Sequence
  Description of Artificial Sequence: Synthetic oligonucleotide
uucucuucgcuccccgccc

SEQ ID NO: 551892 - RNA, 19 nt, Artificial Sequence
  Description of Artificial Sequence: Synthetic oligonucleotide
ugggcgcagaaucaggauc

SEQ ID NO: 551893 - RNA, 19 nt, Artificial Sequence
  Description of Artificial Sequence: Synthetic oligonucleotide
ucgacucuuccuuccuggg

SEQ ID NO: 551894 - RNA, 19 nt, Artificial Sequence
  Description of Artificial Sequence: Synthetic oligonucleotide
ucaguuuagucugggcccc

SEQ ID NO: 551895 - RNA, 19 nt, Artificial Sequence
  Description of Artificial Sequence: Synthetic oligonucleotide
cuugugccaaguccagagg

SEQ ID NO: 551896 - RNA, 19 nt, Artificial Sequence
  Description of Artificial Sequence: Synthetic oligonucleotide
cugggugagaacccugacc

SEQ ID NO: 551897 - RNA, 19 nt, Artificial Sequence
  Description of Artificial Sequence: Synthetic oligonucleotide
cuuugugcaggaaggccac

SEQ ID NO: 551898 - RNA, 19 nt, Artificial Sequence
  Description of Artificial Sequence: Synthetic oligonucleotide
acccugaccuuugucaggg

SEQ ID NO: 551899 - RNA, 19 nt, Artificial Sequence
  Description of Artificial Sequence: Synthetic oligonucleotide
uggcccaucucuuggggug

SEQ ID NO: 551900 - RNA, 19 nt, Artificial Sequence
  Description of Artificial Sequence: Synthetic oligonucleotide
ucucucaguuuagucuggg

SEQ ID NO: 551901 - RNA, 19 nt, Artificial Sequence
  Description of Artificial Sequence: Synthetic oligonucleotide
cacuucgagcuucuugugc

SEQ ID NO: 551902 - RNA, 19 nt, Artificial Sequence
  Description of Artificial Sequence: Synthetic oligonucleotide
gaugaggcuccccaucguc

SEQ ID NO: 551903 - RNA, 19 nt, Artificial Sequence
  Description of Artificial Sequence: Synthetic oligonucleotide
uuccacgagcuuccuuggg

SEQ ID NO: 551904 - RNA, 19 nt, Artificial Sequence
  Description of Artificial Sequence: Synthetic oligonucleotide
cacuuucaggucucgguug

SEQ ID NO: 551905 - RNA, 19 nt, Artificial Sequence
  Description of Artificial Sequence: Synthetic oligonucleotide
cuucuuaccucugggugag

SEQ ID NO: 551906 - RNA, 19 nt, Artificial Sequence
  Description of Artificial Sequence: Synthetic oligonucleotide
uccaagcacaggcugcaaa

SEQ ID NO: 551907 - RNA, 19 nt, Artificial Sequence
  Description of Artificial Sequence: Synthetic oligonucleotide
agaucccgucgucuccugc

SEQ ID NO: 551908 - RNA, 19 nt, Artificial Sequence
  Description of Artificial Sequence: Synthetic oligonucleotide
accacuuugucaugaggaa

SEQ ID NO: 551909 - RNA, 19 nt, Artificial Sequence
  Description of Artificial Sequence: Synthetic oligonucleotide
ucucgacucuuccuuccug

SEQ ID NO: 551910 - RNA, 19 nt, Artificial Sequence
  Description of Artificial Sequence: Synthetic oligonucleotide
uucuucgcucacagacagg

SEQ ID NO: 551911 - RNA, 19 nt, Artificial Sequence
  Description of Artificial Sequence: Synthetic oligonucleotide
guuaggcagggagucaaag

SEQ ID NO: 551912 - RNA, 19 nt, Artificial Sequence
  Description of Artificial Sequence: Synthetic oligonucleotide
uuaaucccgcccucgguau

SEQ ID NO: 551913 - RNA, 19 nt, Artificial Sequence
  Description of Artificial Sequence: Synthetic oligonucleotide
cuaggugcugccuggcgac

SEQ ID NO: 551914 - RNA, 19 nt, Artificial Sequence
  Description of Artificial Sequence: Synthetic oligonucleotide
ucuagaucuccaggcaacu

SEQ ID NO: 551915 - RNA, 19 nt, Artificial Sequence
  Description of Artificial Sequence: Synthetic oligonucleotide
ugcucuccgggucaauuuc

SEQ ID NO: 551916 - RNA, 19 nt, Artificial Sequence
  Description of Artificial Sequence: Synthetic oligonucleotide
uucugaguaccgccauccc

SEQ ID NO: 551917 - RNA, 19 nt, Artificial Sequence
  Description of Artificial Sequence: Synthetic oligonucleotide
cacugucuccccagcaugc

SEQ ID NO: 551918 - RNA, 19 nt, Artificial Sequence
  Description of Artificial Sequence: Synthetic oligonucleotide
ucuccaggcaacugucuaa

SEQ ID NO: 551919 - RNA, 19 nt, Artificial Sequence
  Description of Artificial Sequence: Synthetic oligonucleotide
accuguacguuaggcaggg

SEQ ID NO: 551920 - RNA, 19 nt, Artificial Sequence
  Description of Artificial Sequence: Synthetic oligonucleotide
aauuuccacgagcuuccuu

SEQ ID NO: 551921 - RNA, 19 nt, Artificial Sequence
  Description of Artificial Sequence: Synthetic oligonucleotide
cuuaccucugggugagaac

SEQ ID NO: 551922 - RNA, 19 nt, Artificial Sequence
  Description of Artificial Sequence: Synthetic oligonucleotide
cucucaguuuagucugggc

SEQ ID NO: 551923 - RNA, 19 nt, Artificial Sequence
  Description of Artificial Sequence: Synthetic oligonucleotide
ggcucuuuuggaauaucgg

SEQ ID NO: 551924 - RNA, 19 nt, Artificial Sequence
  Description of Artificial Sequence: Synthetic oligonucleotide
cuggacugacagcugggcc

SEQ ID NO: 551925 - RNA, 19 nt, Artificial Sequence
  Description of Artificial Sequence: Synthetic oligonucleotide
aggcacugaccuuugugca

SEQ ID NO: 551926 - RNA, 19 nt, Artificial Sequence
  Description of Artificial Sequence: Synthetic oligonucleotide
agggaaccuccaccaaagg

SEQ ID NO: 551927 - RNA, 19 nt, Artificial Sequence
  Description of Artificial Sequence: Synthetic oligonucleotide
ucuuaccucugggugagaa

SEQ ID NO: 551928 - RNA, 19 nt, Artificial Sequence
  Description of Artificial Sequence: Synthetic oligonucleotide
gacaggguagugacugugc

SEQ ID NO: 551929 - RNA, 19 nt, Artificial Sequence
  Description of Artificial Sequence: Synthetic oligonucleotide
caaauugcuucucuggacu

SEQ ID NO: 551930 - RNA, 19 nt, Artificial Sequence
  Description of Artificial Sequence: Synthetic oligonucleotide
uugugggcuuucuuauaga

SEQ ID NO: 551931 - RNA, 19 nt, Artificial Sequence
  Description of Artificial Sequence: Synthetic oligonucleotide
caccuugagugaagcaccc

SEQ ID NO: 551932 - RNA, 19 nt, Artificial Sequence
  Description of Artificial Sequence: Synthetic oligonucleotide
gcuguguaccaccuguacc

SEQ ID NO: 551933 - RNA, 19 nt, Artificial Sequence
  Description of Artificial Sequence: Synthetic oligonucleotide
uggacucuuggguggugcc

SEQ ID NO: 551934 - RNA, 19 nt, Artificial Sequence
  Description of Artificial Sequence: Synthetic oligonucleotide
agaggggcuucuucgcuca

SEQ ID NO: 551935 - RNA, 19 nt, Artificial Sequence
  Description of Artificial Sequence: Synthetic oligonucleotide
uuucaggucucgguugggu

SEQ ID NO: 551936 - RNA, 19 nt, Artificial Sequence
  Description of Artificial Sequence: Synthetic oligonucleotide
ccaagcacaggcugcaaag

SEQ ID NO: 551937 - RNA, 19 nt, Artificial Sequence
  Description of Artificial Sequence: Synthetic oligonucleotide
gcaacaaccacaauggggu

SEQ ID NO: 551938 - RNA, 19 nt, Artificial Sequence
  Description of Artificial Sequence: Synthetic oligonucleotide
gcggccauugcuuccuucg

SEQ ID NO: 551939 - RNA, 19 nt, Artificial Sequence
  Description of Artificial Sequence: Synthetic oligonucleotide
uugccggcuguguaccacc

SEQ ID NO: 551940 - RNA, 19 nt, Artificial Sequence
  Description of Artificial Sequence: Synthetic oligonucleotide
aucccgucgucuccugcgg

SEQ ID NO: 551941 - RNA, 19 nt, Artificial Sequence
  Description of Artificial Sequence: Synthetic oligonucleotide
uuugugcgagagccuccag

SEQ ID NO: 551942 - RNA, 19 nt, Artificial Sequence
  Description of Artificial Sequence: Synthetic oligonucleotide
gcaucuaggugcugccugg

SEQ ID NO: 551943 - RNA, 19 nt, Artificial Sequence
  Description of Artificial Sequence: Synthetic oligonucleotide
ccaccuugagugaagcacc

SEQ ID NO: 551944 - RNA, 19 nt, Artificial Sequence
  Description of Artificial Sequence: Synthetic oligonucleotide
cagagucugccuugggcac

SEQ ID NO: 551945 - RNA, 19 nt, Artificial Sequence
  Description of Artificial Sequence: Synthetic oligonucleotide
cauucaccuguacguuagg

SEQ ID NO: 551946 - RNA, 19 nt, Artificial Sequence
  Description of Artificial Sequence: Synthetic oligonucleotide
ugccaaguccagaggggcu

SEQ ID NO: 551947 - RNA, 19 nt, Artificial Sequence
  Description of Artificial Sequence: Synthetic oligonucleotide
ugauaaugacucuguccuu

SEQ ID NO: 551948 - RNA, 19 nt, Artificial Sequence
  Description of Artificial Sequence: Synthetic oligonucleotide
gaccuuugugcaggaaggc

SEQ ID NO: 551949 - RNA, 19 nt, Artificial Sequence
  Description of Artificial Sequence: Synthetic oligonucleotide
gucaaagcugauaaugacu

SEQ ID NO: 551950 - RNA, 19 nt, Artificial Sequence
  Description of Artificial Sequence: Synthetic oligonucleotide
ggagcagggcgacccaugg

SEQ ID NO: 551951 - RNA, 19 nt, Artificial Sequence
  Description of Artificial Sequence: Synthetic oligonucleotide
guacguuaggcagggaguc

SEQ ID NO: 551952 - RNA, 19 nt, Artificial Sequence
  Description of Artificial Sequence: Synthetic oligonucleotide
ucuugugggcuuucuuaua

SEQ ID NO: 551953 - RNA, 19 nt, Artificial Sequence
  Description of Artificial Sequence: Synthetic oligonucleotide
cucacagacaggguaguga

SEQ ID NO: 551954 - RNA, 19 nt, Artificial Sequence
  Description of Artificial Sequence: Synthetic oligonucleotide
ucgucuccugcggagguca

SEQ ID NO: 551955 - RNA, 19 nt, Artificial Sequence
  Description of Artificial Sequence: Synthetic oligonucleotide
caacguugcucuccggguc

SEQ ID NO: 551956 - RNA, 19 nt, Artificial Sequence
  Description of Artificial Sequence: Synthetic oligonucleotide
ucuucgcuccccgcccucg

SEQ ID NO: 551957 - RNA, 19 nt, Artificial Sequence
  Description of Artificial Sequence: Synthetic oligonucleotide
ggcacugaccuuugugcag

SEQ ID NO: 551958 - RNA, 19 nt, Artificial Sequence
  Description of Artificial Sequence: Synthetic oligonucleotide
cuaauuugccggcugugua

SEQ ID NO: 551959 - RNA, 19 nt, Artificial Sequence
  Description of Artificial Sequence: Synthetic oligonucleotide
uuugccggcuguguaccac

SEQ ID NO: 551960 - RNA, 19 nt, Artificial Sequence
  Description of Artificial Sequence: Synthetic oligonucleotide
cuagaucuccaggcaacug

SEQ ID NO: 551961 - RNA, 19 nt, Artificial Sequence
  Description of Artificial Sequence: Synthetic oligonucleotide
ggaaucggaggcucauggc

SEQ ID NO: 551962 - RNA, 19 nt, Artificial Sequence
  Description of Artificial Sequence: Synthetic oligonucleotide
gucucgguuggguuuggca

SEQ ID NO: 551963 - RNA, 19 nt, Artificial Sequence
  Description of Artificial Sequence: Synthetic oligonucleotide
ugcaaaggcuguggagggc

SEQ ID NO: 551964 - RNA, 19 nt, Artificial Sequence
  Description of Artificial Sequence: Synthetic oligonucleotide
acugucuaauuugccggcu

SEQ ID NO: 551965 - RNA, 19 nt, Artificial Sequence
  Description of Artificial Sequence: Synthetic oligonucleotide
agcggccauugcuuccuuc

SEQ ID NO: 551966 - RNA, 19 nt, Artificial Sequence
  Description of Artificial Sequence: Synthetic oligonucleotide
caagggaaccuccaccaaa

SEQ ID NO: 551967 - RNA, 19 nt, Artificial Sequence
  Description of Artificial Sequence: Synthetic oligonucleotide
ucucuucgcuccccgcccu

SEQ ID NO: 551968 - RNA, 19 nt, Artificial Sequence
  Description of Artificial Sequence: Synthetic oligonucleotide
uacguuaggcagggaguca

SEQ ID NO: 551969 - RNA, 19 nt, Artificial Sequence
  Description of Artificial Sequence: Synthetic oligonucleotide
gucauucaccuguacguua

SEQ ID NO: 551970 - RNA, 19 nt, Artificial Sequence
  Description of Artificial Sequence: Synthetic oligonucleotide
cucacgcuuccucuagauc

SEQ ID NO: 551971 - RNA, 19 nt, Artificial Sequence
  Description of Artificial Sequence: Synthetic oligonucleotide
ccuuugugcaggaaggcca

SEQ ID NO: 551972 - RNA, 19 nt, Artificial Sequence
  Description of Artificial Sequence: Synthetic oligonucleotide
gaccagggcgauccagcug

SEQ ID NO: 551973 - RNA, 19 nt, Artificial Sequence
  Description of Artificial Sequence: Synthetic oligonucleotide
ggucucgacucuuccuucc

SEQ ID NO: 551974 - RNA, 19 nt, Artificial Sequence
  Description of Artificial Sequence: Synthetic oligonucleotide
cagguaugugaaccccuug

SEQ ID NO: 551975 - RNA, 19 nt, Artificial Sequence
  Description of Artificial Sequence: Synthetic oligonucleotide
aucggaggcucauggcggu

SEQ ID NO: 551976 - RNA, 19 nt, Artificial Sequence
  Description of Artificial Sequence: Synthetic oligonucleotide
cagggcgacccaugggagc

SEQ ID NO: 551977 - RNA, 19 nt, Artificial Sequence
  Description of Artificial Sequence: Synthetic oligonucleotide
caacaaccacaaugggguc

SEQ ID NO: 551978 - RNA, 19 nt, Artificial Sequence
  Description of Artificial Sequence: Synthetic oligonucleotide
ccaucaccugccaccagcg

SEQ ID NO: 551979 - RNA, 19 nt, Artificial Sequence
  Description of Artificial Sequence: Synthetic oligonucleotide
augcucguccaaggccucc

SEQ ID NO: 551980 - RNA, 19 nt, Artificial Sequence
  Description of Artificial Sequence: Synthetic oligonucleotide
gggcgauccagcugugcgg

SEQ ID NO: 551981 - RNA, 19 nt, Artificial Sequence
  Description of Artificial Sequence: Synthetic oligonucleotide
ugaucaccugcagcaguac

SEQ ID NO: 551982 - RNA, 19 nt, Artificial Sequence
  Description of Artificial Sequence: Synthetic oligonucleotide
gguagugacugugcugacc

SEQ ID NO: 551983 - RNA, 19 nt, Artificial Sequence
  Description of Artificial Sequence: Synthetic oligonucleotide
cugcccuugccaagggcug

SEQ ID NO: 551984 - RNA, 19 nt, Artificial Sequence
  Description of Artificial Sequence: Synthetic oligonucleotide
uggcgacuuccucugcaaa

SEQ ID NO: 551985 - RNA, 19 nt, Artificial Sequence
  Description of Artificial Sequence: Synthetic oligonucleotide
agggcgacccaugggagcu

SEQ ID NO: 551986 - RNA, 19 nt, Artificial Sequence
  Description of Artificial Sequence: Synthetic oligonucleotide
agcagguaugugaaccccu

SEQ ID NO: 551987 - RNA, 19 nt, Artificial Sequence
  Description of Artificial Sequence: Synthetic oligonucleotide
auaucggcaccagcggcca

SEQ ID NO: 551988 - RNA, 19 nt, Artificial Sequence
  Description of Artificial Sequence: Synthetic oligonucleotide
cugucgcugcugucgaauc

SEQ ID NO: 551989 - RNA, 19 nt, Artificial Sequence
  Description of Artificial Sequence: Synthetic oligonucleotide
acguuaggcagggagucaa

SEQ ID NO: 551990 - RNA, 19 nt, Artificial Sequence
  Description of Artificial Sequence: Synthetic oligonucleotide
caucaccugccaccagcgc

SEQ ID NO: 551991 - RNA, 19 nt, Artificial Sequence
  Description of Artificial Sequence: Synthetic oligonucleotide
gacgcccaggccgacccag

SEQ ID NO: 551992 - RNA, 19 nt, Artificial Sequence
  Description of Artificial Sequence: Synthetic oligonucleotide
cuguaccugcugcucuuug

SEQ ID NO: 551993 - RNA, 19 nt, Artificial Sequence
  Description of Artificial Sequence: Synthetic oligonucleotide
aucucagcccucccggcuu

SEQ ID NO: 551994 - RNA, 19 nt, Artificial Sequence
  Description of Artificial Sequence: Synthetic oligonucleotide
cuuccuuucaagggaaccu

SEQ ID NO: 551995 - RNA, 19 nt, Artificial Sequence
  Description of Artificial Sequence: Synthetic oligonucleotide
cuuugugcgagagccucca

SEQ ID NO: 551996 - RNA, 19 nt, Artificial Sequence
  Description of Artificial Sequence: Synthetic oligonucleotide
gguaucuccucgccggcca

SEQ ID NO: 551997 - RNA, 19 nt, Artificial Sequence
  Description of Artificial Sequence: Synthetic oligonucleotide
agccaccuugagugaagca

SEQ ID NO: 551998 - RNA, 19 nt, Artificial Sequence
  Description of Artificial Sequence: Synthetic oligonucleotide
ggcuguguaccaccuguac

SEQ ID NO: 551999 - RNA, 19 nt, Artificial Sequence
  Description of Artificial Sequence: Synthetic oligonucleotide
uggcggugggccucgccca

SEQ ID NO: 552000 - RNA, 19 nt, Artificial Sequence
  Description of Artificial Sequence: Synthetic oligonucleotide
ucucagcccucccggcuuc

SEQ ID NO: 552001 - RNA, 19 nt, Artificial Sequence
  Description of Artificial Sequence: Synthetic oligonucleotide
ccaccacuuugucaugagg

SEQ ID NO: 552002 - RNA, 19 nt, Artificial Sequence
  Description of Artificial Sequence: Synthetic oligonucleotide
ggacccuuaaucugggccu

SEQ ID NO: 552003 - RNA, 19 nt, Artificial Sequence
  Description of Artificial Sequence: Synthetic oligonucleotide
cugguccucucucaguuua

SEQ ID NO: 552004 - RNA, 19 nt, Artificial Sequence
  Description of Artificial Sequence: Synthetic oligonucleotide
gaggccagaucccgucguc

SEQ ID NO: 552005 - RNA, 19 nt, Artificial Sequence
  Description of Artificial Sequence: Synthetic oligonucleotide
cuucgcuccccgcccucgg

SEQ ID NO: 552006 - RNA, 19 nt, Artificial Sequence
  Description of Artificial Sequence: Synthetic oligonucleotide
cucauggcggugggccucg

SEQ ID NO: 552007 - RNA, 19 nt, Artificial Sequence
  Description of Artificial Sequence: Synthetic oligonucleotide
uccucgccggccacuucga

SEQ ID NO: 552008 - RNA, 19 nt, Artificial Sequence
  Description of Artificial Sequence: Synthetic oligonucleotide
agccugccggagcugggug

SEQ ID NO: 552009 - RNA, 19 nt, Artificial Sequence
  Description of Artificial Sequence: Synthetic oligonucleotide
ucccgucgucuccugcgga

SEQ ID NO: 552010 - RNA, 19 nt, Artificial Sequence
  Description of Artificial Sequence: Synthetic oligonucleotide
agagucugccuugggcacu

SEQ ID NO: 552011 - RNA, 19 nt, Artificial Sequence
  Description of Artificial Sequence: Synthetic oligonucleotide
ucuggacucuuggguggug

SEQ ID NO: 552012 - RNA, 19 nt, Artificial Sequence
  Description of Artificial Sequence: Synthetic oligonucleotide
ggaggcucauggcgguggg

SEQ ID NO: 552013 - RNA, 19 nt, Artificial Sequence
  Description of Artificial Sequence: Synthetic oligonucleotide
accucugggugagaacccu

SEQ ID NO: 552014 - RNA, 19 nt, Artificial Sequence
  Description of Artificial Sequence: Synthetic oligonucleotide
ggcgauccagcugugcggc

SEQ ID NO: 552015 - RNA, 19 nt, Artificial Sequence
  Description of Artificial Sequence: Synthetic oligonucleotide
uucgcuccccgcccucggu

SEQ ID NO: 552016 - RNA, 19 nt, Artificial Sequence
  Description of Artificial Sequence: Synthetic oligonucleotide
caugcucguccaaggccuc

SEQ ID NO: 552017 - RNA, 19 nt, Artificial Sequence
  Description of Artificial Sequence: Synthetic oligonucleotide
aggucccucacagccccag

SEQ ID NO: 552018 - RNA, 19 nt, Artificial Sequence
  Description of Artificial Sequence: Synthetic oligonucleotide
ccucucaccaacguugcuc

SEQ ID NO: 552019 - RNA, 19 nt, Artificial Sequence
  Description of Artificial Sequence: Synthetic oligonucleotide
caccagcggccauugcuuc

SEQ ID NO: 552020 - RNA, 19 nt, Artificial Sequence
  Description of Artificial Sequence: Synthetic oligonucleotide
ggugccccagcagagucug

SEQ ID NO: 552021 - RNA, 19 nt, Artificial Sequence
  Description of Artificial Sequence: Synthetic oligonucleotide
accucucaccaacguugcu

SEQ ID NO: 552022 - RNA, 19 nt, Artificial Sequence
  Description of Artificial Sequence: Synthetic oligonucleotide
ucucaccaacguugcucuc

SEQ ID NO: 552023 - RNA, 19 nt, Artificial Sequence
  Description of Artificial Sequence: Synthetic oligonucleotide
uaccgccaucccagguucu

SEQ ID NO: 552024 - RNA, 19 nt, Artificial Sequence
  Description of Artificial Sequence: Synthetic oligonucleotide
agagcaccaccugggcuga

SEQ ID NO: 552025 - RNA, 19 nt, Artificial Sequence
  Description of Artificial Sequence: Synthetic oligonucleotide
caccaacguugcucuccgg

SEQ ID NO: 552026 - RNA, 19 nt, Artificial Sequence
  Description of Artificial Sequence: Synthetic oligonucleotide
cauggcggugggccucgcc

SEQ ID NO: 552027 - RNA, 19 nt, Artificial Sequence
  Description of Artificial Sequence: Synthetic oligonucleotide
ggaggucauucaccuguac

SEQ ID NO: 552028 - RNA, 19 nt, Artificial Sequence
  Description of Artificial Sequence: Synthetic oligonucleotide
ccacugucuccccagcaug

SEQ ID NO: 552029 - RNA, 19 nt, Artificial Sequence
  Description of Artificial Sequence: Synthetic oligonucleotide
cuggcgacuuccucugcaa

SEQ ID NO: 552030 - RNA, 19 nt, Artificial Sequence
  Description of Artificial Sequence: Synthetic oligonucleotide
ucccgcccucgguaucucc

SEQ ID NO: 552031 - RNA, 19 nt, Artificial Sequence
  Description of Artificial Sequence: Synthetic oligonucleotide
ggcgcugcggaggucauuc

SEQ ID NO: 552032 - RNA, 19 nt, Artificial Sequence
  Description of Artificial Sequence: Synthetic oligonucleotide
accuugagugaagcacccu

SEQ ID NO: 552033 - RNA, 19 nt, Artificial Sequence
  Description of Artificial Sequence: Synthetic oligonucleotide
ucccggcuucucuucgcuc

SEQ ID NO: 552034 - RNA, 19 nt, Artificial Sequence
  Description of Artificial Sequence: Synthetic oligonucleotide
gcucuccgggucaauuucc

SEQ ID NO: 552035 - RNA, 19 nt, Artificial Sequence
  Description of Artificial Sequence: Synthetic oligonucleotide
aggggcuucuucgcucaca

SEQ ID NO: 552036 - RNA, 19 nt, Artificial Sequence
  Description of Artificial Sequence: Synthetic oligonucleotide
ccgccuccacuuuaauccc

SEQ ID NO: 552037 - RNA, 19 nt, Artificial Sequence
  Description of Artificial Sequence: Synthetic oligonucleotide
ggccagaucccgucgucuc

SEQ ID NO: 552038 - RNA, 19 nt, Artificial Sequence
  Description of Artificial Sequence: Synthetic oligonucleotide
gaccccucccgccuucugu

SEQ ID NO: 552039 - RNA, 19 nt, Artificial Sequence
  Description of Artificial Sequence: Synthetic oligonucleotide
gaccuuugucagggauggc

SEQ ID NO: 552040 - RNA, 19 nt, Artificial Sequence
  Description of Artificial Sequence: Synthetic oligonucleotide
aguuuagucugggccccuu

SEQ ID NO: 552041 - RNA, 19 nt, Artificial Sequence
  Description of Artificial Sequence: Synthetic oligonucleotide
cagggcgauccagcugugc

SEQ ID NO: 552042 - RNA, 19 nt, Artificial Sequence
  Description of Artificial Sequence: Synthetic oligonucleotide
ccuuaaucugggccugcuc

SEQ ID NO: 552043 - RNA, 19 nt, Artificial Sequence
  Description of Artificial Sequence: Synthetic oligonucleotide
gaguaccgccaucccaggu

SEQ ID NO: 552044 - RNA, 19 nt, Artificial Sequence
  Description of Artificial Sequence: Synthetic oligonucleotide
cccucgguaucuccucgcc

SEQ ID NO: 552045 - RNA, 19 nt, Artificial Sequence
  Description of Artificial Sequence: Synthetic oligonucleotide
cccgucgucuccugcggag

SEQ ID NO: 552046 - RNA, 19 nt, Artificial Sequence
  Description of Artificial Sequence: Synthetic oligonucleotide
uaucggcaccagcggccau

SEQ ID NO: 552047 - RNA, 19 nt, Artificial Sequence
  Description of Artificial Sequence: Synthetic oligonucleotide
gcaugcucguccaaggccu

SEQ ID NO: 552048 - RNA, 19 nt, Artificial Sequence
  Description of Artificial Sequence: Synthetic oligonucleotide
caccucuacaggacccuua

SEQ ID NO: 552049 - RNA, 19 nt, Artificial Sequence
  Description of Artificial Sequence: Synthetic oligonucleotide
agcuagccugggcgcagaa

SEQ ID NO: 552050 - RNA, 19 nt, Artificial Sequence
  Description of Artificial Sequence: Synthetic oligonucleotide
gucucgacucuuccuuccu

SEQ ID NO: 552051 - RNA, 19 nt, Artificial Sequence
  Description of Artificial Sequence: Synthetic oligonucleotide
aggucucgguuggguuugg

SEQ ID NO: 552052 - RNA, 19 nt, Artificial Sequence
  Description of Artificial Sequence: Synthetic oligonucleotide
uucuuaccucugggugaga

SEQ ID NO: 552053 - RNA, 19 nt, Artificial Sequence
  Description of Artificial Sequence: Synthetic oligonucleotide
ggugagaacccugaccuuu

SEQ ID NO: 552054 - RNA, 19 nt, Artificial Sequence
  Description of Artificial Sequence: Synthetic oligonucleotide
ccucuagaucuccaggcaa

SEQ ID NO: 552055 - RNA, 19 nt, Artificial Sequence
  Description of Artificial Sequence: Synthetic oligonucleotide
cacugaccuuugugcagga

SEQ ID NO: 552056 - RNA, 19 nt, Artificial Sequence
  Description of Artificial Sequence: Synthetic oligonucleotide
gggcgcagaaucaggaucu

SEQ ID NO: 552057 - RNA, 19 nt, Artificial Sequence
  Description of Artificial Sequence: Synthetic oligonucleotide
ggcgacuuccucugcaaau

SEQ ID NO: 552058 - RNA, 19 nt, Artificial Sequence
  Description of Artificial Sequence: Synthetic oligonucleotide
cagggcuugcucgggucuc

SEQ ID NO: 552059 - RNA, 19 nt, Artificial Sequence
  Description of Artificial Sequence: Synthetic oligonucleotide
gcucacagacaggguagug

SEQ ID NO: 552060 - RNA, 19 nt, Artificial Sequence
  Description of Artificial Sequence: Synthetic oligonucleotide
cccaucgucgccccuguga

SEQ ID NO: 552061 - RNA, 19 nt, Artificial Sequence
  Description of Artificial Sequence: Synthetic oligonucleotide
cucuucgcuccccgcccuc

SEQ ID NO: 552062 - RNA, 19 nt, Artificial Sequence
  Description of Artificial Sequence: Synthetic oligonucleotide
cucccuucacgcucccucu

SEQ ID NO: 552063 - RNA, 19 nt, Artificial Sequence
  Description of Artificial Sequence: Synthetic oligonucleotide
cucgguuggguuuggcauu

SEQ ID NO: 552064 - RNA, 19 nt, Artificial Sequence
  Description of Artificial Sequence: Synthetic oligonucleotide
aucccgcccucgguaucuc

SEQ ID NO: 552065 - RNA, 19 nt, Artificial Sequence
  Description of Artificial Sequence: Synthetic oligonucleotide
gcccucgguaucuccucgc

SEQ ID NO: 552066 - RNA, 19 nt, Artificial Sequence
  Description of Artificial Sequence: Synthetic oligonucleotide
gcacuuucaggucucgguu

SEQ ID NO: 552067 - RNA, 19 nt, Artificial Sequence
  Description of Artificial Sequence: Synthetic oligonucleotide
ccacuuuaaucccgcccuc

SEQ ID NO: 552068 - RNA, 19 nt, Artificial Sequence
  Description of Artificial Sequence: Synthetic oligonucleotide
gcgcauucugcuccacaga

SEQ ID NO: 552069 - RNA, 19 nt, Artificial Sequence
  Description of Artificial Sequence: Synthetic oligonucleotide
ggcgacccaugggagcucc

SEQ ID NO: 552070 - RNA, 19 nt, Artificial Sequence
  Description of Artificial Sequence: Synthetic oligonucleotide
guugcucuccgggucaauu

SEQ ID NO: 552071 - RNA, 19 nt, Artificial Sequence
  Description of Artificial Sequence: Synthetic oligonucleotide
ugccuugaccagggcgauc

SEQ ID NO: 552072 - RNA, 19 nt, Artificial Sequence
  Description of Artificial Sequence: Synthetic oligonucleotide
gcccuugccaagggcuggg

SEQ ID NO: 552073 - RNA, 19 nt, Artificial Sequence
  Description of Artificial Sequence: Synthetic oligonucleotide
gucgucuccugcggagguc

SEQ ID NO: 552074 - RNA, 19 nt, Artificial Sequence
  Description of Artificial Sequence: Synthetic oligonucleotide
cuccccgcccucggucucc

SEQ ID NO: 552075 - RNA, 19 nt, Artificial Sequence
  Description of Artificial Sequence: Synthetic oligonucleotide
ucagcccucccggcuucuc

SEQ ID NO: 552076 - RNA, 19 nt, Artificial Sequence
  Description of Artificial Sequence: Synthetic oligonucleotide
cuccaggcaacugucuaau

SEQ ID NO: 552077 - RNA, 19 nt, Artificial Sequence
  Description of Artificial Sequence: Synthetic oligonucleotide
cacugguuccaagucccua

SEQ ID NO: 552078 - RNA, 19 nt, Artificial Sequence
  Description of Artificial Sequence: Synthetic oligonucleotide
cugccggagcugggugucc

SEQ ID NO: 552079 - RNA, 19 nt, Artificial Sequence
  Description of Artificial Sequence: Synthetic oligonucleotide
ggcuugcucgggucucuuc

SEQ ID NO: 552080 - RNA, 19 nt, Artificial Sequence
  Description of Artificial Sequence: Synthetic oligonucleotide
ccgucgucuccugcggagg

SEQ ID NO: 552081 - RNA, 19 nt, Artificial Sequence
  Description of Artificial Sequence: Synthetic oligonucleotide
ccaacguugcucuccgggu

SEQ ID NO: 552082 - RNA, 19 nt, Artificial Sequence
  Description of Artificial Sequence: Synthetic oligonucleotide
gucuccugcggaggucaga

SEQ ID NO: 552083 - RNA, 19 nt, Artificial Sequence
  Description of Artificial Sequence: Synthetic oligonucleotide
cugggcgcagaaucaggau

SEQ ID NO: 552084 - RNA, 19 nt, Artificial Sequence
  Description of Artificial Sequence: Synthetic oligonucleotide
gugcgagagccuccagccu

SEQ ID NO: 552085 - RNA, 19 nt, Artificial Sequence
  Description of Artificial Sequence: Synthetic oligonucleotide
acguugcucuccgggucaa

SEQ ID NO: 552086 - RNA, 19 nt, Artificial Sequence
  Description of Artificial Sequence: Synthetic oligonucleotide
ccuugagugaagcacccuu

SEQ ID NO: 552087 - RNA, 19 nt, Artificial Sequence
  Description of Artificial Sequence: Synthetic oligonucleotide
ccuugccaagggcugggca

SEQ ID NO: 552088 - RNA, 19 nt, Artificial Sequence
  Description of Artificial Sequence: Synthetic oligonucleotide
ggucauucaccuguacguu

SEQ ID NO: 552089 - RNA, 19 nt, Artificial Sequence
  Description of Artificial Sequence: Synthetic oligonucleotide
ccgggucaauuuccacgag

SEQ ID NO: 552090 - RNA, 19 nt, Artificial Sequence
  Description of Artificial Sequence: Synthetic oligonucleotide
cggccauugcuuccuucgc

SEQ ID NO: 552091 - RNA, 19 nt, Artificial Sequence
  Description of Artificial Sequence: Synthetic oligonucleotide
cgcccucgguaucuccucg

SEQ ID NO: 552092 - RNA, 19 nt, Artificial Sequence
  Description of Artificial Sequence: Synthetic oligonucleotide
gccucacuucuuaccucug

SEQ ID NO: 552093 - RNA, 19 nt, Artificial Sequence
  Description of Artificial Sequence: Synthetic oligonucleotide
ggcggugggccucgcccac

SEQ ID NO: 552094 - RNA, 19 nt, Artificial Sequence
  Description of Artificial Sequence: Synthetic oligonucleotide
cugggccgccuccacuuua

SEQ ID NO: 552095 - RNA, 19 nt, Artificial Sequence
  Description of Artificial Sequence: Synthetic oligonucleotide
ggaccccucccgccuucug

SEQ ID NO: 552096 - RNA, 19 nt, Artificial Sequence
  Description of Artificial Sequence: Synthetic oligonucleotide
ccucuggcggcuuuggcuu

SEQ ID NO: 552097 - RNA, 19 nt, Artificial Sequence
  Description of Artificial Sequence: Synthetic oligonucleotide
ccgcccucgguaucuccuc

SEQ ID NO: 552098 - RNA, 19 nt, Artificial Sequence
  Description of Artificial Sequence: Synthetic oligonucleotide
gccaccucucaccaacguu

SEQ ID NO: 552099 - RNA, 19 nt, Artificial Sequence
  Description of Artificial Sequence: Synthetic oligonucleotide
ggccaccucucaccaacgu

SEQ ID NO: 552100 - RNA, 19 nt, Artificial Sequence
  Description of Artificial Sequence: Synthetic oligonucleotide
gcccucccggcuucucuuc

SEQ ID NO: 552101 - RNA, 19 nt, Artificial Sequence
  Description of Artificial Sequence: Synthetic oligonucleotide
ggacuuugugcgagagccu

SEQ ID NO: 552102 - RNA, 19 nt, Artificial Sequence
  Description of Artificial Sequence: Synthetic oligonucleotide
acgcccaggccgacccaga

SEQ ID NO: 552103 - RNA, 19 nt, Artificial Sequence
  Description of Artificial Sequence: Synthetic oligonucleotide
ggccucgcccacagggaca

SEQ ID NO: 552104 - RNA, 19 nt, Artificial Sequence
  Description of Artificial Sequence: Synthetic oligonucleotide
ggcguucuugugggcuuuc

SEQ ID NO: 552105 - RNA, 19 nt, Artificial Sequence
  Description of Artificial Sequence: Synthetic oligonucleotide
ccagggcgauccagcugug

SEQ ID NO: 552106 - RNA, 19 nt, Artificial Sequence
  Description of Artificial Sequence: Synthetic oligonucleotide
cccaucucuugggguggag

SEQ ID NO: 552107 - RNA, 19 nt, Artificial Sequence
  Description of Artificial Sequence: Synthetic oligonucleotide
ggggcguucuugugggcuu

SEQ ID NO: 552108 - RNA, 19 nt, Artificial Sequence
  Description of Artificial Sequence: Synthetic oligonucleotide
caguuuagucugggccccu

SEQ ID NO: 552109 - RNA, 19 nt, Artificial Sequence
  Description of Artificial Sequence: Synthetic oligonucleotide
gugcggcuucuugcuucuc

SEQ ID NO: 552110 - RNA, 19 nt, Artificial Sequence
  Description of Artificial Sequence: Synthetic oligonucleotide
ccagggcuugcucgggucu

SEQ ID NO: 552111 - RNA, 19 nt, Artificial Sequence
  Description of Artificial Sequence: Synthetic oligonucleotide
gggugagaacccugaccuu

SEQ ID NO: 552112 - RNA, 19 nt, Artificial Sequence
  Description of Artificial Sequence: Synthetic oligonucleotide
cccgcccucgguaucuccu

SEQ ID NO: 552113 - RNA, 19 nt, Artificial Sequence
  Description of Artificial Sequence: Synthetic oligonucleotide
ccugucgcugcugucgaau

SEQ ID NO: 552114 - RNA, 19 nt, Artificial Sequence
  Description of Artificial Sequence: Synthetic oligonucleotide
cccugaccuuugucaggga

SEQ ID NO: 552115 - RNA, 19 nt, Artificial Sequence
  Description of Artificial Sequence: Synthetic oligonucleotide
cggaggucauucaccugua

SEQ ID NO: 552116 - RNA, 19 nt, Artificial Sequence
  Description of Artificial Sequence: Synthetic oligonucleotide
gcacugguuccaagucccu

SEQ ID NO: 552117 - RNA, 19 nt, Artificial Sequence
  Description of Artificial Sequence: Synthetic oligonucleotide
ccccacugccagggcuugc

SEQ ID NO: 552118 - RNA, 19 nt, Artificial Sequence
  Description of Artificial Sequence: Synthetic oligonucleotide
gggcgacccaugggagcuc

SEQ ID NO: 552119 - RNA, 19 nt, Artificial Sequence
  Description of Artificial Sequence: Synthetic oligonucleotide
gcgauccagcugugcggcu

SEQ ID NO: 552120 - RNA, 19 nt, Artificial Sequence
  Description of Artificial Sequence: Synthetic oligonucleotide
gcuguaccugcugcucuuu

SEQ ID NO: 552121 - RNA, 19 nt, Artificial Sequence
  Description of Artificial Sequence: Synthetic oligonucleotide
cucagcccucccggcuucu

SEQ ID NO: 552122 - RNA, 19 nt, Artificial Sequence
  Description of Artificial Sequence: Synthetic oligonucleotide
ccaggacgcccaggccgac

SEQ ID NO: 552123 - RNA, 19 nt, Artificial Sequence
  Description of Artificial Sequence: Synthetic oligonucleotide
gcgacccaugggagcucca

SEQ ID NO: 552124 - RNA, 19 nt, Artificial Sequence
  Description of Artificial Sequence: Synthetic oligonucleotide
cgucgucuccugcggaggu

SEQ ID NO: 552125 - RNA, 19 nt, Artificial Sequence
  Description of Artificial Sequence: Synthetic oligonucleotide
gcaccucuacaggacccuu

SEQ ID NO: 552126 - RNA, 19 nt, Artificial Sequence
  Description of Artificial Sequence: Synthetic oligonucleotide
cggcaccagcggccauugc

SEQ ID NO: 552127 - RNA, 19 nt, Artificial Sequence
  Description of Artificial Sequence: Synthetic oligonucleotide
ccucgcccacagggacagc

SEQ ID NO: 552128 - RNA, 19 nt, Artificial Sequence
  Description of Artificial Sequence: Synthetic oligonucleotide
ccccgcccucggucuccac

SEQ ID NO: 552129 - RNA, 19 nt, Artificial Sequence
  Description of Artificial Sequence: Synthetic oligonucleotide
gggcuugcucgggucucuu

SEQ ID NO: 552130 - RNA, 19 nt, Artificial Sequence
  Description of Artificial Sequence: Synthetic oligonucleotide
gggcgcugcggaggucauu

SEQ ID NO: 552131 - RNA, 19 nt, Artificial Sequence
  Description of Artificial Sequence: Synthetic oligonucleotide
cgccggccacuucgagcuu

SEQ ID NO: 552132 - RNA, 19 nt, Artificial Sequence
  Description of Artificial Sequence: Synthetic oligonucleotide
uugacgauagccaugaugg

SEQ ID NO: 552133 - RNA, 19 nt, Artificial Sequence
  Description of Artificial Sequence: Synthetic oligonucleotide
aaauagagaacagaugccc

SEQ ID NO: 552134 - RNA, 19 nt, Artificial Sequence
  Description of Artificial Sequence: Synthetic oligonucleotide
aaguguucaacgcugaagg

SEQ ID NO: 552135 - RNA, 19 nt, Artificial Sequence
  Description of Artificial Sequence: Synthetic oligonucleotide
aauccaauuccauggaggg

SEQ ID NO: 552136 - RNA, 19 nt, Artificial Sequence
  Description of Artificial Sequence: Synthetic oligonucleotide
ugucgaucaucuuagagcg

SEQ ID NO: 552137 - RNA, 19 nt, Artificial Sequence
  Description of Artificial Sequence: Synthetic oligonucleotide
uagauuagcgcuaaggagc

SEQ ID NO: 552138 - RNA, 19 nt, Artificial Sequence
  Description of Artificial Sequence: Synthetic oligonucleotide
uacucggggaaacagaugg

SEQ ID NO: 552139 - RNA, 19 nt, Artificial Sequence
  Description of Artificial Sequence: Synthetic oligonucleotide
aauagauuucuacuuaaaa

SEQ ID NO: 552140 - RNA, 19 nt, Artificial Sequence
  Description of Artificial Sequence: Synthetic oligonucleotide
aagucuacgagaaugagca

SEQ ID NO: 552141 - RNA, 19 nt, Artificial Sequence
  Description of Artificial Sequence: Synthetic oligonucleotide
aacggcacgauacugccgg

SEQ ID NO: 552142 - RNA, 19 nt, Artificial Sequence
  Description of Artificial Sequence: Synthetic oligonucleotide
aacaauuccauaaaacaug

SEQ ID NO: 552143 - RNA, 19 nt, Artificial Sequence
  Description of Artificial Sequence: Synthetic oligonucleotide
uugucgaucaucuuagagc

SEQ ID NO: 552144 - RNA, 19 nt, Artificial Sequence
  Description of Artificial Sequence: Synthetic oligonucleotide
ugguguuggacaaagccgg

SEQ ID NO: 552145 - RNA, 19 nt, Artificial Sequence
  Description of Artificial Sequence: Synthetic oligonucleotide
aaacacaaacugcacguuc

SEQ ID NO: 552146 - RNA, 19 nt, Artificial Sequence
  Description of Artificial Sequence: Synthetic oligonucleotide
gcuacauuuagguuaaugg

SEQ ID NO: 552147 - RNA, 19 nt, Artificial Sequence
  Description of Artificial Sequence: Synthetic oligonucleotide
uuuaagucuacgagaauga

SEQ ID NO: 552148 - RNA, 19 nt, Artificial Sequence
  Description of Artificial Sequence: Synthetic oligonucleotide
acgaucagaaaauagagaa

SEQ ID NO: 552149 - RNA, 19 nt, Artificial Sequence
  Description of Artificial Sequence: Synthetic oligonucleotide
acauuuagguuaauggagc

SEQ ID NO: 552150 - RNA, 19 nt, Artificial Sequence
  Description of Artificial Sequence: Synthetic oligonucleotide
uuuagguuaauggagccug

SEQ ID NO: 552151 - RNA, 19 nt, Artificial Sequence
  Description of Artificial Sequence: Synthetic oligonucleotide
uaagucuacgagaaugagc

SEQ ID NO: 552152 - RNA, 19 nt, Artificial Sequence
  Description of Artificial Sequence: Synthetic oligonucleotide
cuagauuagcgcuaaggag

SEQ ID NO: 552153 - RNA, 19 nt, Artificial Sequence
  Description of Artificial Sequence: Synthetic oligonucleotide
caacgaucagaaaauagag

SEQ ID NO: 552154 - RNA, 19 nt, Artificial Sequence
  Description of Artificial Sequence: Synthetic oligonucleotide
acaucuugaaguguaaguc

SEQ ID NO: 552155 - RNA, 19 nt, Artificial Sequence
  Description of Artificial Sequence: Synthetic oligonucleotide
agaugggagaagcagcugg

SEQ ID NO: 552156 - RNA, 19 nt, Artificial Sequence
  Description of Artificial Sequence: Synthetic oligonucleotide
aacgcugaaggacccgggc

SEQ ID NO: 552157 - RNA, 19 nt, Artificial Sequence
  Description of Artificial Sequence: Synthetic oligonucleotide
aggucauucagguaauaag

SEQ ID NO: 552158 - RNA, 19 nt, Artificial Sequence
  Description of Artificial Sequence: Synthetic oligonucleotide
acaagggugggcuucgaac

SEQ ID NO: 552159 - RNA, 19 nt, Artificial Sequence
  Description of Artificial Sequence: Synthetic oligonucleotide
agaaugagcagguggacug

SEQ ID NO: 552160 - RNA, 19 nt, Artificial Sequence
  Description of Artificial Sequence: Synthetic oligonucleotide
cacgcagacacacucaagg

SEQ ID NO: 552161 - RNA, 19 nt, Artificial Sequence
  Description of Artificial Sequence: Synthetic oligonucleotide
uguaccguggccacucccg

SEQ ID NO: 552162 - RNA, 19 nt, Artificial Sequence
  Description of Artificial Sequence: Synthetic oligonucleotide
cuaaggagcuacauuuagg

SEQ ID NO: 552163 - RNA, 19 nt, Artificial Sequence
  Description of Artificial Sequence: Synthetic oligonucleotide
cauuaagcugguauucccg

SEQ ID NO: 552164 - RNA, 19 nt, Artificial Sequence
  Description of Artificial Sequence: Synthetic oligonucleotide
gaacagaugcccaggaagg

SEQ ID NO: 552165 - RNA, 19 nt, Artificial Sequence
  Description of Artificial Sequence: Synthetic oligonucleotide
uccuagauuagcgcuaagg

SEQ ID NO: 552166 - RNA, 19 nt, Artificial Sequence
  Description of Artificial Sequence: Synthetic oligonucleotide
ucuacgagaaugagcaggu

SEQ ID NO: 552167 - RNA, 19 nt, Artificial Sequence
  Description of Artificial Sequence: Synthetic oligonucleotide
auuagcgcuaaggagcuac

SEQ ID NO: 552168 - RNA, 19 nt, Artificial Sequence
  Description of Artificial Sequence: Synthetic oligonucleotide
aaacucugcaugcgcuccc

SEQ ID NO: 552169 - RNA, 19 nt, Artificial Sequence
  Description of Artificial Sequence: Synthetic oligonucleotide
guuaauggagccugggccc

SEQ ID NO: 552170 - RNA, 19 nt, Artificial Sequence
  Description of Artificial Sequence: Synthetic oligonucleotide
aaacuugcucuggauauag

SEQ ID NO: 552171 - RNA, 19 nt, Artificial Sequence
  Description of Artificial Sequence: Synthetic oligonucleotide
acacucaaggcacggaauc

SEQ ID NO: 552172 - RNA, 19 nt, Artificial Sequence
  Description of Artificial Sequence: Synthetic oligonucleotide
uucuacuuaaaaguuuucu

SEQ ID NO: 552173 - RNA, 19 nt, Artificial Sequence
  Description of Artificial Sequence: Synthetic oligonucleotide
agcccuuggaauccaauuc

SEQ ID NO: 552174 - RNA, 19 nt, Artificial Sequence
  Description of Artificial Sequence: Synthetic oligonucleotide
cuugggaaacucugcaugc

SEQ ID NO: 552175 - RNA, 19 nt, Artificial Sequence
  Description of Artificial Sequence: Synthetic oligonucleotide
cuacauuuagguuaaugga

SEQ ID NO: 552176 - RNA, 19 nt, Artificial Sequence
  Description of Artificial Sequence: Synthetic oligonucleotide
uguauauuuccuugguguc

SEQ ID NO: 552177 - RNA, 19 nt, Artificial Sequence
  Description of Artificial Sequence: Synthetic oligonucleotide
uaagcugguauucccguga

SEQ ID NO: 552178 - RNA, 19 nt, Artificial Sequence
  Description of Artificial Sequence: Synthetic oligonucleotide
aaagaugggagaagcagcu

SEQ ID NO: 552179 - RNA, 19 nt, Artificial Sequence
  Description of Artificial Sequence: Synthetic oligonucleotide
gaaugguggcgucucaugc

SEQ ID NO: 552180 - RNA, 19 nt, Artificial Sequence
  Description of Artificial Sequence: Synthetic oligonucleotide
aacuucaccucccgcgccg

SEQ ID NO: 552181 - RNA, 19 nt, Artificial Sequence
  Description of Artificial Sequence: Synthetic oligonucleotide
uuucuuagguuugucuuag

SEQ ID NO: 552182 - RNA, 19 nt, Artificial Sequence
  Description of Artificial Sequence: Synthetic oligonucleotide
gguuaauggagccugggcc

SEQ ID NO: 552183 - RNA, 19 nt, Artificial Sequence
  Description of Artificial Sequence: Synthetic oligonucleotide
ucaccccagaacaagacaa

SEQ ID NO: 552184 - RNA, 19 nt, Artificial Sequence
  Description of Artificial Sequence: Synthetic oligonucleotide
accugacaguuuuaaauag

SEQ ID NO: 552185 - RNA, 19 nt, Artificial Sequence
  Description of Artificial Sequence: Synthetic oligonucleotide
uuagguuaauggagccugg

SEQ ID NO: 552186 - RNA, 19 nt, Artificial Sequence
  Description of Artificial Sequence: Synthetic oligonucleotide
auucagguaauaagcggcc

SEQ ID NO: 552187 - RNA, 19 nt, Artificial Sequence
  Description of Artificial Sequence: Synthetic oligonucleotide
agcaccuaacagcagcaac

SEQ ID NO: 552188 - RNA, 19 nt, Artificial Sequence
  Description of Artificial Sequence: Synthetic oligonucleotide
aagcaaggaaguguucaac

SEQ ID NO: 552189 - RNA, 19 nt, Artificial Sequence
  Description of Artificial Sequence: Synthetic oligonucleotide
auagcuggcugccucauca

SEQ ID NO: 552190 - RNA, 19 nt, Artificial Sequence
  Description of Artificial Sequence: Synthetic oligonucleotide
gucuacgagaaugagcagg

SEQ ID NO: 552191 - RNA, 19 nt, Artificial Sequence
  Description of Artificial Sequence: Synthetic oligonucleotide
aaugguggcgucucaugcu

SEQ ID NO: 552192 - RNA, 19 nt, Artificial Sequence
  Description of Artificial Sequence: Synthetic oligonucleotide
aaggguguaccguggccac

SEQ ID NO: 552193 - RNA, 19 nt, Artificial Sequence
  Description of Artificial Sequence: Synthetic oligonucleotide
aaagcaaggaaguguucaa

SEQ ID NO: 552194 - RNA, 19 nt, Artificial Sequence
  Description of Artificial Sequence: Synthetic oligonucleotide
aaggaaguguucaacgcug

SEQ ID NO: 552195 - RNA, 19 nt, Artificial Sequence
  Description of Artificial Sequence: Synthetic oligonucleotide
guagacaacggcacgauac

SEQ ID NO: 552196 - RNA, 19 nt, Artificial Sequence
  Description of Artificial Sequence: Synthetic oligonucleotide
augcgcuccccucucaccc

SEQ ID NO: 552197 - RNA, 19 nt, Artificial Sequence
  Description of Artificial Sequence: Synthetic oligonucleotide
ucagguaauaagcggccga

SEQ ID NO: 552198 - RNA, 19 nt, Artificial Sequence
  Description of Artificial Sequence: Synthetic oligonucleotide
ucuuagguuugucuuaguu

SEQ ID NO: 552199 - RNA, 19 nt, Artificial Sequence
  Description of Artificial Sequence: Synthetic oligonucleotide
auuaagcugguauucccgu

SEQ ID NO: 552200 - RNA, 19 nt, Artificial Sequence
  Description of Artificial Sequence: Synthetic oligonucleotide
uuaagucuacgagaaugag

SEQ ID NO: 552201 - RNA, 19 nt, Artificial Sequence
  Description of Artificial Sequence: Synthetic oligonucleotide
ggucauucagguaauaagc

SEQ ID NO: 552202 - RNA, 19 nt, Artificial Sequence
  Description of Artificial Sequence: Synthetic oligonucleotide
agaacagagaaaagauggg

SEQ ID NO: 552203 - RNA, 19 nt, Artificial Sequence
  Description of Artificial Sequence: Synthetic oligonucleotide
aggcuuguacaccaugguc

SEQ ID NO: 552204 - RNA, 19 nt, Artificial Sequence
  Description of Artificial Sequence: Synthetic oligonucleotide
ugcguagggauguagucac

SEQ ID NO: 552205 - RNA, 19 nt, Artificial Sequence
  Description of Artificial Sequence: Synthetic oligonucleotide
aacgaucagaaaauagaga

SEQ ID NO: 552206 - RNA, 19 nt, Artificial Sequence
  Description of Artificial Sequence: Synthetic oligonucleotide
aucauccgcacgcuguggg

SEQ ID NO: 552207 - RNA, 19 nt, Artificial Sequence
  Description of Artificial Sequence: Synthetic oligonucleotide
ugacauuggcaguugucug

SEQ ID NO: 552208 - RNA, 19 nt, Artificial Sequence
  Description of Artificial Sequence: Synthetic oligonucleotide
guguauauuuccuuggugu

SEQ ID NO: 552209 - RNA, 19 nt, Artificial Sequence
  Description of Artificial Sequence: Synthetic oligonucleotide
uuuggacuuggguuagggc

SEQ ID NO: 552210 - RNA, 19 nt, Artificial Sequence
  Description of Artificial Sequence: Synthetic oligonucleotide
auuuggacuuggguuaggg

SEQ ID NO: 552211 - RNA, 19 nt, Artificial Sequence
  Description of Artificial Sequence: Synthetic oligonucleotide
ucaacgcugaaggacccgg

SEQ ID NO: 552212 - RNA, 19 nt, Artificial Sequence
  Description of Artificial Sequence: Synthetic oligonucleotide
ucacucugcgcaaugcgcu

SEQ ID NO: 552213 - RNA, 19 nt, Artificial Sequence
  Description of Artificial Sequence: Synthetic oligonucleotide
uagacaacggcacgauacu

SEQ ID NO: 552214 - RNA, 19 nt, Artificial Sequence
  Description of Artificial Sequence: Synthetic oligonucleotide
uggaauccaauuccaugga

SEQ ID NO: 552215 - RNA, 19 nt, Artificial Sequence
  Description of Artificial Sequence: Synthetic oligonucleotide
uuagggcugguguuggaca

SEQ ID NO: 552216 - RNA, 19 nt, Artificial Sequence
  Description of Artificial Sequence: Synthetic oligonucleotide
guagggagcagagucggcg

SEQ ID NO: 552217 - RNA, 19 nt, Artificial Sequence
  Description of Artificial Sequence: Synthetic oligonucleotide
uucagguaauaagcggccg

SEQ ID NO: 552218 - RNA, 19 nt, Artificial Sequence
  Description of Artificial Sequence: Synthetic oligonucleotide
gaguagggagcagagucgg

SEQ ID NO: 552219 - RNA, 19 nt, Artificial Sequence
  Description of Artificial Sequence: Synthetic oligonucleotide
uuaagcugguauucccgug

SEQ ID NO: 552220 - RNA, 19 nt, Artificial Sequence
  Description of Artificial Sequence: Synthetic oligonucleotide
gacaacggcacgauacugc

SEQ ID NO: 552221 - RNA, 19 nt, Artificial Sequence
  Description of Artificial Sequence: Synthetic oligonucleotide
ucaucuuagagcgcucggc

SEQ ID NO: 552222 - RNA, 19 nt, Artificial Sequence
  Description of Artificial Sequence: Synthetic oligonucleotide
ugcacguucuuggugucgg

SEQ ID NO: 552223 - RNA, 19 nt, Artificial Sequence
  Description of Artificial Sequence: Synthetic oligonucleotide
acggaaucacuggaaaggg

SEQ ID NO: 552224 - RNA, 19 nt, Artificial Sequence
  Description of Artificial Sequence: Synthetic oligonucleotide
uugaaguguaaguccuuga

SEQ ID NO: 552225 - RNA, 19 nt, Artificial Sequence
  Description of Artificial Sequence: Synthetic oligonucleotide
ucugcaugcgcuccccucu

SEQ ID NO: 552226 - RNA, 19 nt, Artificial Sequence
  Description of Artificial Sequence: Synthetic oligonucleotide
ucuagagucgagggagggg

SEQ ID NO: 552227 - RNA, 19 nt, Artificial Sequence
  Description of Artificial Sequence: Synthetic oligonucleotide
acucaaggcacggaaucac

SEQ ID NO: 552228 - RNA, 19 nt, Artificial Sequence
  Description of Artificial Sequence: Synthetic oligonucleotide
aagcggccgagucauuaag

SEQ ID NO: 552229 - RNA, 19 nt, Artificial Sequence
  Description of Artificial Sequence: Synthetic oligonucleotide
aacucugcaugcgcucccc

SEQ ID NO: 552230 - RNA, 19 nt, Artificial Sequence
  Description of Artificial Sequence: Synthetic oligonucleotide
guaauaagcggccgaguca

SEQ ID NO: 552231 - RNA, 19 nt, Artificial Sequence
  Description of Artificial Sequence: Synthetic oligonucleotide
acucccggcaccuuagaca

SEQ ID NO: 552232 - RNA, 19 nt, Artificial Sequence
  Description of Artificial Sequence: Synthetic oligonucleotide
uggaguaguggguaccccu

SEQ ID NO: 552233 - RNA, 19 nt, Artificial Sequence
  Description of Artificial Sequence: Synthetic oligonucleotide
aacuugcucuggauauagc

SEQ ID NO: 552234 - RNA, 19 nt, Artificial Sequence
  Description of Artificial Sequence: Synthetic oligonucleotide
gucuuugcguuuauucagg

SEQ ID NO: 552235 - RNA, 19 nt, Artificial Sequence
  Description of Artificial Sequence: Synthetic oligonucleotide
agccaugauggacuggaug

SEQ ID NO: 552236 - RNA, 19 nt, Artificial Sequence
  Description of Artificial Sequence: Synthetic oligonucleotide
ucucagguccgcaguuccg

SEQ ID NO: 552237 - RNA, 19 nt, Artificial Sequence
  Description of Artificial Sequence: Synthetic oligonucleotide
gucggcaaagucaaucugc

SEQ ID NO: 552238 - RNA, 19 nt, Artificial Sequence
  Description of Artificial Sequence: Synthetic oligonucleotide
agagggacggguguaaaca

SEQ ID NO: 552239 - RNA, 19 nt, Artificial Sequence
  Description of Artificial Sequence: Synthetic oligonucleotide
gguaauaagcggccgaguc

SEQ ID NO: 552240 - RNA, 19 nt, Artificial Sequence
  Description of Artificial Sequence: Synthetic oligonucleotide
auuccccagcaccuaacag

SEQ ID NO: 552241 - RNA, 19 nt, Artificial Sequence
  Description of Artificial Sequence: Synthetic oligonucleotide
ucggcgguggcccauccug

SEQ ID NO: 552242 - RNA, 19 nt, Artificial Sequence
  Description of Artificial Sequence: Synthetic oligonucleotide
ugguauucccgugagcgac

SEQ ID NO: 552243 - RNA, 19 nt, Artificial Sequence
  Description of Artificial Sequence: Synthetic oligonucleotide
gcuaaggagcuacauuuag

SEQ ID NO: 552244 - RNA, 19 nt, Artificial Sequence
  Description of Artificial Sequence: Synthetic oligonucleotide
ugugaaccacuuguuguug

SEQ ID NO: 552245 - RNA, 19 nt, Artificial Sequence
  Description of Artificial Sequence: Synthetic oligonucleotide
ggcaccuuagacaagggug

SEQ ID NO: 552246 - RNA, 19 nt, Artificial Sequence
  Description of Artificial Sequence: Synthetic oligonucleotide
gugcguguauauuuccuug

SEQ ID NO: 552247 - RNA, 19 nt, Artificial Sequence
  Description of Artificial Sequence: Synthetic oligonucleotide
auuuagguuaauggagccu

SEQ ID NO: 552248 - RNA, 19 nt, Artificial Sequence
  Description of Artificial Sequence: Synthetic oligonucleotide
uucccgugagcgaccaaag

SEQ ID NO: 552249 - RNA, 19 nt, Artificial Sequence
  Description of Artificial Sequence: Synthetic oligonucleotide
agauuucuacuuaaaaguu

SEQ ID NO: 552250 - RNA, 19 nt, Artificial Sequence
  Description of Artificial Sequence: Synthetic oligonucleotide
ugcugcguagggauguagu

SEQ ID NO: 552251 - RNA, 19 nt, Artificial Sequence
  Description of Artificial Sequence: Synthetic oligonucleotide
gcucccuguaaacauuugg

SEQ ID NO: 552252 - RNA, 19 nt, Artificial Sequence
  Description of Artificial Sequence: Synthetic oligonucleotide
aguguucaacgcugaagga

SEQ ID NO: 552253 - RNA, 19 nt, Artificial Sequence
  Description of Artificial Sequence: Synthetic oligonucleotide
agggcccucagugacauug

SEQ ID NO: 552254 - RNA, 19 nt, Artificial Sequence
  Description of Artificial Sequence: Synthetic oligonucleotide
uggcgucucaugcuucuug

SEQ ID NO: 552255 - RNA, 19 nt, Artificial Sequence
  Description of Artificial Sequence: Synthetic oligonucleotide
accuuagacaagggugggc

SEQ ID NO: 552256 - RNA, 19 nt, Artificial Sequence
  Description of Artificial Sequence: Synthetic oligonucleotide
gauggaggugucugugaac

SEQ ID NO: 552257 - RNA, 19 nt, Artificial Sequence
  Description of Artificial Sequence: Synthetic oligonucleotide
acgagaaugagcaggugga

SEQ ID NO: 552258 - RNA, 19 nt, Artificial Sequence
  Description of Artificial Sequence: Synthetic oligonucleotide
gcaccuuagacaagggugg

SEQ ID NO: 552259 - RNA, 19 nt, Artificial Sequence
  Description of Artificial Sequence: Synthetic oligonucleotide
cucacggugcagcccaucc

SEQ ID NO: 552260 - RNA, 19 nt, Artificial Sequence
  Description of Artificial Sequence: Synthetic oligonucleotide
uuagcgcuaaggagcuaca

SEQ ID NO: 552261 - RNA, 19 nt, Artificial Sequence
  Description of Artificial Sequence: Synthetic oligonucleotide
caucccuuguuccucagca

SEQ ID NO: 552262 - RNA, 19 nt, Artificial Sequence
  Description of Artificial Sequence: Synthetic oligonucleotide
cucucagguccgcaguucc

SEQ ID NO: 552263 - RNA, 19 nt, Artificial Sequence
  Description of Artificial Sequence: Synthetic oligonucleotide
aagugcguguauauuuccu

SEQ ID NO: 552264 - RNA, 19 nt, Artificial Sequence
  Description of Artificial Sequence: Synthetic oligonucleotide
ggaauccaauuccauggag

SEQ ID NO: 552265 - RNA, 19 nt, Artificial Sequence
  Description of Artificial Sequence: Synthetic oligonucleotide
gggauguagucacucugcg

SEQ ID NO: 552266 - RNA, 19 nt, Artificial Sequence
  Description of Artificial Sequence: Synthetic oligonucleotide
cagagccuccggaugacgc

SEQ ID NO: 552267 - RNA, 19 nt, Artificial Sequence
  Description of Artificial Sequence: Synthetic oligonucleotide
gaguaguggguaccccucc

SEQ ID NO: 552268 - RNA, 19 nt, Artificial Sequence
  Description of Artificial Sequence: Synthetic oligonucleotide
uguacaccauggucagccc

SEQ ID NO: 552269 - RNA, 19 nt, Artificial Sequence
  Description of Artificial Sequence: Synthetic oligonucleotide
cuuugcguuuauucagguc

SEQ ID NO: 552270 - RNA, 19 nt, Artificial Sequence
  Description of Artificial Sequence: Synthetic oligonucleotide
augugaagugcguguauau

SEQ ID NO: 552271 - RNA, 19 nt, Artificial Sequence
  Description of Artificial Sequence: Synthetic oligonucleotide
cagacacacucaaggcacg

SEQ ID NO: 552272 - RNA, 19 nt, Artificial Sequence
  Description of Artificial Sequence: Synthetic oligonucleotide
ucuccaggaaugguggcgu

SEQ ID NO: 552273 - RNA, 19 nt, Artificial Sequence
  Description of Artificial Sequence: Synthetic oligonucleotide
cugugggucggcaaaguca

SEQ ID NO: 552274 - RNA, 19 nt, Artificial Sequence
  Description of Artificial Sequence: Synthetic oligonucleotide
agauuagcgcuaaggagcu

SEQ ID NO: 552275 - RNA, 19 nt, Artificial Sequence
  Description of Artificial Sequence: Synthetic oligonucleotide
cagguaauaagcggccgag

SEQ ID NO: 552276 - RNA, 19 nt, Artificial Sequence
  Description of Artificial Sequence: Synthetic oligonucleotide
acucugcgcaaugcgcucc

SEQ ID NO: 552277 - RNA, 19 nt, Artificial Sequence
  Description of Artificial Sequence: Synthetic oligonucleotide
auccgcacgcugugggucg

SEQ ID NO: 552278 - RNA, 19 nt, Artificial Sequence
  Description of Artificial Sequence: Synthetic oligonucleotide
uggacugcgucuccaggaa

SEQ ID NO: 552279 - RNA, 19 nt, Artificial Sequence
  Description of Artificial Sequence: Synthetic oligonucleotide
guaguggguaccccuccag

SEQ ID NO: 552280 - RNA, 19 nt, Artificial Sequence
  Description of Artificial Sequence: Synthetic oligonucleotide
agcggcgguuccuagauua

SEQ ID NO: 552281 - RNA, 19 nt, Artificial Sequence
  Description of Artificial Sequence: Synthetic oligonucleotide
uucaacgcugaaggacccg

SEQ ID NO: 552282 - RNA, 19 nt, Artificial Sequence
  Description of Artificial Sequence: Synthetic oligonucleotide
agcggccgagucauuaagc

SEQ ID NO: 552283 - RNA, 19 nt, Artificial Sequence
  Description of Artificial Sequence: Synthetic oligonucleotide
cuagagucgagggagggga

SEQ ID NO: 552284 - RNA, 19 nt, Artificial Sequence
  Description of Artificial Sequence: Synthetic oligonucleotide
uguagacaacggcacgaua

SEQ ID NO: 552285 - RNA, 19 nt, Artificial Sequence
  Description of Artificial Sequence: Synthetic oligonucleotide
acauuuggacuuggguuag

SEQ ID NO: 552286 - RNA, 19 nt, Artificial Sequence
  Description of Artificial Sequence: Synthetic oligonucleotide
ggcgguuccuagauuagcg

SEQ ID NO: 552287 - RNA, 19 nt, Artificial Sequence
  Description of Artificial Sequence: Synthetic oligonucleotide
ugggucggcaaagucaauc

SEQ ID NO: 552288 - RNA, 19 nt, Artificial Sequence
  Description of Artificial Sequence: Synthetic oligonucleotide
aguaguggguaccccucca

SEQ ID NO: 552289 - RNA, 19 nt, Artificial Sequence
  Description of Artificial Sequence: Synthetic oligonucleotide
aagaugggagaagcagcug

SEQ ID NO: 552290 - RNA, 19 nt, Artificial Sequence
  Description of Artificial Sequence: Synthetic oligonucleotide
guagucacucugcgcaaug

SEQ ID NO: 552291 - RNA, 19 nt, Artificial Sequence
  Description of Artificial Sequence: Synthetic oligonucleotide
gucacucugcgcaaugcgc

SEQ ID NO: 552292 - RNA, 19 nt, Artificial Sequence
  Description of Artificial Sequence: Synthetic oligonucleotide
cuucgaacagggaggccug

SEQ ID NO: 552293 - RNA, 19 nt, Artificial Sequence
  Description of Artificial Sequence: Synthetic oligonucleotide
ucccgugagcgaccaaagc

SEQ ID NO: 552294 - RNA, 19 nt, Artificial Sequence
  Description of Artificial Sequence: Synthetic oligonucleotide
agacacacucaaggcacgg

SEQ ID NO: 552295 - RNA, 19 nt, Artificial Sequence
  Description of Artificial Sequence: Synthetic oligonucleotide
ucccgcagguucuugucga

SEQ ID NO: 552296 - RNA, 19 nt, Artificial Sequence
  Description of Artificial Sequence: Synthetic oligonucleotide
gacacaggccuugggaaac

SEQ ID NO: 552297 - RNA, 19 nt, Artificial Sequence
  Description of Artificial Sequence: Synthetic oligonucleotide
ucgguggcgcaugugaagu

SEQ ID NO: 552298 - RNA, 19 nt, Artificial Sequence
  Description of Artificial Sequence: Synthetic oligonucleotide
agucuacgagaaugagcag

SEQ ID NO: 552299 - RNA, 19 nt, Artificial Sequence
  Description of Artificial Sequence: Synthetic oligonucleotide
uaagcggccgagucauuaa

SEQ ID NO: 552300 - RNA, 19 nt, Artificial Sequence
  Description of Artificial Sequence: Synthetic oligonucleotide
ucuugucgaucaucuuaga

SEQ ID NO: 552301 - RNA, 19 nt, Artificial Sequence
  Description of Artificial Sequence: Synthetic oligonucleotide
ugucgguggcgcaugugaa

SEQ ID NO: 552302 - RNA, 19 nt, Artificial Sequence
  Description of Artificial Sequence: Synthetic oligonucleotide
gucuagagucgagggaggg

SEQ ID NO: 552303 - RNA, 19 nt, Artificial Sequence
  Description of Artificial Sequence: Synthetic oligonucleotide
agcgcuaaggagcuacauu

SEQ ID NO: 552304 - RNA, 19 nt, Artificial Sequence
  Description of Artificial Sequence: Synthetic oligonucleotide
uggccuugacgauagccau

SEQ ID NO: 552305 - RNA, 19 nt, Artificial Sequence
  Description of Artificial Sequence: Synthetic oligonucleotide
ccuugggaaacucugcaug

SEQ ID NO: 552306 - RNA, 19 nt, Artificial Sequence
  Description of Artificial Sequence: Synthetic oligonucleotide
guaccguggccacucccgg

SEQ ID NO: 552307 - RNA, 19 nt, Artificial Sequence
  Description of Artificial Sequence: Synthetic oligonucleotide
gauuucuacuuaaaaguuu

SEQ ID NO: 552308 - RNA, 19 nt, Artificial Sequence
  Description of Artificial Sequence: Synthetic oligonucleotide
caagucuagagucgaggga

SEQ ID NO: 552309 - RNA, 19 nt, Artificial Sequence
  Description of Artificial Sequence: Synthetic oligonucleotide
auucccgugagcgaccaaa

SEQ ID NO: 552310 - RNA, 19 nt, Artificial Sequence
  Description of Artificial Sequence: Synthetic oligonucleotide
caacgcugaaggacccggg

SEQ ID NO: 552311 - RNA, 19 nt, Artificial Sequence
  Description of Artificial Sequence: Synthetic oligonucleotide
uagagcgcucggcugccgc

SEQ ID NO: 552312 - RNA, 19 nt, Artificial Sequence
  Description of Artificial Sequence: Synthetic oligonucleotide
agucuagagucgagggagg

SEQ ID NO: 552313 - RNA, 19 nt, Artificial Sequence
  Description of Artificial Sequence: Synthetic oligonucleotide
ccgugagcgaccaaagcag

SEQ ID NO: 552314 - RNA, 19 nt, Artificial Sequence
  Description of Artificial Sequence: Synthetic oligonucleotide
cagugacggcaucaaacac

SEQ ID NO: 552315 - RNA, 19 nt, Artificial Sequence
  Description of Artificial Sequence: Synthetic oligonucleotide
ggagcauggucuucuugcc

SEQ ID NO: 552316 - RNA, 19 nt, Artificial Sequence
  Description of Artificial Sequence: Synthetic oligonucleotide
caacggcacgauacugccg

SEQ ID NO: 552317 - RNA, 19 nt, Artificial Sequence
  Description of Artificial Sequence: Synthetic oligonucleotide
cuguaaacauuuggacuug

SEQ ID NO: 552318 - RNA, 19 nt, Artificial Sequence
  Description of Artificial Sequence: Synthetic oligonucleotide
ggauauagcuggcugccuc

SEQ ID NO: 552319 - RNA, 19 nt, Artificial Sequence
  Description of Artificial Sequence: Synthetic oligonucleotide
gcucugagugaucuucucc

SEQ ID NO: 552320 - RNA, 19 nt, Artificial Sequence
  Description of Artificial Sequence: Synthetic oligonucleotide
caugcgcuccccucucacc

SEQ ID NO: 552321 - RNA, 19 nt, Artificial Sequence
  Description of Artificial Sequence: Synthetic oligonucleotide
ggaccugacaguuuuaaau

SEQ ID NO: 552322 - RNA, 19 nt, Artificial Sequence
  Description of Artificial Sequence: Synthetic oligonucleotide
guuagggcugguguuggac

SEQ ID NO: 552323 - RNA, 19 nt, Artificial Sequence
  Description of Artificial Sequence: Synthetic oligonucleotide
gcaacuucaccucccgcgc

SEQ ID NO: 552324 - RNA, 19 nt, Artificial Sequence
  Description of Artificial Sequence: Synthetic oligonucleotide
cucccggcaccuuagacaa

SEQ ID NO: 552325 - RNA, 19 nt, Artificial Sequence
  Description of Artificial Sequence: Synthetic oligonucleotide
agacaacggcacgauacug

SEQ ID NO: 552326 - RNA, 19 nt, Artificial Sequence
  Description of Artificial Sequence: Synthetic oligonucleotide
ggaaugguggcgucucaug

SEQ ID NO: 552327 - RNA, 19 nt, Artificial Sequence
  Description of Artificial Sequence: Synthetic oligonucleotide
aguagggagcagagucggc

SEQ ID NO: 552328 - RNA, 19 nt, Artificial Sequence
  Description of Artificial Sequence: Synthetic oligonucleotide
cugcgcaaugcgcuccagg

SEQ ID NO: 552329 - RNA, 19 nt, Artificial Sequence
  Description of Artificial Sequence: Synthetic oligonucleotide
uauagcuggcugccucauc

SEQ ID NO: 552330 - RNA, 19 nt, Artificial Sequence
  Description of Artificial Sequence: Synthetic oligonucleotide
agggagcauggucuucuug

SEQ ID NO: 552331 - RNA, 19 nt, Artificial Sequence
  Description of Artificial Sequence: Synthetic oligonucleotide
cucugcgggaagcucucag

SEQ ID NO: 552332 - RNA, 19 nt, Artificial Sequence
  Description of Artificial Sequence: Synthetic oligonucleotide
cacgauacugccggcacuc

SEQ ID NO: 552333 - RNA, 19 nt, Artificial Sequence
  Description of Artificial Sequence: Synthetic oligonucleotide
uuccuagauuagcgcuaag

SEQ ID NO: 552334 - RNA, 19 nt, Artificial Sequence
  Description of Artificial Sequence: Synthetic oligonucleotide
agguggacugcgucuccag

SEQ ID NO: 552335 - RNA, 19 nt, Artificial Sequence
  Description of Artificial Sequence: Synthetic oligonucleotide
ucauccgcacgcugugggu

SEQ ID NO: 552336 - RNA, 19 nt, Artificial Sequence
  Description of Artificial Sequence: Synthetic oligonucleotide
caacuucaccucccgcgcc

SEQ ID NO: 552337 - RNA, 19 nt, Artificial Sequence
  Description of Artificial Sequence: Synthetic oligonucleotide
uagagucgagggaggggac

SEQ ID NO: 552338 - RNA, 19 nt, Artificial Sequence
  Description of Artificial Sequence: Synthetic oligonucleotide
guacaccauggucagccca

SEQ ID NO: 552339 - RNA, 19 nt, Artificial Sequence
  Description of Artificial Sequence: Synthetic oligonucleotide
cuuggguuagggcuggugu

SEQ ID NO: 552340 - RNA, 19 nt, Artificial Sequence
  Description of Artificial Sequence: Synthetic oligonucleotide
uggcaucauccgcacgcug

SEQ ID NO: 552341 - RNA, 19 nt, Artificial Sequence
  Description of Artificial Sequence: Synthetic oligonucleotide
ugcgggaagcucucagguc

SEQ ID NO: 552342 - RNA, 19 nt, Artificial Sequence
  Description of Artificial Sequence: Synthetic oligonucleotide
guucaacgcugaaggaccc

SEQ ID NO: 552343 - RNA, 19 nt, Artificial Sequence
  Description of Artificial Sequence: Synthetic oligonucleotide
uucuuagguuugucuuagu

SEQ ID NO: 552344 - RNA, 19 nt, Artificial Sequence
  Description of Artificial Sequence: Synthetic oligonucleotide
guggcgcaugugaagugcg

SEQ ID NO: 552345 - RNA, 19 nt, Artificial Sequence
  Description of Artificial Sequence: Synthetic oligonucleotide
aggaccugacaguuuuaaa

SEQ ID NO: 552346 - RNA, 19 nt, Artificial Sequence
  Description of Artificial Sequence: Synthetic oligonucleotide
cuuagagcgcucggcugcc

SEQ ID NO: 552347 - RNA, 19 nt, Artificial Sequence
  Description of Artificial Sequence: Synthetic oligonucleotide
cacuccgcucccaccgacg

SEQ ID NO: 552348 - RNA, 19 nt, Artificial Sequence
  Description of Artificial Sequence: Synthetic oligonucleotide
caccuuagacaaggguggg

SEQ ID NO: 552349 - RNA, 19 nt, Artificial Sequence
  Description of Artificial Sequence: Synthetic oligonucleotide
gggacggguguaaacacgc

SEQ ID NO: 552350 - RNA, 19 nt, Artificial Sequence
  Description of Artificial Sequence: Synthetic oligonucleotide
cagguccgcaguuccgagc

SEQ ID NO: 552351 - RNA, 19 nt, Artificial Sequence
  Description of Artificial Sequence: Synthetic oligonucleotide
auguagucacucugcgcaa

SEQ ID NO: 552352 - RNA, 19 nt, Artificial Sequence
  Description of Artificial Sequence: Synthetic oligonucleotide
ggaaggguguaccguggcc

SEQ ID NO: 552353 - RNA, 19 nt, Artificial Sequence
  Description of Artificial Sequence: Synthetic oligonucleotide
cgucucaugcuucuugugc

SEQ ID NO: 552354 - RNA, 19 nt, Artificial Sequence
  Description of Artificial Sequence: Synthetic oligonucleotide
gagaaugagcagguggacu

SEQ ID NO: 552355 - RNA, 19 nt, Artificial Sequence
  Description of Artificial Sequence: Synthetic oligonucleotide
gugagcgaccaaagcaggc

SEQ ID NO: 552356 - RNA, 19 nt, Artificial Sequence
  Description of Artificial Sequence: Synthetic oligonucleotide
cgaucagaaaauagagaac

SEQ ID NO: 552357 - RNA, 19 nt, Artificial Sequence
  Description of Artificial Sequence: Synthetic oligonucleotide
uggcgcaugugaagugcgu

SEQ ID NO: 552358 - RNA, 19 nt, Artificial Sequence
  Description of Artificial Sequence: Synthetic oligonucleotide
ccaaagcaggcuuguacac

SEQ ID NO: 552359 - RNA, 19 nt, Artificial Sequence
  Description of Artificial Sequence: Synthetic oligonucleotide
acggugcagcccauccugc

SEQ ID NO: 552360 - RNA, 19 nt, Artificial Sequence
  Description of Artificial Sequence: Synthetic oligonucleotide
ugcaugcgcuccccucuca

SEQ ID NO: 552361 - RNA, 19 nt, Artificial Sequence
  Description of Artificial Sequence: Synthetic oligonucleotide
caucauccgcacgcugugg

SEQ ID NO: 552362 - RNA, 19 nt, Artificial Sequence
  Description of Artificial Sequence: Synthetic oligonucleotide
uuagagcgcucggcugccg

SEQ ID NO: 552363 - RNA, 19 nt, Artificial Sequence
  Description of Artificial Sequence: Synthetic oligonucleotide
agcaucccuuguuccucag

SEQ ID NO: 552364 - RNA, 19 nt, Artificial Sequence
  Description of Artificial Sequence: Synthetic oligonucleotide
gguaccccuccagacacag

SEQ ID NO: 552365 - RNA, 19 nt, Artificial Sequence
  Description of Artificial Sequence: Synthetic oligonucleotide
cacguucuuggugucggug

SEQ ID NO: 552366 - RNA, 19 nt, Artificial Sequence
  Description of Artificial Sequence: Synthetic oligonucleotide
gcgguuccuagauuagcgc

SEQ ID NO: 552367 - RNA, 19 nt, Artificial Sequence
  Description of Artificial Sequence: Synthetic oligonucleotide
caucuuagagcgcucggcu

SEQ ID NO: 552368 - RNA, 19 nt, Artificial Sequence
  Description of Artificial Sequence: Synthetic oligonucleotide
cauuuggacuuggguuagg

SEQ ID NO: 552369 - RNA, 19 nt, Artificial Sequence
  Description of Artificial Sequence: Synthetic oligonucleotide
cugcguagggauguaguca

SEQ ID NO: 552370 - RNA, 19 nt, Artificial Sequence
  Description of Artificial Sequence: Synthetic oligonucleotide
ugcgcuccccucucacccc

SEQ ID NO: 552371 - RNA, 19 nt, Artificial Sequence
  Description of Artificial Sequence: Synthetic oligonucleotide
guguaccguggccacuccc

SEQ ID NO: 552372 - RNA, 19 nt, Artificial Sequence
  Description of Artificial Sequence: Synthetic oligonucleotide
ccaccgacggcccucugcg

SEQ ID NO: 552373 - RNA, 19 nt, Artificial Sequence
  Description of Artificial Sequence: Synthetic oligonucleotide
agguaauaagcggccgagu

SEQ ID NO: 552374 - RNA, 19 nt, Artificial Sequence
  Description of Artificial Sequence: Synthetic oligonucleotide
cacucccggcaccuuagac

SEQ ID NO: 552375 - RNA, 19 nt, Artificial Sequence
  Description of Artificial Sequence: Synthetic oligonucleotide
gacccacuccgcucccacc

SEQ ID NO: 552376 - RNA, 19 nt, Artificial Sequence
  Description of Artificial Sequence: Synthetic oligonucleotide
ggcacgauacugccggcac

SEQ ID NO: 552377 - RNA, 19 nt, Artificial Sequence
  Description of Artificial Sequence: Synthetic oligonucleotide
cugguauucccgugagcga

SEQ ID NO: 552378 - RNA, 19 nt, Artificial Sequence
  Description of Artificial Sequence: Synthetic oligonucleotide
cacucugcgcaaugcgcuc

SEQ ID NO: 552379 - RNA, 19 nt, Artificial Sequence
  Description of Artificial Sequence: Synthetic oligonucleotide
cuggaguaguggguacccc

SEQ ID NO: 552380 - RNA, 19 nt, Artificial Sequence
  Description of Artificial Sequence: Synthetic oligonucleotide
caugugaagugcguguaua

SEQ ID NO: 552381 - RNA, 19 nt, Artificial Sequence
  Description of Artificial Sequence: Synthetic oligonucleotide
guguacucggggaaacaga

SEQ ID NO: 552382 - RNA, 19 nt, Artificial Sequence
  Description of Artificial Sequence: Synthetic oligonucleotide
agcgaccaaagcaggcuug

SEQ ID NO: 552383 - RNA, 19 nt, Artificial Sequence
  Description of Artificial Sequence: Synthetic oligonucleotide
guuccuagauuagcgcuaa

SEQ ID NO: 552384 - RNA, 19 nt, Artificial Sequence
  Description of Artificial Sequence: Synthetic oligonucleotide
cugcacguucuuggugucg

SEQ ID NO: 552385 - RNA, 19 nt, Artificial Sequence
  Description of Artificial Sequence: Synthetic oligonucleotide
uuggugucuuugcguuuau

SEQ ID NO: 552386 - RNA, 19 nt, Artificial Sequence
  Description of Artificial Sequence: Synthetic oligonucleotide
cauccgcacgcuguggguc

SEQ ID NO: 552387 - RNA, 19 nt, Artificial Sequence
  Description of Artificial Sequence: Synthetic oligonucleotide
ggcugccucaucauacuug

SEQ ID NO: 552388 - RNA, 19 nt, Artificial Sequence
  Description of Artificial Sequence: Synthetic oligonucleotide
cacucaaggcacggaauca

SEQ ID NO: 552389 - RNA, 19 nt, Artificial Sequence
  Description of Artificial Sequence: Synthetic oligonucleotide
gcagagucggcgguggccc

SEQ ID NO: 552390 - RNA, 19 nt, Artificial Sequence
  Description of Artificial Sequence: Synthetic oligonucleotide
ggccuugggaaacucugca

SEQ ID NO: 552391 - RNA, 19 nt, Artificial Sequence
  Description of Artificial Sequence: Synthetic oligonucleotide
cccgugagcgaccaaagca

SEQ ID NO: 552392 - RNA, 19 nt, Artificial Sequence
  Description of Artificial Sequence: Synthetic oligonucleotide
auauagcuggcugccucau

SEQ ID NO: 552393 - RNA, 19 nt, Artificial Sequence
  Description of Artificial Sequence: Synthetic oligonucleotide
gcuggaguaguggguaccc

SEQ ID NO: 552394 - RNA, 19 nt, Artificial Sequence
  Description of Artificial Sequence: Synthetic oligonucleotide
gcgcuaaggagcuacauuu

SEQ ID NO: 552395 - RNA, 19 nt, Artificial Sequence
  Description of Artificial Sequence: Synthetic oligonucleotide
acacgcagacacacucaag

SEQ ID NO: 552396 - RNA, 19 nt, Artificial Sequence
  Description of Artificial Sequence: Synthetic oligonucleotide
cgugagcgaccaaagcagg

SEQ ID NO: 552397 - RNA, 19 nt, Artificial Sequence
  Description of Artificial Sequence: Synthetic oligonucleotide
cuacgagaaugagcaggug

SEQ ID NO: 552398 - RNA, 19 nt, Artificial Sequence
  Description of Artificial Sequence: Synthetic oligonucleotide
ggacaggggagcugagaac

SEQ ID NO: 552399 - RNA, 19 nt, Artificial Sequence
  Description of Artificial Sequence: Synthetic oligonucleotide
uccgagcggcagagggcag

SEQ ID NO: 552400 - RNA, 19 nt, Artificial Sequence
  Description of Artificial Sequence: Synthetic oligonucleotide
gagcagagucggcgguggc

SEQ ID NO: 552401 - RNA, 19 nt, Artificial Sequence
  Description of Artificial Sequence: Synthetic oligonucleotide
gguauucccgugagcgacc

SEQ ID NO: 552402 - RNA, 19 nt, Artificial Sequence
  Description of Artificial Sequence: Synthetic oligonucleotide
acucugcaugcgcuccccu

SEQ ID NO: 552403 - RNA, 19 nt, Artificial Sequence
  Description of Artificial Sequence: Synthetic oligonucleotide
ucugcgcaaugcgcuccag

SEQ ID NO: 552404 - RNA, 19 nt, Artificial Sequence
  Description of Artificial Sequence: Synthetic oligonucleotide
gggcugguguuggacaaag

SEQ ID NO: 552405 - RNA, 19 nt, Artificial Sequence
  Description of Artificial Sequence: Synthetic oligonucleotide
gcuucgaacagggaggccu

SEQ ID NO: 552406 - RNA, 19 nt, Artificial Sequence
  Description of Artificial Sequence: Synthetic oligonucleotide
ggcgcaugugaagugcgug

SEQ ID NO: 552407 - RNA, 19 nt, Artificial Sequence
  Description of Artificial Sequence: Synthetic oligonucleotide
uucgaacagggaggccugu

SEQ ID NO: 552408 - RNA, 19 nt, Artificial Sequence
  Description of Artificial Sequence: Synthetic oligonucleotide
guauucccgugagcgacca

SEQ ID NO: 552409 - RNA, 19 nt, Artificial Sequence
  Description of Artificial Sequence: Synthetic oligonucleotide
guccgcaguuccgagcgac

SEQ ID NO: 552410 - RNA, 19 nt, Artificial Sequence
  Description of Artificial Sequence: Synthetic oligonucleotide
cucaaggcacggaaucacu

SEQ ID NO: 552411 - RNA, 19 nt, Artificial Sequence
  Description of Artificial Sequence: Synthetic oligonucleotide
gcugccccucagaagaggc

SEQ ID NO: 552412 - RNA, 19 nt, Artificial Sequence
  Description of Artificial Sequence: Synthetic oligonucleotide
gcaccuaacagcagcaacu

SEQ ID NO: 552413 - RNA, 19 nt, Artificial Sequence
  Description of Artificial Sequence: Synthetic oligonucleotide
uccgcacgcugugggucgg

SEQ ID NO: 552414 - RNA, 19 nt, Artificial Sequence
  Description of Artificial Sequence: Synthetic oligonucleotide
caggaccugacaguuuuaa

SEQ ID NO: 552415 - RNA, 19 nt, Artificial Sequence
  Description of Artificial Sequence: Synthetic oligonucleotide
ggaguaguggguaccccuc

SEQ ID NO: 552416 - RNA, 19 nt, Artificial Sequence
  Description of Artificial Sequence: Synthetic oligonucleotide
ucccggcaccuuagacaag

SEQ ID NO: 552417 - RNA, 19 nt, Artificial Sequence
  Description of Artificial Sequence: Synthetic oligonucleotide
uauucccgugagcgaccaa

SEQ ID NO: 552418 - RNA, 19 nt, Artificial Sequence
  Description of Artificial Sequence: Synthetic oligonucleotide
gacgccggacagauccuca

SEQ ID NO: 552419 - RNA, 19 nt, Artificial Sequence
  Description of Artificial Sequence: Synthetic oligonucleotide
gggucggcaaagucaaucu

SEQ ID NO: 552420 - RNA, 19 nt, Artificial Sequence
  Description of Artificial Sequence: Synthetic oligonucleotide
cugcugcguagggauguag

SEQ ID NO: 552421 - RNA, 19 nt, Artificial Sequence
  Description of Artificial Sequence: Synthetic oligonucleotide
gcugcccggagagggacgg

SEQ ID NO: 552422 - RNA, 19 nt, Artificial Sequence
  Description of Artificial Sequence: Synthetic oligonucleotide
ccccagaacaagacaacga

SEQ ID NO: 552423 - RNA, 19 nt, Artificial Sequence
  Description of Artificial Sequence: Synthetic oligonucleotide
ggaggcucccuguaaacau

SEQ ID NO: 552424 - RNA, 19 nt, Artificial Sequence
  Description of Artificial Sequence: Synthetic oligonucleotide
cugcgggaagcucucaggu

SEQ ID NO: 552425 - RNA, 19 nt, Artificial Sequence
  Description of Artificial Sequence: Synthetic oligonucleotide
gggcuucgaacagggaggc

SEQ ID NO: 552426 - RNA, 19 nt, Artificial Sequence
  Description of Artificial Sequence: Synthetic oligonucleotide
ugccggcacucuuccucug

SEQ ID NO: 552427 - RNA, 19 nt, Artificial Sequence
  Description of Artificial Sequence: Synthetic oligonucleotide
gguuccuagauuagcgcua

SEQ ID NO: 552428 - RNA, 19 nt, Artificial Sequence
  Description of Artificial Sequence: Synthetic oligonucleotide
caaacuugcucuggauaua

SEQ ID NO: 552429 - RNA, 19 nt, Artificial Sequence
  Description of Artificial Sequence: Synthetic oligonucleotide
aggcagcggcgguuccuag

SEQ ID NO: 552430 - RNA, 19 nt, Artificial Sequence
  Description of Artificial Sequence: Synthetic oligonucleotide
cugcaugcgcuccccucuc

SEQ ID NO: 552431 - RNA, 19 nt, Artificial Sequence
  Description of Artificial Sequence: Synthetic oligonucleotide
acagcccuuggaauccaau

SEQ ID NO: 552432 - RNA, 19 nt, Artificial Sequence
  Description of Artificial Sequence: Synthetic oligonucleotide
gagcgaccaaagcaggcuu

SEQ ID NO: 552433 - RNA, 19 nt, Artificial Sequence
  Description of Artificial Sequence: Synthetic oligonucleotide
ggcucugagugaucuucuc

SEQ ID NO: 552434 - RNA, 19 nt, Artificial Sequence
  Description of Artificial Sequence: Synthetic oligonucleotide
aauaagcggccgagucauu

SEQ ID NO: 552435 - RNA, 19 nt, Artificial Sequence
  Description of Artificial Sequence: Synthetic oligonucleotide
gcgucucaugcuucuugug

SEQ ID NO: 552436 - RNA, 19 nt, Artificial Sequence
  Description of Artificial Sequence: Synthetic oligonucleotide
aggcucccuguaaacauuu

SEQ ID NO: 552437 - RNA, 19 nt, Artificial Sequence
  Description of Artificial Sequence: Synthetic oligonucleotide
ggcgguggcccauccugcc

SEQ ID NO: 552438 - RNA, 19 nt, Artificial Sequence
  Description of Artificial Sequence: Synthetic oligonucleotide
cagauggucagagggcucu

SEQ ID NO: 552439 - RNA, 19 nt, Artificial Sequence
  Description of Artificial Sequence: Synthetic oligonucleotide
gguguaccguggccacucc

SEQ ID NO: 552440 - RNA, 19 nt, Artificial Sequence
  Description of Artificial Sequence: Synthetic oligonucleotide
cacggcccggcucggcccc

SEQ ID NO: 552441 - RNA, 19 nt, Artificial Sequence
  Description of Artificial Sequence: Synthetic oligonucleotide
cacacggcccacggcccgg

SEQ ID NO: 552442 - RNA, 19 nt, Artificial Sequence
  Description of Artificial Sequence: Synthetic oligonucleotide
ggucuaggcuggaguagug

SEQ ID NO: 552443 - RNA, 19 nt, Artificial Sequence
  Description of Artificial Sequence: Synthetic oligonucleotide
ccugccguccgccggcccg

SEQ ID NO: 552444 - RNA, 19 nt, Artificial Sequence
  Description of Artificial Sequence: Synthetic oligonucleotide
acgauacugccggcacucu

SEQ ID NO: 552445 - RNA, 19 nt, Artificial Sequence
  Description of Artificial Sequence: Synthetic oligonucleotide
uccugccguccgccggccc

SEQ ID NO: 552446 - RNA, 19 nt, Artificial Sequence
  Description of Artificial Sequence: Synthetic oligonucleotide
cucugcgcaaugcgcucca

SEQ ID NO: 552447 - RNA, 19 nt, Artificial Sequence
  Description of Artificial Sequence: Synthetic oligonucleotide
gcgcucacggugcagccca

SEQ ID NO: 552448 - RNA, 19 nt, Artificial Sequence
  Description of Artificial Sequence: Synthetic oligonucleotide
ggguguaccguggccacuc

SEQ ID NO: 552449 - RNA, 19 nt, Artificial Sequence
  Description of Artificial Sequence: Synthetic oligonucleotide
cccagaacaagacaacgau

SEQ ID NO: 552450 - RNA, 19 nt, Artificial Sequence
  Description of Artificial Sequence: Synthetic oligonucleotide
gcggccgagucauuaagcu

SEQ ID NO: 552451 - RNA, 19 nt, Artificial Sequence
  Description of Artificial Sequence: Synthetic oligonucleotide
gcaugcgcuccccucucac

SEQ ID NO: 552452 - RNA, 19 nt, Artificial Sequence
  Description of Artificial Sequence: Synthetic oligonucleotide
gcguguauauuuccuuggu

SEQ ID NO: 552453 - RNA, 19 nt, Artificial Sequence
  Description of Artificial Sequence: Synthetic oligonucleotide
cccaccgacggcccucugc

SEQ ID NO: 552454 - RNA, 19 nt, Artificial Sequence
  Description of Artificial Sequence: Synthetic oligonucleotide
cgagucauuaagcugguau

SEQ ID NO: 552455 - RNA, 19 nt, Artificial Sequence
  Description of Artificial Sequence: Synthetic oligonucleotide
ggcaucauccgcacgcugu

SEQ ID NO: 552456 - RNA, 19 nt, Artificial Sequence
  Description of Artificial Sequence: Synthetic oligonucleotide
cagcccuuggaauccaauu

SEQ ID NO: 552457 - RNA, 19 nt, Artificial Sequence
  Description of Artificial Sequence: Synthetic oligonucleotide
gggaaacucugcaugcgcu

SEQ ID NO: 552458 - RNA, 19 nt, Artificial Sequence
  Description of Artificial Sequence: Synthetic oligonucleotide
gguggcgucucaugcuucu

SEQ ID NO: 552459 - RNA, 19 nt, Artificial Sequence
  Description of Artificial Sequence: Synthetic oligonucleotide
gcgcaaugcgcuccagguc

SEQ ID NO: 552460 - RNA, 19 nt, Artificial Sequence
  Description of Artificial Sequence: Synthetic oligonucleotide
ggcagcggcgguuccuaga

SEQ ID NO: 552461 - RNA, 19 nt, Artificial Sequence
  Description of Artificial Sequence: Synthetic oligonucleotide
ccccgcccgacccacuccg

SEQ ID NO: 552462 - RNA, 19 nt, Artificial Sequence
  Description of Artificial Sequence: Synthetic oligonucleotide
cugccggcacucuuccucu

SEQ ID NO: 552463 - RNA, 19 nt, Artificial Sequence
  Description of Artificial Sequence: Synthetic oligonucleotide
ggaagcucucagguccgca

SEQ ID NO: 552464 - RNA, 19 nt, Artificial Sequence
  Description of Artificial Sequence: Synthetic oligonucleotide
ggcucccuguaaacauuug

SEQ ID NO: 552465 - RNA, 19 nt, Artificial Sequence
  Description of Artificial Sequence: Synthetic oligonucleotide
gauuagcgcuaaggagcua

SEQ ID NO: 552466 - RNA, 19 nt, Artificial Sequence
  Description of Artificial Sequence: Synthetic oligonucleotide
gcggcgguuccuagauuag

SEQ ID NO: 552467 - RNA, 19 nt, Artificial Sequence
  Description of Artificial Sequence: Synthetic oligonucleotide
ggugucgguggcgcaugug

SEQ ID NO: 552468 - RNA, 19 nt, Artificial Sequence
  Description of Artificial Sequence: Synthetic oligonucleotide
gcucggccccgcccgaccc

SEQ ID NO: 552469 - RNA, 19 nt, Artificial Sequence
  Description of Artificial Sequence: Synthetic oligonucleotide
caccuaacagcagcaacuu

SEQ ID NO: 552470 - RNA, 19 nt, Artificial Sequence
  Description of Artificial Sequence: Synthetic oligonucleotide
cuguagacaacggcacgau

SEQ ID NO: 552471 - RNA, 19 nt, Artificial Sequence
  Description of Artificial Sequence: Synthetic oligonucleotide
cgccggacagauccucagg

SEQ ID NO: 552472 - RNA, 19 nt, Artificial Sequence
  Description of Artificial Sequence: Synthetic oligonucleotide
gcagcggcgguuccuagau

SEQ ID NO: 552473 - RNA, 19 nt, Artificial Sequence
  Description of Artificial Sequence: Synthetic oligonucleotide
ucccaccgacggcccucug

SEQ ID NO: 552474 - RNA, 19 nt, Artificial Sequence
  Description of Artificial Sequence: Synthetic oligonucleotide
cugcccggagagggacggg

SEQ ID NO: 552475 - RNA, 19 nt, Artificial Sequence
  Description of Artificial Sequence: Synthetic oligonucleotide
cagagucggcgguggccca

SEQ ID NO: 552476 - RNA, 19 nt, Artificial Sequence
  Description of Artificial Sequence: Synthetic oligonucleotide
cagcaccuaacagcagcaa

SEQ ID NO: 552477 - RNA, 19 nt, Artificial Sequence
  Description of Artificial Sequence: Synthetic oligonucleotide
ccacggcccggcucggccc

SEQ ID NO: 552478 - RNA, 19 nt, Artificial Sequence
  Description of Artificial Sequence: Synthetic oligonucleotide
ggacggguguaaacacgca

SEQ ID NO: 552479 - RNA, 19 nt, Artificial Sequence
  Description of Artificial Sequence: Synthetic oligonucleotide
gccggcacucuuccucuga

SEQ ID NO: 552480 - RNA, 19 nt, Artificial Sequence
  Description of Artificial Sequence: Synthetic oligonucleotide
cggugcagcccauccugcc

SEQ ID NO: 552481 - RNA, 19 nt, Artificial Sequence
  Description of Artificial Sequence: Synthetic oligonucleotide
uccgccggcccggccuggc

SEQ ID NO: 552482 - RNA, 19 nt, Artificial Sequence
  Description of Artificial Sequence: Synthetic oligonucleotide
gcaugugaagugcguguau

SEQ ID NO: 552483 - RNA, 19 nt, Artificial Sequence
  Description of Artificial Sequence: Synthetic oligonucleotide
ggcuucgaacagggaggcc

SEQ ID NO: 552484 - RNA, 19 nt, Artificial Sequence
  Description of Artificial Sequence: Synthetic oligonucleotide
ggagagggacggguguaaa

SEQ ID NO: 552485 - RNA, 19 nt, Artificial Sequence
  Description of Artificial Sequence: Synthetic oligonucleotide
cgguuccuagauuagcgcu

SEQ ID NO: 552486 - RNA, 19 nt, Artificial Sequence
  Description of Artificial Sequence: Synthetic oligonucleotide
gcacgauacugccggcacu

SEQ ID NO: 552487 - RNA, 19 nt, Artificial Sequence
  Description of Artificial Sequence: Synthetic oligonucleotide
ggccacucccggcaccuua

SEQ ID NO: 552488 - RNA, 19 nt, Artificial Sequence
  Description of Artificial Sequence: Synthetic oligonucleotide
cggcgguuccuagauuagc

SEQ ID NO: 552489 - RNA, 19 nt, Artificial Sequence
  Description of Artificial Sequence: Synthetic oligonucleotide
cucggccccgcccgaccca

SEQ ID NO: 552490 - RNA, 19 nt, Artificial Sequence
  Description of Artificial Sequence: Synthetic oligonucleotide
ggugggcuucgaacaggga

SEQ ID NO: 552491 - RNA, 19 nt, Artificial Sequence
  Description of Artificial Sequence: Synthetic oligonucleotide
gcgaccaaagcaggcuugu

SEQ ID NO: 552492 - RNA, 19 nt, Artificial Sequence
  Description of Artificial Sequence: Synthetic oligonucleotide
gguccgcaguuccgagcga

SEQ ID NO: 552493 - RNA, 19 nt, Artificial Sequence
  Description of Artificial Sequence: Synthetic oligonucleotide
gcucuggauauagcuggcu

SEQ ID NO: 552494 - RNA, 19 nt, Artificial Sequence
  Description of Artificial Sequence: Synthetic oligonucleotide
cgcuaaggagcuacauuua

SEQ ID NO: 552495 - RNA, 19 nt, Artificial Sequence
  Description of Artificial Sequence: Synthetic oligonucleotide
cgacccacuccgcucccac

SEQ ID NO: 552496 - RNA, 19 nt, Artificial Sequence
  Description of Artificial Sequence: Synthetic oligonucleotide
cccgcgccgccuucucgcc

SEQ ID NO: 552497 - RNA, 19 nt, Artificial Sequence
  Description of Artificial Sequence: Synthetic oligonucleotide
ccgcagguucuugucgauc

SEQ ID NO: 552498 - RNA, 19 nt, Artificial Sequence
  Description of Artificial Sequence: Synthetic oligonucleotide
gucggcgguggcccauccu

SEQ ID NO: 552499 - RNA, 19 nt, Artificial Sequence
  Description of Artificial Sequence: Synthetic oligonucleotide
gggcucugagugaucuucu

SEQ ID NO: 552500 - RNA, 19 nt, Artificial Sequence
  Description of Artificial Sequence: Synthetic oligonucleotide
ggcccucugcgggaagcuc

SEQ ID NO: 552501 - RNA, 19 nt, Artificial Sequence
  Description of Artificial Sequence: Synthetic oligonucleotide
ccggcacucuuccucugaa

SEQ ID NO: 552502 - RNA, 19 nt, Artificial Sequence
  Description of Artificial Sequence: Synthetic oligonucleotide
ggccuccgagcggcagagg

SEQ ID NO: 552503 - RNA, 19 nt, Artificial Sequence
  Description of Artificial Sequence: Synthetic oligonucleotide
ccgcucccaccgacggccc

SEQ ID NO: 552504 - RNA, 19 nt, Artificial Sequence
  Description of Artificial Sequence: Synthetic oligonucleotide
cccgacccacuccgcuccc

SEQ ID NO: 552505 - RNA, 19 nt, Artificial Sequence
  Description of Artificial Sequence: Synthetic oligonucleotide
cgcccgacccacuccgcuc

SEQ ID NO: 552506 - RNA, 19 nt, Artificial Sequence
  Description of Artificial Sequence: Synthetic oligonucleotide
gacuuggguuagggcuggu

SEQ ID NO: 552507 - RNA, 19 nt, Artificial Sequence
  Description of Artificial Sequence: Synthetic oligonucleotide
cccgcccgacccacuccgc

SEQ ID NO: 552508 - RNA, 19 nt, Artificial Sequence
  Description of Artificial Sequence: Synthetic oligonucleotide
gccuccggaugacgccgga

SEQ ID NO: 552509 - RNA, 19 nt, Artificial Sequence
  Description of Artificial Sequence: Synthetic oligonucleotide
gccgagucauuaagcuggu

SEQ ID NO: 552510 - RNA, 19 nt, Artificial Sequence
  Description of Artificial Sequence: Synthetic oligonucleotide
cccggagagggacgggugu

SEQ ID NO: 552511 - RNA, 19 nt, Artificial Sequence
  Description of Artificial Sequence: Synthetic oligonucleotide
gagcuacauuuagguuaau

SEQ ID NO: 552512 - RNA, 19 nt, Artificial Sequence
  Description of Artificial Sequence: Synthetic oligonucleotide
ccacucccggcaccuuaga

SEQ ID NO: 552513 - RNA, 19 nt, Artificial Sequence
  Description of Artificial Sequence: Synthetic oligonucleotide
cucccaccgacggcccucu

SEQ ID NO: 552514 - RNA, 19 nt, Artificial Sequence
  Description of Artificial Sequence: Synthetic oligonucleotide
ggcccacggcccggcucgg

SEQ ID NO: 552515 - RNA, 19 nt, Artificial Sequence
  Description of Artificial Sequence: Synthetic oligonucleotide
cggcaccuuagacaagggu

SEQ ID NO: 552516 - RNA, 19 nt, Artificial Sequence
  Description of Artificial Sequence: Synthetic oligonucleotide
cggcacgauacugccggca

SEQ ID NO: 552517 - RNA, 19 nt, Artificial Sequence
  Description of Artificial Sequence: Synthetic oligonucleotide
ccggagagggacgggugua

SEQ ID NO: 552518 - RNA, 19 nt, Artificial Sequence
  Description of Artificial Sequence: Synthetic oligonucleotide
ccgcacgcugugggucggc

SEQ ID NO: 552519 - RNA, 19 nt, Artificial Sequence
  Description of Artificial Sequence: Synthetic oligonucleotide
ccugcugcguagggaugua

SEQ ID NO: 552520 - RNA, 19 nt, Artificial Sequence
  Description of Artificial Sequence: Synthetic oligonucleotide
cagcggcgguuccuagauu

SEQ ID NO: 552521 - RNA, 19 nt, Artificial Sequence
  Description of Artificial Sequence: Synthetic oligonucleotide
cccgcagguucuugucgau

SEQ ID NO: 552522 - RNA, 19 nt, Artificial Sequence
  Description of Artificial Sequence: Synthetic oligonucleotide
ccgagucauuaagcuggua

SEQ ID NO: 552523 - RNA, 19 nt, Artificial Sequence
  Description of Artificial Sequence: Synthetic oligonucleotide
cgcacgcugugggucggca

SEQ ID NO: 552524 - RNA, 19 nt, Artificial Sequence
  Description of Artificial Sequence: Synthetic oligonucleotide
ccgcccgacccacuccgcu

SEQ ID NO: 552525 - RNA, 19 nt, Artificial Sequence
  Description of Artificial Sequence: Synthetic oligonucleotide
cgagggcaugaggggccug

SEQ ID NO: 552526 - RNA, 19 nt, Artificial Sequence
  Description of Artificial Sequence: Synthetic oligonucleotide
gcgccgccuucucgccguc

SEQ ID NO: 552527 - RNA, 19 nt, Artificial Sequence
  Description of Artificial Sequence: Synthetic oligonucleotide
cgcgccgccuucucgccgu

SEQ ID NO: 552528 - RNA, 19 nt, Artificial Sequence
  Description of Artificial Sequence: Synthetic oligonucleotide
cgccgccuucucgccgucc

SEQ ID NO: 552529 - RNA, 19 nt, Artificial Sequence
  Description of Artificial Sequence: Synthetic oligonucleotide
cagggcccucagugacauu

SEQ ID NO: 552530 - RNA, 19 nt, Artificial Sequence
  Description of Artificial Sequence: Synthetic oligonucleotide
cgcugugggucggcaaagu

SEQ ID NO: 552531 - RNA, 19 nt, Artificial Sequence
  Description of Artificial Sequence: Synthetic oligonucleotide
cuuguaguaaccauguacc

SEQ ID NO: 552532 - RNA, 19 nt, Artificial Sequence
  Description of Artificial Sequence: Synthetic oligonucleotide
aaagcaaauauucucgccu

SEQ ID NO: 552533 - RNA, 19 nt, Artificial Sequence
  Description of Artificial Sequence: Synthetic oligonucleotide
gauauacucauacagucgc

SEQ ID NO: 552534 - RNA, 19 nt, Artificial Sequence
  Description of Artificial Sequence: Synthetic oligonucleotide
aaaguaguggaacuuucuc

SEQ ID NO: 552535 - RNA, 19 nt, Artificial Sequence
  Description of Artificial Sequence: Synthetic oligonucleotide
uggugauauacucauacag

SEQ ID NO: 552536 - RNA, 19 nt, Artificial Sequence
  Description of Artificial Sequence: Synthetic oligonucleotide
gacuucauaggugugaugg

SEQ ID NO: 552537 - RNA, 19 nt, Artificial Sequence
  Description of Artificial Sequence: Synthetic oligonucleotide
ucgacaucgagcaaggcag

SEQ ID NO: 552538 - RNA, 19 nt, Artificial Sequence
  Description of Artificial Sequence: Synthetic oligonucleotide
uguauaaccucucagcuau

SEQ ID NO: 552539 - RNA, 19 nt, Artificial Sequence
  Description of Artificial Sequence: Synthetic oligonucleotide
uguaaaguguucaggcccg

SEQ ID NO: 552540 - RNA, 19 nt, Artificial Sequence
  Description of Artificial Sequence: Synthetic oligonucleotide
ggauguacuucauaaaucg

SEQ ID NO: 552541 - RNA, 19 nt, Artificial Sequence
  Description of Artificial Sequence: Synthetic oligonucleotide
aaaucgauggcacuuccca

SEQ ID NO: 552542 - RNA, 19 nt, Artificial Sequence
  Description of Artificial Sequence: Synthetic oligonucleotide
uguguauaaccucucagcu

SEQ ID NO: 552543 - RNA, 19 nt, Artificial Sequence
  Description of Artificial Sequence: Synthetic oligonucleotide
ugugaugggaggaugguca

SEQ ID NO: 552544 - RNA, 19 nt, Artificial Sequence
  Description of Artificial Sequence: Synthetic oligonucleotide
aaaguguucaggcccgauc

SEQ ID NO: 552545 - RNA, 19 nt, Artificial Sequence
  Description of Artificial Sequence: Synthetic oligonucleotide
ucugcaucgaucuuguagu

SEQ ID NO: 552546 - RNA, 19 nt, Artificial Sequence
  Description of Artificial Sequence: Synthetic oligonucleotide
ucguagagaacccuucagg

SEQ ID NO: 552547 - RNA, 19 nt, Artificial Sequence
  Description of Artificial Sequence: Synthetic oligonucleotide
ucaggcccgauccugaagg

SEQ ID NO: 552548 - RNA, 19 nt, Artificial Sequence
  Description of Artificial Sequence: Synthetic oligonucleotide
cugaacggcaucaaggacc

SEQ ID NO: 552549 - RNA, 19 nt, Artificial Sequence
  Description of Artificial Sequence: Synthetic oligonucleotide
uguacacucauuacagccc

SEQ ID NO: 552550 - RNA, 19 nt, Artificial Sequence
  Description of Artificial Sequence: Synthetic oligonucleotide
guacuucauaaaucgaugg

SEQ ID NO: 552551 - RNA, 19 nt, Artificial Sequence
  Description of Artificial Sequence: Synthetic oligonucleotide
auaaaucgauggcacuucc

SEQ ID NO: 552552 - RNA, 19 nt, Artificial Sequence
  Description of Artificial Sequence: Synthetic oligonucleotide
uaauaacugcuuuaccgag

SEQ ID NO: 552553 - RNA, 19 nt, Artificial Sequence
  Description of Artificial Sequence: Synthetic oligonucleotide
aaucgauggcacuucccac

SEQ ID NO: 552554 - RNA, 19 nt, Artificial Sequence
  Description of Artificial Sequence: Synthetic oligonucleotide
ucaacaaaguaguggaacu

SEQ ID NO: 552555 - RNA, 19 nt, Artificial Sequence
  Description of Artificial Sequence: Synthetic oligonucleotide
ugucucguugccaggaagg

SEQ ID NO: 552556 - RNA, 19 nt, Artificial Sequence
  Description of Artificial Sequence: Synthetic oligonucleotide
uccacugcgcuucggaugg

SEQ ID NO: 552557 - RNA, 19 nt, Artificial Sequence
  Description of Artificial Sequence: Synthetic oligonucleotide
agucagauagucugguggg

SEQ ID NO: 552558 - RNA, 19 nt, Artificial Sequence
  Description of Artificial Sequence: Synthetic oligonucleotide
uacuucauaaaucgauggc

SEQ ID NO: 552559 - RNA, 19 nt, Artificial Sequence
  Description of Artificial Sequence: Synthetic oligonucleotide
uguaccagaacgaugccaa

SEQ ID NO: 552560 - RNA, 19 nt, Artificial Sequence
  Description of Artificial Sequence: Synthetic oligonucleotide
aagacggggucacagaaga

SEQ ID NO: 552561 - RNA, 19 nt, Artificial Sequence
  Description of Artificial Sequence: Synthetic oligonucleotide
aaggauaccuccaucaacu

SEQ ID NO: 552562 - RNA, 19 nt, Artificial Sequence
  Description of Artificial Sequence: Synthetic oligonucleotide
uguauugcaggccaccuuc

SEQ ID NO: 552563 - RNA, 19 nt, Artificial Sequence
  Description of Artificial Sequence: Synthetic oligonucleotide
guuuggaaccuagugaacg

SEQ ID NO: 552564 - RNA, 19 nt, Artificial Sequence
  Description of Artificial Sequence: Synthetic oligonucleotide
cauacagucgccaugcguc

SEQ ID NO: 552565 - RNA, 19 nt, Artificial Sequence
  Description of Artificial Sequence: Synthetic oligonucleotide
uaggucucgucacaguggg

SEQ ID NO: 552566 - RNA, 19 nt, Artificial Sequence
  Description of Artificial Sequence: Synthetic oligonucleotide
ucggugggcauuuucaaag

SEQ ID NO: 552567 - RNA, 19 nt, Artificial Sequence
  Description of Artificial Sequence: Synthetic oligonucleotide
aaccuagugaacgcgcagc

SEQ ID NO: 552568 - RNA, 19 nt, Artificial Sequence
  Description of Artificial Sequence: Synthetic oligonucleotide
guguacacucauuacagcc

SEQ ID NO: 552569 - RNA, 19 nt, Artificial Sequence
  Description of Artificial Sequence: Synthetic oligonucleotide
uggaacugaaccuggcccg

SEQ ID NO: 552570 - RNA, 19 nt, Artificial Sequence
  Description of Artificial Sequence: Synthetic oligonucleotide
cagucagauagucuggugg

SEQ ID NO: 552571 - RNA, 19 nt, Artificial Sequence
  Description of Artificial Sequence: Synthetic oligonucleotide
gaagaugcagccugugugc

SEQ ID NO: 552572 - RNA, 19 nt, Artificial Sequence
  Description of Artificial Sequence: Synthetic oligonucleotide
auccaauggacaccgcagc

SEQ ID NO: 552573 - RNA, 19 nt, Artificial Sequence
  Description of Artificial Sequence: Synthetic oligonucleotide
gagauacuugcagucaugg

SEQ ID NO: 552574 - RNA, 19 nt, Artificial Sequence
  Description of Artificial Sequence: Synthetic oligonucleotide
aacccuucaggucaaaguu

SEQ ID NO: 552575 - RNA, 19 nt, Artificial Sequence
  Description of Artificial Sequence: Synthetic oligonucleotide
guguguauaaccucucagc

SEQ ID NO: 552576 - RNA, 19 nt, Artificial Sequence
  Description of Artificial Sequence: Synthetic oligonucleotide
gauacuggcaucagucccg

SEQ ID NO: 552577 - RNA, 19 nt, Artificial Sequence
  Description of Artificial Sequence: Synthetic oligonucleotide
guaguaaccauguaccaga

SEQ ID NO: 552578 - RNA, 19 nt, Artificial Sequence
  Description of Artificial Sequence: Synthetic oligonucleotide
aaaguucucgggauaagug

SEQ ID NO: 552579 - RNA, 19 nt, Artificial Sequence
  Description of Artificial Sequence: Synthetic oligonucleotide
acuucauaaaucgauggca

SEQ ID NO: 552580 - RNA, 19 nt, Artificial Sequence
  Description of Artificial Sequence: Synthetic oligonucleotide
uuacagauguccgugucag

SEQ ID NO: 552581 - RNA, 19 nt, Artificial Sequence
  Description of Artificial Sequence: Synthetic oligonucleotide
cucugcaucgaucuuguag

SEQ ID NO: 552582 - RNA, 19 nt, Artificial Sequence
  Description of Artificial Sequence: Synthetic oligonucleotide
cagaacgaugccaagguug

SEQ ID NO: 552583 - RNA, 19 nt, Artificial Sequence
  Description of Artificial Sequence: Synthetic oligonucleotide
ucauccaauggacaccgca

SEQ ID NO: 552584 - RNA, 19 nt, Artificial Sequence
  Description of Artificial Sequence: Synthetic oligonucleotide
uaaccauguaccagaacga

SEQ ID NO: 552585 - RNA, 19 nt, Artificial Sequence
  Description of Artificial Sequence: Synthetic oligonucleotide
aggaccucaaagcaaauau

SEQ ID NO: 552586 - RNA, 19 nt, Artificial Sequence
  Description of Artificial Sequence: Synthetic oligonucleotide
accuagugaacgcgcagcc

SEQ ID NO: 552587 - RNA, 19 nt, Artificial Sequence
  Description of Artificial Sequence: Synthetic oligonucleotide
ccauguaccagaacgaugc

SEQ ID NO: 552588 - RNA, 19 nt, Artificial Sequence
  Description of Artificial Sequence: Synthetic oligonucleotide
caaagcaaauauucucgcc

SEQ ID NO: 552589 - RNA, 19 nt, Artificial Sequence
  Description of Artificial Sequence: Synthetic oligonucleotide
agcaucauggccuuuccgu

SEQ ID NO: 552590 - RNA, 19 nt, Artificial Sequence
  Description of Artificial Sequence: Synthetic oligonucleotide
gauaccgugcuucuccaug

SEQ ID NO: 552591 - RNA, 19 nt, Artificial Sequence
  Description of Artificial Sequence: Synthetic oligonucleotide
agucauccaauggacaccg

SEQ ID NO: 552592 - RNA, 19 nt, Artificial Sequence
  Description of Artificial Sequence: Synthetic oligonucleotide
auaccuucugcuaauaacu

SEQ ID NO: 552593 - RNA, 19 nt, Artificial Sequence
  Description of Artificial Sequence: Synthetic oligonucleotide
uucaugucucggaagggug

SEQ ID NO: 552594 - RNA, 19 nt, Artificial Sequence
  Description of Artificial Sequence: Synthetic oligonucleotide
ugcuuuagcuccaccagcu

SEQ ID NO: 552595 - RNA, 19 nt, Artificial Sequence
  Description of Artificial Sequence: Synthetic oligonucleotide
agugauggaacugaaccug

SEQ ID NO: 552596 - RNA, 19 nt, Artificial Sequence
  Description of Artificial Sequence: Synthetic oligonucleotide
uauacucauacagucgcca

SEQ ID NO: 552597 - RNA, 19 nt, Artificial Sequence
  Description of Artificial Sequence: Synthetic oligonucleotide
gaccucaaagcaaauauuc

SEQ ID NO: 552598 - RNA, 19 nt, Artificial Sequence
  Description of Artificial Sequence: Synthetic oligonucleotide
uaaaucgauggcacuuccc

SEQ ID NO: 552599 - RNA, 19 nt, Artificial Sequence
  Description of Artificial Sequence: Synthetic oligonucleotide
ugguuauagcaguagggac

SEQ ID NO: 552600 - RNA, 19 nt, Artificial Sequence
  Description of Artificial Sequence: Synthetic oligonucleotide
ugucuggugauauacucau

SEQ ID NO: 552601 - RNA, 19 nt, Artificial Sequence
  Description of Artificial Sequence: Synthetic oligonucleotide
cauccaauggacaccgcag

SEQ ID NO: 552602 - RNA, 19 nt, Artificial Sequence
  Description of Artificial Sequence: Synthetic oligonucleotide
agauaacugucuuuccuga

SEQ ID NO: 552603 - RNA, 19 nt, Artificial Sequence
  Description of Artificial Sequence: Synthetic oligonucleotide
uacucggugggcauuuuca

SEQ ID NO: 552604 - RNA, 19 nt, Artificial Sequence
  Description of Artificial Sequence: Synthetic oligonucleotide
gauacccguacucgguggg

SEQ ID NO: 552605 - RNA, 19 nt, Artificial Sequence
  Description of Artificial Sequence: Synthetic oligonucleotide
cuucccacaacgugagagg

SEQ ID NO: 552606 - RNA, 19 nt, Artificial Sequence
  Description of Artificial Sequence: Synthetic oligonucleotide
uacucauacagucgccaug

SEQ ID NO: 552607 - RNA, 19 nt, Artificial Sequence
  Description of Artificial Sequence: Synthetic oligonucleotide
accgagucugcccaguaag

SEQ ID NO: 552608 - RNA, 19 nt, Artificial Sequence
  Description of Artificial Sequence: Synthetic oligonucleotide
uauuuguuuggaaccuagu

SEQ ID NO: 552609 - RNA, 19 nt, Artificial Sequence
  Description of Artificial Sequence: Synthetic oligonucleotide
ugcuuuaccgagucugccc

SEQ ID NO: 552610 - RNA, 19 nt, Artificial Sequence
  Description of Artificial Sequence: Synthetic oligonucleotide
uuguaguaaccauguacca

SEQ ID NO: 552611 - RNA, 19 nt, Artificial Sequence
  Description of Artificial Sequence: Synthetic oligonucleotide
uucauaaaucgauggcacu

SEQ ID NO: 552612 - RNA, 19 nt, Artificial Sequence
  Description of Artificial Sequence: Synthetic oligonucleotide
accagaacgaugccaaggu

SEQ ID NO: 552613 - RNA, 19 nt, Artificial Sequence
  Description of Artificial Sequence: Synthetic oligonucleotide
acggggucacagaagaugc

SEQ ID NO: 552614 - RNA, 19 nt, Artificial Sequence
  Description of Artificial Sequence: Synthetic oligonucleotide
uuggaaccuagugaacgcg

SEQ ID NO: 552615 - RNA, 19 nt, Artificial Sequence
  Description of Artificial Sequence: Synthetic oligonucleotide
uggaaccuagugaacgcgc

SEQ ID NO: 552616 - RNA, 19 nt, Artificial Sequence
  Description of Artificial Sequence: Synthetic oligonucleotide
cuggcaucagucccgauac

SEQ ID NO: 552617 - RNA, 19 nt, Artificial Sequence
  Description of Artificial Sequence: Synthetic oligonucleotide
gguagacucucuuccaggg

SEQ ID NO: 552618 - RNA, 19 nt, Artificial Sequence
  Description of Artificial Sequence: Synthetic oligonucleotide
ugucguagagaacccuuca

SEQ ID NO: 552619 - RNA, 19 nt, Artificial Sequence
  Description of Artificial Sequence: Synthetic oligonucleotide
auauuuguuuggaaccuag

SEQ ID NO: 552620 - RNA, 19 nt, Artificial Sequence
  Description of Artificial Sequence: Synthetic oligonucleotide
ucauaaaucgauggcacuu

SEQ ID NO: 552621 - RNA, 19 nt, Artificial Sequence
  Description of Artificial Sequence: Synthetic oligonucleotide
aauaacugcuuuaccgagu

SEQ ID NO: 552622 - RNA, 19 nt, Artificial Sequence
  Description of Artificial Sequence: Synthetic oligonucleotide
cacagugacauaguugcgc

SEQ ID NO: 552623 - RNA, 19 nt, Artificial Sequence
  Description of Artificial Sequence: Synthetic oligonucleotide
acgcccacgacccugccuc

SEQ ID NO: 552624 - RNA, 19 nt, Artificial Sequence
  Description of Artificial Sequence: Synthetic oligonucleotide
aagucgacaucgagcaagg

SEQ ID NO: 552625 - RNA, 19 nt, Artificial Sequence
  Description of Artificial Sequence: Synthetic oligonucleotide
uccgugucagugauggaac

SEQ ID NO: 552626 - RNA, 19 nt, Artificial Sequence
  Description of Artificial Sequence: Synthetic oligonucleotide
uuauucaugacaggcugaa

SEQ ID NO: 552627 - RNA, 19 nt, Artificial Sequence
  Description of Artificial Sequence: Synthetic oligonucleotide
acgugagaggggcuugccc

SEQ ID NO: 552628 - RNA, 19 nt, Artificial Sequence
  Description of Artificial Sequence: Synthetic oligonucleotide
cacgcacuggccaaugccc

SEQ ID NO: 552629 - RNA, 19 nt, Artificial Sequence
  Description of Artificial Sequence: Synthetic oligonucleotide
auaagugggugguuucugu

SEQ ID NO: 552630 - RNA, 19 nt, Artificial Sequence
  Description of Artificial Sequence: Synthetic oligonucleotide
gguguguacacucauuaca

SEQ ID NO: 552631 - RNA, 19 nt, Artificial Sequence
  Description of Artificial Sequence: Synthetic oligonucleotide
uccaauggacaccgcagcu

SEQ ID NO: 552632 - RNA, 19 nt, Artificial Sequence
  Description of Artificial Sequence: Synthetic oligonucleotide
caucgaucuuguaguaacc

SEQ ID NO: 552633 - RNA, 19 nt, Artificial Sequence
  Description of Artificial Sequence: Synthetic oligonucleotide
ugauaccuucugcuaauaa

SEQ ID NO: 552634 - RNA, 19 nt, Artificial Sequence
  Description of Artificial Sequence: Synthetic oligonucleotide
ugaacgcgcagccgaugcg

SEQ ID NO: 552635 - RNA, 19 nt, Artificial Sequence
  Description of Artificial Sequence: Synthetic oligonucleotide
gaaccuagugaacgcgcag

SEQ ID NO: 552636 - RNA, 19 nt, Artificial Sequence
  Description of Artificial Sequence: Synthetic oligonucleotide
aucaacucguccaugccag

SEQ ID NO: 552637 - RNA, 19 nt, Artificial Sequence
  Description of Artificial Sequence: Synthetic oligonucleotide
ggagauagugcucuggaga

SEQ ID NO: 552638 - RNA, 19 nt, Artificial Sequence
  Description of Artificial Sequence: Synthetic oligonucleotide
acagcccaugccuuucuuc

SEQ ID NO: 552639 - RNA, 19 nt, Artificial Sequence
  Description of Artificial Sequence: Synthetic oligonucleotide
ugggaggauggucaccagc

SEQ ID NO: 552640 - RNA, 19 nt, Artificial Sequence
  Description of Artificial Sequence: Synthetic oligonucleotide
gucgacaucgagcaaggca

SEQ ID NO: 552641 - RNA, 19 nt, Artificial Sequence
  Description of Artificial Sequence: Synthetic oligonucleotide
auauucucgccuuccuugu

SEQ ID NO: 552642 - RNA, 19 nt, Artificial Sequence
  Description of Artificial Sequence: Synthetic oligonucleotide
aacgugagaggggcuugcc

SEQ ID NO: 552643 - RNA, 19 nt, Artificial Sequence
  Description of Artificial Sequence: Synthetic oligonucleotide
gaugagagagcuaucuaaa

SEQ ID NO: 552644 - RNA, 19 nt, Artificial Sequence
  Description of Artificial Sequence: Synthetic oligonucleotide
ucagauagucuggugggcu

SEQ ID NO: 552645 - RNA, 19 nt, Artificial Sequence
  Description of Artificial Sequence: Synthetic oligonucleotide
gauaagugggugguuucug

SEQ ID NO: 552646 - RNA, 19 nt, Artificial Sequence
  Description of Artificial Sequence: Synthetic oligonucleotide
guuggugggcuugagccgg

SEQ ID NO: 552647 - RNA, 19 nt, Artificial Sequence
  Description of Artificial Sequence: Synthetic oligonucleotide
aauauuuguuuggaaccua

SEQ ID NO: 552648 - RNA, 19 nt, Artificial Sequence
  Description of Artificial Sequence: Synthetic oligonucleotide
caggucuagcuccuggcgg

SEQ ID NO: 552649 - RNA, 19 nt, Artificial Sequence
  Description of Artificial Sequence: Synthetic oligonucleotide
gucguagagaacccuucag

SEQ ID NO: 552650 - RNA, 19 nt, Artificial Sequence
  Description of Artificial Sequence: Synthetic oligonucleotide
guagagaacccuucagguc

SEQ ID NO: 552651 - RNA, 19 nt, Artificial Sequence
  Description of Artificial Sequence: Synthetic oligonucleotide
aggauaccuccaucaacuc

SEQ ID NO: 552652 - RNA, 19 nt, Artificial Sequence
  Description of Artificial Sequence: Synthetic oligonucleotide
acagugggagcaguguagg

SEQ ID NO: 552653 - RNA, 19 nt, Artificial Sequence
  Description of Artificial Sequence: Synthetic oligonucleotide
agcuaucuaaaucuccaua

SEQ ID NO: 552654 - RNA, 19 nt, Artificial Sequence
  Description of Artificial Sequence: Synthetic oligonucleotide
cuagugaacgcgcagccga

SEQ ID NO: 552655 - RNA, 19 nt, Artificial Sequence
  Description of Artificial Sequence: Synthetic oligonucleotide
aggguguguacacucauua

SEQ ID NO: 552656 - RNA, 19 nt, Artificial Sequence
  Description of Artificial Sequence: Synthetic oligonucleotide
agccacaacacaauguagu

SEQ ID NO: 552657 - RNA, 19 nt, Artificial Sequence
  Description of Artificial Sequence: Synthetic oligonucleotide
ggauacuggcaucaguccc

SEQ ID NO: 552658 - RNA, 19 nt, Artificial Sequence
  Description of Artificial Sequence: Synthetic oligonucleotide
agauagucuggugggcucg

SEQ ID NO: 552659 - RNA, 19 nt, Artificial Sequence
  Description of Artificial Sequence: Synthetic oligonucleotide
auaccgugcuucuccauga

SEQ ID NO: 552660 - RNA, 19 nt, Artificial Sequence
  Description of Artificial Sequence: Synthetic oligonucleotide
cucauuacagcccaugccu

SEQ ID NO: 552661 - RNA, 19 nt, Artificial Sequence
  Description of Artificial Sequence: Synthetic oligonucleotide
gugguuauagcaguaggga

SEQ ID NO: 552662 - RNA, 19 nt, Artificial Sequence
  Description of Artificial Sequence: Synthetic oligonucleotide
cauaaaucgauggcacuuc

SEQ ID NO: 552663 - RNA, 19 nt, Artificial Sequence
  Description of Artificial Sequence: Synthetic oligonucleotide
uaagugggugguuucuguc

SEQ ID NO: 552664 - RNA, 19 nt, Artificial Sequence
  Description of Artificial Sequence: Synthetic oligonucleotide
aacucguccaugccagcaa

SEQ ID NO: 552665 - RNA, 19 nt, Artificial Sequence
  Description of Artificial Sequence: Synthetic oligonucleotide
gcaucgaucuuguaguaac

SEQ ID NO: 552666 - RNA, 19 nt, Artificial Sequence
  Description of Artificial Sequence: Synthetic oligonucleotide
uaguugcgcuggcagaugu

SEQ ID NO: 552667 - RNA, 19 nt, Artificial Sequence
  Description of Artificial Sequence: Synthetic oligonucleotide
aaccauguaccagaacgau

SEQ ID NO: 552668 - RNA, 19 nt, Artificial Sequence
  Description of Artificial Sequence: Synthetic oligonucleotide
cucgccuuccuugucacag

SEQ ID NO: 552669 - RNA, 19 nt, Artificial Sequence
  Description of Artificial Sequence: Synthetic oligonucleotide
gaauauuuguuuggaaccu

SEQ ID NO: 552670 - RNA, 19 nt, Artificial Sequence
  Description of Artificial Sequence: Synthetic oligonucleotide
agucuggugggcucgucug

SEQ ID NO: 552671 - RNA, 19 nt, Artificial Sequence
  Description of Artificial Sequence: Synthetic oligonucleotide
ucuccaugagugugaugag

SEQ ID NO: 552672 - RNA, 19 nt, Artificial Sequence
  Description of Artificial Sequence: Synthetic oligonucleotide
gugauggaacugaaccugg

SEQ ID NO: 552673 - RNA, 19 nt, Artificial Sequence
  Description of Artificial Sequence: Synthetic oligonucleotide
gguuauagcaguagggaca

SEQ ID NO: 552674 - RNA, 19 nt, Artificial Sequence
  Description of Artificial Sequence: Synthetic oligonucleotide
ucgcagguguugcaguugu

SEQ ID NO: 552675 - RNA, 19 nt, Artificial Sequence
  Description of Artificial Sequence: Synthetic oligonucleotide
guccaugccagcaauagaa

SEQ ID NO: 552676 - RNA, 19 nt, Artificial Sequence
  Description of Artificial Sequence: Synthetic oligonucleotide
gugaacgcgcagccgaugc

SEQ ID NO: 552677 - RNA, 19 nt, Artificial Sequence
  Description of Artificial Sequence: Synthetic oligonucleotide
ugcgcuucggauggugggg

SEQ ID NO: 552678 - RNA, 19 nt, Artificial Sequence
  Description of Artificial Sequence: Synthetic oligonucleotide
uaguaaccauguaccagaa

SEQ ID NO: 552679 - RNA, 19 nt, Artificial Sequence
  Description of Artificial Sequence: Synthetic oligonucleotide
gaacccuucaggucaaagu

SEQ ID NO: 552680 - RNA, 19 nt, Artificial Sequence
  Description of Artificial Sequence: Synthetic oligonucleotide
caucgagcaaggcagccuc

SEQ ID NO: 552681 - RNA, 19 nt, Artificial Sequence
  Description of Artificial Sequence: Synthetic oligonucleotide
gguugggcuuuccuggagg

SEQ ID NO: 552682 - RNA, 19 nt, Artificial Sequence
  Description of Artificial Sequence: Synthetic oligonucleotide
uggaagacggggucacaga

SEQ ID NO: 552683 - RNA, 19 nt, Artificial Sequence
  Description of Artificial Sequence: Synthetic oligonucleotide
auacucauacagucgccau

SEQ ID NO: 552684 - RNA, 19 nt, Artificial Sequence
  Description of Artificial Sequence: Synthetic oligonucleotide
uccaugccagcaauagaau

SEQ ID NO: 552685 - RNA, 19 nt, Artificial Sequence
  Description of Artificial Sequence: Synthetic oligonucleotide
caucaacucguccaugcca

SEQ ID NO: 552686 - RNA, 19 nt, Artificial Sequence
  Description of Artificial Sequence: Synthetic oligonucleotide
guguaggcggcuuggcuug

SEQ ID NO: 552687 - RNA, 19 nt, Artificial Sequence
  Description of Artificial Sequence: Synthetic oligonucleotide
ugggcgguugauaccuucu

SEQ ID NO: 552688 - RNA, 19 nt, Artificial Sequence
  Description of Artificial Sequence: Synthetic oligonucleotide
ggcauuacagauguccgug

SEQ ID NO: 552689 - RNA, 19 nt, Artificial Sequence
  Description of Artificial Sequence: Synthetic oligonucleotide
cugcgcuucggaugguggg

SEQ ID NO: 552690 - RNA, 19 nt, Artificial Sequence
  Description of Artificial Sequence: Synthetic oligonucleotide
aacugaaccuggcccggaa

SEQ ID NO: 552691 - RNA, 19 nt, Artificial Sequence
  Description of Artificial Sequence: Synthetic oligonucleotide
caccucggugcauagggug

SEQ ID NO: 552692 - RNA, 19 nt, Artificial Sequence
  Description of Artificial Sequence: Synthetic oligonucleotide
uuacagcccaugccuuucu

SEQ ID NO: 552693 - RNA, 19 nt, Artificial Sequence
  Description of Artificial Sequence: Synthetic oligonucleotide
cugucguagagaacccuuc

SEQ ID NO: 552694 - RNA, 19 nt, Artificial Sequence
  Description of Artificial Sequence: Synthetic oligonucleotide
gaacgcgcagccgaugcgc

SEQ ID NO: 552695 - RNA, 19 nt, Artificial Sequence
  Description of Artificial Sequence: Synthetic oligonucleotide
uccuggcgggcauccaccg

SEQ ID NO: 552696 - RNA, 19 nt, Artificial Sequence
  Description of Artificial Sequence: Synthetic oligonucleotide
gguguugcaguugucagca

SEQ ID NO: 552697 - RNA, 19 nt, Artificial Sequence
  Description of Artificial Sequence: Synthetic oligonucleotide
ugagccggcggccacucuc

SEQ ID NO: 552698 - RNA, 19 nt, Artificial Sequence
  Description of Artificial Sequence: Synthetic oligonucleotide
aaggaccucaaagcaaaua

SEQ ID NO: 552699 - RNA, 19 nt, Artificial Sequence
  Description of Artificial Sequence: Synthetic oligonucleotide
cagauacccguacucggug

SEQ ID NO: 552700 - RNA, 19 nt, Artificial Sequence
  Description of Artificial Sequence: Synthetic oligonucleotide
cauguaccagaacgaugcc

SEQ ID NO: 552701 - RNA, 19 nt, Artificial Sequence
  Description of Artificial Sequence: Synthetic oligonucleotide
gugucucguugccaggaag

SEQ ID NO: 552702 - RNA, 19 nt, Artificial Sequence
  Description of Artificial Sequence: Synthetic oligonucleotide
caccgagagugccucauug

SEQ ID NO: 552703 - RNA, 19 nt, Artificial Sequence
  Description of Artificial Sequence: Synthetic oligonucleotide
gucuuuuggccgccugggg

SEQ ID NO: 552704 - RNA, 19 nt, Artificial Sequence
  Description of Artificial Sequence: Synthetic oligonucleotide
gacaucgagcaaggcagcc

SEQ ID NO: 552705 - RNA, 19 nt, Artificial Sequence
  Description of Artificial Sequence: Synthetic oligonucleotide
auguaccagaacgaugcca

SEQ ID NO: 552706 - RNA, 19 nt, Artificial Sequence
  Description of Artificial Sequence: Synthetic oligonucleotide
agacgggucauggcauuac

SEQ ID NO: 552707 - RNA, 19 nt, Artificial Sequence
  Description of Artificial Sequence: Synthetic oligonucleotide
cuggugauauacucauaca

SEQ ID NO: 552708 - RNA, 19 nt, Artificial Sequence
  Description of Artificial Sequence: Synthetic oligonucleotide
uuuaccgagucugcccagu

SEQ ID NO: 552709 - RNA, 19 nt, Artificial Sequence
  Description of Artificial Sequence: Synthetic oligonucleotide
ucguugccaggaaggggag

SEQ ID NO: 552710 - RNA, 19 nt, Artificial Sequence
  Description of Artificial Sequence: Synthetic oligonucleotide
uccacgcacuggccaaugc

SEQ ID NO: 552711 - RNA, 19 nt, Artificial Sequence
  Description of Artificial Sequence: Synthetic oligonucleotide
cagauagucuggugggcuc

SEQ ID NO: 552712 - RNA, 19 nt, Artificial Sequence
  Description of Artificial Sequence: Synthetic oligonucleotide
accauguaccagaacgaug

SEQ ID NO: 552713 - RNA, 19 nt, Artificial Sequence
  Description of Artificial Sequence: Synthetic oligonucleotide
uauucucgccuuccuuguc

SEQ ID NO: 552714 - RNA, 19 nt, Artificial Sequence
  Description of Artificial Sequence: Synthetic oligonucleotide
ucaacucguccaugccagc

SEQ ID NO: 552715 - RNA, 19 nt, Artificial Sequence
  Description of Artificial Sequence: Synthetic oligonucleotide
cacucagacgggucauggc

SEQ ID NO: 552716 - RNA, 19 nt, Artificial Sequence
  Description of Artificial Sequence: Synthetic oligonucleotide
accucggugcauagggugg

SEQ ID NO: 552717 - RNA, 19 nt, Artificial Sequence
  Description of Artificial Sequence: Synthetic oligonucleotide
acaccgcagcuccuuguag

SEQ ID NO: 552718 - RNA, 19 nt, Artificial Sequence
  Description of Artificial Sequence: Synthetic oligonucleotide
agagugccucauugugguc

SEQ ID NO: 552719 - RNA, 19 nt, Artificial Sequence
  Description of Artificial Sequence: Synthetic oligonucleotide
ugcaucgaucuuguaguaa

SEQ ID NO: 552720 - RNA, 19 nt, Artificial Sequence
  Description of Artificial Sequence: Synthetic oligonucleotide
cagcaucauggccuuuccg

SEQ ID NO: 552721 - RNA, 19 nt, Artificial Sequence
  Description of Artificial Sequence: Synthetic oligonucleotide
cuuuaccgagucugcccag

SEQ ID NO: 552722 - RNA, 19 nt, Artificial Sequence
  Description of Artificial Sequence: Synthetic oligonucleotide
guaccagaacgaugccaag

SEQ ID NO: 552723 - RNA, 19 nt, Artificial Sequence
  Description of Artificial Sequence: Synthetic oligonucleotide
guguauaaccucucagcua

SEQ ID NO: 552724 - RNA, 19 nt, Artificial Sequence
  Description of Artificial Sequence: Synthetic oligonucleotide
acugcgcuucggauggugg

SEQ ID NO: 552725 - RNA, 19 nt, Artificial Sequence
  Description of Artificial Sequence: Synthetic oligonucleotide
ugaagucgacaucgagcaa

SEQ ID NO: 552726 - RNA, 19 nt, Artificial Sequence
  Description of Artificial Sequence: Synthetic oligonucleotide
gaaccuggcccggaacacc

SEQ ID NO: 552727 - RNA, 19 nt, Artificial Sequence
  Description of Artificial Sequence: Synthetic oligonucleotide
acucggugggcauuuucaa

SEQ ID NO: 552728 - RNA, 19 nt, Artificial Sequence
  Description of Artificial Sequence: Synthetic oligonucleotide
uaccgagucugcccaguaa

SEQ ID NO: 552729 - RNA, 19 nt, Artificial Sequence
  Description of Artificial Sequence: Synthetic oligonucleotide
ggagauaacugucuuuccu

SEQ ID NO: 552730 - RNA, 19 nt, Artificial Sequence
  Description of Artificial Sequence: Synthetic oligonucleotide
ugaugggaggauggucacc

SEQ ID NO: 552731 - RNA, 19 nt, Artificial Sequence
  Description of Artificial Sequence: Synthetic oligonucleotide
uaggguguguacacucauu

SEQ ID NO: 552732 - RNA, 19 nt, Artificial Sequence
  Description of Artificial Sequence: Synthetic oligonucleotide
uccgugggcgguugauacc

SEQ ID NO: 552733 - RNA, 19 nt, Artificial Sequence
  Description of Artificial Sequence: Synthetic oligonucleotide
gacuccguucucacacucc

SEQ ID NO: 552734 - RNA, 19 nt, Artificial Sequence
  Description of Artificial Sequence: Synthetic oligonucleotide
acagaagaugcagccugug

SEQ ID NO: 552735 - RNA, 19 nt, Artificial Sequence
  Description of Artificial Sequence: Synthetic oligonucleotide
ggcgguugauaccuucugc

SEQ ID NO: 552736 - RNA, 19 nt, Artificial Sequence
  Description of Artificial Sequence: Synthetic oligonucleotide
acgcagcaucuccacagug

SEQ ID NO: 552737 - RNA, 19 nt, Artificial Sequence
  Description of Artificial Sequence: Synthetic oligonucleotide
gguguaggucucgucacag

SEQ ID NO: 552738 - RNA, 19 nt, Artificial Sequence
  Description of Artificial Sequence: Synthetic oligonucleotide
uuaccgagucugcccagua

SEQ ID NO: 552739 - RNA, 19 nt, Artificial Sequence
  Description of Artificial Sequence: Synthetic oligonucleotide
gugucuggugauauacuca

SEQ ID NO: 552740 - RNA, 19 nt, Artificial Sequence
  Description of Artificial Sequence: Synthetic oligonucleotide
gcuuuaccgagucugccca

SEQ ID NO: 552741 - RNA, 19 nt, Artificial Sequence
  Description of Artificial Sequence: Synthetic oligonucleotide
guauugcaggccaccuucc

SEQ ID NO: 552742 - RNA, 19 nt, Artificial Sequence
  Description of Artificial Sequence: Synthetic oligonucleotide
guccgugucagugauggaa

SEQ ID NO: 552743 - RNA, 19 nt, Artificial Sequence
  Description of Artificial Sequence: Synthetic oligonucleotide
gcaaguggucucugcuugg

SEQ ID NO: 552744 - RNA, 19 nt, Artificial Sequence
  Description of Artificial Sequence: Synthetic oligonucleotide
ugcauggcaugcugugguc

SEQ ID NO: 552745 - RNA, 19 nt, Artificial Sequence
  Description of Artificial Sequence: Synthetic oligonucleotide
acaucgagcaaggcagccu

SEQ ID NO: 552746 - RNA, 19 nt, Artificial Sequence
  Description of Artificial Sequence: Synthetic oligonucleotide
auagcaguagggacacagu

SEQ ID NO: 552747 - RNA, 19 nt, Artificial Sequence
  Description of Artificial Sequence: Synthetic oligonucleotide
uagugaacgcgcagccgau

SEQ ID NO: 552748 - RNA, 19 nt, Artificial Sequence
  Description of Artificial Sequence: Synthetic oligonucleotide
ugugggcauuauucaugac

SEQ ID NO: 552749 - RNA, 19 nt, Artificial Sequence
  Description of Artificial Sequence: Synthetic oligonucleotide
acaacgugagaggggcuug

SEQ ID NO: 552750 - RNA, 19 nt, Artificial Sequence
  Description of Artificial Sequence: Synthetic oligonucleotide
accgugcuucuccaugagu

SEQ ID NO: 552751 - RNA, 19 nt, Artificial Sequence
  Description of Artificial Sequence: Synthetic oligonucleotide
uacagauguccgugucagu

SEQ ID NO: 552752 - RNA, 19 nt, Artificial Sequence
  Description of Artificial Sequence: Synthetic oligonucleotide
uuuuggccgccugggguug

SEQ ID NO: 552753 - RNA, 19 nt, Artificial Sequence
  Description of Artificial Sequence: Synthetic oligonucleotide
cagugacauaguugcgcug

SEQ ID NO: 552754 - RNA, 19 nt, Artificial Sequence
  Description of Artificial Sequence: Synthetic oligonucleotide
gugaaaaggauaccuccau

SEQ ID NO: 552755 - RNA, 19 nt, Artificial Sequence
  Description of Artificial Sequence: Synthetic oligonucleotide
ugcgcuggcagauguuguu

SEQ ID NO: 552756 - RNA, 19 nt, Artificial Sequence
  Description of Artificial Sequence: Synthetic oligonucleotide
caaaggugucacccuucug

SEQ ID NO: 552757 - RNA, 19 nt, Artificial Sequence
  Description of Artificial Sequence: Synthetic oligonucleotide
auaguugcgcuggcagaug

SEQ ID NO: 552758 - RNA, 19 nt, Artificial Sequence
  Description of Artificial Sequence: Synthetic oligonucleotide
acagggauacuggcaucag

SEQ ID NO: 552759 - RNA, 19 nt, Artificial Sequence
  Description of Artificial Sequence: Synthetic oligonucleotide
ucagacgggucauggcauu

SEQ ID NO: 552760 - RNA, 19 nt, Artificial Sequence
  Description of Artificial Sequence: Synthetic oligonucleotide
ggaacugaaccuggcccgg

SEQ ID NO: 552761 - RNA, 19 nt, Artificial Sequence
  Description of Artificial Sequence: Synthetic oligonucleotide
ugcugucguagagaacccu

SEQ ID NO: 552762 - RNA, 19 nt, Artificial Sequence
  Description of Artificial Sequence: Synthetic oligonucleotide
ucucagcuauuugcauggc

SEQ ID NO: 552763 - RNA, 19 nt, Artificial Sequence
  Description of Artificial Sequence: Synthetic oligonucleotide
uaaaguguucaggcccgau

SEQ ID NO: 552764 - RNA, 19 nt, Artificial Sequence
  Description of Artificial Sequence: Synthetic oligonucleotide
uguaggcggcuuggcuugg

SEQ ID NO: 552765 - RNA, 19 nt, Artificial Sequence
  Description of Artificial Sequence: Synthetic oligonucleotide
cuuccacuugggacccgag

SEQ ID NO: 552766 - RNA, 19 nt, Artificial Sequence
  Description of Artificial Sequence: Synthetic oligonucleotide
ggguguguacacucauuac

SEQ ID NO: 552767 - RNA, 19 nt, Artificial Sequence
  Description of Artificial Sequence: Synthetic oligonucleotide
auaccuccaucaacucguc

SEQ ID NO: 552768 - RNA, 19 nt, Artificial Sequence
  Description of Artificial Sequence: Synthetic oligonucleotide
caacgugagaggggcuugc

SEQ ID NO: 552769 - RNA, 19 nt, Artificial Sequence
  Description of Artificial Sequence: Synthetic oligonucleotide
agccucgcagguguugcag

SEQ ID NO: 552770 - RNA, 19 nt, Artificial Sequence
  Description of Artificial Sequence: Synthetic oligonucleotide
ggagauacuugcagucaug

SEQ ID NO: 552771 - RNA, 19 nt, Artificial Sequence
  Description of Artificial Sequence: Synthetic oligonucleotide
gaccaccucggugcauagg

SEQ ID NO: 552772 - RNA, 19 nt, Artificial Sequence
  Description of Artificial Sequence: Synthetic oligonucleotide
ccgagagugccucauugug

SEQ ID NO: 552773 - RNA, 19 nt, Artificial Sequence
  Description of Artificial Sequence: Synthetic oligonucleotide
gcugaacggcaucaaggac

SEQ ID NO: 552774 - RNA, 19 nt, Artificial Sequence
  Description of Artificial Sequence: Synthetic oligonucleotide
agugaacgcgcagccgaug

SEQ ID NO: 552775 - RNA, 19 nt, Artificial Sequence
  Description of Artificial Sequence: Synthetic oligonucleotide
gggauaagugggugguuuc

SEQ ID NO: 552776 - RNA, 19 nt, Artificial Sequence
  Description of Artificial Sequence: Synthetic oligonucleotide
gcugacuucauagguguga

SEQ ID NO: 552777 - RNA, 19 nt, Artificial Sequence
  Description of Artificial Sequence: Synthetic oligonucleotide
cuccguucucacacuccac

SEQ ID NO: 552778 - RNA, 19 nt, Artificial Sequence
  Description of Artificial Sequence: Synthetic oligonucleotide
aguaagcagccagggcuga

SEQ ID NO: 552779 - RNA, 19 nt, Artificial Sequence
  Description of Artificial Sequence: Synthetic oligonucleotide
auagucuggugggcucguc

SEQ ID NO: 552780 - RNA, 19 nt, Artificial Sequence
  Description of Artificial Sequence: Synthetic oligonucleotide
aacgcgcagccgaugcgca

SEQ ID NO: 552781 - RNA, 19 nt, Artificial Sequence
  Description of Artificial Sequence: Synthetic oligonucleotide
aggcccgauccugaaggag

SEQ ID NO: 552782 - RNA, 19 nt, Artificial Sequence
  Description of Artificial Sequence: Synthetic oligonucleotide
gugugaugggaggaugguc

SEQ ID NO: 552783 - RNA, 19 nt, Artificial Sequence
  Description of Artificial Sequence: Synthetic oligonucleotide
ccacgcacuggccaaugcc

SEQ ID NO: 552784 - RNA, 19 nt, Artificial Sequence
  Description of Artificial Sequence: Synthetic oligonucleotide
cagucgccaugcgucaccc

SEQ ID NO: 552785 - RNA, 19 nt, Artificial Sequence
  Description of Artificial Sequence: Synthetic oligonucleotide
uacagucgccaugcgucac

SEQ ID NO: 552786 - RNA, 19 nt, Artificial Sequence
  Description of Artificial Sequence: Synthetic oligonucleotide
uugccccgggagccugagg

SEQ ID NO: 552787 - RNA, 19 nt, Artificial Sequence
  Description of Artificial Sequence: Synthetic oligonucleotide
cucuguagcugacuucaua

SEQ ID NO: 552788 - RNA, 19 nt, Artificial Sequence
  Description of Artificial Sequence: Synthetic oligonucleotide
gugggcgguugauaccuuc

SEQ ID NO: 552789 - RNA, 19 nt, Artificial Sequence
  Description of Artificial Sequence: Synthetic oligonucleotide
uggccuuuccgugggcggu

SEQ ID NO: 552790 - RNA, 19 nt, Artificial Sequence
  Description of Artificial Sequence: Synthetic oligonucleotide
gagccggcggccacucucc

SEQ ID NO: 552791 - RNA, 19 nt, Artificial Sequence
  Description of Artificial Sequence: Synthetic oligonucleotide
ccguggguagcugauguag

SEQ ID NO: 552792 - RNA, 19 nt, Artificial Sequence
  Description of Artificial Sequence: Synthetic oligonucleotide
gggaagauggguugucaua

SEQ ID NO: 552793 - RNA, 19 nt, Artificial Sequence
  Description of Artificial Sequence: Synthetic oligonucleotide
ucuugucuuuuggccgccu

SEQ ID NO: 552794 - RNA, 19 nt, Artificial Sequence
  Description of Artificial Sequence: Synthetic oligonucleotide
ggugggugguuauagcagu

SEQ ID NO: 552795 - RNA, 19 nt, Artificial Sequence
  Description of Artificial Sequence: Synthetic oligonucleotide
uuauagcaguagggacaca

SEQ ID NO: 552796 - RNA, 19 nt, Artificial Sequence
  Description of Artificial Sequence: Synthetic oligonucleotide
ggaaccuagugaacgcgca

SEQ ID NO: 552797 - RNA, 19 nt, Artificial Sequence
  Description of Artificial Sequence: Synthetic oligonucleotide
gggcgguugauaccuucug

SEQ ID NO: 552798 - RNA, 19 nt, Artificial Sequence
  Description of Artificial Sequence: Synthetic oligonucleotide
ggguugucauacaaaguaa

SEQ ID NO: 552799 - RNA, 19 nt, Artificial Sequence
  Description of Artificial Sequence: Synthetic oligonucleotide
cauaguugcgcuggcagau

SEQ ID NO: 552800 - RNA, 19 nt, Artificial Sequence
  Description of Artificial Sequence: Synthetic oligonucleotide
ccuagugaacgcgcagccg

SEQ ID NO: 552801 - RNA, 19 nt, Artificial Sequence
  Description of Artificial Sequence: Synthetic oligonucleotide
cgagucugcccaguaaggg

SEQ ID NO: 552802 - RNA, 19 nt, Artificial Sequence
  Description of Artificial Sequence: Synthetic oligonucleotide
ggguagcugauguagcccu

SEQ ID NO: 552803 - RNA, 19 nt, Artificial Sequence
  Description of Artificial Sequence: Synthetic oligonucleotide
agccgaugcgcaggucuag

SEQ ID NO: 552804 - RNA, 19 nt, Artificial Sequence
  Description of Artificial Sequence: Synthetic oligonucleotide
agauagugcucuggagaua

SEQ ID NO: 552805 - RNA, 19 nt, Artificial Sequence
  Description of Artificial Sequence: Synthetic oligonucleotide
uaagggugguuggccugcu

SEQ ID NO: 552806 - RNA, 19 nt, Artificial Sequence
  Description of Artificial Sequence: Synthetic oligonucleotide
ggacuccguucucacacuc

SEQ ID NO: 552807 - RNA, 19 nt, Artificial Sequence
  Description of Artificial Sequence: Synthetic oligonucleotide
acgcacuggccaaugccca

SEQ ID NO: 552808 - RNA, 19 nt, Artificial Sequence
  Description of Artificial Sequence: Synthetic oligonucleotide
guaaaguguucaggcccga

SEQ ID NO: 552809 - RNA, 19 nt, Artificial Sequence
  Description of Artificial Sequence: Synthetic oligonucleotide
cuuuuggccgccugggguu

SEQ ID NO: 552810 - RNA, 19 nt, Artificial Sequence
  Description of Artificial Sequence: Synthetic oligonucleotide
gaacugaaccuggcccgga

SEQ ID NO: 552811 - RNA, 19 nt, Artificial Sequence
  Description of Artificial Sequence: Synthetic oligonucleotide
ggcccgauccugaaggaga

SEQ ID NO: 552812 - RNA, 19 nt, Artificial Sequence
  Description of Artificial Sequence: Synthetic oligonucleotide
acccguacucggugggcau

SEQ ID NO: 552813 - RNA, 19 nt, Artificial Sequence
  Description of Artificial Sequence: Synthetic oligonucleotide
cccaguaagggugguuggc

SEQ ID NO: 552814 - RNA, 19 nt, Artificial Sequence
  Description of Artificial Sequence: Synthetic oligonucleotide
ggcgggcauccaccgagag

SEQ ID NO: 552815 - RNA, 19 nt, Artificial Sequence
  Description of Artificial Sequence: Synthetic oligonucleotide
cugcaucgaucuuguagua

SEQ ID NO: 552816 - RNA, 19 nt, Artificial Sequence
  Description of Artificial Sequence: Synthetic oligonucleotide
cuugccccgggagccugag

SEQ ID NO: 552817 - RNA, 19 nt, Artificial Sequence
  Description of Artificial Sequence: Synthetic oligonucleotide
cauuacagcccaugccuuu

SEQ ID NO: 552818 - RNA, 19 nt, Artificial Sequence
  Description of Artificial Sequence: Synthetic oligonucleotide
auagugcucuggagauacu

SEQ ID NO: 552819 - RNA, 19 nt, Artificial Sequence
  Description of Artificial Sequence: Synthetic oligonucleotide
cuucugcuaauaacugcuu

SEQ ID NO: 552820 - RNA, 19 nt, Artificial Sequence
  Description of Artificial Sequence: Synthetic oligonucleotide
cuccacgcacuggccaaug

SEQ ID NO: 552821 - RNA, 19 nt, Artificial Sequence
  Description of Artificial Sequence: Synthetic oligonucleotide
gucauccaauggacaccgc

SEQ ID NO: 552822 - RNA, 19 nt, Artificial Sequence
  Description of Artificial Sequence: Synthetic oligonucleotide
ggauaagugggugguuucu

SEQ ID NO: 552823 - RNA, 19 nt, Artificial Sequence
  Description of Artificial Sequence: Synthetic oligonucleotide
ucccgauaccgugcuucuc

SEQ ID NO: 552824 - RNA, 19 nt, Artificial Sequence
  Description of Artificial Sequence: Synthetic oligonucleotide
cagggauacuggcaucagu

SEQ ID NO: 552825 - RNA, 19 nt, Artificial Sequence
  Description of Artificial Sequence: Synthetic oligonucleotide
gcuauuugcauggcaugcu

SEQ ID NO: 552826 - RNA, 19 nt, Artificial Sequence
  Description of Artificial Sequence: Synthetic oligonucleotide
gucccgauaccgugcuucu

SEQ ID NO: 552827 - RNA, 19 nt, Artificial Sequence
  Description of Artificial Sequence: Synthetic oligonucleotide
cauguggguagacucucuu

SEQ ID NO: 552828 - RNA, 19 nt, Artificial Sequence
  Description of Artificial Sequence: Synthetic oligonucleotide
cccguggcagccaggggug

SEQ ID NO: 552829 - RNA, 19 nt, Artificial Sequence
  Description of Artificial Sequence: Synthetic oligonucleotide
cuuggaagacggggucaca

SEQ ID NO: 552830 - RNA, 19 nt, Artificial Sequence
  Description of Artificial Sequence: Synthetic oligonucleotide
guaggcggcuuggcuuggc

SEQ ID NO: 552831 - RNA, 19 nt, Artificial Sequence
  Description of Artificial Sequence: Synthetic oligonucleotide
cccgggcacgcccacgacc

SEQ ID NO: 552832 - RNA, 19 nt, Artificial Sequence
  Description of Artificial Sequence: Synthetic oligonucleotide
cagccgaugcgcaggucua

SEQ ID NO: 552833 - RNA, 19 nt, Artificial Sequence
  Description of Artificial Sequence: Synthetic oligonucleotide
accuuccacuugggacccg

SEQ ID NO: 552834 - RNA, 19 nt, Artificial Sequence
  Description of Artificial Sequence: Synthetic oligonucleotide
ggcacgcccacgacccugc

SEQ ID NO: 552835 - RNA, 19 nt, Artificial Sequence
  Description of Artificial Sequence: Synthetic oligonucleotide
agacggggucacagaagau

SEQ ID NO: 552836 - RNA, 19 nt, Artificial Sequence
  Description of Artificial Sequence: Synthetic oligonucleotide
gacccgaggugggguccag

SEQ ID NO: 552837 - RNA, 19 nt, Artificial Sequence
  Description of Artificial Sequence: Synthetic oligonucleotide
gccgaugcgcaggucuagc

SEQ ID NO: 552838 - RNA, 19 nt, Artificial Sequence
  Description of Artificial Sequence: Synthetic oligonucleotide
ucucaccacugugggcauu

SEQ ID NO: 552839 - RNA, 19 nt, Artificial Sequence
  Description of Artificial Sequence: Synthetic oligonucleotide
gcggcuuggcuuggccugg

SEQ ID NO: 552840 - RNA, 19 nt, Artificial Sequence
  Description of Artificial Sequence: Synthetic oligonucleotide
gcagauacccguacucggu

SEQ ID NO: 552841 - RNA, 19 nt, Artificial Sequence
  Description of Artificial Sequence: Synthetic oligonucleotide
cacaacgugagaggggcuu

SEQ ID NO: 552842 - RNA, 19 nt, Artificial Sequence
  Description of Artificial Sequence: Synthetic oligonucleotide
agccggcggccacucucca

SEQ ID NO: 552843 - RNA, 19 nt, Artificial Sequence
  Description of Artificial Sequence: Synthetic oligonucleotide
ccuggcccggaacaccguc

SEQ ID NO: 552844 - RNA, 19 nt, Artificial Sequence
  Description of Artificial Sequence: Synthetic oligonucleotide
ggaccucaaagcaaauauu

SEQ ID NO: 552845 - RNA, 19 nt, Artificial Sequence
  Description of Artificial Sequence: Synthetic oligonucleotide
gggacccgagguggggucc

SEQ ID NO: 552846 - RNA, 19 nt, Artificial Sequence
  Description of Artificial Sequence: Synthetic oligonucleotide
caguagggacacagugggu

SEQ ID NO: 552847 - RNA, 19 nt, Artificial Sequence
  Description of Artificial Sequence: Synthetic oligonucleotide
cuaccaggaccaccucggu

SEQ ID NO: 552848 - RNA, 19 nt, Artificial Sequence
  Description of Artificial Sequence: Synthetic oligonucleotide
cagacgggucauggcauua

SEQ ID NO: 552849 - RNA, 19 nt, Artificial Sequence
  Description of Artificial Sequence: Synthetic oligonucleotide
ggacaccgcagcuccuugu

SEQ ID NO: 552850 - RNA, 19 nt, Artificial Sequence
  Description of Artificial Sequence: Synthetic oligonucleotide
gcugucguagagaacccuu

SEQ ID NO: 552851 - RNA, 19 nt, Artificial Sequence
  Description of Artificial Sequence: Synthetic oligonucleotide
gaacggcaucaaggaccuc

SEQ ID NO: 552852 - RNA, 19 nt, Artificial Sequence
  Description of Artificial Sequence: Synthetic oligonucleotide
gccccgggcacgcccacga

SEQ ID NO: 552853 - RNA, 19 nt, Artificial Sequence
  Description of Artificial Sequence: Synthetic oligonucleotide
gcgcuucggauggugggga

SEQ ID NO: 552854 - RNA, 19 nt, Artificial Sequence
  Description of Artificial Sequence: Synthetic oligonucleotide
gccuuuccgugggcgguug

SEQ ID NO: 552855 - RNA, 19 nt, Artificial Sequence
  Description of Artificial Sequence: Synthetic oligonucleotide
caccugagcuuugguccaa

SEQ ID NO: 552856 - RNA, 19 nt, Artificial Sequence
  Description of Artificial Sequence: Synthetic oligonucleotide
cacgcccacgacccugccu

SEQ ID NO: 552857 - RNA, 19 nt, Artificial Sequence
  Description of Artificial Sequence: Synthetic oligonucleotide
gcgggcauccaccgagagu

SEQ ID NO: 552858 - RNA, 19 nt, Artificial Sequence
  Description of Artificial Sequence: Synthetic oligonucleotide
guauaaccucucagcuauu

SEQ ID NO: 552859 - RNA, 19 nt, Artificial Sequence
  Description of Artificial Sequence: Synthetic oligonucleotide
ggacccgagguggggucca

SEQ ID NO: 552860 - RNA, 19 nt, Artificial Sequence
  Description of Artificial Sequence: Synthetic oligonucleotide
gcuucggaugguggggagu

SEQ ID NO: 552861 - RNA, 19 nt, Artificial Sequence
  Description of Artificial Sequence: Synthetic oligonucleotide
ccgugucagugauggaacu

SEQ ID NO: 552862 - RNA, 19 nt, Artificial Sequence
  Description of Artificial Sequence: Synthetic oligonucleotide
ccgugggcgguugauaccu

SEQ ID NO: 552863 - RNA, 19 nt, Artificial Sequence
  Description of Artificial Sequence: Synthetic oligonucleotide
cgauggcacuucccacaac

SEQ ID NO: 552864 - RNA, 19 nt, Artificial Sequence
  Description of Artificial Sequence: Synthetic oligonucleotide
gcccgauccugaaggagau

SEQ ID NO: 552865 - RNA, 19 nt, Artificial Sequence
  Description of Artificial Sequence: Synthetic oligonucleotide
ccccuaauucagccucugu

SEQ ID NO: 552866 - RNA, 19 nt, Artificial Sequence
  Description of Artificial Sequence: Synthetic oligonucleotide
ccgggagccugaggaccac

SEQ ID NO: 552867 - RNA, 19 nt, Artificial Sequence
  Description of Artificial Sequence: Synthetic oligonucleotide
cgggauaagugggugguuu

SEQ ID NO: 552868 - RNA, 19 nt, Artificial Sequence
  Description of Artificial Sequence: Synthetic oligonucleotide
ggccuuuccgugggcgguu

SEQ ID NO: 552869 - RNA, 19 nt, Artificial Sequence
  Description of Artificial Sequence: Synthetic oligonucleotide
cccgauccugaaggagaua

SEQ ID NO: 552870 - RNA, 19 nt, Artificial Sequence
  Description of Artificial Sequence: Synthetic oligonucleotide
cgauaccgugcuucuccau

SEQ ID NO: 552871 - RNA, 19 nt, Artificial Sequence
  Description of Artificial Sequence: Synthetic oligonucleotide
ccguacucggugggcauuu

SEQ ID NO: 552872 - RNA, 19 nt, Artificial Sequence
  Description of Artificial Sequence: Synthetic oligonucleotide
cccguacucggugggcauu

SEQ ID NO: 552873 - RNA, 19 nt, Artificial Sequence
  Description of Artificial Sequence: Synthetic oligonucleotide
ccacugcgcuucggauggu

SEQ ID NO: 552874 - RNA, 19 nt, Artificial Sequence
  Description of Artificial Sequence: Synthetic oligonucleotide
cgggcacgcccacgacccu

SEQ ID NO: 552875 - RNA, 19 nt, Artificial Sequence
  Description of Artificial Sequence: Synthetic oligonucleotide
uaaggugauauucagagcg

SEQ ID NO: 552876 - RNA, 19 nt, Artificial Sequence
  Description of Artificial Sequence: Synthetic oligonucleotide
aaaauggacuuauaauugc

SEQ ID NO: 552877 - RNA, 19 nt, Artificial Sequence
  Description of Artificial Sequence: Synthetic oligonucleotide
uauaugauuguucuuacag

SEQ ID NO: 552878 - RNA, 19 nt, Artificial Sequence
  Description of Artificial Sequence: Synthetic oligonucleotide
uaaugaguaacucugauac

SEQ ID NO: 552879 - RNA, 19 nt, Artificial Sequence
  Description of Artificial Sequence: Synthetic oligonucleotide
uaauuaaugaguaacucug

SEQ ID NO: 552880 - RNA, 19 nt, Artificial Sequence
  Description of Artificial Sequence: Synthetic oligonucleotide
aauauaugauuguucuuac

SEQ ID NO: 552881 - RNA, 19 nt, Artificial Sequence
  Description of Artificial Sequence: Synthetic oligonucleotide
uauuauuggacuuauagau

SEQ ID NO: 552882 - RNA, 19 nt, Artificial Sequence
  Description of Artificial Sequence: Synthetic oligonucleotide
uuauaauugccauugaagu

SEQ ID NO: 552883 - RNA, 19 nt, Artificial Sequence
  Description of Artificial Sequence: Synthetic oligonucleotide
aaauccagaaguuccgacg

SEQ ID NO: 552884 - RNA, 19 nt, Artificial Sequence
  Description of Artificial Sequence: Synthetic oligonucleotide
ucgaaugucaaacuuucgg

SEQ ID NO: 552885 - RNA, 19 nt, Artificial Sequence
  Description of Artificial Sequence: Synthetic oligonucleotide
caagauaagaagcuaaggc

SEQ ID NO: 552886 - RNA, 19 nt, Artificial Sequence
  Description of Artificial Sequence: Synthetic oligonucleotide
acuaaggaagcuuuucggc

SEQ ID NO: 552887 - RNA, 19 nt, Artificial Sequence
  Description of Artificial Sequence: Synthetic oligonucleotide
gguuauagcauguaguugg

SEQ ID NO: 552888 - RNA, 19 nt, Artificial Sequence
  Description of Artificial Sequence: Synthetic oligonucleotide
uucaacacaaccacaacug

SEQ ID NO: 552889 - RNA, 19 nt, Artificial Sequence
  Description of Artificial Sequence: Synthetic oligonucleotide
agcuguucgaagcacaccc

SEQ ID NO: 552890 - RNA, 19 nt, Artificial Sequence
  Description of Artificial Sequence: Synthetic oligonucleotide
aaugcucuaagguccaguc

SEQ ID NO: 552891 - RNA, 19 nt, Artificial Sequence
  Description of Artificial Sequence: Synthetic oligonucleotide
uuaugucaauauaugauug

SEQ ID NO: 552892 - RNA, 19 nt, Artificial Sequence
  Description of Artificial Sequence: Synthetic oligonucleotide
auaauuaaugaguaacucu

SEQ ID NO: 552893 - RNA, 19 nt, Artificial Sequence
  Description of Artificial Sequence: Synthetic oligonucleotide
ucugauacauauuauugga

SEQ ID NO: 552894 - RNA, 19 nt, Artificial Sequence
  Description of Artificial Sequence: Synthetic oligonucleotide
uauacugauggucaaccag

SEQ ID NO: 552895 - RNA, 19 nt, Artificial Sequence
  Description of Artificial Sequence: Synthetic oligonucleotide
uuugcaauccaaacguugc

SEQ ID NO: 552896 - RNA, 19 nt, Artificial Sequence
  Description of Artificial Sequence: Synthetic oligonucleotide
ugauacauauuauuggacu

SEQ ID NO: 552897 - RNA, 19 nt, Artificial Sequence
  Description of Artificial Sequence: Synthetic oligonucleotide
uuauuggacuuauagauuc

SEQ ID NO: 552898 - RNA, 19 nt, Artificial Sequence
  Description of Artificial Sequence: Synthetic oligonucleotide
acuagcuucacuaaggaag

SEQ ID NO: 552899 - RNA, 19 nt, Artificial Sequence
  Description of Artificial Sequence: Synthetic oligonucleotide
ucacuaaggaagcuuuucg

SEQ ID NO: 552900 - RNA, 19 nt, Artificial Sequence
  Description of Artificial Sequence: Synthetic oligonucleotide
aaucucggcuaccugugcc

SEQ ID NO: 552901 - RNA, 19 nt, Artificial Sequence
  Description of Artificial Sequence: Synthetic oligonucleotide
acuuacaccgacuaaccuc

SEQ ID NO: 552902 - RNA, 19 nt, Artificial Sequence
  Description of Artificial Sequence: Synthetic oligonucleotide
uuuaugucaauauaugauu

SEQ ID NO: 552903 - RNA, 19 nt, Artificial Sequence
  Description of Artificial Sequence: Synthetic oligonucleotide
uuaccugagguucugauuc

SEQ ID NO: 552904 - RNA, 19 nt, Artificial Sequence
  Description of Artificial Sequence: Synthetic oligonucleotide
auuugcgucaaaaugccgc

SEQ ID NO: 552905 - RNA, 19 nt, Artificial Sequence
  Description of Artificial Sequence: Synthetic oligonucleotide
uguggcaaccuccaaaaug

SEQ ID NO: 552906 - RNA, 19 nt, Artificial Sequence
  Description of Artificial Sequence: Synthetic oligonucleotide
uuaauaaacugcuugugua

SEQ ID NO: 552907 - RNA, 19 nt, Artificial Sequence
  Description of Artificial Sequence: Synthetic oligonucleotide
uccuccacaagauaagaag

SEQ ID NO: 552908 - RNA, 19 nt, Artificial Sequence
  Description of Artificial Sequence: Synthetic oligonucleotide
ucguauuucccauaguucu

SEQ ID NO: 552909 - RNA, 19 nt, Artificial Sequence
  Description of Artificial Sequence: Synthetic oligonucleotide
auaauugccauugaaguca

SEQ ID NO: 552910 - RNA, 19 nt, Artificial Sequence
  Description of Artificial Sequence: Synthetic oligonucleotide
uggacuuauagauucauau

SEQ ID NO: 552911 - RNA, 19 nt, Artificial Sequence
  Description of Artificial Sequence: Synthetic oligonucleotide
cuuauagcgucguugacac

SEQ ID NO: 552912 - RNA, 19 nt, Artificial Sequence
  Description of Artificial Sequence: Synthetic oligonucleotide
accgacuaaccucaaagac

SEQ ID NO: 552913 - RNA, 19 nt, Artificial Sequence
  Description of Artificial Sequence: Synthetic oligonucleotide
ugauuugcgucaaaaugcc

SEQ ID NO: 552914 - RNA, 19 nt, Artificial Sequence
  Description of Artificial Sequence: Synthetic oligonucleotide
aaguaauguuucaaggcac

SEQ ID NO: 552915 - RNA, 19 nt, Artificial Sequence
  Description of Artificial Sequence: Synthetic oligonucleotide
uucaugggagguuauagca

SEQ ID NO: 552916 - RNA, 19 nt, Artificial Sequence
  Description of Artificial Sequence: Synthetic oligonucleotide
uauagcgucguugacacug

SEQ ID NO: 552917 - RNA, 19 nt, Artificial Sequence
  Description of Artificial Sequence: Synthetic oligonucleotide
aggcucaugacccagucuc

SEQ ID NO: 552918 - RNA, 19 nt, Artificial Sequence
  Description of Artificial Sequence: Synthetic oligonucleotide
agcacuuacaccgacuaac

SEQ ID NO: 552919 - RNA, 19 nt, Artificial Sequence
  Description of Artificial Sequence: Synthetic oligonucleotide
acauaugacucugggaacc

SEQ ID NO: 552920 - RNA, 19 nt, Artificial Sequence
  Description of Artificial Sequence: Synthetic oligonucleotide
aaugccgcuuucuaaggug

SEQ ID NO: 552921 - RNA, 19 nt, Artificial Sequence
  Description of Artificial Sequence: Synthetic oligonucleotide
agguuaguuggauaaauca

SEQ ID NO: 552922 - RNA, 19 nt, Artificial Sequence
  Description of Artificial Sequence: Synthetic oligonucleotide
aagcacacccucucuauag

SEQ ID NO: 552923 - RNA, 19 nt, Artificial Sequence
  Description of Artificial Sequence: Synthetic oligonucleotide
ugaguauuuaugucaauau

SEQ ID NO: 552924 - RNA, 19 nt, Artificial Sequence
  Description of Artificial Sequence: Synthetic oligonucleotide
aauugcuccaggcauuuaa

SEQ ID NO: 552925 - RNA, 19 nt, Artificial Sequence
  Description of Artificial Sequence: Synthetic oligonucleotide
aguaauguuucaaggcacc

SEQ ID NO: 552926 - RNA, 19 nt, Artificial Sequence
  Description of Artificial Sequence: Synthetic oligonucleotide
ucggccaauacuuauucug

SEQ ID NO: 552927 - RNA, 19 nt, Artificial Sequence
  Description of Artificial Sequence: Synthetic oligonucleotide
gcaaugguuggucaaaugg

SEQ ID NO: 552928 - RNA, 19 nt, Artificial Sequence
  Description of Artificial Sequence: Synthetic oligonucleotide
ugccauugaagucaagugu

SEQ ID NO: 552929 - RNA, 19 nt, Artificial Sequence
  Description of Artificial Sequence: Synthetic oligonucleotide
acaaccacaacuguucauc

SEQ ID NO: 552930 - RNA, 19 nt, Artificial Sequence
  Description of Artificial Sequence: Synthetic oligonucleotide
guaacucugauacauauua

SEQ ID NO: 552931 - RNA, 19 nt, Artificial Sequence
  Description of Artificial Sequence: Synthetic oligonucleotide
uuaucuacaugauacgguu

SEQ ID NO: 552932 - RNA, 19 nt, Artificial Sequence
  Description of Artificial Sequence: Synthetic oligonucleotide
gacauauaguuaccugagg

SEQ ID NO: 552933 - RNA, 19 nt, Artificial Sequence
  Description of Artificial Sequence: Synthetic oligonucleotide
uucaaggcaccucaagaca

SEQ ID NO: 552934 - RNA, 19 nt, Artificial Sequence
  Description of Artificial Sequence: Synthetic oligonucleotide
ugguuggucaaauggcagg

SEQ ID NO: 552935 - RNA, 19 nt, Artificial Sequence
  Description of Artificial Sequence: Synthetic oligonucleotide
ccaaaaugcucuaaggucc

SEQ ID NO: 552936 - RNA, 19 nt, Artificial Sequence
  Description of Artificial Sequence: Synthetic oligonucleotide
cacuaaggaagcuuuucgg

SEQ ID NO: 552937 - RNA, 19 nt, Artificial Sequence
  Description of Artificial Sequence: Synthetic oligonucleotide
guuacugaccggaagcugg

SEQ ID NO: 552938 - RNA, 19 nt, Artificial Sequence
  Description of Artificial Sequence: Synthetic oligonucleotide
uuuggcucaugugacauug

SEQ ID NO: 552939 - RNA, 19 nt, Artificial Sequence
  Description of Artificial Sequence: Synthetic oligonucleotide
uugaugaacgcagcgggcg

SEQ ID NO: 552940 - RNA, 19 nt, Artificial Sequence
  Description of Artificial Sequence: Synthetic oligonucleotide
cuaucaaggacuuaauaaa

SEQ ID NO: 552941 - RNA, 19 nt, Artificial Sequence
  Description of Artificial Sequence: Synthetic oligonucleotide
uguguaaaugaaagcacau

SEQ ID NO: 552942 - RNA, 19 nt, Artificial Sequence
  Description of Artificial Sequence: Synthetic oligonucleotide
ucccauaguucuuugagaa

SEQ ID NO: 552943 - RNA, 19 nt, Artificial Sequence
  Description of Artificial Sequence: Synthetic oligonucleotide
uggauaaaucacauaugac

SEQ ID NO: 552944 - RNA, 19 nt, Artificial Sequence
  Description of Artificial Sequence: Synthetic oligonucleotide
gguuauuuggcucauguga

SEQ ID NO: 552945 - RNA, 19 nt, Artificial Sequence
  Description of Artificial Sequence: Synthetic oligonucleotide
auacugauggucaaccagg

SEQ ID NO: 552946 - RNA, 19 nt, Artificial Sequence
  Description of Artificial Sequence: Synthetic oligonucleotide
uuauguguuugauuugcgu

SEQ ID NO: 552947 - RNA, 19 nt, Artificial Sequence
  Description of Artificial Sequence: Synthetic oligonucleotide
uguuguaagaagccaggaa

SEQ ID NO: 552948 - RNA, 19 nt, Artificial Sequence
  Description of Artificial Sequence: Synthetic oligonucleotide
gaagucgaagccaaagagc

SEQ ID NO: 552949 - RNA, 19 nt, Artificial Sequence
  Description of Artificial Sequence: Synthetic oligonucleotide
uuagguacugguugaacuc

SEQ ID NO: 552950 - RNA, 19 nt, Artificial Sequence
  Description of Artificial Sequence: Synthetic oligonucleotide
uuaaugaguaacucugaua

SEQ ID NO: 552951 - RNA, 19 nt, Artificial Sequence
  Description of Artificial Sequence: Synthetic oligonucleotide
uucguauuucccauaguuc

SEQ ID NO: 552952 - RNA, 19 nt, Artificial Sequence
  Description of Artificial Sequence: Synthetic oligonucleotide
uggaugagacacaaacuga

SEQ ID NO: 552953 - RNA, 19 nt, Artificial Sequence
  Description of Artificial Sequence: Synthetic oligonucleotide
ggacuuaauaaacugcuug

SEQ ID NO: 552954 - RNA, 19 nt, Artificial Sequence
  Description of Artificial Sequence: Synthetic oligonucleotide
agugucaccccaaagagcu

SEQ ID NO: 552955 - RNA, 19 nt, Artificial Sequence
  Description of Artificial Sequence: Synthetic oligonucleotide
guggcaaccuccaaaaugc

SEQ ID NO: 552956 - RNA, 19 nt, Artificial Sequence
  Description of Artificial Sequence: Synthetic oligonucleotide
uucgaaugucaaacuuucg

SEQ ID NO: 552957 - RNA, 19 nt, Artificial Sequence
  Description of Artificial Sequence: Synthetic oligonucleotide
uaugacucugggaaccaug

SEQ ID NO: 552958 - RNA, 19 nt, Artificial Sequence
  Description of Artificial Sequence: Synthetic oligonucleotide
acucugauacauauuauug

SEQ ID NO: 552959 - RNA, 19 nt, Artificial Sequence
  Description of Artificial Sequence: Synthetic oligonucleotide
aacgcagcgggcgugcggc

SEQ ID NO: 552960 - RNA, 19 nt, Artificial Sequence
  Description of Artificial Sequence: Synthetic oligonucleotide
cuuacaccgacuaaccuca

SEQ ID NO: 552961 - RNA, 19 nt, Artificial Sequence
  Description of Artificial Sequence: Synthetic oligonucleotide
cuuucuaaggugauauuca

SEQ ID NO: 552962 - RNA, 19 nt, Artificial Sequence
  Description of Artificial Sequence: Synthetic oligonucleotide
gacuuugcaauccaaacgu

SEQ ID NO: 552963 - RNA, 19 nt, Artificial Sequence
  Description of Artificial Sequence: Synthetic oligonucleotide
aaaggcucuugagguagcc

SEQ ID NO: 552964 - RNA, 19 nt, Artificial Sequence
  Description of Artificial Sequence: Synthetic oligonucleotide
cuugacuagcuucacuaag

SEQ ID NO: 552965 - RNA, 19 nt, Artificial Sequence
  Description of Artificial Sequence: Synthetic oligonucleotide
uaguauuugccuuguuuca

SEQ ID NO: 552966 - RNA, 19 nt, Artificial Sequence
  Description of Artificial Sequence: Synthetic oligonucleotide
uugggcagucagaugacag

SEQ ID NO: 552967 - RNA, 19 nt, Artificial Sequence
  Description of Artificial Sequence: Synthetic oligonucleotide
gacuaaaggcccucgaguc

SEQ ID NO: 552968 - RNA, 19 nt, Artificial Sequence
  Description of Artificial Sequence: Synthetic oligonucleotide
uggaguuacugaccggaag

SEQ ID NO: 552969 - RNA, 19 nt, Artificial Sequence
  Description of Artificial Sequence: Synthetic oligonucleotide
aauaaacugcuuguguaaa

SEQ ID NO: 552970 - RNA, 19 nt, Artificial Sequence
  Description of Artificial Sequence: Synthetic oligonucleotide
gcuuggaugagacacaaac

SEQ ID NO: 552971 - RNA, 19 nt, Artificial Sequence
  Description of Artificial Sequence: Synthetic oligonucleotide
cugauacauauuauuggac

SEQ ID NO: 552972 - RNA, 19 nt, Artificial Sequence
  Description of Artificial Sequence: Synthetic oligonucleotide
uaacgcugcagcagguggg

SEQ ID NO: 552973 - RNA, 19 nt, Artificial Sequence
  Description of Artificial Sequence: Synthetic oligonucleotide
uccacaauuccuuggcaca

SEQ ID NO: 552974 - RNA, 19 nt, Artificial Sequence
  Description of Artificial Sequence: Synthetic oligonucleotide
aauuaaugaguaacucuga

SEQ ID NO: 552975 - RNA, 19 nt, Artificial Sequence
  Description of Artificial Sequence: Synthetic oligonucleotide
uucuaaggugauauucaga

SEQ ID NO: 552976 - RNA, 19 nt, Artificial Sequence
  Description of Artificial Sequence: Synthetic oligonucleotide
cuaacgcugcagcaggugg

SEQ ID NO: 552977 - RNA, 19 nt, Artificial Sequence
  Description of Artificial Sequence: Synthetic oligonucleotide
ucaacacaaccacaacugu

SEQ ID NO: 552978 - RNA, 19 nt, Artificial Sequence
  Description of Artificial Sequence: Synthetic oligonucleotide
ugcuuguguaaaugaaagc

SEQ ID NO: 552979 - RNA, 19 nt, Artificial Sequence
  Description of Artificial Sequence: Synthetic oligonucleotide
cuugagguuaguuggauaa

SEQ ID NO: 552980 - RNA, 19 nt, Artificial Sequence
  Description of Artificial Sequence: Synthetic oligonucleotide
ucaaagguguuuguccugc

SEQ ID NO: 552981 - RNA, 19 nt, Artificial Sequence
  Description of Artificial Sequence: Synthetic oligonucleotide
aaaugccgcuuucuaaggu

SEQ ID NO: 552982 - RNA, 19 nt, Artificial Sequence
  Description of Artificial Sequence: Synthetic oligonucleotide
aauucaccagcuguaccag

SEQ ID NO: 552983 - RNA, 19 nt, Artificial Sequence
  Description of Artificial Sequence: Synthetic oligonucleotide
ugugagugucaccccaaag

SEQ ID NO: 552984 - RNA, 19 nt, Artificial Sequence
  Description of Artificial Sequence: Synthetic oligonucleotide
ucaaggcaccucaagacau

SEQ ID NO: 552985 - RNA, 19 nt, Artificial Sequence
  Description of Artificial Sequence: Synthetic oligonucleotide
augaguaacucugauacau

SEQ ID NO: 552986 - RNA, 19 nt, Artificial Sequence
  Description of Artificial Sequence: Synthetic oligonucleotide
uccucgaagaacauuucau

SEQ ID NO: 552987 - RNA, 19 nt, Artificial Sequence
  Description of Artificial Sequence: Synthetic oligonucleotide
uuugcgucaaaaugccgcu

SEQ ID NO: 552988 - RNA, 19 nt, Artificial Sequence
  Description of Artificial Sequence: Synthetic oligonucleotide
aaacguugccuuccccauc

SEQ ID NO: 552989 - RNA, 19 nt, Artificial Sequence
  Description of Artificial Sequence: Synthetic oligonucleotide
acuuaauaaacugcuugug

SEQ ID NO: 552990 - RNA, 19 nt, Artificial Sequence
  Description of Artificial Sequence: Synthetic oligonucleotide
cagagcgcugcuuagguac

SEQ ID NO: 552991 - RNA, 19 nt, Artificial Sequence
  Description of Artificial Sequence: Synthetic oligonucleotide
augaagucgaagccaaaga

SEQ ID NO: 552992 - RNA, 19 nt, Artificial Sequence
  Description of Artificial Sequence: Synthetic oligonucleotide
aaaacaccuuauagcgucg

SEQ ID NO: 552993 - RNA, 19 nt, Artificial Sequence
  Description of Artificial Sequence: Synthetic oligonucleotide
uuauacugauggucaacca

SEQ ID NO: 552994 - RNA, 19 nt, Artificial Sequence
  Description of Artificial Sequence: Synthetic oligonucleotide
ugaaugcaaugguugguca

SEQ ID NO: 552995 - RNA, 19 nt, Artificial Sequence
  Description of Artificial Sequence: Synthetic oligonucleotide
gaagcuggaugccauucug

SEQ ID NO: 552996 - RNA, 19 nt, Artificial Sequence
  Description of Artificial Sequence: Synthetic oligonucleotide
guuauuuggcucaugugac

SEQ ID NO: 552997 - RNA, 19 nt, Artificial Sequence
  Description of Artificial Sequence: Synthetic oligonucleotide
auuaucuacaugauacggu

SEQ ID NO: 552998 - RNA, 19 nt, Artificial Sequence
  Description of Artificial Sequence: Synthetic oligonucleotide
gcuaucaaggacuuaauaa

SEQ ID NO: 552999 - RNA, 19 nt, Artificial Sequence
  Description of Artificial Sequence: Synthetic oligonucleotide
gugcaugugagugucaccc

SEQ ID NO: 553000 - RNA, 19 nt, Artificial Sequence
  Description of Artificial Sequence: Synthetic oligonucleotide
cuaccugugccacccaagg

SEQ ID NO: 553001 - RNA, 19 nt, Artificial Sequence
  Description of Artificial Sequence: Synthetic oligonucleotide
aagcuguucgaagcacacc

SEQ ID NO: 553002 - RNA, 19 nt, Artificial Sequence
  Description of Artificial Sequence: Synthetic oligonucleotide
acuuauagauucauaucug

SEQ ID NO: 553003 - RNA, 19 nt, Artificial Sequence
  Description of Artificial Sequence: Synthetic oligonucleotide
auauaugauuguucuuaca

SEQ ID NO: 553004 - RNA, 19 nt, Artificial Sequence
  Description of Artificial Sequence: Synthetic oligonucleotide
auaagaagcuaaggcacag

SEQ ID NO: 553005 - RNA, 19 nt, Artificial Sequence
  Description of Artificial Sequence: Synthetic oligonucleotide
guaauucaccagcuguacc

SEQ ID NO: 553006 - RNA, 19 nt, Artificial Sequence
  Description of Artificial Sequence: Synthetic oligonucleotide
gcucaugugacauugggca

SEQ ID NO: 553007 - RNA, 19 nt, Artificial Sequence
  Description of Artificial Sequence: Synthetic oligonucleotide
guaguaauucaccagcugu

SEQ ID NO: 553008 - RNA, 19 nt, Artificial Sequence
  Description of Artificial Sequence: Synthetic oligonucleotide
agcuugaugaacgcagcgg

SEQ ID NO: 553009 - RNA, 19 nt, Artificial Sequence
  Description of Artificial Sequence: Synthetic oligonucleotide
agauucauaucuguuuaca

SEQ ID NO: 553010 - RNA, 19 nt, Artificial Sequence
  Description of Artificial Sequence: Synthetic oligonucleotide
agcgagguuauuuggcuca

SEQ ID NO: 553011 - RNA, 19 nt, Artificial Sequence
  Description of Artificial Sequence: Synthetic oligonucleotide
ggaaggacacuggauaugg

SEQ ID NO: 553012 - RNA, 19 nt, Artificial Sequence
  Description of Artificial Sequence: Synthetic oligonucleotide
auccaaacguugccuuccc

SEQ ID NO: 553013 - RNA, 19 nt, Artificial Sequence
  Description of Artificial Sequence: Synthetic oligonucleotide
agcuaaggcacuaacgcug

SEQ ID NO: 553014 - RNA, 19 nt, Artificial Sequence
  Description of Artificial Sequence: Synthetic oligonucleotide
aguggaaucaauagcucca

SEQ ID NO: 553015 - RNA, 19 nt, Artificial Sequence
  Description of Artificial Sequence: Synthetic oligonucleotide
acagaaacgcacagucagc

SEQ ID NO: 553016 - RNA, 19 nt, Artificial Sequence
  Description of Artificial Sequence: Synthetic oligonucleotide
agcgacuggugucuugagg

SEQ ID NO: 553017 - RNA, 19 nt, Artificial Sequence
  Description of Artificial Sequence: Synthetic oligonucleotide
caaagacuggcugggaagc

SEQ ID NO: 553018 - RNA, 19 nt, Artificial Sequence
  Description of Artificial Sequence: Synthetic oligonucleotide
agaaguuccgacgccuccg

SEQ ID NO: 553019 - RNA, 19 nt, Artificial Sequence
  Description of Artificial Sequence: Synthetic oligonucleotide
cagcccaggcucaugaccc

SEQ ID NO: 553020 - RNA, 19 nt, Artificial Sequence
  Description of Artificial Sequence: Synthetic oligonucleotide
uaucuacaugauacgguuc

SEQ ID NO: 553021 - RNA, 19 nt, Artificial Sequence
  Description of Artificial Sequence: Synthetic oligonucleotide
ugagguuaguuggauaaau

SEQ ID NO: 553022 - RNA, 19 nt, Artificial Sequence
  Description of Artificial Sequence: Synthetic oligonucleotide
ugcaaugguuggucaaaug

SEQ ID NO: 553023 - RNA, 19 nt, Artificial Sequence
  Description of Artificial Sequence: Synthetic oligonucleotide
gauacauauuauuggacuu

SEQ ID NO: 553024 - RNA, 19 nt, Artificial Sequence
  Description of Artificial Sequence: Synthetic oligonucleotide
acuaaaggcccucgagucu

SEQ ID NO: 553025 - RNA, 19 nt, Artificial Sequence
  Description of Artificial Sequence: Synthetic oligonucleotide
accuugggacuaaaggccc

SEQ ID NO: 553026 - RNA, 19 nt, Artificial Sequence
  Description of Artificial Sequence: Synthetic oligonucleotide
gauuugcgucaaaaugccg

SEQ ID NO: 553027 - RNA, 19 nt, Artificial Sequence
  Description of Artificial Sequence: Synthetic oligonucleotide
agcuagugugcaugccagc

SEQ ID NO: 553028 - RNA, 19 nt, Artificial Sequence
  Description of Artificial Sequence: Synthetic oligonucleotide
acaccuuauagcgucguug

SEQ ID NO: 553029 - RNA, 19 nt, Artificial Sequence
  Description of Artificial Sequence: Synthetic oligonucleotide
aacugcucggccaauacuu

SEQ ID NO: 553030 - RNA, 19 nt, Artificial Sequence
  Description of Artificial Sequence: Synthetic oligonucleotide
acccucucuauagagguag

SEQ ID NO: 553031 - RNA, 19 nt, Artificial Sequence
  Description of Artificial Sequence: Synthetic oligonucleotide
uguuuguccugcuucccaa

SEQ ID NO: 553032 - RNA, 19 nt, Artificial Sequence
  Description of Artificial Sequence: Synthetic oligonucleotide
ucuugacuagcuucacuaa

SEQ ID NO: 553033 - RNA, 19 nt, Artificial Sequence
  Description of Artificial Sequence: Synthetic oligonucleotide
cucaugugacauugggcag

SEQ ID NO: 553034 - RNA, 19 nt, Artificial Sequence
  Description of Artificial Sequence: Synthetic oligonucleotide
ugaguaacucugauacaua

SEQ ID NO: 553035 - RNA, 19 nt, Artificial Sequence
  Description of Artificial Sequence: Synthetic oligonucleotide
cauugaagucaagugugag

SEQ ID NO: 553036 - RNA, 19 nt, Artificial Sequence
  Description of Artificial Sequence: Synthetic oligonucleotide
cuuauagauucauaucugu

SEQ ID NO: 553037 - RNA, 19 nt, Artificial Sequence
  Description of Artificial Sequence: Synthetic oligonucleotide
cccaaaguaauguuucaag

SEQ ID NO: 553038 - RNA, 19 nt, Artificial Sequence
  Description of Artificial Sequence: Synthetic oligonucleotide
uaauugccauugaagucaa

SEQ ID NO: 553039 - RNA, 19 nt, Artificial Sequence
  Description of Artificial Sequence: Synthetic oligonucleotide
agaggcagcuccuuauuau

SEQ ID NO: 553040 - RNA, 19 nt, Artificial Sequence
  Description of Artificial Sequence: Synthetic oligonucleotide
cuauguccacaauuccuug

SEQ ID NO: 553041 - RNA, 19 nt, Artificial Sequence
  Description of Artificial Sequence: Synthetic oligonucleotide
guucuuacagauuugcuuu

SEQ ID NO: 553042 - RNA, 19 nt, Artificial Sequence
  Description of Artificial Sequence: Synthetic oligonucleotide
uugagaacucuuucugaau

SEQ ID NO: 553043 - RNA, 19 nt, Artificial Sequence
  Description of Artificial Sequence: Synthetic oligonucleotide
auagcauguaguuggcauu

SEQ ID NO: 553044 - RNA, 19 nt, Artificial Sequence
  Description of Artificial Sequence: Synthetic oligonucleotide
gagcuacagaaacgcacag

SEQ ID NO: 553045 - RNA, 19 nt, Artificial Sequence
  Description of Artificial Sequence: Synthetic oligonucleotide
uggaucacguguacuugac

SEQ ID NO: 553046 - RNA, 19 nt, Artificial Sequence
  Description of Artificial Sequence: Synthetic oligonucleotide
accuuauagcgucguugac

SEQ ID NO: 553047 - RNA, 19 nt, Artificial Sequence
  Description of Artificial Sequence: Synthetic oligonucleotide
cucaugacccagucucccg

SEQ ID NO: 553048 - RNA, 19 nt, Artificial Sequence
  Description of Artificial Sequence: Synthetic oligonucleotide
agagccaggaguggaauca

SEQ ID NO: 553049 - RNA, 19 nt, Artificial Sequence
  Description of Artificial Sequence: Synthetic oligonucleotide
gauucauaucuguuuacau

SEQ ID NO: 553050 - RNA, 19 nt, Artificial Sequence
  Description of Artificial Sequence: Synthetic oligonucleotide
cuuagguacugguugaacu

SEQ ID NO: 553051 - RNA, 19 nt, Artificial Sequence
  Description of Artificial Sequence: Synthetic oligonucleotide
uuggacuuauagauucaua

SEQ ID NO: 553052 - RNA, 19 nt, Artificial Sequence
  Description of Artificial Sequence: Synthetic oligonucleotide
aucacguguacuugacccu

SEQ ID NO: 553053 - RNA, 19 nt, Artificial Sequence
  Description of Artificial Sequence: Synthetic oligonucleotide
ugauacgguucugaagcug

SEQ ID NO: 553054 - RNA, 19 nt, Artificial Sequence
  Description of Artificial Sequence: Synthetic oligonucleotide
gagguuauagcauguaguu

SEQ ID NO: 553055 - RNA, 19 nt, Artificial Sequence
  Description of Artificial Sequence: Synthetic oligonucleotide
aaagagcuacagaaacgca

SEQ ID NO: 553056 - RNA, 19 nt, Artificial Sequence
  Description of Artificial Sequence: Synthetic oligonucleotide
gacgccuccgaggagauga

SEQ ID NO: 553057 - RNA, 19 nt, Artificial Sequence
  Description of Artificial Sequence: Synthetic oligonucleotide
ugcgucaaaaugccgcuuu

SEQ ID NO: 553058 - RNA, 19 nt, Artificial Sequence
  Description of Artificial Sequence: Synthetic oligonucleotide
ugaugaacgcagcgggcgu

SEQ ID NO: 553059 - RNA, 19 nt, Artificial Sequence
  Description of Artificial Sequence: Synthetic oligonucleotide
ucauccguccuggaguuac

SEQ ID NO: 553060 - RNA, 19 nt, Artificial Sequence
  Description of Artificial Sequence: Synthetic oligonucleotide
gguauuucuggaucacgug

SEQ ID NO: 553061 - RNA, 19 nt, Artificial Sequence
  Description of Artificial Sequence: Synthetic oligonucleotide
ucacguguacuugacccug

SEQ ID NO: 553062 - RNA, 19 nt, Artificial Sequence
  Description of Artificial Sequence: Synthetic oligonucleotide
agguuauagcauguaguug

SEQ ID NO: 553063 - RNA, 19 nt, Artificial Sequence
  Description of Artificial Sequence: Synthetic oligonucleotide
auacauauuauuggacuua

SEQ ID NO: 553064 - RNA, 19 nt, Artificial Sequence
  Description of Artificial Sequence: Synthetic oligonucleotide
ggacuuauagauucauauc

SEQ ID NO: 553065 - RNA, 19 nt, Artificial Sequence
  Description of Artificial Sequence: Synthetic oligonucleotide
cgacuaaccucaaagacug

SEQ ID NO: 553066 - RNA, 19 nt, Artificial Sequence
  Description of Artificial Sequence: Synthetic oligonucleotide
guuauagcauguaguuggc

SEQ ID NO: 553067 - RNA, 19 nt, Artificial Sequence
  Description of Artificial Sequence: Synthetic oligonucleotide
gggagguuauagcauguag

SEQ ID NO: 553068 - RNA, 19 nt, Artificial Sequence
  Description of Artificial Sequence: Synthetic oligonucleotide
acuguucaucaaaacaccu

SEQ ID NO: 553069 - RNA, 19 nt, Artificial Sequence
  Description of Artificial Sequence: Synthetic oligonucleotide
gagguuaguuggauaaauc

SEQ ID NO: 553070 - RNA, 19 nt, Artificial Sequence
  Description of Artificial Sequence: Synthetic oligonucleotide
ucggcuaccugugccaccc

SEQ ID NO: 553071 - RNA, 19 nt, Artificial Sequence
  Description of Artificial Sequence: Synthetic oligonucleotide
gccuuguuucaacacaacc

SEQ ID NO: 553072 - RNA, 19 nt, Artificial Sequence
  Description of Artificial Sequence: Synthetic oligonucleotide
ugucaaacuuucggugacc

SEQ ID NO: 553073 - RNA, 19 nt, Artificial Sequence
  Description of Artificial Sequence: Synthetic oligonucleotide
uaccugugccacccaaggc

SEQ ID NO: 553074 - RNA, 19 nt, Artificial Sequence
  Description of Artificial Sequence: Synthetic oligonucleotide
caccuuauagcgucguuga

SEQ ID NO: 553075 - RNA, 19 nt, Artificial Sequence
  Description of Artificial Sequence: Synthetic oligonucleotide
ugcaugugagugucacccc

SEQ ID NO: 553076 - RNA, 19 nt, Artificial Sequence
  Description of Artificial Sequence: Synthetic oligonucleotide
ccagcuucgaaugucaaac

SEQ ID NO: 553077 - RNA, 19 nt, Artificial Sequence
  Description of Artificial Sequence: Synthetic oligonucleotide
gaaucucggcuaccugugc

SEQ ID NO: 553078 - RNA, 19 nt, Artificial Sequence
  Description of Artificial Sequence: Synthetic oligonucleotide
caauccaaacguugccuuc

SEQ ID NO: 553079 - RNA, 19 nt, Artificial Sequence
  Description of Artificial Sequence: Synthetic oligonucleotide
auugagaaccuugggacua

SEQ ID NO: 553080 - RNA, 19 nt, Artificial Sequence
  Description of Artificial Sequence: Synthetic oligonucleotide
uccaaacguugccuucccc

SEQ ID NO: 553081 - RNA, 19 nt, Artificial Sequence
  Description of Artificial Sequence: Synthetic oligonucleotide
uugggacuaaaggcccucg

SEQ ID NO: 553082 - RNA, 19 nt, Artificial Sequence
  Description of Artificial Sequence: Synthetic oligonucleotide
augaacgcagcgggcgugc

SEQ ID NO: 553083 - RNA, 19 nt, Artificial Sequence
  Description of Artificial Sequence: Synthetic oligonucleotide
auuggacuuauagauucau

SEQ ID NO: 553084 - RNA, 19 nt, Artificial Sequence
  Description of Artificial Sequence: Synthetic oligonucleotide
gcuuucuaaggugauauuc

SEQ ID NO: 553085 - RNA, 19 nt, Artificial Sequence
  Description of Artificial Sequence: Synthetic oligonucleotide
ugggacuaaaggcccucga

SEQ ID NO: 553086 - RNA, 19 nt, Artificial Sequence
  Description of Artificial Sequence: Synthetic oligonucleotide
gaagcuuuucggcacaguu

SEQ ID NO: 553087 - RNA, 19 nt, Artificial Sequence
  Description of Artificial Sequence: Synthetic oligonucleotide
aaguuccgacgccuccgag

SEQ ID NO: 553088 - RNA, 19 nt, Artificial Sequence
  Description of Artificial Sequence: Synthetic oligonucleotide
gggacuaaaggcccucgag

SEQ ID NO: 553089 - RNA, 19 nt, Artificial Sequence
  Description of Artificial Sequence: Synthetic oligonucleotide
uaguuggcauugagaaccu

SEQ ID NO: 553090 - RNA, 19 nt, Artificial Sequence
  Description of Artificial Sequence: Synthetic oligonucleotide
uugacccugguugucuaug

SEQ ID NO: 553091 - RNA, 19 nt, Artificial Sequence
  Description of Artificial Sequence: Synthetic oligonucleotide
ggccaauacuuauucugag

SEQ ID NO: 553092 - RNA, 19 nt, Artificial Sequence
  Description of Artificial Sequence: Synthetic oligonucleotide
acaccacucagagaucucu

SEQ ID NO: 553093 - RNA, 19 nt, Artificial Sequence
  Description of Artificial Sequence: Synthetic oligonucleotide
ggugggaagggccaucaac

SEQ ID NO: 553094 - RNA, 19 nt, Artificial Sequence
  Description of Artificial Sequence: Synthetic oligonucleotide
cuguucgaagcacacccuc

SEQ ID NO: 553095 - RNA, 19 nt, Artificial Sequence
  Description of Artificial Sequence: Synthetic oligonucleotide
aacaccuuauagcgucguu

SEQ ID NO: 553096 - RNA, 19 nt, Artificial Sequence
  Description of Artificial Sequence: Synthetic oligonucleotide
acccugguugucuaugaaa

SEQ ID NO: 553097 - RNA, 19 nt, Artificial Sequence
  Description of Artificial Sequence: Synthetic oligonucleotide
aaggcaccucaagacauau

SEQ ID NO: 553098 - RNA, 19 nt, Artificial Sequence
  Description of Artificial Sequence: Synthetic oligonucleotide
ugccuuguuucaacacaac

SEQ ID NO: 553099 - RNA, 19 nt, Artificial Sequence
  Description of Artificial Sequence: Synthetic oligonucleotide
ucugaguauuuaugucaau

SEQ ID NO: 553100 - RNA, 19 nt, Artificial Sequence
  Description of Artificial Sequence: Synthetic oligonucleotide
uccguccuggaguuacuga

SEQ ID NO: 553101 - RNA, 19 nt, Artificial Sequence
  Description of Artificial Sequence: Synthetic oligonucleotide
cuucguauuucccauaguu

SEQ ID NO: 553102 - RNA, 19 nt, Artificial Sequence
  Description of Artificial Sequence: Synthetic oligonucleotide
gacuagcuucacuaaggaa

SEQ ID NO: 553103 - RNA, 19 nt, Artificial Sequence
  Description of Artificial Sequence: Synthetic oligonucleotide
ucacagcuugaugaacgca

SEQ ID NO: 553104 - RNA, 19 nt, Artificial Sequence
  Description of Artificial Sequence: Synthetic oligonucleotide
guuugauuugcgucaaaau

SEQ ID NO: 553105 - RNA, 19 nt, Artificial Sequence
  Description of Artificial Sequence: Synthetic oligonucleotide
gaugaacgcagcgggcgug

SEQ ID NO: 553106 - RNA, 19 nt, Artificial Sequence
  Description of Artificial Sequence: Synthetic oligonucleotide
cugagcaacugcucggcca

SEQ ID NO: 553107 - RNA, 19 nt, Artificial Sequence
  Description of Artificial Sequence: Synthetic oligonucleotide
ggcacuaacgcugcagcag

SEQ ID NO: 553108 - RNA, 19 nt, Artificial Sequence
  Description of Artificial Sequence: Synthetic oligonucleotide
ugcucggccaauacuuauu

SEQ ID NO: 553109 - RNA, 19 nt, Artificial Sequence
  Description of Artificial Sequence: Synthetic oligonucleotide
auagcgucguugacacugg

SEQ ID NO: 553110 - RNA, 19 nt, Artificial Sequence
  Description of Artificial Sequence: Synthetic oligonucleotide
cuggaucacguguacuuga

SEQ ID NO: 553111 - RNA, 19 nt, Artificial Sequence
  Description of Artificial Sequence: Synthetic oligonucleotide
caggacuggucuugacuag

SEQ ID NO: 553112 - RNA, 19 nt, Artificial Sequence
  Description of Artificial Sequence: Synthetic oligonucleotide
ggcgccguugaccucaaug

SEQ ID NO: 553113 - RNA, 19 nt, Artificial Sequence
  Description of Artificial Sequence: Synthetic oligonucleotide
acuaacgcugcagcaggug

SEQ ID NO: 553114 - RNA, 19 nt, Artificial Sequence
  Description of Artificial Sequence: Synthetic oligonucleotide
cauucugggcuggagcgac

SEQ ID NO: 553115 - RNA, 19 nt, Artificial Sequence
  Description of Artificial Sequence: Synthetic oligonucleotide
gaaguuccgacgccuccga

SEQ ID NO: 553116 - RNA, 19 nt, Artificial Sequence
  Description of Artificial Sequence: Synthetic oligonucleotide
augacccagucucccgaag

SEQ ID NO: 553117 - RNA, 19 nt, Artificial Sequence
  Description of Artificial Sequence: Synthetic oligonucleotide
gagcuaaggcacuaacgcu

SEQ ID NO: 553118 - RNA, 19 nt, Artificial Sequence
  Description of Artificial Sequence: Synthetic oligonucleotide
caccgacuaaccucaaaga

SEQ ID NO: 553119 - RNA, 19 nt, Artificial Sequence
  Description of Artificial Sequence: Synthetic oligonucleotide
uggcaaccuccaaaaugcu

SEQ ID NO: 553120 - RNA, 19 nt, Artificial Sequence
  Description of Artificial Sequence: Synthetic oligonucleotide
uugagguuaguuggauaaa

SEQ ID NO: 553121 - RNA, 19 nt, Artificial Sequence
  Description of Artificial Sequence: Synthetic oligonucleotide
caccacucagagaucucug

SEQ ID NO: 553122 - RNA, 19 nt, Artificial Sequence
  Description of Artificial Sequence: Synthetic oligonucleotide
caggcgugcccaucugugc

SEQ ID NO: 553123 - RNA, 19 nt, Artificial Sequence
  Description of Artificial Sequence: Synthetic oligonucleotide
agcuccuuauuauguguuu

SEQ ID NO: 553124 - RNA, 19 nt, Artificial Sequence
  Description of Artificial Sequence: Synthetic oligonucleotide
aacuucaugggagguuaua

SEQ ID NO: 553125 - RNA, 19 nt, Artificial Sequence
  Description of Artificial Sequence: Synthetic oligonucleotide
agagacugcucaagggcug

SEQ ID NO: 553126 - RNA, 19 nt, Artificial Sequence
  Description of Artificial Sequence: Synthetic oligonucleotide
ugggaagggccaucaacuu

SEQ ID NO: 553127 - RNA, 19 nt, Artificial Sequence
  Description of Artificial Sequence: Synthetic oligonucleotide
caucggacaucuccuccac

SEQ ID NO: 553128 - RNA, 19 nt, Artificial Sequence
  Description of Artificial Sequence: Synthetic oligonucleotide
ggaucacguguacuugacc

SEQ ID NO: 553129 - RNA, 19 nt, Artificial Sequence
  Description of Artificial Sequence: Synthetic oligonucleotide
agacacaaacugagcaacu

SEQ ID NO: 553130 - RNA, 19 nt, Artificial Sequence
  Description of Artificial Sequence: Synthetic oligonucleotide
agcuucacuaaggaagcuu

SEQ ID NO: 553131 - RNA, 19 nt, Artificial Sequence
  Description of Artificial Sequence: Synthetic oligonucleotide
aggcccucgagucuucuuu

SEQ ID NO: 553132 - RNA, 19 nt, Artificial Sequence
  Description of Artificial Sequence: Synthetic oligonucleotide
ucagagcgcugcuuaggua

SEQ ID NO: 553133 - RNA, 19 nt, Artificial Sequence
  Description of Artificial Sequence: Synthetic oligonucleotide
ggcacaguuuguccgcccc

SEQ ID NO: 553134 - RNA, 19 nt, Artificial Sequence
  Description of Artificial Sequence: Synthetic oligonucleotide
uagcgucguugacacuggc

SEQ ID NO: 553135 - RNA, 19 nt, Artificial Sequence
  Description of Artificial Sequence: Synthetic oligonucleotide
gagcgacuggugucuugag

SEQ ID NO: 553136 - RNA, 19 nt, Artificial Sequence
  Description of Artificial Sequence: Synthetic oligonucleotide
gcacuuacaccgacuaacc

SEQ ID NO: 553137 - RNA, 19 nt, Artificial Sequence
  Description of Artificial Sequence: Synthetic oligonucleotide
acguguacuugacccuggu

SEQ ID NO: 553138 - RNA, 19 nt, Artificial Sequence
  Description of Artificial Sequence: Synthetic oligonucleotide
ugaacgcagcgggcgugcg

SEQ ID NO: 553139 - RNA, 19 nt, Artificial Sequence
  Description of Artificial Sequence: Synthetic oligonucleotide
aggcagcuccuuauuaugu

SEQ ID NO: 553140 - RNA, 19 nt, Artificial Sequence
  Description of Artificial Sequence: Synthetic oligonucleotide
gcgccguugaccucaauga

SEQ ID NO: 553141 - RNA, 19 nt, Artificial Sequence
  Description of Artificial Sequence: Synthetic oligonucleotide
uuauagcgucguugacacu

SEQ ID NO: 553142 - RNA, 19 nt, Artificial Sequence
  Description of Artificial Sequence: Synthetic oligonucleotide
aaaggcccucgagucuucu

SEQ ID NO: 553143 - RNA, 19 nt, Artificial Sequence
  Description of Artificial Sequence: Synthetic oligonucleotide
ggagguuauagcauguagu

SEQ ID NO: 553144 - RNA, 19 nt, Artificial Sequence
  Description of Artificial Sequence: Synthetic oligonucleotide
gguagccccugggucaucg

SEQ ID NO: 553145 - RNA, 19 nt, Artificial Sequence
  Description of Artificial Sequence: Synthetic oligonucleotide
ccguccuggaguuacugac

SEQ ID NO: 553146 - RNA, 19 nt, Artificial Sequence
  Description of Artificial Sequence: Synthetic oligonucleotide
gcuaaggcacuaacgcugc

SEQ ID NO: 553147 - RNA, 19 nt, Artificial Sequence
  Description of Artificial Sequence: Synthetic oligonucleotide
ccaaacguugccuucccca

SEQ ID NO: 553148 - RNA, 19 nt, Artificial Sequence
  Description of Artificial Sequence: Synthetic oligonucleotide
augccgcuuucuaagguga

SEQ ID NO: 553149 - RNA, 19 nt, Artificial Sequence
  Description of Artificial Sequence: Synthetic oligonucleotide
aguucugcauagagcuucu

SEQ ID NO: 553150 - RNA, 19 nt, Artificial Sequence
  Description of Artificial Sequence: Synthetic oligonucleotide
gucagaugacagagccagg

SEQ ID NO: 553151 - RNA, 19 nt, Artificial Sequence
  Description of Artificial Sequence: Synthetic oligonucleotide
ggacuaaaggcccucgagu

SEQ ID NO: 553152 - RNA, 19 nt, Artificial Sequence
  Description of Artificial Sequence: Synthetic oligonucleotide
ucggcacaguuuguccgcc

SEQ ID NO: 553153 - RNA, 19 nt, Artificial Sequence
  Description of Artificial Sequence: Synthetic oligonucleotide
gcucggccaauacuuauuc

SEQ ID NO: 553154 - RNA, 19 nt, Artificial Sequence
  Description of Artificial Sequence: Synthetic oligonucleotide
ucucggcuaccugugccac

SEQ ID NO: 553155 - RNA, 19 nt, Artificial Sequence
  Description of Artificial Sequence: Synthetic oligonucleotide
cauaugacucugggaacca

SEQ ID NO: 553156 - RNA, 19 nt, Artificial Sequence
  Description of Artificial Sequence: Synthetic oligonucleotide
guagccccugggucaucgg

SEQ ID NO: 553157 - RNA, 19 nt, Artificial Sequence
  Description of Artificial Sequence: Synthetic oligonucleotide
gcaugugagugucacccca

SEQ ID NO: 553158 - RNA, 19 nt, Artificial Sequence
  Description of Artificial Sequence: Synthetic oligonucleotide
caugugagugucaccccaa

SEQ ID NO: 553159 - RNA, 19 nt, Artificial Sequence
  Description of Artificial Sequence: Synthetic oligonucleotide
gggaagggccaucaacuuc

SEQ ID NO: 553160 - RNA, 19 nt, Artificial Sequence
  Description of Artificial Sequence: Synthetic oligonucleotide
aggacuuaauaaacugcuu

SEQ ID NO: 553161 - RNA, 19 nt, Artificial Sequence
  Description of Artificial Sequence: Synthetic oligonucleotide
auguggcaaccuccaaaau

SEQ ID NO: 553162 - RNA, 19 nt, Artificial Sequence
  Description of Artificial Sequence: Synthetic oligonucleotide
aaggcccucgagucuucuu

SEQ ID NO: 553163 - RNA, 19 nt, Artificial Sequence
  Description of Artificial Sequence: Synthetic oligonucleotide
cucggcuaccugugccacc

SEQ ID NO: 553164 - RNA, 19 nt, Artificial Sequence
  Description of Artificial Sequence: Synthetic oligonucleotide
uggugucuugagguuaguu

SEQ ID NO: 553165 - RNA, 19 nt, Artificial Sequence
  Description of Artificial Sequence: Synthetic oligonucleotide
ugggagguuauagcaugua

SEQ ID NO: 553166 - RNA, 19 nt, Artificial Sequence
  Description of Artificial Sequence: Synthetic oligonucleotide
ccuuauagcgucguugaca

SEQ ID NO: 553167 - RNA, 19 nt, Artificial Sequence
  Description of Artificial Sequence: Synthetic oligonucleotide
auccguccuggaguuacug

SEQ ID NO: 553168 - RNA, 19 nt, Artificial Sequence
  Description of Artificial Sequence: Synthetic oligonucleotide
agggcgcucgagguauuuc

SEQ ID NO: 553169 - RNA, 19 nt, Artificial Sequence
  Description of Artificial Sequence: Synthetic oligonucleotide
guuaccugagguucugauu

SEQ ID NO: 553170 - RNA, 19 nt, Artificial Sequence
  Description of Artificial Sequence: Synthetic oligonucleotide
ugccgcuuucuaaggugau

SEQ ID NO: 553171 - RNA, 19 nt, Artificial Sequence
  Description of Artificial Sequence: Synthetic oligonucleotide
ccagugcuccccaauguuc

SEQ ID NO: 553172 - RNA, 19 nt, Artificial Sequence
  Description of Artificial Sequence: Synthetic oligonucleotide
uuacaccgacuaaccucaa

SEQ ID NO: 553173 - RNA, 19 nt, Artificial Sequence
  Description of Artificial Sequence: Synthetic oligonucleotide
agcgucguugacacuggcu

SEQ ID NO: 553174 - RNA, 19 nt, Artificial Sequence
  Description of Artificial Sequence: Synthetic oligonucleotide
gacccugguugucuaugaa

SEQ ID NO: 553175 - RNA, 19 nt, Artificial Sequence
  Description of Artificial Sequence: Synthetic oligonucleotide
auaugacucugggaaccau

SEQ ID NO: 553176 - RNA, 19 nt, Artificial Sequence
  Description of Artificial Sequence: Synthetic oligonucleotide
acuuugcaauccaaacguu

SEQ ID NO: 553177 - RNA, 19 nt, Artificial Sequence
  Description of Artificial Sequence: Synthetic oligonucleotide
ccacaauuccuuggcacag

SEQ ID NO: 553178 - RNA, 19 nt, Artificial Sequence
  Description of Artificial Sequence: Synthetic oligonucleotide
gcucaugacccagucuccc

SEQ ID NO: 553179 - RNA, 19 nt, Artificial Sequence
  Description of Artificial Sequence: Synthetic oligonucleotide
gccaauacuuauucugagu

SEQ ID NO: 553180 - RNA, 19 nt, Artificial Sequence
  Description of Artificial Sequence: Synthetic oligonucleotide
caaacguugccuuccccau

SEQ ID NO: 553181 - RNA, 19 nt, Artificial Sequence
  Description of Artificial Sequence: Synthetic oligonucleotide
ccgacuaaccucaaagacu

SEQ ID NO: 553182 - RNA, 19 nt, Artificial Sequence
  Description of Artificial Sequence: Synthetic oligonucleotide
ggagcgacuggugucuuga

SEQ ID NO: 553183 - RNA, 19 nt, Artificial Sequence
  Description of Artificial Sequence: Synthetic oligonucleotide
gcuaccugugccacccaag

SEQ ID NO: 553184 - RNA, 19 nt, Artificial Sequence
  Description of Artificial Sequence: Synthetic oligonucleotide
ccaggcgugcccaucugug

SEQ ID NO: 553185 - RNA, 19 nt, Artificial Sequence
  Description of Artificial Sequence: Synthetic oligonucleotide
cgucguugacacuggcugg

SEQ ID NO: 553186 - RNA, 19 nt, Artificial Sequence
  Description of Artificial Sequence: Synthetic oligonucleotide
agagcgcugcuuagguacu

SEQ ID NO: 553187 - RNA, 19 nt, Artificial Sequence
  Description of Artificial Sequence: Synthetic oligonucleotide
gcuuagguacugguugaac

SEQ ID NO: 553188 - RNA, 19 nt, Artificial Sequence
  Description of Artificial Sequence: Synthetic oligonucleotide
acgcaggggcgccguugac

SEQ ID NO: 553189 - RNA, 19 nt, Artificial Sequence
  Description of Artificial Sequence: Synthetic oligonucleotide
cacuuacaccgacuaaccu

SEQ ID NO: 553190 - RNA, 19 nt, Artificial Sequence
  Description of Artificial Sequence: Synthetic oligonucleotide
cgaaugucaaacuuucggu

SEQ ID NO: 553191 - RNA, 19 nt, Artificial Sequence
  Description of Artificial Sequence: Synthetic oligonucleotide
uugcgucaaaaugccgcuu

SEQ ID NO: 553192 - RNA, 19 nt, Artificial Sequence
  Description of Artificial Sequence: Synthetic oligonucleotide
ccagaaguuccgacgccuc

SEQ ID NO: 553193 - RNA, 19 nt, Artificial Sequence
  Description of Artificial Sequence: Synthetic oligonucleotide
ggcucaugacccagucucc

SEQ ID NO: 553194 - RNA, 19 nt, Artificial Sequence
  Description of Artificial Sequence: Synthetic oligonucleotide
cuaaaggcccucgagucuu

SEQ ID NO: 553195 - RNA, 19 nt, Artificial Sequence
  Description of Artificial Sequence: Synthetic oligonucleotide
ggucaaauggcaggucuua

SEQ ID NO: 553196 - RNA, 19 nt, Artificial Sequence
  Description of Artificial Sequence: Synthetic oligonucleotide
gcgaggcugcacuggacac

SEQ ID NO: 553197 - RNA, 19 nt, Artificial Sequence
  Description of Artificial Sequence: Synthetic oligonucleotide
uacugaccggaagcuggau

SEQ ID NO: 553198 - RNA, 19 nt, Artificial Sequence
  Description of Artificial Sequence: Synthetic oligonucleotide
cacgcaggggcgccguuga

SEQ ID NO: 553199 - RNA, 19 nt, Artificial Sequence
  Description of Artificial Sequence: Synthetic oligonucleotide
ggcccucgagucuucuuuc

SEQ ID NO: 553200 - RNA, 19 nt, Artificial Sequence
  Description of Artificial Sequence: Synthetic oligonucleotide
ggcgcucgagguauuucug

SEQ ID NO: 553201 - RNA, 19 nt, Artificial Sequence
  Description of Artificial Sequence: Synthetic oligonucleotide
cucggccaauacuuauucu

SEQ ID NO: 553202 - RNA, 19 nt, Artificial Sequence
  Description of Artificial Sequence: Synthetic oligonucleotide
cggccaauacuuauucuga

SEQ ID NO: 553203 - RNA, 19 nt, Artificial Sequence
  Description of Artificial Sequence: Synthetic oligonucleotide
cagacccucagcuccucgu

SEQ ID NO: 553204 - RNA, 19 nt, Artificial Sequence
  Description of Artificial Sequence: Synthetic oligonucleotide
gcuucgaaugucaaacuuu

SEQ ID NO: 553205 - RNA, 19 nt, Artificial Sequence
  Description of Artificial Sequence: Synthetic oligonucleotide
caaugacaccaugcaggga

SEQ ID NO: 553206 - RNA, 19 nt, Artificial Sequence
  Description of Artificial Sequence: Synthetic oligonucleotide
gcuucacuaaggaagcuuu

SEQ ID NO: 553207 - RNA, 19 nt, Artificial Sequence
  Description of Artificial Sequence: Synthetic oligonucleotide
gggaaccaugugcaggacu

SEQ ID NO: 553208 - RNA, 19 nt, Artificial Sequence
  Description of Artificial Sequence: Synthetic oligonucleotide
gggcgcucgagguauuucu

SEQ ID NO: 553209 - RNA, 19 nt, Artificial Sequence
  Description of Artificial Sequence: Synthetic oligonucleotide
cgccguugaccucaaugag

SEQ ID NO: 553210 - RNA, 19 nt, Artificial Sequence
  Description of Artificial Sequence: Synthetic oligonucleotide
ggcgugcccaucugugcca

SEQ ID NO: 553211 - RNA, 19 nt, Artificial Sequence
  Description of Artificial Sequence: Synthetic oligonucleotide
gucuugagguuaguuggau

SEQ ID NO: 553212 - RNA, 19 nt, Artificial Sequence
  Description of Artificial Sequence: Synthetic oligonucleotide
agcucugguaagggaggua

SEQ ID NO: 553213 - RNA, 19 nt, Artificial Sequence
  Description of Artificial Sequence: Synthetic oligonucleotide
gcgggcgugcggcaccugc

SEQ ID NO: 553214 - RNA, 19 nt, Artificial Sequence
  Description of Artificial Sequence: Synthetic oligonucleotide
acgccuccgaggagaugag

SEQ ID NO: 553215 - RNA, 19 nt, Artificial Sequence
  Description of Artificial Sequence: Synthetic oligonucleotide
cacuaacgcugcagcaggu

SEQ ID NO: 553216 - RNA, 19 nt, Artificial Sequence
  Description of Artificial Sequence: Synthetic oligonucleotide
cgagguauuucuggaucac

SEQ ID NO: 553217 - RNA, 19 nt, Artificial Sequence
  Description of Artificial Sequence: Synthetic oligonucleotide
augugacauugggcaguca

SEQ ID NO: 553218 - RNA, 19 nt, Artificial Sequence
  Description of Artificial Sequence: Synthetic oligonucleotide
ggcuaccugugccacccaa

SEQ ID NO: 553219 - RNA, 19 nt, Artificial Sequence
  Description of Artificial Sequence: Synthetic oligonucleotide
cuugacccugguugucuau

SEQ ID NO: 553220 - RNA, 19 nt, Artificial Sequence
  Description of Artificial Sequence: Synthetic oligonucleotide
gcuggagcgacuggugucu

SEQ ID NO: 553221 - RNA, 19 nt, Artificial Sequence
  Description of Artificial Sequence: Synthetic oligonucleotide
cccagcuucgaaugucaaa

SEQ ID NO: 553222 - RNA, 19 nt, Artificial Sequence
  Description of Artificial Sequence: Synthetic oligonucleotide
gugaggggaggggcuuuuc

SEQ ID NO: 553223 - RNA, 19 nt, Artificial Sequence
  Description of Artificial Sequence: Synthetic oligonucleotide
cgcucgagguauuucugga

SEQ ID NO: 553224 - RNA, 19 nt, Artificial Sequence
  Description of Artificial Sequence: Synthetic oligonucleotide
gagguagccccugggucau

SEQ ID NO: 553225 - RNA, 19 nt, Artificial Sequence
  Description of Artificial Sequence: Synthetic oligonucleotide
ggacuggucuugacuagcu

SEQ ID NO: 553226 - RNA, 19 nt, Artificial Sequence
  Description of Artificial Sequence: Synthetic oligonucleotide
acgcagcgggcgugcggca

SEQ ID NO: 553227 - RNA, 19 nt, Artificial Sequence
  Description of Artificial Sequence: Synthetic oligonucleotide
ccugggucaucggacaucu

SEQ ID NO: 553228 - RNA, 19 nt, Artificial Sequence
  Description of Artificial Sequence: Synthetic oligonucleotide
cccgaagggcagccgguuc

SEQ ID NO: 553229 - RNA, 19 nt, Artificial Sequence
  Description of Artificial Sequence: Synthetic oligonucleotide
ccgaggagaugaggaugcc

SEQ ID NO: 553230 - RNA, 19 nt, Artificial Sequence
  Description of Artificial Sequence: Synthetic oligonucleotide
cccucucuauagagguaga

SEQ ID NO: 553231 - RNA, 19 nt, Artificial Sequence
  Description of Artificial Sequence: Synthetic oligonucleotide
ccucaaugagccagacccu

SEQ ID NO: 553232 - RNA, 19 nt, Artificial Sequence
  Description of Artificial Sequence: Synthetic oligonucleotide
caggggcgccguugaccuc

SEQ ID NO: 553233 - RNA, 19 nt, Artificial Sequence
  Description of Artificial Sequence: Synthetic oligonucleotide
ccggcaaugggcagcacuu

SEQ ID NO: 553234 - RNA, 19 nt, Artificial Sequence
  Description of Artificial Sequence: Synthetic oligonucleotide
cggcacaguuuguccgccc

SEQ ID NO: 553235 - RNA, 19 nt, Artificial Sequence
  Description of Artificial Sequence: Synthetic oligonucleotide
ggaagcuuuucggcacagu

SEQ ID NO: 553236 - RNA, 19 nt, Artificial Sequence
  Description of Artificial Sequence: Synthetic oligonucleotide
ccuugggacuaaaggcccu

SEQ ID NO: 553237 - RNA, 19 nt, Artificial Sequence
  Description of Artificial Sequence: Synthetic oligonucleotide
gccaggcgugcccaucugu

SEQ ID NO: 553238 - RNA, 19 nt, Artificial Sequence
  Description of Artificial Sequence: Synthetic oligonucleotide
cccucgagucuucuuucua

SEQ ID NO: 553239 - RNA, 19 nt, Artificial Sequence
  Description of Artificial Sequence: Synthetic oligonucleotide
gagggcgcucgagguauuu

SEQ ID NO: 553240 - RNA, 19 nt, Artificial Sequence
  Description of Artificial Sequence: Synthetic oligonucleotide
cgccuccgaggagaugagg

SEQ ID NO: 553241 - RNA, 19 nt, Artificial Sequence
  Description of Artificial Sequence: Synthetic oligonucleotide
cguugaccucaaugagcca

SEQ ID NO: 553242 - RNA, 19 nt, Artificial Sequence
  Description of Artificial Sequence: Synthetic oligonucleotide
gcgagguuauuuggcucau

SEQ ID NO: 553243 - RNA, 19 nt, Artificial Sequence
  Description of Artificial Sequence: Synthetic oligonucleotide
ccgacgccuccgaggagau

SEQ ID NO: 553244 - RNA, 19 nt, Artificial Sequence
  Description of Artificial Sequence: Synthetic oligonucleotide
cgacgccuccgaggagaug

SEQ ID NO: 553245 - RNA, 19 nt, Artificial Sequence
  Description of Artificial Sequence: Synthetic oligonucleotide
ggggcgccguugaccucaa

SEQ ID NO: 553246 - RNA, 19 nt, Artificial Sequence
  Description of Artificial Sequence: Synthetic oligonucleotide
cgggcgugcggcaccugcu

SEQ ID NO: 553247 - RNA, 19 nt, Artificial Sequence
  Description of Artificial Sequence: Synthetic oligonucleotide
cggcuaccugugccaccca

SEQ ID NO: 553248 - RNA, 19 nt, Artificial Sequence
  Description of Artificial Sequence: Synthetic oligonucleotide
gggcgccguugaccucaau

SEQ ID NO: 553249 - RNA, 19 nt, Artificial Sequence
  Description of Artificial Sequence: Synthetic oligonucleotide
auaguuagaaaucacauuc

SEQ ID NO: 553250 - RNA, 19 nt, Artificial Sequence
  Description of Artificial Sequence: Synthetic oligonucleotide
aaacauaucauggaaacac

SEQ ID NO: 553251 - RNA, 19 nt, Artificial Sequence
  Description of Artificial Sequence: Synthetic oligonucleotide
uauacaaucaagcugucug

SEQ ID NO: 553252 - RNA, 19 nt, Artificial Sequence
  Description of Artificial Sequence: Synthetic oligonucleotide
uugaauagauaaaagaaca

SEQ ID NO: 553253 - RNA, 19 nt, Artificial Sequence
  Description of Artificial Sequence: Synthetic oligonucleotide
uucuauacaaucaagcugu

SEQ ID NO: 553254 - RNA, 19 nt, Artificial Sequence
  Description of Artificial Sequence: Synthetic oligonucleotide
uaucauucaguuaagaaaa

SEQ ID NO: 553255 - RNA, 19 nt, Artificial Sequence
  Description of Artificial Sequence: Synthetic oligonucleotide
aagguaauauuagggaucc

SEQ ID NO: 553256 - RNA, 19 nt, Artificial Sequence
  Description of Artificial Sequence: Synthetic oligonucleotide
acuuacaacaauugaauag

SEQ ID NO: 553257 - RNA, 19 nt, Artificial Sequence
  Description of Artificial Sequence: Synthetic oligonucleotide
aaguguuaaacauaucaug

SEQ ID NO: 553258 - RNA, 19 nt, Artificial Sequence
  Description of Artificial Sequence: Synthetic oligonucleotide
cucacuauuggcuuuagcc

SEQ ID NO: 553259 - RNA, 19 nt, Artificial Sequence
  Description of Artificial Sequence: Synthetic oligonucleotide
aacauuaacgucuaauaau

SEQ ID NO: 553260 - RNA, 19 nt, Artificial Sequence
  Description of Artificial Sequence: Synthetic oligonucleotide
aaaguaacgguuaagagaa

SEQ ID NO: 553261 - RNA, 19 nt, Artificial Sequence
  Description of Artificial Sequence: Synthetic oligonucleotide
aacgucuaauaauaguuag

SEQ ID NO: 553262 - RNA, 19 nt, Artificial Sequence
  Description of Artificial Sequence: Synthetic oligonucleotide
auaaucaccgguugggcgc

SEQ ID NO: 553263 - RNA, 19 nt, Artificial Sequence
  Description of Artificial Sequence: Synthetic oligonucleotide
uguuauagauuuaaaacau

SEQ ID NO: 553264 - RNA, 19 nt, Artificial Sequence
  Description of Artificial Sequence: Synthetic oligonucleotide
aauaauaguuagaaaucac

SEQ ID NO: 553265 - RNA, 19 nt, Artificial Sequence
  Description of Artificial Sequence: Synthetic oligonucleotide
uuaacgucuaauaauaguu

SEQ ID NO: 553266 - RNA, 19 nt, Artificial Sequence
  Description of Artificial Sequence: Synthetic oligonucleotide
ugguuauagaaacaaacac

SEQ ID NO: 553267 - RNA, 19 nt, Artificial Sequence
  Description of Artificial Sequence: Synthetic oligonucleotide
caaucaagcugucugaacg

SEQ ID NO: 553268 - RNA, 19 nt, Artificial Sequence
  Description of Artificial Sequence: Synthetic oligonucleotide
cuaaguguuaaacauauca

SEQ ID NO: 553269 - RNA, 19 nt, Artificial Sequence
  Description of Artificial Sequence: Synthetic oligonucleotide
uuguuucaaaccaugggag

SEQ ID NO: 553270 - RNA, 19 nt, Artificial Sequence
  Description of Artificial Sequence: Synthetic oligonucleotide
uaauaauaguuagaaauca

SEQ ID NO: 553271 - RNA, 19 nt, Artificial Sequence
  Description of Artificial Sequence: Synthetic oligonucleotide
auaccacugcuuuuaaagc

SEQ ID NO: 553272 - RNA, 19 nt, Artificial Sequence
  Description of Artificial Sequence: Synthetic oligonucleotide
acuccgugaggacagaggc

SEQ ID NO: 553273 - RNA, 19 nt, Artificial Sequence
  Description of Artificial Sequence: Synthetic oligonucleotide
ucaagcuaagguaauauua

SEQ ID NO: 553274 - RNA, 19 nt, Artificial Sequence
  Description of Artificial Sequence: Synthetic oligonucleotide
aguuaagcuauucgugggc

SEQ ID NO: 553275 - RNA, 19 nt, Artificial Sequence
  Description of Artificial Sequence: Synthetic oligonucleotide
gauaaaguaacgguuaaga

SEQ ID NO: 553276 - RNA, 19 nt, Artificial Sequence
  Description of Artificial Sequence: Synthetic oligonucleotide
ucacuauuggcuuuagccc

SEQ ID NO: 553277 - RNA, 19 nt, Artificial Sequence
  Description of Artificial Sequence: Synthetic oligonucleotide
agaacgaccucacuauugg

SEQ ID NO: 553278 - RNA, 19 nt, Artificial Sequence
  Description of Artificial Sequence: Synthetic oligonucleotide
uauguguuuuguuucaaac

SEQ ID NO: 553279 - RNA, 19 nt, Artificial Sequence
  Description of Artificial Sequence: Synthetic oligonucleotide
uaagguaauauuagggauc

SEQ ID NO: 553280 - RNA, 19 nt, Artificial Sequence
  Description of Artificial Sequence: Synthetic oligonucleotide
uguguaucccaucugaaau

SEQ ID NO: 553281 - RNA, 19 nt, Artificial Sequence
  Description of Artificial Sequence: Synthetic oligonucleotide
guagaaauuucccacuuug

SEQ ID NO: 553282 - RNA, 19 nt, Artificial Sequence
  Description of Artificial Sequence: Synthetic oligonucleotide
auuaacgucuaauaauagu

SEQ ID NO: 553283 - RNA, 19 nt, Artificial Sequence
  Description of Artificial Sequence: Synthetic oligonucleotide
uauggaagcuggcauguag

SEQ ID NO: 553284 - RNA, 19 nt, Artificial Sequence
  Description of Artificial Sequence: Synthetic oligonucleotide
auuaucauucaguuaagaa

SEQ ID NO: 553285 - RNA, 19 nt, Artificial Sequence
  Description of Artificial Sequence: Synthetic oligonucleotide
gauagcauggccugagggc

SEQ ID NO: 553286 - RNA, 19 nt, Artificial Sequence
  Description of Artificial Sequence: Synthetic oligonucleotide
auagcgauacucuggaaca

SEQ ID NO: 553287 - RNA, 19 nt, Artificial Sequence
  Description of Artificial Sequence: Synthetic oligonucleotide
aaauuguccaaguguggca

SEQ ID NO: 553288 - RNA, 19 nt, Artificial Sequence
  Description of Artificial Sequence: Synthetic oligonucleotide
uagccacuaaguuggaagg

SEQ ID NO: 553289 - RNA, 19 nt, Artificial Sequence
  Description of Artificial Sequence: Synthetic oligonucleotide
agcuaagguaauauuaggg

SEQ ID NO: 553290 - RNA, 19 nt, Artificial Sequence
  Description of Artificial Sequence: Synthetic oligonucleotide
cauaaucaccgguugggcg

SEQ ID NO: 553291 - RNA, 19 nt, Artificial Sequence
  Description of Artificial Sequence: Synthetic oligonucleotide
acuuuaaacagccacugua

SEQ ID NO: 553292 - RNA, 19 nt, Artificial Sequence
  Description of Artificial Sequence: Synthetic oligonucleotide
cacuauuggcuuuagcccc

SEQ ID NO: 553293 - RNA, 19 nt, Artificial Sequence
  Description of Artificial Sequence: Synthetic oligonucleotide
gugguuaccacccucacca

SEQ ID NO: 553294 - RNA, 19 nt, Artificial Sequence
  Description of Artificial Sequence: Synthetic oligonucleotide
uaguuagaaaucacauuca

SEQ ID NO: 553295 - RNA, 19 nt, Artificial Sequence
  Description of Artificial Sequence: Synthetic oligonucleotide
auuuccagcgcauaggaua

SEQ ID NO: 553296 - RNA, 19 nt, Artificial Sequence
  Description of Artificial Sequence: Synthetic oligonucleotide
aaugcuaugguagguuucu

SEQ ID NO: 553297 - RNA, 19 nt, Artificial Sequence
  Description of Artificial Sequence: Synthetic oligonucleotide
guuaccacccucaccaugg

SEQ ID NO: 553298 - RNA, 19 nt, Artificial Sequence
  Description of Artificial Sequence: Synthetic oligonucleotide
uguaggauggugacugugu

SEQ ID NO: 553299 - RNA, 19 nt, Artificial Sequence
  Description of Artificial Sequence: Synthetic oligonucleotide
uccguucugagugacagcc

SEQ ID NO: 553300 - RNA, 19 nt, Artificial Sequence
  Description of Artificial Sequence: Synthetic oligonucleotide
uaagcguugccaguuaagc

SEQ ID NO: 553301 - RNA, 19 nt, Artificial Sequence
  Description of Artificial Sequence: Synthetic oligonucleotide
ugaaaugaacgcccaggug

SEQ ID NO: 553302 - RNA, 19 nt, Artificial Sequence
  Description of Artificial Sequence: Synthetic oligonucleotide
cacaaguuuggcuucggag

SEQ ID NO: 553303 - RNA, 19 nt, Artificial Sequence
  Description of Artificial Sequence: Synthetic oligonucleotide
caugcgagcacucacucac

SEQ ID NO: 553304 - RNA, 19 nt, Artificial Sequence
  Description of Artificial Sequence: Synthetic oligonucleotide
ugucggauagaguucugcc

SEQ ID NO: 553305 - RNA, 19 nt, Artificial Sequence
  Description of Artificial Sequence: Synthetic oligonucleotide
agaaauuucccacuuuguu

SEQ ID NO: 553306 - RNA, 19 nt, Artificial Sequence
  Description of Artificial Sequence: Synthetic oligonucleotide
cauuaacgucuaauaauag

SEQ ID NO: 553307 - RNA, 19 nt, Artificial Sequence
  Description of Artificial Sequence: Synthetic oligonucleotide
guaauauuagggaucccag

SEQ ID NO: 553308 - RNA, 19 nt, Artificial Sequence
  Description of Artificial Sequence: Synthetic oligonucleotide
uaacgucuaauaauaguua

SEQ ID NO: 553309 - RNA, 19 nt, Artificial Sequence
  Description of Artificial Sequence: Synthetic oligonucleotide
cuugaucucggguuccccg

SEQ ID NO: 553310 - RNA, 19 nt, Artificial Sequence
  Description of Artificial Sequence: Synthetic oligonucleotide
ucugaacguguuuaugugu

SEQ ID NO: 553311 - RNA, 19 nt, Artificial Sequence
  Description of Artificial Sequence: Synthetic oligonucleotide
gucgggaucauguggaaug

SEQ ID NO: 553312 - RNA, 19 nt, Artificial Sequence
  Description of Artificial Sequence: Synthetic oligonucleotide
aaaccacacaugcgagcac

SEQ ID NO: 553313 - RNA, 19 nt, Artificial Sequence
  Description of Artificial Sequence: Synthetic oligonucleotide
gaccgagggacuuugauaa

SEQ ID NO: 553314 - RNA, 19 nt, Artificial Sequence
  Description of Artificial Sequence: Synthetic oligonucleotide
caguuaagcuauucguggg

SEQ ID NO: 553315 - RNA, 19 nt, Artificial Sequence
  Description of Artificial Sequence: Synthetic oligonucleotide
caaguuuggcuucggaggc

SEQ ID NO: 553316 - RNA, 19 nt, Artificial Sequence
  Description of Artificial Sequence: Synthetic oligonucleotide
guaggcgacaggcuuagcc

SEQ ID NO: 553317 - RNA, 19 nt, Artificial Sequence
  Description of Artificial Sequence: Synthetic oligonucleotide
ucuuugucuccgcuuucgg

SEQ ID NO: 553318 - RNA, 19 nt, Artificial Sequence
  Description of Artificial Sequence: Synthetic oligonucleotide
ucacauacccgggugauga

SEQ ID NO: 553319 - RNA, 19 nt, Artificial Sequence
  Description of Artificial Sequence: Synthetic oligonucleotide
ucacucaccgguaccuggg

SEQ ID NO: 553320 - RNA, 19 nt, Artificial Sequence
  Description of Artificial Sequence: Synthetic oligonucleotide
gucggcguggcauuagugg

SEQ ID NO: 553321 - RNA, 19 nt, Artificial Sequence
  Description of Artificial Sequence: Synthetic oligonucleotide
acuaagaggagaaaacaga

SEQ ID NO: 553322 - RNA, 19 nt, Artificial Sequence
  Description of Artificial Sequence: Synthetic oligonucleotide
ugauaaaguaacgguuaag

SEQ ID NO: 553323 - RNA, 19 nt, Artificial Sequence
  Description of Artificial Sequence: Synthetic oligonucleotide
aaguagaaauuucccacuu

SEQ ID NO: 553324 - RNA, 19 nt, Artificial Sequence
  Description of Artificial Sequence: Synthetic oligonucleotide
uuuggguuacaucucuuua

SEQ ID NO: 553325 - RNA, 19 nt, Artificial Sequence
  Description of Artificial Sequence: Synthetic oligonucleotide
uuuaaagcacuaaguguua

SEQ ID NO: 553326 - RNA, 19 nt, Artificial Sequence
  Description of Artificial Sequence: Synthetic oligonucleotide
aagcguugccaguuaagcu

SEQ ID NO: 553327 - RNA, 19 nt, Artificial Sequence
  Description of Artificial Sequence: Synthetic oligonucleotide
agggcauaagcguugccag

SEQ ID NO: 553328 - RNA, 19 nt, Artificial Sequence
  Description of Artificial Sequence: Synthetic oligonucleotide
uuggguuacaucucuuuaa

SEQ ID NO: 553329 - RNA, 19 nt, Artificial Sequence
  Description of Artificial Sequence: Synthetic oligonucleotide
ucuuaccccugccucuugg

SEQ ID NO: 553330 - RNA, 19 nt, Artificial Sequence
  Description of Artificial Sequence: Synthetic oligonucleotide
caggugacuucacucaccg

SEQ ID NO: 553331 - RNA, 19 nt, Artificial Sequence
  Description of Artificial Sequence: Synthetic oligonucleotide
aagaacgaccucacuauug

SEQ ID NO: 553332 - RNA, 19 nt, Artificial Sequence
  Description of Artificial Sequence: Synthetic oligonucleotide
aacgaccucacuauuggcu

SEQ ID NO: 553333 - RNA, 19 nt, Artificial Sequence
  Description of Artificial Sequence: Synthetic oligonucleotide
ugggaauagcgauacucug

SEQ ID NO: 553334 - RNA, 19 nt, Artificial Sequence
  Description of Artificial Sequence: Synthetic oligonucleotide
gacaggcuuagccacuaag

SEQ ID NO: 553335 - RNA, 19 nt, Artificial Sequence
  Description of Artificial Sequence: Synthetic oligonucleotide
ucacuauggaagcuggcau

SEQ ID NO: 553336 - RNA, 19 nt, Artificial Sequence
  Description of Artificial Sequence: Synthetic oligonucleotide
ccaguuaagcuauucgugg

SEQ ID NO: 553337 - RNA, 19 nt, Artificial Sequence
  Description of Artificial Sequence: Synthetic oligonucleotide
uggggcaugucccaucucu

SEQ ID NO: 553338 - RNA, 19 nt, Artificial Sequence
  Description of Artificial Sequence: Synthetic oligonucleotide
acauuaacgucuaauaaua

SEQ ID NO: 553339 - RNA, 19 nt, Artificial Sequence
  Description of Artificial Sequence: Synthetic oligonucleotide
uggguuacaucucuuuaau

SEQ ID NO: 553340 - RNA, 19 nt, Artificial Sequence
  Description of Artificial Sequence: Synthetic oligonucleotide
uaacucggcuggcagcagg

SEQ ID NO: 553341 - RNA, 19 nt, Artificial Sequence
  Description of Artificial Sequence: Synthetic oligonucleotide
uggcuagcgaggauguacc

SEQ ID NO: 553342 - RNA, 19 nt, Artificial Sequence
  Description of Artificial Sequence: Synthetic oligonucleotide
gaaugcuuguuccacaagu

SEQ ID NO: 553343 - RNA, 19 nt, Artificial Sequence
  Description of Artificial Sequence: Synthetic oligonucleotide
ugagguucucccuccgucc

SEQ ID NO: 553344 - RNA, 19 nt, Artificial Sequence
  Description of Artificial Sequence: Synthetic oligonucleotide
agccauaaucaccgguugg

SEQ ID NO: 553345 - RNA, 19 nt, Artificial Sequence
  Description of Artificial Sequence: Synthetic oligonucleotide
augaacgcccagguggugc

SEQ ID NO: 553346 - RNA, 19 nt, Artificial Sequence
  Description of Artificial Sequence: Synthetic oligonucleotide
ugcuaugguagguuucucu

SEQ ID NO: 553347 - RNA, 19 nt, Artificial Sequence
  Description of Artificial Sequence: Synthetic oligonucleotide
agcguugccaguuaagcua

SEQ ID NO: 553348 - RNA, 19 nt, Artificial Sequence
  Description of Artificial Sequence: Synthetic oligonucleotide
accucuugaucucggguuc

SEQ ID NO: 553349 - RNA, 19 nt, Artificial Sequence
  Description of Artificial Sequence: Synthetic oligonucleotide
ucggguuccccgcuggaag

SEQ ID NO: 553350 - RNA, 19 nt, Artificial Sequence
  Description of Artificial Sequence: Synthetic oligonucleotide
acuaaguuggaaggucggg

SEQ ID NO: 553351 - RNA, 19 nt, Artificial Sequence
  Description of Artificial Sequence: Synthetic oligonucleotide
acauacccgggugaugacc

SEQ ID NO: 553352 - RNA, 19 nt, Artificial Sequence
  Description of Artificial Sequence: Synthetic oligonucleotide
acucaccgguaccugggcc

SEQ ID NO: 553353 - RNA, 19 nt, Artificial Sequence
  Description of Artificial Sequence: Synthetic oligonucleotide
aaagaacgaccucacuauu

SEQ ID NO: 553354 - RNA, 19 nt, Artificial Sequence
  Description of Artificial Sequence: Synthetic oligonucleotide
cauuaguggccaccgagac

SEQ ID NO: 553355 - RNA, 19 nt, Artificial Sequence
  Description of Artificial Sequence: Synthetic oligonucleotide
cacugaguggggcaugucc

SEQ ID NO: 553356 - RNA, 19 nt, Artificial Sequence
  Description of Artificial Sequence: Synthetic oligonucleotide
ugucccaucucuggaauca

SEQ ID NO: 553357 - RNA, 19 nt, Artificial Sequence
  Description of Artificial Sequence: Synthetic oligonucleotide
ggauagcauggccugaggg

SEQ ID NO: 553358 - RNA, 19 nt, Artificial Sequence
  Description of Artificial Sequence: Synthetic oligonucleotide
ugacagcccggacuggaag

SEQ ID NO: 553359 - RNA, 19 nt, Artificial Sequence
  Description of Artificial Sequence: Synthetic oligonucleotide
aaaugaacgcccagguggu

SEQ ID NO: 553360 - RNA, 19 nt, Artificial Sequence
  Description of Artificial Sequence: Synthetic oligonucleotide
gguaauauuagggauccca

SEQ ID NO: 553361 - RNA, 19 nt, Artificial Sequence
  Description of Artificial Sequence: Synthetic oligonucleotide
ugaagcuggagcacuccgu

SEQ ID NO: 553362 - RNA, 19 nt, Artificial Sequence
  Description of Artificial Sequence: Synthetic oligonucleotide
aggucggggagggacagcc

SEQ ID NO: 553363 - RNA, 19 nt, Artificial Sequence
  Description of Artificial Sequence: Synthetic oligonucleotide
uuucggaaugcuuguucca

SEQ ID NO: 553364 - RNA, 19 nt, Artificial Sequence
  Description of Artificial Sequence: Synthetic oligonucleotide
uuaagcuauucgugggcac

SEQ ID NO: 553365 - RNA, 19 nt, Artificial Sequence
  Description of Artificial Sequence: Synthetic oligonucleotide
uuucccacuuuguuauaga

SEQ ID NO: 553366 - RNA, 19 nt, Artificial Sequence
  Description of Artificial Sequence: Synthetic oligonucleotide
uccguccuugacugcagcg

SEQ ID NO: 553367 - RNA, 19 nt, Artificial Sequence
  Description of Artificial Sequence: Synthetic oligonucleotide
uaagcuauucgugggcaca

SEQ ID NO: 553368 - RNA, 19 nt, Artificial Sequence
  Description of Artificial Sequence: Synthetic oligonucleotide
aggaaucaagcuaagguaa

SEQ ID NO: 553369 - RNA, 19 nt, Artificial Sequence
  Description of Artificial Sequence: Synthetic oligonucleotide
aagcuauucgugggcacag

SEQ ID NO: 553370 - RNA, 19 nt, Artificial Sequence
  Description of Artificial Sequence: Synthetic oligonucleotide
uaccucacauacccgggug

SEQ ID NO: 553371 - RNA, 19 nt, Artificial Sequence
  Description of Artificial Sequence: Synthetic oligonucleotide
uaggauaccacugcuuuua

SEQ ID NO: 553372 - RNA, 19 nt, Artificial Sequence
  Description of Artificial Sequence: Synthetic oligonucleotide
cucaccgguaccugggccc

SEQ ID NO: 553373 - RNA, 19 nt, Artificial Sequence
  Description of Artificial Sequence: Synthetic oligonucleotide
ucuacccgggaccucuuga

SEQ ID NO: 553374 - RNA, 19 nt, Artificial Sequence
  Description of Artificial Sequence: Synthetic oligonucleotide
uuaaagcacuaaguguuaa

SEQ ID NO: 553375 - RNA, 19 nt, Artificial Sequence
  Description of Artificial Sequence: Synthetic oligonucleotide
ggcccuaccucacauaccc

SEQ ID NO: 553376 - RNA, 19 nt, Artificial Sequence
  Description of Artificial Sequence: Synthetic oligonucleotide
cuaugguagguuucucuuc

SEQ ID NO: 553377 - RNA, 19 nt, Artificial Sequence
  Description of Artificial Sequence: Synthetic oligonucleotide
gguggugcugcuuagaugu

SEQ ID NO: 553378 - RNA, 19 nt, Artificial Sequence
  Description of Artificial Sequence: Synthetic oligonucleotide
ucgggaucauguggaaugg

SEQ ID NO: 553379 - RNA, 19 nt, Artificial Sequence
  Description of Artificial Sequence: Synthetic oligonucleotide
ugcccgauggucacuggug

SEQ ID NO: 553380 - RNA, 19 nt, Artificial Sequence
  Description of Artificial Sequence: Synthetic oligonucleotide
aucaagcuaagguaauauu

SEQ ID NO: 553381 - RNA, 19 nt, Artificial Sequence
  Description of Artificial Sequence: Synthetic oligonucleotide
uucccacuuuguuauagau

SEQ ID NO: 553382 - RNA, 19 nt, Artificial Sequence
  Description of Artificial Sequence: Synthetic oligonucleotide
guacccauuggcugaguug

SEQ ID NO: 553383 - RNA, 19 nt, Artificial Sequence
  Description of Artificial Sequence: Synthetic oligonucleotide
gggaauagcgauacucugg

SEQ ID NO: 553384 - RNA, 19 nt, Artificial Sequence
  Description of Artificial Sequence: Synthetic oligonucleotide
uucggaaugcuuguuccac

SEQ ID NO: 553385 - RNA, 19 nt, Artificial Sequence
  Description of Artificial Sequence: Synthetic oligonucleotide
acuggcguggaugaacuug

SEQ ID NO: 553386 - RNA, 19 nt, Artificial Sequence
  Description of Artificial Sequence: Synthetic oligonucleotide
cuuaccccugccucuuggg

SEQ ID NO: 553387 - RNA, 19 nt, Artificial Sequence
  Description of Artificial Sequence: Synthetic oligonucleotide
ggagacaccucuuugucuc

SEQ ID NO: 553388 - RNA, 19 nt, Artificial Sequence
  Description of Artificial Sequence: Synthetic oligonucleotide
cuaagguaauauuagggau

SEQ ID NO: 553389 - RNA, 19 nt, Artificial Sequence
  Description of Artificial Sequence: Synthetic oligonucleotide
ugacuucacucaccgguac

SEQ ID NO: 553390 - RNA, 19 nt, Artificial Sequence
  Description of Artificial Sequence: Synthetic oligonucleotide
gagggcauaagcguugcca

SEQ ID NO: 553391 - RNA, 19 nt, Artificial Sequence
  Description of Artificial Sequence: Synthetic oligonucleotide
auuaguggccaccgagaca

SEQ ID NO: 553392 - RNA, 19 nt, Artificial Sequence
  Description of Artificial Sequence: Synthetic oligonucleotide
gaacgaccucacuauuggc

SEQ ID NO: 553393 - RNA, 19 nt, Artificial Sequence
  Description of Artificial Sequence: Synthetic oligonucleotide
uucaaaccaugggaggaca

SEQ ID NO: 553394 - RNA, 19 nt, Artificial Sequence
  Description of Artificial Sequence: Synthetic oligonucleotide
aggagacaccucuuugucu

SEQ ID NO: 553395 - RNA, 19 nt, Artificial Sequence
  Description of Artificial Sequence: Synthetic oligonucleotide
gaacgaggggacaucaguc

SEQ ID NO: 553396 - RNA, 19 nt, Artificial Sequence
  Description of Artificial Sequence: Synthetic oligonucleotide
ugccccuaccuuuucccag

SEQ ID NO: 553397 - RNA, 19 nt, Artificial Sequence
  Description of Artificial Sequence: Synthetic oligonucleotide
gauguacccauuggcugag

SEQ ID NO: 553398 - RNA, 19 nt, Artificial Sequence
  Description of Artificial Sequence: Synthetic oligonucleotide
gucggauagaguucugcca

SEQ ID NO: 553399 - RNA, 19 nt, Artificial Sequence
  Description of Artificial Sequence: Synthetic oligonucleotide
ccacuaaguuggaaggucg

SEQ ID NO: 553400 - RNA, 19 nt, Artificial Sequence
  Description of Artificial Sequence: Synthetic oligonucleotide
guuaagagaaagguugugu

SEQ ID NO: 553401 - RNA, 19 nt, Artificial Sequence
  Description of Artificial Sequence: Synthetic oligonucleotide
gccauaaucaccgguuggg

SEQ ID NO: 553402 - RNA, 19 nt, Artificial Sequence
  Description of Artificial Sequence: Synthetic oligonucleotide
ggaaauuguccaagugugg

SEQ ID NO: 553403 - RNA, 19 nt, Artificial Sequence
  Description of Artificial Sequence: Synthetic oligonucleotide
cuaccuuuucccagcccag

SEQ ID NO: 553404 - RNA, 19 nt, Artificial Sequence
  Description of Artificial Sequence: Synthetic oligonucleotide
aggugguuaccacccucac

SEQ ID NO: 553405 - RNA, 19 nt, Artificial Sequence
  Description of Artificial Sequence: Synthetic oligonucleotide
cgagcacucacucacauac

SEQ ID NO: 553406 - RNA, 19 nt, Artificial Sequence
  Description of Artificial Sequence: Synthetic oligonucleotide
cuggcuagcgaggauguac

SEQ ID NO: 553407 - RNA, 19 nt, Artificial Sequence
  Description of Artificial Sequence: Synthetic oligonucleotide
guuaagcuauucgugggca

SEQ ID NO: 553408 - RNA, 19 nt, Artificial Sequence
  Description of Artificial Sequence: Synthetic oligonucleotide
uguugacuccucaggcccu

SEQ ID NO: 553409 - RNA, 19 nt, Artificial Sequence
  Description of Artificial Sequence: Synthetic oligonucleotide
auaagcguugccaguuaag

SEQ ID NO: 553410 - RNA, 19 nt, Artificial Sequence
  Description of Artificial Sequence: Synthetic oligonucleotide
cauacccgggugaugacca

SEQ ID NO: 553411 - RNA, 19 nt, Artificial Sequence
  Description of Artificial Sequence: Synthetic oligonucleotide
agcgcauaggauaccacug

SEQ ID NO: 553412 - RNA, 19 nt, Artificial Sequence
  Description of Artificial Sequence: Synthetic oligonucleotide
uuagccccucccucacacg

SEQ ID NO: 553413 - RNA, 19 nt, Artificial Sequence
  Description of Artificial Sequence: Synthetic oligonucleotide
ggugacuucacucaccggu

SEQ ID NO: 553414 - RNA, 19 nt, Artificial Sequence
  Description of Artificial Sequence: Synthetic oligonucleotide
uccagcgcauaggauacca

SEQ ID NO: 553415 - RNA, 19 nt, Artificial Sequence
  Description of Artificial Sequence: Synthetic oligonucleotide
acuaaguguuaaacauauc

SEQ ID NO: 553416 - RNA, 19 nt, Artificial Sequence
  Description of Artificial Sequence: Synthetic oligonucleotide
acgaggggacaucagucca

SEQ ID NO: 553417 - RNA, 19 nt, Artificial Sequence
  Description of Artificial Sequence: Synthetic oligonucleotide
acuuugaccccaagucggg

SEQ ID NO: 553418 - RNA, 19 nt, Artificial Sequence
  Description of Artificial Sequence: Synthetic oligonucleotide
uagcgauacucuggaacag

SEQ ID NO: 553419 - RNA, 19 nt, Artificial Sequence
  Description of Artificial Sequence: Synthetic oligonucleotide
acgaccucacuauuggcuu

SEQ ID NO: 553420 - RNA, 19 nt, Artificial Sequence
  Description of Artificial Sequence: Synthetic oligonucleotide
uuccccgccccacuuacaa

SEQ ID NO: 553421 - RNA, 19 nt, Artificial Sequence
  Description of Artificial Sequence: Synthetic oligonucleotide
agguggugcugcuuagaug

SEQ ID NO: 553422 - RNA, 19 nt, Artificial Sequence
  Description of Artificial Sequence: Synthetic oligonucleotide
acgucuaauaauaguuaga

SEQ ID NO: 553423 - RNA, 19 nt, Artificial Sequence
  Description of Artificial Sequence: Synthetic oligonucleotide
ugcgagcacucacucacau

SEQ ID NO: 553424 - RNA, 19 nt, Artificial Sequence
  Description of Artificial Sequence: Synthetic oligonucleotide
gacagcccggacuggaaga

SEQ ID NO: 553425 - RNA, 19 nt, Artificial Sequence
  Description of Artificial Sequence: Synthetic oligonucleotide
acaguucaaauggaugaaa

SEQ ID NO: 553426 - RNA, 19 nt, Artificial Sequence
  Description of Artificial Sequence: Synthetic oligonucleotide
ggauguacccauuggcuga

SEQ ID NO: 553427 - RNA, 19 nt, Artificial Sequence
  Description of Artificial Sequence: Synthetic oligonucleotide
ggacaucaguccaggaugg

SEQ ID NO: 553428 - RNA, 19 nt, Artificial Sequence
  Description of Artificial Sequence: Synthetic oligonucleotide
cuuugucuccgcuuucgga

SEQ ID NO: 553429 - RNA, 19 nt, Artificial Sequence
  Description of Artificial Sequence: Synthetic oligonucleotide
ugaucucggguuccccgcu

SEQ ID NO: 553430 - RNA, 19 nt, Artificial Sequence
  Description of Artificial Sequence: Synthetic oligonucleotide
cuggcgacugucuggauaa

SEQ ID NO: 553431 - RNA, 19 nt, Artificial Sequence
  Description of Artificial Sequence: Synthetic oligonucleotide
agcggcuggccaccugggc

SEQ ID NO: 553432 - RNA, 19 nt, Artificial Sequence
  Description of Artificial Sequence: Synthetic oligonucleotide
uccucuacccgggaccucu

SEQ ID NO: 553433 - RNA, 19 nt, Artificial Sequence
  Description of Artificial Sequence: Synthetic oligonucleotide
agguaauauuagggauccc

SEQ ID NO: 553434 - RNA, 19 nt, Artificial Sequence
  Description of Artificial Sequence: Synthetic oligonucleotide
ugaacguguuuauguguuu

SEQ ID NO: 553435 - RNA, 19 nt, Artificial Sequence
  Description of Artificial Sequence: Synthetic oligonucleotide
agcuauucgugggcacagc

SEQ ID NO: 553436 - RNA, 19 nt, Artificial Sequence
  Description of Artificial Sequence: Synthetic oligonucleotide
accgagacagcugcuguug

SEQ ID NO: 553437 - RNA, 19 nt, Artificial Sequence
  Description of Artificial Sequence: Synthetic oligonucleotide
cacaugcgagcacucacuc

SEQ ID NO: 553438 - RNA, 19 nt, Artificial Sequence
  Description of Artificial Sequence: Synthetic oligonucleotide
gaggauguacccauuggcu

SEQ ID NO: 553439 - RNA, 19 nt, Artificial Sequence
  Description of Artificial Sequence: Synthetic oligonucleotide
ugugucggauagaguucug

SEQ ID NO: 553440 - RNA, 19 nt, Artificial Sequence
  Description of Artificial Sequence: Synthetic oligonucleotide
aaugaacgcccagguggug

SEQ ID NO: 553441 - RNA, 19 nt, Artificial Sequence
  Description of Artificial Sequence: Synthetic oligonucleotide
ugccucuugggugggaccu

SEQ ID NO: 553442 - RNA, 19 nt, Artificial Sequence
  Description of Artificial Sequence: Synthetic oligonucleotide
auacccgggugaugaccac

SEQ ID NO: 553443 - RNA, 19 nt, Artificial Sequence
  Description of Artificial Sequence: Synthetic oligonucleotide
uuccguucugagugacagc

SEQ ID NO: 553444 - RNA, 19 nt, Artificial Sequence
  Description of Artificial Sequence: Synthetic oligonucleotide
gugucggauagaguucugc

SEQ ID NO: 553445 - RNA, 19 nt, Artificial Sequence
  Description of Artificial Sequence: Synthetic oligonucleotide
aggugacuucacucaccgg

SEQ ID NO: 553446 - RNA, 19 nt, Artificial Sequence
  Description of Artificial Sequence: Synthetic oligonucleotide
ugaacuugccugggcugcc

SEQ ID NO: 553447 - RNA, 19 nt, Artificial Sequence
  Description of Artificial Sequence: Synthetic oligonucleotide
cccaguuacuuuuacagaa

SEQ ID NO: 553448 - RNA, 19 nt, Artificial Sequence
  Description of Artificial Sequence: Synthetic oligonucleotide
gguuaagagaaagguugug

SEQ ID NO: 553449 - RNA, 19 nt, Artificial Sequence
  Description of Artificial Sequence: Synthetic oligonucleotide
cuggcauguaggcgacagg

SEQ ID NO: 553450 - RNA, 19 nt, Artificial Sequence
  Description of Artificial Sequence: Synthetic oligonucleotide
agcccuugucagcaguccu

SEQ ID NO: 553451 - RNA, 19 nt, Artificial Sequence
  Description of Artificial Sequence: Synthetic oligonucleotide
ugacgguaggggccugcug

SEQ ID NO: 553452 - RNA, 19 nt, Artificial Sequence
  Description of Artificial Sequence: Synthetic oligonucleotide
cugucugaacguguuuaug

SEQ ID NO: 553453 - RNA, 19 nt, Artificial Sequence
  Description of Artificial Sequence: Synthetic oligonucleotide
cuguaggauggugacugug

SEQ ID NO: 553454 - RNA, 19 nt, Artificial Sequence
  Description of Artificial Sequence: Synthetic oligonucleotide
aagcugucugaacguguuu

SEQ ID NO: 553455 - RNA, 19 nt, Artificial Sequence
  Description of Artificial Sequence: Synthetic oligonucleotide
uaaucaccgguugggcgcu

SEQ ID NO: 553456 - RNA, 19 nt, Artificial Sequence
  Description of Artificial Sequence: Synthetic oligonucleotide
uuaccacccucaccauggu

SEQ ID NO: 553457 - RNA, 19 nt, Artificial Sequence
  Description of Artificial Sequence: Synthetic oligonucleotide
ggaaugcuuguuccacaag

SEQ ID NO: 553458 - RNA, 19 nt, Artificial Sequence
  Description of Artificial Sequence: Synthetic oligonucleotide
uucuuaccccugccucuug

SEQ ID NO: 553459 - RNA, 19 nt, Artificial Sequence
  Description of Artificial Sequence: Synthetic oligonucleotide
cgaggauguacccauuggc

SEQ ID NO: 553460 - RNA, 19 nt, Artificial Sequence
  Description of Artificial Sequence: Synthetic oligonucleotide
gaucucggguuccccgcug

SEQ ID NO: 553461 - RNA, 19 nt, Artificial Sequence
  Description of Artificial Sequence: Synthetic oligonucleotide
acuauuggcuuuagccccu

SEQ ID NO: 553462 - RNA, 19 nt, Artificial Sequence
  Description of Artificial Sequence: Synthetic oligonucleotide
gucccaaccuccaccuucc

SEQ ID NO: 553463 - RNA, 19 nt, Artificial Sequence
  Description of Artificial Sequence: Synthetic oligonucleotide
gaccucuugaucucggguu

SEQ ID NO: 553464 - RNA, 19 nt, Artificial Sequence
  Description of Artificial Sequence: Synthetic oligonucleotide
gcgcauaggauaccacugc

SEQ ID NO: 553465 - RNA, 19 nt, Artificial Sequence
  Description of Artificial Sequence: Synthetic oligonucleotide
cauaagcguugccaguuaa

SEQ ID NO: 553466 - RNA, 19 nt, Artificial Sequence
  Description of Artificial Sequence: Synthetic oligonucleotide
cuagcgaggauguacccau

SEQ ID NO: 553467 - RNA, 19 nt, Artificial Sequence
  Description of Artificial Sequence: Synthetic oligonucleotide
gcuauucgugggcacagca

SEQ ID NO: 553468 - RNA, 19 nt, Artificial Sequence
  Description of Artificial Sequence: Synthetic oligonucleotide
cauguaggcgacaggcuua

SEQ ID NO: 553469 - RNA, 19 nt, Artificial Sequence
  Description of Artificial Sequence: Synthetic oligonucleotide
ccuaccuuuucccagccca

SEQ ID NO: 553470 - RNA, 19 nt, Artificial Sequence
  Description of Artificial Sequence: Synthetic oligonucleotide
guaggggccugcugcacca

SEQ ID NO: 553471 - RNA, 19 nt, Artificial Sequence
  Description of Artificial Sequence: Synthetic oligonucleotide
aggcccuaccucacauacc

SEQ ID NO: 553472 - RNA, 19 nt, Artificial Sequence
  Description of Artificial Sequence: Synthetic oligonucleotide
ugcugugucgugggauccc

SEQ ID NO: 553473 - RNA, 19 nt, Artificial Sequence
  Description of Artificial Sequence: Synthetic oligonucleotide
uuggcuucggaggcagggu

SEQ ID NO: 553474 - RNA, 19 nt, Artificial Sequence
  Description of Artificial Sequence: Synthetic oligonucleotide
cacucaccgguaccugggc

SEQ ID NO: 553475 - RNA, 19 nt, Artificial Sequence
  Description of Artificial Sequence: Synthetic oligonucleotide
ggagguugcugggucggcg

SEQ ID NO: 553476 - RNA, 19 nt, Artificial Sequence
  Description of Artificial Sequence: Synthetic oligonucleotide
cuucacucaccgguaccug

SEQ ID NO: 553477 - RNA, 19 nt, Artificial Sequence
  Description of Artificial Sequence: Synthetic oligonucleotide
cgucuaauaauaguuagaa

SEQ ID NO: 553478 - RNA, 19 nt, Artificial Sequence
  Description of Artificial Sequence: Synthetic oligonucleotide
gggcgcucugggaauagcg

SEQ ID NO: 553479 - RNA, 19 nt, Artificial Sequence
  Description of Artificial Sequence: Synthetic oligonucleotide
gcucugggaauagcgauac

SEQ ID NO: 553480 - RNA, 19 nt, Artificial Sequence
  Description of Artificial Sequence: Synthetic oligonucleotide
cacauacccgggugaugac

SEQ ID NO: 553481 - RNA, 19 nt, Artificial Sequence
  Description of Artificial Sequence: Synthetic oligonucleotide
ggaacgaggggacaucagu

SEQ ID NO: 553482 - RNA, 19 nt, Artificial Sequence
  Description of Artificial Sequence: Synthetic oligonucleotide
ggcgugagucccaaccucc

SEQ ID NO: 553483 - RNA, 19 nt, Artificial Sequence
  Description of Artificial Sequence: Synthetic oligonucleotide
agcaugcuuuccguucuga

SEQ ID NO: 553484 - RNA, 19 nt, Artificial Sequence
  Description of Artificial Sequence: Synthetic oligonucleotide
ccgagggacuuugauaaag

SEQ ID NO: 553485 - RNA, 19 nt, Artificial Sequence
  Description of Artificial Sequence: Synthetic oligonucleotide
ggcaugucccaucucugga

SEQ ID NO: 553486 - RNA, 19 nt, Artificial Sequence
  Description of Artificial Sequence: Synthetic oligonucleotide
cgauacucuggaacagagg

SEQ ID NO: 553487 - RNA, 19 nt, Artificial Sequence
  Description of Artificial Sequence: Synthetic oligonucleotide
ccauaaucaccgguugggc

SEQ ID NO: 553488 - RNA, 19 nt, Artificial Sequence
  Description of Artificial Sequence: Synthetic oligonucleotide
cagcgcauaggauaccacu

SEQ ID NO: 553489 - RNA, 19 nt, Artificial Sequence
  Description of Artificial Sequence: Synthetic oligonucleotide
gaacguguuuauguguuuu

SEQ ID NO: 553490 - RNA, 19 nt, Artificial Sequence
  Description of Artificial Sequence: Synthetic oligonucleotide
gucuccgcuuucggaaugc

SEQ ID NO: 553491 - RNA, 19 nt, Artificial Sequence
  Description of Artificial Sequence: Synthetic oligonucleotide
acugguguagcuggcugua

SEQ ID NO: 553492 - RNA, 19 nt, Artificial Sequence
  Description of Artificial Sequence: Synthetic oligonucleotide
cacccguggcgugaguccc

SEQ ID NO: 553493 - RNA, 19 nt, Artificial Sequence
  Description of Artificial Sequence: Synthetic oligonucleotide
ucaccgguugggcgcugac

SEQ ID NO: 553494 - RNA, 19 nt, Artificial Sequence
  Description of Artificial Sequence: Synthetic oligonucleotide
gucagcaguccuguaguaa

SEQ ID NO: 553495 - RNA, 19 nt, Artificial Sequence
  Description of Artificial Sequence: Synthetic oligonucleotide
agucgggaucauguggaau

SEQ ID NO: 553496 - RNA, 19 nt, Artificial Sequence
  Description of Artificial Sequence: Synthetic oligonucleotide
cugggaccgagggacuuug

SEQ ID NO: 553497 - RNA, 19 nt, Artificial Sequence
  Description of Artificial Sequence: Synthetic oligonucleotide
ggagcacuccgugaggaca

SEQ ID NO: 553498 - RNA, 19 nt, Artificial Sequence
  Description of Artificial Sequence: Synthetic oligonucleotide
agccacucuuguggcacag

SEQ ID NO: 553499 - RNA, 19 nt, Artificial Sequence
  Description of Artificial Sequence: Synthetic oligonucleotide
gcagggauuguggcaaaug

SEQ ID NO: 553500 - RNA, 19 nt, Artificial Sequence
  Description of Artificial Sequence: Synthetic oligonucleotide
ggacagccauaaucaccgg

SEQ ID NO: 553501 - RNA, 19 nt, Artificial Sequence
  Description of Artificial Sequence: Synthetic oligonucleotide
ggcuagcgaggauguaccc

SEQ ID NO: 553502 - RNA, 19 nt, Artificial Sequence
  Description of Artificial Sequence: Synthetic oligonucleotide
cuauucgugggcacagcau

SEQ ID NO: 553503 - RNA, 19 nt, Artificial Sequence
  Description of Artificial Sequence: Synthetic oligonucleotide
acagagcuuccccgcccca

SEQ ID NO: 553504 - RNA, 19 nt, Artificial Sequence
  Description of Artificial Sequence: Synthetic oligonucleotide
ugccugcugugucguggga

SEQ ID NO: 553505 - RNA, 19 nt, Artificial Sequence
  Description of Artificial Sequence: Synthetic oligonucleotide
gccccacuuacaacaauug

SEQ ID NO: 553506 - RNA, 19 nt, Artificial Sequence
  Description of Artificial Sequence: Synthetic oligonucleotide
cuccccgagacaggcacuc

SEQ ID NO: 553507 - RNA, 19 nt, Artificial Sequence
  Description of Artificial Sequence: Synthetic oligonucleotide
uccccgccccacuuacaac

SEQ ID NO: 553508 - RNA, 19 nt, Artificial Sequence
  Description of Artificial Sequence: Synthetic oligonucleotide
accgagggacuuugauaaa

SEQ ID NO: 553509 - RNA, 19 nt, Artificial Sequence
  Description of Artificial Sequence: Synthetic oligonucleotide
gcacccguggcgugagucc

SEQ ID NO: 553510 - RNA, 19 nt, Artificial Sequence
  Description of Artificial Sequence: Synthetic oligonucleotide
gugacuucacucaccggua

SEQ ID NO: 553511 - RNA, 19 nt, Artificial Sequence
  Description of Artificial Sequence: Synthetic oligonucleotide
ugggcacccguggcgugag

SEQ ID NO: 553512 - RNA, 19 nt, Artificial Sequence
  Description of Artificial Sequence: Synthetic oligonucleotide
ugcuuagauguggguccac

SEQ ID NO: 553513 - RNA, 19 nt, Artificial Sequence
  Description of Artificial Sequence: Synthetic oligonucleotide
gcgcugacaggggagcccg

SEQ ID NO: 553514 - RNA, 19 nt, Artificial Sequence
  Description of Artificial Sequence: Synthetic oligonucleotide
ggguuacaucucuuuaaua

SEQ ID NO: 553515 - RNA, 19 nt, Artificial Sequence
  Description of Artificial Sequence: Synthetic oligonucleotide
gguuccccgcuggaagagg

SEQ ID NO: 553516 - RNA, 19 nt, Artificial Sequence
  Description of Artificial Sequence: Synthetic oligonucleotide
gggugggaccuucacccac

SEQ ID NO: 553517 - RNA, 19 nt, Artificial Sequence
  Description of Artificial Sequence: Synthetic oligonucleotide
gcuagcgaggauguaccca

SEQ ID NO: 553518 - RNA, 19 nt, Artificial Sequence
  Description of Artificial Sequence: Synthetic oligonucleotide
ccucacuauuggcuuuagc

SEQ ID NO: 553519 - RNA, 19 nt, Artificial Sequence
  Description of Artificial Sequence: Synthetic oligonucleotide
ggggacaucaguccaggau

SEQ ID NO: 553520 - RNA, 19 nt, Artificial Sequence
  Description of Artificial Sequence: Synthetic oligonucleotide
uguaggcgacaggcuuagc

SEQ ID NO: 553521 - RNA, 19 nt, Artificial Sequence
  Description of Artificial Sequence: Synthetic oligonucleotide
uagcgaggauguacccauu

SEQ ID NO: 553522 - RNA, 19 nt, Artificial Sequence
  Description of Artificial Sequence: Synthetic oligonucleotide
ccggcugagcccuggcuag

SEQ ID NO: 553523 - RNA, 19 nt, Artificial Sequence
  Description of Artificial Sequence: Synthetic oligonucleotide
gcacuaaguguuaaacaua

SEQ ID NO: 553524 - RNA, 19 nt, Artificial Sequence
  Description of Artificial Sequence: Synthetic oligonucleotide
cccuccccgagacaggcac

SEQ ID NO: 553525 - RNA, 19 nt, Artificial Sequence
  Description of Artificial Sequence: Synthetic oligonucleotide
acggccgugccugcugugu

SEQ ID NO: 553526 - RNA, 19 nt, Artificial Sequence
  Description of Artificial Sequence: Synthetic oligonucleotide
agcagggauuguggcaaau

SEQ ID NO: 553527 - RNA, 19 nt, Artificial Sequence
  Description of Artificial Sequence: Synthetic oligonucleotide
gcugugucgugggaucccc

SEQ ID NO: 553528 - RNA, 19 nt, Artificial Sequence
  Description of Artificial Sequence: Synthetic oligonucleotide
cuggaacagaggcuaacuu

SEQ ID NO: 553529 - RNA, 19 nt, Artificial Sequence
  Description of Artificial Sequence: Synthetic oligonucleotide
ucccuccguccuugacugc

SEQ ID NO: 553530 - RNA, 19 nt, Artificial Sequence
  Description of Artificial Sequence: Synthetic oligonucleotide
cacugguguagcuggcugu

SEQ ID NO: 553531 - RNA, 19 nt, Artificial Sequence
  Description of Artificial Sequence: Synthetic oligonucleotide
gucggggagggacagccau

SEQ ID NO: 553532 - RNA, 19 nt, Artificial Sequence
  Description of Artificial Sequence: Synthetic oligonucleotide
gcauguaggcgacaggcuu

SEQ ID NO: 553533 - RNA, 19 nt, Artificial Sequence
  Description of Artificial Sequence: Synthetic oligonucleotide
ccguucugagugacagccc

SEQ ID NO: 553534 - RNA, 19 nt, Artificial Sequence
  Description of Artificial Sequence: Synthetic oligonucleotide
uccugggaccgagggacuu

SEQ ID NO: 553535 - RNA, 19 nt, Artificial Sequence
  Description of Artificial Sequence: Synthetic oligonucleotide
ccagcgcauaggauaccac

SEQ ID NO: 553536 - RNA, 19 nt, Artificial Sequence
  Description of Artificial Sequence: Synthetic oligonucleotide
ccccaguuacuuuuacaga

SEQ ID NO: 553537 - RNA, 19 nt, Artificial Sequence
  Description of Artificial Sequence: Synthetic oligonucleotide
ggucggcguggcauuagug

SEQ ID NO: 553538 - RNA, 19 nt, Artificial Sequence
  Description of Artificial Sequence: Synthetic oligonucleotide
ggcgcucugggaauagcga

SEQ ID NO: 553539 - RNA, 19 nt, Artificial Sequence
  Description of Artificial Sequence: Synthetic oligonucleotide
augcgagcacucacucaca

SEQ ID NO: 553540 - RNA, 19 nt, Artificial Sequence
  Description of Artificial Sequence: Synthetic oligonucleotide
ggcguggcauuaguggcca

SEQ ID NO: 553541 - RNA, 19 nt, Artificial Sequence
  Description of Artificial Sequence: Synthetic oligonucleotide
cuacccgggaccucuugau

SEQ ID NO: 553542 - RNA, 19 nt, Artificial Sequence
  Description of Artificial Sequence: Synthetic oligonucleotide
acgcccagguggugcugcu

SEQ ID NO: 553543 - RNA, 19 nt, Artificial Sequence
  Description of Artificial Sequence: Synthetic oligonucleotide
gcaaaugcuaugguagguu

SEQ ID NO: 553544 - RNA, 19 nt, Artificial Sequence
  Description of Artificial Sequence: Synthetic oligonucleotide
gcggaagcaggagacaccu

SEQ ID NO: 553545 - RNA, 19 nt, Artificial Sequence
  Description of Artificial Sequence: Synthetic oligonucleotide
ggcguggaugaacuugccu

SEQ ID NO: 553546 - RNA, 19 nt, Artificial Sequence
  Description of Artificial Sequence: Synthetic oligonucleotide
uggcgacugucuggauaac

SEQ ID NO: 553547 - RNA, 19 nt, Artificial Sequence
  Description of Artificial Sequence: Synthetic oligonucleotide
gagcacucacucacauacu

SEQ ID NO: 553548 - RNA, 19 nt, Artificial Sequence
  Description of Artificial Sequence: Synthetic oligonucleotide
gcauaagcguugccaguua

SEQ ID NO: 553549 - RNA, 19 nt, Artificial Sequence
  Description of Artificial Sequence: Synthetic oligonucleotide
ggcacccguggcgugaguc

SEQ ID NO: 553550 - RNA, 19 nt, Artificial Sequence
  Description of Artificial Sequence: Synthetic oligonucleotide
cagccacucuuguggcaca

SEQ ID NO: 553551 - RNA, 19 nt, Artificial Sequence
  Description of Artificial Sequence: Synthetic oligonucleotide
ccgguugggcgcugacagg

SEQ ID NO: 553552 - RNA, 19 nt, Artificial Sequence
  Description of Artificial Sequence: Synthetic oligonucleotide
ggcauaagcguugccaguu

SEQ ID NO: 553553 - RNA, 19 nt, Artificial Sequence
  Description of Artificial Sequence: Synthetic oligonucleotide
agcacuccgugaggacaga

SEQ ID NO: 553554 - RNA, 19 nt, Artificial Sequence
  Description of Artificial Sequence: Synthetic oligonucleotide
gcugucugaacguguuuau

SEQ ID NO: 553555 - RNA, 19 nt, Artificial Sequence
  Description of Artificial Sequence: Synthetic oligonucleotide
cacggccgugccugcugug

SEQ ID NO: 553556 - RNA, 19 nt, Artificial Sequence
  Description of Artificial Sequence: Synthetic oligonucleotide
auguacccauuggcugagu

SEQ ID NO: 553557 - RNA, 19 nt, Artificial Sequence
  Description of Artificial Sequence: Synthetic oligonucleotide
ccaacacggccgugccugc

SEQ ID NO: 553558 - RNA, 19 nt, Artificial Sequence
  Description of Artificial Sequence: Synthetic oligonucleotide
cugcccgauggucacuggu

SEQ ID NO: 553559 - RNA, 19 nt, Artificial Sequence
  Description of Artificial Sequence: Synthetic oligonucleotide
gggcuggugagggcauaag

SEQ ID NO: 553560 - RNA, 19 nt, Artificial Sequence
  Description of Artificial Sequence: Synthetic oligonucleotide
gcccuaccucacauacccg

SEQ ID NO: 553561 - RNA, 19 nt, Artificial Sequence
  Description of Artificial Sequence: Synthetic oligonucleotide
gaugaccacuggcguggau

SEQ ID NO: 553562 - RNA, 19 nt, Artificial Sequence
  Description of Artificial Sequence: Synthetic oligonucleotide
cgggaccucuugaucucgg

SEQ ID NO: 553563 - RNA, 19 nt, Artificial Sequence
  Description of Artificial Sequence: Synthetic oligonucleotide
cccuaccuuuucccagccc

SEQ ID NO: 553564 - RNA, 19 nt, Artificial Sequence
  Description of Artificial Sequence: Synthetic oligonucleotide
aggcuaacuuugaccccaa

SEQ ID NO: 553565 - RNA, 19 nt, Artificial Sequence
  Description of Artificial Sequence: Synthetic oligonucleotide
cgugagucccaaccuccac

SEQ ID NO: 553566 - RNA, 19 nt, Artificial Sequence
  Description of Artificial Sequence: Synthetic oligonucleotide
cugggcacccguggcguga

SEQ ID NO: 553567 - RNA, 19 nt, Artificial Sequence
  Description of Artificial Sequence: Synthetic oligonucleotide
cucggcuggcagcagggau

SEQ ID NO: 553568 - RNA, 19 nt, Artificial Sequence
  Description of Artificial Sequence: Synthetic oligonucleotide
ggcgacugucuggauaacu

SEQ ID NO: 553569 - RNA, 19 nt, Artificial Sequence
  Description of Artificial Sequence: Synthetic oligonucleotide
guccuugacugcagcggcu

SEQ ID NO: 553570 - RNA, 19 nt, Artificial Sequence
  Description of Artificial Sequence: Synthetic oligonucleotide
ggggcgcucugggaauagc

SEQ ID NO: 553571 - RNA, 19 nt, Artificial Sequence
  Description of Artificial Sequence: Synthetic oligonucleotide
ggugggaccuucacccacu

SEQ ID NO: 553572 - RNA, 19 nt, Artificial Sequence
  Description of Artificial Sequence: Synthetic oligonucleotide
gcgagcacucacucacaua

SEQ ID NO: 553573 - RNA, 19 nt, Artificial Sequence
  Description of Artificial Sequence: Synthetic oligonucleotide
gcgugagucccaaccucca

SEQ ID NO: 553574 - RNA, 19 nt, Artificial Sequence
  Description of Artificial Sequence: Synthetic oligonucleotide
caccgagacagcugcuguu

SEQ ID NO: 553575 - RNA, 19 nt, Artificial Sequence
  Description of Artificial Sequence: Synthetic oligonucleotide
acccguggcgugaguccca

SEQ ID NO: 553576 - RNA, 19 nt, Artificial Sequence
  Description of Artificial Sequence: Synthetic oligonucleotide
ccgagacagcugcuguuga

SEQ ID NO: 553577 - RNA, 19 nt, Artificial Sequence
  Description of Artificial Sequence: Synthetic oligonucleotide
cgguuaagagaaagguugu

SEQ ID NO: 553578 - RNA, 19 nt, Artificial Sequence
  Description of Artificial Sequence: Synthetic oligonucleotide
gcguugccaguuaagcuau

SEQ ID NO: 553579 - RNA, 19 nt, Artificial Sequence
  Description of Artificial Sequence: Synthetic oligonucleotide
cucugggaauagcgauacu

SEQ ID NO: 553580 - RNA, 19 nt, Artificial Sequence
  Description of Artificial Sequence: Synthetic oligonucleotide
gcuucggaggcagggucua

SEQ ID NO: 553581 - RNA, 19 nt, Artificial Sequence
  Description of Artificial Sequence: Synthetic oligonucleotide
cgcauaggauaccacugcu

SEQ ID NO: 553582 - RNA, 19 nt, Artificial Sequence
  Description of Artificial Sequence: Synthetic oligonucleotide
gcgacaggcuuagccacua

SEQ ID NO: 553583 - RNA, 19 nt, Artificial Sequence
  Description of Artificial Sequence: Synthetic oligonucleotide
cgcucugggaauagcgaua

SEQ ID NO: 553584 - RNA, 19 nt, Artificial Sequence
  Description of Artificial Sequence: Synthetic oligonucleotide
guccuguaguaaggguaau

SEQ ID NO: 553585 - RNA, 19 nt, Artificial Sequence
  Description of Artificial Sequence: Synthetic oligonucleotide
caccgguaccugggcccug

SEQ ID NO: 553586 - RNA, 19 nt, Artificial Sequence
  Description of Artificial Sequence: Synthetic oligonucleotide
cggguuccccgcuggaaga

SEQ ID NO: 553587 - RNA, 19 nt, Artificial Sequence
  Description of Artificial Sequence: Synthetic oligonucleotide
ccgcuuucggaaugcuugu

SEQ ID NO: 553588 - RNA, 19 nt, Artificial Sequence
  Description of Artificial Sequence: Synthetic oligonucleotide
cccuggcuagcgaggaugu

SEQ ID NO: 553589 - RNA, 19 nt, Artificial Sequence
  Description of Artificial Sequence: Synthetic oligonucleotide
cccgauggucacuggugua

SEQ ID NO: 553590 - RNA, 19 nt, Artificial Sequence
  Description of Artificial Sequence: Synthetic oligonucleotide
ggcgacaggcuuagccacu

SEQ ID NO: 553591 - RNA, 19 nt, Artificial Sequence
  Description of Artificial Sequence: Synthetic oligonucleotide
gcguggcauuaguggccac

SEQ ID NO: 553592 - RNA, 19 nt, Artificial Sequence
  Description of Artificial Sequence: Synthetic oligonucleotide
cgugggcacagcaugcuuu

SEQ ID NO: 553593 - RNA, 19 nt, Artificial Sequence
  Description of Artificial Sequence: Synthetic oligonucleotide
caacacggccgugccugcu

SEQ ID NO: 553594 - RNA, 19 nt, Artificial Sequence
  Description of Artificial Sequence: Synthetic oligonucleotide
ggccaucuggcuggcgacu

SEQ ID NO: 553595 - RNA, 19 nt, Artificial Sequence
  Description of Artificial Sequence: Synthetic oligonucleotide
ccucacauacccgggugau

SEQ ID NO: 553596 - RNA, 19 nt, Artificial Sequence
  Description of Artificial Sequence: Synthetic oligonucleotide
ccucaccauggugacggua

SEQ ID NO: 553597 - RNA, 19 nt, Artificial Sequence
  Description of Artificial Sequence: Synthetic oligonucleotide
cggggcgcucugggaauag

SEQ ID NO: 553598 - RNA, 19 nt, Artificial Sequence
  Description of Artificial Sequence: Synthetic oligonucleotide
ccuccccgagacaggcacu

SEQ ID NO: 553599 - RNA, 19 nt, Artificial Sequence
  Description of Artificial Sequence: Synthetic oligonucleotide
cgaccucacuauuggcuuu

SEQ ID NO: 553600 - RNA, 19 nt, Artificial Sequence
  Description of Artificial Sequence: Synthetic oligonucleotide
gccucuugggugggaccuu

SEQ ID NO: 553601 - RNA, 19 nt, Artificial Sequence
  Description of Artificial Sequence: Synthetic oligonucleotide
cccucaccauggugacggu

SEQ ID NO: 553602 - RNA, 19 nt, Artificial Sequence
  Description of Artificial Sequence: Synthetic oligonucleotide
ccggggcgcucugggaaua

SEQ ID NO: 553603 - RNA, 19 nt, Artificial Sequence
  Description of Artificial Sequence: Synthetic oligonucleotide
uguggaauggccaaaauau

SEQ ID NO: 553604 - RNA, 19 nt, Artificial Sequence
  Description of Artificial Sequence: Synthetic oligonucleotide
aguagcgacggucaaggcc

SEQ ID NO: 553605 - RNA, 19 nt, Artificial Sequence
  Description of Artificial Sequence: Synthetic oligonucleotide
uuuguuguagaaacguagc

SEQ ID NO: 553606 - RNA, 19 nt, Artificial Sequence
  Description of Artificial Sequence: Synthetic oligonucleotide
uauuggcucacgaaaggcg

SEQ ID NO: 553607 - RNA, 19 nt, Artificial Sequence
  Description of Artificial Sequence: Synthetic oligonucleotide
uuguuguagaaacguagcg

SEQ ID NO: 553608 - RNA, 19 nt, Artificial Sequence
  Description of Artificial Sequence: Synthetic oligonucleotide
gagaggugcaugcauagcg

SEQ ID NO: 553609 - RNA, 19 nt, Artificial Sequence
  Description of Artificial Sequence: Synthetic oligonucleotide
aacguagcgaccuguguag

SEQ ID NO: 553610 - RNA, 19 nt, Artificial Sequence
  Description of Artificial Sequence: Synthetic oligonucleotide
gaagcgaagcaacacucgg

SEQ ID NO: 553611 - RNA, 19 nt, Artificial Sequence
  Description of Artificial Sequence: Synthetic oligonucleotide
aguguccgaacccacgcgc

SEQ ID NO: 553612 - RNA, 19 nt, Artificial Sequence
  Description of Artificial Sequence: Synthetic oligonucleotide
ucaguugucgccagcgucc

SEQ ID NO: 553613 - RNA, 19 nt, Artificial Sequence
  Description of Artificial Sequence: Synthetic oligonucleotide
guagcgacggucaaggccg

SEQ ID NO: 553614 - RNA, 19 nt, Artificial Sequence
  Description of Artificial Sequence: Synthetic oligonucleotide
uguuguagaaacguagcga

SEQ ID NO: 553615 - RNA, 19 nt, Artificial Sequence
  Description of Artificial Sequence: Synthetic oligonucleotide
ucaggacuggacaauuuug

SEQ ID NO: 553616 - RNA, 19 nt, Artificial Sequence
  Description of Artificial Sequence: Synthetic oligonucleotide
ucguaguucucauauuggc

SEQ ID NO: 553617 - RNA, 19 nt, Artificial Sequence
  Description of Artificial Sequence: Synthetic oligonucleotide
cacgaaaggcgccugaggg

SEQ ID NO: 553618 - RNA, 19 nt, Artificial Sequence
  Description of Artificial Sequence: Synthetic oligonucleotide
uccuagacuagaaaacccu

SEQ ID NO: 553619 - RNA, 19 nt, Artificial Sequence
  Description of Artificial Sequence: Synthetic oligonucleotide
cauauuggcucacgaaagg

SEQ ID NO: 553620 - RNA, 19 nt, Artificial Sequence
  Description of Artificial Sequence: Synthetic oligonucleotide
ggauagaugaccccagccg

SEQ ID NO: 553621 - RNA, 19 nt, Artificial Sequence
  Description of Artificial Sequence: Synthetic oligonucleotide
aaacguagcgaccugugua

SEQ ID NO: 553622 - RNA, 19 nt, Artificial Sequence
  Description of Artificial Sequence: Synthetic oligonucleotide
ugcaucaagcaggucauag

SEQ ID NO: 553623 - RNA, 19 nt, Artificial Sequence
  Description of Artificial Sequence: Synthetic oligonucleotide
ucacgaaaggcgccugagg

SEQ ID NO: 553624 - RNA, 19 nt, Artificial Sequence
  Description of Artificial Sequence: Synthetic oligonucleotide
uucucauauuggcucacga

SEQ ID NO: 553625 - RNA, 19 nt, Artificial Sequence
  Description of Artificial Sequence: Synthetic oligonucleotide
agacgaaaggaugucguag

SEQ ID NO: 553626 - RNA, 19 nt, Artificial Sequence
  Description of Artificial Sequence: Synthetic oligonucleotide
cacuggaucaguugucgcc

SEQ ID NO: 553627 - RNA, 19 nt, Artificial Sequence
  Description of Artificial Sequence: Synthetic oligonucleotide
ugcaccgcgauaguacacg

SEQ ID NO: 553628 - RNA, 19 nt, Artificial Sequence
  Description of Artificial Sequence: Synthetic oligonucleotide
ucucauauuggcucacgaa

SEQ ID NO: 553629 - RNA, 19 nt, Artificial Sequence
  Description of Artificial Sequence: Synthetic oligonucleotide
agaggugcaugcauagcgc

SEQ ID NO: 553630 - RNA, 19 nt, Artificial Sequence
  Description of Artificial Sequence: Synthetic oligonucleotide
ugggucgguacacacuacc

SEQ ID NO: 553631 - RNA, 19 nt, Artificial Sequence
  Description of Artificial Sequence: Synthetic oligonucleotide
agaugaccccagccgaggc

SEQ ID NO: 553632 - RNA, 19 nt, Artificial Sequence
  Description of Artificial Sequence: Synthetic oligonucleotide
gacgaaaggaugucguaga

SEQ ID NO: 553633 - RNA, 19 nt, Artificial Sequence
  Description of Artificial Sequence: Synthetic oligonucleotide
acuacguuguuggugaagu

SEQ ID NO: 553634 - RNA, 19 nt, Artificial Sequence
  Description of Artificial Sequence: Synthetic oligonucleotide
guagcgaccuguguagugg

SEQ ID NO: 553635 - RNA, 19 nt, Artificial Sequence
  Description of Artificial Sequence: Synthetic oligonucleotide
uguugcaucucacuacguu

SEQ ID NO: 553636 - RNA, 19 nt, Artificial Sequence
  Description of Artificial Sequence: Synthetic oligonucleotide
uuuggggcgcgccugccag

SEQ ID NO: 553637 - RNA, 19 nt, Artificial Sequence
  Description of Artificial Sequence: Synthetic oligonucleotide
ucucacuacguuguuggug

SEQ ID NO: 553638 - RNA, 19 nt, Artificial Sequence
  Description of Artificial Sequence: Synthetic oligonucleotide
uccgggaccaaaucaggga

SEQ ID NO: 553639 - RNA, 19 nt, Artificial Sequence
  Description of Artificial Sequence: Synthetic oligonucleotide
ugugccacucccaggugug

SEQ ID NO: 553640 - RNA, 19 nt, Artificial Sequence
  Description of Artificial Sequence: Synthetic oligonucleotide
uucugguugggucgguaca

SEQ ID NO: 553641 - RNA, 19 nt, Artificial Sequence
  Description of Artificial Sequence: Synthetic oligonucleotide
gcuacucucgccucuuugg

SEQ ID NO: 553642 - RNA, 19 nt, Artificial Sequence
  Description of Artificial Sequence: Synthetic oligonucleotide
cugggugccuucauuguac

SEQ ID NO: 553643 - RNA, 19 nt, Artificial Sequence
  Description of Artificial Sequence: Synthetic oligonucleotide
cauagggccucuccggggc

SEQ ID NO: 553644 - RNA, 19 nt, Artificial Sequence
  Description of Artificial Sequence: Synthetic oligonucleotide
cugcccgugcaccaggacg

SEQ ID NO: 553645 - RNA, 19 nt, Artificial Sequence
  Description of Artificial Sequence: Synthetic oligonucleotide
guuguggcuccaccgcucg

SEQ ID NO: 553646 - RNA, 19 nt, Artificial Sequence
  Description of Artificial Sequence: Synthetic oligonucleotide
caguuaugucaauccauug

SEQ ID NO: 553647 - RNA, 19 nt, Artificial Sequence
  Description of Artificial Sequence: Synthetic oligonucleotide
aagccgaaugggugccgcg

SEQ ID NO: 553648 - RNA, 19 nt, Artificial Sequence
  Description of Artificial Sequence: Synthetic oligonucleotide
uuggcucacgaaaggcgcc

SEQ ID NO: 553649 - RNA, 19 nt, Artificial Sequence
  Description of Artificial Sequence: Synthetic oligonucleotide
accaaaucagggaggccgc

SEQ ID NO: 553650 - RNA, 19 nt, Artificial Sequence
  Description of Artificial Sequence: Synthetic oligonucleotide
gccgcgaccauucugguug

SEQ ID NO: 553651 - RNA, 19 nt, Artificial Sequence
  Description of Artificial Sequence: Synthetic oligonucleotide
gccgcugagacguuugggg

SEQ ID NO: 553652 - RNA, 19 nt, Artificial Sequence
  Description of Artificial Sequence: Synthetic oligonucleotide
uguccgaacccacgcgccc

SEQ ID NO: 553653 - RNA, 19 nt, Artificial Sequence
  Description of Artificial Sequence: Synthetic oligonucleotide
ugggugccgcguuugacca

SEQ ID NO: 553654 - RNA, 19 nt, Artificial Sequence
  Description of Artificial Sequence: Synthetic oligonucleotide
uagaaacguagcgaccugu

SEQ ID NO: 553655 - RNA, 19 nt, Artificial Sequence
  Description of Artificial Sequence: Synthetic oligonucleotide
aucaguuaugucaauccau

SEQ ID NO: 553656 - RNA, 19 nt, Artificial Sequence
  Description of Artificial Sequence: Synthetic oligonucleotide
ucuuugcacauauguggau

SEQ ID NO: 553657 - RNA, 19 nt, Artificial Sequence
  Description of Artificial Sequence: Synthetic oligonucleotide
uggccgguuggggagaaag

SEQ ID NO: 553658 - RNA, 19 nt, Artificial Sequence
  Description of Artificial Sequence: Synthetic oligonucleotide
agcguaaggaguacagaug

SEQ ID NO: 553659 - RNA, 19 nt, Artificial Sequence
  Description of Artificial Sequence: Synthetic oligonucleotide
uccuccgccgcacagcgua

SEQ ID NO: 553660 - RNA, 19 nt, Artificial Sequence
  Description of Artificial Sequence: Synthetic oligonucleotide
agcuacucucgccucuuug

SEQ ID NO: 553661 - RNA, 19 nt, Artificial Sequence
  Description of Artificial Sequence: Synthetic oligonucleotide
acguuuggggcgcgccugc

SEQ ID NO: 553662 - RNA, 19 nt, Artificial Sequence
  Description of Artificial Sequence: Synthetic oligonucleotide
guagaaacguagcgaccug

SEQ ID NO: 553663 - RNA, 19 nt, Artificial Sequence
  Description of Artificial Sequence: Synthetic oligonucleotide
uccgccgcacagcguaagg

SEQ ID NO: 553664 - RNA, 19 nt, Artificial Sequence
  Description of Artificial Sequence: Synthetic oligonucleotide
ugccugcacauaguugggg

SEQ ID NO: 553665 - RNA, 19 nt, Artificial Sequence
  Description of Artificial Sequence: Synthetic oligonucleotide
uguggcuccaccgcucgug

SEQ ID NO: 553666 - RNA, 19 nt, Artificial Sequence
  Description of Artificial Sequence: Synthetic oligonucleotide
accucucgccaguugucgg

SEQ ID NO: 553667 - RNA, 19 nt, Artificial Sequence
  Description of Artificial Sequence: Synthetic oligonucleotide
acgaaaggcgccugagggu

SEQ ID NO: 553668 - RNA, 19 nt, Artificial Sequence
  Description of Artificial Sequence: Synthetic oligonucleotide
agacuagaaaacccuuguu

SEQ ID NO: 553669 - RNA, 19 nt, Artificial Sequence
  Description of Artificial Sequence: Synthetic oligonucleotide
uggagcuacucucgccucu

SEQ ID NO: 553670 - RNA, 19 nt, Artificial Sequence
  Description of Artificial Sequence: Synthetic oligonucleotide
guucucauauuggcucacg

SEQ ID NO: 553671 - RNA, 19 nt, Artificial Sequence
  Description of Artificial Sequence: Synthetic oligonucleotide
agaaacguagcgaccugug

SEQ ID NO: 553672 - RNA, 19 nt, Artificial Sequence
  Description of Artificial Sequence: Synthetic oligonucleotide
agguccgcgaugcgggguc

SEQ ID NO: 553673 - RNA, 19 nt, Artificial Sequence
  Description of Artificial Sequence: Synthetic oligonucleotide
gaugucguagaggagaguu

SEQ ID NO: 553674 - RNA, 19 nt, Artificial Sequence
  Description of Artificial Sequence: Synthetic oligonucleotide
ccaacaacagacgaaagga

SEQ ID NO: 553675 - RNA, 19 nt, Artificial Sequence
  Description of Artificial Sequence: Synthetic oligonucleotide
guccgggaccaaaucaggg

SEQ ID NO: 553676 - RNA, 19 nt, Artificial Sequence
  Description of Artificial Sequence: Synthetic oligonucleotide
caacacucggaggucguag

SEQ ID NO: 553677 - RNA, 19 nt, Artificial Sequence
  Description of Artificial Sequence: Synthetic oligonucleotide
caguguccgaacccacgcg

SEQ ID NO: 553678 - RNA, 19 nt, Artificial Sequence
  Description of Artificial Sequence: Synthetic oligonucleotide
ugggugccuucauuguaca

SEQ ID NO: 553679 - RNA, 19 nt, Artificial Sequence
  Description of Artificial Sequence: Synthetic oligonucleotide
uacuccucguagcgugccc

SEQ ID NO: 553680 - RNA, 19 nt, Artificial Sequence
  Description of Artificial Sequence: Synthetic oligonucleotide
caucagaacugcgcacagg

SEQ ID NO: 553681 - RNA, 19 nt, Artificial Sequence
  Description of Artificial Sequence: Synthetic oligonucleotide
uagcgaccuguguagugga

SEQ ID NO: 553682 - RNA, 19 nt, Artificial Sequence
  Description of Artificial Sequence: Synthetic oligonucleotide
cucacgaaaggcgccugag

SEQ ID NO: 553683 - RNA, 19 nt, Artificial Sequence
  Description of Artificial Sequence: Synthetic oligonucleotide
ggcugcggugcauagggcc

SEQ ID NO: 553684 - RNA, 19 nt, Artificial Sequence
  Description of Artificial Sequence: Synthetic oligonucleotide
gaaacguagcgaccugugu

SEQ ID NO: 553685 - RNA, 19 nt, Artificial Sequence
  Description of Artificial Sequence: Synthetic oligonucleotide
aguuuguuguagaaacgua

SEQ ID NO: 553686 - RNA, 19 nt, Artificial Sequence
  Description of Artificial Sequence: Synthetic oligonucleotide
gagacguuuggggcgcgcc

SEQ ID NO: 553687 - RNA, 19 nt, Artificial Sequence
  Description of Artificial Sequence: Synthetic oligonucleotide
ccgggguuggaaaggauag

SEQ ID NO: 553688 - RNA, 19 nt, Artificial Sequence
  Description of Artificial Sequence: Synthetic oligonucleotide
agacguuuggggcgcgccu

SEQ ID NO: 553689 - RNA, 19 nt, Artificial Sequence
  Description of Artificial Sequence: Synthetic oligonucleotide
cguagguccgcgaugcggg

SEQ ID NO: 553690 - RNA, 19 nt, Artificial Sequence
  Description of Artificial Sequence: Synthetic oligonucleotide
cuacguuguuggugaaguc

SEQ ID NO: 553691 - RNA, 19 nt, Artificial Sequence
  Description of Artificial Sequence: Synthetic oligonucleotide
gucguagaggagaguuagg

SEQ ID NO: 553692 - RNA, 19 nt, Artificial Sequence
  Description of Artificial Sequence: Synthetic oligonucleotide
gacguuuggggcgcgccug

SEQ ID NO: 553693 - RNA, 19 nt, Artificial Sequence
  Description of Artificial Sequence: Synthetic oligonucleotide
ggcgcaucagaacugcgca

SEQ ID NO: 553694 - RNA, 19 nt, Artificial Sequence
  Description of Artificial Sequence: Synthetic oligonucleotide
gccgaagccgaaugggugc

SEQ ID NO: 553695 - RNA, 19 nt, Artificial Sequence
  Description of Artificial Sequence: Synthetic oligonucleotide
cgcgauaguacacguagcc

SEQ ID NO: 553696 - RNA, 19 nt, Artificial Sequence
  Description of Artificial Sequence: Synthetic oligonucleotide
gaguagcgacggucaaggc

SEQ ID NO: 553697 - RNA, 19 nt, Artificial Sequence
  Description of Artificial Sequence: Synthetic oligonucleotide
ucgccagcgucccgggucu

SEQ ID NO: 553698 - RNA, 19 nt, Artificial Sequence
  Description of Artificial Sequence: Synthetic oligonucleotide
ggugccgcguuugaccacg

SEQ ID NO: 553699 - RNA, 19 nt, Artificial Sequence
  Description of Artificial Sequence: Synthetic oligonucleotide
ccgguuggggagaaagucc

SEQ ID NO: 553700 - RNA, 19 nt, Artificial Sequence
  Description of Artificial Sequence: Synthetic oligonucleotide
ugagacggcccugcugggc

SEQ ID NO: 553701 - RNA, 19 nt, Artificial Sequence
  Description of Artificial Sequence: Synthetic oligonucleotide
ugggguccgggaccaaauc

SEQ ID NO: 553702 - RNA, 19 nt, Artificial Sequence
  Description of Artificial Sequence: Synthetic oligonucleotide
uugggucgguacacacuac

SEQ ID NO: 553703 - RNA, 19 nt, Artificial Sequence
  Description of Artificial Sequence: Synthetic oligonucleotide
cacuacccacgcugagacg

SEQ ID NO: 553704 - RNA, 19 nt, Artificial Sequence
  Description of Artificial Sequence: Synthetic oligonucleotide
cuggcgguaggugguggcg

SEQ ID NO: 553705 - RNA, 19 nt, Artificial Sequence
  Description of Artificial Sequence: Synthetic oligonucleotide
ggguccgggaccaaaucag

SEQ ID NO: 553706 - RNA, 19 nt, Artificial Sequence
  Description of Artificial Sequence: Synthetic oligonucleotide
gucgccagcgucccggguc

SEQ ID NO: 553707 - RNA, 19 nt, Artificial Sequence
  Description of Artificial Sequence: Synthetic oligonucleotide
ucaaggccgucagaggguu

SEQ ID NO: 553708 - RNA, 19 nt, Artificial Sequence
  Description of Artificial Sequence: Synthetic oligonucleotide
ugguacgaggauggcuggc

SEQ ID NO: 553709 - RNA, 19 nt, Artificial Sequence
  Description of Artificial Sequence: Synthetic oligonucleotide
ugcuccgucggugcuggga

SEQ ID NO: 553710 - RNA, 19 nt, Artificial Sequence
  Description of Artificial Sequence: Synthetic oligonucleotide
uggcucacgaaaggcgccu

SEQ ID NO: 553711 - RNA, 19 nt, Artificial Sequence
  Description of Artificial Sequence: Synthetic oligonucleotide
aggucguagucgguggccu

SEQ ID NO: 553712 - RNA, 19 nt, Artificial Sequence
  Description of Artificial Sequence: Synthetic oligonucleotide
gccgcguuugaccacgcac

SEQ ID NO: 553713 - RNA, 19 nt, Artificial Sequence
  Description of Artificial Sequence: Synthetic oligonucleotide
cugcaccgcgauaguacac

SEQ ID NO: 553714 - RNA, 19 nt, Artificial Sequence
  Description of Artificial Sequence: Synthetic oligonucleotide
gucguagguccgcgaugcg

SEQ ID NO: 553715 - RNA, 19 nt, Artificial Sequence
  Description of Artificial Sequence: Synthetic oligonucleotide
guguccgaacccacgcgcc

SEQ ID NO: 553716 - RNA, 19 nt, Artificial Sequence
  Description of Artificial Sequence: Synthetic oligonucleotide
caguugucgccagcguccc

SEQ ID NO: 553717 - RNA, 19 nt, Artificial Sequence
  Description of Artificial Sequence: Synthetic oligonucleotide
ugagacguuuggggcgcgc

SEQ ID NO: 553718 - RNA, 19 nt, Artificial Sequence
  Description of Artificial Sequence: Synthetic oligonucleotide
ucacuacguuguuggugaa

SEQ ID NO: 553719 - RNA, 19 nt, Artificial Sequence
  Description of Artificial Sequence: Synthetic oligonucleotide
ccgcugagacguuuggggc

SEQ ID NO: 553720 - RNA, 19 nt, Artificial Sequence
  Description of Artificial Sequence: Synthetic oligonucleotide
gggucgguacacacuaccc

SEQ ID NO: 553721 - RNA, 19 nt, Artificial Sequence
  Description of Artificial Sequence: Synthetic oligonucleotide
ggggucguaguucucauau

SEQ ID NO: 553722 - RNA, 19 nt, Artificial Sequence
  Description of Artificial Sequence: Synthetic oligonucleotide
gggguccgggaccaaauca

SEQ ID NO: 553723 - RNA, 19 nt, Artificial Sequence
  Description of Artificial Sequence: Synthetic oligonucleotide
agccgaaugggugccgcgu

SEQ ID NO: 553724 - RNA, 19 nt, Artificial Sequence
  Description of Artificial Sequence: Synthetic oligonucleotide
cagacgaaaggaugucgua

SEQ ID NO: 553725 - RNA, 19 nt, Artificial Sequence
  Description of Artificial Sequence: Synthetic oligonucleotide
gguaccagccgaggcgggg

SEQ ID NO: 553726 - RNA, 19 nt, Artificial Sequence
  Description of Artificial Sequence: Synthetic oligonucleotide
gcaucucacuacguuguug

SEQ ID NO: 553727 - RNA, 19 nt, Artificial Sequence
  Description of Artificial Sequence: Synthetic oligonucleotide
ccuggccgaagccgaaugg

SEQ ID NO: 553728 - RNA, 19 nt, Artificial Sequence
  Description of Artificial Sequence: Synthetic oligonucleotide
ugccgcguuugaccacgca

SEQ ID NO: 553729 - RNA, 19 nt, Artificial Sequence
  Description of Artificial Sequence: Synthetic oligonucleotide
gggcgcaucagaacugcgc

SEQ ID NO: 553730 - RNA, 19 nt, Artificial Sequence
  Description of Artificial Sequence: Synthetic oligonucleotide
guaguggauguugcaucuc

SEQ ID NO: 553731 - RNA, 19 nt, Artificial Sequence
  Description of Artificial Sequence: Synthetic oligonucleotide
gucguagucgguggccuca

SEQ ID NO: 553732 - RNA, 19 nt, Artificial Sequence
  Description of Artificial Sequence: Synthetic oligonucleotide
ugucugcguuguagguguc

SEQ ID NO: 553733 - RNA, 19 nt, Artificial Sequence
  Description of Artificial Sequence: Synthetic oligonucleotide
ccucuuuggggccccgcgg

SEQ ID NO: 553734 - RNA, 19 nt, Artificial Sequence
  Description of Artificial Sequence: Synthetic oligonucleotide
acgaggauggcuggcggua

SEQ ID NO: 553735 - RNA, 19 nt, Artificial Sequence
  Description of Artificial Sequence: Synthetic oligonucleotide
ggccgaagccgaaugggug

SEQ ID NO: 553736 - RNA, 19 nt, Artificial Sequence
  Description of Artificial Sequence: Synthetic oligonucleotide
cccgcgggcacguacucag

SEQ ID NO: 553737 - RNA, 19 nt, Artificial Sequence
  Description of Artificial Sequence: Synthetic oligonucleotide
caccugccccgguggagcc

SEQ ID NO: 553738 - RNA, 19 nt, Artificial Sequence
  Description of Artificial Sequence: Synthetic oligonucleotide
gcguuguaggugucauagc

SEQ ID NO: 553739 - RNA, 19 nt, Artificial Sequence
  Description of Artificial Sequence: Synthetic oligonucleotide
agcaacacucggaggucgu

SEQ ID NO: 553740 - RNA, 19 nt, Artificial Sequence
  Description of Artificial Sequence: Synthetic oligonucleotide
ccucguagcgugcccgggg

SEQ ID NO: 553741 - RNA, 19 nt, Artificial Sequence
  Description of Artificial Sequence: Synthetic oligonucleotide
augucguagaggagaguua

SEQ ID NO: 553742 - RNA, 19 nt, Artificial Sequence
  Description of Artificial Sequence: Synthetic oligonucleotide
ugucgccagcgucccgggu

SEQ ID NO: 553743 - RNA, 19 nt, Artificial Sequence
  Description of Artificial Sequence: Synthetic oligonucleotide
cgggcaaucuugcugugug

SEQ ID NO: 553744 - RNA, 19 nt, Artificial Sequence
  Description of Artificial Sequence: Synthetic oligonucleotide
ggcgagggcgcaucagaac

SEQ ID NO: 553745 - RNA, 19 nt, Artificial Sequence
  Description of Artificial Sequence: Synthetic oligonucleotide
cggauacucgggcugcucc

SEQ ID NO: 553746 - RNA, 19 nt, Artificial Sequence
  Description of Artificial Sequence: Synthetic oligonucleotide
gcgggcacguacucagagc

SEQ ID NO: 553747 - RNA, 19 nt, Artificial Sequence
  Description of Artificial Sequence: Synthetic oligonucleotide
cuguguggaauggccaaaa

SEQ ID NO: 553748 - RNA, 19 nt, Artificial Sequence
  Description of Artificial Sequence: Synthetic oligonucleotide
gccugcaccgcgauaguac

SEQ ID NO: 553749 - RNA, 19 nt, Artificial Sequence
  Description of Artificial Sequence: Synthetic oligonucleotide
auguugcaucucacuacgu

SEQ ID NO: 553750 - RNA, 19 nt, Artificial Sequence
  Description of Artificial Sequence: Synthetic oligonucleotide
ccgcguuugaccacgcaca

SEQ ID NO: 553751 - RNA, 19 nt, Artificial Sequence
  Description of Artificial Sequence: Synthetic oligonucleotide
cgggaccaaaucagggagg

SEQ ID NO: 553752 - RNA, 19 nt, Artificial Sequence
  Description of Artificial Sequence: Synthetic oligonucleotide
gcuggcgguaggugguggc

SEQ ID NO: 553753 - RNA, 19 nt, Artificial Sequence
  Description of Artificial Sequence: Synthetic oligonucleotide
acguagcgaccuguguagu

SEQ ID NO: 553754 - RNA, 19 nt, Artificial Sequence
  Description of Artificial Sequence: Synthetic oligonucleotide
ggagggacauaggccucgg

SEQ ID NO: 553755 - RNA, 19 nt, Artificial Sequence
  Description of Artificial Sequence: Synthetic oligonucleotide
ccgcgauaguacacguagc

SEQ ID NO: 553756 - RNA, 19 nt, Artificial Sequence
  Description of Artificial Sequence: Synthetic oligonucleotide
gcuggcuaccggcuccggc

SEQ ID NO: 553757 - RNA, 19 nt, Artificial Sequence
  Description of Artificial Sequence: Synthetic oligonucleotide
gcgaguagcgacggucaag

SEQ ID NO: 553758 - RNA, 19 nt, Artificial Sequence
  Description of Artificial Sequence: Synthetic oligonucleotide
cggaggucguagucggugg

SEQ ID NO: 553759 - RNA, 19 nt, Artificial Sequence
  Description of Artificial Sequence: Synthetic oligonucleotide
ccugcaccgcgauaguaca

SEQ ID NO: 553760 - RNA, 19 nt, Artificial Sequence
  Description of Artificial Sequence: Synthetic oligonucleotide
cgccgcacagcguaaggag

SEQ ID NO: 553761 - RNA, 19 nt, Artificial Sequence
  Description of Artificial Sequence: Synthetic oligonucleotide
ugcggugcauagggccucu

SEQ ID NO: 553762 - RNA, 19 nt, Artificial Sequence
  Description of Artificial Sequence: Synthetic oligonucleotide
ccaaaucagggaggccgcg

SEQ ID NO: 553763 - RNA, 19 nt, Artificial Sequence
  Description of Artificial Sequence: Synthetic oligonucleotide
gaccacgcacaguguccga

SEQ ID NO: 553764 - RNA, 19 nt, Artificial Sequence
  Description of Artificial Sequence: Synthetic oligonucleotide
cguagcgaccuguguagug

SEQ ID NO: 553765 - RNA, 19 nt, Artificial Sequence
  Description of Artificial Sequence: Synthetic oligonucleotide
ggaccaaaucagggaggcc

SEQ ID NO: 553766 - RNA, 19 nt, Artificial Sequence
  Description of Artificial Sequence: Synthetic oligonucleotide
cuccgucggugcugggauc

SEQ ID NO: 553767 - RNA, 19 nt, Artificial Sequence
  Description of Artificial Sequence: Synthetic oligonucleotide
gccguuccucuccccaccc

SEQ ID NO: 553768 - RNA, 19 nt, Artificial Sequence
  Description of Artificial Sequence: Synthetic oligonucleotide
cuccgccgcacagcguaag

SEQ ID NO: 553769 - RNA, 19 nt, Artificial Sequence
  Description of Artificial Sequence: Synthetic oligonucleotide
cgcguuugaccacgcacag

SEQ ID NO: 553770 - RNA, 19 nt, Artificial Sequence
  Description of Artificial Sequence: Synthetic oligonucleotide
cugcggugcauagggccuc

SEQ ID NO: 553771 - RNA, 19 nt, Artificial Sequence
  Description of Artificial Sequence: Synthetic oligonucleotide
agcgacggucaaggccguc

SEQ ID NO: 553772 - RNA, 19 nt, Artificial Sequence
  Description of Artificial Sequence: Synthetic oligonucleotide
gcucacgaaaggcgccuga

SEQ ID NO: 553773 - RNA, 19 nt, Artificial Sequence
  Description of Artificial Sequence: Synthetic oligonucleotide
cugccgacgccgggguccc

SEQ ID NO: 553774 - RNA, 19 nt, Artificial Sequence
  Description of Artificial Sequence: Synthetic oligonucleotide
cuggucguagguccgcgau

SEQ ID NO: 553775 - RNA, 19 nt, Artificial Sequence
  Description of Artificial Sequence: Synthetic oligonucleotide
agcuggcuaccggcuccgg

SEQ ID NO: 553776 - RNA, 19 nt, Artificial Sequence
  Description of Artificial Sequence: Synthetic oligonucleotide
accgcucguggagggacau

SEQ ID NO: 553777 - RNA, 19 nt, Artificial Sequence
  Description of Artificial Sequence: Synthetic oligonucleotide
gcgacggucaaggccguca

SEQ ID NO: 553778 - RNA, 19 nt, Artificial Sequence
  Description of Artificial Sequence: Synthetic oligonucleotide
ccgggucugagcccuguuc

SEQ ID NO: 553779 - RNA, 19 nt, Artificial Sequence
  Description of Artificial Sequence: Synthetic oligonucleotide
caccgcgauaguacacgua

SEQ ID NO: 553780 - RNA, 19 nt, Artificial Sequence
  Description of Artificial Sequence: Synthetic oligonucleotide
ccgcgaccauucugguugg

SEQ ID NO: 553781 - RNA, 19 nt, Artificial Sequence
  Description of Artificial Sequence: Synthetic oligonucleotide
cugcguuguaggugucaua

SEQ ID NO: 553782 - RNA, 19 nt, Artificial Sequence
  Description of Artificial Sequence: Synthetic oligonucleotide
caccgcucguggagggaca

SEQ ID NO: 553783 - RNA, 19 nt, Artificial Sequence
  Description of Artificial Sequence: Synthetic oligonucleotide
agcgaccuguguaguggau

SEQ ID NO: 553784 - RNA, 19 nt, Artificial Sequence
  Description of Artificial Sequence: Synthetic oligonucleotide
ccuagacuagaaaacccuu

SEQ ID NO: 553785 - RNA, 19 nt, Artificial Sequence
  Description of Artificial Sequence: Synthetic oligonucleotide
uccgcgaugcggggucgua

SEQ ID NO: 553786 - RNA, 19 nt, Artificial Sequence
  Description of Artificial Sequence: Synthetic oligonucleotide
cgacggucaaggccgucag

SEQ ID NO: 553787 - RNA, 19 nt, Artificial Sequence
  Description of Artificial Sequence: Synthetic oligonucleotide
gguccgcgaugcggggucg

SEQ ID NO: 553788 - RNA, 19 nt, Artificial Sequence
  Description of Artificial Sequence: Synthetic oligonucleotide
ccaccgcucguggagggac

SEQ ID NO: 553789 - RNA, 19 nt, Artificial Sequence
  Description of Artificial Sequence: Synthetic oligonucleotide
ggcucacgaaaggcgccug

SEQ ID NO: 553790 - RNA, 19 nt, Artificial Sequence
  Description of Artificial Sequence: Synthetic oligonucleotide
gcuguguggaauggccaaa

SEQ ID NO: 553791 - RNA, 19 nt, Artificial Sequence
  Description of Artificial Sequence: Synthetic oligonucleotide
augcggggucguaguucuc

SEQ ID NO: 553792 - RNA, 19 nt, Artificial Sequence
  Description of Artificial Sequence: Synthetic oligonucleotide
cgaaugggugccgcguuug

SEQ ID NO: 553793 - RNA, 19 nt, Artificial Sequence
  Description of Artificial Sequence: Synthetic oligonucleotide
cacccggcgagggcgcauc

SEQ ID NO: 553794 - RNA, 19 nt, Artificial Sequence
  Description of Artificial Sequence: Synthetic oligonucleotide
cccgugccguugcugggag

SEQ ID NO: 553795 - RNA, 19 nt, Artificial Sequence
  Description of Artificial Sequence: Synthetic oligonucleotide
ccagcgucccgggucugag

SEQ ID NO: 553796 - RNA, 19 nt, Artificial Sequence
  Description of Artificial Sequence: Synthetic oligonucleotide
gcuccgucggugcugggau

SEQ ID NO: 553797 - RNA, 19 nt, Artificial Sequence
  Description of Artificial Sequence: Synthetic oligonucleotide
agguguggcguggccgguu

SEQ ID NO: 553798 - RNA, 19 nt, Artificial Sequence
  Description of Artificial Sequence: Synthetic oligonucleotide
cgccguuccucuccccacc

SEQ ID NO: 553799 - RNA, 19 nt, Artificial Sequence
  Description of Artificial Sequence: Synthetic oligonucleotide
gugccgcguuugaccacgc

SEQ ID NO: 553800 - RNA, 19 nt, Artificial Sequence
  Description of Artificial Sequence: Synthetic oligonucleotide
gggugccgcguuugaccac

SEQ ID NO: 553801 - RNA, 19 nt, Artificial Sequence
  Description of Artificial Sequence: Synthetic oligonucleotide
gaguacagaugggcucuuu

SEQ ID NO: 553802 - RNA, 19 nt, Artificial Sequence
  Description of Artificial Sequence: Synthetic oligonucleotide
gagcuacucucgccucuuu

SEQ ID NO: 553803 - RNA, 19 nt, Artificial Sequence
  Description of Artificial Sequence: Synthetic oligonucleotide
ccgcgaugcggggucguag

SEQ ID NO: 553804 - RNA, 19 nt, Artificial Sequence
  Description of Artificial Sequence: Synthetic oligonucleotide
cgccgcugagacguuuggg

SEQ ID NO: 553805 - RNA, 19 nt, Artificial Sequence
  Description of Artificial Sequence: Synthetic oligonucleotide
acgcgcccaggcaggggca

SEQ ID NO: 553806 - RNA, 19 nt, Artificial Sequence
  Description of Artificial Sequence: Synthetic oligonucleotide
gggucguaguucucauauu

SEQ ID NO: 553807 - RNA, 19 nt, Artificial Sequence
  Description of Artificial Sequence: Synthetic oligonucleotide
ggcgcgccugccagcagca

SEQ ID NO: 553808 - RNA, 19 nt, Artificial Sequence
  Description of Artificial Sequence: Synthetic oligonucleotide
gcuaccggcuccggccaga

SEQ ID NO: 553809 - RNA, 19 nt, Artificial Sequence
  Description of Artificial Sequence: Synthetic oligonucleotide
gcaacacucggaggucgua

SEQ ID NO: 553810 - RNA, 19 nt, Artificial Sequence
  Description of Artificial Sequence: Synthetic oligonucleotide
cagccgaggcggggaucac

SEQ ID NO: 553811 - RNA, 19 nt, Artificial Sequence
  Description of Artificial Sequence: Synthetic oligonucleotide
ccgccgcacagcguaagga

SEQ ID NO: 553812 - RNA, 19 nt, Artificial Sequence
  Description of Artificial Sequence: Synthetic oligonucleotide
ccggauacucgggcugcuc

SEQ ID NO: 553813 - RNA, 19 nt, Artificial Sequence
  Description of Artificial Sequence: Synthetic oligonucleotide
ccccgacggccaccucucg

SEQ ID NO: 553814 - RNA, 19 nt, Artificial Sequence
  Description of Artificial Sequence: Synthetic oligonucleotide
ccgaacccacgcgcccagg

SEQ ID NO: 553815 - RNA, 19 nt, Artificial Sequence
  Description of Artificial Sequence: Synthetic oligonucleotide
ggccgguuggggagaaagu

SEQ ID NO: 553816 - RNA, 19 nt, Artificial Sequence
  Description of Artificial Sequence: Synthetic oligonucleotide
gccgaaugggugccgcguu

SEQ ID NO: 553817 - RNA, 19 nt, Artificial Sequence
  Description of Artificial Sequence: Synthetic oligonucleotide
ccgucggugcugggaucag

SEQ ID NO: 553818 - RNA, 19 nt, Artificial Sequence
  Description of Artificial Sequence: Synthetic oligonucleotide
cgggguuggaaaggauaga

SEQ ID NO: 553819 - RNA, 19 nt, Artificial Sequence
  Description of Artificial Sequence: Synthetic oligonucleotide
cgcgaccauucugguuggg

SEQ ID NO: 553820 - RNA, 19 nt, Artificial Sequence
  Description of Artificial Sequence: Synthetic oligonucleotide
ccccgugccguugcuggga

SEQ ID NO: 553821 - RNA, 19 nt, Artificial Sequence
  Description of Artificial Sequence: Synthetic oligonucleotide
gcguggccgguuggggaga

SEQ ID NO: 553822 - RNA, 19 nt, Artificial Sequence
  Description of Artificial Sequence: Synthetic oligonucleotide
ggccgcgaccauucugguu

SEQ ID NO: 553823 - RNA, 19 nt, Artificial Sequence
  Description of Artificial Sequence: Synthetic oligonucleotide
guggccgguuggggagaaa

SEQ ID NO: 553824 - RNA, 19 nt, Artificial Sequence
  Description of Artificial Sequence: Synthetic oligonucleotide
gcgaugcggggucguaguu

SEQ ID NO: 553825 - RNA, 19 nt, Artificial Sequence
  Description of Artificial Sequence: Synthetic oligonucleotide
guccgcgaugcggggucgu

SEQ ID NO: 553826 - RNA, 19 nt, Artificial Sequence
  Description of Artificial Sequence: Synthetic oligonucleotide
ccuccgccgcacagcguaa

SEQ ID NO: 553827 - RNA, 19 nt, Artificial Sequence
  Description of Artificial Sequence: Synthetic oligonucleotide
ccgcgggcacguacucaga

SEQ ID NO: 553828 - RNA, 19 nt, Artificial Sequence
  Description of Artificial Sequence: Synthetic oligonucleotide
ggcaggcgccccacaccaa

SEQ ID NO: 553829 - RNA, 19 nt, Artificial Sequence
  Description of Artificial Sequence: Synthetic oligonucleotide
ccgaaugggugccgcguuu

SEQ ID NO: 553830 - RNA, 19 nt, Artificial Sequence
  Description of Artificial Sequence: Synthetic oligonucleotide
ccgugccguugcugggaga

SEQ ID NO: 553831 - RNA, 19 nt, Artificial Sequence
  Description of Artificial Sequence: Synthetic oligonucleotide
gccggauacucgggcugcu

SEQ ID NO: 553832 - RNA, 19 nt, Artificial Sequence
  Description of Artificial Sequence: Synthetic oligonucleotide
ccgggcaaucuugcugugu

SEQ ID NO: 553833 - RNA, 19 nt, Artificial Sequence
  Description of Artificial Sequence: Synthetic oligonucleotide
ccccgcgggcacguacuca

SEQ ID NO: 553834 - RNA, 19 nt, Artificial Sequence
  Description of Artificial Sequence: Synthetic oligonucleotide
cgccugcaccgcgauagua

SEQ ID NO: 553835 - RNA, 19 nt, Artificial Sequence
  Description of Artificial Sequence: Synthetic oligonucleotide
ccgccugcaccgcgauagu

SEQ ID NO: 553836 - RNA, 19 nt, Artificial Sequence
  Description of Artificial Sequence: Synthetic oligonucleotide
cccgggucugagcccuguu

SEQ ID NO: 553837 - RNA, 19 nt, Artificial Sequence
  Description of Artificial Sequence: Synthetic oligonucleotide
gcugcgccgcugagacguu

SEQ ID NO: 553838 - RNA, 19 nt, Artificial Sequence
  Description of Artificial Sequence: Synthetic oligonucleotide
aauaacguaaaauacagug

SEQ ID NO: 553839 - RNA, 19 nt, Artificial Sequence
  Description of Artificial Sequence: Synthetic oligonucleotide
uuaauaacguaaaauacag

SEQ ID NO: 553840 - RNA, 19 nt, Artificial Sequence
  Description of Artificial Sequence: Synthetic oligonucleotide
cauggaauuacuuaaaggc

SEQ ID NO: 553841 - RNA, 19 nt, Artificial Sequence
  Description of Artificial Sequence: Synthetic oligonucleotide
aagccaaucauucacauug

SEQ ID NO: 553842 - RNA, 19 nt, Artificial Sequence
  Description of Artificial Sequence: Synthetic oligonucleotide
aacugaaucacaccguagc

SEQ ID NO: 553843 - RNA, 19 nt, Artificial Sequence
  Description of Artificial Sequence: Synthetic oligonucleotide
aacuugauaauacucagug

SEQ ID NO: 553844 - RNA, 19 nt, Artificial Sequence
  Description of Artificial Sequence: Synthetic oligonucleotide
aaucagacaaaucuagcuc

SEQ ID NO: 553845 - RNA, 19 nt, Artificial Sequence
  Description of Artificial Sequence: Synthetic oligonucleotide
aguaaugucacuaugggac

SEQ ID NO: 553846 - RNA, 19 nt, Artificial Sequence
  Description of Artificial Sequence: Synthetic oligonucleotide
cuugauaauacucaguggc

SEQ ID NO: 553847 - RNA, 19 nt, Artificial Sequence
  Description of Artificial Sequence: Synthetic oligonucleotide
aggacauugacuuuauccc

SEQ ID NO: 553848 - RNA, 19 nt, Artificial Sequence
  Description of Artificial Sequence: Synthetic oligonucleotide
uagaacauaaauccuagag

SEQ ID NO: 553849 - RNA, 19 nt, Artificial Sequence
  Description of Artificial Sequence: Synthetic oligonucleotide
aauuaagcugacuagccag

SEQ ID NO: 553850 - RNA, 19 nt, Artificial Sequence
  Description of Artificial Sequence: Synthetic oligonucleotide
caaucauucacauuguagg

SEQ ID NO: 553851 - RNA, 19 nt, Artificial Sequence
  Description of Artificial Sequence: Synthetic oligonucleotide
uaacguaaaauacagugug

SEQ ID NO: 553852 - RNA, 19 nt, Artificial Sequence
  Description of Artificial Sequence: Synthetic oligonucleotide
acauaaauccuagagaaac

SEQ ID NO: 553853 - RNA, 19 nt, Artificial Sequence
  Description of Artificial Sequence: Synthetic oligonucleotide
agaggaguucuauacagcc

SEQ ID NO: 553854 - RNA, 19 nt, Artificial Sequence
  Description of Artificial Sequence: Synthetic oligonucleotide
aaauaugaggcucuuuuca

SEQ ID NO: 553855 - RNA, 19 nt, Artificial Sequence
  Description of Artificial Sequence: Synthetic oligonucleotide
uguguuagaccucaaaaga

SEQ ID NO: 553856 - RNA, 19 nt, Artificial Sequence
  Description of Artificial Sequence: Synthetic oligonucleotide
uuaucccuaguuaagagca

SEQ ID NO: 553857 - RNA, 19 nt, Artificial Sequence
  Description of Artificial Sequence: Synthetic oligonucleotide
aauaugaggcucuuuucag

SEQ ID NO: 553858 - RNA, 19 nt, Artificial Sequence
  Description of Artificial Sequence: Synthetic oligonucleotide
auagugauuaacuuaaaau

SEQ ID NO: 553859 - RNA, 19 nt, Artificial Sequence
  Description of Artificial Sequence: Synthetic oligonucleotide
uuucuuucgaaugaaaaug

SEQ ID NO: 553860 - RNA, 19 nt, Artificial Sequence
  Description of Artificial Sequence: Synthetic oligonucleotide
gaaucagcaauuuuagcgc

SEQ ID NO: 553861 - RNA, 19 nt, Artificial Sequence
  Description of Artificial Sequence: Synthetic oligonucleotide
uguaagcauaacuugagga

SEQ ID NO: 553862 - RNA, 19 nt, Artificial Sequence
  Description of Artificial Sequence: Synthetic oligonucleotide
aaguguuucgcacagccug

SEQ ID NO: 553863 - RNA, 19 nt, Artificial Sequence
  Description of Artificial Sequence: Synthetic oligonucleotide
ugcaccauacguuuggagg

SEQ ID NO: 553864 - RNA, 19 nt, Artificial Sequence
  Description of Artificial Sequence: Synthetic oligonucleotide
aaauccuagagaaacuuuc

SEQ ID NO: 553865 - RNA, 19 nt, Artificial Sequence
  Description of Artificial Sequence: Synthetic oligonucleotide
aauaccuggaauaagaguu

SEQ ID NO: 553866 - RNA, 19 nt, Artificial Sequence
  Description of Artificial Sequence: Synthetic oligonucleotide
agagaucacaaacugcugg

SEQ ID NO: 553867 - RNA, 19 nt, Artificial Sequence
  Description of Artificial Sequence: Synthetic oligonucleotide
uggaauuacuuaaaggcca

SEQ ID NO: 553868 - RNA, 19 nt, Artificial Sequence
  Description of Artificial Sequence: Synthetic oligonucleotide
uguuuaguauaucauuagc

SEQ ID NO: 553869 - RNA, 19 nt, Artificial Sequence
  Description of Artificial Sequence: Synthetic oligonucleotide
agaacuguagaacauaaau

SEQ ID NO: 553870 - RNA, 19 nt, Artificial Sequence
  Description of Artificial Sequence: Synthetic oligonucleotide
auaucauuagcauagugau

SEQ ID NO: 553871 - RNA, 19 nt, Artificial Sequence
  Description of Artificial Sequence: Synthetic oligonucleotide
uuguugaugacuguugagg

SEQ ID NO: 553872 - RNA, 19 nt, Artificial Sequence
  Description of Artificial Sequence: Synthetic oligonucleotide
uucuuucccgguaagaccc

SEQ ID NO: 553873 - RNA, 19 nt, Artificial Sequence
  Description of Artificial Sequence: Synthetic oligonucleotide
agaacauaaauccuagaga

SEQ ID NO: 553874 - RNA, 19 nt, Artificial Sequence
  Description of Artificial Sequence: Synthetic oligonucleotide
uuaagcugcauacaggcaa

SEQ ID NO: 553875 - RNA, 19 nt, Artificial Sequence
  Description of Artificial Sequence: Synthetic oligonucleotide
uguaccaagaugcuguuuc

SEQ ID NO: 553876 - RNA, 19 nt, Artificial Sequence
  Description of Artificial Sequence: Synthetic oligonucleotide
ugauuaacuuaaaauuaug

SEQ ID NO: 553877 - RNA, 19 nt, Artificial Sequence
  Description of Artificial Sequence: Synthetic oligonucleotide
uguuagaccucaaaagaga

SEQ ID NO: 553878 - RNA, 19 nt, Artificial Sequence
  Description of Artificial Sequence: Synthetic oligonucleotide
caccaauaaauccuuaggg

SEQ ID NO: 553879 - RNA, 19 nt, Artificial Sequence
  Description of Artificial Sequence: Synthetic oligonucleotide
uuuaucccuaguuaagagc

SEQ ID NO: 553880 - RNA, 19 nt, Artificial Sequence
  Description of Artificial Sequence: Synthetic oligonucleotide
uuaaacuucucacugguuu

SEQ ID NO: 553881 - RNA, 19 nt, Artificial Sequence
  Description of Artificial Sequence: Synthetic oligonucleotide
acuuagaaaggaauaaagg

SEQ ID NO: 553882 - RNA, 19 nt, Artificial Sequence
  Description of Artificial Sequence: Synthetic oligonucleotide
ugacauguagacuaaauuu

SEQ ID NO: 553883 - RNA, 19 nt, Artificial Sequence
  Description of Artificial Sequence: Synthetic oligonucleotide
auggaauuacuuaaaggcc

SEQ ID NO: 553884 - RNA, 19 nt, Artificial Sequence
  Description of Artificial Sequence: Synthetic oligonucleotide
auaugaggcucuuuucagc

SEQ ID NO: 553885 - RNA, 19 nt, Artificial Sequence
  Description of Artificial Sequence: Synthetic oligonucleotide
ugggagucgguuaaguuag

SEQ ID NO: 553886 - RNA, 19 nt, Artificial Sequence
  Description of Artificial Sequence: Synthetic oligonucleotide
aauguaagcauaacuugag

SEQ ID NO: 553887 - RNA, 19 nt, Artificial Sequence
  Description of Artificial Sequence: Synthetic oligonucleotide
aauuuggugauuucuguuu

SEQ ID NO: 553888 - RNA, 19 nt, Artificial Sequence
  Description of Artificial Sequence: Synthetic oligonucleotide
guaugguaaaguuguauag

SEQ ID NO: 553889 - RNA, 19 nt, Artificial Sequence
  Description of Artificial Sequence: Synthetic oligonucleotide
aaauguaagcauaacuuga

SEQ ID NO: 553890 - RNA, 19 nt, Artificial Sequence
  Description of Artificial Sequence: Synthetic oligonucleotide
uucauaguucaaagcauag

SEQ ID NO: 553891 - RNA, 19 nt, Artificial Sequence
  Description of Artificial Sequence: Synthetic oligonucleotide
uuaaaacuaagugucugcc

SEQ ID NO: 553892 - RNA, 19 nt, Artificial Sequence
  Description of Artificial Sequence: Synthetic oligonucleotide
gagaucacaaacugcuggg

SEQ ID NO: 553893 - RNA, 19 nt, Artificial Sequence
  Description of Artificial Sequence: Synthetic oligonucleotide
uuacuuaaaggccagugua

SEQ ID NO: 553894 - RNA, 19 nt, Artificial Sequence
  Description of Artificial Sequence: Synthetic oligonucleotide
aaagcagcuaaguuauccu

SEQ ID NO: 553895 - RNA, 19 nt, Artificial Sequence
  Description of Artificial Sequence: Synthetic oligonucleotide
agucgguuaaguuagugcu

SEQ ID NO: 553896 - RNA, 19 nt, Artificial Sequence
  Description of Artificial Sequence: Synthetic oligonucleotide
ggaauaagcaaugauuugg

SEQ ID NO: 553897 - RNA, 19 nt, Artificial Sequence
  Description of Artificial Sequence: Synthetic oligonucleotide
guagaggaguucuauacag

SEQ ID NO: 553898 - RNA, 19 nt, Artificial Sequence
  Description of Artificial Sequence: Synthetic oligonucleotide
guaagaaggaacugaauca

SEQ ID NO: 553899 - RNA, 19 nt, Artificial Sequence
  Description of Artificial Sequence: Synthetic oligonucleotide
guuccuuaugacuuggaag

SEQ ID NO: 553900 - RNA, 19 nt, Artificial Sequence
  Description of Artificial Sequence: Synthetic oligonucleotide
gaggaauuaagcugacuag

SEQ ID NO: 553901 - RNA, 19 nt, Artificial Sequence
  Description of Artificial Sequence: Synthetic oligonucleotide
uaagauguugggaaggcuc

SEQ ID NO: 553902 - RNA, 19 nt, Artificial Sequence
  Description of Artificial Sequence: Synthetic oligonucleotide
aauaagcaaugauuuggca

SEQ ID NO: 553903 - RNA, 19 nt, Artificial Sequence
  Description of Artificial Sequence: Synthetic oligonucleotide
uaugggaccauaaaauuuu

SEQ ID NO: 553904 - RNA, 19 nt, Artificial Sequence
  Description of Artificial Sequence: Synthetic oligonucleotide
ucuuugaauaccuggaaua

SEQ ID NO: 553905 - RNA, 19 nt, Artificial Sequence
  Description of Artificial Sequence: Synthetic oligonucleotide
cauugcuucacaucuguag

SEQ ID NO: 553906 - RNA, 19 nt, Artificial Sequence
  Description of Artificial Sequence: Synthetic oligonucleotide
agaggaauuaagcugacua

SEQ ID NO: 553907 - RNA, 19 nt, Artificial Sequence
  Description of Artificial Sequence: Synthetic oligonucleotide
ugugauucagaguuuagua

SEQ ID NO: 553908 - RNA, 19 nt, Artificial Sequence
  Description of Artificial Sequence: Synthetic oligonucleotide
uuuuaguuggccuggggcu

SEQ ID NO: 553909 - RNA, 19 nt, Artificial Sequence
  Description of Artificial Sequence: Synthetic oligonucleotide
acuugauaauacucagugg

SEQ ID NO: 553910 - RNA, 19 nt, Artificial Sequence
  Description of Artificial Sequence: Synthetic oligonucleotide
cacacuaacugauaauuug

SEQ ID NO: 553911 - RNA, 19 nt, Artificial Sequence
  Description of Artificial Sequence: Synthetic oligonucleotide
uucuggacaagccagcccu

SEQ ID NO: 553912 - RNA, 19 nt, Artificial Sequence
  Description of Artificial Sequence: Synthetic oligonucleotide
uugauaauacucaguggca

SEQ ID NO: 553913 - RNA, 19 nt, Artificial Sequence
  Description of Artificial Sequence: Synthetic oligonucleotide
ucuaguaguccauugcuuc

SEQ ID NO: 553914 - RNA, 19 nt, Artificial Sequence
  Description of Artificial Sequence: Synthetic oligonucleotide
uuaaucgagaugucacugc

SEQ ID NO: 553915 - RNA, 19 nt, Artificial Sequence
  Description of Artificial Sequence: Synthetic oligonucleotide
auaauuuggugauuucugu

SEQ ID NO: 553916 - RNA, 19 nt, Artificial Sequence
  Description of Artificial Sequence: Synthetic oligonucleotide
uuaguaaguaugguaaagu

SEQ ID NO: 553917 - RNA, 19 nt, Artificial Sequence
  Description of Artificial Sequence: Synthetic oligonucleotide
aaauccuuagggugaugag

SEQ ID NO: 553918 - RNA, 19 nt, Artificial Sequence
  Description of Artificial Sequence: Synthetic oligonucleotide
agcaucaagccucuuucac

SEQ ID NO: 553919 - RNA, 19 nt, Artificial Sequence
  Description of Artificial Sequence: Synthetic oligonucleotide
ucuuguugaugacuguuga

SEQ ID NO: 553920 - RNA, 19 nt, Artificial Sequence
  Description of Artificial Sequence: Synthetic oligonucleotide
uuucuuucccgguaagacc

SEQ ID NO: 553921 - RNA, 19 nt, Artificial Sequence
  Description of Artificial Sequence: Synthetic oligonucleotide
ugauaauuuggugauuucu

SEQ ID NO: 553922 - RNA, 19 nt, Artificial Sequence
  Description of Artificial Sequence: Synthetic oligonucleotide
auucuaguaguccauugcu

SEQ ID NO: 553923 - RNA, 19 nt, Artificial Sequence
  Description of Artificial Sequence: Synthetic oligonucleotide
uaaucgagaugucacugca

SEQ ID NO: 553924 - RNA, 19 nt, Artificial Sequence
  Description of Artificial Sequence: Synthetic oligonucleotide
gacacuaacacacuagaua

SEQ ID NO: 553925 - RNA, 19 nt, Artificial Sequence
  Description of Artificial Sequence: Synthetic oligonucleotide
auguaagcauaacuugagg

SEQ ID NO: 553926 - RNA, 19 nt, Artificial Sequence
  Description of Artificial Sequence: Synthetic oligonucleotide
cuguuaaucgagaugucac

SEQ ID NO: 553927 - RNA, 19 nt, Artificial Sequence
  Description of Artificial Sequence: Synthetic oligonucleotide
aaccuaagauguugggaag

SEQ ID NO: 553928 - RNA, 19 nt, Artificial Sequence
  Description of Artificial Sequence: Synthetic oligonucleotide
cuguagaggaguucuauac

SEQ ID NO: 553929 - RNA, 19 nt, Artificial Sequence
  Description of Artificial Sequence: Synthetic oligonucleotide
uaaauccuuagggugauga

SEQ ID NO: 553930 - RNA, 19 nt, Artificial Sequence
  Description of Artificial Sequence: Synthetic oligonucleotide
aguaugguaaaguuguaua

SEQ ID NO: 553931 - RNA, 19 nt, Artificial Sequence
  Description of Artificial Sequence: Synthetic oligonucleotide
ugucuuuaucaacuuuaag

SEQ ID NO: 553932 - RNA, 19 nt, Artificial Sequence
  Description of Artificial Sequence: Synthetic oligonucleotide
uaacugauaauuuggugau

SEQ ID NO: 553933 - RNA, 19 nt, Artificial Sequence
  Description of Artificial Sequence: Synthetic oligonucleotide
acacuaacugauaauuugg

SEQ ID NO: 553934 - RNA, 19 nt, Artificial Sequence
  Description of Artificial Sequence: Synthetic oligonucleotide
uggauacuuagaaaggaau

SEQ ID NO: 553935 - RNA, 19 nt, Artificial Sequence
  Description of Artificial Sequence: Synthetic oligonucleotide
ugacuuuaucccuaguuaa

SEQ ID NO: 553936 - RNA, 19 nt, Artificial Sequence
  Description of Artificial Sequence: Synthetic oligonucleotide
cuuuaucaacuuuaagcug

SEQ ID NO: 553937 - RNA, 19 nt, Artificial Sequence
  Description of Artificial Sequence: Synthetic oligonucleotide
uuucgaaguagccacuuau

SEQ ID NO: 553938 - RNA, 19 nt, Artificial Sequence
  Description of Artificial Sequence: Synthetic oligonucleotide
aguaaguaugguaaaguug

SEQ ID NO: 553939 - RNA, 19 nt, Artificial Sequence
  Description of Artificial Sequence: Synthetic oligonucleotide
uuuagacacuaacacacua

SEQ ID NO: 553940 - RNA, 19 nt, Artificial Sequence
  Description of Artificial Sequence: Synthetic oligonucleotide
gagucgguuaaguuagugc

SEQ ID NO: 553941 - RNA, 19 nt, Artificial Sequence
  Description of Artificial Sequence: Synthetic oligonucleotide
uaugguaaaguuguauagu

SEQ ID NO: 553942 - RNA, 19 nt, Artificial Sequence
  Description of Artificial Sequence: Synthetic oligonucleotide
ugaagugacaggacauuga

SEQ ID NO: 553943 - RNA, 19 nt, Artificial Sequence
  Description of Artificial Sequence: Synthetic oligonucleotide
uuugaauaccuggaauaag

SEQ ID NO: 553944 - RNA, 19 nt, Artificial Sequence
  Description of Artificial Sequence: Synthetic oligonucleotide
uaagugucugccauggaau

SEQ ID NO: 553945 - RNA, 19 nt, Artificial Sequence
  Description of Artificial Sequence: Synthetic oligonucleotide
acuagauauagaaauauuu

SEQ ID NO: 553946 - RNA, 19 nt, Artificial Sequence
  Description of Artificial Sequence: Synthetic oligonucleotide
uguuaaucgagaugucacu

SEQ ID NO: 553947 - RNA, 19 nt, Artificial Sequence
  Description of Artificial Sequence: Synthetic oligonucleotide
uucuguaagaaggaacuga

SEQ ID NO: 553948 - RNA, 19 nt, Artificial Sequence
  Description of Artificial Sequence: Synthetic oligonucleotide
ucgcacagccuguuaaucg

SEQ ID NO: 553949 - RNA, 19 nt, Artificial Sequence
  Description of Artificial Sequence: Synthetic oligonucleotide
uaugacuuggaaggaauca

SEQ ID NO: 553950 - RNA, 19 nt, Artificial Sequence
  Description of Artificial Sequence: Synthetic oligonucleotide
cacaccguagcaucaagcc

SEQ ID NO: 553951 - RNA, 19 nt, Artificial Sequence
  Description of Artificial Sequence: Synthetic oligonucleotide
uugaucaaggagcucuaca

SEQ ID NO: 553952 - RNA, 19 nt, Artificial Sequence
  Description of Artificial Sequence: Synthetic oligonucleotide
agccuguuaaucgagaugu

SEQ ID NO: 553953 - RNA, 19 nt, Artificial Sequence
  Description of Artificial Sequence: Synthetic oligonucleotide
uuaaguuagugcuucugua

SEQ ID NO: 553954 - RNA, 19 nt, Artificial Sequence
  Description of Artificial Sequence: Synthetic oligonucleotide
ugccuuucuguuuuaguug

SEQ ID NO: 553955 - RNA, 19 nt, Artificial Sequence
  Description of Artificial Sequence: Synthetic oligonucleotide
cacuggauacuuagaaagg

SEQ ID NO: 553956 - RNA, 19 nt, Artificial Sequence
  Description of Artificial Sequence: Synthetic oligonucleotide
uccucuacuuuacaugggu

SEQ ID NO: 553957 - RNA, 19 nt, Artificial Sequence
  Description of Artificial Sequence: Synthetic oligonucleotide
caaccaaucagacaaaucu

SEQ ID NO: 553958 - RNA, 19 nt, Artificial Sequence
  Description of Artificial Sequence: Synthetic oligonucleotide
cacaaaguucccugcaacc

SEQ ID NO: 553959 - RNA, 19 nt, Artificial Sequence
  Description of Artificial Sequence: Synthetic oligonucleotide
ggagucaccaaccaaucag

SEQ ID NO: 553960 - RNA, 19 nt, Artificial Sequence
  Description of Artificial Sequence: Synthetic oligonucleotide
uaguaaugucacuauggga

SEQ ID NO: 553961 - RNA, 19 nt, Artificial Sequence
  Description of Artificial Sequence: Synthetic oligonucleotide
guauaguaaugucacuaug

SEQ ID NO: 553962 - RNA, 19 nt, Artificial Sequence
  Description of Artificial Sequence: Synthetic oligonucleotide
aguucuauacagccauuug

SEQ ID NO: 553963 - RNA, 19 nt, Artificial Sequence
  Description of Artificial Sequence: Synthetic oligonucleotide
gaauuaagcugacuagcca

SEQ ID NO: 553964 - RNA, 19 nt, Artificial Sequence
  Description of Artificial Sequence: Synthetic oligonucleotide
ucggcaaaacuugugcagg

SEQ ID NO: 553965 - RNA, 19 nt, Artificial Sequence
  Description of Artificial Sequence: Synthetic oligonucleotide
cuuuacauggguccugaug

SEQ ID NO: 553966 - RNA, 19 nt, Artificial Sequence
  Description of Artificial Sequence: Synthetic oligonucleotide
uugcuucacaucuguagag

SEQ ID NO: 553967 - RNA, 19 nt, Artificial Sequence
  Description of Artificial Sequence: Synthetic oligonucleotide
uuaucaacuuuaagcugca

SEQ ID NO: 553968 - RNA, 19 nt, Artificial Sequence
  Description of Artificial Sequence: Synthetic oligonucleotide
uccauugcuucacaucugu

SEQ ID NO: 553969 - RNA, 19 nt, Artificial Sequence
  Description of Artificial Sequence: Synthetic oligonucleotide
auaacguaaaauacagugu

SEQ ID NO: 553970 - RNA, 19 nt, Artificial Sequence
  Description of Artificial Sequence: Synthetic oligonucleotide
uagaggaguucuauacagc

SEQ ID NO: 553971 - RNA, 19 nt, Artificial Sequence
  Description of Artificial Sequence: Synthetic oligonucleotide
uaguaaguaugguaaaguu

SEQ ID NO: 553972 - RNA, 19 nt, Artificial Sequence
  Description of Artificial Sequence: Synthetic oligonucleotide
aaaacuugugcagggcuca

SEQ ID NO: 553973 - RNA, 19 nt, Artificial Sequence
  Description of Artificial Sequence: Synthetic oligonucleotide
accaaucagacaaaucuag

SEQ ID NO: 553974 - RNA, 19 nt, Artificial Sequence
  Description of Artificial Sequence: Synthetic oligonucleotide
guauaucauuagcauagug

SEQ ID NO: 553975 - RNA, 19 nt, Artificial Sequence
  Description of Artificial Sequence: Synthetic oligonucleotide
augacauguagacuaaauu

SEQ ID NO: 553976 - RNA, 19 nt, Artificial Sequence
  Description of Artificial Sequence: Synthetic oligonucleotide
caugcgggcccaauaagcc

SEQ ID NO: 553977 - RNA, 19 nt, Artificial Sequence
  Description of Artificial Sequence: Synthetic oligonucleotide
gcuuaauuucuuucgaaug

SEQ ID NO: 553978 - RNA, 19 nt, Artificial Sequence
  Description of Artificial Sequence: Synthetic oligonucleotide
aguacuaggcacuuccuua

SEQ ID NO: 553979 - RNA, 19 nt, Artificial Sequence
  Description of Artificial Sequence: Synthetic oligonucleotide
guguuagaccucaaaagag

SEQ ID NO: 553980 - RNA, 19 nt, Artificial Sequence
  Description of Artificial Sequence: Synthetic oligonucleotide
uuacacaggaugcaccaau

SEQ ID NO: 553981 - RNA, 19 nt, Artificial Sequence
  Description of Artificial Sequence: Synthetic oligonucleotide
aacuaagcggcagaggaau

SEQ ID NO: 553982 - RNA, 19 nt, Artificial Sequence
  Description of Artificial Sequence: Synthetic oligonucleotide
ugggaccauaaaauuuucc

SEQ ID NO: 553983 - RNA, 19 nt, Artificial Sequence
  Description of Artificial Sequence: Synthetic oligonucleotide
guuaaucgagaugucacug

SEQ ID NO: 553984 - RNA, 19 nt, Artificial Sequence
  Description of Artificial Sequence: Synthetic oligonucleotide
uuguagggcucuuugaaua

SEQ ID NO: 553985 - RNA, 19 nt, Artificial Sequence
  Description of Artificial Sequence: Synthetic oligonucleotide
gacuuuaucccuaguuaag

SEQ ID NO: 553986 - RNA, 19 nt, Artificial Sequence
  Description of Artificial Sequence: Synthetic oligonucleotide
auuuuagcgcuuccuucuc

SEQ ID NO: 553987 - RNA, 19 nt, Artificial Sequence
  Description of Artificial Sequence: Synthetic oligonucleotide
gaguuuaguaaguauggua

SEQ ID NO: 553988 - RNA, 19 nt, Artificial Sequence
  Description of Artificial Sequence: Synthetic oligonucleotide
uuaugacuuggaaggaauc

SEQ ID NO: 553989 - RNA, 19 nt, Artificial Sequence
  Description of Artificial Sequence: Synthetic oligonucleotide
uacguuuggagguuccgga

SEQ ID NO: 553990 - RNA, 19 nt, Artificial Sequence
  Description of Artificial Sequence: Synthetic oligonucleotide
acugaaucacaccguagca

SEQ ID NO: 553991 - RNA, 19 nt, Artificial Sequence
  Description of Artificial Sequence: Synthetic oligonucleotide
cuuguugaugacuguugag

SEQ ID NO: 553992 - RNA, 19 nt, Artificial Sequence
  Description of Artificial Sequence: Synthetic oligonucleotide
aauaaauccuuagggugau

SEQ ID NO: 553993 - RNA, 19 nt, Artificial Sequence
  Description of Artificial Sequence: Synthetic oligonucleotide
caaccuaagauguugggaa

SEQ ID NO: 553994 - RNA, 19 nt, Artificial Sequence
  Description of Artificial Sequence: Synthetic oligonucleotide
aaguaugguaaaguuguau

SEQ ID NO: 553995 - RNA, 19 nt, Artificial Sequence
  Description of Artificial Sequence: Synthetic oligonucleotide
gucggcaaaacuugugcag

SEQ ID NO: 553996 - RNA, 19 nt, Artificial Sequence
  Description of Artificial Sequence: Synthetic oligonucleotide
gcuacaauggcuguuacac

SEQ ID NO: 553997 - RNA, 19 nt, Artificial Sequence
  Description of Artificial Sequence: Synthetic oligonucleotide
aagcauaacuugaggaugu

SEQ ID NO: 553998 - RNA, 19 nt, Artificial Sequence
  Description of Artificial Sequence: Synthetic oligonucleotide
uuuagcgcuuccuucucac

SEQ ID NO: 553999 - RNA, 19 nt, Artificial Sequence
  Description of Artificial Sequence: Synthetic oligonucleotide
ucauaguucaaagcauaga

SEQ ID NO: 554000 - RNA, 19 nt, Artificial Sequence
  Description of Artificial Sequence: Synthetic oligonucleotide
ucuacuuuacauggguccu

SEQ ID NO: 554001 - RNA, 19 nt, Artificial Sequence
  Description of Artificial Sequence: Synthetic oligonucleotide
ucuaguaugggagucgguu

SEQ ID NO: 554002 - RNA, 19 nt, Artificial Sequence
  Description of Artificial Sequence: Synthetic oligonucleotide
gcuguuucuaguaugggag

SEQ ID NO: 554003 - RNA, 19 nt, Artificial Sequence
  Description of Artificial Sequence: Synthetic oligonucleotide
uggggcucuuuaaagacaa

SEQ ID NO: 554004 - RNA, 19 nt, Artificial Sequence
  Description of Artificial Sequence: Synthetic oligonucleotide
cagucggcaaaacuugugc

SEQ ID NO: 554005 - RNA, 19 nt, Artificial Sequence
  Description of Artificial Sequence: Synthetic oligonucleotide
uaguaugggagucgguuaa

SEQ ID NO: 554006 - RNA, 19 nt, Artificial Sequence
  Description of Artificial Sequence: Synthetic oligonucleotide
aauguaacuaauagacauu

SEQ ID NO: 554007 - RNA, 19 nt, Artificial Sequence
  Description of Artificial Sequence: Synthetic oligonucleotide
uucgaaguagccacuuauc

SEQ ID NO: 554008 - RNA, 19 nt, Artificial Sequence
  Description of Artificial Sequence: Synthetic oligonucleotide
ggccauagggccuuuaagc

SEQ ID NO: 554009 - RNA, 19 nt, Artificial Sequence
  Description of Artificial Sequence: Synthetic oligonucleotide
ucccugcaaccuaagaugu

SEQ ID NO: 554010 - RNA, 19 nt, Artificial Sequence
  Description of Artificial Sequence: Synthetic oligonucleotide
uacccugacaguugguaca

SEQ ID NO: 554011 - RNA, 19 nt, Artificial Sequence
  Description of Artificial Sequence: Synthetic oligonucleotide
augggagucgguuaaguua

SEQ ID NO: 554012 - RNA, 19 nt, Artificial Sequence
  Description of Artificial Sequence: Synthetic oligonucleotide
ugauuuggcaagucacagu

SEQ ID NO: 554013 - RNA, 19 nt, Artificial Sequence
  Description of Artificial Sequence: Synthetic oligonucleotide
aacguaaaauacagugugu

SEQ ID NO: 554014 - RNA, 19 nt, Artificial Sequence
  Description of Artificial Sequence: Synthetic oligonucleotide
uggccauagggccuuuaag

SEQ ID NO: 554015 - RNA, 19 nt, Artificial Sequence
  Description of Artificial Sequence: Synthetic oligonucleotide
gccuuucuguuuuaguugg

SEQ ID NO: 554016 - RNA, 19 nt, Artificial Sequence
  Description of Artificial Sequence: Synthetic oligonucleotide
uccauuuacacaggaugca

SEQ ID NO: 554017 - RNA, 19 nt, Artificial Sequence
  Description of Artificial Sequence: Synthetic oligonucleotide
auguaacuaauagacauuu

SEQ ID NO: 554018 - RNA, 19 nt, Artificial Sequence
  Description of Artificial Sequence: Synthetic oligonucleotide
ucuucgaccuuuuccacuu

SEQ ID NO: 554019 - RNA, 19 nt, Artificial Sequence
  Description of Artificial Sequence: Synthetic oligonucleotide
ucccuaguuaagagcacca

SEQ ID NO: 554020 - RNA, 19 nt, Artificial Sequence
  Description of Artificial Sequence: Synthetic oligonucleotide
aaagcauagaaagcagcua

SEQ ID NO: 554021 - RNA, 19 nt, Artificial Sequence
  Description of Artificial Sequence: Synthetic oligonucleotide
aguccuuggaauaagcaau

SEQ ID NO: 554022 - RNA, 19 nt, Artificial Sequence
  Description of Artificial Sequence: Synthetic oligonucleotide
auacguuuggagguuccgg

SEQ ID NO: 554023 - RNA, 19 nt, Artificial Sequence
  Description of Artificial Sequence: Synthetic oligonucleotide
agucggcaaaacuugugca

SEQ ID NO: 554024 - RNA, 19 nt, Artificial Sequence
  Description of Artificial Sequence: Synthetic oligonucleotide
ccacaaguaauuccaauag

SEQ ID NO: 554025 - RNA, 19 nt, Artificial Sequence
  Description of Artificial Sequence: Synthetic oligonucleotide
gugauucagaguuuaguaa

SEQ ID NO: 554026 - RNA, 19 nt, Artificial Sequence
  Description of Artificial Sequence: Synthetic oligonucleotide
uguaacuaauagacauuua

SEQ ID NO: 554027 - RNA, 19 nt, Artificial Sequence
  Description of Artificial Sequence: Synthetic oligonucleotide
cacugcaccauacguuugg

SEQ ID NO: 554028 - RNA, 19 nt, Artificial Sequence
  Description of Artificial Sequence: Synthetic oligonucleotide
aaggcacaaguguuucgca

SEQ ID NO: 554029 - RNA, 19 nt, Artificial Sequence
  Description of Artificial Sequence: Synthetic oligonucleotide
ugcaugcgggcccaauaag

SEQ ID NO: 554030 - RNA, 19 nt, Artificial Sequence
  Description of Artificial Sequence: Synthetic oligonucleotide
caaaucuagcucaucuuga

SEQ ID NO: 554031 - RNA, 19 nt, Artificial Sequence
  Description of Artificial Sequence: Synthetic oligonucleotide
gggacauaagaaaauauga

SEQ ID NO: 554032 - RNA, 19 nt, Artificial Sequence
  Description of Artificial Sequence: Synthetic oligonucleotide
aggcuugacaagccaauca

SEQ ID NO: 554033 - RNA, 19 nt, Artificial Sequence
  Description of Artificial Sequence: Synthetic oligonucleotide
cauagugauuaacuuaaaa

SEQ ID NO: 554034 - RNA, 19 nt, Artificial Sequence
  Description of Artificial Sequence: Synthetic oligonucleotide
acugcccuaaaaguggucu

SEQ ID NO: 554035 - RNA, 19 nt, Artificial Sequence
  Description of Artificial Sequence: Synthetic oligonucleotide
ucuguagaggaguucuaua

SEQ ID NO: 554036 - RNA, 19 nt, Artificial Sequence
  Description of Artificial Sequence: Synthetic oligonucleotide
uccuuagggugaugagugg

SEQ ID NO: 554037 - RNA, 19 nt, Artificial Sequence
  Description of Artificial Sequence: Synthetic oligonucleotide
uuuaaacuucucacugguu

SEQ ID NO: 554038 - RNA, 19 nt, Artificial Sequence
  Description of Artificial Sequence: Synthetic oligonucleotide
ggcccaauaagccauucug

SEQ ID NO: 554039 - RNA, 19 nt, Artificial Sequence
  Description of Artificial Sequence: Synthetic oligonucleotide
uugcaugcgggcccaauaa

SEQ ID NO: 554040 - RNA, 19 nt, Artificial Sequence
  Description of Artificial Sequence: Synthetic oligonucleotide
cuaagugucugccauggaa

SEQ ID NO: 554041 - RNA, 19 nt, Artificial Sequence
  Description of Artificial Sequence: Synthetic oligonucleotide
cuacauuccuaacacaucu

SEQ ID NO: 554042 - RNA, 19 nt, Artificial Sequence
  Description of Artificial Sequence: Synthetic oligonucleotide
ccuaguuaagagcaccagg

SEQ ID NO: 554043 - RNA, 19 nt, Artificial Sequence
  Description of Artificial Sequence: Synthetic oligonucleotide
uucccgguaagacccaguc

SEQ ID NO: 554044 - RNA, 19 nt, Artificial Sequence
  Description of Artificial Sequence: Synthetic oligonucleotide
ucgguuaaguuagugcuuc

SEQ ID NO: 554045 - RNA, 19 nt, Artificial Sequence
  Description of Artificial Sequence: Synthetic oligonucleotide
uuugcaugcgggcccaaua

SEQ ID NO: 554046 - RNA, 19 nt, Artificial Sequence
  Description of Artificial Sequence: Synthetic oligonucleotide
guaagcauaacuugaggau

SEQ ID NO: 554047 - RNA, 19 nt, Artificial Sequence
  Description of Artificial Sequence: Synthetic oligonucleotide
caaucagacaaaucuagcu

SEQ ID NO: 554048 - RNA, 19 nt, Artificial Sequence
  Description of Artificial Sequence: Synthetic oligonucleotide
uaucauuagcauagugauu

SEQ ID NO: 554049 - RNA, 19 nt, Artificial Sequence
  Description of Artificial Sequence: Synthetic oligonucleotide
guuaaguuagugcuucugu

SEQ ID NO: 554050 - RNA, 19 nt, Artificial Sequence
  Description of Artificial Sequence: Synthetic oligonucleotide
cacuuaucuucuccagagg

SEQ ID NO: 554051 - RNA, 19 nt, Artificial Sequence
  Description of Artificial Sequence: Synthetic oligonucleotide
cuugugcagggcucauugg

SEQ ID NO: 554052 - RNA, 19 nt, Artificial Sequence
  Description of Artificial Sequence: Synthetic oligonucleotide
cuucauaguucaaagcaua

SEQ ID NO: 554053 - RNA, 19 nt, Artificial Sequence
  Description of Artificial Sequence: Synthetic oligonucleotide
ugcuacaauggcuguuaca

SEQ ID NO: 554054 - RNA, 19 nt, Artificial Sequence
  Description of Artificial Sequence: Synthetic oligonucleotide
caaagcauagaaagcagcu

SEQ ID NO: 554055 - RNA, 19 nt, Artificial Sequence
  Description of Artificial Sequence: Synthetic oligonucleotide
acaccguagcaucaagccu

SEQ ID NO: 554056 - RNA, 19 nt, Artificial Sequence
  Description of Artificial Sequence: Synthetic oligonucleotide
cauaacuugaggaugucau

SEQ ID NO: 554057 - RNA, 19 nt, Artificial Sequence
  Description of Artificial Sequence: Synthetic oligonucleotide
acguaaaauacaguguguu

SEQ ID NO: 554058 - RNA, 19 nt, Artificial Sequence
  Description of Artificial Sequence: Synthetic oligonucleotide
cugaugguucuggacaagc

SEQ ID NO: 554059 - RNA, 19 nt, Artificial Sequence
  Description of Artificial Sequence: Synthetic oligonucleotide
ucgagaugucacugcacca

SEQ ID NO: 554060 - RNA, 19 nt, Artificial Sequence
  Description of Artificial Sequence: Synthetic oligonucleotide
gguaaaguuguauaguaau

SEQ ID NO: 554061 - RNA, 19 nt, Artificial Sequence
  Description of Artificial Sequence: Synthetic oligonucleotide
cugauaauuuggugauuuc

SEQ ID NO: 554062 - RNA, 19 nt, Artificial Sequence
  Description of Artificial Sequence: Synthetic oligonucleotide
ugcccuaaaaguggucuug

SEQ ID NO: 554063 - RNA, 19 nt, Artificial Sequence
  Description of Artificial Sequence: Synthetic oligonucleotide
agcaaugauuuggcaaguc

SEQ ID NO: 554064 - RNA, 19 nt, Artificial Sequence
  Description of Artificial Sequence: Synthetic oligonucleotide
agaaaccacaaaguucccu

SEQ ID NO: 554065 - RNA, 19 nt, Artificial Sequence
  Description of Artificial Sequence: Synthetic oligonucleotide
uccugaugguucuggacaa

SEQ ID NO: 554066 - RNA, 19 nt, Artificial Sequence
  Description of Artificial Sequence: Synthetic oligonucleotide
acacagucggcaaaacuug

SEQ ID NO: 554067 - RNA, 19 nt, Artificial Sequence
  Description of Artificial Sequence: Synthetic oligonucleotide
agcauagaaagcagcuaag

SEQ ID NO: 554068 - RNA, 19 nt, Artificial Sequence
  Description of Artificial Sequence: Synthetic oligonucleotide
cauacguuuggagguuccg

SEQ ID NO: 554069 - RNA, 19 nt, Artificial Sequence
  Description of Artificial Sequence: Synthetic oligonucleotide
gccauggaauuacuuaaag

SEQ ID NO: 554070 - RNA, 19 nt, Artificial Sequence
  Description of Artificial Sequence: Synthetic oligonucleotide
ggaauuacuuaaaggccag

SEQ ID NO: 554071 - RNA, 19 nt, Artificial Sequence
  Description of Artificial Sequence: Synthetic oligonucleotide
gacauguagacuaaauuuu

SEQ ID NO: 554072 - RNA, 19 nt, Artificial Sequence
  Description of Artificial Sequence: Synthetic oligonucleotide
uaaguaugguaaaguugua

SEQ ID NO: 554073 - RNA, 19 nt, Artificial Sequence
  Description of Artificial Sequence: Synthetic oligonucleotide
ggcaacaacuacaggaggc

SEQ ID NO: 554074 - RNA, 19 nt, Artificial Sequence
  Description of Artificial Sequence: Synthetic oligonucleotide
aggcuuaauuucuuucgaa

SEQ ID NO: 554075 - RNA, 19 nt, Artificial Sequence
  Description of Artificial Sequence: Synthetic oligonucleotide
acaggacauugacuuuauc

SEQ ID NO: 554076 - RNA, 19 nt, Artificial Sequence
  Description of Artificial Sequence: Synthetic oligonucleotide
uuacauggguccugauggu

SEQ ID NO: 554077 - RNA, 19 nt, Artificial Sequence
  Description of Artificial Sequence: Synthetic oligonucleotide
guuucgcacagccuguuaa

SEQ ID NO: 554078 - RNA, 19 nt, Artificial Sequence
  Description of Artificial Sequence: Synthetic oligonucleotide
ggugaauuaagaaauacuu

SEQ ID NO: 554079 - RNA, 19 nt, Artificial Sequence
  Description of Artificial Sequence: Synthetic oligonucleotide
guagaacauaaauccuaga

SEQ ID NO: 554080 - RNA, 19 nt, Artificial Sequence
  Description of Artificial Sequence: Synthetic oligonucleotide
caauagcauaggcaguuca

SEQ ID NO: 554081 - RNA, 19 nt, Artificial Sequence
  Description of Artificial Sequence: Synthetic oligonucleotide
gucacuaugggaccauaaa

SEQ ID NO: 554082 - RNA, 19 nt, Artificial Sequence
  Description of Artificial Sequence: Synthetic oligonucleotide
gagucaccaaccaaucaga

SEQ ID NO: 554083 - RNA, 19 nt, Artificial Sequence
  Description of Artificial Sequence: Synthetic oligonucleotide
aggagucaggcuugacaag

SEQ ID NO: 554084 - RNA, 19 nt, Artificial Sequence
  Description of Artificial Sequence: Synthetic oligonucleotide
auuuagacacuaacacacu

SEQ ID NO: 554085 - RNA, 19 nt, Artificial Sequence
  Description of Artificial Sequence: Synthetic oligonucleotide
aaacuaagcggcagaggaa

SEQ ID NO: 554086 - RNA, 19 nt, Artificial Sequence
  Description of Artificial Sequence: Synthetic oligonucleotide
uaagcggcagaggaauuaa

SEQ ID NO: 554087 - RNA, 19 nt, Artificial Sequence
  Description of Artificial Sequence: Synthetic oligonucleotide
cauaaauccuagagaaacu

SEQ ID NO: 554088 - RNA, 19 nt, Artificial Sequence
  Description of Artificial Sequence: Synthetic oligonucleotide
uuagcgcuuccuucucaca

SEQ ID NO: 554089 - RNA, 19 nt, Artificial Sequence
  Description of Artificial Sequence: Synthetic oligonucleotide
caucuucgaccuuuuccac

SEQ ID NO: 554090 - RNA, 19 nt, Artificial Sequence
  Description of Artificial Sequence: Synthetic oligonucleotide
guccuuggaauaagcaaug

SEQ ID NO: 554091 - RNA, 19 nt, Artificial Sequence
  Description of Artificial Sequence: Synthetic oligonucleotide
uccuuggaauaagcaauga

SEQ ID NO: 554092 - RNA, 19 nt, Artificial Sequence
  Description of Artificial Sequence: Synthetic oligonucleotide
cugcaccauacguuuggag

SEQ ID NO: 554093 - RNA, 19 nt, Artificial Sequence
  Description of Artificial Sequence: Synthetic oligonucleotide
uccuuaugacuuggaagga

SEQ ID NO: 554094 - RNA, 19 nt, Artificial Sequence
  Description of Artificial Sequence: Synthetic oligonucleotide
cagccuguuaaucgagaug

SEQ ID NO: 554095 - RNA, 19 nt, Artificial Sequence
  Description of Artificial Sequence: Synthetic oligonucleotide
cuuaugacuuggaaggaau

SEQ ID NO: 554096 - RNA, 19 nt, Artificial Sequence
  Description of Artificial Sequence: Synthetic oligonucleotide
agcgcuuccuucucacagu

SEQ ID NO: 554097 - RNA, 19 nt, Artificial Sequence
  Description of Artificial Sequence: Synthetic oligonucleotide
uuuuacccaccaacuugau

SEQ ID NO: 554098 - RNA, 19 nt, Artificial Sequence
  Description of Artificial Sequence: Synthetic oligonucleotide
uucuaguaugggagucggu

SEQ ID NO: 554099 - RNA, 19 nt, Artificial Sequence
  Description of Artificial Sequence: Synthetic oligonucleotide
accauacguuuggagguuc

SEQ ID NO: 554100 - RNA, 19 nt, Artificial Sequence
  Description of Artificial Sequence: Synthetic oligonucleotide
gguuaaguuagugcuucug

SEQ ID NO: 554101 - RNA, 19 nt, Artificial Sequence
  Description of Artificial Sequence: Synthetic oligonucleotide
uuucccgguaagacccagu

SEQ ID NO: 554102 - RNA, 19 nt, Artificial Sequence
  Description of Artificial Sequence: Synthetic oligonucleotide
ccuagagaaacuuucuaaa

SEQ ID NO: 554103 - RNA, 19 nt, Artificial Sequence
  Description of Artificial Sequence: Synthetic oligonucleotide
gcacaaguguuucgcacag

SEQ ID NO: 554104 - RNA, 19 nt, Artificial Sequence
  Description of Artificial Sequence: Synthetic oligonucleotide
aguaugggagucgguuaag

SEQ ID NO: 554105 - RNA, 19 nt, Artificial Sequence
  Description of Artificial Sequence: Synthetic oligonucleotide
aguugcaauguaacuaaua

SEQ ID NO: 554106 - RNA, 19 nt, Artificial Sequence
  Description of Artificial Sequence: Synthetic oligonucleotide
gccauagggccuuuaagca

SEQ ID NO: 554107 - RNA, 19 nt, Artificial Sequence
  Description of Artificial Sequence: Synthetic oligonucleotide
guugggaaggcuccuuaaa

SEQ ID NO: 554108 - RNA, 19 nt, Artificial Sequence
  Description of Artificial Sequence: Synthetic oligonucleotide
ucuuucgaaguagccacuu

SEQ ID NO: 554109 - RNA, 19 nt, Artificial Sequence
  Description of Artificial Sequence: Synthetic oligonucleotide
cuaguaugggagucgguua

SEQ ID NO: 554110 - RNA, 19 nt, Artificial Sequence
  Description of Artificial Sequence: Synthetic oligonucleotide
aagcggcagaggaauuaag

SEQ ID NO: 554111 - RNA, 19 nt, Artificial Sequence
  Description of Artificial Sequence: Synthetic oligonucleotide
cuaugggaccauaaaauuu

SEQ ID NO: 554112 - RNA, 19 nt, Artificial Sequence
  Description of Artificial Sequence: Synthetic oligonucleotide
gcucauuggcuuugcauac

SEQ ID NO: 554113 - RNA, 19 nt, Artificial Sequence
  Description of Artificial Sequence: Synthetic oligonucleotide
gacccagucagcaguauua

SEQ ID NO: 554114 - RNA, 19 nt, Artificial Sequence
  Description of Artificial Sequence: Synthetic oligonucleotide
uguuucgcacagccuguua

SEQ ID NO: 554115 - RNA, 19 nt, Artificial Sequence
  Description of Artificial Sequence: Synthetic oligonucleotide
cacuuucuuucccgguaag

SEQ ID NO: 554116 - RNA, 19 nt, Artificial Sequence
  Description of Artificial Sequence: Synthetic oligonucleotide
cuacuuuacauggguccug

SEQ ID NO: 554117 - RNA, 19 nt, Artificial Sequence
  Description of Artificial Sequence: Synthetic oligonucleotide
cauagaaagcagcuaaguu

SEQ ID NO: 554118 - RNA, 19 nt, Artificial Sequence
  Description of Artificial Sequence: Synthetic oligonucleotide
acagucggcaaaacuugug

SEQ ID NO: 554119 - RNA, 19 nt, Artificial Sequence
  Description of Artificial Sequence: Synthetic oligonucleotide
aguguaccaagaugcuguu

SEQ ID NO: 554120 - RNA, 19 nt, Artificial Sequence
  Description of Artificial Sequence: Synthetic oligonucleotide
cacuaacugauaauuuggu

SEQ ID NO: 554121 - RNA, 19 nt, Artificial Sequence
  Description of Artificial Sequence: Synthetic oligonucleotide
acuaagugucugccaugga

SEQ ID NO: 554122 - RNA, 19 nt, Artificial Sequence
  Description of Artificial Sequence: Synthetic oligonucleotide
acguuuggagguuccggau

SEQ ID NO: 554123 - RNA, 19 nt, Artificial Sequence
  Description of Artificial Sequence: Synthetic oligonucleotide
uagggugaugaguggucaa

SEQ ID NO: 554124 - RNA, 19 nt, Artificial Sequence
  Description of Artificial Sequence: Synthetic oligonucleotide
agccuccauuuacacagga

SEQ ID NO: 554125 - RNA, 19 nt, Artificial Sequence
  Description of Artificial Sequence: Synthetic oligonucleotide
cuuggggagucaccaacca

SEQ ID NO: 554126 - RNA, 19 nt, Artificial Sequence
  Description of Artificial Sequence: Synthetic oligonucleotide
aguguuucgcacagccugu

SEQ ID NO: 554127 - RNA, 19 nt, Artificial Sequence
  Description of Artificial Sequence: Synthetic oligonucleotide
cuauacagccauuugucuu

SEQ ID NO: 554128 - RNA, 19 nt, Artificial Sequence
  Description of Artificial Sequence: Synthetic oligonucleotide
gucacugcaccauacguuu

SEQ ID NO: 554129 - RNA, 19 nt, Artificial Sequence
  Description of Artificial Sequence: Synthetic oligonucleotide
gagaacuguagaacauaaa

SEQ ID NO: 554130 - RNA, 19 nt, Artificial Sequence
  Description of Artificial Sequence: Synthetic oligonucleotide
ggagaacuguagaacauaa

SEQ ID NO: 554131 - RNA, 19 nt, Artificial Sequence
  Description of Artificial Sequence: Synthetic oligonucleotide
caacuugauaauacucagu

SEQ ID NO: 554132 - RNA, 19 nt, Artificial Sequence
  Description of Artificial Sequence: Synthetic oligonucleotide
auaccuggaauaagaguuu

SEQ ID NO: 554133 - RNA, 19 nt, Artificial Sequence
  Description of Artificial Sequence: Synthetic oligonucleotide
gcagcuaaguuauccugga

SEQ ID NO: 554134 - RNA, 19 nt, Artificial Sequence
  Description of Artificial Sequence: Synthetic oligonucleotide
ccaauaagccauucugaca

SEQ ID NO: 554135 - RNA, 19 nt, Artificial Sequence
  Description of Artificial Sequence: Synthetic oligonucleotide
gcaaccuaagauguuggga

SEQ ID NO: 554136 - RNA, 19 nt, Artificial Sequence
  Description of Artificial Sequence: Synthetic oligonucleotide
gcaugcgggcccaauaagc

SEQ ID NO: 554137 - RNA, 19 nt, Artificial Sequence
  Description of Artificial Sequence: Synthetic oligonucleotide
auaaauccuuagggugaug

SEQ ID NO: 554138 - RNA, 19 nt, Artificial Sequence
  Description of Artificial Sequence: Synthetic oligonucleotide
cauagggccuuuaagcauu

SEQ ID NO: 554139 - RNA, 19 nt, Artificial Sequence
  Description of Artificial Sequence: Synthetic oligonucleotide
ggcuuaauuucuuucgaau

SEQ ID NO: 554140 - RNA, 19 nt, Artificial Sequence
  Description of Artificial Sequence: Synthetic oligonucleotide
cuacaucuucgaccuuuuc

SEQ ID NO: 554141 - RNA, 19 nt, Artificial Sequence
  Description of Artificial Sequence: Synthetic oligonucleotide
ggagucgguuaaguuagug

SEQ ID NO: 554142 - RNA, 19 nt, Artificial Sequence
  Description of Artificial Sequence: Synthetic oligonucleotide
cuuucccgguaagacccag

SEQ ID NO: 554143 - RNA, 19 nt, Artificial Sequence
  Description of Artificial Sequence: Synthetic oligonucleotide
caugcugggaacugacagu

SEQ ID NO: 554144 - RNA, 19 nt, Artificial Sequence
  Description of Artificial Sequence: Synthetic oligonucleotide
gugcuacaauggcuguuac

SEQ ID NO: 554145 - RNA, 19 nt, Artificial Sequence
  Description of Artificial Sequence: Synthetic oligonucleotide
acuuuacauggguccugau

SEQ ID NO: 554146 - RNA, 19 nt, Artificial Sequence
  Description of Artificial Sequence: Synthetic oligonucleotide
ggagggacauaagaaaaua

SEQ ID NO: 554147 - RNA, 19 nt, Artificial Sequence
  Description of Artificial Sequence: Synthetic oligonucleotide
gcaccauacguuuggaggu

SEQ ID NO: 554148 - RNA, 19 nt, Artificial Sequence
  Description of Artificial Sequence: Synthetic oligonucleotide
ccauacguuuggagguucc

SEQ ID NO: 554149 - RNA, 19 nt, Artificial Sequence
  Description of Artificial Sequence: Synthetic oligonucleotide
cugugauucagaguuuagu

SEQ ID NO: 554150 - RNA, 19 nt, Artificial Sequence
  Description of Artificial Sequence: Synthetic oligonucleotide
guaccaagaugcuguuucu

SEQ ID NO: 554151 - RNA, 19 nt, Artificial Sequence
  Description of Artificial Sequence: Synthetic oligonucleotide
ccucuacuuuacauggguc

SEQ ID NO: 554152 - RNA, 19 nt, Artificial Sequence
  Description of Artificial Sequence: Synthetic oligonucleotide
aaguggucauucaggcauu

SEQ ID NO: 554153 - RNA, 19 nt, Artificial Sequence
  Description of Artificial Sequence: Synthetic oligonucleotide
guggccauagggccuuuaa

SEQ ID NO: 554154 - RNA, 19 nt, Artificial Sequence
  Description of Artificial Sequence: Synthetic oligonucleotide
ccuguuaaucgagauguca

SEQ ID NO: 554155 - RNA, 19 nt, Artificial Sequence
  Description of Artificial Sequence: Synthetic oligonucleotide
gaugacuguugaggagcca

SEQ ID NO: 554156 - RNA, 19 nt, Artificial Sequence
  Description of Artificial Sequence: Synthetic oligonucleotide
gcugugauucagaguuuag

SEQ ID NO: 554157 - RNA, 19 nt, Artificial Sequence
  Description of Artificial Sequence: Synthetic oligonucleotide
ggcuugacaagccaaucau

SEQ ID NO: 554158 - RNA, 19 nt, Artificial Sequence
  Description of Artificial Sequence: Synthetic oligonucleotide
ggugcuacaauggcuguua

SEQ ID NO: 554159 - RNA, 19 nt, Artificial Sequence
  Description of Artificial Sequence: Synthetic oligonucleotide
cacaaacugcugggaggcc

SEQ ID NO: 554160 - RNA, 19 nt, Artificial Sequence
  Description of Artificial Sequence: Synthetic oligonucleotide
uggugcuacaauggcuguu

SEQ ID NO: 554161 - RNA, 19 nt, Artificial Sequence
  Description of Artificial Sequence: Synthetic oligonucleotide
gcaauuuuagcgcuuccuu

SEQ ID NO: 554162 - RNA, 19 nt, Artificial Sequence
  Description of Artificial Sequence: Synthetic oligonucleotide
cuucgaccuuuuccacuuc

SEQ ID NO: 554163 - RNA, 19 nt, Artificial Sequence
  Description of Artificial Sequence: Synthetic oligonucleotide
cugaaucacaccguagcau

SEQ ID NO: 554164 - RNA, 19 nt, Artificial Sequence
  Description of Artificial Sequence: Synthetic oligonucleotide
guaugggagucgguuaagu

SEQ ID NO: 554165 - RNA, 19 nt, Artificial Sequence
  Description of Artificial Sequence: Synthetic oligonucleotide
gugaacuggcugagguuuc

SEQ ID NO: 554166 - RNA, 19 nt, Artificial Sequence
  Description of Artificial Sequence: Synthetic oligonucleotide
gcauagaaagcagcuaagu

SEQ ID NO: 554167 - RNA, 19 nt, Artificial Sequence
  Description of Artificial Sequence: Synthetic oligonucleotide
aguggucauucaggcauuu

SEQ ID NO: 554168 - RNA, 19 nt, Artificial Sequence
  Description of Artificial Sequence: Synthetic oligonucleotide
gacugcccuaaaagugguc

SEQ ID NO: 554169 - RNA, 19 nt, Artificial Sequence
  Description of Artificial Sequence: Synthetic oligonucleotide
cuaagauguugggaaggcu

SEQ ID NO: 554170 - RNA, 19 nt, Artificial Sequence
  Description of Artificial Sequence: Synthetic oligonucleotide
gcacagccuguuaaucgag

SEQ ID NO: 554171 - RNA, 19 nt, Artificial Sequence
  Description of Artificial Sequence: Synthetic oligonucleotide
cacagucggcaaaacuugu

SEQ ID NO: 554172 - RNA, 19 nt, Artificial Sequence
  Description of Artificial Sequence: Synthetic oligonucleotide
ccgguaagacccagucagc

SEQ ID NO: 554173 - RNA, 19 nt, Artificial Sequence
  Description of Artificial Sequence: Synthetic oligonucleotide
cucuacaucuucgaccuuu

SEQ ID NO: 554174 - RNA, 19 nt, Artificial Sequence
  Description of Artificial Sequence: Synthetic oligonucleotide
cccuaguuaagagcaccag

SEQ ID NO: 554175 - RNA, 19 nt, Artificial Sequence
  Description of Artificial Sequence: Synthetic oligonucleotide
gcaacaacuacaggaggcu

SEQ ID NO: 554176 - RNA, 19 nt, Artificial Sequence
  Description of Artificial Sequence: Synthetic oligonucleotide
cuugaagugacaggacauu

SEQ ID NO: 554177 - RNA, 19 nt, Artificial Sequence
  Description of Artificial Sequence: Synthetic oligonucleotide
acuaagcggcagaggaauu

SEQ ID NO: 554178 - RNA, 19 nt, Artificial Sequence
  Description of Artificial Sequence: Synthetic oligonucleotide
guacaggagucaggcuuga

SEQ ID NO: 554179 - RNA, 19 nt, Artificial Sequence
  Description of Artificial Sequence: Synthetic oligonucleotide
gcccucgguggucaugcug

SEQ ID NO: 554180 - RNA, 19 nt, Artificial Sequence
  Description of Artificial Sequence: Synthetic oligonucleotide
ggcucuuuucagcugugau

SEQ ID NO: 554181 - RNA, 19 nt, Artificial Sequence
  Description of Artificial Sequence: Synthetic oligonucleotide
auagggccuuuaagcauuu

SEQ ID NO: 554182 - RNA, 19 nt, Artificial Sequence
  Description of Artificial Sequence: Synthetic oligonucleotide
caguacuaggcacuuccuu

SEQ ID NO: 554183 - RNA, 19 nt, Artificial Sequence
  Description of Artificial Sequence: Synthetic oligonucleotide
gcccuaaaaguggucuuga

SEQ ID NO: 554184 - RNA, 19 nt, Artificial Sequence
  Description of Artificial Sequence: Synthetic oligonucleotide
ccuuaugacuuggaaggaa

SEQ ID NO: 554185 - RNA, 19 nt, Artificial Sequence
  Description of Artificial Sequence: Synthetic oligonucleotide
ccaccaacuugauaauacu

SEQ ID NO: 554186 - RNA, 19 nt, Artificial Sequence
  Description of Artificial Sequence: Synthetic oligonucleotide
ccugaugguucuggacaag

SEQ ID NO: 554187 - RNA, 19 nt, Artificial Sequence
  Description of Artificial Sequence: Synthetic oligonucleotide
cucauuggcuuugcauacu

SEQ ID NO: 554188 - RNA, 19 nt, Artificial Sequence
  Description of Artificial Sequence: Synthetic oligonucleotide
gucgguuaaguuagugcuu

SEQ ID NO: 554189 - RNA, 19 nt, Artificial Sequence
  Description of Artificial Sequence: Synthetic oligonucleotide
cuggugcuacaauggcugu

SEQ ID NO: 554190 - RNA, 19 nt, Artificial Sequence
  Description of Artificial Sequence: Synthetic oligonucleotide
cagaggcuucauaguucaa

SEQ ID NO: 554191 - RNA, 19 nt, Artificial Sequence
  Description of Artificial Sequence: Synthetic oligonucleotide
cugcccuaaaaguggucuu

SEQ ID NO: 554192 - RNA, 19 nt, Artificial Sequence
  Description of Artificial Sequence: Synthetic oligonucleotide
cccuaaaaguggucuugaa

SEQ ID NO: 554193 - RNA, 19 nt, Artificial Sequence
  Description of Artificial Sequence: Synthetic oligonucleotide
ccauagggccuuuaagcau

SEQ ID NO: 554194 - RNA, 19 nt, Artificial Sequence
  Description of Artificial Sequence: Synthetic oligonucleotide
ggccuccaaguggucauuc

SEQ ID NO: 554195 - RNA, 19 nt, Artificial Sequence
  Description of Artificial Sequence: Synthetic oligonucleotide
caacaacuacaggaggcuu

SEQ ID NO: 554196 - RNA, 19 nt, Artificial Sequence
  Description of Artificial Sequence: Synthetic oligonucleotide
cccagucagcaguauuaaa

SEQ ID NO: 554197 - RNA, 19 nt, Artificial Sequence
  Description of Artificial Sequence: Synthetic oligonucleotide
gccuguuaaucgagauguc

SEQ ID NO: 554198 - RNA, 19 nt, Artificial Sequence
  Description of Artificial Sequence: Synthetic oligonucleotide
gucugccauggaauuacuu

SEQ ID NO: 554199 - RNA, 19 nt, Artificial Sequence
  Description of Artificial Sequence: Synthetic oligonucleotide
ccauugcuucacaucugua

SEQ ID NO: 554200 - RNA, 19 nt, Artificial Sequence
  Description of Artificial Sequence: Synthetic oligonucleotide
cuuugcaugcgggcccaau

SEQ ID NO: 554201 - RNA, 19 nt, Artificial Sequence
  Description of Artificial Sequence: Synthetic oligonucleotide
caccauacguuuggagguu

SEQ ID NO: 554202 - RNA, 19 nt, Artificial Sequence
  Description of Artificial Sequence: Synthetic oligonucleotide
guguuucgcacagccuguu

SEQ ID NO: 554203 - RNA, 19 nt, Artificial Sequence
  Description of Artificial Sequence: Synthetic oligonucleotide
gucugcagggaagcugcuu

SEQ ID NO: 554204 - RNA, 19 nt, Artificial Sequence
  Description of Artificial Sequence: Synthetic oligonucleotide
cgagaugucacugcaccau

SEQ ID NO: 554205 - RNA, 19 nt, Artificial Sequence
  Description of Artificial Sequence: Synthetic oligonucleotide
ggaguucuauacagccauu

SEQ ID NO: 554206 - RNA, 19 nt, Artificial Sequence
  Description of Artificial Sequence: Synthetic oligonucleotide
gggagucgguuaaguuagu

SEQ ID NO: 554207 - RNA, 19 nt, Artificial Sequence
  Description of Artificial Sequence: Synthetic oligonucleotide
cgggcccaauaagccauuc

SEQ ID NO: 554208 - RNA, 19 nt, Artificial Sequence
  Description of Artificial Sequence: Synthetic oligonucleotide
cgguuaaguuagugcuucu

SEQ ID NO: 554209 - RNA, 19 nt, Artificial Sequence
  Description of Artificial Sequence: Synthetic oligonucleotide
cccugcaaccuaagauguu

SEQ ID NO: 554210 - RNA, 19 nt, Artificial Sequence
  Description of Artificial Sequence: Synthetic oligonucleotide
augcaaaauaguuagagcc

SEQ ID NO: 554211 - RNA, 19 nt, Artificial Sequence
  Description of Artificial Sequence: Synthetic oligonucleotide
uacacuaccaagucaaugg

SEQ ID NO: 554212 - RNA, 19 nt, Artificial Sequence
  Description of Artificial Sequence: Synthetic oligonucleotide
ugagacauuaaaauuguga

SEQ ID NO: 554213 - RNA, 19 nt, Artificial Sequence
  Description of Artificial Sequence: Synthetic oligonucleotide
uucuggauagcauaauacg

SEQ ID NO: 554214 - RNA, 19 nt, Artificial Sequence
  Description of Artificial Sequence: Synthetic oligonucleotide
uccauuccaacuaagacac

SEQ ID NO: 554215 - RNA, 19 nt, Artificial Sequence
  Description of Artificial Sequence: Synthetic oligonucleotide
uuaucuguggcauaagucu

SEQ ID NO: 554216 - RNA, 19 nt, Artificial Sequence
  Description of Artificial Sequence: Synthetic oligonucleotide
aacaucagaacgccugggc

SEQ ID NO: 554217 - RNA, 19 nt, Artificial Sequence
  Description of Artificial Sequence: Synthetic oligonucleotide
aauaguuagagcccaacaa

SEQ ID NO: 554218 - RNA, 19 nt, Artificial Sequence
  Description of Artificial Sequence: Synthetic oligonucleotide
aaagcugcauugcuggacg

SEQ ID NO: 554219 - RNA, 19 nt, Artificial Sequence
  Description of Artificial Sequence: Synthetic oligonucleotide
gauacucucaucaucaagc

SEQ ID NO: 554220 - RNA, 19 nt, Artificial Sequence
  Description of Artificial Sequence: Synthetic oligonucleotide
cucaaaauaaucaugcuca

SEQ ID NO: 554221 - RNA, 19 nt, Artificial Sequence
  Description of Artificial Sequence: Synthetic oligonucleotide
aauagcuaaaggcaaaaua

SEQ ID NO: 554222 - RNA, 19 nt, Artificial Sequence
  Description of Artificial Sequence: Synthetic oligonucleotide
uacuauagcaugauauucc

SEQ ID NO: 554223 - RNA, 19 nt, Artificial Sequence
  Description of Artificial Sequence: Synthetic oligonucleotide
ugugcuauaauuacaugcu

SEQ ID NO: 554224 - RNA, 19 nt, Artificial Sequence
  Description of Artificial Sequence: Synthetic oligonucleotide
cuuauuccugcuuagacac

SEQ ID NO: 554225 - RNA, 19 nt, Artificial Sequence
  Description of Artificial Sequence: Synthetic oligonucleotide
ugcgaauucuacuauagca

SEQ ID NO: 554226 - RNA, 19 nt, Artificial Sequence
  Description of Artificial Sequence: Synthetic oligonucleotide
aguugauauaugcucuggc

SEQ ID NO: 554227 - RNA, 19 nt, Artificial Sequence
  Description of Artificial Sequence: Synthetic oligonucleotide
gucagauucucuuuguccg

SEQ ID NO: 554228 - RNA, 19 nt, Artificial Sequence
  Description of Artificial Sequence: Synthetic oligonucleotide
auuacaugcuuguugcuuc

SEQ ID NO: 554229 - RNA, 19 nt, Artificial Sequence
  Description of Artificial Sequence: Synthetic oligonucleotide
acagacuaguaucauuagc

SEQ ID NO: 554230 - RNA, 19 nt, Artificial Sequence
  Description of Artificial Sequence: Synthetic oligonucleotide
ugcaaaauaguuagagccc

SEQ ID NO: 554231 - RNA, 19 nt, Artificial Sequence
  Description of Artificial Sequence: Synthetic oligonucleotide
gcuaauaccacuuuccugc

SEQ ID NO: 554232 - RNA, 19 nt, Artificial Sequence
  Description of Artificial Sequence: Synthetic oligonucleotide
ugcuauaauuacaugcuug

SEQ ID NO: 554233 - RNA, 19 nt, Artificial Sequence
  Description of Artificial Sequence: Synthetic oligonucleotide
acaagcuauaauuacaaaa

SEQ ID NO: 554234 - RNA, 19 nt, Artificial Sequence
  Description of Artificial Sequence: Synthetic oligonucleotide
ucuggauagcauaauacgu

SEQ ID NO: 554235 - RNA, 19 nt, Artificial Sequence
  Description of Artificial Sequence: Synthetic oligonucleotide
ucuauuucgcgucuccucc

SEQ ID NO: 554236 - RNA, 19 nt, Artificial Sequence
  Description of Artificial Sequence: Synthetic oligonucleotide
aucucugauacucucauca

SEQ ID NO: 554237 - RNA, 19 nt, Artificial Sequence
  Description of Artificial Sequence: Synthetic oligonucleotide
uucuacacuaccaagucaa

SEQ ID NO: 554238 - RNA, 19 nt, Artificial Sequence
  Description of Artificial Sequence: Synthetic oligonucleotide
agcaugauauuccugaccu

SEQ ID NO: 554239 - RNA, 19 nt, Artificial Sequence
  Description of Artificial Sequence: Synthetic oligonucleotide
aaggauuacacuuuaccua

SEQ ID NO: 554240 - RNA, 19 nt, Artificial Sequence
  Description of Artificial Sequence: Synthetic oligonucleotide
gaggauacagacuaguauc

SEQ ID NO: 554241 - RNA, 19 nt, Artificial Sequence
  Description of Artificial Sequence: Synthetic oligonucleotide
auuuguucuauccugcacu

SEQ ID NO: 554242 - RNA, 19 nt, Artificial Sequence
  Description of Artificial Sequence: Synthetic oligonucleotide
ugagccugcaaucuuauuc

SEQ ID NO: 554243 - RNA, 19 nt, Artificial Sequence
  Description of Artificial Sequence: Synthetic oligonucleotide
aaagcgucuuuccugucuc

SEQ ID NO: 554244 - RNA, 19 nt, Artificial Sequence
  Description of Artificial Sequence: Synthetic oligonucleotide
ucaaaguuaaguccuuacu

SEQ ID NO: 554245 - RNA, 19 nt, Artificial Sequence
  Description of Artificial Sequence: Synthetic oligonucleotide
auaauacgugcucuuuggc

SEQ ID NO: 554246 - RNA, 19 nt, Artificial Sequence
  Description of Artificial Sequence: Synthetic oligonucleotide
ucuguaaucucugauacuc

SEQ ID NO: 554247 - RNA, 19 nt, Artificial Sequence
  Description of Artificial Sequence: Synthetic oligonucleotide
ucaacaucagaacgccugg

SEQ ID NO: 554248 - RNA, 19 nt, Artificial Sequence
  Description of Artificial Sequence: Synthetic oligonucleotide
ucuuauuccugcuuagaca

SEQ ID NO: 554249 - RNA, 19 nt, Artificial Sequence
  Description of Artificial Sequence: Synthetic oligonucleotide
ugcaaugccguuacgccgg

SEQ ID NO: 554250 - RNA, 19 nt, Artificial Sequence
  Description of Artificial Sequence: Synthetic oligonucleotide
uugauauaugcucuggcaa

SEQ ID NO: 554251 - RNA, 19 nt, Artificial Sequence
  Description of Artificial Sequence: Synthetic oligonucleotide
uuagagcccaacaagacuu

SEQ ID NO: 554252 - RNA, 19 nt, Artificial Sequence
  Description of Artificial Sequence: Synthetic oligonucleotide
aaacauaugaggauacaga

SEQ ID NO: 554253 - RNA, 19 nt, Artificial Sequence
  Description of Artificial Sequence: Synthetic oligonucleotide
guaagguugacuauuaauc

SEQ ID NO: 554254 - RNA, 19 nt, Artificial Sequence
  Description of Artificial Sequence: Synthetic oligonucleotide
uggauagcauaauacgugc

SEQ ID NO: 554255 - RNA, 19 nt, Artificial Sequence
  Description of Artificial Sequence: Synthetic oligonucleotide
aaguccuuacuucacauuu

SEQ ID NO: 554256 - RNA, 19 nt, Artificial Sequence
  Description of Artificial Sequence: Synthetic oligonucleotide
ucuucgaauuaccaccuug

SEQ ID NO: 554257 - RNA, 19 nt, Artificial Sequence
  Description of Artificial Sequence: Synthetic oligonucleotide
uuugaaacggugcgaauuc

SEQ ID NO: 554258 - RNA, 19 nt, Artificial Sequence
  Description of Artificial Sequence: Synthetic oligonucleotide
ugauacucucaucaucaag

SEQ ID NO: 554259 - RNA, 19 nt, Artificial Sequence
  Description of Artificial Sequence: Synthetic oligonucleotide
uaaacaaggauuacacuuu

SEQ ID NO: 554260 - RNA, 19 nt, Artificial Sequence
  Description of Artificial Sequence: Synthetic oligonucleotide
ugaggauacagacuaguau

SEQ ID NO: 554261 - RNA, 19 nt, Artificial Sequence
  Description of Artificial Sequence: Synthetic oligonucleotide
ucuauuggcuaauaccacu

SEQ ID NO: 554262 - RNA, 19 nt, Artificial Sequence
  Description of Artificial Sequence: Synthetic oligonucleotide
acuaagacacuccaagcca

SEQ ID NO: 554263 - RNA, 19 nt, Artificial Sequence
  Description of Artificial Sequence: Synthetic oligonucleotide
cuaucuuccccucuggcgc

SEQ ID NO: 554264 - RNA, 19 nt, Artificial Sequence
  Description of Artificial Sequence: Synthetic oligonucleotide
uauuaaucuuuuccaucag

SEQ ID NO: 554265 - RNA, 19 nt, Artificial Sequence
  Description of Artificial Sequence: Synthetic oligonucleotide
agcccaacaagacuuagug

SEQ ID NO: 554266 - RNA, 19 nt, Artificial Sequence
  Description of Artificial Sequence: Synthetic oligonucleotide
gauagcauaauacgugcuc

SEQ ID NO: 554267 - RNA, 19 nt, Artificial Sequence
  Description of Artificial Sequence: Synthetic oligonucleotide
cagaguacaacuuugccca

SEQ ID NO: 554268 - RNA, 19 nt, Artificial Sequence
  Description of Artificial Sequence: Synthetic oligonucleotide
cuggauagcauaauacgug

SEQ ID NO: 554269 - RNA, 19 nt, Artificial Sequence
  Description of Artificial Sequence: Synthetic oligonucleotide
gagccugcaaucuuauucc

SEQ ID NO: 554270 - RNA, 19 nt, Artificial Sequence
  Description of Artificial Sequence: Synthetic oligonucleotide
aaugccguuacgccgggca

SEQ ID NO: 554271 - RNA, 19 nt, Artificial Sequence
  Description of Artificial Sequence: Synthetic oligonucleotide
uuuugaugcuacuuucaca

SEQ ID NO: 554272 - RNA, 19 nt, Artificial Sequence
  Description of Artificial Sequence: Synthetic oligonucleotide
uaauacgugcucuuuggcu

SEQ ID NO: 554273 - RNA, 19 nt, Artificial Sequence
  Description of Artificial Sequence: Synthetic oligonucleotide
ugguuaucaccaacaaugc

SEQ ID NO: 554274 - RNA, 19 nt, Artificial Sequence
  Description of Artificial Sequence: Synthetic oligonucleotide
gacaccuauggccaucggg

SEQ ID NO: 554275 - RNA, 19 nt, Artificial Sequence
  Description of Artificial Sequence: Synthetic oligonucleotide
acuaguaucauuagcaaaa

SEQ ID NO: 554276 - RNA, 19 nt, Artificial Sequence
  Description of Artificial Sequence: Synthetic oligonucleotide
caccuguugauuuucgacc

SEQ ID NO: 554277 - RNA, 19 nt, Artificial Sequence
  Description of Artificial Sequence: Synthetic oligonucleotide
aaagugggaggcaaucuuc

SEQ ID NO: 554278 - RNA, 19 nt, Artificial Sequence
  Description of Artificial Sequence: Synthetic oligonucleotide
aaguugauauaugcucugg

SEQ ID NO: 554279 - RNA, 19 nt, Artificial Sequence
  Description of Artificial Sequence: Synthetic oligonucleotide
aggauuacacuuuaccuau

SEQ ID NO: 554280 - RNA, 19 nt, Artificial Sequence
  Description of Artificial Sequence: Synthetic oligonucleotide
ugcuuagacacacuacacu

SEQ ID NO: 554281 - RNA, 19 nt, Artificial Sequence
  Description of Artificial Sequence: Synthetic oligonucleotide
ugaggcguuaacaggguca

SEQ ID NO: 554282 - RNA, 19 nt, Artificial Sequence
  Description of Artificial Sequence: Synthetic oligonucleotide
ucuacuauagcaugauauu

SEQ ID NO: 554283 - RNA, 19 nt, Artificial Sequence
  Description of Artificial Sequence: Synthetic oligonucleotide
aacggugcgaauucuacua

SEQ ID NO: 554284 - RNA, 19 nt, Artificial Sequence
  Description of Artificial Sequence: Synthetic oligonucleotide
aaucucugauacucucauc

SEQ ID NO: 554285 - RNA, 19 nt, Artificial Sequence
  Description of Artificial Sequence: Synthetic oligonucleotide
ucaaaucggucccugaaua

SEQ ID NO: 554286 - RNA, 19 nt, Artificial Sequence
  Description of Artificial Sequence: Synthetic oligonucleotide
uugauuuucgacccugcuc

SEQ ID NO: 554287 - RNA, 19 nt, Artificial Sequence
  Description of Artificial Sequence: Synthetic oligonucleotide
auggccacgguucacgcuc

SEQ ID NO: 554288 - RNA, 19 nt, Artificial Sequence
  Description of Artificial Sequence: Synthetic oligonucleotide
aguaaacaaaacaagcuau

SEQ ID NO: 554289 - RNA, 19 nt, Artificial Sequence
  Description of Artificial Sequence: Synthetic oligonucleotide
auuccaacuaagacacucc

SEQ ID NO: 554290 - RNA, 19 nt, Artificial Sequence
  Description of Artificial Sequence: Synthetic oligonucleotide
guugauauaugcucuggca

SEQ ID NO: 554291 - RNA, 19 nt, Artificial Sequence
  Description of Artificial Sequence: Synthetic oligonucleotide
uaaucucugauacucucau

SEQ ID NO: 554292 - RNA, 19 nt, Artificial Sequence
  Description of Artificial Sequence: Synthetic oligonucleotide
cuauccugcacucuacuug

SEQ ID NO: 554293 - RNA, 19 nt, Artificial Sequence
  Description of Artificial Sequence: Synthetic oligonucleotide
auacgugcucuuuggcugc

SEQ ID NO: 554294 - RNA, 19 nt, Artificial Sequence
  Description of Artificial Sequence: Synthetic oligonucleotide
uagcuauuaauucucgguu

SEQ ID NO: 554295 - RNA, 19 nt, Artificial Sequence
  Description of Artificial Sequence: Synthetic oligonucleotide
uauccugcacucuacuugu

SEQ ID NO: 554296 - RNA, 19 nt, Artificial Sequence
  Description of Artificial Sequence: Synthetic oligonucleotide
aauucuacuauagcaugau

SEQ ID NO: 554297 - RNA, 19 nt, Artificial Sequence
  Description of Artificial Sequence: Synthetic oligonucleotide
ucaucgauagucccaacuu

SEQ ID NO: 554298 - RNA, 19 nt, Artificial Sequence
  Description of Artificial Sequence: Synthetic oligonucleotide
ugcuggacgauccuuguuc

SEQ ID NO: 554299 - RNA, 19 nt, Artificial Sequence
  Description of Artificial Sequence: Synthetic oligonucleotide
agacauuaaaauugugaaa

SEQ ID NO: 554300 - RNA, 19 nt, Artificial Sequence
  Description of Artificial Sequence: Synthetic oligonucleotide
cuccauuccaacuaagaca

SEQ ID NO: 554301 - RNA, 19 nt, Artificial Sequence
  Description of Artificial Sequence: Synthetic oligonucleotide
uccuuguuccuuaugcggu

SEQ ID NO: 554302 - RNA, 19 nt, Artificial Sequence
  Description of Artificial Sequence: Synthetic oligonucleotide
uaauuuguucuauccugca

SEQ ID NO: 554303 - RNA, 19 nt, Artificial Sequence
  Description of Artificial Sequence: Synthetic oligonucleotide
aguuagagcccaacaagac

SEQ ID NO: 554304 - RNA, 19 nt, Artificial Sequence
  Description of Artificial Sequence: Synthetic oligonucleotide
uuagaacaccuguugauuu

SEQ ID NO: 554305 - RNA, 19 nt, Artificial Sequence
  Description of Artificial Sequence: Synthetic oligonucleotide
uccuuuaucucgaaugcuu

SEQ ID NO: 554306 - RNA, 19 nt, Artificial Sequence
  Description of Artificial Sequence: Synthetic oligonucleotide
uacagacuaguaucauuag

SEQ ID NO: 554307 - RNA, 19 nt, Artificial Sequence
  Description of Artificial Sequence: Synthetic oligonucleotide
aucaucgauagucccaacu

SEQ ID NO: 554308 - RNA, 19 nt, Artificial Sequence
  Description of Artificial Sequence: Synthetic oligonucleotide
uucuauuggcuaauaccac

SEQ ID NO: 554309 - RNA, 19 nt, Artificial Sequence
  Description of Artificial Sequence: Synthetic oligonucleotide
uuuugaaacggugcgaauu

SEQ ID NO: 554310 - RNA, 19 nt, Artificial Sequence
  Description of Artificial Sequence: Synthetic oligonucleotide
aggauauaggauguaaggu

SEQ ID NO: 554311 - RNA, 19 nt, Artificial Sequence
  Description of Artificial Sequence: Synthetic oligonucleotide
uaaucaugcucaggcauag

SEQ ID NO: 554312 - RNA, 19 nt, Artificial Sequence
  Description of Artificial Sequence: Synthetic oligonucleotide
uucuccuuaggccugugau

SEQ ID NO: 554313 - RNA, 19 nt, Artificial Sequence
  Description of Artificial Sequence: Synthetic oligonucleotide
cuuucuauuucgcgucucc

SEQ ID NO: 554314 - RNA, 19 nt, Artificial Sequence
  Description of Artificial Sequence: Synthetic oligonucleotide
uuuguucuauccugcacuc

SEQ ID NO: 554315 - RNA, 19 nt, Artificial Sequence
  Description of Artificial Sequence: Synthetic oligonucleotide
ucucgaaugcuucuuucuc

SEQ ID NO: 554316 - RNA, 19 nt, Artificial Sequence
  Description of Artificial Sequence: Synthetic oligonucleotide
ugcagugcaccccaccagc

SEQ ID NO: 554317 - RNA, 19 nt, Artificial Sequence
  Description of Artificial Sequence: Synthetic oligonucleotide
gucgacuucggcuucgagc

SEQ ID NO: 554318 - RNA, 19 nt, Artificial Sequence
  Description of Artificial Sequence: Synthetic oligonucleotide
uaucuguggcauaagucuc

SEQ ID NO: 554319 - RNA, 19 nt, Artificial Sequence
  Description of Artificial Sequence: Synthetic oligonucleotide
cuacuauagcaugauauuc

SEQ ID NO: 554320 - RNA, 19 nt, Artificial Sequence
  Description of Artificial Sequence: Synthetic oligonucleotide
ucguucucgcaucaugcgc

SEQ ID NO: 554321 - RNA, 19 nt, Artificial Sequence
  Description of Artificial Sequence: Synthetic oligonucleotide
uucgaauuaccaccuugcu

SEQ ID NO: 554322 - RNA, 19 nt, Artificial Sequence
  Description of Artificial Sequence: Synthetic oligonucleotide
gauagucccaacuuuugua

SEQ ID NO: 554323 - RNA, 19 nt, Artificial Sequence
  Description of Artificial Sequence: Synthetic oligonucleotide
cacuggugaaucuccaggc

SEQ ID NO: 554324 - RNA, 19 nt, Artificial Sequence
  Description of Artificial Sequence: Synthetic oligonucleotide
auagcauaauacgugcucu

SEQ ID NO: 554325 - RNA, 19 nt, Artificial Sequence
  Description of Artificial Sequence: Synthetic oligonucleotide
gauauaugcucuggcaaac

SEQ ID NO: 554326 - RNA, 19 nt, Artificial Sequence
  Description of Artificial Sequence: Synthetic oligonucleotide
caaucuuauuccugcuuag

SEQ ID NO: 554327 - RNA, 19 nt, Artificial Sequence
  Description of Artificial Sequence: Synthetic oligonucleotide
gaucgugccuaucuucccc

SEQ ID NO: 554328 - RNA, 19 nt, Artificial Sequence
  Description of Artificial Sequence: Synthetic oligonucleotide
uggcuaauaccacuuuccu

SEQ ID NO: 554329 - RNA, 19 nt, Artificial Sequence
  Description of Artificial Sequence: Synthetic oligonucleotide
cugcaaugccguuacgccg

SEQ ID NO: 554330 - RNA, 19 nt, Artificial Sequence
  Description of Artificial Sequence: Synthetic oligonucleotide
acaucagaacgccugggca

SEQ ID NO: 554331 - RNA, 19 nt, Artificial Sequence
  Description of Artificial Sequence: Synthetic oligonucleotide
ugaucucguucauaauccc

SEQ ID NO: 554332 - RNA, 19 nt, Artificial Sequence
  Description of Artificial Sequence: Synthetic oligonucleotide
aaucuuauuccugcuuaga

SEQ ID NO: 554333 - RNA, 19 nt, Artificial Sequence
  Description of Artificial Sequence: Synthetic oligonucleotide
uuccuuucuauuucgcguc

SEQ ID NO: 554334 - RNA, 19 nt, Artificial Sequence
  Description of Artificial Sequence: Synthetic oligonucleotide
caauuuuguucugaggcac

SEQ ID NO: 554335 - RNA, 19 nt, Artificial Sequence
  Description of Artificial Sequence: Synthetic oligonucleotide
aucagccguaauuuguucu

SEQ ID NO: 554336 - RNA, 19 nt, Artificial Sequence
  Description of Artificial Sequence: Synthetic oligonucleotide
auacagacuaguaucauua

SEQ ID NO: 554337 - RNA, 19 nt, Artificial Sequence
  Description of Artificial Sequence: Synthetic oligonucleotide
cauugcuggacgauccuug

SEQ ID NO: 554338 - RNA, 19 nt, Artificial Sequence
  Description of Artificial Sequence: Synthetic oligonucleotide
auaaucccgaucccugucu

SEQ ID NO: 554339 - RNA, 19 nt, Artificial Sequence
  Description of Artificial Sequence: Synthetic oligonucleotide
ugcuuguugcuucuacacu

SEQ ID NO: 554340 - RNA, 19 nt, Artificial Sequence
  Description of Artificial Sequence: Synthetic oligonucleotide
uucuucucucuucuucucu

SEQ ID NO: 554341 - RNA, 19 nt, Artificial Sequence
  Description of Artificial Sequence: Synthetic oligonucleotide
aaaucggucccugaauaaa

SEQ ID NO: 554342 - RNA, 19 nt, Artificial Sequence
  Description of Artificial Sequence: Synthetic oligonucleotide
gacuaguaucauuagcaaa

SEQ ID NO: 554343 - RNA, 19 nt, Artificial Sequence
  Description of Artificial Sequence: Synthetic oligonucleotide
aucucgaaugcuucuuucu

SEQ ID NO: 554344 - RNA, 19 nt, Artificial Sequence
  Description of Artificial Sequence: Synthetic oligonucleotide
ucucuguugcgaucgugcc

SEQ ID NO: 554345 - RNA, 19 nt, Artificial Sequence
  Description of Artificial Sequence: Synthetic oligonucleotide
uucuauuucgcgucuccuc

SEQ ID NO: 554346 - RNA, 19 nt, Artificial Sequence
  Description of Artificial Sequence: Synthetic oligonucleotide
uuaacagggucacucgcuu

SEQ ID NO: 554347 - RNA, 19 nt, Artificial Sequence
  Description of Artificial Sequence: Synthetic oligonucleotide
cacccugaggcguuaacag

SEQ ID NO: 554348 - RNA, 19 nt, Artificial Sequence
  Description of Artificial Sequence: Synthetic oligonucleotide
aaauagcuaaaggcaaaau

SEQ ID NO: 554349 - RNA, 19 nt, Artificial Sequence
  Description of Artificial Sequence: Synthetic oligonucleotide
ucaugcgcuccugaucucg

SEQ ID NO: 554350 - RNA, 19 nt, Artificial Sequence
  Description of Artificial Sequence: Synthetic oligonucleotide
ucgaaugcuucuuucucuc

SEQ ID NO: 554351 - RNA, 19 nt, Artificial Sequence
  Description of Artificial Sequence: Synthetic oligonucleotide
cucguucucgcaucaugcg

SEQ ID NO: 554352 - RNA, 19 nt, Artificial Sequence
  Description of Artificial Sequence: Synthetic oligonucleotide
ucuguugcgaucgugccua

SEQ ID NO: 554353 - RNA, 19 nt, Artificial Sequence
  Description of Artificial Sequence: Synthetic oligonucleotide
agcuauuaauucucgguuu

SEQ ID NO: 554354 - RNA, 19 nt, Artificial Sequence
  Description of Artificial Sequence: Synthetic oligonucleotide
ugggaggcaaucuucgaau

SEQ ID NO: 554355 - RNA, 19 nt, Artificial Sequence
  Description of Artificial Sequence: Synthetic oligonucleotide
uucuauccugcacucuacu

SEQ ID NO: 554356 - RNA, 19 nt, Artificial Sequence
  Description of Artificial Sequence: Synthetic oligonucleotide
gacagagucgacuucggcu

SEQ ID NO: 554357 - RNA, 19 nt, Artificial Sequence
  Description of Artificial Sequence: Synthetic oligonucleotide
acacuaccaagucaauggu

SEQ ID NO: 554358 - RNA, 19 nt, Artificial Sequence
  Description of Artificial Sequence: Synthetic oligonucleotide
uccugcuuagacacacuac

SEQ ID NO: 554359 - RNA, 19 nt, Artificial Sequence
  Description of Artificial Sequence: Synthetic oligonucleotide
uuguugcuucuacacuacc

SEQ ID NO: 554360 - RNA, 19 nt, Artificial Sequence
  Description of Artificial Sequence: Synthetic oligonucleotide
aggcauagguugaagaugu

SEQ ID NO: 554361 - RNA, 19 nt, Artificial Sequence
  Description of Artificial Sequence: Synthetic oligonucleotide
aucaaaucggucccugaau

SEQ ID NO: 554362 - RNA, 19 nt, Artificial Sequence
  Description of Artificial Sequence: Synthetic oligonucleotide
uguccggucucuuugcuuu

SEQ ID NO: 554363 - RNA, 19 nt, Artificial Sequence
  Description of Artificial Sequence: Synthetic oligonucleotide
ugcggucucucuuaaucac

SEQ ID NO: 554364 - RNA, 19 nt, Artificial Sequence
  Description of Artificial Sequence: Synthetic oligonucleotide
aagacuuagugugcuucug

SEQ ID NO: 554365 - RNA, 19 nt, Artificial Sequence
  Description of Artificial Sequence: Synthetic oligonucleotide
uaauuacaugcuuguugcu

SEQ ID NO: 554366 - RNA, 19 nt, Artificial Sequence
  Description of Artificial Sequence: Synthetic oligonucleotide
agaguacaacuuugcccac

SEQ ID NO: 554367 - RNA, 19 nt, Artificial Sequence
  Description of Artificial Sequence: Synthetic oligonucleotide
ucagccguaauuuguucua

SEQ ID NO: 554368 - RNA, 19 nt, Artificial Sequence
  Description of Artificial Sequence: Synthetic oligonucleotide
uuccugcuuagacacacua

SEQ ID NO: 554369 - RNA, 19 nt, Artificial Sequence
  Description of Artificial Sequence: Synthetic oligonucleotide
cugcuuagacacacuacac

SEQ ID NO: 554370 - RNA, 19 nt, Artificial Sequence
  Description of Artificial Sequence: Synthetic oligonucleotide
agauucucuuuguccgguc

SEQ ID NO: 554371 - RNA, 19 nt, Artificial Sequence
  Description of Artificial Sequence: Synthetic oligonucleotide
uuuucgacccugcuccuuu

SEQ ID NO: 554372 - RNA, 19 nt, Artificial Sequence
  Description of Artificial Sequence: Synthetic oligonucleotide
uauaggauguaagguugac

SEQ ID NO: 554373 - RNA, 19 nt, Artificial Sequence
  Description of Artificial Sequence: Synthetic oligonucleotide
uuacaugcuuguugcuucu

SEQ ID NO: 554374 - RNA, 19 nt, Artificial Sequence
  Description of Artificial Sequence: Synthetic oligonucleotide
aggcaaucuucgaauuacc

SEQ ID NO: 554375 - RNA, 19 nt, Artificial Sequence
  Description of Artificial Sequence: Synthetic oligonucleotide
ucacucgcuucuccuuagg

SEQ ID NO: 554376 - RNA, 19 nt, Artificial Sequence
  Description of Artificial Sequence: Synthetic oligonucleotide
augcggucucucuuaauca

SEQ ID NO: 554377 - RNA, 19 nt, Artificial Sequence
  Description of Artificial Sequence: Synthetic oligonucleotide
ucucgcaucaugcgcuccu

SEQ ID NO: 554378 - RNA, 19 nt, Artificial Sequence
  Description of Artificial Sequence: Synthetic oligonucleotide
uuuguccggucucuuugcu

SEQ ID NO: 554379 - RNA, 19 nt, Artificial Sequence
  Description of Artificial Sequence: Synthetic oligonucleotide
cagucgacccguuuucuug

SEQ ID NO: 554380 - RNA, 19 nt, Artificial Sequence
  Description of Artificial Sequence: Synthetic oligonucleotide
aaucaugcucaggcauagg

SEQ ID NO: 554381 - RNA, 19 nt, Artificial Sequence
  Description of Artificial Sequence: Synthetic oligonucleotide
cuacacuaccaagucaaug

SEQ ID NO: 554382 - RNA, 19 nt, Artificial Sequence
  Description of Artificial Sequence: Synthetic oligonucleotide
acaacuuugcccacuggcu

SEQ ID NO: 554383 - RNA, 19 nt, Artificial Sequence
  Description of Artificial Sequence: Synthetic oligonucleotide
ucggcuucgagcuccuggu

SEQ ID NO: 554384 - RNA, 19 nt, Artificial Sequence
  Description of Artificial Sequence: Synthetic oligonucleotide
ggugcgaauucuacuauag

SEQ ID NO: 554385 - RNA, 19 nt, Artificial Sequence
  Description of Artificial Sequence: Synthetic oligonucleotide
uuauuccugcuuagacaca

SEQ ID NO: 554386 - RNA, 19 nt, Artificial Sequence
  Description of Artificial Sequence: Synthetic oligonucleotide
ccugaucucguucauaauc

SEQ ID NO: 554387 - RNA, 19 nt, Artificial Sequence
  Description of Artificial Sequence: Synthetic oligonucleotide
uuucuauuucgcgucuccu

SEQ ID NO: 554388 - RNA, 19 nt, Artificial Sequence
  Description of Artificial Sequence: Synthetic oligonucleotide
aaugcucuuccuaccuucu

SEQ ID NO: 554389 - RNA, 19 nt, Artificial Sequence
  Description of Artificial Sequence: Synthetic oligonucleotide
ucuucucucuucuucucuu

SEQ ID NO: 554390 - RNA, 19 nt, Artificial Sequence
  Description of Artificial Sequence: Synthetic oligonucleotide
aacaagacuuagugugcuu

SEQ ID NO: 554391 - RNA, 19 nt, Artificial Sequence
  Description of Artificial Sequence: Synthetic oligonucleotide
gacuucggcuucgagcucc

SEQ ID NO: 554392 - RNA, 19 nt, Artificial Sequence
  Description of Artificial Sequence: Synthetic oligonucleotide
gcauaauacgugcucuuug

SEQ ID NO: 554393 - RNA, 19 nt, Artificial Sequence
  Description of Artificial Sequence: Synthetic oligonucleotide
agcacagucgacccguuuu

SEQ ID NO: 554394 - RNA, 19 nt, Artificial Sequence
  Description of Artificial Sequence: Synthetic oligonucleotide
gugcgaauucuacuauagc

SEQ ID NO: 554395 - RNA, 19 nt, Artificial Sequence
  Description of Artificial Sequence: Synthetic oligonucleotide
ucuauccugcacucuacuu

SEQ ID NO: 554396 - RNA, 19 nt, Artificial Sequence
  Description of Artificial Sequence: Synthetic oligonucleotide
gacacacuacacuccucug

SEQ ID NO: 554397 - RNA, 19 nt, Artificial Sequence
  Description of Artificial Sequence: Synthetic oligonucleotide
uccuuucuauuucgcgucu

SEQ ID NO: 554398 - RNA, 19 nt, Artificial Sequence
  Description of Artificial Sequence: Synthetic oligonucleotide
cccugaggcguuaacaggg

SEQ ID NO: 554399 - RNA, 19 nt, Artificial Sequence
  Description of Artificial Sequence: Synthetic oligonucleotide
ucucugauacucucaucau

SEQ ID NO: 554400 - RNA, 19 nt, Artificial Sequence
  Description of Artificial Sequence: Synthetic oligonucleotide
uaucuuccccucuggcgcc

SEQ ID NO: 554401 - RNA, 19 nt, Artificial Sequence
  Description of Artificial Sequence: Synthetic oligonucleotide
agucgacccguuuucuugu

SEQ ID NO: 554402 - RNA, 19 nt, Artificial Sequence
  Description of Artificial Sequence: Synthetic oligonucleotide
aggaagcucaaaagugggg

SEQ ID NO: 554403 - RNA, 19 nt, Artificial Sequence
  Description of Artificial Sequence: Synthetic oligonucleotide
ugcgaucgugccuaucuuc

SEQ ID NO: 554404 - RNA, 19 nt, Artificial Sequence
  Description of Artificial Sequence: Synthetic oligonucleotide
ggucucuuugcuuugucuc

SEQ ID NO: 554405 - RNA, 19 nt, Artificial Sequence
  Description of Artificial Sequence: Synthetic oligonucleotide
uagaacaccuguugauuuu

SEQ ID NO: 554406 - RNA, 19 nt, Artificial Sequence
  Description of Artificial Sequence: Synthetic oligonucleotide
guugcgaucgugccuaucu

SEQ ID NO: 554407 - RNA, 19 nt, Artificial Sequence
  Description of Artificial Sequence: Synthetic oligonucleotide
cauaaucccgaucccuguc

SEQ ID NO: 554408 - RNA, 19 nt, Artificial Sequence
  Description of Artificial Sequence: Synthetic oligonucleotide
ucauggccacgguucacgc

SEQ ID NO: 554409 - RNA, 19 nt, Artificial Sequence
  Description of Artificial Sequence: Synthetic oligonucleotide
augccguuacgccgggcac

SEQ ID NO: 554410 - RNA, 19 nt, Artificial Sequence
  Description of Artificial Sequence: Synthetic oligonucleotide
ucuacacuaccaagucaau

SEQ ID NO: 554411 - RNA, 19 nt, Artificial Sequence
  Description of Artificial Sequence: Synthetic oligonucleotide
guuagagcccaacaagacu

SEQ ID NO: 554412 - RNA, 19 nt, Artificial Sequence
  Description of Artificial Sequence: Synthetic oligonucleotide
gauguaagguugacuauua

SEQ ID NO: 554413 - RNA, 19 nt, Artificial Sequence
  Description of Artificial Sequence: Synthetic oligonucleotide
agguugacuauuaaucuuu

SEQ ID NO: 554414 - RNA, 19 nt, Artificial Sequence
  Description of Artificial Sequence: Synthetic oligonucleotide
ugcauugcuggacgauccu

SEQ ID NO: 554415 - RNA, 19 nt, Artificial Sequence
  Description of Artificial Sequence: Synthetic oligonucleotide
uccuuaugcggucucucuu

SEQ ID NO: 554416 - RNA, 19 nt, Artificial Sequence
  Description of Artificial Sequence: Synthetic oligonucleotide
ugcggcguucuucuuccug

SEQ ID NO: 554417 - RNA, 19 nt, Artificial Sequence
  Description of Artificial Sequence: Synthetic oligonucleotide
agaacgccugggcagagua

SEQ ID NO: 554418 - RNA, 19 nt, Artificial Sequence
  Description of Artificial Sequence: Synthetic oligonucleotide
aggauguaagguugacuau

SEQ ID NO: 554419 - RNA, 19 nt, Artificial Sequence
  Description of Artificial Sequence: Synthetic oligonucleotide
guacaacuuugcccacugg

SEQ ID NO: 554420 - RNA, 19 nt, Artificial Sequence
  Description of Artificial Sequence: Synthetic oligonucleotide
cacucgcuucuccuuaggc

SEQ ID NO: 554421 - RNA, 19 nt, Artificial Sequence
  Description of Artificial Sequence: Synthetic oligonucleotide
gaggcguuaacagggucac

SEQ ID NO: 554422 - RNA, 19 nt, Artificial Sequence
  Description of Artificial Sequence: Synthetic oligonucleotide
acgccgggcaccuacgacu

SEQ ID NO: 554423 - RNA, 19 nt, Artificial Sequence
  Description of Artificial Sequence: Synthetic oligonucleotide
cgauccuuguuccuuaugc

SEQ ID NO: 554424 - RNA, 19 nt, Artificial Sequence
  Description of Artificial Sequence: Synthetic oligonucleotide
aucgugccuaucuuccccu

SEQ ID NO: 554425 - RNA, 19 nt, Artificial Sequence
  Description of Artificial Sequence: Synthetic oligonucleotide
caucgggacuucucacucc

SEQ ID NO: 554426 - RNA, 19 nt, Artificial Sequence
  Description of Artificial Sequence: Synthetic oligonucleotide
cuguugauuuucgacccug

SEQ ID NO: 554427 - RNA, 19 nt, Artificial Sequence
  Description of Artificial Sequence: Synthetic oligonucleotide
ugccuccauuccaacuaag

SEQ ID NO: 554428 - RNA, 19 nt, Artificial Sequence
  Description of Artificial Sequence: Synthetic oligonucleotide
ggggacagagucgacuucg

SEQ ID NO: 554429 - RNA, 19 nt, Artificial Sequence
  Description of Artificial Sequence: Synthetic oligonucleotide
ccuuggucaaagugggagg

SEQ ID NO: 554430 - RNA, 19 nt, Artificial Sequence
  Description of Artificial Sequence: Synthetic oligonucleotide
uucgcgucuccuccuuucu

SEQ ID NO: 554431 - RNA, 19 nt, Artificial Sequence
  Description of Artificial Sequence: Synthetic oligonucleotide
uagcauaauacgugcucuu

SEQ ID NO: 554432 - RNA, 19 nt, Artificial Sequence
  Description of Artificial Sequence: Synthetic oligonucleotide
auaaucaugcucaggcaua

SEQ ID NO: 554433 - RNA, 19 nt, Artificial Sequence
  Description of Artificial Sequence: Synthetic oligonucleotide
caacaucagaacgccuggg

SEQ ID NO: 554434 - RNA, 19 nt, Artificial Sequence
  Description of Artificial Sequence: Synthetic oligonucleotide
gucagcaacuaaacaagga

SEQ ID NO: 554435 - RNA, 19 nt, Artificial Sequence
  Description of Artificial Sequence: Synthetic oligonucleotide
ccugcuuagacacacuaca

SEQ ID NO: 554436 - RNA, 19 nt, Artificial Sequence
  Description of Artificial Sequence: Synthetic oligonucleotide
ggauauaggauguaagguu

SEQ ID NO: 554437 - RNA, 19 nt, Artificial Sequence
  Description of Artificial Sequence: Synthetic oligonucleotide
auguaagguugacuauuaa

SEQ ID NO: 554438 - RNA, 19 nt, Artificial Sequence
  Description of Artificial Sequence: Synthetic oligonucleotide
aagcugcauugcuggacga

SEQ ID NO: 554439 - RNA, 19 nt, Artificial Sequence
  Description of Artificial Sequence: Synthetic oligonucleotide
caucagccguaauuuguuc

SEQ ID NO: 554440 - RNA, 19 nt, Artificial Sequence
  Description of Artificial Sequence: Synthetic oligonucleotide
agugggaggcaaucuucga

SEQ ID NO: 554441 - RNA, 19 nt, Artificial Sequence
  Description of Artificial Sequence: Synthetic oligonucleotide
gcguuaacagggucacucg

SEQ ID NO: 554442 - RNA, 19 nt, Artificial Sequence
  Description of Artificial Sequence: Synthetic oligonucleotide
auaugaggauacagacuag

SEQ ID NO: 554443 - RNA, 19 nt, Artificial Sequence
  Description of Artificial Sequence: Synthetic oligonucleotide
cuuaggccugugaucuuuc

SEQ ID NO: 554444 - RNA, 19 nt, Artificial Sequence
  Description of Artificial Sequence: Synthetic oligonucleotide
agagucgacuucggcuucg

SEQ ID NO: 554445 - RNA, 19 nt, Artificial Sequence
  Description of Artificial Sequence: Synthetic oligonucleotide
uauuucgcgucuccuccuu

SEQ ID NO: 554446 - RNA, 19 nt, Artificial Sequence
  Description of Artificial Sequence: Synthetic oligonucleotide
cagucagauucucuuuguc

SEQ ID NO: 554447 - RNA, 19 nt, Artificial Sequence
  Description of Artificial Sequence: Synthetic oligonucleotide
aggauuuagaacaccuguu

SEQ ID NO: 554448 - RNA, 19 nt, Artificial Sequence
  Description of Artificial Sequence: Synthetic oligonucleotide
cucaaagcgucuuuccugu

SEQ ID NO: 554449 - RNA, 19 nt, Artificial Sequence
  Description of Artificial Sequence: Synthetic oligonucleotide
ggcguuaacagggucacuc

SEQ ID NO: 554450 - RNA, 19 nt, Artificial Sequence
  Description of Artificial Sequence: Synthetic oligonucleotide
agucaaugguuaucaccaa

SEQ ID NO: 554451 - RNA, 19 nt, Artificial Sequence
  Description of Artificial Sequence: Synthetic oligonucleotide
uaacagggucacucgcuuc

SEQ ID NO: 554452 - RNA, 19 nt, Artificial Sequence
  Description of Artificial Sequence: Synthetic oligonucleotide
gcaaucuuauuccugcuua

SEQ ID NO: 554453 - RNA, 19 nt, Artificial Sequence
  Description of Artificial Sequence: Synthetic oligonucleotide
cucguucauaaucccgauc

SEQ ID NO: 554454 - RNA, 19 nt, Artificial Sequence
  Description of Artificial Sequence: Synthetic oligonucleotide
uuacgccgggcaccuacga

SEQ ID NO: 554455 - RNA, 19 nt, Artificial Sequence
  Description of Artificial Sequence: Synthetic oligonucleotide
ucacgcuccucagagccgu

SEQ ID NO: 554456 - RNA, 19 nt, Artificial Sequence
  Description of Artificial Sequence: Synthetic oligonucleotide
cacgguucacgcuccucag

SEQ ID NO: 554457 - RNA, 19 nt, Artificial Sequence
  Description of Artificial Sequence: Synthetic oligonucleotide
caccuauggccaucgggac

SEQ ID NO: 554458 - RNA, 19 nt, Artificial Sequence
  Description of Artificial Sequence: Synthetic oligonucleotide
gcuggacgauccuuguucc

SEQ ID NO: 554459 - RNA, 19 nt, Artificial Sequence
  Description of Artificial Sequence: Synthetic oligonucleotide
acaaugcaaaauaguuaga

SEQ ID NO: 554460 - RNA, 19 nt, Artificial Sequence
  Description of Artificial Sequence: Synthetic oligonucleotide
uggacgauccuuguuccuu

SEQ ID NO: 554461 - RNA, 19 nt, Artificial Sequence
  Description of Artificial Sequence: Synthetic oligonucleotide
agccugcaaucuuauuccu

SEQ ID NO: 554462 - RNA, 19 nt, Artificial Sequence
  Description of Artificial Sequence: Synthetic oligonucleotide
caaaucggucccugaauaa

SEQ ID NO: 554463 - RNA, 19 nt, Artificial Sequence
  Description of Artificial Sequence: Synthetic oligonucleotide
guuacgccgggcaccuacg

SEQ ID NO: 554464 - RNA, 19 nt, Artificial Sequence
  Description of Artificial Sequence: Synthetic oligonucleotide
ucgcaucaugcgcuccuga

SEQ ID NO: 554465 - RNA, 19 nt, Artificial Sequence
  Description of Artificial Sequence: Synthetic oligonucleotide
aucagaacgccugggcaga

SEQ ID NO: 554466 - RNA, 19 nt, Artificial Sequence
  Description of Artificial Sequence: Synthetic oligonucleotide
acgauccuuguuccuuaug

SEQ ID NO: 554467 - RNA, 19 nt, Artificial Sequence
  Description of Artificial Sequence: Synthetic oligonucleotide
ggcuucgagcuccugguug

SEQ ID NO: 554468 - RNA, 19 nt, Artificial Sequence
  Description of Artificial Sequence: Synthetic oligonucleotide
guucugaggcacauauuga

SEQ ID NO: 554469 - RNA, 19 nt, Artificial Sequence
  Description of Artificial Sequence: Synthetic oligonucleotide
agcucaaaagugggguugu

SEQ ID NO: 554470 - RNA, 19 nt, Artificial Sequence
  Description of Artificial Sequence: Synthetic oligonucleotide
gugggaggcaaucuucgaa

SEQ ID NO: 554471 - RNA, 19 nt, Artificial Sequence
  Description of Artificial Sequence: Synthetic oligonucleotide
guccuuuuagcuauuaauu

SEQ ID NO: 554472 - RNA, 19 nt, Artificial Sequence
  Description of Artificial Sequence: Synthetic oligonucleotide
ucgacccguuuucuuguuc

SEQ ID NO: 554473 - RNA, 19 nt, Artificial Sequence
  Description of Artificial Sequence: Synthetic oligonucleotide
ggcaaacauaugaggauac

SEQ ID NO: 554474 - RNA, 19 nt, Artificial Sequence
  Description of Artificial Sequence: Synthetic oligonucleotide
agcauaauacgugcucuuu

SEQ ID NO: 554475 - RNA, 19 nt, Artificial Sequence
  Description of Artificial Sequence: Synthetic oligonucleotide
guucuauccugcacucuac

SEQ ID NO: 554476 - RNA, 19 nt, Artificial Sequence
  Description of Artificial Sequence: Synthetic oligonucleotide
ugccguuacgccgggcacc

SEQ ID NO: 554477 - RNA, 19 nt, Artificial Sequence
  Description of Artificial Sequence: Synthetic oligonucleotide
acggugcgaauucuacuau

SEQ ID NO: 554478 - RNA, 19 nt, Artificial Sequence
  Description of Artificial Sequence: Synthetic oligonucleotide
ucuuuuccaucagccguaa

SEQ ID NO: 554479 - RNA, 19 nt, Artificial Sequence
  Description of Artificial Sequence: Synthetic oligonucleotide
ccuuuuagcuauuaauucu

SEQ ID NO: 554480 - RNA, 19 nt, Artificial Sequence
  Description of Artificial Sequence: Synthetic oligonucleotide
agucgacuucggcuucgag

SEQ ID NO: 554481 - RNA, 19 nt, Artificial Sequence
  Description of Artificial Sequence: Synthetic oligonucleotide
uuguucuauccugcacucu

SEQ ID NO: 554482 - RNA, 19 nt, Artificial Sequence
  Description of Artificial Sequence: Synthetic oligonucleotide
gaauuaccaccuugcucaa

SEQ ID NO: 554483 - RNA, 19 nt, Artificial Sequence
  Description of Artificial Sequence: Synthetic oligonucleotide
acagucgacccguuuucuu

SEQ ID NO: 554484 - RNA, 19 nt, Artificial Sequence
  Description of Artificial Sequence: Synthetic oligonucleotide
acauagccaucaaaucggu

SEQ ID NO: 554485 - RNA, 19 nt, Artificial Sequence
  Description of Artificial Sequence: Synthetic oligonucleotide
cacaggauauaggauguaa

SEQ ID NO: 554486 - RNA, 19 nt, Artificial Sequence
  Description of Artificial Sequence: Synthetic oligonucleotide
uuaugcggucucucuuaau

SEQ ID NO: 554487 - RNA, 19 nt, Artificial Sequence
  Description of Artificial Sequence: Synthetic oligonucleotide
uugcgaucgugccuaucuu

SEQ ID NO: 554488 - RNA, 19 nt, Artificial Sequence
  Description of Artificial Sequence: Synthetic oligonucleotide
gcauagguugaagauguuc

SEQ ID NO: 554489 - RNA, 19 nt, Artificial Sequence
  Description of Artificial Sequence: Synthetic oligonucleotide
gaagcucaaaagugggguu

SEQ ID NO: 554490 - RNA, 19 nt, Artificial Sequence
  Description of Artificial Sequence: Synthetic oligonucleotide
uccugaucucguucauaau

SEQ ID NO: 554491 - RNA, 19 nt, Artificial Sequence
  Description of Artificial Sequence: Synthetic oligonucleotide
guuaacagggucacucgcu

SEQ ID NO: 554492 - RNA, 19 nt, Artificial Sequence
  Description of Artificial Sequence: Synthetic oligonucleotide
cuauuggcuaauaccacuu

SEQ ID NO: 554493 - RNA, 19 nt, Artificial Sequence
  Description of Artificial Sequence: Synthetic oligonucleotide
ucagaacgccugggcagag

SEQ ID NO: 554494 - RNA, 19 nt, Artificial Sequence
  Description of Artificial Sequence: Synthetic oligonucleotide
uggccacgguucacgcucc

SEQ ID NO: 554495 - RNA, 19 nt, Artificial Sequence
  Description of Artificial Sequence: Synthetic oligonucleotide
ggaagcucaaaaguggggu

SEQ ID NO: 554496 - RNA, 19 nt, Artificial Sequence
  Description of Artificial Sequence: Synthetic oligonucleotide
cagcaacuaaacaaggauu

SEQ ID NO: 554497 - RNA, 19 nt, Artificial Sequence
  Description of Artificial Sequence: Synthetic oligonucleotide
gcgaucgugccuaucuucc

SEQ ID NO: 554498 - RNA, 19 nt, Artificial Sequence
  Description of Artificial Sequence: Synthetic oligonucleotide
cuuaugcggucucucuuaa

SEQ ID NO: 554499 - RNA, 19 nt, Artificial Sequence
  Description of Artificial Sequence: Synthetic oligonucleotide
gcaacuaaacaaggauuac

SEQ ID NO: 554500 - RNA, 19 nt, Artificial Sequence
  Description of Artificial Sequence: Synthetic oligonucleotide
caagacuuagugugcuucu

SEQ ID NO: 554501 - RNA, 19 nt, Artificial Sequence
  Description of Artificial Sequence: Synthetic oligonucleotide
ggcguucuucuuccugccg

SEQ ID NO: 554502 - RNA, 19 nt, Artificial Sequence
  Description of Artificial Sequence: Synthetic oligonucleotide
ggacagagucgacuucggc

SEQ ID NO: 554503 - RNA, 19 nt, Artificial Sequence
  Description of Artificial Sequence: Synthetic oligonucleotide
cacgcugccgccuguggca

SEQ ID NO: 554504 - RNA, 19 nt, Artificial Sequence
  Description of Artificial Sequence: Synthetic oligonucleotide
cagugcaccccaccagcac

SEQ ID NO: 554505 - RNA, 19 nt, Artificial Sequence
  Description of Artificial Sequence: Synthetic oligonucleotide
uucucgcaucaugcgcucc

SEQ ID NO: 554506 - RNA, 19 nt, Artificial Sequence
  Description of Artificial Sequence: Synthetic oligonucleotide
guucucgcaucaugcgcuc

SEQ ID NO: 554507 - RNA, 19 nt, Artificial Sequence
  Description of Artificial Sequence: Synthetic oligonucleotide
cacucuacuugugcuauaa

SEQ ID NO: 554508 - RNA, 19 nt, Artificial Sequence
  Description of Artificial Sequence: Synthetic oligonucleotide
cguuaacagggucacucgc

SEQ ID NO: 554509 - RNA, 19 nt, Artificial Sequence
  Description of Artificial Sequence: Synthetic oligonucleotide
aguccuuacuucacauuuu

SEQ ID NO: 554510 - RNA, 19 nt, Artificial Sequence
  Description of Artificial Sequence: Synthetic oligonucleotide
gcaucaugcgcuccugauc

SEQ ID NO: 554511 - RNA, 19 nt, Artificial Sequence
  Description of Artificial Sequence: Synthetic oligonucleotide
cuaauaccacuuuccugcu

SEQ ID NO: 554512 - RNA, 19 nt, Artificial Sequence
  Description of Artificial Sequence: Synthetic oligonucleotide
aucuucgaauuaccaccuu

SEQ ID NO: 554513 - RNA, 19 nt, Artificial Sequence
  Description of Artificial Sequence: Synthetic oligonucleotide
uuucgacccugcuccuuuu

SEQ ID NO: 554514 - RNA, 19 nt, Artificial Sequence
  Description of Artificial Sequence: Synthetic oligonucleotide
uccggucucuuugcuuugu

SEQ ID NO: 554515 - RNA, 19 nt, Artificial Sequence
  Description of Artificial Sequence: Synthetic oligonucleotide
uacgugcucuuuggcugcc

SEQ ID NO: 554516 - RNA, 19 nt, Artificial Sequence
  Description of Artificial Sequence: Synthetic oligonucleotide
gaacgccugggcagaguac

SEQ ID NO: 554517 - RNA, 19 nt, Artificial Sequence
  Description of Artificial Sequence: Synthetic oligonucleotide
cgguucacgcuccucagag

SEQ ID NO: 554518 - RNA, 19 nt, Artificial Sequence
  Description of Artificial Sequence: Synthetic oligonucleotide
caaagugggaggcaaucuu

SEQ ID NO: 554519 - RNA, 19 nt, Artificial Sequence
  Description of Artificial Sequence: Synthetic oligonucleotide
ccuuguuccuuaugcgguc

SEQ ID NO: 554520 - RNA, 19 nt, Artificial Sequence
  Description of Artificial Sequence: Synthetic oligonucleotide
gcuauuaauucucgguuuu

SEQ ID NO: 554521 - RNA, 19 nt, Artificial Sequence
  Description of Artificial Sequence: Synthetic oligonucleotide
cagagucgacuucggcuuc

SEQ ID NO: 554522 - RNA, 19 nt, Artificial Sequence
  Description of Artificial Sequence: Synthetic oligonucleotide
ucuggcgccuucggcagua

SEQ ID NO: 554523 - RNA, 19 nt, Artificial Sequence
  Description of Artificial Sequence: Synthetic oligonucleotide
cagacacaggauauaggau

SEQ ID NO: 554524 - RNA, 19 nt, Artificial Sequence
  Description of Artificial Sequence: Synthetic oligonucleotide
ucgugccuaucuuccccuc

SEQ ID NO: 554525 - RNA, 19 nt, Artificial Sequence
  Description of Artificial Sequence: Synthetic oligonucleotide
gcgaauucuacuauagcau

SEQ ID NO: 554526 - RNA, 19 nt, Artificial Sequence
  Description of Artificial Sequence: Synthetic oligonucleotide
ccaucgggacuucucacuc

SEQ ID NO: 554527 - RNA, 19 nt, Artificial Sequence
  Description of Artificial Sequence: Synthetic oligonucleotide
gcacagucgacccguuuuc

SEQ ID NO: 554528 - RNA, 19 nt, Artificial Sequence
  Description of Artificial Sequence: Synthetic oligonucleotide
ucgcgucuccuccuuucuu

SEQ ID NO: 554529 - RNA, 19 nt, Artificial Sequence
  Description of Artificial Sequence: Synthetic oligonucleotide
gggacagagucgacuucgg

SEQ ID NO: 554530 - RNA, 19 nt, Artificial Sequence
  Description of Artificial Sequence: Synthetic oligonucleotide
gcugcauugcuggacgauc

SEQ ID NO: 554531 - RNA, 19 nt, Artificial Sequence
  Description of Artificial Sequence: Synthetic oligonucleotide
gcaaacauaugaggauaca

SEQ ID NO: 554532 - RNA, 19 nt, Artificial Sequence
  Description of Artificial Sequence: Synthetic oligonucleotide
gugcuauaauuacaugcuu

SEQ ID NO: 554533 - RNA, 19 nt, Artificial Sequence
  Description of Artificial Sequence: Synthetic oligonucleotide
uacaugcuuguugcuucua

SEQ ID NO: 554534 - RNA, 19 nt, Artificial Sequence
  Description of Artificial Sequence: Synthetic oligonucleotide
ugccgccuguggcacccug

SEQ ID NO: 554535 - RNA, 19 nt, Artificial Sequence
  Description of Artificial Sequence: Synthetic oligonucleotide
auuuucgacccugcuccuu

SEQ ID NO: 554536 - RNA, 19 nt, Artificial Sequence
  Description of Artificial Sequence: Synthetic oligonucleotide
ucgggacuucucacuccuc

SEQ ID NO: 554537 - RNA, 19 nt, Artificial Sequence
  Description of Artificial Sequence: Synthetic oligonucleotide
gaguacaacuuugcccacu

SEQ ID NO: 554538 - RNA, 19 nt, Artificial Sequence
  Description of Artificial Sequence: Synthetic oligonucleotide
agcugcauugcuggacgau

SEQ ID NO: 554539 - RNA, 19 nt, Artificial Sequence
  Description of Artificial Sequence: Synthetic oligonucleotide
cucgcaucaugcgcuccug

SEQ ID NO: 554540 - RNA, 19 nt, Artificial Sequence
  Description of Artificial Sequence: Synthetic oligonucleotide
ggauguaagguugacuauu

SEQ ID NO: 554541 - RNA, 19 nt, Artificial Sequence
  Description of Artificial Sequence: Synthetic oligonucleotide
uguugcgaucgugccuauc

SEQ ID NO: 554542 - RNA, 19 nt, Artificial Sequence
  Description of Artificial Sequence: Synthetic oligonucleotide
ccugaccuuuauugucaag

SEQ ID NO: 554543 - RNA, 19 nt, Artificial Sequence
  Description of Artificial Sequence: Synthetic oligonucleotide
cccugaauaaaaggauguc

SEQ ID NO: 554544 - RNA, 19 nt, Artificial Sequence
  Description of Artificial Sequence: Synthetic oligonucleotide
gcaaugccguuacgccggg

SEQ ID NO: 554545 - RNA, 19 nt, Artificial Sequence
  Description of Artificial Sequence: Synthetic oligonucleotide
ccacgguucacgcuccuca

SEQ ID NO: 554546 - RNA, 19 nt, Artificial Sequence
  Description of Artificial Sequence: Synthetic oligonucleotide
ggacaccuauggccaucgg

SEQ ID NO: 554547 - RNA, 19 nt, Artificial Sequence
  Description of Artificial Sequence: Synthetic oligonucleotide
ccguggcucagcugcaaug

SEQ ID NO: 554548 - RNA, 19 nt, Artificial Sequence
  Description of Artificial Sequence: Synthetic oligonucleotide
ggacgauccuuguuccuua

SEQ ID NO: 554549 - RNA, 19 nt, Artificial Sequence
  Description of Artificial Sequence: Synthetic oligonucleotide
cguuacgccgggcaccuac

SEQ ID NO: 554550 - RNA, 19 nt, Artificial Sequence
  Description of Artificial Sequence: Synthetic oligonucleotide
ggacagucaggacaccuau

SEQ ID NO: 554551 - RNA, 19 nt, Artificial Sequence
  Description of Artificial Sequence: Synthetic oligonucleotide
cucuguugcgaucgugccu

SEQ ID NO: 554552 - RNA, 19 nt, Artificial Sequence
  Description of Artificial Sequence: Synthetic oligonucleotide
acacaggauauaggaugua

SEQ ID NO: 554553 - RNA, 19 nt, Artificial Sequence
  Description of Artificial Sequence: Synthetic oligonucleotide
gcacccugaggcguuaaca

SEQ ID NO: 554554 - RNA, 19 nt, Artificial Sequence
  Description of Artificial Sequence: Synthetic oligonucleotide
cuccuuggucaaaguggga

SEQ ID NO: 554555 - RNA, 19 nt, Artificial Sequence
  Description of Artificial Sequence: Synthetic oligonucleotide
gacgauccuuguuccuuau

SEQ ID NO: 554556 - RNA, 19 nt, Artificial Sequence
  Description of Artificial Sequence: Synthetic oligonucleotide
ccuuaugcggucucucuua

SEQ ID NO: 554557 - RNA, 19 nt, Artificial Sequence
  Description of Artificial Sequence: Synthetic oligonucleotide
gagucgacuucggcuucga

SEQ ID NO: 554558 - RNA, 19 nt, Artificial Sequence
  Description of Artificial Sequence: Synthetic oligonucleotide
ggauagcauaauacgugcu

SEQ ID NO: 554559 - RNA, 19 nt, Artificial Sequence
  Description of Artificial Sequence: Synthetic oligonucleotide
cgaucgugccuaucuuccc

SEQ ID NO: 554560 - RNA, 19 nt, Artificial Sequence
  Description of Artificial Sequence: Synthetic oligonucleotide
gccugcggcguucuucuuc

SEQ ID NO: 554561 - RNA, 19 nt, Artificial Sequence
  Description of Artificial Sequence: Synthetic oligonucleotide
cagauucucuuuguccggu

SEQ ID NO: 554562 - RNA, 19 nt, Artificial Sequence
  Description of Artificial Sequence: Synthetic oligonucleotide
ggcacccugaggcguuaac

SEQ ID NO: 554563 - RNA, 19 nt, Artificial Sequence
  Description of Artificial Sequence: Synthetic oligonucleotide
caaugccguuacgccgggc

SEQ ID NO: 554564 - RNA, 19 nt, Artificial Sequence
  Description of Artificial Sequence: Synthetic oligonucleotide
gccaucgggacuucucacu

SEQ ID NO: 554565 - RNA, 19 nt, Artificial Sequence
  Description of Artificial Sequence: Synthetic oligonucleotide
aucuuccccucuggcgccu

SEQ ID NO: 554566 - RNA, 19 nt, Artificial Sequence
  Description of Artificial Sequence: Synthetic oligonucleotide
ccgccuguggcacccugag

SEQ ID NO: 554567 - RNA, 19 nt, Artificial Sequence
  Description of Artificial Sequence: Synthetic oligonucleotide
cacgcuccucagagccgug

SEQ ID NO: 554568 - RNA, 19 nt, Artificial Sequence
  Description of Artificial Sequence: Synthetic oligonucleotide
ccuuucuauuucgcgucuc

SEQ ID NO: 554569 - RNA, 19 nt, Artificial Sequence
  Description of Artificial Sequence: Synthetic oligonucleotide
cuggacgauccuuguuccu

SEQ ID NO: 554570 - RNA, 19 nt, Artificial Sequence
  Description of Artificial Sequence: Synthetic oligonucleotide
aggcguuaacagggucacu

SEQ ID NO: 554571 - RNA, 19 nt, Artificial Sequence
  Description of Artificial Sequence: Synthetic oligonucleotide
gguugacuauuaaucuuuu

SEQ ID NO: 554572 - RNA, 19 nt, Artificial Sequence
  Description of Artificial Sequence: Synthetic oligonucleotide
gggaggcaaucuucgaauu

SEQ ID NO: 554573 - RNA, 19 nt, Artificial Sequence
  Description of Artificial Sequence: Synthetic oligonucleotide
cuauggccaucgggacuuc

SEQ ID NO: 554574 - RNA, 19 nt, Artificial Sequence
  Description of Artificial Sequence: Synthetic oligonucleotide
cacagucgacccguuuucu

SEQ ID NO: 554575 - RNA, 19 nt, Artificial Sequence
  Description of Artificial Sequence: Synthetic oligonucleotide
ccaucagccguaauuuguu

SEQ ID NO: 554576 - RNA, 19 nt, Artificial Sequence
  Description of Artificial Sequence: Synthetic oligonucleotide
gcucaaaagugggguuguc

SEQ ID NO: 554577 - RNA, 19 nt, Artificial Sequence
  Description of Artificial Sequence: Synthetic oligonucleotide
ccggucucuuugcuuuguc

SEQ ID NO: 554578 - RNA, 19 nt, Artificial Sequence
  Description of Artificial Sequence: Synthetic oligonucleotide
cuguggcacccugaggcgu

SEQ ID NO: 554579 - RNA, 19 nt, Artificial Sequence
  Description of Artificial Sequence: Synthetic oligonucleotide
ugccugcggcguucuucuu

SEQ ID NO: 554580 - RNA, 19 nt, Artificial Sequence
  Description of Artificial Sequence: Synthetic oligonucleotide
cgauagucccaacuuuugu

SEQ ID NO: 554581 - RNA, 19 nt, Artificial Sequence
  Description of Artificial Sequence: Synthetic oligonucleotide
ccuauggccaucgggacuu

SEQ ID NO: 554582 - RNA, 19 nt, Artificial Sequence
  Description of Artificial Sequence: Synthetic oligonucleotide
gcggucucucuuaaucacu

SEQ ID NO: 554583 - RNA, 19 nt, Artificial Sequence
  Description of Artificial Sequence: Synthetic oligonucleotide
cgccgggcaccuacgacuc

SEQ ID NO: 554584 - RNA, 19 nt, Artificial Sequence
  Description of Artificial Sequence: Synthetic oligonucleotide
gucgacccguuuucuuguu

SEQ ID NO: 554585 - RNA, 19 nt, Artificial Sequence
  Description of Artificial Sequence: Synthetic oligonucleotide
gggucacucgcuucuccuu

SEQ ID NO: 554586 - RNA, 19 nt, Artificial Sequence
  Description of Artificial Sequence: Synthetic oligonucleotide
cggugcgaauucuacuaua

SEQ ID NO: 554587 - RNA, 19 nt, Artificial Sequence
  Description of Artificial Sequence: Synthetic oligonucleotide
gccguuacgccgggcaccu

SEQ ID NO: 554588 - RNA, 19 nt, Artificial Sequence
  Description of Artificial Sequence: Synthetic oligonucleotide
cagaacgccugggcagagu

SEQ ID NO: 554589 - RNA, 19 nt, Artificial Sequence
  Description of Artificial Sequence: Synthetic oligonucleotide
guggcacccugaggcguua

SEQ ID NO: 554590 - RNA, 19 nt, Artificial Sequence
  Description of Artificial Sequence: Synthetic oligonucleotide
cucuggcgccuucggcagu

SEQ ID NO: 554591 - RNA, 19 nt, Artificial Sequence
  Description of Artificial Sequence: Synthetic oligonucleotide
cgcaucaugcgcuccugau

SEQ ID NO: 554592 - RNA, 19 nt, Artificial Sequence
  Description of Artificial Sequence: Synthetic oligonucleotide
cuguugcgaucgugccuau

SEQ ID NO: 554593 - RNA, 19 nt, Artificial Sequence
  Description of Artificial Sequence: Synthetic oligonucleotide
gccguggcucagcugcaau

SEQ ID NO: 554594 - RNA, 19 nt, Artificial Sequence
  Description of Artificial Sequence: Synthetic oligonucleotide
ccguuacgccgggcaccua

SEQ ID NO: 554595 - RNA, 19 nt, Artificial Sequence
  Description of Artificial Sequence: Synthetic oligonucleotide
aaucuuggcacccauauac

SEQ ID NO: 554596 - RNA, 19 nt, Artificial Sequence
  Description of Artificial Sequence: Synthetic oligonucleotide
aauguugacagccagaaca

SEQ ID NO: 554597 - RNA, 19 nt, Artificial Sequence
  Description of Artificial Sequence: Synthetic oligonucleotide
uucaauacaagaaagugag

SEQ ID NO: 554598 - RNA, 19 nt, Artificial Sequence
  Description of Artificial Sequence: Synthetic oligonucleotide
aauugcgugguauaagugc

SEQ ID NO: 554599 - RNA, 19 nt, Artificial Sequence
  Description of Artificial Sequence: Synthetic oligonucleotide
uuaagaaugcaacuaauag

SEQ ID NO: 554600 - RNA, 19 nt, Artificial Sequence
  Description of Artificial Sequence: Synthetic oligonucleotide
ucuauuuccaaauugagaa

SEQ ID NO: 554601 - RNA, 19 nt, Artificial Sequence
  Description of Artificial Sequence: Synthetic oligonucleotide
gucaauauaacucuuaaug

SEQ ID NO: 554602 - RNA, 19 nt, Artificial Sequence
  Description of Artificial Sequence: Synthetic oligonucleotide
ucuacuuuggaaaacaccu

SEQ ID NO: 554603 - RNA, 19 nt, Artificial Sequence
  Description of Artificial Sequence: Synthetic oligonucleotide
aauuacaaccuauucugac

SEQ ID NO: 554604 - RNA, 19 nt, Artificial Sequence
  Description of Artificial Sequence: Synthetic oligonucleotide
ugaaaugugagauacaaaa

SEQ ID NO: 554605 - RNA, 19 nt, Artificial Sequence
  Description of Artificial Sequence: Synthetic oligonucleotide
aagaaagugagaugaacuc

SEQ ID NO: 554606 - RNA, 19 nt, Artificial Sequence
  Description of Artificial Sequence: Synthetic oligonucleotide
uuuagcagaaaucucaaga

SEQ ID NO: 554607 - RNA, 19 nt, Artificial Sequence
  Description of Artificial Sequence: Synthetic oligonucleotide
aauacuagaaacaccagag

SEQ ID NO: 554608 - RNA, 19 nt, Artificial Sequence
  Description of Artificial Sequence: Synthetic oligonucleotide
aaagguaucagcaccuucc

SEQ ID NO: 554609 - RNA, 19 nt, Artificial Sequence
  Description of Artificial Sequence: Synthetic oligonucleotide
uuuacauuuucacauaggu

SEQ ID NO: 554610 - RNA, 19 nt, Artificial Sequence
  Description of Artificial Sequence: Synthetic oligonucleotide
cuagcauuaggaaacaagg

SEQ ID NO: 554611 - RNA, 19 nt, Artificial Sequence
  Description of Artificial Sequence: Synthetic oligonucleotide
aauucuaagacggaaagca

SEQ ID NO: 554612 - RNA, 19 nt, Artificial Sequence
  Description of Artificial Sequence: Synthetic oligonucleotide
uguaucaccacacagaauu

SEQ ID NO: 554613 - RNA, 19 nt, Artificial Sequence
  Description of Artificial Sequence: Synthetic oligonucleotide
aucagugcuaaucaauucc

SEQ ID NO: 554614 - RNA, 19 nt, Artificial Sequence
  Description of Artificial Sequence: Synthetic oligonucleotide
uucauaagagccaagaauc

SEQ ID NO: 554615 - RNA, 19 nt, Artificial Sequence
  Description of Artificial Sequence: Synthetic oligonucleotide
aaucucaagacauuuagaa

SEQ ID NO: 554616 - RNA, 19 nt, Artificial Sequence
  Description of Artificial Sequence: Synthetic oligonucleotide
caugugaauucuaagacgg

SEQ ID NO: 554617 - RNA, 19 nt, Artificial Sequence
  Description of Artificial Sequence: Synthetic oligonucleotide
uuuaaauccugacacagac

SEQ ID NO: 554618 - RNA, 19 nt, Artificial Sequence
  Description of Artificial Sequence: Synthetic oligonucleotide
ucuuaaaucuucuacuuug

SEQ ID NO: 554619 - RNA, 19 nt, Artificial Sequence
  Description of Artificial Sequence: Synthetic oligonucleotide
uaagaaugcaacuaauagc

SEQ ID NO: 554620 - RNA, 19 nt, Artificial Sequence
  Description of Artificial Sequence: Synthetic oligonucleotide
aacggggagaaagaaaucc

SEQ ID NO: 554621 - RNA, 19 nt, Artificial Sequence
  Description of Artificial Sequence: Synthetic oligonucleotide
uuucaauacaagaaaguga

SEQ ID NO: 554622 - RNA, 19 nt, Artificial Sequence
  Description of Artificial Sequence: Synthetic oligonucleotide
ugaauucuaagacggaaag

SEQ ID NO: 554623 - RNA, 19 nt, Artificial Sequence
  Description of Artificial Sequence: Synthetic oligonucleotide
uguuaagaggcacuaaccc

SEQ ID NO: 554624 - RNA, 19 nt, Artificial Sequence
  Description of Artificial Sequence: Synthetic oligonucleotide
ucaauauaacucuuaaugu

SEQ ID NO: 554625 - RNA, 19 nt, Artificial Sequence
  Description of Artificial Sequence: Synthetic oligonucleotide
uggaaaacaccucaauggg

SEQ ID NO: 554626 - RNA, 19 nt, Artificial Sequence
  Description of Artificial Sequence: Synthetic oligonucleotide
aaggcuuaucuacuguccc

SEQ ID NO: 554627 - RNA, 19 nt, Artificial Sequence
  Description of Artificial Sequence: Synthetic oligonucleotide
aguaguagcuuccaacucg

SEQ ID NO: 554628 - RNA, 19 nt, Artificial Sequence
  Description of Artificial Sequence: Synthetic oligonucleotide
gauagagucaacaagaaaa

SEQ ID NO: 554629 - RNA, 19 nt, Artificial Sequence
  Description of Artificial Sequence: Synthetic oligonucleotide
auauucaaaucuuggcacc

SEQ ID NO: 554630 - RNA, 19 nt, Artificial Sequence
  Description of Artificial Sequence: Synthetic oligonucleotide
aguguuaucauucucuggu

SEQ ID NO: 554631 - RNA, 19 nt, Artificial Sequence
  Description of Artificial Sequence: Synthetic oligonucleotide
uuagguauuaagaaugcaa

SEQ ID NO: 554632 - RNA, 19 nt, Artificial Sequence
  Description of Artificial Sequence: Synthetic oligonucleotide
aagagccaagaaucuaucc

SEQ ID NO: 554633 - RNA, 19 nt, Artificial Sequence
  Description of Artificial Sequence: Synthetic oligonucleotide
aacuaauagcccuagccug

SEQ ID NO: 554634 - RNA, 19 nt, Artificial Sequence
  Description of Artificial Sequence: Synthetic oligonucleotide
aagacaauauacuagcauu

SEQ ID NO: 554635 - RNA, 19 nt, Artificial Sequence
  Description of Artificial Sequence: Synthetic oligonucleotide
uuugaaaagacaagccggc

SEQ ID NO: 554636 - RNA, 19 nt, Artificial Sequence
  Description of Artificial Sequence: Synthetic oligonucleotide
aauagcccuagccugauga

SEQ ID NO: 554637 - RNA, 19 nt, Artificial Sequence
  Description of Artificial Sequence: Synthetic oligonucleotide
uaauacuagaaacaccaga

SEQ ID NO: 554638 - RNA, 19 nt, Artificial Sequence
  Description of Artificial Sequence: Synthetic oligonucleotide
uccaauaaaagaauuccgu

SEQ ID NO: 554639 - RNA, 19 nt, Artificial Sequence
  Description of Artificial Sequence: Synthetic oligonucleotide
caauauaacucuuaaugug

SEQ ID NO: 554640 - RNA, 19 nt, Artificial Sequence
  Description of Artificial Sequence: Synthetic oligonucleotide
uuuacacugacugauccgg

SEQ ID NO: 554641 - RNA, 19 nt, Artificial Sequence
  Description of Artificial Sequence: Synthetic oligonucleotide
ucuaagacggaaagcacag

SEQ ID NO: 554642 - RNA, 19 nt, Artificial Sequence
  Description of Artificial Sequence: Synthetic oligonucleotide
aauauacuagcauuaggaa

SEQ ID NO: 554643 - RNA, 19 nt, Artificial Sequence
  Description of Artificial Sequence: Synthetic oligonucleotide
cucaggaacacuauaguag

SEQ ID NO: 554644 - RNA, 19 nt, Artificial Sequence
  Description of Artificial Sequence: Synthetic oligonucleotide
aaguaagucaucaaugucu

SEQ ID NO: 554645 - RNA, 19 nt, Artificial Sequence
  Description of Artificial Sequence: Synthetic oligonucleotide
aaccaugaaaggcuuaucu

SEQ ID NO: 554646 - RNA, 19 nt, Artificial Sequence
  Description of Artificial Sequence: Synthetic oligonucleotide
aauucccuccaauaaaaga

SEQ ID NO: 554647 - RNA, 19 nt, Artificial Sequence
  Description of Artificial Sequence: Synthetic oligonucleotide
aauacuacaguuugacaau

SEQ ID NO: 554648 - RNA, 19 nt, Artificial Sequence
  Description of Artificial Sequence: Synthetic oligonucleotide
uuuacgaugagcgacacua

SEQ ID NO: 554649 - RNA, 19 nt, Artificial Sequence
  Description of Artificial Sequence: Synthetic oligonucleotide
ucaggaacacuauaguagc

SEQ ID NO: 554650 - RNA, 19 nt, Artificial Sequence
  Description of Artificial Sequence: Synthetic oligonucleotide
acauaaaguguuaucauuc

SEQ ID NO: 554651 - RNA, 19 nt, Artificial Sequence
  Description of Artificial Sequence: Synthetic oligonucleotide
uggguauugacuuacuagu

SEQ ID NO: 554652 - RNA, 19 nt, Artificial Sequence
  Description of Artificial Sequence: Synthetic oligonucleotide
aaaaguuaguuaaacuucu

SEQ ID NO: 554653 - RNA, 19 nt, Artificial Sequence
  Description of Artificial Sequence: Synthetic oligonucleotide
acagucuacucugagaacg

SEQ ID NO: 554654 - RNA, 19 nt, Artificial Sequence
  Description of Artificial Sequence: Synthetic oligonucleotide
uuugaacuaauacuagaaa

SEQ ID NO: 554655 - RNA, 19 nt, Artificial Sequence
  Description of Artificial Sequence: Synthetic oligonucleotide
auggguauugacuuacuag

SEQ ID NO: 554656 - RNA, 19 nt, Artificial Sequence
  Description of Artificial Sequence: Synthetic oligonucleotide
uuuacaugcacugaccaga

SEQ ID NO: 554657 - RNA, 19 nt, Artificial Sequence
  Description of Artificial Sequence: Synthetic oligonucleotide
guauaagacaauauacuag

SEQ ID NO: 554658 - RNA, 19 nt, Artificial Sequence
  Description of Artificial Sequence: Synthetic oligonucleotide
uucuaagacggaaagcaca

SEQ ID NO: 554659 - RNA, 19 nt, Artificial Sequence
  Description of Artificial Sequence: Synthetic oligonucleotide
gaaggugcacucuugauca

SEQ ID NO: 554660 - RNA, 19 nt, Artificial Sequence
  Description of Artificial Sequence: Synthetic oligonucleotide
aacauaaaguguuaucauu

SEQ ID NO: 554661 - RNA, 19 nt, Artificial Sequence
  Description of Artificial Sequence: Synthetic oligonucleotide
uugcuuugaacuaauacua

SEQ ID NO: 554662 - RNA, 19 nt, Artificial Sequence
  Description of Artificial Sequence: Synthetic oligonucleotide
agaagaauacucugcuagg

SEQ ID NO: 554663 - RNA, 19 nt, Artificial Sequence
  Description of Artificial Sequence: Synthetic oligonucleotide
uaguuaaacuucuuaaauc

SEQ ID NO: 554664 - RNA, 19 nt, Artificial Sequence
  Description of Artificial Sequence: Synthetic oligonucleotide
uggcuuaggauuaaauaug

SEQ ID NO: 554665 - RNA, 19 nt, Artificial Sequence
  Description of Artificial Sequence: Synthetic oligonucleotide
aacacuauaguagcuguug

SEQ ID NO: 554666 - RNA, 19 nt, Artificial Sequence
  Description of Artificial Sequence: Synthetic oligonucleotide
aaguguuaucauucucugg

SEQ ID NO: 554667 - RNA, 19 nt, Artificial Sequence
  Description of Artificial Sequence: Synthetic oligonucleotide
guacagagcguacacaucc

SEQ ID NO: 554668 - RNA, 19 nt, Artificial Sequence
  Description of Artificial Sequence: Synthetic oligonucleotide
cuccaauaaaagaauuccg

SEQ ID NO: 554669 - RNA, 19 nt, Artificial Sequence
  Description of Artificial Sequence: Synthetic oligonucleotide
gaagguucuacaguuuacg

SEQ ID NO: 554670 - RNA, 19 nt, Artificial Sequence
  Description of Artificial Sequence: Synthetic oligonucleotide
ugguguauccuccaucaag

SEQ ID NO: 554671 - RNA, 19 nt, Artificial Sequence
  Description of Artificial Sequence: Synthetic oligonucleotide
aacaagcaagagaauuucc

SEQ ID NO: 554672 - RNA, 19 nt, Artificial Sequence
  Description of Artificial Sequence: Synthetic oligonucleotide
auuacaaccuauucugacu

SEQ ID NO: 554673 - RNA, 19 nt, Artificial Sequence
  Description of Artificial Sequence: Synthetic oligonucleotide
ucuacucugagaacgggga

SEQ ID NO: 554674 - RNA, 19 nt, Artificial Sequence
  Description of Artificial Sequence: Synthetic oligonucleotide
aagaauacucugcuaggca

SEQ ID NO: 554675 - RNA, 19 nt, Artificial Sequence
  Description of Artificial Sequence: Synthetic oligonucleotide
gcacuaacccauuugaugg

SEQ ID NO: 554676 - RNA, 19 nt, Artificial Sequence
  Description of Artificial Sequence: Synthetic oligonucleotide
acaauacuuagguauuaag

SEQ ID NO: 554677 - RNA, 19 nt, Artificial Sequence
  Description of Artificial Sequence: Synthetic oligonucleotide
aauguguaggaucuguaua

SEQ ID NO: 554678 - RNA, 19 nt, Artificial Sequence
  Description of Artificial Sequence: Synthetic oligonucleotide
uauaguagcuguugugcag

SEQ ID NO: 554679 - RNA, 19 nt, Artificial Sequence
  Description of Artificial Sequence: Synthetic oligonucleotide
auauacuagcauuaggaaa

SEQ ID NO: 554680 - RNA, 19 nt, Artificial Sequence
  Description of Artificial Sequence: Synthetic oligonucleotide
acugauccggaucacauca

SEQ ID NO: 554681 - RNA, 19 nt, Artificial Sequence
  Description of Artificial Sequence: Synthetic oligonucleotide
aaauccgagacaaaccaug

SEQ ID NO: 554682 - RNA, 19 nt, Artificial Sequence
  Description of Artificial Sequence: Synthetic oligonucleotide
ugucugggaauauagaaua

SEQ ID NO: 554683 - RNA, 19 nt, Artificial Sequence
  Description of Artificial Sequence: Synthetic oligonucleotide
ucagugcuaaucaauucca

SEQ ID NO: 554684 - RNA, 19 nt, Artificial Sequence
  Description of Artificial Sequence: Synthetic oligonucleotide
gguucuacaguuuacgaug

SEQ ID NO: 554685 - RNA, 19 nt, Artificial Sequence
  Description of Artificial Sequence: Synthetic oligonucleotide
acaauugcgugguauaagu

SEQ ID NO: 554686 - RNA, 19 nt, Artificial Sequence
  Description of Artificial Sequence: Synthetic oligonucleotide
uccuguacagucuacucug

SEQ ID NO: 554687 - RNA, 19 nt, Artificial Sequence
  Description of Artificial Sequence: Synthetic oligonucleotide
cugggaauauagaauacac

SEQ ID NO: 554688 - RNA, 19 nt, Artificial Sequence
  Description of Artificial Sequence: Synthetic oligonucleotide
aaguuaguuaaacuucuua

SEQ ID NO: 554689 - RNA, 19 nt, Artificial Sequence
  Description of Artificial Sequence: Synthetic oligonucleotide
acagauagagucaacaaga

SEQ ID NO: 554690 - RNA, 19 nt, Artificial Sequence
  Description of Artificial Sequence: Synthetic oligonucleotide
cacagauagagucaacaag

SEQ ID NO: 554691 - RNA, 19 nt, Artificial Sequence
  Description of Artificial Sequence: Synthetic oligonucleotide
ugcgccuugaaacaaucca

SEQ ID NO: 554692 - RNA, 19 nt, Artificial Sequence
  Description of Artificial Sequence: Synthetic oligonucleotide
caagcaagagaauuuccag

SEQ ID NO: 554693 - RNA, 19 nt, Artificial Sequence
  Description of Artificial Sequence: Synthetic oligonucleotide
uguacuagagaacuaccua

SEQ ID NO: 554694 - RNA, 19 nt, Artificial Sequence
  Description of Artificial Sequence: Synthetic oligonucleotide
ugcuuugaacuaauacuag

SEQ ID NO: 554695 - RNA, 19 nt, Artificial Sequence
  Description of Artificial Sequence: Synthetic oligonucleotide
ggagaaagaaauccgagac

SEQ ID NO: 554696 - RNA, 19 nt, Artificial Sequence
  Description of Artificial Sequence: Synthetic oligonucleotide
acucaaucagugcuaauca

SEQ ID NO: 554697 - RNA, 19 nt, Artificial Sequence
  Description of Artificial Sequence: Synthetic oligonucleotide
gggaauauagaauacacaa

SEQ ID NO: 554698 - RNA, 19 nt, Artificial Sequence
  Description of Artificial Sequence: Synthetic oligonucleotide
uauugacuuacuaguaaaa

SEQ ID NO: 554699 - RNA, 19 nt, Artificial Sequence
  Description of Artificial Sequence: Synthetic oligonucleotide
agcauuaggaaacaagguu

SEQ ID NO: 554700 - RNA, 19 nt, Artificial Sequence
  Description of Artificial Sequence: Synthetic oligonucleotide
guuccauacaagugcaugc

SEQ ID NO: 554701 - RNA, 19 nt, Artificial Sequence
  Description of Artificial Sequence: Synthetic oligonucleotide
auuuacaugcacugaccag

SEQ ID NO: 554702 - RNA, 19 nt, Artificial Sequence
  Description of Artificial Sequence: Synthetic oligonucleotide
agcuguacuagagaacuac

SEQ ID NO: 554703 - RNA, 19 nt, Artificial Sequence
  Description of Artificial Sequence: Synthetic oligonucleotide
agagucaacaagaaaauaa

SEQ ID NO: 554704 - RNA, 19 nt, Artificial Sequence
  Description of Artificial Sequence: Synthetic oligonucleotide
aagguucuacaguuuacga

SEQ ID NO: 554705 - RNA, 19 nt, Artificial Sequence
  Description of Artificial Sequence: Synthetic oligonucleotide
uuacaaccuauucugacuu

SEQ ID NO: 554706 - RNA, 19 nt, Artificial Sequence
  Description of Artificial Sequence: Synthetic oligonucleotide
gacguugcauucuucuucc

SEQ ID NO: 554707 - RNA, 19 nt, Artificial Sequence
  Description of Artificial Sequence: Synthetic oligonucleotide
gaagaauacucugcuaggc

SEQ ID NO: 554708 - RNA, 19 nt, Artificial Sequence
  Description of Artificial Sequence: Synthetic oligonucleotide
aaauacaauugcgugguau

SEQ ID NO: 554709 - RNA, 19 nt, Artificial Sequence
  Description of Artificial Sequence: Synthetic oligonucleotide
accuacuccccauuuauug

SEQ ID NO: 554710 - RNA, 19 nt, Artificial Sequence
  Description of Artificial Sequence: Synthetic oligonucleotide
acuagcauuaggaaacaag

SEQ ID NO: 554711 - RNA, 19 nt, Artificial Sequence
  Description of Artificial Sequence: Synthetic oligonucleotide
gaagguagguauuccaguc

SEQ ID NO: 554712 - RNA, 19 nt, Artificial Sequence
  Description of Artificial Sequence: Synthetic oligonucleotide
auccuuauggcuguaucac

SEQ ID NO: 554713 - RNA, 19 nt, Artificial Sequence
  Description of Artificial Sequence: Synthetic oligonucleotide
gcaacuaauagcccuagcc

SEQ ID NO: 554714 - RNA, 19 nt, Artificial Sequence
  Description of Artificial Sequence: Synthetic oligonucleotide
agauuaucuucuccaugcg

SEQ ID NO: 554715 - RNA, 19 nt, Artificial Sequence
  Description of Artificial Sequence: Synthetic oligonucleotide
aggagaagaauacucugcu

SEQ ID NO: 554716 - RNA, 19 nt, Artificial Sequence
  Description of Artificial Sequence: Synthetic oligonucleotide
gauggcuuaggauuaaaua

SEQ ID NO: 554717 - RNA, 19 nt, Artificial Sequence
  Description of Artificial Sequence: Synthetic oligonucleotide
gauaccugaagguucuaca

SEQ ID NO: 554718 - RNA, 19 nt, Artificial Sequence
  Description of Artificial Sequence: Synthetic oligonucleotide
agguauuccagucuguaau

SEQ ID NO: 554719 - RNA, 19 nt, Artificial Sequence
  Description of Artificial Sequence: Synthetic oligonucleotide
acacuacucaucuuuaaaa

SEQ ID NO: 554720 - RNA, 19 nt, Artificial Sequence
  Description of Artificial Sequence: Synthetic oligonucleotide
aagguagguauuccagucu

SEQ ID NO: 554721 - RNA, 19 nt, Artificial Sequence
  Description of Artificial Sequence: Synthetic oligonucleotide
auguguaggaucuguauaa

SEQ ID NO: 554722 - RNA, 19 nt, Artificial Sequence
  Description of Artificial Sequence: Synthetic oligonucleotide
ucugggaauauagaauaca

SEQ ID NO: 554723 - RNA, 19 nt, Artificial Sequence
  Description of Artificial Sequence: Synthetic oligonucleotide
agguagaauucauuaauau

SEQ ID NO: 554724 - RNA, 19 nt, Artificial Sequence
  Description of Artificial Sequence: Synthetic oligonucleotide
uacaagugcaugcauuuua

SEQ ID NO: 554725 - RNA, 19 nt, Artificial Sequence
  Description of Artificial Sequence: Synthetic oligonucleotide
aguccuguacagucuacuc

SEQ ID NO: 554726 - RNA, 19 nt, Artificial Sequence
  Description of Artificial Sequence: Synthetic oligonucleotide
auucaacggauuuuauugu

SEQ ID NO: 554727 - RNA, 19 nt, Artificial Sequence
  Description of Artificial Sequence: Synthetic oligonucleotide
auaugaaaacaggccagac

SEQ ID NO: 554728 - RNA, 19 nt, Artificial Sequence
  Description of Artificial Sequence: Synthetic oligonucleotide
auucccuccaauaaaagaa

SEQ ID NO: 554729 - RNA, 19 nt, Artificial Sequence
  Description of Artificial Sequence: Synthetic oligonucleotide
cuaauacuagaaacaccag

SEQ ID NO: 554730 - RNA, 19 nt, Artificial Sequence
  Description of Artificial Sequence: Synthetic oligonucleotide
acucaagaguccuguacag

SEQ ID NO: 554731 - RNA, 19 nt, Artificial Sequence
  Description of Artificial Sequence: Synthetic oligonucleotide
agacaaaccaugaaaggcu

SEQ ID NO: 554732 - RNA, 19 nt, Artificial Sequence
  Description of Artificial Sequence: Synthetic oligonucleotide
guaggaucuguauaagaca

SEQ ID NO: 554733 - RNA, 19 nt, Artificial Sequence
  Description of Artificial Sequence: Synthetic oligonucleotide
gaauucuaagacggaaagc

SEQ ID NO: 554734 - RNA, 19 nt, Artificial Sequence
  Description of Artificial Sequence: Synthetic oligonucleotide
uggcuguaucaccacacag

SEQ ID NO: 554735 - RNA, 19 nt, Artificial Sequence
  Description of Artificial Sequence: Synthetic oligonucleotide
uuaauguguaggaucugua

SEQ ID NO: 554736 - RNA, 19 nt, Artificial Sequence
  Description of Artificial Sequence: Synthetic oligonucleotide
agaacggggagaaagaaau

SEQ ID NO: 554737 - RNA, 19 nt, Artificial Sequence
  Description of Artificial Sequence: Synthetic oligonucleotide
uuaucuacugucccugcua

SEQ ID NO: 554738 - RNA, 19 nt, Artificial Sequence
  Description of Artificial Sequence: Synthetic oligonucleotide
uacaauugcgugguauaag

SEQ ID NO: 554739 - RNA, 19 nt, Artificial Sequence
  Description of Artificial Sequence: Synthetic oligonucleotide
uuucagugcaagauccaaa

SEQ ID NO: 554740 - RNA, 19 nt, Artificial Sequence
  Description of Artificial Sequence: Synthetic oligonucleotide
ugcuaggcauuuagaaacc

SEQ ID NO: 554741 - RNA, 19 nt, Artificial Sequence
  Description of Artificial Sequence: Synthetic oligonucleotide
ugggagcuguacuagagaa

SEQ ID NO: 554742 - RNA, 19 nt, Artificial Sequence
  Description of Artificial Sequence: Synthetic oligonucleotide
uacgaugagcgacacuacu

SEQ ID NO: 554743 - RNA, 19 nt, Artificial Sequence
  Description of Artificial Sequence: Synthetic oligonucleotide
uaucuacugucccugcuaa

SEQ ID NO: 554744 - RNA, 19 nt, Artificial Sequence
  Description of Artificial Sequence: Synthetic oligonucleotide
caauaaaagaauuccgugu

SEQ ID NO: 554745 - RNA, 19 nt, Artificial Sequence
  Description of Artificial Sequence: Synthetic oligonucleotide
auucuaagacggaaagcac

SEQ ID NO: 554746 - RNA, 19 nt, Artificial Sequence
  Description of Artificial Sequence: Synthetic oligonucleotide
agaaugcaacuaauagccc

SEQ ID NO: 554747 - RNA, 19 nt, Artificial Sequence
  Description of Artificial Sequence: Synthetic oligonucleotide
agagcuaauacagaugguu

SEQ ID NO: 554748 - RNA, 19 nt, Artificial Sequence
  Description of Artificial Sequence: Synthetic oligonucleotide
caacggauuuuauuguuuc

SEQ ID NO: 554749 - RNA, 19 nt, Artificial Sequence
  Description of Artificial Sequence: Synthetic oligonucleotide
guauugacuuacuaguaaa

SEQ ID NO: 554750 - RNA, 19 nt, Artificial Sequence
  Description of Artificial Sequence: Synthetic oligonucleotide
uccggaucacaucaugagu

SEQ ID NO: 554751 - RNA, 19 nt, Artificial Sequence
  Description of Artificial Sequence: Synthetic oligonucleotide
uacaguuuacgaugagcga

SEQ ID NO: 554752 - RNA, 19 nt, Artificial Sequence
  Description of Artificial Sequence: Synthetic oligonucleotide
gaaacaauccaaaccagcu

SEQ ID NO: 554753 - RNA, 19 nt, Artificial Sequence
  Description of Artificial Sequence: Synthetic oligonucleotide
agcgacacuacucaucuuu

SEQ ID NO: 554754 - RNA, 19 nt, Artificial Sequence
  Description of Artificial Sequence: Synthetic oligonucleotide
gaaagugagaugaacucaa

SEQ ID NO: 554755 - RNA, 19 nt, Artificial Sequence
  Description of Artificial Sequence: Synthetic oligonucleotide
agauaccugaagguucuac

SEQ ID NO: 554756 - RNA, 19 nt, Artificial Sequence
  Description of Artificial Sequence: Synthetic oligonucleotide
aaccuauucugacuucaaa

SEQ ID NO: 554757 - RNA, 19 nt, Artificial Sequence
  Description of Artificial Sequence: Synthetic oligonucleotide
ugacugauccggaucacau

SEQ ID NO: 554758 - RNA, 19 nt, Artificial Sequence
  Description of Artificial Sequence: Synthetic oligonucleotide
ugcuaaggaagcacuugca

SEQ ID NO: 554759 - RNA, 19 nt, Artificial Sequence
  Description of Artificial Sequence: Synthetic oligonucleotide
uguguaggaucuguauaag

SEQ ID NO: 554760 - RNA, 19 nt, Artificial Sequence
  Description of Artificial Sequence: Synthetic oligonucleotide
auagcccuagccugaugac

SEQ ID NO: 554761 - RNA, 19 nt, Artificial Sequence
  Description of Artificial Sequence: Synthetic oligonucleotide
ucaacggauuuuauuguuu

SEQ ID NO: 554762 - RNA, 19 nt, Artificial Sequence
  Description of Artificial Sequence: Synthetic oligonucleotide
ggcacuaacccauuugaug

SEQ ID NO: 554763 - RNA, 19 nt, Artificial Sequence
  Description of Artificial Sequence: Synthetic oligonucleotide
acagaauugcuuugaacua

SEQ ID NO: 554764 - RNA, 19 nt, Artificial Sequence
  Description of Artificial Sequence: Synthetic oligonucleotide
acggaaagcacagugucug

SEQ ID NO: 554765 - RNA, 19 nt, Artificial Sequence
  Description of Artificial Sequence: Synthetic oligonucleotide
uccuuauggcuguaucacc

SEQ ID NO: 554766 - RNA, 19 nt, Artificial Sequence
  Description of Artificial Sequence: Synthetic oligonucleotide
agcuuaucaaggcucagua

SEQ ID NO: 554767 - RNA, 19 nt, Artificial Sequence
  Description of Artificial Sequence: Synthetic oligonucleotide
ccaugugaauucuaagacg

SEQ ID NO: 554768 - RNA, 19 nt, Artificial Sequence
  Description of Artificial Sequence: Synthetic oligonucleotide
agguucuacaguuuacgau

SEQ ID NO: 554769 - RNA, 19 nt, Artificial Sequence
  Description of Artificial Sequence: Synthetic oligonucleotide
cuccaaugcaagacaaaug

SEQ ID NO: 554770 - RNA, 19 nt, Artificial Sequence
  Description of Artificial Sequence: Synthetic oligonucleotide
agugcuaaucaauuccauu

SEQ ID NO: 554771 - RNA, 19 nt, Artificial Sequence
  Description of Artificial Sequence: Synthetic oligonucleotide
agauagagucaacaagaaa

SEQ ID NO: 554772 - RNA, 19 nt, Artificial Sequence
  Description of Artificial Sequence: Synthetic oligonucleotide
uagaugggagcuguacuag

SEQ ID NO: 554773 - RNA, 19 nt, Artificial Sequence
  Description of Artificial Sequence: Synthetic oligonucleotide
uuccauacaagugcaugca

SEQ ID NO: 554774 - RNA, 19 nt, Artificial Sequence
  Description of Artificial Sequence: Synthetic oligonucleotide
aagacggaaagcacagugu

SEQ ID NO: 554775 - RNA, 19 nt, Artificial Sequence
  Description of Artificial Sequence: Synthetic oligonucleotide
aaggugcacucuugaucac

SEQ ID NO: 554776 - RNA, 19 nt, Artificial Sequence
  Description of Artificial Sequence: Synthetic oligonucleotide
gguguauccuccaucaagc

SEQ ID NO: 554777 - RNA, 19 nt, Artificial Sequence
  Description of Artificial Sequence: Synthetic oligonucleotide
gugccaauguauaaaguac

SEQ ID NO: 554778 - RNA, 19 nt, Artificial Sequence
  Description of Artificial Sequence: Synthetic oligonucleotide
aagguugguguuugacacu

SEQ ID NO: 554779 - RNA, 19 nt, Artificial Sequence
  Description of Artificial Sequence: Synthetic oligonucleotide
gaagcugugcauuuacacu

SEQ ID NO: 554780 - RNA, 19 nt, Artificial Sequence
  Description of Artificial Sequence: Synthetic oligonucleotide
cucccgaucuguuaaauaa

SEQ ID NO: 554781 - RNA, 19 nt, Artificial Sequence
  Description of Artificial Sequence: Synthetic oligonucleotide
cagucuacucugagaacgg

SEQ ID NO: 554782 - RNA, 19 nt, Artificial Sequence
  Description of Artificial Sequence: Synthetic oligonucleotide
aaugcaacuaauagcccua

SEQ ID NO: 554783 - RNA, 19 nt, Artificial Sequence
  Description of Artificial Sequence: Synthetic oligonucleotide
uucaacggauuuuauuguu

SEQ ID NO: 554784 - RNA, 19 nt, Artificial Sequence
  Description of Artificial Sequence: Synthetic oligonucleotide
ccgagacaaaccaugaaag

SEQ ID NO: 554785 - RNA, 19 nt, Artificial Sequence
  Description of Artificial Sequence: Synthetic oligonucleotide
accucaauggguauugacu

SEQ ID NO: 554786 - RNA, 19 nt, Artificial Sequence
  Description of Artificial Sequence: Synthetic oligonucleotide
uucuacaguuuacgaugag

SEQ ID NO: 554787 - RNA, 19 nt, Artificial Sequence
  Description of Artificial Sequence: Synthetic oligonucleotide
uguacagagcguacacauc

SEQ ID NO: 554788 - RNA, 19 nt, Artificial Sequence
  Description of Artificial Sequence: Synthetic oligonucleotide
agagaacuaccuacucccc

SEQ ID NO: 554789 - RNA, 19 nt, Artificial Sequence
  Description of Artificial Sequence: Synthetic oligonucleotide
caauugcgugguauaagug

SEQ ID NO: 554790 - RNA, 19 nt, Artificial Sequence
  Description of Artificial Sequence: Synthetic oligonucleotide
auugcgugguauaagugca

SEQ ID NO: 554791 - RNA, 19 nt, Artificial Sequence
  Description of Artificial Sequence: Synthetic oligonucleotide
uuacaugcacugaccagau

SEQ ID NO: 554792 - RNA, 19 nt, Artificial Sequence
  Description of Artificial Sequence: Synthetic oligonucleotide
agcaauucaacggauuuua

SEQ ID NO: 554793 - RNA, 19 nt, Artificial Sequence
  Description of Artificial Sequence: Synthetic oligonucleotide
acaaccuauucugacuuca

SEQ ID NO: 554794 - RNA, 19 nt, Artificial Sequence
  Description of Artificial Sequence: Synthetic oligonucleotide
cacccauauacaauacauc

SEQ ID NO: 554795 - RNA, 19 nt, Artificial Sequence
  Description of Artificial Sequence: Synthetic oligonucleotide
cacaagaguccucacuuuc

SEQ ID NO: 554796 - RNA, 19 nt, Artificial Sequence
  Description of Artificial Sequence: Synthetic oligonucleotide
guagcuuccaacucguagu

SEQ ID NO: 554797 - RNA, 19 nt, Artificial Sequence
  Description of Artificial Sequence: Synthetic oligonucleotide
ugacacucaagaguccugu

SEQ ID NO: 554798 - RNA, 19 nt, Artificial Sequence
  Description of Artificial Sequence: Synthetic oligonucleotide
cauccuuauggcuguauca

SEQ ID NO: 554799 - RNA, 19 nt, Artificial Sequence
  Description of Artificial Sequence: Synthetic oligonucleotide
ugcaacuaauagcccuagc

SEQ ID NO: 554800 - RNA, 19 nt, Artificial Sequence
  Description of Artificial Sequence: Synthetic oligonucleotide
cacuaacccauuugauggc

SEQ ID NO: 554801 - RNA, 19 nt, Artificial Sequence
  Description of Artificial Sequence: Synthetic oligonucleotide
cucguagugcaauuuucuc

SEQ ID NO: 554802 - RNA, 19 nt, Artificial Sequence
  Description of Artificial Sequence: Synthetic oligonucleotide
cauucuagcugccagcaaa

SEQ ID NO: 554803 - RNA, 19 nt, Artificial Sequence
  Description of Artificial Sequence: Synthetic oligonucleotide
acggggagaaagaaauccg

SEQ ID NO: 554804 - RNA, 19 nt, Artificial Sequence
  Description of Artificial Sequence: Synthetic oligonucleotide
aguuuacgaugagcgacac

SEQ ID NO: 554805 - RNA, 19 nt, Artificial Sequence
  Description of Artificial Sequence: Synthetic oligonucleotide
uuacgaugagcgacacuac

SEQ ID NO: 554806 - RNA, 19 nt, Artificial Sequence
  Description of Artificial Sequence: Synthetic oligonucleotide
gguauuaagaaugcaacua

SEQ ID NO: 554807 - RNA, 19 nt, Artificial Sequence
  Description of Artificial Sequence: Synthetic oligonucleotide
agagcguacacauccccau

SEQ ID NO: 554808 - RNA, 19 nt, Artificial Sequence
  Description of Artificial Sequence: Synthetic oligonucleotide
uccauacaagugcaugcau

SEQ ID NO: 554809 - RNA, 19 nt, Artificial Sequence
  Description of Artificial Sequence: Synthetic oligonucleotide
ugcgcugugcgccuugaaa

SEQ ID NO: 554810 - RNA, 19 nt, Artificial Sequence
  Description of Artificial Sequence: Synthetic oligonucleotide
aacuaccuacuccccauuu

SEQ ID NO: 554811 - RNA, 19 nt, Artificial Sequence
  Description of Artificial Sequence: Synthetic oligonucleotide
cacucaagaguccuguaca

SEQ ID NO: 554812 - RNA, 19 nt, Artificial Sequence
  Description of Artificial Sequence: Synthetic oligonucleotide
aagcacuugcacacucccg

SEQ ID NO: 554813 - RNA, 19 nt, Artificial Sequence
  Description of Artificial Sequence: Synthetic oligonucleotide
ccggaucacaucaugagug

SEQ ID NO: 554814 - RNA, 19 nt, Artificial Sequence
  Description of Artificial Sequence: Synthetic oligonucleotide
acuaauagcccuagccuga

SEQ ID NO: 554815 - RNA, 19 nt, Artificial Sequence
  Description of Artificial Sequence: Synthetic oligonucleotide
cagguuuugcgcugugcgc

SEQ ID NO: 554816 - RNA, 19 nt, Artificial Sequence
  Description of Artificial Sequence: Synthetic oligonucleotide
ugagaacggggagaaagaa

SEQ ID NO: 554817 - RNA, 19 nt, Artificial Sequence
  Description of Artificial Sequence: Synthetic oligonucleotide
agaaagcaaucaugcagau

SEQ ID NO: 554818 - RNA, 19 nt, Artificial Sequence
  Description of Artificial Sequence: Synthetic oligonucleotide
uuccgugucgcugaucuuc

SEQ ID NO: 554819 - RNA, 19 nt, Artificial Sequence
  Description of Artificial Sequence: Synthetic oligonucleotide
acccauuugauggcuuagg

SEQ ID NO: 554820 - RNA, 19 nt, Artificial Sequence
  Description of Artificial Sequence: Synthetic oligonucleotide
uccgugucgcugaucuuca

SEQ ID NO: 554821 - RNA, 19 nt, Artificial Sequence
  Description of Artificial Sequence: Synthetic oligonucleotide
gauccggaucacaucauga

SEQ ID NO: 554822 - RNA, 19 nt, Artificial Sequence
  Description of Artificial Sequence: Synthetic oligonucleotide
caauuacaaccuauucuga

SEQ ID NO: 554823 - RNA, 19 nt, Artificial Sequence
  Description of Artificial Sequence: Synthetic oligonucleotide
cuacucugagaacggggag

SEQ ID NO: 554824 - RNA, 19 nt, Artificial Sequence
  Description of Artificial Sequence: Synthetic oligonucleotide
guguaggaucuguauaaga

SEQ ID NO: 554825 - RNA, 19 nt, Artificial Sequence
  Description of Artificial Sequence: Synthetic oligonucleotide
gcuaaggaagcacuugcac

SEQ ID NO: 554826 - RNA, 19 nt, Artificial Sequence
  Description of Artificial Sequence: Synthetic oligonucleotide
gcuuugaacuaauacuaga

SEQ ID NO: 554827 - RNA, 19 nt, Artificial Sequence
  Description of Artificial Sequence: Synthetic oligonucleotide
caacuaauagcccuagccu

SEQ ID NO: 554828 - RNA, 19 nt, Artificial Sequence
  Description of Artificial Sequence: Synthetic oligonucleotide
cccgaucuguuaaauaaag

SEQ ID NO: 554829 - RNA, 19 nt, Artificial Sequence
  Description of Artificial Sequence: Synthetic oligonucleotide
caaugucagaagcugugca

SEQ ID NO: 554830 - RNA, 19 nt, Artificial Sequence
  Description of Artificial Sequence: Synthetic oligonucleotide
gggagaaagaaauccgaga

SEQ ID NO: 554831 - RNA, 19 nt, Artificial Sequence
  Description of Artificial Sequence: Synthetic oligonucleotide
augucugggaauauagaau

SEQ ID NO: 554832 - RNA, 19 nt, Artificial Sequence
  Description of Artificial Sequence: Synthetic oligonucleotide
caccucaauggguauugac

SEQ ID NO: 554833 - RNA, 19 nt, Artificial Sequence
  Description of Artificial Sequence: Synthetic oligonucleotide
ucuuaauguguaggaucug

SEQ ID NO: 554834 - RNA, 19 nt, Artificial Sequence
  Description of Artificial Sequence: Synthetic oligonucleotide
gacaauacuuagguauuaa

SEQ ID NO: 554835 - RNA, 19 nt, Artificial Sequence
  Description of Artificial Sequence: Synthetic oligonucleotide
auacaauugcgugguauaa

SEQ ID NO: 554836 - RNA, 19 nt, Artificial Sequence
  Description of Artificial Sequence: Synthetic oligonucleotide
uccugucuagaugggagcu

SEQ ID NO: 554837 - RNA, 19 nt, Artificial Sequence
  Description of Artificial Sequence: Synthetic oligonucleotide
aaaguuaguuaaacuucuu

SEQ ID NO: 554838 - RNA, 19 nt, Artificial Sequence
  Description of Artificial Sequence: Synthetic oligonucleotide
caaugucugggaauauaga

SEQ ID NO: 554839 - RNA, 19 nt, Artificial Sequence
  Description of Artificial Sequence: Synthetic oligonucleotide
ugacaauacuuagguauua

SEQ ID NO: 554840 - RNA, 19 nt, Artificial Sequence
  Description of Artificial Sequence: Synthetic oligonucleotide
uuuugcgcugugcgccuug

SEQ ID NO: 554841 - RNA, 19 nt, Artificial Sequence
  Description of Artificial Sequence: Synthetic oligonucleotide
auuugauggcuuaggauua

SEQ ID NO: 554842 - RNA, 19 nt, Artificial Sequence
  Description of Artificial Sequence: Synthetic oligonucleotide
ggacguugcauucuucuuc

SEQ ID NO: 554843 - RNA, 19 nt, Artificial Sequence
  Description of Artificial Sequence: Synthetic oligonucleotide
ccuacuccccauuuauugc

SEQ ID NO: 554844 - RNA, 19 nt, Artificial Sequence
  Description of Artificial Sequence: Synthetic oligonucleotide
gacugauccggaucacauc

SEQ ID NO: 554845 - RNA, 19 nt, Artificial Sequence
  Description of Artificial Sequence: Synthetic oligonucleotide
auauaacucuuaaugugua

SEQ ID NO: 554846 - RNA, 19 nt, Artificial Sequence
  Description of Artificial Sequence: Synthetic oligonucleotide
acuaccuacuccccauuua

SEQ ID NO: 554847 - RNA, 19 nt, Artificial Sequence
  Description of Artificial Sequence: Synthetic oligonucleotide
guuuaaggcaguaguagcu

SEQ ID NO: 554848 - RNA, 19 nt, Artificial Sequence
  Description of Artificial Sequence: Synthetic oligonucleotide
gcuguaucaccacacagaa

SEQ ID NO: 554849 - RNA, 19 nt, Artificial Sequence
  Description of Artificial Sequence: Synthetic oligonucleotide
cugagaacggggagaaaga

SEQ ID NO: 554850 - RNA, 19 nt, Artificial Sequence
  Description of Artificial Sequence: Synthetic oligonucleotide
acaagaguccucacuuuca

SEQ ID NO: 554851 - RNA, 19 nt, Artificial Sequence
  Description of Artificial Sequence: Synthetic oligonucleotide
uacaaccuauucugacuuc

SEQ ID NO: 554852 - RNA, 19 nt, Artificial Sequence
  Description of Artificial Sequence: Synthetic oligonucleotide
gugaauucuaagacggaaa

SEQ ID NO: 554853 - RNA, 19 nt, Artificial Sequence
  Description of Artificial Sequence: Synthetic oligonucleotide
caguaguagcuuccaacuc

SEQ ID NO: 554854 - RNA, 19 nt, Artificial Sequence
  Description of Artificial Sequence: Synthetic oligonucleotide
ugaucacugggcggggagc

SEQ ID NO: 554855 - RNA, 19 nt, Artificial Sequence
  Description of Artificial Sequence: Synthetic oligonucleotide
cuuagguauuaagaaugca

SEQ ID NO: 554856 - RNA, 19 nt, Artificial Sequence
  Description of Artificial Sequence: Synthetic oligonucleotide
cuccccauuuauugcuuug

SEQ ID NO: 554857 - RNA, 19 nt, Artificial Sequence
  Description of Artificial Sequence: Synthetic oligonucleotide
uuugauggcuuaggauuaa

SEQ ID NO: 554858 - RNA, 19 nt, Artificial Sequence
  Description of Artificial Sequence: Synthetic oligonucleotide
ggaaagcacagugucugag

SEQ ID NO: 554859 - RNA, 19 nt, Artificial Sequence
  Description of Artificial Sequence: Synthetic oligonucleotide
agaauugcuuugaacuaau

SEQ ID NO: 554860 - RNA, 19 nt, Artificial Sequence
  Description of Artificial Sequence: Synthetic oligonucleotide
uugcacacucccgaucugu

SEQ ID NO: 554861 - RNA, 19 nt, Artificial Sequence
  Description of Artificial Sequence: Synthetic oligonucleotide
guucuacaguuuacgauga

SEQ ID NO: 554862 - RNA, 19 nt, Artificial Sequence
  Description of Artificial Sequence: Synthetic oligonucleotide
cuguacuagagaacuaccu

SEQ ID NO: 554863 - RNA, 19 nt, Artificial Sequence
  Description of Artificial Sequence: Synthetic oligonucleotide
auacuagcauuaggaaaca

SEQ ID NO: 554864 - RNA, 19 nt, Artificial Sequence
  Description of Artificial Sequence: Synthetic oligonucleotide
uccaacucguagugcaauu

SEQ ID NO: 554865 - RNA, 19 nt, Artificial Sequence
  Description of Artificial Sequence: Synthetic oligonucleotide
augcaacuaauagcccuag

SEQ ID NO: 554866 - RNA, 19 nt, Artificial Sequence
  Description of Artificial Sequence: Synthetic oligonucleotide
cuuaauguguaggaucugu

SEQ ID NO: 554867 - RNA, 19 nt, Artificial Sequence
  Description of Artificial Sequence: Synthetic oligonucleotide
ugcgugguauaagugcaaa

SEQ ID NO: 554868 - RNA, 19 nt, Artificial Sequence
  Description of Artificial Sequence: Synthetic oligonucleotide
uugcgugguauaagugcaa

SEQ ID NO: 554869 - RNA, 19 nt, Artificial Sequence
  Description of Artificial Sequence: Synthetic oligonucleotide
aucaaugucugggaauaua

SEQ ID NO: 554870 - RNA, 19 nt, Artificial Sequence
  Description of Artificial Sequence: Synthetic oligonucleotide
uaguagcuguugugcaggu

SEQ ID NO: 554871 - RNA, 19 nt, Artificial Sequence
  Description of Artificial Sequence: Synthetic oligonucleotide
gccaauguauaaaguacug

SEQ ID NO: 554872 - RNA, 19 nt, Artificial Sequence
  Description of Artificial Sequence: Synthetic oligonucleotide
ggcuuaggauuaaauauga

SEQ ID NO: 554873 - RNA, 19 nt, Artificial Sequence
  Description of Artificial Sequence: Synthetic oligonucleotide
guuucagugcaagauccaa

SEQ ID NO: 554874 - RNA, 19 nt, Artificial Sequence
  Description of Artificial Sequence: Synthetic oligonucleotide
ccuuauggcuguaucacca

SEQ ID NO: 554875 - RNA, 19 nt, Artificial Sequence
  Description of Artificial Sequence: Synthetic oligonucleotide
agugucugagccacuuuga

SEQ ID NO: 554876 - RNA, 19 nt, Artificial Sequence
  Description of Artificial Sequence: Synthetic oligonucleotide
agaguccuguacagucuac

SEQ ID NO: 554877 - RNA, 19 nt, Artificial Sequence
  Description of Artificial Sequence: Synthetic oligonucleotide
cagaauugcuuugaacuaa

SEQ ID NO: 554878 - RNA, 19 nt, Artificial Sequence
  Description of Artificial Sequence: Synthetic oligonucleotide
gagaacggggagaaagaaa

SEQ ID NO: 554879 - RNA, 19 nt, Artificial Sequence
  Description of Artificial Sequence: Synthetic oligonucleotide
agaccugaccugaauaaua

SEQ ID NO: 554880 - RNA, 19 nt, Artificial Sequence
  Description of Artificial Sequence: Synthetic oligonucleotide
uaccuacuccccauuuauu

SEQ ID NO: 554881 - RNA, 19 nt, Artificial Sequence
  Description of Artificial Sequence: Synthetic oligonucleotide
acucccgaucuguuaaaua

SEQ ID NO: 554882 - RNA, 19 nt, Artificial Sequence
  Description of Artificial Sequence: Synthetic oligonucleotide
gucugggaauauagaauac

SEQ ID NO: 554883 - RNA, 19 nt, Artificial Sequence
  Description of Artificial Sequence: Synthetic oligonucleotide
ggcuuaucuacugucccug

SEQ ID NO: 554884 - RNA, 19 nt, Artificial Sequence
  Description of Artificial Sequence: Synthetic oligonucleotide
cuagcuuaucaaggcucag

SEQ ID NO: 554885 - RNA, 19 nt, Artificial Sequence
  Description of Artificial Sequence: Synthetic oligonucleotide
uccaucaagcucagcccuu

SEQ ID NO: 554886 - RNA, 19 nt, Artificial Sequence
  Description of Artificial Sequence: Synthetic oligonucleotide
uacuguuaagaggcacuaa

SEQ ID NO: 554887 - RNA, 19 nt, Artificial Sequence
  Description of Artificial Sequence: Synthetic oligonucleotide
agacuccaaugcaagacaa

SEQ ID NO: 554888 - RNA, 19 nt, Artificial Sequence
  Description of Artificial Sequence: Synthetic oligonucleotide
ugcacacucccgaucuguu

SEQ ID NO: 554889 - RNA, 19 nt, Artificial Sequence
  Description of Artificial Sequence: Synthetic oligonucleotide
gugucgcugaucuucaaau

SEQ ID NO: 554890 - RNA, 19 nt, Artificial Sequence
  Description of Artificial Sequence: Synthetic oligonucleotide
cagagcguacacaucccca

SEQ ID NO: 554891 - RNA, 19 nt, Artificial Sequence
  Description of Artificial Sequence: Synthetic oligonucleotide
ggaacacuauaguagcugu

SEQ ID NO: 554892 - RNA, 19 nt, Artificial Sequence
  Description of Artificial Sequence: Synthetic oligonucleotide
ugggugggacguugcauuc

SEQ ID NO: 554893 - RNA, 19 nt, Artificial Sequence
  Description of Artificial Sequence: Synthetic oligonucleotide
gcgcugugcgccuugaaac

SEQ ID NO: 554894 - RNA, 19 nt, Artificial Sequence
  Description of Artificial Sequence: Synthetic oligonucleotide
gcuguacuagagaacuacc

SEQ ID NO: 554895 - RNA, 19 nt, Artificial Sequence
  Description of Artificial Sequence: Synthetic oligonucleotide
guagguauuccagucugua

SEQ ID NO: 554896 - RNA, 19 nt, Artificial Sequence
  Description of Artificial Sequence: Synthetic oligonucleotide
uacuagcauuaggaaacaa

SEQ ID NO: 554897 - RNA, 19 nt, Artificial Sequence
  Description of Artificial Sequence: Synthetic oligonucleotide
agcccuagccugaugacaa

SEQ ID NO: 554898 - RNA, 19 nt, Artificial Sequence
  Description of Artificial Sequence: Synthetic oligonucleotide
cugcaagcuuucaguugag

SEQ ID NO: 554899 - RNA, 19 nt, Artificial Sequence
  Description of Artificial Sequence: Synthetic oligonucleotide
cauaagagccaagaaucua

SEQ ID NO: 554900 - RNA, 19 nt, Artificial Sequence
  Description of Artificial Sequence: Synthetic oligonucleotide
gaacggggagaaagaaauc

SEQ ID NO: 554901 - RNA, 19 nt, Artificial Sequence
  Description of Artificial Sequence: Synthetic oligonucleotide
gugucugagccacuuugaa

SEQ ID NO: 554902 - RNA, 19 nt, Artificial Sequence
  Description of Artificial Sequence: Synthetic oligonucleotide
aggugcacucuugaucacu

SEQ ID NO: 554903 - RNA, 19 nt, Artificial Sequence
  Description of Artificial Sequence: Synthetic oligonucleotide
guacuguuaagaggcacua

SEQ ID NO: 554904 - RNA, 19 nt, Artificial Sequence
  Description of Artificial Sequence: Synthetic oligonucleotide
gagcuaauacagaugguuu

SEQ ID NO: 554905 - RNA, 19 nt, Artificial Sequence
  Description of Artificial Sequence: Synthetic oligonucleotide
ggcacccauauacaauaca

SEQ ID NO: 554906 - RNA, 19 nt, Artificial Sequence
  Description of Artificial Sequence: Synthetic oligonucleotide
cuaccuacuccccauuuau

SEQ ID NO: 554907 - RNA, 19 nt, Artificial Sequence
  Description of Artificial Sequence: Synthetic oligonucleotide
acuccccauuuauugcuuu

SEQ ID NO: 554908 - RNA, 19 nt, Artificial Sequence
  Description of Artificial Sequence: Synthetic oligonucleotide
ugucuagaugggagcugua

SEQ ID NO: 554909 - RNA, 19 nt, Artificial Sequence
  Description of Artificial Sequence: Synthetic oligonucleotide
cggaucacaucaugagugg

SEQ ID NO: 554910 - RNA, 19 nt, Artificial Sequence
  Description of Artificial Sequence: Synthetic oligonucleotide
uuugcgcugugcgccuuga

SEQ ID NO: 554911 - RNA, 19 nt, Artificial Sequence
  Description of Artificial Sequence: Synthetic oligonucleotide
cuuaucuacugucccugcu

SEQ ID NO: 554912 - RNA, 19 nt, Artificial Sequence
  Description of Artificial Sequence: Synthetic oligonucleotide
caaccuauucugacuucaa

SEQ ID NO: 554913 - RNA, 19 nt, Artificial Sequence
  Description of Artificial Sequence: Synthetic oligonucleotide
guaguagcuuccaacucgu

SEQ ID NO: 554914 - RNA, 19 nt, Artificial Sequence
  Description of Artificial Sequence: Synthetic oligonucleotide
gacuccaaugcaagacaaa

SEQ ID NO: 554915 - RNA, 19 nt, Artificial Sequence
  Description of Artificial Sequence: Synthetic oligonucleotide
gacggaaagcacagugucu

SEQ ID NO: 554916 - RNA, 19 nt, Artificial Sequence
  Description of Artificial Sequence: Synthetic oligonucleotide
ccauccuuauggcuguauc

SEQ ID NO: 554917 - RNA, 19 nt, Artificial Sequence
  Description of Artificial Sequence: Synthetic oligonucleotide
gaguccuguacagucuacu

SEQ ID NO: 554918 - RNA, 19 nt, Artificial Sequence
  Description of Artificial Sequence: Synthetic oligonucleotide
cugacugauccggaucaca

SEQ ID NO: 554919 - RNA, 19 nt, Artificial Sequence
  Description of Artificial Sequence: Synthetic oligonucleotide
acguugcauucuucuucca

SEQ ID NO: 554920 - RNA, 19 nt, Artificial Sequence
  Description of Artificial Sequence: Synthetic oligonucleotide
ccagaccugaccugaauaa

SEQ ID NO: 554921 - RNA, 19 nt, Artificial Sequence
  Description of Artificial Sequence: Synthetic oligonucleotide
gaucacugggcggggagcu

SEQ ID NO: 554922 - RNA, 19 nt, Artificial Sequence
  Description of Artificial Sequence: Synthetic oligonucleotide
ccacagauagagucaacaa

SEQ ID NO: 554923 - RNA, 19 nt, Artificial Sequence
  Description of Artificial Sequence: Synthetic oligonucleotide
cccauuugauggcuuagga

SEQ ID NO: 554924 - RNA, 19 nt, Artificial Sequence
  Description of Artificial Sequence: Synthetic oligonucleotide
gcacccauauacaauacau

SEQ ID NO: 554925 - RNA, 19 nt, Artificial Sequence
  Description of Artificial Sequence: Synthetic oligonucleotide
caggaacacuauaguagcu

SEQ ID NO: 554926 - RNA, 19 nt, Artificial Sequence
  Description of Artificial Sequence: Synthetic oligonucleotide
gaauuccgugucgcugauc

SEQ ID NO: 554927 - RNA, 19 nt, Artificial Sequence
  Description of Artificial Sequence: Synthetic oligonucleotide
gccagaccugaccugaaua

SEQ ID NO: 554928 - RNA, 19 nt, Artificial Sequence
  Description of Artificial Sequence: Synthetic oligonucleotide
guuuacgaugagcgacacu

SEQ ID NO: 554929 - RNA, 19 nt, Artificial Sequence
  Description of Artificial Sequence: Synthetic oligonucleotide
uugcgcugugcgccuugaa

SEQ ID NO: 554930 - RNA, 19 nt, Artificial Sequence
  Description of Artificial Sequence: Synthetic oligonucleotide
gaacacuauaguagcuguu

SEQ ID NO: 554931 - RNA, 19 nt, Artificial Sequence
  Description of Artificial Sequence: Synthetic oligonucleotide
ggguauugacuuacuagua

SEQ ID NO: 554932 - RNA, 19 nt, Artificial Sequence
  Description of Artificial Sequence: Synthetic oligonucleotide
auuccgugucgcugaucuu

SEQ ID NO: 554933 - RNA, 19 nt, Artificial Sequence
  Description of Artificial Sequence: Synthetic oligonucleotide
ccucaauggguauugacuu

SEQ ID NO: 554934 - RNA, 19 nt, Artificial Sequence
  Description of Artificial Sequence: Synthetic oligonucleotide
gaacuaccuacuccccauu

SEQ ID NO: 554935 - RNA, 19 nt, Artificial Sequence
  Description of Artificial Sequence: Synthetic oligonucleotide
cucaagaguccuguacagu

SEQ ID NO: 554936 - RNA, 19 nt, Artificial Sequence
  Description of Artificial Sequence: Synthetic oligonucleotide
gcgccuugaaacaauccaa

SEQ ID NO: 554937 - RNA, 19 nt, Artificial Sequence
  Description of Artificial Sequence: Synthetic oligonucleotide
gcgugguauaagugcaaaa

SEQ ID NO: 554938 - RNA, 19 nt, Artificial Sequence
  Description of Artificial Sequence: Synthetic oligonucleotide
cagugcuaaucaauuccau

SEQ ID NO: 554939 - RNA, 19 nt, Artificial Sequence
  Description of Artificial Sequence: Synthetic oligonucleotide
cagagcuaauacagauggu

SEQ ID NO: 554940 - RNA, 19 nt, Artificial Sequence
  Description of Artificial Sequence: Synthetic oligonucleotide
gacaagccggcagcugcaa

SEQ ID NO: 554941 - RNA, 19 nt, Artificial Sequence
  Description of Artificial Sequence: Synthetic oligonucleotide
cugguguauccuccaucaa

SEQ ID NO: 554942 - RNA, 19 nt, Artificial Sequence
  Description of Artificial Sequence: Synthetic oligonucleotide
gcuuaucaaggcucaguau

SEQ ID NO: 554943 - RNA, 19 nt, Artificial Sequence
  Description of Artificial Sequence: Synthetic oligonucleotide
cggggagaaagaaauccga

SEQ ID NO: 554944 - RNA, 19 nt, Artificial Sequence
  Description of Artificial Sequence: Synthetic oligonucleotide
ccaauguauaaaguacugu

SEQ ID NO: 554945 - RNA, 19 nt, Artificial Sequence
  Description of Artificial Sequence: Synthetic oligonucleotide
caggugcacuuccuuuaaa

SEQ ID NO: 554946 - RNA, 19 nt, Artificial Sequence
  Description of Artificial Sequence: Synthetic oligonucleotide
cuaagacggaaagcacagu

SEQ ID NO: 554947 - RNA, 19 nt, Artificial Sequence
  Description of Artificial Sequence: Synthetic oligonucleotide
cuguaucaccacacagaau

SEQ ID NO: 554948 - RNA, 19 nt, Artificial Sequence
  Description of Artificial Sequence: Synthetic oligonucleotide
gguuuugcgcugugcgccu

SEQ ID NO: 554949 - RNA, 19 nt, Artificial Sequence
  Description of Artificial Sequence: Synthetic oligonucleotide
cuaauagcccuagccugau

SEQ ID NO: 554950 - RNA, 19 nt, Artificial Sequence
  Description of Artificial Sequence: Synthetic oligonucleotide
gcguucaaugucagaagcu

SEQ ID NO: 554951 - RNA, 19 nt, Artificial Sequence
  Description of Artificial Sequence: Synthetic oligonucleotide
cagaccugaccugaauaau

SEQ ID NO: 554952 - RNA, 19 nt, Artificial Sequence
  Description of Artificial Sequence: Synthetic oligonucleotide
gcugugcgccuugaaacaa

SEQ ID NO: 554953 - RNA, 19 nt, Artificial Sequence
  Description of Artificial Sequence: Synthetic oligonucleotide
cagcaauucaacggauuuu

SEQ ID NO: 554954 - RNA, 19 nt, Artificial Sequence
  Description of Artificial Sequence: Synthetic oligonucleotide
gguagguauuccagucugu

SEQ ID NO: 554955 - RNA, 19 nt, Artificial Sequence
  Description of Artificial Sequence: Synthetic oligonucleotide
ggugggacguugcauucuu

SEQ ID NO: 554956 - RNA, 19 nt, Artificial Sequence
  Description of Artificial Sequence: Synthetic oligonucleotide
cuguuccauacaagugcau

SEQ ID NO: 554957 - RNA, 19 nt, Artificial Sequence
  Description of Artificial Sequence: Synthetic oligonucleotide
gguugguguuugacacuca

SEQ ID NO: 554958 - RNA, 19 nt, Artificial Sequence
  Description of Artificial Sequence: Synthetic oligonucleotide
gcgacacuacucaucuuua

SEQ ID NO: 554959 - RNA, 19 nt, Artificial Sequence
  Description of Artificial Sequence: Synthetic oligonucleotide
cgcugugcgccuugaaaca

SEQ ID NO: 554960 - RNA, 19 nt, Artificial Sequence
  Description of Artificial Sequence: Synthetic oligonucleotide
gggacguugcauucuucuu

SEQ ID NO: 554961 - RNA, 19 nt, Artificial Sequence
  Description of Artificial Sequence: Synthetic oligonucleotide
gagcgacacuacucaucuu

SEQ ID NO: 554962 - RNA, 19 nt, Artificial Sequence
  Description of Artificial Sequence: Synthetic oligonucleotide
ggccagaccugaccugaau

SEQ ID NO: 554963 - RNA, 19 nt, Artificial Sequence
  Description of Artificial Sequence: Synthetic oligonucleotide
cacugggcggggagcugcu

SEQ ID NO: 554964 - RNA, 19 nt, Artificial Sequence
  Description of Artificial Sequence: Synthetic oligonucleotide
gggugggacguugcauucu

SEQ ID NO: 554965 - RNA, 19 nt, Artificial Sequence
  Description of Artificial Sequence: Synthetic oligonucleotide
guuuugcgcugugcgccuu

SEQ ID NO: 554966 - RNA, 19 nt, Artificial Sequence
  Description of Artificial Sequence: Synthetic oligonucleotide
caugagugggugggacguu

SEQ ID NO: 554967 - RNA, 19 nt, Artificial Sequence
  Description of Artificial Sequence: Synthetic oligonucleotide
cccugcuaaggaagcacuu

SEQ ID NO: 554968 - RNA, 19 nt, Artificial Sequence
  Description of Artificial Sequence: Synthetic oligonucleotide
gcccuagccugaugacaau

SEQ ID NO: 554969 - RNA, 19 nt, Artificial Sequence
  Description of Artificial Sequence: Synthetic oligonucleotide
cccuagccugaugacaauu

SEQ ID NO: 554970 - RNA, 19 nt, Artificial Sequence
  Description of Artificial Sequence: Synthetic oligonucleotide
ucuacaauuucacuggucg

SEQ ID NO: 554971 - RNA, 19 nt, Artificial Sequence
  Description of Artificial Sequence: Synthetic oligonucleotide
auagacuagaacuacaauc

SEQ ID NO: 554972 - RNA, 19 nt, Artificial Sequence
  Description of Artificial Sequence: Synthetic oligonucleotide
aaaguggcaaacuuucagc

SEQ ID NO: 554973 - RNA, 19 nt, Artificial Sequence
  Description of Artificial Sequence: Synthetic oligonucleotide
ugaauugugguuaaggagc

SEQ ID NO: 554974 - RNA, 19 nt, Artificial Sequence
  Description of Artificial Sequence: Synthetic oligonucleotide
aaacaguuaauuuuggaca

SEQ ID NO: 554975 - RNA, 19 nt, Artificial Sequence
  Description of Artificial Sequence: Synthetic oligonucleotide
aaugauccaaucuggaaag

SEQ ID NO: 554976 - RNA, 19 nt, Artificial Sequence
  Description of Artificial Sequence: Synthetic oligonucleotide
ucuggaaagaguauaauaa

SEQ ID NO: 554977 - RNA, 19 nt, Artificial Sequence
  Description of Artificial Sequence: Synthetic oligonucleotide
aaaacuuauacccggauuu

SEQ ID NO: 554978 - RNA, 19 nt, Artificial Sequence
  Description of Artificial Sequence: Synthetic oligonucleotide
augaaguaccuucaugucc

SEQ ID NO: 554979 - RNA, 19 nt, Artificial Sequence
  Description of Artificial Sequence: Synthetic oligonucleotide
auuguuuauagacagugca

SEQ ID NO: 554980 - RNA, 19 nt, Artificial Sequence
  Description of Artificial Sequence: Synthetic oligonucleotide
gaugguaugaaguaccuuc

SEQ ID NO: 554981 - RNA, 19 nt, Artificial Sequence
  Description of Artificial Sequence: Synthetic oligonucleotide
caaacaguuaauuuuggac

SEQ ID NO: 554982 - RNA, 19 nt, Artificial Sequence
  Description of Artificial Sequence: Synthetic oligonucleotide
auaaauggagggaaaaugg

SEQ ID NO: 554983 - RNA, 19 nt, Artificial Sequence
  Description of Artificial Sequence: Synthetic oligonucleotide
aguauggauagacuagaac

SEQ ID NO: 554984 - RNA, 19 nt, Artificial Sequence
  Description of Artificial Sequence: Synthetic oligonucleotide
uuauagacagugcacacaa

SEQ ID NO: 554985 - RNA, 19 nt, Artificial Sequence
  Description of Artificial Sequence: Synthetic oligonucleotide
gaugcagagaggaacaugc

SEQ ID NO: 554986 - RNA, 19 nt, Artificial Sequence
  Description of Artificial Sequence: Synthetic oligonucleotide
ucaguccggagaaucaugg

SEQ ID NO: 554987 - RNA, 19 nt, Artificial Sequence
  Description of Artificial Sequence: Synthetic oligonucleotide
aacaguuaauuuuggacaa

SEQ ID NO: 554988 - RNA, 19 nt, Artificial Sequence
  Description of Artificial Sequence: Synthetic oligonucleotide
aaagaguauaauaaaugga

SEQ ID NO: 554989 - RNA, 19 nt, Artificial Sequence
  Description of Artificial Sequence: Synthetic oligonucleotide
gaaaauacacggaucacug

SEQ ID NO: 554990 - RNA, 19 nt, Artificial Sequence
  Description of Artificial Sequence: Synthetic oligonucleotide
ugcaccucuccaauggucg

SEQ ID NO: 554991 - RNA, 19 nt, Artificial Sequence
  Description of Artificial Sequence: Synthetic oligonucleotide
ugguugaacauuucgguca

SEQ ID NO: 554992 - RNA, 19 nt, Artificial Sequence
  Description of Artificial Sequence: Synthetic oligonucleotide
acacucgccaccuuccugc

SEQ ID NO: 554993 - RNA, 19 nt, Artificial Sequence
  Description of Artificial Sequence: Synthetic oligonucleotide
uauacccggauuuacuacc

SEQ ID NO: 554994 - RNA, 19 nt, Artificial Sequence
  Description of Artificial Sequence: Synthetic oligonucleotide
aauagcuguaguugcaaau

SEQ ID NO: 554995 - RNA, 19 nt, Artificial Sequence
  Description of Artificial Sequence: Synthetic oligonucleotide
agacguguuauccugguug

SEQ ID NO: 554996 - RNA, 19 nt, Artificial Sequence
  Description of Artificial Sequence: Synthetic oligonucleotide
agucaugagaugcggaguc

SEQ ID NO: 554997 - RNA, 19 nt, Artificial Sequence
  Description of Artificial Sequence: Synthetic oligonucleotide
guauggauagacuagaacu

SEQ ID NO: 554998 - RNA, 19 nt, Artificial Sequence
  Description of Artificial Sequence: Synthetic oligonucleotide
gaaugauccaaucuggaaa

SEQ ID NO: 554999 - RNA, 19 nt, Artificial Sequence
  Description of Artificial Sequence: Synthetic oligonucleotide
aacaguauggauagacuag

SEQ ID NO: 555000 - RNA, 19 nt, Artificial Sequence
  Description of Artificial Sequence: Synthetic oligonucleotide
ugagccgggaucauguuug

SEQ ID NO: 555001 - RNA, 19 nt, Artificial Sequence
  Description of Artificial Sequence: Synthetic oligonucleotide
uacgucugcguuacuaagg

SEQ ID NO: 555002 - RNA, 19 nt, Artificial Sequence
  Description of Artificial Sequence: Synthetic oligonucleotide
agaguauaauaaauggagg

SEQ ID NO: 555003 - RNA, 19 nt, Artificial Sequence
  Description of Artificial Sequence: Synthetic oligonucleotide
acugccaucgagccugugc

SEQ ID NO: 555004 - RNA, 19 nt, Artificial Sequence
  Description of Artificial Sequence: Synthetic oligonucleotide
uagacagugcacacaagcc

SEQ ID NO: 555005 - RNA, 19 nt, Artificial Sequence
  Description of Artificial Sequence: Synthetic oligonucleotide
ucgaacaguggcaaaggcc

SEQ ID NO: 555006 - RNA, 19 nt, Artificial Sequence
  Description of Artificial Sequence: Synthetic oligonucleotide
augccguccaugcugaagg

SEQ ID NO: 555007 - RNA, 19 nt, Artificial Sequence
  Description of Artificial Sequence: Synthetic oligonucleotide
cuugcaucaaaagccaggg

SEQ ID NO: 555008 - RNA, 19 nt, Artificial Sequence
  Description of Artificial Sequence: Synthetic oligonucleotide
uaaguuggcguccuguccu

SEQ ID NO: 555009 - RNA, 19 nt, Artificial Sequence
  Description of Artificial Sequence: Synthetic oligonucleotide
uuuguguccugccaugaga

SEQ ID NO: 555010 - RNA, 19 nt, Artificial Sequence
  Description of Artificial Sequence: Synthetic oligonucleotide
ucucaagauccccauggag

SEQ ID NO: 555011 - RNA, 19 nt, Artificial Sequence
  Description of Artificial Sequence: Synthetic oligonucleotide
aaaguagccgguccaggug

SEQ ID NO: 555012 - RNA, 19 nt, Artificial Sequence
  Description of Artificial Sequence: Synthetic oligonucleotide
ucucaaguuaauggugucg

SEQ ID NO: 555013 - RNA, 19 nt, Artificial Sequence
  Description of Artificial Sequence: Synthetic oligonucleotide
gaacaugccguccaugcug

SEQ ID NO: 555014 - RNA, 19 nt, Artificial Sequence
  Description of Artificial Sequence: Synthetic oligonucleotide
uuuauggccacagaauggu

SEQ ID NO: 555015 - RNA, 19 nt, Artificial Sequence
  Description of Artificial Sequence: Synthetic oligonucleotide
ucaacaguauggauagacu

SEQ ID NO: 555016 - RNA, 19 nt, Artificial Sequence
  Description of Artificial Sequence: Synthetic oligonucleotide
aaaauacacggaucacugu

SEQ ID NO: 555017 - RNA, 19 nt, Artificial Sequence
  Description of Artificial Sequence: Synthetic oligonucleotide
aaagcaaggagacgccaca

SEQ ID NO: 555018 - RNA, 19 nt, Artificial Sequence
  Description of Artificial Sequence: Synthetic oligonucleotide
agugcauucauagaucugu

SEQ ID NO: 555019 - RNA, 19 nt, Artificial Sequence
  Description of Artificial Sequence: Synthetic oligonucleotide
uuagcaagucuuguugggg

SEQ ID NO: 555020 - RNA, 19 nt, Artificial Sequence
  Description of Artificial Sequence: Synthetic oligonucleotide
guauaggcuucuaaguugg

SEQ ID NO: 555021 - RNA, 19 nt, Artificial Sequence
  Description of Artificial Sequence: Synthetic oligonucleotide
gcagcucucaaguuaaugg

SEQ ID NO: 555022 - RNA, 19 nt, Artificial Sequence
  Description of Artificial Sequence: Synthetic oligonucleotide
cacugaguugaaaacagug

SEQ ID NO: 555023 - RNA, 19 nt, Artificial Sequence
  Description of Artificial Sequence: Synthetic oligonucleotide
cuuggcacaucaugcaugc

SEQ ID NO: 555024 - RNA, 19 nt, Artificial Sequence
  Description of Artificial Sequence: Synthetic oligonucleotide
aauagccaucugaugcucc

SEQ ID NO: 555025 - RNA, 19 nt, Artificial Sequence
  Description of Artificial Sequence: Synthetic oligonucleotide
acgucugcguuacuaaggg

SEQ ID NO: 555026 - RNA, 19 nt, Artificial Sequence
  Description of Artificial Sequence: Synthetic oligonucleotide
uucuggaauggaaaauaca

SEQ ID NO: 555027 - RNA, 19 nt, Artificial Sequence
  Description of Artificial Sequence: Synthetic oligonucleotide
guaugaaguaccuucaugu

SEQ ID NO: 555028 - RNA, 19 nt, Artificial Sequence
  Description of Artificial Sequence: Synthetic oligonucleotide
ucaugagccgggaucaugu

SEQ ID NO: 555029 - RNA, 19 nt, Artificial Sequence
  Description of Artificial Sequence: Synthetic oligonucleotide
cauuguuuauagacagugc

SEQ ID NO: 555030 - RNA, 19 nt, Artificial Sequence
  Description of Artificial Sequence: Synthetic oligonucleotide
agguuguacauguauaaau

SEQ ID NO: 555031 - RNA, 19 nt, Artificial Sequence
  Description of Artificial Sequence: Synthetic oligonucleotide
uggcucgccagguucaugg

SEQ ID NO: 555032 - RNA, 19 nt, Artificial Sequence
  Description of Artificial Sequence: Synthetic oligonucleotide
cuagagacguguuauccug

SEQ ID NO: 555033 - RNA, 19 nt, Artificial Sequence
  Description of Artificial Sequence: Synthetic oligonucleotide
uuuauagacagugcacaca

SEQ ID NO: 555034 - RNA, 19 nt, Artificial Sequence
  Description of Artificial Sequence: Synthetic oligonucleotide
ugcggagucuacaauuuca

SEQ ID NO: 555035 - RNA, 19 nt, Artificial Sequence
  Description of Artificial Sequence: Synthetic oligonucleotide
aagauccccauggagaaca

SEQ ID NO: 555036 - RNA, 19 nt, Artificial Sequence
  Description of Artificial Sequence: Synthetic oligonucleotide
auggauagacuagaacuac

SEQ ID NO: 555037 - RNA, 19 nt, Artificial Sequence
  Description of Artificial Sequence: Synthetic oligonucleotide
agacuagaacuacaaucuc

SEQ ID NO: 555038 - RNA, 19 nt, Artificial Sequence
  Description of Artificial Sequence: Synthetic oligonucleotide
aucgagccugugcugacgc

SEQ ID NO: 555039 - RNA, 19 nt, Artificial Sequence
  Description of Artificial Sequence: Synthetic oligonucleotide
cuguaguugcaaaucucgg

SEQ ID NO: 555040 - RNA, 19 nt, Artificial Sequence
  Description of Artificial Sequence: Synthetic oligonucleotide
uuauacccggauuuacuac

SEQ ID NO: 555041 - RNA, 19 nt, Artificial Sequence
  Description of Artificial Sequence: Synthetic oligonucleotide
uguauauagagcgacucuu

SEQ ID NO: 555042 - RNA, 19 nt, Artificial Sequence
  Description of Artificial Sequence: Synthetic oligonucleotide
auaggcuucuaaguuggcg

SEQ ID NO: 555043 - RNA, 19 nt, Artificial Sequence
  Description of Artificial Sequence: Synthetic oligonucleotide
uacgccaaguagcaguugu

SEQ ID NO: 555044 - RNA, 19 nt, Artificial Sequence
  Description of Artificial Sequence: Synthetic oligonucleotide
aagagggcuccugacagag

SEQ ID NO: 555045 - RNA, 19 nt, Artificial Sequence
  Description of Artificial Sequence: Synthetic oligonucleotide
ucugcguuacuaaggggca

SEQ ID NO: 555046 - RNA, 19 nt, Artificial Sequence
  Description of Artificial Sequence: Synthetic oligonucleotide
gauuagucaguccggagaa

SEQ ID NO: 555047 - RNA, 19 nt, Artificial Sequence
  Description of Artificial Sequence: Synthetic oligonucleotide
cugguagacgccaugagca

SEQ ID NO: 555048 - RNA, 19 nt, Artificial Sequence
  Description of Artificial Sequence: Synthetic oligonucleotide
uagucgaacaguggcaaag

SEQ ID NO: 555049 - RNA, 19 nt, Artificial Sequence
  Description of Artificial Sequence: Synthetic oligonucleotide
gucugcguuacuaaggggc

SEQ ID NO: 555050 - RNA, 19 nt, Artificial Sequence
  Description of Artificial Sequence: Synthetic oligonucleotide
uccuaugcuggcuuggcac

SEQ ID NO: 555051 - RNA, 19 nt, Artificial Sequence
  Description of Artificial Sequence: Synthetic oligonucleotide
accaaccgccgccucaucc

SEQ ID NO: 555052 - RNA, 19 nt, Artificial Sequence
  Description of Artificial Sequence: Synthetic oligonucleotide
ucacuggucgucuccauac

SEQ ID NO: 555053 - RNA, 19 nt, Artificial Sequence
  Description of Artificial Sequence: Synthetic oligonucleotide
aucuggaaagaguauaaua

SEQ ID NO: 555054 - RNA, 19 nt, Artificial Sequence
  Description of Artificial Sequence: Synthetic oligonucleotide
guuggcgaacagcagcugg

SEQ ID NO: 555055 - RNA, 19 nt, Artificial Sequence
  Description of Artificial Sequence: Synthetic oligonucleotide
ugugccauacgucugcguu

SEQ ID NO: 555056 - RNA, 19 nt, Artificial Sequence
  Description of Artificial Sequence: Synthetic oligonucleotide
acccggauuuacuaccaac

SEQ ID NO: 555057 - RNA, 19 nt, Artificial Sequence
  Description of Artificial Sequence: Synthetic oligonucleotide
gugguuaaggagcagaugu

SEQ ID NO: 555058 - RNA, 19 nt, Artificial Sequence
  Description of Artificial Sequence: Synthetic oligonucleotide
uucccaaaguagccggucc

SEQ ID NO: 555059 - RNA, 19 nt, Artificial Sequence
  Description of Artificial Sequence: Synthetic oligonucleotide
ugagaugcggagucuacaa

SEQ ID NO: 555060 - RNA, 19 nt, Artificial Sequence
  Description of Artificial Sequence: Synthetic oligonucleotide
auacgucugcguuacuaag

SEQ ID NO: 555061 - RNA, 19 nt, Artificial Sequence
  Description of Artificial Sequence: Synthetic oligonucleotide
aagaccugcaccucuccaa

SEQ ID NO: 555062 - RNA, 19 nt, Artificial Sequence
  Description of Artificial Sequence: Synthetic oligonucleotide
uuacuaaggggcagucaug

SEQ ID NO: 555063 - RNA, 19 nt, Artificial Sequence
  Description of Artificial Sequence: Synthetic oligonucleotide
cacauaggcaccuuuggca

SEQ ID NO: 555064 - RNA, 19 nt, Artificial Sequence
  Description of Artificial Sequence: Synthetic oligonucleotide
ugguagucgaacaguggca

SEQ ID NO: 555065 - RNA, 19 nt, Artificial Sequence
  Description of Artificial Sequence: Synthetic oligonucleotide
ucuaaguuggcguccuguc

SEQ ID NO: 555066 - RNA, 19 nt, Artificial Sequence
  Description of Artificial Sequence: Synthetic oligonucleotide
uccuaccagcaaccgaggg

SEQ ID NO: 555067 - RNA, 19 nt, Artificial Sequence
  Description of Artificial Sequence: Synthetic oligonucleotide
uuagucaguccggagaauc

SEQ ID NO: 555068 - RNA, 19 nt, Artificial Sequence
  Description of Artificial Sequence: Synthetic oligonucleotide
auugugguuaaggagcaga

SEQ ID NO: 555069 - RNA, 19 nt, Artificial Sequence
  Description of Artificial Sequence: Synthetic oligonucleotide
cucaguuggcggaugggcc

SEQ ID NO: 555070 - RNA, 19 nt, Artificial Sequence
  Description of Artificial Sequence: Synthetic oligonucleotide
gacgcaucagggcacacuc

SEQ ID NO: 555071 - RNA, 19 nt, Artificial Sequence
  Description of Artificial Sequence: Synthetic oligonucleotide
aacagcuagagacguguua

SEQ ID NO: 555072 - RNA, 19 nt, Artificial Sequence
  Description of Artificial Sequence: Synthetic oligonucleotide
gcagguagcugguagacgc

SEQ ID NO: 555073 - RNA, 19 nt, Artificial Sequence
  Description of Artificial Sequence: Synthetic oligonucleotide
cacaucaugcaugcaaagc

SEQ ID NO: 555074 - RNA, 19 nt, Artificial Sequence
  Description of Artificial Sequence: Synthetic oligonucleotide
gaacacacugcaaacgaca

SEQ ID NO: 555075 - RNA, 19 nt, Artificial Sequence
  Description of Artificial Sequence: Synthetic oligonucleotide
ucucaguuggcggaugggc

SEQ ID NO: 555076 - RNA, 19 nt, Artificial Sequence
  Description of Artificial Sequence: Synthetic oligonucleotide
agaugcggagucuacaauu

SEQ ID NO: 555077 - RNA, 19 nt, Artificial Sequence
  Description of Artificial Sequence: Synthetic oligonucleotide
agaaugguagucgaacagu

SEQ ID NO: 555078 - RNA, 19 nt, Artificial Sequence
  Description of Artificial Sequence: Synthetic oligonucleotide
cacagaaugguagucgaac

SEQ ID NO: 555079 - RNA, 19 nt, Artificial Sequence
  Description of Artificial Sequence: Synthetic oligonucleotide
auagagcgacucuuccagg

SEQ ID NO: 555080 - RNA, 19 nt, Artificial Sequence
  Description of Artificial Sequence: Synthetic oligonucleotide
gguaugaaguaccuucaug

SEQ ID NO: 555081 - RNA, 19 nt, Artificial Sequence
  Description of Artificial Sequence: Synthetic oligonucleotide
acaguauggauagacuaga

SEQ ID NO: 555082 - RNA, 19 nt, Artificial Sequence
  Description of Artificial Sequence: Synthetic oligonucleotide
gaauucacaggucaggauu

SEQ ID NO: 555083 - RNA, 19 nt, Artificial Sequence
  Description of Artificial Sequence: Synthetic oligonucleotide
aggaucguguuggaauagc

SEQ ID NO: 555084 - RNA, 19 nt, Artificial Sequence
  Description of Artificial Sequence: Synthetic oligonucleotide
aacucgggcggcccgcggg

SEQ ID NO: 555085 - RNA, 19 nt, Artificial Sequence
  Description of Artificial Sequence: Synthetic oligonucleotide
gaaaaugguccaggugggg

SEQ ID NO: 555086 - RNA, 19 nt, Artificial Sequence
  Description of Artificial Sequence: Synthetic oligonucleotide
ucucggaugguaugaagua

SEQ ID NO: 555087 - RNA, 19 nt, Artificial Sequence
  Description of Artificial Sequence: Synthetic oligonucleotide
aaguuggcgaacagcagcu

SEQ ID NO: 555088 - RNA, 19 nt, Artificial Sequence
  Description of Artificial Sequence: Synthetic oligonucleotide
aucaugggaggauguucac

SEQ ID NO: 555089 - RNA, 19 nt, Artificial Sequence
  Description of Artificial Sequence: Synthetic oligonucleotide
aauucacaggucaggauua

SEQ ID NO: 555090 - RNA, 19 nt, Artificial Sequence
  Description of Artificial Sequence: Synthetic oligonucleotide
aaucuggaaagaguauaau

SEQ ID NO: 555091 - RNA, 19 nt, Artificial Sequence
  Description of Artificial Sequence: Synthetic oligonucleotide
uggggacgagggcacauag

SEQ ID NO: 555092 - RNA, 19 nt, Artificial Sequence
  Description of Artificial Sequence: Synthetic oligonucleotide
uggucgucuccauacugcc

SEQ ID NO: 555093 - RNA, 19 nt, Artificial Sequence
  Description of Artificial Sequence: Synthetic oligonucleotide
acagcuagagacguguuau

SEQ ID NO: 555094 - RNA, 19 nt, Artificial Sequence
  Description of Artificial Sequence: Synthetic oligonucleotide
auagccaucugaugcuccu

SEQ ID NO: 555095 - RNA, 19 nt, Artificial Sequence
  Description of Artificial Sequence: Synthetic oligonucleotide
aguguucucugcgaccggg

SEQ ID NO: 555096 - RNA, 19 nt, Artificial Sequence
  Description of Artificial Sequence: Synthetic oligonucleotide
ugguuugcuauggagugac

SEQ ID NO: 555097 - RNA, 19 nt, Artificial Sequence
  Description of Artificial Sequence: Synthetic oligonucleotide
gaaucaugggaggauguuc

SEQ ID NO: 555098 - RNA, 19 nt, Artificial Sequence
  Description of Artificial Sequence: Synthetic oligonucleotide
caacaguauggauagacua

SEQ ID NO: 555099 - RNA, 19 nt, Artificial Sequence
  Description of Artificial Sequence: Synthetic oligonucleotide
aggauuagucaguccggag

SEQ ID NO: 555100 - RNA, 19 nt, Artificial Sequence
  Description of Artificial Sequence: Synthetic oligonucleotide
acuagaacuacaaucucuu

SEQ ID NO: 555101 - RNA, 19 nt, Artificial Sequence
  Description of Artificial Sequence: Synthetic oligonucleotide
guuacuaaggggcagucau

SEQ ID NO: 555102 - RNA, 19 nt, Artificial Sequence
  Description of Artificial Sequence: Synthetic oligonucleotide
acuggucgucuccauacug

SEQ ID NO: 555103 - RNA, 19 nt, Artificial Sequence
  Description of Artificial Sequence: Synthetic oligonucleotide
gacguguuauccugguuga

SEQ ID NO: 555104 - RNA, 19 nt, Artificial Sequence
  Description of Artificial Sequence: Synthetic oligonucleotide
cuuauacccggauuuacua

SEQ ID NO: 555105 - RNA, 19 nt, Artificial Sequence
  Description of Artificial Sequence: Synthetic oligonucleotide
cucuccggaacucgaacag

SEQ ID NO: 555106 - RNA, 19 nt, Artificial Sequence
  Description of Artificial Sequence: Synthetic oligonucleotide
uucucugcgaccgggccag

SEQ ID NO: 555107 - RNA, 19 nt, Artificial Sequence
  Description of Artificial Sequence: Synthetic oligonucleotide
uucuaaguuggcguccugu

SEQ ID NO: 555108 - RNA, 19 nt, Artificial Sequence
  Description of Artificial Sequence: Synthetic oligonucleotide
caauggucgcacucccugg

SEQ ID NO: 555109 - RNA, 19 nt, Artificial Sequence
  Description of Artificial Sequence: Synthetic oligonucleotide
ggauuagucaguccggaga

SEQ ID NO: 555110 - RNA, 19 nt, Artificial Sequence
  Description of Artificial Sequence: Synthetic oligonucleotide
guacauguauaaauagcca

SEQ ID NO: 555111 - RNA, 19 nt, Artificial Sequence
  Description of Artificial Sequence: Synthetic oligonucleotide
aauugugguuaaggagcag

SEQ ID NO: 555112 - RNA, 19 nt, Artificial Sequence
  Description of Artificial Sequence: Synthetic oligonucleotide
augcggagucuacaauuuc

SEQ ID NO: 555113 - RNA, 19 nt, Artificial Sequence
  Description of Artificial Sequence: Synthetic oligonucleotide
aaacuuauacccggauuua

SEQ ID NO: 555114 - RNA, 19 nt, Artificial Sequence
  Description of Artificial Sequence: Synthetic oligonucleotide
uuugccucgacugccuccu

SEQ ID NO: 555115 - RNA, 19 nt, Artificial Sequence
  Description of Artificial Sequence: Synthetic oligonucleotide
aaguaccuucaugucccgg

SEQ ID NO: 555116 - RNA, 19 nt, Artificial Sequence
  Description of Artificial Sequence: Synthetic oligonucleotide
cuggauacgccaaguagca

SEQ ID NO: 555117 - RNA, 19 nt, Artificial Sequence
  Description of Artificial Sequence: Synthetic oligonucleotide
agucuacaauuucacuggu

SEQ ID NO: 555118 - RNA, 19 nt, Artificial Sequence
  Description of Artificial Sequence: Synthetic oligonucleotide
acuuauacccggauuuacu

SEQ ID NO: 555119 - RNA, 19 nt, Artificial Sequence
  Description of Artificial Sequence: Synthetic oligonucleotide
cuucacuccucuccggaac

SEQ ID NO: 555120 - RNA, 19 nt, Artificial Sequence
  Description of Artificial Sequence: Synthetic oligonucleotide
ugucucucggaugguauga

SEQ ID NO: 555121 - RNA, 19 nt, Artificial Sequence
  Description of Artificial Sequence: Synthetic oligonucleotide
gucgaacaguggcaaaggc

SEQ ID NO: 555122 - RNA, 19 nt, Artificial Sequence
  Description of Artificial Sequence: Synthetic oligonucleotide
gcuccuaccagcaaccgag

SEQ ID NO: 555123 - RNA, 19 nt, Artificial Sequence
  Description of Artificial Sequence: Synthetic oligonucleotide
acacggaucacuguccccu

SEQ ID NO: 555124 - RNA, 19 nt, Artificial Sequence
  Description of Artificial Sequence: Synthetic oligonucleotide
uggcuuggcacaucaugca

SEQ ID NO: 555125 - RNA, 19 nt, Artificial Sequence
  Description of Artificial Sequence: Synthetic oligonucleotide
agagacguguuauccuggu

SEQ ID NO: 555126 - RNA, 19 nt, Artificial Sequence
  Description of Artificial Sequence: Synthetic oligonucleotide
caugagaugcggagucuac

SEQ ID NO: 555127 - RNA, 19 nt, Artificial Sequence
  Description of Artificial Sequence: Synthetic oligonucleotide
uggaaaauacacggaucac

SEQ ID NO: 555128 - RNA, 19 nt, Artificial Sequence
  Description of Artificial Sequence: Synthetic oligonucleotide
gccgggaucauguuugcag

SEQ ID NO: 555129 - RNA, 19 nt, Artificial Sequence
  Description of Artificial Sequence: Synthetic oligonucleotide
aucucgguuccuuucuuaa

SEQ ID NO: 555130 - RNA, 19 nt, Artificial Sequence
  Description of Artificial Sequence: Synthetic oligonucleotide
uccucuccggaacucgaac

SEQ ID NO: 555131 - RNA, 19 nt, Artificial Sequence
  Description of Artificial Sequence: Synthetic oligonucleotide
gaauagcuguaguugcaaa

SEQ ID NO: 555132 - RNA, 19 nt, Artificial Sequence
  Description of Artificial Sequence: Synthetic oligonucleotide
ugguaugaaguaccuucau

SEQ ID NO: 555133 - RNA, 19 nt, Artificial Sequence
  Description of Artificial Sequence: Synthetic oligonucleotide
acgacaguccccauggaga

SEQ ID NO: 555134 - RNA, 19 nt, Artificial Sequence
  Description of Artificial Sequence: Synthetic oligonucleotide
ugguuaaggagcagauguu

SEQ ID NO: 555135 - RNA, 19 nt, Artificial Sequence
  Description of Artificial Sequence: Synthetic oligonucleotide
guauauagagcgacucuuc

SEQ ID NO: 555136 - RNA, 19 nt, Artificial Sequence
  Description of Artificial Sequence: Synthetic oligonucleotide
uucggucacuugugaaggc

SEQ ID NO: 555137 - RNA, 19 nt, Artificial Sequence
  Description of Artificial Sequence: Synthetic oligonucleotide
agcuagucccagaaugauc

SEQ ID NO: 555138 - RNA, 19 nt, Artificial Sequence
  Description of Artificial Sequence: Synthetic oligonucleotide
ucggucacuugugaaggca

SEQ ID NO: 555139 - RNA, 19 nt, Artificial Sequence
  Description of Artificial Sequence: Synthetic oligonucleotide
aagcuagucccagaaugau

SEQ ID NO: 555140 - RNA, 19 nt, Artificial Sequence
  Description of Artificial Sequence: Synthetic oligonucleotide
cauacgucugcguuacuaa

SEQ ID NO: 555141 - RNA, 19 nt, Artificial Sequence
  Description of Artificial Sequence: Synthetic oligonucleotide
guguuauccugguugaagu

SEQ ID NO: 555142 - RNA, 19 nt, Artificial Sequence
  Description of Artificial Sequence: Synthetic oligonucleotide
augguaugaaguaccuuca

SEQ ID NO: 555143 - RNA, 19 nt, Artificial Sequence
  Description of Artificial Sequence: Synthetic oligonucleotide
gcuggcuuggcacaucaug

SEQ ID NO: 555144 - RNA, 19 nt, Artificial Sequence
  Description of Artificial Sequence: Synthetic oligonucleotide
cucucaaguuaaugguguc

SEQ ID NO: 555145 - RNA, 19 nt, Artificial Sequence
  Description of Artificial Sequence: Synthetic oligonucleotide
ugguagacgccaugagcac

SEQ ID NO: 555146 - RNA, 19 nt, Artificial Sequence
  Description of Artificial Sequence: Synthetic oligonucleotide
auaggcaccuuuggcagcu

SEQ ID NO: 555147 - RNA, 19 nt, Artificial Sequence
  Description of Artificial Sequence: Synthetic oligonucleotide
ugcguuacuaaggggcagu

SEQ ID NO: 555148 - RNA, 19 nt, Artificial Sequence
  Description of Artificial Sequence: Synthetic oligonucleotide
ucugcgaccgggccagaau

SEQ ID NO: 555149 - RNA, 19 nt, Artificial Sequence
  Description of Artificial Sequence: Synthetic oligonucleotide
ucaugagaugcggagucua

SEQ ID NO: 555150 - RNA, 19 nt, Artificial Sequence
  Description of Artificial Sequence: Synthetic oligonucleotide
uccaauggucgcacucccu

SEQ ID NO: 555151 - RNA, 19 nt, Artificial Sequence
  Description of Artificial Sequence: Synthetic oligonucleotide
uuauggccacagaauggua

SEQ ID NO: 555152 - RNA, 19 nt, Artificial Sequence
  Description of Artificial Sequence: Synthetic oligonucleotide
cucgacugccuccucucgc

SEQ ID NO: 555153 - RNA, 19 nt, Artificial Sequence
  Description of Artificial Sequence: Synthetic oligonucleotide
ggagaaucaugggaggaug

SEQ ID NO: 555154 - RNA, 19 nt, Artificial Sequence
  Description of Artificial Sequence: Synthetic oligonucleotide
ggucucaguuggcggaugg

SEQ ID NO: 555155 - RNA, 19 nt, Artificial Sequence
  Description of Artificial Sequence: Synthetic oligonucleotide
ucgcacucccuggauacgc

SEQ ID NO: 555156 - RNA, 19 nt, Artificial Sequence
  Description of Artificial Sequence: Synthetic oligonucleotide
gcaaacgacaguccccaug

SEQ ID NO: 555157 - RNA, 19 nt, Artificial Sequence
  Description of Artificial Sequence: Synthetic oligonucleotide
ugaugacugugguuugcua

SEQ ID NO: 555158 - RNA, 19 nt, Artificial Sequence
  Description of Artificial Sequence: Synthetic oligonucleotide
cuccuaccagcaaccgagg

SEQ ID NO: 555159 - RNA, 19 nt, Artificial Sequence
  Description of Artificial Sequence: Synthetic oligonucleotide
augagaugcggagucuaca

SEQ ID NO: 555160 - RNA, 19 nt, Artificial Sequence
  Description of Artificial Sequence: Synthetic oligonucleotide
cagguagcugguagacgcc

SEQ ID NO: 555161 - RNA, 19 nt, Artificial Sequence
  Description of Artificial Sequence: Synthetic oligonucleotide
gcugacgauggccaccaag

SEQ ID NO: 555162 - RNA, 19 nt, Artificial Sequence
  Description of Artificial Sequence: Synthetic oligonucleotide
uggauacgccaaguagcag

SEQ ID NO: 555163 - RNA, 19 nt, Artificial Sequence
  Description of Artificial Sequence: Synthetic oligonucleotide
ggccagaauucacagguca

SEQ ID NO: 555164 - RNA, 19 nt, Artificial Sequence
  Description of Artificial Sequence: Synthetic oligonucleotide
uucgcgggagcgcgcgcgg

SEQ ID NO: 555165 - RNA, 19 nt, Artificial Sequence
  Description of Artificial Sequence: Synthetic oligonucleotide
augggccuaucccugcaga

SEQ ID NO: 555166 - RNA, 19 nt, Artificial Sequence
  Description of Artificial Sequence: Synthetic oligonucleotide
ggauacgccaaguagcagu

SEQ ID NO: 555167 - RNA, 19 nt, Artificial Sequence
  Description of Artificial Sequence: Synthetic oligonucleotide
ggaaaauacacggaucacu

SEQ ID NO: 555168 - RNA, 19 nt, Artificial Sequence
  Description of Artificial Sequence: Synthetic oligonucleotide
gaccacucgcucuccuaug

SEQ ID NO: 555169 - RNA, 19 nt, Artificial Sequence
  Description of Artificial Sequence: Synthetic oligonucleotide
ugggccuaucccugcagaa

SEQ ID NO: 555170 - RNA, 19 nt, Artificial Sequence
  Description of Artificial Sequence: Synthetic oligonucleotide
gcaaaucucgguuccuuuc

SEQ ID NO: 555171 - RNA, 19 nt, Artificial Sequence
  Description of Artificial Sequence: Synthetic oligonucleotide
gugucagugcauucauaga

SEQ ID NO: 555172 - RNA, 19 nt, Artificial Sequence
  Description of Artificial Sequence: Synthetic oligonucleotide
ccggauuuacuaccaacag

SEQ ID NO: 555173 - RNA, 19 nt, Artificial Sequence
  Description of Artificial Sequence: Synthetic oligonucleotide
ggagacgccacagacuuca

SEQ ID NO: 555174 - RNA, 19 nt, Artificial Sequence
  Description of Artificial Sequence: Synthetic oligonucleotide
ugacgcaucagggcacacu

SEQ ID NO: 555175 - RNA, 19 nt, Artificial Sequence
  Description of Artificial Sequence: Synthetic oligonucleotide
caaccgccgccucaucccg

SEQ ID NO: 555176 - RNA, 19 nt, Artificial Sequence
  Description of Artificial Sequence: Synthetic oligonucleotide
agaggaacaugccguccau

SEQ ID NO: 555177 - RNA, 19 nt, Artificial Sequence
  Description of Artificial Sequence: Synthetic oligonucleotide
cucggaccgccuucgcggg

SEQ ID NO: 555178 - RNA, 19 nt, Artificial Sequence
  Description of Artificial Sequence: Synthetic oligonucleotide
cugcaaacgacagucccca

SEQ ID NO: 555179 - RNA, 19 nt, Artificial Sequence
  Description of Artificial Sequence: Synthetic oligonucleotide
augagccgggaucauguuu

SEQ ID NO: 555180 - RNA, 19 nt, Artificial Sequence
  Description of Artificial Sequence: Synthetic oligonucleotide
cugucaugagccgggauca

SEQ ID NO: 555181 - RNA, 19 nt, Artificial Sequence
  Description of Artificial Sequence: Synthetic oligonucleotide
gguucggcucuuugccucg

SEQ ID NO: 555182 - RNA, 19 nt, Artificial Sequence
  Description of Artificial Sequence: Synthetic oligonucleotide
ucccuggauacgccaagua

SEQ ID NO: 555183 - RNA, 19 nt, Artificial Sequence
  Description of Artificial Sequence: Synthetic oligonucleotide
ugcgaccgggccagaauuc

SEQ ID NO: 555184 - RNA, 19 nt, Artificial Sequence
  Description of Artificial Sequence: Synthetic oligonucleotide
cggauuuacuaccaacagc

SEQ ID NO: 555185 - RNA, 19 nt, Artificial Sequence
  Description of Artificial Sequence: Synthetic oligonucleotide
gcacaucaugcaugcaaag

SEQ ID NO: 555186 - RNA, 19 nt, Artificial Sequence
  Description of Artificial Sequence: Synthetic oligonucleotide
ggccuaucccugcagaauc

SEQ ID NO: 555187 - RNA, 19 nt, Artificial Sequence
  Description of Artificial Sequence: Synthetic oligonucleotide
agaaucaugggaggauguu

SEQ ID NO: 555188 - RNA, 19 nt, Artificial Sequence
  Description of Artificial Sequence: Synthetic oligonucleotide
uggucgcacucccuggaua

SEQ ID NO: 555189 - RNA, 19 nt, Artificial Sequence
  Description of Artificial Sequence: Synthetic oligonucleotide
gcaagucuuguuggggacg

SEQ ID NO: 555190 - RNA, 19 nt, Artificial Sequence
  Description of Artificial Sequence: Synthetic oligonucleotide
aguccccauggagaaagcu

SEQ ID NO: 555191 - RNA, 19 nt, Artificial Sequence
  Description of Artificial Sequence: Synthetic oligonucleotide
agucaguccggagaaucau

SEQ ID NO: 555192 - RNA, 19 nt, Artificial Sequence
  Description of Artificial Sequence: Synthetic oligonucleotide
ucgccagguucauggcugc

SEQ ID NO: 555193 - RNA, 19 nt, Artificial Sequence
  Description of Artificial Sequence: Synthetic oligonucleotide
gucucaguuggcggauggg

SEQ ID NO: 555194 - RNA, 19 nt, Artificial Sequence
  Description of Artificial Sequence: Synthetic oligonucleotide
caucuguauaggcuucuaa

SEQ ID NO: 555195 - RNA, 19 nt, Artificial Sequence
  Description of Artificial Sequence: Synthetic oligonucleotide
caaaguagccgguccaggu

SEQ ID NO: 555196 - RNA, 19 nt, Artificial Sequence
  Description of Artificial Sequence: Synthetic oligonucleotide
caucgagccugugcugacg

SEQ ID NO: 555197 - RNA, 19 nt, Artificial Sequence
  Description of Artificial Sequence: Synthetic oligonucleotide
ggcgaacagcagcuggccg

SEQ ID NO: 555198 - RNA, 19 nt, Artificial Sequence
  Description of Artificial Sequence: Synthetic oligonucleotide
cccggauuuacuaccaaca

SEQ ID NO: 555199 - RNA, 19 nt, Artificial Sequence
  Description of Artificial Sequence: Synthetic oligonucleotide
acaguuaauuuuggacaaa

SEQ ID NO: 555200 - RNA, 19 nt, Artificial Sequence
  Description of Artificial Sequence: Synthetic oligonucleotide
cuucccaaaguagccgguc

SEQ ID NO: 555201 - RNA, 19 nt, Artificial Sequence
  Description of Artificial Sequence: Synthetic oligonucleotide
caaaucucgguuccuuucu

SEQ ID NO: 555202 - RNA, 19 nt, Artificial Sequence
  Description of Artificial Sequence: Synthetic oligonucleotide
gacugugguuugcuaugga

SEQ ID NO: 555203 - RNA, 19 nt, Artificial Sequence
  Description of Artificial Sequence: Synthetic oligonucleotide
uccugcggguccagguugu

SEQ ID NO: 555204 - RNA, 19 nt, Artificial Sequence
  Description of Artificial Sequence: Synthetic oligonucleotide
gguagacgccaugagcacc

SEQ ID NO: 555205 - RNA, 19 nt, Artificial Sequence
  Description of Artificial Sequence: Synthetic oligonucleotide
uacccggauuuacuaccaa

SEQ ID NO: 555206 - RNA, 19 nt, Artificial Sequence
  Description of Artificial Sequence: Synthetic oligonucleotide
auacccggauuuacuacca

SEQ ID NO: 555207 - RNA, 19 nt, Artificial Sequence
  Description of Artificial Sequence: Synthetic oligonucleotide
cuucgcgggagcgcgcgcg

SEQ ID NO: 555208 - RNA, 19 nt, Artificial Sequence
  Description of Artificial Sequence: Synthetic oligonucleotide
auggcugcgcgcgcgcgac

SEQ ID NO: 555209 - RNA, 19 nt, Artificial Sequence
  Description of Artificial Sequence: Synthetic oligonucleotide
caggaucguguuggaauag

SEQ ID NO: 555210 - RNA, 19 nt, Artificial Sequence
  Description of Artificial Sequence: Synthetic oligonucleotide
gagccgggaucauguuugc

SEQ ID NO: 555211 - RNA, 19 nt, Artificial Sequence
  Description of Artificial Sequence: Synthetic oligonucleotide
agguagcugguagacgcca

SEQ ID NO: 555212 - RNA, 19 nt, Artificial Sequence
  Description of Artificial Sequence: Synthetic oligonucleotide
cccgguucggcucuuugcc

SEQ ID NO: 555213 - RNA, 19 nt, Artificial Sequence
  Description of Artificial Sequence: Synthetic oligonucleotide
ccccauggagaacacacug

SEQ ID NO: 555214 - RNA, 19 nt, Artificial Sequence
  Description of Artificial Sequence: Synthetic oligonucleotide
gauuuacuaccaacagcua

SEQ ID NO: 555215 - RNA, 19 nt, Artificial Sequence
  Description of Artificial Sequence: Synthetic oligonucleotide
gcuuggcacaucaugcaug

SEQ ID NO: 555216 - RNA, 19 nt, Artificial Sequence
  Description of Artificial Sequence: Synthetic oligonucleotide
ggcguccuguccuuuagca

SEQ ID NO: 555217 - RNA, 19 nt, Artificial Sequence
  Description of Artificial Sequence: Synthetic oligonucleotide
caguauggauagacuagaa

SEQ ID NO: 555218 - RNA, 19 nt, Artificial Sequence
  Description of Artificial Sequence: Synthetic oligonucleotide
cucucaagauccccaugga

SEQ ID NO: 555219 - RNA, 19 nt, Artificial Sequence
  Description of Artificial Sequence: Synthetic oligonucleotide
gaccgggccagaauucaca

SEQ ID NO: 555220 - RNA, 19 nt, Artificial Sequence
  Description of Artificial Sequence: Synthetic oligonucleotide
gagaaucaugggaggaugu

SEQ ID NO: 555221 - RNA, 19 nt, Artificial Sequence
  Description of Artificial Sequence: Synthetic oligonucleotide
cuccggaacucgaacagcu

SEQ ID NO: 555222 - RNA, 19 nt, Artificial Sequence
  Description of Artificial Sequence: Synthetic oligonucleotide
gguagucgaacaguggcaa

SEQ ID NO: 555223 - RNA, 19 nt, Artificial Sequence
  Description of Artificial Sequence: Synthetic oligonucleotide
cugcgcggggaccaaccgc

SEQ ID NO: 555224 - RNA, 19 nt, Artificial Sequence
  Description of Artificial Sequence: Synthetic oligonucleotide
ccaccaagcugcuugagaa

SEQ ID NO: 555225 - RNA, 19 nt, Artificial Sequence
  Description of Artificial Sequence: Synthetic oligonucleotide
cugcguuacuaaggggcag

SEQ ID NO: 555226 - RNA, 19 nt, Artificial Sequence
  Description of Artificial Sequence: Synthetic oligonucleotide
caggauuagucaguccgga

SEQ ID NO: 555227 - RNA, 19 nt, Artificial Sequence
  Description of Artificial Sequence: Synthetic oligonucleotide
uucggcucuuugccucgac

SEQ ID NO: 555228 - RNA, 19 nt, Artificial Sequence
  Description of Artificial Sequence: Synthetic oligonucleotide
cccucaauucaggucaaag

SEQ ID NO: 555229 - RNA, 19 nt, Artificial Sequence
  Description of Artificial Sequence: Synthetic oligonucleotide
cuucuaaguuggcguccug

SEQ ID NO: 555230 - RNA, 19 nt, Artificial Sequence
  Description of Artificial Sequence: Synthetic oligonucleotide
gaugcggagucuacaauuu

SEQ ID NO: 555231 - RNA, 19 nt, Artificial Sequence
  Description of Artificial Sequence: Synthetic oligonucleotide
aguuggcgaacagcagcug

SEQ ID NO: 555232 - RNA, 19 nt, Artificial Sequence
  Description of Artificial Sequence: Synthetic oligonucleotide
auuagucaguccggagaau

SEQ ID NO: 555233 - RNA, 19 nt, Artificial Sequence
  Description of Artificial Sequence: Synthetic oligonucleotide
gggagcgcucuacacucag

SEQ ID NO: 555234 - RNA, 19 nt, Artificial Sequence
  Description of Artificial Sequence: Synthetic oligonucleotide
ucgagccugugcugacgca

SEQ ID NO: 555235 - RNA, 19 nt, Artificial Sequence
  Description of Artificial Sequence: Synthetic oligonucleotide
ucucaacaguauggauaga

SEQ ID NO: 555236 - RNA, 19 nt, Artificial Sequence
  Description of Artificial Sequence: Synthetic oligonucleotide
gauacgccaaguagcaguu

SEQ ID NO: 555237 - RNA, 19 nt, Artificial Sequence
  Description of Artificial Sequence: Synthetic oligonucleotide
guagucgaacaguggcaaa

SEQ ID NO: 555238 - RNA, 19 nt, Artificial Sequence
  Description of Artificial Sequence: Synthetic oligonucleotide
acgcaucagggcacacucg

SEQ ID NO: 555239 - RNA, 19 nt, Artificial Sequence
  Description of Artificial Sequence: Synthetic oligonucleotide
guagacgccaugagcaccu

SEQ ID NO: 555240 - RNA, 19 nt, Artificial Sequence
  Description of Artificial Sequence: Synthetic oligonucleotide
ucaucccguccccacucuu

SEQ ID NO: 555241 - RNA, 19 nt, Artificial Sequence
  Description of Artificial Sequence: Synthetic oligonucleotide
caguccccauggagaaagc

SEQ ID NO: 555242 - RNA, 19 nt, Artificial Sequence
  Description of Artificial Sequence: Synthetic oligonucleotide
auggucgcacucccuggau

SEQ ID NO: 555243 - RNA, 19 nt, Artificial Sequence
  Description of Artificial Sequence: Synthetic oligonucleotide
ccuuucuuaaaguggcaaa

SEQ ID NO: 555244 - RNA, 19 nt, Artificial Sequence
  Description of Artificial Sequence: Synthetic oligonucleotide
caagagggcuccugacaga

SEQ ID NO: 555245 - RNA, 19 nt, Artificial Sequence
  Description of Artificial Sequence: Synthetic oligonucleotide
gugccauacgucugcguua

SEQ ID NO: 555246 - RNA, 19 nt, Artificial Sequence
  Description of Artificial Sequence: Synthetic oligonucleotide
gagaugcggagucuacaau

SEQ ID NO: 555247 - RNA, 19 nt, Artificial Sequence
  Description of Artificial Sequence: Synthetic oligonucleotide
agagggcuccugacagagg

SEQ ID NO: 555248 - RNA, 19 nt, Artificial Sequence
  Description of Artificial Sequence: Synthetic oligonucleotide
auacgccaaguagcaguug

SEQ ID NO: 555249 - RNA, 19 nt, Artificial Sequence
  Description of Artificial Sequence: Synthetic oligonucleotide
uggucucaguuggcggaug

SEQ ID NO: 555250 - RNA, 19 nt, Artificial Sequence
  Description of Artificial Sequence: Synthetic oligonucleotide
gugguuugcuauggaguga

SEQ ID NO: 555251 - RNA, 19 nt, Artificial Sequence
  Description of Artificial Sequence: Synthetic oligonucleotide
ccucaauucaggucaaagu

SEQ ID NO: 555252 - RNA, 19 nt, Artificial Sequence
  Description of Artificial Sequence: Synthetic oligonucleotide
aggcacacgaugagccucu

SEQ ID NO: 555253 - RNA, 19 nt, Artificial Sequence
  Description of Artificial Sequence: Synthetic oligonucleotide
gcugcgcggggaccaaccg

SEQ ID NO: 555254 - RNA, 19 nt, Artificial Sequence
  Description of Artificial Sequence: Synthetic oligonucleotide
cuccuaugcuggcuuggca

SEQ ID NO: 555255 - RNA, 19 nt, Artificial Sequence
  Description of Artificial Sequence: Synthetic oligonucleotide
guguuggaauagcuguagu

SEQ ID NO: 555256 - RNA, 19 nt, Artificial Sequence
  Description of Artificial Sequence: Synthetic oligonucleotide
uccccgcucuggcucgcca

SEQ ID NO: 555257 - RNA, 19 nt, Artificial Sequence
  Description of Artificial Sequence: Synthetic oligonucleotide
agcaaccgagggaucuucu

SEQ ID NO: 555258 - RNA, 19 nt, Artificial Sequence
  Description of Artificial Sequence: Synthetic oligonucleotide
ugcaaacgacaguccccau

SEQ ID NO: 555259 - RNA, 19 nt, Artificial Sequence
  Description of Artificial Sequence: Synthetic oligonucleotide
guuggcguccuguccuuua

SEQ ID NO: 555260 - RNA, 19 nt, Artificial Sequence
  Description of Artificial Sequence: Synthetic oligonucleotide
gguucauggcugcgcgcgc

SEQ ID NO: 555261 - RNA, 19 nt, Artificial Sequence
  Description of Artificial Sequence: Synthetic oligonucleotide
cuaucccugcagaaucacu

SEQ ID NO: 555262 - RNA, 19 nt, Artificial Sequence
  Description of Artificial Sequence: Synthetic oligonucleotide
ggagcgcucuacacucagg

SEQ ID NO: 555263 - RNA, 19 nt, Artificial Sequence
  Description of Artificial Sequence: Synthetic oligonucleotide
cagcaaccgagggaucuuc

SEQ ID NO: 555264 - RNA, 19 nt, Artificial Sequence
  Description of Artificial Sequence: Synthetic oligonucleotide
uuggggacgagggcacaua

SEQ ID NO: 555265 - RNA, 19 nt, Artificial Sequence
  Description of Artificial Sequence: Synthetic oligonucleotide
cggucacuugugaaggcag

SEQ ID NO: 555266 - RNA, 19 nt, Artificial Sequence
  Description of Artificial Sequence: Synthetic oligonucleotide
aggagacgccacagacuuc

SEQ ID NO: 555267 - RNA, 19 nt, Artificial Sequence
  Description of Artificial Sequence: Synthetic oligonucleotide
cggcucuuugccucgacug

SEQ ID NO: 555268 - RNA, 19 nt, Artificial Sequence
  Description of Artificial Sequence: Synthetic oligonucleotide
ucggaccgccuucgcggga

SEQ ID NO: 555269 - RNA, 19 nt, Artificial Sequence
  Description of Artificial Sequence: Synthetic oligonucleotide
cacucccuggauacgccaa

SEQ ID NO: 555270 - RNA, 19 nt, Artificial Sequence
  Description of Artificial Sequence: Synthetic oligonucleotide
ggcggaugggccuaucccu

SEQ ID NO: 555271 - RNA, 19 nt, Artificial Sequence
  Description of Artificial Sequence: Synthetic oligonucleotide
gugaccacucgcucuccua

SEQ ID NO: 555272 - RNA, 19 nt, Artificial Sequence
  Description of Artificial Sequence: Synthetic oligonucleotide
caacucgggcggcccgcgg

SEQ ID NO: 555273 - RNA, 19 nt, Artificial Sequence
  Description of Artificial Sequence: Synthetic oligonucleotide
gguuaaggagcagauguuu

SEQ ID NO: 555274 - RNA, 19 nt, Artificial Sequence
  Description of Artificial Sequence: Synthetic oligonucleotide
ccucuccggaacucgaaca

SEQ ID NO: 555275 - RNA, 19 nt, Artificial Sequence
  Description of Artificial Sequence: Synthetic oligonucleotide
gggcacacucgccaccuuc

SEQ ID NO: 555276 - RNA, 19 nt, Artificial Sequence
  Description of Artificial Sequence: Synthetic oligonucleotide
ucuggcucgccagguucau

SEQ ID NO: 555277 - RNA, 19 nt, Artificial Sequence
  Description of Artificial Sequence: Synthetic oligonucleotide
aguagccgguccagguggu

SEQ ID NO: 555278 - RNA, 19 nt, Artificial Sequence
  Description of Artificial Sequence: Synthetic oligonucleotide
cgcgcgacgggcucggacc

SEQ ID NO: 555279 - RNA, 19 nt, Artificial Sequence
  Description of Artificial Sequence: Synthetic oligonucleotide
gggcuccugacagaggcca

SEQ ID NO: 555280 - RNA, 19 nt, Artificial Sequence
  Description of Artificial Sequence: Synthetic oligonucleotide
ccucgacugccuccucucg

SEQ ID NO: 555281 - RNA, 19 nt, Artificial Sequence
  Description of Artificial Sequence: Synthetic oligonucleotide
ccaggaucguguuggaaua

SEQ ID NO: 555282 - RNA, 19 nt, Artificial Sequence
  Description of Artificial Sequence: Synthetic oligonucleotide
cucucgcugcgcggggacc

SEQ ID NO: 555283 - RNA, 19 nt, Artificial Sequence
  Description of Artificial Sequence: Synthetic oligonucleotide
gcgcgacgggcucggaccg

SEQ ID NO: 555284 - RNA, 19 nt, Artificial Sequence
  Description of Artificial Sequence: Synthetic oligonucleotide
cgucugcguuacuaagggg

SEQ ID NO: 555285 - RNA, 19 nt, Artificial Sequence
  Description of Artificial Sequence: Synthetic oligonucleotide
ggaucguguuggaauagcu

SEQ ID NO: 555286 - RNA, 19 nt, Artificial Sequence
  Description of Artificial Sequence: Synthetic oligonucleotide
ccuaucccugcagaaucac

SEQ ID NO: 555287 - RNA, 19 nt, Artificial Sequence
  Description of Artificial Sequence: Synthetic oligonucleotide
gguuugcuauggagugacc

SEQ ID NO: 555288 - RNA, 19 nt, Artificial Sequence
  Description of Artificial Sequence: Synthetic oligonucleotide
cuccucuccggaacucgaa

SEQ ID NO: 555289 - RNA, 19 nt, Artificial Sequence
  Description of Artificial Sequence: Synthetic oligonucleotide
cggauguuguguauauaga

SEQ ID NO: 555290 - RNA, 19 nt, Artificial Sequence
  Description of Artificial Sequence: Synthetic oligonucleotide
acguguuauccugguugaa

SEQ ID NO: 555291 - RNA, 19 nt, Artificial Sequence
  Description of Artificial Sequence: Synthetic oligonucleotide
agccgggaucauguuugca

SEQ ID NO: 555292 - RNA, 19 nt, Artificial Sequence
  Description of Artificial Sequence: Synthetic oligonucleotide
guagccgguccagguggug

SEQ ID NO: 555293 - RNA, 19 nt, Artificial Sequence
  Description of Artificial Sequence: Synthetic oligonucleotide
gagacguguuauccugguu

SEQ ID NO: 555294 - RNA, 19 nt, Artificial Sequence
  Description of Artificial Sequence: Synthetic oligonucleotide
caccucuccaauggucgca

SEQ ID NO: 555295 - RNA, 19 nt, Artificial Sequence
  Description of Artificial Sequence: Synthetic oligonucleotide
ggcagucaugagaugcgga

SEQ ID NO: 555296 - RNA, 19 nt, Artificial Sequence
  Description of Artificial Sequence: Synthetic oligonucleotide
gagacgccacagacuucac

SEQ ID NO: 555297 - RNA, 19 nt, Artificial Sequence
  Description of Artificial Sequence: Synthetic oligonucleotide
ccaacagcuagagacgugu

SEQ ID NO: 555298 - RNA, 19 nt, Artificial Sequence
  Description of Artificial Sequence: Synthetic oligonucleotide
gccucgacugccuccucuc

SEQ ID NO: 555299 - RNA, 19 nt, Artificial Sequence
  Description of Artificial Sequence: Synthetic oligonucleotide
gcacucccuggauacgcca

SEQ ID NO: 555300 - RNA, 19 nt, Artificial Sequence
  Description of Artificial Sequence: Synthetic oligonucleotide
ccaucgagccugugcugac

SEQ ID NO: 555301 - RNA, 19 nt, Artificial Sequence
  Description of Artificial Sequence: Synthetic oligonucleotide
gccuucgcgggagcgcgcg

SEQ ID NO: 555302 - RNA, 19 nt, Artificial Sequence
  Description of Artificial Sequence: Synthetic oligonucleotide
uugccucgacugccuccuc

SEQ ID NO: 555303 - RNA, 19 nt, Artificial Sequence
  Description of Artificial Sequence: Synthetic oligonucleotide
gcguccuguccuuuagcaa

SEQ ID NO: 555304 - RNA, 19 nt, Artificial Sequence
  Description of Artificial Sequence: Synthetic oligonucleotide
gcaacucgggcggcccgcg

SEQ ID NO: 555305 - RNA, 19 nt, Artificial Sequence
  Description of Artificial Sequence: Synthetic oligonucleotide
gccuaucccugcagaauca

SEQ ID NO: 555306 - RNA, 19 nt, Artificial Sequence
  Description of Artificial Sequence: Synthetic oligonucleotide
gcgcaacucgggcggcccg

SEQ ID NO: 555307 - RNA, 19 nt, Artificial Sequence
  Description of Artificial Sequence: Synthetic oligonucleotide
ggcuuggcacaucaugcau

SEQ ID NO: 555308 - RNA, 19 nt, Artificial Sequence
  Description of Artificial Sequence: Synthetic oligonucleotide
ggcgcaacucgggcggccc

SEQ ID NO: 555309 - RNA, 19 nt, Artificial Sequence
  Description of Artificial Sequence: Synthetic oligonucleotide
cgcacucccuggauacgcc

SEQ ID NO: 555310 - RNA, 19 nt, Artificial Sequence
  Description of Artificial Sequence: Synthetic oligonucleotide
ggcugcuaagggacuguca

SEQ ID NO: 555311 - RNA, 19 nt, Artificial Sequence
  Description of Artificial Sequence: Synthetic oligonucleotide
cugcgaccgggccagaauu

SEQ ID NO: 555312 - RNA, 19 nt, Artificial Sequence
  Description of Artificial Sequence: Synthetic oligonucleotide
cgguucggcucuuugccuc

SEQ ID NO: 555313 - RNA, 19 nt, Artificial Sequence
  Description of Artificial Sequence: Synthetic oligonucleotide
gcguuacuaaggggcaguc

SEQ ID NO: 555314 - RNA, 19 nt, Artificial Sequence
  Description of Artificial Sequence: Synthetic oligonucleotide
cacuggucgucuccauacu

SEQ ID NO: 555315 - RNA, 19 nt, Artificial Sequence
  Description of Artificial Sequence: Synthetic oligonucleotide
ggugucucucggaugguau

SEQ ID NO: 555316 - RNA, 19 nt, Artificial Sequence
  Description of Artificial Sequence: Synthetic oligonucleotide
cggaugggccuaucccugc

SEQ ID NO: 555317 - RNA, 19 nt, Artificial Sequence
  Description of Artificial Sequence: Synthetic oligonucleotide
gcgaccgggccagaauuca

SEQ ID NO: 555318 - RNA, 19 nt, Artificial Sequence
  Description of Artificial Sequence: Synthetic oligonucleotide
ccacagaaugguagucgaa

SEQ ID NO: 555319 - RNA, 19 nt, Artificial Sequence
  Description of Artificial Sequence: Synthetic oligonucleotide
cgcugcgcggggaccaacc

SEQ ID NO: 555320 - RNA, 19 nt, Artificial Sequence
  Description of Artificial Sequence: Synthetic oligonucleotide
gggccagaauucacagguc

SEQ ID NO: 555321 - RNA, 19 nt, Artificial Sequence
  Description of Artificial Sequence: Synthetic oligonucleotide
caacagcuagagacguguu

SEQ ID NO: 555322 - RNA, 19 nt, Artificial Sequence
  Description of Artificial Sequence: Synthetic oligonucleotide
gcgacgggcucggaccgcc

SEQ ID NO: 555323 - RNA, 19 nt, Artificial Sequence
  Description of Artificial Sequence: Synthetic oligonucleotide
ggcccugcccugguugaac

SEQ ID NO: 555324 - RNA, 19 nt, Artificial Sequence
  Description of Artificial Sequence: Synthetic oligonucleotide
guuggcggaugggccuauc

SEQ ID NO: 555325 - RNA, 19 nt, Artificial Sequence
  Description of Artificial Sequence: Synthetic oligonucleotide
cuaugcuggcuuggcacau

SEQ ID NO: 555326 - RNA, 19 nt, Artificial Sequence
  Description of Artificial Sequence: Synthetic oligonucleotide
gggcugcuaagggacuguc

SEQ ID NO: 555327 - RNA, 19 nt, Artificial Sequence
  Description of Artificial Sequence: Synthetic oligonucleotide
caugagccgggaucauguu

SEQ ID NO: 555328 - RNA, 19 nt, Artificial Sequence
  Description of Artificial Sequence: Synthetic oligonucleotide
cauccaggcgcagggcacu

SEQ ID NO: 555329 - RNA, 19 nt, Artificial Sequence
  Description of Artificial Sequence: Synthetic oligonucleotide
cgaccgggccagaauucac

SEQ ID NO: 555330 - RNA, 19 nt, Artificial Sequence
  Description of Artificial Sequence: Synthetic oligonucleotide
caccuuccugcggguccag

SEQ ID NO: 555331 - RNA, 19 nt, Artificial Sequence
  Description of Artificial Sequence: Synthetic oligonucleotide
ggaccgccuucgcgggagc

SEQ ID NO: 555332 - RNA, 19 nt, Artificial Sequence
  Description of Artificial Sequence: Synthetic oligonucleotide
ggcaagcuuggucccacuu

SEQ ID NO: 555333 - RNA, 19 nt, Artificial Sequence
  Description of Artificial Sequence: Synthetic oligonucleotide
gacgggcucggaccgccuu

SEQ ID NO: 555334 - RNA, 19 nt, Artificial Sequence
  Description of Artificial Sequence: Synthetic oligonucleotide
caguuggcggaugggccua

SEQ ID NO: 555335 - RNA, 19 nt, Artificial Sequence
  Description of Artificial Sequence: Synthetic oligonucleotide
ucucugcgaccgggccaga

SEQ ID NO: 555336 - RNA, 19 nt, Artificial Sequence
  Description of Artificial Sequence: Synthetic oligonucleotide
ggcuccugacagaggccac

SEQ ID NO: 555337 - RNA, 19 nt, Artificial Sequence
  Description of Artificial Sequence: Synthetic oligonucleotide
cucugcgaccgggccagaa

SEQ ID NO: 555338 - RNA, 19 nt, Artificial Sequence
  Description of Artificial Sequence: Synthetic oligonucleotide
ccggaacucgaacagcuuu

SEQ ID NO: 555339 - RNA, 19 nt, Artificial Sequence
  Description of Artificial Sequence: Synthetic oligonucleotide
cguuacuaaggggcaguca

SEQ ID NO: 555340 - RNA, 19 nt, Artificial Sequence
  Description of Artificial Sequence: Synthetic oligonucleotide
ccgagggaucuucugaauu

SEQ ID NO: 555341 - RNA, 19 nt, Artificial Sequence
  Description of Artificial Sequence: Synthetic oligonucleotide
gcuccugacagaggccacu

SEQ ID NO: 555342 - RNA, 19 nt, Artificial Sequence
  Description of Artificial Sequence: Synthetic oligonucleotide
gggccuaucccugcagaau

SEQ ID NO: 555343 - RNA, 19 nt, Artificial Sequence
  Description of Artificial Sequence: Synthetic oligonucleotide
cggaugguaugaaguaccu

SEQ ID NO: 555344 - RNA, 19 nt, Artificial Sequence
  Description of Artificial Sequence: Synthetic oligonucleotide
ccuucgcgggagcgcgcgc

SEQ ID NO: 555345 - RNA, 19 nt, Artificial Sequence
  Description of Artificial Sequence: Synthetic oligonucleotide
cacggaucacuguccccuu

SEQ ID NO: 555346 - RNA, 19 nt, Artificial Sequence
  Description of Artificial Sequence: Synthetic oligonucleotide
gcggguccagguuguacau

SEQ ID NO: 555347 - RNA, 19 nt, Artificial Sequence
  Description of Artificial Sequence: Synthetic oligonucleotide
cccgcgggagcgcucuaca

SEQ ID NO: 555348 - RNA, 19 nt, Artificial Sequence
  Description of Artificial Sequence: Synthetic oligonucleotide
guagggcaagagggcuccu

SEQ ID NO: 555349 - RNA, 19 nt, Artificial Sequence
  Description of Artificial Sequence: Synthetic oligonucleotide
ccgguucggcucuuugccu

SEQ ID NO: 555350 - RNA, 19 nt, Artificial Sequence
  Description of Artificial Sequence: Synthetic oligonucleotide
cucgcugcgcggggaccaa

SEQ ID NO: 555351 - RNA, 19 nt, Artificial Sequence
  Description of Artificial Sequence: Synthetic oligonucleotide
gcccgcgggagcgcucuac

SEQ ID NO: 555352 - RNA, 19 nt, Artificial Sequence
  Description of Artificial Sequence: Synthetic oligonucleotide
cgcccgguucggcucuuug

SEQ ID NO: 555353 - RNA, 19 nt, Artificial Sequence
  Description of Artificial Sequence: Synthetic oligonucleotide
gcggcgcaacucgggcggc

SEQ ID NO: 555354 - RNA, 19 nt, Artificial Sequence
  Description of Artificial Sequence: Synthetic oligonucleotide
ggcugacgauggccaccaa

SEQ ID NO: 555355 - RNA, 19 nt, Artificial Sequence
  Description of Artificial Sequence: Synthetic oligonucleotide
cccggauguuguguauaua

SEQ ID NO: 555356 - RNA, 19 nt, Artificial Sequence
  Description of Artificial Sequence: Synthetic oligonucleotide
cgccuucgcgggagcgcgc

SEQ ID NO: 555357 - RNA, 19 nt, Artificial Sequence
  Description of Artificial Sequence: Synthetic oligonucleotide
gccauacgucugcguuacu

SEQ ID NO: 555358 - RNA, 19 nt, Artificial Sequence
  Description of Artificial Sequence: Synthetic oligonucleotide
ggggugucucucggauggu

SEQ ID NO: 555359 - RNA, 19 nt, Artificial Sequence
  Description of Artificial Sequence: Synthetic oligonucleotide
cgcgacgggcucggaccgc

SEQ ID NO: 555360 - RNA, 19 nt, Artificial Sequence
  Description of Artificial Sequence: Synthetic oligonucleotide
ccgccucaucccgucccca

SEQ ID NO: 555361 - RNA, 19 nt, Artificial Sequence
  Description of Artificial Sequence: Synthetic oligonucleotide
ggcccgcgggagcgcucua

SEQ ID NO: 555362 - RNA, 19 nt, Artificial Sequence
  Description of Artificial Sequence: Synthetic oligonucleotide
cgacgggcucggaccgccu

SEQ ID NO: 555363 - RNA, 19 nt, Artificial Sequence
  Description of Artificial Sequence: Synthetic oligonucleotide
cggcccgcgggagcgcucu

SEQ ID NO: 555364 - RNA, 19 nt, Artificial Sequence
  Description of Artificial Sequence: Synthetic oligonucleotide
aauucauuaacgcagcugg

SEQ ID NO: 555365 - RNA, 19 nt, Artificial Sequence
  Description of Artificial Sequence: Synthetic oligonucleotide
aaucuuacaucccagagug

SEQ ID NO: 555366 - RNA, 19 nt, Artificial Sequence
  Description of Artificial Sequence: Synthetic oligonucleotide
uugacgaaagcucauacgg

SEQ ID NO: 555367 - RNA, 19 nt, Artificial Sequence
  Description of Artificial Sequence: Synthetic oligonucleotide
gauacuaaagcccuggaug

SEQ ID NO: 555368 - RNA, 19 nt, Artificial Sequence
  Description of Artificial Sequence: Synthetic oligonucleotide
uucagugaaaacaucaagc

SEQ ID NO: 555369 - RNA, 19 nt, Artificial Sequence
  Description of Artificial Sequence: Synthetic oligonucleotide
uaugcaucagguuggaugg

SEQ ID NO: 555370 - RNA, 19 nt, Artificial Sequence
  Description of Artificial Sequence: Synthetic oligonucleotide
uuaaauaguuaucugucug

SEQ ID NO: 555371 - RNA, 19 nt, Artificial Sequence
  Description of Artificial Sequence: Synthetic oligonucleotide
guuaacaccagccaacugc

SEQ ID NO: 555372 - RNA, 19 nt, Artificial Sequence
  Description of Artificial Sequence: Synthetic oligonucleotide
aaagauacuaaagcccugg

SEQ ID NO: 555373 - RNA, 19 nt, Artificial Sequence
  Description of Artificial Sequence: Synthetic oligonucleotide
auauggaaagagcagaaug

SEQ ID NO: 555374 - RNA, 19 nt, Artificial Sequence
  Description of Artificial Sequence: Synthetic oligonucleotide
agaaguaccaauugcaggu

SEQ ID NO: 555375 - RNA, 19 nt, Artificial Sequence
  Description of Artificial Sequence: Synthetic oligonucleotide
cuaggugaauucauuaacg

SEQ ID NO: 555376 - RNA, 19 nt, Artificial Sequence
  Description of Artificial Sequence: Synthetic oligonucleotide
auaugcaucagguuggaug

SEQ ID NO: 555377 - RNA, 19 nt, Artificial Sequence
  Description of Artificial Sequence: Synthetic oligonucleotide
uauauccccauucugaaaa

SEQ ID NO: 555378 - RNA, 19 nt, Artificial Sequence
  Description of Artificial Sequence: Synthetic oligonucleotide
agauacucaccucugcacc

SEQ ID NO: 555379 - RNA, 19 nt, Artificial Sequence
  Description of Artificial Sequence: Synthetic oligonucleotide
uucuaugugaaguuuucag

SEQ ID NO: 555380 - RNA, 19 nt, Artificial Sequence
  Description of Artificial Sequence: Synthetic oligonucleotide
uuugacgaaagcucauacg

SEQ ID NO: 555381 - RNA, 19 nt, Artificial Sequence
  Description of Artificial Sequence: Synthetic oligonucleotide
aagucagauacucaccucu

SEQ ID NO: 555382 - RNA, 19 nt, Artificial Sequence
  Description of Artificial Sequence: Synthetic oligonucleotide
uauaagaggggacacggcu

SEQ ID NO: 555383 - RNA, 19 nt, Artificial Sequence
  Description of Artificial Sequence: Synthetic oligonucleotide
uguuaacccagucuggucu

SEQ ID NO: 555384 - RNA, 19 nt, Artificial Sequence
  Description of Artificial Sequence: Synthetic oligonucleotide
ucuguaauugccacugggc

SEQ ID NO: 555385 - RNA, 19 nt, Artificial Sequence
  Description of Artificial Sequence: Synthetic oligonucleotide
ccuaguaucucuaagacac

SEQ ID NO: 555386 - RNA, 19 nt, Artificial Sequence
  Description of Artificial Sequence: Synthetic oligonucleotide
agugaaaacaucaagcccu

SEQ ID NO: 555387 - RNA, 19 nt, Artificial Sequence
  Description of Artificial Sequence: Synthetic oligonucleotide
cuuauaagaggggacacgg

SEQ ID NO: 555388 - RNA, 19 nt, Artificial Sequence
  Description of Artificial Sequence: Synthetic oligonucleotide
cuaaacaucacuuuugugu

SEQ ID NO: 555389 - RNA, 19 nt, Artificial Sequence
  Description of Artificial Sequence: Synthetic oligonucleotide
aaguaccaauugcaggugg

SEQ ID NO: 555390 - RNA, 19 nt, Artificial Sequence
  Description of Artificial Sequence: Synthetic oligonucleotide
cuaaaugagaguccacacc

SEQ ID NO: 555391 - RNA, 19 nt, Artificial Sequence
  Description of Artificial Sequence: Synthetic oligonucleotide
uuaacaccagccaacugca

SEQ ID NO: 555392 - RNA, 19 nt, Artificial Sequence
  Description of Artificial Sequence: Synthetic oligonucleotide
ucggcaggaaaucggauag

SEQ ID NO: 555393 - RNA, 19 nt, Artificial Sequence
  Description of Artificial Sequence: Synthetic oligonucleotide
uaggugaauucauuaacgc

SEQ ID NO: 555394 - RNA, 19 nt, Artificial Sequence
  Description of Artificial Sequence: Synthetic oligonucleotide
ggugaauucauuaacgcag

SEQ ID NO: 555395 - RNA, 19 nt, Artificial Sequence
  Description of Artificial Sequence: Synthetic oligonucleotide
aguaaucucagcuuccuaa

SEQ ID NO: 555396 - RNA, 19 nt, Artificial Sequence
  Description of Artificial Sequence: Synthetic oligonucleotide
ucgaucaggguucaggacu

SEQ ID NO: 555397 - RNA, 19 nt, Artificial Sequence
  Description of Artificial Sequence: Synthetic oligonucleotide
guuuauuauuaggagggcg

SEQ ID NO: 555398 - RNA, 19 nt, Artificial Sequence
  Description of Artificial Sequence: Synthetic oligonucleotide
ucgacaguaggucacuggc

SEQ ID NO: 555399 - RNA, 19 nt, Artificial Sequence
  Description of Artificial Sequence: Synthetic oligonucleotide
aagcucauacggauggugc

SEQ ID NO: 555400 - RNA, 19 nt, Artificial Sequence
  Description of Artificial Sequence: Synthetic oligonucleotide
uguagguccaaguuauugu

SEQ ID NO: 555401 - RNA, 19 nt, Artificial Sequence
  Description of Artificial Sequence: Synthetic oligonucleotide
uccaauguaguagagccgc

SEQ ID NO: 555402 - RNA, 19 nt, Artificial Sequence
  Description of Artificial Sequence: Synthetic oligonucleotide
aguagagccgcacugacau

SEQ ID NO: 555403 - RNA, 19 nt, Artificial Sequence
  Description of Artificial Sequence: Synthetic oligonucleotide
aauguacguacccaggauu

SEQ ID NO: 555404 - RNA, 19 nt, Artificial Sequence
  Description of Artificial Sequence: Synthetic oligonucleotide
ugcgugaccacacacacua

SEQ ID NO: 555405 - RNA, 19 nt, Artificial Sequence
  Description of Artificial Sequence: Synthetic oligonucleotide
gacaguaggucacuggcug

SEQ ID NO: 555406 - RNA, 19 nt, Artificial Sequence
  Description of Artificial Sequence: Synthetic oligonucleotide
cagcauaugcaucagguug

SEQ ID NO: 555407 - RNA, 19 nt, Artificial Sequence
  Description of Artificial Sequence: Synthetic oligonucleotide
aaaucggauagcaaagaca

SEQ ID NO: 555408 - RNA, 19 nt, Artificial Sequence
  Description of Artificial Sequence: Synthetic oligonucleotide
uuggggcuaagaaugaagu

SEQ ID NO: 555409 - RNA, 19 nt, Artificial Sequence
  Description of Artificial Sequence: Synthetic oligonucleotide
guaauugccacugggcacg

SEQ ID NO: 555410 - RNA, 19 nt, Artificial Sequence
  Description of Artificial Sequence: Synthetic oligonucleotide
gaacaggacaggaacuucg

SEQ ID NO: 555411 - RNA, 19 nt, Artificial Sequence
  Description of Artificial Sequence: Synthetic oligonucleotide
uuacaacugucuuuaagaa

SEQ ID NO: 555412 - RNA, 19 nt, Artificial Sequence
  Description of Artificial Sequence: Synthetic oligonucleotide
gaugucuuaccuucuggug

SEQ ID NO: 555413 - RNA, 19 nt, Artificial Sequence
  Description of Artificial Sequence: Synthetic oligonucleotide
auagcaaagacaugggaua

SEQ ID NO: 555414 - RNA, 19 nt, Artificial Sequence
  Description of Artificial Sequence: Synthetic oligonucleotide
ggagggaucuugcagacgg

SEQ ID NO: 555415 - RNA, 19 nt, Artificial Sequence
  Description of Artificial Sequence: Synthetic oligonucleotide
uguaauugccacugggcac

SEQ ID NO: 555416 - RNA, 19 nt, Artificial Sequence
  Description of Artificial Sequence: Synthetic oligonucleotide
aaaauuguaauagcccuuu

SEQ ID NO: 555417 - RNA, 19 nt, Artificial Sequence
  Description of Artificial Sequence: Synthetic oligonucleotide
aguuuauuauuaggagggc

SEQ ID NO: 555418 - RNA, 19 nt, Artificial Sequence
  Description of Artificial Sequence: Synthetic oligonucleotide
ucguaguaggagauggagc

SEQ ID NO: 555419 - RNA, 19 nt, Artificial Sequence
  Description of Artificial Sequence: Synthetic oligonucleotide
ucuaccgagucacuguccu

SEQ ID NO: 555420 - RNA, 19 nt, Artificial Sequence
  Description of Artificial Sequence: Synthetic oligonucleotide
cucguuuucucuguaauug

SEQ ID NO: 555421 - RNA, 19 nt, Artificial Sequence
  Description of Artificial Sequence: Synthetic oligonucleotide
ucuuacaucccagagugaa

SEQ ID NO: 555422 - RNA, 19 nt, Artificial Sequence
  Description of Artificial Sequence: Synthetic oligonucleotide
uucgguggcagucuuuuac

SEQ ID NO: 555423 - RNA, 19 nt, Artificial Sequence
  Description of Artificial Sequence: Synthetic oligonucleotide
aaguuauugugugcugggg

SEQ ID NO: 555424 - RNA, 19 nt, Artificial Sequence
  Description of Artificial Sequence: Synthetic oligonucleotide
ugggauagucauuucacaa

SEQ ID NO: 555425 - RNA, 19 nt, Artificial Sequence
  Description of Artificial Sequence: Synthetic oligonucleotide
ucauuaacgcagcuggcuc

SEQ ID NO: 555426 - RNA, 19 nt, Artificial Sequence
  Description of Artificial Sequence: Synthetic oligonucleotide
gagggcgcuuauaagaggg

SEQ ID NO: 555427 - RNA, 19 nt, Artificial Sequence
  Description of Artificial Sequence: Synthetic oligonucleotide
uaccgagucacuguccugg

SEQ ID NO: 555428 - RNA, 19 nt, Artificial Sequence
  Description of Artificial Sequence: Synthetic oligonucleotide
uucagcucguaguaggaga

SEQ ID NO: 555429 - RNA, 19 nt, Artificial Sequence
  Description of Artificial Sequence: Synthetic oligonucleotide
uggaaugucuccccaacuc

SEQ ID NO: 555430 - RNA, 19 nt, Artificial Sequence
  Description of Artificial Sequence: Synthetic oligonucleotide
aaauaguuaucugucugaa

SEQ ID NO: 555431 - RNA, 19 nt, Artificial Sequence
  Description of Artificial Sequence: Synthetic oligonucleotide
ugugccucagcucuaccga

SEQ ID NO: 555432 - RNA, 19 nt, Artificial Sequence
  Description of Artificial Sequence: Synthetic oligonucleotide
uuuuaccaaagcuggguaa

SEQ ID NO: 555433 - RNA, 19 nt, Artificial Sequence
  Description of Artificial Sequence: Synthetic oligonucleotide
agcauaugcaucagguugg

SEQ ID NO: 555434 - RNA, 19 nt, Artificial Sequence
  Description of Artificial Sequence: Synthetic oligonucleotide
ucagguuggauggaguucu

SEQ ID NO: 555435 - RNA, 19 nt, Artificial Sequence
  Description of Artificial Sequence: Synthetic oligonucleotide
uuauaagaggggacacggc

SEQ ID NO: 555436 - RNA, 19 nt, Artificial Sequence
  Description of Artificial Sequence: Synthetic oligonucleotide
cuuugacgaaagcucauac

SEQ ID NO: 555437 - RNA, 19 nt, Artificial Sequence
  Description of Artificial Sequence: Synthetic oligonucleotide
ucguuuucucuguaauugc

SEQ ID NO: 555438 - RNA, 19 nt, Artificial Sequence
  Description of Artificial Sequence: Synthetic oligonucleotide
cuggaauauauccccauuc

SEQ ID NO: 555439 - RNA, 19 nt, Artificial Sequence
  Description of Artificial Sequence: Synthetic oligonucleotide
uccuaguaucucuaagaca

SEQ ID NO: 555440 - RNA, 19 nt, Artificial Sequence
  Description of Artificial Sequence: Synthetic oligonucleotide
aagcuggguaaucuuacau

SEQ ID NO: 555441 - RNA, 19 nt, Artificial Sequence
  Description of Artificial Sequence: Synthetic oligonucleotide
auagugacaguaaucucag

SEQ ID NO: 555442 - RNA, 19 nt, Artificial Sequence
  Description of Artificial Sequence: Synthetic oligonucleotide
caugcgagucaacugguag

SEQ ID NO: 555443 - RNA, 19 nt, Artificial Sequence
  Description of Artificial Sequence: Synthetic oligonucleotide
uucauuaacgcagcuggcu

SEQ ID NO: 555444 - RNA, 19 nt, Artificial Sequence
  Description of Artificial Sequence: Synthetic oligonucleotide
cuccuaguaucucuaagac

SEQ ID NO: 555445 - RNA, 19 nt, Artificial Sequence
  Description of Artificial Sequence: Synthetic oligonucleotide
ugcacaugcgagucaacug

SEQ ID NO: 555446 - RNA, 19 nt, Artificial Sequence
  Description of Artificial Sequence: Synthetic oligonucleotide
gcacaugcgagucaacugg

SEQ ID NO: 555447 - RNA, 19 nt, Artificial Sequence
  Description of Artificial Sequence: Synthetic oligonucleotide
ugugaggcguggaaugucu

SEQ ID NO: 555448 - RNA, 19 nt, Artificial Sequence
  Description of Artificial Sequence: Synthetic oligonucleotide
gugcucauuacacaguauc

SEQ ID NO: 555449 - RNA, 19 nt, Artificial Sequence
  Description of Artificial Sequence: Synthetic oligonucleotide
ugcuaggugaauucauuaa

SEQ ID NO: 555450 - RNA, 19 nt, Artificial Sequence
  Description of Artificial Sequence: Synthetic oligonucleotide
uuauuauuaggagggcgcu

SEQ ID NO: 555451 - RNA, 19 nt, Artificial Sequence
  Description of Artificial Sequence: Synthetic oligonucleotide
aacgcagcuggcuccauaa

SEQ ID NO: 555452 - RNA, 19 nt, Artificial Sequence
  Description of Artificial Sequence: Synthetic oligonucleotide
uagagccgcacugacauug

SEQ ID NO: 555453 - RNA, 19 nt, Artificial Sequence
  Description of Artificial Sequence: Synthetic oligonucleotide
caugcgugaccacacacac

SEQ ID NO: 555454 - RNA, 19 nt, Artificial Sequence
  Description of Artificial Sequence: Synthetic oligonucleotide
ugugaaguuuucaguccca

SEQ ID NO: 555455 - RNA, 19 nt, Artificial Sequence
  Description of Artificial Sequence: Synthetic oligonucleotide
aggaaaucggauagcaaag

SEQ ID NO: 555456 - RNA, 19 nt, Artificial Sequence
  Description of Artificial Sequence: Synthetic oligonucleotide
gaccacaacgccccguaag

SEQ ID NO: 555457 - RNA, 19 nt, Artificial Sequence
  Description of Artificial Sequence: Synthetic oligonucleotide
ucggugaagccaucuacug

SEQ ID NO: 555458 - RNA, 19 nt, Artificial Sequence
  Description of Artificial Sequence: Synthetic oligonucleotide
uuuaccaaagcuggguaau

SEQ ID NO: 555459 - RNA, 19 nt, Artificial Sequence
  Description of Artificial Sequence: Synthetic oligonucleotide
ugaccacacacacuauuaa

SEQ ID NO: 555460 - RNA, 19 nt, Artificial Sequence
  Description of Artificial Sequence: Synthetic oligonucleotide
ggggcauugguucagagga

SEQ ID NO: 555461 - RNA, 19 nt, Artificial Sequence
  Description of Artificial Sequence: Synthetic oligonucleotide
agauacuaaagcccuggau

SEQ ID NO: 555462 - RNA, 19 nt, Artificial Sequence
  Description of Artificial Sequence: Synthetic oligonucleotide
ugucuuaccuucuggugaa

SEQ ID NO: 555463 - RNA, 19 nt, Artificial Sequence
  Description of Artificial Sequence: Synthetic oligonucleotide
auagccaugcugaagcaug

SEQ ID NO: 555464 - RNA, 19 nt, Artificial Sequence
  Description of Artificial Sequence: Synthetic oligonucleotide
uuucuaugugaaguuuuca

SEQ ID NO: 555465 - RNA, 19 nt, Artificial Sequence
  Description of Artificial Sequence: Synthetic oligonucleotide
cagauacucaccucugcac

SEQ ID NO: 555466 - RNA, 19 nt, Artificial Sequence
  Description of Artificial Sequence: Synthetic oligonucleotide
auucauuaacgcagcuggc

SEQ ID NO: 555467 - RNA, 19 nt, Artificial Sequence
  Description of Artificial Sequence: Synthetic oligonucleotide
ggaauauauccccauucug

SEQ ID NO: 555468 - RNA, 19 nt, Artificial Sequence
  Description of Artificial Sequence: Synthetic oligonucleotide
cuccaauguaguagagccg

SEQ ID NO: 555469 - RNA, 19 nt, Artificial Sequence
  Description of Artificial Sequence: Synthetic oligonucleotide
ucgguggcagucuuuuacc

SEQ ID NO: 555470 - RNA, 19 nt, Artificial Sequence
  Description of Artificial Sequence: Synthetic oligonucleotide
caccaagccugcaauuucc

SEQ ID NO: 555471 - RNA, 19 nt, Artificial Sequence
  Description of Artificial Sequence: Synthetic oligonucleotide
auaagaggggacacggcuc

SEQ ID NO: 555472 - RNA, 19 nt, Artificial Sequence
  Description of Artificial Sequence: Synthetic oligonucleotide
gggaaaucuuccaacagcc

SEQ ID NO: 555473 - RNA, 19 nt, Artificial Sequence
  Description of Artificial Sequence: Synthetic oligonucleotide
augggauagucauuucaca

SEQ ID NO: 555474 - RNA, 19 nt, Artificial Sequence
  Description of Artificial Sequence: Synthetic oligonucleotide
uacggauggugcacaugcg

SEQ ID NO: 555475 - RNA, 19 nt, Artificial Sequence
  Description of Artificial Sequence: Synthetic oligonucleotide
ggggaaaucuuccaacagc

SEQ ID NO: 555476 - RNA, 19 nt, Artificial Sequence
  Description of Artificial Sequence: Synthetic oligonucleotide
auauccccauucugaaaag

SEQ ID NO: 555477 - RNA, 19 nt, Artificial Sequence
  Description of Artificial Sequence: Synthetic oligonucleotide
cucgacaguaggucacugg

SEQ ID NO: 555478 - RNA, 19 nt, Artificial Sequence
  Description of Artificial Sequence: Synthetic oligonucleotide
gauagcaaagacaugggau

SEQ ID NO: 555479 - RNA, 19 nt, Artificial Sequence
  Description of Artificial Sequence: Synthetic oligonucleotide
cuguaauugccacugggca

SEQ ID NO: 555480 - RNA, 19 nt, Artificial Sequence
  Description of Artificial Sequence: Synthetic oligonucleotide
agagcggccuguuugugca

SEQ ID NO: 555481 - RNA, 19 nt, Artificial Sequence
  Description of Artificial Sequence: Synthetic oligonucleotide
uguuccccgaaauggcagc

SEQ ID NO: 555482 - RNA, 19 nt, Artificial Sequence
  Description of Artificial Sequence: Synthetic oligonucleotide
uccccgaaauggcagcuug

SEQ ID NO: 555483 - RNA, 19 nt, Artificial Sequence
  Description of Artificial Sequence: Synthetic oligonucleotide
auggaaagagcagaaugcu

SEQ ID NO: 555484 - RNA, 19 nt, Artificial Sequence
  Description of Artificial Sequence: Synthetic oligonucleotide
agaaugcuaaacaucacuu

SEQ ID NO: 555485 - RNA, 19 nt, Artificial Sequence
  Description of Artificial Sequence: Synthetic oligonucleotide
gacaguaaucucagcuucc

SEQ ID NO: 555486 - RNA, 19 nt, Artificial Sequence
  Description of Artificial Sequence: Synthetic oligonucleotide
cuagugaaaaguuuauuau

SEQ ID NO: 555487 - RNA, 19 nt, Artificial Sequence
  Description of Artificial Sequence: Synthetic oligonucleotide
uucggcaggaaaucggaua

SEQ ID NO: 555488 - RNA, 19 nt, Artificial Sequence
  Description of Artificial Sequence: Synthetic oligonucleotide
aagaccacaacgccccgua

SEQ ID NO: 555489 - RNA, 19 nt, Artificial Sequence
  Description of Artificial Sequence: Synthetic oligonucleotide
uguuugugcaugccaccac

SEQ ID NO: 555490 - RNA, 19 nt, Artificial Sequence
  Description of Artificial Sequence: Synthetic oligonucleotide
caaagauacuaaagcccug

SEQ ID NO: 555491 - RNA, 19 nt, Artificial Sequence
  Description of Artificial Sequence: Synthetic oligonucleotide
gcuaggugaauucauuaac

SEQ ID NO: 555492 - RNA, 19 nt, Artificial Sequence
  Description of Artificial Sequence: Synthetic oligonucleotide
agguggcgaucccaugugc

SEQ ID NO: 555493 - RNA, 19 nt, Artificial Sequence
  Description of Artificial Sequence: Synthetic oligonucleotide
cuggguaaucuuacauccc

SEQ ID NO: 555494 - RNA, 19 nt, Artificial Sequence
  Description of Artificial Sequence: Synthetic oligonucleotide
augcgagucaacugguaga

SEQ ID NO: 555495 - RNA, 19 nt, Artificial Sequence
  Description of Artificial Sequence: Synthetic oligonucleotide
auuauuaggagggcgcuua

SEQ ID NO: 555496 - RNA, 19 nt, Artificial Sequence
  Description of Artificial Sequence: Synthetic oligonucleotide
cuguagguccaaguuauug

SEQ ID NO: 555497 - RNA, 19 nt, Artificial Sequence
  Description of Artificial Sequence: Synthetic oligonucleotide
guuaacccagucuggucug

SEQ ID NO: 555498 - RNA, 19 nt, Artificial Sequence
  Description of Artificial Sequence: Synthetic oligonucleotide
gucagauacucaccucugc

SEQ ID NO: 555499 - RNA, 19 nt, Artificial Sequence
  Description of Artificial Sequence: Synthetic oligonucleotide
auguacguacccaggauug

SEQ ID NO: 555500 - RNA, 19 nt, Artificial Sequence
  Description of Artificial Sequence: Synthetic oligonucleotide
uggcugaauagugacagua

SEQ ID NO: 555501 - RNA, 19 nt, Artificial Sequence
  Description of Artificial Sequence: Synthetic oligonucleotide
agcucauacggauggugca

SEQ ID NO: 555502 - RNA, 19 nt, Artificial Sequence
  Description of Artificial Sequence: Synthetic oligonucleotide
uaguagagccgcacugaca

SEQ ID NO: 555503 - RNA, 19 nt, Artificial Sequence
  Description of Artificial Sequence: Synthetic oligonucleotide
gaagggcguggcucgacag

SEQ ID NO: 555504 - RNA, 19 nt, Artificial Sequence
  Description of Artificial Sequence: Synthetic oligonucleotide
aacugcaggggccguuuca

SEQ ID NO: 555505 - RNA, 19 nt, Artificial Sequence
  Description of Artificial Sequence: Synthetic oligonucleotide
agcucuaccgagucacugu

SEQ ID NO: 555506 - RNA, 19 nt, Artificial Sequence
  Description of Artificial Sequence: Synthetic oligonucleotide
uagagcggccuguuugugc

SEQ ID NO: 555507 - RNA, 19 nt, Artificial Sequence
  Description of Artificial Sequence: Synthetic oligonucleotide
acggauggugcacaugcga

SEQ ID NO: 555508 - RNA, 19 nt, Artificial Sequence
  Description of Artificial Sequence: Synthetic oligonucleotide
ucuuaccuucuggugaacu

SEQ ID NO: 555509 - RNA, 19 nt, Artificial Sequence
  Description of Artificial Sequence: Synthetic oligonucleotide
uuguuaacccagucugguc

SEQ ID NO: 555510 - RNA, 19 nt, Artificial Sequence
  Description of Artificial Sequence: Synthetic oligonucleotide
gacgaaagcucauacggau

SEQ ID NO: 555511 - RNA, 19 nt, Artificial Sequence
  Description of Artificial Sequence: Synthetic oligonucleotide
ccaagaaguaccaauugca

SEQ ID NO: 555512 - RNA, 19 nt, Artificial Sequence
  Description of Artificial Sequence: Synthetic oligonucleotide
acggcuccuuaacauuggg

SEQ ID NO: 555513 - RNA, 19 nt, Artificial Sequence
  Description of Artificial Sequence: Synthetic oligonucleotide
gaggcguggaaugucuccc

SEQ ID NO: 555514 - RNA, 19 nt, Artificial Sequence
  Description of Artificial Sequence: Synthetic oligonucleotide
uuuucgguggcagucuuuu

SEQ ID NO: 555515 - RNA, 19 nt, Artificial Sequence
  Description of Artificial Sequence: Synthetic oligonucleotide
auauauccccauucugaaa

SEQ ID NO: 555516 - RNA, 19 nt, Artificial Sequence
  Description of Artificial Sequence: Synthetic oligonucleotide
cgagucaacugguagacag

SEQ ID NO: 555517 - RNA, 19 nt, Artificial Sequence
  Description of Artificial Sequence: Synthetic oligonucleotide
aaaccaacugcagccucga

SEQ ID NO: 555518 - RNA, 19 nt, Artificial Sequence
  Description of Artificial Sequence: Synthetic oligonucleotide
uaccaauugcagguggcga

SEQ ID NO: 555519 - RNA, 19 nt, Artificial Sequence
  Description of Artificial Sequence: Synthetic oligonucleotide
ggacagucggaguucgggg

SEQ ID NO: 555520 - RNA, 19 nt, Artificial Sequence
  Description of Artificial Sequence: Synthetic oligonucleotide
ugauuuuguggauccugua

SEQ ID NO: 555521 - RNA, 19 nt, Artificial Sequence
  Description of Artificial Sequence: Synthetic oligonucleotide
uacguacccaggauuguuu

SEQ ID NO: 555522 - RNA, 19 nt, Artificial Sequence
  Description of Artificial Sequence: Synthetic oligonucleotide
ccuaaaugagaguccacac

SEQ ID NO: 555523 - RNA, 19 nt, Artificial Sequence
  Description of Artificial Sequence: Synthetic oligonucleotide
aagggcguggcucgacagu

SEQ ID NO: 555524 - RNA, 19 nt, Artificial Sequence
  Description of Artificial Sequence: Synthetic oligonucleotide
acaguaaucucagcuuccu

SEQ ID NO: 555525 - RNA, 19 nt, Artificial Sequence
  Description of Artificial Sequence: Synthetic oligonucleotide
uuugugcaugccaccacuu

SEQ ID NO: 555526 - RNA, 19 nt, Artificial Sequence
  Description of Artificial Sequence: Synthetic oligonucleotide
acucguuuucucuguaauu

SEQ ID NO: 555527 - RNA, 19 nt, Artificial Sequence
  Description of Artificial Sequence: Synthetic oligonucleotide
gagucaacugguagacagc

SEQ ID NO: 555528 - RNA, 19 nt, Artificial Sequence
  Description of Artificial Sequence: Synthetic oligonucleotide
gacgguggcagggugccag

SEQ ID NO: 555529 - RNA, 19 nt, Artificial Sequence
  Description of Artificial Sequence: Synthetic oligonucleotide
gcuuauaagaggggacacg

SEQ ID NO: 555530 - RNA, 19 nt, Artificial Sequence
  Description of Artificial Sequence: Synthetic oligonucleotide
uggcucgacaguaggucac

SEQ ID NO: 555531 - RNA, 19 nt, Artificial Sequence
  Description of Artificial Sequence: Synthetic oligonucleotide
uuauuaggagggcgcuuau

SEQ ID NO: 555532 - RNA, 19 nt, Artificial Sequence
  Description of Artificial Sequence: Synthetic oligonucleotide
aguaucucuaagacacacu

SEQ ID NO: 555533 - RNA, 19 nt, Artificial Sequence
  Description of Artificial Sequence: Synthetic oligonucleotide
acgcccuucacuccuagua

SEQ ID NO: 555534 - RNA, 19 nt, Artificial Sequence
  Description of Artificial Sequence: Synthetic oligonucleotide
agccgcacugacauuggac

SEQ ID NO: 555535 - RNA, 19 nt, Artificial Sequence
  Description of Artificial Sequence: Synthetic oligonucleotide
cucgaucaggguucaggac

SEQ ID NO: 555536 - RNA, 19 nt, Artificial Sequence
  Description of Artificial Sequence: Synthetic oligonucleotide
acaguaggucacuggcugu

SEQ ID NO: 555537 - RNA, 19 nt, Artificial Sequence
  Description of Artificial Sequence: Synthetic oligonucleotide
guacuggucacugucuguc

SEQ ID NO: 555538 - RNA, 19 nt, Artificial Sequence
  Description of Artificial Sequence: Synthetic oligonucleotide
cucuaccgagucacugucc

SEQ ID NO: 555539 - RNA, 19 nt, Artificial Sequence
  Description of Artificial Sequence: Synthetic oligonucleotide
acacggcuccuuaacauug

SEQ ID NO: 555540 - RNA, 19 nt, Artificial Sequence
  Description of Artificial Sequence: Synthetic oligonucleotide
auuaacgcagcuggcucca

SEQ ID NO: 555541 - RNA, 19 nt, Artificial Sequence
  Description of Artificial Sequence: Synthetic oligonucleotide
guggcgaucccaugugcug

SEQ ID NO: 555542 - RNA, 19 nt, Artificial Sequence
  Description of Artificial Sequence: Synthetic oligonucleotide
acaucaagcccuggaauau

SEQ ID NO: 555543 - RNA, 19 nt, Artificial Sequence
  Description of Artificial Sequence: Synthetic oligonucleotide
agcaguuuucgguggcagu

SEQ ID NO: 555544 - RNA, 19 nt, Artificial Sequence
  Description of Artificial Sequence: Synthetic oligonucleotide
guucagcucguaguaggag

SEQ ID NO: 555545 - RNA, 19 nt, Artificial Sequence
  Description of Artificial Sequence: Synthetic oligonucleotide
aacccaugcuaggugaauu

SEQ ID NO: 555546 - RNA, 19 nt, Artificial Sequence
  Description of Artificial Sequence: Synthetic oligonucleotide
ggauagcaaagacauggga

SEQ ID NO: 555547 - RNA, 19 nt, Artificial Sequence
  Description of Artificial Sequence: Synthetic oligonucleotide
uguacguacccaggauugu

SEQ ID NO: 555548 - RNA, 19 nt, Artificial Sequence
  Description of Artificial Sequence: Synthetic oligonucleotide
gcuaaacaucacuuuugug

SEQ ID NO: 555549 - RNA, 19 nt, Artificial Sequence
  Description of Artificial Sequence: Synthetic oligonucleotide
agaagggcguggcucgaca

SEQ ID NO: 555550 - RNA, 19 nt, Artificial Sequence
  Description of Artificial Sequence: Synthetic oligonucleotide
ucacugagacacucugcaa

SEQ ID NO: 555551 - RNA, 19 nt, Artificial Sequence
  Description of Artificial Sequence: Synthetic oligonucleotide
ccccauucugaaaagcaag

SEQ ID NO: 555552 - RNA, 19 nt, Artificial Sequence
  Description of Artificial Sequence: Synthetic oligonucleotide
gcaguugggugacugaaca

SEQ ID NO: 555553 - RNA, 19 nt, Artificial Sequence
  Description of Artificial Sequence: Synthetic oligonucleotide
agggugccagccauagcgc

SEQ ID NO: 555554 - RNA, 19 nt, Artificial Sequence
  Description of Artificial Sequence: Synthetic oligonucleotide
uuaccaaagcuggguaauc

SEQ ID NO: 555555 - RNA, 19 nt, Artificial Sequence
  Description of Artificial Sequence: Synthetic oligonucleotide
aggugcagcucgauccagc

SEQ ID NO: 555556 - RNA, 19 nt, Artificial Sequence
  Description of Artificial Sequence: Synthetic oligonucleotide
gugaacuggcuucuguaaa

SEQ ID NO: 555557 - RNA, 19 nt, Artificial Sequence
  Description of Artificial Sequence: Synthetic oligonucleotide
acuucggcaggaaaucgga

SEQ ID NO: 555558 - RNA, 19 nt, Artificial Sequence
  Description of Artificial Sequence: Synthetic oligonucleotide
uacugucauggauggcugu

SEQ ID NO: 555559 - RNA, 19 nt, Artificial Sequence
  Description of Artificial Sequence: Synthetic oligonucleotide
gcucauuacacaguaucac

SEQ ID NO: 555560 - RNA, 19 nt, Artificial Sequence
  Description of Artificial Sequence: Synthetic oligonucleotide
agucagauacucaccucug

SEQ ID NO: 555561 - RNA, 19 nt, Artificial Sequence
  Description of Artificial Sequence: Synthetic oligonucleotide
auacucaccucugcaccag

SEQ ID NO: 555562 - RNA, 19 nt, Artificial Sequence
  Description of Artificial Sequence: Synthetic oligonucleotide
acaugcgugaccacacaca

SEQ ID NO: 555563 - RNA, 19 nt, Artificial Sequence
  Description of Artificial Sequence: Synthetic oligonucleotide
gggagagaaccuuuacaac

SEQ ID NO: 555564 - RNA, 19 nt, Artificial Sequence
  Description of Artificial Sequence: Synthetic oligonucleotide
aguaggucacuggcuguag

SEQ ID NO: 555565 - RNA, 19 nt, Artificial Sequence
  Description of Artificial Sequence: Synthetic oligonucleotide
uccuuaacauugggguaca

SEQ ID NO: 555566 - RNA, 19 nt, Artificial Sequence
  Description of Artificial Sequence: Synthetic oligonucleotide
acgaaagcucauacggaug

SEQ ID NO: 555567 - RNA, 19 nt, Artificial Sequence
  Description of Artificial Sequence: Synthetic oligonucleotide
uaauugccacugggcacgg

SEQ ID NO: 555568 - RNA, 19 nt, Artificial Sequence
  Description of Artificial Sequence: Synthetic oligonucleotide
ucggccucggaugucuuac

SEQ ID NO: 555569 - RNA, 19 nt, Artificial Sequence
  Description of Artificial Sequence: Synthetic oligonucleotide
ucauacggauggugcacau

SEQ ID NO: 555570 - RNA, 19 nt, Artificial Sequence
  Description of Artificial Sequence: Synthetic oligonucleotide
auaaaccaacacagcauau

SEQ ID NO: 555571 - RNA, 19 nt, Artificial Sequence
  Description of Artificial Sequence: Synthetic oligonucleotide
ccucggaugucuuaccuuc

SEQ ID NO: 555572 - RNA, 19 nt, Artificial Sequence
  Description of Artificial Sequence: Synthetic oligonucleotide
guggcucgacaguagguca

SEQ ID NO: 555573 - RNA, 19 nt, Artificial Sequence
  Description of Artificial Sequence: Synthetic oligonucleotide
cuaguaucucuaagacaca

SEQ ID NO: 555574 - RNA, 19 nt, Artificial Sequence
  Description of Artificial Sequence: Synthetic oligonucleotide
ggaacuucggcaggaaauc

SEQ ID NO: 555575 - RNA, 19 nt, Artificial Sequence
  Description of Artificial Sequence: Synthetic oligonucleotide
uggcgaucccaugugcugu

SEQ ID NO: 555576 - RNA, 19 nt, Artificial Sequence
  Description of Artificial Sequence: Synthetic oligonucleotide
gcuuccuaaaugagagucc

SEQ ID NO: 555577 - RNA, 19 nt, Artificial Sequence
  Description of Artificial Sequence: Synthetic oligonucleotide
aucaagcccuggaauauau

SEQ ID NO: 555578 - RNA, 19 nt, Artificial Sequence
  Description of Artificial Sequence: Synthetic oligonucleotide
acguacccaggauuguuuu

SEQ ID NO: 555579 - RNA, 19 nt, Artificial Sequence
  Description of Artificial Sequence: Synthetic oligonucleotide
cagcuggcuccauaaacca

SEQ ID NO: 555580 - RNA, 19 nt, Artificial Sequence
  Description of Artificial Sequence: Synthetic oligonucleotide
gccucgaucaggguucagg

SEQ ID NO: 555581 - RNA, 19 nt, Artificial Sequence
  Description of Artificial Sequence: Synthetic oligonucleotide
uauuaggagggcgcuuaua

SEQ ID NO: 555582 - RNA, 19 nt, Artificial Sequence
  Description of Artificial Sequence: Synthetic oligonucleotide
cuuguuaacccagucuggu

SEQ ID NO: 555583 - RNA, 19 nt, Artificial Sequence
  Description of Artificial Sequence: Synthetic oligonucleotide
cauacggauggugcacaug

SEQ ID NO: 555584 - RNA, 19 nt, Artificial Sequence
  Description of Artificial Sequence: Synthetic oligonucleotide
cagcaguuuucgguggcag

SEQ ID NO: 555585 - RNA, 19 nt, Artificial Sequence
  Description of Artificial Sequence: Synthetic oligonucleotide
caacucgcugguucagcuc

SEQ ID NO: 555586 - RNA, 19 nt, Artificial Sequence
  Description of Artificial Sequence: Synthetic oligonucleotide
gguugcaguugggugacug

SEQ ID NO: 555587 - RNA, 19 nt, Artificial Sequence
  Description of Artificial Sequence: Synthetic oligonucleotide
agggcgcuuauaagagggg

SEQ ID NO: 555588 - RNA, 19 nt, Artificial Sequence
  Description of Artificial Sequence: Synthetic oligonucleotide
cuaccgagucacuguccug

SEQ ID NO: 555589 - RNA, 19 nt, Artificial Sequence
  Description of Artificial Sequence: Synthetic oligonucleotide
ccaguugaaauaauuuaua

SEQ ID NO: 555590 - RNA, 19 nt, Artificial Sequence
  Description of Artificial Sequence: Synthetic oligonucleotide
ccgaaauggcagcuugggg

SEQ ID NO: 555591 - RNA, 19 nt, Artificial Sequence
  Description of Artificial Sequence: Synthetic oligonucleotide
cugggcacggugcucauua

SEQ ID NO: 555592 - RNA, 19 nt, Artificial Sequence
  Description of Artificial Sequence: Synthetic oligonucleotide
agaccuccccuccaaugua

SEQ ID NO: 555593 - RNA, 19 nt, Artificial Sequence
  Description of Artificial Sequence: Synthetic oligonucleotide
agguuggauggaguucucu

SEQ ID NO: 555594 - RNA, 19 nt, Artificial Sequence
  Description of Artificial Sequence: Synthetic oligonucleotide
ugacuagagcggccuguuu

SEQ ID NO: 555595 - RNA, 19 nt, Artificial Sequence
  Description of Artificial Sequence: Synthetic oligonucleotide
cagcucuaccgagucacug

SEQ ID NO: 555596 - RNA, 19 nt, Artificial Sequence
  Description of Artificial Sequence: Synthetic oligonucleotide
cuuccagccaauguacgua

SEQ ID NO: 555597 - RNA, 19 nt, Artificial Sequence
  Description of Artificial Sequence: Synthetic oligonucleotide
caacgccccguaagcacug

SEQ ID NO: 555598 - RNA, 19 nt, Artificial Sequence
  Description of Artificial Sequence: Synthetic oligonucleotide
gccccguaagcacuguggc

SEQ ID NO: 555599 - RNA, 19 nt, Artificial Sequence
  Description of Artificial Sequence: Synthetic oligonucleotide
ccaauguacguacccagga

SEQ ID NO: 555600 - RNA, 19 nt, Artificial Sequence
  Description of Artificial Sequence: Synthetic oligonucleotide
cccgaaauggcagcuuggg

SEQ ID NO: 555601 - RNA, 19 nt, Artificial Sequence
  Description of Artificial Sequence: Synthetic oligonucleotide
cucauacggauggugcaca

SEQ ID NO: 555602 - RNA, 19 nt, Artificial Sequence
  Description of Artificial Sequence: Synthetic oligonucleotide
uuucgguggcagucuuuua

SEQ ID NO: 555603 - RNA, 19 nt, Artificial Sequence
  Description of Artificial Sequence: Synthetic oligonucleotide
gcaccagacagcucaggca

SEQ ID NO: 555604 - RNA, 19 nt, Artificial Sequence
  Description of Artificial Sequence: Synthetic oligonucleotide
gacacggcuccuuaacauu

SEQ ID NO: 555605 - RNA, 19 nt, Artificial Sequence
  Description of Artificial Sequence: Synthetic oligonucleotide
ggcgcuuauaagaggggac

SEQ ID NO: 555606 - RNA, 19 nt, Artificial Sequence
  Description of Artificial Sequence: Synthetic oligonucleotide
gcucuaccgagucacuguc

SEQ ID NO: 555607 - RNA, 19 nt, Artificial Sequence
  Description of Artificial Sequence: Synthetic oligonucleotide
gccuguuugugcaugccac

SEQ ID NO: 555608 - RNA, 19 nt, Artificial Sequence
  Description of Artificial Sequence: Synthetic oligonucleotide
cuuaacauugggguacaau

SEQ ID NO: 555609 - RNA, 19 nt, Artificial Sequence
  Description of Artificial Sequence: Synthetic oligonucleotide
cuagagcggccuguuugug

SEQ ID NO: 555610 - RNA, 19 nt, Artificial Sequence
  Description of Artificial Sequence: Synthetic oligonucleotide
gcuguaagauacaaaaguu

SEQ ID NO: 555611 - RNA, 19 nt, Artificial Sequence
  Description of Artificial Sequence: Synthetic oligonucleotide
agcggccuguuugugcaug

SEQ ID NO: 555612 - RNA, 19 nt, Artificial Sequence
  Description of Artificial Sequence: Synthetic oligonucleotide
gcaccaagccugcaauuuc

SEQ ID NO: 555613 - RNA, 19 nt, Artificial Sequence
  Description of Artificial Sequence: Synthetic oligonucleotide
gguggcagucuuuuaccaa

SEQ ID NO: 555614 - RNA, 19 nt, Artificial Sequence
  Description of Artificial Sequence: Synthetic oligonucleotide
cugugaggcguggaauguc

SEQ ID NO: 555615 - RNA, 19 nt, Artificial Sequence
  Description of Artificial Sequence: Synthetic oligonucleotide
ccucgaucaggguucagga

SEQ ID NO: 555616 - RNA, 19 nt, Artificial Sequence
  Description of Artificial Sequence: Synthetic oligonucleotide
gggacacggcuccuuaaca

SEQ ID NO: 555617 - RNA, 19 nt, Artificial Sequence
  Description of Artificial Sequence: Synthetic oligonucleotide
gcgcuuauaagaggggaca

SEQ ID NO: 555618 - RNA, 19 nt, Artificial Sequence
  Description of Artificial Sequence: Synthetic oligonucleotide
gagccgcacugacauugga

SEQ ID NO: 555619 - RNA, 19 nt, Artificial Sequence
  Description of Artificial Sequence: Synthetic oligonucleotide
agaccacaacgccccguaa

SEQ ID NO: 555620 - RNA, 19 nt, Artificial Sequence
  Description of Artificial Sequence: Synthetic oligonucleotide
caguugggugacugaacaa

SEQ ID NO: 555621 - RNA, 19 nt, Artificial Sequence
  Description of Artificial Sequence: Synthetic oligonucleotide
acgccccguaagcacugug

SEQ ID NO: 555622 - RNA, 19 nt, Artificial Sequence
  Description of Artificial Sequence: Synthetic oligonucleotide
agggcguggcucgacagua

SEQ ID NO: 555623 - RNA, 19 nt, Artificial Sequence
  Description of Artificial Sequence: Synthetic oligonucleotide
ggcgaucccaugugcugug

SEQ ID NO: 555624 - RNA, 19 nt, Artificial Sequence
  Description of Artificial Sequence: Synthetic oligonucleotide
aauugccacugggcacggu

SEQ ID NO: 555625 - RNA, 19 nt, Artificial Sequence
  Description of Artificial Sequence: Synthetic oligonucleotide
gguucagcucguaguagga

SEQ ID NO: 555626 - RNA, 19 nt, Artificial Sequence
  Description of Artificial Sequence: Synthetic oligonucleotide
ccccgaaauggcagcuugg

SEQ ID NO: 555627 - RNA, 19 nt, Artificial Sequence
  Description of Artificial Sequence: Synthetic oligonucleotide
gcuccuuaacauuggggua

SEQ ID NO: 555628 - RNA, 19 nt, Artificial Sequence
  Description of Artificial Sequence: Synthetic oligonucleotide
cgccccguaagcacugugg

SEQ ID NO: 555629 - RNA, 19 nt, Artificial Sequence
  Description of Artificial Sequence: Synthetic oligonucleotide
cgcagcuggcuccauaaac

SEQ ID NO: 555630 - RNA, 19 nt, Artificial Sequence
  Description of Artificial Sequence: Synthetic oligonucleotide
cugaguuggagggaucggu

SEQ ID NO: 555631 - RNA, 19 nt, Artificial Sequence
  Description of Artificial Sequence: Synthetic oligonucleotide
aacgccccguaagcacugu

SEQ ID NO: 555632 - RNA, 19 nt, Artificial Sequence
  Description of Artificial Sequence: Synthetic oligonucleotide
caggugcagcucgauccag

SEQ ID NO: 555633 - RNA, 19 nt, Artificial Sequence
  Description of Artificial Sequence: Synthetic oligonucleotide
cacaugcgagucaacuggu

SEQ ID NO: 555634 - RNA, 19 nt, Artificial Sequence
  Description of Artificial Sequence: Synthetic oligonucleotide
ggcccauucaggugcagcu

SEQ ID NO: 555635 - RNA, 19 nt, Artificial Sequence
  Description of Artificial Sequence: Synthetic oligonucleotide
cagcucguaguaggagaug

SEQ ID NO: 555636 - RNA, 19 nt, Artificial Sequence
  Description of Artificial Sequence: Synthetic oligonucleotide
ccguuucaaaggugauagc

SEQ ID NO: 555637 - RNA, 19 nt, Artificial Sequence
  Description of Artificial Sequence: Synthetic oligonucleotide
ccagaagggaggggcauug

SEQ ID NO: 555638 - RNA, 19 nt, Artificial Sequence
  Description of Artificial Sequence: Synthetic oligonucleotide
augcgugaccacacacacu

SEQ ID NO: 555639 - RNA, 19 nt, Artificial Sequence
  Description of Artificial Sequence: Synthetic oligonucleotide
gggcgcuuauaagagggga

SEQ ID NO: 555640 - RNA, 19 nt, Artificial Sequence
  Description of Artificial Sequence: Synthetic oligonucleotide
auugugugcuggggacagu

SEQ ID NO: 555641 - RNA, 19 nt, Artificial Sequence
  Description of Artificial Sequence: Synthetic oligonucleotide
acgcagcuggcuccauaaa

SEQ ID NO: 555642 - RNA, 19 nt, Artificial Sequence
  Description of Artificial Sequence: Synthetic oligonucleotide
ggacacggcuccuuaacau

SEQ ID NO: 555643 - RNA, 19 nt, Artificial Sequence
  Description of Artificial Sequence: Synthetic oligonucleotide
ggcguggaaugucucccca

SEQ ID NO: 555644 - RNA, 19 nt, Artificial Sequence
  Description of Artificial Sequence: Synthetic oligonucleotide
acaugcgagucaacuggua

SEQ ID NO: 555645 - RNA, 19 nt, Artificial Sequence
  Description of Artificial Sequence: Synthetic oligonucleotide
gguacuggucacugucugu

SEQ ID NO: 555646 - RNA, 19 nt, Artificial Sequence
  Description of Artificial Sequence: Synthetic oligonucleotide
gugaggcguggaaugucuc

SEQ ID NO: 555647 - RNA, 19 nt, Artificial Sequence
  Description of Artificial Sequence: Synthetic oligonucleotide
cagaagggcguggcucgac

SEQ ID NO: 555648 - RNA, 19 nt, Artificial Sequence
  Description of Artificial Sequence: Synthetic oligonucleotide
gccugggcuugacuagagc

SEQ ID NO: 555649 - RNA, 19 nt, Artificial Sequence
  Description of Artificial Sequence: Synthetic oligonucleotide
aggggccguuucaaaggug

SEQ ID NO: 555650 - RNA, 19 nt, Artificial Sequence
  Description of Artificial Sequence: Synthetic oligonucleotide
uuaacgcagcuggcuccau

SEQ ID NO: 555651 - RNA, 19 nt, Artificial Sequence
  Description of Artificial Sequence: Synthetic oligonucleotide
caucaagcccuggaauaua

SEQ ID NO: 555652 - RNA, 19 nt, Artificial Sequence
  Description of Artificial Sequence: Synthetic oligonucleotide
cucggaugucuuaccuucu

SEQ ID NO: 555653 - RNA, 19 nt, Artificial Sequence
  Description of Artificial Sequence: Synthetic oligonucleotide
gaacccaugcuaggugaau

SEQ ID NO: 555654 - RNA, 19 nt, Artificial Sequence
  Description of Artificial Sequence: Synthetic oligonucleotide
gucuuaccuucuggugaac

SEQ ID NO: 555655 - RNA, 19 nt, Artificial Sequence
  Description of Artificial Sequence: Synthetic oligonucleotide
cguggcucgacaguagguc

SEQ ID NO: 555656 - RNA, 19 nt, Artificial Sequence
  Description of Artificial Sequence: Synthetic oligonucleotide
caggggccguuucaaaggu

SEQ ID NO: 555657 - RNA, 19 nt, Artificial Sequence
  Description of Artificial Sequence: Synthetic oligonucleotide
ggagggcagcaaauuccug

SEQ ID NO: 555658 - RNA, 19 nt, Artificial Sequence
  Description of Artificial Sequence: Synthetic oligonucleotide
cgcuuauaagaggggacac

SEQ ID NO: 555659 - RNA, 19 nt, Artificial Sequence
  Description of Artificial Sequence: Synthetic oligonucleotide
cuucggcaggaaaucggau

SEQ ID NO: 555660 - RNA, 19 nt, Artificial Sequence
  Description of Artificial Sequence: Synthetic oligonucleotide
guuccccgaaauggcagcu

SEQ ID NO: 555661 - RNA, 19 nt, Artificial Sequence
  Description of Artificial Sequence: Synthetic oligonucleotide
gucaacugguagacagccu

SEQ ID NO: 555662 - RNA, 19 nt, Artificial Sequence
  Description of Artificial Sequence: Synthetic oligonucleotide
gguggcgaucccaugugcu

SEQ ID NO: 555663 - RNA, 19 nt, Artificial Sequence
  Description of Artificial Sequence: Synthetic oligonucleotide
gucggccucggaugucuua

SEQ ID NO: 555664 - RNA, 19 nt, Artificial Sequence
  Description of Artificial Sequence: Synthetic oligonucleotide
gcagcaguuuucgguggca

SEQ ID NO: 555665 - RNA, 19 nt, Artificial Sequence
  Description of Artificial Sequence: Synthetic oligonucleotide
ccaacucgcugguucagcu

SEQ ID NO: 555666 - RNA, 19 nt, Artificial Sequence
  Description of Artificial Sequence: Synthetic oligonucleotide
gcguggaaugucuccccaa

SEQ ID NO: 555667 - RNA, 19 nt, Artificial Sequence
  Description of Artificial Sequence: Synthetic oligonucleotide
ccguaagcacuguggcuca

SEQ ID NO: 555668 - RNA, 19 nt, Artificial Sequence
  Description of Artificial Sequence: Synthetic oligonucleotide
ccuuugacgaaagcucaua

SEQ ID NO: 555669 - RNA, 19 nt, Artificial Sequence
  Description of Artificial Sequence: Synthetic oligonucleotide
agacgguggcagggugcca

SEQ ID NO: 555670 - RNA, 19 nt, Artificial Sequence
  Description of Artificial Sequence: Synthetic oligonucleotide
ccacugcaagggcccauuc

SEQ ID NO: 555671 - RNA, 19 nt, Artificial Sequence
  Description of Artificial Sequence: Synthetic oligonucleotide
guuuucgguggcagucuuu

SEQ ID NO: 555672 - RNA, 19 nt, Artificial Sequence
  Description of Artificial Sequence: Synthetic oligonucleotide
gcgagucaacugguagaca

SEQ ID NO: 555673 - RNA, 19 nt, Artificial Sequence
  Description of Artificial Sequence: Synthetic oligonucleotide
guacuccgcuccccagccu

SEQ ID NO: 555674 - RNA, 19 nt, Artificial Sequence
  Description of Artificial Sequence: Synthetic oligonucleotide
guagagccgcacugacauu

SEQ ID NO: 555675 - RNA, 19 nt, Artificial Sequence
  Description of Artificial Sequence: Synthetic oligonucleotide
cucuggucuuccagccaau

SEQ ID NO: 555676 - RNA, 19 nt, Artificial Sequence
  Description of Artificial Sequence: Synthetic oligonucleotide
cagccucgaucaggguuca

SEQ ID NO: 555677 - RNA, 19 nt, Artificial Sequence
  Description of Artificial Sequence: Synthetic oligonucleotide
gcauugguucagaggacau

SEQ ID NO: 555678 - RNA, 19 nt, Artificial Sequence
  Description of Artificial Sequence: Synthetic oligonucleotide
ggugcucauuacacaguau

SEQ ID NO: 555679 - RNA, 19 nt, Artificial Sequence
  Description of Artificial Sequence: Synthetic oligonucleotide
cacgcccuucacuccuagu

SEQ ID NO: 555680 - RNA, 19 nt, Artificial Sequence
  Description of Artificial Sequence: Synthetic oligonucleotide
cggcaggaaaucggauagc

SEQ ID NO: 555681 - RNA, 19 nt, Artificial Sequence
  Description of Artificial Sequence: Synthetic oligonucleotide
cucgcugguucagcucgua

SEQ ID NO: 555682 - RNA, 19 nt, Artificial Sequence
  Description of Artificial Sequence: Synthetic oligonucleotide
ggguggcacuuucuucccu

SEQ ID NO: 555683 - RNA, 19 nt, Artificial Sequence
  Description of Artificial Sequence: Synthetic oligonucleotide
gagcggccuguuugugcau

SEQ ID NO: 555684 - RNA, 19 nt, Artificial Sequence
  Description of Artificial Sequence: Synthetic oligonucleotide
gccucggaugucuuaccuu

SEQ ID NO: 555685 - RNA, 19 nt, Artificial Sequence
  Description of Artificial Sequence: Synthetic oligonucleotide
cguaagcacuguggcucag

SEQ ID NO: 555686 - RNA, 19 nt, Artificial Sequence
  Description of Artificial Sequence: Synthetic oligonucleotide
ggcucgacaguaggucacu

SEQ ID NO: 555687 - RNA, 19 nt, Artificial Sequence
  Description of Artificial Sequence: Synthetic oligonucleotide
cgacaguaggucacuggcu

SEQ ID NO: 555688 - RNA, 19 nt, Artificial Sequence
  Description of Artificial Sequence: Synthetic oligonucleotide
ccccguaagcacuguggcu

SEQ ID NO: 555689 - RNA, 19 nt, Artificial Sequence
  Description of Artificial Sequence: Synthetic oligonucleotide
cggccuguuugugcaugcc

SEQ ID NO: 555690 - RNA, 19 nt, Artificial Sequence
  Description of Artificial Sequence: Synthetic oligonucleotide
ccauagcgcugguugcagu

SEQ ID NO: 555691 - RNA, 19 nt, Artificial Sequence
  Description of Artificial Sequence: Synthetic oligonucleotide
ccagaagggcguggcucga

SEQ ID NO: 555692 - RNA, 19 nt, Artificial Sequence
  Description of Artificial Sequence: Synthetic oligonucleotide
gcuguagguccaaguuauu

SEQ ID NO: 555693 - RNA, 19 nt, Artificial Sequence
  Description of Artificial Sequence: Synthetic oligonucleotide
gcgaucccaugugcugugu

SEQ ID NO: 555694 - RNA, 19 nt, Artificial Sequence
  Description of Artificial Sequence: Synthetic oligonucleotide
gccuuggaggguggcacuu

SEQ ID NO: 555695 - RNA, 19 nt, Artificial Sequence
  Description of Artificial Sequence: Synthetic oligonucleotide
gauaagacgacuuugacac

SEQ ID NO: 555696 - RNA, 19 nt, Artificial Sequence
  Description of Artificial Sequence: Synthetic oligonucleotide
ugugcuuacucucaguugg

SEQ ID NO: 555697 - RNA, 19 nt, Artificial Sequence
  Description of Artificial Sequence: Synthetic oligonucleotide
acauauaugggguccaacc

SEQ ID NO: 555698 - RNA, 19 nt, Artificial Sequence
  Description of Artificial Sequence: Synthetic oligonucleotide
acauauaucuuucugaccu

SEQ ID NO: 555699 - RNA, 19 nt, Artificial Sequence
  Description of Artificial Sequence: Synthetic oligonucleotide
aauggucccaacaaguacc

SEQ ID NO: 555700 - RNA, 19 nt, Artificial Sequence
  Description of Artificial Sequence: Synthetic oligonucleotide
uccauuaaccauauuauga

SEQ ID NO: 555701 - RNA, 19 nt, Artificial Sequence
  Description of Artificial Sequence: Synthetic oligonucleotide
acugauacggagcuaaccg

SEQ ID NO: 555702 - RNA, 19 nt, Artificial Sequence
  Description of Artificial Sequence: Synthetic oligonucleotide
agcacguuuaaguagacag

SEQ ID NO: 555703 - RNA, 19 nt, Artificial Sequence
  Description of Artificial Sequence: Synthetic oligonucleotide
aaauugacggaagaguagg

SEQ ID NO: 555704 - RNA, 19 nt, Artificial Sequence
  Description of Artificial Sequence: Synthetic oligonucleotide
uggauuagcuuuuaguaag

SEQ ID NO: 555705 - RNA, 19 nt, Artificial Sequence
  Description of Artificial Sequence: Synthetic oligonucleotide
gauauagccaaccauugac

SEQ ID NO: 555706 - RNA, 19 nt, Artificial Sequence
  Description of Artificial Sequence: Synthetic oligonucleotide
uuucugaccuguaaagccg

SEQ ID NO: 555707 - RNA, 19 nt, Artificial Sequence
  Description of Artificial Sequence: Synthetic oligonucleotide
acuuagucaguguagcucg

SEQ ID NO: 555708 - RNA, 19 nt, Artificial Sequence
  Description of Artificial Sequence: Synthetic oligonucleotide
ugagaaugaacaaauucga

SEQ ID NO: 555709 - RNA, 19 nt, Artificial Sequence
  Description of Artificial Sequence: Synthetic oligonucleotide
aagaguagggaucaugacu

SEQ ID NO: 555710 - RNA, 19 nt, Artificial Sequence
  Description of Artificial Sequence: Synthetic oligonucleotide
ugaacaucacccuuggacc

SEQ ID NO: 555711 - RNA, 19 nt, Artificial Sequence
  Description of Artificial Sequence: Synthetic oligonucleotide
auuaaccauauuaugaguc

SEQ ID NO: 555712 - RNA, 19 nt, Artificial Sequence
  Description of Artificial Sequence: Synthetic oligonucleotide
aguagcuucuuguaugagg

SEQ ID NO: 555713 - RNA, 19 nt, Artificial Sequence
  Description of Artificial Sequence: Synthetic oligonucleotide
guacaucugacauaguaag

SEQ ID NO: 555714 - RNA, 19 nt, Artificial Sequence
  Description of Artificial Sequence: Synthetic oligonucleotide
aacuuagucaguguagcuc

SEQ ID NO: 555715 - RNA, 19 nt, Artificial Sequence
  Description of Artificial Sequence: Synthetic oligonucleotide
guaaagccgauucauaccc

SEQ ID NO: 555716 - RNA, 19 nt, Artificial Sequence
  Description of Artificial Sequence: Synthetic oligonucleotide
aaguacaauaagugccugg

SEQ ID NO: 555717 - RNA, 19 nt, Artificial Sequence
  Description of Artificial Sequence: Synthetic oligonucleotide
agaaccauuaauaaaguga

SEQ ID NO: 555718 - RNA, 19 nt, Artificial Sequence
  Description of Artificial Sequence: Synthetic oligonucleotide
uuaaccauauuaugaguca

SEQ ID NO: 555719 - RNA, 19 nt, Artificial Sequence
  Description of Artificial Sequence: Synthetic oligonucleotide
accauauuaugagucaggc

SEQ ID NO: 555720 - RNA, 19 nt, Artificial Sequence
  Description of Artificial Sequence: Synthetic oligonucleotide
acuaccaugcucuagcaga

SEQ ID NO: 555721 - RNA, 19 nt, Artificial Sequence
  Description of Artificial Sequence: Synthetic oligonucleotide
uugacacugaauucccucg

SEQ ID NO: 555722 - RNA, 19 nt, Artificial Sequence
  Description of Artificial Sequence: Synthetic oligonucleotide
aacugauacggagcuaacc

SEQ ID NO: 555723 - RNA, 19 nt, Artificial Sequence
  Description of Artificial Sequence: Synthetic oligonucleotide
ucguccauggauuagcaug

SEQ ID NO: 555724 - RNA, 19 nt, Artificial Sequence
  Description of Artificial Sequence: Synthetic oligonucleotide
acacgcaugggauaagacg

SEQ ID NO: 555725 - RNA, 19 nt, Artificial Sequence
  Description of Artificial Sequence: Synthetic oligonucleotide
uuaaaaggcuaauugcuaa

SEQ ID NO: 555726 - RNA, 19 nt, Artificial Sequence
  Description of Artificial Sequence: Synthetic oligonucleotide
uccuucaauagauaauggc

SEQ ID NO: 555727 - RNA, 19 nt, Artificial Sequence
  Description of Artificial Sequence: Synthetic oligonucleotide
uguaaagccgauucauacc

SEQ ID NO: 555728 - RNA, 19 nt, Artificial Sequence
  Description of Artificial Sequence: Synthetic oligonucleotide
aauagugucuuuaccagcu

SEQ ID NO: 555729 - RNA, 19 nt, Artificial Sequence
  Description of Artificial Sequence: Synthetic oligonucleotide
acacuauuuauuuuagcca

SEQ ID NO: 555730 - RNA, 19 nt, Artificial Sequence
  Description of Artificial Sequence: Synthetic oligonucleotide
aaagccgauucauacccag

SEQ ID NO: 555731 - RNA, 19 nt, Artificial Sequence
  Description of Artificial Sequence: Synthetic oligonucleotide
uccuguuacucuauuucgg

SEQ ID NO: 555732 - RNA, 19 nt, Artificial Sequence
  Description of Artificial Sequence: Synthetic oligonucleotide
uauaugggguccaaccaag

SEQ ID NO: 555733 - RNA, 19 nt, Artificial Sequence
  Description of Artificial Sequence: Synthetic oligonucleotide
uuaugagucaggcgaaaug

SEQ ID NO: 555734 - RNA, 19 nt, Artificial Sequence
  Description of Artificial Sequence: Synthetic oligonucleotide
aaauucgaagaaaucaacu

SEQ ID NO: 555735 - RNA, 19 nt, Artificial Sequence
  Description of Artificial Sequence: Synthetic oligonucleotide
agugacuucaauaaauucu

SEQ ID NO: 555736 - RNA, 19 nt, Artificial Sequence
  Description of Artificial Sequence: Synthetic oligonucleotide
uucguaaucgcauugcuuu

SEQ ID NO: 555737 - RNA, 19 nt, Artificial Sequence
  Description of Artificial Sequence: Synthetic oligonucleotide
uguucaguuagucgaguug

SEQ ID NO: 555738 - RNA, 19 nt, Artificial Sequence
  Description of Artificial Sequence: Synthetic oligonucleotide
uaggauauagccaaccauu

SEQ ID NO: 555739 - RNA, 19 nt, Artificial Sequence
  Description of Artificial Sequence: Synthetic oligonucleotide
cauaaaccggccaacuuag

SEQ ID NO: 555740 - RNA, 19 nt, Artificial Sequence
  Description of Artificial Sequence: Synthetic oligonucleotide
uggaauuacuuccaucaac

SEQ ID NO: 555741 - RNA, 19 nt, Artificial Sequence
  Description of Artificial Sequence: Synthetic oligonucleotide
aauccuccaagcucaaaga

SEQ ID NO: 555742 - RNA, 19 nt, Artificial Sequence
  Description of Artificial Sequence: Synthetic oligonucleotide
gagcuaaccgauuugugug

SEQ ID NO: 555743 - RNA, 19 nt, Artificial Sequence
  Description of Artificial Sequence: Synthetic oligonucleotide
caagcccuaggauauagcc

SEQ ID NO: 555744 - RNA, 19 nt, Artificial Sequence
  Description of Artificial Sequence: Synthetic oligonucleotide
uucgaagaaaucaacugua

SEQ ID NO: 555745 - RNA, 19 nt, Artificial Sequence
  Description of Artificial Sequence: Synthetic oligonucleotide
uuugcauguucaugaauug

SEQ ID NO: 555746 - RNA, 19 nt, Artificial Sequence
  Description of Artificial Sequence: Synthetic oligonucleotide
aaccggccaacuuagucag

SEQ ID NO: 555747 - RNA, 19 nt, Artificial Sequence
  Description of Artificial Sequence: Synthetic oligonucleotide
ucuauuucgggucuugauu

SEQ ID NO: 555748 - RNA, 19 nt, Artificial Sequence
  Description of Artificial Sequence: Synthetic oligonucleotide
agcuaaccgauuugugugc

SEQ ID NO: 555749 - RNA, 19 nt, Artificial Sequence
  Description of Artificial Sequence: Synthetic oligonucleotide
uguuacucuauuucggguc

SEQ ID NO: 555750 - RNA, 19 nt, Artificial Sequence
  Description of Artificial Sequence: Synthetic oligonucleotide
uucucauuugcacacgauc

SEQ ID NO: 555751 - RNA, 19 nt, Artificial Sequence
  Description of Artificial Sequence: Synthetic oligonucleotide
acuuccaucaaccgauuug

SEQ ID NO: 555752 - RNA, 19 nt, Artificial Sequence
  Description of Artificial Sequence: Synthetic oligonucleotide
gaauagugucuuuaccagc

SEQ ID NO: 555753 - RNA, 19 nt, Artificial Sequence
  Description of Artificial Sequence: Synthetic oligonucleotide
ugggauaagacgacuuuga

SEQ ID NO: 555754 - RNA, 19 nt, Artificial Sequence
  Description of Artificial Sequence: Synthetic oligonucleotide
uucuauacuuuccauucuc

SEQ ID NO: 555755 - RNA, 19 nt, Artificial Sequence
  Description of Artificial Sequence: Synthetic oligonucleotide
auuacuuccaucaaccgau

SEQ ID NO: 555756 - RNA, 19 nt, Artificial Sequence
  Description of Artificial Sequence: Synthetic oligonucleotide
uuagucgaguugcaucucc

SEQ ID NO: 555757 - RNA, 19 nt, Artificial Sequence
  Description of Artificial Sequence: Synthetic oligonucleotide
cacacgaucagaacgacca

SEQ ID NO: 555758 - RNA, 19 nt, Artificial Sequence
  Description of Artificial Sequence: Synthetic oligonucleotide
uugcacacgaucagaacga

SEQ ID NO: 555759 - RNA, 19 nt, Artificial Sequence
  Description of Artificial Sequence: Synthetic oligonucleotide
uugacaugacugcaguaga

SEQ ID NO: 555760 - RNA, 19 nt, Artificial Sequence
  Description of Artificial Sequence: Synthetic oligonucleotide
uauagccaaccauugacau

SEQ ID NO: 555761 - RNA, 19 nt, Artificial Sequence
  Description of Artificial Sequence: Synthetic oligonucleotide
uuagcaugggcacccaaaa

SEQ ID NO: 555762 - RNA, 19 nt, Artificial Sequence
  Description of Artificial Sequence: Synthetic oligonucleotide
aguacaauaagugccuggu

SEQ ID NO: 555763 - RNA, 19 nt, Artificial Sequence
  Description of Artificial Sequence: Synthetic oligonucleotide
ccauuaaccauauuaugag

SEQ ID NO: 555764 - RNA, 19 nt, Artificial Sequence
  Description of Artificial Sequence: Synthetic oligonucleotide
aauugacggaagaguaggg

SEQ ID NO: 555765 - RNA, 19 nt, Artificial Sequence
  Description of Artificial Sequence: Synthetic oligonucleotide
auggauuagcuuuuaguaa

SEQ ID NO: 555766 - RNA, 19 nt, Artificial Sequence
  Description of Artificial Sequence: Synthetic oligonucleotide
ucuucguaaucgcauugcu

SEQ ID NO: 555767 - RNA, 19 nt, Artificial Sequence
  Description of Artificial Sequence: Synthetic oligonucleotide
uucaauagauaauggcaau

SEQ ID NO: 555768 - RNA, 19 nt, Artificial Sequence
  Description of Artificial Sequence: Synthetic oligonucleotide
uguagcucguccauggauu

SEQ ID NO: 555769 - RNA, 19 nt, Artificial Sequence
  Description of Artificial Sequence: Synthetic oligonucleotide
auauaugggguccaaccaa

SEQ ID NO: 555770 - RNA, 19 nt, Artificial Sequence
  Description of Artificial Sequence: Synthetic oligonucleotide
cacgcaugggauaagacga

SEQ ID NO: 555771 - RNA, 19 nt, Artificial Sequence
  Description of Artificial Sequence: Synthetic oligonucleotide
agguacaucugacauagua

SEQ ID NO: 555772 - RNA, 19 nt, Artificial Sequence
  Description of Artificial Sequence: Synthetic oligonucleotide
ugauacggagcuaaccgau

SEQ ID NO: 555773 - RNA, 19 nt, Artificial Sequence
  Description of Artificial Sequence: Synthetic oligonucleotide
aagacaguugaagucuaca

SEQ ID NO: 555774 - RNA, 19 nt, Artificial Sequence
  Description of Artificial Sequence: Synthetic oligonucleotide
ucaaccgauuuguugcaca

SEQ ID NO: 555775 - RNA, 19 nt, Artificial Sequence
  Description of Artificial Sequence: Synthetic oligonucleotide
auuaaagguucucucugau

SEQ ID NO: 555776 - RNA, 19 nt, Artificial Sequence
  Description of Artificial Sequence: Synthetic oligonucleotide
gaucgcugagauuuuccug

SEQ ID NO: 555777 - RNA, 19 nt, Artificial Sequence
  Description of Artificial Sequence: Synthetic oligonucleotide
uuaaagguucucucugauc

SEQ ID NO: 555778 - RNA, 19 nt, Artificial Sequence
  Description of Artificial Sequence: Synthetic oligonucleotide
cauuuuaaagugagugcuc

SEQ ID NO: 555779 - RNA, 19 nt, Artificial Sequence
  Description of Artificial Sequence: Synthetic oligonucleotide
agcucguccauggauuagc

SEQ ID NO: 555780 - RNA, 19 nt, Artificial Sequence
  Description of Artificial Sequence: Synthetic oligonucleotide
aacaucacccuuggaccac

SEQ ID NO: 555781 - RNA, 19 nt, Artificial Sequence
  Description of Artificial Sequence: Synthetic oligonucleotide
ugacggaagaguagggauc

SEQ ID NO: 555782 - RNA, 19 nt, Artificial Sequence
  Description of Artificial Sequence: Synthetic oligonucleotide
aucgcauugcuuucaaaau

SEQ ID NO: 555783 - RNA, 19 nt, Artificial Sequence
  Description of Artificial Sequence: Synthetic oligonucleotide
acaagcgcucuacaaauau

SEQ ID NO: 555784 - RNA, 19 nt, Artificial Sequence
  Description of Artificial Sequence: Synthetic oligonucleotide
aucugauuuugggacuacc

SEQ ID NO: 555785 - RNA, 19 nt, Artificial Sequence
  Description of Artificial Sequence: Synthetic oligonucleotide
uaguaagaauuuccuugca

SEQ ID NO: 555786 - RNA, 19 nt, Artificial Sequence
  Description of Artificial Sequence: Synthetic oligonucleotide
ugcuuaauguuggaauuac

SEQ ID NO: 555787 - RNA, 19 nt, Artificial Sequence
  Description of Artificial Sequence: Synthetic oligonucleotide
ucgcauugcuuucaaaauu

SEQ ID NO: 555788 - RNA, 19 nt, Artificial Sequence
  Description of Artificial Sequence: Synthetic oligonucleotide
aaacauaauucaacacccu

SEQ ID NO: 555789 - RNA, 19 nt, Artificial Sequence
  Description of Artificial Sequence: Synthetic oligonucleotide
ccuucaauagauaauggca

SEQ ID NO: 555790 - RNA, 19 nt, Artificial Sequence
  Description of Artificial Sequence: Synthetic oligonucleotide
uucugaccuguaaagccga

SEQ ID NO: 555791 - RNA, 19 nt, Artificial Sequence
  Description of Artificial Sequence: Synthetic oligonucleotide
uaaccgauuugugugcucu

SEQ ID NO: 555792 - RNA, 19 nt, Artificial Sequence
  Description of Artificial Sequence: Synthetic oligonucleotide
uuucuauaagccucugcuu

SEQ ID NO: 555793 - RNA, 19 nt, Artificial Sequence
  Description of Artificial Sequence: Synthetic oligonucleotide
aagcgcucuacaaauauuu

SEQ ID NO: 555794 - RNA, 19 nt, Artificial Sequence
  Description of Artificial Sequence: Synthetic oligonucleotide
aagccgauucauacccagc

SEQ ID NO: 555795 - RNA, 19 nt, Artificial Sequence
  Description of Artificial Sequence: Synthetic oligonucleotide
gagucaggcgaaaugguac

SEQ ID NO: 555796 - RNA, 19 nt, Artificial Sequence
  Description of Artificial Sequence: Synthetic oligonucleotide
cuauuucgggucuugauua

SEQ ID NO: 555797 - RNA, 19 nt, Artificial Sequence
  Description of Artificial Sequence: Synthetic oligonucleotide
aguuucauucaguggugcu

SEQ ID NO: 555798 - RNA, 19 nt, Artificial Sequence
  Description of Artificial Sequence: Synthetic oligonucleotide
aggacccauuccauuaacc

SEQ ID NO: 555799 - RNA, 19 nt, Artificial Sequence
  Description of Artificial Sequence: Synthetic oligonucleotide
aaacugauacggagcuaac

SEQ ID NO: 555800 - RNA, 19 nt, Artificial Sequence
  Description of Artificial Sequence: Synthetic oligonucleotide
uacggagcuaaccgauuug

SEQ ID NO: 555801 - RNA, 19 nt, Artificial Sequence
  Description of Artificial Sequence: Synthetic oligonucleotide
gacuaccaugcucuagcag

SEQ ID NO: 555802 - RNA, 19 nt, Artificial Sequence
  Description of Artificial Sequence: Synthetic oligonucleotide
gggcacccaaaauugacgg

SEQ ID NO: 555803 - RNA, 19 nt, Artificial Sequence
  Description of Artificial Sequence: Synthetic oligonucleotide
agucaggcgaaaugguaca

SEQ ID NO: 555804 - RNA, 19 nt, Artificial Sequence
  Description of Artificial Sequence: Synthetic oligonucleotide
ggauaagacgacuuugaca

SEQ ID NO: 555805 - RNA, 19 nt, Artificial Sequence
  Description of Artificial Sequence: Synthetic oligonucleotide
auucaccggugaaagaauc

SEQ ID NO: 555806 - RNA, 19 nt, Artificial Sequence
  Description of Artificial Sequence: Synthetic oligonucleotide
caugauuagcaugggcacc

SEQ ID NO: 555807 - RNA, 19 nt, Artificial Sequence
  Description of Artificial Sequence: Synthetic oligonucleotide
aguucggcaagucucgauu

SEQ ID NO: 555808 - RNA, 19 nt, Artificial Sequence
  Description of Artificial Sequence: Synthetic oligonucleotide
uaaagccgauucauaccca

SEQ ID NO: 555809 - RNA, 19 nt, Artificial Sequence
  Description of Artificial Sequence: Synthetic oligonucleotide
ccuguuacucuauuucggg

SEQ ID NO: 555810 - RNA, 19 nt, Artificial Sequence
  Description of Artificial Sequence: Synthetic oligonucleotide
aggauauagccaaccauug

SEQ ID NO: 555811 - RNA, 19 nt, Artificial Sequence
  Description of Artificial Sequence: Synthetic oligonucleotide
ucaauuggucagcauccau

SEQ ID NO: 555812 - RNA, 19 nt, Artificial Sequence
  Description of Artificial Sequence: Synthetic oligonucleotide
uauuucgggucuugauuac

SEQ ID NO: 555813 - RNA, 19 nt, Artificial Sequence
  Description of Artificial Sequence: Synthetic oligonucleotide
auugacggaagaguaggga

SEQ ID NO: 555814 - RNA, 19 nt, Artificial Sequence
  Description of Artificial Sequence: Synthetic oligonucleotide
cagucguuguucaauguca

SEQ ID NO: 555815 - RNA, 19 nt, Artificial Sequence
  Description of Artificial Sequence: Synthetic oligonucleotide
agacgacuuugacacagcu

SEQ ID NO: 555816 - RNA, 19 nt, Artificial Sequence
  Description of Artificial Sequence: Synthetic oligonucleotide
gucuugauuacaccuugca

SEQ ID NO: 555817 - RNA, 19 nt, Artificial Sequence
  Description of Artificial Sequence: Synthetic oligonucleotide
auaagugccuggugaacau

SEQ ID NO: 555818 - RNA, 19 nt, Artificial Sequence
  Description of Artificial Sequence: Synthetic oligonucleotide
acccuucugaaguacaaua

SEQ ID NO: 555819 - RNA, 19 nt, Artificial Sequence
  Description of Artificial Sequence: Synthetic oligonucleotide
uagucgaguugcaucucca

SEQ ID NO: 555820 - RNA, 19 nt, Artificial Sequence
  Description of Artificial Sequence: Synthetic oligonucleotide
gaaguacaauaagugccug

SEQ ID NO: 555821 - RNA, 19 nt, Artificial Sequence
  Description of Artificial Sequence: Synthetic oligonucleotide
auugcuugcugaggguagg

SEQ ID NO: 555822 - RNA, 19 nt, Artificial Sequence
  Description of Artificial Sequence: Synthetic oligonucleotide
acugaauucccucgauaau

SEQ ID NO: 555823 - RNA, 19 nt, Artificial Sequence
  Description of Artificial Sequence: Synthetic oligonucleotide
aaccgauuugugugcucug

SEQ ID NO: 555824 - RNA, 19 nt, Artificial Sequence
  Description of Artificial Sequence: Synthetic oligonucleotide
gacaugacugcaguagaca

SEQ ID NO: 555825 - RNA, 19 nt, Artificial Sequence
  Description of Artificial Sequence: Synthetic oligonucleotide
uucggcaagucucgauucu

SEQ ID NO: 555826 - RNA, 19 nt, Artificial Sequence
  Description of Artificial Sequence: Synthetic oligonucleotide
ugcaucuguucacacgcau

SEQ ID NO: 555827 - RNA, 19 nt, Artificial Sequence
  Description of Artificial Sequence: Synthetic oligonucleotide
acccaaaauugacggaaga

SEQ ID NO: 555828 - RNA, 19 nt, Artificial Sequence
  Description of Artificial Sequence: Synthetic oligonucleotide
guccuucaauagauaaugg

SEQ ID NO: 555829 - RNA, 19 nt, Artificial Sequence
  Description of Artificial Sequence: Synthetic oligonucleotide
cuucaucgugagaaugaac

SEQ ID NO: 555830 - RNA, 19 nt, Artificial Sequence
  Description of Artificial Sequence: Synthetic oligonucleotide
gccuauuugccacaguaac

SEQ ID NO: 555831 - RNA, 19 nt, Artificial Sequence
  Description of Artificial Sequence: Synthetic oligonucleotide
cauuugcacacgaucagaa

SEQ ID NO: 555832 - RNA, 19 nt, Artificial Sequence
  Description of Artificial Sequence: Synthetic oligonucleotide
ucucaguuggggauuuauu

SEQ ID NO: 555833 - RNA, 19 nt, Artificial Sequence
  Description of Artificial Sequence: Synthetic oligonucleotide
guaacaauucuugucgucu

SEQ ID NO: 555834 - RNA, 19 nt, Artificial Sequence
  Description of Artificial Sequence: Synthetic oligonucleotide
ccauauuaugagucaggcg

SEQ ID NO: 555835 - RNA, 19 nt, Artificial Sequence
  Description of Artificial Sequence: Synthetic oligonucleotide
gcucuagcagagcacagcc

SEQ ID NO: 555836 - RNA, 19 nt, Artificial Sequence
  Description of Artificial Sequence: Synthetic oligonucleotide
cuauacuuuccauucucaa

SEQ ID NO: 555837 - RNA, 19 nt, Artificial Sequence
  Description of Artificial Sequence: Synthetic oligonucleotide
auacggagcuaaccgauuu

SEQ ID NO: 555838 - RNA, 19 nt, Artificial Sequence
  Description of Artificial Sequence: Synthetic oligonucleotide
gugacaccucaucauuaag

SEQ ID NO: 555839 - RNA, 19 nt, Artificial Sequence
  Description of Artificial Sequence: Synthetic oligonucleotide
uucaauuggucagcaucca

SEQ ID NO: 555840 - RNA, 19 nt, Artificial Sequence
  Description of Artificial Sequence: Synthetic oligonucleotide
uccuuucacugguuuacuc

SEQ ID NO: 555841 - RNA, 19 nt, Artificial Sequence
  Description of Artificial Sequence: Synthetic oligonucleotide
uccaaccaagguacaucug

SEQ ID NO: 555842 - RNA, 19 nt, Artificial Sequence
  Description of Artificial Sequence: Synthetic oligonucleotide
auaggacccauuccauuaa

SEQ ID NO: 555843 - RNA, 19 nt, Artificial Sequence
  Description of Artificial Sequence: Synthetic oligonucleotide
uuaagaucgcugagauuuu

SEQ ID NO: 555844 - RNA, 19 nt, Artificial Sequence
  Description of Artificial Sequence: Synthetic oligonucleotide
cucgauaauuucuauacuu

SEQ ID NO: 555845 - RNA, 19 nt, Artificial Sequence
  Description of Artificial Sequence: Synthetic oligonucleotide
cgugagaaugaacaaauuc

SEQ ID NO: 555846 - RNA, 19 nt, Artificial Sequence
  Description of Artificial Sequence: Synthetic oligonucleotide
uauuaugagucaggcgaaa

SEQ ID NO: 555847 - RNA, 19 nt, Artificial Sequence
  Description of Artificial Sequence: Synthetic oligonucleotide
guaaugcacauguccuuca

SEQ ID NO: 555848 - RNA, 19 nt, Artificial Sequence
  Description of Artificial Sequence: Synthetic oligonucleotide
ucacacgcaugggauaaga

SEQ ID NO: 555849 - RNA, 19 nt, Artificial Sequence
  Description of Artificial Sequence: Synthetic oligonucleotide
ugcagucguuguucaaugu

SEQ ID NO: 555850 - RNA, 19 nt, Artificial Sequence
  Description of Artificial Sequence: Synthetic oligonucleotide
uggcaauccuguuacucua

SEQ ID NO: 555851 - RNA, 19 nt, Artificial Sequence
  Description of Artificial Sequence: Synthetic oligonucleotide
ucguaaucgcauugcuuuc

SEQ ID NO: 555852 - RNA, 19 nt, Artificial Sequence
  Description of Artificial Sequence: Synthetic oligonucleotide
cugauacggagcuaaccga

SEQ ID NO: 555853 - RNA, 19 nt, Artificial Sequence
  Description of Artificial Sequence: Synthetic oligonucleotide
caugcucuagcagagcaca

SEQ ID NO: 555854 - RNA, 19 nt, Artificial Sequence
  Description of Artificial Sequence: Synthetic oligonucleotide
uacucuauuucgggucuug

SEQ ID NO: 555855 - RNA, 19 nt, Artificial Sequence
  Description of Artificial Sequence: Synthetic oligonucleotide
guucggcaagucucgauuc

SEQ ID NO: 555856 - RNA, 19 nt, Artificial Sequence
  Description of Artificial Sequence: Synthetic oligonucleotide
auuaugagucaggcgaaau

SEQ ID NO: 555857 - RNA, 19 nt, Artificial Sequence
  Description of Artificial Sequence: Synthetic oligonucleotide
auaugggguccaaccaagg

SEQ ID NO: 555858 - RNA, 19 nt, Artificial Sequence
  Description of Artificial Sequence: Synthetic oligonucleotide
uacaagcgcucuacaaaua

SEQ ID NO: 555859 - RNA, 19 nt, Artificial Sequence
  Description of Artificial Sequence: Synthetic oligonucleotide
uaagaucgcugagauuuuc

SEQ ID NO: 555860 - RNA, 19 nt, Artificial Sequence
  Description of Artificial Sequence: Synthetic oligonucleotide
cacacgcaugggauaagac

SEQ ID NO: 555861 - RNA, 19 nt, Artificial Sequence
  Description of Artificial Sequence: Synthetic oligonucleotide
guuacucuauuucgggucu

SEQ ID NO: 555862 - RNA, 19 nt, Artificial Sequence
  Description of Artificial Sequence: Synthetic oligonucleotide
cucuucgaaacagacccuc

SEQ ID NO: 555863 - RNA, 19 nt, Artificial Sequence
  Description of Artificial Sequence: Synthetic oligonucleotide
auuagcaugggcacccaaa

SEQ ID NO: 555864 - RNA, 19 nt, Artificial Sequence
  Description of Artificial Sequence: Synthetic oligonucleotide
gaccuguaaagccgauuca

SEQ ID NO: 555865 - RNA, 19 nt, Artificial Sequence
  Description of Artificial Sequence: Synthetic oligonucleotide
auaagacgacuuugacaca

SEQ ID NO: 555866 - RNA, 19 nt, Artificial Sequence
  Description of Artificial Sequence: Synthetic oligonucleotide
ucgugagaaugaacaaauu

SEQ ID NO: 555867 - RNA, 19 nt, Artificial Sequence
  Description of Artificial Sequence: Synthetic oligonucleotide
cauuaaccauauuaugagu

SEQ ID NO: 555868 - RNA, 19 nt, Artificial Sequence
  Description of Artificial Sequence: Synthetic oligonucleotide
acggagcuaaccgauuugu

SEQ ID NO: 555869 - RNA, 19 nt, Artificial Sequence
  Description of Artificial Sequence: Synthetic oligonucleotide
auauuaugagucaggcgaa

SEQ ID NO: 555870 - RNA, 19 nt, Artificial Sequence
  Description of Artificial Sequence: Synthetic oligonucleotide
ucuacgccucuuuggugac

SEQ ID NO: 555871 - RNA, 19 nt, Artificial Sequence
  Description of Artificial Sequence: Synthetic oligonucleotide
acuucaucgugagaaugaa

SEQ ID NO: 555872 - RNA, 19 nt, Artificial Sequence
  Description of Artificial Sequence: Synthetic oligonucleotide
acaauucuugucgucuaaa

SEQ ID NO: 555873 - RNA, 19 nt, Artificial Sequence
  Description of Artificial Sequence: Synthetic oligonucleotide
ggagcuaaccgauuugugu

SEQ ID NO: 555874 - RNA, 19 nt, Artificial Sequence
  Description of Artificial Sequence: Synthetic oligonucleotide
agucgaguugcaucuccaa

SEQ ID NO: 555875 - RNA, 19 nt, Artificial Sequence
  Description of Artificial Sequence: Synthetic oligonucleotide
cuacaagcgcucuacaaau

SEQ ID NO: 555876 - RNA, 19 nt, Artificial Sequence
  Description of Artificial Sequence: Synthetic oligonucleotide
aguagacaagauaggccca

SEQ ID NO: 555877 - RNA, 19 nt, Artificial Sequence
  Description of Artificial Sequence: Synthetic oligonucleotide
uacuuccaucaaccgauuu

SEQ ID NO: 555878 - RNA, 19 nt, Artificial Sequence
  Description of Artificial Sequence: Synthetic oligonucleotide
ggauauagccaaccauuga

SEQ ID NO: 555879 - RNA, 19 nt, Artificial Sequence
  Description of Artificial Sequence: Synthetic oligonucleotide
cacguuuaaguagacaggu

SEQ ID NO: 555880 - RNA, 19 nt, Artificial Sequence
  Description of Artificial Sequence: Synthetic oligonucleotide
agcgcucuacaaauauuug

SEQ ID NO: 555881 - RNA, 19 nt, Artificial Sequence
  Description of Artificial Sequence: Synthetic oligonucleotide
gccaacuuagucaguguag

SEQ ID NO: 555882 - RNA, 19 nt, Artificial Sequence
  Description of Artificial Sequence: Synthetic oligonucleotide
cuaaccgauuugugugcuc

SEQ ID NO: 555883 - RNA, 19 nt, Artificial Sequence
  Description of Artificial Sequence: Synthetic oligonucleotide
acgcaugggauaagacgac

SEQ ID NO: 555884 - RNA, 19 nt, Artificial Sequence
  Description of Artificial Sequence: Synthetic oligonucleotide
uuacuuccaucaaccgauu

SEQ ID NO: 555885 - RNA, 19 nt, Artificial Sequence
  Description of Artificial Sequence: Synthetic oligonucleotide
gcagucguuguucaauguc

SEQ ID NO: 555886 - RNA, 19 nt, Artificial Sequence
  Description of Artificial Sequence: Synthetic oligonucleotide
caaccgauuuguugcacaa

SEQ ID NO: 555887 - RNA, 19 nt, Artificial Sequence
  Description of Artificial Sequence: Synthetic oligonucleotide
gugcuuacucucaguuggg

SEQ ID NO: 555888 - RNA, 19 nt, Artificial Sequence
  Description of Artificial Sequence: Synthetic oligonucleotide
acccuuggaccacagccau

SEQ ID NO: 555889 - RNA, 19 nt, Artificial Sequence
  Description of Artificial Sequence: Synthetic oligonucleotide
auagugucuuuaccagcuu

SEQ ID NO: 555890 - RNA, 19 nt, Artificial Sequence
  Description of Artificial Sequence: Synthetic oligonucleotide
gaguagggaucaugacuga

SEQ ID NO: 555891 - RNA, 19 nt, Artificial Sequence
  Description of Artificial Sequence: Synthetic oligonucleotide
gauuagcaugggcacccaa

SEQ ID NO: 555892 - RNA, 19 nt, Artificial Sequence
  Description of Artificial Sequence: Synthetic oligonucleotide
ugcacacgaucagaacgac

SEQ ID NO: 555893 - RNA, 19 nt, Artificial Sequence
  Description of Artificial Sequence: Synthetic oligonucleotide
ccuauuugccacaguaaca

SEQ ID NO: 555894 - RNA, 19 nt, Artificial Sequence
  Description of Artificial Sequence: Synthetic oligonucleotide
cauuccuacaagguguugu

SEQ ID NO: 555895 - RNA, 19 nt, Artificial Sequence
  Description of Artificial Sequence: Synthetic oligonucleotide
acucuauuucgggucuuga

SEQ ID NO: 555896 - RNA, 19 nt, Artificial Sequence
  Description of Artificial Sequence: Synthetic oligonucleotide
guagggaucaugacugacu

SEQ ID NO: 555897 - RNA, 19 nt, Artificial Sequence
  Description of Artificial Sequence: Synthetic oligonucleotide
agucguuguucaaugucaa

SEQ ID NO: 555898 - RNA, 19 nt, Artificial Sequence
  Description of Artificial Sequence: Synthetic oligonucleotide
uagcucguccauggauuag

SEQ ID NO: 555899 - RNA, 19 nt, Artificial Sequence
  Description of Artificial Sequence: Synthetic oligonucleotide
ugagccgcauaagcacucu

SEQ ID NO: 555900 - RNA, 19 nt, Artificial Sequence
  Description of Artificial Sequence: Synthetic oligonucleotide
guagcucguccauggauua

SEQ ID NO: 555901 - RNA, 19 nt, Artificial Sequence
  Description of Artificial Sequence: Synthetic oligonucleotide
agccuauuugccacaguaa

SEQ ID NO: 555902 - RNA, 19 nt, Artificial Sequence
  Description of Artificial Sequence: Synthetic oligonucleotide
caucacccuuggaccacag

SEQ ID NO: 555903 - RNA, 19 nt, Artificial Sequence
  Description of Artificial Sequence: Synthetic oligonucleotide
ccgauuuguugcacaauuc

SEQ ID NO: 555904 - RNA, 19 nt, Artificial Sequence
  Description of Artificial Sequence: Synthetic oligonucleotide
cuguuacucuauuucgggu

SEQ ID NO: 555905 - RNA, 19 nt, Artificial Sequence
  Description of Artificial Sequence: Synthetic oligonucleotide
ccauaaaccggccaacuua

SEQ ID NO: 555906 - RNA, 19 nt, Artificial Sequence
  Description of Artificial Sequence: Synthetic oligonucleotide
agccgcauaagcacucuau

SEQ ID NO: 555907 - RNA, 19 nt, Artificial Sequence
  Description of Artificial Sequence: Synthetic oligonucleotide
ccccaguuucauucagugg

SEQ ID NO: 555908 - RNA, 19 nt, Artificial Sequence
  Description of Artificial Sequence: Synthetic oligonucleotide
gccgcauaagcacucuauc

SEQ ID NO: 555909 - RNA, 19 nt, Artificial Sequence
  Description of Artificial Sequence: Synthetic oligonucleotide
caucugacauaguaaguuu

SEQ ID NO: 555910 - RNA, 19 nt, Artificial Sequence
  Description of Artificial Sequence: Synthetic oligonucleotide
ggauuagcuuuuaguaaga

SEQ ID NO: 555911 - RNA, 19 nt, Artificial Sequence
  Description of Artificial Sequence: Synthetic oligonucleotide
gacacugaauucccucgau

SEQ ID NO: 555912 - RNA, 19 nt, Artificial Sequence
  Description of Artificial Sequence: Synthetic oligonucleotide
acaucacccuuggaccaca

SEQ ID NO: 555913 - RNA, 19 nt, Artificial Sequence
  Description of Artificial Sequence: Synthetic oligonucleotide
cccuaggauauagccaacc

SEQ ID NO: 555914 - RNA, 19 nt, Artificial Sequence
  Description of Artificial Sequence: Synthetic oligonucleotide
gccucaguguaacuucaca

SEQ ID NO: 555915 - RNA, 19 nt, Artificial Sequence
  Description of Artificial Sequence: Synthetic oligonucleotide
gaacaucuacaagcgcucu

SEQ ID NO: 555916 - RNA, 19 nt, Artificial Sequence
  Description of Artificial Sequence: Synthetic oligonucleotide
cucuauuucgggucuugau

SEQ ID NO: 555917 - RNA, 19 nt, Artificial Sequence
  Description of Artificial Sequence: Synthetic oligonucleotide
cuucguaaucgcauugcuu

SEQ ID NO: 555918 - RNA, 19 nt, Artificial Sequence
  Description of Artificial Sequence: Synthetic oligonucleotide
auaaaccggccaacuuagu

SEQ ID NO: 555919 - RNA, 19 nt, Artificial Sequence
  Description of Artificial Sequence: Synthetic oligonucleotide
uugggacuaccaugcucua

SEQ ID NO: 555920 - RNA, 19 nt, Artificial Sequence
  Description of Artificial Sequence: Synthetic oligonucleotide
ccaugcucuagcagagcac

SEQ ID NO: 555921 - RNA, 19 nt, Artificial Sequence
  Description of Artificial Sequence: Synthetic oligonucleotide
ggacuaccaugcucuagca

SEQ ID NO: 555922 - RNA, 19 nt, Artificial Sequence
  Description of Artificial Sequence: Synthetic oligonucleotide
cauucaccggugaaagaau

SEQ ID NO: 555923 - RNA, 19 nt, Artificial Sequence
  Description of Artificial Sequence: Synthetic oligonucleotide
acguuuaaguagacagguu

SEQ ID NO: 555924 - RNA, 19 nt, Artificial Sequence
  Description of Artificial Sequence: Synthetic oligonucleotide
ccgauuugugugcucugug

SEQ ID NO: 555925 - RNA, 19 nt, Artificial Sequence
  Description of Artificial Sequence: Synthetic oligonucleotide
ggcacccaaaauugacgga

SEQ ID NO: 555926 - RNA, 19 nt, Artificial Sequence
  Description of Artificial Sequence: Synthetic oligonucleotide
gcacacgaucagaacgacc

SEQ ID NO: 555927 - RNA, 19 nt, Artificial Sequence
  Description of Artificial Sequence: Synthetic oligonucleotide
cuuagucaguguagcucgu

SEQ ID NO: 555928 - RNA, 19 nt, Artificial Sequence
  Description of Artificial Sequence: Synthetic oligonucleotide
gauacggagcuaaccgauu

SEQ ID NO: 555929 - RNA, 19 nt, Artificial Sequence
  Description of Artificial Sequence: Synthetic oligonucleotide
gucaggcgaaaugguacaa

SEQ ID NO: 555930 - RNA, 19 nt, Artificial Sequence
  Description of Artificial Sequence: Synthetic oligonucleotide
gagccgcauaagcacucua

SEQ ID NO: 555931 - RNA, 19 nt, Artificial Sequence
  Description of Artificial Sequence: Synthetic oligonucleotide
ccaagguacaucugacaua

SEQ ID NO: 555932 - RNA, 19 nt, Artificial Sequence
  Description of Artificial Sequence: Synthetic oligonucleotide
cauuaagaucgcugagauu

SEQ ID NO: 555933 - RNA, 19 nt, Artificial Sequence
  Description of Artificial Sequence: Synthetic oligonucleotide
auuacaccuugcagucguu

SEQ ID NO: 555934 - RNA, 19 nt, Artificial Sequence
  Description of Artificial Sequence: Synthetic oligonucleotide
cggagcuaaccgauuugug

SEQ ID NO: 555935 - RNA, 19 nt, Artificial Sequence
  Description of Artificial Sequence: Synthetic oligonucleotide
gcucguccauggauuagca

SEQ ID NO: 555936 - RNA, 19 nt, Artificial Sequence
  Description of Artificial Sequence: Synthetic oligonucleotide
gagcugagucuacgccucu

SEQ ID NO: 555937 - RNA, 19 nt, Artificial Sequence
  Description of Artificial Sequence: Synthetic oligonucleotide
cccaacaaguacccaauau

SEQ ID NO: 555938 - RNA, 19 nt, Artificial Sequence
  Description of Artificial Sequence: Synthetic oligonucleotide
cucguccauggauuagcau

SEQ ID NO: 555939 - RNA, 19 nt, Artificial Sequence
  Description of Artificial Sequence: Synthetic oligonucleotide
cguaaucgcauugcuuuca

SEQ ID NO: 555940 - RNA, 19 nt, Artificial Sequence
  Description of Artificial Sequence: Synthetic oligonucleotide
ggaauaccuuggcuauuau

SEQ ID NO: 555941 - RNA, 19 nt, Artificial Sequence
  Description of Artificial Sequence: Synthetic oligonucleotide
caguucggcaagucucgau

SEQ ID NO: 555942 - RNA, 19 nt, Artificial Sequence
  Description of Artificial Sequence: Synthetic oligonucleotide
cuacgccucuuuggugaca

SEQ ID NO: 555943 - RNA, 19 nt, Artificial Sequence
  Description of Artificial Sequence: Synthetic oligonucleotide
ccauuccuacaagguguug

SEQ ID NO: 555944 - RNA, 19 nt, Artificial Sequence
  Description of Artificial Sequence: Synthetic oligonucleotide
gugagugcucaugcuuaau

SEQ ID NO: 555945 - RNA, 19 nt, Artificial Sequence
  Description of Artificial Sequence: Synthetic oligonucleotide
cgaucagaacgaccaccuu

SEQ ID NO: 555946 - RNA, 19 nt, Artificial Sequence
  Description of Artificial Sequence: Synthetic oligonucleotide
aaggggauuaaacauaugc

SEQ ID NO: 555947 - RNA, 19 nt, Artificial Sequence
  Description of Artificial Sequence: Synthetic oligonucleotide
aauucgacuucucaguacc

SEQ ID NO: 555948 - RNA, 19 nt, Artificial Sequence
  Description of Artificial Sequence: Synthetic oligonucleotide
uuaacauuaaugaugcucc

SEQ ID NO: 555949 - RNA, 19 nt, Artificial Sequence
  Description of Artificial Sequence: Synthetic oligonucleotide
aaugcaauuaggcaggcag

SEQ ID NO: 555950 - RNA, 19 nt, Artificial Sequence
  Description of Artificial Sequence: Synthetic oligonucleotide
auuuaagacacuucacucc

SEQ ID NO: 555951 - RNA, 19 nt, Artificial Sequence
  Description of Artificial Sequence: Synthetic oligonucleotide
aauaccuggauccaggcug

SEQ ID NO: 555952 - RNA, 19 nt, Artificial Sequence
  Description of Artificial Sequence: Synthetic oligonucleotide
aaauggaugaagcgaauuc

SEQ ID NO: 555953 - RNA, 19 nt, Artificial Sequence
  Description of Artificial Sequence: Synthetic oligonucleotide
acauuaaugaugcuccagc

SEQ ID NO: 555954 - RNA, 19 nt, Artificial Sequence
  Description of Artificial Sequence: Synthetic oligonucleotide
auccuguuaaccuuggacc

SEQ ID NO: 555955 - RNA, 19 nt, Artificial Sequence
  Description of Artificial Sequence: Synthetic oligonucleotide
aguaccuugauccgguucc

SEQ ID NO: 555956 - RNA, 19 nt, Artificial Sequence
  Description of Artificial Sequence: Synthetic oligonucleotide
uuaaugaugcuccagcuga

SEQ ID NO: 555957 - RNA, 19 nt, Artificial Sequence
  Description of Artificial Sequence: Synthetic oligonucleotide
aagaauuucuuauggaccu

SEQ ID NO: 555958 - RNA, 19 nt, Artificial Sequence
  Description of Artificial Sequence: Synthetic oligonucleotide
aauaagugccuccagaaau

SEQ ID NO: 555959 - RNA, 19 nt, Artificial Sequence
  Description of Artificial Sequence: Synthetic oligonucleotide
aaaucuacccagaugguac

SEQ ID NO: 555960 - RNA, 19 nt, Artificial Sequence
  Description of Artificial Sequence: Synthetic oligonucleotide
cugaagaugcuuuaaagag

SEQ ID NO: 555961 - RNA, 19 nt, Artificial Sequence
  Description of Artificial Sequence: Synthetic oligonucleotide
uuauggaccuuauaaaccc

SEQ ID NO: 555962 - RNA, 19 nt, Artificial Sequence
  Description of Artificial Sequence: Synthetic oligonucleotide
gaaugaaggaucuagggga

SEQ ID NO: 555963 - RNA, 19 nt, Artificial Sequence
  Description of Artificial Sequence: Synthetic oligonucleotide
uuuacaacuucaauccgcc

SEQ ID NO: 555964 - RNA, 19 nt, Artificial Sequence
  Description of Artificial Sequence: Synthetic oligonucleotide
uacaacuucaauccgccag

SEQ ID NO: 555965 - RNA, 19 nt, Artificial Sequence
  Description of Artificial Sequence: Synthetic oligonucleotide
aaucuacccagaugguacc

SEQ ID NO: 555966 - RNA, 19 nt, Artificial Sequence
  Description of Artificial Sequence: Synthetic oligonucleotide
uguucuagucgaaugaugu

SEQ ID NO: 555967 - RNA, 19 nt, Artificial Sequence
  Description of Artificial Sequence: Synthetic oligonucleotide
cuuguuaagagccaagcac

SEQ ID NO: 555968 - RNA, 19 nt, Artificial Sequence
  Description of Artificial Sequence: Synthetic oligonucleotide
aggguugccaagcagauag

SEQ ID NO: 555969 - RNA, 19 nt, Artificial Sequence
  Description of Artificial Sequence: Synthetic oligonucleotide
uguauuauguuucuugaua

SEQ ID NO: 555970 - RNA, 19 nt, Artificial Sequence
  Description of Artificial Sequence: Synthetic oligonucleotide
aguaguguaucccacagga

SEQ ID NO: 555971 - RNA, 19 nt, Artificial Sequence
  Description of Artificial Sequence: Synthetic oligonucleotide
ugaagaugcuuuaaagagc

SEQ ID NO: 555972 - RNA, 19 nt, Artificial Sequence
  Description of Artificial Sequence: Synthetic oligonucleotide
uuagcaguuucuuuuaggu

SEQ ID NO: 555973 - RNA, 19 nt, Artificial Sequence
  Description of Artificial Sequence: Synthetic oligonucleotide
agaagcuucccucuccacc

SEQ ID NO: 555974 - RNA, 19 nt, Artificial Sequence
  Description of Artificial Sequence: Synthetic oligonucleotide
cuggacaauaccuggaucc

SEQ ID NO: 555975 - RNA, 19 nt, Artificial Sequence
  Description of Artificial Sequence: Synthetic oligonucleotide
uaauggaguauccagccca

SEQ ID NO: 555976 - RNA, 19 nt, Artificial Sequence
  Description of Artificial Sequence: Synthetic oligonucleotide
auaugcacccuccacacuc

SEQ ID NO: 555977 - RNA, 19 nt, Artificial Sequence
  Description of Artificial Sequence: Synthetic oligonucleotide
uggucuacacuccaagggg

SEQ ID NO: 555978 - RNA, 19 nt, Artificial Sequence
  Description of Artificial Sequence: Synthetic oligonucleotide
agcagaaugcuguaggcuc

SEQ ID NO: 555979 - RNA, 19 nt, Artificial Sequence
  Description of Artificial Sequence: Synthetic oligonucleotide
ugaauguccaagcaggguc

SEQ ID NO: 555980 - RNA, 19 nt, Artificial Sequence
  Description of Artificial Sequence: Synthetic oligonucleotide
uugccaagcagauagacuc

SEQ ID NO: 555981 - RNA, 19 nt, Artificial Sequence
  Description of Artificial Sequence: Synthetic oligonucleotide
uauccuguuaaccuuggac

SEQ ID NO: 555982 - RNA, 19 nt, Artificial Sequence
  Description of Artificial Sequence: Synthetic oligonucleotide
auggucuacacuccaaggg

SEQ ID NO: 555983 - RNA, 19 nt, Artificial Sequence
  Description of Artificial Sequence: Synthetic oligonucleotide
uuuguguucuagucgaaug

SEQ ID NO: 555984 - RNA, 19 nt, Artificial Sequence
  Description of Artificial Sequence: Synthetic oligonucleotide
auuaaacauaugcacccuc

SEQ ID NO: 555985 - RNA, 19 nt, Artificial Sequence
  Description of Artificial Sequence: Synthetic oligonucleotide
ugaccaaauggaugaagcg

SEQ ID NO: 555986 - RNA, 19 nt, Artificial Sequence
  Description of Artificial Sequence: Synthetic oligonucleotide
aaauucagccaccugucca

SEQ ID NO: 555987 - RNA, 19 nt, Artificial Sequence
  Description of Artificial Sequence: Synthetic oligonucleotide
ucuaauuagcuaccuugcc

SEQ ID NO: 555988 - RNA, 19 nt, Artificial Sequence
  Description of Artificial Sequence: Synthetic oligonucleotide
gauggucuacacuccaagg

SEQ ID NO: 555989 - RNA, 19 nt, Artificial Sequence
  Description of Artificial Sequence: Synthetic oligonucleotide
ggauuaaacauaugcaccc

SEQ ID NO: 555990 - RNA, 19 nt, Artificial Sequence
  Description of Artificial Sequence: Synthetic oligonucleotide
aucuaauuagcuaccuugc

SEQ ID NO: 555991 - RNA, 19 nt, Artificial Sequence
  Description of Artificial Sequence: Synthetic oligonucleotide
uccgccagaaaucauuuga

SEQ ID NO: 555992 - RNA, 19 nt, Artificial Sequence
  Description of Artificial Sequence: Synthetic oligonucleotide
agcgaauucgacuucucag

SEQ ID NO: 555993 - RNA, 19 nt, Artificial Sequence
  Description of Artificial Sequence: Synthetic oligonucleotide
aaaucauuugaguccccug

SEQ ID NO: 555994 - RNA, 19 nt, Artificial Sequence
  Description of Artificial Sequence: Synthetic oligonucleotide
acacacaagccgcacuucc

SEQ ID NO: 555995 - RNA, 19 nt, Artificial Sequence
  Description of Artificial Sequence: Synthetic oligonucleotide
uugauaugcucuucuaugu

SEQ ID NO: 555996 - RNA, 19 nt, Artificial Sequence
  Description of Artificial Sequence: Synthetic oligonucleotide
uuguguucuagucgaauga

SEQ ID NO: 555997 - RNA, 19 nt, Artificial Sequence
  Description of Artificial Sequence: Synthetic oligonucleotide
uaguguaucccacaggaua

SEQ ID NO: 555998 - RNA, 19 nt, Artificial Sequence
  Description of Artificial Sequence: Synthetic oligonucleotide
uuaaccuuggaccauucuu

SEQ ID NO: 555999 - RNA, 19 nt, Artificial Sequence
  Description of Artificial Sequence: Synthetic oligonucleotide
cugauaauugauaggccag

SEQ ID NO: 556000 - RNA, 19 nt, Artificial Sequence
  Description of Artificial Sequence: Synthetic oligonucleotide
uuuagguacggagugcaag

SEQ ID NO: 556001 - RNA, 19 nt, Artificial Sequence
  Description of Artificial Sequence: Synthetic oligonucleotide
aacauuaaugaugcuccag

SEQ ID NO: 556002 - RNA, 19 nt, Artificial Sequence
  Description of Artificial Sequence: Synthetic oligonucleotide
acccugucagaguuggucc

SEQ ID NO: 556003 - RNA, 19 nt, Artificial Sequence
  Description of Artificial Sequence: Synthetic oligonucleotide
ucaugauagugacugugca

SEQ ID NO: 556004 - RNA, 19 nt, Artificial Sequence
  Description of Artificial Sequence: Synthetic oligonucleotide
uucuagucgaaugaugucu

SEQ ID NO: 556005 - RNA, 19 nt, Artificial Sequence
  Description of Artificial Sequence: Synthetic oligonucleotide
auaaaccccaaugaaacca

SEQ ID NO: 556006 - RNA, 19 nt, Artificial Sequence
  Description of Artificial Sequence: Synthetic oligonucleotide
auuuaugccauagccagug

SEQ ID NO: 556007 - RNA, 19 nt, Artificial Sequence
  Description of Artificial Sequence: Synthetic oligonucleotide
uuugaggccauuguuuccc

SEQ ID NO: 556008 - RNA, 19 nt, Artificial Sequence
  Description of Artificial Sequence: Synthetic oligonucleotide
uaaacauaugcacccucca

SEQ ID NO: 556009 - RNA, 19 nt, Artificial Sequence
  Description of Artificial Sequence: Synthetic oligonucleotide
gaucauaaccaugugggac

SEQ ID NO: 556010 - RNA, 19 nt, Artificial Sequence
  Description of Artificial Sequence: Synthetic oligonucleotide
ugauaggccagugccaggg

SEQ ID NO: 556011 - RNA, 19 nt, Artificial Sequence
  Description of Artificial Sequence: Synthetic oligonucleotide
uggaaguagaggauccggc

SEQ ID NO: 556012 - RNA, 19 nt, Artificial Sequence
  Description of Artificial Sequence: Synthetic oligonucleotide
guaggcaguugccagaagc

SEQ ID NO: 556013 - RNA, 19 nt, Artificial Sequence
  Description of Artificial Sequence: Synthetic oligonucleotide
uuagguacggagugcaagu

SEQ ID NO: 556014 - RNA, 19 nt, Artificial Sequence
  Description of Artificial Sequence: Synthetic oligonucleotide
uucuauguuccagauggag

SEQ ID NO: 556015 - RNA, 19 nt, Artificial Sequence
  Description of Artificial Sequence: Synthetic oligonucleotide
gagaggagucaaaagagug

SEQ ID NO: 556016 - RNA, 19 nt, Artificial Sequence
  Description of Artificial Sequence: Synthetic oligonucleotide
aauuagcuaccuugccuug

SEQ ID NO: 556017 - RNA, 19 nt, Artificial Sequence
  Description of Artificial Sequence: Synthetic oligonucleotide
uccuguuaaccuuggacca

SEQ ID NO: 556018 - RNA, 19 nt, Artificial Sequence
  Description of Artificial Sequence: Synthetic oligonucleotide
aaugcucaccagauucagc

SEQ ID NO: 556019 - RNA, 19 nt, Artificial Sequence
  Description of Artificial Sequence: Synthetic oligonucleotide
uuaugccauagccagugac

SEQ ID NO: 556020 - RNA, 19 nt, Artificial Sequence
  Description of Artificial Sequence: Synthetic oligonucleotide
uuuccccggaucauaacca

SEQ ID NO: 556021 - RNA, 19 nt, Artificial Sequence
  Description of Artificial Sequence: Synthetic oligonucleotide
caaaagagugcagccaugg

SEQ ID NO: 556022 - RNA, 19 nt, Artificial Sequence
  Description of Artificial Sequence: Synthetic oligonucleotide
guuuacaacuucaauccgc

SEQ ID NO: 556023 - RNA, 19 nt, Artificial Sequence
  Description of Artificial Sequence: Synthetic oligonucleotide
caugauagugacugugcag

SEQ ID NO: 556024 - RNA, 19 nt, Artificial Sequence
  Description of Artificial Sequence: Synthetic oligonucleotide
guuuccccggaucauaacc

SEQ ID NO: 556025 - RNA, 19 nt, Artificial Sequence
  Description of Artificial Sequence: Synthetic oligonucleotide
guuggaagggcccaggauc

SEQ ID NO: 556026 - RNA, 19 nt, Artificial Sequence
  Description of Artificial Sequence: Synthetic oligonucleotide
aauauccuguuaaccuugg

SEQ ID NO: 556027 - RNA, 19 nt, Artificial Sequence
  Description of Artificial Sequence: Synthetic oligonucleotide
acaagaaaauucagccacc

SEQ ID NO: 556028 - RNA, 19 nt, Artificial Sequence
  Description of Artificial Sequence: Synthetic oligonucleotide
uaauaagugccuccagaaa

SEQ ID NO: 556029 - RNA, 19 nt, Artificial Sequence
  Description of Artificial Sequence: Synthetic oligonucleotide
uauggaccuuauaaacccc

SEQ ID NO: 556030 - RNA, 19 nt, Artificial Sequence
  Description of Artificial Sequence: Synthetic oligonucleotide
ucuagucgaaugaugucuc

SEQ ID NO: 556031 - RNA, 19 nt, Artificial Sequence
  Description of Artificial Sequence: Synthetic oligonucleotide
gaccugauagugcuuccgg

SEQ ID NO: 556032 - RNA, 19 nt, Artificial Sequence
  Description of Artificial Sequence: Synthetic oligonucleotide
uuuaaagagcucugacccu

SEQ ID NO: 556033 - RNA, 19 nt, Artificial Sequence
  Description of Artificial Sequence: Synthetic oligonucleotide
uuaguccugccauuggacu

SEQ ID NO: 556034 - RNA, 19 nt, Artificial Sequence
  Description of Artificial Sequence: Synthetic oligonucleotide
acggagugcaaguuacuuc

SEQ ID NO: 556035 - RNA, 19 nt, Artificial Sequence
  Description of Artificial Sequence: Synthetic oligonucleotide
aacugcaccccucucugca

SEQ ID NO: 556036 - RNA, 19 nt, Artificial Sequence
  Description of Artificial Sequence: Synthetic oligonucleotide
acaacuucaauccgccaga

SEQ ID NO: 556037 - RNA, 19 nt, Artificial Sequence
  Description of Artificial Sequence: Synthetic oligonucleotide
gaagcuucccucuccacca

SEQ ID NO: 556038 - RNA, 19 nt, Artificial Sequence
  Description of Artificial Sequence: Synthetic oligonucleotide
aaaaucuacccagauggua

SEQ ID NO: 556039 - RNA, 19 nt, Artificial Sequence
  Description of Artificial Sequence: Synthetic oligonucleotide
cugggaaugaaggaucuag

SEQ ID NO: 556040 - RNA, 19 nt, Artificial Sequence
  Description of Artificial Sequence: Synthetic oligonucleotide
cauuugaguccccuguccc

SEQ ID NO: 556041 - RNA, 19 nt, Artificial Sequence
  Description of Artificial Sequence: Synthetic oligonucleotide
gaugaagcgaauucgacuu

SEQ ID NO: 556042 - RNA, 19 nt, Artificial Sequence
  Description of Artificial Sequence: Synthetic oligonucleotide
ucgacuucucaguaccuug

SEQ ID NO: 556043 - RNA, 19 nt, Artificial Sequence
  Description of Artificial Sequence: Synthetic oligonucleotide
cuuaguccugccauuggac

SEQ ID NO: 556044 - RNA, 19 nt, Artificial Sequence
  Description of Artificial Sequence: Synthetic oligonucleotide
ugaaggaucuaggggaucu

SEQ ID NO: 556045 - RNA, 19 nt, Artificial Sequence
  Description of Artificial Sequence: Synthetic oligonucleotide
gugaccaaauggaugaagc

SEQ ID NO: 556046 - RNA, 19 nt, Artificial Sequence
  Description of Artificial Sequence: Synthetic oligonucleotide
uagaggauccggcccauca

SEQ ID NO: 556047 - RNA, 19 nt, Artificial Sequence
  Description of Artificial Sequence: Synthetic oligonucleotide
cggaucauaaccauguggg

SEQ ID NO: 556048 - RNA, 19 nt, Artificial Sequence
  Description of Artificial Sequence: Synthetic oligonucleotide
ucaaaagagugcagccaug

SEQ ID NO: 556049 - RNA, 19 nt, Artificial Sequence
  Description of Artificial Sequence: Synthetic oligonucleotide
ucucaguaccuugauccgg

SEQ ID NO: 556050 - RNA, 19 nt, Artificial Sequence
  Description of Artificial Sequence: Synthetic oligonucleotide
uagguaaaguguccugugu

SEQ ID NO: 556051 - RNA, 19 nt, Artificial Sequence
  Description of Artificial Sequence: Synthetic oligonucleotide
guagcagaaugcuguaggc

SEQ ID NO: 556052 - RNA, 19 nt, Artificial Sequence
  Description of Artificial Sequence: Synthetic oligonucleotide
ucccauaagccagagggug

SEQ ID NO: 556053 - RNA, 19 nt, Artificial Sequence
  Description of Artificial Sequence: Synthetic oligonucleotide
gaauucgacuucucaguac

SEQ ID NO: 556054 - RNA, 19 nt, Artificial Sequence
  Description of Artificial Sequence: Synthetic oligonucleotide
uggaugaagcgaauucgac

SEQ ID NO: 556055 - RNA, 19 nt, Artificial Sequence
  Description of Artificial Sequence: Synthetic oligonucleotide
uuagcuaccuugccuugcu

SEQ ID NO: 556056 - RNA, 19 nt, Artificial Sequence
  Description of Artificial Sequence: Synthetic oligonucleotide
ugauaauugauaggccagu

SEQ ID NO: 556057 - RNA, 19 nt, Artificial Sequence
  Description of Artificial Sequence: Synthetic oligonucleotide
uguggcuccuuuuaguauu

SEQ ID NO: 556058 - RNA, 19 nt, Artificial Sequence
  Description of Artificial Sequence: Synthetic oligonucleotide
gaugguaccccacugggcu

SEQ ID NO: 556059 - RNA, 19 nt, Artificial Sequence
  Description of Artificial Sequence: Synthetic oligonucleotide
ugcaauuaggcaggcagcu

SEQ ID NO: 556060 - RNA, 19 nt, Artificial Sequence
  Description of Artificial Sequence: Synthetic oligonucleotide
gaccaaauggaugaagcga

SEQ ID NO: 556061 - RNA, 19 nt, Artificial Sequence
  Description of Artificial Sequence: Synthetic oligonucleotide
ugucccugagaccaauuuc

SEQ ID NO: 556062 - RNA, 19 nt, Artificial Sequence
  Description of Artificial Sequence: Synthetic oligonucleotide
cagaguuggucccaccugc

SEQ ID NO: 556063 - RNA, 19 nt, Artificial Sequence
  Description of Artificial Sequence: Synthetic oligonucleotide
ugauccgguucccaaauuu

SEQ ID NO: 556064 - RNA, 19 nt, Artificial Sequence
  Description of Artificial Sequence: Synthetic oligonucleotide
uccgagucguuucuuugug

SEQ ID NO: 556065 - RNA, 19 nt, Artificial Sequence
  Description of Artificial Sequence: Synthetic oligonucleotide
aauggaguauccagcccag

SEQ ID NO: 556066 - RNA, 19 nt, Artificial Sequence
  Description of Artificial Sequence: Synthetic oligonucleotide
agucguuucuuuguguucu

SEQ ID NO: 556067 - RNA, 19 nt, Artificial Sequence
  Description of Artificial Sequence: Synthetic oligonucleotide
gguuggggaggguuaaugg

SEQ ID NO: 556068 - RNA, 19 nt, Artificial Sequence
  Description of Artificial Sequence: Synthetic oligonucleotide
caauuaggcaggcagcuca

SEQ ID NO: 556069 - RNA, 19 nt, Artificial Sequence
  Description of Artificial Sequence: Synthetic oligonucleotide
ggauaagaggccaagcccc

SEQ ID NO: 556070 - RNA, 19 nt, Artificial Sequence
  Description of Artificial Sequence: Synthetic oligonucleotide
guaauggaguauccagccc

SEQ ID NO: 556071 - RNA, 19 nt, Artificial Sequence
  Description of Artificial Sequence: Synthetic oligonucleotide
ugaccugauagugcuuccg

SEQ ID NO: 556072 - RNA, 19 nt, Artificial Sequence
  Description of Artificial Sequence: Synthetic oligonucleotide
ugauaugcucuucuauguu

SEQ ID NO: 556073 - RNA, 19 nt, Artificial Sequence
  Description of Artificial Sequence: Synthetic oligonucleotide
cauagcugggugucccugg

SEQ ID NO: 556074 - RNA, 19 nt, Artificial Sequence
  Description of Artificial Sequence: Synthetic oligonucleotide
agccucaguaguguauccc

SEQ ID NO: 556075 - RNA, 19 nt, Artificial Sequence
  Description of Artificial Sequence: Synthetic oligonucleotide
ugaagcgaauucgacuucu

SEQ ID NO: 556076 - RNA, 19 nt, Artificial Sequence
  Description of Artificial Sequence: Synthetic oligonucleotide
ggggauaagaggccaagcc

SEQ ID NO: 556077 - RNA, 19 nt, Artificial Sequence
  Description of Artificial Sequence: Synthetic oligonucleotide
caugauucuagccaccuua

SEQ ID NO: 556078 - RNA, 19 nt, Artificial Sequence
  Description of Artificial Sequence: Synthetic oligonucleotide
augaagcgaauucgacuuc

SEQ ID NO: 556079 - RNA, 19 nt, Artificial Sequence
  Description of Artificial Sequence: Synthetic oligonucleotide
uauuaaauccaggucuguu

SEQ ID NO: 556080 - RNA, 19 nt, Artificial Sequence
  Description of Artificial Sequence: Synthetic oligonucleotide
aaugaaggaucuaggggau

SEQ ID NO: 556081 - RNA, 19 nt, Artificial Sequence
  Description of Artificial Sequence: Synthetic oligonucleotide
agucgaaugaugucuccau

SEQ ID NO: 556082 - RNA, 19 nt, Artificial Sequence
  Description of Artificial Sequence: Synthetic oligonucleotide
cauuggacucucagauucc

SEQ ID NO: 556083 - RNA, 19 nt, Artificial Sequence
  Description of Artificial Sequence: Synthetic oligonucleotide
cuagucgaaugaugucucc

SEQ ID NO: 556084 - RNA, 19 nt, Artificial Sequence
  Description of Artificial Sequence: Synthetic oligonucleotide
gauucagccaccagaccac

SEQ ID NO: 556085 - RNA, 19 nt, Artificial Sequence
  Description of Artificial Sequence: Synthetic oligonucleotide
aggggauaagaggccaagc

SEQ ID NO: 556086 - RNA, 19 nt, Artificial Sequence
  Description of Artificial Sequence: Synthetic oligonucleotide
gcccugauaauugauaggc

SEQ ID NO: 556087 - RNA, 19 nt, Artificial Sequence
  Description of Artificial Sequence: Synthetic oligonucleotide
gggaacuggcaccaagugg

SEQ ID NO: 556088 - RNA, 19 nt, Artificial Sequence
  Description of Artificial Sequence: Synthetic oligonucleotide
ucugcuacccaggggauaa

SEQ ID NO: 556089 - RNA, 19 nt, Artificial Sequence
  Description of Artificial Sequence: Synthetic oligonucleotide
auaagccagaggguggaag

SEQ ID NO: 556090 - RNA, 19 nt, Artificial Sequence
  Description of Artificial Sequence: Synthetic oligonucleotide
uuguuuccccggaucauaa

SEQ ID NO: 556091 - RNA, 19 nt, Artificial Sequence
  Description of Artificial Sequence: Synthetic oligonucleotide
uguguucuagucgaaugau

SEQ ID NO: 556092 - RNA, 19 nt, Artificial Sequence
  Description of Artificial Sequence: Synthetic oligonucleotide
agguaaaguguccugugua

SEQ ID NO: 556093 - RNA, 19 nt, Artificial Sequence
  Description of Artificial Sequence: Synthetic oligonucleotide
guuugaggccauuguuucc

SEQ ID NO: 556094 - RNA, 19 nt, Artificial Sequence
  Description of Artificial Sequence: Synthetic oligonucleotide
ugauucuagccaccuuagu

SEQ ID NO: 556095 - RNA, 19 nt, Artificial Sequence
  Description of Artificial Sequence: Synthetic oligonucleotide
uaaugggagcagagcuccg

SEQ ID NO: 556096 - RNA, 19 nt, Artificial Sequence
  Description of Artificial Sequence: Synthetic oligonucleotide
gauagugcuuccgggucag

SEQ ID NO: 556097 - RNA, 19 nt, Artificial Sequence
  Description of Artificial Sequence: Synthetic oligonucleotide
uuuccucuauuaacauuaa

SEQ ID NO: 556098 - RNA, 19 nt, Artificial Sequence
  Description of Artificial Sequence: Synthetic oligonucleotide
aucuacccagaugguaccc

SEQ ID NO: 556099 - RNA, 19 nt, Artificial Sequence
  Description of Artificial Sequence: Synthetic oligonucleotide
uucacuccaguuagauggu

SEQ ID NO: 556100 - RNA, 19 nt, Artificial Sequence
  Description of Artificial Sequence: Synthetic oligonucleotide
cuaauuagcuaccuugccu

SEQ ID NO: 556101 - RNA, 19 nt, Artificial Sequence
  Description of Artificial Sequence: Synthetic oligonucleotide
gauaccugucaacauggua

SEQ ID NO: 556102 - RNA, 19 nt, Artificial Sequence
  Description of Artificial Sequence: Synthetic oligonucleotide
cugauagugcuuccggguc

SEQ ID NO: 556103 - RNA, 19 nt, Artificial Sequence
  Description of Artificial Sequence: Synthetic oligonucleotide
cuuaggauucccaucacau

SEQ ID NO: 556104 - RNA, 19 nt, Artificial Sequence
  Description of Artificial Sequence: Synthetic oligonucleotide
ggaccaaccaucccauaag

SEQ ID NO: 556105 - RNA, 19 nt, Artificial Sequence
  Description of Artificial Sequence: Synthetic oligonucleotide
ccauuggacucucagauuc

SEQ ID NO: 556106 - RNA, 19 nt, Artificial Sequence
  Description of Artificial Sequence: Synthetic oligonucleotide
augauucuagccaccuuag

SEQ ID NO: 556107 - RNA, 19 nt, Artificial Sequence
  Description of Artificial Sequence: Synthetic oligonucleotide
gucgaaugaugucuccaug

SEQ ID NO: 556108 - RNA, 19 nt, Artificial Sequence
  Description of Artificial Sequence: Synthetic oligonucleotide
ccugauaauugauaggcca

SEQ ID NO: 556109 - RNA, 19 nt, Artificial Sequence
  Description of Artificial Sequence: Synthetic oligonucleotide
guuaaugggagcagagcuc

SEQ ID NO: 556110 - RNA, 19 nt, Artificial Sequence
  Description of Artificial Sequence: Synthetic oligonucleotide
caaguggugcuguagguaa

SEQ ID NO: 556111 - RNA, 19 nt, Artificial Sequence
  Description of Artificial Sequence: Synthetic oligonucleotide
cuuuuagguacggagugca

SEQ ID NO: 556112 - RNA, 19 nt, Artificial Sequence
  Description of Artificial Sequence: Synthetic oligonucleotide
uguuaaccuuggaccauuc

SEQ ID NO: 556113 - RNA, 19 nt, Artificial Sequence
  Description of Artificial Sequence: Synthetic oligonucleotide
gaaaugcaauuaggcaggc

SEQ ID NO: 556114 - RNA, 19 nt, Artificial Sequence
  Description of Artificial Sequence: Synthetic oligonucleotide
uagcaguuucuuuuaggua

SEQ ID NO: 556115 - RNA, 19 nt, Artificial Sequence
  Description of Artificial Sequence: Synthetic oligonucleotide
ugccaagcagauagacucu

SEQ ID NO: 556116 - RNA, 19 nt, Artificial Sequence
  Description of Artificial Sequence: Synthetic oligonucleotide
ugugcagguuccgagucgu

SEQ ID NO: 556117 - RNA, 19 nt, Artificial Sequence
  Description of Artificial Sequence: Synthetic oligonucleotide
cggagugcaaguuacuucc

SEQ ID NO: 556118 - RNA, 19 nt, Artificial Sequence
  Description of Artificial Sequence: Synthetic oligonucleotide
acaggauaccugucaacau

SEQ ID NO: 556119 - RNA, 19 nt, Artificial Sequence
  Description of Artificial Sequence: Synthetic oligonucleotide
guucuagucgaaugauguc

SEQ ID NO: 556120 - RNA, 19 nt, Artificial Sequence
  Description of Artificial Sequence: Synthetic oligonucleotide
cucacgcccgcuuuccuug

SEQ ID NO: 556121 - RNA, 19 nt, Artificial Sequence
  Description of Artificial Sequence: Synthetic oligonucleotide
aggacacaaccugugacca

SEQ ID NO: 556122 - RNA, 19 nt, Artificial Sequence
  Description of Artificial Sequence: Synthetic oligonucleotide
aaaugcaauuaggcaggca

SEQ ID NO: 556123 - RNA, 19 nt, Artificial Sequence
  Description of Artificial Sequence: Synthetic oligonucleotide
cacaagccgcacuuccugc

SEQ ID NO: 556124 - RNA, 19 nt, Artificial Sequence
  Description of Artificial Sequence: Synthetic oligonucleotide
uaagugccuccagaaauaa

SEQ ID NO: 556125 - RNA, 19 nt, Artificial Sequence
  Description of Artificial Sequence: Synthetic oligonucleotide
accauucuuggaauuuaag

SEQ ID NO: 556126 - RNA, 19 nt, Artificial Sequence
  Description of Artificial Sequence: Synthetic oligonucleotide
auggaugaagcgaauucga

SEQ ID NO: 556127 - RNA, 19 nt, Artificial Sequence
  Description of Artificial Sequence: Synthetic oligonucleotide
caggguuggaugugaacuc

SEQ ID NO: 556128 - RNA, 19 nt, Artificial Sequence
  Description of Artificial Sequence: Synthetic oligonucleotide
ugcaggcccugauaauuga

SEQ ID NO: 556129 - RNA, 19 nt, Artificial Sequence
  Description of Artificial Sequence: Synthetic oligonucleotide
gagucguuucuuuguguuc

SEQ ID NO: 556130 - RNA, 19 nt, Artificial Sequence
  Description of Artificial Sequence: Synthetic oligonucleotide
ccggaucauaaccaugugg

SEQ ID NO: 556131 - RNA, 19 nt, Artificial Sequence
  Description of Artificial Sequence: Synthetic oligonucleotide
acaagccgcacuuccugcu

SEQ ID NO: 556132 - RNA, 19 nt, Artificial Sequence
  Description of Artificial Sequence: Synthetic oligonucleotide
caggcuuaggauucccauc

SEQ ID NO: 556133 - RNA, 19 nt, Artificial Sequence
  Description of Artificial Sequence: Synthetic oligonucleotide
aagaugcuuuaaagagcuc

SEQ ID NO: 556134 - RNA, 19 nt, Artificial Sequence
  Description of Artificial Sequence: Synthetic oligonucleotide
augguaccccacugggcuc

SEQ ID NO: 556135 - RNA, 19 nt, Artificial Sequence
  Description of Artificial Sequence: Synthetic oligonucleotide
uguguaggugcugcagaca

SEQ ID NO: 556136 - RNA, 19 nt, Artificial Sequence
  Description of Artificial Sequence: Synthetic oligonucleotide
gguacggagugcaaguuac

SEQ ID NO: 556137 - RNA, 19 nt, Artificial Sequence
  Description of Artificial Sequence: Synthetic oligonucleotide
ucuagccaccuuaguccug

SEQ ID NO: 556138 - RNA, 19 nt, Artificial Sequence
  Description of Artificial Sequence: Synthetic oligonucleotide
gucaaaagagugcagccau

SEQ ID NO: 556139 - RNA, 19 nt, Artificial Sequence
  Description of Artificial Sequence: Synthetic oligonucleotide
gauaagaggccaagcccca

SEQ ID NO: 556140 - RNA, 19 nt, Artificial Sequence
  Description of Artificial Sequence: Synthetic oligonucleotide
uaacacugugagggguggg

SEQ ID NO: 556141 - RNA, 19 nt, Artificial Sequence
  Description of Artificial Sequence: Synthetic oligonucleotide
accccaaugaaaccacauu

SEQ ID NO: 556142 - RNA, 19 nt, Artificial Sequence
  Description of Artificial Sequence: Synthetic oligonucleotide
auaagugccuccagaaaua

SEQ ID NO: 556143 - RNA, 19 nt, Artificial Sequence
  Description of Artificial Sequence: Synthetic oligonucleotide
auauccuguuaaccuugga

SEQ ID NO: 556144 - RNA, 19 nt, Artificial Sequence
  Description of Artificial Sequence: Synthetic oligonucleotide
uguuuccccggaucauaac

SEQ ID NO: 556145 - RNA, 19 nt, Artificial Sequence
  Description of Artificial Sequence: Synthetic oligonucleotide
uacggagugcaaguuacuu

SEQ ID NO: 556146 - RNA, 19 nt, Artificial Sequence
  Description of Artificial Sequence: Synthetic oligonucleotide
augcuuuaaagagcucuga

SEQ ID NO: 556147 - RNA, 19 nt, Artificial Sequence
  Description of Artificial Sequence: Synthetic oligonucleotide
augggagcagagcuccgca

SEQ ID NO: 556148 - RNA, 19 nt, Artificial Sequence
  Description of Artificial Sequence: Synthetic oligonucleotide
auggaguauccagcccagc

SEQ ID NO: 556149 - RNA, 19 nt, Artificial Sequence
  Description of Artificial Sequence: Synthetic oligonucleotide
gagugcaaguuacuuccaa

SEQ ID NO: 556150 - RNA, 19 nt, Artificial Sequence
  Description of Artificial Sequence: Synthetic oligonucleotide
augaaggaucuaggggauc

SEQ ID NO: 556151 - RNA, 19 nt, Artificial Sequence
  Description of Artificial Sequence: Synthetic oligonucleotide
agguuggggaggguuaaug

SEQ ID NO: 556152 - RNA, 19 nt, Artificial Sequence
  Description of Artificial Sequence: Synthetic oligonucleotide
ggaguuagcaguuucuuuu

SEQ ID NO: 556153 - RNA, 19 nt, Artificial Sequence
  Description of Artificial Sequence: Synthetic oligonucleotide
ugccagagaauauccuguu

SEQ ID NO: 556154 - RNA, 19 nt, Artificial Sequence
  Description of Artificial Sequence: Synthetic oligonucleotide
gcaacugcaccccucucug

SEQ ID NO: 556155 - RNA, 19 nt, Artificial Sequence
  Description of Artificial Sequence: Synthetic oligonucleotide
auuguuuccccggaucaua

SEQ ID NO: 556156 - RNA, 19 nt, Artificial Sequence
  Description of Artificial Sequence: Synthetic oligonucleotide
aguccccugucccauuuau

SEQ ID NO: 556157 - RNA, 19 nt, Artificial Sequence
  Description of Artificial Sequence: Synthetic oligonucleotide
ugcuacccaggggauaaga

SEQ ID NO: 556158 - RNA, 19 nt, Artificial Sequence
  Description of Artificial Sequence: Synthetic oligonucleotide
cuaggggaccaaccauccc

SEQ ID NO: 556159 - RNA, 19 nt, Artificial Sequence
  Description of Artificial Sequence: Synthetic oligonucleotide
gaggguuaaugggagcaga

SEQ ID NO: 556160 - RNA, 19 nt, Artificial Sequence
  Description of Artificial Sequence: Synthetic oligonucleotide
caucacauguauucugcua

SEQ ID NO: 556161 - RNA, 19 nt, Artificial Sequence
  Description of Artificial Sequence: Synthetic oligonucleotide
cccucuaauaagugccucc

SEQ ID NO: 556162 - RNA, 19 nt, Artificial Sequence
  Description of Artificial Sequence: Synthetic oligonucleotide
auccgccagaaaucauuug

SEQ ID NO: 556163 - RNA, 19 nt, Artificial Sequence
  Description of Artificial Sequence: Synthetic oligonucleotide
ggaugaagcgaauucgacu

SEQ ID NO: 556164 - RNA, 19 nt, Artificial Sequence
  Description of Artificial Sequence: Synthetic oligonucleotide
caguuucuuuuagguacgg

SEQ ID NO: 556165 - RNA, 19 nt, Artificial Sequence
  Description of Artificial Sequence: Synthetic oligonucleotide
gugaccugauagugcuucc

SEQ ID NO: 556166 - RNA, 19 nt, Artificial Sequence
  Description of Artificial Sequence: Synthetic oligonucleotide
guuuggcaguuugggauug

SEQ ID NO: 556167 - RNA, 19 nt, Artificial Sequence
  Description of Artificial Sequence: Synthetic oligonucleotide
uacccagaugguaccccac

SEQ ID NO: 556168 - RNA, 19 nt, Artificial Sequence
  Description of Artificial Sequence: Synthetic oligonucleotide
ggcaguggccucaaaauuc

SEQ ID NO: 556169 - RNA, 19 nt, Artificial Sequence
  Description of Artificial Sequence: Synthetic oligonucleotide
uucgacuucucaguaccuu

SEQ ID NO: 556170 - RNA, 19 nt, Artificial Sequence
  Description of Artificial Sequence: Synthetic oligonucleotide
caaggggauuaaacauaug

SEQ ID NO: 556171 - RNA, 19 nt, Artificial Sequence
  Description of Artificial Sequence: Synthetic oligonucleotide
agguacggagugcaaguua

SEQ ID NO: 556172 - RNA, 19 nt, Artificial Sequence
  Description of Artificial Sequence: Synthetic oligonucleotide
gguggaaguagaggauccg

SEQ ID NO: 556173 - RNA, 19 nt, Artificial Sequence
  Description of Artificial Sequence: Synthetic oligonucleotide
cccauaagccagagggugg

SEQ ID NO: 556174 - RNA, 19 nt, Artificial Sequence
  Description of Artificial Sequence: Synthetic oligonucleotide
ccaguuagauggucuacac

SEQ ID NO: 556175 - RNA, 19 nt, Artificial Sequence
  Description of Artificial Sequence: Synthetic oligonucleotide
caguaccuugauccgguuc

SEQ ID NO: 556176 - RNA, 19 nt, Artificial Sequence
  Description of Artificial Sequence: Synthetic oligonucleotide
uuccccggaucauaaccau

SEQ ID NO: 556177 - RNA, 19 nt, Artificial Sequence
  Description of Artificial Sequence: Synthetic oligonucleotide
uccauagcugggugucccu

SEQ ID NO: 556178 - RNA, 19 nt, Artificial Sequence
  Description of Artificial Sequence: Synthetic oligonucleotide
agaugccagagaauauccu

SEQ ID NO: 556179 - RNA, 19 nt, Artificial Sequence
  Description of Artificial Sequence: Synthetic oligonucleotide
ggaucuggcuccauagcug

SEQ ID NO: 556180 - RNA, 19 nt, Artificial Sequence
  Description of Artificial Sequence: Synthetic oligonucleotide
caggggauaagaggccaag

SEQ ID NO: 556181 - RNA, 19 nt, Artificial Sequence
  Description of Artificial Sequence: Synthetic oligonucleotide
ggaucauaaccauguggga

SEQ ID NO: 556182 - RNA, 19 nt, Artificial Sequence
  Description of Artificial Sequence: Synthetic oligonucleotide
ccgccagaaaucauuugag

SEQ ID NO: 556183 - RNA, 19 nt, Artificial Sequence
  Description of Artificial Sequence: Synthetic oligonucleotide
cuacccagaugguacccca

SEQ ID NO: 556184 - RNA, 19 nt, Artificial Sequence
  Description of Artificial Sequence: Synthetic oligonucleotide
ugcauccccucuucaggaa

SEQ ID NO: 556185 - RNA, 19 nt, Artificial Sequence
  Description of Artificial Sequence: Synthetic oligonucleotide
ugggauugauaugcucuuc

SEQ ID NO: 556186 - RNA, 19 nt, Artificial Sequence
  Description of Artificial Sequence: Synthetic oligonucleotide
cccugauaauugauaggcc

SEQ ID NO: 556187 - RNA, 19 nt, Artificial Sequence
  Description of Artificial Sequence: Synthetic oligonucleotide
gggucuccuuguuaagagc

SEQ ID NO: 556188 - RNA, 19 nt, Artificial Sequence
  Description of Artificial Sequence: Synthetic oligonucleotide
ugcagguuccgagucguuu

SEQ ID NO: 556189 - RNA, 19 nt, Artificial Sequence
  Description of Artificial Sequence: Synthetic oligonucleotide
gggaaguaauggaguaucc

SEQ ID NO: 556190 - RNA, 19 nt, Artificial Sequence
  Description of Artificial Sequence: Synthetic oligonucleotide
uugauccgguucccaaauu

SEQ ID NO: 556191 - RNA, 19 nt, Artificial Sequence
  Description of Artificial Sequence: Synthetic oligonucleotide
aguuugggauugauaugcu

SEQ ID NO: 556192 - RNA, 19 nt, Artificial Sequence
  Description of Artificial Sequence: Synthetic oligonucleotide
gaaaaucuacccagauggu

SEQ ID NO: 556193 - RNA, 19 nt, Artificial Sequence
  Description of Artificial Sequence: Synthetic oligonucleotide
gcagauagacucugagguc

SEQ ID NO: 556194 - RNA, 19 nt, Artificial Sequence
  Description of Artificial Sequence: Synthetic oligonucleotide
cuccaguuagauggucuac

SEQ ID NO: 556195 - RNA, 19 nt, Artificial Sequence
  Description of Artificial Sequence: Synthetic oligonucleotide
ucuacacuccaaggggauu

SEQ ID NO: 556196 - RNA, 19 nt, Artificial Sequence
  Description of Artificial Sequence: Synthetic oligonucleotide
gggaccaaccaucccauaa

SEQ ID NO: 556197 - RNA, 19 nt, Artificial Sequence
  Description of Artificial Sequence: Synthetic oligonucleotide
uuggcaguuugggauugau

SEQ ID NO: 556198 - RNA, 19 nt, Artificial Sequence
  Description of Artificial Sequence: Synthetic oligonucleotide
agccaccuuaguccugcca

SEQ ID NO: 556199 - RNA, 19 nt, Artificial Sequence
  Description of Artificial Sequence: Synthetic oligonucleotide
gcagguuccgagucguuuc

SEQ ID NO: 556200 - RNA, 19 nt, Artificial Sequence
  Description of Artificial Sequence: Synthetic oligonucleotide
gcgauggcaauggugcucc

SEQ ID NO: 556201 - RNA, 19 nt, Artificial Sequence
  Description of Artificial Sequence: Synthetic oligonucleotide
cuaccuugccuugcucuug

SEQ ID NO: 556202 - RNA, 19 nt, Artificial Sequence
  Description of Artificial Sequence: Synthetic oligonucleotide
cuacacuccaaggggauua

SEQ ID NO: 556203 - RNA, 19 nt, Artificial Sequence
  Description of Artificial Sequence: Synthetic oligonucleotide
gggauugauaugcucuucu

SEQ ID NO: 556204 - RNA, 19 nt, Artificial Sequence
  Description of Artificial Sequence: Synthetic oligonucleotide
acucacgcccgcuuuccuu

SEQ ID NO: 556205 - RNA, 19 nt, Artificial Sequence
  Description of Artificial Sequence: Synthetic oligonucleotide
guuaaccuuggaccauucu

SEQ ID NO: 556206 - RNA, 19 nt, Artificial Sequence
  Description of Artificial Sequence: Synthetic oligonucleotide
gccauuguuuccccggauc

SEQ ID NO: 556207 - RNA, 19 nt, Artificial Sequence
  Description of Artificial Sequence: Synthetic oligonucleotide
guaccuugauccgguuccc

SEQ ID NO: 556208 - RNA, 19 nt, Artificial Sequence
  Description of Artificial Sequence: Synthetic oligonucleotide
gcgaauucgacuucucagu

SEQ ID NO: 556209 - RNA, 19 nt, Artificial Sequence
  Description of Artificial Sequence: Synthetic oligonucleotide
ggaguuggaagggcccagg

SEQ ID NO: 556210 - RNA, 19 nt, Artificial Sequence
  Description of Artificial Sequence: Synthetic oligonucleotide
ugccaggguuggaugugaa

SEQ ID NO: 556211 - RNA, 19 nt, Artificial Sequence
  Description of Artificial Sequence: Synthetic oligonucleotide
ucacuccaguuagaugguc

SEQ ID NO: 556212 - RNA, 19 nt, Artificial Sequence
  Description of Artificial Sequence: Synthetic oligonucleotide
auucgacuucucaguaccu

SEQ ID NO: 556213 - RNA, 19 nt, Artificial Sequence
  Description of Artificial Sequence: Synthetic oligonucleotide
ucagugggccucagaucua

SEQ ID NO: 556214 - RNA, 19 nt, Artificial Sequence
  Description of Artificial Sequence: Synthetic oligonucleotide
ggauugauaugcucuucua

SEQ ID NO: 556215 - RNA, 19 nt, Artificial Sequence
  Description of Artificial Sequence: Synthetic oligonucleotide
acgcccgcuuuccuugugu

SEQ ID NO: 556216 - RNA, 19 nt, Artificial Sequence
  Description of Artificial Sequence: Synthetic oligonucleotide
aaacuccacugggaaugaa

SEQ ID NO: 556217 - RNA, 19 nt, Artificial Sequence
  Description of Artificial Sequence: Synthetic oligonucleotide
ccuuguuaagagccaagca

SEQ ID NO: 556218 - RNA, 19 nt, Artificial Sequence
  Description of Artificial Sequence: Synthetic oligonucleotide
ggucuacacuccaagggga

SEQ ID NO: 556219 - RNA, 19 nt, Artificial Sequence
  Description of Artificial Sequence: Synthetic oligonucleotide
ccucaguaguguaucccac

SEQ ID NO: 556220 - RNA, 19 nt, Artificial Sequence
  Description of Artificial Sequence: Synthetic oligonucleotide
gccagugaccugauagugc

SEQ ID NO: 556221 - RNA, 19 nt, Artificial Sequence
  Description of Artificial Sequence: Synthetic oligonucleotide
cacuccaguuagauggucu

SEQ ID NO: 556222 - RNA, 19 nt, Artificial Sequence
  Description of Artificial Sequence: Synthetic oligonucleotide
ucaguaccuugauccgguu

SEQ ID NO: 556223 - RNA, 19 nt, Artificial Sequence
  Description of Artificial Sequence: Synthetic oligonucleotide
cuugauccgguucccaaau

SEQ ID NO: 556224 - RNA, 19 nt, Artificial Sequence
  Description of Artificial Sequence: Synthetic oligonucleotide
aguguccuguguaggugcu

SEQ ID NO: 556225 - RNA, 19 nt, Artificial Sequence
  Description of Artificial Sequence: Synthetic oligonucleotide
uucugcuacccaggggaua

SEQ ID NO: 556226 - RNA, 19 nt, Artificial Sequence
  Description of Artificial Sequence: Synthetic oligonucleotide
cugucagaguuggucccac

SEQ ID NO: 556227 - RNA, 19 nt, Artificial Sequence
  Description of Artificial Sequence: Synthetic oligonucleotide
cauuuaugccauagccagu

SEQ ID NO: 556228 - RNA, 19 nt, Artificial Sequence
  Description of Artificial Sequence: Synthetic oligonucleotide
aagguuggggaggguuaau

SEQ ID NO: 556229 - RNA, 19 nt, Artificial Sequence
  Description of Artificial Sequence: Synthetic oligonucleotide
ugacccugucagaguuggu

SEQ ID NO: 556230 - RNA, 19 nt, Artificial Sequence
  Description of Artificial Sequence: Synthetic oligonucleotide
aggauucccaucacaugua

SEQ ID NO: 556231 - RNA, 19 nt, Artificial Sequence
  Description of Artificial Sequence: Synthetic oligonucleotide
gacuucucaguaccuugau

SEQ ID NO: 556232 - RNA, 19 nt, Artificial Sequence
  Description of Artificial Sequence: Synthetic oligonucleotide
ggcucagaacaagcucugg

SEQ ID NO: 556233 - RNA, 19 nt, Artificial Sequence
  Description of Artificial Sequence: Synthetic oligonucleotide
caguuagauggucuacacu

SEQ ID NO: 556234 - RNA, 19 nt, Artificial Sequence
  Description of Artificial Sequence: Synthetic oligonucleotide
caaacuccacugggaauga

SEQ ID NO: 556235 - RNA, 19 nt, Artificial Sequence
  Description of Artificial Sequence: Synthetic oligonucleotide
ccuggacaauaccuggauc

SEQ ID NO: 556236 - RNA, 19 nt, Artificial Sequence
  Description of Artificial Sequence: Synthetic oligonucleotide
ccucagaucuaauuagcua

SEQ ID NO: 556237 - RNA, 19 nt, Artificial Sequence
  Description of Artificial Sequence: Synthetic oligonucleotide
gauccgguucccaaauuuu

SEQ ID NO: 556238 - RNA, 19 nt, Artificial Sequence
  Description of Artificial Sequence: Synthetic oligonucleotide
gauagugacugugcagguu

SEQ ID NO: 556239 - RNA, 19 nt, Artificial Sequence
  Description of Artificial Sequence: Synthetic oligonucleotide
ccacaggauaccugucaac

SEQ ID NO: 556240 - RNA, 19 nt, Artificial Sequence
  Description of Artificial Sequence: Synthetic oligonucleotide
caggaaaaucuacccagau

SEQ ID NO: 556241 - RNA, 19 nt, Artificial Sequence
  Description of Artificial Sequence: Synthetic oligonucleotide
caauaccuggauccaggcu

SEQ ID NO: 556242 - RNA, 19 nt, Artificial Sequence
  Description of Artificial Sequence: Synthetic oligonucleotide
auucugcuacccaggggau

SEQ ID NO: 556243 - RNA, 19 nt, Artificial Sequence
  Description of Artificial Sequence: Synthetic oligonucleotide
ccucuaauaagugccucca

SEQ ID NO: 556244 - RNA, 19 nt, Artificial Sequence
  Description of Artificial Sequence: Synthetic oligonucleotide
uugaguccccugucccauu

SEQ ID NO: 556245 - RNA, 19 nt, Artificial Sequence
  Description of Artificial Sequence: Synthetic oligonucleotide
gauagacucugaggucugu

SEQ ID NO: 556246 - RNA, 19 nt, Artificial Sequence
  Description of Artificial Sequence: Synthetic oligonucleotide
cacccuggucagcccuucc

SEQ ID NO: 556247 - RNA, 19 nt, Artificial Sequence
  Description of Artificial Sequence: Synthetic oligonucleotide
cucugacccugucagaguu

SEQ ID NO: 556248 - RNA, 19 nt, Artificial Sequence
  Description of Artificial Sequence: Synthetic oligonucleotide
cagaucuaauuagcuaccu

SEQ ID NO: 556249 - RNA, 19 nt, Artificial Sequence
  Description of Artificial Sequence: Synthetic oligonucleotide
gucguuucuuuguguucua

SEQ ID NO: 556250 - RNA, 19 nt, Artificial Sequence
  Description of Artificial Sequence: Synthetic oligonucleotide
guguccuguguaggugcug

SEQ ID NO: 556251 - RNA, 19 nt, Artificial Sequence
  Description of Artificial Sequence: Synthetic oligonucleotide
ccaaggggauuaaacauau

SEQ ID NO: 556252 - RNA, 19 nt, Artificial Sequence
  Description of Artificial Sequence: Synthetic oligonucleotide
ggaccauucuuggaauuua

SEQ ID NO: 556253 - RNA, 19 nt, Artificial Sequence
  Description of Artificial Sequence: Synthetic oligonucleotide
caacuucaauccgccagaa

SEQ ID NO: 556254 - RNA, 19 nt, Artificial Sequence
  Description of Artificial Sequence: Synthetic oligonucleotide
gugggccucagaucuaauu

SEQ ID NO: 556255 - RNA, 19 nt, Artificial Sequence
  Description of Artificial Sequence: Synthetic oligonucleotide
gcaauuaggcaggcagcuc

SEQ ID NO: 556256 - RNA, 19 nt, Artificial Sequence
  Description of Artificial Sequence: Synthetic oligonucleotide
ggauucccaucacauguau

SEQ ID NO: 556257 - RNA, 19 nt, Artificial Sequence
  Description of Artificial Sequence: Synthetic oligonucleotide
ccuugccuugcucuugaca

SEQ ID NO: 556258 - RNA, 19 nt, Artificial Sequence
  Description of Artificial Sequence: Synthetic oligonucleotide
cauaugcacccuccacacu

SEQ ID NO: 556259 - RNA, 19 nt, Artificial Sequence
  Description of Artificial Sequence: Synthetic oligonucleotide
gggagcagagcuccgcagu

SEQ ID NO: 556260 - RNA, 19 nt, Artificial Sequence
  Description of Artificial Sequence: Synthetic oligonucleotide
cagugggccucagaucuaa

SEQ ID NO: 556261 - RNA, 19 nt, Artificial Sequence
  Description of Artificial Sequence: Synthetic oligonucleotide
cagguuccgagucguuucu

SEQ ID NO: 556262 - RNA, 19 nt, Artificial Sequence
  Description of Artificial Sequence: Synthetic oligonucleotide
cacgcccgcuuuccuugug

SEQ ID NO: 556263 - RNA, 19 nt, Artificial Sequence
  Description of Artificial Sequence: Synthetic oligonucleotide
cugcuacccaggggauaag

SEQ ID NO: 556264 - RNA, 19 nt, Artificial Sequence
  Description of Artificial Sequence: Synthetic oligonucleotide
ggagugcaaguuacuucca

SEQ ID NO: 556265 - RNA, 19 nt, Artificial Sequence
  Description of Artificial Sequence: Synthetic oligonucleotide
gccucagaucuaauuagcu

SEQ ID NO: 556266 - RNA, 19 nt, Artificial Sequence
  Description of Artificial Sequence: Synthetic oligonucleotide
ggacacaaccugugaccaa

SEQ ID NO: 556267 - RNA, 19 nt, Artificial Sequence
  Description of Artificial Sequence: Synthetic oligonucleotide
ccauagcugggugucccug

SEQ ID NO: 556268 - RNA, 19 nt, Artificial Sequence
  Description of Artificial Sequence: Synthetic oligonucleotide
cccggaucauaaccaugug

SEQ ID NO: 556269 - RNA, 19 nt, Artificial Sequence
  Description of Artificial Sequence: Synthetic oligonucleotide
cguggcaaccaccuccuga

SEQ ID NO: 556270 - RNA, 19 nt, Artificial Sequence
  Description of Artificial Sequence: Synthetic oligonucleotide
gguuccgagucguuucuuu

SEQ ID NO: 556271 - RNA, 19 nt, Artificial Sequence
  Description of Artificial Sequence: Synthetic oligonucleotide
ccucaaaauucccaugauu

SEQ ID NO: 556272 - RNA, 19 nt, Artificial Sequence
  Description of Artificial Sequence: Synthetic oligonucleotide
cgaauucgacuucucagua

SEQ ID NO: 556273 - RNA, 19 nt, Artificial Sequence
  Description of Artificial Sequence: Synthetic oligonucleotide
guacggagugcaaguuacu

SEQ ID NO: 556274 - RNA, 19 nt, Artificial Sequence
  Description of Artificial Sequence: Synthetic oligonucleotide
cuguuaaccuuggaccauu

SEQ ID NO: 556275 - RNA, 19 nt, Artificial Sequence
  Description of Artificial Sequence: Synthetic oligonucleotide
cuaggggaucuguguuugu

SEQ ID NO: 556276 - RNA, 19 nt, Artificial Sequence
  Description of Artificial Sequence: Synthetic oligonucleotide
agguuccgagucguuucuu

SEQ ID NO: 556277 - RNA, 19 nt, Artificial Sequence
  Description of Artificial Sequence: Synthetic oligonucleotide
gcuaccuugccuugcucuu

SEQ ID NO: 556278 - RNA, 19 nt, Artificial Sequence
  Description of Artificial Sequence: Synthetic oligonucleotide
agugggccucagaucuaau

SEQ ID NO: 556279 - RNA, 19 nt, Artificial Sequence
  Description of Artificial Sequence: Synthetic oligonucleotide
gggacuccagcaagaucuc

SEQ ID NO: 556280 - RNA, 19 nt, Artificial Sequence
  Description of Artificial Sequence: Synthetic oligonucleotide
ggauggucagugggccuca

SEQ ID NO: 556281 - RNA, 19 nt, Artificial Sequence
  Description of Artificial Sequence: Synthetic oligonucleotide
gccucaaaauucccaugau

SEQ ID NO: 556282 - RNA, 19 nt, Artificial Sequence
  Description of Artificial Sequence: Synthetic oligonucleotide
caggguugccaagcagaua

SEQ ID NO: 556283 - RNA, 19 nt, Artificial Sequence
  Description of Artificial Sequence: Synthetic oligonucleotide
cgagucguuucuuuguguu

SEQ ID NO: 556284 - RNA, 19 nt, Artificial Sequence
  Description of Artificial Sequence: Synthetic oligonucleotide
cacucacgcccgcuuuccu

SEQ ID NO: 556285 - RNA, 19 nt, Artificial Sequence
  Description of Artificial Sequence: Synthetic oligonucleotide
cccaugggucuccuuguua

SEQ ID NO: 556286 - RNA, 19 nt, Artificial Sequence
  Description of Artificial Sequence: Synthetic oligonucleotide
ccgagucguuucuuugugu

SEQ ID NO: 556287 - RNA, 19 nt, Artificial Sequence
  Description of Artificial Sequence: Synthetic oligonucleotide
cccuggacaauaccuggau

SEQ ID NO: 556288 - RNA, 19 nt, Artificial Sequence
  Description of Artificial Sequence: Synthetic oligonucleotide
ggguuggaugugaacucau

SEQ ID NO: 556289 - RNA, 19 nt, Artificial Sequence
  Description of Artificial Sequence: Synthetic oligonucleotide
cgcagucccugccagaaau

SEQ ID NO: 556290 - RNA, 19 nt, Artificial Sequence
  Description of Artificial Sequence: Synthetic oligonucleotide
gucccaccugcugugccuu

SEQ ID NO: 556291 - RNA, 19 nt, Artificial Sequence
  Description of Artificial Sequence: Synthetic oligonucleotide
ccuguuaaccuuggaccau

SEQ ID NO: 556292 - RNA, 19 nt, Artificial Sequence
  Description of Artificial Sequence: Synthetic oligonucleotide
gggccucaugauagugacu

SEQ ID NO: 556293 - RNA, 19 nt, Artificial Sequence
  Description of Artificial Sequence: Synthetic oligonucleotide
gcagaacauccaggcugau

SEQ ID NO: 556294 - RNA, 19 nt, Artificial Sequence
  Description of Artificial Sequence: Synthetic oligonucleotide
ucaagauaaaauaacaaag

SEQ ID NO: 556295 - RNA, 19 nt, Artificial Sequence
  Description of Artificial Sequence: Synthetic oligonucleotide
aauacuuuaggccuaaucu

SEQ ID NO: 556296 - RNA, 19 nt, Artificial Sequence
  Description of Artificial Sequence: Synthetic oligonucleotide
ugcacuuguauaaagauag

SEQ ID NO: 556297 - RNA, 19 nt, Artificial Sequence
  Description of Artificial Sequence: Synthetic oligonucleotide
uuaaaguaaauacuugaag

SEQ ID NO: 556298 - RNA, 19 nt, Artificial Sequence
  Description of Artificial Sequence: Synthetic oligonucleotide
uguuaaagaagucaggcca

SEQ ID NO: 556299 - RNA, 19 nt, Artificial Sequence
  Description of Artificial Sequence: Synthetic oligonucleotide
uaacuuagcagauuuaaag

SEQ ID NO: 556300 - RNA, 19 nt, Artificial Sequence
  Description of Artificial Sequence: Synthetic oligonucleotide
uugucagauaaccacaagg

SEQ ID NO: 556301 - RNA, 19 nt, Artificial Sequence
  Description of Artificial Sequence: Synthetic oligonucleotide
acucauuaaaacuuaggac

SEQ ID NO: 556302 - RNA, 19 nt, Artificial Sequence
  Description of Artificial Sequence: Synthetic oligonucleotide
uuuuguaugaaauaccuau

SEQ ID NO: 556303 - RNA, 19 nt, Artificial Sequence
  Description of Artificial Sequence: Synthetic oligonucleotide
uuaaaauuacaccaucuga

SEQ ID NO: 556304 - RNA, 19 nt, Artificial Sequence
  Description of Artificial Sequence: Synthetic oligonucleotide
uauaaagauagcaacauuu

SEQ ID NO: 556305 - RNA, 19 nt, Artificial Sequence
  Description of Artificial Sequence: Synthetic oligonucleotide
acaacugagauugaggagc

SEQ ID NO: 556306 - RNA, 19 nt, Artificial Sequence
  Description of Artificial Sequence: Synthetic oligonucleotide
ucuacaauacauaaguuau

SEQ ID NO: 556307 - RNA, 19 nt, Artificial Sequence
  Description of Artificial Sequence: Synthetic oligonucleotide
uuugaauccaguccuuugg

SEQ ID NO: 556308 - RNA, 19 nt, Artificial Sequence
  Description of Artificial Sequence: Synthetic oligonucleotide
aaauugaccacgcucauau

SEQ ID NO: 556309 - RNA, 19 nt, Artificial Sequence
  Description of Artificial Sequence: Synthetic oligonucleotide
ugauccagcuucaagauug

SEQ ID NO: 556310 - RNA, 19 nt, Artificial Sequence
  Description of Artificial Sequence: Synthetic oligonucleotide
ugucagauaaccacaaggc

SEQ ID NO: 556311 - RNA, 19 nt, Artificial Sequence
  Description of Artificial Sequence: Synthetic oligonucleotide
cuuguauaaagauagcaac

SEQ ID NO: 556312 - RNA, 19 nt, Artificial Sequence
  Description of Artificial Sequence: Synthetic oligonucleotide
aauuacaccaucugagcug

SEQ ID NO: 556313 - RNA, 19 nt, Artificial Sequence
  Description of Artificial Sequence: Synthetic oligonucleotide
cauauucccaucucgaugc

SEQ ID NO: 556314 - RNA, 19 nt, Artificial Sequence
  Description of Artificial Sequence: Synthetic oligonucleotide
uuagguucaaaacugucga

SEQ ID NO: 556315 - RNA, 19 nt, Artificial Sequence
  Description of Artificial Sequence: Synthetic oligonucleotide
uacccuaagugacugaggg

SEQ ID NO: 556316 - RNA, 19 nt, Artificial Sequence
  Description of Artificial Sequence: Synthetic oligonucleotide
auuaaaacuuaggacaagg

SEQ ID NO: 556317 - RNA, 19 nt, Artificial Sequence
  Description of Artificial Sequence: Synthetic oligonucleotide
ucuucaauaagaguuauuc

SEQ ID NO: 556318 - RNA, 19 nt, Artificial Sequence
  Description of Artificial Sequence: Synthetic oligonucleotide
auugaccacgcucauauuc

SEQ ID NO: 556319 - RNA, 19 nt, Artificial Sequence
  Description of Artificial Sequence: Synthetic oligonucleotide
ucgagcacucaacagaggg

SEQ ID NO: 556320 - RNA, 19 nt, Artificial Sequence
  Description of Artificial Sequence: Synthetic oligonucleotide
aaguuauugauccauugaa

SEQ ID NO: 556321 - RNA, 19 nt, Artificial Sequence
  Description of Artificial Sequence: Synthetic oligonucleotide
uucaauaagaguuauucuu

SEQ ID NO: 556322 - RNA, 19 nt, Artificial Sequence
  Description of Artificial Sequence: Synthetic oligonucleotide
aaccacaaggccuuuaacu

SEQ ID NO: 556323 - RNA, 19 nt, Artificial Sequence
  Description of Artificial Sequence: Synthetic oligonucleotide
aaguaaauacuugaagcag

SEQ ID NO: 556324 - RNA, 19 nt, Artificial Sequence
  Description of Artificial Sequence: Synthetic oligonucleotide
aaccggauugcacuaacuc

SEQ ID NO: 556325 - RNA, 19 nt, Artificial Sequence
  Description of Artificial Sequence: Synthetic oligonucleotide
uacaguaaggcacggagug

SEQ ID NO: 556326 - RNA, 19 nt, Artificial Sequence
  Description of Artificial Sequence: Synthetic oligonucleotide
ucaauaagaguuauucuuc

SEQ ID NO: 556327 - RNA, 19 nt, Artificial Sequence
  Description of Artificial Sequence: Synthetic oligonucleotide
ucuaagcccaacauaagac

SEQ ID NO: 556328 - RNA, 19 nt, Artificial Sequence
  Description of Artificial Sequence: Synthetic oligonucleotide
agaugacgcaaccuguucc

SEQ ID NO: 556329 - RNA, 19 nt, Artificial Sequence
  Description of Artificial Sequence: Synthetic oligonucleotide
uguuguuccguacacagaa

SEQ ID NO: 556330 - RNA, 19 nt, Artificial Sequence
  Description of Artificial Sequence: Synthetic oligonucleotide
aguaguguauucuacacau

SEQ ID NO: 556331 - RNA, 19 nt, Artificial Sequence
  Description of Artificial Sequence: Synthetic oligonucleotide
aaaauauguaccgucuuca

SEQ ID NO: 556332 - RNA, 19 nt, Artificial Sequence
  Description of Artificial Sequence: Synthetic oligonucleotide
aaaaccggauugcacuaac

SEQ ID NO: 556333 - RNA, 19 nt, Artificial Sequence
  Description of Artificial Sequence: Synthetic oligonucleotide
uucuauuaggguauauucu

SEQ ID NO: 556334 - RNA, 19 nt, Artificial Sequence
  Description of Artificial Sequence: Synthetic oligonucleotide
guacacagaacacagugag

SEQ ID NO: 556335 - RNA, 19 nt, Artificial Sequence
  Description of Artificial Sequence: Synthetic oligonucleotide
ugcgagagcagcauccugg

SEQ ID NO: 556336 - RNA, 19 nt, Artificial Sequence
  Description of Artificial Sequence: Synthetic oligonucleotide
uucugcacaaauacgaaaa

SEQ ID NO: 556337 - RNA, 19 nt, Artificial Sequence
  Description of Artificial Sequence: Synthetic oligonucleotide
ucauauucccaucucgaug

SEQ ID NO: 556338 - RNA, 19 nt, Artificial Sequence
  Description of Artificial Sequence: Synthetic oligonucleotide
agguauucgagucagucug

SEQ ID NO: 556339 - RNA, 19 nt, Artificial Sequence
  Description of Artificial Sequence: Synthetic oligonucleotide
auuacaccaucugagcugc

SEQ ID NO: 556340 - RNA, 19 nt, Artificial Sequence
  Description of Artificial Sequence: Synthetic oligonucleotide
ucuauuaggguauauucua

SEQ ID NO: 556341 - RNA, 19 nt, Artificial Sequence
  Description of Artificial Sequence: Synthetic oligonucleotide
aacaacugagauugaggag

SEQ ID NO: 556342 - RNA, 19 nt, Artificial Sequence
  Description of Artificial Sequence: Synthetic oligonucleotide
ugauccauugaauuucuga

SEQ ID NO: 556343 - RNA, 19 nt, Artificial Sequence
  Description of Artificial Sequence: Synthetic oligonucleotide
augacuaagucuguuaaag

SEQ ID NO: 556344 - RNA, 19 nt, Artificial Sequence
  Description of Artificial Sequence: Synthetic oligonucleotide
aguuauucuucuacaauac

SEQ ID NO: 556345 - RNA, 19 nt, Artificial Sequence
  Description of Artificial Sequence: Synthetic oligonucleotide
auucgagucagucuguugu

SEQ ID NO: 556346 - RNA, 19 nt, Artificial Sequence
  Description of Artificial Sequence: Synthetic oligonucleotide
caaugcuacacugaagugg

SEQ ID NO: 556347 - RNA, 19 nt, Artificial Sequence
  Description of Artificial Sequence: Synthetic oligonucleotide
uguauaaagauagcaacau

SEQ ID NO: 556348 - RNA, 19 nt, Artificial Sequence
  Description of Artificial Sequence: Synthetic oligonucleotide
aucuaagcagagcaggcuc

SEQ ID NO: 556349 - RNA, 19 nt, Artificial Sequence
  Description of Artificial Sequence: Synthetic oligonucleotide
uugaccacgcucauauucc

SEQ ID NO: 556350 - RNA, 19 nt, Artificial Sequence
  Description of Artificial Sequence: Synthetic oligonucleotide
gaaagcauaggaaaugaca

SEQ ID NO: 556351 - RNA, 19 nt, Artificial Sequence
  Description of Artificial Sequence: Synthetic oligonucleotide
agucuaauccuccggcucg

SEQ ID NO: 556352 - RNA, 19 nt, Artificial Sequence
  Description of Artificial Sequence: Synthetic oligonucleotide
ugacauaucagcagucuaa

SEQ ID NO: 556353 - RNA, 19 nt, Artificial Sequence
  Description of Artificial Sequence: Synthetic oligonucleotide
uauugauccauugaauuuc

SEQ ID NO: 556354 - RNA, 19 nt, Artificial Sequence
  Description of Artificial Sequence: Synthetic oligonucleotide
aagaguuauucuucuacaa

SEQ ID NO: 556355 - RNA, 19 nt, Artificial Sequence
  Description of Artificial Sequence: Synthetic oligonucleotide
gacuaagucuguuaaagaa

SEQ ID NO: 556356 - RNA, 19 nt, Artificial Sequence
  Description of Artificial Sequence: Synthetic oligonucleotide
cugcuguacaucauuauac

SEQ ID NO: 556357 - RNA, 19 nt, Artificial Sequence
  Description of Artificial Sequence: Synthetic oligonucleotide
guguauucuacacauuaug

SEQ ID NO: 556358 - RNA, 19 nt, Artificial Sequence
  Description of Artificial Sequence: Synthetic oligonucleotide
cuuagguagagucaggaga

SEQ ID NO: 556359 - RNA, 19 nt, Artificial Sequence
  Description of Artificial Sequence: Synthetic oligonucleotide
ugcuuuaaauugaccacgc

SEQ ID NO: 556360 - RNA, 19 nt, Artificial Sequence
  Description of Artificial Sequence: Synthetic oligonucleotide
agauugaggagcaaucagg

SEQ ID NO: 556361 - RNA, 19 nt, Artificial Sequence
  Description of Artificial Sequence: Synthetic oligonucleotide
ucaaggaugccacuguuua

SEQ ID NO: 556362 - RNA, 19 nt, Artificial Sequence
  Description of Artificial Sequence: Synthetic oligonucleotide
uuauugauccauugaauuu

SEQ ID NO: 556363 - RNA, 19 nt, Artificial Sequence
  Description of Artificial Sequence: Synthetic oligonucleotide
aaugacauaucagcagucu

SEQ ID NO: 556364 - RNA, 19 nt, Artificial Sequence
  Description of Artificial Sequence: Synthetic oligonucleotide
uggcacaugccuuuggagc

SEQ ID NO: 556365 - RNA, 19 nt, Artificial Sequence
  Description of Artificial Sequence: Synthetic oligonucleotide
uaaagcuuccucucaucag

SEQ ID NO: 556366 - RNA, 19 nt, Artificial Sequence
  Description of Artificial Sequence: Synthetic oligonucleotide
acuaacucuguguacugug

SEQ ID NO: 556367 - RNA, 19 nt, Artificial Sequence
  Description of Artificial Sequence: Synthetic oligonucleotide
aaaugacauaucagcaguc

SEQ ID NO: 556368 - RNA, 19 nt, Artificial Sequence
  Description of Artificial Sequence: Synthetic oligonucleotide
ugugcggucauuccaggca

SEQ ID NO: 556369 - RNA, 19 nt, Artificial Sequence
  Description of Artificial Sequence: Synthetic oligonucleotide
gaugacgcaaccuguuccc

SEQ ID NO: 556370 - RNA, 19 nt, Artificial Sequence
  Description of Artificial Sequence: Synthetic oligonucleotide
ucugaagguauucgaguca

SEQ ID NO: 556371 - RNA, 19 nt, Artificial Sequence
  Description of Artificial Sequence: Synthetic oligonucleotide
uacacagaacacagugagg

SEQ ID NO: 556372 - RNA, 19 nt, Artificial Sequence
  Description of Artificial Sequence: Synthetic oligonucleotide
uguguugacaguaguguau

SEQ ID NO: 556373 - RNA, 19 nt, Artificial Sequence
  Description of Artificial Sequence: Synthetic oligonucleotide
uuuguaugaaauaccuaua

SEQ ID NO: 556374 - RNA, 19 nt, Artificial Sequence
  Description of Artificial Sequence: Synthetic oligonucleotide
aaggaugccacuguuuaca

SEQ ID NO: 556375 - RNA, 19 nt, Artificial Sequence
  Description of Artificial Sequence: Synthetic oligonucleotide
ugcguaaggcacuuugugc

SEQ ID NO: 556376 - RNA, 19 nt, Artificial Sequence
  Description of Artificial Sequence: Synthetic oligonucleotide
gaauacuuuaggccuaauc

SEQ ID NO: 556377 - RNA, 19 nt, Artificial Sequence
  Description of Artificial Sequence: Synthetic oligonucleotide
aaugacuaagucuguuaaa

SEQ ID NO: 556378 - RNA, 19 nt, Artificial Sequence
  Description of Artificial Sequence: Synthetic oligonucleotide
ugcuguacaucauuauaca

SEQ ID NO: 556379 - RNA, 19 nt, Artificial Sequence
  Description of Artificial Sequence: Synthetic oligonucleotide
uggcagauagguucggaag

SEQ ID NO: 556380 - RNA, 19 nt, Artificial Sequence
  Description of Artificial Sequence: Synthetic oligonucleotide
aacugucgagcacucaaca

SEQ ID NO: 556381 - RNA, 19 nt, Artificial Sequence
  Description of Artificial Sequence: Synthetic oligonucleotide
ucugcuguacaucauuaua

SEQ ID NO: 556382 - RNA, 19 nt, Artificial Sequence
  Description of Artificial Sequence: Synthetic oligonucleotide
gucagauaaccacaaggcc

SEQ ID NO: 556383 - RNA, 19 nt, Artificial Sequence
  Description of Artificial Sequence: Synthetic oligonucleotide
acuuaggacaagggaaagc

SEQ ID NO: 556384 - RNA, 19 nt, Artificial Sequence
  Description of Artificial Sequence: Synthetic oligonucleotide
auugcacuaacucugugua

SEQ ID NO: 556385 - RNA, 19 nt, Artificial Sequence
  Description of Artificial Sequence: Synthetic oligonucleotide
uuaggguauauucuauuuu

SEQ ID NO: 556386 - RNA, 19 nt, Artificial Sequence
  Description of Artificial Sequence: Synthetic oligonucleotide
acgguuuucuguaagaacu

SEQ ID NO: 556387 - RNA, 19 nt, Artificial Sequence
  Description of Artificial Sequence: Synthetic oligonucleotide
acaucuaggacaugaaguu

SEQ ID NO: 556388 - RNA, 19 nt, Artificial Sequence
  Description of Artificial Sequence: Synthetic oligonucleotide
aaauauguaccgucuucaa

SEQ ID NO: 556389 - RNA, 19 nt, Artificial Sequence
  Description of Artificial Sequence: Synthetic oligonucleotide
auucccuauuuccugaggu

SEQ ID NO: 556390 - RNA, 19 nt, Artificial Sequence
  Description of Artificial Sequence: Synthetic oligonucleotide
ucaggaagucucuccaacc

SEQ ID NO: 556391 - RNA, 19 nt, Artificial Sequence
  Description of Artificial Sequence: Synthetic oligonucleotide
ugcacuaacucuguguacu

SEQ ID NO: 556392 - RNA, 19 nt, Artificial Sequence
  Description of Artificial Sequence: Synthetic oligonucleotide
uuccguaaauucuccacug

SEQ ID NO: 556393 - RNA, 19 nt, Artificial Sequence
  Description of Artificial Sequence: Synthetic oligonucleotide
caugucguuccguaaauuc

SEQ ID NO: 556394 - RNA, 19 nt, Artificial Sequence
  Description of Artificial Sequence: Synthetic oligonucleotide
aguggcucgccucugaagu

SEQ ID NO: 556395 - RNA, 19 nt, Artificial Sequence
  Description of Artificial Sequence: Synthetic oligonucleotide
ugagcacgaggacugcagg

SEQ ID NO: 556396 - RNA, 19 nt, Artificial Sequence
  Description of Artificial Sequence: Synthetic oligonucleotide
uguacugugcggucauucc

SEQ ID NO: 556397 - RNA, 19 nt, Artificial Sequence
  Description of Artificial Sequence: Synthetic oligonucleotide
uguucccugccacaucuag

SEQ ID NO: 556398 - RNA, 19 nt, Artificial Sequence
  Description of Artificial Sequence: Synthetic oligonucleotide
gacaggauacaguaaggca

SEQ ID NO: 556399 - RNA, 19 nt, Artificial Sequence
  Description of Artificial Sequence: Synthetic oligonucleotide
aaaacgaaggucagaugug

SEQ ID NO: 556400 - RNA, 19 nt, Artificial Sequence
  Description of Artificial Sequence: Synthetic oligonucleotide
acaauacauaaguuauuga

SEQ ID NO: 556401 - RNA, 19 nt, Artificial Sequence
  Description of Artificial Sequence: Synthetic oligonucleotide
ugagguugcagcacccgcc

SEQ ID NO: 556402 - RNA, 19 nt, Artificial Sequence
  Description of Artificial Sequence: Synthetic oligonucleotide
agaguuauucuucuacaau

SEQ ID NO: 556403 - RNA, 19 nt, Artificial Sequence
  Description of Artificial Sequence: Synthetic oligonucleotide
aaacugucgagcacucaac

SEQ ID NO: 556404 - RNA, 19 nt, Artificial Sequence
  Description of Artificial Sequence: Synthetic oligonucleotide
ucuccaaccuguuuucaga

SEQ ID NO: 556405 - RNA, 19 nt, Artificial Sequence
  Description of Artificial Sequence: Synthetic oligonucleotide
auaggaaaugacauaucag

SEQ ID NO: 556406 - RNA, 19 nt, Artificial Sequence
  Description of Artificial Sequence: Synthetic oligonucleotide
ugucguuccguaaauucuc

SEQ ID NO: 556407 - RNA, 19 nt, Artificial Sequence
  Description of Artificial Sequence: Synthetic oligonucleotide
aguaaauacuugaagcagu

SEQ ID NO: 556408 - RNA, 19 nt, Artificial Sequence
  Description of Artificial Sequence: Synthetic oligonucleotide
uguggucagugucagucug

SEQ ID NO: 556409 - RNA, 19 nt, Artificial Sequence
  Description of Artificial Sequence: Synthetic oligonucleotide
guaaauacuugaagcagug

SEQ ID NO: 556410 - RNA, 19 nt, Artificial Sequence
  Description of Artificial Sequence: Synthetic oligonucleotide
ugagauugaggagcaauca

SEQ ID NO: 556411 - RNA, 19 nt, Artificial Sequence
  Description of Artificial Sequence: Synthetic oligonucleotide
uuucugcacaaauacgaaa

SEQ ID NO: 556412 - RNA, 19 nt, Artificial Sequence
  Description of Artificial Sequence: Synthetic oligonucleotide
gcguaaggcacuuugugcg

SEQ ID NO: 556413 - RNA, 19 nt, Artificial Sequence
  Description of Artificial Sequence: Synthetic oligonucleotide
acugauuucuucaggaagu

SEQ ID NO: 556414 - RNA, 19 nt, Artificial Sequence
  Description of Artificial Sequence: Synthetic oligonucleotide
acuuguauaaagauagcaa

SEQ ID NO: 556415 - RNA, 19 nt, Artificial Sequence
  Description of Artificial Sequence: Synthetic oligonucleotide
cauacauaaagcuuccucu

SEQ ID NO: 556416 - RNA, 19 nt, Artificial Sequence
  Description of Artificial Sequence: Synthetic oligonucleotide
ucacucaccaggcuuucca

SEQ ID NO: 556417 - RNA, 19 nt, Artificial Sequence
  Description of Artificial Sequence: Synthetic oligonucleotide
uugacaguaguguauucua

SEQ ID NO: 556418 - RNA, 19 nt, Artificial Sequence
  Description of Artificial Sequence: Synthetic oligonucleotide
ugacaguaguguauucuac

SEQ ID NO: 556419 - RNA, 19 nt, Artificial Sequence
  Description of Artificial Sequence: Synthetic oligonucleotide
gauugaggagcaaucagga

SEQ ID NO: 556420 - RNA, 19 nt, Artificial Sequence
  Description of Artificial Sequence: Synthetic oligonucleotide
ggcagauagguucggaagg

SEQ ID NO: 556421 - RNA, 19 nt, Artificial Sequence
  Description of Artificial Sequence: Synthetic oligonucleotide
acauaucagcagucuaauc

SEQ ID NO: 556422 - RNA, 19 nt, Artificial Sequence
  Description of Artificial Sequence: Synthetic oligonucleotide
caauacauaaguuauugau

SEQ ID NO: 556423 - RNA, 19 nt, Artificial Sequence
  Description of Artificial Sequence: Synthetic oligonucleotide
acugucgagcacucaacag

SEQ ID NO: 556424 - RNA, 19 nt, Artificial Sequence
  Description of Artificial Sequence: Synthetic oligonucleotide
auuuccauccaaccagaga

SEQ ID NO: 556425 - RNA, 19 nt, Artificial Sequence
  Description of Artificial Sequence: Synthetic oligonucleotide
uuaguuuuccaaugccauc

SEQ ID NO: 556426 - RNA, 19 nt, Artificial Sequence
  Description of Artificial Sequence: Synthetic oligonucleotide
cucugaagguauucgaguc

SEQ ID NO: 556427 - RNA, 19 nt, Artificial Sequence
  Description of Artificial Sequence: Synthetic oligonucleotide
ugguacauuacuugcuaaa

SEQ ID NO: 556428 - RNA, 19 nt, Artificial Sequence
  Description of Artificial Sequence: Synthetic oligonucleotide
ugacuggcaccccuuaacu

SEQ ID NO: 556429 - RNA, 19 nt, Artificial Sequence
  Description of Artificial Sequence: Synthetic oligonucleotide
cugagauugaggagcaauc

SEQ ID NO: 556430 - RNA, 19 nt, Artificial Sequence
  Description of Artificial Sequence: Synthetic oligonucleotide
gagguugcagcacccgccg

SEQ ID NO: 556431 - RNA, 19 nt, Artificial Sequence
  Description of Artificial Sequence: Synthetic oligonucleotide
uauuaggguauauucuauu

SEQ ID NO: 556432 - RNA, 19 nt, Artificial Sequence
  Description of Artificial Sequence: Synthetic oligonucleotide
auaaccacaaggccuuuaa

SEQ ID NO: 556433 - RNA, 19 nt, Artificial Sequence
  Description of Artificial Sequence: Synthetic oligonucleotide
aggggugugguugaccucg

SEQ ID NO: 556434 - RNA, 19 nt, Artificial Sequence
  Description of Artificial Sequence: Synthetic oligonucleotide
uggacgcaagcacaggaac

SEQ ID NO: 556435 - RNA, 19 nt, Artificial Sequence
  Description of Artificial Sequence: Synthetic oligonucleotide
acauaaguuauugauccau

SEQ ID NO: 556436 - RNA, 19 nt, Artificial Sequence
  Description of Artificial Sequence: Synthetic oligonucleotide
aagcauaggaaaugacaua

SEQ ID NO: 556437 - RNA, 19 nt, Artificial Sequence
  Description of Artificial Sequence: Synthetic oligonucleotide
uuaaauugaccacgcucau

SEQ ID NO: 556438 - RNA, 19 nt, Artificial Sequence
  Description of Artificial Sequence: Synthetic oligonucleotide
ucgggaauuguuuccagua

SEQ ID NO: 556439 - RNA, 19 nt, Artificial Sequence
  Description of Artificial Sequence: Synthetic oligonucleotide
uccccaauugcuucaggca

SEQ ID NO: 556440 - RNA, 19 nt, Artificial Sequence
  Description of Artificial Sequence: Synthetic oligonucleotide
gacgcaaccuguucccugc

SEQ ID NO: 556441 - RNA, 19 nt, Artificial Sequence
  Description of Artificial Sequence: Synthetic oligonucleotide
agcuucaagauugacaguu

SEQ ID NO: 556442 - RNA, 19 nt, Artificial Sequence
  Description of Artificial Sequence: Synthetic oligonucleotide
uuugacaggacaggauaca

SEQ ID NO: 556443 - RNA, 19 nt, Artificial Sequence
  Description of Artificial Sequence: Synthetic oligonucleotide
cuuaacuuagcagauuuaa

SEQ ID NO: 556444 - RNA, 19 nt, Artificial Sequence
  Description of Artificial Sequence: Synthetic oligonucleotide
uccguaaauucuccacuga

SEQ ID NO: 556445 - RNA, 19 nt, Artificial Sequence
  Description of Artificial Sequence: Synthetic oligonucleotide
uguggaguggcucgccucu

SEQ ID NO: 556446 - RNA, 19 nt, Artificial Sequence
  Description of Artificial Sequence: Synthetic oligonucleotide
ugagguaauucaagacagu

SEQ ID NO: 556447 - RNA, 19 nt, Artificial Sequence
  Description of Artificial Sequence: Synthetic oligonucleotide
guuauugauccauugaauu

SEQ ID NO: 556448 - RNA, 19 nt, Artificial Sequence
  Description of Artificial Sequence: Synthetic oligonucleotide
gggaauuguuuccaguaag

SEQ ID NO: 556449 - RNA, 19 nt, Artificial Sequence
  Description of Artificial Sequence: Synthetic oligonucleotide
aacaucucuacagcaggga

SEQ ID NO: 556450 - RNA, 19 nt, Artificial Sequence
  Description of Artificial Sequence: Synthetic oligonucleotide
aucucuacagcagggaaga

SEQ ID NO: 556451 - RNA, 19 nt, Artificial Sequence
  Description of Artificial Sequence: Synthetic oligonucleotide
gauugcacuaacucugugu

SEQ ID NO: 556452 - RNA, 19 nt, Artificial Sequence
  Description of Artificial Sequence: Synthetic oligonucleotide
uauucgagucagucuguug

SEQ ID NO: 556453 - RNA, 19 nt, Artificial Sequence
  Description of Artificial Sequence: Synthetic oligonucleotide
uauguaccgucuucaagau

SEQ ID NO: 556454 - RNA, 19 nt, Artificial Sequence
  Description of Artificial Sequence: Synthetic oligonucleotide
auuucuauuaggguauauu

SEQ ID NO: 556455 - RNA, 19 nt, Artificial Sequence
  Description of Artificial Sequence: Synthetic oligonucleotide
gacacaguagguagaacuc

SEQ ID NO: 556456 - RNA, 19 nt, Artificial Sequence
  Description of Artificial Sequence: Synthetic oligonucleotide
agguaauucaagacaguug

SEQ ID NO: 556457 - RNA, 19 nt, Artificial Sequence
  Description of Artificial Sequence: Synthetic oligonucleotide
aguguucucguuucguuuu

SEQ ID NO: 556458 - RNA, 19 nt, Artificial Sequence
  Description of Artificial Sequence: Synthetic oligonucleotide
ucaagacaguugauuucca

SEQ ID NO: 556459 - RNA, 19 nt, Artificial Sequence
  Description of Artificial Sequence: Synthetic oligonucleotide
uucaugucguuccguaaau

SEQ ID NO: 556460 - RNA, 19 nt, Artificial Sequence
  Description of Artificial Sequence: Synthetic oligonucleotide
auaccuauacaaaauuuua

SEQ ID NO: 556461 - RNA, 19 nt, Artificial Sequence
  Description of Artificial Sequence: Synthetic oligonucleotide
cacaucuaggacaugaagu

SEQ ID NO: 556462 - RNA, 19 nt, Artificial Sequence
  Description of Artificial Sequence: Synthetic oligonucleotide
auagguucggaaggcaucu

SEQ ID NO: 556463 - RNA, 19 nt, Artificial Sequence
  Description of Artificial Sequence: Synthetic oligonucleotide
uaaccacaaggccuuuaac

SEQ ID NO: 556464 - RNA, 19 nt, Artificial Sequence
  Description of Artificial Sequence: Synthetic oligonucleotide
cucggauggacgcaagcac

SEQ ID NO: 556465 - RNA, 19 nt, Artificial Sequence
  Description of Artificial Sequence: Synthetic oligonucleotide
agguagaacucagaggcca

SEQ ID NO: 556466 - RNA, 19 nt, Artificial Sequence
  Description of Artificial Sequence: Synthetic oligonucleotide
ugaaguguucucguuucgu

SEQ ID NO: 556467 - RNA, 19 nt, Artificial Sequence
  Description of Artificial Sequence: Synthetic oligonucleotide
cacuuguauaaagauagca

SEQ ID NO: 556468 - RNA, 19 nt, Artificial Sequence
  Description of Artificial Sequence: Synthetic oligonucleotide
ccauugguacauuacuugc

SEQ ID NO: 556469 - RNA, 19 nt, Artificial Sequence
  Description of Artificial Sequence: Synthetic oligonucleotide
ucuguguacugugcgguca

SEQ ID NO: 556470 - RNA, 19 nt, Artificial Sequence
  Description of Artificial Sequence: Synthetic oligonucleotide
acaucucuacagcagggaa

SEQ ID NO: 556471 - RNA, 19 nt, Artificial Sequence
  Description of Artificial Sequence: Synthetic oligonucleotide
gagacgguuuucuguaaga

SEQ ID NO: 556472 - RNA, 19 nt, Artificial Sequence
  Description of Artificial Sequence: Synthetic oligonucleotide
cacaaggccuuuaacuuca

SEQ ID NO: 556473 - RNA, 19 nt, Artificial Sequence
  Description of Artificial Sequence: Synthetic oligonucleotide
aauucaaagugcacuugua

SEQ ID NO: 556474 - RNA, 19 nt, Artificial Sequence
  Description of Artificial Sequence: Synthetic oligonucleotide
ggaugcguaaggcacuuug

SEQ ID NO: 556475 - RNA, 19 nt, Artificial Sequence
  Description of Artificial Sequence: Synthetic oligonucleotide
ucuacacauuaugaacaac

SEQ ID NO: 556476 - RNA, 19 nt, Artificial Sequence
  Description of Artificial Sequence: Synthetic oligonucleotide
cugucgagcacucaacaga

SEQ ID NO: 556477 - RNA, 19 nt, Artificial Sequence
  Description of Artificial Sequence: Synthetic oligonucleotide
uugauccauugaauuucug

SEQ ID NO: 556478 - RNA, 19 nt, Artificial Sequence
  Description of Artificial Sequence: Synthetic oligonucleotide
ugacugagggaugcguaag

SEQ ID NO: 556479 - RNA, 19 nt, Artificial Sequence
  Description of Artificial Sequence: Synthetic oligonucleotide
aucgggaauuguuuccagu

SEQ ID NO: 556480 - RNA, 19 nt, Artificial Sequence
  Description of Artificial Sequence: Synthetic oligonucleotide
aggcacuuugugcgagagc

SEQ ID NO: 556481 - RNA, 19 nt, Artificial Sequence
  Description of Artificial Sequence: Synthetic oligonucleotide
agagucaggagacgguuuu

SEQ ID NO: 556482 - RNA, 19 nt, Artificial Sequence
  Description of Artificial Sequence: Synthetic oligonucleotide
aggacaggauacaguaagg

SEQ ID NO: 556483 - RNA, 19 nt, Artificial Sequence
  Description of Artificial Sequence: Synthetic oligonucleotide
ugugugagccuguucugau

SEQ ID NO: 556484 - RNA, 19 nt, Artificial Sequence
  Description of Artificial Sequence: Synthetic oligonucleotide
gguacccuaagugacugag

SEQ ID NO: 556485 - RNA, 19 nt, Artificial Sequence
  Description of Artificial Sequence: Synthetic oligonucleotide
gugacuggcaccccuuaac

SEQ ID NO: 556486 - RNA, 19 nt, Artificial Sequence
  Description of Artificial Sequence: Synthetic oligonucleotide
agugagguugcagcacccg

SEQ ID NO: 556487 - RNA, 19 nt, Artificial Sequence
  Description of Artificial Sequence: Synthetic oligonucleotide
auugaggagcaaucaggau

SEQ ID NO: 556488 - RNA, 19 nt, Artificial Sequence
  Description of Artificial Sequence: Synthetic oligonucleotide
auguguugacaguagugua

SEQ ID NO: 556489 - RNA, 19 nt, Artificial Sequence
  Description of Artificial Sequence: Synthetic oligonucleotide
uucuucaauaagaguuauu

SEQ ID NO: 556490 - RNA, 19 nt, Artificial Sequence
  Description of Artificial Sequence: Synthetic oligonucleotide
agguucggaaggcaucuga

SEQ ID NO: 556491 - RNA, 19 nt, Artificial Sequence
  Description of Artificial Sequence: Synthetic oligonucleotide
uccucggauggacgcaagc

SEQ ID NO: 556492 - RNA, 19 nt, Artificial Sequence
  Description of Artificial Sequence: Synthetic oligonucleotide
acacaguagguagaacuca

SEQ ID NO: 556493 - RNA, 19 nt, Artificial Sequence
  Description of Artificial Sequence: Synthetic oligonucleotide
agucugaugcugcacucau

SEQ ID NO: 556494 - RNA, 19 nt, Artificial Sequence
  Description of Artificial Sequence: Synthetic oligonucleotide
guuccguacacagaacaca

SEQ ID NO: 556495 - RNA, 19 nt, Artificial Sequence
  Description of Artificial Sequence: Synthetic oligonucleotide
uucccuauuuccugaggua

SEQ ID NO: 556496 - RNA, 19 nt, Artificial Sequence
  Description of Artificial Sequence: Synthetic oligonucleotide
gaguggcucgccucugaag

SEQ ID NO: 556497 - RNA, 19 nt, Artificial Sequence
  Description of Artificial Sequence: Synthetic oligonucleotide
uguugacaguaguguauuc

SEQ ID NO: 556498 - RNA, 19 nt, Artificial Sequence
  Description of Artificial Sequence: Synthetic oligonucleotide
uguucucguuucguuuucc

SEQ ID NO: 556499 - RNA, 19 nt, Artificial Sequence
  Description of Artificial Sequence: Synthetic oligonucleotide
caaggaugccacuguuuac

SEQ ID NO: 556500 - RNA, 19 nt, Artificial Sequence
  Description of Artificial Sequence: Synthetic oligonucleotide
ugccaucgggaauuguuuc

SEQ ID NO: 556501 - RNA, 19 nt, Artificial Sequence
  Description of Artificial Sequence: Synthetic oligonucleotide
uugcacuaacucuguguac

SEQ ID NO: 556502 - RNA, 19 nt, Artificial Sequence
  Description of Artificial Sequence: Synthetic oligonucleotide
caaccagagauccuucaga

SEQ ID NO: 556503 - RNA, 19 nt, Artificial Sequence
  Description of Artificial Sequence: Synthetic oligonucleotide
agacaucuaagcagagcag

SEQ ID NO: 556504 - RNA, 19 nt, Artificial Sequence
  Description of Artificial Sequence: Synthetic oligonucleotide
ccguacacagaacacagug

SEQ ID NO: 556505 - RNA, 19 nt, Artificial Sequence
  Description of Artificial Sequence: Synthetic oligonucleotide
gugagguugcagcacccgc

SEQ ID NO: 556506 - RNA, 19 nt, Artificial Sequence
  Description of Artificial Sequence: Synthetic oligonucleotide
cagucuaauccuccggcuc

SEQ ID NO: 556507 - RNA, 19 nt, Artificial Sequence
  Description of Artificial Sequence: Synthetic oligonucleotide
gccaaugcuacacugaagu

SEQ ID NO: 556508 - RNA, 19 nt, Artificial Sequence
  Description of Artificial Sequence: Synthetic oligonucleotide
ucguuccguaaauucucca

SEQ ID NO: 556509 - RNA, 19 nt, Artificial Sequence
  Description of Artificial Sequence: Synthetic oligonucleotide
cugaaguggucacucgguc

SEQ ID NO: 556510 - RNA, 19 nt, Artificial Sequence
  Description of Artificial Sequence: Synthetic oligonucleotide
aguguauucuacacauuau

SEQ ID NO: 556511 - RNA, 19 nt, Artificial Sequence
  Description of Artificial Sequence: Synthetic oligonucleotide
aaaccggauugcacuaacu

SEQ ID NO: 556512 - RNA, 19 nt, Artificial Sequence
  Description of Artificial Sequence: Synthetic oligonucleotide
guacugugcggucauucca

SEQ ID NO: 556513 - RNA, 19 nt, Artificial Sequence
  Description of Artificial Sequence: Synthetic oligonucleotide
guuccguaaauucuccacu

SEQ ID NO: 556514 - RNA, 19 nt, Artificial Sequence
  Description of Artificial Sequence: Synthetic oligonucleotide
agcccaacauaagacaaaa

SEQ ID NO: 556515 - RNA, 19 nt, Artificial Sequence
  Description of Artificial Sequence: Synthetic oligonucleotide
acugaaguggucacucggu

SEQ ID NO: 556516 - RNA, 19 nt, Artificial Sequence
  Description of Artificial Sequence: Synthetic oligonucleotide
aauugaccacgcucauauu

SEQ ID NO: 556517 - RNA, 19 nt, Artificial Sequence
  Description of Artificial Sequence: Synthetic oligonucleotide
uggucagugucagucugga

SEQ ID NO: 556518 - RNA, 19 nt, Artificial Sequence
  Description of Artificial Sequence: Synthetic oligonucleotide
guacccuaagugacugagg

SEQ ID NO: 556519 - RNA, 19 nt, Artificial Sequence
  Description of Artificial Sequence: Synthetic oligonucleotide
uaaauugaccacgcucaua

SEQ ID NO: 556520 - RNA, 19 nt, Artificial Sequence
  Description of Artificial Sequence: Synthetic oligonucleotide
ggaacgugaggagaggcug

SEQ ID NO: 556521 - RNA, 19 nt, Artificial Sequence
  Description of Artificial Sequence: Synthetic oligonucleotide
agucuggaacgugaggaga

SEQ ID NO: 556522 - RNA, 19 nt, Artificial Sequence
  Description of Artificial Sequence: Synthetic oligonucleotide
cacggaguggaugguacag

SEQ ID NO: 556523 - RNA, 19 nt, Artificial Sequence
  Description of Artificial Sequence: Synthetic oligonucleotide
uagagucaggagacgguuu

SEQ ID NO: 556524 - RNA, 19 nt, Artificial Sequence
  Description of Artificial Sequence: Synthetic oligonucleotide
aauccuccggcucgucuuu

SEQ ID NO: 556525 - RNA, 19 nt, Artificial Sequence
  Description of Artificial Sequence: Synthetic oligonucleotide
guugacaguaguguauucu

SEQ ID NO: 556526 - RNA, 19 nt, Artificial Sequence
  Description of Artificial Sequence: Synthetic oligonucleotide
gagcacgaggacugcagga

SEQ ID NO: 556527 - RNA, 19 nt, Artificial Sequence
  Description of Artificial Sequence: Synthetic oligonucleotide
cagaugacgcaaccuguuc

SEQ ID NO: 556528 - RNA, 19 nt, Artificial Sequence
  Description of Artificial Sequence: Synthetic oligonucleotide
caacugagauugaggagca

SEQ ID NO: 556529 - RNA, 19 nt, Artificial Sequence
  Description of Artificial Sequence: Synthetic oligonucleotide
cugguacccuaagugacug

SEQ ID NO: 556530 - RNA, 19 nt, Artificial Sequence
  Description of Artificial Sequence: Synthetic oligonucleotide
cucuuagguagagucagga

SEQ ID NO: 556531 - RNA, 19 nt, Artificial Sequence
  Description of Artificial Sequence: Synthetic oligonucleotide
cauugguacauuacuugcu

SEQ ID NO: 556532 - RNA, 19 nt, Artificial Sequence
  Description of Artificial Sequence: Synthetic oligonucleotide
acuaauucugugagguuuu

SEQ ID NO: 556533 - RNA, 19 nt, Artificial Sequence
  Description of Artificial Sequence: Synthetic oligonucleotide
uucgagucagucuguuguu

SEQ ID NO: 556534 - RNA, 19 nt, Artificial Sequence
  Description of Artificial Sequence: Synthetic oligonucleotide
cucuacagcagggaagaca

SEQ ID NO: 556535 - RNA, 19 nt, Artificial Sequence
  Description of Artificial Sequence: Synthetic oligonucleotide
aguagguccaugagaacuu

SEQ ID NO: 556536 - RNA, 19 nt, Artificial Sequence
  Description of Artificial Sequence: Synthetic oligonucleotide
gucguuccguaaauucucc

SEQ ID NO: 556537 - RNA, 19 nt, Artificial Sequence
  Description of Artificial Sequence: Synthetic oligonucleotide
guggucagugucagucugg

SEQ ID NO: 556538 - RNA, 19 nt, Artificial Sequence
  Description of Artificial Sequence: Synthetic oligonucleotide
agauagguucggaaggcau

SEQ ID NO: 556539 - RNA, 19 nt, Artificial Sequence
  Description of Artificial Sequence: Synthetic oligonucleotide
gguacauuacuugcuaaaa

SEQ ID NO: 556540 - RNA, 19 nt, Artificial Sequence
  Description of Artificial Sequence: Synthetic oligonucleotide
ucgagucagucuguuguuc

SEQ ID NO: 556541 - RNA, 19 nt, Artificial Sequence
  Description of Artificial Sequence: Synthetic oligonucleotide
uccauacauaaagcuuccu

SEQ ID NO: 556542 - RNA, 19 nt, Artificial Sequence
  Description of Artificial Sequence: Synthetic oligonucleotide
ccguaaauucuccacugac

SEQ ID NO: 556543 - RNA, 19 nt, Artificial Sequence
  Description of Artificial Sequence: Synthetic oligonucleotide
gugacugagggaugcguaa

SEQ ID NO: 556544 - RNA, 19 nt, Artificial Sequence
  Description of Artificial Sequence: Synthetic oligonucleotide
gccaucgggaauuguuucc

SEQ ID NO: 556545 - RNA, 19 nt, Artificial Sequence
  Description of Artificial Sequence: Synthetic oligonucleotide
agacacaaguuaaaaucuu

SEQ ID NO: 556546 - RNA, 19 nt, Artificial Sequence
  Description of Artificial Sequence: Synthetic oligonucleotide
gacaggcucucuuggcaga

SEQ ID NO: 556547 - RNA, 19 nt, Artificial Sequence
  Description of Artificial Sequence: Synthetic oligonucleotide
agugacuggcaccccuuaa

SEQ ID NO: 556548 - RNA, 19 nt, Artificial Sequence
  Description of Artificial Sequence: Synthetic oligonucleotide
gaaguguucucguuucguu

SEQ ID NO: 556549 - RNA, 19 nt, Artificial Sequence
  Description of Artificial Sequence: Synthetic oligonucleotide
caggagacgguuuucugua

SEQ ID NO: 556550 - RNA, 19 nt, Artificial Sequence
  Description of Artificial Sequence: Synthetic oligonucleotide
caguaaggcacggagugga

SEQ ID NO: 556551 - RNA, 19 nt, Artificial Sequence
  Description of Artificial Sequence: Synthetic oligonucleotide
gcgacaggggcagaugacg

SEQ ID NO: 556552 - RNA, 19 nt, Artificial Sequence
  Description of Artificial Sequence: Synthetic oligonucleotide
gcagauagguucggaaggc

SEQ ID NO: 556553 - RNA, 19 nt, Artificial Sequence
  Description of Artificial Sequence: Synthetic oligonucleotide
uauucccaucucgaugcuc

SEQ ID NO: 556554 - RNA, 19 nt, Artificial Sequence
  Description of Artificial Sequence: Synthetic oligonucleotide
cucuguguacugugcgguc

SEQ ID NO: 556555 - RNA, 19 nt, Artificial Sequence
  Description of Artificial Sequence: Synthetic oligonucleotide
gacauaucagcagucuaau

SEQ ID NO: 556556 - RNA, 19 nt, Artificial Sequence
  Description of Artificial Sequence: Synthetic oligonucleotide
cuauuaggguauauucuau

SEQ ID NO: 556557 - RNA, 19 nt, Artificial Sequence
  Description of Artificial Sequence: Synthetic oligonucleotide
ccaaccagagauccuucag

SEQ ID NO: 556558 - RNA, 19 nt, Artificial Sequence
  Description of Artificial Sequence: Synthetic oligonucleotide
ugguacccuaagugacuga

SEQ ID NO: 556559 - RNA, 19 nt, Artificial Sequence
  Description of Artificial Sequence: Synthetic oligonucleotide
acaguagguagaacucaga

SEQ ID NO: 556560 - RNA, 19 nt, Artificial Sequence
  Description of Artificial Sequence: Synthetic oligonucleotide
augcucuuagguagaguca

SEQ ID NO: 556561 - RNA, 19 nt, Artificial Sequence
  Description of Artificial Sequence: Synthetic oligonucleotide
acccgccgaucucuuuugg

SEQ ID NO: 556562 - RNA, 19 nt, Artificial Sequence
  Description of Artificial Sequence: Synthetic oligonucleotide
cagauaaccacaaggccuu

SEQ ID NO: 556563 - RNA, 19 nt, Artificial Sequence
  Description of Artificial Sequence: Synthetic oligonucleotide
cgcucauauucccaucucg

SEQ ID NO: 556564 - RNA, 19 nt, Artificial Sequence
  Description of Artificial Sequence: Synthetic oligonucleotide
guuguuccguacacagaac

SEQ ID NO: 556565 - RNA, 19 nt, Artificial Sequence
  Description of Artificial Sequence: Synthetic oligonucleotide
ucaugucguuccguaaauu

SEQ ID NO: 556566 - RNA, 19 nt, Artificial Sequence
  Description of Artificial Sequence: Synthetic oligonucleotide
aggcaacugugugagccug

SEQ ID NO: 556567 - RNA, 19 nt, Artificial Sequence
  Description of Artificial Sequence: Synthetic oligonucleotide
gcacuaacucuguguacug

SEQ ID NO: 556568 - RNA, 19 nt, Artificial Sequence
  Description of Artificial Sequence: Synthetic oligonucleotide
acgcaagcacaggaacauc

SEQ ID NO: 556569 - RNA, 19 nt, Artificial Sequence
  Description of Artificial Sequence: Synthetic oligonucleotide
gcucauauucccaucucga

SEQ ID NO: 556570 - RNA, 19 nt, Artificial Sequence
  Description of Artificial Sequence: Synthetic oligonucleotide
gucgagcacucaacagagg

SEQ ID NO: 556571 - RNA, 19 nt, Artificial Sequence
  Description of Artificial Sequence: Synthetic oligonucleotide
gacgcaagcacaggaacau

SEQ ID NO: 556572 - RNA, 19 nt, Artificial Sequence
  Description of Artificial Sequence: Synthetic oligonucleotide
ugcauucaaguugcucaau

SEQ ID NO: 556573 - RNA, 19 nt, Artificial Sequence
  Description of Artificial Sequence: Synthetic oligonucleotide
ccacaaggccuuuaacuuc

SEQ ID NO: 556574 - RNA, 19 nt, Artificial Sequence
  Description of Artificial Sequence: Synthetic oligonucleotide
aggagacgguuuucuguaa

SEQ ID NO: 556575 - RNA, 19 nt, Artificial Sequence
  Description of Artificial Sequence: Synthetic oligonucleotide
guguucucguuucguuuuc

SEQ ID NO: 556576 - RNA, 19 nt, Artificial Sequence
  Description of Artificial Sequence: Synthetic oligonucleotide
acgaauacuuuaggccuaa

SEQ ID NO: 556577 - RNA, 19 nt, Artificial Sequence
  Description of Artificial Sequence: Synthetic oligonucleotide
augccaucgggaauuguuu

SEQ ID NO: 556578 - RNA, 19 nt, Artificial Sequence
  Description of Artificial Sequence: Synthetic oligonucleotide
ugcggucauuccaggcauc

SEQ ID NO: 556579 - RNA, 19 nt, Artificial Sequence
  Description of Artificial Sequence: Synthetic oligonucleotide
cacccgccgaucucuuuug

SEQ ID NO: 556580 - RNA, 19 nt, Artificial Sequence
  Description of Artificial Sequence: Synthetic oligonucleotide
auguaccgucuucaagaua

SEQ ID NO: 556581 - RNA, 19 nt, Artificial Sequence
  Description of Artificial Sequence: Synthetic oligonucleotide
uagguucggaaggcaucug

SEQ ID NO: 556582 - RNA, 19 nt, Artificial Sequence
  Description of Artificial Sequence: Synthetic oligonucleotide
aacugagauugaggagcaa

SEQ ID NO: 556583 - RNA, 19 nt, Artificial Sequence
  Description of Artificial Sequence: Synthetic oligonucleotide
gagucaggagacgguuuuc

SEQ ID NO: 556584 - RNA, 19 nt, Artificial Sequence
  Description of Artificial Sequence: Synthetic oligonucleotide
augacgcaaccuguucccu

SEQ ID NO: 556585 - RNA, 19 nt, Artificial Sequence
  Description of Artificial Sequence: Synthetic oligonucleotide
gaccacgcucauauuccca

SEQ ID NO: 556586 - RNA, 19 nt, Artificial Sequence
  Description of Artificial Sequence: Synthetic oligonucleotide
gcugcacucauuaaaacuu

SEQ ID NO: 556587 - RNA, 19 nt, Artificial Sequence
  Description of Artificial Sequence: Synthetic oligonucleotide
ucucuacagcagggaagac

SEQ ID NO: 556588 - RNA, 19 nt, Artificial Sequence
  Description of Artificial Sequence: Synthetic oligonucleotide
gcacuuguauaaagauagc

SEQ ID NO: 556589 - RNA, 19 nt, Artificial Sequence
  Description of Artificial Sequence: Synthetic oligonucleotide
acauuucuauuaggguaua

SEQ ID NO: 556590 - RNA, 19 nt, Artificial Sequence
  Description of Artificial Sequence: Synthetic oligonucleotide
ggacgcaagcacaggaaca

SEQ ID NO: 556591 - RNA, 19 nt, Artificial Sequence
  Description of Artificial Sequence: Synthetic oligonucleotide
guugcagcacccgccgauc

SEQ ID NO: 556592 - RNA, 19 nt, Artificial Sequence
  Description of Artificial Sequence: Synthetic oligonucleotide
caucucgaugcucaaggau

SEQ ID NO: 556593 - RNA, 19 nt, Artificial Sequence
  Description of Artificial Sequence: Synthetic oligonucleotide
cagauagguucggaaggca

SEQ ID NO: 556594 - RNA, 19 nt, Artificial Sequence
  Description of Artificial Sequence: Synthetic oligonucleotide
gcucuuagguagagucagg

SEQ ID NO: 556595 - RNA, 19 nt, Artificial Sequence
  Description of Artificial Sequence: Synthetic oligonucleotide
caucuaagcagagcaggcu

SEQ ID NO: 556596 - RNA, 19 nt, Artificial Sequence
  Description of Artificial Sequence: Synthetic oligonucleotide
cacagcgagacaggcucuc

SEQ ID NO: 556597 - RNA, 19 nt, Artificial Sequence
  Description of Artificial Sequence: Synthetic oligonucleotide
acagcgagacaggcucucu

SEQ ID NO: 556598 - RNA, 19 nt, Artificial Sequence
  Description of Artificial Sequence: Synthetic oligonucleotide
ggcaucugaggaaguaaga

SEQ ID NO: 556599 - RNA, 19 nt, Artificial Sequence
  Description of Artificial Sequence: Synthetic oligonucleotide
cauccaaccagagauccuu

SEQ ID NO: 556600 - RNA, 19 nt, Artificial Sequence
  Description of Artificial Sequence: Synthetic oligonucleotide
caugagaacuuagguucaa

SEQ ID NO: 556601 - RNA, 19 nt, Artificial Sequence
  Description of Artificial Sequence: Synthetic oligonucleotide
cguacacagaacacaguga

SEQ ID NO: 556602 - RNA, 19 nt, Artificial Sequence
  Description of Artificial Sequence: Synthetic oligonucleotide
gcauaggaaaugacauauc

SEQ ID NO: 556603 - RNA, 19 nt, Artificial Sequence
  Description of Artificial Sequence: Synthetic oligonucleotide
guguggucagugucagucu

SEQ ID NO: 556604 - RNA, 19 nt, Artificial Sequence
  Description of Artificial Sequence: Synthetic oligonucleotide
guagguccaugagaacuua

SEQ ID NO: 556605 - RNA, 19 nt, Artificial Sequence
  Description of Artificial Sequence: Synthetic oligonucleotide
ccccaauugcuucaggcaa

SEQ ID NO: 556606 - RNA, 19 nt, Artificial Sequence
  Description of Artificial Sequence: Synthetic oligonucleotide
guguugacaguaguguauu

SEQ ID NO: 556607 - RNA, 19 nt, Artificial Sequence
  Description of Artificial Sequence: Synthetic oligonucleotide
ggugugguugaccucguuu

SEQ ID NO: 556608 - RNA, 19 nt, Artificial Sequence
  Description of Artificial Sequence: Synthetic oligonucleotide
uguguacugugcggucauu

SEQ ID NO: 556609 - RNA, 19 nt, Artificial Sequence
  Description of Artificial Sequence: Synthetic oligonucleotide
gcuuuaaauugaccacgcu

SEQ ID NO: 556610 - RNA, 19 nt, Artificial Sequence
  Description of Artificial Sequence: Synthetic oligonucleotide
ccgaucucuuuugguaaag

SEQ ID NO: 556611 - RNA, 19 nt, Artificial Sequence
  Description of Artificial Sequence: Synthetic oligonucleotide
cccuaagugacugagggau

SEQ ID NO: 556612 - RNA, 19 nt, Artificial Sequence
  Description of Artificial Sequence: Synthetic oligonucleotide
caggcaacugugugagccu

SEQ ID NO: 556613 - RNA, 19 nt, Artificial Sequence
  Description of Artificial Sequence: Synthetic oligonucleotide
gguagagucaggagacggu

SEQ ID NO: 556614 - RNA, 19 nt, Artificial Sequence
  Description of Artificial Sequence: Synthetic oligonucleotide
cguuucguuuuccucuuca

SEQ ID NO: 556615 - RNA, 19 nt, Artificial Sequence
  Description of Artificial Sequence: Synthetic oligonucleotide
ccaucucgaugcucaagga

SEQ ID NO: 556616 - RNA, 19 nt, Artificial Sequence
  Description of Artificial Sequence: Synthetic oligonucleotide
gcacggaguggaugguaca

SEQ ID NO: 556617 - RNA, 19 nt, Artificial Sequence
  Description of Artificial Sequence: Synthetic oligonucleotide
cacuaacucuguguacugu

SEQ ID NO: 556618 - RNA, 19 nt, Artificial Sequence
  Description of Artificial Sequence: Synthetic oligonucleotide
ccucggauggacgcaagca

SEQ ID NO: 556619 - RNA, 19 nt, Artificial Sequence
  Description of Artificial Sequence: Synthetic oligonucleotide
guauucgagucagucuguu

SEQ ID NO: 556620 - RNA, 19 nt, Artificial Sequence
  Description of Artificial Sequence: Synthetic oligonucleotide
gguguggaguggcucgccu

SEQ ID NO: 556621 - RNA, 19 nt, Artificial Sequence
  Description of Artificial Sequence: Synthetic oligonucleotide
gguauucgagucagucugu

SEQ ID NO: 556622 - RNA, 19 nt, Artificial Sequence
  Description of Artificial Sequence: Synthetic oligonucleotide
gucuaauccuccggcucgu

SEQ ID NO: 556623 - RNA, 19 nt, Artificial Sequence
  Description of Artificial Sequence: Synthetic oligonucleotide
ccugcucuaagcccaacau

SEQ ID NO: 556624 - RNA, 19 nt, Artificial Sequence
  Description of Artificial Sequence: Synthetic oligonucleotide
ggguguggaguggcucgcc

SEQ ID NO: 556625 - RNA, 19 nt, Artificial Sequence
  Description of Artificial Sequence: Synthetic oligonucleotide
cuguucccugccacaucua

SEQ ID NO: 556626 - RNA, 19 nt, Artificial Sequence
  Description of Artificial Sequence: Synthetic oligonucleotide
gucacucggucaggggugu

SEQ ID NO: 556627 - RNA, 19 nt, Artificial Sequence
  Description of Artificial Sequence: Synthetic oligonucleotide
ggcuccucggauggacgca

SEQ ID NO: 556628 - RNA, 19 nt, Artificial Sequence
  Description of Artificial Sequence: Synthetic oligonucleotide
gcuccucggauggacgcaa

SEQ ID NO: 556629 - RNA, 19 nt, Artificial Sequence
  Description of Artificial Sequence: Synthetic oligonucleotide
cgaucucuuuugguaaaga

SEQ ID NO: 556630 - RNA, 19 nt, Artificial Sequence
  Description of Artificial Sequence: Synthetic oligonucleotide
cucucaucaguagguccau

SEQ ID NO: 556631 - RNA, 19 nt, Artificial Sequence
  Description of Artificial Sequence: Synthetic oligonucleotide
gcuucaagauugacaguuu

SEQ ID NO: 556632 - RNA, 19 nt, Artificial Sequence
  Description of Artificial Sequence: Synthetic oligonucleotide
gcccacugguacccuaagu

SEQ ID NO: 556633 - RNA, 19 nt, Artificial Sequence
  Description of Artificial Sequence: Synthetic oligonucleotide
gcucgccucugaaguguuc

SEQ ID NO: 556634 - RNA, 19 nt, Artificial Sequence
  Description of Artificial Sequence: Synthetic oligonucleotide
ggcaacugugugagccugu

SEQ ID NO: 556635 - RNA, 19 nt, Artificial Sequence
  Description of Artificial Sequence: Synthetic oligonucleotide
cccgccgaucucuuuuggu

SEQ ID NO: 556636 - RNA, 19 nt, Artificial Sequence
  Description of Artificial Sequence: Synthetic oligonucleotide
ccacagcgagacaggcucu

SEQ ID NO: 556637 - RNA, 19 nt, Artificial Sequence
  Description of Artificial Sequence: Synthetic oligonucleotide
ccccuuaacuuagcagauu

SEQ ID NO: 556638 - RNA, 19 nt, Artificial Sequence
  Description of Artificial Sequence: Synthetic oligonucleotide
gggaugcguaaggcacuuu

SEQ ID NO: 556639 - RNA, 19 nt, Artificial Sequence
  Description of Artificial Sequence: Synthetic oligonucleotide
cgaauacuuuaggccuaau

SEQ ID NO: 556640 - RNA, 19 nt, Artificial Sequence
  Description of Artificial Sequence: Synthetic oligonucleotide
aauaugaccaguaagauag

SEQ ID NO: 556641 - RNA, 19 nt, Artificial Sequence
  Description of Artificial Sequence: Synthetic oligonucleotide
aauaacauuaauuuuccug

SEQ ID NO: 556642 - RNA, 19 nt, Artificial Sequence
  Description of Artificial Sequence: Synthetic oligonucleotide
aaagcaagaguauuaacgg

SEQ ID NO: 556643 - RNA, 19 nt, Artificial Sequence
  Description of Artificial Sequence: Synthetic oligonucleotide
agugcaaucacauugguag

SEQ ID NO: 556644 - RNA, 19 nt, Artificial Sequence
  Description of Artificial Sequence: Synthetic oligonucleotide
aauaugagcaaagggaggc

SEQ ID NO: 556645 - RNA, 19 nt, Artificial Sequence
  Description of Artificial Sequence: Synthetic oligonucleotide
gaaagcaagaguauuaacg

SEQ ID NO: 556646 - RNA, 19 nt, Artificial Sequence
  Description of Artificial Sequence: Synthetic oligonucleotide
aaacaauaugagcaaaggg

SEQ ID NO: 556647 - RNA, 19 nt, Artificial Sequence
  Description of Artificial Sequence: Synthetic oligonucleotide
ugaccaguaagauagagcc

SEQ ID NO: 556648 - RNA, 19 nt, Artificial Sequence
  Description of Artificial Sequence: Synthetic oligonucleotide
aauauuuagacagggcucg

SEQ ID NO: 556649 - RNA, 19 nt, Artificial Sequence
  Description of Artificial Sequence: Synthetic oligonucleotide
cuaaagguaacaaauggcc

SEQ ID NO: 556650 - RNA, 19 nt, Artificial Sequence
  Description of Artificial Sequence: Synthetic oligonucleotide
uuagggucaaaucaaaagc

SEQ ID NO: 556651 - RNA, 19 nt, Artificial Sequence
  Description of Artificial Sequence: Synthetic oligonucleotide
uuuuguuaaacaguggccg

SEQ ID NO: 556652 - RNA, 19 nt, Artificial Sequence
  Description of Artificial Sequence: Synthetic oligonucleotide
cuugauuagacauuugggc

SEQ ID NO: 556653 - RNA, 19 nt, Artificial Sequence
  Description of Artificial Sequence: Synthetic oligonucleotide
aacaauaugagcaaaggga

SEQ ID NO: 556654 - RNA, 19 nt, Artificial Sequence
  Description of Artificial Sequence: Synthetic oligonucleotide
caaacuacagacuugugag

SEQ ID NO: 556655 - RNA, 19 nt, Artificial Sequence
  Description of Artificial Sequence: Synthetic oligonucleotide
ucuaaagguaacaaauggc

SEQ ID NO: 556656 - RNA, 19 nt, Artificial Sequence
  Description of Artificial Sequence: Synthetic oligonucleotide
acuggguuaaaauugcccg

SEQ ID NO: 556657 - RNA, 19 nt, Artificial Sequence
  Description of Artificial Sequence: Synthetic oligonucleotide
agcaaaaugagcaagagca

SEQ ID NO: 556658 - RNA, 19 nt, Artificial Sequence
  Description of Artificial Sequence: Synthetic oligonucleotide
aaagguaacaaauggcccu

SEQ ID NO: 556659 - RNA, 19 nt, Artificial Sequence
  Description of Artificial Sequence: Synthetic oligonucleotide
aaaauugcccgcuaaugug

SEQ ID NO: 556660 - RNA, 19 nt, Artificial Sequence
  Description of Artificial Sequence: Synthetic oligonucleotide
uuuggagcggcacacaaag

SEQ ID NO: 556661 - RNA, 19 nt, Artificial Sequence
  Description of Artificial Sequence: Synthetic oligonucleotide
uguaucuaagcccuggccc

SEQ ID NO: 556662 - RNA, 19 nt, Artificial Sequence
  Description of Artificial Sequence: Synthetic oligonucleotide
aguaagauagagcccacac

SEQ ID NO: 556663 - RNA, 19 nt, Artificial Sequence
  Description of Artificial Sequence: Synthetic oligonucleotide
cuuagaauccugcagcugg

SEQ ID NO: 556664 - RNA, 19 nt, Artificial Sequence
  Description of Artificial Sequence: Synthetic oligonucleotide
uuucucauagguacguggg

SEQ ID NO: 556665 - RNA, 19 nt, Artificial Sequence
  Description of Artificial Sequence: Synthetic oligonucleotide
uuuucucauagguacgugg

SEQ ID NO: 556666 - RNA, 19 nt, Artificial Sequence
  Description of Artificial Sequence: Synthetic oligonucleotide
auaguaacaguucaguccu

SEQ ID NO: 556667 - RNA, 19 nt, Artificial Sequence
  Description of Artificial Sequence: Synthetic oligonucleotide
uaaaauugcccgcuaaugu

SEQ ID NO: 556668 - RNA, 19 nt, Artificial Sequence
  Description of Artificial Sequence: Synthetic oligonucleotide
ucggaaaacaccuuaggug

SEQ ID NO: 556669 - RNA, 19 nt, Artificial Sequence
  Description of Artificial Sequence: Synthetic oligonucleotide
agacuugugagaaaagugc

SEQ ID NO: 556670 - RNA, 19 nt, Artificial Sequence
  Description of Artificial Sequence: Synthetic oligonucleotide
aaauugcccgcuaaugugc

SEQ ID NO: 556671 - RNA, 19 nt, Artificial Sequence
  Description of Artificial Sequence: Synthetic oligonucleotide
uugauuagacauuugggcu

SEQ ID NO: 556672 - RNA, 19 nt, Artificial Sequence
  Description of Artificial Sequence: Synthetic oligonucleotide
uuaucauugucuccuacca

SEQ ID NO: 556673 - RNA, 19 nt, Artificial Sequence
  Description of Artificial Sequence: Synthetic oligonucleotide
uuuccuuuaggguaggacu

SEQ ID NO: 556674 - RNA, 19 nt, Artificial Sequence
  Description of Artificial Sequence: Synthetic oligonucleotide
aauuacuuccauugaagau

SEQ ID NO: 556675 - RNA, 19 nt, Artificial Sequence
  Description of Artificial Sequence: Synthetic oligonucleotide
cacuauuacaggaagauca

SEQ ID NO: 556676 - RNA, 19 nt, Artificial Sequence
  Description of Artificial Sequence: Synthetic oligonucleotide
ugucacggaaaacacagca

SEQ ID NO: 556677 - RNA, 19 nt, Artificial Sequence
  Description of Artificial Sequence: Synthetic oligonucleotide
uuaaacaguggccguagcc

SEQ ID NO: 556678 - RNA, 19 nt, Artificial Sequence
  Description of Artificial Sequence: Synthetic oligonucleotide
aaggggaacaucgugucac

SEQ ID NO: 556679 - RNA, 19 nt, Artificial Sequence
  Description of Artificial Sequence: Synthetic oligonucleotide
aaaucccacuaccauugac

SEQ ID NO: 556680 - RNA, 19 nt, Artificial Sequence
  Description of Artificial Sequence: Synthetic oligonucleotide
guacggagaagucagaaug

SEQ ID NO: 556681 - RNA, 19 nt, Artificial Sequence
  Description of Artificial Sequence: Synthetic oligonucleotide
ugaaucuauagcuguaugu

SEQ ID NO: 556682 - RNA, 19 nt, Artificial Sequence
  Description of Artificial Sequence: Synthetic oligonucleotide
gauugggagaaauauaaaa

SEQ ID NO: 556683 - RNA, 19 nt, Artificial Sequence
  Description of Artificial Sequence: Synthetic oligonucleotide
auuaacggcaaggugagag

SEQ ID NO: 556684 - RNA, 19 nt, Artificial Sequence
  Description of Artificial Sequence: Synthetic oligonucleotide
uaucaagucacagaaagau

SEQ ID NO: 556685 - RNA, 19 nt, Artificial Sequence
  Description of Artificial Sequence: Synthetic oligonucleotide
gagaaguacuaguagagca

SEQ ID NO: 556686 - RNA, 19 nt, Artificial Sequence
  Description of Artificial Sequence: Synthetic oligonucleotide
uuaaaauugcccgcuaaug

SEQ ID NO: 556687 - RNA, 19 nt, Artificial Sequence
  Description of Artificial Sequence: Synthetic oligonucleotide
gcuaucaagucacagaaag

SEQ ID NO: 556688 - RNA, 19 nt, Artificial Sequence
  Description of Artificial Sequence: Synthetic oligonucleotide
acaauaugagcaaagggag

SEQ ID NO: 556689 - RNA, 19 nt, Artificial Sequence
  Description of Artificial Sequence: Synthetic oligonucleotide
auguaucuaagcccuggcc

SEQ ID NO: 556690 - RNA, 19 nt, Artificial Sequence
  Description of Artificial Sequence: Synthetic oligonucleotide
aguucacuauuacaggaag

SEQ ID NO: 556691 - RNA, 19 nt, Artificial Sequence
  Description of Artificial Sequence: Synthetic oligonucleotide
ucuauagcuguauguaucu

SEQ ID NO: 556692 - RNA, 19 nt, Artificial Sequence
  Description of Artificial Sequence: Synthetic oligonucleotide
auaagauugggagaaauau

SEQ ID NO: 556693 - RNA, 19 nt, Artificial Sequence
  Description of Artificial Sequence: Synthetic oligonucleotide
acuaguagagcaaaaugag

SEQ ID NO: 556694 - RNA, 19 nt, Artificial Sequence
  Description of Artificial Sequence: Synthetic oligonucleotide
aguaacaguucaguccucc

SEQ ID NO: 556695 - RNA, 19 nt, Artificial Sequence
  Description of Artificial Sequence: Synthetic oligonucleotide
agaagucagaaugacauca

SEQ ID NO: 556696 - RNA, 19 nt, Artificial Sequence
  Description of Artificial Sequence: Synthetic oligonucleotide
agguuuaccagcuuuuccu

SEQ ID NO: 556697 - RNA, 19 nt, Artificial Sequence
  Description of Artificial Sequence: Synthetic oligonucleotide
uggccuaaacagaaggaag

SEQ ID NO: 556698 - RNA, 19 nt, Artificial Sequence
  Description of Artificial Sequence: Synthetic oligonucleotide
uguacuugugcagaggaga

SEQ ID NO: 556699 - RNA, 19 nt, Artificial Sequence
  Description of Artificial Sequence: Synthetic oligonucleotide
aagggaggcaguuuagggu

SEQ ID NO: 556700 - RNA, 19 nt, Artificial Sequence
  Description of Artificial Sequence: Synthetic oligonucleotide
uccaauuacuuccauugaa

SEQ ID NO: 556701 - RNA, 19 nt, Artificial Sequence
  Description of Artificial Sequence: Synthetic oligonucleotide
aagaugugagucucguuga

SEQ ID NO: 556702 - RNA, 19 nt, Artificial Sequence
  Description of Artificial Sequence: Synthetic oligonucleotide
acaagagucagccccgaag

SEQ ID NO: 556703 - RNA, 19 nt, Artificial Sequence
  Description of Artificial Sequence: Synthetic oligonucleotide
uauaagauugggagaaaua

SEQ ID NO: 556704 - RNA, 19 nt, Artificial Sequence
  Description of Artificial Sequence: Synthetic oligonucleotide
gauucucucacagccaaag

SEQ ID NO: 556705 - RNA, 19 nt, Artificial Sequence
  Description of Artificial Sequence: Synthetic oligonucleotide
aauaaagagcuggcuggac

SEQ ID NO: 556706 - RNA, 19 nt, Artificial Sequence
  Description of Artificial Sequence: Synthetic oligonucleotide
uguccuucucuaaagguaa

SEQ ID NO: 556707 - RNA, 19 nt, Artificial Sequence
  Description of Artificial Sequence: Synthetic oligonucleotide
agaggcuaaacccuuuucu

SEQ ID NO: 556708 - RNA, 19 nt, Artificial Sequence
  Description of Artificial Sequence: Synthetic oligonucleotide
caauaugagcaaagggagg

SEQ ID NO: 556709 - RNA, 19 nt, Artificial Sequence
  Description of Artificial Sequence: Synthetic oligonucleotide
auagguacguggguaagac

SEQ ID NO: 556710 - RNA, 19 nt, Artificial Sequence
  Description of Artificial Sequence: Synthetic oligonucleotide
uggugaacaggcuacgcug

SEQ ID NO: 556711 - RNA, 19 nt, Artificial Sequence
  Description of Artificial Sequence: Synthetic oligonucleotide
aucggaaaacaccuuaggu

SEQ ID NO: 556712 - RNA, 19 nt, Artificial Sequence
  Description of Artificial Sequence: Synthetic oligonucleotide
augaccaguaagauagagc

SEQ ID NO: 556713 - RNA, 19 nt, Artificial Sequence
  Description of Artificial Sequence: Synthetic oligonucleotide
aacaucgugucacggaaaa

SEQ ID NO: 556714 - RNA, 19 nt, Artificial Sequence
  Description of Artificial Sequence: Synthetic oligonucleotide
uaucauugucuccuaccag

SEQ ID NO: 556715 - RNA, 19 nt, Artificial Sequence
  Description of Artificial Sequence: Synthetic oligonucleotide
agaacugcagacccauguc

SEQ ID NO: 556716 - RNA, 19 nt, Artificial Sequence
  Description of Artificial Sequence: Synthetic oligonucleotide
uggagcggcacacaaaguc

SEQ ID NO: 556717 - RNA, 19 nt, Artificial Sequence
  Description of Artificial Sequence: Synthetic oligonucleotide
agagucagccccgaagacc

SEQ ID NO: 556718 - RNA, 19 nt, Artificial Sequence
  Description of Artificial Sequence: Synthetic oligonucleotide
uaagauugggagaaauaua

SEQ ID NO: 556719 - RNA, 19 nt, Artificial Sequence
  Description of Artificial Sequence: Synthetic oligonucleotide
ugauuagacauuugggcua

SEQ ID NO: 556720 - RNA, 19 nt, Artificial Sequence
  Description of Artificial Sequence: Synthetic oligonucleotide
aucuauagcuguauguauc

SEQ ID NO: 556721 - RNA, 19 nt, Artificial Sequence
  Description of Artificial Sequence: Synthetic oligonucleotide
agagaugagaagaggcggc

SEQ ID NO: 556722 - RNA, 19 nt, Artificial Sequence
  Description of Artificial Sequence: Synthetic oligonucleotide
cuaaacccuuuucucauag

SEQ ID NO: 556723 - RNA, 19 nt, Artificial Sequence
  Description of Artificial Sequence: Synthetic oligonucleotide
aacuacagacuugugagaa

SEQ ID NO: 556724 - RNA, 19 nt, Artificial Sequence
  Description of Artificial Sequence: Synthetic oligonucleotide
aaacaacaaaugagaugcc

SEQ ID NO: 556725 - RNA, 19 nt, Artificial Sequence
  Description of Artificial Sequence: Synthetic oligonucleotide
ucuagcuaucaagucacag

SEQ ID NO: 556726 - RNA, 19 nt, Artificial Sequence
  Description of Artificial Sequence: Synthetic oligonucleotide
ucucaacuugugaaaauau

SEQ ID NO: 556727 - RNA, 19 nt, Artificial Sequence
  Description of Artificial Sequence: Synthetic oligonucleotide
ucagacacuggguuaaaau

SEQ ID NO: 556728 - RNA, 19 nt, Artificial Sequence
  Description of Artificial Sequence: Synthetic oligonucleotide
gacggcacaagagucagcc

SEQ ID NO: 556729 - RNA, 19 nt, Artificial Sequence
  Description of Artificial Sequence: Synthetic oligonucleotide
ucguugauucucccgacca

SEQ ID NO: 556730 - RNA, 19 nt, Artificial Sequence
  Description of Artificial Sequence: Synthetic oligonucleotide
uacggagaagucagaauga

SEQ ID NO: 556731 - RNA, 19 nt, Artificial Sequence
  Description of Artificial Sequence: Synthetic oligonucleotide
uguuaaacaguggccguag

SEQ ID NO: 556732 - RNA, 19 nt, Artificial Sequence
  Description of Artificial Sequence: Synthetic oligonucleotide
aacuuuuguuaaacagugg

SEQ ID NO: 556733 - RNA, 19 nt, Artificial Sequence
  Description of Artificial Sequence: Synthetic oligonucleotide
cccacuaccauugacaagg

SEQ ID NO: 556734 - RNA, 19 nt, Artificial Sequence
  Description of Artificial Sequence: Synthetic oligonucleotide
ugagaaguacuaguagagc

SEQ ID NO: 556735 - RNA, 19 nt, Artificial Sequence
  Description of Artificial Sequence: Synthetic oligonucleotide
ugcccuaaucccauacaag

SEQ ID NO: 556736 - RNA, 19 nt, Artificial Sequence
  Description of Artificial Sequence: Synthetic oligonucleotide
uguagacagcaaccaauga

SEQ ID NO: 556737 - RNA, 19 nt, Artificial Sequence
  Description of Artificial Sequence: Synthetic oligonucleotide
acaaguugagaaguacuag

SEQ ID NO: 556738 - RNA, 19 nt, Artificial Sequence
  Description of Artificial Sequence: Synthetic oligonucleotide
uuccugacggcacaagagu

SEQ ID NO: 556739 - RNA, 19 nt, Artificial Sequence
  Description of Artificial Sequence: Synthetic oligonucleotide
guagagcaaaaugagcaag

SEQ ID NO: 556740 - RNA, 19 nt, Artificial Sequence
  Description of Artificial Sequence: Synthetic oligonucleotide
acuggggaacuaugcaaac

SEQ ID NO: 556741 - RNA, 19 nt, Artificial Sequence
  Description of Artificial Sequence: Synthetic oligonucleotide
cggaaaacaccuuaggugg

SEQ ID NO: 556742 - RNA, 19 nt, Artificial Sequence
  Description of Artificial Sequence: Synthetic oligonucleotide
guauguaucuaagcccugg

SEQ ID NO: 556743 - RNA, 19 nt, Artificial Sequence
  Description of Artificial Sequence: Synthetic oligonucleotide
guagacagcaaccaaugaa

SEQ ID NO: 556744 - RNA, 19 nt, Artificial Sequence
  Description of Artificial Sequence: Synthetic oligonucleotide
cagaaagaucggaaaacac

SEQ ID NO: 556745 - RNA, 19 nt, Artificial Sequence
  Description of Artificial Sequence: Synthetic oligonucleotide
gcaguuuagggucaaauca

SEQ ID NO: 556746 - RNA, 19 nt, Artificial Sequence
  Description of Artificial Sequence: Synthetic oligonucleotide
cuuggagcccaauucuagc

SEQ ID NO: 556747 - RNA, 19 nt, Artificial Sequence
  Description of Artificial Sequence: Synthetic oligonucleotide
aagugcaacacaaguugag

SEQ ID NO: 556748 - RNA, 19 nt, Artificial Sequence
  Description of Artificial Sequence: Synthetic oligonucleotide
auucccuuggcucccacca

SEQ ID NO: 556749 - RNA, 19 nt, Artificial Sequence
  Description of Artificial Sequence: Synthetic oligonucleotide
gggaauaaagagcuggcug

SEQ ID NO: 556750 - RNA, 19 nt, Artificial Sequence
  Description of Artificial Sequence: Synthetic oligonucleotide
acuugugaaaauauuuaga

SEQ ID NO: 556751 - RNA, 19 nt, Artificial Sequence
  Description of Artificial Sequence: Synthetic oligonucleotide
aggacuagcaauaguaaca

SEQ ID NO: 556752 - RNA, 19 nt, Artificial Sequence
  Description of Artificial Sequence: Synthetic oligonucleotide
aagguaacaaauggcccug

SEQ ID NO: 556753 - RNA, 19 nt, Artificial Sequence
  Description of Artificial Sequence: Synthetic oligonucleotide
ccuaaucccauacaagggg

SEQ ID NO: 556754 - RNA, 19 nt, Artificial Sequence
  Description of Artificial Sequence: Synthetic oligonucleotide
aucacauugguagcaaaug

SEQ ID NO: 556755 - RNA, 19 nt, Artificial Sequence
  Description of Artificial Sequence: Synthetic oligonucleotide
gagucagccccgaagaccc

SEQ ID NO: 556756 - RNA, 19 nt, Artificial Sequence
  Description of Artificial Sequence: Synthetic oligonucleotide
uggacaguaaaagugcaau

SEQ ID NO: 556757 - RNA, 19 nt, Artificial Sequence
  Description of Artificial Sequence: Synthetic oligonucleotide
ucucgaagagguacagaca

SEQ ID NO: 556758 - RNA, 19 nt, Artificial Sequence
  Description of Artificial Sequence: Synthetic oligonucleotide
uccaucucgaagagguaca

SEQ ID NO: 556759 - RNA, 19 nt, Artificial Sequence
  Description of Artificial Sequence: Synthetic oligonucleotide
agucuucccuacccggagc

SEQ ID NO: 556760 - RNA, 19 nt, Artificial Sequence
  Description of Artificial Sequence: Synthetic oligonucleotide
agugucucaacuugugaaa

SEQ ID NO: 556761 - RNA, 19 nt, Artificial Sequence
  Description of Artificial Sequence: Synthetic oligonucleotide
uuggagcccaauucuagcu

SEQ ID NO: 556762 - RNA, 19 nt, Artificial Sequence
  Description of Artificial Sequence: Synthetic oligonucleotide
aggggcauuucagugacuc

SEQ ID NO: 556763 - RNA, 19 nt, Artificial Sequence
  Description of Artificial Sequence: Synthetic oligonucleotide
agguaagcacugcaaagca

SEQ ID NO: 556764 - RNA, 19 nt, Artificial Sequence
  Description of Artificial Sequence: Synthetic oligonucleotide
acguugcgggguuuggagc

SEQ ID NO: 556765 - RNA, 19 nt, Artificial Sequence
  Description of Artificial Sequence: Synthetic oligonucleotide
aaauggucaucccuuucuu

SEQ ID NO: 556766 - RNA, 19 nt, Artificial Sequence
  Description of Artificial Sequence: Synthetic oligonucleotide
auacaaggggcauuucagu

SEQ ID NO: 556767 - RNA, 19 nt, Artificial Sequence
  Description of Artificial Sequence: Synthetic oligonucleotide
acaggcuacgcugcugucc

SEQ ID NO: 556768 - RNA, 19 nt, Artificial Sequence
  Description of Artificial Sequence: Synthetic oligonucleotide
uagcaaauggucaucccuu

SEQ ID NO: 556769 - RNA, 19 nt, Artificial Sequence
  Description of Artificial Sequence: Synthetic oligonucleotide
auuuagcgguccuugcucu

SEQ ID NO: 556770 - RNA, 19 nt, Artificial Sequence
  Description of Artificial Sequence: Synthetic oligonucleotide
caauucuagcuaucaaguc

SEQ ID NO: 556771 - RNA, 19 nt, Artificial Sequence
  Description of Artificial Sequence: Synthetic oligonucleotide
gcuugauuagacauuuggg

SEQ ID NO: 556772 - RNA, 19 nt, Artificial Sequence
  Description of Artificial Sequence: Synthetic oligonucleotide
cccaauucuagcuaucaag

SEQ ID NO: 556773 - RNA, 19 nt, Artificial Sequence
  Description of Artificial Sequence: Synthetic oligonucleotide
cauugguagcaaaugguca

SEQ ID NO: 556774 - RNA, 19 nt, Artificial Sequence
  Description of Artificial Sequence: Synthetic oligonucleotide
ugacaucauuucauguccu

SEQ ID NO: 556775 - RNA, 19 nt, Artificial Sequence
  Description of Artificial Sequence: Synthetic oligonucleotide
agguugccaagaucuugcc

SEQ ID NO: 556776 - RNA, 19 nt, Artificial Sequence
  Description of Artificial Sequence: Synthetic oligonucleotide
gacccuaugucuacuuucc

SEQ ID NO: 556777 - RNA, 19 nt, Artificial Sequence
  Description of Artificial Sequence: Synthetic oligonucleotide
uguauguaucuaagcccug

SEQ ID NO: 556778 - RNA, 19 nt, Artificial Sequence
  Description of Artificial Sequence: Synthetic oligonucleotide
cucgaagagguacagacaa

SEQ ID NO: 556779 - RNA, 19 nt, Artificial Sequence
  Description of Artificial Sequence: Synthetic oligonucleotide
uuccguuccucagacacug

SEQ ID NO: 556780 - RNA, 19 nt, Artificial Sequence
  Description of Artificial Sequence: Synthetic oligonucleotide
cauuuagcgguccuugcuc

SEQ ID NO: 556781 - RNA, 19 nt, Artificial Sequence
  Description of Artificial Sequence: Synthetic oligonucleotide
gauuagacauuugggcuac

SEQ ID NO: 556782 - RNA, 19 nt, Artificial Sequence
  Description of Artificial Sequence: Synthetic oligonucleotide
auugacaaggguacggaga

SEQ ID NO: 556783 - RNA, 19 nt, Artificial Sequence
  Description of Artificial Sequence: Synthetic oligonucleotide
guuacuuacuggccuagga

SEQ ID NO: 556784 - RNA, 19 nt, Artificial Sequence
  Description of Artificial Sequence: Synthetic oligonucleotide
aucgugucacggaaaacac

SEQ ID NO: 556785 - RNA, 19 nt, Artificial Sequence
  Description of Artificial Sequence: Synthetic oligonucleotide
aaaaucccacuaccauuga

SEQ ID NO: 556786 - RNA, 19 nt, Artificial Sequence
  Description of Artificial Sequence: Synthetic oligonucleotide
uguuugggcuacagccagg

SEQ ID NO: 556787 - RNA, 19 nt, Artificial Sequence
  Description of Artificial Sequence: Synthetic oligonucleotide
guugauucucccgaccacc

SEQ ID NO: 556788 - RNA, 19 nt, Artificial Sequence
  Description of Artificial Sequence: Synthetic oligonucleotide
uucucauagguacgugggu

SEQ ID NO: 556789 - RNA, 19 nt, Artificial Sequence
  Description of Artificial Sequence: Synthetic oligonucleotide
ugguagcaaauggucaucc

SEQ ID NO: 556790 - RNA, 19 nt, Artificial Sequence
  Description of Artificial Sequence: Synthetic oligonucleotide
guaucuaagcccuggccca

SEQ ID NO: 556791 - RNA, 19 nt, Artificial Sequence
  Description of Artificial Sequence: Synthetic oligonucleotide
cagguuuaccagcuuuucc

SEQ ID NO: 556792 - RNA, 19 nt, Artificial Sequence
  Description of Artificial Sequence: Synthetic oligonucleotide
ucugaaucuauagcuguau

SEQ ID NO: 556793 - RNA, 19 nt, Artificial Sequence
  Description of Artificial Sequence: Synthetic oligonucleotide
cuaggaguucacuauuaca

SEQ ID NO: 556794 - RNA, 19 nt, Artificial Sequence
  Description of Artificial Sequence: Synthetic oligonucleotide
cugaaucuauagcuguaug

SEQ ID NO: 556795 - RNA, 19 nt, Artificial Sequence
  Description of Artificial Sequence: Synthetic oligonucleotide
caucgugucacggaaaaca

SEQ ID NO: 556796 - RNA, 19 nt, Artificial Sequence
  Description of Artificial Sequence: Synthetic oligonucleotide
uguuacuuacuggccuagg

SEQ ID NO: 556797 - RNA, 19 nt, Artificial Sequence
  Description of Artificial Sequence: Synthetic oligonucleotide
uaaugugcgucgguugcag

SEQ ID NO: 556798 - RNA, 19 nt, Artificial Sequence
  Description of Artificial Sequence: Synthetic oligonucleotide
cugaucugcaccaggccug

SEQ ID NO: 556799 - RNA, 19 nt, Artificial Sequence
  Description of Artificial Sequence: Synthetic oligonucleotide
ucgcugguauaagaaaccc

SEQ ID NO: 556800 - RNA, 19 nt, Artificial Sequence
  Description of Artificial Sequence: Synthetic oligonucleotide
agccaaacuacagacuugu

SEQ ID NO: 556801 - RNA, 19 nt, Artificial Sequence
  Description of Artificial Sequence: Synthetic oligonucleotide
ucgugucacggaaaacaca

SEQ ID NO: 556802 - RNA, 19 nt, Artificial Sequence
  Description of Artificial Sequence: Synthetic oligonucleotide
acacuggggaacuaugcaa

SEQ ID NO: 556803 - RNA, 19 nt, Artificial Sequence
  Description of Artificial Sequence: Synthetic oligonucleotide
acggcaaggugagagauga

SEQ ID NO: 556804 - RNA, 19 nt, Artificial Sequence
  Description of Artificial Sequence: Synthetic oligonucleotide
uccugacggcacaagaguc

SEQ ID NO: 556805 - RNA, 19 nt, Artificial Sequence
  Description of Artificial Sequence: Synthetic oligonucleotide
cgugucacggaaaacacag

SEQ ID NO: 556806 - RNA, 19 nt, Artificial Sequence
  Description of Artificial Sequence: Synthetic oligonucleotide
cacguugcgggguuuggag

SEQ ID NO: 556807 - RNA, 19 nt, Artificial Sequence
  Description of Artificial Sequence: Synthetic oligonucleotide
cuguauguaucuaagcccu

SEQ ID NO: 556808 - RNA, 19 nt, Artificial Sequence
  Description of Artificial Sequence: Synthetic oligonucleotide
gguaagacacuucccugag

SEQ ID NO: 556809 - RNA, 19 nt, Artificial Sequence
  Description of Artificial Sequence: Synthetic oligonucleotide
ucccggcauacucugaauc

SEQ ID NO: 556810 - RNA, 19 nt, Artificial Sequence
  Description of Artificial Sequence: Synthetic oligonucleotide
caggucuauuuccuuuagg

SEQ ID NO: 556811 - RNA, 19 nt, Artificial Sequence
  Description of Artificial Sequence: Synthetic oligonucleotide
cuaucaagucacagaaaga

SEQ ID NO: 556812 - RNA, 19 nt, Artificial Sequence
  Description of Artificial Sequence: Synthetic oligonucleotide
ucauagguacguggguaag

SEQ ID NO: 556813 - RNA, 19 nt, Artificial Sequence
  Description of Artificial Sequence: Synthetic oligonucleotide
gagaacugcagacccaugu

SEQ ID NO: 556814 - RNA, 19 nt, Artificial Sequence
  Description of Artificial Sequence: Synthetic oligonucleotide
gucacggaaaacacagcag

SEQ ID NO: 556815 - RNA, 19 nt, Artificial Sequence
  Description of Artificial Sequence: Synthetic oligonucleotide
uacuuuccacuguacuugu

SEQ ID NO: 556816 - RNA, 19 nt, Artificial Sequence
  Description of Artificial Sequence: Synthetic oligonucleotide
gaaguacuaguagagcaaa

SEQ ID NO: 556817 - RNA, 19 nt, Artificial Sequence
  Description of Artificial Sequence: Synthetic oligonucleotide
caucaccacugcucgacgc

SEQ ID NO: 556818 - RNA, 19 nt, Artificial Sequence
  Description of Artificial Sequence: Synthetic oligonucleotide
aagacccuaugucuacuuu

SEQ ID NO: 556819 - RNA, 19 nt, Artificial Sequence
  Description of Artificial Sequence: Synthetic oligonucleotide
acacaaguugagaaguacu

SEQ ID NO: 556820 - RNA, 19 nt, Artificial Sequence
  Description of Artificial Sequence: Synthetic oligonucleotide
gcuaaugugcgucgguugc

SEQ ID NO: 556821 - RNA, 19 nt, Artificial Sequence
  Description of Artificial Sequence: Synthetic oligonucleotide
ugugagucucguugauucu

SEQ ID NO: 556822 - RNA, 19 nt, Artificial Sequence
  Description of Artificial Sequence: Synthetic oligonucleotide
ugucucaacuugugaaaau

SEQ ID NO: 556823 - RNA, 19 nt, Artificial Sequence
  Description of Artificial Sequence: Synthetic oligonucleotide
agaaguacuaguagagcaa

SEQ ID NO: 556824 - RNA, 19 nt, Artificial Sequence
  Description of Artificial Sequence: Synthetic oligonucleotide
guagcaaauggucaucccu

SEQ ID NO: 556825 - RNA, 19 nt, Artificial Sequence
  Description of Artificial Sequence: Synthetic oligonucleotide
acgauaggcagcaggcacg

SEQ ID NO: 556826 - RNA, 19 nt, Artificial Sequence
  Description of Artificial Sequence: Synthetic oligonucleotide
aagauagagcccacacuga

SEQ ID NO: 556827 - RNA, 19 nt, Artificial Sequence
  Description of Artificial Sequence: Synthetic oligonucleotide
cuucucuaaagguaacaaa

SEQ ID NO: 556828 - RNA, 19 nt, Artificial Sequence
  Description of Artificial Sequence: Synthetic oligonucleotide
ugugcgucgguugcaggag

SEQ ID NO: 556829 - RNA, 19 nt, Artificial Sequence
  Description of Artificial Sequence: Synthetic oligonucleotide
cucgacgcuguucucugcc

SEQ ID NO: 556830 - RNA, 19 nt, Artificial Sequence
  Description of Artificial Sequence: Synthetic oligonucleotide
agguggugccuuagaaucc

SEQ ID NO: 556831 - RNA, 19 nt, Artificial Sequence
  Description of Artificial Sequence: Synthetic oligonucleotide
gugcaacacaaguugagaa

SEQ ID NO: 556832 - RNA, 19 nt, Artificial Sequence
  Description of Artificial Sequence: Synthetic oligonucleotide
ucacuauuacaggaagauc

SEQ ID NO: 556833 - RNA, 19 nt, Artificial Sequence
  Description of Artificial Sequence: Synthetic oligonucleotide
acggcacaagagucagccc

SEQ ID NO: 556834 - RNA, 19 nt, Artificial Sequence
  Description of Artificial Sequence: Synthetic oligonucleotide
ggugggaaaccucugguga

SEQ ID NO: 556835 - RNA, 19 nt, Artificial Sequence
  Description of Artificial Sequence: Synthetic oligonucleotide
aaucccauacaaggggcau

SEQ ID NO: 556836 - RNA, 19 nt, Artificial Sequence
  Description of Artificial Sequence: Synthetic oligonucleotide
uggccuaggaguucacuau

SEQ ID NO: 556837 - RNA, 19 nt, Artificial Sequence
  Description of Artificial Sequence: Synthetic oligonucleotide
gguuuaccagcuuuuccug

SEQ ID NO: 556838 - RNA, 19 nt, Artificial Sequence
  Description of Artificial Sequence: Synthetic oligonucleotide
aucaccacugcucgacgcu

SEQ ID NO: 556839 - RNA, 19 nt, Artificial Sequence
  Description of Artificial Sequence: Synthetic oligonucleotide
ugcucgacgcuguucucug

SEQ ID NO: 556840 - RNA, 19 nt, Artificial Sequence
  Description of Artificial Sequence: Synthetic oligonucleotide
cauggccuaaacagaagga

SEQ ID NO: 556841 - RNA, 19 nt, Artificial Sequence
  Description of Artificial Sequence: Synthetic oligonucleotide
ugggagaugcggccggaga

SEQ ID NO: 556842 - RNA, 19 nt, Artificial Sequence
  Description of Artificial Sequence: Synthetic oligonucleotide
ucuggugaacaggcuacgc

SEQ ID NO: 556843 - RNA, 19 nt, Artificial Sequence
  Description of Artificial Sequence: Synthetic oligonucleotide
accagucgcugguauaaga

SEQ ID NO: 556844 - RNA, 19 nt, Artificial Sequence
  Description of Artificial Sequence: Synthetic oligonucleotide
uuagacauuugggcuacau

SEQ ID NO: 556845 - RNA, 19 nt, Artificial Sequence
  Description of Artificial Sequence: Synthetic oligonucleotide
ugcccgcuaaugugcgucg

SEQ ID NO: 556846 - RNA, 19 nt, Artificial Sequence
  Description of Artificial Sequence: Synthetic oligonucleotide
gaauguggcccugggguug

SEQ ID NO: 556847 - RNA, 19 nt, Artificial Sequence
  Description of Artificial Sequence: Synthetic oligonucleotide
caggcucgaggcaaauggc

SEQ ID NO: 556848 - RNA, 19 nt, Artificial Sequence
  Description of Artificial Sequence: Synthetic oligonucleotide
guuaaaauugcccgcuaau

SEQ ID NO: 556849 - RNA, 19 nt, Artificial Sequence
  Description of Artificial Sequence: Synthetic oligonucleotide
uucuagcuaucaagucaca

SEQ ID NO: 556850 - RNA, 19 nt, Artificial Sequence
  Description of Artificial Sequence: Synthetic oligonucleotide
ccuuuauauaucagcauga

SEQ ID NO: 556851 - RNA, 19 nt, Artificial Sequence
  Description of Artificial Sequence: Synthetic oligonucleotide
guaagauagagcccacacu

SEQ ID NO: 556852 - RNA, 19 nt, Artificial Sequence
  Description of Artificial Sequence: Synthetic oligonucleotide
uuguuaaacaguggccgua

SEQ ID NO: 556853 - RNA, 19 nt, Artificial Sequence
  Description of Artificial Sequence: Synthetic oligonucleotide
cugacggcacaagagucag

SEQ ID NO: 556854 - RNA, 19 nt, Artificial Sequence
  Description of Artificial Sequence: Synthetic oligonucleotide
gcagcagucuucccuaccc

SEQ ID NO: 556855 - RNA, 19 nt, Artificial Sequence
  Description of Artificial Sequence: Synthetic oligonucleotide
acaucgugucacggaaaac

SEQ ID NO: 556856 - RNA, 19 nt, Artificial Sequence
  Description of Artificial Sequence: Synthetic oligonucleotide
cucgaggcaaauggcagug

SEQ ID NO: 556857 - RNA, 19 nt, Artificial Sequence
  Description of Artificial Sequence: Synthetic oligonucleotide
agaauguggcccugggguu

SEQ ID NO: 556858 - RNA, 19 nt, Artificial Sequence
  Description of Artificial Sequence: Synthetic oligonucleotide
ggaacaucgugucacggaa

SEQ ID NO: 556859 - RNA, 19 nt, Artificial Sequence
  Description of Artificial Sequence: Synthetic oligonucleotide
gagaaggggaacaucgugu

SEQ ID NO: 556860 - RNA, 19 nt, Artificial Sequence
  Description of Artificial Sequence: Synthetic oligonucleotide
ugggagaggcuaaacccuu

SEQ ID NO: 556861 - RNA, 19 nt, Artificial Sequence
  Description of Artificial Sequence: Synthetic oligonucleotide
ucucccgaccaccgucucc

SEQ ID NO: 556862 - RNA, 19 nt, Artificial Sequence
  Description of Artificial Sequence: Synthetic oligonucleotide
agcaaauggucaucccuuu

SEQ ID NO: 556863 - RNA, 19 nt, Artificial Sequence
  Description of Artificial Sequence: Synthetic oligonucleotide
auauaucagcaugauccaa

SEQ ID NO: 556864 - RNA, 19 nt, Artificial Sequence
  Description of Artificial Sequence: Synthetic oligonucleotide
agccccgaagacccuaugu

SEQ ID NO: 556865 - RNA, 19 nt, Artificial Sequence
  Description of Artificial Sequence: Synthetic oligonucleotide
cuuuucucauagguacgug

SEQ ID NO: 556866 - RNA, 19 nt, Artificial Sequence
  Description of Artificial Sequence: Synthetic oligonucleotide
cucauagguacguggguaa

SEQ ID NO: 556867 - RNA, 19 nt, Artificial Sequence
  Description of Artificial Sequence: Synthetic oligonucleotide
auaugagcaaagggaggca

SEQ ID NO: 556868 - RNA, 19 nt, Artificial Sequence
  Description of Artificial Sequence: Synthetic oligonucleotide
ugggaaaccucuggugaac

SEQ ID NO: 556869 - RNA, 19 nt, Artificial Sequence
  Description of Artificial Sequence: Synthetic oligonucleotide
uguguucagauguguuguu

SEQ ID NO: 556870 - RNA, 19 nt, Artificial Sequence
  Description of Artificial Sequence: Synthetic oligonucleotide
cacuguacuugugcagagg

SEQ ID NO: 556871 - RNA, 19 nt, Artificial Sequence
  Description of Artificial Sequence: Synthetic oligonucleotide
agaugugagucucguugau

SEQ ID NO: 556872 - RNA, 19 nt, Artificial Sequence
  Description of Artificial Sequence: Synthetic oligonucleotide
ggguaagacacuucccuga

SEQ ID NO: 556873 - RNA, 19 nt, Artificial Sequence
  Description of Artificial Sequence: Synthetic oligonucleotide
aaguacuaguagagcaaaa

SEQ ID NO: 556874 - RNA, 19 nt, Artificial Sequence
  Description of Artificial Sequence: Synthetic oligonucleotide
agcccaauucuagcuauca

SEQ ID NO: 556875 - RNA, 19 nt, Artificial Sequence
  Description of Artificial Sequence: Synthetic oligonucleotide
uuccugcacacaagcucug

SEQ ID NO: 556876 - RNA, 19 nt, Artificial Sequence
  Description of Artificial Sequence: Synthetic oligonucleotide
cacuggggaacuaugcaaa

SEQ ID NO: 556877 - RNA, 19 nt, Artificial Sequence
  Description of Artificial Sequence: Synthetic oligonucleotide
cuaccagguugccaagauc

SEQ ID NO: 556878 - RNA, 19 nt, Artificial Sequence
  Description of Artificial Sequence: Synthetic oligonucleotide
uacguggguaagacacuuc

SEQ ID NO: 556879 - RNA, 19 nt, Artificial Sequence
  Description of Artificial Sequence: Synthetic oligonucleotide
ucccauacaaggggcauuu

SEQ ID NO: 556880 - RNA, 19 nt, Artificial Sequence
  Description of Artificial Sequence: Synthetic oligonucleotide
gguugggagaugcggccgg

SEQ ID NO: 556881 - RNA, 19 nt, Artificial Sequence
  Description of Artificial Sequence: Synthetic oligonucleotide
gguuaaaauugcccgcuaa

SEQ ID NO: 556882 - RNA, 19 nt, Artificial Sequence
  Description of Artificial Sequence: Synthetic oligonucleotide
ucgacgcuguucucugcca

SEQ ID NO: 556883 - RNA, 19 nt, Artificial Sequence
  Description of Artificial Sequence: Synthetic oligonucleotide
uuggagcggcacacaaagu

SEQ ID NO: 556884 - RNA, 19 nt, Artificial Sequence
  Description of Artificial Sequence: Synthetic oligonucleotide
ggugccuuagaauccugca

SEQ ID NO: 556885 - RNA, 19 nt, Artificial Sequence
  Description of Artificial Sequence: Synthetic oligonucleotide
agcaaccaaugaaacaaau

SEQ ID NO: 556886 - RNA, 19 nt, Artificial Sequence
  Description of Artificial Sequence: Synthetic oligonucleotide
gugagucucguugauucuc

SEQ ID NO: 556887 - RNA, 19 nt, Artificial Sequence
  Description of Artificial Sequence: Synthetic oligonucleotide
uuagcgguccuugcucuuc

SEQ ID NO: 556888 - RNA, 19 nt, Artificial Sequence
  Description of Artificial Sequence: Synthetic oligonucleotide
ggugaacaggcuacgcugc

SEQ ID NO: 556889 - RNA, 19 nt, Artificial Sequence
  Description of Artificial Sequence: Synthetic oligonucleotide
uaucuaagcccuggcccac

SEQ ID NO: 556890 - RNA, 19 nt, Artificial Sequence
  Description of Artificial Sequence: Synthetic oligonucleotide
ugacggcacaagagucagc

SEQ ID NO: 556891 - RNA, 19 nt, Artificial Sequence
  Description of Artificial Sequence: Synthetic oligonucleotide
ggguaggacugcuugauua

SEQ ID NO: 556892 - RNA, 19 nt, Artificial Sequence
  Description of Artificial Sequence: Synthetic oligonucleotide
ugcgucgguugcaggagau

SEQ ID NO: 556893 - RNA, 19 nt, Artificial Sequence
  Description of Artificial Sequence: Synthetic oligonucleotide
ccaauucuagcuaucaagu

SEQ ID NO: 556894 - RNA, 19 nt, Artificial Sequence
  Description of Artificial Sequence: Synthetic oligonucleotide
uaguaacaguucaguccuc

SEQ ID NO: 556895 - RNA, 19 nt, Artificial Sequence
  Description of Artificial Sequence: Synthetic oligonucleotide
cuggccuaggaguucacua

SEQ ID NO: 556896 - RNA, 19 nt, Artificial Sequence
  Description of Artificial Sequence: Synthetic oligonucleotide
auauuuagacagggcucgu

SEQ ID NO: 556897 - RNA, 19 nt, Artificial Sequence
  Description of Artificial Sequence: Synthetic oligonucleotide
gccuaaacagaaggaagug

SEQ ID NO: 556898 - RNA, 19 nt, Artificial Sequence
  Description of Artificial Sequence: Synthetic oligonucleotide
uccuuaucauugucuccua

SEQ ID NO: 556899 - RNA, 19 nt, Artificial Sequence
  Description of Artificial Sequence: Synthetic oligonucleotide
ggcucgaggcaaauggcag

SEQ ID NO: 556900 - RNA, 19 nt, Artificial Sequence
  Description of Artificial Sequence: Synthetic oligonucleotide
ggcggcuugagaagucugg

SEQ ID NO: 556901 - RNA, 19 nt, Artificial Sequence
  Description of Artificial Sequence: Synthetic oligonucleotide
uuuagcgguccuugcucuu

SEQ ID NO: 556902 - RNA, 19 nt, Artificial Sequence
  Description of Artificial Sequence: Synthetic oligonucleotide
gggaacaucgugucacgga

SEQ ID NO: 556903 - RNA, 19 nt, Artificial Sequence
  Description of Artificial Sequence: Synthetic oligonucleotide
uauuaacggcaaggugaga

SEQ ID NO: 556904 - RNA, 19 nt, Artificial Sequence
  Description of Artificial Sequence: Synthetic oligonucleotide
aggcucgaggcaaauggca

SEQ ID NO: 556905 - RNA, 19 nt, Artificial Sequence
  Description of Artificial Sequence: Synthetic oligonucleotide
guaggacugcuugauuaga

SEQ ID NO: 556906 - RNA, 19 nt, Artificial Sequence
  Description of Artificial Sequence: Synthetic oligonucleotide
cauagguacguggguaaga

SEQ ID NO: 556907 - RNA, 19 nt, Artificial Sequence
  Description of Artificial Sequence: Synthetic oligonucleotide
cucaacuugugaaaauauu

SEQ ID NO: 556908 - RNA, 19 nt, Artificial Sequence
  Description of Artificial Sequence: Synthetic oligonucleotide
auucucccgaccaccgucu

SEQ ID NO: 556909 - RNA, 19 nt, Artificial Sequence
  Description of Artificial Sequence: Synthetic oligonucleotide
uugggagaugcggccggag

SEQ ID NO: 556910 - RNA, 19 nt, Artificial Sequence
  Description of Artificial Sequence: Synthetic oligonucleotide
gcaauaguaacaguucagu

SEQ ID NO: 556911 - RNA, 19 nt, Artificial Sequence
  Description of Artificial Sequence: Synthetic oligonucleotide
cuauaagauugggagaaau

SEQ ID NO: 556912 - RNA, 19 nt, Artificial Sequence
  Description of Artificial Sequence: Synthetic oligonucleotide
auugcccgcuaaugugcgu

SEQ ID NO: 556913 - RNA, 19 nt, Artificial Sequence
  Description of Artificial Sequence: Synthetic oligonucleotide
ugggcuacauauggcuuua

SEQ ID NO: 556914 - RNA, 19 nt, Artificial Sequence
  Description of Artificial Sequence: Synthetic oligonucleotide
caacacaaguugagaagua

SEQ ID NO: 556915 - RNA, 19 nt, Artificial Sequence
  Description of Artificial Sequence: Synthetic oligonucleotide
cacggaaaacacagcagcu

SEQ ID NO: 556916 - RNA, 19 nt, Artificial Sequence
  Description of Artificial Sequence: Synthetic oligonucleotide
uucccggcauacucugaau

SEQ ID NO: 556917 - RNA, 19 nt, Artificial Sequence
  Description of Artificial Sequence: Synthetic oligonucleotide
cuaccaggucacaagacuu

SEQ ID NO: 556918 - RNA, 19 nt, Artificial Sequence
  Description of Artificial Sequence: Synthetic oligonucleotide
acaccuuagguggugccuu

SEQ ID NO: 556919 - RNA, 19 nt, Artificial Sequence
  Description of Artificial Sequence: Synthetic oligonucleotide
cuacccggagcagagaacu

SEQ ID NO: 556920 - RNA, 19 nt, Artificial Sequence
  Description of Artificial Sequence: Synthetic oligonucleotide
gaagucagaaugacaucau

SEQ ID NO: 556921 - RNA, 19 nt, Artificial Sequence
  Description of Artificial Sequence: Synthetic oligonucleotide
gaagacccuaugucuacuu

SEQ ID NO: 556922 - RNA, 19 nt, Artificial Sequence
  Description of Artificial Sequence: Synthetic oligonucleotide
ggggaacaucgugucacgg

SEQ ID NO: 556923 - RNA, 19 nt, Artificial Sequence
  Description of Artificial Sequence: Synthetic oligonucleotide
cuaaugugcgucgguugca

SEQ ID NO: 556924 - RNA, 19 nt, Artificial Sequence
  Description of Artificial Sequence: Synthetic oligonucleotide
gaacaucgugucacggaaa

SEQ ID NO: 556925 - RNA, 19 nt, Artificial Sequence
  Description of Artificial Sequence: Synthetic oligonucleotide
cguagccucuccaggagag

SEQ ID NO: 556926 - RNA, 19 nt, Artificial Sequence
  Description of Artificial Sequence: Synthetic oligonucleotide
auaugaccaguaagauaga

SEQ ID NO: 556927 - RNA, 19 nt, Artificial Sequence
  Description of Artificial Sequence: Synthetic oligonucleotide
gcaaauggucaucccuuuc

SEQ ID NO: 556928 - RNA, 19 nt, Artificial Sequence
  Description of Artificial Sequence: Synthetic oligonucleotide
agcuaccagguugccaaga

SEQ ID NO: 556929 - RNA, 19 nt, Artificial Sequence
  Description of Artificial Sequence: Synthetic oligonucleotide
cgcugguauaagaaacccc

SEQ ID NO: 556930 - RNA, 19 nt, Artificial Sequence
  Description of Artificial Sequence: Synthetic oligonucleotide
gcaaagggaggcaguuuag

SEQ ID NO: 556931 - RNA, 19 nt, Artificial Sequence
  Description of Artificial Sequence: Synthetic oligonucleotide
gccccgaagacccuauguc

SEQ ID NO: 556932 - RNA, 19 nt, Artificial Sequence
  Description of Artificial Sequence: Synthetic oligonucleotide
ucgaggcaaauggcagugu

SEQ ID NO: 556933 - RNA, 19 nt, Artificial Sequence
  Description of Artificial Sequence: Synthetic oligonucleotide
cuucccuacccggagcaga

SEQ ID NO: 556934 - RNA, 19 nt, Artificial Sequence
  Description of Artificial Sequence: Synthetic oligonucleotide
guuugggcuacagccaggu

SEQ ID NO: 556935 - RNA, 19 nt, Artificial Sequence
  Description of Artificial Sequence: Synthetic oligonucleotide
ugacucacuccaggcucga

SEQ ID NO: 556936 - RNA, 19 nt, Artificial Sequence
  Description of Artificial Sequence: Synthetic oligonucleotide
ggcucccaccaccagucgc

SEQ ID NO: 556937 - RNA, 19 nt, Artificial Sequence
  Description of Artificial Sequence: Synthetic oligonucleotide
gugggagaggcuaaacccu

SEQ ID NO: 556938 - RNA, 19 nt, Artificial Sequence
  Description of Artificial Sequence: Synthetic oligonucleotide
uucucccgaccaccgucuc

SEQ ID NO: 556939 - RNA, 19 nt, Artificial Sequence
  Description of Artificial Sequence: Synthetic oligonucleotide
gccguagccucuccaggag

SEQ ID NO: 556940 - RNA, 19 nt, Artificial Sequence
  Description of Artificial Sequence: Synthetic oligonucleotide
gcccauuuagcgguccuug

SEQ ID NO: 556941 - RNA, 19 nt, Artificial Sequence
  Description of Artificial Sequence: Synthetic oligonucleotide
acagacaaucuuggacuuu

SEQ ID NO: 556942 - RNA, 19 nt, Artificial Sequence
  Description of Artificial Sequence: Synthetic oligonucleotide
ggggaacuaugcaaacaac

SEQ ID NO: 556943 - RNA, 19 nt, Artificial Sequence
  Description of Artificial Sequence: Synthetic oligonucleotide
ccugacggcacaagaguca

SEQ ID NO: 556944 - RNA, 19 nt, Artificial Sequence
  Description of Artificial Sequence: Synthetic oligonucleotide
gagcccaauucuagcuauc

SEQ ID NO: 556945 - RNA, 19 nt, Artificial Sequence
  Description of Artificial Sequence: Synthetic oligonucleotide
ccaggacuagcaauaguaa

SEQ ID NO: 556946 - RNA, 19 nt, Artificial Sequence
  Description of Artificial Sequence: Synthetic oligonucleotide
caccagucgcugguauaag

SEQ ID NO: 556947 - RNA, 19 nt, Artificial Sequence
  Description of Artificial Sequence: Synthetic oligonucleotide
gaugugagucucguugauu

SEQ ID NO: 556948 - RNA, 19 nt, Artificial Sequence
  Description of Artificial Sequence: Synthetic oligonucleotide
aucccauacaaggggcauu

SEQ ID NO: 556949 - RNA, 19 nt, Artificial Sequence
  Description of Artificial Sequence: Synthetic oligonucleotide
gguacggagaagucagaau

SEQ ID NO: 556950 - RNA, 19 nt, Artificial Sequence
  Description of Artificial Sequence: Synthetic oligonucleotide
gacugcuugauuagacauu

SEQ ID NO: 556951 - RNA, 19 nt, Artificial Sequence
  Description of Artificial Sequence: Synthetic oligonucleotide
ccaucucgaagagguacag

SEQ ID NO: 556952 - RNA, 19 nt, Artificial Sequence
  Description of Artificial Sequence: Synthetic oligonucleotide
aucuaagcccuggcccaca

SEQ ID NO: 556953 - RNA, 19 nt, Artificial Sequence
  Description of Artificial Sequence: Synthetic oligonucleotide
aggcacguugcgggguuug

SEQ ID NO: 556954 - RNA, 19 nt, Artificial Sequence
  Description of Artificial Sequence: Synthetic oligonucleotide
agcggcacacaaagucaca

SEQ ID NO: 556955 - RNA, 19 nt, Artificial Sequence
  Description of Artificial Sequence: Synthetic oligonucleotide
gggaaaccucuggugaaca

SEQ ID NO: 556956 - RNA, 19 nt, Artificial Sequence
  Description of Artificial Sequence: Synthetic oligonucleotide
gugcgucgguugcaggaga

SEQ ID NO: 556957 - RNA, 19 nt, Artificial Sequence
  Description of Artificial Sequence: Synthetic oligonucleotide
cgcuaaugugcgucgguug

SEQ ID NO: 556958 - RNA, 19 nt, Artificial Sequence
  Description of Artificial Sequence: Synthetic oligonucleotide
aggcggcuugagaagucug

SEQ ID NO: 556959 - RNA, 19 nt, Artificial Sequence
  Description of Artificial Sequence: Synthetic oligonucleotide
ccuaccaggucacaagacu

SEQ ID NO: 556960 - RNA, 19 nt, Artificial Sequence
  Description of Artificial Sequence: Synthetic oligonucleotide
ggcacguugcgggguuugg

SEQ ID NO: 556961 - RNA, 19 nt, Artificial Sequence
  Description of Artificial Sequence: Synthetic oligonucleotide
ggguacggagaagucagaa

SEQ ID NO: 556962 - RNA, 19 nt, Artificial Sequence
  Description of Artificial Sequence: Synthetic oligonucleotide
cagagaacugcagacccau

SEQ ID NO: 556963 - RNA, 19 nt, Artificial Sequence
  Description of Artificial Sequence: Synthetic oligonucleotide
guacguggguaagacacuu

SEQ ID NO: 556964 - RNA, 19 nt, Artificial Sequence
  Description of Artificial Sequence: Synthetic oligonucleotide
guugggagaugcggccgga

SEQ ID NO: 556965 - RNA, 19 nt, Artificial Sequence
  Description of Artificial Sequence: Synthetic oligonucleotide
gguggugccuuagaauccu

SEQ ID NO: 556966 - RNA, 19 nt, Artificial Sequence
  Description of Artificial Sequence: Synthetic oligonucleotide
cuuuaggguaggacugcuu

SEQ ID NO: 556967 - RNA, 19 nt, Artificial Sequence
  Description of Artificial Sequence: Synthetic oligonucleotide
gcggcacacaaagucacaa

SEQ ID NO: 556968 - RNA, 19 nt, Artificial Sequence
  Description of Artificial Sequence: Synthetic oligonucleotide
cacaagagucagccccgaa

SEQ ID NO: 556969 - RNA, 19 nt, Artificial Sequence
  Description of Artificial Sequence: Synthetic oligonucleotide
gcucgacgcuguucucugc

SEQ ID NO: 556970 - RNA, 19 nt, Artificial Sequence
  Description of Artificial Sequence: Synthetic oligonucleotide
guuccguuccucagacacu

SEQ ID NO: 556971 - RNA, 19 nt, Artificial Sequence
  Description of Artificial Sequence: Synthetic oligonucleotide
ggaaaacaccuuagguggu

SEQ ID NO: 556972 - RNA, 19 nt, Artificial Sequence
  Description of Artificial Sequence: Synthetic oligonucleotide
gcuaccagguugccaagau

SEQ ID NO: 556973 - RNA, 19 nt, Artificial Sequence
  Description of Artificial Sequence: Synthetic oligonucleotide
cacuaccauugacaagggu

SEQ ID NO: 556974 - RNA, 19 nt, Artificial Sequence
  Description of Artificial Sequence: Synthetic oligonucleotide
ggcauacucugaaucuaua

SEQ ID NO: 556975 - RNA, 19 nt, Artificial Sequence
  Description of Artificial Sequence: Synthetic oligonucleotide
cgucgguugcaggagauca

SEQ ID NO: 556976 - RNA, 19 nt, Artificial Sequence
  Description of Artificial Sequence: Synthetic oligonucleotide
ggcauuucagugacucacu

SEQ ID NO: 556977 - RNA, 19 nt, Artificial Sequence
  Description of Artificial Sequence: Synthetic oligonucleotide
ccuuagguggugccuuaga

SEQ ID NO: 556978 - RNA, 19 nt, Artificial Sequence
  Description of Artificial Sequence: Synthetic oligonucleotide
gguugccagcuucccggca

SEQ ID NO: 556979 - RNA, 19 nt, Artificial Sequence
  Description of Artificial Sequence: Synthetic oligonucleotide
cccggcauacucugaaucu

SEQ ID NO: 556980 - RNA, 19 nt, Artificial Sequence
  Description of Artificial Sequence: Synthetic oligonucleotide
cugcucgacgcuguucucu

SEQ ID NO: 556981 - RNA, 19 nt, Artificial Sequence
  Description of Artificial Sequence: Synthetic oligonucleotide
gcccgcuaaugugcgucgg

SEQ ID NO: 556982 - RNA, 19 nt, Artificial Sequence
  Description of Artificial Sequence: Synthetic oligonucleotide
cugcagacccauguccacu

SEQ ID NO: 556983 - RNA, 19 nt, Artificial Sequence
  Description of Artificial Sequence: Synthetic oligonucleotide
gguacguggguaagacacu

SEQ ID NO: 556984 - RNA, 19 nt, Artificial Sequence
  Description of Artificial Sequence: Synthetic oligonucleotide
gccuaggaguucacuauua

SEQ ID NO: 556985 - RNA, 19 nt, Artificial Sequence
  Description of Artificial Sequence: Synthetic oligonucleotide
uggcaguguuugggcuaca

SEQ ID NO: 556986 - RNA, 19 nt, Artificial Sequence
  Description of Artificial Sequence: Synthetic oligonucleotide
ggccuaggaguucacuauu

SEQ ID NO: 556987 - RNA, 19 nt, Artificial Sequence
  Description of Artificial Sequence: Synthetic oligonucleotide
gcacguugcgggguuugga

SEQ ID NO: 556988 - RNA, 19 nt, Artificial Sequence
  Description of Artificial Sequence: Synthetic oligonucleotide
gcgggguuuggagcggcac

SEQ ID NO: 556989 - RNA, 19 nt, Artificial Sequence
  Description of Artificial Sequence: Synthetic oligonucleotide
ggguuuggagcggcacaca

SEQ ID NO: 556990 - RNA, 19 nt, Artificial Sequence
  Description of Artificial Sequence: Synthetic oligonucleotide
ccggcauacucugaaucua

SEQ ID NO: 556991 - RNA, 19 nt, Artificial Sequence
  Description of Artificial Sequence: Synthetic oligonucleotide
gcgucgguugcaggagauc

SEQ ID NO: 556992 - RNA, 19 nt, Artificial Sequence
  Description of Artificial Sequence: Synthetic oligonucleotide
cgggguuuggagcggcaca

SEQ ID NO: 556993 - RNA, 19 nt, Artificial Sequence
  Description of Artificial Sequence: Synthetic oligonucleotide
cccauacaaggggcauuuc

SEQ ID NO: 556994 - RNA, 19 nt, Artificial Sequence
  Description of Artificial Sequence: Synthetic oligonucleotide
gggcuacauauggcuuuaa

SEQ ID NO: 556995 - RNA, 19 nt, Artificial Sequence
  Description of Artificial Sequence: Synthetic oligonucleotide
cggcauacucugaaucuau

SEQ ID NO: 556996 - RNA, 19 nt, Artificial Sequence
  Description of Artificial Sequence: Synthetic oligonucleotide
cgaggcaaauggcaguguu

SEQ ID NO: 556997 - RNA, 19 nt, Artificial Sequence
  Description of Artificial Sequence: Synthetic oligonucleotide
cccgcuaaugugcgucggu

SEQ ID NO: 556998 - RNA, 19 nt, Artificial Sequence
  Description of Artificial Sequence: Synthetic oligonucleotide
ccgcuaaugugcgucgguu

SEQ ID NO: 556999 - RNA, 19 nt, Artificial Sequence
  Description of Artificial Sequence: Synthetic oligonucleotide
aaauuaguuccacacaugg

SEQ ID NO: 557000 - RNA, 19 nt, Artificial Sequence
  Description of Artificial Sequence: Synthetic oligonucleotide
auugguacuuucuugaccc

SEQ ID NO: 557001 - RNA, 19 nt, Artificial Sequence
  Description of Artificial Sequence: Synthetic oligonucleotide
auuaguuccacacauggcg

SEQ ID NO: 557002 - RNA, 19 nt, Artificial Sequence
  Description of Artificial Sequence: Synthetic oligonucleotide
uuucgcauaugucacaugg

SEQ ID NO: 557003 - RNA, 19 nt, Artificial Sequence
  Description of Artificial Sequence: Synthetic oligonucleotide
uuuucgagcacacaaagga

SEQ ID NO: 557004 - RNA, 19 nt, Artificial Sequence
  Description of Artificial Sequence: Synthetic oligonucleotide
uuuagugcaaaacaaauua

SEQ ID NO: 557005 - RNA, 19 nt, Artificial Sequence
  Description of Artificial Sequence: Synthetic oligonucleotide
aauuuucgagcacacaaag

SEQ ID NO: 557006 - RNA, 19 nt, Artificial Sequence
  Description of Artificial Sequence: Synthetic oligonucleotide
uguguguucauuauccuag

SEQ ID NO: 557007 - RNA, 19 nt, Artificial Sequence
  Description of Artificial Sequence: Synthetic oligonucleotide
uuaaucauguccaggauga

SEQ ID NO: 557008 - RNA, 19 nt, Artificial Sequence
  Description of Artificial Sequence: Synthetic oligonucleotide
cagaauuuuauuaagucac

SEQ ID NO: 557009 - RNA, 19 nt, Artificial Sequence
  Description of Artificial Sequence: Synthetic oligonucleotide
aauggcacgcaaugcaggc

SEQ ID NO: 557010 - RNA, 19 nt, Artificial Sequence
  Description of Artificial Sequence: Synthetic oligonucleotide
uuaacagaauuuuauuaag

SEQ ID NO: 557011 - RNA, 19 nt, Artificial Sequence
  Description of Artificial Sequence: Synthetic oligonucleotide
ugugcuaugacgauggcaa

SEQ ID NO: 557012 - RNA, 19 nt, Artificial Sequence
  Description of Artificial Sequence: Synthetic oligonucleotide
uuugcaauggucgacagca

SEQ ID NO: 557013 - RNA, 19 nt, Artificial Sequence
  Description of Artificial Sequence: Synthetic oligonucleotide
aaauagaucuuguguguuc

SEQ ID NO: 557014 - RNA, 19 nt, Artificial Sequence
  Description of Artificial Sequence: Synthetic oligonucleotide
aacccaaagaccugauuac

SEQ ID NO: 557015 - RNA, 19 nt, Artificial Sequence
  Description of Artificial Sequence: Synthetic oligonucleotide
aaccagagcacagauuucc

SEQ ID NO: 557016 - RNA, 19 nt, Artificial Sequence
  Description of Artificial Sequence: Synthetic oligonucleotide
gucaaauagaucuugugug

SEQ ID NO: 557017 - RNA, 19 nt, Artificial Sequence
  Description of Artificial Sequence: Synthetic oligonucleotide
auccauagaaaacuccucg

SEQ ID NO: 557018 - RNA, 19 nt, Artificial Sequence
  Description of Artificial Sequence: Synthetic oligonucleotide
aauaggcugcaacuucagc

SEQ ID NO: 557019 - RNA, 19 nt, Artificial Sequence
  Description of Artificial Sequence: Synthetic oligonucleotide
ugaggguacaucaggagag

SEQ ID NO: 557020 - RNA, 19 nt, Artificial Sequence
  Description of Artificial Sequence: Synthetic oligonucleotide
aacauugguccucacagca

SEQ ID NO: 557021 - RNA, 19 nt, Artificial Sequence
  Description of Artificial Sequence: Synthetic oligonucleotide
acagaauuuuauuaaguca

SEQ ID NO: 557022 - RNA, 19 nt, Artificial Sequence
  Description of Artificial Sequence: Synthetic oligonucleotide
ucuuacaagacagcaaugc

SEQ ID NO: 557023 - RNA, 19 nt, Artificial Sequence
  Description of Artificial Sequence: Synthetic oligonucleotide
uauuaagucacagaaacuu

SEQ ID NO: 557024 - RNA, 19 nt, Artificial Sequence
  Description of Artificial Sequence: Synthetic oligonucleotide
uugguuaacagaauuuuau

SEQ ID NO: 557025 - RNA, 19 nt, Artificial Sequence
  Description of Artificial Sequence: Synthetic oligonucleotide
guaagaaucaaccgccucc

SEQ ID NO: 557026 - RNA, 19 nt, Artificial Sequence
  Description of Artificial Sequence: Synthetic oligonucleotide
guaggggucaggcagaaag

SEQ ID NO: 557027 - RNA, 19 nt, Artificial Sequence
  Description of Artificial Sequence: Synthetic oligonucleotide
ucuucaagauaggaggugg

SEQ ID NO: 557028 - RNA, 19 nt, Artificial Sequence
  Description of Artificial Sequence: Synthetic oligonucleotide
ucaaccgccuccuugcacg

SEQ ID NO: 557029 - RNA, 19 nt, Artificial Sequence
  Description of Artificial Sequence: Synthetic oligonucleotide
guaacgaaggaucucuucc

SEQ ID NO: 557030 - RNA, 19 nt, Artificial Sequence
  Description of Artificial Sequence: Synthetic oligonucleotide
uccuagacccacaaauagg

SEQ ID NO: 557031 - RNA, 19 nt, Artificial Sequence
  Description of Artificial Sequence: Synthetic oligonucleotide
aaucuagguccauuuagcu

SEQ ID NO: 557032 - RNA, 19 nt, Artificial Sequence
  Description of Artificial Sequence: Synthetic oligonucleotide
cagguaagaaucaaccgcc

SEQ ID NO: 557033 - RNA, 19 nt, Artificial Sequence
  Description of Artificial Sequence: Synthetic oligonucleotide
cacuacgcuacacagaggc

SEQ ID NO: 557034 - RNA, 19 nt, Artificial Sequence
  Description of Artificial Sequence: Synthetic oligonucleotide
gaaucaaccgccuccuugc

SEQ ID NO: 557035 - RNA, 19 nt, Artificial Sequence
  Description of Artificial Sequence: Synthetic oligonucleotide
auucagaaguuuccccucc

SEQ ID NO: 557036 - RNA, 19 nt, Artificial Sequence
  Description of Artificial Sequence: Synthetic oligonucleotide
agggcgagagcguacaugg

SEQ ID NO: 557037 - RNA, 19 nt, Artificial Sequence
  Description of Artificial Sequence: Synthetic oligonucleotide
ugcuucaaaucauccauag

SEQ ID NO: 557038 - RNA, 19 nt, Artificial Sequence
  Description of Artificial Sequence: Synthetic oligonucleotide
ucaucguugaucuuggauu

SEQ ID NO: 557039 - RNA, 19 nt, Artificial Sequence
  Description of Artificial Sequence: Synthetic oligonucleotide
uuacaagacagcaaugcua

SEQ ID NO: 557040 - RNA, 19 nt, Artificial Sequence
  Description of Artificial Sequence: Synthetic oligonucleotide
aauagaucuuguguguuca

SEQ ID NO: 557041 - RNA, 19 nt, Artificial Sequence
  Description of Artificial Sequence: Synthetic oligonucleotide
agggguccuacuuagaaug

SEQ ID NO: 557042 - RNA, 19 nt, Artificial Sequence
  Description of Artificial Sequence: Synthetic oligonucleotide
cuugacaugcuccacuaag

SEQ ID NO: 557043 - RNA, 19 nt, Artificial Sequence
  Description of Artificial Sequence: Synthetic oligonucleotide
uacuggucaacguaguucu

SEQ ID NO: 557044 - RNA, 19 nt, Artificial Sequence
  Description of Artificial Sequence: Synthetic oligonucleotide
cuuggauuggaacuggcug

SEQ ID NO: 557045 - RNA, 19 nt, Artificial Sequence
  Description of Artificial Sequence: Synthetic oligonucleotide
guuuggguagugcaggcgg

SEQ ID NO: 557046 - RNA, 19 nt, Artificial Sequence
  Description of Artificial Sequence: Synthetic oligonucleotide
aaugcuagggguccuacuu

SEQ ID NO: 557047 - RNA, 19 nt, Artificial Sequence
  Description of Artificial Sequence: Synthetic oligonucleotide
agagucaugaauccacuca

SEQ ID NO: 557048 - RNA, 19 nt, Artificial Sequence
  Description of Artificial Sequence: Synthetic oligonucleotide
auccuagacccacaaauag

SEQ ID NO: 557049 - RNA, 19 nt, Artificial Sequence
  Description of Artificial Sequence: Synthetic oligonucleotide
uaugacgauggcaauucca

SEQ ID NO: 557050 - RNA, 19 nt, Artificial Sequence
  Description of Artificial Sequence: Synthetic oligonucleotide
guuucaaggccccacauuc

SEQ ID NO: 557051 - RNA, 19 nt, Artificial Sequence
  Description of Artificial Sequence: Synthetic oligonucleotide
aauggcaacuucagaguac

SEQ ID NO: 557052 - RNA, 19 nt, Artificial Sequence
  Description of Artificial Sequence: Synthetic oligonucleotide
aagcaagccaccugcaggu

SEQ ID NO: 557053 - RNA, 19 nt, Artificial Sequence
  Description of Artificial Sequence: Synthetic oligonucleotide
uggucgacagcauugcacc

SEQ ID NO: 557054 - RNA, 19 nt, Artificial Sequence
  Description of Artificial Sequence: Synthetic oligonucleotide
agaaagcagugucccaagc

SEQ ID NO: 557055 - RNA, 19 nt, Artificial Sequence
  Description of Artificial Sequence: Synthetic oligonucleotide
ucaggagagggauauuggc

SEQ ID NO: 557056 - RNA, 19 nt, Artificial Sequence
  Description of Artificial Sequence: Synthetic oligonucleotide
acccucacacaacaaaagg

SEQ ID NO: 557057 - RNA, 19 nt, Artificial Sequence
  Description of Artificial Sequence: Synthetic oligonucleotide
uccucgguaccacaggaag

SEQ ID NO: 557058 - RNA, 19 nt, Artificial Sequence
  Description of Artificial Sequence: Synthetic oligonucleotide
agagcggugaccagaaggc

SEQ ID NO: 557059 - RNA, 19 nt, Artificial Sequence
  Description of Artificial Sequence: Synthetic oligonucleotide
cuacaagguaggaaagggg

SEQ ID NO: 557060 - RNA, 19 nt, Artificial Sequence
  Description of Artificial Sequence: Synthetic oligonucleotide
uuagcuguacacuacgcua

SEQ ID NO: 557061 - RNA, 19 nt, Artificial Sequence
  Description of Artificial Sequence: Synthetic oligonucleotide
gucaugaauccacucacag

SEQ ID NO: 557062 - RNA, 19 nt, Artificial Sequence
  Description of Artificial Sequence: Synthetic oligonucleotide
cacccuagcccacagaacc

SEQ ID NO: 557063 - RNA, 19 nt, Artificial Sequence
  Description of Artificial Sequence: Synthetic oligonucleotide
gaggcuagagucaugaauc

SEQ ID NO: 557064 - RNA, 19 nt, Artificial Sequence
  Description of Artificial Sequence: Synthetic oligonucleotide
caagcaagccaccugcagg

SEQ ID NO: 557065 - RNA, 19 nt, Artificial Sequence
  Description of Artificial Sequence: Synthetic oligonucleotide
acaguuucgcauaugucac

SEQ ID NO: 557066 - RNA, 19 nt, Artificial Sequence
  Description of Artificial Sequence: Synthetic oligonucleotide
gagucaugaauccacucac

SEQ ID NO: 557067 - RNA, 19 nt, Artificial Sequence
  Description of Artificial Sequence: Synthetic oligonucleotide
ucgcauaugucacauggaa

SEQ ID NO: 557068 - RNA, 19 nt, Artificial Sequence
  Description of Artificial Sequence: Synthetic oligonucleotide
ugaauccacucacaggccu

SEQ ID NO: 557069 - RNA, 19 nt, Artificial Sequence
  Description of Artificial Sequence: Synthetic oligonucleotide
agccaaauacuucuggaga

SEQ ID NO: 557070 - RNA, 19 nt, Artificial Sequence
  Description of Artificial Sequence: Synthetic oligonucleotide
auggcguuugcaauggucg

SEQ ID NO: 557071 - RNA, 19 nt, Artificial Sequence
  Description of Artificial Sequence: Synthetic oligonucleotide
cauguucugacaccaguag

SEQ ID NO: 557072 - RNA, 19 nt, Artificial Sequence
  Description of Artificial Sequence: Synthetic oligonucleotide
cuugcacgaguucuggagg

SEQ ID NO: 557073 - RNA, 19 nt, Artificial Sequence
  Description of Artificial Sequence: Synthetic oligonucleotide
cauugguacuuucuugacc

SEQ ID NO: 557074 - RNA, 19 nt, Artificial Sequence
  Description of Artificial Sequence: Synthetic oligonucleotide
caucguugaucuuggauug

SEQ ID NO: 557075 - RNA, 19 nt, Artificial Sequence
  Description of Artificial Sequence: Synthetic oligonucleotide
ucgacagcauugcaccggg

SEQ ID NO: 557076 - RNA, 19 nt, Artificial Sequence
  Description of Artificial Sequence: Synthetic oligonucleotide
caggagagggauauuggcc

SEQ ID NO: 557077 - RNA, 19 nt, Artificial Sequence
  Description of Artificial Sequence: Synthetic oligonucleotide
auuuagcuguacacuacgc

SEQ ID NO: 557078 - RNA, 19 nt, Artificial Sequence
  Description of Artificial Sequence: Synthetic oligonucleotide
agaccugauuacccugugc

SEQ ID NO: 557079 - RNA, 19 nt, Artificial Sequence
  Description of Artificial Sequence: Synthetic oligonucleotide
uuccaaauagcugaccagu

SEQ ID NO: 557080 - RNA, 19 nt, Artificial Sequence
  Description of Artificial Sequence: Synthetic oligonucleotide
ugacccucacacaacaaaa

SEQ ID NO: 557081 - RNA, 19 nt, Artificial Sequence
  Description of Artificial Sequence: Synthetic oligonucleotide
aucugugcuaugacgaugg

SEQ ID NO: 557082 - RNA, 19 nt, Artificial Sequence
  Description of Artificial Sequence: Synthetic oligonucleotide
ccuagacccacaaauaggc

SEQ ID NO: 557083 - RNA, 19 nt, Artificial Sequence
  Description of Artificial Sequence: Synthetic oligonucleotide
ucuuggauuggaacuggcu

SEQ ID NO: 557084 - RNA, 19 nt, Artificial Sequence
  Description of Artificial Sequence: Synthetic oligonucleotide
ccucacacaacaaaaggcc

SEQ ID NO: 557085 - RNA, 19 nt, Artificial Sequence
  Description of Artificial Sequence: Synthetic oligonucleotide
gaaagcagugucccaagca

SEQ ID NO: 557086 - RNA, 19 nt, Artificial Sequence
  Description of Artificial Sequence: Synthetic oligonucleotide
uccuacuuagaaugaaguc

SEQ ID NO: 557087 - RNA, 19 nt, Artificial Sequence
  Description of Artificial Sequence: Synthetic oligonucleotide
auuacccugugcuucaaau

SEQ ID NO: 557088 - RNA, 19 nt, Artificial Sequence
  Description of Artificial Sequence: Synthetic oligonucleotide
gaugaggugagagcaauuc

SEQ ID NO: 557089 - RNA, 19 nt, Artificial Sequence
  Description of Artificial Sequence: Synthetic oligonucleotide
agaucuuguguguucauua

SEQ ID NO: 557090 - RNA, 19 nt, Artificial Sequence
  Description of Artificial Sequence: Synthetic oligonucleotide
ggauauuggccaugaaggg

SEQ ID NO: 557091 - RNA, 19 nt, Artificial Sequence
  Description of Artificial Sequence: Synthetic oligonucleotide
ugcuagggguccuacuuag

SEQ ID NO: 557092 - RNA, 19 nt, Artificial Sequence
  Description of Artificial Sequence: Synthetic oligonucleotide
uuucaaggccccacauucc

SEQ ID NO: 557093 - RNA, 19 nt, Artificial Sequence
  Description of Artificial Sequence: Synthetic oligonucleotide
uucaagauaggagguggcc

SEQ ID NO: 557094 - RNA, 19 nt, Artificial Sequence
  Description of Artificial Sequence: Synthetic oligonucleotide
acccaaagaccugauuacc

SEQ ID NO: 557095 - RNA, 19 nt, Artificial Sequence
  Description of Artificial Sequence: Synthetic oligonucleotide
auuuucgagcacacaaagg

SEQ ID NO: 557096 - RNA, 19 nt, Artificial Sequence
  Description of Artificial Sequence: Synthetic oligonucleotide
acaagagcuacaagguagg

SEQ ID NO: 557097 - RNA, 19 nt, Artificial Sequence
  Description of Artificial Sequence: Synthetic oligonucleotide
uggcacgcaaugcaggcug

SEQ ID NO: 557098 - RNA, 19 nt, Artificial Sequence
  Description of Artificial Sequence: Synthetic oligonucleotide
auugcaccgggcugcaguc

SEQ ID NO: 557099 - RNA, 19 nt, Artificial Sequence
  Description of Artificial Sequence: Synthetic oligonucleotide
acacauggcguuugcaaug

SEQ ID NO: 557100 - RNA, 19 nt, Artificial Sequence
  Description of Artificial Sequence: Synthetic oligonucleotide
uaacauugguccucacagc

SEQ ID NO: 557101 - RNA, 19 nt, Artificial Sequence
  Description of Artificial Sequence: Synthetic oligonucleotide
aaccccaaacaagguagac

SEQ ID NO: 557102 - RNA, 19 nt, Artificial Sequence
  Description of Artificial Sequence: Synthetic oligonucleotide
agcagagguucauauucag

SEQ ID NO: 557103 - RNA, 19 nt, Artificial Sequence
  Description of Artificial Sequence: Synthetic oligonucleotide
uccgggaucuuguuggacu

SEQ ID NO: 557104 - RNA, 19 nt, Artificial Sequence
  Description of Artificial Sequence: Synthetic oligonucleotide
uugcguugcaugugcauca

SEQ ID NO: 557105 - RNA, 19 nt, Artificial Sequence
  Description of Artificial Sequence: Synthetic oligonucleotide
cuucaagauaggagguggc

SEQ ID NO: 557106 - RNA, 19 nt, Artificial Sequence
  Description of Artificial Sequence: Synthetic oligonucleotide
ggcagguaagaaucaaccg

SEQ ID NO: 557107 - RNA, 19 nt, Artificial Sequence
  Description of Artificial Sequence: Synthetic oligonucleotide
uuuggguagugcaggcggc

SEQ ID NO: 557108 - RNA, 19 nt, Artificial Sequence
  Description of Artificial Sequence: Synthetic oligonucleotide
uucagaaguuuccccuccc

SEQ ID NO: 557109 - RNA, 19 nt, Artificial Sequence
  Description of Artificial Sequence: Synthetic oligonucleotide
agcuacaagguaggaaagg

SEQ ID NO: 557110 - RNA, 19 nt, Artificial Sequence
  Description of Artificial Sequence: Synthetic oligonucleotide
ggcaacuucagaguacugg

SEQ ID NO: 557111 - RNA, 19 nt, Artificial Sequence
  Description of Artificial Sequence: Synthetic oligonucleotide
aucccgcggaccuaaaucu

SEQ ID NO: 557112 - RNA, 19 nt, Artificial Sequence
  Description of Artificial Sequence: Synthetic oligonucleotide
uucgcauaugucacaugga

SEQ ID NO: 557113 - RNA, 19 nt, Artificial Sequence
  Description of Artificial Sequence: Synthetic oligonucleotide
gaucccgcggaccuaaauc

SEQ ID NO: 557114 - RNA, 19 nt, Artificial Sequence
  Description of Artificial Sequence: Synthetic oligonucleotide
agcacauaccuucgggucu

SEQ ID NO: 557115 - RNA, 19 nt, Artificial Sequence
  Description of Artificial Sequence: Synthetic oligonucleotide
ugggcaaguuacauucaga

SEQ ID NO: 557116 - RNA, 19 nt, Artificial Sequence
  Description of Artificial Sequence: Synthetic oligonucleotide
ggcgaagagggcgagagcg

SEQ ID NO: 557117 - RNA, 19 nt, Artificial Sequence
  Description of Artificial Sequence: Synthetic oligonucleotide
aagaccugauuacccugug

SEQ ID NO: 557118 - RNA, 19 nt, Artificial Sequence
  Description of Artificial Sequence: Synthetic oligonucleotide
cacacuucacagaacccac

SEQ ID NO: 557119 - RNA, 19 nt, Artificial Sequence
  Description of Artificial Sequence: Synthetic oligonucleotide
acgcaaugcaggcuguuug

SEQ ID NO: 557120 - RNA, 19 nt, Artificial Sequence
  Description of Artificial Sequence: Synthetic oligonucleotide
aagguaacauugguccuca

SEQ ID NO: 557121 - RNA, 19 nt, Artificial Sequence
  Description of Artificial Sequence: Synthetic oligonucleotide
aacccaccggucuucuucu

SEQ ID NO: 557122 - RNA, 19 nt, Artificial Sequence
  Description of Artificial Sequence: Synthetic oligonucleotide
cuacacagaggccucucag

SEQ ID NO: 557123 - RNA, 19 nt, Artificial Sequence
  Description of Artificial Sequence: Synthetic oligonucleotide
augacccucacacaacaaa

SEQ ID NO: 557124 - RNA, 19 nt, Artificial Sequence
  Description of Artificial Sequence: Synthetic oligonucleotide
cagcaagcuggaaaauuag

SEQ ID NO: 557125 - RNA, 19 nt, Artificial Sequence
  Description of Artificial Sequence: Synthetic oligonucleotide
ugucacauggaagggauuu

SEQ ID NO: 557126 - RNA, 19 nt, Artificial Sequence
  Description of Artificial Sequence: Synthetic oligonucleotide
aucaaccgccuccuugcac

SEQ ID NO: 557127 - RNA, 19 nt, Artificial Sequence
  Description of Artificial Sequence: Synthetic oligonucleotide
agggcaagccccaauuuuc

SEQ ID NO: 557128 - RNA, 19 nt, Artificial Sequence
  Description of Artificial Sequence: Synthetic oligonucleotide
gaauggcaacuucagagua

SEQ ID NO: 557129 - RNA, 19 nt, Artificial Sequence
  Description of Artificial Sequence: Synthetic oligonucleotide
agguuguguuccaaauagc

SEQ ID NO: 557130 - RNA, 19 nt, Artificial Sequence
  Description of Artificial Sequence: Synthetic oligonucleotide
agagcguacaugguggccu

SEQ ID NO: 557131 - RNA, 19 nt, Artificial Sequence
  Description of Artificial Sequence: Synthetic oligonucleotide
cccucacacaacaaaaggc

SEQ ID NO: 557132 - RNA, 19 nt, Artificial Sequence
  Description of Artificial Sequence: Synthetic oligonucleotide
agacagcaaugcuaggggu

SEQ ID NO: 557133 - RNA, 19 nt, Artificial Sequence
  Description of Artificial Sequence: Synthetic oligonucleotide
auggcaacuucagaguacu

SEQ ID NO: 557134 - RNA, 19 nt, Artificial Sequence
  Description of Artificial Sequence: Synthetic oligonucleotide
cucacacaacaaaaggcca

SEQ ID NO: 557135 - RNA, 19 nt, Artificial Sequence
  Description of Artificial Sequence: Synthetic oligonucleotide
guaggaaaggggcgugcag

SEQ ID NO: 557136 - RNA, 19 nt, Artificial Sequence
  Description of Artificial Sequence: Synthetic oligonucleotide
cauagaaaacuccucggua

SEQ ID NO: 557137 - RNA, 19 nt, Artificial Sequence
  Description of Artificial Sequence: Synthetic oligonucleotide
caauuuucgagcacacaaa

SEQ ID NO: 557138 - RNA, 19 nt, Artificial Sequence
  Description of Artificial Sequence: Synthetic oligonucleotide
agaagccccaccccguaca

SEQ ID NO: 557139 - RNA, 19 nt, Artificial Sequence
  Description of Artificial Sequence: Synthetic oligonucleotide
uggauuggaacuggcugug

SEQ ID NO: 557140 - RNA, 19 nt, Artificial Sequence
  Description of Artificial Sequence: Synthetic oligonucleotide
acuacgcuacacagaggcc

SEQ ID NO: 557141 - RNA, 19 nt, Artificial Sequence
  Description of Artificial Sequence: Synthetic oligonucleotide
cagcacauaccuucggguc

SEQ ID NO: 557142 - RNA, 19 nt, Artificial Sequence
  Description of Artificial Sequence: Synthetic oligonucleotide
ucucaguucaucgcccgcu

SEQ ID NO: 557143 - RNA, 19 nt, Artificial Sequence
  Description of Artificial Sequence: Synthetic oligonucleotide
aucuuggauuggaacuggc

SEQ ID NO: 557144 - RNA, 19 nt, Artificial Sequence
  Description of Artificial Sequence: Synthetic oligonucleotide
gucgacagcauugcaccgg

SEQ ID NO: 557145 - RNA, 19 nt, Artificial Sequence
  Description of Artificial Sequence: Synthetic oligonucleotide
ucguacuccgcaagcugca

SEQ ID NO: 557146 - RNA, 19 nt, Artificial Sequence
  Description of Artificial Sequence: Synthetic oligonucleotide
cuuguuggacucaagcugu

SEQ ID NO: 557147 - RNA, 19 nt, Artificial Sequence
  Description of Artificial Sequence: Synthetic oligonucleotide
aagagggcgagagcguaca

SEQ ID NO: 557148 - RNA, 19 nt, Artificial Sequence
  Description of Artificial Sequence: Synthetic oligonucleotide
ugcuugacaugcuccacua

SEQ ID NO: 557149 - RNA, 19 nt, Artificial Sequence
  Description of Artificial Sequence: Synthetic oligonucleotide
aggguacaucaggagaggg

SEQ ID NO: 557150 - RNA, 19 nt, Artificial Sequence
  Description of Artificial Sequence: Synthetic oligonucleotide
ugguacuuucuugacccca

SEQ ID NO: 557151 - RNA, 19 nt, Artificial Sequence
  Description of Artificial Sequence: Synthetic oligonucleotide
cuaugacgauggcaauucc

SEQ ID NO: 557152 - RNA, 19 nt, Artificial Sequence
  Description of Artificial Sequence: Synthetic oligonucleotide
augacgauggcaauuccau

SEQ ID NO: 557153 - RNA, 19 nt, Artificial Sequence
  Description of Artificial Sequence: Synthetic oligonucleotide
ugacaacaguuucgcauau

SEQ ID NO: 557154 - RNA, 19 nt, Artificial Sequence
  Description of Artificial Sequence: Synthetic oligonucleotide
aguuucgcauaugucacau

SEQ ID NO: 557155 - RNA, 19 nt, Artificial Sequence
  Description of Artificial Sequence: Synthetic oligonucleotide
aacguaguucuugcacaug

SEQ ID NO: 557156 - RNA, 19 nt, Artificial Sequence
  Description of Artificial Sequence: Synthetic oligonucleotide
gggcaaguuacauucagaa

SEQ ID NO: 557157 - RNA, 19 nt, Artificial Sequence
  Description of Artificial Sequence: Synthetic oligonucleotide
gguaacauugguccucaca

SEQ ID NO: 557158 - RNA, 19 nt, Artificial Sequence
  Description of Artificial Sequence: Synthetic oligonucleotide
agguaggaaaggggcgugc

SEQ ID NO: 557159 - RNA, 19 nt, Artificial Sequence
  Description of Artificial Sequence: Synthetic oligonucleotide
uacgcuacacagaggccuc

SEQ ID NO: 557160 - RNA, 19 nt, Artificial Sequence
  Description of Artificial Sequence: Synthetic oligonucleotide
gacagcauugcaccgggcu

SEQ ID NO: 557161 - RNA, 19 nt, Artificial Sequence
  Description of Artificial Sequence: Synthetic oligonucleotide
ucaacccaaagaccugauu

SEQ ID NO: 557162 - RNA, 19 nt, Artificial Sequence
  Description of Artificial Sequence: Synthetic oligonucleotide
cacgaguucuggaggcuag

SEQ ID NO: 557163 - RNA, 19 nt, Artificial Sequence
  Description of Artificial Sequence: Synthetic oligonucleotide
agauaggagguggccacag

SEQ ID NO: 557164 - RNA, 19 nt, Artificial Sequence
  Description of Artificial Sequence: Synthetic oligonucleotide
ugaccagaaggcuggcgaa

SEQ ID NO: 557165 - RNA, 19 nt, Artificial Sequence
  Description of Artificial Sequence: Synthetic oligonucleotide
ugacgauggcaauuccauc

SEQ ID NO: 557166 - RNA, 19 nt, Artificial Sequence
  Description of Artificial Sequence: Synthetic oligonucleotide
agagggauauuggccauga

SEQ ID NO: 557167 - RNA, 19 nt, Artificial Sequence
  Description of Artificial Sequence: Synthetic oligonucleotide
ccuugcacgaguucuggag

SEQ ID NO: 557168 - RNA, 19 nt, Artificial Sequence
  Description of Artificial Sequence: Synthetic oligonucleotide
guugcguugcaugugcauc

SEQ ID NO: 557169 - RNA, 19 nt, Artificial Sequence
  Description of Artificial Sequence: Synthetic oligonucleotide
cauaccuucgggucuugga

SEQ ID NO: 557170 - RNA, 19 nt, Artificial Sequence
  Description of Artificial Sequence: Synthetic oligonucleotide
gguccuacuuagaaugaag

SEQ ID NO: 557171 - RNA, 19 nt, Artificial Sequence
  Description of Artificial Sequence: Synthetic oligonucleotide
uggcguuugcaauggucga

SEQ ID NO: 557172 - RNA, 19 nt, Artificial Sequence
  Description of Artificial Sequence: Synthetic oligonucleotide
cuuagguugcguugcaugu

SEQ ID NO: 557173 - RNA, 19 nt, Artificial Sequence
  Description of Artificial Sequence: Synthetic oligonucleotide
agguugagugcagagcaca

SEQ ID NO: 557174 - RNA, 19 nt, Artificial Sequence
  Description of Artificial Sequence: Synthetic oligonucleotide
ggcaauuccaucaacccaa

SEQ ID NO: 557175 - RNA, 19 nt, Artificial Sequence
  Description of Artificial Sequence: Synthetic oligonucleotide
aucguugaucuuggauugg

SEQ ID NO: 557176 - RNA, 19 nt, Artificial Sequence
  Description of Artificial Sequence: Synthetic oligonucleotide
uuccuuagguugcguugca

SEQ ID NO: 557177 - RNA, 19 nt, Artificial Sequence
  Description of Artificial Sequence: Synthetic oligonucleotide
acuguucaugacccucaca

SEQ ID NO: 557178 - RNA, 19 nt, Artificial Sequence
  Description of Artificial Sequence: Synthetic oligonucleotide
cugauuacccugugcuuca

SEQ ID NO: 557179 - RNA, 19 nt, Artificial Sequence
  Description of Artificial Sequence: Synthetic oligonucleotide
guuucgcauaugucacaug

SEQ ID NO: 557180 - RNA, 19 nt, Artificial Sequence
  Description of Artificial Sequence: Synthetic oligonucleotide
cauuauccuagacccacaa

SEQ ID NO: 557181 - RNA, 19 nt, Artificial Sequence
  Description of Artificial Sequence: Synthetic oligonucleotide
ccuuagguugcguugcaug

SEQ ID NO: 557182 - RNA, 19 nt, Artificial Sequence
  Description of Artificial Sequence: Synthetic oligonucleotide
gguaagaaucaaccgccuc

SEQ ID NO: 557183 - RNA, 19 nt, Artificial Sequence
  Description of Artificial Sequence: Synthetic oligonucleotide
gagggcgagagcguacaug

SEQ ID NO: 557184 - RNA, 19 nt, Artificial Sequence
  Description of Artificial Sequence: Synthetic oligonucleotide
agcggugaccagaaggcug

SEQ ID NO: 557185 - RNA, 19 nt, Artificial Sequence
  Description of Artificial Sequence: Synthetic oligonucleotide
gcuaugacgauggcaauuc

SEQ ID NO: 557186 - RNA, 19 nt, Artificial Sequence
  Description of Artificial Sequence: Synthetic oligonucleotide
aggugcuucugaaaucugu

SEQ ID NO: 557187 - RNA, 19 nt, Artificial Sequence
  Description of Artificial Sequence: Synthetic oligonucleotide
gagagcguacaugguggcc

SEQ ID NO: 557188 - RNA, 19 nt, Artificial Sequence
  Description of Artificial Sequence: Synthetic oligonucleotide
caccggucuucuucugagg

SEQ ID NO: 557189 - RNA, 19 nt, Artificial Sequence
  Description of Artificial Sequence: Synthetic oligonucleotide
ggcggcagggaccaaaguc

SEQ ID NO: 557190 - RNA, 19 nt, Artificial Sequence
  Description of Artificial Sequence: Synthetic oligonucleotide
ugaucccgcggaccuaaau

SEQ ID NO: 557191 - RNA, 19 nt, Artificial Sequence
  Description of Artificial Sequence: Synthetic oligonucleotide
ggccucucaguucaucgcc

SEQ ID NO: 557192 - RNA, 19 nt, Artificial Sequence
  Description of Artificial Sequence: Synthetic oligonucleotide
agguaacauugguccucac

SEQ ID NO: 557193 - RNA, 19 nt, Artificial Sequence
  Description of Artificial Sequence: Synthetic oligonucleotide
acuccgcaagcugcacugc

SEQ ID NO: 557194 - RNA, 19 nt, Artificial Sequence
  Description of Artificial Sequence: Synthetic oligonucleotide
caucaacccaaagaccuga

SEQ ID NO: 557195 - RNA, 19 nt, Artificial Sequence
  Description of Artificial Sequence: Synthetic oligonucleotide
ggucgacagcauugcaccg

SEQ ID NO: 557196 - RNA, 19 nt, Artificial Sequence
  Description of Artificial Sequence: Synthetic oligonucleotide
gcaauucaacaagagcuac

SEQ ID NO: 557197 - RNA, 19 nt, Artificial Sequence
  Description of Artificial Sequence: Synthetic oligonucleotide
caccucuuacaagacagca

SEQ ID NO: 557198 - RNA, 19 nt, Artificial Sequence
  Description of Artificial Sequence: Synthetic oligonucleotide
acauaccuucgggucuugg

SEQ ID NO: 557199 - RNA, 19 nt, Artificial Sequence
  Description of Artificial Sequence: Synthetic oligonucleotide
caaccagagcacagauuuc

SEQ ID NO: 557200 - RNA, 19 nt, Artificial Sequence
  Description of Artificial Sequence: Synthetic oligonucleotide
gcaacuucagaguacuggu

SEQ ID NO: 557201 - RNA, 19 nt, Artificial Sequence
  Description of Artificial Sequence: Synthetic oligonucleotide
gaagagggcgagagcguac

SEQ ID NO: 557202 - RNA, 19 nt, Artificial Sequence
  Description of Artificial Sequence: Synthetic oligonucleotide
caugaugaggugagagcaa

SEQ ID NO: 557203 - RNA, 19 nt, Artificial Sequence
  Description of Artificial Sequence: Synthetic oligonucleotide
ccguacaccaagucagggc

SEQ ID NO: 557204 - RNA, 19 nt, Artificial Sequence
  Description of Artificial Sequence: Synthetic oligonucleotide
agggaccaaagucuucauu

SEQ ID NO: 557205 - RNA, 19 nt, Artificial Sequence
  Description of Artificial Sequence: Synthetic oligonucleotide
gauuucgcugugggcuugc

SEQ ID NO: 557206 - RNA, 19 nt, Artificial Sequence
  Description of Artificial Sequence: Synthetic oligonucleotide
accugauuacccugugcuu

SEQ ID NO: 557207 - RNA, 19 nt, Artificial Sequence
  Description of Artificial Sequence: Synthetic oligonucleotide
cagaaggggaacacugaaa

SEQ ID NO: 557208 - RNA, 19 nt, Artificial Sequence
  Description of Artificial Sequence: Synthetic oligonucleotide
guccuacuuagaaugaagu

SEQ ID NO: 557209 - RNA, 19 nt, Artificial Sequence
  Description of Artificial Sequence: Synthetic oligonucleotide
gauuacccugugcuucaaa

SEQ ID NO: 557210 - RNA, 19 nt, Artificial Sequence
  Description of Artificial Sequence: Synthetic oligonucleotide
acagaaccccaaacaaggu

SEQ ID NO: 557211 - RNA, 19 nt, Artificial Sequence
  Description of Artificial Sequence: Synthetic oligonucleotide
augcuagggguccuacuua

SEQ ID NO: 557212 - RNA, 19 nt, Artificial Sequence
  Description of Artificial Sequence: Synthetic oligonucleotide
gggcaagccccaauuuucg

SEQ ID NO: 557213 - RNA, 19 nt, Artificial Sequence
  Description of Artificial Sequence: Synthetic oligonucleotide
cuacgcuacacagaggccu

SEQ ID NO: 557214 - RNA, 19 nt, Artificial Sequence
  Description of Artificial Sequence: Synthetic oligonucleotide
guacacuacgcuacacaga

SEQ ID NO: 557215 - RNA, 19 nt, Artificial Sequence
  Description of Artificial Sequence: Synthetic oligonucleotide
cgcauaugucacauggaag

SEQ ID NO: 557216 - RNA, 19 nt, Artificial Sequence
  Description of Artificial Sequence: Synthetic oligonucleotide
agguucauauucagacaca

SEQ ID NO: 557217 - RNA, 19 nt, Artificial Sequence
  Description of Artificial Sequence: Synthetic oligonucleotide
accucuuacaagacagcaa

SEQ ID NO: 557218 - RNA, 19 nt, Artificial Sequence
  Description of Artificial Sequence: Synthetic oligonucleotide
caccccguacaccaaguca

SEQ ID NO: 557219 - RNA, 19 nt, Artificial Sequence
  Description of Artificial Sequence: Synthetic oligonucleotide
agagacuggcacagguuga

SEQ ID NO: 557220 - RNA, 19 nt, Artificial Sequence
  Description of Artificial Sequence: Synthetic oligonucleotide
agguaagaaucaaccgccu

SEQ ID NO: 557221 - RNA, 19 nt, Artificial Sequence
  Description of Artificial Sequence: Synthetic oligonucleotide
uuguuggacucaagcuguu

SEQ ID NO: 557222 - RNA, 19 nt, Artificial Sequence
  Description of Artificial Sequence: Synthetic oligonucleotide
guguuccaaauagcugacc

SEQ ID NO: 557223 - RNA, 19 nt, Artificial Sequence
  Description of Artificial Sequence: Synthetic oligonucleotide
ugcacgaguucuggaggcu

SEQ ID NO: 557224 - RNA, 19 nt, Artificial Sequence
  Description of Artificial Sequence: Synthetic oligonucleotide
ccucucaguucaucgcccg

SEQ ID NO: 557225 - RNA, 19 nt, Artificial Sequence
  Description of Artificial Sequence: Synthetic oligonucleotide
cugugcuaugacgauggca

SEQ ID NO: 557226 - RNA, 19 nt, Artificial Sequence
  Description of Artificial Sequence: Synthetic oligonucleotide
caggugcuucugaaaucug

SEQ ID NO: 557227 - RNA, 19 nt, Artificial Sequence
  Description of Artificial Sequence: Synthetic oligonucleotide
ucgguaccacaggaaggug

SEQ ID NO: 557228 - RNA, 19 nt, Artificial Sequence
  Description of Artificial Sequence: Synthetic oligonucleotide
acagaagccccaccccgua

SEQ ID NO: 557229 - RNA, 19 nt, Artificial Sequence
  Description of Artificial Sequence: Synthetic oligonucleotide
caguuucgcauaugucaca

SEQ ID NO: 557230 - RNA, 19 nt, Artificial Sequence
  Description of Artificial Sequence: Synthetic oligonucleotide
ucccgcggaccuaaaucua

SEQ ID NO: 557231 - RNA, 19 nt, Artificial Sequence
  Description of Artificial Sequence: Synthetic oligonucleotide
caucacacuccuucuggua

SEQ ID NO: 557232 - RNA, 19 nt, Artificial Sequence
  Description of Artificial Sequence: Synthetic oligonucleotide
cucgguaccacaggaaggu

SEQ ID NO: 557233 - RNA, 19 nt, Artificial Sequence
  Description of Artificial Sequence: Synthetic oligonucleotide
caccuccgggaucuuguug

SEQ ID NO: 557234 - RNA, 19 nt, Artificial Sequence
  Description of Artificial Sequence: Synthetic oligonucleotide
gcugaccuagaaagcagug

SEQ ID NO: 557235 - RNA, 19 nt, Artificial Sequence
  Description of Artificial Sequence: Synthetic oligonucleotide
ccaucaacccaaagaccug

SEQ ID NO: 557236 - RNA, 19 nt, Artificial Sequence
  Description of Artificial Sequence: Synthetic oligonucleotide
auggcacgcaaugcaggcu

SEQ ID NO: 557237 - RNA, 19 nt, Artificial Sequence
  Description of Artificial Sequence: Synthetic oligonucleotide
ggauuggaacuggcugugg

SEQ ID NO: 557238 - RNA, 19 nt, Artificial Sequence
  Description of Artificial Sequence: Synthetic oligonucleotide
acauggcguuugcaauggu

SEQ ID NO: 557239 - RNA, 19 nt, Artificial Sequence
  Description of Artificial Sequence: Synthetic oligonucleotide
gcugaccaguuucuugcac

SEQ ID NO: 557240 - RNA, 19 nt, Artificial Sequence
  Description of Artificial Sequence: Synthetic oligonucleotide
cagaagccccaccccguac

SEQ ID NO: 557241 - RNA, 19 nt, Artificial Sequence
  Description of Artificial Sequence: Synthetic oligonucleotide
cuagacccacaaauaggcu

SEQ ID NO: 557242 - RNA, 19 nt, Artificial Sequence
  Description of Artificial Sequence: Synthetic oligonucleotide
uccuuagguugcguugcau

SEQ ID NO: 557243 - RNA, 19 nt, Artificial Sequence
  Description of Artificial Sequence: Synthetic oligonucleotide
gguugagugcagagcacac

SEQ ID NO: 557244 - RNA, 19 nt, Artificial Sequence
  Description of Artificial Sequence: Synthetic oligonucleotide
gucagagcggugaccagaa

SEQ ID NO: 557245 - RNA, 19 nt, Artificial Sequence
  Description of Artificial Sequence: Synthetic oligonucleotide
gaagggcaagccccaauuu

SEQ ID NO: 557246 - RNA, 19 nt, Artificial Sequence
  Description of Artificial Sequence: Synthetic oligonucleotide
caugacccucacacaacaa

SEQ ID NO: 557247 - RNA, 19 nt, Artificial Sequence
  Description of Artificial Sequence: Synthetic oligonucleotide
gugauccugaggguacauc

SEQ ID NO: 557248 - RNA, 19 nt, Artificial Sequence
  Description of Artificial Sequence: Synthetic oligonucleotide
ccucuuacaagacagcaau

SEQ ID NO: 557249 - RNA, 19 nt, Artificial Sequence
  Description of Artificial Sequence: Synthetic oligonucleotide
gcccugacagccaagcuga

SEQ ID NO: 557250 - RNA, 19 nt, Artificial Sequence
  Description of Artificial Sequence: Synthetic oligonucleotide
ugauuacccugugcuucaa

SEQ ID NO: 557251 - RNA, 19 nt, Artificial Sequence
  Description of Artificial Sequence: Synthetic oligonucleotide
ccucguacuccgcaagcug

SEQ ID NO: 557252 - RNA, 19 nt, Artificial Sequence
  Description of Artificial Sequence: Synthetic oligonucleotide
ggccucguacuccgcaagc

SEQ ID NO: 557253 - RNA, 19 nt, Artificial Sequence
  Description of Artificial Sequence: Synthetic oligonucleotide
ugcguugcaugugcaucau

SEQ ID NO: 557254 - RNA, 19 nt, Artificial Sequence
  Description of Artificial Sequence: Synthetic oligonucleotide
gguaggaaaggggcgugca

SEQ ID NO: 557255 - RNA, 19 nt, Artificial Sequence
  Description of Artificial Sequence: Synthetic oligonucleotide
cuagcccacagaaccccaa

SEQ ID NO: 557256 - RNA, 19 nt, Artificial Sequence
  Description of Artificial Sequence: Synthetic oligonucleotide
cuccgcaagcugcacugca

SEQ ID NO: 557257 - RNA, 19 nt, Artificial Sequence
  Description of Artificial Sequence: Synthetic oligonucleotide
cugaccuagaaagcagugu

SEQ ID NO: 557258 - RNA, 19 nt, Artificial Sequence
  Description of Artificial Sequence: Synthetic oligonucleotide
cccgcggaccuaaaucuac

SEQ ID NO: 557259 - RNA, 19 nt, Artificial Sequence
  Description of Artificial Sequence: Synthetic oligonucleotide
ccccuuaaucauguccagg

SEQ ID NO: 557260 - RNA, 19 nt, Artificial Sequence
  Description of Artificial Sequence: Synthetic oligonucleotide
ggcguuugcaauggucgac

SEQ ID NO: 557261 - RNA, 19 nt, Artificial Sequence
  Description of Artificial Sequence: Synthetic oligonucleotide
caaauagaucuuguguguu

SEQ ID NO: 557262 - RNA, 19 nt, Artificial Sequence
  Description of Artificial Sequence: Synthetic oligonucleotide
agagggcgagagcguacau

SEQ ID NO: 557263 - RNA, 19 nt, Artificial Sequence
  Description of Artificial Sequence: Synthetic oligonucleotide
gagggauauuggccaugaa

SEQ ID NO: 557264 - RNA, 19 nt, Artificial Sequence
  Description of Artificial Sequence: Synthetic oligonucleotide
guggccucguacuccgcaa

SEQ ID NO: 557265 - RNA, 19 nt, Artificial Sequence
  Description of Artificial Sequence: Synthetic oligonucleotide
ccccguacaccaagucagg

SEQ ID NO: 557266 - RNA, 19 nt, Artificial Sequence
  Description of Artificial Sequence: Synthetic oligonucleotide
gcguuugcaauggucgaca

SEQ ID NO: 557267 - RNA, 19 nt, Artificial Sequence
  Description of Artificial Sequence: Synthetic oligonucleotide
cccguacaccaagucaggg

SEQ ID NO: 557268 - RNA, 19 nt, Artificial Sequence
  Description of Artificial Sequence: Synthetic oligonucleotide
cuccucgguaccacaggaa

SEQ ID NO: 557269 - RNA, 19 nt, Artificial Sequence
  Description of Artificial Sequence: Synthetic oligonucleotide
ggcagaaggggaacacuga

SEQ ID NO: 557270 - RNA, 19 nt, Artificial Sequence
  Description of Artificial Sequence: Synthetic oligonucleotide
cuccgggaucuuguuggac

SEQ ID NO: 557271 - RNA, 19 nt, Artificial Sequence
  Description of Artificial Sequence: Synthetic oligonucleotide
ccauagaaaacuccucggu

SEQ ID NO: 557272 - RNA, 19 nt, Artificial Sequence
  Description of Artificial Sequence: Synthetic oligonucleotide
cguuugcaauggucgacag

SEQ ID NO: 557273 - RNA, 19 nt, Artificial Sequence
  Description of Artificial Sequence: Synthetic oligonucleotide
gccucucaguucaucgccc

SEQ ID NO: 557274 - RNA, 19 nt, Artificial Sequence
  Description of Artificial Sequence: Synthetic oligonucleotide
auuucgcugugggcuugcu

SEQ ID NO: 557275 - RNA, 19 nt, Artificial Sequence
  Description of Artificial Sequence: Synthetic oligonucleotide
cuagguccauuuagcugua

SEQ ID NO: 557276 - RNA, 19 nt, Artificial Sequence
  Description of Artificial Sequence: Synthetic oligonucleotide
agguugcguugcaugugca

SEQ ID NO: 557277 - RNA, 19 nt, Artificial Sequence
  Description of Artificial Sequence: Synthetic oligonucleotide
aggcuggcgaagagggcga

SEQ ID NO: 557278 - RNA, 19 nt, Artificial Sequence
  Description of Artificial Sequence: Synthetic oligonucleotide
cauccaugaugaggugaga

SEQ ID NO: 557279 - RNA, 19 nt, Artificial Sequence
  Description of Artificial Sequence: Synthetic oligonucleotide
acgcuacacagaggccucu

SEQ ID NO: 557280 - RNA, 19 nt, Artificial Sequence
  Description of Artificial Sequence: Synthetic oligonucleotide
ccccaggcggucacacucc

SEQ ID NO: 557281 - RNA, 19 nt, Artificial Sequence
  Description of Artificial Sequence: Synthetic oligonucleotide
aggugagcagcaaccucuu

SEQ ID NO: 557282 - RNA, 19 nt, Artificial Sequence
  Description of Artificial Sequence: Synthetic oligonucleotide
ggcacagguugagugcaga

SEQ ID NO: 557283 - RNA, 19 nt, Artificial Sequence
  Description of Artificial Sequence: Synthetic oligonucleotide
agcuagggccccagacaca

SEQ ID NO: 557284 - RNA, 19 nt, Artificial Sequence
  Description of Artificial Sequence: Synthetic oligonucleotide
ggguccuacuuagaaugaa

SEQ ID NO: 557285 - RNA, 19 nt, Artificial Sequence
  Description of Artificial Sequence: Synthetic oligonucleotide
gagcggugaccagaaggcu

SEQ ID NO: 557286 - RNA, 19 nt, Artificial Sequence
  Description of Artificial Sequence: Synthetic oligonucleotide
cacauaccuucgggucuug

SEQ ID NO: 557287 - RNA, 19 nt, Artificial Sequence
  Description of Artificial Sequence: Synthetic oligonucleotide
gguacuuucuugaccccau

SEQ ID NO: 557288 - RNA, 19 nt, Artificial Sequence
  Description of Artificial Sequence: Synthetic oligonucleotide
gguugcguugcaugugcau

SEQ ID NO: 557289 - RNA, 19 nt, Artificial Sequence
  Description of Artificial Sequence: Synthetic oligonucleotide
gcugaucccgcggaccuaa

SEQ ID NO: 557290 - RNA, 19 nt, Artificial Sequence
  Description of Artificial Sequence: Synthetic oligonucleotide
ggcugaccuagaaagcagu

SEQ ID NO: 557291 - RNA, 19 nt, Artificial Sequence
  Description of Artificial Sequence: Synthetic oligonucleotide
ccggucuucuucugaggca

SEQ ID NO: 557292 - RNA, 19 nt, Artificial Sequence
  Description of Artificial Sequence: Synthetic oligonucleotide
caguagcuagggccccaga

SEQ ID NO: 557293 - RNA, 19 nt, Artificial Sequence
  Description of Artificial Sequence: Synthetic oligonucleotide
ccaguagcuagggccccag

SEQ ID NO: 557294 - RNA, 19 nt, Artificial Sequence
  Description of Artificial Sequence: Synthetic oligonucleotide
gugcuaugacgauggcaau

SEQ ID NO: 557295 - RNA, 19 nt, Artificial Sequence
  Description of Artificial Sequence: Synthetic oligonucleotide
ccgcaagcugcacugcaga

SEQ ID NO: 557296 - RNA, 19 nt, Artificial Sequence
  Description of Artificial Sequence: Synthetic oligonucleotide
ggcuggcgaagagggcgag

SEQ ID NO: 557297 - RNA, 19 nt, Artificial Sequence
  Description of Artificial Sequence: Synthetic oligonucleotide
gcacgaguucuggaggcua

SEQ ID NO: 557298 - RNA, 19 nt, Artificial Sequence
  Description of Artificial Sequence: Synthetic oligonucleotide
cugaucccgcggaccuaaa

SEQ ID NO: 557299 - RNA, 19 nt, Artificial Sequence
  Description of Artificial Sequence: Synthetic oligonucleotide
gggcgugcagggcccugac

SEQ ID NO: 557300 - RNA, 19 nt, Artificial Sequence
  Description of Artificial Sequence: Synthetic oligonucleotide
ggcggucacacuccugcuu

SEQ ID NO: 557301 - RNA, 19 nt, Artificial Sequence
  Description of Artificial Sequence: Synthetic oligonucleotide
cgacagcauugcaccgggc

SEQ ID NO: 557302 - RNA, 19 nt, Artificial Sequence
  Description of Artificial Sequence: Synthetic oligonucleotide
cagccaguaucuccuccuu

SEQ ID NO: 557303 - RNA, 19 nt, Artificial Sequence
  Description of Artificial Sequence: Synthetic oligonucleotide
gcauugcaccgggcugcag

SEQ ID NO: 557304 - RNA, 19 nt, Artificial Sequence
  Description of Artificial Sequence: Synthetic oligonucleotide
gcuggcgaagagggcgaga

SEQ ID NO: 557305 - RNA, 19 nt, Artificial Sequence
  Description of Artificial Sequence: Synthetic oligonucleotide
gcgaagagggcgagagcgu

SEQ ID NO: 557306 - RNA, 19 nt, Artificial Sequence
  Description of Artificial Sequence: Synthetic oligonucleotide
gcguacaugguggccucgu

SEQ ID NO: 557307 - RNA, 19 nt, Artificial Sequence
  Description of Artificial Sequence: Synthetic oligonucleotide
cgaagagggcgagagcgua

SEQ ID NO: 557308 - RNA, 19 nt, Artificial Sequence
  Description of Artificial Sequence: Synthetic oligonucleotide
ggcacgcaaugcaggcugu

SEQ ID NO: 557309 - RNA, 19 nt, Artificial Sequence
  Description of Artificial Sequence: Synthetic oligonucleotide
ggucuuggacagggguggu

SEQ ID NO: 557310 - RNA, 19 nt, Artificial Sequence
  Description of Artificial Sequence: Synthetic oligonucleotide
cccaccccguacaccaagu

SEQ ID NO: 557311 - RNA, 19 nt, Artificial Sequence
  Description of Artificial Sequence: Synthetic oligonucleotide
gggcgagagcguacauggu

SEQ ID NO: 557312 - RNA, 19 nt, Artificial Sequence
  Description of Artificial Sequence: Synthetic oligonucleotide
gcacgcaaugcaggcuguu

SEQ ID NO: 557313 - RNA, 19 nt, Artificial Sequence
  Description of Artificial Sequence: Synthetic oligonucleotide
ccaccuccgggaucuuguu

SEQ ID NO: 557314 - RNA, 19 nt, Artificial Sequence
  Description of Artificial Sequence: Synthetic oligonucleotide
aauaauauacucuugggua

SEQ ID NO: 557315 - RNA, 19 nt, Artificial Sequence
  Description of Artificial Sequence: Synthetic oligonucleotide
uauaugaccucucuugugg

SEQ ID NO: 557316 - RNA, 19 nt, Artificial Sequence
  Description of Artificial Sequence: Synthetic oligonucleotide
uggagugagagauuuaagg

SEQ ID NO: 557317 - RNA, 19 nt, Artificial Sequence
  Description of Artificial Sequence: Synthetic oligonucleotide
acuuguagcacuugaaagg

SEQ ID NO: 557318 - RNA, 19 nt, Artificial Sequence
  Description of Artificial Sequence: Synthetic oligonucleotide
ucaauaauauacucuuggg

SEQ ID NO: 557319 - RNA, 19 nt, Artificial Sequence
  Description of Artificial Sequence: Synthetic oligonucleotide
ucuauaagggcgcucauca

SEQ ID NO: 557320 - RNA, 19 nt, Artificial Sequence
  Description of Artificial Sequence: Synthetic oligonucleotide
uguacgaugaucuggugcc

SEQ ID NO: 557321 - RNA, 19 nt, Artificial Sequence
  Description of Artificial Sequence: Synthetic oligonucleotide
aguagccucaauaauauac

SEQ ID NO: 557322 - RNA, 19 nt, Artificial Sequence
  Description of Artificial Sequence: Synthetic oligonucleotide
agugagagauuuaaggugc

SEQ ID NO: 557323 - RNA, 19 nt, Artificial Sequence
  Description of Artificial Sequence: Synthetic oligonucleotide
auagcaugcacacguagcg

SEQ ID NO: 557324 - RNA, 19 nt, Artificial Sequence
  Description of Artificial Sequence: Synthetic oligonucleotide
agucucacugcacugaggg

SEQ ID NO: 557325 - RNA, 19 nt, Artificial Sequence
  Description of Artificial Sequence: Synthetic oligonucleotide
agugaauuccaccuggcag

SEQ ID NO: 557326 - RNA, 19 nt, Artificial Sequence
  Description of Artificial Sequence: Synthetic oligonucleotide
uuuuguacgaugaucuggu

SEQ ID NO: 557327 - RNA, 19 nt, Artificial Sequence
  Description of Artificial Sequence: Synthetic oligonucleotide
uauacgaugacugucugca

SEQ ID NO: 557328 - RNA, 19 nt, Artificial Sequence
  Description of Artificial Sequence: Synthetic oligonucleotide
uguugggaaagucucacug

SEQ ID NO: 557329 - RNA, 19 nt, Artificial Sequence
  Description of Artificial Sequence: Synthetic oligonucleotide
uggacaaaguccuccaagg

SEQ ID NO: 557330 - RNA, 19 nt, Artificial Sequence
  Description of Artificial Sequence: Synthetic oligonucleotide
auacucuuggguaucagcc

SEQ ID NO: 557331 - RNA, 19 nt, Artificial Sequence
  Description of Artificial Sequence: Synthetic oligonucleotide
uccagcuauacgaugacug

SEQ ID NO: 557332 - RNA, 19 nt, Artificial Sequence
  Description of Artificial Sequence: Synthetic oligonucleotide
aaggucuugugacauagca

SEQ ID NO: 557333 - RNA, 19 nt, Artificial Sequence
  Description of Artificial Sequence: Synthetic oligonucleotide
gagugagagauuuaaggug

SEQ ID NO: 557334 - RNA, 19 nt, Artificial Sequence
  Description of Artificial Sequence: Synthetic oligonucleotide
aauaagcccaaguuccuga

SEQ ID NO: 557335 - RNA, 19 nt, Artificial Sequence
  Description of Artificial Sequence: Synthetic oligonucleotide
agcaugcacacguagcggc

SEQ ID NO: 557336 - RNA, 19 nt, Artificial Sequence
  Description of Artificial Sequence: Synthetic oligonucleotide
uguguggugccucacgugc

SEQ ID NO: 557337 - RNA, 19 nt, Artificial Sequence
  Description of Artificial Sequence: Synthetic oligonucleotide
uuuuguaacgcuugccaca

SEQ ID NO: 557338 - RNA, 19 nt, Artificial Sequence
  Description of Artificial Sequence: Synthetic oligonucleotide
aaagucucacugcacugag

SEQ ID NO: 557339 - RNA, 19 nt, Artificial Sequence
  Description of Artificial Sequence: Synthetic oligonucleotide
uauaagggcgcucaucagu

SEQ ID NO: 557340 - RNA, 19 nt, Artificial Sequence
  Description of Artificial Sequence: Synthetic oligonucleotide
ugcucaguaagacucucag

SEQ ID NO: 557341 - RNA, 19 nt, Artificial Sequence
  Description of Artificial Sequence: Synthetic oligonucleotide
uguguuaccaugugggccu

SEQ ID NO: 557342 - RNA, 19 nt, Artificial Sequence
  Description of Artificial Sequence: Synthetic oligonucleotide
ugugccaugcucugcaaag

SEQ ID NO: 557343 - RNA, 19 nt, Artificial Sequence
  Description of Artificial Sequence: Synthetic oligonucleotide
caugaugugacuguccacc

SEQ ID NO: 557344 - RNA, 19 nt, Artificial Sequence
  Description of Artificial Sequence: Synthetic oligonucleotide
uuauaaaacuucccacacu

SEQ ID NO: 557345 - RNA, 19 nt, Artificial Sequence
  Description of Artificial Sequence: Synthetic oligonucleotide
uauacucuuggguaucagc

SEQ ID NO: 557346 - RNA, 19 nt, Artificial Sequence
  Description of Artificial Sequence: Synthetic oligonucleotide
agagauuuaaggugccgag

SEQ ID NO: 557347 - RNA, 19 nt, Artificial Sequence
  Description of Artificial Sequence: Synthetic oligonucleotide
ugaugguuaggacugccug

SEQ ID NO: 557348 - RNA, 19 nt, Artificial Sequence
  Description of Artificial Sequence: Synthetic oligonucleotide
ucuugugcuggacaaaguc

SEQ ID NO: 557349 - RNA, 19 nt, Artificial Sequence
  Description of Artificial Sequence: Synthetic oligonucleotide
cacuuguagcacuugaaag

SEQ ID NO: 557350 - RNA, 19 nt, Artificial Sequence
  Description of Artificial Sequence: Synthetic oligonucleotide
ugcaguagccucaauaaua

SEQ ID NO: 557351 - RNA, 19 nt, Artificial Sequence
  Description of Artificial Sequence: Synthetic oligonucleotide
cauagcaugcacacguagc

SEQ ID NO: 557352 - RNA, 19 nt, Artificial Sequence
  Description of Artificial Sequence: Synthetic oligonucleotide
guucaguacuguuuggacc

SEQ ID NO: 557353 - RNA, 19 nt, Artificial Sequence
  Description of Artificial Sequence: Synthetic oligonucleotide
cuuguagcacuugaaaggc

SEQ ID NO: 557354 - RNA, 19 nt, Artificial Sequence
  Description of Artificial Sequence: Synthetic oligonucleotide
uucugaacagacaggugug

SEQ ID NO: 557355 - RNA, 19 nt, Artificial Sequence
  Description of Artificial Sequence: Synthetic oligonucleotide
auugaagcuucacuggcca

SEQ ID NO: 557356 - RNA, 19 nt, Artificial Sequence
  Description of Artificial Sequence: Synthetic oligonucleotide
uggacuucauggauguggc

SEQ ID NO: 557357 - RNA, 19 nt, Artificial Sequence
  Description of Artificial Sequence: Synthetic oligonucleotide
ugagugagcccuugguccg

SEQ ID NO: 557358 - RNA, 19 nt, Artificial Sequence
  Description of Artificial Sequence: Synthetic oligonucleotide
cacgaugugggccacagug

SEQ ID NO: 557359 - RNA, 19 nt, Artificial Sequence
  Description of Artificial Sequence: Synthetic oligonucleotide
uccgaaaggaggcaccaca

SEQ ID NO: 557360 - RNA, 19 nt, Artificial Sequence
  Description of Artificial Sequence: Synthetic oligonucleotide
uguucaguacuguuuggac

SEQ ID NO: 557361 - RNA, 19 nt, Artificial Sequence
  Description of Artificial Sequence: Synthetic oligonucleotide
cccaauaagcccaaguucc

SEQ ID NO: 557362 - RNA, 19 nt, Artificial Sequence
  Description of Artificial Sequence: Synthetic oligonucleotide
accauugucacaguggccu

SEQ ID NO: 557363 - RNA, 19 nt, Artificial Sequence
  Description of Artificial Sequence: Synthetic oligonucleotide
aaggugccgagucagugca

SEQ ID NO: 557364 - RNA, 19 nt, Artificial Sequence
  Description of Artificial Sequence: Synthetic oligonucleotide
aggcggaucuuuucugugc

SEQ ID NO: 557365 - RNA, 19 nt, Artificial Sequence
  Description of Artificial Sequence: Synthetic oligonucleotide
uggugaucgugucagcagc

SEQ ID NO: 557366 - RNA, 19 nt, Artificial Sequence
  Description of Artificial Sequence: Synthetic oligonucleotide
ucgguggccccgcacaugg

SEQ ID NO: 557367 - RNA, 19 nt, Artificial Sequence
  Description of Artificial Sequence: Synthetic oligonucleotide
cuugcucacgcugaggcgg

SEQ ID NO: 557368 - RNA, 19 nt, Artificial Sequence
  Description of Artificial Sequence: Synthetic oligonucleotide
augaccucucuugugggcc

SEQ ID NO: 557369 - RNA, 19 nt, Artificial Sequence
  Description of Artificial Sequence: Synthetic oligonucleotide
ucucucgucuucugaacag

SEQ ID NO: 557370 - RNA, 19 nt, Artificial Sequence
  Description of Artificial Sequence: Synthetic oligonucleotide
acauagcaugcacacguag

SEQ ID NO: 557371 - RNA, 19 nt, Artificial Sequence
  Description of Artificial Sequence: Synthetic oligonucleotide
gaugagugagcccuugguc

SEQ ID NO: 557372 - RNA, 19 nt, Artificial Sequence
  Description of Artificial Sequence: Synthetic oligonucleotide
acauggacuucauggaugu

SEQ ID NO: 557373 - RNA, 19 nt, Artificial Sequence
  Description of Artificial Sequence: Synthetic oligonucleotide
guugggaaagucucacugc

SEQ ID NO: 557374 - RNA, 19 nt, Artificial Sequence
  Description of Artificial Sequence: Synthetic oligonucleotide
uuuguaacgcuugccacac

SEQ ID NO: 557375 - RNA, 19 nt, Artificial Sequence
  Description of Artificial Sequence: Synthetic oligonucleotide
cucacgguuguucucacug

SEQ ID NO: 557376 - RNA, 19 nt, Artificial Sequence
  Description of Artificial Sequence: Synthetic oligonucleotide
acacuuggcacaucuauaa

SEQ ID NO: 557377 - RNA, 19 nt, Artificial Sequence
  Description of Artificial Sequence: Synthetic oligonucleotide
guuuuguaacgcuugccac

SEQ ID NO: 557378 - RNA, 19 nt, Artificial Sequence
  Description of Artificial Sequence: Synthetic oligonucleotide
gaucucgguggcuucacug

SEQ ID NO: 557379 - RNA, 19 nt, Artificial Sequence
  Description of Artificial Sequence: Synthetic oligonucleotide
ugagagauuuaaggugccg

SEQ ID NO: 557380 - RNA, 19 nt, Artificial Sequence
  Description of Artificial Sequence: Synthetic oligonucleotide
ggaucuuuucugugcaugg

SEQ ID NO: 557381 - RNA, 19 nt, Artificial Sequence
  Description of Artificial Sequence: Synthetic oligonucleotide
aguaagacucucaggagug

SEQ ID NO: 557382 - RNA, 19 nt, Artificial Sequence
  Description of Artificial Sequence: Synthetic oligonucleotide
acaucuauaagggcgcuca

SEQ ID NO: 557383 - RNA, 19 nt, Artificial Sequence
  Description of Artificial Sequence: Synthetic oligonucleotide
uuaaggugccgagucagug

SEQ ID NO: 557384 - RNA, 19 nt, Artificial Sequence
  Description of Artificial Sequence: Synthetic oligonucleotide
aguacucuccuccccagca

SEQ ID NO: 557385 - RNA, 19 nt, Artificial Sequence
  Description of Artificial Sequence: Synthetic oligonucleotide
cuauaugaccucucuugug

SEQ ID NO: 557386 - RNA, 19 nt, Artificial Sequence
  Description of Artificial Sequence: Synthetic oligonucleotide
cuauacgaugacugucugc

SEQ ID NO: 557387 - RNA, 19 nt, Artificial Sequence
  Description of Artificial Sequence: Synthetic oligonucleotide
ugaugugcccacuuccaac

SEQ ID NO: 557388 - RNA, 19 nt, Artificial Sequence
  Description of Artificial Sequence: Synthetic oligonucleotide
uguccggaagugcaccugc

SEQ ID NO: 557389 - RNA, 19 nt, Artificial Sequence
  Description of Artificial Sequence: Synthetic oligonucleotide
uguucucucucucucucuc

SEQ ID NO: 557390 - RNA, 19 nt, Artificial Sequence
  Description of Artificial Sequence: Synthetic oligonucleotide
cuaucuguuccaucuccag

SEQ ID NO: 557391 - RNA, 19 nt, Artificial Sequence
  Description of Artificial Sequence: Synthetic oligonucleotide
ucucucucucucucucucg

SEQ ID NO: 557392 - RNA, 19 nt, Artificial Sequence
  Description of Artificial Sequence: Synthetic oligonucleotide
aaguuccugaugguuagga

SEQ ID NO: 557393 - RNA, 19 nt, Artificial Sequence
  Description of Artificial Sequence: Synthetic oligonucleotide
gguuuuguaacgcuugcca

SEQ ID NO: 557394 - RNA, 19 nt, Artificial Sequence
  Description of Artificial Sequence: Synthetic oligonucleotide
cacauuuuguacgaugauc

SEQ ID NO: 557395 - RNA, 19 nt, Artificial Sequence
  Description of Artificial Sequence: Synthetic oligonucleotide
gcauucuugguuuuguaac

SEQ ID NO: 557396 - RNA, 19 nt, Artificial Sequence
  Description of Artificial Sequence: Synthetic oligonucleotide
gaugaucuggugcccagca

SEQ ID NO: 557397 - RNA, 19 nt, Artificial Sequence
  Description of Artificial Sequence: Synthetic oligonucleotide
cagaauucugcauggccug

SEQ ID NO: 557398 - RNA, 19 nt, Artificial Sequence
  Description of Artificial Sequence: Synthetic oligonucleotide
cuucugcaagcacaguggc

SEQ ID NO: 557399 - RNA, 19 nt, Artificial Sequence
  Description of Artificial Sequence: Synthetic oligonucleotide
uuuaaggugccgagucagu

SEQ ID NO: 557400 - RNA, 19 nt, Artificial Sequence
  Description of Artificial Sequence: Synthetic oligonucleotide
uuuucucggaagccucggc

SEQ ID NO: 557401 - RNA, 19 nt, Artificial Sequence
  Description of Artificial Sequence: Synthetic oligonucleotide
ucuugugacauagcaugca

SEQ ID NO: 557402 - RNA, 19 nt, Artificial Sequence
  Description of Artificial Sequence: Synthetic oligonucleotide
accugugcgggcugugagc

SEQ ID NO: 557403 - RNA, 19 nt, Artificial Sequence
  Description of Artificial Sequence: Synthetic oligonucleotide
gaugugacuguccaccucu

SEQ ID NO: 557404 - RNA, 19 nt, Artificial Sequence
  Description of Artificial Sequence: Synthetic oligonucleotide
ucguccuaccaccguagag

SEQ ID NO: 557405 - RNA, 19 nt, Artificial Sequence
  Description of Artificial Sequence: Synthetic oligonucleotide
gucacauuuuguacgauga

SEQ ID NO: 557406 - RNA, 19 nt, Artificial Sequence
  Description of Artificial Sequence: Synthetic oligonucleotide
caauaauauacucuugggu

SEQ ID NO: 557407 - RNA, 19 nt, Artificial Sequence
  Description of Artificial Sequence: Synthetic oligonucleotide
ucucaucugaguggacacg

SEQ ID NO: 557408 - RNA, 19 nt, Artificial Sequence
  Description of Artificial Sequence: Synthetic oligonucleotide
auaagggcgcucaucagug

SEQ ID NO: 557409 - RNA, 19 nt, Artificial Sequence
  Description of Artificial Sequence: Synthetic oligonucleotide
aucuauaagggcgcucauc

SEQ ID NO: 557410 - RNA, 19 nt, Artificial Sequence
  Description of Artificial Sequence: Synthetic oligonucleotide
gccuuaaggaugcugcccg

SEQ ID NO: 557411 - RNA, 19 nt, Artificial Sequence
  Description of Artificial Sequence: Synthetic oligonucleotide
auacgaugacugucugcac

SEQ ID NO: 557412 - RNA, 19 nt, Artificial Sequence
  Description of Artificial Sequence: Synthetic oligonucleotide
uuaaggaugcugcccguuu

SEQ ID NO: 557413 - RNA, 19 nt, Artificial Sequence
  Description of Artificial Sequence: Synthetic oligonucleotide
ucaucagugugucgccugu

SEQ ID NO: 557414 - RNA, 19 nt, Artificial Sequence
  Description of Artificial Sequence: Synthetic oligonucleotide
cccuauaugaccucucuug

SEQ ID NO: 557415 - RNA, 19 nt, Artificial Sequence
  Description of Artificial Sequence: Synthetic oligonucleotide
uuucaugcccaggggaagc

SEQ ID NO: 557416 - RNA, 19 nt, Artificial Sequence
  Description of Artificial Sequence: Synthetic oligonucleotide
caggugaauggccucggcc

SEQ ID NO: 557417 - RNA, 19 nt, Artificial Sequence
  Description of Artificial Sequence: Synthetic oligonucleotide
uagcaugcacacguagcgg

SEQ ID NO: 557418 - RNA, 19 nt, Artificial Sequence
  Description of Artificial Sequence: Synthetic oligonucleotide
uucucucucucucucucuc

SEQ ID NO: 557419 - RNA, 19 nt, Artificial Sequence
  Description of Artificial Sequence: Synthetic oligonucleotide
guuccugaugguuaggacu

SEQ ID NO: 557420 - RNA, 19 nt, Artificial Sequence
  Description of Artificial Sequence: Synthetic oligonucleotide
ugcauggagugagagauuu

SEQ ID NO: 557421 - RNA, 19 nt, Artificial Sequence
  Description of Artificial Sequence: Synthetic oligonucleotide
cuccacaacggaagcggcg

SEQ ID NO: 557422 - RNA, 19 nt, Artificial Sequence
  Description of Artificial Sequence: Synthetic oligonucleotide
agaguacucuccuccccag

SEQ ID NO: 557423 - RNA, 19 nt, Artificial Sequence
  Description of Artificial Sequence: Synthetic oligonucleotide
ucugggugcccucaaugau

SEQ ID NO: 557424 - RNA, 19 nt, Artificial Sequence
  Description of Artificial Sequence: Synthetic oligonucleotide
ugcaccugacucccugaag

SEQ ID NO: 557425 - RNA, 19 nt, Artificial Sequence
  Description of Artificial Sequence: Synthetic oligonucleotide
guccuaccaccguagaggc

SEQ ID NO: 557426 - RNA, 19 nt, Artificial Sequence
  Description of Artificial Sequence: Synthetic oligonucleotide
agugugucgccugugguga

SEQ ID NO: 557427 - RNA, 19 nt, Artificial Sequence
  Description of Artificial Sequence: Synthetic oligonucleotide
cuauaagggcgcucaucag

SEQ ID NO: 557428 - RNA, 19 nt, Artificial Sequence
  Description of Artificial Sequence: Synthetic oligonucleotide
ugguccgaaaggaggcacc

SEQ ID NO: 557429 - RNA, 19 nt, Artificial Sequence
  Description of Artificial Sequence: Synthetic oligonucleotide
gacaggugugggcaggcac

SEQ ID NO: 557430 - RNA, 19 nt, Artificial Sequence
  Description of Artificial Sequence: Synthetic oligonucleotide
uggccucggcccuauauga

SEQ ID NO: 557431 - RNA, 19 nt, Artificial Sequence
  Description of Artificial Sequence: Synthetic oligonucleotide
ugcccuaggcaccauugaa

SEQ ID NO: 557432 - RNA, 19 nt, Artificial Sequence
  Description of Artificial Sequence: Synthetic oligonucleotide
ucgccuguggugacggaug

SEQ ID NO: 557433 - RNA, 19 nt, Artificial Sequence
  Description of Artificial Sequence: Synthetic oligonucleotide
agccucaauaauauacucu

SEQ ID NO: 557434 - RNA, 19 nt, Artificial Sequence
  Description of Artificial Sequence: Synthetic oligonucleotide
cuguggugacggaugagug

SEQ ID NO: 557435 - RNA, 19 nt, Artificial Sequence
  Description of Artificial Sequence: Synthetic oligonucleotide
ugggaaagucucacugcac

SEQ ID NO: 557436 - RNA, 19 nt, Artificial Sequence
  Description of Artificial Sequence: Synthetic oligonucleotide
ucauggauguggccuugcu

SEQ ID NO: 557437 - RNA, 19 nt, Artificial Sequence
  Description of Artificial Sequence: Synthetic oligonucleotide
aagucucacugcacugagg

SEQ ID NO: 557438 - RNA, 19 nt, Artificial Sequence
  Description of Artificial Sequence: Synthetic oligonucleotide
ccuaccaccguagaggccc

SEQ ID NO: 557439 - RNA, 19 nt, Artificial Sequence
  Description of Artificial Sequence: Synthetic oligonucleotide
cagugugucgccuguggug

SEQ ID NO: 557440 - RNA, 19 nt, Artificial Sequence
  Description of Artificial Sequence: Synthetic oligonucleotide
guaagacucucaggagugg

SEQ ID NO: 557441 - RNA, 19 nt, Artificial Sequence
  Description of Artificial Sequence: Synthetic oligonucleotide
agcaacccgcucgaggacg

SEQ ID NO: 557442 - RNA, 19 nt, Artificial Sequence
  Description of Artificial Sequence: Synthetic oligonucleotide
aggaguggcaauggugauc

SEQ ID NO: 557443 - RNA, 19 nt, Artificial Sequence
  Description of Artificial Sequence: Synthetic oligonucleotide
acucuccacaacggaagcg

SEQ ID NO: 557444 - RNA, 19 nt, Artificial Sequence
  Description of Artificial Sequence: Synthetic oligonucleotide
ucgaggacgaugccagaau

SEQ ID NO: 557445 - RNA, 19 nt, Artificial Sequence
  Description of Artificial Sequence: Synthetic oligonucleotide
gcaauggucuuauaaaacu

SEQ ID NO: 557446 - RNA, 19 nt, Artificial Sequence
  Description of Artificial Sequence: Synthetic oligonucleotide
acgaugaucuggugcccag

SEQ ID NO: 557447 - RNA, 19 nt, Artificial Sequence
  Description of Artificial Sequence: Synthetic oligonucleotide
cauggauguggccuugcuc

SEQ ID NO: 557448 - RNA, 19 nt, Artificial Sequence
  Description of Artificial Sequence: Synthetic oligonucleotide
auaagcccaaguuccugau

SEQ ID NO: 557449 - RNA, 19 nt, Artificial Sequence
  Description of Artificial Sequence: Synthetic oligonucleotide
ugcaccucaauugggcccu

SEQ ID NO: 557450 - RNA, 19 nt, Artificial Sequence
  Description of Artificial Sequence: Synthetic oligonucleotide
cauggagugagagauuuaa

SEQ ID NO: 557451 - RNA, 19 nt, Artificial Sequence
  Description of Artificial Sequence: Synthetic oligonucleotide
gugacauagcaugcacacg

SEQ ID NO: 557452 - RNA, 19 nt, Artificial Sequence
  Description of Artificial Sequence: Synthetic oligonucleotide
gaccugugcgggcugugag

SEQ ID NO: 557453 - RNA, 19 nt, Artificial Sequence
  Description of Artificial Sequence: Synthetic oligonucleotide
cugaaucuugugcuggaca

SEQ ID NO: 557454 - RNA, 19 nt, Artificial Sequence
  Description of Artificial Sequence: Synthetic oligonucleotide
ugugucgccuguggugacg

SEQ ID NO: 557455 - RNA, 19 nt, Artificial Sequence
  Description of Artificial Sequence: Synthetic oligonucleotide
cugauugcugaagccagug

SEQ ID NO: 557456 - RNA, 19 nt, Artificial Sequence
  Description of Artificial Sequence: Synthetic oligonucleotide
ucugaaucuugugcuggac

SEQ ID NO: 557457 - RNA, 19 nt, Artificial Sequence
  Description of Artificial Sequence: Synthetic oligonucleotide
accaccguagaggcccucc

SEQ ID NO: 557458 - RNA, 19 nt, Artificial Sequence
  Description of Artificial Sequence: Synthetic oligonucleotide
cuuucaugcccaggggaag

SEQ ID NO: 557459 - RNA, 19 nt, Artificial Sequence
  Description of Artificial Sequence: Synthetic oligonucleotide
gacucgaggggccagggcu

SEQ ID NO: 557460 - RNA, 19 nt, Artificial Sequence
  Description of Artificial Sequence: Synthetic oligonucleotide
ccuugguccgaaaggaggc

SEQ ID NO: 557461 - RNA, 19 nt, Artificial Sequence
  Description of Artificial Sequence: Synthetic oligonucleotide
cucuuggguaucagccacc

SEQ ID NO: 557462 - RNA, 19 nt, Artificial Sequence
  Description of Artificial Sequence: Synthetic oligonucleotide
caauaagcccaaguuccug

SEQ ID NO: 557463 - RNA, 19 nt, Artificial Sequence
  Description of Artificial Sequence: Synthetic oligonucleotide
uggugcacaaucugcugua

SEQ ID NO: 557464 - RNA, 19 nt, Artificial Sequence
  Description of Artificial Sequence: Synthetic oligonucleotide
ucucucucucucucucucu

SEQ ID NO: 557465 - RNA, 19 nt, Artificial Sequence
  Description of Artificial Sequence: Synthetic oligonucleotide
uacgaugaucuggugccca

SEQ ID NO: 557466 - RNA, 19 nt, Artificial Sequence
  Description of Artificial Sequence: Synthetic oligonucleotide
ugcaggugaauggccucgg

SEQ ID NO: 557467 - RNA, 19 nt, Artificial Sequence
  Description of Artificial Sequence: Synthetic oligonucleotide
aacggaagcggcgcucgug

SEQ ID NO: 557468 - RNA, 19 nt, Artificial Sequence
  Description of Artificial Sequence: Synthetic oligonucleotide
gaguacucuccuccccagc

SEQ ID NO: 557469 - RNA, 19 nt, Artificial Sequence
  Description of Artificial Sequence: Synthetic oligonucleotide
uccucguccuaccaccgua

SEQ ID NO: 557470 - RNA, 19 nt, Artificial Sequence
  Description of Artificial Sequence: Synthetic oligonucleotide
ggugacggaugagugagcc

SEQ ID NO: 557471 - RNA, 19 nt, Artificial Sequence
  Description of Artificial Sequence: Synthetic oligonucleotide
accucaauugggcccucug

SEQ ID NO: 557472 - RNA, 19 nt, Artificial Sequence
  Description of Artificial Sequence: Synthetic oligonucleotide
acucggguccucguccuac

SEQ ID NO: 557473 - RNA, 19 nt, Artificial Sequence
  Description of Artificial Sequence: Synthetic oligonucleotide
uugaagcuucacuggccac

SEQ ID NO: 557474 - RNA, 19 nt, Artificial Sequence
  Description of Artificial Sequence: Synthetic oligonucleotide
gaagccucggcugcagaac

SEQ ID NO: 557475 - RNA, 19 nt, Artificial Sequence
  Description of Artificial Sequence: Synthetic oligonucleotide
cugcaguuggcacuaccuc

SEQ ID NO: 557476 - RNA, 19 nt, Artificial Sequence
  Description of Artificial Sequence: Synthetic oligonucleotide
agcccuugguccgaaagga

SEQ ID NO: 557477 - RNA, 19 nt, Artificial Sequence
  Description of Artificial Sequence: Synthetic oligonucleotide
guagccucaauaauauacu

SEQ ID NO: 557478 - RNA, 19 nt, Artificial Sequence
  Description of Artificial Sequence: Synthetic oligonucleotide
cucucucucucucucucuc

SEQ ID NO: 557479 - RNA, 19 nt, Artificial Sequence
  Description of Artificial Sequence: Synthetic oligonucleotide
uugguccgaaaggaggcac

SEQ ID NO: 557480 - RNA, 19 nt, Artificial Sequence
  Description of Artificial Sequence: Synthetic oligonucleotide
caccauugucacaguggcc

SEQ ID NO: 557481 - RNA, 19 nt, Artificial Sequence
  Description of Artificial Sequence: Synthetic oligonucleotide
ugaucucgguggcuucacu

SEQ ID NO: 557482 - RNA, 19 nt, Artificial Sequence
  Description of Artificial Sequence: Synthetic oligonucleotide
ugaccucucuugugggccu

SEQ ID NO: 557483 - RNA, 19 nt, Artificial Sequence
  Description of Artificial Sequence: Synthetic oligonucleotide
caguaagacucucaggagu

SEQ ID NO: 557484 - RNA, 19 nt, Artificial Sequence
  Description of Artificial Sequence: Synthetic oligonucleotide
ucgugcacaugcaccuccu

SEQ ID NO: 557485 - RNA, 19 nt, Artificial Sequence
  Description of Artificial Sequence: Synthetic oligonucleotide
cucucucgucuucugaaca

SEQ ID NO: 557486 - RNA, 19 nt, Artificial Sequence
  Description of Artificial Sequence: Synthetic oligonucleotide
acacguagcggccuuccuu

SEQ ID NO: 557487 - RNA, 19 nt, Artificial Sequence
  Description of Artificial Sequence: Synthetic oligonucleotide
cagcuauacgaugacuguc

SEQ ID NO: 557488 - RNA, 19 nt, Artificial Sequence
  Description of Artificial Sequence: Synthetic oligonucleotide
gguaucagccaccacagau

SEQ ID NO: 557489 - RNA, 19 nt, Artificial Sequence
  Description of Artificial Sequence: Synthetic oligonucleotide
ucucucucucucgucuucu

SEQ ID NO: 557490 - RNA, 19 nt, Artificial Sequence
  Description of Artificial Sequence: Synthetic oligonucleotide
cguccuaccaccguagagg

SEQ ID NO: 557491 - RNA, 19 nt, Artificial Sequence
  Description of Artificial Sequence: Synthetic oligonucleotide
cagaguacucuccucccca

SEQ ID NO: 557492 - RNA, 19 nt, Artificial Sequence
  Description of Artificial Sequence: Synthetic oligonucleotide
guugagugugccaugcucu

SEQ ID NO: 557493 - RNA, 19 nt, Artificial Sequence
  Description of Artificial Sequence: Synthetic oligonucleotide
gugagagauuuaaggugcc

SEQ ID NO: 557494 - RNA, 19 nt, Artificial Sequence
  Description of Artificial Sequence: Synthetic oligonucleotide
uggugacggaugagugagc

SEQ ID NO: 557495 - RNA, 19 nt, Artificial Sequence
  Description of Artificial Sequence: Synthetic oligonucleotide
acgucgguggccccgcaca

SEQ ID NO: 557496 - RNA, 19 nt, Artificial Sequence
  Description of Artificial Sequence: Synthetic oligonucleotide
uaagggcgcucaucagugu

SEQ ID NO: 557497 - RNA, 19 nt, Artificial Sequence
  Description of Artificial Sequence: Synthetic oligonucleotide
uugcucacgcugaggcgga

SEQ ID NO: 557498 - RNA, 19 nt, Artificial Sequence
  Description of Artificial Sequence: Synthetic oligonucleotide
caaguuccugaugguuagg

SEQ ID NO: 557499 - RNA, 19 nt, Artificial Sequence
  Description of Artificial Sequence: Synthetic oligonucleotide
agacucucaggaguggcaa

SEQ ID NO: 557500 - RNA, 19 nt, Artificial Sequence
  Description of Artificial Sequence: Synthetic oligonucleotide
gcuauacgaugacugucug

SEQ ID NO: 557501 - RNA, 19 nt, Artificial Sequence
  Description of Artificial Sequence: Synthetic oligonucleotide
agcauggcugaugucugcu

SEQ ID NO: 557502 - RNA, 19 nt, Artificial Sequence
  Description of Artificial Sequence: Synthetic oligonucleotide
ugcggcugcuguguguuac

SEQ ID NO: 557503 - RNA, 19 nt, Artificial Sequence
  Description of Artificial Sequence: Synthetic oligonucleotide
gugaucgugucagcagcag

SEQ ID NO: 557504 - RNA, 19 nt, Artificial Sequence
  Description of Artificial Sequence: Synthetic oligonucleotide
cugccagagagguggcuuc

SEQ ID NO: 557505 - RNA, 19 nt, Artificial Sequence
  Description of Artificial Sequence: Synthetic oligonucleotide
gaagcggcgcucgugcaca

SEQ ID NO: 557506 - RNA, 19 nt, Artificial Sequence
  Description of Artificial Sequence: Synthetic oligonucleotide
cacggccacacuuguagca

SEQ ID NO: 557507 - RNA, 19 nt, Artificial Sequence
  Description of Artificial Sequence: Synthetic oligonucleotide
ucucucucucucucucguc

SEQ ID NO: 557508 - RNA, 19 nt, Artificial Sequence
  Description of Artificial Sequence: Synthetic oligonucleotide
ucggguccucguccuacca

SEQ ID NO: 557509 - RNA, 19 nt, Artificial Sequence
  Description of Artificial Sequence: Synthetic oligonucleotide
gaucucuauguccucugau

SEQ ID NO: 557510 - RNA, 19 nt, Artificial Sequence
  Description of Artificial Sequence: Synthetic oligonucleotide
aucgugucagcagcagcug

SEQ ID NO: 557511 - RNA, 19 nt, Artificial Sequence
  Description of Artificial Sequence: Synthetic oligonucleotide
ucggcccuauaugaccucu

SEQ ID NO: 557512 - RNA, 19 nt, Artificial Sequence
  Description of Artificial Sequence: Synthetic oligonucleotide
gccucaauaauauacucuu

SEQ ID NO: 557513 - RNA, 19 nt, Artificial Sequence
  Description of Artificial Sequence: Synthetic oligonucleotide
ucucucucucucucgucuu

SEQ ID NO: 557514 - RNA, 19 nt, Artificial Sequence
  Description of Artificial Sequence: Synthetic oligonucleotide
uggccuguucaguacuguu

SEQ ID NO: 557515 - RNA, 19 nt, Artificial Sequence
  Description of Artificial Sequence: Synthetic oligonucleotide
caccguagaggcccuccag

SEQ ID NO: 557516 - RNA, 19 nt, Artificial Sequence
  Description of Artificial Sequence: Synthetic oligonucleotide
ugcugcccguuuugaaggu

SEQ ID NO: 557517 - RNA, 19 nt, Artificial Sequence
  Description of Artificial Sequence: Synthetic oligonucleotide
uuaggacugccuggagccu

SEQ ID NO: 557518 - RNA, 19 nt, Artificial Sequence
  Description of Artificial Sequence: Synthetic oligonucleotide
cugcaucuggacauggacu

SEQ ID NO: 557519 - RNA, 19 nt, Artificial Sequence
  Description of Artificial Sequence: Synthetic oligonucleotide
augacaccauugucacagu

SEQ ID NO: 557520 - RNA, 19 nt, Artificial Sequence
  Description of Artificial Sequence: Synthetic oligonucleotide
cucucucucucucgucuuc

SEQ ID NO: 557521 - RNA, 19 nt, Artificial Sequence
  Description of Artificial Sequence: Synthetic oligonucleotide
uggugccucacgugccgca

SEQ ID NO: 557522 - RNA, 19 nt, Artificial Sequence
  Description of Artificial Sequence: Synthetic oligonucleotide
gggcuuucaugcccagggg

SEQ ID NO: 557523 - RNA, 19 nt, Artificial Sequence
  Description of Artificial Sequence: Synthetic oligonucleotide
cuugaggggcccgauggca

SEQ ID NO: 557524 - RNA, 19 nt, Artificial Sequence
  Description of Artificial Sequence: Synthetic oligonucleotide
agcuugcacucaugguccu

SEQ ID NO: 557525 - RNA, 19 nt, Artificial Sequence
  Description of Artificial Sequence: Synthetic oligonucleotide
gcccuaggcaccauugaag

SEQ ID NO: 557526 - RNA, 19 nt, Artificial Sequence
  Description of Artificial Sequence: Synthetic oligonucleotide
uccugaugguuaggacugc

SEQ ID NO: 557527 - RNA, 19 nt, Artificial Sequence
  Description of Artificial Sequence: Synthetic oligonucleotide
guacgaugaucuggugccc

SEQ ID NO: 557528 - RNA, 19 nt, Artificial Sequence
  Description of Artificial Sequence: Synthetic oligonucleotide
gcaagcacaguggcagccg

SEQ ID NO: 557529 - RNA, 19 nt, Artificial Sequence
  Description of Artificial Sequence: Synthetic oligonucleotide
gugggcaggcacucggguc

SEQ ID NO: 557530 - RNA, 19 nt, Artificial Sequence
  Description of Artificial Sequence: Synthetic oligonucleotide
ggccuuaaggaugcugccc

SEQ ID NO: 557531 - RNA, 19 nt, Artificial Sequence
  Description of Artificial Sequence: Synthetic oligonucleotide
cguuuugaaggucuuguga

SEQ ID NO: 557532 - RNA, 19 nt, Artificial Sequence
  Description of Artificial Sequence: Synthetic oligonucleotide
cucucucucucucucgucu

SEQ ID NO: 557533 - RNA, 19 nt, Artificial Sequence
  Description of Artificial Sequence: Synthetic oligonucleotide
ggugaagcaaugaccagcu

SEQ ID NO: 557534 - RNA, 19 nt, Artificial Sequence
  Description of Artificial Sequence: Synthetic oligonucleotide
ccagaguacucuccucccc

SEQ ID NO: 557535 - RNA, 19 nt, Artificial Sequence
  Description of Artificial Sequence: Synthetic oligonucleotide
ccuugcucacgcugaggcg

SEQ ID NO: 557536 - RNA, 19 nt, Artificial Sequence
  Description of Artificial Sequence: Synthetic oligonucleotide
cacaucuauaagggcgcuc

SEQ ID NO: 557537 - RNA, 19 nt, Artificial Sequence
  Description of Artificial Sequence: Synthetic oligonucleotide
cgcucgaggacgaugccag

SEQ ID NO: 557538 - RNA, 19 nt, Artificial Sequence
  Description of Artificial Sequence: Synthetic oligonucleotide
ugaauggccucggcccuau

SEQ ID NO: 557539 - RNA, 19 nt, Artificial Sequence
  Description of Artificial Sequence: Synthetic oligonucleotide
acacuggggacaagggaaa

SEQ ID NO: 557540 - RNA, 19 nt, Artificial Sequence
  Description of Artificial Sequence: Synthetic oligonucleotide
gacauagcaugcacacgua

SEQ ID NO: 557541 - RNA, 19 nt, Artificial Sequence
  Description of Artificial Sequence: Synthetic oligonucleotide
cugaugguuaggacugccu

SEQ ID NO: 557542 - RNA, 19 nt, Artificial Sequence
  Description of Artificial Sequence: Synthetic oligonucleotide
cucacgcugaggcggaucu

SEQ ID NO: 557543 - RNA, 19 nt, Artificial Sequence
  Description of Artificial Sequence: Synthetic oligonucleotide
ccguuuugaaggucuugug

SEQ ID NO: 557544 - RNA, 19 nt, Artificial Sequence
  Description of Artificial Sequence: Synthetic oligonucleotide
gagacggcuccagaguacu

SEQ ID NO: 557545 - RNA, 19 nt, Artificial Sequence
  Description of Artificial Sequence: Synthetic oligonucleotide
cugugagcacagugccuuc

SEQ ID NO: 557546 - RNA, 19 nt, Artificial Sequence
  Description of Artificial Sequence: Synthetic oligonucleotide
cucucgucuucugaacaga

SEQ ID NO: 557547 - RNA, 19 nt, Artificial Sequence
  Description of Artificial Sequence: Synthetic oligonucleotide
ggaagcuccugcaucugga

SEQ ID NO: 557548 - RNA, 19 nt, Artificial Sequence
  Description of Artificial Sequence: Synthetic oligonucleotide
ccucguccuaccaccguag

SEQ ID NO: 557549 - RNA, 19 nt, Artificial Sequence
  Description of Artificial Sequence: Synthetic oligonucleotide
ggaagcggcgcucgugcac

SEQ ID NO: 557550 - RNA, 19 nt, Artificial Sequence
  Description of Artificial Sequence: Synthetic oligonucleotide
ggaagccucggcugcagaa

SEQ ID NO: 557551 - RNA, 19 nt, Artificial Sequence
  Description of Artificial Sequence: Synthetic oligonucleotide
uggacacgucgguggcccc

SEQ ID NO: 557552 - RNA, 19 nt, Artificial Sequence
  Description of Artificial Sequence: Synthetic oligonucleotide
ggaugagugagcccuuggu

SEQ ID NO: 557553 - RNA, 19 nt, Artificial Sequence
  Description of Artificial Sequence: Synthetic oligonucleotide
caguuggcacuaccuccug

SEQ ID NO: 557554 - RNA, 19 nt, Artificial Sequence
  Description of Artificial Sequence: Synthetic oligonucleotide
cugcccguuuugaaggucu

SEQ ID NO: 557555 - RNA, 19 nt, Artificial Sequence
  Description of Artificial Sequence: Synthetic oligonucleotide
gugaagcaaugaccagcuc

SEQ ID NO: 557556 - RNA, 19 nt, Artificial Sequence
  Description of Artificial Sequence: Synthetic oligonucleotide
cgugccgcaccagugagcc

SEQ ID NO: 557557 - RNA, 19 nt, Artificial Sequence
  Description of Artificial Sequence: Synthetic oligonucleotide
ggcgcucaucagugugucg

SEQ ID NO: 557558 - RNA, 19 nt, Artificial Sequence
  Description of Artificial Sequence: Synthetic oligonucleotide
cucgaggacgaugccagaa

SEQ ID NO: 557559 - RNA, 19 nt, Artificial Sequence
  Description of Artificial Sequence: Synthetic oligonucleotide
guguccggaagugcaccug

SEQ ID NO: 557560 - RNA, 19 nt, Artificial Sequence
  Description of Artificial Sequence: Synthetic oligonucleotide
cagccaccacagaugagaa

SEQ ID NO: 557561 - RNA, 19 nt, Artificial Sequence
  Description of Artificial Sequence: Synthetic oligonucleotide
guuuggaccugugcgggcu

SEQ ID NO: 557562 - RNA, 19 nt, Artificial Sequence
  Description of Artificial Sequence: Synthetic oligonucleotide
guucucucucucucucucu

SEQ ID NO: 557563 - RNA, 19 nt, Artificial Sequence
  Description of Artificial Sequence: Synthetic oligonucleotide
acguagcggccuuccuugu

SEQ ID NO: 557564 - RNA, 19 nt, Artificial Sequence
  Description of Artificial Sequence: Synthetic oligonucleotide
ccugaugguuaggacugcc

SEQ ID NO: 557565 - RNA, 19 nt, Artificial Sequence
  Description of Artificial Sequence: Synthetic oligonucleotide
gccgagucagugcaccuga

SEQ ID NO: 557566 - RNA, 19 nt, Artificial Sequence
  Description of Artificial Sequence: Synthetic oligonucleotide
gcuuucaugcccaggggaa

SEQ ID NO: 557567 - RNA, 19 nt, Artificial Sequence
  Description of Artificial Sequence: Synthetic oligonucleotide
acgguuguucucacuggaa

SEQ ID NO: 557568 - RNA, 19 nt, Artificial Sequence
  Description of Artificial Sequence: Synthetic oligonucleotide
cuccccaauaagcccaagu

SEQ ID NO: 557569 - RNA, 19 nt, Artificial Sequence
  Description of Artificial Sequence: Synthetic oligonucleotide
uagaggcccuccagcuaua

SEQ ID NO: 557570 - RNA, 19 nt, Artificial Sequence
  Description of Artificial Sequence: Synthetic oligonucleotide
ggacacgucgguggccccg

SEQ ID NO: 557571 - RNA, 19 nt, Artificial Sequence
  Description of Artificial Sequence: Synthetic oligonucleotide
cucggcccuauaugaccuc

SEQ ID NO: 557572 - RNA, 19 nt, Artificial Sequence
  Description of Artificial Sequence: Synthetic oligonucleotide
cuucagcagguaggcuuug

SEQ ID NO: 557573 - RNA, 19 nt, Artificial Sequence
  Description of Artificial Sequence: Synthetic oligonucleotide
cucucucucucucucucgu

SEQ ID NO: 557574 - RNA, 19 nt, Artificial Sequence
  Description of Artificial Sequence: Synthetic oligonucleotide
ugucgccuguggugacgga

SEQ ID NO: 557575 - RNA, 19 nt, Artificial Sequence
  Description of Artificial Sequence: Synthetic oligonucleotide
augcacacguagcggccuu

SEQ ID NO: 557576 - RNA, 19 nt, Artificial Sequence
  Description of Artificial Sequence: Synthetic oligonucleotide
ccuauaugaccucucuugu

SEQ ID NO: 557577 - RNA, 19 nt, Artificial Sequence
  Description of Artificial Sequence: Synthetic oligonucleotide
gguccgaaaggaggcacca

SEQ ID NO: 557578 - RNA, 19 nt, Artificial Sequence
  Description of Artificial Sequence: Synthetic oligonucleotide
ggugcacaaucugcuguac

SEQ ID NO: 557579 - RNA, 19 nt, Artificial Sequence
  Description of Artificial Sequence: Synthetic oligonucleotide
ugcacacguagcggccuuc

SEQ ID NO: 557580 - RNA, 19 nt, Artificial Sequence
  Description of Artificial Sequence: Synthetic oligonucleotide
ccgguugagugugccaugc

SEQ ID NO: 557581 - RNA, 19 nt, Artificial Sequence
  Description of Artificial Sequence: Synthetic oligonucleotide
cucguccuaccaccguaga

SEQ ID NO: 557582 - RNA, 19 nt, Artificial Sequence
  Description of Artificial Sequence: Synthetic oligonucleotide
aagcggcgcucgugcacau

SEQ ID NO: 557583 - RNA, 19 nt, Artificial Sequence
  Description of Artificial Sequence: Synthetic oligonucleotide
aggugccgagucagugcac

SEQ ID NO: 557584 - RNA, 19 nt, Artificial Sequence
  Description of Artificial Sequence: Synthetic oligonucleotide
cacgucgguggccccgcac

SEQ ID NO: 557585 - RNA, 19 nt, Artificial Sequence
  Description of Artificial Sequence: Synthetic oligonucleotide
ggccucucaucugagugga

SEQ ID NO: 557586 - RNA, 19 nt, Artificial Sequence
  Description of Artificial Sequence: Synthetic oligonucleotide
ccaucucgccauccccugg

SEQ ID NO: 557587 - RNA, 19 nt, Artificial Sequence
  Description of Artificial Sequence: Synthetic oligonucleotide
caccugacucccugaagcu

SEQ ID NO: 557588 - RNA, 19 nt, Artificial Sequence
  Description of Artificial Sequence: Synthetic oligonucleotide
gugugucgccuguggugac

SEQ ID NO: 557589 - RNA, 19 nt, Artificial Sequence
  Description of Artificial Sequence: Synthetic oligonucleotide
guccgaaaggaggcaccac

SEQ ID NO: 557590 - RNA, 19 nt, Artificial Sequence
  Description of Artificial Sequence: Synthetic oligonucleotide
caguagccucaauaauaua

SEQ ID NO: 557591 - RNA, 19 nt, Artificial Sequence
  Description of Artificial Sequence: Synthetic oligonucleotide
caucucgccauccccuggu

SEQ ID NO: 557592 - RNA, 19 nt, Artificial Sequence
  Description of Artificial Sequence: Synthetic oligonucleotide
cuguucucucucucucucu

SEQ ID NO: 557593 - RNA, 19 nt, Artificial Sequence
  Description of Artificial Sequence: Synthetic oligonucleotide
ccagagacuggugacugga

SEQ ID NO: 557594 - RNA, 19 nt, Artificial Sequence
  Description of Artificial Sequence: Synthetic oligonucleotide
guggugccucacgugccgc

SEQ ID NO: 557595 - RNA, 19 nt, Artificial Sequence
  Description of Artificial Sequence: Synthetic oligonucleotide
gagugagcccuugguccga

SEQ ID NO: 557596 - RNA, 19 nt, Artificial Sequence
  Description of Artificial Sequence: Synthetic oligonucleotide
gcggcugcuguguguuacc

SEQ ID NO: 557597 - RNA, 19 nt, Artificial Sequence
  Description of Artificial Sequence: Synthetic oligonucleotide
uggccugauguagcagguu

SEQ ID NO: 557598 - RNA, 19 nt, Artificial Sequence
  Description of Artificial Sequence: Synthetic oligonucleotide
aggggcccgauggcagguc

SEQ ID NO: 557599 - RNA, 19 nt, Artificial Sequence
  Description of Artificial Sequence: Synthetic oligonucleotide
uguuaccaugugggccuua

SEQ ID NO: 557600 - RNA, 19 nt, Artificial Sequence
  Description of Artificial Sequence: Synthetic oligonucleotide
agcuugacuugggccugcu

SEQ ID NO: 557601 - RNA, 19 nt, Artificial Sequence
  Description of Artificial Sequence: Synthetic oligonucleotide
agugagcccuugguccgaa

SEQ ID NO: 557602 - RNA, 19 nt, Artificial Sequence
  Description of Artificial Sequence: Synthetic oligonucleotide
ggcccuauaugaccucucu

SEQ ID NO: 557603 - RNA, 19 nt, Artificial Sequence
  Description of Artificial Sequence: Synthetic oligonucleotide
gccgguugagugugccaug

SEQ ID NO: 557604 - RNA, 19 nt, Artificial Sequence
  Description of Artificial Sequence: Synthetic oligonucleotide
gcacacguagcggccuucc

SEQ ID NO: 557605 - RNA, 19 nt, Artificial Sequence
  Description of Artificial Sequence: Synthetic oligonucleotide
acucgaggggccagggcuu

SEQ ID NO: 557606 - RNA, 19 nt, Artificial Sequence
  Description of Artificial Sequence: Synthetic oligonucleotide
gcccuugguccgaaaggag

SEQ ID NO: 557607 - RNA, 19 nt, Artificial Sequence
  Description of Artificial Sequence: Synthetic oligonucleotide
ccagcuauacgaugacugu

SEQ ID NO: 557608 - RNA, 19 nt, Artificial Sequence
  Description of Artificial Sequence: Synthetic oligonucleotide
ccucuugaggggcccgaug

SEQ ID NO: 557609 - RNA, 19 nt, Artificial Sequence
  Description of Artificial Sequence: Synthetic oligonucleotide
ggaccucccucugcugcag

SEQ ID NO: 557610 - RNA, 19 nt, Artificial Sequence
  Description of Artificial Sequence: Synthetic oligonucleotide
ggugccucacgugccgcac

SEQ ID NO: 557611 - RNA, 19 nt, Artificial Sequence
  Description of Artificial Sequence: Synthetic oligonucleotide
cuugcggcugcuguguguu

SEQ ID NO: 557612 - RNA, 19 nt, Artificial Sequence
  Description of Artificial Sequence: Synthetic oligonucleotide
cgcccuccccaauaagccc

SEQ ID NO: 557613 - RNA, 19 nt, Artificial Sequence
  Description of Artificial Sequence: Synthetic oligonucleotide
uggugcgcaggugccgguu

SEQ ID NO: 557614 - RNA, 19 nt, Artificial Sequence
  Description of Artificial Sequence: Synthetic oligonucleotide
ccaauaagcccaaguuccu

SEQ ID NO: 557615 - RNA, 19 nt, Artificial Sequence
  Description of Artificial Sequence: Synthetic oligonucleotide
cucggaagccucggcugca

SEQ ID NO: 557616 - RNA, 19 nt, Artificial Sequence
  Description of Artificial Sequence: Synthetic oligonucleotide
ggguaucagccaccacaga

SEQ ID NO: 557617 - RNA, 19 nt, Artificial Sequence
  Description of Artificial Sequence: Synthetic oligonucleotide
cuuaaggaugcugcccguu

SEQ ID NO: 557618 - RNA, 19 nt, Artificial Sequence
  Description of Artificial Sequence: Synthetic oligonucleotide
ccaccucugucugggugcc

SEQ ID NO: 557619 - RNA, 19 nt, Artificial Sequence
  Description of Artificial Sequence: Synthetic oligonucleotide
ucacgcugaggcggaucuu

SEQ ID NO: 557620 - RNA, 19 nt, Artificial Sequence
  Description of Artificial Sequence: Synthetic oligonucleotide
acacgucgguggccccgca

SEQ ID NO: 557621 - RNA, 19 nt, Artificial Sequence
  Description of Artificial Sequence: Synthetic oligonucleotide
cugcucgcccuccccaaua

SEQ ID NO: 557622 - RNA, 19 nt, Artificial Sequence
  Description of Artificial Sequence: Synthetic oligonucleotide
cuccagcuauacgaugacu

SEQ ID NO: 557623 - RNA, 19 nt, Artificial Sequence
  Description of Artificial Sequence: Synthetic oligonucleotide
cuggaacagggaagcuccu

SEQ ID NO: 557624 - RNA, 19 nt, Artificial Sequence
  Description of Artificial Sequence: Synthetic oligonucleotide
gucgccuguggugacggau

SEQ ID NO: 557625 - RNA, 19 nt, Artificial Sequence
  Description of Artificial Sequence: Synthetic oligonucleotide
cccguuuugaaggucuugu

SEQ ID NO: 557626 - RNA, 19 nt, Artificial Sequence
  Description of Artificial Sequence: Synthetic oligonucleotide
ccccgcacaugggcaaugg

SEQ ID NO: 557627 - RNA, 19 nt, Artificial Sequence
  Description of Artificial Sequence: Synthetic oligonucleotide
caggaguggcaauggugau

SEQ ID NO: 557628 - RNA, 19 nt, Artificial Sequence
  Description of Artificial Sequence: Synthetic oligonucleotide
ccuguguggugccucacgu

SEQ ID NO: 557629 - RNA, 19 nt, Artificial Sequence
  Description of Artificial Sequence: Synthetic oligonucleotide
gggugugcccuaggcacca

SEQ ID NO: 557630 - RNA, 19 nt, Artificial Sequence
  Description of Artificial Sequence: Synthetic oligonucleotide
ggcccgauggcaggucuuc

SEQ ID NO: 557631 - RNA, 19 nt, Artificial Sequence
  Description of Artificial Sequence: Synthetic oligonucleotide
gcacagugccuucacugau

SEQ ID NO: 557632 - RNA, 19 nt, Artificial Sequence
  Description of Artificial Sequence: Synthetic oligonucleotide
caugggcaauggucuuaua

SEQ ID NO: 557633 - RNA, 19 nt, Artificial Sequence
  Description of Artificial Sequence: Synthetic oligonucleotide
ucgaggggccagggcuuuc

SEQ ID NO: 557634 - RNA, 19 nt, Artificial Sequence
  Description of Artificial Sequence: Synthetic oligonucleotide
acgcugaggcggaucuuuu

SEQ ID NO: 557635 - RNA, 19 nt, Artificial Sequence
  Description of Artificial Sequence: Synthetic oligonucleotide
guccucguccuaccaccgu

SEQ ID NO: 557636 - RNA, 19 nt, Artificial Sequence
  Description of Artificial Sequence: Synthetic oligonucleotide
cacgcugaggcggaucuuu

SEQ ID NO: 557637 - RNA, 19 nt, Artificial Sequence
  Description of Artificial Sequence: Synthetic oligonucleotide
ggaccugugcgggcuguga

SEQ ID NO: 557638 - RNA, 19 nt, Artificial Sequence
  Description of Artificial Sequence: Synthetic oligonucleotide
ccucggcccuauaugaccu

SEQ ID NO: 557639 - RNA, 19 nt, Artificial Sequence
  Description of Artificial Sequence: Synthetic oligonucleotide
ugcucacgcugaggcggau

SEQ ID NO: 557640 - RNA, 19 nt, Artificial Sequence
  Description of Artificial Sequence: Synthetic oligonucleotide
gggccucuugaggggcccg

SEQ ID NO: 557641 - RNA, 19 nt, Artificial Sequence
  Description of Artificial Sequence: Synthetic oligonucleotide
gcugcccguuuugaagguc

SEQ ID NO: 557642 - RNA, 19 nt, Artificial Sequence
  Description of Artificial Sequence: Synthetic oligonucleotide
uaccaccguagaggcccuc

SEQ ID NO: 557643 - RNA, 19 nt, Artificial Sequence
  Description of Artificial Sequence: Synthetic oligonucleotide
ccuaggcaccauugaagcu

SEQ ID NO: 557644 - RNA, 19 nt, Artificial Sequence
  Description of Artificial Sequence: Synthetic oligonucleotide
gaauggccucggcccuaua

SEQ ID NO: 557645 - RNA, 19 nt, Artificial Sequence
  Description of Artificial Sequence: Synthetic oligonucleotide
cacacguagcggccuuccu

SEQ ID NO: 557646 - RNA, 19 nt, Artificial Sequence
  Description of Artificial Sequence: Synthetic oligonucleotide
cuaccaccguagaggcccu

SEQ ID NO: 557647 - RNA, 19 nt, Artificial Sequence
  Description of Artificial Sequence: Synthetic oligonucleotide
cggguccucguccuaccac

SEQ ID NO: 557648 - RNA, 19 nt, Artificial Sequence
  Description of Artificial Sequence: Synthetic oligonucleotide
cccgcucgaggacgaugcc

SEQ ID NO: 557649 - RNA, 19 nt, Artificial Sequence
  Description of Artificial Sequence: Synthetic oligonucleotide
gaguggcaauggugaucgu

SEQ ID NO: 557650 - RNA, 19 nt, Artificial Sequence
  Description of Artificial Sequence: Synthetic oligonucleotide
aggcaccauugaagcuuca

SEQ ID NO: 557651 - RNA, 19 nt, Artificial Sequence
  Description of Artificial Sequence: Synthetic oligonucleotide
caggcacucggguccucgu

SEQ ID NO: 557652 - RNA, 19 nt, Artificial Sequence
  Description of Artificial Sequence: Synthetic oligonucleotide
ccacaaugaccucuuugau

SEQ ID NO: 557653 - RNA, 19 nt, Artificial Sequence
  Description of Artificial Sequence: Synthetic oligonucleotide
gcucacgcugaggcggauc

SEQ ID NO: 557654 - RNA, 19 nt, Artificial Sequence
  Description of Artificial Sequence: Synthetic oligonucleotide
gcccuauaugaccucucuu

SEQ ID NO: 557655 - RNA, 19 nt, Artificial Sequence
  Description of Artificial Sequence: Synthetic oligonucleotide
gacggaugagugagcccuu

SEQ ID NO: 557656 - RNA, 19 nt, Artificial Sequence
  Description of Artificial Sequence: Synthetic oligonucleotide
gccgcagaggggcucuccu

SEQ ID NO: 557657 - RNA, 19 nt, Artificial Sequence
  Description of Artificial Sequence: Synthetic oligonucleotide
gcauggagugagagauuua

SEQ ID NO: 557658 - RNA, 19 nt, Artificial Sequence
  Description of Artificial Sequence: Synthetic oligonucleotide
ggcccucuggugaagcaau

SEQ ID NO: 557659 - RNA, 19 nt, Artificial Sequence
  Description of Artificial Sequence: Synthetic oligonucleotide
ccgcucgaggacgaugcca

SEQ ID NO: 557660 - RNA, 19 nt, Artificial Sequence
  Description of Artificial Sequence: Synthetic oligonucleotide
gcacaugggcaauggucuu

SEQ ID NO: 557661 - RNA, 19 nt, Artificial Sequence
  Description of Artificial Sequence: Synthetic oligonucleotide
gcacaucuauaagggcgcu

SEQ ID NO: 557662 - RNA, 19 nt, Artificial Sequence
  Description of Artificial Sequence: Synthetic oligonucleotide
caacggaagcggcgcucgu

SEQ ID NO: 557663 - RNA, 19 nt, Artificial Sequence
  Description of Artificial Sequence: Synthetic oligonucleotide
cggcccuauaugaccucuc

SEQ ID NO: 557664 - RNA, 19 nt, Artificial Sequence
  Description of Artificial Sequence: Synthetic oligonucleotide
ccucacgugccgcaccagu

SEQ ID NO: 557665 - RNA, 19 nt, Artificial Sequence
  Description of Artificial Sequence: Synthetic oligonucleotide
cgccuguggugacggauga

SEQ ID NO: 557666 - RNA, 19 nt, Artificial Sequence
  Description of Artificial Sequence: Synthetic oligonucleotide
caccucaauugggcccucu

SEQ ID NO: 557667 - RNA, 19 nt, Artificial Sequence
  Description of Artificial Sequence: Synthetic oligonucleotide
ccaccacgaugugggccac

SEQ ID NO: 557668 - RNA, 19 nt, Artificial Sequence
  Description of Artificial Sequence: Synthetic oligonucleotide
ccucuuugaugugcccacu

SEQ ID NO: 557669 - RNA, 19 nt, Artificial Sequence
  Description of Artificial Sequence: Synthetic oligonucleotide
cggcugcuguguguuacca

SEQ ID NO: 557670 - RNA, 19 nt, Artificial Sequence
  Description of Artificial Sequence: Synthetic oligonucleotide
gcaccucaauugggcccuc

SEQ ID NO: 557671 - RNA, 19 nt, Artificial Sequence
  Description of Artificial Sequence: Synthetic oligonucleotide
ccacgaugugggccacagu

SEQ ID NO: 557672 - RNA, 19 nt, Artificial Sequence
  Description of Artificial Sequence: Synthetic oligonucleotide
caacccgcucgaggacgau

SEQ ID NO: 557673 - RNA, 19 nt, Artificial Sequence
  Description of Artificial Sequence: Synthetic oligonucleotide
ccugcucgcccuccccaau

SEQ ID NO: 557674 - RNA, 19 nt, Artificial Sequence
  Description of Artificial Sequence: Synthetic oligonucleotide
cguagcggccuuccuuguu

SEQ ID NO: 557675 - RNA, 19 nt, Artificial Sequence
  Description of Artificial Sequence: Synthetic oligonucleotide
gggcccgauggcaggucuu

SEQ ID NO: 557676 - RNA, 19 nt, Artificial Sequence
  Description of Artificial Sequence: Synthetic oligonucleotide
cgucgguggccccgcacau

SEQ ID NO: 557677 - RNA, 19 nt, Artificial Sequence
  Description of Artificial Sequence: Synthetic oligonucleotide
gccgcaccagugagcccuu

SEQ ID NO: 557678 - RNA, 19 nt, Artificial Sequence
  Description of Artificial Sequence: Synthetic oligonucleotide
ccgcaccagugagcccuuu

SEQ ID NO: 557679 - RNA, 19 nt, Artificial Sequence
  Description of Artificial Sequence: Synthetic oligonucleotide
aaagcuucuauuccaaugc

SEQ ID NO: 557680 - RNA, 19 nt, Artificial Sequence
  Description of Artificial Sequence: Synthetic oligonucleotide
aaauagucugcacagugac

SEQ ID NO: 557681 - RNA, 19 nt, Artificial Sequence
  Description of Artificial Sequence: Synthetic oligonucleotide
acaugauuagagcagaugg

SEQ ID NO: 557682 - RNA, 19 nt, Artificial Sequence
  Description of Artificial Sequence: Synthetic oligonucleotide
uuaauggucagucaagcag

SEQ ID NO: 557683 - RNA, 19 nt, Artificial Sequence
  Description of Artificial Sequence: Synthetic oligonucleotide
aagucuacaugauuagagc

SEQ ID NO: 557684 - RNA, 19 nt, Artificial Sequence
  Description of Artificial Sequence: Synthetic oligonucleotide
uggucagucaagcagaacg

SEQ ID NO: 557685 - RNA, 19 nt, Artificial Sequence
  Description of Artificial Sequence: Synthetic oligonucleotide
uauagaacagcaaugacaa

SEQ ID NO: 557686 - RNA, 19 nt, Artificial Sequence
  Description of Artificial Sequence: Synthetic oligonucleotide
aaauccgcaagucuugggg

SEQ ID NO: 557687 - RNA, 19 nt, Artificial Sequence
  Description of Artificial Sequence: Synthetic oligonucleotide
cauaguaucgauaaccuug

SEQ ID NO: 557688 - RNA, 19 nt, Artificial Sequence
  Description of Artificial Sequence: Synthetic oligonucleotide
uaggccauaucaaagaaug

SEQ ID NO: 557689 - RNA, 19 nt, Artificial Sequence
  Description of Artificial Sequence: Synthetic oligonucleotide
uucaguaacucccaggaug

SEQ ID NO: 557690 - RNA, 19 nt, Artificial Sequence
  Description of Artificial Sequence: Synthetic oligonucleotide
aacucuauagaacagcaau

SEQ ID NO: 557691 - RNA, 19 nt, Artificial Sequence
  Description of Artificial Sequence: Synthetic oligonucleotide
gaugaaguggcgcacagcc

SEQ ID NO: 557692 - RNA, 19 nt, Artificial Sequence
  Description of Artificial Sequence: Synthetic oligonucleotide
aaugcaaagagauucuuuu

SEQ ID NO: 557693 - RNA, 19 nt, Artificial Sequence
  Description of Artificial Sequence: Synthetic oligonucleotide
auaguaguuuuauuguaac

SEQ ID NO: 557694 - RNA, 19 nt, Artificial Sequence
  Description of Artificial Sequence: Synthetic oligonucleotide
uguacugucugacucaugu

SEQ ID NO: 557695 - RNA, 19 nt, Artificial Sequence
  Description of Artificial Sequence: Synthetic oligonucleotide
caaaauuccagacaccagc

SEQ ID NO: 557696 - RNA, 19 nt, Artificial Sequence
  Description of Artificial Sequence: Synthetic oligonucleotide
ugcacagugacaaaccggc

SEQ ID NO: 557697 - RNA, 19 nt, Artificial Sequence
  Description of Artificial Sequence: Synthetic oligonucleotide
aguaucgauaaccuuguag

SEQ ID NO: 557698 - RNA, 19 nt, Artificial Sequence
  Description of Artificial Sequence: Synthetic oligonucleotide
auaugauuggcagaggcac

SEQ ID NO: 557699 - RNA, 19 nt, Artificial Sequence
  Description of Artificial Sequence: Synthetic oligonucleotide
ucuguaaagcacaauuucu

SEQ ID NO: 557700 - RNA, 19 nt, Artificial Sequence
  Description of Artificial Sequence: Synthetic oligonucleotide
accauauaggcccauguuc

SEQ ID NO: 557701 - RNA, 19 nt, Artificial Sequence
  Description of Artificial Sequence: Synthetic oligonucleotide
aagcuucuauuccaaugcc

SEQ ID NO: 557702 - RNA, 19 nt, Artificial Sequence
  Description of Artificial Sequence: Synthetic oligonucleotide
aauaugaguggucucaguu

SEQ ID NO: 557703 - RNA, 19 nt, Artificial Sequence
  Description of Artificial Sequence: Synthetic oligonucleotide
ucucaugagagcaaaggcu

SEQ ID NO: 557704 - RNA, 19 nt, Artificial Sequence
  Description of Artificial Sequence: Synthetic oligonucleotide
uguaaugugaucugcugac

SEQ ID NO: 557705 - RNA, 19 nt, Artificial Sequence
  Description of Artificial Sequence: Synthetic oligonucleotide
ucuaauaugaguggucuca

SEQ ID NO: 557706 - RNA, 19 nt, Artificial Sequence
  Description of Artificial Sequence: Synthetic oligonucleotide
aauuccagacaccagccgu

SEQ ID NO: 557707 - RNA, 19 nt, Artificial Sequence
  Description of Artificial Sequence: Synthetic oligonucleotide
ucugcacagugacaaaccg

SEQ ID NO: 557708 - RNA, 19 nt, Artificial Sequence
  Description of Artificial Sequence: Synthetic oligonucleotide
guaacagagaaaccaggcg

SEQ ID NO: 557709 - RNA, 19 nt, Artificial Sequence
  Description of Artificial Sequence: Synthetic oligonucleotide
acaggggaaccccugauac

SEQ ID NO: 557710 - RNA, 19 nt, Artificial Sequence
  Description of Artificial Sequence: Synthetic oligonucleotide
aaugcagguucccacucuc

SEQ ID NO: 557711 - RNA, 19 nt, Artificial Sequence
  Description of Artificial Sequence: Synthetic oligonucleotide
cauucagucgcuguuaugc

SEQ ID NO: 557712 - RNA, 19 nt, Artificial Sequence
  Description of Artificial Sequence: Synthetic oligonucleotide
aguaagucuacaugauuag

SEQ ID NO: 557713 - RNA, 19 nt, Artificial Sequence
  Description of Artificial Sequence: Synthetic oligonucleotide
cacguuaaugcccugcucg

SEQ ID NO: 557714 - RNA, 19 nt, Artificial Sequence
  Description of Artificial Sequence: Synthetic oligonucleotide
cuuacguaagucccgacag

SEQ ID NO: 557715 - RNA, 19 nt, Artificial Sequence
  Description of Artificial Sequence: Synthetic oligonucleotide
uaaccuuguaguugcaugc

SEQ ID NO: 557716 - RNA, 19 nt, Artificial Sequence
  Description of Artificial Sequence: Synthetic oligonucleotide
gaaagguggucucuguucc

SEQ ID NO: 557717 - RNA, 19 nt, Artificial Sequence
  Description of Artificial Sequence: Synthetic oligonucleotide
uugguaggccauaucaaag

SEQ ID NO: 557718 - RNA, 19 nt, Artificial Sequence
  Description of Artificial Sequence: Synthetic oligonucleotide
uguuaugcauugugguugg

SEQ ID NO: 557719 - RNA, 19 nt, Artificial Sequence
  Description of Artificial Sequence: Synthetic oligonucleotide
aagucaaauccgcaagucu

SEQ ID NO: 557720 - RNA, 19 nt, Artificial Sequence
  Description of Artificial Sequence: Synthetic oligonucleotide
ugaaacucuauagaacagc

SEQ ID NO: 557721 - RNA, 19 nt, Artificial Sequence
  Description of Artificial Sequence: Synthetic oligonucleotide
uagaccgagaacuccuugg

SEQ ID NO: 557722 - RNA, 19 nt, Artificial Sequence
  Description of Artificial Sequence: Synthetic oligonucleotide
ucagguuggagaccaacug

SEQ ID NO: 557723 - RNA, 19 nt, Artificial Sequence
  Description of Artificial Sequence: Synthetic oligonucleotide
gaauacauggggcggauca

SEQ ID NO: 557724 - RNA, 19 nt, Artificial Sequence
  Description of Artificial Sequence: Synthetic oligonucleotide
ucucacaaccucuaauaug

SEQ ID NO: 557725 - RNA, 19 nt, Artificial Sequence
  Description of Artificial Sequence: Synthetic oligonucleotide
acgggaugaaacucuauag

SEQ ID NO: 557726 - RNA, 19 nt, Artificial Sequence
  Description of Artificial Sequence: Synthetic oligonucleotide
ucuauagaacagcaaugac

SEQ ID NO: 557727 - RNA, 19 nt, Artificial Sequence
  Description of Artificial Sequence: Synthetic oligonucleotide
ucguuguuuucucccaggg

SEQ ID NO: 557728 - RNA, 19 nt, Artificial Sequence
  Description of Artificial Sequence: Synthetic oligonucleotide
uccaugcuuacguaagucc

SEQ ID NO: 557729 - RNA, 19 nt, Artificial Sequence
  Description of Artificial Sequence: Synthetic oligonucleotide
uaugcauugugguuggaaa

SEQ ID NO: 557730 - RNA, 19 nt, Artificial Sequence
  Description of Artificial Sequence: Synthetic oligonucleotide
agaaaggagggucuggccu

SEQ ID NO: 557731 - RNA, 19 nt, Artificial Sequence
  Description of Artificial Sequence: Synthetic oligonucleotide
ucgcuguuaugcauugugg

SEQ ID NO: 557732 - RNA, 19 nt, Artificial Sequence
  Description of Artificial Sequence: Synthetic oligonucleotide
guaucgauaaccuuguagu

SEQ ID NO: 557733 - RNA, 19 nt, Artificial Sequence
  Description of Artificial Sequence: Synthetic oligonucleotide
uaaugaugcggucagccau

SEQ ID NO: 557734 - RNA, 19 nt, Artificial Sequence
  Description of Artificial Sequence: Synthetic oligonucleotide
aacgggaugaaacucuaua

SEQ ID NO: 557735 - RNA, 19 nt, Artificial Sequence
  Description of Artificial Sequence: Synthetic oligonucleotide
cacccugguaauuacuugg

SEQ ID NO: 557736 - RNA, 19 nt, Artificial Sequence
  Description of Artificial Sequence: Synthetic oligonucleotide
accgagaacuccuugguca

SEQ ID NO: 557737 - RNA, 19 nt, Artificial Sequence
  Description of Artificial Sequence: Synthetic oligonucleotide
agcacaauuucuguaaugu

SEQ ID NO: 557738 - RNA, 19 nt, Artificial Sequence
  Description of Artificial Sequence: Synthetic oligonucleotide
cagugaaacaaaacaugcc

SEQ ID NO: 557739 - RNA, 19 nt, Artificial Sequence
  Description of Artificial Sequence: Synthetic oligonucleotide
aggaugguugcugcaaucc

SEQ ID NO: 557740 - RNA, 19 nt, Artificial Sequence
  Description of Artificial Sequence: Synthetic oligonucleotide
aagcacaauuucuguaaug

SEQ ID NO: 557741 - RNA, 19 nt, Artificial Sequence
  Description of Artificial Sequence: Synthetic oligonucleotide
aauccgcaagucuuggggu

SEQ ID NO: 557742 - RNA, 19 nt, Artificial Sequence
  Description of Artificial Sequence: Synthetic oligonucleotide
ucagucaagcagaacggga

SEQ ID NO: 557743 - RNA, 19 nt, Artificial Sequence
  Description of Artificial Sequence: Synthetic oligonucleotide
uuugcagaccacagugaag

SEQ ID NO: 557744 - RNA, 19 nt, Artificial Sequence
  Description of Artificial Sequence: Synthetic oligonucleotide
caugcuuacguaagucccg

SEQ ID NO: 557745 - RNA, 19 nt, Artificial Sequence
  Description of Artificial Sequence: Synthetic oligonucleotide
gguuggaauacauggggcg

SEQ ID NO: 557746 - RNA, 19 nt, Artificial Sequence
  Description of Artificial Sequence: Synthetic oligonucleotide
guaggagccaaucaaucac

SEQ ID NO: 557747 - RNA, 19 nt, Artificial Sequence
  Description of Artificial Sequence: Synthetic oligonucleotide
cuggcuccgauccuuaagg

SEQ ID NO: 557748 - RNA, 19 nt, Artificial Sequence
  Description of Artificial Sequence: Synthetic oligonucleotide
uugucauguagaccgagaa

SEQ ID NO: 557749 - RNA, 19 nt, Artificial Sequence
  Description of Artificial Sequence: Synthetic oligonucleotide
caagguagcccacauugcc

SEQ ID NO: 557750 - RNA, 19 nt, Artificial Sequence
  Description of Artificial Sequence: Synthetic oligonucleotide
gaaacucuauagaacagca

SEQ ID NO: 557751 - RNA, 19 nt, Artificial Sequence
  Description of Artificial Sequence: Synthetic oligonucleotide
ucacuucuugcaaccauug

SEQ ID NO: 557752 - RNA, 19 nt, Artificial Sequence
  Description of Artificial Sequence: Synthetic oligonucleotide
ugcgauuuccuuccacugc

SEQ ID NO: 557753 - RNA, 19 nt, Artificial Sequence
  Description of Artificial Sequence: Synthetic oligonucleotide
uucguuguuuucucccagg

SEQ ID NO: 557754 - RNA, 19 nt, Artificial Sequence
  Description of Artificial Sequence: Synthetic oligonucleotide
uugcaugccagcaucccug

SEQ ID NO: 557755 - RNA, 19 nt, Artificial Sequence
  Description of Artificial Sequence: Synthetic oligonucleotide
uugucaucucgauaggcac

SEQ ID NO: 557756 - RNA, 19 nt, Artificial Sequence
  Description of Artificial Sequence: Synthetic oligonucleotide
acagaacuaggcuagguuu

SEQ ID NO: 557757 - RNA, 19 nt, Artificial Sequence
  Description of Artificial Sequence: Synthetic oligonucleotide
aacaaaccccagaauaucu

SEQ ID NO: 557758 - RNA, 19 nt, Artificial Sequence
  Description of Artificial Sequence: Synthetic oligonucleotide
cuguuaugcauugugguug

SEQ ID NO: 557759 - RNA, 19 nt, Artificial Sequence
  Description of Artificial Sequence: Synthetic oligonucleotide
acacaugacucucaugaga

SEQ ID NO: 557760 - RNA, 19 nt, Artificial Sequence
  Description of Artificial Sequence: Synthetic oligonucleotide
auagucugcacagugacaa

SEQ ID NO: 557761 - RNA, 19 nt, Artificial Sequence
  Description of Artificial Sequence: Synthetic oligonucleotide
aucgauaaccuuguaguug

SEQ ID NO: 557762 - RNA, 19 nt, Artificial Sequence
  Description of Artificial Sequence: Synthetic oligonucleotide
aaccaggcggcaguaaguc

SEQ ID NO: 557763 - RNA, 19 nt, Artificial Sequence
  Description of Artificial Sequence: Synthetic oligonucleotide
caggaugagguuaaugguc

SEQ ID NO: 557764 - RNA, 19 nt, Artificial Sequence
  Description of Artificial Sequence: Synthetic oligonucleotide
agcagaacgggaugaaacu

SEQ ID NO: 557765 - RNA, 19 nt, Artificial Sequence
  Description of Artificial Sequence: Synthetic oligonucleotide
ucccgaggaacacauucag

SEQ ID NO: 557766 - RNA, 19 nt, Artificial Sequence
  Description of Artificial Sequence: Synthetic oligonucleotide
cagguuggagaccaacugg

SEQ ID NO: 557767 - RNA, 19 nt, Artificial Sequence
  Description of Artificial Sequence: Synthetic oligonucleotide
auuacuuggugaccuggug

SEQ ID NO: 557768 - RNA, 19 nt, Artificial Sequence
  Description of Artificial Sequence: Synthetic oligonucleotide
uacaugauuagagcagaug

SEQ ID NO: 557769 - RNA, 19 nt, Artificial Sequence
  Description of Artificial Sequence: Synthetic oligonucleotide
ugucugacucaugugagga

SEQ ID NO: 557770 - RNA, 19 nt, Artificial Sequence
  Description of Artificial Sequence: Synthetic oligonucleotide
agacuuauugguuucugua

SEQ ID NO: 557771 - RNA, 19 nt, Artificial Sequence
  Description of Artificial Sequence: Synthetic oligonucleotide
agcagaaaguuaugcuguc

SEQ ID NO: 557772 - RNA, 19 nt, Artificial Sequence
  Description of Artificial Sequence: Synthetic oligonucleotide
uggacgaggguccacgccu

SEQ ID NO: 557773 - RNA, 19 nt, Artificial Sequence
  Description of Artificial Sequence: Synthetic oligonucleotide
aauacauggggcggaucag

SEQ ID NO: 557774 - RNA, 19 nt, Artificial Sequence
  Description of Artificial Sequence: Synthetic oligonucleotide
cccguugucaucucgauag

SEQ ID NO: 557775 - RNA, 19 nt, Artificial Sequence
  Description of Artificial Sequence: Synthetic oligonucleotide
gauccuacccuguacuguc

SEQ ID NO: 557776 - RNA, 19 nt, Artificial Sequence
  Description of Artificial Sequence: Synthetic oligonucleotide
gucgcuguuaugcauugug

SEQ ID NO: 557777 - RNA, 19 nt, Artificial Sequence
  Description of Artificial Sequence: Synthetic oligonucleotide
uguaguugcaugccagcau

SEQ ID NO: 557778 - RNA, 19 nt, Artificial Sequence
  Description of Artificial Sequence: Synthetic oligonucleotide
auccgggcaccauugagag

SEQ ID NO: 557779 - RNA, 19 nt, Artificial Sequence
  Description of Artificial Sequence: Synthetic oligonucleotide
aguuaugcuguccaugcuu

SEQ ID NO: 557780 - RNA, 19 nt, Artificial Sequence
  Description of Artificial Sequence: Synthetic oligonucleotide
uucuauggcuccugagaag

SEQ ID NO: 557781 - RNA, 19 nt, Artificial Sequence
  Description of Artificial Sequence: Synthetic oligonucleotide
uuaggccagugaaacaaaa

SEQ ID NO: 557782 - RNA, 19 nt, Artificial Sequence
  Description of Artificial Sequence: Synthetic oligonucleotide
ugagguuaauggucaguca

SEQ ID NO: 557783 - RNA, 19 nt, Artificial Sequence
  Description of Artificial Sequence: Synthetic oligonucleotide
uggcaacagacuuauuggu

SEQ ID NO: 557784 - RNA, 19 nt, Artificial Sequence
  Description of Artificial Sequence: Synthetic oligonucleotide
uuggcauaugauuggcaga

SEQ ID NO: 557785 - RNA, 19 nt, Artificial Sequence
  Description of Artificial Sequence: Synthetic oligonucleotide
cauugugguuggaaacagg

SEQ ID NO: 557786 - RNA, 19 nt, Artificial Sequence
  Description of Artificial Sequence: Synthetic oligonucleotide
uaggccagugaaacaaaac

SEQ ID NO: 557787 - RNA, 19 nt, Artificial Sequence
  Description of Artificial Sequence: Synthetic oligonucleotide
gcugugauuuucuugcuug

SEQ ID NO: 557788 - RNA, 19 nt, Artificial Sequence
  Description of Artificial Sequence: Synthetic oligonucleotide
uucccgaggaacacauuca

SEQ ID NO: 557789 - RNA, 19 nt, Artificial Sequence
  Description of Artificial Sequence: Synthetic oligonucleotide
acucuauagaacagcaaug

SEQ ID NO: 557790 - RNA, 19 nt, Artificial Sequence
  Description of Artificial Sequence: Synthetic oligonucleotide
ucgaugaaguggcgcacag

SEQ ID NO: 557791 - RNA, 19 nt, Artificial Sequence
  Description of Artificial Sequence: Synthetic oligonucleotide
guaguugcaugccagcauc

SEQ ID NO: 557792 - RNA, 19 nt, Artificial Sequence
  Description of Artificial Sequence: Synthetic oligonucleotide
gaaauagucugcacaguga

SEQ ID NO: 557793 - RNA, 19 nt, Artificial Sequence
  Description of Artificial Sequence: Synthetic oligonucleotide
uaaggcuccagucccggaa

SEQ ID NO: 557794 - RNA, 19 nt, Artificial Sequence
  Description of Artificial Sequence: Synthetic oligonucleotide
ucaaucacugaaggggaca

SEQ ID NO: 557795 - RNA, 19 nt, Artificial Sequence
  Description of Artificial Sequence: Synthetic oligonucleotide
aauuacuuggugaccuggu

SEQ ID NO: 557796 - RNA, 19 nt, Artificial Sequence
  Description of Artificial Sequence: Synthetic oligonucleotide
augcuguccaugcuuacgu

SEQ ID NO: 557797 - RNA, 19 nt, Artificial Sequence
  Description of Artificial Sequence: Synthetic oligonucleotide
cucuauagaacagcaauga

SEQ ID NO: 557798 - RNA, 19 nt, Artificial Sequence
  Description of Artificial Sequence: Synthetic oligonucleotide
ugcccuaccucuuucccga

SEQ ID NO: 557799 - RNA, 19 nt, Artificial Sequence
  Description of Artificial Sequence: Synthetic oligonucleotide
auaguaucgauaaccuugu

SEQ ID NO: 557800 - RNA, 19 nt, Artificial Sequence
  Description of Artificial Sequence: Synthetic oligonucleotide
gagaaaggagggucuggcc

SEQ ID NO: 557801 - RNA, 19 nt, Artificial Sequence
  Description of Artificial Sequence: Synthetic oligonucleotide
cuaauaugaguggucucag

SEQ ID NO: 557802 - RNA, 19 nt, Artificial Sequence
  Description of Artificial Sequence: Synthetic oligonucleotide
uuuaggccagugaaacaaa

SEQ ID NO: 557803 - RNA, 19 nt, Artificial Sequence
  Description of Artificial Sequence: Synthetic oligonucleotide
cauggggcggaucaggauc

SEQ ID NO: 557804 - RNA, 19 nt, Artificial Sequence
  Description of Artificial Sequence: Synthetic oligonucleotide
uaucgauaaccuuguaguu

SEQ ID NO: 557805 - RNA, 19 nt, Artificial Sequence
  Description of Artificial Sequence: Synthetic oligonucleotide
gacaacgcucugcucuggg

SEQ ID NO: 557806 - RNA, 19 nt, Artificial Sequence
  Description of Artificial Sequence: Synthetic oligonucleotide
gggcuaauucugcagaagc

SEQ ID NO: 557807 - RNA, 19 nt, Artificial Sequence
  Description of Artificial Sequence: Synthetic oligonucleotide
uaauaugaguggucucagu

SEQ ID NO: 557808 - RNA, 19 nt, Artificial Sequence
  Description of Artificial Sequence: Synthetic oligonucleotide
caaauccgcaagucuuggg

SEQ ID NO: 557809 - RNA, 19 nt, Artificial Sequence
  Description of Artificial Sequence: Synthetic oligonucleotide
auacauggggcggaucagg

SEQ ID NO: 557810 - RNA, 19 nt, Artificial Sequence
  Description of Artificial Sequence: Synthetic oligonucleotide
guuggagaccaacuggguc

SEQ ID NO: 557811 - RNA, 19 nt, Artificial Sequence
  Description of Artificial Sequence: Synthetic oligonucleotide
agcacguaaggcuucccgu

SEQ ID NO: 557812 - RNA, 19 nt, Artificial Sequence
  Description of Artificial Sequence: Synthetic oligonucleotide
uuaugcauugugguuggaa

SEQ ID NO: 557813 - RNA, 19 nt, Artificial Sequence
  Description of Artificial Sequence: Synthetic oligonucleotide
aaccccugauaccaacgga

SEQ ID NO: 557814 - RNA, 19 nt, Artificial Sequence
  Description of Artificial Sequence: Synthetic oligonucleotide
ugcacccugguaauuacuu

SEQ ID NO: 557815 - RNA, 19 nt, Artificial Sequence
  Description of Artificial Sequence: Synthetic oligonucleotide
gucucaguuggguccacag

SEQ ID NO: 557816 - RNA, 19 nt, Artificial Sequence
  Description of Artificial Sequence: Synthetic oligonucleotide
ucuugcaaccauugcuuuc

SEQ ID NO: 557817 - RNA, 19 nt, Artificial Sequence
  Description of Artificial Sequence: Synthetic oligonucleotide
ucccaguaggagccaauca

SEQ ID NO: 557818 - RNA, 19 nt, Artificial Sequence
  Description of Artificial Sequence: Synthetic oligonucleotide
cuugguaggccauaucaaa

SEQ ID NO: 557819 - RNA, 19 nt, Artificial Sequence
  Description of Artificial Sequence: Synthetic oligonucleotide
acacguuaaugcccugcuc

SEQ ID NO: 557820 - RNA, 19 nt, Artificial Sequence
  Description of Artificial Sequence: Synthetic oligonucleotide
agaaaguuaugcuguccau

SEQ ID NO: 557821 - RNA, 19 nt, Artificial Sequence
  Description of Artificial Sequence: Synthetic oligonucleotide
agucccggaaauagucugc

SEQ ID NO: 557822 - RNA, 19 nt, Artificial Sequence
  Description of Artificial Sequence: Synthetic oligonucleotide
cacgcucaccauauaggcc

SEQ ID NO: 557823 - RNA, 19 nt, Artificial Sequence
  Description of Artificial Sequence: Synthetic oligonucleotide
agaccgagaacuccuuggu

SEQ ID NO: 557824 - RNA, 19 nt, Artificial Sequence
  Description of Artificial Sequence: Synthetic oligonucleotide
ugguaauuacuuggugacc

SEQ ID NO: 557825 - RNA, 19 nt, Artificial Sequence
  Description of Artificial Sequence: Synthetic oligonucleotide
ccugagaagucaaauccgc

SEQ ID NO: 557826 - RNA, 19 nt, Artificial Sequence
  Description of Artificial Sequence: Synthetic oligonucleotide
aaaccccagaauaucuccu

SEQ ID NO: 557827 - RNA, 19 nt, Artificial Sequence
  Description of Artificial Sequence: Synthetic oligonucleotide
gucagucaagcagaacggg

SEQ ID NO: 557828 - RNA, 19 nt, Artificial Sequence
  Description of Artificial Sequence: Synthetic oligonucleotide
aucucgauaggcaccaacu

SEQ ID NO: 557829 - RNA, 19 nt, Artificial Sequence
  Description of Artificial Sequence: Synthetic oligonucleotide
ccaugcuuacguaaguccc

SEQ ID NO: 557830 - RNA, 19 nt, Artificial Sequence
  Description of Artificial Sequence: Synthetic oligonucleotide
aagguagcccacauugcca

SEQ ID NO: 557831 - RNA, 19 nt, Artificial Sequence
  Description of Artificial Sequence: Synthetic oligonucleotide
aacucccagguucaucuuu

SEQ ID NO: 557832 - RNA, 19 nt, Artificial Sequence
  Description of Artificial Sequence: Synthetic oligonucleotide
acauugccagaggugacuc

SEQ ID NO: 557833 - RNA, 19 nt, Artificial Sequence
  Description of Artificial Sequence: Synthetic oligonucleotide
agucaaauccgcaagucuu

SEQ ID NO: 557834 - RNA, 19 nt, Artificial Sequence
  Description of Artificial Sequence: Synthetic oligonucleotide
aucucggcugaacuuaaaa

SEQ ID NO: 557835 - RNA, 19 nt, Artificial Sequence
  Description of Artificial Sequence: Synthetic oligonucleotide
uggcgcacagcccaggcau

SEQ ID NO: 557836 - RNA, 19 nt, Artificial Sequence
  Description of Artificial Sequence: Synthetic oligonucleotide
auauaggcccauguucuug

SEQ ID NO: 557837 - RNA, 19 nt, Artificial Sequence
  Description of Artificial Sequence: Synthetic oligonucleotide
ugauccuacccuguacugu

SEQ ID NO: 557838 - RNA, 19 nt, Artificial Sequence
  Description of Artificial Sequence: Synthetic oligonucleotide
uccugauccuacccuguac

SEQ ID NO: 557839 - RNA, 19 nt, Artificial Sequence
  Description of Artificial Sequence: Synthetic oligonucleotide
caacagacuuauugguuuc

SEQ ID NO: 557840 - RNA, 19 nt, Artificial Sequence
  Description of Artificial Sequence: Synthetic oligonucleotide
accucuaauaugagugguc

SEQ ID NO: 557841 - RNA, 19 nt, Artificial Sequence
  Description of Artificial Sequence: Synthetic oligonucleotide
uucagaaaagugggagaca

SEQ ID NO: 557842 - RNA, 19 nt, Artificial Sequence
  Description of Artificial Sequence: Synthetic oligonucleotide
ggaugguugcugcaauccg

SEQ ID NO: 557843 - RNA, 19 nt, Artificial Sequence
  Description of Artificial Sequence: Synthetic oligonucleotide
caaagggcggagucugagc

SEQ ID NO: 557844 - RNA, 19 nt, Artificial Sequence
  Description of Artificial Sequence: Synthetic oligonucleotide
cuucuauggcuccugagaa

SEQ ID NO: 557845 - RNA, 19 nt, Artificial Sequence
  Description of Artificial Sequence: Synthetic oligonucleotide
uucagucgcuguuaugcau

SEQ ID NO: 557846 - RNA, 19 nt, Artificial Sequence
  Description of Artificial Sequence: Synthetic oligonucleotide
ggaugaaacucuauagaac

SEQ ID NO: 557847 - RNA, 19 nt, Artificial Sequence
  Description of Artificial Sequence: Synthetic oligonucleotide
auaccaacggaugcuucag

SEQ ID NO: 557848 - RNA, 19 nt, Artificial Sequence
  Description of Artificial Sequence: Synthetic oligonucleotide
ccggaaauagucugcacag

SEQ ID NO: 557849 - RNA, 19 nt, Artificial Sequence
  Description of Artificial Sequence: Synthetic oligonucleotide
agccaaucaaucacugaag

SEQ ID NO: 557850 - RNA, 19 nt, Artificial Sequence
  Description of Artificial Sequence: Synthetic oligonucleotide
cagucccggaaauagucug

SEQ ID NO: 557851 - RNA, 19 nt, Artificial Sequence
  Description of Artificial Sequence: Synthetic oligonucleotide
cugcccuaccucuuucccg

SEQ ID NO: 557852 - RNA, 19 nt, Artificial Sequence
  Description of Artificial Sequence: Synthetic oligonucleotide
uccuacccuguacugucug

SEQ ID NO: 557853 - RNA, 19 nt, Artificial Sequence
  Description of Artificial Sequence: Synthetic oligonucleotide
ugauaccaacggaugcuuc

SEQ ID NO: 557854 - RNA, 19 nt, Artificial Sequence
  Description of Artificial Sequence: Synthetic oligonucleotide
aggacaacuguggaugaca

SEQ ID NO: 557855 - RNA, 19 nt, Artificial Sequence
  Description of Artificial Sequence: Synthetic oligonucleotide
cugcgauuuccuuccacug

SEQ ID NO: 557856 - RNA, 19 nt, Artificial Sequence
  Description of Artificial Sequence: Synthetic oligonucleotide
cuaaugaugcggucagcca

SEQ ID NO: 557857 - RNA, 19 nt, Artificial Sequence
  Description of Artificial Sequence: Synthetic oligonucleotide
aaacucuauagaacagcaa

SEQ ID NO: 557858 - RNA, 19 nt, Artificial Sequence
  Description of Artificial Sequence: Synthetic oligonucleotide
gaugggugugugauuuccc

SEQ ID NO: 557859 - RNA, 19 nt, Artificial Sequence
  Description of Artificial Sequence: Synthetic oligonucleotide
acacaacaucauuuacugu

SEQ ID NO: 557860 - RNA, 19 nt, Artificial Sequence
  Description of Artificial Sequence: Synthetic oligonucleotide
guagcccacauugccagag

SEQ ID NO: 557861 - RNA, 19 nt, Artificial Sequence
  Description of Artificial Sequence: Synthetic oligonucleotide
accaacggaugcuucagua

SEQ ID NO: 557862 - RNA, 19 nt, Artificial Sequence
  Description of Artificial Sequence: Synthetic oligonucleotide
uggggagcacguaaggcuu

SEQ ID NO: 557863 - RNA, 19 nt, Artificial Sequence
  Description of Artificial Sequence: Synthetic oligonucleotide
caucucgauaggcaccaac

SEQ ID NO: 557864 - RNA, 19 nt, Artificial Sequence
  Description of Artificial Sequence: Synthetic oligonucleotide
cauuuacuguccucgcuga

SEQ ID NO: 557865 - RNA, 19 nt, Artificial Sequence
  Description of Artificial Sequence: Synthetic oligonucleotide
cugauccuacccuguacug

SEQ ID NO: 557866 - RNA, 19 nt, Artificial Sequence
  Description of Artificial Sequence: Synthetic oligonucleotide
guuccuugcugagaaagga

SEQ ID NO: 557867 - RNA, 19 nt, Artificial Sequence
  Description of Artificial Sequence: Synthetic oligonucleotide
gucugacucaugugaggag

SEQ ID NO: 557868 - RNA, 19 nt, Artificial Sequence
  Description of Artificial Sequence: Synthetic oligonucleotide
auguagaccgagaacuccu

SEQ ID NO: 557869 - RNA, 19 nt, Artificial Sequence
  Description of Artificial Sequence: Synthetic oligonucleotide
cucuggacgaggguccacg

SEQ ID NO: 557870 - RNA, 19 nt, Artificial Sequence
  Description of Artificial Sequence: Synthetic oligonucleotide
cucuugaaggcuucaguaa

SEQ ID NO: 557871 - RNA, 19 nt, Artificial Sequence
  Description of Artificial Sequence: Synthetic oligonucleotide
uggcuccgauccuuaaggc

SEQ ID NO: 557872 - RNA, 19 nt, Artificial Sequence
  Description of Artificial Sequence: Synthetic oligonucleotide
uguagaccgagaacuccuu

SEQ ID NO: 557873 - RNA, 19 nt, Artificial Sequence
  Description of Artificial Sequence: Synthetic oligonucleotide
ccuuguaguugcaugccag

SEQ ID NO: 557874 - RNA, 19 nt, Artificial Sequence
  Description of Artificial Sequence: Synthetic oligonucleotide
uugcacccugguaauuacu

SEQ ID NO: 557875 - RNA, 19 nt, Artificial Sequence
  Description of Artificial Sequence: Synthetic oligonucleotide
ggcuuuaggccagugaaac

SEQ ID NO: 557876 - RNA, 19 nt, Artificial Sequence
  Description of Artificial Sequence: Synthetic oligonucleotide
caugauuagagcagauggu

SEQ ID NO: 557877 - RNA, 19 nt, Artificial Sequence
  Description of Artificial Sequence: Synthetic oligonucleotide
gagagguggguuggaauac

SEQ ID NO: 557878 - RNA, 19 nt, Artificial Sequence
  Description of Artificial Sequence: Synthetic oligonucleotide
agggcuaauucugcagaag

SEQ ID NO: 557879 - RNA, 19 nt, Artificial Sequence
  Description of Artificial Sequence: Synthetic oligonucleotide
ucaugcuaaugaugcgguc

SEQ ID NO: 557880 - RNA, 19 nt, Artificial Sequence
  Description of Artificial Sequence: Synthetic oligonucleotide
uucuugcaaccauugcuuu

SEQ ID NO: 557881 - RNA, 19 nt, Artificial Sequence
  Description of Artificial Sequence: Synthetic oligonucleotide
cauugccagaggugacucc

SEQ ID NO: 557882 - RNA, 19 nt, Artificial Sequence
  Description of Artificial Sequence: Synthetic oligonucleotide
cacguaaggcuucccguug

SEQ ID NO: 557883 - RNA, 19 nt, Artificial Sequence
  Description of Artificial Sequence: Synthetic oligonucleotide
gacaucucggcugaacuua

SEQ ID NO: 557884 - RNA, 19 nt, Artificial Sequence
  Description of Artificial Sequence: Synthetic oligonucleotide
ugacucucaugagagcaaa

SEQ ID NO: 557885 - RNA, 19 nt, Artificial Sequence
  Description of Artificial Sequence: Synthetic oligonucleotide
guuggaaacagguucuauu

SEQ ID NO: 557886 - RNA, 19 nt, Artificial Sequence
  Description of Artificial Sequence: Synthetic oligonucleotide
ggcuaauucugcagaagcc

SEQ ID NO: 557887 - RNA, 19 nt, Artificial Sequence
  Description of Artificial Sequence: Synthetic oligonucleotide
uaagucccgacaggaugag

SEQ ID NO: 557888 - RNA, 19 nt, Artificial Sequence
  Description of Artificial Sequence: Synthetic oligonucleotide
gguaauuacuuggugaccu

SEQ ID NO: 557889 - RNA, 19 nt, Artificial Sequence
  Description of Artificial Sequence: Synthetic oligonucleotide
gcggcaguaagucuacaug

SEQ ID NO: 557890 - RNA, 19 nt, Artificial Sequence
  Description of Artificial Sequence: Synthetic oligonucleotide
uaccaacggaugcuucagu

SEQ ID NO: 557891 - RNA, 19 nt, Artificial Sequence
  Description of Artificial Sequence: Synthetic oligonucleotide
agcuucuauuccaaugcca

SEQ ID NO: 557892 - RNA, 19 nt, Artificial Sequence
  Description of Artificial Sequence: Synthetic oligonucleotide
uacuguccucgcugaagug

SEQ ID NO: 557893 - RNA, 19 nt, Artificial Sequence
  Description of Artificial Sequence: Synthetic oligonucleotide
acaacgcucugcucuggga

SEQ ID NO: 557894 - RNA, 19 nt, Artificial Sequence
  Description of Artificial Sequence: Synthetic oligonucleotide
acguaaggcuucccguugu

SEQ ID NO: 557895 - RNA, 19 nt, Artificial Sequence
  Description of Artificial Sequence: Synthetic oligonucleotide
caggggaaccccugauacc

SEQ ID NO: 557896 - RNA, 19 nt, Artificial Sequence
  Description of Artificial Sequence: Synthetic oligonucleotide
ugggaggaccccucuuucu

SEQ ID NO: 557897 - RNA, 19 nt, Artificial Sequence
  Description of Artificial Sequence: Synthetic oligonucleotide
uuaaggcuccagucccgga

SEQ ID NO: 557898 - RNA, 19 nt, Artificial Sequence
  Description of Artificial Sequence: Synthetic oligonucleotide
ugcugcgauuuccuuccac

SEQ ID NO: 557899 - RNA, 19 nt, Artificial Sequence
  Description of Artificial Sequence: Synthetic oligonucleotide
cuucccguugucaucucga

SEQ ID NO: 557900 - RNA, 19 nt, Artificial Sequence
  Description of Artificial Sequence: Synthetic oligonucleotide
cucgcugaaguggcaacag

SEQ ID NO: 557901 - RNA, 19 nt, Artificial Sequence
  Description of Artificial Sequence: Synthetic oligonucleotide
gaccgagaacuccuugguc

SEQ ID NO: 557902 - RNA, 19 nt, Artificial Sequence
  Description of Artificial Sequence: Synthetic oligonucleotide
ggugugugauuuccccagg

SEQ ID NO: 557903 - RNA, 19 nt, Artificial Sequence
  Description of Artificial Sequence: Synthetic oligonucleotide
uguuuucucccagggcuaa

SEQ ID NO: 557904 - RNA, 19 nt, Artificial Sequence
  Description of Artificial Sequence: Synthetic oligonucleotide
gcuuacguaagucccgaca

SEQ ID NO: 557905 - RNA, 19 nt, Artificial Sequence
  Description of Artificial Sequence: Synthetic oligonucleotide
cacgguuccuugcugagaa

SEQ ID NO: 557906 - RNA, 19 nt, Artificial Sequence
  Description of Artificial Sequence: Synthetic oligonucleotide
aguugugggaggaccccuc

SEQ ID NO: 557907 - RNA, 19 nt, Artificial Sequence
  Description of Artificial Sequence: Synthetic oligonucleotide
uccgcaagucuugggguca

SEQ ID NO: 557908 - RNA, 19 nt, Artificial Sequence
  Description of Artificial Sequence: Synthetic oligonucleotide
ugccaaucuggucggugau

SEQ ID NO: 557909 - RNA, 19 nt, Artificial Sequence
  Description of Artificial Sequence: Synthetic oligonucleotide
cuugcaaccauugcuuucu

SEQ ID NO: 557910 - RNA, 19 nt, Artificial Sequence
  Description of Artificial Sequence: Synthetic oligonucleotide
guuaugcuguccaugcuua

SEQ ID NO: 557911 - RNA, 19 nt, Artificial Sequence
  Description of Artificial Sequence: Synthetic oligonucleotide
cuggacgaggguccacgcc

SEQ ID NO: 557912 - RNA, 19 nt, Artificial Sequence
  Description of Artificial Sequence: Synthetic oligonucleotide
auggucagucaagcagaac

SEQ ID NO: 557913 - RNA, 19 nt, Artificial Sequence
  Description of Artificial Sequence: Synthetic oligonucleotide
cagguucuauucaccacca

SEQ ID NO: 557914 - RNA, 19 nt, Artificial Sequence
  Description of Artificial Sequence: Synthetic oligonucleotide
aaguggcgcacagcccagg

SEQ ID NO: 557915 - RNA, 19 nt, Artificial Sequence
  Description of Artificial Sequence: Synthetic oligonucleotide
ggcaccauugagagguggg

SEQ ID NO: 557916 - RNA, 19 nt, Artificial Sequence
  Description of Artificial Sequence: Synthetic oligonucleotide
ugguugcugcaauccgggc

SEQ ID NO: 557917 - RNA, 19 nt, Artificial Sequence
  Description of Artificial Sequence: Synthetic oligonucleotide
aggagccaaucaaucacug

SEQ ID NO: 557918 - RNA, 19 nt, Artificial Sequence
  Description of Artificial Sequence: Synthetic oligonucleotide
accccugauaccaacggau

SEQ ID NO: 557919 - RNA, 19 nt, Artificial Sequence
  Description of Artificial Sequence: Synthetic oligonucleotide
guaaugugaucugcugaca

SEQ ID NO: 557920 - RNA, 19 nt, Artificial Sequence
  Description of Artificial Sequence: Synthetic oligonucleotide
augcuuacguaagucccga

SEQ ID NO: 557921 - RNA, 19 nt, Artificial Sequence
  Description of Artificial Sequence: Synthetic oligonucleotide
cugcucgaugaaguggcgc

SEQ ID NO: 557922 - RNA, 19 nt, Artificial Sequence
  Description of Artificial Sequence: Synthetic oligonucleotide
uucccguugucaucucgau

SEQ ID NO: 557923 - RNA, 19 nt, Artificial Sequence
  Description of Artificial Sequence: Synthetic oligonucleotide
gagaugcggccauccuuug

SEQ ID NO: 557924 - RNA, 19 nt, Artificial Sequence
  Description of Artificial Sequence: Synthetic oligonucleotide
ucccguugucaucucgaua

SEQ ID NO: 557925 - RNA, 19 nt, Artificial Sequence
  Description of Artificial Sequence: Synthetic oligonucleotide
cuggggagcacguaaggcu

SEQ ID NO: 557926 - RNA, 19 nt, Artificial Sequence
  Description of Artificial Sequence: Synthetic oligonucleotide
gguggucucuguuccuuug

SEQ ID NO: 557927 - RNA, 19 nt, Artificial Sequence
  Description of Artificial Sequence: Synthetic oligonucleotide
ggguuggaauacauggggc

SEQ ID NO: 557928 - RNA, 19 nt, Artificial Sequence
  Description of Artificial Sequence: Synthetic oligonucleotide
gcauugugguuggaaacag

SEQ ID NO: 557929 - RNA, 19 nt, Artificial Sequence
  Description of Artificial Sequence: Synthetic oligonucleotide
aggcacacguuaaugcccu

SEQ ID NO: 557930 - RNA, 19 nt, Artificial Sequence
  Description of Artificial Sequence: Synthetic oligonucleotide
ugcuccauacugggagggc

SEQ ID NO: 557931 - RNA, 19 nt, Artificial Sequence
  Description of Artificial Sequence: Synthetic oligonucleotide
ugcuuacguaagucccgac

SEQ ID NO: 557932 - RNA, 19 nt, Artificial Sequence
  Description of Artificial Sequence: Synthetic oligonucleotide
cacaaccucuaauaugagu

SEQ ID NO: 557933 - RNA, 19 nt, Artificial Sequence
  Description of Artificial Sequence: Synthetic oligonucleotide
ucccggaaauagucugcac

SEQ ID NO: 557934 - RNA, 19 nt, Artificial Sequence
  Description of Artificial Sequence: Synthetic oligonucleotide
agugacaaaccggccacuu

SEQ ID NO: 557935 - RNA, 19 nt, Artificial Sequence
  Description of Artificial Sequence: Synthetic oligonucleotide
uaguaucgauaaccuugua

SEQ ID NO: 557936 - RNA, 19 nt, Artificial Sequence
  Description of Artificial Sequence: Synthetic oligonucleotide
gcagaggcacacguuaaug

SEQ ID NO: 557937 - RNA, 19 nt, Artificial Sequence
  Description of Artificial Sequence: Synthetic oligonucleotide
aggaccccucuuucuucag

SEQ ID NO: 557938 - RNA, 19 nt, Artificial Sequence
  Description of Artificial Sequence: Synthetic oligonucleotide
ucccgacaggaugagguua

SEQ ID NO: 557939 - RNA, 19 nt, Artificial Sequence
  Description of Artificial Sequence: Synthetic oligonucleotide
cuuucacuucuugcaacca

SEQ ID NO: 557940 - RNA, 19 nt, Artificial Sequence
  Description of Artificial Sequence: Synthetic oligonucleotide
auggggcggaucaggaucu

SEQ ID NO: 557941 - RNA, 19 nt, Artificial Sequence
  Description of Artificial Sequence: Synthetic oligonucleotide
acccugguaauuacuuggu

SEQ ID NO: 557942 - RNA, 19 nt, Artificial Sequence
  Description of Artificial Sequence: Synthetic oligonucleotide
acggagaugcggccauccu

SEQ ID NO: 557943 - RNA, 19 nt, Artificial Sequence
  Description of Artificial Sequence: Synthetic oligonucleotide
cccagaauaucuccugauc

SEQ ID NO: 557944 - RNA, 19 nt, Artificial Sequence
  Description of Artificial Sequence: Synthetic oligonucleotide
gugggaggaccccucuuuc

SEQ ID NO: 557945 - RNA, 19 nt, Artificial Sequence
  Description of Artificial Sequence: Synthetic oligonucleotide
ccauauaggcccauguucu

SEQ ID NO: 557946 - RNA, 19 nt, Artificial Sequence
  Description of Artificial Sequence: Synthetic oligonucleotide
ggagccaaucaaucacuga

SEQ ID NO: 557947 - RNA, 19 nt, Artificial Sequence
  Description of Artificial Sequence: Synthetic oligonucleotide
cccggaaauagucugcaca

SEQ ID NO: 557948 - RNA, 19 nt, Artificial Sequence
  Description of Artificial Sequence: Synthetic oligonucleotide
ccgagaacuccuuggucag

SEQ ID NO: 557949 - RNA, 19 nt, Artificial Sequence
  Description of Artificial Sequence: Synthetic oligonucleotide
agaacgggaugaaacucua

SEQ ID NO: 557950 - RNA, 19 nt, Artificial Sequence
  Description of Artificial Sequence: Synthetic oligonucleotide
uugugggaggaccccucuu

SEQ ID NO: 557951 - RNA, 19 nt, Artificial Sequence
  Description of Artificial Sequence: Synthetic oligonucleotide
caguaacucccaggauggg

SEQ ID NO: 557952 - RNA, 19 nt, Artificial Sequence
  Description of Artificial Sequence: Synthetic oligonucleotide
gcagaacgggaugaaacuc

SEQ ID NO: 557953 - RNA, 19 nt, Artificial Sequence
  Description of Artificial Sequence: Synthetic oligonucleotide
cagggcuaauucugcagaa

SEQ ID NO: 557954 - RNA, 19 nt, Artificial Sequence
  Description of Artificial Sequence: Synthetic oligonucleotide
gucccggaaauagucugca

SEQ ID NO: 557955 - RNA, 19 nt, Artificial Sequence
  Description of Artificial Sequence: Synthetic oligonucleotide
cuauuccaaugccauggcu

SEQ ID NO: 557956 - RNA, 19 nt, Artificial Sequence
  Description of Artificial Sequence: Synthetic oligonucleotide
ggaugcuucaguaaagcuu

SEQ ID NO: 557957 - RNA, 19 nt, Artificial Sequence
  Description of Artificial Sequence: Synthetic oligonucleotide
gggaaccccugauaccaac

SEQ ID NO: 557958 - RNA, 19 nt, Artificial Sequence
  Description of Artificial Sequence: Synthetic oligonucleotide
cucucacaaccucuaauau

SEQ ID NO: 557959 - RNA, 19 nt, Artificial Sequence
  Description of Artificial Sequence: Synthetic oligonucleotide
gccguggaagccucugccc

SEQ ID NO: 557960 - RNA, 19 nt, Artificial Sequence
  Description of Artificial Sequence: Synthetic oligonucleotide
gagcgcaggcaugcaggag

SEQ ID NO: 557961 - RNA, 19 nt, Artificial Sequence
  Description of Artificial Sequence: Synthetic oligonucleotide
cacacguuaaugcccugcu

SEQ ID NO: 557962 - RNA, 19 nt, Artificial Sequence
  Description of Artificial Sequence: Synthetic oligonucleotide
gcacacguuaaugcccugc

SEQ ID NO: 557963 - RNA, 19 nt, Artificial Sequence
  Description of Artificial Sequence: Synthetic oligonucleotide
cagaacuaggcuagguuuu

SEQ ID NO: 557964 - RNA, 19 nt, Artificial Sequence
  Description of Artificial Sequence: Synthetic oligonucleotide
ccccugauaccaacggaug

SEQ ID NO: 557965 - RNA, 19 nt, Artificial Sequence
  Description of Artificial Sequence: Synthetic oligonucleotide
cugcaucuuugcagaccac

SEQ ID NO: 557966 - RNA, 19 nt, Artificial Sequence
  Description of Artificial Sequence: Synthetic oligonucleotide
gcggccauccuuugucaug

SEQ ID NO: 557967 - RNA, 19 nt, Artificial Sequence
  Description of Artificial Sequence: Synthetic oligonucleotide
ccagggcuaauucugcaga

SEQ ID NO: 557968 - RNA, 19 nt, Artificial Sequence
  Description of Artificial Sequence: Synthetic oligonucleotide
acaucucggcugaacuuaa

SEQ ID NO: 557969 - RNA, 19 nt, Artificial Sequence
  Description of Artificial Sequence: Synthetic oligonucleotide
guaggccauaucaaagaau

SEQ ID NO: 557970 - RNA, 19 nt, Artificial Sequence
  Description of Artificial Sequence: Synthetic oligonucleotide
caacaucauuuacuguccu

SEQ ID NO: 557971 - RNA, 19 nt, Artificial Sequence
  Description of Artificial Sequence: Synthetic oligonucleotide
aucccacacaugacucuca

SEQ ID NO: 557972 - RNA, 19 nt, Artificial Sequence
  Description of Artificial Sequence: Synthetic oligonucleotide
guggcgcacagcccaggca

SEQ ID NO: 557973 - RNA, 19 nt, Artificial Sequence
  Description of Artificial Sequence: Synthetic oligonucleotide
gcuguuaugcauugugguu

SEQ ID NO: 557974 - RNA, 19 nt, Artificial Sequence
  Description of Artificial Sequence: Synthetic oligonucleotide
cuacaugauuagagcagau

SEQ ID NO: 557975 - RNA, 19 nt, Artificial Sequence
  Description of Artificial Sequence: Synthetic oligonucleotide
acguaagucccgacaggau

SEQ ID NO: 557976 - RNA, 19 nt, Artificial Sequence
  Description of Artificial Sequence: Synthetic oligonucleotide
gcuccauacugggagggca

SEQ ID NO: 557977 - RNA, 19 nt, Artificial Sequence
  Description of Artificial Sequence: Synthetic oligonucleotide
agucgcuguuaugcauugu

SEQ ID NO: 557978 - RNA, 19 nt, Artificial Sequence
  Description of Artificial Sequence: Synthetic oligonucleotide
guccacgccugugggguug

SEQ ID NO: 557979 - RNA, 19 nt, Artificial Sequence
  Description of Artificial Sequence: Synthetic oligonucleotide
ccguugucaucucgauagg

SEQ ID NO: 557980 - RNA, 19 nt, Artificial Sequence
  Description of Artificial Sequence: Synthetic oligonucleotide
ccaacggaugcuucaguaa

SEQ ID NO: 557981 - RNA, 19 nt, Artificial Sequence
  Description of Artificial Sequence: Synthetic oligonucleotide
cacauugccagaggugacu

SEQ ID NO: 557982 - RNA, 19 nt, Artificial Sequence
  Description of Artificial Sequence: Synthetic oligonucleotide
ggcuccgauccuuaaggcu

SEQ ID NO: 557983 - RNA, 19 nt, Artificial Sequence
  Description of Artificial Sequence: Synthetic oligonucleotide
acgguuccuugcugagaaa

SEQ ID NO: 557984 - RNA, 19 nt, Artificial Sequence
  Description of Artificial Sequence: Synthetic oligonucleotide
ggacaacgcucugcucugg

SEQ ID NO: 557985 - RNA, 19 nt, Artificial Sequence
  Description of Artificial Sequence: Synthetic oligonucleotide
uccgauccuuaaggcucca

SEQ ID NO: 557986 - RNA, 19 nt, Artificial Sequence
  Description of Artificial Sequence: Synthetic oligonucleotide
gggagcacguaaggcuucc

SEQ ID NO: 557987 - RNA, 19 nt, Artificial Sequence
  Description of Artificial Sequence: Synthetic oligonucleotide
cauugagagguggguugga

SEQ ID NO: 557988 - RNA, 19 nt, Artificial Sequence
  Description of Artificial Sequence: Synthetic oligonucleotide
agucugagccgggcuggca

SEQ ID NO: 557989 - RNA, 19 nt, Artificial Sequence
  Description of Artificial Sequence: Synthetic oligonucleotide
cccuaccucuuucccgagg

SEQ ID NO: 557990 - RNA, 19 nt, Artificial Sequence
  Description of Artificial Sequence: Synthetic oligonucleotide
cauauaggcccauguucuu

SEQ ID NO: 557991 - RNA, 19 nt, Artificial Sequence
  Description of Artificial Sequence: Synthetic oligonucleotide
ccgggcaccauugagaggu

SEQ ID NO: 557992 - RNA, 19 nt, Artificial Sequence
  Description of Artificial Sequence: Synthetic oligonucleotide
cuaccucuuucccgaggaa

SEQ ID NO: 557993 - RNA, 19 nt, Artificial Sequence
  Description of Artificial Sequence: Synthetic oligonucleotide
caccauauaggcccauguu

SEQ ID NO: 557994 - RNA, 19 nt, Artificial Sequence
  Description of Artificial Sequence: Synthetic oligonucleotide
caucucggcugaacuuaaa

SEQ ID NO: 557995 - RNA, 19 nt, Artificial Sequence
  Description of Artificial Sequence: Synthetic oligonucleotide
cuucaguaacucccaggau

SEQ ID NO: 557996 - RNA, 19 nt, Artificial Sequence
  Description of Artificial Sequence: Synthetic oligonucleotide
gcacagugacaaaccggcc

SEQ ID NO: 557997 - RNA, 19 nt, Artificial Sequence
  Description of Artificial Sequence: Synthetic oligonucleotide
ggagaugcggccauccuuu

SEQ ID NO: 557998 - RNA, 19 nt, Artificial Sequence
  Description of Artificial Sequence: Synthetic oligonucleotide
uccacgccugugggguugu

SEQ ID NO: 557999 - RNA, 19 nt, Artificial Sequence
  Description of Artificial Sequence: Synthetic oligonucleotide
cuccagucccggaaauagu

SEQ ID NO: 558000 - RNA, 19 nt, Artificial Sequence
  Description of Artificial Sequence: Synthetic oligonucleotide
aggaugguuugggcagaaa

SEQ ID NO: 558001 - RNA, 19 nt, Artificial Sequence
  Description of Artificial Sequence: Synthetic oligonucleotide
gcucgaugaaguggcgcac

SEQ ID NO: 558002 - RNA, 19 nt, Artificial Sequence
  Description of Artificial Sequence: Synthetic oligonucleotide
ggaauacauggggcggauc

SEQ ID NO: 558003 - RNA, 19 nt, Artificial Sequence
  Description of Artificial Sequence: Synthetic oligonucleotide
ccauacugggagggcaaac

SEQ ID NO: 558004 - RNA, 19 nt, Artificial Sequence
  Description of Artificial Sequence: Synthetic oligonucleotide
ggguccucaugcuaaugau

SEQ ID NO: 558005 - RNA, 19 nt, Artificial Sequence
  Description of Artificial Sequence: Synthetic oligonucleotide
ggacgaggguccacgccug

SEQ ID NO: 558006 - RNA, 19 nt, Artificial Sequence
  Description of Artificial Sequence: Synthetic oligonucleotide
gaacgggaugaaacucuau

SEQ ID NO: 558007 - RNA, 19 nt, Artificial Sequence
  Description of Artificial Sequence: Synthetic oligonucleotide
ggcacacguuaaugcccug

SEQ ID NO: 558008 - RNA, 19 nt, Artificial Sequence
  Description of Artificial Sequence: Synthetic oligonucleotide
cacgccugugggguuguga

SEQ ID NO: 558009 - RNA, 19 nt, Artificial Sequence
  Description of Artificial Sequence: Synthetic oligonucleotide
ggcggcaguaagucuacau

SEQ ID NO: 558010 - RNA, 19 nt, Artificial Sequence
  Description of Artificial Sequence: Synthetic oligonucleotide
ccugauaccaacggaugcu

SEQ ID NO: 558011 - RNA, 19 nt, Artificial Sequence
  Description of Artificial Sequence: Synthetic oligonucleotide
ggagcacguaaggcuuccc

SEQ ID NO: 558012 - RNA, 19 nt, Artificial Sequence
  Description of Artificial Sequence: Synthetic oligonucleotide
gcgcacagcccaggcaucc

SEQ ID NO: 558013 - RNA, 19 nt, Artificial Sequence
  Description of Artificial Sequence: Synthetic oligonucleotide
ccuacccuguacugucuga

SEQ ID NO: 558014 - RNA, 19 nt, Artificial Sequence
  Description of Artificial Sequence: Synthetic oligonucleotide
gacgaggguccacgccugu

SEQ ID NO: 558015 - RNA, 19 nt, Artificial Sequence
  Description of Artificial Sequence: Synthetic oligonucleotide
gcacguaaggcuucccguu

SEQ ID NO: 558016 - RNA, 19 nt, Artificial Sequence
  Description of Artificial Sequence: Synthetic oligonucleotide
ggguccacgccuguggggu

SEQ ID NO: 558017 - RNA, 19 nt, Artificial Sequence
  Description of Artificial Sequence: Synthetic oligonucleotide
gucccgacaggaugagguu

SEQ ID NO: 558018 - RNA, 19 nt, Artificial Sequence
  Description of Artificial Sequence: Synthetic oligonucleotide
gggaggaccccucuuucuu

SEQ ID NO: 558019 - RNA, 19 nt, Artificial Sequence
  Description of Artificial Sequence: Synthetic oligonucleotide
cgaugaaguggcgcacagc

SEQ ID NO: 558020 - RNA, 19 nt, Artificial Sequence
  Description of Artificial Sequence: Synthetic oligonucleotide
gguuggaaacagguucuau

SEQ ID NO: 558021 - RNA, 19 nt, Artificial Sequence
  Description of Artificial Sequence: Synthetic oligonucleotide
cuucaucacugcugcgauu

SEQ ID NO: 558022 - RNA, 19 nt, Artificial Sequence
  Description of Artificial Sequence: Synthetic oligonucleotide
aggcggcaguaagucuaca

SEQ ID NO: 558023 - RNA, 19 nt, Artificial Sequence
  Description of Artificial Sequence: Synthetic oligonucleotide
ccagccguggaagccucug

SEQ ID NO: 558024 - RNA, 19 nt, Artificial Sequence
  Description of Artificial Sequence: Synthetic oligonucleotide
gcccuaccucuuucccgag

SEQ ID NO: 558025 - RNA, 19 nt, Artificial Sequence
  Description of Artificial Sequence: Synthetic oligonucleotide
cguaaggcuucccguuguc

SEQ ID NO: 558026 - RNA, 19 nt, Artificial Sequence
  Description of Artificial Sequence: Synthetic oligonucleotide
ggggagcacguaaggcuuc

SEQ ID NO: 558027 - RNA, 19 nt, Artificial Sequence
  Description of Artificial Sequence: Synthetic oligonucleotide
caguugugggaggaccccu

SEQ ID NO: 558028 - RNA, 19 nt, Artificial Sequence
  Description of Artificial Sequence: Synthetic oligonucleotide
cgauccuuaaggcuccagu

SEQ ID NO: 558029 - RNA, 19 nt, Artificial Sequence
  Description of Artificial Sequence: Synthetic oligonucleotide
cugcugcgauuuccuucca

SEQ ID NO: 558030 - RNA, 19 nt, Artificial Sequence
  Description of Artificial Sequence: Synthetic oligonucleotide
ccgauccuuaaggcuccag

SEQ ID NO: 558031 - RNA, 19 nt, Artificial Sequence
  Description of Artificial Sequence: Synthetic oligonucleotide
cuuucccgaggaacacauu

SEQ ID NO: 558032 - RNA, 19 nt, Artificial Sequence
  Description of Artificial Sequence: Synthetic oligonucleotide
uggggcggaucaggaucuu

SEQ ID NO: 558033 - RNA, 19 nt, Artificial Sequence
  Description of Artificial Sequence: Synthetic oligonucleotide
cgauaaccuuguaguugca

SEQ ID NO: 558034 - RNA, 19 nt, Artificial Sequence
  Description of Artificial Sequence: Synthetic oligonucleotide
ggacacuggggagcacgua

SEQ ID NO: 558035 - RNA, 19 nt, Artificial Sequence
  Description of Artificial Sequence: Synthetic oligonucleotide
cgggcaccauugagaggug

SEQ ID NO: 558036 - RNA, 19 nt, Artificial Sequence
  Description of Artificial Sequence: Synthetic oligonucleotide
gguccacgccugugggguu

SEQ ID NO: 558037 - RNA, 19 nt, Artificial Sequence
  Description of Artificial Sequence: Synthetic oligonucleotide
cguuaaugcccugcucgau

SEQ ID NO: 558038 - RNA, 19 nt, Artificial Sequence
  Description of Artificial Sequence: Synthetic oligonucleotide
ccacgccugugggguugug

SEQ ID NO: 558039 - RNA, 19 nt, Artificial Sequence
  Description of Artificial Sequence: Synthetic oligonucleotide
ccgcaagucuuggggucau

SEQ ID NO: 558040 - RNA, 19 nt, Artificial Sequence
  Description of Artificial Sequence: Synthetic oligonucleotide
cggccacuuuucagcacuu

SEQ ID NO: 558041 - RNA, 19 nt, Artificial Sequence
  Description of Artificial Sequence: Synthetic oligonucleotide
aauuauaaguuacagacuc

SEQ ID NO: 558042 - RNA, 19 nt, Artificial Sequence
  Description of Artificial Sequence: Synthetic oligonucleotide
aaugaacgaaaacagauca

SEQ ID NO: 558043 - RNA, 19 nt, Artificial Sequence
  Description of Artificial Sequence: Synthetic oligonucleotide
acuacuacaugacugagac

SEQ ID NO: 558044 - RNA, 19 nt, Artificial Sequence
  Description of Artificial Sequence: Synthetic oligonucleotide
uaaacuaagaacugaaaug

SEQ ID NO: 558045 - RNA, 19 nt, Artificial Sequence
  Description of Artificial Sequence: Synthetic oligonucleotide
aacguucugauuuguaggc

SEQ ID NO: 558046 - RNA, 19 nt, Artificial Sequence
  Description of Artificial Sequence: Synthetic oligonucleotide
uacugauuguaaaugaacg

SEQ ID NO: 558047 - RNA, 19 nt, Artificial Sequence
  Description of Artificial Sequence: Synthetic oligonucleotide
ugagucuauaaauauaugc

SEQ ID NO: 558048 - RNA, 19 nt, Artificial Sequence
  Description of Artificial Sequence: Synthetic oligonucleotide
acgaaaacagaucaguuac

SEQ ID NO: 558049 - RNA, 19 nt, Artificial Sequence
  Description of Artificial Sequence: Synthetic oligonucleotide
aguuuuagcagcuagaaaa

SEQ ID NO: 558050 - RNA, 19 nt, Artificial Sequence
  Description of Artificial Sequence: Synthetic oligonucleotide
uauguuugcacccagcagc

SEQ ID NO: 558051 - RNA, 19 nt, Artificial Sequence
  Description of Artificial Sequence: Synthetic oligonucleotide
aauguugaauuguaaguag

SEQ ID NO: 558052 - RNA, 19 nt, Artificial Sequence
  Description of Artificial Sequence: Synthetic oligonucleotide
gagggauguaauuugaacg

SEQ ID NO: 558053 - RNA, 19 nt, Artificial Sequence
  Description of Artificial Sequence: Synthetic oligonucleotide
acauaaacggaauuuagag

SEQ ID NO: 558054 - RNA, 19 nt, Artificial Sequence
  Description of Artificial Sequence: Synthetic oligonucleotide
aaacguucugauuuguagg

SEQ ID NO: 558055 - RNA, 19 nt, Artificial Sequence
  Description of Artificial Sequence: Synthetic oligonucleotide
aaacuaagaacugaaauga

SEQ ID NO: 558056 - RNA, 19 nt, Artificial Sequence
  Description of Artificial Sequence: Synthetic oligonucleotide
agggauguaauuugaacgc

SEQ ID NO: 558057 - RNA, 19 nt, Artificial Sequence
  Description of Artificial Sequence: Synthetic oligonucleotide
augaacuugagccauggac

SEQ ID NO: 558058 - RNA, 19 nt, Artificial Sequence
  Description of Artificial Sequence: Synthetic oligonucleotide
aaguauauguuacauacau

SEQ ID NO: 558059 - RNA, 19 nt, Artificial Sequence
  Description of Artificial Sequence: Synthetic oligonucleotide
aggucuuuuaaauauaucu

SEQ ID NO: 558060 - RNA, 19 nt, Artificial Sequence
  Description of Artificial Sequence: Synthetic oligonucleotide
acugaaaugagacauacaa

SEQ ID NO: 558061 - RNA, 19 nt, Artificial Sequence
  Description of Artificial Sequence: Synthetic oligonucleotide
acuaucuucauuguagagc

SEQ ID NO: 558062 - RNA, 19 nt, Artificial Sequence
  Description of Artificial Sequence: Synthetic oligonucleotide
ugaaaaguaacugaggccu

SEQ ID NO: 558063 - RNA, 19 nt, Artificial Sequence
  Description of Artificial Sequence: Synthetic oligonucleotide
aaaauaacuugcuuacuga

SEQ ID NO: 558064 - RNA, 19 nt, Artificial Sequence
  Description of Artificial Sequence: Synthetic oligonucleotide
ugguauuugaguuuggcca

SEQ ID NO: 558065 - RNA, 19 nt, Artificial Sequence
  Description of Artificial Sequence: Synthetic oligonucleotide
uuacagacucaaaucaagg

SEQ ID NO: 558066 - RNA, 19 nt, Artificial Sequence
  Description of Artificial Sequence: Synthetic oligonucleotide
auggggaauaacuuguuac

SEQ ID NO: 558067 - RNA, 19 nt, Artificial Sequence
  Description of Artificial Sequence: Synthetic oligonucleotide
aaugccaaauguugagacg

SEQ ID NO: 558068 - RNA, 19 nt, Artificial Sequence
  Description of Artificial Sequence: Synthetic oligonucleotide
gaaacguucugauuuguag

SEQ ID NO: 558069 - RNA, 19 nt, Artificial Sequence
  Description of Artificial Sequence: Synthetic oligonucleotide
uauaucuuggcucuugagu

SEQ ID NO: 558070 - RNA, 19 nt, Artificial Sequence
  Description of Artificial Sequence: Synthetic oligonucleotide
uugaauuguaaguagccgc

SEQ ID NO: 558071 - RNA, 19 nt, Artificial Sequence
  Description of Artificial Sequence: Synthetic oligonucleotide
aaagacugcuugcuagagc

SEQ ID NO: 558072 - RNA, 19 nt, Artificial Sequence
  Description of Artificial Sequence: Synthetic oligonucleotide
auaaguuacagacucaaau

SEQ ID NO: 558073 - RNA, 19 nt, Artificial Sequence
  Description of Artificial Sequence: Synthetic oligonucleotide
caugauaucccuuuggauc

SEQ ID NO: 558074 - RNA, 19 nt, Artificial Sequence
  Description of Artificial Sequence: Synthetic oligonucleotide
uucaauuguaagaggaagc

SEQ ID NO: 558075 - RNA, 19 nt, Artificial Sequence
  Description of Artificial Sequence: Synthetic oligonucleotide
aaacauggggaauaacuug

SEQ ID NO: 558076 - RNA, 19 nt, Artificial Sequence
  Description of Artificial Sequence: Synthetic oligonucleotide
uagacaauugcuccuacug

SEQ ID NO: 558077 - RNA, 19 nt, Artificial Sequence
  Description of Artificial Sequence: Synthetic oligonucleotide
gagacauacaaaguaagag

SEQ ID NO: 558078 - RNA, 19 nt, Artificial Sequence
  Description of Artificial Sequence: Synthetic oligonucleotide
uuagaggcagggaagacug

SEQ ID NO: 558079 - RNA, 19 nt, Artificial Sequence
  Description of Artificial Sequence: Synthetic oligonucleotide
aaaugaacgaaaacagauc

SEQ ID NO: 558080 - RNA, 19 nt, Artificial Sequence
  Description of Artificial Sequence: Synthetic oligonucleotide
acucaaaucaagguugccc

SEQ ID NO: 558081 - RNA, 19 nt, Artificial Sequence
  Description of Artificial Sequence: Synthetic oligonucleotide
uuguagagccgcuugaucc

SEQ ID NO: 558082 - RNA, 19 nt, Artificial Sequence
  Description of Artificial Sequence: Synthetic oligonucleotide
aaaccuguccaaaagacug

SEQ ID NO: 558083 - RNA, 19 nt, Artificial Sequence
  Description of Artificial Sequence: Synthetic oligonucleotide
agaaaucugggccugcgac

SEQ ID NO: 558084 - RNA, 19 nt, Artificial Sequence
  Description of Artificial Sequence: Synthetic oligonucleotide
aacuugcuuacugaauugc

SEQ ID NO: 558085 - RNA, 19 nt, Artificial Sequence
  Description of Artificial Sequence: Synthetic oligonucleotide
guauauguuacauacaugu

SEQ ID NO: 558086 - RNA, 19 nt, Artificial Sequence
  Description of Artificial Sequence: Synthetic oligonucleotide
agaaaggugaugugcugcc

SEQ ID NO: 558087 - RNA, 19 nt, Artificial Sequence
  Description of Artificial Sequence: Synthetic oligonucleotide
cagugcuacacacagaacc

SEQ ID NO: 558088 - RNA, 19 nt, Artificial Sequence
  Description of Artificial Sequence: Synthetic oligonucleotide
ugaauuguaaguagccgca

SEQ ID NO: 558089 - RNA, 19 nt, Artificial Sequence
  Description of Artificial Sequence: Synthetic oligonucleotide
cucaaaucaagguugcccc

SEQ ID NO: 558090 - RNA, 19 nt, Artificial Sequence
  Description of Artificial Sequence: Synthetic oligonucleotide
aauuugaacgcuccucugu

SEQ ID NO: 558091 - RNA, 19 nt, Artificial Sequence
  Description of Artificial Sequence: Synthetic oligonucleotide
aacuaaugaacuugagcca

SEQ ID NO: 558092 - RNA, 19 nt, Artificial Sequence
  Description of Artificial Sequence: Synthetic oligonucleotide
uccaauaggaaagacaauc

SEQ ID NO: 558093 - RNA, 19 nt, Artificial Sequence
  Description of Artificial Sequence: Synthetic oligonucleotide
ugcacgaggaguuaacacc

SEQ ID NO: 558094 - RNA, 19 nt, Artificial Sequence
  Description of Artificial Sequence: Synthetic oligonucleotide
uuuuggaugggcuuuuacu

SEQ ID NO: 558095 - RNA, 19 nt, Artificial Sequence
  Description of Artificial Sequence: Synthetic oligonucleotide
aacgaaaacagaucaguua

SEQ ID NO: 558096 - RNA, 19 nt, Artificial Sequence
  Description of Artificial Sequence: Synthetic oligonucleotide
ucuauuaccgcugauucgu

SEQ ID NO: 558097 - RNA, 19 nt, Artificial Sequence
  Description of Artificial Sequence: Synthetic oligonucleotide
ucuagucucacuuccgagc

SEQ ID NO: 558098 - RNA, 19 nt, Artificial Sequence
  Description of Artificial Sequence: Synthetic oligonucleotide
uccagacuaaccauggcca

SEQ ID NO: 558099 - RNA, 19 nt, Artificial Sequence
  Description of Artificial Sequence: Synthetic oligonucleotide
uuuaaacuaagaacugaaa

SEQ ID NO: 558100 - RNA, 19 nt, Artificial Sequence
  Description of Artificial Sequence: Synthetic oligonucleotide
ugagacauacaaaguaaga

SEQ ID NO: 558101 - RNA, 19 nt, Artificial Sequence
  Description of Artificial Sequence: Synthetic oligonucleotide
aagguuaaggacaacauuu

SEQ ID NO: 558102 - RNA, 19 nt, Artificial Sequence
  Description of Artificial Sequence: Synthetic oligonucleotide
ugauuguaaaugaacgaaa

SEQ ID NO: 558103 - RNA, 19 nt, Artificial Sequence
  Description of Artificial Sequence: Synthetic oligonucleotide
auaaagguugaacugguau

SEQ ID NO: 558104 - RNA, 19 nt, Artificial Sequence
  Description of Artificial Sequence: Synthetic oligonucleotide
auuaccgcugauucguggg

SEQ ID NO: 558105 - RNA, 19 nt, Artificial Sequence
  Description of Artificial Sequence: Synthetic oligonucleotide
uuaagguuaaggacaacau

SEQ ID NO: 558106 - RNA, 19 nt, Artificial Sequence
  Description of Artificial Sequence: Synthetic oligonucleotide
auuugaacgcuccucuguc

SEQ ID NO: 558107 - RNA, 19 nt, Artificial Sequence
  Description of Artificial Sequence: Synthetic oligonucleotide
auucaacuuauccagaaua

SEQ ID NO: 558108 - RNA, 19 nt, Artificial Sequence
  Description of Artificial Sequence: Synthetic oligonucleotide
uucaacuuauccagaauaa

SEQ ID NO: 558109 - RNA, 19 nt, Artificial Sequence
  Description of Artificial Sequence: Synthetic oligonucleotide
aaugagacauacaaaguaa

SEQ ID NO: 558110 - RNA, 19 nt, Artificial Sequence
  Description of Artificial Sequence: Synthetic oligonucleotide
aguaacugaggccuaguug

SEQ ID NO: 558111 - RNA, 19 nt, Artificial Sequence
  Description of Artificial Sequence: Synthetic oligonucleotide
ggacgguagacauaaacgg

SEQ ID NO: 558112 - RNA, 19 nt, Artificial Sequence
  Description of Artificial Sequence: Synthetic oligonucleotide
caaccauugaauuacuuca

SEQ ID NO: 558113 - RNA, 19 nt, Artificial Sequence
  Description of Artificial Sequence: Synthetic oligonucleotide
acugauuguaaaugaacga

SEQ ID NO: 558114 - RNA, 19 nt, Artificial Sequence
  Description of Artificial Sequence: Synthetic oligonucleotide
guugaauuguaaguagccg

SEQ ID NO: 558115 - RNA, 19 nt, Artificial Sequence
  Description of Artificial Sequence: Synthetic oligonucleotide
aauuuagaggcagggaaga

SEQ ID NO: 558116 - RNA, 19 nt, Artificial Sequence
  Description of Artificial Sequence: Synthetic oligonucleotide
ugcucaaauguccuaauua

SEQ ID NO: 558117 - RNA, 19 nt, Artificial Sequence
  Description of Artificial Sequence: Synthetic oligonucleotide
gauguaauuugaacgcucc

SEQ ID NO: 558118 - RNA, 19 nt, Artificial Sequence
  Description of Artificial Sequence: Synthetic oligonucleotide
acugucucucgccaauacc

SEQ ID NO: 558119 - RNA, 19 nt, Artificial Sequence
  Description of Artificial Sequence: Synthetic oligonucleotide
uuauaaguuacagacucaa

SEQ ID NO: 558120 - RNA, 19 nt, Artificial Sequence
  Description of Artificial Sequence: Synthetic oligonucleotide
auaccuuuaguacuggaau

SEQ ID NO: 558121 - RNA, 19 nt, Artificial Sequence
  Description of Artificial Sequence: Synthetic oligonucleotide
ucaagguugccccaguauc

SEQ ID NO: 558122 - RNA, 19 nt, Artificial Sequence
  Description of Artificial Sequence: Synthetic oligonucleotide
uccuaauuacauaucacuu

SEQ ID NO: 558123 - RNA, 19 nt, Artificial Sequence
  Description of Artificial Sequence: Synthetic oligonucleotide
uacagacucaaaucaaggu

SEQ ID NO: 558124 - RNA, 19 nt, Artificial Sequence
  Description of Artificial Sequence: Synthetic oligonucleotide
aauucaacuuauccagaau

SEQ ID NO: 558125 - RNA, 19 nt, Artificial Sequence
  Description of Artificial Sequence: Synthetic oligonucleotide
aaaaguaacugaggccuag

SEQ ID NO: 558126 - RNA, 19 nt, Artificial Sequence
  Description of Artificial Sequence: Synthetic oligonucleotide
aaacggaauuuagaggcag

SEQ ID NO: 558127 - RNA, 19 nt, Artificial Sequence
  Description of Artificial Sequence: Synthetic oligonucleotide
uuugaacgcuccucugucg

SEQ ID NO: 558128 - RNA, 19 nt, Artificial Sequence
  Description of Artificial Sequence: Synthetic oligonucleotide
agucugauaaagucacaag

SEQ ID NO: 558129 - RNA, 19 nt, Artificial Sequence
  Description of Artificial Sequence: Synthetic oligonucleotide
uacugaacucaauuauaag

SEQ ID NO: 558130 - RNA, 19 nt, Artificial Sequence
  Description of Artificial Sequence: Synthetic oligonucleotide
uauuaccgcugauucgugg

SEQ ID NO: 558131 - RNA, 19 nt, Artificial Sequence
  Description of Artificial Sequence: Synthetic oligonucleotide
uuucuagucucacuuccga

SEQ ID NO: 558132 - RNA, 19 nt, Artificial Sequence
  Description of Artificial Sequence: Synthetic oligonucleotide
acuucacgcagucugauaa

SEQ ID NO: 558133 - RNA, 19 nt, Artificial Sequence
  Description of Artificial Sequence: Synthetic oligonucleotide
uccuacugauuguaaauga

SEQ ID NO: 558134 - RNA, 19 nt, Artificial Sequence
  Description of Artificial Sequence: Synthetic oligonucleotide
gaacucaauuauaaguuac

SEQ ID NO: 558135 - RNA, 19 nt, Artificial Sequence
  Description of Artificial Sequence: Synthetic oligonucleotide
caucguagaagucauccac

SEQ ID NO: 558136 - RNA, 19 nt, Artificial Sequence
  Description of Artificial Sequence: Synthetic oligonucleotide
uuugggcaaacugaaaagu

SEQ ID NO: 558137 - RNA, 19 nt, Artificial Sequence
  Description of Artificial Sequence: Synthetic oligonucleotide
auaacuuguuaccaagaaa

SEQ ID NO: 558138 - RNA, 19 nt, Artificial Sequence
  Description of Artificial Sequence: Synthetic oligonucleotide
ugggcaaacugaaaaguaa

SEQ ID NO: 558139 - RNA, 19 nt, Artificial Sequence
  Description of Artificial Sequence: Synthetic oligonucleotide
uaaagguugaacugguauu

SEQ ID NO: 558140 - RNA, 19 nt, Artificial Sequence
  Description of Artificial Sequence: Synthetic oligonucleotide
uuagcagagguauguuugc

SEQ ID NO: 558141 - RNA, 19 nt, Artificial Sequence
  Description of Artificial Sequence: Synthetic oligonucleotide
ucgccaauaccuuuaguac

SEQ ID NO: 558142 - RNA, 19 nt, Artificial Sequence
  Description of Artificial Sequence: Synthetic oligonucleotide
agcacccggauauauuaac

SEQ ID NO: 558143 - RNA, 19 nt, Artificial Sequence
  Description of Artificial Sequence: Synthetic oligonucleotide
aucccuuuggaucugccug

SEQ ID NO: 558144 - RNA, 19 nt, Artificial Sequence
  Description of Artificial Sequence: Synthetic oligonucleotide
agccauggacuaaagaugg

SEQ ID NO: 558145 - RNA, 19 nt, Artificial Sequence
  Description of Artificial Sequence: Synthetic oligonucleotide
aaagguugaacugguauuu

SEQ ID NO: 558146 - RNA, 19 nt, Artificial Sequence
  Description of Artificial Sequence: Synthetic oligonucleotide
uaagguuaaggacaacauu

SEQ ID NO: 558147 - RNA, 19 nt, Artificial Sequence
  Description of Artificial Sequence: Synthetic oligonucleotide
uguagagccgcuugauccc

SEQ ID NO: 558148 - RNA, 19 nt, Artificial Sequence
  Description of Artificial Sequence: Synthetic oligonucleotide
aagaucccaauucaacuua

SEQ ID NO: 558149 - RNA, 19 nt, Artificial Sequence
  Description of Artificial Sequence: Synthetic oligonucleotide
gacuaaagauggcugccag

SEQ ID NO: 558150 - RNA, 19 nt, Artificial Sequence
  Description of Artificial Sequence: Synthetic oligonucleotide
aaccuguccaaaagacugc

SEQ ID NO: 558151 - RNA, 19 nt, Artificial Sequence
  Description of Artificial Sequence: Synthetic oligonucleotide
aacucaauuauaaguuaca

SEQ ID NO: 558152 - RNA, 19 nt, Artificial Sequence
  Description of Artificial Sequence: Synthetic oligonucleotide
aauugcuccuacugauugu

SEQ ID NO: 558153 - RNA, 19 nt, Artificial Sequence
  Description of Artificial Sequence: Synthetic oligonucleotide
uguggaacagccacagaaa

SEQ ID NO: 558154 - RNA, 19 nt, Artificial Sequence
  Description of Artificial Sequence: Synthetic oligonucleotide
aaaaccuguccaaaagacu

SEQ ID NO: 558155 - RNA, 19 nt, Artificial Sequence
  Description of Artificial Sequence: Synthetic oligonucleotide
aacuaagaacugaaaugag

SEQ ID NO: 558156 - RNA, 19 nt, Artificial Sequence
  Description of Artificial Sequence: Synthetic oligonucleotide
auauaucuuggcucuugag

SEQ ID NO: 558157 - RNA, 19 nt, Artificial Sequence
  Description of Artificial Sequence: Synthetic oligonucleotide
uuaccgcugauucgugggg

SEQ ID NO: 558158 - RNA, 19 nt, Artificial Sequence
  Description of Artificial Sequence: Synthetic oligonucleotide
uuccaaagguccuggaaac

SEQ ID NO: 558159 - RNA, 19 nt, Artificial Sequence
  Description of Artificial Sequence: Synthetic oligonucleotide
uacauacauguuucuucgg

SEQ ID NO: 558160 - RNA, 19 nt, Artificial Sequence
  Description of Artificial Sequence: Synthetic oligonucleotide
accgcaauggcauggaaaa

SEQ ID NO: 558161 - RNA, 19 nt, Artificial Sequence
  Description of Artificial Sequence: Synthetic oligonucleotide
cacgcagucugauaaaguc

SEQ ID NO: 558162 - RNA, 19 nt, Artificial Sequence
  Description of Artificial Sequence: Synthetic oligonucleotide
aguggaucaacugggagcu

SEQ ID NO: 558163 - RNA, 19 nt, Artificial Sequence
  Description of Artificial Sequence: Synthetic oligonucleotide
uuaguacuggaauuuucuc

SEQ ID NO: 558164 - RNA, 19 nt, Artificial Sequence
  Description of Artificial Sequence: Synthetic oligonucleotide
uugagacgggcucaauuug

SEQ ID NO: 558165 - RNA, 19 nt, Artificial Sequence
  Description of Artificial Sequence: Synthetic oligonucleotide
uuagugugcacgaggaguu

SEQ ID NO: 558166 - RNA, 19 nt, Artificial Sequence
  Description of Artificial Sequence: Synthetic oligonucleotide
uaguugacaccgcaauggc

SEQ ID NO: 558167 - RNA, 19 nt, Artificial Sequence
  Description of Artificial Sequence: Synthetic oligonucleotide
aauaacuugcuuacugaau

SEQ ID NO: 558168 - RNA, 19 nt, Artificial Sequence
  Description of Artificial Sequence: Synthetic oligonucleotide
uucuagucucacuuccgag

SEQ ID NO: 558169 - RNA, 19 nt, Artificial Sequence
  Description of Artificial Sequence: Synthetic oligonucleotide
uauaaguuacagacucaaa

SEQ ID NO: 558170 - RNA, 19 nt, Artificial Sequence
  Description of Artificial Sequence: Synthetic oligonucleotide
agacaauugcuccuacuga

SEQ ID NO: 558171 - RNA, 19 nt, Artificial Sequence
  Description of Artificial Sequence: Synthetic oligonucleotide
uaauuugaacgcuccucug

SEQ ID NO: 558172 - RNA, 19 nt, Artificial Sequence
  Description of Artificial Sequence: Synthetic oligonucleotide
cuugagucuauaaauauau

SEQ ID NO: 558173 - RNA, 19 nt, Artificial Sequence
  Description of Artificial Sequence: Synthetic oligonucleotide
aaauaauguugaauuguaa

SEQ ID NO: 558174 - RNA, 19 nt, Artificial Sequence
  Description of Artificial Sequence: Synthetic oligonucleotide
ugcuagagcaaauguuucu

SEQ ID NO: 558175 - RNA, 19 nt, Artificial Sequence
  Description of Artificial Sequence: Synthetic oligonucleotide
uucaaauauuuuggauggg

SEQ ID NO: 558176 - RNA, 19 nt, Artificial Sequence
  Description of Artificial Sequence: Synthetic oligonucleotide
agccgcacaaaggaaaagg

SEQ ID NO: 558177 - RNA, 19 nt, Artificial Sequence
  Description of Artificial Sequence: Synthetic oligonucleotide
uucacgcagucugauaaag

SEQ ID NO: 558178 - RNA, 19 nt, Artificial Sequence
  Description of Artificial Sequence: Synthetic oligonucleotide
augagacauacaaaguaag

SEQ ID NO: 558179 - RNA, 19 nt, Artificial Sequence
  Description of Artificial Sequence: Synthetic oligonucleotide
agacucaaaucaagguugc

SEQ ID NO: 558180 - RNA, 19 nt, Artificial Sequence
  Description of Artificial Sequence: Synthetic oligonucleotide
ucagccuuagugugcacga

SEQ ID NO: 558181 - RNA, 19 nt, Artificial Sequence
  Description of Artificial Sequence: Synthetic oligonucleotide
uuugcguuuagcagaggua

SEQ ID NO: 558182 - RNA, 19 nt, Artificial Sequence
  Description of Artificial Sequence: Synthetic oligonucleotide
agacauaaacggaauuuag

SEQ ID NO: 558183 - RNA, 19 nt, Artificial Sequence
  Description of Artificial Sequence: Synthetic oligonucleotide
guauguuugcacccagcag

SEQ ID NO: 558184 - RNA, 19 nt, Artificial Sequence
  Description of Artificial Sequence: Synthetic oligonucleotide
uugggcaaacugaaaagua

SEQ ID NO: 558185 - RNA, 19 nt, Artificial Sequence
  Description of Artificial Sequence: Synthetic oligonucleotide
acggaauuuagaggcaggg

SEQ ID NO: 558186 - RNA, 19 nt, Artificial Sequence
  Description of Artificial Sequence: Synthetic oligonucleotide
gaauuacuucaucucucug

SEQ ID NO: 558187 - RNA, 19 nt, Artificial Sequence
  Description of Artificial Sequence: Synthetic oligonucleotide
uagacauaaacggaauuua

SEQ ID NO: 558188 - RNA, 19 nt, Artificial Sequence
  Description of Artificial Sequence: Synthetic oligonucleotide
gaggaguuaacaccugaca

SEQ ID NO: 558189 - RNA, 19 nt, Artificial Sequence
  Description of Artificial Sequence: Synthetic oligonucleotide
uguaccucugacuggcacu

SEQ ID NO: 558190 - RNA, 19 nt, Artificial Sequence
  Description of Artificial Sequence: Synthetic oligonucleotide
agacgggcucaauuugggc

SEQ ID NO: 558191 - RNA, 19 nt, Artificial Sequence
  Description of Artificial Sequence: Synthetic oligonucleotide
ucaugauaucccuuuggau

SEQ ID NO: 558192 - RNA, 19 nt, Artificial Sequence
  Description of Artificial Sequence: Synthetic oligonucleotide
aacggaauuuagaggcagg

SEQ ID NO: 558193 - RNA, 19 nt, Artificial Sequence
  Description of Artificial Sequence: Synthetic oligonucleotide
ugccaaauguugagacggg

SEQ ID NO: 558194 - RNA, 19 nt, Artificial Sequence
  Description of Artificial Sequence: Synthetic oligonucleotide
gauugcccuuuccaauagg

SEQ ID NO: 558195 - RNA, 19 nt, Artificial Sequence
  Description of Artificial Sequence: Synthetic oligonucleotide
gggacgguagacauaaacg

SEQ ID NO: 558196 - RNA, 19 nt, Artificial Sequence
  Description of Artificial Sequence: Synthetic oligonucleotide
aaaucaagguugccccagu

SEQ ID NO: 558197 - RNA, 19 nt, Artificial Sequence
  Description of Artificial Sequence: Synthetic oligonucleotide
cagagguauguuugcaccc

SEQ ID NO: 558198 - RNA, 19 nt, Artificial Sequence
  Description of Artificial Sequence: Synthetic oligonucleotide
uugcguuuagcagagguau

SEQ ID NO: 558199 - RNA, 19 nt, Artificial Sequence
  Description of Artificial Sequence: Synthetic oligonucleotide
caagaaaguccuaauaacu

SEQ ID NO: 558200 - RNA, 19 nt, Artificial Sequence
  Description of Artificial Sequence: Synthetic oligonucleotide
acuaaugaacuugagccau

SEQ ID NO: 558201 - RNA, 19 nt, Artificial Sequence
  Description of Artificial Sequence: Synthetic oligonucleotide
ugguagaaggcuguuguac

SEQ ID NO: 558202 - RNA, 19 nt, Artificial Sequence
  Description of Artificial Sequence: Synthetic oligonucleotide
acaguggaguaguugcuug

SEQ ID NO: 558203 - RNA, 19 nt, Artificial Sequence
  Description of Artificial Sequence: Synthetic oligonucleotide
uuaacaccugacacuacua

SEQ ID NO: 558204 - RNA, 19 nt, Artificial Sequence
  Description of Artificial Sequence: Synthetic oligonucleotide
gguagaaggcuguuguacc

SEQ ID NO: 558205 - RNA, 19 nt, Artificial Sequence
  Description of Artificial Sequence: Synthetic oligonucleotide
uguugagacgggcucaauu

SEQ ID NO: 558206 - RNA, 19 nt, Artificial Sequence
  Description of Artificial Sequence: Synthetic oligonucleotide
uuuccagacuaaccauggc

SEQ ID NO: 558207 - RNA, 19 nt, Artificial Sequence
  Description of Artificial Sequence: Synthetic oligonucleotide
uggagauugcccuuuccaa

SEQ ID NO: 558208 - RNA, 19 nt, Artificial Sequence
  Description of Artificial Sequence: Synthetic oligonucleotide
guaauuugaacgcuccucu

SEQ ID NO: 558209 - RNA, 19 nt, Artificial Sequence
  Description of Artificial Sequence: Synthetic oligonucleotide
uauccagaauaauucucuc

SEQ ID NO: 558210 - RNA, 19 nt, Artificial Sequence
  Description of Artificial Sequence: Synthetic oligonucleotide
agauugcccuuuccaauag

SEQ ID NO: 558211 - RNA, 19 nt, Artificial Sequence
  Description of Artificial Sequence: Synthetic oligonucleotide
cucgccaauaccuuuagua

SEQ ID NO: 558212 - RNA, 19 nt, Artificial Sequence
  Description of Artificial Sequence: Synthetic oligonucleotide
auuuagaggcagggaagac

SEQ ID NO: 558213 - RNA, 19 nt, Artificial Sequence
  Description of Artificial Sequence: Synthetic oligonucleotide
guccuaauuacauaucacu

SEQ ID NO: 558214 - RNA, 19 nt, Artificial Sequence
  Description of Artificial Sequence: Synthetic oligonucleotide
aguauauguuacauacaug

SEQ ID NO: 558215 - RNA, 19 nt, Artificial Sequence
  Description of Artificial Sequence: Synthetic oligonucleotide
ugacgcggggucauccggg

SEQ ID NO: 558216 - RNA, 19 nt, Artificial Sequence
  Description of Artificial Sequence: Synthetic oligonucleotide
guuucuucggugagcaccc

SEQ ID NO: 558217 - RNA, 19 nt, Artificial Sequence
  Description of Artificial Sequence: Synthetic oligonucleotide
ugauugcaauacaauucaa

SEQ ID NO: 558218 - RNA, 19 nt, Artificial Sequence
  Description of Artificial Sequence: Synthetic oligonucleotide
cugauuguaaaugaacgaa

SEQ ID NO: 558219 - RNA, 19 nt, Artificial Sequence
  Description of Artificial Sequence: Synthetic oligonucleotide
uaucccuuuggaucugccu

SEQ ID NO: 558220 - RNA, 19 nt, Artificial Sequence
  Description of Artificial Sequence: Synthetic oligonucleotide
uaguugcuuggucaggaau

SEQ ID NO: 558221 - RNA, 19 nt, Artificial Sequence
  Description of Artificial Sequence: Synthetic oligonucleotide
uauuugaguuuggccaacc

SEQ ID NO: 558222 - RNA, 19 nt, Artificial Sequence
  Description of Artificial Sequence: Synthetic oligonucleotide
ggaguaguugcuuggucag

SEQ ID NO: 558223 - RNA, 19 nt, Artificial Sequence
  Description of Artificial Sequence: Synthetic oligonucleotide
caaagguccuggaaacuuc

SEQ ID NO: 558224 - RNA, 19 nt, Artificial Sequence
  Description of Artificial Sequence: Synthetic oligonucleotide
gcucacuucacgcagucug

SEQ ID NO: 558225 - RNA, 19 nt, Artificial Sequence
  Description of Artificial Sequence: Synthetic oligonucleotide
aggguacugaacucaauua

SEQ ID NO: 558226 - RNA, 19 nt, Artificial Sequence
  Description of Artificial Sequence: Synthetic oligonucleotide
gagacgggcucaauuuggg

SEQ ID NO: 558227 - RNA, 19 nt, Artificial Sequence
  Description of Artificial Sequence: Synthetic oligonucleotide
gucacaagcccuucucuac

SEQ ID NO: 558228 - RNA, 19 nt, Artificial Sequence
  Description of Artificial Sequence: Synthetic oligonucleotide
ucacgcagucugauaaagu

SEQ ID NO: 558229 - RNA, 19 nt, Artificial Sequence
  Description of Artificial Sequence: Synthetic oligonucleotide
aaaguaacugaggccuagu

SEQ ID NO: 558230 - RNA, 19 nt, Artificial Sequence
  Description of Artificial Sequence: Synthetic oligonucleotide
guuaacaccugacacuacu

SEQ ID NO: 558231 - RNA, 19 nt, Artificial Sequence
  Description of Artificial Sequence: Synthetic oligonucleotide
ggagggauguaauuugaac

SEQ ID NO: 558232 - RNA, 19 nt, Artificial Sequence
  Description of Artificial Sequence: Synthetic oligonucleotide
ugcguuuagcagagguaug

SEQ ID NO: 558233 - RNA, 19 nt, Artificial Sequence
  Description of Artificial Sequence: Synthetic oligonucleotide
caaaucaagguugccccag

SEQ ID NO: 558234 - RNA, 19 nt, Artificial Sequence
  Description of Artificial Sequence: Synthetic oligonucleotide
gaguuaacaccugacacua

SEQ ID NO: 558235 - RNA, 19 nt, Artificial Sequence
  Description of Artificial Sequence: Synthetic oligonucleotide
uggaucaacugggagcugu

SEQ ID NO: 558236 - RNA, 19 nt, Artificial Sequence
  Description of Artificial Sequence: Synthetic oligonucleotide
cuagucucacuuccgagca

SEQ ID NO: 558237 - RNA, 19 nt, Artificial Sequence
  Description of Artificial Sequence: Synthetic oligonucleotide
ugugcacgaggaguuaaca

SEQ ID NO: 558238 - RNA, 19 nt, Artificial Sequence
  Description of Artificial Sequence: Synthetic oligonucleotide
aaucaagguugccccagua

SEQ ID NO: 558239 - RNA, 19 nt, Artificial Sequence
  Description of Artificial Sequence: Synthetic oligonucleotide
ccgacaguggaucaacugg

SEQ ID NO: 558240 - RNA, 19 nt, Artificial Sequence
  Description of Artificial Sequence: Synthetic oligonucleotide
gguauguuugcacccagca

SEQ ID NO: 558241 - RNA, 19 nt, Artificial Sequence
  Description of Artificial Sequence: Synthetic oligonucleotide
ugaugguagaaggcuguug

SEQ ID NO: 558242 - RNA, 19 nt, Artificial Sequence
  Description of Artificial Sequence: Synthetic oligonucleotide
gagauugcccuuuccaaua

SEQ ID NO: 558243 - RNA, 19 nt, Artificial Sequence
  Description of Artificial Sequence: Synthetic oligonucleotide
ucaugauccucggcgcgcg

SEQ ID NO: 558244 - RNA, 19 nt, Artificial Sequence
  Description of Artificial Sequence: Synthetic oligonucleotide
ucucucgccaauaccuuua

SEQ ID NO: 558245 - RNA, 19 nt, Artificial Sequence
  Description of Artificial Sequence: Synthetic oligonucleotide
ccaaccauugaauuacuuc

SEQ ID NO: 558246 - RNA, 19 nt, Artificial Sequence
  Description of Artificial Sequence: Synthetic oligonucleotide
gacgguagacauaaacgga

SEQ ID NO: 558247 - RNA, 19 nt, Artificial Sequence
  Description of Artificial Sequence: Synthetic oligonucleotide
gaacuugagccauggacua

SEQ ID NO: 558248 - RNA, 19 nt, Artificial Sequence
  Description of Artificial Sequence: Synthetic oligonucleotide
ggagaaacguucugauuug

SEQ ID NO: 558249 - RNA, 19 nt, Artificial Sequence
  Description of Artificial Sequence: Synthetic oligonucleotide
gaagaucccaauucaacuu

SEQ ID NO: 558250 - RNA, 19 nt, Artificial Sequence
  Description of Artificial Sequence: Synthetic oligonucleotide
aauguugagacgggcucaa

SEQ ID NO: 558251 - RNA, 19 nt, Artificial Sequence
  Description of Artificial Sequence: Synthetic oligonucleotide
acgaggaguuaacaccuga

SEQ ID NO: 558252 - RNA, 19 nt, Artificial Sequence
  Description of Artificial Sequence: Synthetic oligonucleotide
acagcugauugcaauacaa

SEQ ID NO: 558253 - RNA, 19 nt, Artificial Sequence
  Description of Artificial Sequence: Synthetic oligonucleotide
gaauuguaaguagccgcac

SEQ ID NO: 558254 - RNA, 19 nt, Artificial Sequence
  Description of Artificial Sequence: Synthetic oligonucleotide
auguagcuaccuucuccuc

SEQ ID NO: 558255 - RNA, 19 nt, Artificial Sequence
  Description of Artificial Sequence: Synthetic oligonucleotide
agucacaagcccuucucua

SEQ ID NO: 558256 - RNA, 19 nt, Artificial Sequence
  Description of Artificial Sequence: Synthetic oligonucleotide
ugcuugaggggacgguaga

SEQ ID NO: 558257 - RNA, 19 nt, Artificial Sequence
  Description of Artificial Sequence: Synthetic oligonucleotide
gcauggauccuuugaacug

SEQ ID NO: 558258 - RNA, 19 nt, Artificial Sequence
  Description of Artificial Sequence: Synthetic oligonucleotide
cuugagccauggacuaaag

SEQ ID NO: 558259 - RNA, 19 nt, Artificial Sequence
  Description of Artificial Sequence: Synthetic oligonucleotide
gugcacgaggaguuaacac

SEQ ID NO: 558260 - RNA, 19 nt, Artificial Sequence
  Description of Artificial Sequence: Synthetic oligonucleotide
ucauccggggcccguuacc

SEQ ID NO: 558261 - RNA, 19 nt, Artificial Sequence
  Description of Artificial Sequence: Synthetic oligonucleotide
cauucucaaaaucucagau

SEQ ID NO: 558262 - RNA, 19 nt, Artificial Sequence
  Description of Artificial Sequence: Synthetic oligonucleotide
uagucucacuuccgagcag

SEQ ID NO: 558263 - RNA, 19 nt, Artificial Sequence
  Description of Artificial Sequence: Synthetic oligonucleotide
gaacgcuccucugucgcag

SEQ ID NO: 558264 - RNA, 19 nt, Artificial Sequence
  Description of Artificial Sequence: Synthetic oligonucleotide
uuccuccuccuccuccucc

SEQ ID NO: 558265 - RNA, 19 nt, Artificial Sequence
  Description of Artificial Sequence: Synthetic oligonucleotide
uguaggcauuuucggcaca

SEQ ID NO: 558266 - RNA, 19 nt, Artificial Sequence
  Description of Artificial Sequence: Synthetic oligonucleotide
augauccucggcgcgcggc

SEQ ID NO: 558267 - RNA, 19 nt, Artificial Sequence
  Description of Artificial Sequence: Synthetic oligonucleotide
gcccuuuccaauaggaaag

SEQ ID NO: 558268 - RNA, 19 nt, Artificial Sequence
  Description of Artificial Sequence: Synthetic oligonucleotide
auugcuaccagaggcuuua

SEQ ID NO: 558269 - RNA, 19 nt, Artificial Sequence
  Description of Artificial Sequence: Synthetic oligonucleotide
uuauugcuaccagaggcuu

SEQ ID NO: 558270 - RNA, 19 nt, Artificial Sequence
  Description of Artificial Sequence: Synthetic oligonucleotide
guggggauagcuugcuuca

SEQ ID NO: 558271 - RNA, 19 nt, Artificial Sequence
  Description of Artificial Sequence: Synthetic oligonucleotide
uccggggcccguuaccacc

SEQ ID NO: 558272 - RNA, 19 nt, Artificial Sequence
  Description of Artificial Sequence: Synthetic oligonucleotide
uuucggcacauugaccuuc

SEQ ID NO: 558273 - RNA, 19 nt, Artificial Sequence
  Description of Artificial Sequence: Synthetic oligonucleotide
ugauccucggcgcgcggca

SEQ ID NO: 558274 - RNA, 19 nt, Artificial Sequence
  Description of Artificial Sequence: Synthetic oligonucleotide
acacuacuacaugacugag

SEQ ID NO: 558275 - RNA, 19 nt, Artificial Sequence
  Description of Artificial Sequence: Synthetic oligonucleotide
ugaacgcuccucugucgca

SEQ ID NO: 558276 - RNA, 19 nt, Artificial Sequence
  Description of Artificial Sequence: Synthetic oligonucleotide
gacgcggggucauccgggg

SEQ ID NO: 558277 - RNA, 19 nt, Artificial Sequence
  Description of Artificial Sequence: Synthetic oligonucleotide
cuauuaccgcugauucgug

SEQ ID NO: 558278 - RNA, 19 nt, Artificial Sequence
  Description of Artificial Sequence: Synthetic oligonucleotide
ggggacgguagacauaaac

SEQ ID NO: 558279 - RNA, 19 nt, Artificial Sequence
  Description of Artificial Sequence: Synthetic oligonucleotide
auugcuccuacugauugua

SEQ ID NO: 558280 - RNA, 19 nt, Artificial Sequence
  Description of Artificial Sequence: Synthetic oligonucleotide
uccggaagucacucagaga

SEQ ID NO: 558281 - RNA, 19 nt, Artificial Sequence
  Description of Artificial Sequence: Synthetic oligonucleotide
cguuaccaccucaugaucc

SEQ ID NO: 558282 - RNA, 19 nt, Artificial Sequence
  Description of Artificial Sequence: Synthetic oligonucleotide
uauugcuaccagaggcuuu

SEQ ID NO: 558283 - RNA, 19 nt, Artificial Sequence
  Description of Artificial Sequence: Synthetic oligonucleotide
agagcaagcauggauccuu

SEQ ID NO: 558284 - RNA, 19 nt, Artificial Sequence
  Description of Artificial Sequence: Synthetic oligonucleotide
uccuccuccuccuccuccc

SEQ ID NO: 558285 - RNA, 19 nt, Artificial Sequence
  Description of Artificial Sequence: Synthetic oligonucleotide
gugacgcggggucauccgg

SEQ ID NO: 558286 - RNA, 19 nt, Artificial Sequence
  Description of Artificial Sequence: Synthetic oligonucleotide
agagccgcuugaucccauc

SEQ ID NO: 558287 - RNA, 19 nt, Artificial Sequence
  Description of Artificial Sequence: Synthetic oligonucleotide
cuuagugugcacgaggagu

SEQ ID NO: 558288 - RNA, 19 nt, Artificial Sequence
  Description of Artificial Sequence: Synthetic oligonucleotide
acuugagccauggacuaaa

SEQ ID NO: 558289 - RNA, 19 nt, Artificial Sequence
  Description of Artificial Sequence: Synthetic oligonucleotide
gagaaaucugggccugcga

SEQ ID NO: 558290 - RNA, 19 nt, Artificial Sequence
  Description of Artificial Sequence: Synthetic oligonucleotide
guugagacgggcucaauuu

SEQ ID NO: 558291 - RNA, 19 nt, Artificial Sequence
  Description of Artificial Sequence: Synthetic oligonucleotide
gacucaaaucaagguugcc

SEQ ID NO: 558292 - RNA, 19 nt, Artificial Sequence
  Description of Artificial Sequence: Synthetic oligonucleotide
cuuugcguuuagcagaggu

SEQ ID NO: 558293 - RNA, 19 nt, Artificial Sequence
  Description of Artificial Sequence: Synthetic oligonucleotide
ggaguuaacaccugacacu

SEQ ID NO: 558294 - RNA, 19 nt, Artificial Sequence
  Description of Artificial Sequence: Synthetic oligonucleotide
aguuaacaccugacacuac

SEQ ID NO: 558295 - RNA, 19 nt, Artificial Sequence
  Description of Artificial Sequence: Synthetic oligonucleotide
cacuacuacaugacugaga

SEQ ID NO: 558296 - RNA, 19 nt, Artificial Sequence
  Description of Artificial Sequence: Synthetic oligonucleotide
gccgcacaaaggaaaaggg

SEQ ID NO: 558297 - RNA, 19 nt, Artificial Sequence
  Description of Artificial Sequence: Synthetic oligonucleotide
aggccuaguugacaccgca

SEQ ID NO: 558298 - RNA, 19 nt, Artificial Sequence
  Description of Artificial Sequence: Synthetic oligonucleotide
cucaugauccucggcgcgc

SEQ ID NO: 558299 - RNA, 19 nt, Artificial Sequence
  Description of Artificial Sequence: Synthetic oligonucleotide
uagaaggcuguuguaccuc

SEQ ID NO: 558300 - RNA, 19 nt, Artificial Sequence
  Description of Artificial Sequence: Synthetic oligonucleotide
gaggagggauguaauuuga

SEQ ID NO: 558301 - RNA, 19 nt, Artificial Sequence
  Description of Artificial Sequence: Synthetic oligonucleotide
cucucgccaauaccuuuag

SEQ ID NO: 558302 - RNA, 19 nt, Artificial Sequence
  Description of Artificial Sequence: Synthetic oligonucleotide
acgcagucugauaaaguca

SEQ ID NO: 558303 - RNA, 19 nt, Artificial Sequence
  Description of Artificial Sequence: Synthetic oligonucleotide
gcaagcauggauccuuuga

SEQ ID NO: 558304 - RNA, 19 nt, Artificial Sequence
  Description of Artificial Sequence: Synthetic oligonucleotide
ggguccggaagucacucag

SEQ ID NO: 558305 - RNA, 19 nt, Artificial Sequence
  Description of Artificial Sequence: Synthetic oligonucleotide
uuuuaagguuaaggacaac

SEQ ID NO: 558306 - RNA, 19 nt, Artificial Sequence
  Description of Artificial Sequence: Synthetic oligonucleotide
ucucgccaauaccuuuagu

SEQ ID NO: 558307 - RNA, 19 nt, Artificial Sequence
  Description of Artificial Sequence: Synthetic oligonucleotide
uguuaccaagaaaguccua

SEQ ID NO: 558308 - RNA, 19 nt, Artificial Sequence
  Description of Artificial Sequence: Synthetic oligonucleotide
aguugacaccgcaauggca

SEQ ID NO: 558309 - RNA, 19 nt, Artificial Sequence
  Description of Artificial Sequence: Synthetic oligonucleotide
guagcuaccuucuccuccu

SEQ ID NO: 558310 - RNA, 19 nt, Artificial Sequence
  Description of Artificial Sequence: Synthetic oligonucleotide
caccugacacuacuacaug

SEQ ID NO: 558311 - RNA, 19 nt, Artificial Sequence
  Description of Artificial Sequence: Synthetic oligonucleotide
accuguccaaaagacugcu

SEQ ID NO: 558312 - RNA, 19 nt, Artificial Sequence
  Description of Artificial Sequence: Synthetic oligonucleotide
gaguuuggccaaccauuga

SEQ ID NO: 558313 - RNA, 19 nt, Artificial Sequence
  Description of Artificial Sequence: Synthetic oligonucleotide
cacuuccgagcagucagcc

SEQ ID NO: 558314 - RNA, 19 nt, Artificial Sequence
  Description of Artificial Sequence: Synthetic oligonucleotide
uugcuccuacugauuguaa

SEQ ID NO: 558315 - RNA, 19 nt, Artificial Sequence
  Description of Artificial Sequence: Synthetic oligonucleotide
uccuccuccuccuccuccu

SEQ ID NO: 558316 - RNA, 19 nt, Artificial Sequence
  Description of Artificial Sequence: Synthetic oligonucleotide
ggcucuugagucuauaaau

SEQ ID NO: 558317 - RNA, 19 nt, Artificial Sequence
  Description of Artificial Sequence: Synthetic oligonucleotide
ucccgacaguggaucaacu

SEQ ID NO: 558318 - RNA, 19 nt, Artificial Sequence
  Description of Artificial Sequence: Synthetic oligonucleotide
ggauguaauuugaacgcuc

SEQ ID NO: 558319 - RNA, 19 nt, Artificial Sequence
  Description of Artificial Sequence: Synthetic oligonucleotide
aucuagacaauugcuccua

SEQ ID NO: 558320 - RNA, 19 nt, Artificial Sequence
  Description of Artificial Sequence: Synthetic oligonucleotide
agguuaaggacaacauuuu

SEQ ID NO: 558321 - RNA, 19 nt, Artificial Sequence
  Description of Artificial Sequence: Synthetic oligonucleotide
guggaguaguugcuugguc

SEQ ID NO: 558322 - RNA, 19 nt, Artificial Sequence
  Description of Artificial Sequence: Synthetic oligonucleotide
gacuaaccauggccagagc

SEQ ID NO: 558323 - RNA, 19 nt, Artificial Sequence
  Description of Artificial Sequence: Synthetic oligonucleotide
ugaggggacgguagacaua

SEQ ID NO: 558324 - RNA, 19 nt, Artificial Sequence
  Description of Artificial Sequence: Synthetic oligonucleotide
aaacugucucucgccaaua

SEQ ID NO: 558325 - RNA, 19 nt, Artificial Sequence
  Description of Artificial Sequence: Synthetic oligonucleotide
auauuuuggaugggcuuuu

SEQ ID NO: 558326 - RNA, 19 nt, Artificial Sequence
  Description of Artificial Sequence: Synthetic oligonucleotide
uuucuucggugagcacccg

SEQ ID NO: 558327 - RNA, 19 nt, Artificial Sequence
  Description of Artificial Sequence: Synthetic oligonucleotide
uaucacuuucaagguuuaa

SEQ ID NO: 558328 - RNA, 19 nt, Artificial Sequence
  Description of Artificial Sequence: Synthetic oligonucleotide
ggugacgcggggucauccg

SEQ ID NO: 558329 - RNA, 19 nt, Artificial Sequence
  Description of Artificial Sequence: Synthetic oligonucleotide
aacuugagccauggacuaa

SEQ ID NO: 558330 - RNA, 19 nt, Artificial Sequence
  Description of Artificial Sequence: Synthetic oligonucleotide
gcacuaucuucauuguaga

SEQ ID NO: 558331 - RNA, 19 nt, Artificial Sequence
  Description of Artificial Sequence: Synthetic oligonucleotide
uggugacgcggggucaucc

SEQ ID NO: 558332 - RNA, 19 nt, Artificial Sequence
  Description of Artificial Sequence: Synthetic oligonucleotide
cucagauguggaacagcca

SEQ ID NO: 558333 - RNA, 19 nt, Artificial Sequence
  Description of Artificial Sequence: Synthetic oligonucleotide
uaccgcugauucgugggga

SEQ ID NO: 558334 - RNA, 19 nt, Artificial Sequence
  Description of Artificial Sequence: Synthetic oligonucleotide
uguuugcacccagcagcag

SEQ ID NO: 558335 - RNA, 19 nt, Artificial Sequence
  Description of Artificial Sequence: Synthetic oligonucleotide
caagguugccccaguaucu

SEQ ID NO: 558336 - RNA, 19 nt, Artificial Sequence
  Description of Artificial Sequence: Synthetic oligonucleotide
cagggugugcuugagggga

SEQ ID NO: 558337 - RNA, 19 nt, Artificial Sequence
  Description of Artificial Sequence: Synthetic oligonucleotide
ccuaguugacaccgcaaug

SEQ ID NO: 558338 - RNA, 19 nt, Artificial Sequence
  Description of Artificial Sequence: Synthetic oligonucleotide
cuccuccuccuccuccucc

SEQ ID NO: 558339 - RNA, 19 nt, Artificial Sequence
  Description of Artificial Sequence: Synthetic oligonucleotide
cacgaggaguuaacaccug

SEQ ID NO: 558340 - RNA, 19 nt, Artificial Sequence
  Description of Artificial Sequence: Synthetic oligonucleotide
acguucugauuuguaggca

SEQ ID NO: 558341 - RNA, 19 nt, Artificial Sequence
  Description of Artificial Sequence: Synthetic oligonucleotide
gaacgaaaacagaucaguu

SEQ ID NO: 558342 - RNA, 19 nt, Artificial Sequence
  Description of Artificial Sequence: Synthetic oligonucleotide
acgcggggucauccggggc

SEQ ID NO: 558343 - RNA, 19 nt, Artificial Sequence
  Description of Artificial Sequence: Synthetic oligonucleotide
ggccucacaguggugacgc

SEQ ID NO: 558344 - RNA, 19 nt, Artificial Sequence
  Description of Artificial Sequence: Synthetic oligonucleotide
uuccgagcagucagccuua

SEQ ID NO: 558345 - RNA, 19 nt, Artificial Sequence
  Description of Artificial Sequence: Synthetic oligonucleotide
agaaacguucugauuugua

SEQ ID NO: 558346 - RNA, 19 nt, Artificial Sequence
  Description of Artificial Sequence: Synthetic oligonucleotide
ccagacuaaccauggccag

SEQ ID NO: 558347 - RNA, 19 nt, Artificial Sequence
  Description of Artificial Sequence: Synthetic oligonucleotide
cucccgacaguggaucaac

SEQ ID NO: 558348 - RNA, 19 nt, Artificial Sequence
  Description of Artificial Sequence: Synthetic oligonucleotide
agcucccgacaguggauca

SEQ ID NO: 558349 - RNA, 19 nt, Artificial Sequence
  Description of Artificial Sequence: Synthetic oligonucleotide
ccuacugauuguaaaugaa

SEQ ID NO: 558350 - RNA, 19 nt, Artificial Sequence
  Description of Artificial Sequence: Synthetic oligonucleotide
cuacuacaugacugagaca

SEQ ID NO: 558351 - RNA, 19 nt, Artificial Sequence
  Description of Artificial Sequence: Synthetic oligonucleotide
cugacacuacuacaugacu

SEQ ID NO: 558352 - RNA, 19 nt, Artificial Sequence
  Description of Artificial Sequence: Synthetic oligonucleotide
accgcugauucguggggau

SEQ ID NO: 558353 - RNA, 19 nt, Artificial Sequence
  Description of Artificial Sequence: Synthetic oligonucleotide
caugauccucggcgcgcgg

SEQ ID NO: 558354 - RNA, 19 nt, Artificial Sequence
  Description of Artificial Sequence: Synthetic oligonucleotide
gacaccgcaauggcaugga

SEQ ID NO: 558355 - RNA, 19 nt, Artificial Sequence
  Description of Artificial Sequence: Synthetic oligonucleotide
gcccguuaccaccucauga

SEQ ID NO: 558356 - RNA, 19 nt, Artificial Sequence
  Description of Artificial Sequence: Synthetic oligonucleotide
gccaaauguugagacgggc

SEQ ID NO: 558357 - RNA, 19 nt, Artificial Sequence
  Description of Artificial Sequence: Synthetic oligonucleotide
ccucaugauccucggcgcg

SEQ ID NO: 558358 - RNA, 19 nt, Artificial Sequence
  Description of Artificial Sequence: Synthetic oligonucleotide
cacauucucugaagcacua

SEQ ID NO: 558359 - RNA, 19 nt, Artificial Sequence
  Description of Artificial Sequence: Synthetic oligonucleotide
ggugugcuugaggggacgg

SEQ ID NO: 558360 - RNA, 19 nt, Artificial Sequence
  Description of Artificial Sequence: Synthetic oligonucleotide
ccucacaguggugacgcgg

SEQ ID NO: 558361 - RNA, 19 nt, Artificial Sequence
  Description of Artificial Sequence: Synthetic oligonucleotide
cuucacgcagucugauaaa

SEQ ID NO: 558362 - RNA, 19 nt, Artificial Sequence
  Description of Artificial Sequence: Synthetic oligonucleotide
gucauccggggcccguuac

SEQ ID NO: 558363 - RNA, 19 nt, Artificial Sequence
  Description of Artificial Sequence: Synthetic oligonucleotide
auaucacuuucaagguuua

SEQ ID NO: 558364 - RNA, 19 nt, Artificial Sequence
  Description of Artificial Sequence: Synthetic oligonucleotide
caggguacugaacucaauu

SEQ ID NO: 558365 - RNA, 19 nt, Artificial Sequence
  Description of Artificial Sequence: Synthetic oligonucleotide
aggguccggaagucacuca

SEQ ID NO: 558366 - RNA, 19 nt, Artificial Sequence
  Description of Artificial Sequence: Synthetic oligonucleotide
gaggccuaguugacaccgc

SEQ ID NO: 558367 - RNA, 19 nt, Artificial Sequence
  Description of Artificial Sequence: Synthetic oligonucleotide
acuuugcguuuagcagagg

SEQ ID NO: 558368 - RNA, 19 nt, Artificial Sequence
  Description of Artificial Sequence: Synthetic oligonucleotide
gagaaacguucugauuugu

SEQ ID NO: 558369 - RNA, 19 nt, Artificial Sequence
  Description of Artificial Sequence: Synthetic oligonucleotide
gugugcacgaggaguuaac

SEQ ID NO: 558370 - RNA, 19 nt, Artificial Sequence
  Description of Artificial Sequence: Synthetic oligonucleotide
gauccucggcgcgcggcag

SEQ ID NO: 558371 - RNA, 19 nt, Artificial Sequence
  Description of Artificial Sequence: Synthetic oligonucleotide
ccuuagugugcacgaggag

SEQ ID NO: 558372 - RNA, 19 nt, Artificial Sequence
  Description of Artificial Sequence: Synthetic oligonucleotide
guagagccgcuugauccca

SEQ ID NO: 558373 - RNA, 19 nt, Artificial Sequence
  Description of Artificial Sequence: Synthetic oligonucleotide
uagagccgcuugaucccau

SEQ ID NO: 558374 - RNA, 19 nt, Artificial Sequence
  Description of Artificial Sequence: Synthetic oligonucleotide
uggggauagcuugcuucaa

SEQ ID NO: 558375 - RNA, 19 nt, Artificial Sequence
  Description of Artificial Sequence: Synthetic oligonucleotide
gccuuagugugcacgagga

SEQ ID NO: 558376 - RNA, 19 nt, Artificial Sequence
  Description of Artificial Sequence: Synthetic oligonucleotide
cuccccggcagagcuguag

SEQ ID NO: 558377 - RNA, 19 nt, Artificial Sequence
  Description of Artificial Sequence: Synthetic oligonucleotide
cagccuuagugugcacgag

SEQ ID NO: 558378 - RNA, 19 nt, Artificial Sequence
  Description of Artificial Sequence: Synthetic oligonucleotide
ucguggggauagcuugcuu

SEQ ID NO: 558379 - RNA, 19 nt, Artificial Sequence
  Description of Artificial Sequence: Synthetic oligonucleotide
acauggggaauaacuuguu

SEQ ID NO: 558380 - RNA, 19 nt, Artificial Sequence
  Description of Artificial Sequence: Synthetic oligonucleotide
cagcugauugcaauacaau

SEQ ID NO: 558381 - RNA, 19 nt, Artificial Sequence
  Description of Artificial Sequence: Synthetic oligonucleotide
ggggauagcuugcuucaaa

SEQ ID NO: 558382 - RNA, 19 nt, Artificial Sequence
  Description of Artificial Sequence: Synthetic oligonucleotide
gcugggagaugaugguaga

SEQ ID NO: 558383 - RNA, 19 nt, Artificial Sequence
  Description of Artificial Sequence: Synthetic oligonucleotide
cuuccuccuccuccuccuc

SEQ ID NO: 558384 - RNA, 19 nt, Artificial Sequence
  Description of Artificial Sequence: Synthetic oligonucleotide
gaaguuggcugcaggucau

SEQ ID NO: 558385 - RNA, 19 nt, Artificial Sequence
  Description of Artificial Sequence: Synthetic oligonucleotide
ucggcgcgcggcagcgggc

SEQ ID NO: 558386 - RNA, 19 nt, Artificial Sequence
  Description of Artificial Sequence: Synthetic oligonucleotide
cccggcagagcuguaggcc

SEQ ID NO: 558387 - RNA, 19 nt, Artificial Sequence
  Description of Artificial Sequence: Synthetic oligonucleotide
cacuucacgcagucugaua

SEQ ID NO: 558388 - RNA, 19 nt, Artificial Sequence
  Description of Artificial Sequence: Synthetic oligonucleotide
gcacgaggaguuaacaccu

SEQ ID NO: 558389 - RNA, 19 nt, Artificial Sequence
  Description of Artificial Sequence: Synthetic oligonucleotide
gaacagccacagaaacugu

SEQ ID NO: 558390 - RNA, 19 nt, Artificial Sequence
  Description of Artificial Sequence: Synthetic oligonucleotide
guaggcauuuucggcacau

SEQ ID NO: 558391 - RNA, 19 nt, Artificial Sequence
  Description of Artificial Sequence: Synthetic oligonucleotide
gcguuuagcagagguaugu

SEQ ID NO: 558392 - RNA, 19 nt, Artificial Sequence
  Description of Artificial Sequence: Synthetic oligonucleotide
gccuaguugacaccgcaau

SEQ ID NO: 558393 - RNA, 19 nt, Artificial Sequence
  Description of Artificial Sequence: Synthetic oligonucleotide
cugauucguggggauagcu

SEQ ID NO: 558394 - RNA, 19 nt, Artificial Sequence
  Description of Artificial Sequence: Synthetic oligonucleotide
ccguuaccaccucaugauc

SEQ ID NO: 558395 - RNA, 19 nt, Artificial Sequence
  Description of Artificial Sequence: Synthetic oligonucleotide
gcugauucguggggauagc

SEQ ID NO: 558396 - RNA, 19 nt, Artificial Sequence
  Description of Artificial Sequence: Synthetic oligonucleotide
gucucucgccaauaccuuu

SEQ ID NO: 558397 - RNA, 19 nt, Artificial Sequence
  Description of Artificial Sequence: Synthetic oligonucleotide
agacugcuugcuagagcaa

SEQ ID NO: 558398 - RNA, 19 nt, Artificial Sequence
  Description of Artificial Sequence: Synthetic oligonucleotide
ccauggacuaaagauggcu

SEQ ID NO: 558399 - RNA, 19 nt, Artificial Sequence
  Description of Artificial Sequence: Synthetic oligonucleotide
guggaucaacugggagcug

SEQ ID NO: 558400 - RNA, 19 nt, Artificial Sequence
  Description of Artificial Sequence: Synthetic oligonucleotide
cgcuugaucccaucguaga

SEQ ID NO: 558401 - RNA, 19 nt, Artificial Sequence
  Description of Artificial Sequence: Synthetic oligonucleotide
cacaaaggaaaaggguguu

SEQ ID NO: 558402 - RNA, 19 nt, Artificial Sequence
  Description of Artificial Sequence: Synthetic oligonucleotide
cccguuaccaccucaugau

SEQ ID NO: 558403 - RNA, 19 nt, Artificial Sequence
  Description of Artificial Sequence: Synthetic oligonucleotide
auguugagacgggcucaau

SEQ ID NO: 558404 - RNA, 19 nt, Artificial Sequence
  Description of Artificial Sequence: Synthetic oligonucleotide
ccgcacaaaggaaaagggu

SEQ ID NO: 558405 - RNA, 19 nt, Artificial Sequence
  Description of Artificial Sequence: Synthetic oligonucleotide
gguccggaagucacucaga

SEQ ID NO: 558406 - RNA, 19 nt, Artificial Sequence
  Description of Artificial Sequence: Synthetic oligonucleotide
ccggauauauuaacuuuau

SEQ ID NO: 558407 - RNA, 19 nt, Artificial Sequence
  Description of Artificial Sequence: Synthetic oligonucleotide
gcacccggauauauuaacu

SEQ ID NO: 558408 - RNA, 19 nt, Artificial Sequence
  Description of Artificial Sequence: Synthetic oligonucleotide
cccuuuggaucugccugcc

SEQ ID NO: 558409 - RNA, 19 nt, Artificial Sequence
  Description of Artificial Sequence: Synthetic oligonucleotide
cgccaauaccuuuaguacu

SEQ ID NO: 558410 - RNA, 19 nt, Artificial Sequence
  Description of Artificial Sequence: Synthetic oligonucleotide
ggccuaguugacaccgcaa

SEQ ID NO: 558411 - RNA, 19 nt, Artificial Sequence
  Description of Artificial Sequence: Synthetic oligonucleotide
gugagcacccggauauauu

SEQ ID NO: 558412 - RNA, 19 nt, Artificial Sequence
  Description of Artificial Sequence: Synthetic oligonucleotide
ggggcccguuaccaccuca

SEQ ID NO: 558413 - RNA, 19 nt, Artificial Sequence
  Description of Artificial Sequence: Synthetic oligonucleotide
ccuccuccuccuccucccc

SEQ ID NO: 558414 - RNA, 19 nt, Artificial Sequence
  Description of Artificial Sequence: Synthetic oligonucleotide
cggaauuuagaggcaggga

SEQ ID NO: 558415 - RNA, 19 nt, Artificial Sequence
  Description of Artificial Sequence: Synthetic oligonucleotide
gugugcuugaggggacggu

SEQ ID NO: 558416 - RNA, 19 nt, Artificial Sequence
  Description of Artificial Sequence: Synthetic oligonucleotide
acgccccucuugccuugau

SEQ ID NO: 558417 - RNA, 19 nt, Artificial Sequence
  Description of Artificial Sequence: Synthetic oligonucleotide
ccucugucgcaggucacca

SEQ ID NO: 558418 - RNA, 19 nt, Artificial Sequence
  Description of Artificial Sequence: Synthetic oligonucleotide
gcucccgacaguggaucaa

SEQ ID NO: 558419 - RNA, 19 nt, Artificial Sequence
  Description of Artificial Sequence: Synthetic oligonucleotide
ggccaaccauugaauuacu

SEQ ID NO: 558420 - RNA, 19 nt, Artificial Sequence
  Description of Artificial Sequence: Synthetic oligonucleotide
aggggacgguagacauaaa

SEQ ID NO: 558421 - RNA, 19 nt, Artificial Sequence
  Description of Artificial Sequence: Synthetic oligonucleotide
ccuccuccuccuccuccuc

SEQ ID NO: 558422 - RNA, 19 nt, Artificial Sequence
  Description of Artificial Sequence: Synthetic oligonucleotide
cacgccccucuugccuuga

SEQ ID NO: 558423 - RNA, 19 nt, Artificial Sequence
  Description of Artificial Sequence: Synthetic oligonucleotide
gcgacagaggagggaugua

SEQ ID NO: 558424 - RNA, 19 nt, Artificial Sequence
  Description of Artificial Sequence: Synthetic oligonucleotide
gggcccguuaccaccucau

SEQ ID NO: 558425 - RNA, 19 nt, Artificial Sequence
  Description of Artificial Sequence: Synthetic oligonucleotide
ccggggcccguuaccaccu

SEQ ID NO: 558426 - RNA, 19 nt, Artificial Sequence
  Description of Artificial Sequence: Synthetic oligonucleotide
ccgcugauucguggggaua

SEQ ID NO: 558427 - RNA, 19 nt, Artificial Sequence
  Description of Artificial Sequence: Synthetic oligonucleotide
ccgagcagucagccuuagu

SEQ ID NO: 558428 - RNA, 19 nt, Artificial Sequence
  Description of Artificial Sequence: Synthetic oligonucleotide
ccgcaauggcauggaaaau

SEQ ID NO: 558429 - RNA, 19 nt, Artificial Sequence
  Description of Artificial Sequence: Synthetic oligonucleotide
cgggcucaauuugggcaaa

SEQ ID NO: 558430 - RNA, 19 nt, Artificial Sequence
  Description of Artificial Sequence: Synthetic oligonucleotide
cggugagcacccggauaua

SEQ ID NO: 558431 - RNA, 19 nt, Artificial Sequence
  Description of Artificial Sequence: Synthetic oligonucleotide
ucaauaaccacuccaaugg

SEQ ID NO: 558432 - RNA, 19 nt, Artificial Sequence
  Description of Artificial Sequence: Synthetic oligonucleotide
  modified_base (2)..(2): a, c, u, g, unknown or other
ancuuuuccaaacaggcuc

SEQ ID NO: 558433 - RNA, 19 nt, Artificial Sequence
  Description of Artificial Sequence: Synthetic oligonucleotide
acaacgauucuccaaaucc

SEQ ID NO: 558434 - RNA, 19 nt, Artificial Sequence
  Description of Artificial Sequence: Synthetic oligonucleotide
aaacuugccaucaacaucg

SEQ ID NO: 558435 - RNA, 19 nt, Artificial Sequence
  Description of Artificial Sequence: Synthetic oligonucleotide
auaauucacaucuugcaac

SEQ ID NO: 558436 - RNA, 19 nt, Artificial Sequence
  Description of Artificial Sequence: Synthetic oligonucleotide
ugagguauauuuauaacug

SEQ ID NO: 558437 - RNA, 19 nt, Artificial Sequence
  Description of Artificial Sequence: Synthetic oligonucleotide
uuaauguugcauaagaaau

SEQ ID NO: 558438 - RNA, 19 nt, Artificial Sequence
  Description of Artificial Sequence: Synthetic oligonucleotide
uuuuauucguuaauguugc

SEQ ID NO: 558439 - RNA, 19 nt, Artificial Sequence
  Description of Artificial Sequence: Synthetic oligonucleotide
  modified_base (5)..(5): a, c, u, g, unknown or other
ugaancuuuuccaaacagg

SEQ ID NO: 558440 - RNA, 19 nt, Artificial Sequence
  Description of Artificial Sequence: Synthetic oligonucleotide
aaauguaagcguguuacac

SEQ ID NO: 558441 - RNA, 19 nt, Artificial Sequence
  Description of Artificial Sequence: Synthetic oligonucleotide
  modified_base (4)..(4): a, c, u, g, unknown or other
gaancuuuuccaaacaggc

SEQ ID NO: 558442 - RNA, 19 nt, Artificial Sequence
  Description of Artificial Sequence: Synthetic oligonucleotide
uuaaguaaaguuucgucug

SEQ ID NO: 558443 - RNA, 19 nt, Artificial Sequence
  Description of Artificial Sequence: Synthetic oligonucleotide
cuugcaacaacguguaugg

SEQ ID NO: 558444 - RNA, 19 nt, Artificial Sequence
  Description of Artificial Sequence: Synthetic oligonucleotide
aauaucgugugcuucugag

SEQ ID NO: 558445 - RNA, 19 nt, Artificial Sequence
  Description of Artificial Sequence: Synthetic oligonucleotide
ucuaagaguuuccuguagg

SEQ ID NO: 558446 - RNA, 19 nt, Artificial Sequence
  Description of Artificial Sequence: Synthetic oligonucleotide
acaacuagagcauuugaag

SEQ ID NO: 558447 - RNA, 19 nt, Artificial Sequence
  Description of Artificial Sequence: Synthetic oligonucleotide
aguuucgucugcuaacugc

SEQ ID NO: 558448 - RNA, 19 nt, Artificial Sequence
  Description of Artificial Sequence: Synthetic oligonucleotide
gacgaguucacauaauggc

SEQ ID NO: 558449 - RNA, 19 nt, Artificial Sequence
  Description of Artificial Sequence: Synthetic oligonucleotide
aauaaccacuccaaugggc

SEQ ID NO: 558450 - RNA, 19 nt, Artificial Sequence
  Description of Artificial Sequence: Synthetic oligonucleotide
aaacgugucucaugcuucc

SEQ ID NO: 558451 - RNA, 19 nt, Artificial Sequence
  Description of Artificial Sequence: Synthetic oligonucleotide
ucaagaauuuaagagaaac

SEQ ID NO: 558452 - RNA, 19 nt, Artificial Sequence
  Description of Artificial Sequence: Synthetic oligonucleotide
acuugcggaaccuccaucc

SEQ ID NO: 558453 - RNA, 19 nt, Artificial Sequence
  Description of Artificial Sequence: Synthetic oligonucleotide
  modified_base (6)..(6): a, c, u, g, unknown or other
uugaancuuuuccaaacag

SEQ ID NO: 558454 - RNA, 19 nt, Artificial Sequence
  Description of Artificial Sequence: Synthetic oligonucleotide
ugacgaguucacauaaugg

SEQ ID NO: 558455 - RNA, 19 nt, Artificial Sequence
  Description of Artificial Sequence: Synthetic oligonucleotide
agaauuuaagagaaacggc

SEQ ID NO: 558456 - RNA, 19 nt, Artificial Sequence
  Description of Artificial Sequence: Synthetic oligonucleotide
uuuaguugccgccucauac

SEQ ID NO: 558457 - RNA, 19 nt, Artificial Sequence
  Description of Artificial Sequence: Synthetic oligonucleotide
uugcauaagaaauguaagc

SEQ ID NO: 558458 - RNA, 19 nt, Artificial Sequence
  Description of Artificial Sequence: Synthetic oligonucleotide
aauguaagcguguuacacu

SEQ ID NO: 558459 - RNA, 19 nt, Artificial Sequence
  Description of Artificial Sequence: Synthetic oligonucleotide
ucuuuuagccagcaugucc

SEQ ID NO: 558460 - RNA, 19 nt, Artificial Sequence
  Description of Artificial Sequence: Synthetic oligonucleotide
ucuagacucuuucugcagg

SEQ ID NO: 558461 - RNA, 19 nt, Artificial Sequence
  Description of Artificial Sequence: Synthetic oligonucleotide
uucagcacguaucuugagg

SEQ ID NO: 558462 - RNA, 19 nt, Artificial Sequence
  Description of Artificial Sequence: Synthetic oligonucleotide
agcaccguuuuauauauag

SEQ ID NO: 558463 - RNA, 19 nt, Artificial Sequence
  Description of Artificial Sequence: Synthetic oligonucleotide
aaguucaauauauuagaaa

SEQ ID NO: 558464 - RNA, 19 nt, Artificial Sequence
  Description of Artificial Sequence: Synthetic oligonucleotide
ucguuaauguugcauaaga

SEQ ID NO: 558465 - RNA, 19 nt, Artificial Sequence
  Description of Artificial Sequence: Synthetic oligonucleotide
uuacgaaacuccaaguccu

SEQ ID NO: 558466 - RNA, 19 nt, Artificial Sequence
  Description of Artificial Sequence: Synthetic oligonucleotide
aucaacaucgaucucuuca

SEQ ID NO: 558467 - RNA, 19 nt, Artificial Sequence
  Description of Artificial Sequence: Synthetic oligonucleotide
uuuauaacugacugaugug

SEQ ID NO: 558468 - RNA, 19 nt, Artificial Sequence
  Description of Artificial Sequence: Synthetic oligonucleotide
auucacaucuugcaacaac

SEQ ID NO: 558469 - RNA, 19 nt, Artificial Sequence
  Description of Artificial Sequence: Synthetic oligonucleotide
agugucaauaauucacauc

SEQ ID NO: 558470 - RNA, 19 nt, Artificial Sequence
  Description of Artificial Sequence: Synthetic oligonucleotide
uugacgaguucacauaaug

SEQ ID NO: 558471 - RNA, 19 nt, Artificial Sequence
  Description of Artificial Sequence: Synthetic oligonucleotide
ucuugagguauauuuauaa

SEQ ID NO: 558472 - RNA, 19 nt, Artificial Sequence
  Description of Artificial Sequence: Synthetic oligonucleotide
aacugacugaugugucucc

SEQ ID NO: 558473 - RNA, 19 nt, Artificial Sequence
  Description of Artificial Sequence: Synthetic oligonucleotide
  modified_base (8)..(8): a, c, u, g, unknown or other
ucuugaancuuuuccaaac

SEQ ID NO: 558474 - RNA, 19 nt, Artificial Sequence
  Description of Artificial Sequence: Synthetic oligonucleotide
auagaacaagagcagacug

SEQ ID NO: 558475 - RNA, 19 nt, Artificial Sequence
  Description of Artificial Sequence: Synthetic oligonucleotide
uuauaacugacugaugugu

SEQ ID NO: 558476 - RNA, 19 nt, Artificial Sequence
  Description of Artificial Sequence: Synthetic oligonucleotide
ucauguugcucccucaucu

SEQ ID NO: 558477 - RNA, 19 nt, Artificial Sequence
  Description of Artificial Sequence: Synthetic oligonucleotide
ugcccgacuagauagagca

SEQ ID NO: 558478 - RNA, 19 nt, Artificial Sequence
  Description of Artificial Sequence: Synthetic oligonucleotide
aauuuaagagaaacggcug

SEQ ID NO: 558479 - RNA, 19 nt, Artificial Sequence
  Description of Artificial Sequence: Synthetic oligonucleotide
uaucgugugcuucugagaa

SEQ ID NO: 558480 - RNA, 19 nt, Artificial Sequence
  Description of Artificial Sequence: Synthetic oligonucleotide
cucaguaagacucugacaa

SEQ ID NO: 558481 - RNA, 19 nt, Artificial Sequence
  Description of Artificial Sequence: Synthetic oligonucleotide
guuaauguugcauaagaaa

SEQ ID NO: 558482 - RNA, 19 nt, Artificial Sequence
  Description of Artificial Sequence: Synthetic oligonucleotide
uagaacaagagcagacugc

SEQ ID NO: 558483 - RNA, 19 nt, Artificial Sequence
  Description of Artificial Sequence: Synthetic oligonucleotide
uguucguagucauucagcu

SEQ ID NO: 558484 - RNA, 19 nt, Artificial Sequence
  Description of Artificial Sequence: Synthetic oligonucleotide
uauucguuaauguugcaua

SEQ ID NO: 558485 - RNA, 19 nt, Artificial Sequence
  Description of Artificial Sequence: Synthetic oligonucleotide
ucuuaaagacuguacuucu

SEQ ID NO: 558486 - RNA, 19 nt, Artificial Sequence
  Description of Artificial Sequence: Synthetic oligonucleotide
uccaauuaugcccggacac

SEQ ID NO: 558487 - RNA, 19 nt, Artificial Sequence
  Description of Artificial Sequence: Synthetic oligonucleotide
uaaguaaaguuucgucugc

SEQ ID NO: 558488 - RNA, 19 nt, Artificial Sequence
  Description of Artificial Sequence: Synthetic oligonucleotide
uaaacuugccaucaacauc

SEQ ID NO: 558489 - RNA, 19 nt, Artificial Sequence
  Description of Artificial Sequence: Synthetic oligonucleotide
ucuugcaacaacguguaug

SEQ ID NO: 558490 - RNA, 19 nt, Artificial Sequence
  Description of Artificial Sequence: Synthetic oligonucleotide
uguauacaggguuaccaug

SEQ ID NO: 558491 - RNA, 19 nt, Artificial Sequence
  Description of Artificial Sequence: Synthetic oligonucleotide
aacgauucuccaaauccac

SEQ ID NO: 558492 - RNA, 19 nt, Artificial Sequence
  Description of Artificial Sequence: Synthetic oligonucleotide
agacugcccgacuagauag

SEQ ID NO: 558493 - RNA, 19 nt, Artificial Sequence
  Description of Artificial Sequence: Synthetic oligonucleotide
uguuggacgcucuuggggc

SEQ ID NO: 558494 - RNA, 19 nt, Artificial Sequence
  Description of Artificial Sequence: Synthetic oligonucleotide
cuaagaguuuccuguaggc

SEQ ID NO: 558495 - RNA, 19 nt, Artificial Sequence
  Description of Artificial Sequence: Synthetic oligonucleotide
uuuguaaccuugaucacuu

SEQ ID NO: 558496 - RNA, 19 nt, Artificial Sequence
  Description of Artificial Sequence: Synthetic oligonucleotide
cuuagaguuuaguugccgc

SEQ ID NO: 558497 - RNA, 19 nt, Artificial Sequence
  Description of Artificial Sequence: Synthetic oligonucleotide
guugcauaagaaauguaag

SEQ ID NO: 558498 - RNA, 19 nt, Artificial Sequence
  Description of Artificial Sequence: Synthetic oligonucleotide
agguuagaaagcugggagg

SEQ ID NO: 558499 - RNA, 19 nt, Artificial Sequence
  Description of Artificial Sequence: Synthetic oligonucleotide
ucagcacguaucuugaggu

SEQ ID NO: 558500 - RNA, 19 nt, Artificial Sequence
  Description of Artificial Sequence: Synthetic oligonucleotide
ucucgacacagucacucgg

SEQ ID NO: 558501 - RNA, 19 nt, Artificial Sequence
  Description of Artificial Sequence: Synthetic oligonucleotide
uguacuucucugagcaacc

SEQ ID NO: 558502 - RNA, 19 nt, Artificial Sequence
  Description of Artificial Sequence: Synthetic oligonucleotide
gaauuuaagagaaacggcu

SEQ ID NO: 558503 - RNA, 19 nt, Artificial Sequence
  Description of Artificial Sequence: Synthetic oligonucleotide
aaaguuucgucugcuaacu

SEQ ID NO: 558504 - RNA, 19 nt, Artificial Sequence
  Description of Artificial Sequence: Synthetic oligonucleotide
ucgugugcuucugagaagg

SEQ ID NO: 558505 - RNA, 19 nt, Artificial Sequence
  Description of Artificial Sequence: Synthetic oligonucleotide
uauacuuacccuccucccu

SEQ ID NO: 558506 - RNA, 19 nt, Artificial Sequence
  Description of Artificial Sequence: Synthetic oligonucleotide
ucagauucgcagcuuaaaa

SEQ ID NO: 558507 - RNA, 19 nt, Artificial Sequence
  Description of Artificial Sequence: Synthetic oligonucleotide
uucuaagaguuuccuguag

SEQ ID NO: 558508 - RNA, 19 nt, Artificial Sequence
  Description of Artificial Sequence: Synthetic oligonucleotide
ucauacucaaucugccgcc

SEQ ID NO: 558509 - RNA, 19 nt, Artificial Sequence
  Description of Artificial Sequence: Synthetic oligonucleotide
gaauagaacaagagcagac

SEQ ID NO: 558510 - RNA, 19 nt, Artificial Sequence
  Description of Artificial Sequence: Synthetic oligonucleotide
ucuugacgaguucacauaa

SEQ ID NO: 558511 - RNA, 19 nt, Artificial Sequence
  Description of Artificial Sequence: Synthetic oligonucleotide
uaaccuugaucacuuauua

SEQ ID NO: 558512 - RNA, 19 nt, Artificial Sequence
  Description of Artificial Sequence: Synthetic oligonucleotide
caccguuuuauauauagca

SEQ ID NO: 558513 - RNA, 19 nt, Artificial Sequence
  Description of Artificial Sequence: Synthetic oligonucleotide
ucaacaucgaucucuucaa

SEQ ID NO: 558514 - RNA, 19 nt, Artificial Sequence
  Description of Artificial Sequence: Synthetic oligonucleotide
ucgggcauucucaagcuug

SEQ ID NO: 558515 - RNA, 19 nt, Artificial Sequence
  Description of Artificial Sequence: Synthetic oligonucleotide
uauaacugacugauguguc

SEQ ID NO: 558516 - RNA, 19 nt, Artificial Sequence
  Description of Artificial Sequence: Synthetic oligonucleotide
aacacaacuagagcauuug

SEQ ID NO: 558517 - RNA, 19 nt, Artificial Sequence
  Description of Artificial Sequence: Synthetic oligonucleotide
uuagaaagcugggaggaca

SEQ ID NO: 558518 - RNA, 19 nt, Artificial Sequence
  Description of Artificial Sequence: Synthetic oligonucleotide
ugcaacaacguguauggau

SEQ ID NO: 558519 - RNA, 19 nt, Artificial Sequence
  Description of Artificial Sequence: Synthetic oligonucleotide
caccaaacgugucucaugc

SEQ ID NO: 558520 - RNA, 19 nt, Artificial Sequence
  Description of Artificial Sequence: Synthetic oligonucleotide
cauugguugauccuguuca

SEQ ID NO: 558521 - RNA, 19 nt, Artificial Sequence
  Description of Artificial Sequence: Synthetic oligonucleotide
ucgaguggugcgaacacug

SEQ ID NO: 558522 - RNA, 19 nt, Artificial Sequence
  Description of Artificial Sequence: Synthetic oligonucleotide
guacaguuaguucaguguc

SEQ ID NO: 558523 - RNA, 19 nt, Artificial Sequence
  Description of Artificial Sequence: Synthetic oligonucleotide
agugcuuacaugaugucug

SEQ ID NO: 558524 - RNA, 19 nt, Artificial Sequence
  Description of Artificial Sequence: Synthetic oligonucleotide
aguagccagcgcugcaucc

SEQ ID NO: 558525 - RNA, 19 nt, Artificial Sequence
  Description of Artificial Sequence: Synthetic oligonucleotide
ucuucaggcggauaaacuu

SEQ ID NO: 558526 - RNA, 19 nt, Artificial Sequence
  Description of Artificial Sequence: Synthetic oligonucleotide
gaaacggcugaacauacaa

SEQ ID NO: 558527 - RNA, 19 nt, Artificial Sequence
  Description of Artificial Sequence: Synthetic oligonucleotide
uacucaaucugccgcccgg

SEQ ID NO: 558528 - RNA, 19 nt, Artificial Sequence
  Description of Artificial Sequence: Synthetic oligonucleotide
auuaugcccggacacgcag

SEQ ID NO: 558529 - RNA, 19 nt, Artificial Sequence
  Description of Artificial Sequence: Synthetic oligonucleotide
agguaugguugucuuaaag

SEQ ID NO: 558530 - RNA, 19 nt, Artificial Sequence
  Description of Artificial Sequence: Synthetic oligonucleotide
auaacugacugaugugucu

SEQ ID NO: 558531 - RNA, 19 nt, Artificial Sequence
  Description of Artificial Sequence: Synthetic oligonucleotide
ucagguaugguugucuuaa

SEQ ID NO: 558532 - RNA, 19 nt, Artificial Sequence
  Description of Artificial Sequence: Synthetic oligonucleotide
ucucgucucauugaucucc

SEQ ID NO: 558533 - RNA, 19 nt, Artificial Sequence
  Description of Artificial Sequence: Synthetic oligonucleotide
ucacucgggaagaaggacu

SEQ ID NO: 558534 - RNA, 19 nt, Artificial Sequence
  Description of Artificial Sequence: Synthetic oligonucleotide
aguuaguucagugucaaua

SEQ ID NO: 558535 - RNA, 19 nt, Artificial Sequence
  Description of Artificial Sequence: Synthetic oligonucleotide
uuaaccguucuuccucgcc

SEQ ID NO: 558536 - RNA, 19 nt, Artificial Sequence
  Description of Artificial Sequence: Synthetic oligonucleotide
ugcgacuggaugaugcucu

SEQ ID NO: 558537 - RNA, 19 nt, Artificial Sequence
  Description of Artificial Sequence: Synthetic oligonucleotide
cacgcagugguauacuuac

SEQ ID NO: 558538 - RNA, 19 nt, Artificial Sequence
  Description of Artificial Sequence: Synthetic oligonucleotide
aaauaucgugugcuucuga

SEQ ID NO: 558539 - RNA, 19 nt, Artificial Sequence
  Description of Artificial Sequence: Synthetic oligonucleotide
uaagcguguuacacuaucu

SEQ ID NO: 558540 - RNA, 19 nt, Artificial Sequence
  Description of Artificial Sequence: Synthetic oligonucleotide
ugucuggauuaauauugcc

SEQ ID NO: 558541 - RNA, 19 nt, Artificial Sequence
  Description of Artificial Sequence: Synthetic oligonucleotide
uuccaauuaugcccggaca

SEQ ID NO: 558542 - RNA, 19 nt, Artificial Sequence
  Description of Artificial Sequence: Synthetic oligonucleotide
  modified_base (9)..(9): a, c, u, g, unknown or other
uucuugaancuuuuccaaa

SEQ ID NO: 558543 - RNA, 19 nt, Artificial Sequence
  Description of Artificial Sequence: Synthetic oligonucleotide
gaacacugcgacuggauga

SEQ ID NO: 558544 - RNA, 19 nt, Artificial Sequence
  Description of Artificial Sequence: Synthetic oligonucleotide
cuguucguagucauucagc

SEQ ID NO: 558545 - RNA, 19 nt, Artificial Sequence
  Description of Artificial Sequence: Synthetic oligonucleotide
uuauucguuaauguugcau

SEQ ID NO: 558546 - RNA, 19 nt, Artificial Sequence
  Description of Artificial Sequence: Synthetic oligonucleotide
ucugacaacgauucuccaa

SEQ ID NO: 558547 - RNA, 19 nt, Artificial Sequence
  Description of Artificial Sequence: Synthetic oligonucleotide
uucaccggugccccaagag

SEQ ID NO: 558548 - RNA, 19 nt, Artificial Sequence
  Description of Artificial Sequence: Synthetic oligonucleotide
uaagaguuuccuguaggca

SEQ ID NO: 558549 - RNA, 19 nt, Artificial Sequence
  Description of Artificial Sequence: Synthetic oligonucleotide
cagucgggcauucucaagc

SEQ ID NO: 558550 - RNA, 19 nt, Artificial Sequence
  Description of Artificial Sequence: Synthetic oligonucleotide
  modified_base (3)..(3): a, c, u, g, unknown or other
aancuuuuccaaacaggcu

SEQ ID NO: 558551 - RNA, 19 nt, Artificial Sequence
  Description of Artificial Sequence: Synthetic oligonucleotide
aacaacguguauggauagg

SEQ ID NO: 558552 - RNA, 19 nt, Artificial Sequence
  Description of Artificial Sequence: Synthetic oligonucleotide
  modified_base (7)..(7): a, c, u, g, unknown or other
cuugaancuuuuccaaaca

SEQ ID NO: 558553 - RNA, 19 nt, Artificial Sequence
  Description of Artificial Sequence: Synthetic oligonucleotide
uaaccguucuuccucgccu

SEQ ID NO: 558554 - RNA, 19 nt, Artificial Sequence
  Description of Artificial Sequence: Synthetic oligonucleotide
agaguuuaguugccgccuc

SEQ ID NO: 558555 - RNA, 19 nt, Artificial Sequence
  Description of Artificial Sequence: Synthetic oligonucleotide
auggauaggauuucuuuua

SEQ ID NO: 558556 - RNA, 19 nt, Artificial Sequence
  Description of Artificial Sequence: Synthetic oligonucleotide
auguaagcguguuacacua

SEQ ID NO: 558557 - RNA, 19 nt, Artificial Sequence
  Description of Artificial Sequence: Synthetic oligonucleotide
auucguuaauguugcauaa

SEQ ID NO: 558558 - RNA, 19 nt, Artificial Sequence
  Description of Artificial Sequence: Synthetic oligonucleotide
cucgacacagucacucggg

SEQ ID NO: 558559 - RNA, 19 nt, Artificial Sequence
  Description of Artificial Sequence: Synthetic oligonucleotide
gucuuaaagacuguacuuc

SEQ ID NO: 558560 - RNA, 19 nt, Artificial Sequence
  Description of Artificial Sequence: Synthetic oligonucleotide
  modified_base (17)..(17): a, c, u, g, unknown or other
uccuccaauucuugaancu

SEQ ID NO: 558561 - RNA, 19 nt, Artificial Sequence
  Description of Artificial Sequence: Synthetic oligonucleotide
ugcggaaccuccauccaga

SEQ ID NO: 558562 - RNA, 19 nt, Artificial Sequence
  Description of Artificial Sequence: Synthetic oligonucleotide
acaacguguauggauagga

SEQ ID NO: 558563 - RNA, 19 nt, Artificial Sequence
  Description of Artificial Sequence: Synthetic oligonucleotide
uauacaggguuaccaugcu

SEQ ID NO: 558564 - RNA, 19 nt, Artificial Sequence
  Description of Artificial Sequence: Synthetic oligonucleotide
uugauccuguucagaagug

SEQ ID NO: 558565 - RNA, 19 nt, Artificial Sequence
  Description of Artificial Sequence: Synthetic oligonucleotide
aggcggauaaacuugccau

SEQ ID NO: 558566 - RNA, 19 nt, Artificial Sequence
  Description of Artificial Sequence: Synthetic oligonucleotide
aagcguguuacacuaucuu

SEQ ID NO: 558567 - RNA, 19 nt, Artificial Sequence
  Description of Artificial Sequence: Synthetic oligonucleotide
uugcggaaccuccauccag

SEQ ID NO: 558568 - RNA, 19 nt, Artificial Sequence
  Description of Artificial Sequence: Synthetic oligonucleotide
cuuccaauuaugcccggac

SEQ ID NO: 558569 - RNA, 19 nt, Artificial Sequence
  Description of Artificial Sequence: Synthetic oligonucleotide
agagugcuuacaugauguc

SEQ ID NO: 558570 - RNA, 19 nt, Artificial Sequence
  Description of Artificial Sequence: Synthetic oligonucleotide
uggagagagcuuuaaccgu

SEQ ID NO: 558571 - RNA, 19 nt, Artificial Sequence
  Description of Artificial Sequence: Synthetic oligonucleotide
gaaauguaagcguguuaca

SEQ ID NO: 558572 - RNA, 19 nt, Artificial Sequence
  Description of Artificial Sequence: Synthetic oligonucleotide
caauuaugcccggacacgc

SEQ ID NO: 558573 - RNA, 19 nt, Artificial Sequence
  Description of Artificial Sequence: Synthetic oligonucleotide
cucgggaagaaggacuugg

SEQ ID NO: 558574 - RNA, 19 nt, Artificial Sequence
  Description of Artificial Sequence: Synthetic oligonucleotide
aaguuucgucugcuaacug

SEQ ID NO: 558575 - RNA, 19 nt, Artificial Sequence
  Description of Artificial Sequence: Synthetic oligonucleotide
uagagcaaucuuccaauua

SEQ ID NO: 558576 - RNA, 19 nt, Artificial Sequence
  Description of Artificial Sequence: Synthetic oligonucleotide
caaacgugucucaugcuuc

SEQ ID NO: 558577 - RNA, 19 nt, Artificial Sequence
  Description of Artificial Sequence: Synthetic oligonucleotide
ucaguauaaccuucacauc

SEQ ID NO: 558578 - RNA, 19 nt, Artificial Sequence
  Description of Artificial Sequence: Synthetic oligonucleotide
cacaucuugcaacaacgug

SEQ ID NO: 558579 - RNA, 19 nt, Artificial Sequence
  Description of Artificial Sequence: Synthetic oligonucleotide
uaugcccggacacgcagug

SEQ ID NO: 558580 - RNA, 19 nt, Artificial Sequence
  Description of Artificial Sequence: Synthetic oligonucleotide
aaguaaaguuucgucugcu

SEQ ID NO: 558581 - RNA, 19 nt, Artificial Sequence
  Description of Artificial Sequence: Synthetic oligonucleotide
guucagaaguguucuucag

SEQ ID NO: 558582 - RNA, 19 nt, Artificial Sequence
  Description of Artificial Sequence: Synthetic oligonucleotide
cagugguauacuuacccuc

SEQ ID NO: 558583 - RNA, 19 nt, Artificial Sequence
  Description of Artificial Sequence: Synthetic oligonucleotide
ucgaagcuucaucugggcu

SEQ ID NO: 558584 - RNA, 19 nt, Artificial Sequence
  Description of Artificial Sequence: Synthetic oligonucleotide
ucucaugcuuccuucucgu

SEQ ID NO: 558585 - RNA, 19 nt, Artificial Sequence
  Description of Artificial Sequence: Synthetic oligonucleotide
caacaacguguauggauag

SEQ ID NO: 558586 - RNA, 19 nt, Artificial Sequence
  Description of Artificial Sequence: Synthetic oligonucleotide
cacgucaacucucuuccgc

SEQ ID NO: 558587 - RNA, 19 nt, Artificial Sequence
  Description of Artificial Sequence: Synthetic oligonucleotide
cuguacuucucugagcaac

SEQ ID NO: 558588 - RNA, 19 nt, Artificial Sequence
  Description of Artificial Sequence: Synthetic oligonucleotide
cguuuuauauauagcagag

SEQ ID NO: 558589 - RNA, 19 nt, Artificial Sequence
  Description of Artificial Sequence: Synthetic oligonucleotide
ucaguaagacucugacaac

SEQ ID NO: 558590 - RNA, 19 nt, Artificial Sequence
  Description of Artificial Sequence: Synthetic oligonucleotide
ggcaugguaggucugcucc

SEQ ID NO: 558591 - RNA, 19 nt, Artificial Sequence
  Description of Artificial Sequence: Synthetic oligonucleotide
auacucaaucugccgcccg

SEQ ID NO: 558592 - RNA, 19 nt, Artificial Sequence
  Description of Artificial Sequence: Synthetic oligonucleotide
uccgcuuuccucgaguggu

SEQ ID NO: 558593 - RNA, 19 nt, Artificial Sequence
  Description of Artificial Sequence: Synthetic oligonucleotide
ggugcgaacacugcgacug

SEQ ID NO: 558594 - RNA, 19 nt, Artificial Sequence
  Description of Artificial Sequence: Synthetic oligonucleotide
uuccgcuuuccucgagugg

SEQ ID NO: 558595 - RNA, 19 nt, Artificial Sequence
  Description of Artificial Sequence: Synthetic oligonucleotide
guaagcguguuacacuauc

SEQ ID NO: 558596 - RNA, 19 nt, Artificial Sequence
  Description of Artificial Sequence: Synthetic oligonucleotide
cugacaacgauucuccaaa

SEQ ID NO: 558597 - RNA, 19 nt, Artificial Sequence
  Description of Artificial Sequence: Synthetic oligonucleotide
uuuauucguuaauguugca

SEQ ID NO: 558598 - RNA, 19 nt, Artificial Sequence
  Description of Artificial Sequence: Synthetic oligonucleotide
gugcuuacaugaugucugg

SEQ ID NO: 558599 - RNA, 19 nt, Artificial Sequence
  Description of Artificial Sequence: Synthetic oligonucleotide
caacgauucuccaaaucca

SEQ ID NO: 558600 - RNA, 19 nt, Artificial Sequence
  Description of Artificial Sequence: Synthetic oligonucleotide
aguucacauaauggcacag

SEQ ID NO: 558601 - RNA, 19 nt, Artificial Sequence
  Description of Artificial Sequence: Synthetic oligonucleotide
agagaaacggcugaacaua

SEQ ID NO: 558602 - RNA, 19 nt, Artificial Sequence
  Description of Artificial Sequence: Synthetic oligonucleotide
cacaacuagagcauuugaa

SEQ ID NO: 558603 - RNA, 19 nt, Artificial Sequence
  Description of Artificial Sequence: Synthetic oligonucleotide
aaagcugggaggacaggcu

SEQ ID NO: 558604 - RNA, 19 nt, Artificial Sequence
  Description of Artificial Sequence: Synthetic oligonucleotide
uaacugacugaugugucuc

SEQ ID NO: 558605 - RNA, 19 nt, Artificial Sequence
  Description of Artificial Sequence: Synthetic oligonucleotide
ugcccggacacgcaguggu

SEQ ID NO: 558606 - RNA, 19 nt, Artificial Sequence
  Description of Artificial Sequence: Synthetic oligonucleotide
agcguguuacacuaucuua

SEQ ID NO: 558607 - RNA, 19 nt, Artificial Sequence
  Description of Artificial Sequence: Synthetic oligonucleotide
aacacugcgacuggaugau

SEQ ID NO: 558608 - RNA, 19 nt, Artificial Sequence
  Description of Artificial Sequence: Synthetic oligonucleotide
ggcacugaucuccaugucc

SEQ ID NO: 558609 - RNA, 19 nt, Artificial Sequence
  Description of Artificial Sequence: Synthetic oligonucleotide
gagcaaucuuccaauuaug

SEQ ID NO: 558610 - RNA, 19 nt, Artificial Sequence
  Description of Artificial Sequence: Synthetic oligonucleotide
acgaguucacauaauggca

SEQ ID NO: 558611 - RNA, 19 nt, Artificial Sequence
  Description of Artificial Sequence: Synthetic oligonucleotide
cucucgacacagucacucg

SEQ ID NO: 558612 - RNA, 19 nt, Artificial Sequence
  Description of Artificial Sequence: Synthetic oligonucleotide
uguugcucccucaucucau

SEQ ID NO: 558613 - RNA, 19 nt, Artificial Sequence
  Description of Artificial Sequence: Synthetic oligonucleotide
uaguugccgccucauacuc

SEQ ID NO: 558614 - RNA, 19 nt, Artificial Sequence
  Description of Artificial Sequence: Synthetic oligonucleotide
agagugggaaaugcuaaca

SEQ ID NO: 558615 - RNA, 19 nt, Artificial Sequence
  Description of Artificial Sequence: Synthetic oligonucleotide
cauccagagugcuuacaug

SEQ ID NO: 558616 - RNA, 19 nt, Artificial Sequence
  Description of Artificial Sequence: Synthetic oligonucleotide
acgucaacucucuuccgcu

SEQ ID NO: 558617 - RNA, 19 nt, Artificial Sequence
  Description of Artificial Sequence: Synthetic oligonucleotide
ucgacacagucacucggga

SEQ ID NO: 558618 - RNA, 19 nt, Artificial Sequence
  Description of Artificial Sequence: Synthetic oligonucleotide
aguaaaguuucgucugcua

SEQ ID NO: 558619 - RNA, 19 nt, Artificial Sequence
  Description of Artificial Sequence: Synthetic oligonucleotide
ggcucuagacucuuucugc

SEQ ID NO: 558620 - RNA, 19 nt, Artificial Sequence
  Description of Artificial Sequence: Synthetic oligonucleotide
uuaaggccaucagauucgc

SEQ ID NO: 558621 - RNA, 19 nt, Artificial Sequence
  Description of Artificial Sequence: Synthetic oligonucleotide
uacuucucugagcaaccuc

SEQ ID NO: 558622 - RNA, 19 nt, Artificial Sequence
  Description of Artificial Sequence: Synthetic oligonucleotide
auacuuacccuccucccuu

SEQ ID NO: 558623 - RNA, 19 nt, Artificial Sequence
  Description of Artificial Sequence: Synthetic oligonucleotide
guucguagucauucagcug

SEQ ID NO: 558624 - RNA, 19 nt, Artificial Sequence
  Description of Artificial Sequence: Synthetic oligonucleotide
uaacagucuggccugccuu

SEQ ID NO: 558625 - RNA, 19 nt, Artificial Sequence
  Description of Artificial Sequence: Synthetic oligonucleotide
acuagagcauuugaagaaa

SEQ ID NO: 558626 - RNA, 19 nt, Artificial Sequence
  Description of Artificial Sequence: Synthetic oligonucleotide
ugucaauaauucacaucuu

SEQ ID NO: 558627 - RNA, 19 nt, Artificial Sequence
  Description of Artificial Sequence: Synthetic oligonucleotide
ugguauacuuacccuccuc

SEQ ID NO: 558628 - RNA, 19 nt, Artificial Sequence
  Description of Artificial Sequence: Synthetic oligonucleotide
aauuaugcccggacacgca

SEQ ID NO: 558629 - RNA, 19 nt, Artificial Sequence
  Description of Artificial Sequence: Synthetic oligonucleotide
aucgugugcuucugagaag

SEQ ID NO: 558630 - RNA, 19 nt, Artificial Sequence
  Description of Artificial Sequence: Synthetic oligonucleotide
aguaagacucugacaacga

SEQ ID NO: 558631 - RNA, 19 nt, Artificial Sequence
  Description of Artificial Sequence: Synthetic oligonucleotide
cacacauucccgguggcug

SEQ ID NO: 558632 - RNA, 19 nt, Artificial Sequence
  Description of Artificial Sequence: Synthetic oligonucleotide
auagagcaaucuuccaauu

SEQ ID NO: 558633 - RNA, 19 nt, Artificial Sequence
  Description of Artificial Sequence: Synthetic oligonucleotide
agucgggcauucucaagcu

SEQ ID NO: 558634 - RNA, 19 nt, Artificial Sequence
  Description of Artificial Sequence: Synthetic oligonucleotide
uacgaaacuccaaguccuc

SEQ ID NO: 558635 - RNA, 19 nt, Artificial Sequence
  Description of Artificial Sequence: Synthetic oligonucleotide
agcauuugcagcccauauu

SEQ ID NO: 558636 - RNA, 19 nt, Artificial Sequence
  Description of Artificial Sequence: Synthetic oligonucleotide
gagcagacugcccgacuag

SEQ ID NO: 558637 - RNA, 19 nt, Artificial Sequence
  Description of Artificial Sequence: Synthetic oligonucleotide
cagagugcuuacaugaugu

SEQ ID NO: 558638 - RNA, 19 nt, Artificial Sequence
  Description of Artificial Sequence: Synthetic oligonucleotide
ugcuaacacuacugcuugc

SEQ ID NO: 558639 - RNA, 19 nt, Artificial Sequence
  Description of Artificial Sequence: Synthetic oligonucleotide
uuaugcccggacacgcagu

SEQ ID NO: 558640 - RNA, 19 nt, Artificial Sequence
  Description of Artificial Sequence: Synthetic oligonucleotide
uuccuccuccuccuccucc

SEQ ID NO: 558641 - RNA, 19 nt, Artificial Sequence
  Description of Artificial Sequence: Synthetic oligonucleotide
gaaguguucuucaggcgga

SEQ ID NO: 558642 - RNA, 19 nt, Artificial Sequence
  Description of Artificial Sequence: Synthetic oligonucleotide
gguuagaaagcugggagga

SEQ ID NO: 558643 - RNA, 19 nt, Artificial Sequence
  Description of Artificial Sequence: Synthetic oligonucleotide
cauucccgguggcugaggc

SEQ ID NO: 558644 - RNA, 19 nt, Artificial Sequence
  Description of Artificial Sequence: Synthetic oligonucleotide
caucugggcuccauuaaga

SEQ ID NO: 558645 - RNA, 19 nt, Artificial Sequence
  Description of Artificial Sequence: Synthetic oligonucleotide
gcuaacacuacugcuugcc

SEQ ID NO: 558646 - RNA, 19 nt, Artificial Sequence
  Description of Artificial Sequence: Synthetic oligonucleotide
gcuguucguagucauucag

SEQ ID NO: 558647 - RNA, 19 nt, Artificial Sequence
  Description of Artificial Sequence: Synthetic oligonucleotide
gucuaccaagggcaguagc

SEQ ID NO: 558648 - RNA, 19 nt, Artificial Sequence
  Description of Artificial Sequence: Synthetic oligonucleotide
accccuaaccccaccugcc

SEQ ID NO: 558649 - RNA, 19 nt, Artificial Sequence
  Description of Artificial Sequence: Synthetic oligonucleotide
cugugacuccagcauuugc

SEQ ID NO: 558650 - RNA, 19 nt, Artificial Sequence
  Description of Artificial Sequence: Synthetic oligonucleotide
agcacguaucuugagguau

SEQ ID NO: 558651 - RNA, 19 nt, Artificial Sequence
  Description of Artificial Sequence: Synthetic oligonucleotide
ucuucaccggugccccaag

SEQ ID NO: 558652 - RNA, 19 nt, Artificial Sequence
  Description of Artificial Sequence: Synthetic oligonucleotide
caccccuaaccccaccugc

SEQ ID NO: 558653 - RNA, 19 nt, Artificial Sequence
  Description of Artificial Sequence: Synthetic oligonucleotide
ccguuuuauauauagcaga

SEQ ID NO: 558654 - RNA, 19 nt, Artificial Sequence
  Description of Artificial Sequence: Synthetic oligonucleotide
ccuuguacagccucacuug

SEQ ID NO: 558655 - RNA, 19 nt, Artificial Sequence
  Description of Artificial Sequence: Synthetic oligonucleotide
uuacccuccucccuuccuu

SEQ ID NO: 558656 - RNA, 19 nt, Artificial Sequence
  Description of Artificial Sequence: Synthetic oligonucleotide
aaccguucuuccucgccuu

SEQ ID NO: 558657 - RNA, 19 nt, Artificial Sequence
  Description of Artificial Sequence: Synthetic oligonucleotide
acugcccgacuagauagag

SEQ ID NO: 558658 - RNA, 19 nt, Artificial Sequence
  Description of Artificial Sequence: Synthetic oligonucleotide
gucuggauuaauauugccu

SEQ ID NO: 558659 - RNA, 19 nt, Artificial Sequence
  Description of Artificial Sequence: Synthetic oligonucleotide
gaacaagagcagacugccc

SEQ ID NO: 558660 - RNA, 19 nt, Artificial Sequence
  Description of Artificial Sequence: Synthetic oligonucleotide
caucaguucuucccgggca

SEQ ID NO: 558661 - RNA, 19 nt, Artificial Sequence
  Description of Artificial Sequence: Synthetic oligonucleotide
ucgucugcuaacugcuuuu

SEQ ID NO: 558662 - RNA, 19 nt, Artificial Sequence
  Description of Artificial Sequence: Synthetic oligonucleotide
gcucccucaucucaugcag

SEQ ID NO: 558663 - RNA, 19 nt, Artificial Sequence
  Description of Artificial Sequence: Synthetic oligonucleotide
agaaagcugggaggacagg

SEQ ID NO: 558664 - RNA, 19 nt, Artificial Sequence
  Description of Artificial Sequence: Synthetic oligonucleotide
gguauauuuauaacugacu

SEQ ID NO: 558665 - RNA, 19 nt, Artificial Sequence
  Description of Artificial Sequence: Synthetic oligonucleotide
gaguuuaguugccgccuca

SEQ ID NO: 558666 - RNA, 19 nt, Artificial Sequence
  Description of Artificial Sequence: Synthetic oligonucleotide
aucagauucgcagcuuaaa

SEQ ID NO: 558667 - RNA, 19 nt, Artificial Sequence
  Description of Artificial Sequence: Synthetic oligonucleotide
cugcccgacuagauagagc

SEQ ID NO: 558668 - RNA, 19 nt, Artificial Sequence
  Description of Artificial Sequence: Synthetic oligonucleotide
ccaauuaugcccggacacg

SEQ ID NO: 558669 - RNA, 19 nt, Artificial Sequence
  Description of Artificial Sequence: Synthetic oligonucleotide
gaacagcaccguuuuauau

SEQ ID NO: 558670 - RNA, 19 nt, Artificial Sequence
  Description of Artificial Sequence: Synthetic oligonucleotide
uccaccaaacgugucucau

SEQ ID NO: 558671 - RNA, 19 nt, Artificial Sequence
  Description of Artificial Sequence: Synthetic oligonucleotide
gacgggaguugucuuucuc

SEQ ID NO: 558672 - RNA, 19 nt, Artificial Sequence
  Description of Artificial Sequence: Synthetic oligonucleotide
ugcuuacaugaugucugga

SEQ ID NO: 558673 - RNA, 19 nt, Artificial Sequence
  Description of Artificial Sequence: Synthetic oligonucleotide
agcaaccuccucucccuga

SEQ ID NO: 558674 - RNA, 19 nt, Artificial Sequence
  Description of Artificial Sequence: Synthetic oligonucleotide
ucucuuccgcuuuccucga

SEQ ID NO: 558675 - RNA, 19 nt, Artificial Sequence
  Description of Artificial Sequence: Synthetic oligonucleotide
aggucaguuggaggacugg

SEQ ID NO: 558676 - RNA, 19 nt, Artificial Sequence
  Description of Artificial Sequence: Synthetic oligonucleotide
gagugcuuacaugaugucu

SEQ ID NO: 558677 - RNA, 19 nt, Artificial Sequence
  Description of Artificial Sequence: Synthetic oligonucleotide
uccuccuccuccuccuccu

SEQ ID NO: 558678 - RNA, 19 nt, Artificial Sequence
  Description of Artificial Sequence: Synthetic oligonucleotide
accaaacgugucucaugcu

SEQ ID NO: 558679 - RNA, 19 nt, Artificial Sequence
  Description of Artificial Sequence: Synthetic oligonucleotide
ggaggacaggcucucgaug

SEQ ID NO: 558680 - RNA, 19 nt, Artificial Sequence
  Description of Artificial Sequence: Synthetic oligonucleotide
caggcggauaaacuugcca

SEQ ID NO: 558681 - RNA, 19 nt, Artificial Sequence
  Description of Artificial Sequence: Synthetic oligonucleotide
gcucucgaugcgcaugcgg

SEQ ID NO: 558682 - RNA, 19 nt, Artificial Sequence
  Description of Artificial Sequence: Synthetic oligonucleotide
uacuuacccuccucccuuc

SEQ ID NO: 558683 - RNA, 19 nt, Artificial Sequence
  Description of Artificial Sequence: Synthetic oligonucleotide
agacuugcggaaccuccau

SEQ ID NO: 558684 - RNA, 19 nt, Artificial Sequence
  Description of Artificial Sequence: Synthetic oligonucleotide
gcagcccauauuguaacag

SEQ ID NO: 558685 - RNA, 19 nt, Artificial Sequence
  Description of Artificial Sequence: Synthetic oligonucleotide
acacagucacucgggaaga

SEQ ID NO: 558686 - RNA, 19 nt, Artificial Sequence
  Description of Artificial Sequence: Synthetic oligonucleotide
acgcagugguauacuuacc

SEQ ID NO: 558687 - RNA, 19 nt, Artificial Sequence
  Description of Artificial Sequence: Synthetic oligonucleotide
gugcgaacacugcgacugg

SEQ ID NO: 558688 - RNA, 19 nt, Artificial Sequence
  Description of Artificial Sequence: Synthetic oligonucleotide
aacgugucucaugcuuccu

SEQ ID NO: 558689 - RNA, 19 nt, Artificial Sequence
  Description of Artificial Sequence: Synthetic oligonucleotide
cagacuugcggaaccucca

SEQ ID NO: 558690 - RNA, 19 nt, Artificial Sequence
  Description of Artificial Sequence: Synthetic oligonucleotide
gccccaagaguucugguuc

SEQ ID NO: 558691 - RNA, 19 nt, Artificial Sequence
  Description of Artificial Sequence: Synthetic oligonucleotide
aucaagaauuuaagagaaa

SEQ ID NO: 558692 - RNA, 19 nt, Artificial Sequence
  Description of Artificial Sequence: Synthetic oligonucleotide
ccuuagaguuuaguugccg

SEQ ID NO: 558693 - RNA, 19 nt, Artificial Sequence
  Description of Artificial Sequence: Synthetic oligonucleotide
ugcgacgggaguugucuuu

SEQ ID NO: 558694 - RNA, 19 nt, Artificial Sequence
  Description of Artificial Sequence: Synthetic oligonucleotide
ggucaguuggaggacuggc

SEQ ID NO: 558695 - RNA, 19 nt, Artificial Sequence
  Description of Artificial Sequence: Synthetic oligonucleotide
ggcggauaaacuugccauc

SEQ ID NO: 558696 - RNA, 19 nt, Artificial Sequence
  Description of Artificial Sequence: Synthetic oligonucleotide
gcaacaacguguauggaua

SEQ ID NO: 558697 - RNA, 19 nt, Artificial Sequence
  Description of Artificial Sequence: Synthetic oligonucleotide
ugcgcaugcggcucuccau

SEQ ID NO: 558698 - RNA, 19 nt, Artificial Sequence
  Description of Artificial Sequence: Synthetic oligonucleotide
uuuccucgaguggugcgaa

SEQ ID NO: 558699 - RNA, 19 nt, Artificial Sequence
  Description of Artificial Sequence: Synthetic oligonucleotide
agaaacggcugaacauaca

SEQ ID NO: 558700 - RNA, 19 nt, Artificial Sequence
  Description of Artificial Sequence: Synthetic oligonucleotide
gacaggcucucgaugcgca

SEQ ID NO: 558701 - RNA, 19 nt, Artificial Sequence
  Description of Artificial Sequence: Synthetic oligonucleotide
caagagcagacugcccgac

SEQ ID NO: 558702 - RNA, 19 nt, Artificial Sequence
  Description of Artificial Sequence: Synthetic oligonucleotide
agcagacugcccgacuaga

SEQ ID NO: 558703 - RNA, 19 nt, Artificial Sequence
  Description of Artificial Sequence: Synthetic oligonucleotide
guaaccuugaucacuuauu

SEQ ID NO: 558704 - RNA, 19 nt, Artificial Sequence
  Description of Artificial Sequence: Synthetic oligonucleotide
gcguguuacacuaucuuaa

SEQ ID NO: 558705 - RNA, 19 nt, Artificial Sequence
  Description of Artificial Sequence: Synthetic oligonucleotide
caucaacaucgaucucuuc

SEQ ID NO: 558706 - RNA, 19 nt, Artificial Sequence
  Description of Artificial Sequence: Synthetic oligonucleotide
caucagauucgcagcuuaa

SEQ ID NO: 558707 - RNA, 19 nt, Artificial Sequence
  Description of Artificial Sequence: Synthetic oligonucleotide
accggugccccaagaguuc

SEQ ID NO: 558708 - RNA, 19 nt, Artificial Sequence
  Description of Artificial Sequence: Synthetic oligonucleotide
cuugcggaaccuccaucca

SEQ ID NO: 558709 - RNA, 19 nt, Artificial Sequence
  Description of Artificial Sequence: Synthetic oligonucleotide
ugcucucgacacagucacu

SEQ ID NO: 558710 - RNA, 19 nt, Artificial Sequence
  Description of Artificial Sequence: Synthetic oligonucleotide
gcagauaaggaugcuucca

SEQ ID NO: 558711 - RNA, 19 nt, Artificial Sequence
  Description of Artificial Sequence: Synthetic oligonucleotide
gcaccguuuuauauauagc

SEQ ID NO: 558712 - RNA, 19 nt, Artificial Sequence
  Description of Artificial Sequence: Synthetic oligonucleotide
gcggauaaacuugccauca

SEQ ID NO: 558713 - RNA, 19 nt, Artificial Sequence
  Description of Artificial Sequence: Synthetic oligonucleotide
gcuuacaugaugucuggau

SEQ ID NO: 558714 - RNA, 19 nt, Artificial Sequence
  Description of Artificial Sequence: Synthetic oligonucleotide
cuaacacuacugcuugccu

SEQ ID NO: 558715 - RNA, 19 nt, Artificial Sequence
  Description of Artificial Sequence: Synthetic oligonucleotide
gauccuguucagaaguguu

SEQ ID NO: 558716 - RNA, 19 nt, Artificial Sequence
  Description of Artificial Sequence: Synthetic oligonucleotide
ccaucaguucuucccgggc

SEQ ID NO: 558717 - RNA, 19 nt, Artificial Sequence
  Description of Artificial Sequence: Synthetic oligonucleotide
uccuccuccuccuccucuu

SEQ ID NO: 558718 - RNA, 19 nt, Artificial Sequence
  Description of Artificial Sequence: Synthetic oligonucleotide
ccgacuagauagagcaauc

SEQ ID NO: 558719 - RNA, 19 nt, Artificial Sequence
  Description of Artificial Sequence: Synthetic oligonucleotide
cagacugcccgacuagaua

SEQ ID NO: 558720 - RNA, 19 nt, Artificial Sequence
  Description of Artificial Sequence: Synthetic oligonucleotide
gacacgcagugguauacuu

SEQ ID NO: 558721 - RNA, 19 nt, Artificial Sequence
  Description of Artificial Sequence: Synthetic oligonucleotide
cacauucccgguggcugag

SEQ ID NO: 558722 - RNA, 19 nt, Artificial Sequence
  Description of Artificial Sequence: Synthetic oligonucleotide
aucuugcaacaacguguau

SEQ ID NO: 558723 - RNA, 19 nt, Artificial Sequence
  Description of Artificial Sequence: Synthetic oligonucleotide
cauuugcagcccauauugu

SEQ ID NO: 558724 - RNA, 19 nt, Artificial Sequence
  Description of Artificial Sequence: Synthetic oligonucleotide
uuccucgaguggugcgaac

SEQ ID NO: 558725 - RNA, 19 nt, Artificial Sequence
  Description of Artificial Sequence: Synthetic oligonucleotide
ccaccaaacgugucucaug

SEQ ID NO: 558726 - RNA, 19 nt, Artificial Sequence
  Description of Artificial Sequence: Synthetic oligonucleotide
caaugcacacauucccggu

SEQ ID NO: 558727 - RNA, 19 nt, Artificial Sequence
  Description of Artificial Sequence: Synthetic oligonucleotide
aguugccgccucauacucu

SEQ ID NO: 558728 - RNA, 19 nt, Artificial Sequence
  Description of Artificial Sequence: Synthetic oligonucleotide
cgaacacugcgacuggaug

SEQ ID NO: 558729 - RNA, 19 nt, Artificial Sequence
  Description of Artificial Sequence: Synthetic oligonucleotide
ggcagagugggaaaugcua

SEQ ID NO: 558730 - RNA, 19 nt, Artificial Sequence
  Description of Artificial Sequence: Synthetic oligonucleotide
auguugcauaagaaaugua

SEQ ID NO: 558731 - RNA, 19 nt, Artificial Sequence
  Description of Artificial Sequence: Synthetic oligonucleotide
acacgcagugguauacuua

SEQ ID NO: 558732 - RNA, 19 nt, Artificial Sequence
  Description of Artificial Sequence: Synthetic oligonucleotide
gcggaaccuccauccagag

SEQ ID NO: 558733 - RNA, 19 nt, Artificial Sequence
  Description of Artificial Sequence: Synthetic oligonucleotide
ccgggcacuguugacagug

SEQ ID NO: 558734 - RNA, 19 nt, Artificial Sequence
  Description of Artificial Sequence: Synthetic oligonucleotide
gacugcccgacuagauaga

SEQ ID NO: 558735 - RNA, 19 nt, Artificial Sequence
  Description of Artificial Sequence: Synthetic oligonucleotide
gcagugguauacuuacccu

SEQ ID NO: 558736 - RNA, 19 nt, Artificial Sequence
  Description of Artificial Sequence: Synthetic oligonucleotide
ccgcccggaauccaccucc

SEQ ID NO: 558737 - RNA, 19 nt, Artificial Sequence
  Description of Artificial Sequence: Synthetic oligonucleotide
guuggacgcucuuggggcu

SEQ ID NO: 558738 - RNA, 19 nt, Artificial Sequence
  Description of Artificial Sequence: Synthetic oligonucleotide
caacguguauggauaggau

SEQ ID NO: 558739 - RNA, 19 nt, Artificial Sequence
  Description of Artificial Sequence: Synthetic oligonucleotide
cuccaccaaacgugucuca

SEQ ID NO: 558740 - RNA, 19 nt, Artificial Sequence
  Description of Artificial Sequence: Synthetic oligonucleotide
cuuccuccuccuccuccuc

SEQ ID NO: 558741 - RNA, 19 nt, Artificial Sequence
  Description of Artificial Sequence: Synthetic oligonucleotide
cuugacgaguucacauaau

SEQ ID NO: 558742 - RNA, 19 nt, Artificial Sequence
  Description of Artificial Sequence: Synthetic oligonucleotide
caucauguugcucccucau

SEQ ID NO: 558743 - RNA, 19 nt, Artificial Sequence
  Description of Artificial Sequence: Synthetic oligonucleotide
augcgacgggaguugucuu

SEQ ID NO: 558744 - RNA, 19 nt, Artificial Sequence
  Description of Artificial Sequence: Synthetic oligonucleotide
ggguuaccaugcuucuguc

SEQ ID NO: 558745 - RNA, 19 nt, Artificial Sequence
  Description of Artificial Sequence: Synthetic oligonucleotide
aguguucuucaggcggaua

SEQ ID NO: 558746 - RNA, 19 nt, Artificial Sequence
  Description of Artificial Sequence: Synthetic oligonucleotide
caugcggcucuccaucagu

SEQ ID NO: 558747 - RNA, 19 nt, Artificial Sequence
  Description of Artificial Sequence: Synthetic oligonucleotide
ccacgucaacucucuuccg

SEQ ID NO: 558748 - RNA, 19 nt, Artificial Sequence
  Description of Artificial Sequence: Synthetic oligonucleotide
acguaucuugagguauauu

SEQ ID NO: 558749 - RNA, 19 nt, Artificial Sequence
  Description of Artificial Sequence: Synthetic oligonucleotide
gcgcaugcggcucuccauc

SEQ ID NO: 558750 - RNA, 19 nt, Artificial Sequence
  Description of Artificial Sequence: Synthetic oligonucleotide
cagguaugguugucuuaaa

SEQ ID NO: 558751 - RNA, 19 nt, Artificial Sequence
  Description of Artificial Sequence: Synthetic oligonucleotide
cacucgggaagaaggacuu

SEQ ID NO: 558752 - RNA, 19 nt, Artificial Sequence
  Description of Artificial Sequence: Synthetic oligonucleotide
cuucaccggugccccaaga

SEQ ID NO: 558753 - RNA, 19 nt, Artificial Sequence
  Description of Artificial Sequence: Synthetic oligonucleotide
cagcacguaucuugaggua

SEQ ID NO: 558754 - RNA, 19 nt, Artificial Sequence
  Description of Artificial Sequence: Synthetic oligonucleotide
ccccuaaccccaccugccc

SEQ ID NO: 558755 - RNA, 19 nt, Artificial Sequence
  Description of Artificial Sequence: Synthetic oligonucleotide
guacuucucugagcaaccu

SEQ ID NO: 558756 - RNA, 19 nt, Artificial Sequence
  Description of Artificial Sequence: Synthetic oligonucleotide
uaaccccaccugccccguc

SEQ ID NO: 558757 - RNA, 19 nt, Artificial Sequence
  Description of Artificial Sequence: Synthetic oligonucleotide
ggagagagcuuuaaccguu

SEQ ID NO: 558758 - RNA, 19 nt, Artificial Sequence
  Description of Artificial Sequence: Synthetic oligonucleotide
ccuuaucuccgccaucucu

SEQ ID NO: 558759 - RNA, 19 nt, Artificial Sequence
  Description of Artificial Sequence: Synthetic oligonucleotide
ggcuccauuaagauccgau

SEQ ID NO: 558760 - RNA, 19 nt, Artificial Sequence
  Description of Artificial Sequence: Synthetic oligonucleotide
ccaaacgugucucaugcuu

SEQ ID NO: 558761 - RNA, 19 nt, Artificial Sequence
  Description of Artificial Sequence: Synthetic oligonucleotide
gcgacgggaguugucuuuc

SEQ ID NO: 558762 - RNA, 19 nt, Artificial Sequence
  Description of Artificial Sequence: Synthetic oligonucleotide
gcgacuggaugaugcucuc

SEQ ID NO: 558763 - RNA, 19 nt, Artificial Sequence
  Description of Artificial Sequence: Synthetic oligonucleotide
ccaccccuaaccccaccug

SEQ ID NO: 558764 - RNA, 19 nt, Artificial Sequence
  Description of Artificial Sequence: Synthetic oligonucleotide
cucgaguggugcgaacacu

SEQ ID NO: 558765 - RNA, 19 nt, Artificial Sequence
  Description of Artificial Sequence: Synthetic oligonucleotide
ggcucucgaugcgcaugcg

SEQ ID NO: 558766 - RNA, 19 nt, Artificial Sequence
  Description of Artificial Sequence: Synthetic oligonucleotide
ccauccagagugcuuacau

SEQ ID NO: 558767 - RNA, 19 nt, Artificial Sequence
  Description of Artificial Sequence: Synthetic oligonucleotide
cacagucacucgggaagaa

SEQ ID NO: 558768 - RNA, 19 nt, Artificial Sequence
  Description of Artificial Sequence: Synthetic oligonucleotide
gcacguaucuugagguaua

SEQ ID NO: 558769 - RNA, 19 nt, Artificial Sequence
  Description of Artificial Sequence: Synthetic oligonucleotide
cacguaucuugagguauau

SEQ ID NO: 558770 - RNA, 19 nt, Artificial Sequence
  Description of Artificial Sequence: Synthetic oligonucleotide
cgaacagcaccguuuuaua

SEQ ID NO: 558771 - RNA, 19 nt, Artificial Sequence
  Description of Artificial Sequence: Synthetic oligonucleotide
cuccuccuccuccuccucu

SEQ ID NO: 558772 - RNA, 19 nt, Artificial Sequence
  Description of Artificial Sequence: Synthetic oligonucleotide
caguuaguucagugucaau

SEQ ID NO: 558773 - RNA, 19 nt, Artificial Sequence
  Description of Artificial Sequence: Synthetic oligonucleotide
ccgaacagcaccguuuuau

SEQ ID NO: 558774 - RNA, 19 nt, Artificial Sequence
  Description of Artificial Sequence: Synthetic oligonucleotide
cccgacuagauagagcaau

SEQ ID NO: 558775 - RNA, 19 nt, Artificial Sequence
  Description of Artificial Sequence: Synthetic oligonucleotide
ggacacgcagugguauacu

SEQ ID NO: 558776 - RNA, 19 nt, Artificial Sequence
  Description of Artificial Sequence: Synthetic oligonucleotide
gcccgaacagcaccguuuu

SEQ ID NO: 558777 - RNA, 19 nt, Artificial Sequence
  Description of Artificial Sequence: Synthetic oligonucleotide
gacgcucuuggggcucccu

SEQ ID NO: 558778 - RNA, 19 nt, Artificial Sequence
  Description of Artificial Sequence: Synthetic oligonucleotide
cgacuagauagagcaaucu

SEQ ID NO: 558779 - RNA, 19 nt, Artificial Sequence
  Description of Artificial Sequence: Synthetic oligonucleotide
gcagacugcccgacuagau

SEQ ID NO: 558780 - RNA, 19 nt, Artificial Sequence
  Description of Artificial Sequence: Synthetic oligonucleotide
ccuccuccuccuccuccuc

SEQ ID NO: 558781 - RNA, 19 nt, Artificial Sequence
  Description of Artificial Sequence: Synthetic oligonucleotide
ccggacacgcagugguaua

SEQ ID NO: 558782 - RNA, 19 nt, Artificial Sequence
  Description of Artificial Sequence: Synthetic oligonucleotide
ggacgcucuuggggcuccc

SEQ ID NO: 558783 - RNA, 19 nt, Artificial Sequence
  Description of Artificial Sequence: Synthetic oligonucleotide
gcccgacuagauagagcaa

SEQ ID NO: 558784 - RNA, 19 nt, Artificial Sequence
  Description of Artificial Sequence: Synthetic oligonucleotide
cgggaguugucuuucucuu

SEQ ID NO: 558785 - RNA, 19 nt, Artificial Sequence
  Description of Artificial Sequence: Synthetic oligonucleotide
ccccgucccucaggaauca

SEQ ID NO: 558786 - RNA, 19 nt, Artificial Sequence
  Description of Artificial Sequence: Synthetic oligonucleotide
cccauugguugauccuguu

SEQ ID NO: 558787 - RNA, 19 nt, Artificial Sequence
  Description of Artificial Sequence: Synthetic oligonucleotide
cccgaacagcaccguuuua

SEQ ID NO: 558788 - RNA, 19 nt, Artificial Sequence
  Description of Artificial Sequence: Synthetic oligonucleotide
cgcccgaacagcaccguuu

SEQ ID NO: 558789 - RNA, 19 nt, Artificial Sequence
  Description of Artificial Sequence: Synthetic oligonucleotide
gcccggacacgcaguggua

SEQ ID NO: 558790 - RNA, 19 nt, Artificial Sequence
  Description of Artificial Sequence: Synthetic oligonucleotide
ccggugccccaagaguucu

SEQ ID NO: 558791 - RNA, 19 nt, Artificial Sequence
  Description of Artificial Sequence: Synthetic oligonucleotide
ccgcccgaacagcaccguu

SEQ ID NO: 558792 - RNA, 19 nt, Artificial Sequence
  Description of Artificial Sequence: Synthetic oligonucleotide
cccgcccgaacagcaccgu

SEQ ID NO: 558793 - RNA, 19 nt, Artificial Sequence
  Description of Artificial Sequence: Synthetic oligonucleotide
auaauuauaaugugaaggg

SEQ ID NO: 558794 - RNA, 19 nt, Artificial Sequence
  Description of Artificial Sequence: Synthetic oligonucleotide
gaauaggagaaguagagcg

SEQ ID NO: 558795 - RNA, 19 nt, Artificial Sequence
  Description of Artificial Sequence: Synthetic oligonucleotide
uuguagauaauuauaaugu

SEQ ID NO: 558796 - RNA, 19 nt, Artificial Sequence
  Description of Artificial Sequence: Synthetic oligonucleotide
uguuauaguaggcaaauug

SEQ ID NO: 558797 - RNA, 19 nt, Artificial Sequence
  Description of Artificial Sequence: Synthetic oligonucleotide
uuuccaauguuauaguagg

SEQ ID NO: 558798 - RNA, 19 nt, Artificial Sequence
  Description of Artificial Sequence: Synthetic oligonucleotide
aauuauaaugugaagggag

SEQ ID NO: 558799 - RNA, 19 nt, Artificial Sequence
  Description of Artificial Sequence: Synthetic oligonucleotide
agacacuuaaauaucaugc

SEQ ID NO: 558800 - RNA, 19 nt, Artificial Sequence
  Description of Artificial Sequence: Synthetic oligonucleotide
aauaucaugcugcugucag

SEQ ID NO: 558801 - RNA, 19 nt, Artificial Sequence
  Description of Artificial Sequence: Synthetic oligonucleotide
uccagcgugaaccacaggg

SEQ ID NO: 558802 - RNA, 19 nt, Artificial Sequence
  Description of Artificial Sequence: Synthetic oligonucleotide
uauaguaggcaaauuguag

SEQ ID NO: 558803 - RNA, 19 nt, Artificial Sequence
  Description of Artificial Sequence: Synthetic oligonucleotide
ucuaagaacaguagcacca

SEQ ID NO: 558804 - RNA, 19 nt, Artificial Sequence
  Description of Artificial Sequence: Synthetic oligonucleotide
aguuguagccaucauaguc

SEQ ID NO: 558805 - RNA, 19 nt, Artificial Sequence
  Description of Artificial Sequence: Synthetic oligonucleotide
caugguuugguaauagucg

SEQ ID NO: 558806 - RNA, 19 nt, Artificial Sequence
  Description of Artificial Sequence: Synthetic oligonucleotide
acaaaaguaccccucacuc

SEQ ID NO: 558807 - RNA, 19 nt, Artificial Sequence
  Description of Artificial Sequence: Synthetic oligonucleotide
ucguaagcgaagaagagca

SEQ ID NO: 558808 - RNA, 19 nt, Artificial Sequence
  Description of Artificial Sequence: Synthetic oligonucleotide
aaugucguaagcgaagaag

SEQ ID NO: 558809 - RNA, 19 nt, Artificial Sequence
  Description of Artificial Sequence: Synthetic oligonucleotide
uugggaaucaccucuuccg

SEQ ID NO: 558810 - RNA, 19 nt, Artificial Sequence
  Description of Artificial Sequence: Synthetic oligonucleotide
auagccugcguauaguuuc

SEQ ID NO: 558811 - RNA, 19 nt, Artificial Sequence
  Description of Artificial Sequence: Synthetic oligonucleotide
agaacuuuucauuuggggu

SEQ ID NO: 558812 - RNA, 19 nt, Artificial Sequence
  Description of Artificial Sequence: Synthetic oligonucleotide
aaguaggacuccaugacac

SEQ ID NO: 558813 - RNA, 19 nt, Artificial Sequence
  Description of Artificial Sequence: Synthetic oligonucleotide
uaaaggauggcacuauagu

SEQ ID NO: 558814 - RNA, 19 nt, Artificial Sequence
  Description of Artificial Sequence: Synthetic oligonucleotide
aauuguagauaauuauaau

SEQ ID NO: 558815 - RNA, 19 nt, Artificial Sequence
  Description of Artificial Sequence: Synthetic oligonucleotide
aguagagucgaacuccuag

SEQ ID NO: 558816 - RNA, 19 nt, Artificial Sequence
  Description of Artificial Sequence: Synthetic oligonucleotide
uuagcggacaaaaguaccc

SEQ ID NO: 558817 - RNA, 19 nt, Artificial Sequence
  Description of Artificial Sequence: Synthetic oligonucleotide
aauaggagaaguagagcgg

SEQ ID NO: 558818 - RNA, 19 nt, Artificial Sequence
  Description of Artificial Sequence: Synthetic oligonucleotide
uucgcugucgguaaucuug

SEQ ID NO: 558819 - RNA, 19 nt, Artificial Sequence
  Description of Artificial Sequence: Synthetic oligonucleotide
uuugguugucuauacagac

SEQ ID NO: 558820 - RNA, 19 nt, Artificial Sequence
  Description of Artificial Sequence: Synthetic oligonucleotide
uaauagucgagguucugcc

SEQ ID NO: 558821 - RNA, 19 nt, Artificial Sequence
  Description of Artificial Sequence: Synthetic oligonucleotide
ucuaggguagaauggaaac

SEQ ID NO: 558822 - RNA, 19 nt, Artificial Sequence
  Description of Artificial Sequence: Synthetic oligonucleotide
aaggcuuuucucgacuugg

SEQ ID NO: 558823 - RNA, 19 nt, Artificial Sequence
  Description of Artificial Sequence: Synthetic oligonucleotide
agaggucugaccucgguag

SEQ ID NO: 558824 - RNA, 19 nt, Artificial Sequence
  Description of Artificial Sequence: Synthetic oligonucleotide
uuauaguaggcaaauugua

SEQ ID NO: 558825 - RNA, 19 nt, Artificial Sequence
  Description of Artificial Sequence: Synthetic oligonucleotide
agugcggcacaccaggugg

SEQ ID NO: 558826 - RNA, 19 nt, Artificial Sequence
  Description of Artificial Sequence: Synthetic oligonucleotide
aguaccggaagagaauccc

SEQ ID NO: 558827 - RNA, 19 nt, Artificial Sequence
  Description of Artificial Sequence: Synthetic oligonucleotide
uccuucauaagguugccga

SEQ ID NO: 558828 - RNA, 19 nt, Artificial Sequence
  Description of Artificial Sequence: Synthetic oligonucleotide
ugugugaccucacugcugu

SEQ ID NO: 558829 - RNA, 19 nt, Artificial Sequence
  Description of Artificial Sequence: Synthetic oligonucleotide
auaaugugaagggaggaag

SEQ ID NO: 558830 - RNA, 19 nt, Artificial Sequence
  Description of Artificial Sequence: Synthetic oligonucleotide
agaauggaaacauguccuc

SEQ ID NO: 558831 - RNA, 19 nt, Artificial Sequence
  Description of Artificial Sequence: Synthetic oligonucleotide
aagaauggcuguauaguag

SEQ ID NO: 558832 - RNA, 19 nt, Artificial Sequence
  Description of Artificial Sequence: Synthetic oligonucleotide
cauuguaguacaugugggc

SEQ ID NO: 558833 - RNA, 19 nt, Artificial Sequence
  Description of Artificial Sequence: Synthetic oligonucleotide
acucuaagaacaguagcac

SEQ ID NO: 558834 - RNA, 19 nt, Artificial Sequence
  Description of Artificial Sequence: Synthetic oligonucleotide
uccuuuggcagguuagcgg

SEQ ID NO: 558835 - RNA, 19 nt, Artificial Sequence
  Description of Artificial Sequence: Synthetic oligonucleotide
caguuauccacauggacug

SEQ ID NO: 558836 - RNA, 19 nt, Artificial Sequence
  Description of Artificial Sequence: Synthetic oligonucleotide
agucuuggcgucuaguuca

SEQ ID NO: 558837 - RNA, 19 nt, Artificial Sequence
  Description of Artificial Sequence: Synthetic oligonucleotide
uuuccuccaucaaaguccc

SEQ ID NO: 558838 - RNA, 19 nt, Artificial Sequence
  Description of Artificial Sequence: Synthetic oligonucleotide
uagagucgaacuccuagcc

SEQ ID NO: 558839 - RNA, 19 nt, Artificial Sequence
  Description of Artificial Sequence: Synthetic oligonucleotide
acguaauggucugugaugg

SEQ ID NO: 558840 - RNA, 19 nt, Artificial Sequence
  Description of Artificial Sequence: Synthetic oligonucleotide
uccuagccgaaacucaugc

SEQ ID NO: 558841 - RNA, 19 nt, Artificial Sequence
  Description of Artificial Sequence: Synthetic oligonucleotide
ucccgugucagucugcuca

SEQ ID NO: 558842 - RNA, 19 nt, Artificial Sequence
  Description of Artificial Sequence: Synthetic oligonucleotide
uccggauccacaaaaggaa

SEQ ID NO: 558843 - RNA, 19 nt, Artificial Sequence
  Description of Artificial Sequence: Synthetic oligonucleotide
acggcauuccucaucagcc

SEQ ID NO: 558844 - RNA, 19 nt, Artificial Sequence
  Description of Artificial Sequence: Synthetic oligonucleotide
acuuaaauaucaugcugcu

SEQ ID NO: 558845 - RNA, 19 nt, Artificial Sequence
  Description of Artificial Sequence: Synthetic oligonucleotide
gacguaauggucugugaug

SEQ ID NO: 558846 - RNA, 19 nt, Artificial Sequence
  Description of Artificial Sequence: Synthetic oligonucleotide
guaaucuugggcauucucc

SEQ ID NO: 558847 - RNA, 19 nt, Artificial Sequence
  Description of Artificial Sequence: Synthetic oligonucleotide
acagccuucacuccgugug

SEQ ID NO: 558848 - RNA, 19 nt, Artificial Sequence
  Description of Artificial Sequence: Synthetic oligonucleotide
cucuaagaacaguagcacc

SEQ ID NO: 558849 - RNA, 19 nt, Artificial Sequence
  Description of Artificial Sequence: Synthetic oligonucleotide
uagucuagguaguuguagc

SEQ ID NO: 558850 - RNA, 19 nt, Artificial Sequence
  Description of Artificial Sequence: Synthetic oligonucleotide
ucggcauucaggaugcagu

SEQ ID NO: 558851 - RNA, 19 nt, Artificial Sequence
  Description of Artificial Sequence: Synthetic oligonucleotide
acaccaucuaucaccaccc

SEQ ID NO: 558852 - RNA, 19 nt, Artificial Sequence
  Description of Artificial Sequence: Synthetic oligonucleotide
gagaucacaccaucuauca

SEQ ID NO: 558853 - RNA, 19 nt, Artificial Sequence
  Description of Artificial Sequence: Synthetic oligonucleotide
auugcagugcggcacacca

SEQ ID NO: 558854 - RNA, 19 nt, Artificial Sequence
  Description of Artificial Sequence: Synthetic oligonucleotide
aaaguccccauugagguaa

SEQ ID NO: 558855 - RNA, 19 nt, Artificial Sequence
  Description of Artificial Sequence: Synthetic oligonucleotide
agagucgaacuccuagccg

SEQ ID NO: 558856 - RNA, 19 nt, Artificial Sequence
  Description of Artificial Sequence: Synthetic oligonucleotide
cugcguauaguuuccaaug

SEQ ID NO: 558857 - RNA, 19 nt, Artificial Sequence
  Description of Artificial Sequence: Synthetic oligonucleotide
ggauugcccacaaagaagg

SEQ ID NO: 558858 - RNA, 19 nt, Artificial Sequence
  Description of Artificial Sequence: Synthetic oligonucleotide
aaaggcuuuucucgacuug

SEQ ID NO: 558859 - RNA, 19 nt, Artificial Sequence
  Description of Artificial Sequence: Synthetic oligonucleotide
ugcguauaguuuccaaugu

SEQ ID NO: 558860 - RNA, 19 nt, Artificial Sequence
  Description of Artificial Sequence: Synthetic oligonucleotide
ucuuggcgcauucaauagc

SEQ ID NO: 558861 - RNA, 19 nt, Artificial Sequence
  Description of Artificial Sequence: Synthetic oligonucleotide
aguacucuugcaaggcugc

SEQ ID NO: 558862 - RNA, 19 nt, Artificial Sequence
  Description of Artificial Sequence: Synthetic oligonucleotide
uaguucagugaaguaaaag

SEQ ID NO: 558863 - RNA, 19 nt, Artificial Sequence
  Description of Artificial Sequence: Synthetic oligonucleotide
uuuaccccagacaugguuu

SEQ ID NO: 558864 - RNA, 19 nt, Artificial Sequence
  Description of Artificial Sequence: Synthetic oligonucleotide
augguuugguaauagucga

SEQ ID NO: 558865 - RNA, 19 nt, Artificial Sequence
  Description of Artificial Sequence: Synthetic oligonucleotide
guagagucgaacuccuagc

SEQ ID NO: 558866 - RNA, 19 nt, Artificial Sequence
  Description of Artificial Sequence: Synthetic oligonucleotide
agagaucacaccaucuauc

SEQ ID NO: 558867 - RNA, 19 nt, Artificial Sequence
  Description of Artificial Sequence: Synthetic oligonucleotide
ucuuccggaguccaugagu

SEQ ID NO: 558868 - RNA, 19 nt, Artificial Sequence
  Description of Artificial Sequence: Synthetic oligonucleotide
uugagagcuuugaggacag

SEQ ID NO: 558869 - RNA, 19 nt, Artificial Sequence
  Description of Artificial Sequence: Synthetic oligonucleotide
ugccuauacaggccgcagg

SEQ ID NO: 558870 - RNA, 19 nt, Artificial Sequence
  Description of Artificial Sequence: Synthetic oligonucleotide
uccggaguccaugaguccg

SEQ ID NO: 558871 - RNA, 19 nt, Artificial Sequence
  Description of Artificial Sequence: Synthetic oligonucleotide
uauaaugugaagggaggaa

SEQ ID NO: 558872 - RNA, 19 nt, Artificial Sequence
  Description of Artificial Sequence: Synthetic oligonucleotide
auaucaugcugcugucagg

SEQ ID NO: 558873 - RNA, 19 nt, Artificial Sequence
  Description of Artificial Sequence: Synthetic oligonucleotide
agggcgauggcacagcgcu

SEQ ID NO: 558874 - RNA, 19 nt, Artificial Sequence
  Description of Artificial Sequence: Synthetic oligonucleotide
cuugggaaucaccucuucc

SEQ ID NO: 558875 - RNA, 19 nt, Artificial Sequence
  Description of Artificial Sequence: Synthetic oligonucleotide
guaauggucugugauggcc

SEQ ID NO: 558876 - RNA, 19 nt, Artificial Sequence
  Description of Artificial Sequence: Synthetic oligonucleotide
aaaguaccccucacucugc

SEQ ID NO: 558877 - RNA, 19 nt, Artificial Sequence
  Description of Artificial Sequence: Synthetic oligonucleotide
uuguaguacaugugggcac

SEQ ID NO: 558878 - RNA, 19 nt, Artificial Sequence
  Description of Artificial Sequence: Synthetic oligonucleotide
ugguuugguaauagucgag

SEQ ID NO: 558879 - RNA, 19 nt, Artificial Sequence
  Description of Artificial Sequence: Synthetic oligonucleotide
ucauagugagacugaugcc

SEQ ID NO: 558880 - RNA, 19 nt, Artificial Sequence
  Description of Artificial Sequence: Synthetic oligonucleotide
acugugucgaggauccagc

SEQ ID NO: 558881 - RNA, 19 nt, Artificial Sequence
  Description of Artificial Sequence: Synthetic oligonucleotide
cuauacaggccgcagggug

SEQ ID NO: 558882 - RNA, 19 nt, Artificial Sequence
  Description of Artificial Sequence: Synthetic oligonucleotide
ucuagguaguuguagccau

SEQ ID NO: 558883 - RNA, 19 nt, Artificial Sequence
  Description of Artificial Sequence: Synthetic oligonucleotide
gauuaacugcuaccaaaca

SEQ ID NO: 558884 - RNA, 19 nt, Artificial Sequence
  Description of Artificial Sequence: Synthetic oligonucleotide
gguuugguaauagucgagg

SEQ ID NO: 558885 - RNA, 19 nt, Artificial Sequence
  Description of Artificial Sequence: Synthetic oligonucleotide
guagucuagguaguuguag

SEQ ID NO: 558886 - RNA, 19 nt, Artificial Sequence
  Description of Artificial Sequence: Synthetic oligonucleotide
aggacuccaugacacgccg

SEQ ID NO: 558887 - RNA, 19 nt, Artificial Sequence
  Description of Artificial Sequence: Synthetic oligonucleotide
caagcuugagagcuuugag

SEQ ID NO: 558888 - RNA, 19 nt, Artificial Sequence
  Description of Artificial Sequence: Synthetic oligonucleotide
uccgaguagagucgaacuc

SEQ ID NO: 558889 - RNA, 19 nt, Artificial Sequence
  Description of Artificial Sequence: Synthetic oligonucleotide
ucaguaccggaagagaauc

SEQ ID NO: 558890 - RNA, 19 nt, Artificial Sequence
  Description of Artificial Sequence: Synthetic oligonucleotide
guuagcggacaaaaguacc

SEQ ID NO: 558891 - RNA, 19 nt, Artificial Sequence
  Description of Artificial Sequence: Synthetic oligonucleotide
uggcgcauucaauagccug

SEQ ID NO: 558892 - RNA, 19 nt, Artificial Sequence
  Description of Artificial Sequence: Synthetic oligonucleotide
auaggagaaguagagcggu

SEQ ID NO: 558893 - RNA, 19 nt, Artificial Sequence
  Description of Artificial Sequence: Synthetic oligonucleotide
cagcgugaaccacagggcg

SEQ ID NO: 558894 - RNA, 19 nt, Artificial Sequence
  Description of Artificial Sequence: Synthetic oligonucleotide
aaaugucguaagcgaagaa

SEQ ID NO: 558895 - RNA, 19 nt, Artificial Sequence
  Description of Artificial Sequence: Synthetic oligonucleotide
aggauugcccacaaagaag

SEQ ID NO: 558896 - RNA, 19 nt, Artificial Sequence
  Description of Artificial Sequence: Synthetic oligonucleotide
gucuuggcgcauucaauag

SEQ ID NO: 558897 - RNA, 19 nt, Artificial Sequence
  Description of Artificial Sequence: Synthetic oligonucleotide
gagcgguguguccaggcgg

SEQ ID NO: 558898 - RNA, 19 nt, Artificial Sequence
  Description of Artificial Sequence: Synthetic oligonucleotide
ggaaucaccucuuccggag

SEQ ID NO: 558899 - RNA, 19 nt, Artificial Sequence
  Description of Artificial Sequence: Synthetic oligonucleotide
gucguaagcgaagaagagc

SEQ ID NO: 558900 - RNA, 19 nt, Artificial Sequence
  Description of Artificial Sequence: Synthetic oligonucleotide
cacggcauuccucaucagc

SEQ ID NO: 558901 - RNA, 19 nt, Artificial Sequence
  Description of Artificial Sequence: Synthetic oligonucleotide
ugcucacauccaaugacuc

SEQ ID NO: 558902 - RNA, 19 nt, Artificial Sequence
  Description of Artificial Sequence: Synthetic oligonucleotide
uccgccugcacccugucuc

SEQ ID NO: 558903 - RNA, 19 nt, Artificial Sequence
  Description of Artificial Sequence: Synthetic oligonucleotide
agaaucccacagcccuucc

SEQ ID NO: 558904 - RNA, 19 nt, Artificial Sequence
  Description of Artificial Sequence: Synthetic oligonucleotide
cucgacuugggugggaagc

SEQ ID NO: 558905 - RNA, 19 nt, Artificial Sequence
  Description of Artificial Sequence: Synthetic oligonucleotide
gcuuugaggacagugacac

SEQ ID NO: 558906 - RNA, 19 nt, Artificial Sequence
  Description of Artificial Sequence: Synthetic oligonucleotide
gagccguucaagacuuugg

SEQ ID NO: 558907 - RNA, 19 nt, Artificial Sequence
  Description of Artificial Sequence: Synthetic oligonucleotide
gucuaguucagugaaguaa

SEQ ID NO: 558908 - RNA, 19 nt, Artificial Sequence
  Description of Artificial Sequence: Synthetic oligonucleotide
cccauugagguaaaggaug

SEQ ID NO: 558909 - RNA, 19 nt, Artificial Sequence
  Description of Artificial Sequence: Synthetic oligonucleotide
cacgaggguuucaaucucc

SEQ ID NO: 558910 - RNA, 19 nt, Artificial Sequence
  Description of Artificial Sequence: Synthetic oligonucleotide
auccuuuggcagguuagcg

SEQ ID NO: 558911 - RNA, 19 nt, Artificial Sequence
  Description of Artificial Sequence: Synthetic oligonucleotide
gccuauacaggccgcaggg

SEQ ID NO: 558912 - RNA, 19 nt, Artificial Sequence
  Description of Artificial Sequence: Synthetic oligonucleotide
cauagggcccuucgcagag

SEQ ID NO: 558913 - RNA, 19 nt, Artificial Sequence
  Description of Artificial Sequence: Synthetic oligonucleotide
uagcggacaaaaguacccc

SEQ ID NO: 558914 - RNA, 19 nt, Artificial Sequence
  Description of Artificial Sequence: Synthetic oligonucleotide
aggugugcgcugcugccac

SEQ ID NO: 558915 - RNA, 19 nt, Artificial Sequence
  Description of Artificial Sequence: Synthetic oligonucleotide
agacaugguuugguaauag

SEQ ID NO: 558916 - RNA, 19 nt, Artificial Sequence
  Description of Artificial Sequence: Synthetic oligonucleotide
uauggggcuuggcuucgag

SEQ ID NO: 558917 - RNA, 19 nt, Artificial Sequence
  Description of Artificial Sequence: Synthetic oligonucleotide
aaguaccccucacucugca

SEQ ID NO: 558918 - RNA, 19 nt, Artificial Sequence
  Description of Artificial Sequence: Synthetic oligonucleotide
gauccagcgugaaccacag

SEQ ID NO: 558919 - RNA, 19 nt, Artificial Sequence
  Description of Artificial Sequence: Synthetic oligonucleotide
ucccuggguccaaugaaac

SEQ ID NO: 558920 - RNA, 19 nt, Artificial Sequence
  Description of Artificial Sequence: Synthetic oligonucleotide
aggcaaauuguagauaauu

SEQ ID NO: 558921 - RNA, 19 nt, Artificial Sequence
  Description of Artificial Sequence: Synthetic oligonucleotide
caagaauggcuguauagua

SEQ ID NO: 558922 - RNA, 19 nt, Artificial Sequence
  Description of Artificial Sequence: Synthetic oligonucleotide
uguucaggauugcccacaa

SEQ ID NO: 558923 - RNA, 19 nt, Artificial Sequence
  Description of Artificial Sequence: Synthetic oligonucleotide
caauguuauaguaggcaaa

SEQ ID NO: 558924 - RNA, 19 nt, Artificial Sequence
  Description of Artificial Sequence: Synthetic oligonucleotide
ucaugcauauggggcuugg

SEQ ID NO: 558925 - RNA, 19 nt, Artificial Sequence
  Description of Artificial Sequence: Synthetic oligonucleotide
auccugagccuuuagccaa

SEQ ID NO: 558926 - RNA, 19 nt, Artificial Sequence
  Description of Artificial Sequence: Synthetic oligonucleotide
acgagucauuuauucuuug

SEQ ID NO: 558927 - RNA, 19 nt, Artificial Sequence
  Description of Artificial Sequence: Synthetic oligonucleotide
uagccgaaacucaugcaua

SEQ ID NO: 558928 - RNA, 19 nt, Artificial Sequence
  Description of Artificial Sequence: Synthetic oligonucleotide
guacaugugggcacucugc

SEQ ID NO: 558929 - RNA, 19 nt, Artificial Sequence
  Description of Artificial Sequence: Synthetic oligonucleotide
uuuggcagguuagcggaca

SEQ ID NO: 558930 - RNA, 19 nt, Artificial Sequence
  Description of Artificial Sequence: Synthetic oligonucleotide
uaccccucacucugcagcc

SEQ ID NO: 558931 - RNA, 19 nt, Artificial Sequence
  Description of Artificial Sequence: Synthetic oligonucleotide
ucgguagccaucuccugaa

SEQ ID NO: 558932 - RNA, 19 nt, Artificial Sequence
  Description of Artificial Sequence: Synthetic oligonucleotide
aauagccugcguauaguuu

SEQ ID NO: 558933 - RNA, 19 nt, Artificial Sequence
  Description of Artificial Sequence: Synthetic oligonucleotide
agcggacaaaaguaccccu

SEQ ID NO: 558934 - RNA, 19 nt, Artificial Sequence
  Description of Artificial Sequence: Synthetic oligonucleotide
cuucacuccguguggguuc

SEQ ID NO: 558935 - RNA, 19 nt, Artificial Sequence
  Description of Artificial Sequence: Synthetic oligonucleotide
cuucgagauccuugaaguc

SEQ ID NO: 558936 - RNA, 19 nt, Artificial Sequence
  Description of Artificial Sequence: Synthetic oligonucleotide
caguaccggaagagaaucc

SEQ ID NO: 558937 - RNA, 19 nt, Artificial Sequence
  Description of Artificial Sequence: Synthetic oligonucleotide
agccgaaacucaugcauau

SEQ ID NO: 558938 - RNA, 19 nt, Artificial Sequence
  Description of Artificial Sequence: Synthetic oligonucleotide
ugggagccguucaagacuu

SEQ ID NO: 558939 - RNA, 19 nt, Artificial Sequence
  Description of Artificial Sequence: Synthetic oligonucleotide
uggacguaauggucuguga

SEQ ID NO: 558940 - RNA, 19 nt, Artificial Sequence
  Description of Artificial Sequence: Synthetic oligonucleotide
ucgacuugggugggaagcc

SEQ ID NO: 558941 - RNA, 19 nt, Artificial Sequence
  Description of Artificial Sequence: Synthetic oligonucleotide
guggcuacuguccuuccuc

SEQ ID NO: 558942 - RNA, 19 nt, Artificial Sequence
  Description of Artificial Sequence: Synthetic oligonucleotide
cacccugucucgcucacug

SEQ ID NO: 558943 - RNA, 19 nt, Artificial Sequence
  Description of Artificial Sequence: Synthetic oligonucleotide
auaagguugccgaucuccu

SEQ ID NO: 558944 - RNA, 19 nt, Artificial Sequence
  Description of Artificial Sequence: Synthetic oligonucleotide
ugucgaggauccagcguga

SEQ ID NO: 558945 - RNA, 19 nt, Artificial Sequence
  Description of Artificial Sequence: Synthetic oligonucleotide
caugaguccggauccacaa

SEQ ID NO: 558946 - RNA, 19 nt, Artificial Sequence
  Description of Artificial Sequence: Synthetic oligonucleotide
guccggauccacaaaagga

SEQ ID NO: 558947 - RNA, 19 nt, Artificial Sequence
  Description of Artificial Sequence: Synthetic oligonucleotide
agguuagcggacaaaagua

SEQ ID NO: 558948 - RNA, 19 nt, Artificial Sequence
  Description of Artificial Sequence: Synthetic oligonucleotide
cauucaauagccugcguau

SEQ ID NO: 558949 - RNA, 19 nt, Artificial Sequence
  Description of Artificial Sequence: Synthetic oligonucleotide
ugucgguaaucuugggcau

SEQ ID NO: 558950 - RNA, 19 nt, Artificial Sequence
  Description of Artificial Sequence: Synthetic oligonucleotide
cuaggguagaauggaaaca

SEQ ID NO: 558951 - RNA, 19 nt, Artificial Sequence
  Description of Artificial Sequence: Synthetic oligonucleotide
ucgaggauccagcgugaac

SEQ ID NO: 558952 - RNA, 19 nt, Artificial Sequence
  Description of Artificial Sequence: Synthetic oligonucleotide
cagguuagcggacaaaagu

SEQ ID NO: 558953 - RNA, 19 nt, Artificial Sequence
  Description of Artificial Sequence: Synthetic oligonucleotide
ucucgacuugggugggaag

SEQ ID NO: 558954 - RNA, 19 nt, Artificial Sequence
  Description of Artificial Sequence: Synthetic oligonucleotide
cucuaggguagaauggaaa

SEQ ID NO: 558955 - RNA, 19 nt, Artificial Sequence
  Description of Artificial Sequence: Synthetic oligonucleotide
cagucuuggcgucuaguuc

SEQ ID NO: 558956 - RNA, 19 nt, Artificial Sequence
  Description of Artificial Sequence: Synthetic oligonucleotide
uggcuacuguccuuccucu

SEQ ID NO: 558957 - RNA, 19 nt, Artificial Sequence
  Description of Artificial Sequence: Synthetic oligonucleotide
ucgguaaucuugggcauuc

SEQ ID NO: 558958 - RNA, 19 nt, Artificial Sequence
  Description of Artificial Sequence: Synthetic oligonucleotide
ucaccacccgcugggagcc

SEQ ID NO: 558959 - RNA, 19 nt, Artificial Sequence
  Description of Artificial Sequence: Synthetic oligonucleotide
accuggacguaauggucug

SEQ ID NO: 558960 - RNA, 19 nt, Artificial Sequence
  Description of Artificial Sequence: Synthetic oligonucleotide
acuccguguggguucucag

SEQ ID NO: 558961 - RNA, 19 nt, Artificial Sequence
  Description of Artificial Sequence: Synthetic oligonucleotide
cuagguaguuguagccauc

SEQ ID NO: 558962 - RNA, 19 nt, Artificial Sequence
  Description of Artificial Sequence: Synthetic oligonucleotide
gaugcacacgagggucucg

SEQ ID NO: 558963 - RNA, 19 nt, Artificial Sequence
  Description of Artificial Sequence: Synthetic oligonucleotide
cuggacguaauggucugug

SEQ ID NO: 558964 - RNA, 19 nt, Artificial Sequence
  Description of Artificial Sequence: Synthetic oligonucleotide
gguuagcggacaaaaguac

SEQ ID NO: 558965 - RNA, 19 nt, Artificial Sequence
  Description of Artificial Sequence: Synthetic oligonucleotide
acugcgguuucucguucug

SEQ ID NO: 558966 - RNA, 19 nt, Artificial Sequence
  Description of Artificial Sequence: Synthetic oligonucleotide
agaugcggacugcgguuuc

SEQ ID NO: 558967 - RNA, 19 nt, Artificial Sequence
  Description of Artificial Sequence: Synthetic oligonucleotide
ucugaccucgguagccauc

SEQ ID NO: 558968 - RNA, 19 nt, Artificial Sequence
  Description of Artificial Sequence: Synthetic oligonucleotide
cagccuucacuccgugugg

SEQ ID NO: 558969 - RNA, 19 nt, Artificial Sequence
  Description of Artificial Sequence: Synthetic oligonucleotide
cauauggggcuuggcuucg

SEQ ID NO: 558970 - RNA, 19 nt, Artificial Sequence
  Description of Artificial Sequence: Synthetic oligonucleotide
uauugcagugcggcacacc

SEQ ID NO: 558971 - RNA, 19 nt, Artificial Sequence
  Description of Artificial Sequence: Synthetic oligonucleotide
ggcgcauucaauagccugc

SEQ ID NO: 558972 - RNA, 19 nt, Artificial Sequence
  Description of Artificial Sequence: Synthetic oligonucleotide
cuagccgaaacucaugcau

SEQ ID NO: 558973 - RNA, 19 nt, Artificial Sequence
  Description of Artificial Sequence: Synthetic oligonucleotide
gaauggaaacauguccucu

SEQ ID NO: 558974 - RNA, 19 nt, Artificial Sequence
  Description of Artificial Sequence: Synthetic oligonucleotide
accuucccgugucagucug

SEQ ID NO: 558975 - RNA, 19 nt, Artificial Sequence
  Description of Artificial Sequence: Synthetic oligonucleotide
uuggcagguuagcggacaa

SEQ ID NO: 558976 - RNA, 19 nt, Artificial Sequence
  Description of Artificial Sequence: Synthetic oligonucleotide
cucggcauucaggaugcag

SEQ ID NO: 558977 - RNA, 19 nt, Artificial Sequence
  Description of Artificial Sequence: Synthetic oligonucleotide
gucuauacagacacuuaaa

SEQ ID NO: 558978 - RNA, 19 nt, Artificial Sequence
  Description of Artificial Sequence: Synthetic oligonucleotide
ugacacgccgaaccuucuc

SEQ ID NO: 558979 - RNA, 19 nt, Artificial Sequence
  Description of Artificial Sequence: Synthetic oligonucleotide
ggucuuggcgcauucaaua

SEQ ID NO: 558980 - RNA, 19 nt, Artificial Sequence
  Description of Artificial Sequence: Synthetic oligonucleotide
caccaucuaucaccacccg

SEQ ID NO: 558981 - RNA, 19 nt, Artificial Sequence
  Description of Artificial Sequence: Synthetic oligonucleotide
cuucuauugcagugcggca

SEQ ID NO: 558982 - RNA, 19 nt, Artificial Sequence
  Description of Artificial Sequence: Synthetic oligonucleotide
cuccuagccgaaacucaug

SEQ ID NO: 558983 - RNA, 19 nt, Artificial Sequence
  Description of Artificial Sequence: Synthetic oligonucleotide
guauaguuuccaauguuau

SEQ ID NO: 558984 - RNA, 19 nt, Artificial Sequence
  Description of Artificial Sequence: Synthetic oligonucleotide
caaaaguaccccucacucu

SEQ ID NO: 558985 - RNA, 19 nt, Artificial Sequence
  Description of Artificial Sequence: Synthetic oligonucleotide
gcauucaauagccugcgua

SEQ ID NO: 558986 - RNA, 19 nt, Artificial Sequence
  Description of Artificial Sequence: Synthetic oligonucleotide
ccgaguagagucgaacucc

SEQ ID NO: 558987 - RNA, 19 nt, Artificial Sequence
  Description of Artificial Sequence: Synthetic oligonucleotide
gcuacuguccuuccucuca

SEQ ID NO: 558988 - RNA, 19 nt, Artificial Sequence
  Description of Artificial Sequence: Synthetic oligonucleotide
guaagcgaagaagagcagu

SEQ ID NO: 558989 - RNA, 19 nt, Artificial Sequence
  Description of Artificial Sequence: Synthetic oligonucleotide
gcccagauuaacugcuacc

SEQ ID NO: 558990 - RNA, 19 nt, Artificial Sequence
  Description of Artificial Sequence: Synthetic oligonucleotide
guauguggagaggucugac

SEQ ID NO: 558991 - RNA, 19 nt, Artificial Sequence
  Description of Artificial Sequence: Synthetic oligonucleotide
gcggaaguaggacuccaug

SEQ ID NO: 558992 - RNA, 19 nt, Artificial Sequence
  Description of Artificial Sequence: Synthetic oligonucleotide
cauuugggguauguggaga

SEQ ID NO: 558993 - RNA, 19 nt, Artificial Sequence
  Description of Artificial Sequence: Synthetic oligonucleotide
uucacuccguguggguucu

SEQ ID NO: 558994 - RNA, 19 nt, Artificial Sequence
  Description of Artificial Sequence: Synthetic oligonucleotide
ccuuuggcagguuagcgga

SEQ ID NO: 558995 - RNA, 19 nt, Artificial Sequence
  Description of Artificial Sequence: Synthetic oligonucleotide
uggguccaaugaaacccau

SEQ ID NO: 558996 - RNA, 19 nt, Artificial Sequence
  Description of Artificial Sequence: Synthetic oligonucleotide
augaguccggauccacaaa

SEQ ID NO: 558997 - RNA, 19 nt, Artificial Sequence
  Description of Artificial Sequence: Synthetic oligonucleotide
agcugccuauacaggccgc

SEQ ID NO: 558998 - RNA, 19 nt, Artificial Sequence
  Description of Artificial Sequence: Synthetic oligonucleotide
guagagcgguguguccagg

SEQ ID NO: 558999 - RNA, 19 nt, Artificial Sequence
  Description of Artificial Sequence: Synthetic oligonucleotide
augugugaccucacugcug

SEQ ID NO: 559000 - RNA, 19 nt, Artificial Sequence
  Description of Artificial Sequence: Synthetic oligonucleotide
guaccggaagagaauccca

SEQ ID NO: 559001 - RNA, 19 nt, Artificial Sequence
  Description of Artificial Sequence: Synthetic oligonucleotide
caugugugaccucacugcu

SEQ ID NO: 559002 - RNA, 19 nt, Artificial Sequence
  Description of Artificial Sequence: Synthetic oligonucleotide
caaggggccaccuucccgu

SEQ ID NO: 559003 - RNA, 19 nt, Artificial Sequence
  Description of Artificial Sequence: Synthetic oligonucleotide
ggagccguucaagacuuug

SEQ ID NO: 559004 - RNA, 19 nt, Artificial Sequence
  Description of Artificial Sequence: Synthetic oligonucleotide
cgcagggugguucugggcc

SEQ ID NO: 559005 - RNA, 19 nt, Artificial Sequence
  Description of Artificial Sequence: Synthetic oligonucleotide
cuccgaguagagucgaacu

SEQ ID NO: 559006 - RNA, 19 nt, Artificial Sequence
  Description of Artificial Sequence: Synthetic oligonucleotide
agguaguuguagccaucau

SEQ ID NO: 559007 - RNA, 19 nt, Artificial Sequence
  Description of Artificial Sequence: Synthetic oligonucleotide
acgaggguuucaaucuccu

SEQ ID NO: 559008 - RNA, 19 nt, Artificial Sequence
  Description of Artificial Sequence: Synthetic oligonucleotide
cugccuauacaggccgcag

SEQ ID NO: 559009 - RNA, 19 nt, Artificial Sequence
  Description of Artificial Sequence: Synthetic oligonucleotide
gugugcgcugcugccacag

SEQ ID NO: 559010 - RNA, 19 nt, Artificial Sequence
  Description of Artificial Sequence: Synthetic oligonucleotide
agcgugaaccacagggcga

SEQ ID NO: 559011 - RNA, 19 nt, Artificial Sequence
  Description of Artificial Sequence: Synthetic oligonucleotide
guacucuugcaaggcugcc

SEQ ID NO: 559012 - RNA, 19 nt, Artificial Sequence
  Description of Artificial Sequence: Synthetic oligonucleotide
auagggcccuucgcagagg

SEQ ID NO: 559013 - RNA, 19 nt, Artificial Sequence
  Description of Artificial Sequence: Synthetic oligonucleotide
auacaggccgcaggguggu

SEQ ID NO: 559014 - RNA, 19 nt, Artificial Sequence
  Description of Artificial Sequence: Synthetic oligonucleotide
ccaucuaucaccacccgcu

SEQ ID NO: 559015 - RNA, 19 nt, Artificial Sequence
  Description of Artificial Sequence: Synthetic oligonucleotide
gggaaucaccucuuccgga

SEQ ID NO: 559016 - RNA, 19 nt, Artificial Sequence
  Description of Artificial Sequence: Synthetic oligonucleotide
ggauccagcgugaaccaca

SEQ ID NO: 559017 - RNA, 19 nt, Artificial Sequence
  Description of Artificial Sequence: Synthetic oligonucleotide
gguaaaggauggcacuaua

SEQ ID NO: 559018 - RNA, 19 nt, Artificial Sequence
  Description of Artificial Sequence: Synthetic oligonucleotide
ucgcagagggcacggcauu

SEQ ID NO: 559019 - RNA, 19 nt, Artificial Sequence
  Description of Artificial Sequence: Synthetic oligonucleotide
gucuuggcgucuaguucag

SEQ ID NO: 559020 - RNA, 19 nt, Artificial Sequence
  Description of Artificial Sequence: Synthetic oligonucleotide
uggcuucgagauccuugaa

SEQ ID NO: 559021 - RNA, 19 nt, Artificial Sequence
  Description of Artificial Sequence: Synthetic oligonucleotide
cucuuggaacaaaccacua

SEQ ID NO: 559022 - RNA, 19 nt, Artificial Sequence
  Description of Artificial Sequence: Synthetic oligonucleotide
cucaguaccggaagagaau

SEQ ID NO: 559023 - RNA, 19 nt, Artificial Sequence
  Description of Artificial Sequence: Synthetic oligonucleotide
cuuuaccccagacaugguu

SEQ ID NO: 559024 - RNA, 19 nt, Artificial Sequence
  Description of Artificial Sequence: Synthetic oligonucleotide
caagacuuuggaguucaua

SEQ ID NO: 559025 - RNA, 19 nt, Artificial Sequence
  Description of Artificial Sequence: Synthetic oligonucleotide
cagagaucacaccaucuau

SEQ ID NO: 559026 - RNA, 19 nt, Artificial Sequence
  Description of Artificial Sequence: Synthetic oligonucleotide
ugccgaucuccugggagau

SEQ ID NO: 559027 - RNA, 19 nt, Artificial Sequence
  Description of Artificial Sequence: Synthetic oligonucleotide
agcgguguguccaggcgga

SEQ ID NO: 559028 - RNA, 19 nt, Artificial Sequence
  Description of Artificial Sequence: Synthetic oligonucleotide
cucaugcauauggggcuug

SEQ ID NO: 559029 - RNA, 19 nt, Artificial Sequence
  Description of Artificial Sequence: Synthetic oligonucleotide
agccuuuagccaagcccag

SEQ ID NO: 559030 - RNA, 19 nt, Artificial Sequence
  Description of Artificial Sequence: Synthetic oligonucleotide
acucaugcauauggggcuu

SEQ ID NO: 559031 - RNA, 19 nt, Artificial Sequence
  Description of Artificial Sequence: Synthetic oligonucleotide
ggacguaauggucugugau

SEQ ID NO: 559032 - RNA, 19 nt, Artificial Sequence
  Description of Artificial Sequence: Synthetic oligonucleotide
acgggccacuacacacugc

SEQ ID NO: 559033 - RNA, 19 nt, Artificial Sequence
  Description of Artificial Sequence: Synthetic oligonucleotide
ugaccucacugcugucaua

SEQ ID NO: 559034 - RNA, 19 nt, Artificial Sequence
  Description of Artificial Sequence: Synthetic oligonucleotide
guaggucuuggcgcauuca

SEQ ID NO: 559035 - RNA, 19 nt, Artificial Sequence
  Description of Artificial Sequence: Synthetic oligonucleotide
cagcacuguagucuaggua

SEQ ID NO: 559036 - RNA, 19 nt, Artificial Sequence
  Description of Artificial Sequence: Synthetic oligonucleotide
acccugucucgcucacugu

SEQ ID NO: 559037 - RNA, 19 nt, Artificial Sequence
  Description of Artificial Sequence: Synthetic oligonucleotide
gccucuaggguagaaugga

SEQ ID NO: 559038 - RNA, 19 nt, Artificial Sequence
  Description of Artificial Sequence: Synthetic oligonucleotide
ccugcccaagcuugagagc

SEQ ID NO: 559039 - RNA, 19 nt, Artificial Sequence
  Description of Artificial Sequence: Synthetic oligonucleotide
gcucacugugucgaggauc

SEQ ID NO: 559040 - RNA, 19 nt, Artificial Sequence
  Description of Artificial Sequence: Synthetic oligonucleotide
cacgagucauuuauucuuu

SEQ ID NO: 559041 - RNA, 19 nt, Artificial Sequence
  Description of Artificial Sequence: Synthetic oligonucleotide
cguaagcgaagaagagcag

SEQ ID NO: 559042 - RNA, 19 nt, Artificial Sequence
  Description of Artificial Sequence: Synthetic oligonucleotide
acacgagggucucggcauu

SEQ ID NO: 559043 - RNA, 19 nt, Artificial Sequence
  Description of Artificial Sequence: Synthetic oligonucleotide
ggguccaaugaaacccaug

SEQ ID NO: 559044 - RNA, 19 nt, Artificial Sequence
  Description of Artificial Sequence: Synthetic oligonucleotide
ucuuggcgucuaguucagu

SEQ ID NO: 559045 - RNA, 19 nt, Artificial Sequence
  Description of Artificial Sequence: Synthetic oligonucleotide
uucccgugucagucugcuc

SEQ ID NO: 559046 - RNA, 19 nt, Artificial Sequence
  Description of Artificial Sequence: Synthetic oligonucleotide
ugaccucgguagccaucuc

SEQ ID NO: 559047 - RNA, 19 nt, Artificial Sequence
  Description of Artificial Sequence: Synthetic oligonucleotide
acgagggucucggcauuca

SEQ ID NO: 559048 - RNA, 19 nt, Artificial Sequence
  Description of Artificial Sequence: Synthetic oligonucleotide
gcggacaaaaguaccccuc

SEQ ID NO: 559049 - RNA, 19 nt, Artificial Sequence
  Description of Artificial Sequence: Synthetic oligonucleotide
ccuccgaguagagucgaac

SEQ ID NO: 559050 - RNA, 19 nt, Artificial Sequence
  Description of Artificial Sequence: Synthetic oligonucleotide
ucacugugucgaggaucca

SEQ ID NO: 559051 - RNA, 19 nt, Artificial Sequence
  Description of Artificial Sequence: Synthetic oligonucleotide
ggucugaccucgguagcca

SEQ ID NO: 559052 - RNA, 19 nt, Artificial Sequence
  Description of Artificial Sequence: Synthetic oligonucleotide
cacgagggucucggcauuc

SEQ ID NO: 559053 - RNA, 19 nt, Artificial Sequence
  Description of Artificial Sequence: Synthetic oligonucleotide
gaugcggacugcgguuucu

SEQ ID NO: 559054 - RNA, 19 nt, Artificial Sequence
  Description of Artificial Sequence: Synthetic oligonucleotide
ccaugaguccggauccaca

SEQ ID NO: 559055 - RNA, 19 nt, Artificial Sequence
  Description of Artificial Sequence: Synthetic oligonucleotide
auauggggcuuggcuucga

SEQ ID NO: 559056 - RNA, 19 nt, Artificial Sequence
  Description of Artificial Sequence: Synthetic oligonucleotide
ccacgagucauuuauucuu

SEQ ID NO: 559057 - RNA, 19 nt, Artificial Sequence
  Description of Artificial Sequence: Synthetic oligonucleotide
cacuccguguggguucuca

SEQ ID NO: 559058 - RNA, 19 nt, Artificial Sequence
  Description of Artificial Sequence: Synthetic oligonucleotide
ggacugcgguuucucguuc

SEQ ID NO: 559059 - RNA, 19 nt, Artificial Sequence
  Description of Artificial Sequence: Synthetic oligonucleotide
ccuagccgaaacucaugca

SEQ ID NO: 559060 - RNA, 19 nt, Artificial Sequence
  Description of Artificial Sequence: Synthetic oligonucleotide
cugcgguuucucguucuga

SEQ ID NO: 559061 - RNA, 19 nt, Artificial Sequence
  Description of Artificial Sequence: Synthetic oligonucleotide
gagaugcggacugcgguuu

SEQ ID NO: 559062 - RNA, 19 nt, Artificial Sequence
  Description of Artificial Sequence: Synthetic oligonucleotide
cccgugucagucugcucac

SEQ ID NO: 559063 - RNA, 19 nt, Artificial Sequence
  Description of Artificial Sequence: Synthetic oligonucleotide
cugcccagauuaacugcua

SEQ ID NO: 559064 - RNA, 19 nt, Artificial Sequence
  Description of Artificial Sequence: Synthetic oligonucleotide
ccugcguauaguuuccaau

SEQ ID NO: 559065 - RNA, 19 nt, Artificial Sequence
  Description of Artificial Sequence: Synthetic oligonucleotide
gugugaccucacugcuguc

SEQ ID NO: 559066 - RNA, 19 nt, Artificial Sequence
  Description of Artificial Sequence: Synthetic oligonucleotide
cugaggaccuggacguaau

SEQ ID NO: 559067 - RNA, 19 nt, Artificial Sequence
  Description of Artificial Sequence: Synthetic oligonucleotide
gcugccuauacaggccgca

SEQ ID NO: 559068 - RNA, 19 nt, Artificial Sequence
  Description of Artificial Sequence: Synthetic oligonucleotide
cuccuccgaguagagucga

SEQ ID NO: 559069 - RNA, 19 nt, Artificial Sequence
  Description of Artificial Sequence: Synthetic oligonucleotide
gcguauaguuuccaauguu

SEQ ID NO: 559070 - RNA, 19 nt, Artificial Sequence
  Description of Artificial Sequence: Synthetic oligonucleotide
accacccgcugggagccgu

SEQ ID NO: 559071 - RNA, 19 nt, Artificial Sequence
  Description of Artificial Sequence: Synthetic oligonucleotide
accccucacucugcagccu

SEQ ID NO: 559072 - RNA, 19 nt, Artificial Sequence
  Description of Artificial Sequence: Synthetic oligonucleotide
gccugcguauaguuuccaa

SEQ ID NO: 559073 - RNA, 19 nt, Artificial Sequence
  Description of Artificial Sequence: Synthetic oligonucleotide
gucgaggauccagcgugaa

SEQ ID NO: 559074 - RNA, 19 nt, Artificial Sequence
  Description of Artificial Sequence: Synthetic oligonucleotide
ggcuucgcugucgguaauc

SEQ ID NO: 559075 - RNA, 19 nt, Artificial Sequence
  Description of Artificial Sequence: Synthetic oligonucleotide
gcuaccaaacauggccucu

SEQ ID NO: 559076 - RNA, 19 nt, Artificial Sequence
  Description of Artificial Sequence: Synthetic oligonucleotide
gcccuucgcagagggcacg

SEQ ID NO: 559077 - RNA, 19 nt, Artificial Sequence
  Description of Artificial Sequence: Synthetic oligonucleotide
cccuucgcagagggcacgg

SEQ ID NO: 559078 - RNA, 19 nt, Artificial Sequence
  Description of Artificial Sequence: Synthetic oligonucleotide
gcgauggcacagcgcugcc

SEQ ID NO: 559079 - RNA, 19 nt, Artificial Sequence
  Description of Artificial Sequence: Synthetic oligonucleotide
cgagggucucggcauucag

SEQ ID NO: 559080 - RNA, 19 nt, Artificial Sequence
  Description of Artificial Sequence: Synthetic oligonucleotide
ccccauugagguaaaggau

SEQ ID NO: 559081 - RNA, 19 nt, Artificial Sequence
  Description of Artificial Sequence: Synthetic oligonucleotide
ccgcagggugguucugggc

SEQ ID NO: 559082 - RNA, 19 nt, Artificial Sequence
  Description of Artificial Sequence: Synthetic oligonucleotide
ccuucauaagguugccgau

SEQ ID NO: 559083 - RNA, 19 nt, Artificial Sequence
  Description of Artificial Sequence: Synthetic oligonucleotide
ggcccuucgcagagggcac

SEQ ID NO: 559084 - RNA, 19 nt, Artificial Sequence
  Description of Artificial Sequence: Synthetic oligonucleotide
gucgguaaucuugggcauu

SEQ ID NO: 559085 - RNA, 19 nt, Artificial Sequence
  Description of Artificial Sequence: Synthetic oligonucleotide
gcuguauaguaggccagau

SEQ ID NO: 559086 - RNA, 19 nt, Artificial Sequence
  Description of Artificial Sequence: Synthetic oligonucleotide
ccgcaucuccauguguuca

SEQ ID NO: 559087 - RNA, 19 nt, Artificial Sequence
  Description of Artificial Sequence: Synthetic oligonucleotide
cgaguagagucgaacuccu

SEQ ID NO: 559088 - RNA, 19 nt, Artificial Sequence
  Description of Artificial Sequence: Synthetic oligonucleotide
ccggauccacaaaaggaau

SEQ ID NO: 559089 - RNA, 19 nt, Artificial Sequence
  Description of Artificial Sequence: Synthetic oligonucleotide
cgcugggagccguucaaga

SEQ ID NO: 559090 - RNA, 19 nt, Artificial Sequence
  Description of Artificial Sequence: Synthetic oligonucleotide
ccuucgcagagggcacggc

SEQ ID NO: 559091 - RNA, 19 nt, Artificial Sequence
  Description of Artificial Sequence: Synthetic oligonucleotide
caccacccgcugggagccg

SEQ ID NO: 559092 - RNA, 19 nt, Artificial Sequence
  Description of Artificial Sequence: Synthetic oligonucleotide
ccgcugggagccguucaag

SEQ ID NO: 559093 - RNA, 19 nt, Artificial Sequence
  Description of Artificial Sequence: Synthetic oligonucleotide
gggcgauggcacagcgcug

SEQ ID NO: 559094 - RNA, 19 nt, Artificial Sequence
  Description of Artificial Sequence: Synthetic oligonucleotide
gcgugaaccacagggcgau

SEQ ID NO: 559095 - RNA, 19 nt, Artificial Sequence
  Description of Artificial Sequence: Synthetic oligonucleotide
gccgaucuccugggagaug

SEQ ID NO: 559096 - RNA, 19 nt, Artificial Sequence
  Description of Artificial Sequence: Synthetic oligonucleotide
ucacuccguguggguucuc

SEQ ID NO: 559097 - RNA, 19 nt, Artificial Sequence
  Description of Artificial Sequence: Synthetic oligonucleotide
ccuauacaggccgcagggu

SEQ ID NO: 559098 - RNA, 19 nt, Artificial Sequence
  Description of Artificial Sequence: Synthetic oligonucleotide
ggcggaaguaggacuccau

SEQ ID NO: 559099 - RNA, 19 nt, Artificial Sequence
  Description of Artificial Sequence: Synthetic oligonucleotide
cgacuugggugggaagcca

SEQ ID NO: 559100 - RNA, 19 nt, Artificial Sequence
  Description of Artificial Sequence: Synthetic oligonucleotide
ggucauccgccugcacccu

SEQ ID NO: 559101 - RNA, 19 nt, Artificial Sequence
  Description of Artificial Sequence: Synthetic oligonucleotide
ccuuuaccccagacauggu

SEQ ID NO: 559102 - RNA, 19 nt, Artificial Sequence
  Description of Artificial Sequence: Synthetic oligonucleotide
ggucaugcaggggcugcuu

SEQ ID NO: 559103 - RNA, 19 nt, Artificial Sequence
  Description of Artificial Sequence: Synthetic oligonucleotide
gcgguguguccaggcggaa

SEQ ID NO: 559104 - RNA, 19 nt, Artificial Sequence
  Description of Artificial Sequence: Synthetic oligonucleotide
gcacccugucucgcucacu

SEQ ID NO: 559105 - RNA, 19 nt, Artificial Sequence
  Description of Artificial Sequence: Synthetic oligonucleotide
gggagccguucaagacuuu

SEQ ID NO: 559106 - RNA, 19 nt, Artificial Sequence
  Description of Artificial Sequence: Synthetic oligonucleotide
aauacggucaaacacaaug

SEQ ID NO: 559107 - RNA, 19 nt, Artificial Sequence
  Description of Artificial Sequence: Synthetic oligonucleotide
aaaagcaacauacugacaa

SEQ ID NO: 559108 - RNA, 19 nt, Artificial Sequence
  Description of Artificial Sequence: Synthetic oligonucleotide
acauauaugagacugaggu

SEQ ID NO: 559109 - RNA, 19 nt, Artificial Sequence
  Description of Artificial Sequence: Synthetic oligonucleotide
aacuuagugauaaacagac

SEQ ID NO: 559110 - RNA, 19 nt, Artificial Sequence
  Description of Artificial Sequence: Synthetic oligonucleotide
uauuugauaagaauaagaa

SEQ ID NO: 559111 - RNA, 19 nt, Artificial Sequence
  Description of Artificial Sequence: Synthetic oligonucleotide
auaauagacaaagaaaggg

SEQ ID NO: 559112 - RNA, 19 nt, Artificial Sequence
  Description of Artificial Sequence: Synthetic oligonucleotide
uggucuuaaacuuaugagg

SEQ ID NO: 559113 - RNA, 19 nt, Artificial Sequence
  Description of Artificial Sequence: Synthetic oligonucleotide
cuugacuugaaacagggcg

SEQ ID NO: 559114 - RNA, 19 nt, Artificial Sequence
  Description of Artificial Sequence: Synthetic oligonucleotide
uacacuaacaggaugaaac

SEQ ID NO: 559115 - RNA, 19 nt, Artificial Sequence
  Description of Artificial Sequence: Synthetic oligonucleotide
gaugauuugaugucuacag

SEQ ID NO: 559116 - RNA, 19 nt, Artificial Sequence
  Description of Artificial Sequence: Synthetic oligonucleotide
ugaucuugauacuugauag

SEQ ID NO: 559117 - RNA, 19 nt, Artificial Sequence
  Description of Artificial Sequence: Synthetic oligonucleotide
aaccauaacucuuagaaaa

SEQ ID NO: 559118 - RNA, 19 nt, Artificial Sequence
  Description of Artificial Sequence: Synthetic oligonucleotide
ugauuugaugucuacagag

SEQ ID NO: 559119 - RNA, 19 nt, Artificial Sequence
  Description of Artificial Sequence: Synthetic oligonucleotide
aagaauaagaauaaggaaa

SEQ ID NO: 559120 - RNA, 19 nt, Artificial Sequence
  Description of Artificial Sequence: Synthetic oligonucleotide
ugaccuaucauccaagaca

SEQ ID NO: 559121 - RNA, 19 nt, Artificial Sequence
  Description of Artificial Sequence: Synthetic oligonucleotide
aauugugaucuucugcaac

SEQ ID NO: 559122 - RNA, 19 nt, Artificial Sequence
  Description of Artificial Sequence: Synthetic oligonucleotide
uaacauauuguuaccuucg

SEQ ID NO: 559123 - RNA, 19 nt, Artificial Sequence
  Description of Artificial Sequence: Synthetic oligonucleotide
aaaagucucuccuggcgcc

SEQ ID NO: 559124 - RNA, 19 nt, Artificial Sequence
  Description of Artificial Sequence: Synthetic oligonucleotide
uauuuuguagcuaccguag

SEQ ID NO: 559125 - RNA, 19 nt, Artificial Sequence
  Description of Artificial Sequence: Synthetic oligonucleotide
augauaugaucauuuaaac

SEQ ID NO: 559126 - RNA, 19 nt, Artificial Sequence
  Description of Artificial Sequence: Synthetic oligonucleotide
aaugcuauuugauaagaau

SEQ ID NO: 559127 - RNA, 19 nt, Artificial Sequence
  Description of Artificial Sequence: Synthetic oligonucleotide
uuugccuuagcuuacaguc

SEQ ID NO: 559128 - RNA, 19 nt, Artificial Sequence
  Description of Artificial Sequence: Synthetic oligonucleotide
uacaauacggucaaacaca

SEQ ID NO: 559129 - RNA, 19 nt, Artificial Sequence
  Description of Artificial Sequence: Synthetic oligonucleotide
auaacauauuguuaccuuc

SEQ ID NO: 559130 - RNA, 19 nt, Artificial Sequence
  Description of Artificial Sequence: Synthetic oligonucleotide
uccuaauugauuuuaggug

SEQ ID NO: 559131 - RNA, 19 nt, Artificial Sequence
  Description of Artificial Sequence: Synthetic oligonucleotide
cauauuguuaccuucgcug

SEQ ID NO: 559132 - RNA, 19 nt, Artificial Sequence
  Description of Artificial Sequence: Synthetic oligonucleotide
uguuaacuucagaugaggg

SEQ ID NO: 559133 - RNA, 19 nt, Artificial Sequence
  Description of Artificial Sequence: Synthetic oligonucleotide
ucgauaucaacucgugugg

SEQ ID NO: 559134 - RNA, 19 nt, Artificial Sequence
  Description of Artificial Sequence: Synthetic oligonucleotide
uuagcuuacagucuacacu

SEQ ID NO: 559135 - RNA, 19 nt, Artificial Sequence
  Description of Artificial Sequence: Synthetic oligonucleotide
uguaauacaauacggucaa

SEQ ID NO: 559136 - RNA, 19 nt, Artificial Sequence
  Description of Artificial Sequence: Synthetic oligonucleotide
ugauaugaucauuuaaaca

SEQ ID NO: 559137 - RNA, 19 nt, Artificial Sequence
  Description of Artificial Sequence: Synthetic oligonucleotide
uguuguauaagucgagugu

SEQ ID NO: 559138 - RNA, 19 nt, Artificial Sequence
  Description of Artificial Sequence: Synthetic oligonucleotide
uguuuguuaacuucagaug

SEQ ID NO: 559139 - RNA, 19 nt, Artificial Sequence
  Description of Artificial Sequence: Synthetic oligonucleotide
auauuguuaccuucgcugg

SEQ ID NO: 559140 - RNA, 19 nt, Artificial Sequence
  Description of Artificial Sequence: Synthetic oligonucleotide
agauagaacucccaugauc

SEQ ID NO: 559141 - RNA, 19 nt, Artificial Sequence
  Description of Artificial Sequence: Synthetic oligonucleotide
ucacacuaaaauaucagaa

SEQ ID NO: 559142 - RNA, 19 nt, Artificial Sequence
  Description of Artificial Sequence: Synthetic oligonucleotide
ugcaacuuagugauaaaca

SEQ ID NO: 559143 - RNA, 19 nt, Artificial Sequence
  Description of Artificial Sequence: Synthetic oligonucleotide
auguguacauauaugagac

SEQ ID NO: 559144 - RNA, 19 nt, Artificial Sequence
  Description of Artificial Sequence: Synthetic oligonucleotide
auuggucuuaaacuuauga

SEQ ID NO: 559145 - RNA, 19 nt, Artificial Sequence
  Description of Artificial Sequence: Synthetic oligonucleotide
aaaacaccaguuuccuuag

SEQ ID NO: 559146 - RNA, 19 nt, Artificial Sequence
  Description of Artificial Sequence: Synthetic oligonucleotide
gucgauaucaacucgugug

SEQ ID NO: 559147 - RNA, 19 nt, Artificial Sequence
  Description of Artificial Sequence: Synthetic oligonucleotide
aauucauccgaggacuggg

SEQ ID NO: 559148 - RNA, 19 nt, Artificial Sequence
  Description of Artificial Sequence: Synthetic oligonucleotide
uucaguuuggcaacggugu

SEQ ID NO: 559149 - RNA, 19 nt, Artificial Sequence
  Description of Artificial Sequence: Synthetic oligonucleotide
uuucaguuuggcaacggug

SEQ ID NO: 559150 - RNA, 19 nt, Artificial Sequence
  Description of Artificial Sequence: Synthetic oligonucleotide
uggugaguaacucuguugu

SEQ ID NO: 559151 - RNA, 19 nt, Artificial Sequence
  Description of Artificial Sequence: Synthetic oligonucleotide
uuagcaaacaugagcgccc

SEQ ID NO: 559152 - RNA, 19 nt, Artificial Sequence
  Description of Artificial Sequence: Synthetic oligonucleotide
caucaggucagaauucugg

SEQ ID NO: 559153 - RNA, 19 nt, Artificial Sequence
  Description of Artificial Sequence: Synthetic oligonucleotide
ucuaugucgauaucaacuc

SEQ ID NO: 559154 - RNA, 19 nt, Artificial Sequence
  Description of Artificial Sequence: Synthetic oligonucleotide
cuauuugauaagaauaaga

SEQ ID NO: 559155 - RNA, 19 nt, Artificial Sequence
  Description of Artificial Sequence: Synthetic oligonucleotide
agaggaacagucaagaacu

SEQ ID NO: 559156 - RNA, 19 nt, Artificial Sequence
  Description of Artificial Sequence: Synthetic oligonucleotide
gauuugaugucuacagagg

SEQ ID NO: 559157 - RNA, 19 nt, Artificial Sequence
  Description of Artificial Sequence: Synthetic oligonucleotide
uugugagugagauguacag

SEQ ID NO: 559158 - RNA, 19 nt, Artificial Sequence
  Description of Artificial Sequence: Synthetic oligonucleotide
ucacguucugcaauggcag

SEQ ID NO: 559159 - RNA, 19 nt, Artificial Sequence
  Description of Artificial Sequence: Synthetic oligonucleotide
ccuaauugauuuuaggugc

SEQ ID NO: 559160 - RNA, 19 nt, Artificial Sequence
  Description of Artificial Sequence: Synthetic oligonucleotide
aaacugggcucuuauuuug

SEQ ID NO: 559161 - RNA, 19 nt, Artificial Sequence
  Description of Artificial Sequence: Synthetic oligonucleotide
ugaugauaugaucauuuaa

SEQ ID NO: 559162 - RNA, 19 nt, Artificial Sequence
  Description of Artificial Sequence: Synthetic oligonucleotide
auaauucugcuucugcucu

SEQ ID NO: 559163 - RNA, 19 nt, Artificial Sequence
  Description of Artificial Sequence: Synthetic oligonucleotide
uacucacacuaaaauauca

SEQ ID NO: 559164 - RNA, 19 nt, Artificial Sequence
  Description of Artificial Sequence: Synthetic oligonucleotide
uacuugauaggaagguugc

SEQ ID NO: 559165 - RNA, 19 nt, Artificial Sequence
  Description of Artificial Sequence: Synthetic oligonucleotide
auauaugagacugagguuu

SEQ ID NO: 559166 - RNA, 19 nt, Artificial Sequence
  Description of Artificial Sequence: Synthetic oligonucleotide
gaccuaucauccaagacag

SEQ ID NO: 559167 - RNA, 19 nt, Artificial Sequence
  Description of Artificial Sequence: Synthetic oligonucleotide
agcgagaacauugugcacg

SEQ ID NO: 559168 - RNA, 19 nt, Artificial Sequence
  Description of Artificial Sequence: Synthetic oligonucleotide
uuuagaugauuugaugucu

SEQ ID NO: 559169 - RNA, 19 nt, Artificial Sequence
  Description of Artificial Sequence: Synthetic oligonucleotide
gcaacuuagugauaaacag

SEQ ID NO: 559170 - RNA, 19 nt, Artificial Sequence
  Description of Artificial Sequence: Synthetic oligonucleotide
acagucuacacuaacagga

SEQ ID NO: 559171 - RNA, 19 nt, Artificial Sequence
  Description of Artificial Sequence: Synthetic oligonucleotide
cuaauugauuuuaggugcc

SEQ ID NO: 559172 - RNA, 19 nt, Artificial Sequence
  Description of Artificial Sequence: Synthetic oligonucleotide
ucugaaagacaaacugggc

SEQ ID NO: 559173 - RNA, 19 nt, Artificial Sequence
  Description of Artificial Sequence: Synthetic oligonucleotide
uccacuugacuugaaacag

SEQ ID NO: 559174 - RNA, 19 nt, Artificial Sequence
  Description of Artificial Sequence: Synthetic oligonucleotide
ucuagacuugcauuucuca

SEQ ID NO: 559175 - RNA, 19 nt, Artificial Sequence
  Description of Artificial Sequence: Synthetic oligonucleotide
uguacgcugaccuaucauc

SEQ ID NO: 559176 - RNA, 19 nt, Artificial Sequence
  Description of Artificial Sequence: Synthetic oligonucleotide
uccuaucuucaucacagga

SEQ ID NO: 559177 - RNA, 19 nt, Artificial Sequence
  Description of Artificial Sequence: Synthetic oligonucleotide
cagaggaacagucaagaac

SEQ ID NO: 559178 - RNA, 19 nt, Artificial Sequence
  Description of Artificial Sequence: Synthetic oligonucleotide
agaauaagaauaaggaaaa

SEQ ID NO: 559179 - RNA, 19 nt, Artificial Sequence
  Description of Artificial Sequence: Synthetic oligonucleotide
agaacuaaugaugaaguau

SEQ ID NO: 559180 - RNA, 19 nt, Artificial Sequence
  Description of Artificial Sequence: Synthetic oligonucleotide
auguguacuauucucuaga

SEQ ID NO: 559181 - RNA, 19 nt, Artificial Sequence
  Description of Artificial Sequence: Synthetic oligonucleotide
ucaagauguugccuagccc

SEQ ID NO: 559182 - RNA, 19 nt, Artificial Sequence
  Description of Artificial Sequence: Synthetic oligonucleotide
auacugacaauucaaccau

SEQ ID NO: 559183 - RNA, 19 nt, Artificial Sequence
  Description of Artificial Sequence: Synthetic oligonucleotide
acugcaaaacuguaauaca

SEQ ID NO: 559184 - RNA, 19 nt, Artificial Sequence
  Description of Artificial Sequence: Synthetic oligonucleotide
aauugauuuuaggugccug

SEQ ID NO: 559185 - RNA, 19 nt, Artificial Sequence
  Description of Artificial Sequence: Synthetic oligonucleotide
ucuuaggcgucucacucug

SEQ ID NO: 559186 - RNA, 19 nt, Artificial Sequence
  Description of Artificial Sequence: Synthetic oligonucleotide
ucgcauuucuagcacuucc

SEQ ID NO: 559187 - RNA, 19 nt, Artificial Sequence
  Description of Artificial Sequence: Synthetic oligonucleotide
caaaagucucuccuggcgc

SEQ ID NO: 559188 - RNA, 19 nt, Artificial Sequence
  Description of Artificial Sequence: Synthetic oligonucleotide
uuaccuucgcuggagauga

SEQ ID NO: 559189 - RNA, 19 nt, Artificial Sequence
  Description of Artificial Sequence: Synthetic oligonucleotide
ucuauggagagcagcugug

SEQ ID NO: 559190 - RNA, 19 nt, Artificial Sequence
  Description of Artificial Sequence: Synthetic oligonucleotide
ucaucuucgucccucacuu

SEQ ID NO: 559191 - RNA, 19 nt, Artificial Sequence
  Description of Artificial Sequence: Synthetic oligonucleotide
uuaccggaagggauguaag

SEQ ID NO: 559192 - RNA, 19 nt, Artificial Sequence
  Description of Artificial Sequence: Synthetic oligonucleotide
aagucgagugucuuccaca

SEQ ID NO: 559193 - RNA, 19 nt, Artificial Sequence
  Description of Artificial Sequence: Synthetic oligonucleotide
agucgagugucuuccacag

SEQ ID NO: 559194 - RNA, 19 nt, Artificial Sequence
  Description of Artificial Sequence: Synthetic oligonucleotide
agacuugcauuucucaaga

SEQ ID NO: 559195 - RNA, 19 nt, Artificial Sequence
  Description of Artificial Sequence: Synthetic oligonucleotide
cucgguaucucccugaaga

SEQ ID NO: 559196 - RNA, 19 nt, Artificial Sequence
  Description of Artificial Sequence: Synthetic oligonucleotide
ugucuacagaggaacaguc

SEQ ID NO: 559197 - RNA, 19 nt, Artificial Sequence
  Description of Artificial Sequence: Synthetic oligonucleotide
uguguacuauucucuagac

SEQ ID NO: 559198 - RNA, 19 nt, Artificial Sequence
  Description of Artificial Sequence: Synthetic oligonucleotide
auugugcacgggcugcggc

SEQ ID NO: 559199 - RNA, 19 nt, Artificial Sequence
  Description of Artificial Sequence: Synthetic oligonucleotide
auaucaacucgugugguug

SEQ ID NO: 559200 - RNA, 19 nt, Artificial Sequence
  Description of Artificial Sequence: Synthetic oligonucleotide
augacggcugaacagucag

SEQ ID NO: 559201 - RNA, 19 nt, Artificial Sequence
  Description of Artificial Sequence: Synthetic oligonucleotide
gaaguaucaagcaucaggu

SEQ ID NO: 559202 - RNA, 19 nt, Artificial Sequence
  Description of Artificial Sequence: Synthetic oligonucleotide
cuaugucgauaucaacucg

SEQ ID NO: 559203 - RNA, 19 nt, Artificial Sequence
  Description of Artificial Sequence: Synthetic oligonucleotide
ugauuuuaggugccuggga

SEQ ID NO: 559204 - RNA, 19 nt, Artificial Sequence
  Description of Artificial Sequence: Synthetic oligonucleotide
acacuaacaggaugaaaca

SEQ ID NO: 559205 - RNA, 19 nt, Artificial Sequence
  Description of Artificial Sequence: Synthetic oligonucleotide
uauggagagcagcugugca

SEQ ID NO: 559206 - RNA, 19 nt, Artificial Sequence
  Description of Artificial Sequence: Synthetic oligonucleotide
aacuucagaugagggugcc

SEQ ID NO: 559207 - RNA, 19 nt, Artificial Sequence
  Description of Artificial Sequence: Synthetic oligonucleotide
ucgggcaauuugcaaauga

SEQ ID NO: 559208 - RNA, 19 nt, Artificial Sequence
  Description of Artificial Sequence: Synthetic oligonucleotide
uuaggcgucucacucugga

SEQ ID NO: 559209 - RNA, 19 nt, Artificial Sequence
  Description of Artificial Sequence: Synthetic oligonucleotide
uuggcucgcauuucuagca

SEQ ID NO: 559210 - RNA, 19 nt, Artificial Sequence
  Description of Artificial Sequence: Synthetic oligonucleotide
ugugcugcgagcuuugcuu

SEQ ID NO: 559211 - RNA, 19 nt, Artificial Sequence
  Description of Artificial Sequence: Synthetic oligonucleotide
cauguguacuauucucuag

SEQ ID NO: 559212 - RNA, 19 nt, Artificial Sequence
  Description of Artificial Sequence: Synthetic oligonucleotide
cuguucaagcacaugaaga

SEQ ID NO: 559213 - RNA, 19 nt, Artificial Sequence
  Description of Artificial Sequence: Synthetic oligonucleotide
cuuggcucgcauuucuagc

SEQ ID NO: 559214 - RNA, 19 nt, Artificial Sequence
  Description of Artificial Sequence: Synthetic oligonucleotide
ucgcuggagaugaugauau

SEQ ID NO: 559215 - RNA, 19 nt, Artificial Sequence
  Description of Artificial Sequence: Synthetic oligonucleotide
uuuuaggugccugggauaa

SEQ ID NO: 559216 - RNA, 19 nt, Artificial Sequence
  Description of Artificial Sequence: Synthetic oligonucleotide
uauaugagacugagguuuc

SEQ ID NO: 559217 - RNA, 19 nt, Artificial Sequence
  Description of Artificial Sequence: Synthetic oligonucleotide
uacuauucucuagacuugc

SEQ ID NO: 559218 - RNA, 19 nt, Artificial Sequence
  Description of Artificial Sequence: Synthetic oligonucleotide
ggagaugaugauaugauca

SEQ ID NO: 559219 - RNA, 19 nt, Artificial Sequence
  Description of Artificial Sequence: Synthetic oligonucleotide
agucuacacuaacaggaug

SEQ ID NO: 559220 - RNA, 19 nt, Artificial Sequence
  Description of Artificial Sequence: Synthetic oligonucleotide
guagcuaccguaguguaac

SEQ ID NO: 559221 - RNA, 19 nt, Artificial Sequence
  Description of Artificial Sequence: Synthetic oligonucleotide
augauuugaugucuacaga

SEQ ID NO: 559222 - RNA, 19 nt, Artificial Sequence
  Description of Artificial Sequence: Synthetic oligonucleotide
acauauuguuaccuucgcu

SEQ ID NO: 559223 - RNA, 19 nt, Artificial Sequence
  Description of Artificial Sequence: Synthetic oligonucleotide
acucacacuaaaauaucag

SEQ ID NO: 559224 - RNA, 19 nt, Artificial Sequence
  Description of Artificial Sequence: Synthetic oligonucleotide
ugcucuacucacacuaaaa

SEQ ID NO: 559225 - RNA, 19 nt, Artificial Sequence
  Description of Artificial Sequence: Synthetic oligonucleotide
ugcgcaaaagucucuccug

SEQ ID NO: 559226 - RNA, 19 nt, Artificial Sequence
  Description of Artificial Sequence: Synthetic oligonucleotide
ucugcuaguuucugugcug

SEQ ID NO: 559227 - RNA, 19 nt, Artificial Sequence
  Description of Artificial Sequence: Synthetic oligonucleotide
guugccuagcccugcgucg

SEQ ID NO: 559228 - RNA, 19 nt, Artificial Sequence
  Description of Artificial Sequence: Synthetic oligonucleotide
ugucgauaucaacucgugu

SEQ ID NO: 559229 - RNA, 19 nt, Artificial Sequence
  Description of Artificial Sequence: Synthetic oligonucleotide
gaauucauccgaggacugg

SEQ ID NO: 559230 - RNA, 19 nt, Artificial Sequence
  Description of Artificial Sequence: Synthetic oligonucleotide
cuacagaggaacagucaag

SEQ ID NO: 559231 - RNA, 19 nt, Artificial Sequence
  Description of Artificial Sequence: Synthetic oligonucleotide
uagcacuuccauguaauga

SEQ ID NO: 559232 - RNA, 19 nt, Artificial Sequence
  Description of Artificial Sequence: Synthetic oligonucleotide
uaagucgagugucuuccac

SEQ ID NO: 559233 - RNA, 19 nt, Artificial Sequence
  Description of Artificial Sequence: Synthetic oligonucleotide
gaacauugugcacgggcug

SEQ ID NO: 559234 - RNA, 19 nt, Artificial Sequence
  Description of Artificial Sequence: Synthetic oligonucleotide
uuccauguaaugaggccuc

SEQ ID NO: 559235 - RNA, 19 nt, Artificial Sequence
  Description of Artificial Sequence: Synthetic oligonucleotide
gucuacacuaacaggauga

SEQ ID NO: 559236 - RNA, 19 nt, Artificial Sequence
  Description of Artificial Sequence: Synthetic oligonucleotide
auuuuguagcuaccguagu

SEQ ID NO: 559237 - RNA, 19 nt, Artificial Sequence
  Description of Artificial Sequence: Synthetic oligonucleotide
guuaacuucagaugagggu

SEQ ID NO: 559238 - RNA, 19 nt, Artificial Sequence
  Description of Artificial Sequence: Synthetic oligonucleotide
uguagcuaccguaguguaa

SEQ ID NO: 559239 - RNA, 19 nt, Artificial Sequence
  Description of Artificial Sequence: Synthetic oligonucleotide
uaccggaagggauguaagc

SEQ ID NO: 559240 - RNA, 19 nt, Artificial Sequence
  Description of Artificial Sequence: Synthetic oligonucleotide
gcucuuauuuuguagcuac

SEQ ID NO: 559241 - RNA, 19 nt, Artificial Sequence
  Description of Artificial Sequence: Synthetic oligonucleotide
gcagcuaucuuaaagaaaa

SEQ ID NO: 559242 - RNA, 19 nt, Artificial Sequence
  Description of Artificial Sequence: Synthetic oligonucleotide
ugccuuagcuuacagucua

SEQ ID NO: 559243 - RNA, 19 nt, Artificial Sequence
  Description of Artificial Sequence: Synthetic oligonucleotide
uugccuuagcuuacagucu

SEQ ID NO: 559244 - RNA, 19 nt, Artificial Sequence
  Description of Artificial Sequence: Synthetic oligonucleotide
cugaaagacaaacugggcu

SEQ ID NO: 559245 - RNA, 19 nt, Artificial Sequence
  Description of Artificial Sequence: Synthetic oligonucleotide
uuuacagguuccacauaau

SEQ ID NO: 559246 - RNA, 19 nt, Artificial Sequence
  Description of Artificial Sequence: Synthetic oligonucleotide
acuccaugcaugcaugcau

SEQ ID NO: 559247 - RNA, 19 nt, Artificial Sequence
  Description of Artificial Sequence: Synthetic oligonucleotide
aguuuggcaacggugucug

SEQ ID NO: 559248 - RNA, 19 nt, Artificial Sequence
  Description of Artificial Sequence: Synthetic oligonucleotide
guacgcugaccuaucaucc

SEQ ID NO: 559249 - RNA, 19 nt, Artificial Sequence
  Description of Artificial Sequence: Synthetic oligonucleotide
ugucgggcaauuugcaaau

SEQ ID NO: 559250 - RNA, 19 nt, Artificial Sequence
  Description of Artificial Sequence: Synthetic oligonucleotide
gauaacauauuguuaccuu

SEQ ID NO: 559251 - RNA, 19 nt, Artificial Sequence
  Description of Artificial Sequence: Synthetic oligonucleotide
ugagguuucugcagccuau

SEQ ID NO: 559252 - RNA, 19 nt, Artificial Sequence
  Description of Artificial Sequence: Synthetic oligonucleotide
auguacagguccuuguguu

SEQ ID NO: 559253 - RNA, 19 nt, Artificial Sequence
  Description of Artificial Sequence: Synthetic oligonucleotide
auucauccgaggacugggc

SEQ ID NO: 559254 - RNA, 19 nt, Artificial Sequence
  Description of Artificial Sequence: Synthetic oligonucleotide
cuucgucccucacuucucg

SEQ ID NO: 559255 - RNA, 19 nt, Artificial Sequence
  Description of Artificial Sequence: Synthetic oligonucleotide
agcuuuggagauagaacuc

SEQ ID NO: 559256 - RNA, 19 nt, Artificial Sequence
  Description of Artificial Sequence: Synthetic oligonucleotide
cuucacguucugcaauggc

SEQ ID NO: 559257 - RNA, 19 nt, Artificial Sequence
  Description of Artificial Sequence: Synthetic oligonucleotide
ucgguaucucccugaagac

SEQ ID NO: 559258 - RNA, 19 nt, Artificial Sequence
  Description of Artificial Sequence: Synthetic oligonucleotide
cuagacuugcauuucucaa

SEQ ID NO: 559259 - RNA, 19 nt, Artificial Sequence
  Description of Artificial Sequence: Synthetic oligonucleotide
gggauaacaaaguacuuua

SEQ ID NO: 559260 - RNA, 19 nt, Artificial Sequence
  Description of Artificial Sequence: Synthetic oligonucleotide
ucugaggguucacucuggu

SEQ ID NO: 559261 - RNA, 19 nt, Artificial Sequence
  Description of Artificial Sequence: Synthetic oligonucleotide
uuguagcucugcauuuuaa

SEQ ID NO: 559262 - RNA, 19 nt, Artificial Sequence
  Description of Artificial Sequence: Synthetic oligonucleotide
cucuacucacacuaaaaua

SEQ ID NO: 559263 - RNA, 19 nt, Artificial Sequence
  Description of Artificial Sequence: Synthetic oligonucleotide
aaguccucgggagcugggg

SEQ ID NO: 559264 - RNA, 19 nt, Artificial Sequence
  Description of Artificial Sequence: Synthetic oligonucleotide
ugugcucuacucacacuaa

SEQ ID NO: 559265 - RNA, 19 nt, Artificial Sequence
  Description of Artificial Sequence: Synthetic oligonucleotide
aaugagcuggggaagccaa

SEQ ID NO: 559266 - RNA, 19 nt, Artificial Sequence
  Description of Artificial Sequence: Synthetic oligonucleotide
uaauugauuuuaggugccu

SEQ ID NO: 559267 - RNA, 19 nt, Artificial Sequence
  Description of Artificial Sequence: Synthetic oligonucleotide
guugcgcaaaagucucucc

SEQ ID NO: 559268 - RNA, 19 nt, Artificial Sequence
  Description of Artificial Sequence: Synthetic oligonucleotide
uguauaagucgagugucuu

SEQ ID NO: 559269 - RNA, 19 nt, Artificial Sequence
  Description of Artificial Sequence: Synthetic oligonucleotide
aaugacggcugaacaguca

SEQ ID NO: 559270 - RNA, 19 nt, Artificial Sequence
  Description of Artificial Sequence: Synthetic oligonucleotide
cuauggagagcagcugugc

SEQ ID NO: 559271 - RNA, 19 nt, Artificial Sequence
  Description of Artificial Sequence: Synthetic oligonucleotide
ucuacacuaacaggaugaa

SEQ ID NO: 559272 - RNA, 19 nt, Artificial Sequence
  Description of Artificial Sequence: Synthetic oligonucleotide
aggagacucaccccucuga

SEQ ID NO: 559273 - RNA, 19 nt, Artificial Sequence
  Description of Artificial Sequence: Synthetic oligonucleotide
ucucgguaucucccugaag

SEQ ID NO: 559274 - RNA, 19 nt, Artificial Sequence
  Description of Artificial Sequence: Synthetic oligonucleotide
auuguagcucugcauuuua

SEQ ID NO: 559275 - RNA, 19 nt, Artificial Sequence
  Description of Artificial Sequence: Synthetic oligonucleotide
augagcgcccuguacgcug

SEQ ID NO: 559276 - RNA, 19 nt, Artificial Sequence
  Description of Artificial Sequence: Synthetic oligonucleotide
gccagcgacucuucuaugg

SEQ ID NO: 559277 - RNA, 19 nt, Artificial Sequence
  Description of Artificial Sequence: Synthetic oligonucleotide
cuccuaucuucaucacagg

SEQ ID NO: 559278 - RNA, 19 nt, Artificial Sequence
  Description of Artificial Sequence: Synthetic oligonucleotide
gagaugaugauaugaucau

SEQ ID NO: 559279 - RNA, 19 nt, Artificial Sequence
  Description of Artificial Sequence: Synthetic oligonucleotide
ucauccgaggacugggcau

SEQ ID NO: 559280 - RNA, 19 nt, Artificial Sequence
  Description of Artificial Sequence: Synthetic oligonucleotide
cugcuaguuucugugcugc

SEQ ID NO: 559281 - RNA, 19 nt, Artificial Sequence
  Description of Artificial Sequence: Synthetic oligonucleotide
gcgcaaaagucucuccugg

SEQ ID NO: 559282 - RNA, 19 nt, Artificial Sequence
  Description of Artificial Sequence: Synthetic oligonucleotide
caaggugcuccuaucuuca

SEQ ID NO: 559283 - RNA, 19 nt, Artificial Sequence
  Description of Artificial Sequence: Synthetic oligonucleotide
uaccguaguguaacuuuaa

SEQ ID NO: 559284 - RNA, 19 nt, Artificial Sequence
  Description of Artificial Sequence: Synthetic oligonucleotide
accguaguguaacuuuaaa

SEQ ID NO: 559285 - RNA, 19 nt, Artificial Sequence
  Description of Artificial Sequence: Synthetic oligonucleotide
uucucgguaucucccugaa

SEQ ID NO: 559286 - RNA, 19 nt, Artificial Sequence
  Description of Artificial Sequence: Synthetic oligonucleotide
ucuucgucccucacuucuc

SEQ ID NO: 559287 - RNA, 19 nt, Artificial Sequence
  Description of Artificial Sequence: Synthetic oligonucleotide
acauuggucuuaaacuuau

SEQ ID NO: 559288 - RNA, 19 nt, Artificial Sequence
  Description of Artificial Sequence: Synthetic oligonucleotide
cuuauuuuguagcuaccgu

SEQ ID NO: 559289 - RNA, 19 nt, Artificial Sequence
  Description of Artificial Sequence: Synthetic oligonucleotide
caaugacggcugaacaguc

SEQ ID NO: 559290 - RNA, 19 nt, Artificial Sequence
  Description of Artificial Sequence: Synthetic oligonucleotide
acaauacggucaaacacaa

SEQ ID NO: 559291 - RNA, 19 nt, Artificial Sequence
  Description of Artificial Sequence: Synthetic oligonucleotide
cccucugacaaugacuugg

SEQ ID NO: 559292 - RNA, 19 nt, Artificial Sequence
  Description of Artificial Sequence: Synthetic oligonucleotide
uugugcacgggcugcggcu

SEQ ID NO: 559293 - RNA, 19 nt, Artificial Sequence
  Description of Artificial Sequence: Synthetic oligonucleotide
gcgagaacauugugcacgg

SEQ ID NO: 559294 - RNA, 19 nt, Artificial Sequence
  Description of Artificial Sequence: Synthetic oligonucleotide
uggguaacacauuggucuu

SEQ ID NO: 559295 - RNA, 19 nt, Artificial Sequence
  Description of Artificial Sequence: Synthetic oligonucleotide
acuuuaccggaagggaugu

SEQ ID NO: 559296 - RNA, 19 nt, Artificial Sequence
  Description of Artificial Sequence: Synthetic oligonucleotide
cauuggucuuaaacuuaug

SEQ ID NO: 559297 - RNA, 19 nt, Artificial Sequence
  Description of Artificial Sequence: Synthetic oligonucleotide
caaugcuauuugauaagaa

SEQ ID NO: 559298 - RNA, 19 nt, Artificial Sequence
  Description of Artificial Sequence: Synthetic oligonucleotide
agcuuucaguuuggcaacg

SEQ ID NO: 559299 - RNA, 19 nt, Artificial Sequence
  Description of Artificial Sequence: Synthetic oligonucleotide
cuuugucgggcaauuugca

SEQ ID NO: 559300 - RNA, 19 nt, Artificial Sequence
  Description of Artificial Sequence: Synthetic oligonucleotide
uggcucgcauuucuagcac

SEQ ID NO: 559301 - RNA, 19 nt, Artificial Sequence
  Description of Artificial Sequence: Synthetic oligonucleotide
cuuaggcgucucacucugg

SEQ ID NO: 559302 - RNA, 19 nt, Artificial Sequence
  Description of Artificial Sequence: Synthetic oligonucleotide
ugagcgcccuguacgcuga

SEQ ID NO: 559303 - RNA, 19 nt, Artificial Sequence
  Description of Artificial Sequence: Synthetic oligonucleotide
gagacucaccccucugaca

SEQ ID NO: 559304 - RNA, 19 nt, Artificial Sequence
  Description of Artificial Sequence: Synthetic oligonucleotide
agcgacucuucuauggaga

SEQ ID NO: 559305 - RNA, 19 nt, Artificial Sequence
  Description of Artificial Sequence: Synthetic oligonucleotide
ccugggauaacaaaguacu

SEQ ID NO: 559306 - RNA, 19 nt, Artificial Sequence
  Description of Artificial Sequence: Synthetic oligonucleotide
aacucgugugguugcuuuu

SEQ ID NO: 559307 - RNA, 19 nt, Artificial Sequence
  Description of Artificial Sequence: Synthetic oligonucleotide
agauagcagucaccccaag

SEQ ID NO: 559308 - RNA, 19 nt, Artificial Sequence
  Description of Artificial Sequence: Synthetic oligonucleotide
guacagguccuuguguuuc

SEQ ID NO: 559309 - RNA, 19 nt, Artificial Sequence
  Description of Artificial Sequence: Synthetic oligonucleotide
augucgauaucaacucgug

SEQ ID NO: 559310 - RNA, 19 nt, Artificial Sequence
  Description of Artificial Sequence: Synthetic oligonucleotide
ccacuugacuugaaacagg

SEQ ID NO: 559311 - RNA, 19 nt, Artificial Sequence
  Description of Artificial Sequence: Synthetic oligonucleotide
ggaagauagcagucacccc

SEQ ID NO: 559312 - RNA, 19 nt, Artificial Sequence
  Description of Artificial Sequence: Synthetic oligonucleotide
uaggugccugggauaacaa

SEQ ID NO: 559313 - RNA, 19 nt, Artificial Sequence
  Description of Artificial Sequence: Synthetic oligonucleotide
uugccuagcccugcgucgc

SEQ ID NO: 559314 - RNA, 19 nt, Artificial Sequence
  Description of Artificial Sequence: Synthetic oligonucleotide
gugaguaacucuguugugu

SEQ ID NO: 559315 - RNA, 19 nt, Artificial Sequence
  Description of Artificial Sequence: Synthetic oligonucleotide
ggugaguaacucuguugug

SEQ ID NO: 559316 - RNA, 19 nt, Artificial Sequence
  Description of Artificial Sequence: Synthetic oligonucleotide
gcuuacagucuacacuaac

SEQ ID NO: 559317 - RNA, 19 nt, Artificial Sequence
  Description of Artificial Sequence: Synthetic oligonucleotide
gcgacucuucuauggagag

SEQ ID NO: 559318 - RNA, 19 nt, Artificial Sequence
  Description of Artificial Sequence: Synthetic oligonucleotide
aagacaaacugggcucuua

SEQ ID NO: 559319 - RNA, 19 nt, Artificial Sequence
  Description of Artificial Sequence: Synthetic oligonucleotide
gacggcugaacagucagcu

SEQ ID NO: 559320 - RNA, 19 nt, Artificial Sequence
  Description of Artificial Sequence: Synthetic oligonucleotide
acuuagugauaaacagacu

SEQ ID NO: 559321 - RNA, 19 nt, Artificial Sequence
  Description of Artificial Sequence: Synthetic oligonucleotide
aaggugcuccuaucuucau

SEQ ID NO: 559322 - RNA, 19 nt, Artificial Sequence
  Description of Artificial Sequence: Synthetic oligonucleotide
gauaucaacucgugugguu

SEQ ID NO: 559323 - RNA, 19 nt, Artificial Sequence
  Description of Artificial Sequence: Synthetic oligonucleotide
ggagacucaccccucugac

SEQ ID NO: 559324 - RNA, 19 nt, Artificial Sequence
  Description of Artificial Sequence: Synthetic oligonucleotide
aggaacagucaagaacuaa

SEQ ID NO: 559325 - RNA, 19 nt, Artificial Sequence
  Description of Artificial Sequence: Synthetic oligonucleotide
cuaccguaguguaacuuua

SEQ ID NO: 559326 - RNA, 19 nt, Artificial Sequence
  Description of Artificial Sequence: Synthetic oligonucleotide
guaagcaaugcuauuugau

SEQ ID NO: 559327 - RNA, 19 nt, Artificial Sequence
  Description of Artificial Sequence: Synthetic oligonucleotide
cugaggguucacucugguc

SEQ ID NO: 559328 - RNA, 19 nt, Artificial Sequence
  Description of Artificial Sequence: Synthetic oligonucleotide
cuaugaggcaaugacggcu

SEQ ID NO: 559329 - RNA, 19 nt, Artificial Sequence
  Description of Artificial Sequence: Synthetic oligonucleotide
gcuaugaggcaaugacggc

SEQ ID NO: 559330 - RNA, 19 nt, Artificial Sequence
  Description of Artificial Sequence: Synthetic oligonucleotide
cuucucgguaucucccuga

SEQ ID NO: 559331 - RNA, 19 nt, Artificial Sequence
  Description of Artificial Sequence: Synthetic oligonucleotide
gacucgggcgcgcgagcgg

SEQ ID NO: 559332 - RNA, 19 nt, Artificial Sequence
  Description of Artificial Sequence: Synthetic oligonucleotide
acuauucucuagacuugca

SEQ ID NO: 559333 - RNA, 19 nt, Artificial Sequence
  Description of Artificial Sequence: Synthetic oligonucleotide
ccuuagcaaacaugagcgc

SEQ ID NO: 559334 - RNA, 19 nt, Artificial Sequence
  Description of Artificial Sequence: Synthetic oligonucleotide
aggcgcgcugcugugaugu

SEQ ID NO: 559335 - RNA, 19 nt, Artificial Sequence
  Description of Artificial Sequence: Synthetic oligonucleotide
acucgggcgcgcgagcggg

SEQ ID NO: 559336 - RNA, 19 nt, Artificial Sequence
  Description of Artificial Sequence: Synthetic oligonucleotide
cauccgaggacugggcauc

SEQ ID NO: 559337 - RNA, 19 nt, Artificial Sequence
  Description of Artificial Sequence: Synthetic oligonucleotide
uccgccgaacuccgcugcc

SEQ ID NO: 559338 - RNA, 19 nt, Artificial Sequence
  Description of Artificial Sequence: Synthetic oligonucleotide
cuauucucuagacuugcau

SEQ ID NO: 559339 - RNA, 19 nt, Artificial Sequence
  Description of Artificial Sequence: Synthetic oligonucleotide
accuaucauccaagacagc

SEQ ID NO: 559340 - RNA, 19 nt, Artificial Sequence
  Description of Artificial Sequence: Synthetic oligonucleotide
ccucuuaggcgucucacuc

SEQ ID NO: 559341 - RNA, 19 nt, Artificial Sequence
  Description of Artificial Sequence: Synthetic oligonucleotide
cuucagaugagggugcccu

SEQ ID NO: 559342 - RNA, 19 nt, Artificial Sequence
  Description of Artificial Sequence: Synthetic oligonucleotide
cauugugcacgggcugcgg

SEQ ID NO: 559343 - RNA, 19 nt, Artificial Sequence
  Description of Artificial Sequence: Synthetic oligonucleotide
uagcuaccguaguguaacu

SEQ ID NO: 559344 - RNA, 19 nt, Artificial Sequence
  Description of Artificial Sequence: Synthetic oligonucleotide
cacguucucagagcugcug

SEQ ID NO: 559345 - RNA, 19 nt, Artificial Sequence
  Description of Artificial Sequence: Synthetic oligonucleotide
ggaacagucaagaacuaau

SEQ ID NO: 559346 - RNA, 19 nt, Artificial Sequence
  Description of Artificial Sequence: Synthetic oligonucleotide
ccuucgcuggagaugauga

SEQ ID NO: 559347 - RNA, 19 nt, Artificial Sequence
  Description of Artificial Sequence: Synthetic oligonucleotide
agcgcccuguacgcugacc

SEQ ID NO: 559348 - RNA, 19 nt, Artificial Sequence
  Description of Artificial Sequence: Synthetic oligonucleotide
cauauaugagacugagguu

SEQ ID NO: 559349 - RNA, 19 nt, Artificial Sequence
  Description of Artificial Sequence: Synthetic oligonucleotide
gcagccuauaaacaccucu

SEQ ID NO: 559350 - RNA, 19 nt, Artificial Sequence
  Description of Artificial Sequence: Synthetic oligonucleotide
ccaacaucucaggaacucc

SEQ ID NO: 559351 - RNA, 19 nt, Artificial Sequence
  Description of Artificial Sequence: Synthetic oligonucleotide
uuuaggugccugggauaac

SEQ ID NO: 559352 - RNA, 19 nt, Artificial Sequence
  Description of Artificial Sequence: Synthetic oligonucleotide
cagcgagaacauugugcac

SEQ ID NO: 559353 - RNA, 19 nt, Artificial Sequence
  Description of Artificial Sequence: Synthetic oligonucleotide
gugcucuacucacacuaaa

SEQ ID NO: 559354 - RNA, 19 nt, Artificial Sequence
  Description of Artificial Sequence: Synthetic oligonucleotide
cuuucaguuuggcaacggu

SEQ ID NO: 559355 - RNA, 19 nt, Artificial Sequence
  Description of Artificial Sequence: Synthetic oligonucleotide
gcugaccuaucauccaaga

SEQ ID NO: 559356 - RNA, 19 nt, Artificial Sequence
  Description of Artificial Sequence: Synthetic oligonucleotide
gguggagcggaaggaggcg

SEQ ID NO: 559357 - RNA, 19 nt, Artificial Sequence
  Description of Artificial Sequence: Synthetic oligonucleotide
cucgaagccgcggggcagc

SEQ ID NO: 559358 - RNA, 19 nt, Artificial Sequence
  Description of Artificial Sequence: Synthetic oligonucleotide
gcucuacucacacuaaaau

SEQ ID NO: 559359 - RNA, 19 nt, Artificial Sequence
  Description of Artificial Sequence: Synthetic oligonucleotide
cucgcauuucuagcacuuc

SEQ ID NO: 559360 - RNA, 19 nt, Artificial Sequence
  Description of Artificial Sequence: Synthetic oligonucleotide
caucuucgucccucacuuc

SEQ ID NO: 559361 - RNA, 19 nt, Artificial Sequence
  Description of Artificial Sequence: Synthetic oligonucleotide
ucaacucgugugguugcuu

SEQ ID NO: 559362 - RNA, 19 nt, Artificial Sequence
  Description of Artificial Sequence: Synthetic oligonucleotide
ggggagauguuuguuaacu

SEQ ID NO: 559363 - RNA, 19 nt, Artificial Sequence
  Description of Artificial Sequence: Synthetic oligonucleotide
agcuaccguaguguaacuu

SEQ ID NO: 559364 - RNA, 19 nt, Artificial Sequence
  Description of Artificial Sequence: Synthetic oligonucleotide
gauuguagcucugcauuuu

SEQ ID NO: 559365 - RNA, 19 nt, Artificial Sequence
  Description of Artificial Sequence: Synthetic oligonucleotide
cuacacuaacaggaugaaa

SEQ ID NO: 559366 - RNA, 19 nt, Artificial Sequence
  Description of Artificial Sequence: Synthetic oligonucleotide
cagccuauaaacaccucuu

SEQ ID NO: 559367 - RNA, 19 nt, Artificial Sequence
  Description of Artificial Sequence: Synthetic oligonucleotide
cugccgggaacagggccgg

SEQ ID NO: 559368 - RNA, 19 nt, Artificial Sequence
  Description of Artificial Sequence: Synthetic oligonucleotide
agggugcccuggcuguacu

SEQ ID NO: 559369 - RNA, 19 nt, Artificial Sequence
  Description of Artificial Sequence: Synthetic oligonucleotide
gcaaugacggcugaacagu

SEQ ID NO: 559370 - RNA, 19 nt, Artificial Sequence
  Description of Artificial Sequence: Synthetic oligonucleotide
gccgguguucacugugcag

SEQ ID NO: 559371 - RNA, 19 nt, Artificial Sequence
  Description of Artificial Sequence: Synthetic oligonucleotide
gcgggagcaggcuccgcgg

SEQ ID NO: 559372 - RNA, 19 nt, Artificial Sequence
  Description of Artificial Sequence: Synthetic oligonucleotide
gcuaccguaguguaacuuu

SEQ ID NO: 559373 - RNA, 19 nt, Artificial Sequence
  Description of Artificial Sequence: Synthetic oligonucleotide
acggcugaacagucagcuu

SEQ ID NO: 559374 - RNA, 19 nt, Artificial Sequence
  Description of Artificial Sequence: Synthetic oligonucleotide
cuggcuguacugccgggaa

SEQ ID NO: 559375 - RNA, 19 nt, Artificial Sequence
  Description of Artificial Sequence: Synthetic oligonucleotide
gcugacgcggagggcacgg

SEQ ID NO: 559376 - RNA, 19 nt, Artificial Sequence
  Description of Artificial Sequence: Synthetic oligonucleotide
gggauguaagcaaugcuau

SEQ ID NO: 559377 - RNA, 19 nt, Artificial Sequence
  Description of Artificial Sequence: Synthetic oligonucleotide
ccuagcccugcgucgcugc

SEQ ID NO: 559378 - RNA, 19 nt, Artificial Sequence
  Description of Artificial Sequence: Synthetic oligonucleotide
gcaugcaugcauguguacu

SEQ ID NO: 559379 - RNA, 19 nt, Artificial Sequence
  Description of Artificial Sequence: Synthetic oligonucleotide
agcuuacagucuacacuaa

SEQ ID NO: 559380 - RNA, 19 nt, Artificial Sequence
  Description of Artificial Sequence: Synthetic oligonucleotide
acggcgggagcaggcuccg

SEQ ID NO: 559381 - RNA, 19 nt, Artificial Sequence
  Description of Artificial Sequence: Synthetic oligonucleotide
ccggaagggauguaagcaa

SEQ ID NO: 559382 - RNA, 19 nt, Artificial Sequence
  Description of Artificial Sequence: Synthetic oligonucleotide
cacuggguucuuggcucgc

SEQ ID NO: 559383 - RNA, 19 nt, Artificial Sequence
  Description of Artificial Sequence: Synthetic oligonucleotide
cgcagcuccgccgaacucc

SEQ ID NO: 559384 - RNA, 19 nt, Artificial Sequence
  Description of Artificial Sequence: Synthetic oligonucleotide
agucgccauuuucccggaa

SEQ ID NO: 559385 - RNA, 19 nt, Artificial Sequence
  Description of Artificial Sequence: Synthetic oligonucleotide
cugggauaacaaaguacuu

SEQ ID NO: 559386 - RNA, 19 nt, Artificial Sequence
  Description of Artificial Sequence: Synthetic oligonucleotide
gcauuucuagcacuuccau

SEQ ID NO: 559387 - RNA, 19 nt, Artificial Sequence
  Description of Artificial Sequence: Synthetic oligonucleotide
caacucgugugguugcuuu

SEQ ID NO: 559388 - RNA, 19 nt, Artificial Sequence
  Description of Artificial Sequence: Synthetic oligonucleotide
cgcugaccuaucauccaag

SEQ ID NO: 559389 - RNA, 19 nt, Artificial Sequence
  Description of Artificial Sequence: Synthetic oligonucleotide
gcggcugacgcggagggca

SEQ ID NO: 559390 - RNA, 19 nt, Artificial Sequence
  Description of Artificial Sequence: Synthetic oligonucleotide
gaacuccgcugccccaagu

SEQ ID NO: 559391 - RNA, 19 nt, Artificial Sequence
  Description of Artificial Sequence: Synthetic oligonucleotide
cgggcugcggcugacgcgg

SEQ ID NO: 559392 - RNA, 19 nt, Artificial Sequence
  Description of Artificial Sequence: Synthetic oligonucleotide
aggaggcgcgcugcuguga

SEQ ID NO: 559393 - RNA, 19 nt, Artificial Sequence
  Description of Artificial Sequence: Synthetic oligonucleotide
uaccuucgcuggagaugau

SEQ ID NO: 559394 - RNA, 19 nt, Artificial Sequence
  Description of Artificial Sequence: Synthetic oligonucleotide
cuucgcuggagaugaugau

SEQ ID NO: 559395 - RNA, 19 nt, Artificial Sequence
  Description of Artificial Sequence: Synthetic oligonucleotide
cuguacgcugaccuaucau

SEQ ID NO: 559396 - RNA, 19 nt, Artificial Sequence
  Description of Artificial Sequence: Synthetic oligonucleotide
ggagcuccggcacguucuc

SEQ ID NO: 559397 - RNA, 19 nt, Artificial Sequence
  Description of Artificial Sequence: Synthetic oligonucleotide
cugacgcggagggcacggc

SEQ ID NO: 559398 - RNA, 19 nt, Artificial Sequence
  Description of Artificial Sequence: Synthetic oligonucleotide
ggccagcgacucuucuaug

SEQ ID NO: 559399 - RNA, 19 nt, Artificial Sequence
  Description of Artificial Sequence: Synthetic oligonucleotide
ggccgguguucacugugca

SEQ ID NO: 559400 - RNA, 19 nt, Artificial Sequence
  Description of Artificial Sequence: Synthetic oligonucleotide
gcggaaggaggcgcgcugc

SEQ ID NO: 559401 - RNA, 19 nt, Artificial Sequence
  Description of Artificial Sequence: Synthetic oligonucleotide
ggcucgcauuucuagcacu

SEQ ID NO: 559402 - RNA, 19 nt, Artificial Sequence
  Description of Artificial Sequence: Synthetic oligonucleotide
gcgcccuguacgcugaccu

SEQ ID NO: 559403 - RNA, 19 nt, Artificial Sequence
  Description of Artificial Sequence: Synthetic oligonucleotide
ccuguacgcugaccuauca

SEQ ID NO: 559404 - RNA, 19 nt, Artificial Sequence
  Description of Artificial Sequence: Synthetic oligonucleotide
cguugcgcaaaagucucuc

SEQ ID NO: 559405 - RNA, 19 nt, Artificial Sequence
  Description of Artificial Sequence: Synthetic oligonucleotide
gucgagugucuuccacagu

SEQ ID NO: 559406 - RNA, 19 nt, Artificial Sequence
  Description of Artificial Sequence: Synthetic oligonucleotide
cccuguacgcugaccuauc

SEQ ID NO: 559407 - RNA, 19 nt, Artificial Sequence
  Description of Artificial Sequence: Synthetic oligonucleotide
gcugcgagcuuugcuugca

SEQ ID NO: 559408 - RNA, 19 nt, Artificial Sequence
  Description of Artificial Sequence: Synthetic oligonucleotide
guuguguggguaacacauu

SEQ ID NO: 559409 - RNA, 19 nt, Artificial Sequence
  Description of Artificial Sequence: Synthetic oligonucleotide
caauacggucaaacacaau

SEQ ID NO: 559410 - RNA, 19 nt, Artificial Sequence
  Description of Artificial Sequence: Synthetic oligonucleotide
gacucaccccucugacaau

SEQ ID NO: 559411 - RNA, 19 nt, Artificial Sequence
  Description of Artificial Sequence: Synthetic oligonucleotide
gccuuagcuuacagucuac

SEQ ID NO: 559412 - RNA, 19 nt, Artificial Sequence
  Description of Artificial Sequence: Synthetic oligonucleotide
gccgggaacagggccggug

SEQ ID NO: 559413 - RNA, 19 nt, Artificial Sequence
  Description of Artificial Sequence: Synthetic oligonucleotide
ccgguguucacugugcagu

SEQ ID NO: 559414 - RNA, 19 nt, Artificial Sequence
  Description of Artificial Sequence: Synthetic oligonucleotide
ggcugacgcggagggcacg

SEQ ID NO: 559415 - RNA, 19 nt, Artificial Sequence
  Description of Artificial Sequence: Synthetic oligonucleotide
gugcacgggcugcggcuga

SEQ ID NO: 559416 - RNA, 19 nt, Artificial Sequence
  Description of Artificial Sequence: Synthetic oligonucleotide
cgccgaacuccgcugcccc

SEQ ID NO: 559417 - RNA, 19 nt, Artificial Sequence
  Description of Artificial Sequence: Synthetic oligonucleotide
cuccccggcggggcccacg

SEQ ID NO: 559418 - RNA, 19 nt, Artificial Sequence
  Description of Artificial Sequence: Synthetic oligonucleotide
ggguaacacauuggucuua

SEQ ID NO: 559419 - RNA, 19 nt, Artificial Sequence
  Description of Artificial Sequence: Synthetic oligonucleotide
caugagcgcccuguacgcu

SEQ ID NO: 559420 - RNA, 19 nt, Artificial Sequence
  Description of Artificial Sequence: Synthetic oligonucleotide
cugugcagucagccuccaa

SEQ ID NO: 559421 - RNA, 19 nt, Artificial Sequence
  Description of Artificial Sequence: Synthetic oligonucleotide
gcgcgcugcugugauguca

SEQ ID NO: 559422 - RNA, 19 nt, Artificial Sequence
  Description of Artificial Sequence: Synthetic oligonucleotide
ggaggcgcgcugcugugau

SEQ ID NO: 559423 - RNA, 19 nt, Artificial Sequence
  Description of Artificial Sequence: Synthetic oligonucleotide
gggcccacggcgggagcag

SEQ ID NO: 559424 - RNA, 19 nt, Artificial Sequence
  Description of Artificial Sequence: Synthetic oligonucleotide
cgaacuccgcugccccaag

SEQ ID NO: 559425 - RNA, 19 nt, Artificial Sequence
  Description of Artificial Sequence: Synthetic oligonucleotide
ggcgcgcgagcgggagucg

SEQ ID NO: 559426 - RNA, 19 nt, Artificial Sequence
  Description of Artificial Sequence: Synthetic oligonucleotide
ugccgggaacagggccggu

SEQ ID NO: 559427 - RNA, 19 nt, Artificial Sequence
  Description of Artificial Sequence: Synthetic oligonucleotide
gcucgcauuucuagcacuu

SEQ ID NO: 559428 - RNA, 19 nt, Artificial Sequence
  Description of Artificial Sequence: Synthetic oligonucleotide
gacuccccuucuggauugu

SEQ ID NO: 559429 - RNA, 19 nt, Artificial Sequence
  Description of Artificial Sequence: Synthetic oligonucleotide
cugcgagcuuugcuugcau

SEQ ID NO: 559430 - RNA, 19 nt, Artificial Sequence
  Description of Artificial Sequence: Synthetic oligonucleotide
gcccuguacgcugaccuau

SEQ ID NO: 559431 - RNA, 19 nt, Artificial Sequence
  Description of Artificial Sequence: Synthetic oligonucleotide
ggcgcgcugcugugauguc

SEQ ID NO: 559432 - RNA, 19 nt, Artificial Sequence
  Description of Artificial Sequence: Synthetic oligonucleotide
gcgcgagcgggagucgcca

SEQ ID NO: 559433 - RNA, 19 nt, Artificial Sequence
  Description of Artificial Sequence: Synthetic oligonucleotide
gcgcgcgagcgggagucgc

SEQ ID NO: 559434 - RNA, 19 nt, Artificial Sequence
  Description of Artificial Sequence: Synthetic oligonucleotide
cgucccucacuucucggua

SEQ ID NO: 559435 - RNA, 19 nt, Artificial Sequence
  Description of Artificial Sequence: Synthetic oligonucleotide
gcgucucacucuggagcuc

SEQ ID NO: 559436 - RNA, 19 nt, Artificial Sequence
  Description of Artificial Sequence: Synthetic oligonucleotide
cgauaucaacucguguggu

SEQ ID NO: 559437 - RNA, 19 nt, Artificial Sequence
  Description of Artificial Sequence: Synthetic oligonucleotide
ccgcagcuccgccgaacuc

SEQ ID NO: 559438 - RNA, 19 nt, Artificial Sequence
  Description of Artificial Sequence: Synthetic oligonucleotide
cggcugacgcggagggcac

SEQ ID NO: 559439 - RNA, 19 nt, Artificial Sequence
  Description of Artificial Sequence: Synthetic oligonucleotide
cgagugucuuccacaguau

SEQ ID NO: 559440 - RNA, 19 nt, Artificial Sequence
  Description of Artificial Sequence: Synthetic oligonucleotide
cgguaucucccugaagacu

SEQ ID NO: 559441 - RNA, 19 nt, Artificial Sequence
  Description of Artificial Sequence: Synthetic oligonucleotide
gggccuugucuaugucgau

SEQ ID NO: 559442 - RNA, 19 nt, Artificial Sequence
  Description of Artificial Sequence: Synthetic oligonucleotide
cccgcagcuccgccgaacu

SEQ ID NO: 559443 - RNA, 19 nt, Artificial Sequence
  Description of Artificial Sequence: Synthetic oligonucleotide
cucccgcagcuccgccgaa

SEQ ID NO: 559444 - RNA, 19 nt, Artificial Sequence
  Description of Artificial Sequence: Synthetic oligonucleotide
cgcgcugcugugaugucau

SEQ ID NO: 559445 - RNA, 19 nt, Artificial Sequence
  Description of Artificial Sequence: Synthetic oligonucleotide
gcgagcgggagucgccauu

SEQ ID NO: 559446 - RNA, 19 nt, Artificial Sequence
  Description of Artificial Sequence: Synthetic oligonucleotide
cccucacuucucgguaucu

SEQ ID NO: 559447 - RNA, 19 nt, Artificial Sequence
  Description of Artificial Sequence: Synthetic oligonucleotide
cgcccuguacgcugaccua

SEQ ID NO: 559448 - RNA, 19 nt, Artificial Sequence
  Description of Artificial Sequence: Synthetic oligonucleotide
cgagcgggagucgccauuu

SEQ ID NO: 559449 - RNA, 19 nt, Artificial Sequence
  Description of Artificial Sequence: Synthetic oligonucleotide
cgcgagcgggagucgccau

SEQ ID NO: 559450 - RNA, 19 nt, Artificial Sequence
  Description of Artificial Sequence: Synthetic oligonucleotide
aacugauucugucugaugc

SEQ ID NO: 559451 - RNA, 19 nt, Artificial Sequence
  Description of Artificial Sequence: Synthetic oligonucleotide
ugcauuggcagucagaacc

SEQ ID NO: 559452 - RNA, 19 nt, Artificial Sequence
  Description of Artificial Sequence: Synthetic oligonucleotide
uuuuaaucaguggauaugg

SEQ ID NO: 559453 - RNA, 19 nt, Artificial Sequence
  Description of Artificial Sequence: Synthetic oligonucleotide
uguugaaggacacuaagug

SEQ ID NO: 559454 - RNA, 19 nt, Artificial Sequence
  Description of Artificial Sequence: Synthetic oligonucleotide
aaaacuguacaagugguag

SEQ ID NO: 559455 - RNA, 19 nt, Artificial Sequence
  Description of Artificial Sequence: Synthetic oligonucleotide
aaagaccuagagaugaccc

SEQ ID NO: 559456 - RNA, 19 nt, Artificial Sequence
  Description of Artificial Sequence: Synthetic oligonucleotide
aaaaugacccaucacgaga

SEQ ID NO: 559457 - RNA, 19 nt, Artificial Sequence
  Description of Artificial Sequence: Synthetic oligonucleotide
ucauaggacuauuugauga

SEQ ID NO: 559458 - RNA, 19 nt, Artificial Sequence
  Description of Artificial Sequence: Synthetic oligonucleotide
ugaagaagcaucuucaaua

SEQ ID NO: 559459 - RNA, 19 nt, Artificial Sequence
  Description of Artificial Sequence: Synthetic oligonucleotide
gauuuaauccagugaaugc

SEQ ID NO: 559460 - RNA, 19 nt, Artificial Sequence
  Description of Artificial Sequence: Synthetic oligonucleotide
uugaugacccaucuaauug

SEQ ID NO: 559461 - RNA, 19 nt, Artificial Sequence
  Description of Artificial Sequence: Synthetic oligonucleotide
aaguauguguuggagaguc

SEQ ID NO: 559462 - RNA, 19 nt, Artificial Sequence
  Description of Artificial Sequence: Synthetic oligonucleotide
uguggguuuuauuaucugg

SEQ ID NO: 559463 - RNA, 19 nt, Artificial Sequence
  Description of Artificial Sequence: Synthetic oligonucleotide
ugaugacccaucuaauugg

SEQ ID NO: 559464 - RNA, 19 nt, Artificial Sequence
  Description of Artificial Sequence: Synthetic oligonucleotide
uaaucaguggauauggcaa

SEQ ID NO: 559465 - RNA, 19 nt, Artificial Sequence
  Description of Artificial Sequence: Synthetic oligonucleotide
ucacgagaaaugauggucc

SEQ ID NO: 559466 - RNA, 19 nt, Artificial Sequence
  Description of Artificial Sequence: Synthetic oligonucleotide
aguguuugaucucugcauc

SEQ ID NO: 559467 - RNA, 19 nt, Artificial Sequence
  Description of Artificial Sequence: Synthetic oligonucleotide
augggguuaucucucagac

SEQ ID NO: 559468 - RNA, 19 nt, Artificial Sequence
  Description of Artificial Sequence: Synthetic oligonucleotide
ugaggcuaaaucuugcaga

SEQ ID NO: 559469 - RNA, 19 nt, Artificial Sequence
  Description of Artificial Sequence: Synthetic oligonucleotide
uaucaaaauagaaccuuga

SEQ ID NO: 559470 - RNA, 19 nt, Artificial Sequence
  Description of Artificial Sequence: Synthetic oligonucleotide
uuaaguucuuuguauugug

SEQ ID NO: 559471 - RNA, 19 nt, Artificial Sequence
  Description of Artificial Sequence: Synthetic oligonucleotide
ugacguaauguacauguac

SEQ ID NO: 559472 - RNA, 19 nt, Artificial Sequence
  Description of Artificial Sequence: Synthetic oligonucleotide
uuaggaggugacaaagacc

SEQ ID NO: 559473 - RNA, 19 nt, Artificial Sequence
  Description of Artificial Sequence: Synthetic oligonucleotide
gaggcuaaaucuugcagag

SEQ ID NO: 559474 - RNA, 19 nt, Artificial Sequence
  Description of Artificial Sequence: Synthetic oligonucleotide
auuagcacuaaaagacucc

SEQ ID NO: 559475 - RNA, 19 nt, Artificial Sequence
  Description of Artificial Sequence: Synthetic oligonucleotide
cuguagaagagaaagccac

SEQ ID NO: 559476 - RNA, 19 nt, Artificial Sequence
  Description of Artificial Sequence: Synthetic oligonucleotide
uuaauuucuccauucuuaa

SEQ ID NO: 559477 - RNA, 19 nt, Artificial Sequence
  Description of Artificial Sequence: Synthetic oligonucleotide
gaaaaugacccaucacgag

SEQ ID NO: 559478 - RNA, 19 nt, Artificial Sequence
  Description of Artificial Sequence: Synthetic oligonucleotide
ugcaagagggugccgauag

SEQ ID NO: 559479 - RNA, 19 nt, Artificial Sequence
  Description of Artificial Sequence: Synthetic oligonucleotide
aaucggcuacaucaggaag

SEQ ID NO: 559480 - RNA, 19 nt, Artificial Sequence
  Description of Artificial Sequence: Synthetic oligonucleotide
uccgcuguggcacaccagg

SEQ ID NO: 559481 - RNA, 19 nt, Artificial Sequence
  Description of Artificial Sequence: Synthetic oligonucleotide
gugacaaagaccuagagau

SEQ ID NO: 559482 - RNA, 19 nt, Artificial Sequence
  Description of Artificial Sequence: Synthetic oligonucleotide
agaccuuaugagcacuggc

SEQ ID NO: 559483 - RNA, 19 nt, Artificial Sequence
  Description of Artificial Sequence: Synthetic oligonucleotide
aucacgagaaaugaugguc

SEQ ID NO: 559484 - RNA, 19 nt, Artificial Sequence
  Description of Artificial Sequence: Synthetic oligonucleotide
uaggacuauuugaugaccc

SEQ ID NO: 559485 - RNA, 19 nt, Artificial Sequence
  Description of Artificial Sequence: Synthetic oligonucleotide
ugacccaucacgagaaaug

SEQ ID NO: 559486 - RNA, 19 nt, Artificial Sequence
  Description of Artificial Sequence: Synthetic oligonucleotide
acaggcagacgacugcucc

SEQ ID NO: 559487 - RNA, 19 nt, Artificial Sequence
  Description of Artificial Sequence: Synthetic oligonucleotide
aagcagauuuaucaaaaua

SEQ ID NO: 559488 - RNA, 19 nt, Artificial Sequence
  Description of Artificial Sequence: Synthetic oligonucleotide
cuguacaagugguaggagg

SEQ ID NO: 559489 - RNA, 19 nt, Artificial Sequence
  Description of Artificial Sequence: Synthetic oligonucleotide
uccucauaggacuauuuga

SEQ ID NO: 559490 - RNA, 19 nt, Artificial Sequence
  Description of Artificial Sequence: Synthetic oligonucleotide
aauaacaggcagacgacug

SEQ ID NO: 559491 - RNA, 19 nt, Artificial Sequence
  Description of Artificial Sequence: Synthetic oligonucleotide
aauccagugaaugccaagu

SEQ ID NO: 559492 - RNA, 19 nt, Artificial Sequence
  Description of Artificial Sequence: Synthetic oligonucleotide
uguaucugcacaagucuga

SEQ ID NO: 559493 - RNA, 19 nt, Artificial Sequence
  Description of Artificial Sequence: Synthetic oligonucleotide
uuuccaggugauaaauuga

SEQ ID NO: 559494 - RNA, 19 nt, Artificial Sequence
  Description of Artificial Sequence: Synthetic oligonucleotide
auaggacuauuugaugacc

SEQ ID NO: 559495 - RNA, 19 nt, Artificial Sequence
  Description of Artificial Sequence: Synthetic oligonucleotide
ugugacgcaaggaugucga

SEQ ID NO: 559496 - RNA, 19 nt, Artificial Sequence
  Description of Artificial Sequence: Synthetic oligonucleotide
auaggaaccucagaacaac

SEQ ID NO: 559497 - RNA, 19 nt, Artificial Sequence
  Description of Artificial Sequence: Synthetic oligonucleotide
gaugucgaguuccucuagg

SEQ ID NO: 559498 - RNA, 19 nt, Artificial Sequence
  Description of Artificial Sequence: Synthetic oligonucleotide
gacaaagaccuagagauga

SEQ ID NO: 559499 - RNA, 19 nt, Artificial Sequence
  Description of Artificial Sequence: Synthetic oligonucleotide
uuagcugaggcuaaaucuu

SEQ ID NO: 559500 - RNA, 19 nt, Artificial Sequence
  Description of Artificial Sequence: Synthetic oligonucleotide
acguaauguacauguacag

SEQ ID NO: 559501 - RNA, 19 nt, Artificial Sequence
  Description of Artificial Sequence: Synthetic oligonucleotide
agcaagaauuuucuguuga

SEQ ID NO: 559502 - RNA, 19 nt, Artificial Sequence
  Description of Artificial Sequence: Synthetic oligonucleotide
cucuacguugcauuggcag

SEQ ID NO: 559503 - RNA, 19 nt, Artificial Sequence
  Description of Artificial Sequence: Synthetic oligonucleotide
cuucuaauucaaaacuauc

SEQ ID NO: 559504 - RNA, 19 nt, Artificial Sequence
  Description of Artificial Sequence: Synthetic oligonucleotide
uuggagaguccccaggcgc

SEQ ID NO: 559505 - RNA, 19 nt, Artificial Sequence
  Description of Artificial Sequence: Synthetic oligonucleotide
ucacaaucggcuacaucag

SEQ ID NO: 559506 - RNA, 19 nt, Artificial Sequence
  Description of Artificial Sequence: Synthetic oligonucleotide
agcacuaaaagacuccuuu

SEQ ID NO: 559507 - RNA, 19 nt, Artificial Sequence
  Description of Artificial Sequence: Synthetic oligonucleotide
cuugacguaauguacaugu

SEQ ID NO: 559508 - RNA, 19 nt, Artificial Sequence
  Description of Artificial Sequence: Synthetic oligonucleotide
aagaccuagagaugacccu

SEQ ID NO: 559509 - RNA, 19 nt, Artificial Sequence
  Description of Artificial Sequence: Synthetic oligonucleotide
uccaaaucugucuccgcag

SEQ ID NO: 559510 - RNA, 19 nt, Artificial Sequence
  Description of Artificial Sequence: Synthetic oligonucleotide
aaauugaguccuccaggcu

SEQ ID NO: 559511 - RNA, 19 nt, Artificial Sequence
  Description of Artificial Sequence: Synthetic oligonucleotide
uuugaugacccaucuaauu

SEQ ID NO: 559512 - RNA, 19 nt, Artificial Sequence
  Description of Artificial Sequence: Synthetic oligonucleotide
caggccgucagcuacaguc

SEQ ID NO: 559513 - RNA, 19 nt, Artificial Sequence
  Description of Artificial Sequence: Synthetic oligonucleotide
gaccuuaugagcacuggcc

SEQ ID NO: 559514 - RNA, 19 nt, Artificial Sequence
  Description of Artificial Sequence: Synthetic oligonucleotide
uuagcacuaaaagacuccu

SEQ ID NO: 559515 - RNA, 19 nt, Artificial Sequence
  Description of Artificial Sequence: Synthetic oligonucleotide
guaggaggugcacagcucc

SEQ ID NO: 559516 - RNA, 19 nt, Artificial Sequence
  Description of Artificial Sequence: Synthetic oligonucleotide
aacaucggcaacacacagg

SEQ ID NO: 559517 - RNA, 19 nt, Artificial Sequence
  Description of Artificial Sequence: Synthetic oligonucleotide
gacguaauguacauguaca

SEQ ID NO: 559518 - RNA, 19 nt, Artificial Sequence
  Description of Artificial Sequence: Synthetic oligonucleotide
uccagugaaugccaaguuc

SEQ ID NO: 559519 - RNA, 19 nt, Artificial Sequence
  Description of Artificial Sequence: Synthetic oligonucleotide
uauguguuggagagucccc

SEQ ID NO: 559520 - RNA, 19 nt, Artificial Sequence
  Description of Artificial Sequence: Synthetic oligonucleotide
acgacugcuccgcuguggc

SEQ ID NO: 559521 - RNA, 19 nt, Artificial Sequence
  Description of Artificial Sequence: Synthetic oligonucleotide
cuuaugagcacuggccagg

SEQ ID NO: 559522 - RNA, 19 nt, Artificial Sequence
  Description of Artificial Sequence: Synthetic oligonucleotide
ugacaaagaccuagagaug

SEQ ID NO: 559523 - RNA, 19 nt, Artificial Sequence
  Description of Artificial Sequence: Synthetic oligonucleotide
aaaugacccaucacgagaa

SEQ ID NO: 559524 - RNA, 19 nt, Artificial Sequence
  Description of Artificial Sequence: Synthetic oligonucleotide
gagagcggcauauuagcac

SEQ ID NO: 559525 - RNA, 19 nt, Artificial Sequence
  Description of Artificial Sequence: Synthetic oligonucleotide
aggugauaaauugaguccu

SEQ ID NO: 559526 - RNA, 19 nt, Artificial Sequence
  Description of Artificial Sequence: Synthetic oligonucleotide
ucugcacaagucugaacug

SEQ ID NO: 559527 - RNA, 19 nt, Artificial Sequence
  Description of Artificial Sequence: Synthetic oligonucleotide
guauguguuggagaguccc

SEQ ID NO: 559528 - RNA, 19 nt, Artificial Sequence
  Description of Artificial Sequence: Synthetic oligonucleotide
uugaguguuugaucucugc

SEQ ID NO: 559529 - RNA, 19 nt, Artificial Sequence
  Description of Artificial Sequence: Synthetic oligonucleotide
uacaagugguaggaggugc

SEQ ID NO: 559530 - RNA, 19 nt, Artificial Sequence
  Description of Artificial Sequence: Synthetic oligonucleotide
ucguccgcggugaauuccg

SEQ ID NO: 559531 - RNA, 19 nt, Artificial Sequence
  Description of Artificial Sequence: Synthetic oligonucleotide
cugaggcuaaaucuugcag

SEQ ID NO: 559532 - RNA, 19 nt, Artificial Sequence
  Description of Artificial Sequence: Synthetic oligonucleotide
ucggcuacaucaggaaggg

SEQ ID NO: 559533 - RNA, 19 nt, Artificial Sequence
  Description of Artificial Sequence: Synthetic oligonucleotide
cucauaggacuauuugaug

SEQ ID NO: 559534 - RNA, 19 nt, Artificial Sequence
  Description of Artificial Sequence: Synthetic oligonucleotide
ugaccugaugcuguagaag

SEQ ID NO: 559535 - RNA, 19 nt, Artificial Sequence
  Description of Artificial Sequence: Synthetic oligonucleotide
caguggauauggcaaagac

SEQ ID NO: 559536 - RNA, 19 nt, Artificial Sequence
  Description of Artificial Sequence: Synthetic oligonucleotide
guguuugaucucugcaucc

SEQ ID NO: 559537 - RNA, 19 nt, Artificial Sequence
  Description of Artificial Sequence: Synthetic oligonucleotide
aggacacuaagugaaguca

SEQ ID NO: 559538 - RNA, 19 nt, Artificial Sequence
  Description of Artificial Sequence: Synthetic oligonucleotide
auugaguccuccaggcugg

SEQ ID NO: 559539 - RNA, 19 nt, Artificial Sequence
  Description of Artificial Sequence: Synthetic oligonucleotide
agaaccuugaguguuugau

SEQ ID NO: 559540 - RNA, 19 nt, Artificial Sequence
  Description of Artificial Sequence: Synthetic oligonucleotide
uguguuggagaguccccag

SEQ ID NO: 559541 - RNA, 19 nt, Artificial Sequence
  Description of Artificial Sequence: Synthetic oligonucleotide
uggagaguccccaggcgcc

SEQ ID NO: 559542 - RNA, 19 nt, Artificial Sequence
  Description of Artificial Sequence: Synthetic oligonucleotide
cuucaugggguuaucucuc

SEQ ID NO: 559543 - RNA, 19 nt, Artificial Sequence
  Description of Artificial Sequence: Synthetic oligonucleotide
ucuaauuggcagaccuuau

SEQ ID NO: 559544 - RNA, 19 nt, Artificial Sequence
  Description of Artificial Sequence: Synthetic oligonucleotide
uccaggugauaaauugagu

SEQ ID NO: 559545 - RNA, 19 nt, Artificial Sequence
  Description of Artificial Sequence: Synthetic oligonucleotide
agcacagaggucauccagg

SEQ ID NO: 559546 - RNA, 19 nt, Artificial Sequence
  Description of Artificial Sequence: Synthetic oligonucleotide
ggugaauuccgcgugcgcg

SEQ ID NO: 559547 - RNA, 19 nt, Artificial Sequence
  Description of Artificial Sequence: Synthetic oligonucleotide
caccaaaacuuugaggcac

SEQ ID NO: 559548 - RNA, 19 nt, Artificial Sequence
  Description of Artificial Sequence: Synthetic oligonucleotide
cacucugacugccucuacg

SEQ ID NO: 559549 - RNA, 19 nt, Artificial Sequence
  Description of Artificial Sequence: Synthetic oligonucleotide
cugcacaagucugaacugg

SEQ ID NO: 559550 - RNA, 19 nt, Artificial Sequence
  Description of Artificial Sequence: Synthetic oligonucleotide
agggcucgaaucagcaugc

SEQ ID NO: 559551 - RNA, 19 nt, Artificial Sequence
  Description of Artificial Sequence: Synthetic oligonucleotide
agaccuagagaugacccug

SEQ ID NO: 559552 - RNA, 19 nt, Artificial Sequence
  Description of Artificial Sequence: Synthetic oligonucleotide
aggacuauuugaugaccca

SEQ ID NO: 559553 - RNA, 19 nt, Artificial Sequence
  Description of Artificial Sequence: Synthetic oligonucleotide
acaacugcuuaggagguga

SEQ ID NO: 559554 - RNA, 19 nt, Artificial Sequence
  Description of Artificial Sequence: Synthetic oligonucleotide
cacaaucggcuacaucagg

SEQ ID NO: 559555 - RNA, 19 nt, Artificial Sequence
  Description of Artificial Sequence: Synthetic oligonucleotide
gugaauuccgcgugcgcgc

SEQ ID NO: 559556 - RNA, 19 nt, Artificial Sequence
  Description of Artificial Sequence: Synthetic oligonucleotide
guuaucucucagacugugg

SEQ ID NO: 559557 - RNA, 19 nt, Artificial Sequence
  Description of Artificial Sequence: Synthetic oligonucleotide
ucaauaguggaugcuguuu

SEQ ID NO: 559558 - RNA, 19 nt, Artificial Sequence
  Description of Artificial Sequence: Synthetic oligonucleotide
agagaugacccugggacca

SEQ ID NO: 559559 - RNA, 19 nt, Artificial Sequence
  Description of Artificial Sequence: Synthetic oligonucleotide
cagagagggaagacucucc

SEQ ID NO: 559560 - RNA, 19 nt, Artificial Sequence
  Description of Artificial Sequence: Synthetic oligonucleotide
agucagccauugucugugc

SEQ ID NO: 559561 - RNA, 19 nt, Artificial Sequence
  Description of Artificial Sequence: Synthetic oligonucleotide
cccaucacgagaaaugaug

SEQ ID NO: 559562 - RNA, 19 nt, Artificial Sequence
  Description of Artificial Sequence: Synthetic oligonucleotide
uggcaguguaagccaauga

SEQ ID NO: 559563 - RNA, 19 nt, Artificial Sequence
  Description of Artificial Sequence: Synthetic oligonucleotide
augucgaguuccucuaggu

SEQ ID NO: 559564 - RNA, 19 nt, Artificial Sequence
  Description of Artificial Sequence: Synthetic oligonucleotide
cucgaaucagcaugcugac

SEQ ID NO: 559565 - RNA, 19 nt, Artificial Sequence
  Description of Artificial Sequence: Synthetic oligonucleotide
ugguuccaccagaaguuug

SEQ ID NO: 559566 - RNA, 19 nt, Artificial Sequence
  Description of Artificial Sequence: Synthetic oligonucleotide
guguuggagaguccccagg

SEQ ID NO: 559567 - RNA, 19 nt, Artificial Sequence
  Description of Artificial Sequence: Synthetic oligonucleotide
acaaucggcuacaucagga

SEQ ID NO: 559568 - RNA, 19 nt, Artificial Sequence
  Description of Artificial Sequence: Synthetic oligonucleotide
aggucuccgucaugugagc

SEQ ID NO: 559569 - RNA, 19 nt, Artificial Sequence
  Description of Artificial Sequence: Synthetic oligonucleotide
gaccuagagaugacccugg

SEQ ID NO: 559570 - RNA, 19 nt, Artificial Sequence
  Description of Artificial Sequence: Synthetic oligonucleotide
cugugcaacaucacaguga

SEQ ID NO: 559571 - RNA, 19 nt, Artificial Sequence
  Description of Artificial Sequence: Synthetic oligonucleotide
uccgcgugcgcgccgaaug

SEQ ID NO: 559572 - RNA, 19 nt, Artificial Sequence
  Description of Artificial Sequence: Synthetic oligonucleotide
ucuaggucguccgcgguga

SEQ ID NO: 559573 - RNA, 19 nt, Artificial Sequence
  Description of Artificial Sequence: Synthetic oligonucleotide
ucaguggauauggcaaaga

SEQ ID NO: 559574 - RNA, 19 nt, Artificial Sequence
  Description of Artificial Sequence: Synthetic oligonucleotide
aggcagacgacugcuccgc

SEQ ID NO: 559575 - RNA, 19 nt, Artificial Sequence
  Description of Artificial Sequence: Synthetic oligonucleotide
gggagagcggcauauuagc

SEQ ID NO: 559576 - RNA, 19 nt, Artificial Sequence
  Description of Artificial Sequence: Synthetic oligonucleotide
uaacaggcagacgacugcu

SEQ ID NO: 559577 - RNA, 19 nt, Artificial Sequence
  Description of Artificial Sequence: Synthetic oligonucleotide
ucugacauguggagagcau

SEQ ID NO: 559578 - RNA, 19 nt, Artificial Sequence
  Description of Artificial Sequence: Synthetic oligonucleotide
cuuugcuaggucuccguca

SEQ ID NO: 559579 - RNA, 19 nt, Artificial Sequence
  Description of Artificial Sequence: Synthetic oligonucleotide
ggaaaaugacccaucacga

SEQ ID NO: 559580 - RNA, 19 nt, Artificial Sequence
  Description of Artificial Sequence: Synthetic oligonucleotide
cauaccaccucuuguucca

SEQ ID NO: 559581 - RNA, 19 nt, Artificial Sequence
  Description of Artificial Sequence: Synthetic oligonucleotide
ugacgcaaggaugucgagu

SEQ ID NO: 559582 - RNA, 19 nt, Artificial Sequence
  Description of Artificial Sequence: Synthetic oligonucleotide
caggcagacgacugcuccg

SEQ ID NO: 559583 - RNA, 19 nt, Artificial Sequence
  Description of Artificial Sequence: Synthetic oligonucleotide
cagugucccucagacagcg

SEQ ID NO: 559584 - RNA, 19 nt, Artificial Sequence
  Description of Artificial Sequence: Synthetic oligonucleotide
aacaacugcuuaggaggug

SEQ ID NO: 559585 - RNA, 19 nt, Artificial Sequence
  Description of Artificial Sequence: Synthetic oligonucleotide
agccacugugucucugagg

SEQ ID NO: 559586 - RNA, 19 nt, Artificial Sequence
  Description of Artificial Sequence: Synthetic oligonucleotide
gacugcuccgcuguggcac

SEQ ID NO: 559587 - RNA, 19 nt, Artificial Sequence
  Description of Artificial Sequence: Synthetic oligonucleotide
uugacguaauguacaugua

SEQ ID NO: 559588 - RNA, 19 nt, Artificial Sequence
  Description of Artificial Sequence: Synthetic oligonucleotide
gccgauaggaaccucagaa

SEQ ID NO: 559589 - RNA, 19 nt, Artificial Sequence
  Description of Artificial Sequence: Synthetic oligonucleotide
caaugccuggcagggaagg

SEQ ID NO: 559590 - RNA, 19 nt, Artificial Sequence
  Description of Artificial Sequence: Synthetic oligonucleotide
gcaaccagauuuaauccag

SEQ ID NO: 559591 - RNA, 19 nt, Artificial Sequence
  Description of Artificial Sequence: Synthetic oligonucleotide
uggaggccgagacuguauc

SEQ ID NO: 559592 - RNA, 19 nt, Artificial Sequence
  Description of Artificial Sequence: Synthetic oligonucleotide
aaugacccaucacgagaaa

SEQ ID NO: 559593 - RNA, 19 nt, Artificial Sequence
  Description of Artificial Sequence: Synthetic oligonucleotide
gcacuaaaagacuccuuug

SEQ ID NO: 559594 - RNA, 19 nt, Artificial Sequence
  Description of Artificial Sequence: Synthetic oligonucleotide
accggacacuggcucaggg

SEQ ID NO: 559595 - RNA, 19 nt, Artificial Sequence
  Description of Artificial Sequence: Synthetic oligonucleotide
cagugaaugccaaguucug

SEQ ID NO: 559596 - RNA, 19 nt, Artificial Sequence
  Description of Artificial Sequence: Synthetic oligonucleotide
ugccucuacguugcauugg

SEQ ID NO: 559597 - RNA, 19 nt, Artificial Sequence
  Description of Artificial Sequence: Synthetic oligonucleotide
gacgcaaggaugucgaguu

SEQ ID NO: 559598 - RNA, 19 nt, Artificial Sequence
  Description of Artificial Sequence: Synthetic oligonucleotide
gacgacugcuccgcugugg

SEQ ID NO: 559599 - RNA, 19 nt, Artificial Sequence
  Description of Artificial Sequence: Synthetic oligonucleotide
acuguacaagugguaggag

SEQ ID NO: 559600 - RNA, 19 nt, Artificial Sequence
  Description of Artificial Sequence: Synthetic oligonucleotide
gaagcacagcugcugugca

SEQ ID NO: 559601 - RNA, 19 nt, Artificial Sequence
  Description of Artificial Sequence: Synthetic oligonucleotide
uguggcacaccagguguug

SEQ ID NO: 559602 - RNA, 19 nt, Artificial Sequence
  Description of Artificial Sequence: Synthetic oligonucleotide
ugaauuccgcgugcgcgcc

SEQ ID NO: 559603 - RNA, 19 nt, Artificial Sequence
  Description of Artificial Sequence: Synthetic oligonucleotide
acacuggcuugaaaaugac

SEQ ID NO: 559604 - RNA, 19 nt, Artificial Sequence
  Description of Artificial Sequence: Synthetic oligonucleotide
caggcuguuccgaggcgcg

SEQ ID NO: 559605 - RNA, 19 nt, Artificial Sequence
  Description of Artificial Sequence: Synthetic oligonucleotide
aggaugucgaguuccucua

SEQ ID NO: 559606 - RNA, 19 nt, Artificial Sequence
  Description of Artificial Sequence: Synthetic oligonucleotide
agcuuuccaggugauaaau

SEQ ID NO: 559607 - RNA, 19 nt, Artificial Sequence
  Description of Artificial Sequence: Synthetic oligonucleotide
ugccgauaggaaccucaga

SEQ ID NO: 559608 - RNA, 19 nt, Artificial Sequence
  Description of Artificial Sequence: Synthetic oligonucleotide
cagaccuuaugagcacugg

SEQ ID NO: 559609 - RNA, 19 nt, Artificial Sequence
  Description of Artificial Sequence: Synthetic oligonucleotide
auuugaugacccaucuaau

SEQ ID NO: 559610 - RNA, 19 nt, Artificial Sequence
  Description of Artificial Sequence: Synthetic oligonucleotide
ucccuuugcuaggucuccg

SEQ ID NO: 559611 - RNA, 19 nt, Artificial Sequence
  Description of Artificial Sequence: Synthetic oligonucleotide
gcaagaaaucagaggaagc

SEQ ID NO: 559612 - RNA, 19 nt, Artificial Sequence
  Description of Artificial Sequence: Synthetic oligonucleotide
aaugccuggcagggaagga

SEQ ID NO: 559613 - RNA, 19 nt, Artificial Sequence
  Description of Artificial Sequence: Synthetic oligonucleotide
ggaagcacagcugcugugc

SEQ ID NO: 559614 - RNA, 19 nt, Artificial Sequence
  Description of Artificial Sequence: Synthetic oligonucleotide
gaauuccgcgugcgcgccg

SEQ ID NO: 559615 - RNA, 19 nt, Artificial Sequence
  Description of Artificial Sequence: Synthetic oligonucleotide
cugccucuacguugcauug

SEQ ID NO: 559616 - RNA, 19 nt, Artificial Sequence
  Description of Artificial Sequence: Synthetic oligonucleotide
caagagggugccgauagga

SEQ ID NO: 559617 - RNA, 19 nt, Artificial Sequence
  Description of Artificial Sequence: Synthetic oligonucleotide
gaagugugaucuucucugu

SEQ ID NO: 559618 - RNA, 19 nt, Artificial Sequence
  Description of Artificial Sequence: Synthetic oligonucleotide
ccauaccaccucuuguucc

SEQ ID NO: 559619 - RNA, 19 nt, Artificial Sequence
  Description of Artificial Sequence: Synthetic oligonucleotide
cucuaggucguccgcggug

SEQ ID NO: 559620 - RNA, 19 nt, Artificial Sequence
  Description of Artificial Sequence: Synthetic oligonucleotide
aauuccgcgugcgcgccga

SEQ ID NO: 559621 - RNA, 19 nt, Artificial Sequence
  Description of Artificial Sequence: Synthetic oligonucleotide
uccagcugucagcaagaau

SEQ ID NO: 559622 - RNA, 19 nt, Artificial Sequence
  Description of Artificial Sequence: Synthetic oligonucleotide
acgcaaggaugucgaguuc

SEQ ID NO: 559623 - RNA, 19 nt, Artificial Sequence
  Description of Artificial Sequence: Synthetic oligonucleotide
gaaggacacuaagugaagu

SEQ ID NO: 559624 - RNA, 19 nt, Artificial Sequence
  Description of Artificial Sequence: Synthetic oligonucleotide
uccgucaugugagcucuca

SEQ ID NO: 559625 - RNA, 19 nt, Artificial Sequence
  Description of Artificial Sequence: Synthetic oligonucleotide
caaaucugucuccgcagca

SEQ ID NO: 559626 - RNA, 19 nt, Artificial Sequence
  Description of Artificial Sequence: Synthetic oligonucleotide
caaucggcuacaucaggaa

SEQ ID NO: 559627 - RNA, 19 nt, Artificial Sequence
  Description of Artificial Sequence: Synthetic oligonucleotide
cagcuacaguccauuucag

SEQ ID NO: 559628 - RNA, 19 nt, Artificial Sequence
  Description of Artificial Sequence: Synthetic oligonucleotide
gccucuacguugcauuggc

SEQ ID NO: 559629 - RNA, 19 nt, Artificial Sequence
  Description of Artificial Sequence: Synthetic oligonucleotide
uacguugcauuggcaguca

SEQ ID NO: 559630 - RNA, 19 nt, Artificial Sequence
  Description of Artificial Sequence: Synthetic oligonucleotide
ggacacuaagugaagucac

SEQ ID NO: 559631 - RNA, 19 nt, Artificial Sequence
  Description of Artificial Sequence: Synthetic oligonucleotide
augacccaucacgagaaau

SEQ ID NO: 559632 - RNA, 19 nt, Artificial Sequence
  Description of Artificial Sequence: Synthetic oligonucleotide
cguaauguacauguacagc

SEQ ID NO: 559633 - RNA, 19 nt, Artificial Sequence
  Description of Artificial Sequence: Synthetic oligonucleotide
gucuccgucaugugagcuc

SEQ ID NO: 559634 - RNA, 19 nt, Artificial Sequence
  Description of Artificial Sequence: Synthetic oligonucleotide
accugggcaagaaaucaga

SEQ ID NO: 559635 - RNA, 19 nt, Artificial Sequence
  Description of Artificial Sequence: Synthetic oligonucleotide
acgagaaaugaugguccug

SEQ ID NO: 559636 - RNA, 19 nt, Artificial Sequence
  Description of Artificial Sequence: Synthetic oligonucleotide
acaagugguaggaggugca

SEQ ID NO: 559637 - RNA, 19 nt, Artificial Sequence
  Description of Artificial Sequence: Synthetic oligonucleotide
ggcgcgaccggacacuggc

SEQ ID NO: 559638 - RNA, 19 nt, Artificial Sequence
  Description of Artificial Sequence: Synthetic oligonucleotide
uucuuagcugaggcuaaau

SEQ ID NO: 559639 - RNA, 19 nt, Artificial Sequence
  Description of Artificial Sequence: Synthetic oligonucleotide
acguugcauuggcagucag

SEQ ID NO: 559640 - RNA, 19 nt, Artificial Sequence
  Description of Artificial Sequence: Synthetic oligonucleotide
caugugagcucucacuccu

SEQ ID NO: 559641 - RNA, 19 nt, Artificial Sequence
  Description of Artificial Sequence: Synthetic oligonucleotide
ccgauaggaaccucagaac

SEQ ID NO: 559642 - RNA, 19 nt, Artificial Sequence
  Description of Artificial Sequence: Synthetic oligonucleotide
gccugacaauaacaggcag

SEQ ID NO: 559643 - RNA, 19 nt, Artificial Sequence
  Description of Artificial Sequence: Synthetic oligonucleotide
ugaggcacuguggcaacau

SEQ ID NO: 559644 - RNA, 19 nt, Artificial Sequence
  Description of Artificial Sequence: Synthetic oligonucleotide
cgauaggaaccucagaaca

SEQ ID NO: 559645 - RNA, 19 nt, Artificial Sequence
  Description of Artificial Sequence: Synthetic oligonucleotide
gugacgcaaggaugucgag

SEQ ID NO: 559646 - RNA, 19 nt, Artificial Sequence
  Description of Artificial Sequence: Synthetic oligonucleotide
gugccgauaggaaccucag

SEQ ID NO: 559647 - RNA, 19 nt, Artificial Sequence
  Description of Artificial Sequence: Synthetic oligonucleotide
ggaugucgaguuccucuag

SEQ ID NO: 559648 - RNA, 19 nt, Artificial Sequence
  Description of Artificial Sequence: Synthetic oligonucleotide
uggcaucaccuggucauac

SEQ ID NO: 559649 - RNA, 19 nt, Artificial Sequence
  Description of Artificial Sequence: Synthetic oligonucleotide
cuguuccgaggcgcgaccg

SEQ ID NO: 559650 - RNA, 19 nt, Artificial Sequence
  Description of Artificial Sequence: Synthetic oligonucleotide
ggcucgaaucagcaugcug

SEQ ID NO: 559651 - RNA, 19 nt, Artificial Sequence
  Description of Artificial Sequence: Synthetic oligonucleotide
gguuccaccagaaguuuga

SEQ ID NO: 559652 - RNA, 19 nt, Artificial Sequence
  Description of Artificial Sequence: Synthetic oligonucleotide
aggucguccgcggugaauu

SEQ ID NO: 559653 - RNA, 19 nt, Artificial Sequence
  Description of Artificial Sequence: Synthetic oligonucleotide
guguugaaggacacuaagu

SEQ ID NO: 559654 - RNA, 19 nt, Artificial Sequence
  Description of Artificial Sequence: Synthetic oligonucleotide
cuauuugaugacccaucua

SEQ ID NO: 559655 - RNA, 19 nt, Artificial Sequence
  Description of Artificial Sequence: Synthetic oligonucleotide
guaucugcacaagucugaa

SEQ ID NO: 559656 - RNA, 19 nt, Artificial Sequence
  Description of Artificial Sequence: Synthetic oligonucleotide
ccagugaaugccaaguucu

SEQ ID NO: 559657 - RNA, 19 nt, Artificial Sequence
  Description of Artificial Sequence: Synthetic oligonucleotide
uuccgaggcgcgaccggac

SEQ ID NO: 559658 - RNA, 19 nt, Artificial Sequence
  Description of Artificial Sequence: Synthetic oligonucleotide
caucggcaacacacaggag

SEQ ID NO: 559659 - RNA, 19 nt, Artificial Sequence
  Description of Artificial Sequence: Synthetic oligonucleotide
ggugccgauaggaaccuca

SEQ ID NO: 559660 - RNA, 19 nt, Artificial Sequence
  Description of Artificial Sequence: Synthetic oligonucleotide
gucguccgcggugaauucc

SEQ ID NO: 559661 - RNA, 19 nt, Artificial Sequence
  Description of Artificial Sequence: Synthetic oligonucleotide
cuucguggccggcugcuca

SEQ ID NO: 559662 - RNA, 19 nt, Artificial Sequence
  Description of Artificial Sequence: Synthetic oligonucleotide
uccgcagcacagaggucau

SEQ ID NO: 559663 - RNA, 19 nt, Artificial Sequence
  Description of Artificial Sequence: Synthetic oligonucleotide
cacacacggcaguggcagc

SEQ ID NO: 559664 - RNA, 19 nt, Artificial Sequence
  Description of Artificial Sequence: Synthetic oligonucleotide
ccaucuaauuggcagaccu

SEQ ID NO: 559665 - RNA, 19 nt, Artificial Sequence
  Description of Artificial Sequence: Synthetic oligonucleotide
agcgcaucgucugcuucug

SEQ ID NO: 559666 - RNA, 19 nt, Artificial Sequence
  Description of Artificial Sequence: Synthetic oligonucleotide
cagucuggcagggauggga

SEQ ID NO: 559667 - RNA, 19 nt, Artificial Sequence
  Description of Artificial Sequence: Synthetic oligonucleotide
caucacgagaaaugauggu

SEQ ID NO: 559668 - RNA, 19 nt, Artificial Sequence
  Description of Artificial Sequence: Synthetic oligonucleotide
augacccaucuaauuggca

SEQ ID NO: 559669 - RNA, 19 nt, Artificial Sequence
  Description of Artificial Sequence: Synthetic oligonucleotide
ggugauaaauugaguccuc

SEQ ID NO: 559670 - RNA, 19 nt, Artificial Sequence
  Description of Artificial Sequence: Synthetic oligonucleotide
guggccggcugcucaggcc

SEQ ID NO: 559671 - RNA, 19 nt, Artificial Sequence
  Description of Artificial Sequence: Synthetic oligonucleotide
gaaguauguguuggagagu

SEQ ID NO: 559672 - RNA, 19 nt, Artificial Sequence
  Description of Artificial Sequence: Synthetic oligonucleotide
agcacucugacugccucua

SEQ ID NO: 559673 - RNA, 19 nt, Artificial Sequence
  Description of Artificial Sequence: Synthetic oligonucleotide
agacgacugcuccgcugug

SEQ ID NO: 559674 - RNA, 19 nt, Artificial Sequence
  Description of Artificial Sequence: Synthetic oligonucleotide
caauaacaggcagacgacu

SEQ ID NO: 559675 - RNA, 19 nt, Artificial Sequence
  Description of Artificial Sequence: Synthetic oligonucleotide
gccgagacuguaucugcac

SEQ ID NO: 559676 - RNA, 19 nt, Artificial Sequence
  Description of Artificial Sequence: Synthetic oligonucleotide
gcaacaucggcaacacaca

SEQ ID NO: 559677 - RNA, 19 nt, Artificial Sequence
  Description of Artificial Sequence: Synthetic oligonucleotide
cacggcaguggcagcucug

SEQ ID NO: 559678 - RNA, 19 nt, Artificial Sequence
  Description of Artificial Sequence: Synthetic oligonucleotide
gcagacgacugcuccgcug

SEQ ID NO: 559679 - RNA, 19 nt, Artificial Sequence
  Description of Artificial Sequence: Synthetic oligonucleotide
agcggcauauuagcacuaa

SEQ ID NO: 559680 - RNA, 19 nt, Artificial Sequence
  Description of Artificial Sequence: Synthetic oligonucleotide
cagacgacugcuccgcugu

SEQ ID NO: 559681 - RNA, 19 nt, Artificial Sequence
  Description of Artificial Sequence: Synthetic oligonucleotide
gaccggacacuggcucagg

SEQ ID NO: 559682 - RNA, 19 nt, Artificial Sequence
  Description of Artificial Sequence: Synthetic oligonucleotide
gcagagagggaagacucuc

SEQ ID NO: 559683 - RNA, 19 nt, Artificial Sequence
  Description of Artificial Sequence: Synthetic oligonucleotide
cacgagaaaugaugguccu

SEQ ID NO: 559684 - RNA, 19 nt, Artificial Sequence
  Description of Artificial Sequence: Synthetic oligonucleotide
gaggcgcgaccggacacug

SEQ ID NO: 559685 - RNA, 19 nt, Artificial Sequence
  Description of Artificial Sequence: Synthetic oligonucleotide
ucaggccgucagcuacagu

SEQ ID NO: 559686 - RNA, 19 nt, Artificial Sequence
  Description of Artificial Sequence: Synthetic oligonucleotide
ggagagcggcauauuagca

SEQ ID NO: 559687 - RNA, 19 nt, Artificial Sequence
  Description of Artificial Sequence: Synthetic oligonucleotide
agggugccgauaggaaccu

SEQ ID NO: 559688 - RNA, 19 nt, Artificial Sequence
  Description of Artificial Sequence: Synthetic oligonucleotide
ccggacacuggcucagggc

SEQ ID NO: 559689 - RNA, 19 nt, Artificial Sequence
  Description of Artificial Sequence: Synthetic oligonucleotide
caaccagauuuaauccagu

SEQ ID NO: 559690 - RNA, 19 nt, Artificial Sequence
  Description of Artificial Sequence: Synthetic oligonucleotide
cuccgcuguggcacaccag

SEQ ID NO: 559691 - RNA, 19 nt, Artificial Sequence
  Description of Artificial Sequence: Synthetic oligonucleotide
agguugcuucagaagcaga

SEQ ID NO: 559692 - RNA, 19 nt, Artificial Sequence
  Description of Artificial Sequence: Synthetic oligonucleotide
cucagacagcgcaucgucu

SEQ ID NO: 559693 - RNA, 19 nt, Artificial Sequence
  Description of Artificial Sequence: Synthetic oligonucleotide
gcggugaauuccgcgugcg

SEQ ID NO: 559694 - RNA, 19 nt, Artificial Sequence
  Description of Artificial Sequence: Synthetic oligonucleotide
guuccgaggcgcgaccgga

SEQ ID NO: 559695 - RNA, 19 nt, Artificial Sequence
  Description of Artificial Sequence: Synthetic oligonucleotide
caccuucguggccggcugc

SEQ ID NO: 559696 - RNA, 19 nt, Artificial Sequence
  Description of Artificial Sequence: Synthetic oligonucleotide
cuccuggcaaccagauuua

SEQ ID NO: 559697 - RNA, 19 nt, Artificial Sequence
  Description of Artificial Sequence: Synthetic oligonucleotide
ccuuugcuaggucuccguc

SEQ ID NO: 559698 - RNA, 19 nt, Artificial Sequence
  Description of Artificial Sequence: Synthetic oligonucleotide
ggagaaccugggcaagaaa

SEQ ID NO: 559699 - RNA, 19 nt, Artificial Sequence
  Description of Artificial Sequence: Synthetic oligonucleotide
acccaucacgagaaaugau

SEQ ID NO: 559700 - RNA, 19 nt, Artificial Sequence
  Description of Artificial Sequence: Synthetic oligonucleotide
ugcuccgcuguggcacacc

SEQ ID NO: 559701 - RNA, 19 nt, Artificial Sequence
  Description of Artificial Sequence: Synthetic oligonucleotide
cuccuuuguagggaaagau

SEQ ID NO: 559702 - RNA, 19 nt, Artificial Sequence
  Description of Artificial Sequence: Synthetic oligonucleotide
uaggucguccgcggugaau

SEQ ID NO: 559703 - RNA, 19 nt, Artificial Sequence
  Description of Artificial Sequence: Synthetic oligonucleotide
gucccucagacagcgcauc

SEQ ID NO: 559704 - RNA, 19 nt, Artificial Sequence
  Description of Artificial Sequence: Synthetic oligonucleotide
cccugggaccaaagguugc

SEQ ID NO: 559705 - RNA, 19 nt, Artificial Sequence
  Description of Artificial Sequence: Synthetic oligonucleotide
ccuugacguaauguacaug

SEQ ID NO: 559706 - RNA, 19 nt, Artificial Sequence
  Description of Artificial Sequence: Synthetic oligonucleotide
gacucuccugcuucccuuu

SEQ ID NO: 559707 - RNA, 19 nt, Artificial Sequence
  Description of Artificial Sequence: Synthetic oligonucleotide
ggugcuacugagcccuggu

SEQ ID NO: 559708 - RNA, 19 nt, Artificial Sequence
  Description of Artificial Sequence: Synthetic oligonucleotide
ggacuauuugaugacccau

SEQ ID NO: 559709 - RNA, 19 nt, Artificial Sequence
  Description of Artificial Sequence: Synthetic oligonucleotide
gcuccgcuguggcacacca

SEQ ID NO: 559710 - RNA, 19 nt, Artificial Sequence
  Description of Artificial Sequence: Synthetic oligonucleotide
ccgagacuguaucugcaca

SEQ ID NO: 559711 - RNA, 19 nt, Artificial Sequence
  Description of Artificial Sequence: Synthetic oligonucleotide
gccugugacgcaaggaugu

SEQ ID NO: 559712 - RNA, 19 nt, Artificial Sequence
  Description of Artificial Sequence: Synthetic oligonucleotide
cagcugucagcaagaauuu

SEQ ID NO: 559713 - RNA, 19 nt, Artificial Sequence
  Description of Artificial Sequence: Synthetic oligonucleotide
gcucaggacacuggcuuga

SEQ ID NO: 559714 - RNA, 19 nt, Artificial Sequence
  Description of Artificial Sequence: Synthetic oligonucleotide
gcggcauauuagcacuaaa

SEQ ID NO: 559715 - RNA, 19 nt, Artificial Sequence
  Description of Artificial Sequence: Synthetic oligonucleotide
gagcggcauauuagcacua

SEQ ID NO: 559716 - RNA, 19 nt, Artificial Sequence
  Description of Artificial Sequence: Synthetic oligonucleotide
ggucguccgcggugaauuc

SEQ ID NO: 559717 - RNA, 19 nt, Artificial Sequence
  Description of Artificial Sequence: Synthetic oligonucleotide
ggaggccgagacuguaucu

SEQ ID NO: 559718 - RNA, 19 nt, Artificial Sequence
  Description of Artificial Sequence: Synthetic oligonucleotide
ccgcgugcgcgccgaaugg

SEQ ID NO: 559719 - RNA, 19 nt, Artificial Sequence
  Description of Artificial Sequence: Synthetic oligonucleotide
ccaccuucguggccggcug

SEQ ID NO: 559720 - RNA, 19 nt, Artificial Sequence
  Description of Artificial Sequence: Synthetic oligonucleotide
cuccgucaugugagcucuc

SEQ ID NO: 559721 - RNA, 19 nt, Artificial Sequence
  Description of Artificial Sequence: Synthetic oligonucleotide
aggcgcgaccggacacugg

SEQ ID NO: 559722 - RNA, 19 nt, Artificial Sequence
  Description of Artificial Sequence: Synthetic oligonucleotide
ccgcggugaauuccgcgug

SEQ ID NO: 559723 - RNA, 19 nt, Artificial Sequence
  Description of Artificial Sequence: Synthetic oligonucleotide
gccuugacguaauguacau

SEQ ID NO: 559724 - RNA, 19 nt, Artificial Sequence
  Description of Artificial Sequence: Synthetic oligonucleotide
aggcuguuccgaggcgcga

SEQ ID NO: 559725 - RNA, 19 nt, Artificial Sequence
  Description of Artificial Sequence: Synthetic oligonucleotide
cuggaggccgagacuguau

SEQ ID NO: 559726 - RNA, 19 nt, Artificial Sequence
  Description of Artificial Sequence: Synthetic oligonucleotide
cgcggugaauuccgcgugc

SEQ ID NO: 559727 - RNA, 19 nt, Artificial Sequence
  Description of Artificial Sequence: Synthetic oligonucleotide
gacugccucuacguugcau

SEQ ID NO: 559728 - RNA, 19 nt, Artificial Sequence
  Description of Artificial Sequence: Synthetic oligonucleotide
ggaugggagagcggcauau

SEQ ID NO: 559729 - RNA, 19 nt, Artificial Sequence
  Description of Artificial Sequence: Synthetic oligonucleotide
ugcugaccccuggcaucac

SEQ ID NO: 559730 - RNA, 19 nt, Artificial Sequence
  Description of Artificial Sequence: Synthetic oligonucleotide
ccgaggcgcgaccggacac

SEQ ID NO: 559731 - RNA, 19 nt, Artificial Sequence
  Description of Artificial Sequence: Synthetic oligonucleotide
cucugacugccucuacguu

SEQ ID NO: 559732 - RNA, 19 nt, Artificial Sequence
  Description of Artificial Sequence: Synthetic oligonucleotide
ccucuacguugcauuggca

SEQ ID NO: 559733 - RNA, 19 nt, Artificial Sequence
  Description of Artificial Sequence: Synthetic oligonucleotide
cuguggcacaccagguguu

SEQ ID NO: 559734 - RNA, 19 nt, Artificial Sequence
  Description of Artificial Sequence: Synthetic oligonucleotide
cuaggucguccgcggugaa

SEQ ID NO: 559735 - RNA, 19 nt, Artificial Sequence
  Description of Artificial Sequence: Synthetic oligonucleotide
gcaaggaugucgaguuccu

SEQ ID NO: 559736 - RNA, 19 nt, Artificial Sequence
  Description of Artificial Sequence: Synthetic oligonucleotide
cugcuccgcuguggcacac

SEQ ID NO: 559737 - RNA, 19 nt, Artificial Sequence
  Description of Artificial Sequence: Synthetic oligonucleotide
ggucuccgucaugugagcu

SEQ ID NO: 559738 - RNA, 19 nt, Artificial Sequence
  Description of Artificial Sequence: Synthetic oligonucleotide
cucagacuguggguuuuau

SEQ ID NO: 559739 - RNA, 19 nt, Artificial Sequence
  Description of Artificial Sequence: Synthetic oligonucleotide
cgaccggacacuggcucag

SEQ ID NO: 559740 - RNA, 19 nt, Artificial Sequence
  Description of Artificial Sequence: Synthetic oligonucleotide
cguccgcggugaauuccgc

SEQ ID NO: 559741 - RNA, 19 nt, Artificial Sequence
  Description of Artificial Sequence: Synthetic oligonucleotide
cgcgugcgcgccgaauggg

SEQ ID NO: 559742 - RNA, 19 nt, Artificial Sequence
  Description of Artificial Sequence: Synthetic oligonucleotide
cgccacacucuucuuagcu

SEQ ID NO: 559743 - RNA, 19 nt, Artificial Sequence
  Description of Artificial Sequence: Synthetic oligonucleotide
cccuuugcuaggucuccgu

SEQ ID NO: 559744 - RNA, 19 nt, Artificial Sequence
  Description of Artificial Sequence: Synthetic oligonucleotide
ggcagacgacugcuccgcu

SEQ ID NO: 559745 - RNA, 19 nt, Artificial Sequence
  Description of Artificial Sequence: Synthetic oligonucleotide
cccgccgcacagucagcca

SEQ ID NO: 559746 - RNA, 19 nt, Artificial Sequence
  Description of Artificial Sequence: Synthetic oligonucleotide
gcgugcgcgccgaaugggu

SEQ ID NO: 559747 - RNA, 19 nt, Artificial Sequence
  Description of Artificial Sequence: Synthetic oligonucleotide
ccgcuguggcacaccaggu

SEQ ID NO: 559748 - RNA, 19 nt, Artificial Sequence
  Description of Artificial Sequence: Synthetic oligonucleotide
ccucuaggucguccgcggu

SEQ ID NO: 559749 - RNA, 19 nt, Artificial Sequence
  Description of Artificial Sequence: Synthetic oligonucleotide
gggcucgaaucagcaugcu

SEQ ID NO: 559750 - RNA, 19 nt, Artificial Sequence
  Description of Artificial Sequence: Synthetic oligonucleotide
gccgucagcuacaguccau

SEQ ID NO: 559751 - RNA, 19 nt, Artificial Sequence
  Description of Artificial Sequence: Synthetic oligonucleotide
ccggcugcucaggccguca

SEQ ID NO: 559752 - RNA, 19 nt, Artificial Sequence
  Description of Artificial Sequence: Synthetic oligonucleotide
gcgcgaccggacacuggcu

SEQ ID NO: 559753 - RNA, 19 nt, Artificial Sequence
  Description of Artificial Sequence: Synthetic oligonucleotide
cgaggcgcgaccggacacu

SEQ ID NO: 559754 - RNA, 19 nt, Artificial Sequence
  Description of Artificial Sequence: Synthetic oligonucleotide
aaucuuaacagguaacccc

SEQ ID NO: 559755 - RNA, 19 nt, Artificial Sequence
  Description of Artificial Sequence: Synthetic oligonucleotide
aaaaucauaccacuccggc

SEQ ID NO: 559756 - RNA, 19 nt, Artificial Sequence
  Description of Artificial Sequence: Synthetic oligonucleotide
aaaucacagacacagaaag

SEQ ID NO: 559757 - RNA, 19 nt, Artificial Sequence
  Description of Artificial Sequence: Synthetic oligonucleotide
aaucauaccacuccggccg

SEQ ID NO: 559758 - RNA, 19 nt, Artificial Sequence
  Description of Artificial Sequence: Synthetic oligonucleotide
uuugcuaugcuauauaccc

SEQ ID NO: 559759 - RNA, 19 nt, Artificial Sequence
  Description of Artificial Sequence: Synthetic oligonucleotide
uugguaauaguucagagga

SEQ ID NO: 559760 - RNA, 19 nt, Artificial Sequence
  Description of Artificial Sequence: Synthetic oligonucleotide
cuucauaugacucaugucc

SEQ ID NO: 559761 - RNA, 19 nt, Artificial Sequence
  Description of Artificial Sequence: Synthetic oligonucleotide
agauaaagaacucuguuuc

SEQ ID NO: 559762 - RNA, 19 nt, Artificial Sequence
  Description of Artificial Sequence: Synthetic oligonucleotide
auuaaauggucagagagcc

SEQ ID NO: 559763 - RNA, 19 nt, Artificial Sequence
  Description of Artificial Sequence: Synthetic oligonucleotide
uuuuauucuagacugaaaa

SEQ ID NO: 559764 - RNA, 19 nt, Artificial Sequence
  Description of Artificial Sequence: Synthetic oligonucleotide
aaacaaaacaaaacaaaac

SEQ ID NO: 559765 - RNA, 19 nt, Artificial Sequence
  Description of Artificial Sequence: Synthetic oligonucleotide
uaaacaaaugucuuaagac

SEQ ID NO: 559766 - RNA, 19 nt, Artificial Sequence
  Description of Artificial Sequence: Synthetic oligonucleotide
uaugcuauauacccaaucc

SEQ ID NO: 559767 - RNA, 19 nt, Artificial Sequence
  Description of Artificial Sequence: Synthetic oligonucleotide
aaaucauaccacuccggcc

SEQ ID NO: 559768 - RNA, 19 nt, Artificial Sequence
  Description of Artificial Sequence: Synthetic oligonucleotide
uucacuauaucacauauau

SEQ ID NO: 559769 - RNA, 19 nt, Artificial Sequence
  Description of Artificial Sequence: Synthetic oligonucleotide
aaaucuuaacagguaaccc

SEQ ID NO: 559770 - RNA, 19 nt, Artificial Sequence
  Description of Artificial Sequence: Synthetic oligonucleotide
aguauguuuagcuuaaaca

SEQ ID NO: 559771 - RNA, 19 nt, Artificial Sequence
  Description of Artificial Sequence: Synthetic oligonucleotide
aucaauccaacauaucuac

SEQ ID NO: 559772 - RNA, 19 nt, Artificial Sequence
  Description of Artificial Sequence: Synthetic oligonucleotide
ucugcaguaagaaagcugu

SEQ ID NO: 559773 - RNA, 19 nt, Artificial Sequence
  Description of Artificial Sequence: Synthetic oligonucleotide
aacaaaugucuuaagacuc

SEQ ID NO: 559774 - RNA, 19 nt, Artificial Sequence
  Description of Artificial Sequence: Synthetic oligonucleotide
ugagauaaaauauuguuuu

SEQ ID NO: 559775 - RNA, 19 nt, Artificial Sequence
  Description of Artificial Sequence: Synthetic oligonucleotide
aauauuguuuucuucccca

SEQ ID NO: 559776 - RNA, 19 nt, Artificial Sequence
  Description of Artificial Sequence: Synthetic oligonucleotide
aaagucagagcaugguacg

SEQ ID NO: 559777 - RNA, 19 nt, Artificial Sequence
  Description of Artificial Sequence: Synthetic oligonucleotide
auaaaguccacuccugaac

SEQ ID NO: 559778 - RNA, 19 nt, Artificial Sequence
  Description of Artificial Sequence: Synthetic oligonucleotide
aauacaccuuggcaggccc

SEQ ID NO: 559779 - RNA, 19 nt, Artificial Sequence
  Description of Artificial Sequence: Synthetic oligonucleotide
caugccuuuagaauaaagc

SEQ ID NO: 559780 - RNA, 19 nt, Artificial Sequence
  Description of Artificial Sequence: Synthetic oligonucleotide
aaaacaaaacaaaacaaaa

SEQ ID NO: 559781 - RNA, 19 nt, Artificial Sequence
  Description of Artificial Sequence: Synthetic oligonucleotide
ugugaggaccccaaaaugc

SEQ ID NO: 559782 - RNA, 19 nt, Artificial Sequence
  Description of Artificial Sequence: Synthetic oligonucleotide
ugcuauauacccaaucccc

SEQ ID NO: 559783 - RNA, 19 nt, Artificial Sequence
  Description of Artificial Sequence: Synthetic oligonucleotide
uguggaauggaucucugcc

SEQ ID NO: 559784 - RNA, 19 nt, Artificial Sequence
  Description of Artificial Sequence: Synthetic oligonucleotide
uuugcaaauaccucuuggc

SEQ ID NO: 559785 - RNA, 19 nt, Artificial Sequence
  Description of Artificial Sequence: Synthetic oligonucleotide
uaaaaucauaccacuccgg

SEQ ID NO: 559786 - RNA, 19 nt, Artificial Sequence
  Description of Artificial Sequence: Synthetic oligonucleotide
aagauaaagaacucuguuu

SEQ ID NO: 559787 - RNA, 19 nt, Artificial Sequence
  Description of Artificial Sequence: Synthetic oligonucleotide
uaguauuguagacagauuu

SEQ ID NO: 559788 - RNA, 19 nt, Artificial Sequence
  Description of Artificial Sequence: Synthetic oligonucleotide
agaauaaagcaaauacacc

SEQ ID NO: 559789 - RNA, 19 nt, Artificial Sequence
  Description of Artificial Sequence: Synthetic oligonucleotide
uaucuuuaugaauagcaga

SEQ ID NO: 559790 - RNA, 19 nt, Artificial Sequence
  Description of Artificial Sequence: Synthetic oligonucleotide
ucaacaugccuuuagaaua

SEQ ID NO: 559791 - RNA, 19 nt, Artificial Sequence
  Description of Artificial Sequence: Synthetic oligonucleotide
ucaacaguaacaacaggac

SEQ ID NO: 559792 - RNA, 19 nt, Artificial Sequence
  Description of Artificial Sequence: Synthetic oligonucleotide
auauccgacagcaucauac

SEQ ID NO: 559793 - RNA, 19 nt, Artificial Sequence
  Description of Artificial Sequence: Synthetic oligonucleotide
guauguuuagcuuaaacaa

SEQ ID NO: 559794 - RNA, 19 nt, Artificial Sequence
  Description of Artificial Sequence: Synthetic oligonucleotide
uaggccgaaagucuggccg

SEQ ID NO: 559795 - RNA, 19 nt, Artificial Sequence
  Description of Artificial Sequence: Synthetic oligonucleotide
ucgugcacggcuaagacca

SEQ ID NO: 559796 - RNA, 19 nt, Artificial Sequence
  Description of Artificial Sequence: Synthetic oligonucleotide
cauggauuggccacuaugc

SEQ ID NO: 559797 - RNA, 19 nt, Artificial Sequence
  Description of Artificial Sequence: Synthetic oligonucleotide
uaagacacacuauauugug

SEQ ID NO: 559798 - RNA, 19 nt, Artificial Sequence
  Description of Artificial Sequence: Synthetic oligonucleotide
uugcaaauaccucuuggcc

SEQ ID NO: 559799 - RNA, 19 nt, Artificial Sequence
  Description of Artificial Sequence: Synthetic oligonucleotide
acuccguaaaaucauacca

SEQ ID NO: 559800 - RNA, 19 nt, Artificial Sequence
  Description of Artificial Sequence: Synthetic oligonucleotide
aaacugcccacauuuuguc

SEQ ID NO: 559801 - RNA, 19 nt, Artificial Sequence
  Description of Artificial Sequence: Synthetic oligonucleotide
aaacuugccguugucuucg

SEQ ID NO: 559802 - RNA, 19 nt, Artificial Sequence
  Description of Artificial Sequence: Synthetic oligonucleotide
cuauuuaccucuacugacc

SEQ ID NO: 559803 - RNA, 19 nt, Artificial Sequence
  Description of Artificial Sequence: Synthetic oligonucleotide
aagacacacuauauugugc

SEQ ID NO: 559804 - RNA, 19 nt, Artificial Sequence
  Description of Artificial Sequence: Synthetic oligonucleotide
aaaucaauucugaaaguca

SEQ ID NO: 559805 - RNA, 19 nt, Artificial Sequence
  Description of Artificial Sequence: Synthetic oligonucleotide
uucauuuaguauuguagac

SEQ ID NO: 559806 - RNA, 19 nt, Artificial Sequence
  Description of Artificial Sequence: Synthetic oligonucleotide
uacggaguuuaaaucacag

SEQ ID NO: 559807 - RNA, 19 nt, Artificial Sequence
  Description of Artificial Sequence: Synthetic oligonucleotide
ugguacggaguuuaaauca

SEQ ID NO: 559808 - RNA, 19 nt, Artificial Sequence
  Description of Artificial Sequence: Synthetic oligonucleotide
uauuuaacuacacuuccuu

SEQ ID NO: 559809 - RNA, 19 nt, Artificial Sequence
  Description of Artificial Sequence: Synthetic oligonucleotide
uguuuagcuuaaacaagag

SEQ ID NO: 559810 - RNA, 19 nt, Artificial Sequence
  Description of Artificial Sequence: Synthetic oligonucleotide
agucacuccaugcucuggc

SEQ ID NO: 559811 - RNA, 19 nt, Artificial Sequence
  Description of Artificial Sequence: Synthetic oligonucleotide
ugcaaauaccucuuggccu

SEQ ID NO: 559812 - RNA, 19 nt, Artificial Sequence
  Description of Artificial Sequence: Synthetic oligonucleotide
ucaacauuccagaaaccac

SEQ ID NO: 559813 - RNA, 19 nt, Artificial Sequence
  Description of Artificial Sequence: Synthetic oligonucleotide
caaaacaaaacaaaacaaa

SEQ ID NO: 559814 - RNA, 19 nt, Artificial Sequence
  Description of Artificial Sequence: Synthetic oligonucleotide
agaauaucaauccaacaua

SEQ ID NO: 559815 - RNA, 19 nt, Artificial Sequence
  Description of Artificial Sequence: Synthetic oligonucleotide
cauguccuugcuaagacac

SEQ ID NO: 559816 - RNA, 19 nt, Artificial Sequence
  Description of Artificial Sequence: Synthetic oligonucleotide
aaauauggagguggggagg

SEQ ID NO: 559817 - RNA, 19 nt, Artificial Sequence
  Description of Artificial Sequence: Synthetic oligonucleotide
uacaauucucacuuccacc

SEQ ID NO: 559818 - RNA, 19 nt, Artificial Sequence
  Description of Artificial Sequence: Synthetic oligonucleotide
augguacggaguuuaaauc

SEQ ID NO: 559819 - RNA, 19 nt, Artificial Sequence
  Description of Artificial Sequence: Synthetic oligonucleotide
ucauggauuggccacuaug

SEQ ID NO: 559820 - RNA, 19 nt, Artificial Sequence
  Description of Artificial Sequence: Synthetic oligonucleotide
aaauacaccuuggcaggcc

SEQ ID NO: 559821 - RNA, 19 nt, Artificial Sequence
  Description of Artificial Sequence: Synthetic oligonucleotide
ugccuuuagaauaaagcaa

SEQ ID NO: 559822 - RNA, 19 nt, Artificial Sequence
  Description of Artificial Sequence: Synthetic oligonucleotide
aaccuuagugacaacuacg

SEQ ID NO: 559823 - RNA, 19 nt, Artificial Sequence
  Description of Artificial Sequence: Synthetic oligonucleotide
aagaaccuuagugacaacu

SEQ ID NO: 559824 - RNA, 19 nt, Artificial Sequence
  Description of Artificial Sequence: Synthetic oligonucleotide
aaaguuugugcugucucag

SEQ ID NO: 559825 - RNA, 19 nt, Artificial Sequence
  Description of Artificial Sequence: Synthetic oligonucleotide
agucacaauucccugacca

SEQ ID NO: 559826 - RNA, 19 nt, Artificial Sequence
  Description of Artificial Sequence: Synthetic oligonucleotide
agagcgguagaaauaauuc

SEQ ID NO: 559827 - RNA, 19 nt, Artificial Sequence
  Description of Artificial Sequence: Synthetic oligonucleotide
gaccccaaaaugcucagcc

SEQ ID NO: 559828 - RNA, 19 nt, Artificial Sequence
  Description of Artificial Sequence: Synthetic oligonucleotide
ugaccgaaguuuuauuuca

SEQ ID NO: 559829 - RNA, 19 nt, Artificial Sequence
  Description of Artificial Sequence: Synthetic oligonucleotide
uacgcauucugcuucauau

SEQ ID NO: 559830 - RNA, 19 nt, Artificial Sequence
  Description of Artificial Sequence: Synthetic oligonucleotide
aagacucaauauuuaacua

SEQ ID NO: 559831 - RNA, 19 nt, Artificial Sequence
  Description of Artificial Sequence: Synthetic oligonucleotide
aagucacaauucccugacc

SEQ ID NO: 559832 - RNA, 19 nt, Artificial Sequence
  Description of Artificial Sequence: Synthetic oligonucleotide
agaauucagagaagggagc

SEQ ID NO: 559833 - RNA, 19 nt, Artificial Sequence
  Description of Artificial Sequence: Synthetic oligonucleotide
uccguaaaaucauaccacu

SEQ ID NO: 559834 - RNA, 19 nt, Artificial Sequence
  Description of Artificial Sequence: Synthetic oligonucleotide
uaaacaguauguuuagcuu

SEQ ID NO: 559835 - RNA, 19 nt, Artificial Sequence
  Description of Artificial Sequence: Synthetic oligonucleotide
ugacucauguccuugcuaa

SEQ ID NO: 559836 - RNA, 19 nt, Artificial Sequence
  Description of Artificial Sequence: Synthetic oligonucleotide
ugcacggcuaagaccaggg

SEQ ID NO: 559837 - RNA, 19 nt, Artificial Sequence
  Description of Artificial Sequence: Synthetic oligonucleotide
acaauaaaguuugugcugu

SEQ ID NO: 559838 - RNA, 19 nt, Artificial Sequence
  Description of Artificial Sequence: Synthetic oligonucleotide
uuuacugcuugguaauagu

SEQ ID NO: 559839 - RNA, 19 nt, Artificial Sequence
  Description of Artificial Sequence: Synthetic oligonucleotide
acuaaacaaaugucuuaag

SEQ ID NO: 559840 - RNA, 19 nt, Artificial Sequence
  Description of Artificial Sequence: Synthetic oligonucleotide
cuugccguugucuucgccc

SEQ ID NO: 559841 - RNA, 19 nt, Artificial Sequence
  Description of Artificial Sequence: Synthetic oligonucleotide
uggaguagcaaagggaaca

SEQ ID NO: 559842 - RNA, 19 nt, Artificial Sequence
  Description of Artificial Sequence: Synthetic oligonucleotide
uuuaccucuacugaccgaa

SEQ ID NO: 559843 - RNA, 19 nt, Artificial Sequence
  Description of Artificial Sequence: Synthetic oligonucleotide
gacuccguaaaaucauacc

SEQ ID NO: 559844 - RNA, 19 nt, Artificial Sequence
  Description of Artificial Sequence: Synthetic oligonucleotide
uuacuaaacaaaugucuua

SEQ ID NO: 559845 - RNA, 19 nt, Artificial Sequence
  Description of Artificial Sequence: Synthetic oligonucleotide
aaccuaacagcugaagccu

SEQ ID NO: 559846 - RNA, 19 nt, Artificial Sequence
  Description of Artificial Sequence: Synthetic oligonucleotide
uccaauagaugagauaaaa

SEQ ID NO: 559847 - RNA, 19 nt, Artificial Sequence
  Description of Artificial Sequence: Synthetic oligonucleotide
cuccguaaaaucauaccac

SEQ ID NO: 559848 - RNA, 19 nt, Artificial Sequence
  Description of Artificial Sequence: Synthetic oligonucleotide
uauauacccaauccccuuc

SEQ ID NO: 559849 - RNA, 19 nt, Artificial Sequence
  Description of Artificial Sequence: Synthetic oligonucleotide
ugcuaugcuauauacccaa

SEQ ID NO: 559850 - RNA, 19 nt, Artificial Sequence
  Description of Artificial Sequence: Synthetic oligonucleotide
uauacucccauauuuucuu

SEQ ID NO: 559851 - RNA, 19 nt, Artificial Sequence
  Description of Artificial Sequence: Synthetic oligonucleotide
caaagggaacaccaguccc

SEQ ID NO: 559852 - RNA, 19 nt, Artificial Sequence
  Description of Artificial Sequence: Synthetic oligonucleotide
gaguugcuuagcuggagag

SEQ ID NO: 559853 - RNA, 19 nt, Artificial Sequence
  Description of Artificial Sequence: Synthetic oligonucleotide
ucccacuacuguuagcaag

SEQ ID NO: 559854 - RNA, 19 nt, Artificial Sequence
  Description of Artificial Sequence: Synthetic oligonucleotide
gaaccuuagugacaacuac

SEQ ID NO: 559855 - RNA, 19 nt, Artificial Sequence
  Description of Artificial Sequence: Synthetic oligonucleotide
guaauuuacagccgcuuca

SEQ ID NO: 559856 - RNA, 19 nt, Artificial Sequence
  Description of Artificial Sequence: Synthetic oligonucleotide
aaguacuccugucauggau

SEQ ID NO: 559857 - RNA, 19 nt, Artificial Sequence
  Description of Artificial Sequence: Synthetic oligonucleotide
gacucaauauuuaacuaca

SEQ ID NO: 559858 - RNA, 19 nt, Artificial Sequence
  Description of Artificial Sequence: Synthetic oligonucleotide
aagccuaacugcaucaaca

SEQ ID NO: 559859 - RNA, 19 nt, Artificial Sequence
  Description of Artificial Sequence: Synthetic oligonucleotide
acauacaauaaaguuugug

SEQ ID NO: 559860 - RNA, 19 nt, Artificial Sequence
  Description of Artificial Sequence: Synthetic oligonucleotide
agccuaacugcaucaacag

SEQ ID NO: 559861 - RNA, 19 nt, Artificial Sequence
  Description of Artificial Sequence: Synthetic oligonucleotide
cugugguuuuacaaugagc

SEQ ID NO: 559862 - RNA, 19 nt, Artificial Sequence
  Description of Artificial Sequence: Synthetic oligonucleotide
agggaaaggaacuccgcug

SEQ ID NO: 559863 - RNA, 19 nt, Artificial Sequence
  Description of Artificial Sequence: Synthetic oligonucleotide
cacggcuaagaccagggcc

SEQ ID NO: 559864 - RNA, 19 nt, Artificial Sequence
  Description of Artificial Sequence: Synthetic oligonucleotide
ugcuaagacacacuauauu

SEQ ID NO: 559865 - RNA, 19 nt, Artificial Sequence
  Description of Artificial Sequence: Synthetic oligonucleotide
aagucagagcaugguacgg

SEQ ID NO: 559866 - RNA, 19 nt, Artificial Sequence
  Description of Artificial Sequence: Synthetic oligonucleotide
gguaauaguucagaggaug

SEQ ID NO: 559867 - RNA, 19 nt, Artificial Sequence
  Description of Artificial Sequence: Synthetic oligonucleotide
gucagagagccuuuucaag

SEQ ID NO: 559868 - RNA, 19 nt, Artificial Sequence
  Description of Artificial Sequence: Synthetic oligonucleotide
uucccuaggccgaaagucu

SEQ ID NO: 559869 - RNA, 19 nt, Artificial Sequence
  Description of Artificial Sequence: Synthetic oligonucleotide
cuuaacagguaaccccacc

SEQ ID NO: 559870 - RNA, 19 nt, Artificial Sequence
  Description of Artificial Sequence: Synthetic oligonucleotide
cuaugcuauauacccaauc

SEQ ID NO: 559871 - RNA, 19 nt, Artificial Sequence
  Description of Artificial Sequence: Synthetic oligonucleotide
ucaauccaacauaucuacu

SEQ ID NO: 559872 - RNA, 19 nt, Artificial Sequence
  Description of Artificial Sequence: Synthetic oligonucleotide
acaagagcgguagaaauaa

SEQ ID NO: 559873 - RNA, 19 nt, Artificial Sequence
  Description of Artificial Sequence: Synthetic oligonucleotide
caguauguuuagcuuaaac

SEQ ID NO: 559874 - RNA, 19 nt, Artificial Sequence
  Description of Artificial Sequence: Synthetic oligonucleotide
uguaacucagggugaaaua

SEQ ID NO: 559875 - RNA, 19 nt, Artificial Sequence
  Description of Artificial Sequence: Synthetic oligonucleotide
agcgucuucauagaauucu

SEQ ID NO: 559876 - RNA, 19 nt, Artificial Sequence
  Description of Artificial Sequence: Synthetic oligonucleotide
uuucacuauaucacauaua

SEQ ID NO: 559877 - RNA, 19 nt, Artificial Sequence
  Description of Artificial Sequence: Synthetic oligonucleotide
aaacuguggaauggaucuc

SEQ ID NO: 559878 - RNA, 19 nt, Artificial Sequence
  Description of Artificial Sequence: Synthetic oligonucleotide
agagccuuuucaaguaaac

SEQ ID NO: 559879 - RNA, 19 nt, Artificial Sequence
  Description of Artificial Sequence: Synthetic oligonucleotide
aagacccaaaugacacccc

SEQ ID NO: 559880 - RNA, 19 nt, Artificial Sequence
  Description of Artificial Sequence: Synthetic oligonucleotide
uugcuaugcuauauaccca

SEQ ID NO: 559881 - RNA, 19 nt, Artificial Sequence
  Description of Artificial Sequence: Synthetic oligonucleotide
auuuaacuacacuuccuuu

SEQ ID NO: 559882 - RNA, 19 nt, Artificial Sequence
  Description of Artificial Sequence: Synthetic oligonucleotide
uugcuaagacacacuauau

SEQ ID NO: 559883 - RNA, 19 nt, Artificial Sequence
  Description of Artificial Sequence: Synthetic oligonucleotide
aaagucuggccggggacuc

SEQ ID NO: 559884 - RNA, 19 nt, Artificial Sequence
  Description of Artificial Sequence: Synthetic oligonucleotide
gcuuaaacaagagcgguag

SEQ ID NO: 559885 - RNA, 19 nt, Artificial Sequence
  Description of Artificial Sequence: Synthetic oligonucleotide
agaugagauaaaauauugu

SEQ ID NO: 559886 - RNA, 19 nt, Artificial Sequence
  Description of Artificial Sequence: Synthetic oligonucleotide
aacuacgcauucugcuuca

SEQ ID NO: 559887 - RNA, 19 nt, Artificial Sequence
  Description of Artificial Sequence: Synthetic oligonucleotide
gaagccuaacugcaucaac

SEQ ID NO: 559888 - RNA, 19 nt, Artificial Sequence
  Description of Artificial Sequence: Synthetic oligonucleotide
uagcuuaaacaagagcggu

SEQ ID NO: 559889 - RNA, 19 nt, Artificial Sequence
  Description of Artificial Sequence: Synthetic oligonucleotide
aaaguacuccugucaugga

SEQ ID NO: 559890 - RNA, 19 nt, Artificial Sequence
  Description of Artificial Sequence: Synthetic oligonucleotide
aagagcgguagaaauaauu

SEQ ID NO: 559891 - RNA, 19 nt, Artificial Sequence
  Description of Artificial Sequence: Synthetic oligonucleotide
acaacuacgcauucugcuu

SEQ ID NO: 559892 - RNA, 19 nt, Artificial Sequence
  Description of Artificial Sequence: Synthetic oligonucleotide
uuuuguaacucagggugaa

SEQ ID NO: 559893 - RNA, 19 nt, Artificial Sequence
  Description of Artificial Sequence: Synthetic oligonucleotide
ucucgugcacggcuaagac

SEQ ID NO: 559894 - RNA, 19 nt, Artificial Sequence
  Description of Artificial Sequence: Synthetic oligonucleotide
ugauacuagcgucuucaua

SEQ ID NO: 559895 - RNA, 19 nt, Artificial Sequence
  Description of Artificial Sequence: Synthetic oligonucleotide
gacaacuacgcauucugcu

SEQ ID NO: 559896 - RNA, 19 nt, Artificial Sequence
  Description of Artificial Sequence: Synthetic oligonucleotide
auauacccaauccccuuca

SEQ ID NO: 559897 - RNA, 19 nt, Artificial Sequence
  Description of Artificial Sequence: Synthetic oligonucleotide
auggauuggccacuaugcu

SEQ ID NO: 559898 - RNA, 19 nt, Artificial Sequence
  Description of Artificial Sequence: Synthetic oligonucleotide
acucccauauuuucuuaga

SEQ ID NO: 559899 - RNA, 19 nt, Artificial Sequence
  Description of Artificial Sequence: Synthetic oligonucleotide
uaccucuacugaccgaagu

SEQ ID NO: 559900 - RNA, 19 nt, Artificial Sequence
  Description of Artificial Sequence: Synthetic oligonucleotide
gggagcaguaauuuacagc

SEQ ID NO: 559901 - RNA, 19 nt, Artificial Sequence
  Description of Artificial Sequence: Synthetic oligonucleotide
acggaguuuaaaucacaga

SEQ ID NO: 559902 - RNA, 19 nt, Artificial Sequence
  Description of Artificial Sequence: Synthetic oligonucleotide
cuucccuaggccgaaaguc

SEQ ID NO: 559903 - RNA, 19 nt, Artificial Sequence
  Description of Artificial Sequence: Synthetic oligonucleotide
cucgugcacggcuaagacc

SEQ ID NO: 559904 - RNA, 19 nt, Artificial Sequence
  Description of Artificial Sequence: Synthetic oligonucleotide
ucacuauaucacauauaua

SEQ ID NO: 559905 - RNA, 19 nt, Artificial Sequence
  Description of Artificial Sequence: Synthetic oligonucleotide
agagacgccuccuuuggaa

SEQ ID NO: 559906 - RNA, 19 nt, Artificial Sequence
  Description of Artificial Sequence: Synthetic oligonucleotide
cccacuacuguuagcaagg

SEQ ID NO: 559907 - RNA, 19 nt, Artificial Sequence
  Description of Artificial Sequence: Synthetic oligonucleotide
auacccaauccccuucaca

SEQ ID NO: 559908 - RNA, 19 nt, Artificial Sequence
  Description of Artificial Sequence: Synthetic oligonucleotide
uuaccucuacugaccgaag

SEQ ID NO: 559909 - RNA, 19 nt, Artificial Sequence
  Description of Artificial Sequence: Synthetic oligonucleotide
caacuacgcauucugcuuc

SEQ ID NO: 559910 - RNA, 19 nt, Artificial Sequence
  Description of Artificial Sequence: Synthetic oligonucleotide
ucccuaggccgaaagucug

SEQ ID NO: 559911 - RNA, 19 nt, Artificial Sequence
  Description of Artificial Sequence: Synthetic oligonucleotide
agacgccuccuuuggaaag

SEQ ID NO: 559912 - RNA, 19 nt, Artificial Sequence
  Description of Artificial Sequence: Synthetic oligonucleotide
aaauauccgacagcaucau

SEQ ID NO: 559913 - RNA, 19 nt, Artificial Sequence
  Description of Artificial Sequence: Synthetic oligonucleotide
gucacaauucccugaccac

SEQ ID NO: 559914 - RNA, 19 nt, Artificial Sequence
  Description of Artificial Sequence: Synthetic oligonucleotide
accacuccggccgauggcg

SEQ ID NO: 559915 - RNA, 19 nt, Artificial Sequence
  Description of Artificial Sequence: Synthetic oligonucleotide
gacucauguccuugcuaag

SEQ ID NO: 559916 - RNA, 19 nt, Artificial Sequence
  Description of Artificial Sequence: Synthetic oligonucleotide
gacgccuccuuuggaaagg

SEQ ID NO: 559917 - RNA, 19 nt, Artificial Sequence
  Description of Artificial Sequence: Synthetic oligonucleotide
auacuagcgucuucauaga

SEQ ID NO: 559918 - RNA, 19 nt, Artificial Sequence
  Description of Artificial Sequence: Synthetic oligonucleotide
aauauccgacagcaucaua

SEQ ID NO: 559919 - RNA, 19 nt, Artificial Sequence
  Description of Artificial Sequence: Synthetic oligonucleotide
auacaguugucuucauuua

SEQ ID NO: 559920 - RNA, 19 nt, Artificial Sequence
  Description of Artificial Sequence: Synthetic oligonucleotide
cauaaaguccacuccugaa

SEQ ID NO: 559921 - RNA, 19 nt, Artificial Sequence
  Description of Artificial Sequence: Synthetic oligonucleotide
accgaaguuuuauuucaaa

SEQ ID NO: 559922 - RNA, 19 nt, Artificial Sequence
  Description of Artificial Sequence: Synthetic oligonucleotide
ugguaauaguucagaggau

SEQ ID NO: 559923 - RNA, 19 nt, Artificial Sequence
  Description of Artificial Sequence: Synthetic oligonucleotide
cacuacuguuagcaaggcc

SEQ ID NO: 559924 - RNA, 19 nt, Artificial Sequence
  Description of Artificial Sequence: Synthetic oligonucleotide
caugguacggaguuuaaau

SEQ ID NO: 559925 - RNA, 19 nt, Artificial Sequence
  Description of Artificial Sequence: Synthetic oligonucleotide
acggcuaagaccagggcca

SEQ ID NO: 559926 - RNA, 19 nt, Artificial Sequence
  Description of Artificial Sequence: Synthetic oligonucleotide
acgcauucugcuucauaug

SEQ ID NO: 559927 - RNA, 19 nt, Artificial Sequence
  Description of Artificial Sequence: Synthetic oligonucleotide
acucauguccuugcuaaga

SEQ ID NO: 559928 - RNA, 19 nt, Artificial Sequence
  Description of Artificial Sequence: Synthetic oligonucleotide
acuaugguccuugggaaaa

SEQ ID NO: 559929 - RNA, 19 nt, Artificial Sequence
  Description of Artificial Sequence: Synthetic oligonucleotide
uugccguugucuucgcccu

SEQ ID NO: 559930 - RNA, 19 nt, Artificial Sequence
  Description of Artificial Sequence: Synthetic oligonucleotide
cuuuuauucuagacugaaa

SEQ ID NO: 559931 - RNA, 19 nt, Artificial Sequence
  Description of Artificial Sequence: Synthetic oligonucleotide
ucauaugacucauguccuu

SEQ ID NO: 559932 - RNA, 19 nt, Artificial Sequence
  Description of Artificial Sequence: Synthetic oligonucleotide
acaugccuuuagaauaaag

SEQ ID NO: 559933 - RNA, 19 nt, Artificial Sequence
  Description of Artificial Sequence: Synthetic oligonucleotide
agggaacuaugguccuugg

SEQ ID NO: 559934 - RNA, 19 nt, Artificial Sequence
  Description of Artificial Sequence: Synthetic oligonucleotide
caauucccugaccacccgc

SEQ ID NO: 559935 - RNA, 19 nt, Artificial Sequence
  Description of Artificial Sequence: Synthetic oligonucleotide
agugacaacuacgcauucu

SEQ ID NO: 559936 - RNA, 19 nt, Artificial Sequence
  Description of Artificial Sequence: Synthetic oligonucleotide
ucacaagcucaugguauca

SEQ ID NO: 559937 - RNA, 19 nt, Artificial Sequence
  Description of Artificial Sequence: Synthetic oligonucleotide
accucuacugaccgaaguu

SEQ ID NO: 559938 - RNA, 19 nt, Artificial Sequence
  Description of Artificial Sequence: Synthetic oligonucleotide
auuuaccucuacugaccga

SEQ ID NO: 559939 - RNA, 19 nt, Artificial Sequence
  Description of Artificial Sequence: Synthetic oligonucleotide
gcuaagaccagggccauug

SEQ ID NO: 559940 - RNA, 19 nt, Artificial Sequence
  Description of Artificial Sequence: Synthetic oligonucleotide
cugaagccuaacugcauca

SEQ ID NO: 559941 - RNA, 19 nt, Artificial Sequence
  Description of Artificial Sequence: Synthetic oligonucleotide
caacaugccuuuagaauaa

SEQ ID NO: 559942 - RNA, 19 nt, Artificial Sequence
  Description of Artificial Sequence: Synthetic oligonucleotide
cuccugucauggauuggcc

SEQ ID NO: 559943 - RNA, 19 nt, Artificial Sequence
  Description of Artificial Sequence: Synthetic oligonucleotide
agccgcuucaaaaccuaac

SEQ ID NO: 559944 - RNA, 19 nt, Artificial Sequence
  Description of Artificial Sequence: Synthetic oligonucleotide
ccccacuuaauuucugggg

SEQ ID NO: 559945 - RNA, 19 nt, Artificial Sequence
  Description of Artificial Sequence: Synthetic oligonucleotide
cuaggccgaaagucuggcc

SEQ ID NO: 559946 - RNA, 19 nt, Artificial Sequence
  Description of Artificial Sequence: Synthetic oligonucleotide
caggacugaguggauauuc

SEQ ID NO: 559947 - RNA, 19 nt, Artificial Sequence
  Description of Artificial Sequence: Synthetic oligonucleotide
acuagcgucuucauagaau

SEQ ID NO: 559948 - RNA, 19 nt, Artificial Sequence
  Description of Artificial Sequence: Synthetic oligonucleotide
cauagaauucuuugucugu

SEQ ID NO: 559949 - RNA, 19 nt, Artificial Sequence
  Description of Artificial Sequence: Synthetic oligonucleotide
agucagagcaugguacgga

SEQ ID NO: 559950 - RNA, 19 nt, Artificial Sequence
  Description of Artificial Sequence: Synthetic oligonucleotide
cuagcgucuucauagaauu

SEQ ID NO: 559951 - RNA, 19 nt, Artificial Sequence
  Description of Artificial Sequence: Synthetic oligonucleotide
gggaacuaugguccuuggg

SEQ ID NO: 559952 - RNA, 19 nt, Artificial Sequence
  Description of Artificial Sequence: Synthetic oligonucleotide
acacacuauauugugcauu

SEQ ID NO: 559953 - RNA, 19 nt, Artificial Sequence
  Description of Artificial Sequence: Synthetic oligonucleotide
ugaagccuaacugcaucaa

SEQ ID NO: 559954 - RNA, 19 nt, Artificial Sequence
  Description of Artificial Sequence: Synthetic oligonucleotide
uaccacuccggccgauggc

SEQ ID NO: 559955 - RNA, 19 nt, Artificial Sequence
  Description of Artificial Sequence: Synthetic oligonucleotide
augacucauguccuugcua

SEQ ID NO: 559956 - RNA, 19 nt, Artificial Sequence
  Description of Artificial Sequence: Synthetic oligonucleotide
ugugugauacuagcgucuu

SEQ ID NO: 559957 - RNA, 19 nt, Artificial Sequence
  Description of Artificial Sequence: Synthetic oligonucleotide
uagcgucuucauagaauuc

SEQ ID NO: 559958 - RNA, 19 nt, Artificial Sequence
  Description of Artificial Sequence: Synthetic oligonucleotide
gguacggaguuuaaaucac

SEQ ID NO: 559959 - RNA, 19 nt, Artificial Sequence
  Description of Artificial Sequence: Synthetic oligonucleotide
aaauaccucuuggccuuca

SEQ ID NO: 559960 - RNA, 19 nt, Artificial Sequence
  Description of Artificial Sequence: Synthetic oligonucleotide
cuaacagcugaagccuaac

SEQ ID NO: 559961 - RNA, 19 nt, Artificial Sequence
  Description of Artificial Sequence: Synthetic oligonucleotide
uacugaccgaaguuuuauu

SEQ ID NO: 559962 - RNA, 19 nt, Artificial Sequence
  Description of Artificial Sequence: Synthetic oligonucleotide
uacuguuagcaaggccaag

SEQ ID NO: 559963 - RNA, 19 nt, Artificial Sequence
  Description of Artificial Sequence: Synthetic oligonucleotide
aaugagcaccaagaaccuu

SEQ ID NO: 559964 - RNA, 19 nt, Artificial Sequence
  Description of Artificial Sequence: Synthetic oligonucleotide
agucuggccggggacuccg

SEQ ID NO: 559965 - RNA, 19 nt, Artificial Sequence
  Description of Artificial Sequence: Synthetic oligonucleotide
guagacagauuuccuuaaa

SEQ ID NO: 559966 - RNA, 19 nt, Artificial Sequence
  Description of Artificial Sequence: Synthetic oligonucleotide
uacuccugucauggauugg

SEQ ID NO: 559967 - RNA, 19 nt, Artificial Sequence
  Description of Artificial Sequence: Synthetic oligonucleotide
gagacgccuccuuuggaaa

SEQ ID NO: 559968 - RNA, 19 nt, Artificial Sequence
  Description of Artificial Sequence: Synthetic oligonucleotide
gaccucaaacuugccguug

SEQ ID NO: 559969 - RNA, 19 nt, Artificial Sequence
  Description of Artificial Sequence: Synthetic oligonucleotide
cuacuguuagcaaggccaa

SEQ ID NO: 559970 - RNA, 19 nt, Artificial Sequence
  Description of Artificial Sequence: Synthetic oligonucleotide
gcugaagccuaacugcauc

SEQ ID NO: 559971 - RNA, 19 nt, Artificial Sequence
  Description of Artificial Sequence: Synthetic oligonucleotide
cacuuccacccugaaacac

SEQ ID NO: 559972 - RNA, 19 nt, Artificial Sequence
  Description of Artificial Sequence: Synthetic oligonucleotide
aggacugaguggauauucu

SEQ ID NO: 559973 - RNA, 19 nt, Artificial Sequence
  Description of Artificial Sequence: Synthetic oligonucleotide
cugaagauuuuguggcaaa

SEQ ID NO: 559974 - RNA, 19 nt, Artificial Sequence
  Description of Artificial Sequence: Synthetic oligonucleotide
ccgcuucaaaaccuaacag

SEQ ID NO: 559975 - RNA, 19 nt, Artificial Sequence
  Description of Artificial Sequence: Synthetic oligonucleotide
aucauaccacuccggccga

SEQ ID NO: 559976 - RNA, 19 nt, Artificial Sequence
  Description of Artificial Sequence: Synthetic oligonucleotide
ccagagacgccuccuuugg

SEQ ID NO: 559977 - RNA, 19 nt, Artificial Sequence
  Description of Artificial Sequence: Synthetic oligonucleotide
uggccggggacuccguaaa

SEQ ID NO: 559978 - RNA, 19 nt, Artificial Sequence
  Description of Artificial Sequence: Synthetic oligonucleotide
ggaauggaucucugccgag

SEQ ID NO: 559979 - RNA, 19 nt, Artificial Sequence
  Description of Artificial Sequence: Synthetic oligonucleotide
ccaagacccaaaugacacc

SEQ ID NO: 559980 - RNA, 19 nt, Artificial Sequence
  Description of Artificial Sequence: Synthetic oligonucleotide
gagcaugguacggaguuua

SEQ ID NO: 559981 - RNA, 19 nt, Artificial Sequence
  Description of Artificial Sequence: Synthetic oligonucleotide
cccaacauugcacauacua

SEQ ID NO: 559982 - RNA, 19 nt, Artificial Sequence
  Description of Artificial Sequence: Synthetic oligonucleotide
agaaaccacuuuccuuaua

SEQ ID NO: 559983 - RNA, 19 nt, Artificial Sequence
  Description of Artificial Sequence: Synthetic oligonucleotide
ccguaaaaucauaccacuc

SEQ ID NO: 559984 - RNA, 19 nt, Artificial Sequence
  Description of Artificial Sequence: Synthetic oligonucleotide
agcuuaaacaagagcggua

SEQ ID NO: 559985 - RNA, 19 nt, Artificial Sequence
  Description of Artificial Sequence: Synthetic oligonucleotide
ucucucgugcacggcuaag

SEQ ID NO: 559986 - RNA, 19 nt, Artificial Sequence
  Description of Artificial Sequence: Synthetic oligonucleotide
auggcgucucugugugcag

SEQ ID NO: 559987 - RNA, 19 nt, Artificial Sequence
  Description of Artificial Sequence: Synthetic oligonucleotide
guacggaguuuaaaucaca

SEQ ID NO: 559988 - RNA, 19 nt, Artificial Sequence
  Description of Artificial Sequence: Synthetic oligonucleotide
cugugugauacuagcgucu

SEQ ID NO: 559989 - RNA, 19 nt, Artificial Sequence
  Description of Artificial Sequence: Synthetic oligonucleotide
agggccauugaggucccug

SEQ ID NO: 559990 - RNA, 19 nt, Artificial Sequence
  Description of Artificial Sequence: Synthetic oligonucleotide
caauuaucuugcucaacau

SEQ ID NO: 559991 - RNA, 19 nt, Artificial Sequence
  Description of Artificial Sequence: Synthetic oligonucleotide
agggaacaccaguccccuc

SEQ ID NO: 559992 - RNA, 19 nt, Artificial Sequence
  Description of Artificial Sequence: Synthetic oligonucleotide
gaaagucuggccggggacu

SEQ ID NO: 559993 - RNA, 19 nt, Artificial Sequence
  Description of Artificial Sequence: Synthetic oligonucleotide
acacuauauugugcauucu

SEQ ID NO: 559994 - RNA, 19 nt, Artificial Sequence
  Description of Artificial Sequence: Synthetic oligonucleotide
cccauaaaguccacuccug

SEQ ID NO: 559995 - RNA, 19 nt, Artificial Sequence
  Description of Artificial Sequence: Synthetic oligonucleotide
acccugaaacacacugaag

SEQ ID NO: 559996 - RNA, 19 nt, Artificial Sequence
  Description of Artificial Sequence: Synthetic oligonucleotide
ggacuccguaaaaucauac

SEQ ID NO: 559997 - RNA, 19 nt, Artificial Sequence
  Description of Artificial Sequence: Synthetic oligonucleotide
guggaguagcaaagggaac

SEQ ID NO: 559998 - RNA, 19 nt, Artificial Sequence
  Description of Artificial Sequence: Synthetic oligonucleotide
cauaccacuccggccgaug

SEQ ID NO: 559999 - RNA, 19 nt, Artificial Sequence
  Description of Artificial Sequence: Synthetic oligonucleotide
ggaaagguacaaccccaga

SEQ ID NO: 560000 - RNA, 19 nt, Artificial Sequence
  Description of Artificial Sequence: Synthetic oligonucleotide
cgugagaauaucaauccaa

SEQ ID NO: 560001 - RNA, 19 nt, Artificial Sequence
  Description of Artificial Sequence: Synthetic oligonucleotide
caagaaccuuagugacaac

SEQ ID NO: 560002 - RNA, 19 nt, Artificial Sequence
  Description of Artificial Sequence: Synthetic oligonucleotide
ccggggucucuuuaaacug

SEQ ID NO: 560003 - RNA, 19 nt, Artificial Sequence
  Description of Artificial Sequence: Synthetic oligonucleotide
gggaaaggaacuccgcugu

SEQ ID NO: 560004 - RNA, 19 nt, Artificial Sequence
  Description of Artificial Sequence: Synthetic oligonucleotide
ggaucucugccgagaaaag

SEQ ID NO: 560005 - RNA, 19 nt, Artificial Sequence
  Description of Artificial Sequence: Synthetic oligonucleotide
ugucauggauuggccacua

SEQ ID NO: 560006 - RNA, 19 nt, Artificial Sequence
  Description of Artificial Sequence: Synthetic oligonucleotide
cuauauacccaauccccuu

SEQ ID NO: 560007 - RNA, 19 nt, Artificial Sequence
  Description of Artificial Sequence: Synthetic oligonucleotide
cucaggcucucucgugcac

SEQ ID NO: 560008 - RNA, 19 nt, Artificial Sequence
  Description of Artificial Sequence: Synthetic oligonucleotide
gacacacuauauugugcau

SEQ ID NO: 560009 - RNA, 19 nt, Artificial Sequence
  Description of Artificial Sequence: Synthetic oligonucleotide
ugccguugucuucgcccug

SEQ ID NO: 560010 - RNA, 19 nt, Artificial Sequence
  Description of Artificial Sequence: Synthetic oligonucleotide
uugugcugucucagauuua

SEQ ID NO: 560011 - RNA, 19 nt, Artificial Sequence
  Description of Artificial Sequence: Synthetic oligonucleotide
cuucgcccugccucccagc

SEQ ID NO: 560012 - RNA, 19 nt, Artificial Sequence
  Description of Artificial Sequence: Synthetic oligonucleotide
acaccccaacauugcacau

SEQ ID NO: 560013 - RNA, 19 nt, Artificial Sequence
  Description of Artificial Sequence: Synthetic oligonucleotide
cagagcaugguacggaguu

SEQ ID NO: 560014 - RNA, 19 nt, Artificial Sequence
  Description of Artificial Sequence: Synthetic oligonucleotide
agggauccucccacuacug

SEQ ID NO: 560015 - RNA, 19 nt, Artificial Sequence
  Description of Artificial Sequence: Synthetic oligonucleotide
cucucgugcacggcuaaga

SEQ ID NO: 560016 - RNA, 19 nt, Artificial Sequence
  Description of Artificial Sequence: Synthetic oligonucleotide
ccauaaaguccacuccuga

SEQ ID NO: 560017 - RNA, 19 nt, Artificial Sequence
  Description of Artificial Sequence: Synthetic oligonucleotide
gcaaauaccucuuggccuu

SEQ ID NO: 560018 - RNA, 19 nt, Artificial Sequence
  Description of Artificial Sequence: Synthetic oligonucleotide
uggggagagcugaccucaa

SEQ ID NO: 560019 - RNA, 19 nt, Artificial Sequence
  Description of Artificial Sequence: Synthetic oligonucleotide
ggggucucuuuaaacugug

SEQ ID NO: 560020 - RNA, 19 nt, Artificial Sequence
  Description of Artificial Sequence: Synthetic oligonucleotide
cccuaggccgaaagucugg

SEQ ID NO: 560021 - RNA, 19 nt, Artificial Sequence
  Description of Artificial Sequence: Synthetic oligonucleotide
aggcucucucgugcacggc

SEQ ID NO: 560022 - RNA, 19 nt, Artificial Sequence
  Description of Artificial Sequence: Synthetic oligonucleotide
ccgauggcgucucugugug

SEQ ID NO: 560023 - RNA, 19 nt, Artificial Sequence
  Description of Artificial Sequence: Synthetic oligonucleotide
ggauuggccacuaugcuuu

SEQ ID NO: 560024 - RNA, 19 nt, Artificial Sequence
  Description of Artificial Sequence: Synthetic oligonucleotide
ccggggacuccguaaaauc

SEQ ID NO: 560025 - RNA, 19 nt, Artificial Sequence
  Description of Artificial Sequence: Synthetic oligonucleotide
cucuacugaccgaaguuuu

SEQ ID NO: 560026 - RNA, 19 nt, Artificial Sequence
  Description of Artificial Sequence: Synthetic oligonucleotide
gccggggucucuuuaaacu

SEQ ID NO: 560027 - RNA, 19 nt, Artificial Sequence
  Description of Artificial Sequence: Synthetic oligonucleotide
auacaccuuggcaggccca

SEQ ID NO: 560028 - RNA, 19 nt, Artificial Sequence
  Description of Artificial Sequence: Synthetic oligonucleotide
acuccggccgauggcgucu

SEQ ID NO: 560029 - RNA, 19 nt, Artificial Sequence
  Description of Artificial Sequence: Synthetic oligonucleotide
caaauaccucuuggccuuc

SEQ ID NO: 560030 - RNA, 19 nt, Artificial Sequence
  Description of Artificial Sequence: Synthetic oligonucleotide
ccuaggccgaaagucuggc

SEQ ID NO: 560031 - RNA, 19 nt, Artificial Sequence
  Description of Artificial Sequence: Synthetic oligonucleotide
ggccggggucucuuuaaac

SEQ ID NO: 560032 - RNA, 19 nt, Artificial Sequence
  Description of Artificial Sequence: Synthetic oligonucleotide
cuacugaccgaaguuuuau

SEQ ID NO: 560033 - RNA, 19 nt, Artificial Sequence
  Description of Artificial Sequence: Synthetic oligonucleotide
gcacggcuaagaccagggc

SEQ ID NO: 560034 - RNA, 19 nt, Artificial Sequence
  Description of Artificial Sequence: Synthetic oligonucleotide
cgaaagucuggccggggac

SEQ ID NO: 560035 - RNA, 19 nt, Artificial Sequence
  Description of Artificial Sequence: Synthetic oligonucleotide
cacuccggccgauggcguc

SEQ ID NO: 560036 - RNA, 19 nt, Artificial Sequence
  Description of Artificial Sequence: Synthetic oligonucleotide
ggcgucucugugugcagga

SEQ ID NO: 560037 - RNA, 19 nt, Artificial Sequence
  Description of Artificial Sequence: Synthetic oligonucleotide
cagagacgccuccuuugga

SEQ ID NO: 560038 - RNA, 19 nt, Artificial Sequence
  Description of Artificial Sequence: Synthetic oligonucleotide
ggacccaagggaaggccac

SEQ ID NO: 560039 - RNA, 19 nt, Artificial Sequence
  Description of Artificial Sequence: Synthetic oligonucleotide
cuggccggggacuccguaa

SEQ ID NO: 560040 - RNA, 19 nt, Artificial Sequence
  Description of Artificial Sequence: Synthetic oligonucleotide
accuaacagcugaagccua

SEQ ID NO: 560041 - RNA, 19 nt, Artificial Sequence
  Description of Artificial Sequence: Synthetic oligonucleotide
gugauacuagcgucuucau

SEQ ID NO: 560042 - RNA, 19 nt, Artificial Sequence
  Description of Artificial Sequence: Synthetic oligonucleotide
agcaugguacggaguuuaa

SEQ ID NO: 560043 - RNA, 19 nt, Artificial Sequence
  Description of Artificial Sequence: Synthetic oligonucleotide
ggccgaaagucuggccggg

SEQ ID NO: 560044 - RNA, 19 nt, Artificial Sequence
  Description of Artificial Sequence: Synthetic oligonucleotide
ucauaccacuccggccgau

SEQ ID NO: 560045 - RNA, 19 nt, Artificial Sequence
  Description of Artificial Sequence: Synthetic oligonucleotide
ccuuuacuuugcuaugcua

SEQ ID NO: 560046 - RNA, 19 nt, Artificial Sequence
  Description of Artificial Sequence: Synthetic oligonucleotide
gccguugucuucgcccugc

SEQ ID NO: 560047 - RNA, 19 nt, Artificial Sequence
  Description of Artificial Sequence: Synthetic oligonucleotide
acuacgcauucugcuucau

SEQ ID NO: 560048 - RNA, 19 nt, Artificial Sequence
  Description of Artificial Sequence: Synthetic oligonucleotide
ccacccugaaacacacuga

SEQ ID NO: 560049 - RNA, 19 nt, Artificial Sequence
  Description of Artificial Sequence: Synthetic oligonucleotide
cggggacuccguaaaauca

SEQ ID NO: 560050 - RNA, 19 nt, Artificial Sequence
  Description of Artificial Sequence: Synthetic oligonucleotide
ccuaacagcugaagccuaa

SEQ ID NO: 560051 - RNA, 19 nt, Artificial Sequence
  Description of Artificial Sequence: Synthetic oligonucleotide
ggcucucucgugcacggcu

SEQ ID NO: 560052 - RNA, 19 nt, Artificial Sequence
  Description of Artificial Sequence: Synthetic oligonucleotide
gcucaggcucucucgugca

SEQ ID NO: 560053 - RNA, 19 nt, Artificial Sequence
  Description of Artificial Sequence: Synthetic oligonucleotide
ccccauaaaguccacuccu

SEQ ID NO: 560054 - RNA, 19 nt, Artificial Sequence
  Description of Artificial Sequence: Synthetic oligonucleotide
gccuaacugcaucaacagu

SEQ ID NO: 560055 - RNA, 19 nt, Artificial Sequence
  Description of Artificial Sequence: Synthetic oligonucleotide
gcaugguacggaguuuaaa

SEQ ID NO: 560056 - RNA, 19 nt, Artificial Sequence
  Description of Artificial Sequence: Synthetic oligonucleotide
gccgaaagucuggccgggg

SEQ ID NO: 560057 - RNA, 19 nt, Artificial Sequence
  Description of Artificial Sequence: Synthetic oligonucleotide
cugucauggauuggccacu

SEQ ID NO: 560058 - RNA, 19 nt, Artificial Sequence
  Description of Artificial Sequence: Synthetic oligonucleotide
ccgaaagucuggccgggga

SEQ ID NO: 560059 - RNA, 19 nt, Artificial Sequence
  Description of Artificial Sequence: Synthetic oligonucleotide
gacccaagggaaggccacu

SEQ ID NO: 560060 - RNA, 19 nt, Artificial Sequence
  Description of Artificial Sequence: Synthetic oligonucleotide
gggacuccguaaaaucaua

SEQ ID NO: 560061 - RNA, 19 nt, Artificial Sequence
  Description of Artificial Sequence: Synthetic oligonucleotide
gcuucccuaggccgaaagu

SEQ ID NO: 560062 - RNA, 19 nt, Artificial Sequence
  Description of Artificial Sequence: Synthetic oligonucleotide
cgguagaaauaauucacau

SEQ ID NO: 560063 - RNA, 19 nt, Artificial Sequence
  Description of Artificial Sequence: Synthetic oligonucleotide
ggcggcaaugggccagaga

SEQ ID NO: 560064 - RNA, 19 nt, Artificial Sequence
  Description of Artificial Sequence: Synthetic oligonucleotide
ggggacuccguaaaaucau

SEQ ID NO: 560065 - RNA, 19 nt, Artificial Sequence
  Description of Artificial Sequence: Synthetic oligonucleotide
uccggccgauggcgucucu

SEQ ID NO: 560066 - RNA, 19 nt, Artificial Sequence
  Description of Artificial Sequence: Synthetic oligonucleotide
cuguuucaacaugccuuua

SEQ ID NO: 560067 - RNA, 19 nt, Artificial Sequence
  Description of Artificial Sequence: Synthetic oligonucleotide
cugcaguaagaaagcuguu

SEQ ID NO: 560068 - RNA, 19 nt, Artificial Sequence
  Description of Artificial Sequence: Synthetic oligonucleotide
ccuugcuaagacacacuau

SEQ ID NO: 560069 - RNA, 19 nt, Artificial Sequence
  Description of Artificial Sequence: Synthetic oligonucleotide
cugcccacauuuuguccuu

SEQ ID NO: 560070 - RNA, 19 nt, Artificial Sequence
  Description of Artificial Sequence: Synthetic oligonucleotide
ccucuacugaccgaaguuu

SEQ ID NO: 560071 - RNA, 19 nt, Artificial Sequence
  Description of Artificial Sequence: Synthetic oligonucleotide
cgugcacggcuaagaccag

SEQ ID NO: 560072 - RNA, 19 nt, Artificial Sequence
  Description of Artificial Sequence: Synthetic oligonucleotide
gcuaugcuauauacccaau

SEQ ID NO: 560073 - RNA, 19 nt, Artificial Sequence
  Description of Artificial Sequence: Synthetic oligonucleotide
ggccggggacuccguaaaa

SEQ ID NO: 560074 - RNA, 19 nt, Artificial Sequence
  Description of Artificial Sequence: Synthetic oligonucleotide
cggggucucuuuaaacugu

SEQ ID NO: 560075 - RNA, 19 nt, Artificial Sequence
  Description of Artificial Sequence: Synthetic oligonucleotide
gccggggacuccguaaaau

SEQ ID NO: 560076 - RNA, 19 nt, Artificial Sequence
  Description of Artificial Sequence: Synthetic oligonucleotide
gucuggccggggacuccgu

SEQ ID NO: 560077 - RNA, 19 nt, Artificial Sequence
  Description of Artificial Sequence: Synthetic oligonucleotide
ccacuccggccgauggcgu

SEQ ID NO: 560078 - RNA, 19 nt, Artificial Sequence
  Description of Artificial Sequence: Synthetic oligonucleotide
ccccaacauugcacauacu

SEQ ID NO: 560079 - RNA, 19 nt, Artificial Sequence
  Description of Artificial Sequence: Synthetic oligonucleotide
ggcuaagaccagggccauu

SEQ ID NO: 560080 - RNA, 19 nt, Artificial Sequence
  Description of Artificial Sequence: Synthetic oligonucleotide
uuaacaauaacuuagguca

SEQ ID NO: 560081 - RNA, 19 nt, Artificial Sequence
  Description of Artificial Sequence: Synthetic oligonucleotide
acuaauucaaaauaaaacg

SEQ ID NO: 560082 - RNA, 19 nt, Artificial Sequence
  Description of Artificial Sequence: Synthetic oligonucleotide
aauaaaaccacucaucagu

SEQ ID NO: 560083 - RNA, 19 nt, Artificial Sequence
  Description of Artificial Sequence: Synthetic oligonucleotide
ucuuauuuaucuuagagug

SEQ ID NO: 560084 - RNA, 19 nt, Artificial Sequence
  Description of Artificial Sequence: Synthetic oligonucleotide
auugacuggacccaaaacg

SEQ ID NO: 560085 - RNA, 19 nt, Artificial Sequence
  Description of Artificial Sequence: Synthetic oligonucleotide
uuuacagggguccagcugg

SEQ ID NO: 560086 - RNA, 19 nt, Artificial Sequence
  Description of Artificial Sequence: Synthetic oligonucleotide
aaaaccacucaucagugag

SEQ ID NO: 560087 - RNA, 19 nt, Artificial Sequence
  Description of Artificial Sequence: Synthetic oligonucleotide
ucucuuauuuaucuuagag

SEQ ID NO: 560088 - RNA, 19 nt, Artificial Sequence
  Description of Artificial Sequence: Synthetic oligonucleotide
aauaacuuaggucacuaau

SEQ ID NO: 560089 - RNA, 19 nt, Artificial Sequence
  Description of Artificial Sequence: Synthetic oligonucleotide
cuugcuauaaaccugucug

SEQ ID NO: 560090 - RNA, 19 nt, Artificial Sequence
  Description of Artificial Sequence: Synthetic oligonucleotide
uuaucuuagagugggaggg

SEQ ID NO: 560091 - RNA, 19 nt, Artificial Sequence
  Description of Artificial Sequence: Synthetic oligonucleotide
cacuaauucaaaauaaaac

SEQ ID NO: 560092 - RNA, 19 nt, Artificial Sequence
  Description of Artificial Sequence: Synthetic oligonucleotide
uuuaucuuagagugggagg

SEQ ID NO: 560093 - RNA, 19 nt, Artificial Sequence
  Description of Artificial Sequence: Synthetic oligonucleotide
aauugacuggacccaaaac

SEQ ID NO: 560094 - RNA, 19 nt, Artificial Sequence
  Description of Artificial Sequence: Synthetic oligonucleotide
guagucaugagcugaaagg

SEQ ID NO: 560095 - RNA, 19 nt, Artificial Sequence
  Description of Artificial Sequence: Synthetic oligonucleotide
aaaauaaguuacuuccggu

SEQ ID NO: 560096 - RNA, 19 nt, Artificial Sequence
  Description of Artificial Sequence: Synthetic oligonucleotide
agaaccgugaagcucaguc

SEQ ID NO: 560097 - RNA, 19 nt, Artificial Sequence
  Description of Artificial Sequence: Synthetic oligonucleotide
guuaacauugugcaguuug

SEQ ID NO: 560098 - RNA, 19 nt, Artificial Sequence
  Description of Artificial Sequence: Synthetic oligonucleotide
guuacuuccgguuauggug

SEQ ID NO: 560099 - RNA, 19 nt, Artificial Sequence
  Description of Artificial Sequence: Synthetic oligonucleotide
aauuggacgccaauauugc

SEQ ID NO: 560100 - RNA, 19 nt, Artificial Sequence
  Description of Artificial Sequence: Synthetic oligonucleotide
uggucuguuaacauugugc

SEQ ID NO: 560101 - RNA, 19 nt, Artificial Sequence
  Description of Artificial Sequence: Synthetic oligonucleotide
guuaacaauaacuuagguc

SEQ ID NO: 560102 - RNA, 19 nt, Artificial Sequence
  Description of Artificial Sequence: Synthetic oligonucleotide
uccuuguacgaaauaagag

SEQ ID NO: 560103 - RNA, 19 nt, Artificial Sequence
  Description of Artificial Sequence: Synthetic oligonucleotide
ugaguuaagcuuaugcagu

SEQ ID NO: 560104 - RNA, 19 nt, Artificial Sequence
  Description of Artificial Sequence: Synthetic oligonucleotide
caagcuguagcccaguuag

SEQ ID NO: 560105 - RNA, 19 nt, Artificial Sequence
  Description of Artificial Sequence: Synthetic oligonucleotide
ucacuaauucaaaauaaaa

SEQ ID NO: 560106 - RNA, 19 nt, Artificial Sequence
  Description of Artificial Sequence: Synthetic oligonucleotide
gugaguuaagcuuaugcag

SEQ ID NO: 560107 - RNA, 19 nt, Artificial Sequence
  Description of Artificial Sequence: Synthetic oligonucleotide
aaauaaguuacuuccgguu

SEQ ID NO: 560108 - RNA, 19 nt, Artificial Sequence
  Description of Artificial Sequence: Synthetic oligonucleotide
caauuggacgccaauauug

SEQ ID NO: 560109 - RNA, 19 nt, Artificial Sequence
  Description of Artificial Sequence: Synthetic oligonucleotide
aauaaguuacuuccgguua

SEQ ID NO: 560110 - RNA, 19 nt, Artificial Sequence
  Description of Artificial Sequence: Synthetic oligonucleotide
ugggaauccgcacaggacc

SEQ ID NO: 560111 - RNA, 19 nt, Artificial Sequence
  Description of Artificial Sequence: Synthetic oligonucleotide
uuaagcuuaugcaguuugg

SEQ ID NO: 560112 - RNA, 19 nt, Artificial Sequence
  Description of Artificial Sequence: Synthetic oligonucleotide
cauacacuuggaaagcucc

SEQ ID NO: 560113 - RNA, 19 nt, Artificial Sequence
  Description of Artificial Sequence: Synthetic oligonucleotide
acuagcacaaaauaaguua

SEQ ID NO: 560114 - RNA, 19 nt, Artificial Sequence
  Description of Artificial Sequence: Synthetic oligonucleotide
uaacuuaggucacuaauuc

SEQ ID NO: 560115 - RNA, 19 nt, Artificial Sequence
  Description of Artificial Sequence: Synthetic oligonucleotide
acaauugucuuccugggcu

SEQ ID NO: 560116 - RNA, 19 nt, Artificial Sequence
  Description of Artificial Sequence: Synthetic oligonucleotide
uugacuggacccaaaacga

SEQ ID NO: 560117 - RNA, 19 nt, Artificial Sequence
  Description of Artificial Sequence: Synthetic oligonucleotide
cuuguacgaaauaagagca

SEQ ID NO: 560118 - RNA, 19 nt, Artificial Sequence
  Description of Artificial Sequence: Synthetic oligonucleotide
uguggcaacguacaauuga

SEQ ID NO: 560119 - RNA, 19 nt, Artificial Sequence
  Description of Artificial Sequence: Synthetic oligonucleotide
cagaaaauacugcugauuc

SEQ ID NO: 560120 - RNA, 19 nt, Artificial Sequence
  Description of Artificial Sequence: Synthetic oligonucleotide
acguacaauugacuggacc

SEQ ID NO: 560121 - RNA, 19 nt, Artificial Sequence
  Description of Artificial Sequence: Synthetic oligonucleotide
uuacuuccgguuauggugc

SEQ ID NO: 560122 - RNA, 19 nt, Artificial Sequence
  Description of Artificial Sequence: Synthetic oligonucleotide
acguaguugacuugucagc

SEQ ID NO: 560123 - RNA, 19 nt, Artificial Sequence
  Description of Artificial Sequence: Synthetic oligonucleotide
aauguuguacauaguuaac

SEQ ID NO: 560124 - RNA, 19 nt, Artificial Sequence
  Description of Artificial Sequence: Synthetic oligonucleotide
ucuucuguggcaacguaca

SEQ ID NO: 560125 - RNA, 19 nt, Artificial Sequence
  Description of Artificial Sequence: Synthetic oligonucleotide
uaagcuuaugcaguuuggg

SEQ ID NO: 560126 - RNA, 19 nt, Artificial Sequence
  Description of Artificial Sequence: Synthetic oligonucleotide
guuaagcuuaugcaguuug

SEQ ID NO: 560127 - RNA, 19 nt, Artificial Sequence
  Description of Artificial Sequence: Synthetic oligonucleotide
gguacuagcacaaaauaag

SEQ ID NO: 560128 - RNA, 19 nt, Artificial Sequence
  Description of Artificial Sequence: Synthetic oligonucleotide
uggacgccaauauugcacg

SEQ ID NO: 560129 - RNA, 19 nt, Artificial Sequence
  Description of Artificial Sequence: Synthetic oligonucleotide
aguaauggcugcacaaggc

SEQ ID NO: 560130 - RNA, 19 nt, Artificial Sequence
  Description of Artificial Sequence: Synthetic oligonucleotide
aagcuuaugcaguuugggu

SEQ ID NO: 560131 - RNA, 19 nt, Artificial Sequence
  Description of Artificial Sequence: Synthetic oligonucleotide
acauugugcaguuuguagu

SEQ ID NO: 560132 - RNA, 19 nt, Artificial Sequence
  Description of Artificial Sequence: Synthetic oligonucleotide
agagaacacaaacagccca

SEQ ID NO: 560133 - RNA, 19 nt, Artificial Sequence
  Description of Artificial Sequence: Synthetic oligonucleotide
aagaaagaaccgugaagcu

SEQ ID NO: 560134 - RNA, 19 nt, Artificial Sequence
  Description of Artificial Sequence: Synthetic oligonucleotide
uguaagucugcccuccaga

SEQ ID NO: 560135 - RNA, 19 nt, Artificial Sequence
  Description of Artificial Sequence: Synthetic oligonucleotide
aacuuaggucacuaauuca

SEQ ID NO: 560136 - RNA, 19 nt, Artificial Sequence
  Description of Artificial Sequence: Synthetic oligonucleotide
ccuuguacgaaauaagagc

SEQ ID NO: 560137 - RNA, 19 nt, Artificial Sequence
  Description of Artificial Sequence: Synthetic oligonucleotide
uugucgucugacaauuugc

SEQ ID NO: 560138 - RNA, 19 nt, Artificial Sequence
  Description of Artificial Sequence: Synthetic oligonucleotide
uuaacaguauucacuuuaa

SEQ ID NO: 560139 - RNA, 19 nt, Artificial Sequence
  Description of Artificial Sequence: Synthetic oligonucleotide
gagcauaagaucucccuug

SEQ ID NO: 560140 - RNA, 19 nt, Artificial Sequence
  Description of Artificial Sequence: Synthetic oligonucleotide
aggcguugcacacaggguc

SEQ ID NO: 560141 - RNA, 19 nt, Artificial Sequence
  Description of Artificial Sequence: Synthetic oligonucleotide
cagaaucgaagcuugggag

SEQ ID NO: 560142 - RNA, 19 nt, Artificial Sequence
  Description of Artificial Sequence: Synthetic oligonucleotide
uuggacgccaauauugcac

SEQ ID NO: 560143 - RNA, 19 nt, Artificial Sequence
  Description of Artificial Sequence: Synthetic oligonucleotide
cucagucuugguuuguagg

SEQ ID NO: 560144 - RNA, 19 nt, Artificial Sequence
  Description of Artificial Sequence: Synthetic oligonucleotide
aucacgucgccagagaggg

SEQ ID NO: 560145 - RNA, 19 nt, Artificial Sequence
  Description of Artificial Sequence: Synthetic oligonucleotide
uccagugggaagcugugcc

SEQ ID NO: 560146 - RNA, 19 nt, Artificial Sequence
  Description of Artificial Sequence: Synthetic oligonucleotide
uuagacuugcuggacaucu

SEQ ID NO: 560147 - RNA, 19 nt, Artificial Sequence
  Description of Artificial Sequence: Synthetic oligonucleotide
cauucagccccuuucuugc

SEQ ID NO: 560148 - RNA, 19 nt, Artificial Sequence
  Description of Artificial Sequence: Synthetic oligonucleotide
ucuguggcaacguacaauu

SEQ ID NO: 560149 - RNA, 19 nt, Artificial Sequence
  Description of Artificial Sequence: Synthetic oligonucleotide
acagaaucgaagcuuggga

SEQ ID NO: 560150 - RNA, 19 nt, Artificial Sequence
  Description of Artificial Sequence: Synthetic oligonucleotide
uaguugacuugucagcaca

SEQ ID NO: 560151 - RNA, 19 nt, Artificial Sequence
  Description of Artificial Sequence: Synthetic oligonucleotide
aguuaacaauaacuuaggu

SEQ ID NO: 560152 - RNA, 19 nt, Artificial Sequence
  Description of Artificial Sequence: Synthetic oligonucleotide
gauguguccagaguggcug

SEQ ID NO: 560153 - RNA, 19 nt, Artificial Sequence
  Description of Artificial Sequence: Synthetic oligonucleotide
uuuguaguagaggccacag

SEQ ID NO: 560154 - RNA, 19 nt, Artificial Sequence
  Description of Artificial Sequence: Synthetic oligonucleotide
cacguaguugacuugucag

SEQ ID NO: 560155 - RNA, 19 nt, Artificial Sequence
  Description of Artificial Sequence: Synthetic oligonucleotide
uacgaaauaagagcaaaau

SEQ ID NO: 560156 - RNA, 19 nt, Artificial Sequence
  Description of Artificial Sequence: Synthetic oligonucleotide
uaggucacuaauucaaaau

SEQ ID NO: 560157 - RNA, 19 nt, Artificial Sequence
  Description of Artificial Sequence: Synthetic oligonucleotide
uguacgaaauaagagcaaa

SEQ ID NO: 560158 - RNA, 19 nt, Artificial Sequence
  Description of Artificial Sequence: Synthetic oligonucleotide
uuaugcggguacuagcaca

SEQ ID NO: 560159 - RNA, 19 nt, Artificial Sequence
  Description of Artificial Sequence: Synthetic oligonucleotide
agaaaauacugcugauucu

SEQ ID NO: 560160 - RNA, 19 nt, Artificial Sequence
  Description of Artificial Sequence: Synthetic oligonucleotide
uuaggucacuaauucaaaa

SEQ ID NO: 560161 - RNA, 19 nt, Artificial Sequence
  Description of Artificial Sequence: Synthetic oligonucleotide
aaguuacuuccgguuaugg

SEQ ID NO: 560162 - RNA, 19 nt, Artificial Sequence
  Description of Artificial Sequence: Synthetic oligonucleotide
acgaaauaagagcaaaaua

SEQ ID NO: 560163 - RNA, 19 nt, Artificial Sequence
  Description of Artificial Sequence: Synthetic oligonucleotide
agcgcuucgcugcuuaggg

SEQ ID NO: 560164 - RNA, 19 nt, Artificial Sequence
  Description of Artificial Sequence: Synthetic oligonucleotide
ucgauguccaugucugucc

SEQ ID NO: 560165 - RNA, 19 nt, Artificial Sequence
  Description of Artificial Sequence: Synthetic oligonucleotide
agaaucgaagcuugggaga

SEQ ID NO: 560166 - RNA, 19 nt, Artificial Sequence
  Description of Artificial Sequence: Synthetic oligonucleotide
accaccaccaccaccaccg

SEQ ID NO: 560167 - RNA, 19 nt, Artificial Sequence
  Description of Artificial Sequence: Synthetic oligonucleotide
guaagucugcccuccagag

SEQ ID NO: 560168 - RNA, 19 nt, Artificial Sequence
  Description of Artificial Sequence: Synthetic oligonucleotide
gacauuuccccuuuccaga

SEQ ID NO: 560169 - RNA, 19 nt, Artificial Sequence
  Description of Artificial Sequence: Synthetic oligonucleotide
uaacaauaacuuaggucac

SEQ ID NO: 560170 - RNA, 19 nt, Artificial Sequence
  Description of Artificial Sequence: Synthetic oligonucleotide
aagugggucucuugggaug

SEQ ID NO: 560171 - RNA, 19 nt, Artificial Sequence
  Description of Artificial Sequence: Synthetic oligonucleotide
agcaauuggacgccaauau

SEQ ID NO: 560172 - RNA, 19 nt, Artificial Sequence
  Description of Artificial Sequence: Synthetic oligonucleotide
uauaaaccugucuguuuug

SEQ ID NO: 560173 - RNA, 19 nt, Artificial Sequence
  Description of Artificial Sequence: Synthetic oligonucleotide
gcagucaccaugcuggacg

SEQ ID NO: 560174 - RNA, 19 nt, Artificial Sequence
  Description of Artificial Sequence: Synthetic oligonucleotide
ugacuggacccaaaacgag

SEQ ID NO: 560175 - RNA, 19 nt, Artificial Sequence
  Description of Artificial Sequence: Synthetic oligonucleotide
cuccguuugggcuugauga

SEQ ID NO: 560176 - RNA, 19 nt, Artificial Sequence
  Description of Artificial Sequence: Synthetic oligonucleotide
guugucgucugacaauuug

SEQ ID NO: 560177 - RNA, 19 nt, Artificial Sequence
  Description of Artificial Sequence: Synthetic oligonucleotide
aggucacuaauucaaaaua

SEQ ID NO: 560178 - RNA, 19 nt, Artificial Sequence
  Description of Artificial Sequence: Synthetic oligonucleotide
ggcaacguacaauugacug

SEQ ID NO: 560179 - RNA, 19 nt, Artificial Sequence
  Description of Artificial Sequence: Synthetic oligonucleotide
uuuaaaggaauaggagggu

SEQ ID NO: 560180 - RNA, 19 nt, Artificial Sequence
  Description of Artificial Sequence: Synthetic oligonucleotide
uacuagcacaaaauaaguu

SEQ ID NO: 560181 - RNA, 19 nt, Artificial Sequence
  Description of Artificial Sequence: Synthetic oligonucleotide
agauguauuuacagggguc

SEQ ID NO: 560182 - RNA, 19 nt, Artificial Sequence
  Description of Artificial Sequence: Synthetic oligonucleotide
acgccaauauugcacguag

SEQ ID NO: 560183 - RNA, 19 nt, Artificial Sequence
  Description of Artificial Sequence: Synthetic oligonucleotide
aaccgugaagcucagucuu

SEQ ID NO: 560184 - RNA, 19 nt, Artificial Sequence
  Description of Artificial Sequence: Synthetic oligonucleotide
cgaaauaagagcaaaauaa

SEQ ID NO: 560185 - RNA, 19 nt, Artificial Sequence
  Description of Artificial Sequence: Synthetic oligonucleotide
auaaaaccacucaucagug

SEQ ID NO: 560186 - RNA, 19 nt, Artificial Sequence
  Description of Artificial Sequence: Synthetic oligonucleotide
aggaggguagcauacaauu

SEQ ID NO: 560187 - RNA, 19 nt, Artificial Sequence
  Description of Artificial Sequence: Synthetic oligonucleotide
auaaguuacuuccgguuau

SEQ ID NO: 560188 - RNA, 19 nt, Artificial Sequence
  Description of Artificial Sequence: Synthetic oligonucleotide
ggggcuacccuccagacag

SEQ ID NO: 560189 - RNA, 19 nt, Artificial Sequence
  Description of Artificial Sequence: Synthetic oligonucleotide
gcaacguacaauugacugg

SEQ ID NO: 560190 - RNA, 19 nt, Artificial Sequence
  Description of Artificial Sequence: Synthetic oligonucleotide
uguagcccaguuagaaaca

SEQ ID NO: 560191 - RNA, 19 nt, Artificial Sequence
  Description of Artificial Sequence: Synthetic oligonucleotide
gauugucucugcccucugg

SEQ ID NO: 560192 - RNA, 19 nt, Artificial Sequence
  Description of Artificial Sequence: Synthetic oligonucleotide
gauggaagagcccgcugcc

SEQ ID NO: 560193 - RNA, 19 nt, Artificial Sequence
  Description of Artificial Sequence: Synthetic oligonucleotide
uaugcggguacuagcacaa

SEQ ID NO: 560194 - RNA, 19 nt, Artificial Sequence
  Description of Artificial Sequence: Synthetic oligonucleotide
cguacaauugacuggaccc

SEQ ID NO: 560195 - RNA, 19 nt, Artificial Sequence
  Description of Artificial Sequence: Synthetic oligonucleotide
aacaauaacuuaggucacu

SEQ ID NO: 560196 - RNA, 19 nt, Artificial Sequence
  Description of Artificial Sequence: Synthetic oligonucleotide
uugcuauaaaccugucugu

SEQ ID NO: 560197 - RNA, 19 nt, Artificial Sequence
  Description of Artificial Sequence: Synthetic oligonucleotide
uaaaaccacucaucaguga

SEQ ID NO: 560198 - RNA, 19 nt, Artificial Sequence
  Description of Artificial Sequence: Synthetic oligonucleotide
acuuaggucacuaauucaa

SEQ ID NO: 560199 - RNA, 19 nt, Artificial Sequence
  Description of Artificial Sequence: Synthetic oligonucleotide
gaauauucucuuauuuauc

SEQ ID NO: 560200 - RNA, 19 nt, Artificial Sequence
  Description of Artificial Sequence: Synthetic oligonucleotide
uugcucuccaagcaacugu

SEQ ID NO: 560201 - RNA, 19 nt, Artificial Sequence
  Description of Artificial Sequence: Synthetic oligonucleotide
aguuacuuccgguuauggu

SEQ ID NO: 560202 - RNA, 19 nt, Artificial Sequence
  Description of Artificial Sequence: Synthetic oligonucleotide
uauuuaucuuagaguggga

SEQ ID NO: 560203 - RNA, 19 nt, Artificial Sequence
  Description of Artificial Sequence: Synthetic oligonucleotide
ggagccaaaaguguguucc

SEQ ID NO: 560204 - RNA, 19 nt, Artificial Sequence
  Description of Artificial Sequence: Synthetic oligonucleotide
cagagaacacaaacagccc

SEQ ID NO: 560205 - RNA, 19 nt, Artificial Sequence
  Description of Artificial Sequence: Synthetic oligonucleotide
cuggacaucuuccgguucc

SEQ ID NO: 560206 - RNA, 19 nt, Artificial Sequence
  Description of Artificial Sequence: Synthetic oligonucleotide
ucugggagacauuuccccu

SEQ ID NO: 560207 - RNA, 19 nt, Artificial Sequence
  Description of Artificial Sequence: Synthetic oligonucleotide
cuguccguucaucuugugg

SEQ ID NO: 560208 - RNA, 19 nt, Artificial Sequence
  Description of Artificial Sequence: Synthetic oligonucleotide
agcaaccaagagcauaaga

SEQ ID NO: 560209 - RNA, 19 nt, Artificial Sequence
  Description of Artificial Sequence: Synthetic oligonucleotide
agggaaugaucugggagac

SEQ ID NO: 560210 - RNA, 19 nt, Artificial Sequence
  Description of Artificial Sequence: Synthetic oligonucleotide
uuccggcgccauaaggugg

SEQ ID NO: 560211 - RNA, 19 nt, Artificial Sequence
  Description of Artificial Sequence: Synthetic oligonucleotide
aauaggaggguagcauaca

SEQ ID NO: 560212 - RNA, 19 nt, Artificial Sequence
  Description of Artificial Sequence: Synthetic oligonucleotide
gguuauggugcucugcagc

SEQ ID NO: 560213 - RNA, 19 nt, Artificial Sequence
  Description of Artificial Sequence: Synthetic oligonucleotide
uuguacgaaauaagagcaa

SEQ ID NO: 560214 - RNA, 19 nt, Artificial Sequence
  Description of Artificial Sequence: Synthetic oligonucleotide
auaacuuaggucacuaauu

SEQ ID NO: 560215 - RNA, 19 nt, Artificial Sequence
  Description of Artificial Sequence: Synthetic oligonucleotide
caagagcauaagaucuccc

SEQ ID NO: 560216 - RNA, 19 nt, Artificial Sequence
  Description of Artificial Sequence: Synthetic oligonucleotide
agcauaagaucucccuugu

SEQ ID NO: 560217 - RNA, 19 nt, Artificial Sequence
  Description of Artificial Sequence: Synthetic oligonucleotide
uuugcacaacaggugcccg

SEQ ID NO: 560218 - RNA, 19 nt, Artificial Sequence
  Description of Artificial Sequence: Synthetic oligonucleotide
uguacagcuguaccuugaa

SEQ ID NO: 560219 - RNA, 19 nt, Artificial Sequence
  Description of Artificial Sequence: Synthetic oligonucleotide
cuggccuaacagcacaggc

SEQ ID NO: 560220 - RNA, 19 nt, Artificial Sequence
  Description of Artificial Sequence: Synthetic oligonucleotide
agagcauaagaucucccuu

SEQ ID NO: 560221 - RNA, 19 nt, Artificial Sequence
  Description of Artificial Sequence: Synthetic oligonucleotide
ugguagagcccgcaggcgu

SEQ ID NO: 560222 - RNA, 19 nt, Artificial Sequence
  Description of Artificial Sequence: Synthetic oligonucleotide
ggucgcaccagcuuuggcc

SEQ ID NO: 560223 - RNA, 19 nt, Artificial Sequence
  Description of Artificial Sequence: Synthetic oligonucleotide
ucuuagagugggagggagu

SEQ ID NO: 560224 - RNA, 19 nt, Artificial Sequence
  Description of Artificial Sequence: Synthetic oligonucleotide
uugucuuccugggcuaggg

SEQ ID NO: 560225 - RNA, 19 nt, Artificial Sequence
  Description of Artificial Sequence: Synthetic oligonucleotide
cucuuauuuaucuuagagu

SEQ ID NO: 560226 - RNA, 19 nt, Artificial Sequence
  Description of Artificial Sequence: Synthetic oligonucleotide
cucgcucugguucugccag

SEQ ID NO: 560227 - RNA, 19 nt, Artificial Sequence
  Description of Artificial Sequence: Synthetic oligonucleotide
ugcggguacuagcacaaaa

SEQ ID NO: 560228 - RNA, 19 nt, Artificial Sequence
  Description of Artificial Sequence: Synthetic oligonucleotide
agcggcacugaacggggac

SEQ ID NO: 560229 - RNA, 19 nt, Artificial Sequence
  Description of Artificial Sequence: Synthetic oligonucleotide
uaaguuacuuccgguuaug

SEQ ID NO: 560230 - RNA, 19 nt, Artificial Sequence
  Description of Artificial Sequence: Synthetic oligonucleotide
agccacaacagaacagaac

SEQ ID NO: 560231 - RNA, 19 nt, Artificial Sequence
  Description of Artificial Sequence: Synthetic oligonucleotide
auuggacgccaauauugca

SEQ ID NO: 560232 - RNA, 19 nt, Artificial Sequence
  Description of Artificial Sequence: Synthetic oligonucleotide
aagcaacuguccgugaaaa

SEQ ID NO: 560233 - RNA, 19 nt, Artificial Sequence
  Description of Artificial Sequence: Synthetic oligonucleotide
aaccacucaucagugaguu

SEQ ID NO: 560234 - RNA, 19 nt, Artificial Sequence
  Description of Artificial Sequence: Synthetic oligonucleotide
caacguacaauugacugga

SEQ ID NO: 560235 - RNA, 19 nt, Artificial Sequence
  Description of Artificial Sequence: Synthetic oligonucleotide
uccacguccuuguacgaaa

SEQ ID NO: 560236 - RNA, 19 nt, Artificial Sequence
  Description of Artificial Sequence: Synthetic oligonucleotide
aacaggugcccgcucuccu

SEQ ID NO: 560237 - RNA, 19 nt, Artificial Sequence
  Description of Artificial Sequence: Synthetic oligonucleotide
guuccggcgccauaaggug

SEQ ID NO: 560238 - RNA, 19 nt, Artificial Sequence
  Description of Artificial Sequence: Synthetic oligonucleotide
agucuugguuuguagguuu

SEQ ID NO: 560239 - RNA, 19 nt, Artificial Sequence
  Description of Artificial Sequence: Synthetic oligonucleotide
uggcaacguacaauugacu

SEQ ID NO: 560240 - RNA, 19 nt, Artificial Sequence
  Description of Artificial Sequence: Synthetic oligonucleotide
ugcauacacuuggaaagcu

SEQ ID NO: 560241 - RNA, 19 nt, Artificial Sequence
  Description of Artificial Sequence: Synthetic oligonucleotide
agggaguugaggaguuagc

SEQ ID NO: 560242 - RNA, 19 nt, Artificial Sequence
  Description of Artificial Sequence: Synthetic oligonucleotide
guaccuugaaggauccagc

SEQ ID NO: 560243 - RNA, 19 nt, Artificial Sequence
  Description of Artificial Sequence: Synthetic oligonucleotide
cuuaugcggguacuagcac

SEQ ID NO: 560244 - RNA, 19 nt, Artificial Sequence
  Description of Artificial Sequence: Synthetic oligonucleotide
agacauuuauguacagcug

SEQ ID NO: 560245 - RNA, 19 nt, Artificial Sequence
  Description of Artificial Sequence: Synthetic oligonucleotide
ggucucuugggaugggcgg

SEQ ID NO: 560246 - RNA, 19 nt, Artificial Sequence
  Description of Artificial Sequence: Synthetic oligonucleotide
caccaccgcacacagaauc

SEQ ID NO: 560247 - RNA, 19 nt, Artificial Sequence
  Description of Artificial Sequence: Synthetic oligonucleotide
gagaaugcuuccuuccugu

SEQ ID NO: 560248 - RNA, 19 nt, Artificial Sequence
  Description of Artificial Sequence: Synthetic oligonucleotide
cugggaauccgcacaggac

SEQ ID NO: 560249 - RNA, 19 nt, Artificial Sequence
  Description of Artificial Sequence: Synthetic oligonucleotide
agugggaagcugugccuag

SEQ ID NO: 560250 - RNA, 19 nt, Artificial Sequence
  Description of Artificial Sequence: Synthetic oligonucleotide
uugggucgcaccagcuuug

SEQ ID NO: 560251 - RNA, 19 nt, Artificial Sequence
  Description of Artificial Sequence: Synthetic oligonucleotide
guaguugacuugucagcac

SEQ ID NO: 560252 - RNA, 19 nt, Artificial Sequence
  Description of Artificial Sequence: Synthetic oligonucleotide
uuuucuuaugcggguacua

SEQ ID NO: 560253 - RNA, 19 nt, Artificial Sequence
  Description of Artificial Sequence: Synthetic oligonucleotide
agaaugcuuccuuccugug

SEQ ID NO: 560254 - RNA, 19 nt, Artificial Sequence
  Description of Artificial Sequence: Synthetic oligonucleotide
gaggguagcauacaauuuu

SEQ ID NO: 560255 - RNA, 19 nt, Artificial Sequence
  Description of Artificial Sequence: Synthetic oligonucleotide
cacacaagcuguagcccag

SEQ ID NO: 560256 - RNA, 19 nt, Artificial Sequence
  Description of Artificial Sequence: Synthetic oligonucleotide
gugguuucggccaggcuag

SEQ ID NO: 560257 - RNA, 19 nt, Artificial Sequence
  Description of Artificial Sequence: Synthetic oligonucleotide
aacguacaauugacuggac

SEQ ID NO: 560258 - RNA, 19 nt, Artificial Sequence
  Description of Artificial Sequence: Synthetic oligonucleotide
cugccagccacccucgaug

SEQ ID NO: 560259 - RNA, 19 nt, Artificial Sequence
  Description of Artificial Sequence: Synthetic oligonucleotide
acguccuuguacgaaauaa

SEQ ID NO: 560260 - RNA, 19 nt, Artificial Sequence
  Description of Artificial Sequence: Synthetic oligonucleotide
uggacccaaaacgaguuua

SEQ ID NO: 560261 - RNA, 19 nt, Artificial Sequence
  Description of Artificial Sequence: Synthetic oligonucleotide
accaccgcacacagaaucg

SEQ ID NO: 560262 - RNA, 19 nt, Artificial Sequence
  Description of Artificial Sequence: Synthetic oligonucleotide
aguuuguaguagaggccac

SEQ ID NO: 560263 - RNA, 19 nt, Artificial Sequence
  Description of Artificial Sequence: Synthetic oligonucleotide
ugccguagucaugagcuga

SEQ ID NO: 560264 - RNA, 19 nt, Artificial Sequence
  Description of Artificial Sequence: Synthetic oligonucleotide
uggccauuugggucgcacc

SEQ ID NO: 560265 - RNA, 19 nt, Artificial Sequence
  Description of Artificial Sequence: Synthetic oligonucleotide
uccccguuggcguuccggc

SEQ ID NO: 560266 - RNA, 19 nt, Artificial Sequence
  Description of Artificial Sequence: Synthetic oligonucleotide
caaggagaggugguuucgg

SEQ ID NO: 560267 - RNA, 19 nt, Artificial Sequence
  Description of Artificial Sequence: Synthetic oligonucleotide
cuuaggucacuaauucaaa

SEQ ID NO: 560268 - RNA, 19 nt, Artificial Sequence
  Description of Artificial Sequence: Synthetic oligonucleotide
ggugguuucggccaggcua

SEQ ID NO: 560269 - RNA, 19 nt, Artificial Sequence
  Description of Artificial Sequence: Synthetic oligonucleotide
uaucuuagagugggaggga

SEQ ID NO: 560270 - RNA, 19 nt, Artificial Sequence
  Description of Artificial Sequence: Synthetic oligonucleotide
ggagacauuuauguacagc

SEQ ID NO: 560271 - RNA, 19 nt, Artificial Sequence
  Description of Artificial Sequence: Synthetic oligonucleotide
uccggcgccauaagguggu

SEQ ID NO: 560272 - RNA, 19 nt, Artificial Sequence
  Description of Artificial Sequence: Synthetic oligonucleotide
gaacggggacgacuucucc

SEQ ID NO: 560273 - RNA, 19 nt, Artificial Sequence
  Description of Artificial Sequence: Synthetic oligonucleotide
gccaugggauccaagaacc

SEQ ID NO: 560274 - RNA, 19 nt, Artificial Sequence
  Description of Artificial Sequence: Synthetic oligonucleotide
uaccaccaccaccaccacc

SEQ ID NO: 560275 - RNA, 19 nt, Artificial Sequence
  Description of Artificial Sequence: Synthetic oligonucleotide
cuccaagcaacuguccgug

SEQ ID NO: 560276 - RNA, 19 nt, Artificial Sequence
  Description of Artificial Sequence: Synthetic oligonucleotide
acugaacggggacgacuuc

SEQ ID NO: 560277 - RNA, 19 nt, Artificial Sequence
  Description of Artificial Sequence: Synthetic oligonucleotide
cugcuuaggggugaagcug

SEQ ID NO: 560278 - RNA, 19 nt, Artificial Sequence
  Description of Artificial Sequence: Synthetic oligonucleotide
gaugggcgggagccaaaag

SEQ ID NO: 560279 - RNA, 19 nt, Artificial Sequence
  Description of Artificial Sequence: Synthetic oligonucleotide
ugguugucgucugacaauu

SEQ ID NO: 560280 - RNA, 19 nt, Artificial Sequence
  Description of Artificial Sequence: Synthetic oligonucleotide
gguuugguuuugaauauuc

SEQ ID NO: 560281 - RNA, 19 nt, Artificial Sequence
  Description of Artificial Sequence: Synthetic oligonucleotide
aaagaaccgugaagcucag

SEQ ID NO: 560282 - RNA, 19 nt, Artificial Sequence
  Description of Artificial Sequence: Synthetic oligonucleotide
gcuugggagacauuuaugu

SEQ ID NO: 560283 - RNA, 19 nt, Artificial Sequence
  Description of Artificial Sequence: Synthetic oligonucleotide
gaauccgcacaggaccgcc

SEQ ID NO: 560284 - RNA, 19 nt, Artificial Sequence
  Description of Artificial Sequence: Synthetic oligonucleotide
guuccacccagggaguacc

SEQ ID NO: 560285 - RNA, 19 nt, Artificial Sequence
  Description of Artificial Sequence: Synthetic oligonucleotide
auauugcacguaguugacu

SEQ ID NO: 560286 - RNA, 19 nt, Artificial Sequence
  Description of Artificial Sequence: Synthetic oligonucleotide
gaagagcccgcugccguag

SEQ ID NO: 560287 - RNA, 19 nt, Artificial Sequence
  Description of Artificial Sequence: Synthetic oligonucleotide
gaaccgugaagcucagucu

SEQ ID NO: 560288 - RNA, 19 nt, Artificial Sequence
  Description of Artificial Sequence: Synthetic oligonucleotide
ucucggccuucugagcagg

SEQ ID NO: 560289 - RNA, 19 nt, Artificial Sequence
  Description of Artificial Sequence: Synthetic oligonucleotide
accgcacacagaaucgaag

SEQ ID NO: 560290 - RNA, 19 nt, Artificial Sequence
  Description of Artificial Sequence: Synthetic oligonucleotide
ggucacuaauucaaaauaa

SEQ ID NO: 560291 - RNA, 19 nt, Artificial Sequence
  Description of Artificial Sequence: Synthetic oligonucleotide
gagcgcuucgcugcuuagg

SEQ ID NO: 560292 - RNA, 19 nt, Artificial Sequence
  Description of Artificial Sequence: Synthetic oligonucleotide
ccgcacacagaaucgaagc

SEQ ID NO: 560293 - RNA, 19 nt, Artificial Sequence
  Description of Artificial Sequence: Synthetic oligonucleotide
caauugacuggacccaaaa

SEQ ID NO: 560294 - RNA, 19 nt, Artificial Sequence
  Description of Artificial Sequence: Synthetic oligonucleotide
uccgguuauggugcucugc

SEQ ID NO: 560295 - RNA, 19 nt, Artificial Sequence
  Description of Artificial Sequence: Synthetic oligonucleotide
ugccucugugucuccacgu

SEQ ID NO: 560296 - RNA, 19 nt, Artificial Sequence
  Description of Artificial Sequence: Synthetic oligonucleotide
aaucgaagcuugggagaca

SEQ ID NO: 560297 - RNA, 19 nt, Artificial Sequence
  Description of Artificial Sequence: Synthetic oligonucleotide
cuugggagacauuuaugua

SEQ ID NO: 560298 - RNA, 19 nt, Artificial Sequence
  Description of Artificial Sequence: Synthetic oligonucleotide
aggaccgccugcgauuguc

SEQ ID NO: 560299 - RNA, 19 nt, Artificial Sequence
  Description of Artificial Sequence: Synthetic oligonucleotide
guacuagcacaaaauaagu

SEQ ID NO: 560300 - RNA, 19 nt, Artificial Sequence
  Description of Artificial Sequence: Synthetic oligonucleotide
cccagagaacacaaacagc

SEQ ID NO: 560301 - RNA, 19 nt, Artificial Sequence
  Description of Artificial Sequence: Synthetic oligonucleotide
caugccucugugucuccac

SEQ ID NO: 560302 - RNA, 19 nt, Artificial Sequence
  Description of Artificial Sequence: Synthetic oligonucleotide
ugcacguaguugacuuguc

SEQ ID NO: 560303 - RNA, 19 nt, Artificial Sequence
  Description of Artificial Sequence: Synthetic oligonucleotide
uccucuguuucuugcuaua

SEQ ID NO: 560304 - RNA, 19 nt, Artificial Sequence
  Description of Artificial Sequence: Synthetic oligonucleotide
ggguggaugggcguuggcg

SEQ ID NO: 560305 - RNA, 19 nt, Artificial Sequence
  Description of Artificial Sequence: Synthetic oligonucleotide
ggaauaggaggguagcaua

SEQ ID NO: 560306 - RNA, 19 nt, Artificial Sequence
  Description of Artificial Sequence: Synthetic oligonucleotide
acauuuauguacagcugua

SEQ ID NO: 560307 - RNA, 19 nt, Artificial Sequence
  Description of Artificial Sequence: Synthetic oligonucleotide
acuggacccaaaacgaguu

SEQ ID NO: 560308 - RNA, 19 nt, Artificial Sequence
  Description of Artificial Sequence: Synthetic oligonucleotide
agagcccgcugccguaguc

SEQ ID NO: 560309 - RNA, 19 nt, Artificial Sequence
  Description of Artificial Sequence: Synthetic oligonucleotide
cuguggcaacguacaauug

SEQ ID NO: 560310 - RNA, 19 nt, Artificial Sequence
  Description of Artificial Sequence: Synthetic oligonucleotide
gggaauccgcacaggaccg

SEQ ID NO: 560311 - RNA, 19 nt, Artificial Sequence
  Description of Artificial Sequence: Synthetic oligonucleotide
ucagcacaauugucuuccu

SEQ ID NO: 560312 - RNA, 19 nt, Artificial Sequence
  Description of Artificial Sequence: Synthetic oligonucleotide
cuuaugcaguuuggguuug

SEQ ID NO: 560313 - RNA, 19 nt, Artificial Sequence
  Description of Artificial Sequence: Synthetic oligonucleotide
guggaugggcguuggcgug

SEQ ID NO: 560314 - RNA, 19 nt, Artificial Sequence
  Description of Artificial Sequence: Synthetic oligonucleotide
ccaagagcauaagaucucc

SEQ ID NO: 560315 - RNA, 19 nt, Artificial Sequence
  Description of Artificial Sequence: Synthetic oligonucleotide
accgccugcgauugucucu

SEQ ID NO: 560316 - RNA, 19 nt, Artificial Sequence
  Description of Artificial Sequence: Synthetic oligonucleotide
uccaagcaacuguccguga

SEQ ID NO: 560317 - RNA, 19 nt, Artificial Sequence
  Description of Artificial Sequence: Synthetic oligonucleotide
cucccuuguccccagccuc

SEQ ID NO: 560318 - RNA, 19 nt, Artificial Sequence
  Description of Artificial Sequence: Synthetic oligonucleotide
uuggccauuugggucgcac

SEQ ID NO: 560319 - RNA, 19 nt, Artificial Sequence
  Description of Artificial Sequence: Synthetic oligonucleotide
agcuugggagacauuuaug

SEQ ID NO: 560320 - RNA, 19 nt, Artificial Sequence
  Description of Artificial Sequence: Synthetic oligonucleotide
gcaaccaagagcauaagau

SEQ ID NO: 560321 - RNA, 19 nt, Artificial Sequence
  Description of Artificial Sequence: Synthetic oligonucleotide
ugggucgcaccagcuuugg

SEQ ID NO: 560322 - RNA, 19 nt, Artificial Sequence
  Description of Artificial Sequence: Synthetic oligonucleotide
augggauccaagaaccauu

SEQ ID NO: 560323 - RNA, 19 nt, Artificial Sequence
  Description of Artificial Sequence: Synthetic oligonucleotide
ucacgucgccagagagggg

SEQ ID NO: 560324 - RNA, 19 nt, Artificial Sequence
  Description of Artificial Sequence: Synthetic oligonucleotide
uccgguuccgggucuggau

SEQ ID NO: 560325 - RNA, 19 nt, Artificial Sequence
  Description of Artificial Sequence: Synthetic oligonucleotide
caagcaacuguccgugaaa

SEQ ID NO: 560326 - RNA, 19 nt, Artificial Sequence
  Description of Artificial Sequence: Synthetic oligonucleotide
gcacacaagcuguagccca

SEQ ID NO: 560327 - RNA, 19 nt, Artificial Sequence
  Description of Artificial Sequence: Synthetic oligonucleotide
cugugccuagcccauggca

SEQ ID NO: 560328 - RNA, 19 nt, Artificial Sequence
  Description of Artificial Sequence: Synthetic oligonucleotide
aggggcuacccuccagaca

SEQ ID NO: 560329 - RNA, 19 nt, Artificial Sequence
  Description of Artificial Sequence: Synthetic oligonucleotide
gucgcaccagcuuuggccu

SEQ ID NO: 560330 - RNA, 19 nt, Artificial Sequence
  Description of Artificial Sequence: Synthetic oligonucleotide
ggaaugaucugggagacau

SEQ ID NO: 560331 - RNA, 19 nt, Artificial Sequence
  Description of Artificial Sequence: Synthetic oligonucleotide
guugacgcacucucggccu

SEQ ID NO: 560332 - RNA, 19 nt, Artificial Sequence
  Description of Artificial Sequence: Synthetic oligonucleotide
ugcgauugucucugcccuc

SEQ ID NO: 560333 - RNA, 19 nt, Artificial Sequence
  Description of Artificial Sequence: Synthetic oligonucleotide
agggaucacagggccacug

SEQ ID NO: 560334 - RNA, 19 nt, Artificial Sequence
  Description of Artificial Sequence: Synthetic oligonucleotide
ggccauuugggucgcacca

SEQ ID NO: 560335 - RNA, 19 nt, Artificial Sequence
  Description of Artificial Sequence: Synthetic oligonucleotide
aguuaagcuuaugcaguuu

SEQ ID NO: 560336 - RNA, 19 nt, Artificial Sequence
  Description of Artificial Sequence: Synthetic oligonucleotide
caggggcuacccuccagac

SEQ ID NO: 560337 - RNA, 19 nt, Artificial Sequence
  Description of Artificial Sequence: Synthetic oligonucleotide
gacuggacccaaaacgagu

SEQ ID NO: 560338 - RNA, 19 nt, Artificial Sequence
  Description of Artificial Sequence: Synthetic oligonucleotide
gggagacauuuauguacag

SEQ ID NO: 560339 - RNA, 19 nt, Artificial Sequence
  Description of Artificial Sequence: Synthetic oligonucleotide
ucgaagccaagggaaugau

SEQ ID NO: 560340 - RNA, 19 nt, Artificial Sequence
  Description of Artificial Sequence: Synthetic oligonucleotide
uggcguuccggcgccauaa

SEQ ID NO: 560341 - RNA, 19 nt, Artificial Sequence
  Description of Artificial Sequence: Synthetic oligonucleotide
ccacaguugacgcacucuc

SEQ ID NO: 560342 - RNA, 19 nt, Artificial Sequence
  Description of Artificial Sequence: Synthetic oligonucleotide
aguugacuugucagcacaa

SEQ ID NO: 560343 - RNA, 19 nt, Artificial Sequence
  Description of Artificial Sequence: Synthetic oligonucleotide
gggaagcugugccuagccc

SEQ ID NO: 560344 - RNA, 19 nt, Artificial Sequence
  Description of Artificial Sequence: Synthetic oligonucleotide
agggaguacccggccucgc

SEQ ID NO: 560345 - RNA, 19 nt, Artificial Sequence
  Description of Artificial Sequence: Synthetic oligonucleotide
gacccaaaacgaguuuaaa

SEQ ID NO: 560346 - RNA, 19 nt, Artificial Sequence
  Description of Artificial Sequence: Synthetic oligonucleotide
ccacucaucagugaguuaa

SEQ ID NO: 560347 - RNA, 19 nt, Artificial Sequence
  Description of Artificial Sequence: Synthetic oligonucleotide
uacccggccucgcucuggu

SEQ ID NO: 560348 - RNA, 19 nt, Artificial Sequence
  Description of Artificial Sequence: Synthetic oligonucleotide
ccauuugggucgcaccagc

SEQ ID NO: 560349 - RNA, 19 nt, Artificial Sequence
  Description of Artificial Sequence: Synthetic oligonucleotide
guccccguuggcguuccgg

SEQ ID NO: 560350 - RNA, 19 nt, Artificial Sequence
  Description of Artificial Sequence: Synthetic oligonucleotide
gaccgccugcgauugucuc

SEQ ID NO: 560351 - RNA, 19 nt, Artificial Sequence
  Description of Artificial Sequence: Synthetic oligonucleotide
gacgccaauauugcacgua

SEQ ID NO: 560352 - RNA, 19 nt, Artificial Sequence
  Description of Artificial Sequence: Synthetic oligonucleotide
aagaaccgugaagcucagu

SEQ ID NO: 560353 - RNA, 19 nt, Artificial Sequence
  Description of Artificial Sequence: Synthetic oligonucleotide
gcacguaguugacuuguca

SEQ ID NO: 560354 - RNA, 19 nt, Artificial Sequence
  Description of Artificial Sequence: Synthetic oligonucleotide
uugacgcacucucggccuu

SEQ ID NO: 560355 - RNA, 19 nt, Artificial Sequence
  Description of Artificial Sequence: Synthetic oligonucleotide
accgugaagcucagucuug

SEQ ID NO: 560356 - RNA, 19 nt, Artificial Sequence
  Description of Artificial Sequence: Synthetic oligonucleotide
gcguuccggcgccauaagg

SEQ ID NO: 560357 - RNA, 19 nt, Artificial Sequence
  Description of Artificial Sequence: Synthetic oligonucleotide
ccacaggcguugcacacag

SEQ ID NO: 560358 - RNA, 19 nt, Artificial Sequence
  Description of Artificial Sequence: Synthetic oligonucleotide
acaauugacuggacccaaa

SEQ ID NO: 560359 - RNA, 19 nt, Artificial Sequence
  Description of Artificial Sequence: Synthetic oligonucleotide
gcagcggcacugaacgggg

SEQ ID NO: 560360 - RNA, 19 nt, Artificial Sequence
  Description of Artificial Sequence: Synthetic oligonucleotide
gguggaugggcguuggcgu

SEQ ID NO: 560361 - RNA, 19 nt, Artificial Sequence
  Description of Artificial Sequence: Synthetic oligonucleotide
agggguggaugggcguugg

SEQ ID NO: 560362 - RNA, 19 nt, Artificial Sequence
  Description of Artificial Sequence: Synthetic oligonucleotide
agaacccagagaacacaaa

SEQ ID NO: 560363 - RNA, 19 nt, Artificial Sequence
  Description of Artificial Sequence: Synthetic oligonucleotide
gagggguggaugggcguug

SEQ ID NO: 560364 - RNA, 19 nt, Artificial Sequence
  Description of Artificial Sequence: Synthetic oligonucleotide
ccaaggagaggugguuucg

SEQ ID NO: 560365 - RNA, 19 nt, Artificial Sequence
  Description of Artificial Sequence: Synthetic oligonucleotide
uucugccagccacccucga

SEQ ID NO: 560366 - RNA, 19 nt, Artificial Sequence
  Description of Artificial Sequence: Synthetic oligonucleotide
cugcgauugucucugcccu

SEQ ID NO: 560367 - RNA, 19 nt, Artificial Sequence
  Description of Artificial Sequence: Synthetic oligonucleotide
gccaauauugcacguaguu

SEQ ID NO: 560368 - RNA, 19 nt, Artificial Sequence
  Description of Artificial Sequence: Synthetic oligonucleotide
cuuagagugggagggaguu

SEQ ID NO: 560369 - RNA, 19 nt, Artificial Sequence
  Description of Artificial Sequence: Synthetic oligonucleotide
gcauacacuuggaaagcuc

SEQ ID NO: 560370 - RNA, 19 nt, Artificial Sequence
  Description of Artificial Sequence: Synthetic oligonucleotide
gcuuaugcaguuuggguuu

SEQ ID NO: 560371 - RNA, 19 nt, Artificial Sequence
  Description of Artificial Sequence: Synthetic oligonucleotide
uuccgguuccgggucugga

SEQ ID NO: 560372 - RNA, 19 nt, Artificial Sequence
  Description of Artificial Sequence: Synthetic oligonucleotide
gagcccgcugccguaguca

SEQ ID NO: 560373 - RNA, 19 nt, Artificial Sequence
  Description of Artificial Sequence: Synthetic oligonucleotide
guagagcccgcaggcguug

SEQ ID NO: 560374 - RNA, 19 nt, Artificial Sequence
  Description of Artificial Sequence: Synthetic oligonucleotide
ugccuagcccauggcaguc

SEQ ID NO: 560375 - RNA, 19 nt, Artificial Sequence
  Description of Artificial Sequence: Synthetic oligonucleotide
ugcgucagggcaggggcua

SEQ ID NO: 560376 - RNA, 19 nt, Artificial Sequence
  Description of Artificial Sequence: Synthetic oligonucleotide
ggaguacccggccucgcuc

SEQ ID NO: 560377 - RNA, 19 nt, Artificial Sequence
  Description of Artificial Sequence: Synthetic oligonucleotide
cuuccgguuauggugcucu

SEQ ID NO: 560378 - RNA, 19 nt, Artificial Sequence
  Description of Artificial Sequence: Synthetic oligonucleotide
gcggcacugaacggggacg

SEQ ID NO: 560379 - RNA, 19 nt, Artificial Sequence
  Description of Artificial Sequence: Synthetic oligonucleotide
agcccgcugccguagucau

SEQ ID NO: 560380 - RNA, 19 nt, Artificial Sequence
  Description of Artificial Sequence: Synthetic oligonucleotide
cagcaaccaagagcauaag

SEQ ID NO: 560381 - RNA, 19 nt, Artificial Sequence
  Description of Artificial Sequence: Synthetic oligonucleotide
cuuccgguuccgggucugg

SEQ ID NO: 560382 - RNA, 19 nt, Artificial Sequence
  Description of Artificial Sequence: Synthetic oligonucleotide
gugguugucgucugacaau

SEQ ID NO: 560383 - RNA, 19 nt, Artificial Sequence
  Description of Artificial Sequence: Synthetic oligonucleotide
cuccugcuagggccauggg

SEQ ID NO: 560384 - RNA, 19 nt, Artificial Sequence
  Description of Artificial Sequence: Synthetic oligonucleotide
cuaccaccaccaccaccac

SEQ ID NO: 560385 - RNA, 19 nt, Artificial Sequence
  Description of Artificial Sequence: Synthetic oligonucleotide
ccccagggaucacagggcc

SEQ ID NO: 560386 - RNA, 19 nt, Artificial Sequence
  Description of Artificial Sequence: Synthetic oligonucleotide
guccguucaucuuguggua

SEQ ID NO: 560387 - RNA, 19 nt, Artificial Sequence
  Description of Artificial Sequence: Synthetic oligonucleotide
cccguuggcguuccggcgc

SEQ ID NO: 560388 - RNA, 19 nt, Artificial Sequence
  Description of Artificial Sequence: Synthetic oligonucleotide
uuggcguuccggcgccaua

SEQ ID NO: 560389 - RNA, 19 nt, Artificial Sequence
  Description of Artificial Sequence: Synthetic oligonucleotide
ccugcuagggccaugggau

SEQ ID NO: 560390 - RNA, 19 nt, Artificial Sequence
  Description of Artificial Sequence: Synthetic oligonucleotide
gcgcuucgcugcuuagggg

SEQ ID NO: 560391 - RNA, 19 nt, Artificial Sequence
  Description of Artificial Sequence: Synthetic oligonucleotide
cagcaauuggacgccaaua

SEQ ID NO: 560392 - RNA, 19 nt, Artificial Sequence
  Description of Artificial Sequence: Synthetic oligonucleotide
ccgguuauggugcucugca

SEQ ID NO: 560393 - RNA, 19 nt, Artificial Sequence
  Description of Artificial Sequence: Synthetic oligonucleotide
cauuugggucgcaccagcu

SEQ ID NO: 560394 - RNA, 19 nt, Artificial Sequence
  Description of Artificial Sequence: Synthetic oligonucleotide
caccgcacacagaaucgaa

SEQ ID NO: 560395 - RNA, 19 nt, Artificial Sequence
  Description of Artificial Sequence: Synthetic oligonucleotide
accacucaucagugaguua

SEQ ID NO: 560396 - RNA, 19 nt, Artificial Sequence
  Description of Artificial Sequence: Synthetic oligonucleotide
cacugaacggggacgacuu

SEQ ID NO: 560397 - RNA, 19 nt, Artificial Sequence
  Description of Artificial Sequence: Synthetic oligonucleotide
cgcugcuuaggggugaagc

SEQ ID NO: 560398 - RNA, 19 nt, Artificial Sequence
  Description of Artificial Sequence: Synthetic oligonucleotide
ggagcgcuucgcugcuuag

SEQ ID NO: 560399 - RNA, 19 nt, Artificial Sequence
  Description of Artificial Sequence: Synthetic oligonucleotide
ccacaggcgccaugugucc

SEQ ID NO: 560400 - RNA, 19 nt, Artificial Sequence
  Description of Artificial Sequence: Synthetic oligonucleotide
cugaacggggacgacuucu

SEQ ID NO: 560401 - RNA, 19 nt, Artificial Sequence
  Description of Artificial Sequence: Synthetic oligonucleotide
cccuguaagucugcccucc

SEQ ID NO: 560402 - RNA, 19 nt, Artificial Sequence
  Description of Artificial Sequence: Synthetic oligonucleotide
cucuugggaugggcgggag

SEQ ID NO: 560403 - RNA, 19 nt, Artificial Sequence
  Description of Artificial Sequence: Synthetic oligonucleotide
gcgugggcaggaugugucc

SEQ ID NO: 560404 - RNA, 19 nt, Artificial Sequence
  Description of Artificial Sequence: Synthetic oligonucleotide
gggagccaaaaguguguuc

SEQ ID NO: 560405 - RNA, 19 nt, Artificial Sequence
  Description of Artificial Sequence: Synthetic oligonucleotide
ggacccaaaacgaguuuaa

SEQ ID NO: 560406 - RNA, 19 nt, Artificial Sequence
  Description of Artificial Sequence: Synthetic oligonucleotide
gugccuagcccauggcagu

SEQ ID NO: 560407 - RNA, 19 nt, Artificial Sequence
  Description of Artificial Sequence: Synthetic oligonucleotide
ucgcaccagcuuuggccuc

SEQ ID NO: 560408 - RNA, 19 nt, Artificial Sequence
  Description of Artificial Sequence: Synthetic oligonucleotide
guagcccaguuagaaacau

SEQ ID NO: 560409 - RNA, 19 nt, Artificial Sequence
  Description of Artificial Sequence: Synthetic oligonucleotide
ggaauccgcacaggaccgc

SEQ ID NO: 560410 - RNA, 19 nt, Artificial Sequence
  Description of Artificial Sequence: Synthetic oligonucleotide
cagccacccucgaugucca

SEQ ID NO: 560411 - RNA, 19 nt, Artificial Sequence
  Description of Artificial Sequence: Synthetic oligonucleotide
cuucgcugcuuagggguga

SEQ ID NO: 560412 - RNA, 19 nt, Artificial Sequence
  Description of Artificial Sequence: Synthetic oligonucleotide
cuguggccccacaguugac

SEQ ID NO: 560413 - RNA, 19 nt, Artificial Sequence
  Description of Artificial Sequence: Synthetic oligonucleotide
guugacuugucagcacaau

SEQ ID NO: 560414 - RNA, 19 nt, Artificial Sequence
  Description of Artificial Sequence: Synthetic oligonucleotide
uggcugcacaaggcuggga

SEQ ID NO: 560415 - RNA, 19 nt, Artificial Sequence
  Description of Artificial Sequence: Synthetic oligonucleotide
caggcgccauguguccagc

SEQ ID NO: 560416 - RNA, 19 nt, Artificial Sequence
  Description of Artificial Sequence: Synthetic oligonucleotide
ggggacgacuucuccugca

SEQ ID NO: 560417 - RNA, 19 nt, Artificial Sequence
  Description of Artificial Sequence: Synthetic oligonucleotide
ggcguuccggcgccauaag

SEQ ID NO: 560418 - RNA, 19 nt, Artificial Sequence
  Description of Artificial Sequence: Synthetic oligonucleotide
ccgggucuggaucccuucc

SEQ ID NO: 560419 - RNA, 19 nt, Artificial Sequence
  Description of Artificial Sequence: Synthetic oligonucleotide
cugggagacauuuccccuu

SEQ ID NO: 560420 - RNA, 19 nt, Artificial Sequence
  Description of Artificial Sequence: Synthetic oligonucleotide
ggcaggauguguccagagu

SEQ ID NO: 560421 - RNA, 19 nt, Artificial Sequence
  Description of Artificial Sequence: Synthetic oligonucleotide
ccgguuccgggucuggauc

SEQ ID NO: 560422 - RNA, 19 nt, Artificial Sequence
  Description of Artificial Sequence: Synthetic oligonucleotide
gccacccucgauguccaug

SEQ ID NO: 560423 - RNA, 19 nt, Artificial Sequence
  Description of Artificial Sequence: Synthetic oligonucleotide
gcaauuggacgccaauauu

SEQ ID NO: 560424 - RNA, 19 nt, Artificial Sequence
  Description of Artificial Sequence: Synthetic oligonucleotide
cagugggaagcugugccua

SEQ ID NO: 560425 - RNA, 19 nt, Artificial Sequence
  Description of Artificial Sequence: Synthetic oligonucleotide
gccaucacgucgccagaga

SEQ ID NO: 560426 - RNA, 19 nt, Artificial Sequence
  Description of Artificial Sequence: Synthetic oligonucleotide
ccccguuggcguuccggcg

SEQ ID NO: 560427 - RNA, 19 nt, Artificial Sequence
  Description of Artificial Sequence: Synthetic oligonucleotide
cacguccuuguacgaaaua

SEQ ID NO: 560428 - RNA, 19 nt, Artificial Sequence
  Description of Artificial Sequence: Synthetic oligonucleotide
cacaggaccgccugcgauu

SEQ ID NO: 560429 - RNA, 19 nt, Artificial Sequence
  Description of Artificial Sequence: Synthetic oligonucleotide
cgguuauggugcucugcag

SEQ ID NO: 560430 - RNA, 19 nt, Artificial Sequence
  Description of Artificial Sequence: Synthetic oligonucleotide
cagcacccagggcgcacac

SEQ ID NO: 560431 - RNA, 19 nt, Artificial Sequence
  Description of Artificial Sequence: Synthetic oligonucleotide
caaagcauucagccccuuu

SEQ ID NO: 560432 - RNA, 19 nt, Artificial Sequence
  Description of Artificial Sequence: Synthetic oligonucleotide
ccaugggauccaagaacca

SEQ ID NO: 560433 - RNA, 19 nt, Artificial Sequence
  Description of Artificial Sequence: Synthetic oligonucleotide
cucggccuucugagcagga

SEQ ID NO: 560434 - RNA, 19 nt, Artificial Sequence
  Description of Artificial Sequence: Synthetic oligonucleotide
ccgccugcgauugucucug

SEQ ID NO: 560435 - RNA, 19 nt, Artificial Sequence
  Description of Artificial Sequence: Synthetic oligonucleotide
gggucgcaccagcuuuggc

SEQ ID NO: 560436 - RNA, 19 nt, Artificial Sequence
  Description of Artificial Sequence: Synthetic oligonucleotide
ggacgacuucuccugcaua

SEQ ID NO: 560437 - RNA, 19 nt, Artificial Sequence
  Description of Artificial Sequence: Synthetic oligonucleotide
gcggguacuagcacaaaau

SEQ ID NO: 560438 - RNA, 19 nt, Artificial Sequence
  Description of Artificial Sequence: Synthetic oligonucleotide
cgcugccguagucaugagc

SEQ ID NO: 560439 - RNA, 19 nt, Artificial Sequence
  Description of Artificial Sequence: Synthetic oligonucleotide
gcguugcacacaggguccc

SEQ ID NO: 560440 - RNA, 19 nt, Artificial Sequence
  Description of Artificial Sequence: Synthetic oligonucleotide
cggguacuagcacaaaaua

SEQ ID NO: 560441 - RNA, 19 nt, Artificial Sequence
  Description of Artificial Sequence: Synthetic oligonucleotide
cguuccggcgccauaaggu

SEQ ID NO: 560442 - RNA, 19 nt, Artificial Sequence
  Description of Artificial Sequence: Synthetic oligonucleotide
ggugcccgcucuccuggca

SEQ ID NO: 560443 - RNA, 19 nt, Artificial Sequence
  Description of Artificial Sequence: Synthetic oligonucleotide
ggaugggcgggagccaaaa

SEQ ID NO: 560444 - RNA, 19 nt, Artificial Sequence
  Description of Artificial Sequence: Synthetic oligonucleotide
ggaggguagcauacaauuu

SEQ ID NO: 560445 - RNA, 19 nt, Artificial Sequence
  Description of Artificial Sequence: Synthetic oligonucleotide
cuguaccuugaaggaucca

SEQ ID NO: 560446 - RNA, 19 nt, Artificial Sequence
  Description of Artificial Sequence: Synthetic oligonucleotide
gggguggaugggcguuggc

SEQ ID NO: 560447 - RNA, 19 nt, Artificial Sequence
  Description of Artificial Sequence: Synthetic oligonucleotide
cagcggcacugaacgggga

SEQ ID NO: 560448 - RNA, 19 nt, Artificial Sequence
  Description of Artificial Sequence: Synthetic oligonucleotide
gcacugaacggggacgacu

SEQ ID NO: 560449 - RNA, 19 nt, Artificial Sequence
  Description of Artificial Sequence: Synthetic oligonucleotide
gcgauugucucugcccucu

SEQ ID NO: 560450 - RNA, 19 nt, Artificial Sequence
  Description of Artificial Sequence: Synthetic oligonucleotide
ggacgccaauauugcacgu

SEQ ID NO: 560451 - RNA, 19 nt, Artificial Sequence
  Description of Artificial Sequence: Synthetic oligonucleotide
ggcacugaacggggacgac

SEQ ID NO: 560452 - RNA, 19 nt, Artificial Sequence
  Description of Artificial Sequence: Synthetic oligonucleotide
cguuggcgugggcaggaug

SEQ ID NO: 560453 - RNA, 19 nt, Artificial Sequence
  Description of Artificial Sequence: Synthetic oligonucleotide
ccaccaccaccaccaccgc

SEQ ID NO: 560454 - RNA, 19 nt, Artificial Sequence
  Description of Artificial Sequence: Synthetic oligonucleotide
ccagugggaagcugugccu

SEQ ID NO: 560455 - RNA, 19 nt, Artificial Sequence
  Description of Artificial Sequence: Synthetic oligonucleotide
ccaccgcacacagaaucga

SEQ ID NO: 560456 - RNA, 19 nt, Artificial Sequence
  Description of Artificial Sequence: Synthetic oligonucleotide
gcacaggaccgccugcgau

SEQ ID NO: 560457 - RNA, 19 nt, Artificial Sequence
  Description of Artificial Sequence: Synthetic oligonucleotide
ggcuacccuccagacagcu

SEQ ID NO: 560458 - RNA, 19 nt, Artificial Sequence
  Description of Artificial Sequence: Synthetic oligonucleotide
cgcacacagaaucgaagcu

SEQ ID NO: 560459 - RNA, 19 nt, Artificial Sequence
  Description of Artificial Sequence: Synthetic oligonucleotide
gggcuacccuccagacagc

SEQ ID NO: 560460 - RNA, 19 nt, Artificial Sequence
  Description of Artificial Sequence: Synthetic oligonucleotide
gcaggagcgcuucgcugcu

SEQ ID NO: 560461 - RNA, 19 nt, Artificial Sequence
  Description of Artificial Sequence: Synthetic oligonucleotide
guuggcguuccggcgccau

SEQ ID NO: 560462 - RNA, 19 nt, Artificial Sequence
  Description of Artificial Sequence: Synthetic oligonucleotide
cuuggccauuugggucgca

SEQ ID NO: 560463 - RNA, 19 nt, Artificial Sequence
  Description of Artificial Sequence: Synthetic oligonucleotide
gguagagcccgcaggcguu

SEQ ID NO: 560464 - RNA, 19 nt, Artificial Sequence
  Description of Artificial Sequence: Synthetic oligonucleotide
ggaccgccugcgauugucu

SEQ ID NO: 560465 - RNA, 19 nt, Artificial Sequence
  Description of Artificial Sequence: Synthetic oligonucleotide
ccacguccuuguacgaaau

SEQ ID NO: 560466 - RNA, 19 nt, Artificial Sequence
  Description of Artificial Sequence: Synthetic oligonucleotide
cggcacugaacggggacga

SEQ ID NO: 560467 - RNA, 19 nt, Artificial Sequence
  Description of Artificial Sequence: Synthetic oligonucleotide
gcccgcugccguagucaug

SEQ ID NO: 560468 - RNA, 19 nt, Artificial Sequence
  Description of Artificial Sequence: Synthetic oligonucleotide
agccuccguuugggcuuga

SEQ ID NO: 560469 - RNA, 19 nt, Artificial Sequence
  Description of Artificial Sequence: Synthetic oligonucleotide
ccguagucaugagcugaaa

SEQ ID NO: 560470 - RNA, 19 nt, Artificial Sequence
  Description of Artificial Sequence: Synthetic oligonucleotide
cgccugcgauugucucugc

SEQ ID NO: 560471 - RNA, 19 nt, Artificial Sequence
  Description of Artificial Sequence: Synthetic oligonucleotide
cgcacaggaccgccugcga

SEQ ID NO: 560472 - RNA, 19 nt, Artificial Sequence
  Description of Artificial Sequence: Synthetic oligonucleotide
caggaccgccugcgauugu

SEQ ID NO: 560473 - RNA, 19 nt, Artificial Sequence
  Description of Artificial Sequence: Synthetic oligonucleotide
ccggcgccauaagguggug

SEQ ID NO: 560474 - RNA, 19 nt, Artificial Sequence
  Description of Artificial Sequence: Synthetic oligonucleotide
caggagcgcuucgcugcuu

SEQ ID NO: 560475 - RNA, 19 nt, Artificial Sequence
  Description of Artificial Sequence: Synthetic oligonucleotide
cgggagccaaaaguguguu

SEQ ID NO: 560476 - RNA, 19 nt, Artificial Sequence
  Description of Artificial Sequence: Synthetic oligonucleotide
gccuccguuugggcuugau

SEQ ID NO: 560477 - RNA, 19 nt, Artificial Sequence
  Description of Artificial Sequence: Synthetic oligonucleotide
aauauguuaacucuccuag

SEQ ID NO: 560478 - RNA, 19 nt, Artificial Sequence
  Description of Artificial Sequence: Synthetic oligonucleotide
uuauucguguuauagaggg

SEQ ID NO: 560479 - RNA, 19 nt, Artificial Sequence
  Description of Artificial Sequence: Synthetic oligonucleotide
uuuuauucguguuauagag

SEQ ID NO: 560480 - RNA, 19 nt, Artificial Sequence
  Description of Artificial Sequence: Synthetic oligonucleotide
aagagauuuccacaggggc

SEQ ID NO: 560481 - RNA, 19 nt, Artificial Sequence
  Description of Artificial Sequence: Synthetic oligonucleotide
aauguuaagauauugcuuu

SEQ ID NO: 560482 - RNA, 19 nt, Artificial Sequence
  Description of Artificial Sequence: Synthetic oligonucleotide
auucaaucaacgcaagugc

SEQ ID NO: 560483 - RNA, 19 nt, Artificial Sequence
  Description of Artificial Sequence: Synthetic oligonucleotide
aaacggccaaucuagaacg

SEQ ID NO: 560484 - RNA, 19 nt, Artificial Sequence
  Description of Artificial Sequence: Synthetic oligonucleotide
aaauaauucaauccuggca

SEQ ID NO: 560485 - RNA, 19 nt, Artificial Sequence
  Description of Artificial Sequence: Synthetic oligonucleotide
cuagacacacuauugaugg

SEQ ID NO: 560486 - RNA, 19 nt, Artificial Sequence
  Description of Artificial Sequence: Synthetic oligonucleotide
uuuaaaucaggcuucacac

SEQ ID NO: 560487 - RNA, 19 nt, Artificial Sequence
  Description of Artificial Sequence: Synthetic oligonucleotide
aacaacauuagucuuauuu

SEQ ID NO: 560488 - RNA, 19 nt, Artificial Sequence
  Description of Artificial Sequence: Synthetic oligonucleotide
aauaguuucugggaugccc

SEQ ID NO: 560489 - RNA, 19 nt, Artificial Sequence
  Description of Artificial Sequence: Synthetic oligonucleotide
ucagauagcaaaucaacag

SEQ ID NO: 560490 - RNA, 19 nt, Artificial Sequence
  Description of Artificial Sequence: Synthetic oligonucleotide
aaggauucuacucucagcu

SEQ ID NO: 560491 - RNA, 19 nt, Artificial Sequence
  Description of Artificial Sequence: Synthetic oligonucleotide
uuuuaaaucaggcuucaca

SEQ ID NO: 560492 - RNA, 19 nt, Artificial Sequence
  Description of Artificial Sequence: Synthetic oligonucleotide
aaaggauucuacucucagc

SEQ ID NO: 560493 - RNA, 19 nt, Artificial Sequence
  Description of Artificial Sequence: Synthetic oligonucleotide
uggaauaagagaacuuugg

SEQ ID NO: 560494 - RNA, 19 nt, Artificial Sequence
  Description of Artificial Sequence: Synthetic oligonucleotide
guaaucgcaucuuaggucg

SEQ ID NO: 560495 - RNA, 19 nt, Artificial Sequence
  Description of Artificial Sequence: Synthetic oligonucleotide
gguaucaucaaugagaugc

SEQ ID NO: 560496 - RNA, 19 nt, Artificial Sequence
  Description of Artificial Sequence: Synthetic oligonucleotide
ucauaagagauuuccacag

SEQ ID NO: 560497 - RNA, 19 nt, Artificial Sequence
  Description of Artificial Sequence: Synthetic oligonucleotide
aacgccacgauccagucag

SEQ ID NO: 560498 - RNA, 19 nt, Artificial Sequence
  Description of Artificial Sequence: Synthetic oligonucleotide
aaauaugcuuuauuguucu

SEQ ID NO: 560499 - RNA, 19 nt, Artificial Sequence
  Description of Artificial Sequence: Synthetic oligonucleotide
ugugaguuaucagaaaacg

SEQ ID NO: 560500 - RNA, 19 nt, Artificial Sequence
  Description of Artificial Sequence: Synthetic oligonucleotide
uccacauucaaucaacgca

SEQ ID NO: 560501 - RNA, 19 nt, Artificial Sequence
  Description of Artificial Sequence: Synthetic oligonucleotide
cugguuaauauucugcugg

SEQ ID NO: 560502 - RNA, 19 nt, Artificial Sequence
  Description of Artificial Sequence: Synthetic oligonucleotide
aaaguugucacuccauacu

SEQ ID NO: 560503 - RNA, 19 nt, Artificial Sequence
  Description of Artificial Sequence: Synthetic oligonucleotide
aaucaacgcaagugcaacc

SEQ ID NO: 560504 - RNA, 19 nt, Artificial Sequence
  Description of Artificial Sequence: Synthetic oligonucleotide
uguuaacucuccuagacac

SEQ ID NO: 560505 - RNA, 19 nt, Artificial Sequence
  Description of Artificial Sequence: Synthetic oligonucleotide
ucuauugucauguucugga

SEQ ID NO: 560506 - RNA, 19 nt, Artificial Sequence
  Description of Artificial Sequence: Synthetic oligonucleotide
uaaaucaggcuucacaccu

SEQ ID NO: 560507 - RNA, 19 nt, Artificial Sequence
  Description of Artificial Sequence: Synthetic oligonucleotide
ucgaauguaguuaaaagua

SEQ ID NO: 560508 - RNA, 19 nt, Artificial Sequence
  Description of Artificial Sequence: Synthetic oligonucleotide
uucgaauguaguuaaaagu

SEQ ID NO: 560509 - RNA, 19 nt, Artificial Sequence
  Description of Artificial Sequence: Synthetic oligonucleotide
aaauuuagaggguaggaua

SEQ ID NO: 560510 - RNA, 19 nt, Artificial Sequence
  Description of Artificial Sequence: Synthetic oligonucleotide
agcuguuuggaauugaaug

SEQ ID NO: 560511 - RNA, 19 nt, Artificial Sequence
  Description of Artificial Sequence: Synthetic oligonucleotide
uuucacuaaauuaaucccu

SEQ ID NO: 560512 - RNA, 19 nt, Artificial Sequence
  Description of Artificial Sequence: Synthetic oligonucleotide
cuugagucuauguuaaagc

SEQ ID NO: 560513 - RNA, 19 nt, Artificial Sequence
  Description of Artificial Sequence: Synthetic oligonucleotide
agauagcaaaucaacagcc

SEQ ID NO: 560514 - RNA, 19 nt, Artificial Sequence
  Description of Artificial Sequence: Synthetic oligonucleotide
aauuacugguugaauauuc

SEQ ID NO: 560515 - RNA, 19 nt, Artificial Sequence
  Description of Artificial Sequence: Synthetic oligonucleotide
acuucuacugaacacagca

SEQ ID NO: 560516 - RNA, 19 nt, Artificial Sequence
  Description of Artificial Sequence: Synthetic oligonucleotide
ucuacucucagcuaaguuc

SEQ ID NO: 560517 - RNA, 19 nt, Artificial Sequence
  Description of Artificial Sequence: Synthetic oligonucleotide
uucucaaucauuaggaguu

SEQ ID NO: 560518 - RNA, 19 nt, Artificial Sequence
  Description of Artificial Sequence: Synthetic oligonucleotide
ucuaaauuuagaggguagg

SEQ ID NO: 560519 - RNA, 19 nt, Artificial Sequence
  Description of Artificial Sequence: Synthetic oligonucleotide
uaucucugaagcguaaucg

SEQ ID NO: 560520 - RNA, 19 nt, Artificial Sequence
  Description of Artificial Sequence: Synthetic oligonucleotide
cacacaaagauucugagca

SEQ ID NO: 560521 - RNA, 19 nt, Artificial Sequence
  Description of Artificial Sequence: Synthetic oligonucleotide
ugucagauagcaaaucaac

SEQ ID NO: 560522 - RNA, 19 nt, Artificial Sequence
  Description of Artificial Sequence: Synthetic oligonucleotide
caucaaacggccaaucuag

SEQ ID NO: 560523 - RNA, 19 nt, Artificial Sequence
  Description of Artificial Sequence: Synthetic oligonucleotide
uuaaaaguagagcgauucc

SEQ ID NO: 560524 - RNA, 19 nt, Artificial Sequence
  Description of Artificial Sequence: Synthetic oligonucleotide
uauguagcaucacaaacuc

SEQ ID NO: 560525 - RNA, 19 nt, Artificial Sequence
  Description of Artificial Sequence: Synthetic oligonucleotide
cacaucuacugcaacaagg

SEQ ID NO: 560526 - RNA, 19 nt, Artificial Sequence
  Description of Artificial Sequence: Synthetic oligonucleotide
uucugagcaugucaagugg

SEQ ID NO: 560527 - RNA, 19 nt, Artificial Sequence
  Description of Artificial Sequence: Synthetic oligonucleotide
aucauuaggaguugaggag

SEQ ID NO: 560528 - RNA, 19 nt, Artificial Sequence
  Description of Artificial Sequence: Synthetic oligonucleotide
uccucagacaucuauuuug

SEQ ID NO: 560529 - RNA, 19 nt, Artificial Sequence
  Description of Artificial Sequence: Synthetic oligonucleotide
ucuacuucuacugaacaca

SEQ ID NO: 560530 - RNA, 19 nt, Artificial Sequence
  Description of Artificial Sequence: Synthetic oligonucleotide
uugagucuauguuaaagca

SEQ ID NO: 560531 - RNA, 19 nt, Artificial Sequence
  Description of Artificial Sequence: Synthetic oligonucleotide
aaguuuugcuggcauugac

SEQ ID NO: 560532 - RNA, 19 nt, Artificial Sequence
  Description of Artificial Sequence: Synthetic oligonucleotide
caaucuagaacguggauuc

SEQ ID NO: 560533 - RNA, 19 nt, Artificial Sequence
  Description of Artificial Sequence: Synthetic oligonucleotide
aaguagagcgauuccagca

SEQ ID NO: 560534 - RNA, 19 nt, Artificial Sequence
  Description of Artificial Sequence: Synthetic oligonucleotide
aacgcauguucucauaaga

SEQ ID NO: 560535 - RNA, 19 nt, Artificial Sequence
  Description of Artificial Sequence: Synthetic oligonucleotide
aauugaaugcuccccuucu

SEQ ID NO: 560536 - RNA, 19 nt, Artificial Sequence
  Description of Artificial Sequence: Synthetic oligonucleotide
uuaucguuugcucucuucu

SEQ ID NO: 560537 - RNA, 19 nt, Artificial Sequence
  Description of Artificial Sequence: Synthetic oligonucleotide
aaauauguuaacucuccua

SEQ ID NO: 560538 - RNA, 19 nt, Artificial Sequence
  Description of Artificial Sequence: Synthetic oligonucleotide
caaacucgaaccaaaguug

SEQ ID NO: 560539 - RNA, 19 nt, Artificial Sequence
  Description of Artificial Sequence: Synthetic oligonucleotide
cuuaggucgguauuucucc

SEQ ID NO: 560540 - RNA, 19 nt, Artificial Sequence
  Description of Artificial Sequence: Synthetic oligonucleotide
caagaguucccucuaacgc

SEQ ID NO: 560541 - RNA, 19 nt, Artificial Sequence
  Description of Artificial Sequence: Synthetic oligonucleotide
auuuuauucguguuauaga

SEQ ID NO: 560542 - RNA, 19 nt, Artificial Sequence
  Description of Artificial Sequence: Synthetic oligonucleotide
uacugguugaauauucugu

SEQ ID NO: 560543 - RNA, 19 nt, Artificial Sequence
  Description of Artificial Sequence: Synthetic oligonucleotide
cuaaaagugcccagguggg

SEQ ID NO: 560544 - RNA, 19 nt, Artificial Sequence
  Description of Artificial Sequence: Synthetic oligonucleotide
uuuccuaucuauuuaccaa

SEQ ID NO: 560545 - RNA, 19 nt, Artificial Sequence
  Description of Artificial Sequence: Synthetic oligonucleotide
uuuuaacagguuuagccaa

SEQ ID NO: 560546 - RNA, 19 nt, Artificial Sequence
  Description of Artificial Sequence: Synthetic oligonucleotide
uguucuuuaaaaggguuca

SEQ ID NO: 560547 - RNA, 19 nt, Artificial Sequence
  Description of Artificial Sequence: Synthetic oligonucleotide
agcguaaucgcaucuuagg

SEQ ID NO: 560548 - RNA, 19 nt, Artificial Sequence
  Description of Artificial Sequence: Synthetic oligonucleotide
cauucaaucaacgcaagug

SEQ ID NO: 560549 - RNA, 19 nt, Artificial Sequence
  Description of Artificial Sequence: Synthetic oligonucleotide
uuaaaucaggcuucacacc

SEQ ID NO: 560550 - RNA, 19 nt, Artificial Sequence
  Description of Artificial Sequence: Synthetic oligonucleotide
uccaguugugagaacaaca

SEQ ID NO: 560551 - RNA, 19 nt, Artificial Sequence
  Description of Artificial Sequence: Synthetic oligonucleotide
ucuccuagacacacuauug

SEQ ID NO: 560552 - RNA, 19 nt, Artificial Sequence
  Description of Artificial Sequence: Synthetic oligonucleotide
uucaaucaacgcaagugca

SEQ ID NO: 560553 - RNA, 19 nt, Artificial Sequence
  Description of Artificial Sequence: Synthetic oligonucleotide
agcauuucucuacuucuac

SEQ ID NO: 560554 - RNA, 19 nt, Artificial Sequence
  Description of Artificial Sequence: Synthetic oligonucleotide
aaacgcauguucucauaag

SEQ ID NO: 560555 - RNA, 19 nt, Artificial Sequence
  Description of Artificial Sequence: Synthetic oligonucleotide
ugaucuugagucuauguua

SEQ ID NO: 560556 - RNA, 19 nt, Artificial Sequence
  Description of Artificial Sequence: Synthetic oligonucleotide
uaaguccucucuucaauag

SEQ ID NO: 560557 - RNA, 19 nt, Artificial Sequence
  Description of Artificial Sequence: Synthetic oligonucleotide
uuuacgaugucauuuccua

SEQ ID NO: 560558 - RNA, 19 nt, Artificial Sequence
  Description of Artificial Sequence: Synthetic oligonucleotide
auuuccuaucuauuuacca

SEQ ID NO: 560559 - RNA, 19 nt, Artificial Sequence
  Description of Artificial Sequence: Synthetic oligonucleotide
acauuagucuuauuuaaaa

SEQ ID NO: 560560 - RNA, 19 nt, Artificial Sequence
  Description of Artificial Sequence: Synthetic oligonucleotide
aggguugugaguuaucaga

SEQ ID NO: 560561 - RNA, 19 nt, Artificial Sequence
  Description of Artificial Sequence: Synthetic oligonucleotide
guuaaaaguagagcgauuc

SEQ ID NO: 560562 - RNA, 19 nt, Artificial Sequence
  Description of Artificial Sequence: Synthetic oligonucleotide
ucuaacgccacgauccagu

SEQ ID NO: 560563 - RNA, 19 nt, Artificial Sequence
  Description of Artificial Sequence: Synthetic oligonucleotide
ugagucuauguuaaagcaa

SEQ ID NO: 560564 - RNA, 19 nt, Artificial Sequence
  Description of Artificial Sequence: Synthetic oligonucleotide
uuacugguugaauauucug

SEQ ID NO: 560565 - RNA, 19 nt, Artificial Sequence
  Description of Artificial Sequence: Synthetic oligonucleotide
auucugagcaugucaagug

SEQ ID NO: 560566 - RNA, 19 nt, Artificial Sequence
  Description of Artificial Sequence: Synthetic oligonucleotide
aggaguacugaauccauca

SEQ ID NO: 560567 - RNA, 19 nt, Artificial Sequence
  Description of Artificial Sequence: Synthetic oligonucleotide
agcuuuaauuuugaagggg

SEQ ID NO: 560568 - RNA, 19 nt, Artificial Sequence
  Description of Artificial Sequence: Synthetic oligonucleotide
auauguagcaucacaaacu

SEQ ID NO: 560569 - RNA, 19 nt, Artificial Sequence
  Description of Artificial Sequence: Synthetic oligonucleotide
caaacggccaaucuagaac

SEQ ID NO: 560570 - RNA, 19 nt, Artificial Sequence
  Description of Artificial Sequence: Synthetic oligonucleotide
accacaaggagaccuaugu

SEQ ID NO: 560571 - RNA, 19 nt, Artificial Sequence
  Description of Artificial Sequence: Synthetic oligonucleotide
gauucacauuuccagguac

SEQ ID NO: 560572 - RNA, 19 nt, Artificial Sequence
  Description of Artificial Sequence: Synthetic oligonucleotide
ucuuuacgaugucauuucc

SEQ ID NO: 560573 - RNA, 19 nt, Artificial Sequence
  Description of Artificial Sequence: Synthetic oligonucleotide
uagaggguaggauauucug

SEQ ID NO: 560574 - RNA, 19 nt, Artificial Sequence
  Description of Artificial Sequence: Synthetic oligonucleotide
uaaauuuagaggguaggau

SEQ ID NO: 560575 - RNA, 19 nt, Artificial Sequence
  Description of Artificial Sequence: Synthetic oligonucleotide
ucucucaccaugccaaacu

SEQ ID NO: 560576 - RNA, 19 nt, Artificial Sequence
  Description of Artificial Sequence: Synthetic oligonucleotide
uucacuaaauuaaucccuu

SEQ ID NO: 560577 - RNA, 19 nt, Artificial Sequence
  Description of Artificial Sequence: Synthetic oligonucleotide
cauaagagauuuccacagg

SEQ ID NO: 560578 - RNA, 19 nt, Artificial Sequence
  Description of Artificial Sequence: Synthetic oligonucleotide
aaguugucacuccauacuu

SEQ ID NO: 560579 - RNA, 19 nt, Artificial Sequence
  Description of Artificial Sequence: Synthetic oligonucleotide
uguuuuccuaaaagugccc

SEQ ID NO: 560580 - RNA, 19 nt, Artificial Sequence
  Description of Artificial Sequence: Synthetic oligonucleotide
uagcaauacuucauuaaau

SEQ ID NO: 560581 - RNA, 19 nt, Artificial Sequence
  Description of Artificial Sequence: Synthetic oligonucleotide
ucaaucaacgcaagugcaa

SEQ ID NO: 560582 - RNA, 19 nt, Artificial Sequence
  Description of Artificial Sequence: Synthetic oligonucleotide
caagcauaauggaagugug

SEQ ID NO: 560583 - RNA, 19 nt, Artificial Sequence
  Description of Artificial Sequence: Synthetic oligonucleotide
aacucuccuagacacacua

SEQ ID NO: 560584 - RNA, 19 nt, Artificial Sequence
  Description of Artificial Sequence: Synthetic oligonucleotide
aaucuaaauuuagagggua

SEQ ID NO: 560585 - RNA, 19 nt, Artificial Sequence
  Description of Artificial Sequence: Synthetic oligonucleotide
agcaaugcccauugguauc

SEQ ID NO: 560586 - RNA, 19 nt, Artificial Sequence
  Description of Artificial Sequence: Synthetic oligonucleotide
gguuuagccaaucaucuac

SEQ ID NO: 560587 - RNA, 19 nt, Artificial Sequence
  Description of Artificial Sequence: Synthetic oligonucleotide
gauagcaaaucaacagccc

SEQ ID NO: 560588 - RNA, 19 nt, Artificial Sequence
  Description of Artificial Sequence: Synthetic oligonucleotide
cauuuccuaucuauuuacc

SEQ ID NO: 560589 - RNA, 19 nt, Artificial Sequence
  Description of Artificial Sequence: Synthetic oligonucleotide
ucugaucuugagucuaugu

SEQ ID NO: 560590 - RNA, 19 nt, Artificial Sequence
  Description of Artificial Sequence: Synthetic oligonucleotide
uggacgguucauuauggca

SEQ ID NO: 560591 - RNA, 19 nt, Artificial Sequence
  Description of Artificial Sequence: Synthetic oligonucleotide
uuagccaaucaucuacuau

SEQ ID NO: 560592 - RNA, 19 nt, Artificial Sequence
  Description of Artificial Sequence: Synthetic oligonucleotide
uagaacguggauuccuucu

SEQ ID NO: 560593 - RNA, 19 nt, Artificial Sequence
  Description of Artificial Sequence: Synthetic oligonucleotide
uguuauagagggauuucuu

SEQ ID NO: 560594 - RNA, 19 nt, Artificial Sequence
  Description of Artificial Sequence: Synthetic oligonucleotide
cugcaacacagcaaccugg

SEQ ID NO: 560595 - RNA, 19 nt, Artificial Sequence
  Description of Artificial Sequence: Synthetic oligonucleotide
auaauggaaguguguucuc

SEQ ID NO: 560596 - RNA, 19 nt, Artificial Sequence
  Description of Artificial Sequence: Synthetic oligonucleotide
cucauaagagauuuccaca

SEQ ID NO: 560597 - RNA, 19 nt, Artificial Sequence
  Description of Artificial Sequence: Synthetic oligonucleotide
aaacucgaaccaaaguugu

SEQ ID NO: 560598 - RNA, 19 nt, Artificial Sequence
  Description of Artificial Sequence: Synthetic oligonucleotide
uggagcuuuaucauaugua

SEQ ID NO: 560599 - RNA, 19 nt, Artificial Sequence
  Description of Artificial Sequence: Synthetic oligonucleotide
aaaggguucaggguuuggu

SEQ ID NO: 560600 - RNA, 19 nt, Artificial Sequence
  Description of Artificial Sequence: Synthetic oligonucleotide
ucaacgcaagugcaaccag

SEQ ID NO: 560601 - RNA, 19 nt, Artificial Sequence
  Description of Artificial Sequence: Synthetic oligonucleotide
agaccuaugugccaagcau

SEQ ID NO: 560602 - RNA, 19 nt, Artificial Sequence
  Description of Artificial Sequence: Synthetic oligonucleotide
cuuuggauuguaucaucac

SEQ ID NO: 560603 - RNA, 19 nt, Artificial Sequence
  Description of Artificial Sequence: Synthetic oligonucleotide
uccuaaaagugcccaggug

SEQ ID NO: 560604 - RNA, 19 nt, Artificial Sequence
  Description of Artificial Sequence: Synthetic oligonucleotide
cucuuuacgaugucauuuc

SEQ ID NO: 560605 - RNA, 19 nt, Artificial Sequence
  Description of Artificial Sequence: Synthetic oligonucleotide
cucuacuucuacugaacac

SEQ ID NO: 560606 - RNA, 19 nt, Artificial Sequence
  Description of Artificial Sequence: Synthetic oligonucleotide
aucguuugcucucuucuca

SEQ ID NO: 560607 - RNA, 19 nt, Artificial Sequence
  Description of Artificial Sequence: Synthetic oligonucleotide
aucuacuauuugauuaggg

SEQ ID NO: 560608 - RNA, 19 nt, Artificial Sequence
  Description of Artificial Sequence: Synthetic oligonucleotide
uaacagguuuagccaauca

SEQ ID NO: 560609 - RNA, 19 nt, Artificial Sequence
  Description of Artificial Sequence: Synthetic oligonucleotide
auguuaacucuccuagaca

SEQ ID NO: 560610 - RNA, 19 nt, Artificial Sequence
  Description of Artificial Sequence: Synthetic oligonucleotide
uuaggaguugaggaguacu

SEQ ID NO: 560611 - RNA, 19 nt, Artificial Sequence
  Description of Artificial Sequence: Synthetic oligonucleotide
aaaucaguccuaaaauguu

SEQ ID NO: 560612 - RNA, 19 nt, Artificial Sequence
  Description of Artificial Sequence: Synthetic oligonucleotide
ccaucuacauguauugggg

SEQ ID NO: 560613 - RNA, 19 nt, Artificial Sequence
  Description of Artificial Sequence: Synthetic oligonucleotide
gaauugaaugcuccccuuc

SEQ ID NO: 560614 - RNA, 19 nt, Artificial Sequence
  Description of Artificial Sequence: Synthetic oligonucleotide
auaauucaauccuggcaga

SEQ ID NO: 560615 - RNA, 19 nt, Artificial Sequence
  Description of Artificial Sequence: Synthetic oligonucleotide
uggagucaacaguuaaucu

SEQ ID NO: 560616 - RNA, 19 nt, Artificial Sequence
  Description of Artificial Sequence: Synthetic oligonucleotide
uuuaucguuugcucucuuc

SEQ ID NO: 560617 - RNA, 19 nt, Artificial Sequence
  Description of Artificial Sequence: Synthetic oligonucleotide
aacuggagcuuuaucauau

SEQ ID NO: 560618 - RNA, 19 nt, Artificial Sequence
  Description of Artificial Sequence: Synthetic oligonucleotide
cccucuaacgccacgaucc

SEQ ID NO: 560619 - RNA, 19 nt, Artificial Sequence
  Description of Artificial Sequence: Synthetic oligonucleotide
uccuagacacacuauugau

SEQ ID NO: 560620 - RNA, 19 nt, Artificial Sequence
  Description of Artificial Sequence: Synthetic oligonucleotide
uccgcuagcaauacuucau

SEQ ID NO: 560621 - RNA, 19 nt, Artificial Sequence
  Description of Artificial Sequence: Synthetic oligonucleotide
gagucaacaguuaaucuaa

SEQ ID NO: 560622 - RNA, 19 nt, Artificial Sequence
  Description of Artificial Sequence: Synthetic oligonucleotide
agcgauuccagcaacagua

SEQ ID NO: 560623 - RNA, 19 nt, Artificial Sequence
  Description of Artificial Sequence: Synthetic oligonucleotide
ugguuaauauucugcuggu

SEQ ID NO: 560624 - RNA, 19 nt, Artificial Sequence
  Description of Artificial Sequence: Synthetic oligonucleotide
cucgaaccaaaguugucac

SEQ ID NO: 560625 - RNA, 19 nt, Artificial Sequence
  Description of Artificial Sequence: Synthetic oligonucleotide
acuggcuuccgcuagcaau

SEQ ID NO: 560626 - RNA, 19 nt, Artificial Sequence
  Description of Artificial Sequence: Synthetic oligonucleotide
cuuucaagagucugacauc

SEQ ID NO: 560627 - RNA, 19 nt, Artificial Sequence
  Description of Artificial Sequence: Synthetic oligonucleotide
uguuaagauauugcuuuuc

SEQ ID NO: 560628 - RNA, 19 nt, Artificial Sequence
  Description of Artificial Sequence: Synthetic oligonucleotide
ggucaauaaaucuugaaau

SEQ ID NO: 560629 - RNA, 19 nt, Artificial Sequence
  Description of Artificial Sequence: Synthetic oligonucleotide
aagcguaaucgcaucuuag

SEQ ID NO: 560630 - RNA, 19 nt, Artificial Sequence
  Description of Artificial Sequence: Synthetic oligonucleotide
uuguugagaguagcauugg

SEQ ID NO: 560631 - RNA, 19 nt, Artificial Sequence
  Description of Artificial Sequence: Synthetic oligonucleotide
uaaucgcaucuuaggucgg

SEQ ID NO: 560632 - RNA, 19 nt, Artificial Sequence
  Description of Artificial Sequence: Synthetic oligonucleotide
ugucauguucuggaauaag

SEQ ID NO: 560633 - RNA, 19 nt, Artificial Sequence
  Description of Artificial Sequence: Synthetic oligonucleotide
cuaaauuuagaggguagga

SEQ ID NO: 560634 - RNA, 19 nt, Artificial Sequence
  Description of Artificial Sequence: Synthetic oligonucleotide
ucuagaacguggauuccuu

SEQ ID NO: 560635 - RNA, 19 nt, Artificial Sequence
  Description of Artificial Sequence: Synthetic oligonucleotide
uauucguguuauagaggga

SEQ ID NO: 560636 - RNA, 19 nt, Artificial Sequence
  Description of Artificial Sequence: Synthetic oligonucleotide
aauucaauccuggcagaaa

SEQ ID NO: 560637 - RNA, 19 nt, Artificial Sequence
  Description of Artificial Sequence: Synthetic oligonucleotide
uugaaugcuccccuucuuu

SEQ ID NO: 560638 - RNA, 19 nt, Artificial Sequence
  Description of Artificial Sequence: Synthetic oligonucleotide
uuccgcuagcaauacuuca

SEQ ID NO: 560639 - RNA, 19 nt, Artificial Sequence
  Description of Artificial Sequence: Synthetic oligonucleotide
ggaauaagagaacuuugga

SEQ ID NO: 560640 - RNA, 19 nt, Artificial Sequence
  Description of Artificial Sequence: Synthetic oligonucleotide
ccagauucacauuuccagg

SEQ ID NO: 560641 - RNA, 19 nt, Artificial Sequence
  Description of Artificial Sequence: Synthetic oligonucleotide
aaaaggguucaggguuugg

SEQ ID NO: 560642 - RNA, 19 nt, Artificial Sequence
  Description of Artificial Sequence: Synthetic oligonucleotide
caaucaacgcaagugcaac

SEQ ID NO: 560643 - RNA, 19 nt, Artificial Sequence
  Description of Artificial Sequence: Synthetic oligonucleotide
caagagucugacaucucuc

SEQ ID NO: 560644 - RNA, 19 nt, Artificial Sequence
  Description of Artificial Sequence: Synthetic oligonucleotide
ugacaucucucaccaugcc

SEQ ID NO: 560645 - RNA, 19 nt, Artificial Sequence
  Description of Artificial Sequence: Synthetic oligonucleotide
uacuucuacugaacacagc

SEQ ID NO: 560646 - RNA, 19 nt, Artificial Sequence
  Description of Artificial Sequence: Synthetic oligonucleotide
caucuacuauuugauuagg

SEQ ID NO: 560647 - RNA, 19 nt, Artificial Sequence
  Description of Artificial Sequence: Synthetic oligonucleotide
aucaacgcaagugcaacca

SEQ ID NO: 560648 - RNA, 19 nt, Artificial Sequence
  Description of Artificial Sequence: Synthetic oligonucleotide
aggguaggauauucugauc

SEQ ID NO: 560649 - RNA, 19 nt, Artificial Sequence
  Description of Artificial Sequence: Synthetic oligonucleotide
aacguggauuccuucuuuu

SEQ ID NO: 560650 - RNA, 19 nt, Artificial Sequence
  Description of Artificial Sequence: Synthetic oligonucleotide
aaggagaccuaugugccaa

SEQ ID NO: 560651 - RNA, 19 nt, Artificial Sequence
  Description of Artificial Sequence: Synthetic oligonucleotide
uggggcggucaauaaaucu

SEQ ID NO: 560652 - RNA, 19 nt, Artificial Sequence
  Description of Artificial Sequence: Synthetic oligonucleotide
agagcgauuccagcaacag

SEQ ID NO: 560653 - RNA, 19 nt, Artificial Sequence
  Description of Artificial Sequence: Synthetic oligonucleotide
uugguaucucugaagcgua

SEQ ID NO: 560654 - RNA, 19 nt, Artificial Sequence
  Description of Artificial Sequence: Synthetic oligonucleotide
uuuagccaaucaucuacua

SEQ ID NO: 560655 - RNA, 19 nt, Artificial Sequence
  Description of Artificial Sequence: Synthetic oligonucleotide
ugcccauugguaucucuga

SEQ ID NO: 560656 - RNA, 19 nt, Artificial Sequence
  Description of Artificial Sequence: Synthetic oligonucleotide
auuacugguugaauauucu

SEQ ID NO: 560657 - RNA, 19 nt, Artificial Sequence
  Description of Artificial Sequence: Synthetic oligonucleotide
auuaggaguugaggaguac

SEQ ID NO: 560658 - RNA, 19 nt, Artificial Sequence
  Description of Artificial Sequence: Synthetic oligonucleotide
gguauuucuccaaguaaag

SEQ ID NO: 560659 - RNA, 19 nt, Artificial Sequence
  Description of Artificial Sequence: Synthetic oligonucleotide
aauaugcuuuauuguucuu

SEQ ID NO: 560660 - RNA, 19 nt, Artificial Sequence
  Description of Artificial Sequence: Synthetic oligonucleotide
cuauugauggccuguaagu

SEQ ID NO: 560661 - RNA, 19 nt, Artificial Sequence
  Description of Artificial Sequence: Synthetic oligonucleotide
uccuggcuaccuuucacac

SEQ ID NO: 560662 - RNA, 19 nt, Artificial Sequence
  Description of Artificial Sequence: Synthetic oligonucleotide
uggauuguaucaucacuuu

SEQ ID NO: 560663 - RNA, 19 nt, Artificial Sequence
  Description of Artificial Sequence: Synthetic oligonucleotide
aagcauaauggaagugugu

SEQ ID NO: 560664 - RNA, 19 nt, Artificial Sequence
  Description of Artificial Sequence: Synthetic oligonucleotide
uuacgaugucauuuccuau

SEQ ID NO: 560665 - RNA, 19 nt, Artificial Sequence
  Description of Artificial Sequence: Synthetic oligonucleotide
uaauucaauccuggcagaa

SEQ ID NO: 560666 - RNA, 19 nt, Artificial Sequence
  Description of Artificial Sequence: Synthetic oligonucleotide
acagacccucuuuacgaug

SEQ ID NO: 560667 - RNA, 19 nt, Artificial Sequence
  Description of Artificial Sequence: Synthetic oligonucleotide
ggagucaacaguuaaucua

SEQ ID NO: 560668 - RNA, 19 nt, Artificial Sequence
  Description of Artificial Sequence: Synthetic oligonucleotide
acaucucucaccaugccaa

SEQ ID NO: 560669 - RNA, 19 nt, Artificial Sequence
  Description of Artificial Sequence: Synthetic oligonucleotide
uucuacucucagcuaaguu

SEQ ID NO: 560670 - RNA, 19 nt, Artificial Sequence
  Description of Artificial Sequence: Synthetic oligonucleotide
ucuuuaucguuugcucucu

SEQ ID NO: 560671 - RNA, 19 nt, Artificial Sequence
  Description of Artificial Sequence: Synthetic oligonucleotide
ccuagacacacuauugaug

SEQ ID NO: 560672 - RNA, 19 nt, Artificial Sequence
  Description of Artificial Sequence: Synthetic oligonucleotide
gcauugguaggguugugag

SEQ ID NO: 560673 - RNA, 19 nt, Artificial Sequence
  Description of Artificial Sequence: Synthetic oligonucleotide
gaaaaucuaccuccuccaa

SEQ ID NO: 560674 - RNA, 19 nt, Artificial Sequence
  Description of Artificial Sequence: Synthetic oligonucleotide
cagauucgaauguaguuaa

SEQ ID NO: 560675 - RNA, 19 nt, Artificial Sequence
  Description of Artificial Sequence: Synthetic oligonucleotide
gauucugagcaugucaagu

SEQ ID NO: 560676 - RNA, 19 nt, Artificial Sequence
  Description of Artificial Sequence: Synthetic oligonucleotide
agcgucugagguaucauca

SEQ ID NO: 560677 - RNA, 19 nt, Artificial Sequence
  Description of Artificial Sequence: Synthetic oligonucleotide
ugggcuuaaggcugucaga

SEQ ID NO: 560678 - RNA, 19 nt, Artificial Sequence
  Description of Artificial Sequence: Synthetic oligonucleotide
aucuagaacguggauuccu

SEQ ID NO: 560679 - RNA, 19 nt, Artificial Sequence
  Description of Artificial Sequence: Synthetic oligonucleotide
gguaagauuccagauucac

SEQ ID NO: 560680 - RNA, 19 nt, Artificial Sequence
  Description of Artificial Sequence: Synthetic oligonucleotide
gagucuauguuaaagcaau

SEQ ID NO: 560681 - RNA, 19 nt, Artificial Sequence
  Description of Artificial Sequence: Synthetic oligonucleotide
cuuccgcuagcaauacuuc

SEQ ID NO: 560682 - RNA, 19 nt, Artificial Sequence
  Description of Artificial Sequence: Synthetic oligonucleotide
caguuguggaaauauguua

SEQ ID NO: 560683 - RNA, 19 nt, Artificial Sequence
  Description of Artificial Sequence: Synthetic oligonucleotide
ucgaaccaaaguugucacu

SEQ ID NO: 560684 - RNA, 19 nt, Artificial Sequence
  Description of Artificial Sequence: Synthetic oligonucleotide
cuccuagacacacuauuga

SEQ ID NO: 560685 - RNA, 19 nt, Artificial Sequence
  Description of Artificial Sequence: Synthetic oligonucleotide
cuagaacguggauuccuuc

SEQ ID NO: 560686 - RNA, 19 nt, Artificial Sequence
  Description of Artificial Sequence: Synthetic oligonucleotide
cuggacgguucauuauggc

SEQ ID NO: 560687 - RNA, 19 nt, Artificial Sequence
  Description of Artificial Sequence: Synthetic oligonucleotide
gaagcguaaucgcaucuua

SEQ ID NO: 560688 - RNA, 19 nt, Artificial Sequence
  Description of Artificial Sequence: Synthetic oligonucleotide
agauucacauuuccaggua

SEQ ID NO: 560689 - RNA, 19 nt, Artificial Sequence
  Description of Artificial Sequence: Synthetic oligonucleotide
ggauucuacucucagcuaa

SEQ ID NO: 560690 - RNA, 19 nt, Artificial Sequence
  Description of Artificial Sequence: Synthetic oligonucleotide
agucuauguuaaagcaauc

SEQ ID NO: 560691 - RNA, 19 nt, Artificial Sequence
  Description of Artificial Sequence: Synthetic oligonucleotide
gauuccagauucacauuuc

SEQ ID NO: 560692 - RNA, 19 nt, Artificial Sequence
  Description of Artificial Sequence: Synthetic oligonucleotide
ucguguuauagagggauuu

SEQ ID NO: 560693 - RNA, 19 nt, Artificial Sequence
  Description of Artificial Sequence: Synthetic oligonucleotide
cacacgcacaucuacugca

SEQ ID NO: 560694 - RNA, 19 nt, Artificial Sequence
  Description of Artificial Sequence: Synthetic oligonucleotide
ucacuaaauuaaucccuuu

SEQ ID NO: 560695 - RNA, 19 nt, Artificial Sequence
  Description of Artificial Sequence: Synthetic oligonucleotide
agguaccaagaguucccuc

SEQ ID NO: 560696 - RNA, 19 nt, Artificial Sequence
  Description of Artificial Sequence: Synthetic oligonucleotide
guagagcgauuccagcaac

SEQ ID NO: 560697 - RNA, 19 nt, Artificial Sequence
  Description of Artificial Sequence: Synthetic oligonucleotide
uaacgccacgauccaguca

SEQ ID NO: 560698 - RNA, 19 nt, Artificial Sequence
  Description of Artificial Sequence: Synthetic oligonucleotide
auguagcaucacaaacucg

SEQ ID NO: 560699 - RNA, 19 nt, Artificial Sequence
  Description of Artificial Sequence: Synthetic oligonucleotide
aaucgcaucuuaggucggu

SEQ ID NO: 560700 - RNA, 19 nt, Artificial Sequence
  Description of Artificial Sequence: Synthetic oligonucleotide
guaaguccucucuucaaua

SEQ ID NO: 560701 - RNA, 19 nt, Artificial Sequence
  Description of Artificial Sequence: Synthetic oligonucleotide
auugaaugcuccccuucuu

SEQ ID NO: 560702 - RNA, 19 nt, Artificial Sequence
  Description of Artificial Sequence: Synthetic oligonucleotide
cagaaaacgcauguucuca

SEQ ID NO: 560703 - RNA, 19 nt, Artificial Sequence
  Description of Artificial Sequence: Synthetic oligonucleotide
uucguguuauagagggauu

SEQ ID NO: 560704 - RNA, 19 nt, Artificial Sequence
  Description of Artificial Sequence: Synthetic oligonucleotide
gcuagcaauacuucauuaa

SEQ ID NO: 560705 - RNA, 19 nt, Artificial Sequence
  Description of Artificial Sequence: Synthetic oligonucleotide
uucugaucuugagucuaug

SEQ ID NO: 560706 - RNA, 19 nt, Artificial Sequence
  Description of Artificial Sequence: Synthetic oligonucleotide
ucccucuaacgccacgauc

SEQ ID NO: 560707 - RNA, 19 nt, Artificial Sequence
  Description of Artificial Sequence: Synthetic oligonucleotide
ggcuggacgguucauuaug

SEQ ID NO: 560708 - RNA, 19 nt, Artificial Sequence
  Description of Artificial Sequence: Synthetic oligonucleotide
acacacuauugauggccug

SEQ ID NO: 560709 - RNA, 19 nt, Artificial Sequence
  Description of Artificial Sequence: Synthetic oligonucleotide
cuuaaggcugucagacaca

SEQ ID NO: 560710 - RNA, 19 nt, Artificial Sequence
  Description of Artificial Sequence: Synthetic oligonucleotide
cuaacgccacgauccaguc

SEQ ID NO: 560711 - RNA, 19 nt, Artificial Sequence
  Description of Artificial Sequence: Synthetic oligonucleotide
cagauucacauuuccaggu

SEQ ID NO: 560712 - RNA, 19 nt, Artificial Sequence
  Description of Artificial Sequence: Synthetic oligonucleotide
ugguaucucugaagcguaa

SEQ ID NO: 560713 - RNA, 19 nt, Artificial Sequence
  Description of Artificial Sequence: Synthetic oligonucleotide
ugaagcguaaucgcaucuu

SEQ ID NO: 560714 - RNA, 19 nt, Artificial Sequence
  Description of Artificial Sequence: Synthetic oligonucleotide
cuacuuugaugacacaggu

SEQ ID NO: 560715 - RNA, 19 nt, Artificial Sequence
  Description of Artificial Sequence: Synthetic oligonucleotide
cauccuauuggccucauuu

SEQ ID NO: 560716 - RNA, 19 nt, Artificial Sequence
  Description of Artificial Sequence: Synthetic oligonucleotide
gguaccaagaguucccucu

SEQ ID NO: 560717 - RNA, 19 nt, Artificial Sequence
  Description of Artificial Sequence: Synthetic oligonucleotide
cacaaugcacugcaacaca

SEQ ID NO: 560718 - RNA, 19 nt, Artificial Sequence
  Description of Artificial Sequence: Synthetic oligonucleotide
cuuauaaacugaacagcau

SEQ ID NO: 560719 - RNA, 19 nt, Artificial Sequence
  Description of Artificial Sequence: Synthetic oligonucleotide
gacgguucauuauggcaaa

SEQ ID NO: 560720 - RNA, 19 nt, Artificial Sequence
  Description of Artificial Sequence: Synthetic oligonucleotide
uacugcaacaagggcuucu

SEQ ID NO: 560721 - RNA, 19 nt, Artificial Sequence
  Description of Artificial Sequence: Synthetic oligonucleotide
ucgcaucuuaggucgguau

SEQ ID NO: 560722 - RNA, 19 nt, Artificial Sequence
  Description of Artificial Sequence: Synthetic oligonucleotide
agcccacaauucuacaguu

SEQ ID NO: 560723 - RNA, 19 nt, Artificial Sequence
  Description of Artificial Sequence: Synthetic oligonucleotide
ggaguacugaauccaucac

SEQ ID NO: 560724 - RNA, 19 nt, Artificial Sequence
  Description of Artificial Sequence: Synthetic oligonucleotide
caucuuaggucgguauuuc

SEQ ID NO: 560725 - RNA, 19 nt, Artificial Sequence
  Description of Artificial Sequence: Synthetic oligonucleotide
gcuggacgguucauuaugg

SEQ ID NO: 560726 - RNA, 19 nt, Artificial Sequence
  Description of Artificial Sequence: Synthetic oligonucleotide
ugcuggcauugaccaaacc

SEQ ID NO: 560727 - RNA, 19 nt, Artificial Sequence
  Description of Artificial Sequence: Synthetic oligonucleotide
cguaaucgcaucuuagguc

SEQ ID NO: 560728 - RNA, 19 nt, Artificial Sequence
  Description of Artificial Sequence: Synthetic oligonucleotide
ccuaucuauuuaccaaaac

SEQ ID NO: 560729 - RNA, 19 nt, Artificial Sequence
  Description of Artificial Sequence: Synthetic oligonucleotide
cagcgucugagguaucauc

SEQ ID NO: 560730 - RNA, 19 nt, Artificial Sequence
  Description of Artificial Sequence: Synthetic oligonucleotide
aggagaccuaugugccaag

SEQ ID NO: 560731 - RNA, 19 nt, Artificial Sequence
  Description of Artificial Sequence: Synthetic oligonucleotide
agguuuagccaaucaucua

SEQ ID NO: 560732 - RNA, 19 nt, Artificial Sequence
  Description of Artificial Sequence: Synthetic oligonucleotide
ggacgguucauuauggcaa

SEQ ID NO: 560733 - RNA, 19 nt, Artificial Sequence
  Description of Artificial Sequence: Synthetic oligonucleotide
gaacuuuggauuguaucau

SEQ ID NO: 560734 - RNA, 19 nt, Artificial Sequence
  Description of Artificial Sequence: Synthetic oligonucleotide
guaaagcagcuguuuggaa

SEQ ID NO: 560735 - RNA, 19 nt, Artificial Sequence
  Description of Artificial Sequence: Synthetic oligonucleotide
uucccucuaacgccacgau

SEQ ID NO: 560736 - RNA, 19 nt, Artificial Sequence
  Description of Artificial Sequence: Synthetic oligonucleotide
ucacuacuuugaugacaca

SEQ ID NO: 560737 - RNA, 19 nt, Artificial Sequence
  Description of Artificial Sequence: Synthetic oligonucleotide
guuaacucuccuagacaca

SEQ ID NO: 560738 - RNA, 19 nt, Artificial Sequence
  Description of Artificial Sequence: Synthetic oligonucleotide
cggccaaucuagaacgugg

SEQ ID NO: 560739 - RNA, 19 nt, Artificial Sequence
  Description of Artificial Sequence: Synthetic oligonucleotide
caauaguuucugggaugcc

SEQ ID NO: 560740 - RNA, 19 nt, Artificial Sequence
  Description of Artificial Sequence: Synthetic oligonucleotide
augucauuuccuaucuauu

SEQ ID NO: 560741 - RNA, 19 nt, Artificial Sequence
  Description of Artificial Sequence: Synthetic oligonucleotide
uucuacaguuguggaaaua

SEQ ID NO: 560742 - RNA, 19 nt, Artificial Sequence
  Description of Artificial Sequence: Synthetic oligonucleotide
gacccucuuuacgauguca

SEQ ID NO: 560743 - RNA, 19 nt, Artificial Sequence
  Description of Artificial Sequence: Synthetic oligonucleotide
cacuaaauuaaucccuuuu

SEQ ID NO: 560744 - RNA, 19 nt, Artificial Sequence
  Description of Artificial Sequence: Synthetic oligonucleotide
ccaaacuggcuuccgcuag

SEQ ID NO: 560745 - RNA, 19 nt, Artificial Sequence
  Description of Artificial Sequence: Synthetic oligonucleotide
aguuaaaaguagagcgauu

SEQ ID NO: 560746 - RNA, 19 nt, Artificial Sequence
  Description of Artificial Sequence: Synthetic oligonucleotide
cgaaccaaaguugucacuc

SEQ ID NO: 560747 - RNA, 19 nt, Artificial Sequence
  Description of Artificial Sequence: Synthetic oligonucleotide
agccaaucaucuacuauuu

SEQ ID NO: 560748 - RNA, 19 nt, Artificial Sequence
  Description of Artificial Sequence: Synthetic oligonucleotide
guuuagccaaucaucuacu

SEQ ID NO: 560749 - RNA, 19 nt, Artificial Sequence
  Description of Artificial Sequence: Synthetic oligonucleotide
gggcggucaauaaaucuug

SEQ ID NO: 560750 - RNA, 19 nt, Artificial Sequence
  Description of Artificial Sequence: Synthetic oligonucleotide
cuggagcuuuaucauaugu

SEQ ID NO: 560751 - RNA, 19 nt, Artificial Sequence
  Description of Artificial Sequence: Synthetic oligonucleotide
cuucacgaaauuugguuuu

SEQ ID NO: 560752 - RNA, 19 nt, Artificial Sequence
  Description of Artificial Sequence: Synthetic oligonucleotide
cacaaacucgaaccaaagu

SEQ ID NO: 560753 - RNA, 19 nt, Artificial Sequence
  Description of Artificial Sequence: Synthetic oligonucleotide
aucaaacggccaaucuaga

SEQ ID NO: 560754 - RNA, 19 nt, Artificial Sequence
  Description of Artificial Sequence: Synthetic oligonucleotide
gccaaucaucuacuauuug

SEQ ID NO: 560755 - RNA, 19 nt, Artificial Sequence
  Description of Artificial Sequence: Synthetic oligonucleotide
cucuaacgccacgauccag

SEQ ID NO: 560756 - RNA, 19 nt, Artificial Sequence
  Description of Artificial Sequence: Synthetic oligonucleotide
uugguaggguugugaguua

SEQ ID NO: 560757 - RNA, 19 nt, Artificial Sequence
  Description of Artificial Sequence: Synthetic oligonucleotide
agucagcauuucucuacuu

SEQ ID NO: 560758 - RNA, 19 nt, Artificial Sequence
  Description of Artificial Sequence: Synthetic oligonucleotide
cagacccucuuuacgaugu

SEQ ID NO: 560759 - RNA, 19 nt, Artificial Sequence
  Description of Artificial Sequence: Synthetic oligonucleotide
ggaaguguguucuccccaa

SEQ ID NO: 560760 - RNA, 19 nt, Artificial Sequence
  Description of Artificial Sequence: Synthetic oligonucleotide
auucugaucuugagucuau

SEQ ID NO: 560761 - RNA, 19 nt, Artificial Sequence
  Description of Artificial Sequence: Synthetic oligonucleotide
cucugaagcguaaucgcau

SEQ ID NO: 560762 - RNA, 19 nt, Artificial Sequence
  Description of Artificial Sequence: Synthetic oligonucleotide
gacagacccucuuuacgau

SEQ ID NO: 560763 - RNA, 19 nt, Artificial Sequence
  Description of Artificial Sequence: Synthetic oligonucleotide
gagcgauuccagcaacagu

SEQ ID NO: 560764 - RNA, 19 nt, Artificial Sequence
  Description of Artificial Sequence: Synthetic oligonucleotide
ccuggcuaccuuucacacc

SEQ ID NO: 560765 - RNA, 19 nt, Artificial Sequence
  Description of Artificial Sequence: Synthetic oligonucleotide
acacuauugauggccugua

SEQ ID NO: 560766 - RNA, 19 nt, Artificial Sequence
  Description of Artificial Sequence: Synthetic oligonucleotide
guagcaucacaaacucgaa

SEQ ID NO: 560767 - RNA, 19 nt, Artificial Sequence
  Description of Artificial Sequence: Synthetic oligonucleotide
gcaacaguaaaggcagcuc

SEQ ID NO: 560768 - RNA, 19 nt, Artificial Sequence
  Description of Artificial Sequence: Synthetic oligonucleotide
ggguugugaguuaucagaa

SEQ ID NO: 560769 - RNA, 19 nt, Artificial Sequence
  Description of Artificial Sequence: Synthetic oligonucleotide
ccagauucgaauguaguua

SEQ ID NO: 560770 - RNA, 19 nt, Artificial Sequence
  Description of Artificial Sequence: Synthetic oligonucleotide
cauugguaggguugugagu

SEQ ID NO: 560771 - RNA, 19 nt, Artificial Sequence
  Description of Artificial Sequence: Synthetic oligonucleotide
cucuccuagacacacuauu

SEQ ID NO: 560772 - RNA, 19 nt, Artificial Sequence
  Description of Artificial Sequence: Synthetic oligonucleotide
agucaacaguuaaucuaaa

SEQ ID NO: 560773 - RNA, 19 nt, Artificial Sequence
  Description of Artificial Sequence: Synthetic oligonucleotide
gcguaaucgcaucuuaggu

SEQ ID NO: 560774 - RNA, 19 nt, Artificial Sequence
  Description of Artificial Sequence: Synthetic oligonucleotide
caccaugccaaacuggcuu

SEQ ID NO: 560775 - RNA, 19 nt, Artificial Sequence
  Description of Artificial Sequence: Synthetic oligonucleotide
cacacuauugauggccugu

SEQ ID NO: 560776 - RNA, 19 nt, Artificial Sequence
  Description of Artificial Sequence: Synthetic oligonucleotide
gcggucaauaaaucuugaa

SEQ ID NO: 560777 - RNA, 19 nt, Artificial Sequence
  Description of Artificial Sequence: Synthetic oligonucleotide
acacgcacaucuacugcaa

SEQ ID NO: 560778 - RNA, 19 nt, Artificial Sequence
  Description of Artificial Sequence: Synthetic oligonucleotide
cacuauugauggccuguaa

SEQ ID NO: 560779 - RNA, 19 nt, Artificial Sequence
  Description of Artificial Sequence: Synthetic oligonucleotide
ggggaaaaucuaccuccuc

SEQ ID NO: 560780 - RNA, 19 nt, Artificial Sequence
  Description of Artificial Sequence: Synthetic oligonucleotide
ccaucacuacuuugaugac

SEQ ID NO: 560781 - RNA, 19 nt, Artificial Sequence
  Description of Artificial Sequence: Synthetic oligonucleotide
aucgcaucuuaggucggua

SEQ ID NO: 560782 - RNA, 19 nt, Artificial Sequence
  Description of Artificial Sequence: Synthetic oligonucleotide
ggauuguaucaucacuuuu

SEQ ID NO: 560783 - RNA, 19 nt, Artificial Sequence
  Description of Artificial Sequence: Synthetic oligonucleotide
acucuccuagacacacuau

SEQ ID NO: 560784 - RNA, 19 nt, Artificial Sequence
  Description of Artificial Sequence: Synthetic oligonucleotide
gguggggcggucaauaaau

SEQ ID NO: 560785 - RNA, 19 nt, Artificial Sequence
  Description of Artificial Sequence: Synthetic oligonucleotide
aacuggcuccacacugguu

SEQ ID NO: 560786 - RNA, 19 nt, Artificial Sequence
  Description of Artificial Sequence: Synthetic oligonucleotide
guggggcggucaauaaauc

SEQ ID NO: 560787 - RNA, 19 nt, Artificial Sequence
  Description of Artificial Sequence: Synthetic oligonucleotide
gggcggcaggaagaaagag

SEQ ID NO: 560788 - RNA, 19 nt, Artificial Sequence
  Description of Artificial Sequence: Synthetic oligonucleotide
acgccacgauccagucagc

SEQ ID NO: 560789 - RNA, 19 nt, Artificial Sequence
  Description of Artificial Sequence: Synthetic oligonucleotide
gcuuccgcuagcaauacuu

SEQ ID NO: 560790 - RNA, 19 nt, Artificial Sequence
  Description of Artificial Sequence: Synthetic oligonucleotide
guccauccuauuggccuca

SEQ ID NO: 560791 - RNA, 19 nt, Artificial Sequence
  Description of Artificial Sequence: Synthetic oligonucleotide
gguaggguugugaguuauc

SEQ ID NO: 560792 - RNA, 19 nt, Artificial Sequence
  Description of Artificial Sequence: Synthetic oligonucleotide
cuacugcaacaagggcuuc

SEQ ID NO: 560793 - RNA, 19 nt, Artificial Sequence
  Description of Artificial Sequence: Synthetic oligonucleotide
ggaauugaaugcuccccuu

SEQ ID NO: 560794 - RNA, 19 nt, Artificial Sequence
  Description of Artificial Sequence: Synthetic oligonucleotide
gcccauugguaucucugaa

SEQ ID NO: 560795 - RNA, 19 nt, Artificial Sequence
  Description of Artificial Sequence: Synthetic oligonucleotide
gcaaugcccauugguaucu

SEQ ID NO: 560796 - RNA, 19 nt, Artificial Sequence
  Description of Artificial Sequence: Synthetic oligonucleotide
ggcggucaauaaaucuuga

SEQ ID NO: 560797 - RNA, 19 nt, Artificial Sequence
  Description of Artificial Sequence: Synthetic oligonucleotide
gcgucugagguaucaucaa

SEQ ID NO: 560798 - RNA, 19 nt, Artificial Sequence
  Description of Artificial Sequence: Synthetic oligonucleotide
ccaaucuagaacguggauu

SEQ ID NO: 560799 - RNA, 19 nt, Artificial Sequence
  Description of Artificial Sequence: Synthetic oligonucleotide
uggcuaccuuucacaccuu

SEQ ID NO: 560800 - RNA, 19 nt, Artificial Sequence
  Description of Artificial Sequence: Synthetic oligonucleotide
cugccagcgucugagguau

SEQ ID NO: 560801 - RNA, 19 nt, Artificial Sequence
  Description of Artificial Sequence: Synthetic oligonucleotide
ggggcggucaauaaaucuu

SEQ ID NO: 560802 - RNA, 19 nt, Artificial Sequence
  Description of Artificial Sequence: Synthetic oligonucleotide
ggcuccacacugguuaaua

SEQ ID NO: 560803 - RNA, 19 nt, Artificial Sequence
  Description of Artificial Sequence: Synthetic oligonucleotide
gaacaacauuagucuuauu

SEQ ID NO: 560804 - RNA, 19 nt, Artificial Sequence
  Description of Artificial Sequence: Synthetic oligonucleotide
gcgauuccagcaacaguaa

SEQ ID NO: 560805 - RNA, 19 nt, Artificial Sequence
  Description of Artificial Sequence: Synthetic oligonucleotide
ccucuaacgccacgaucca

SEQ ID NO: 560806 - RNA, 19 nt, Artificial Sequence
  Description of Artificial Sequence: Synthetic oligonucleotide
gguuaauauucugcugguu

SEQ ID NO: 560807 - RNA, 19 nt, Artificial Sequence
  Description of Artificial Sequence: Synthetic oligonucleotide
gccaaucuagaacguggau

SEQ ID NO: 560808 - RNA, 19 nt, Artificial Sequence
  Description of Artificial Sequence: Synthetic oligonucleotide
cuuuaucguuugcucucuu

SEQ ID NO: 560809 - RNA, 19 nt, Artificial Sequence
  Description of Artificial Sequence: Synthetic oligonucleotide
gggguggggcggucaauaa

SEQ ID NO: 560810 - RNA, 19 nt, Artificial Sequence
  Description of Artificial Sequence: Synthetic oligonucleotide
ggcuaccuuucacaccuuu

SEQ ID NO: 560811 - RNA, 19 nt, Artificial Sequence
  Description of Artificial Sequence: Synthetic oligonucleotide
cgguucauuauggcaaaua

SEQ ID NO: 560812 - RNA, 19 nt, Artificial Sequence
  Description of Artificial Sequence: Synthetic oligonucleotide
ccgcuagcaauacuucauu

SEQ ID NO: 560813 - RNA, 19 nt, Artificial Sequence
  Description of Artificial Sequence: Synthetic oligonucleotide
cgaugucauuuccuaucua

SEQ ID NO: 560814 - RNA, 19 nt, Artificial Sequence
  Description of Artificial Sequence: Synthetic oligonucleotide
cgccacgauccagucagca

SEQ ID NO: 560815 - RNA, 19 nt, Artificial Sequence
  Description of Artificial Sequence: Synthetic oligonucleotide
ccauccuauuggccucauu

SEQ ID NO: 560816 - RNA, 19 nt, Artificial Sequence
  Description of Artificial Sequence: Synthetic oligonucleotide
uguaaugucaaguuccugg

SEQ ID NO: 560817 - RNA, 19 nt, Artificial Sequence
  Description of Artificial Sequence: Synthetic oligonucleotide
uuaaacauagcacuaaagu

SEQ ID NO: 560818 - RNA, 19 nt, Artificial Sequence
  Description of Artificial Sequence: Synthetic oligonucleotide
aauguugggguacacaauc

SEQ ID NO: 560819 - RNA, 19 nt, Artificial Sequence
  Description of Artificial Sequence: Synthetic oligonucleotide
ugaucugacauuuacauga

SEQ ID NO: 560820 - RNA, 19 nt, Artificial Sequence
  Description of Artificial Sequence: Synthetic oligonucleotide
uuuauguaggaccauaaug

SEQ ID NO: 560821 - RNA, 19 nt, Artificial Sequence
  Description of Artificial Sequence: Synthetic oligonucleotide
uaagcuuucguaaugauuc

SEQ ID NO: 560822 - RNA, 19 nt, Artificial Sequence
  Description of Artificial Sequence: Synthetic oligonucleotide
uauguaauauccuacccag

SEQ ID NO: 560823 - RNA, 19 nt, Artificial Sequence
  Description of Artificial Sequence: Synthetic oligonucleotide
uguaauuccuuacaugcag

SEQ ID NO: 560824 - RNA, 19 nt, Artificial Sequence
  Description of Artificial Sequence: Synthetic oligonucleotide
cuuucuacccguaaggugc

SEQ ID NO: 560825 - RNA, 19 nt, Artificial Sequence
  Description of Artificial Sequence: Synthetic oligonucleotide
aauuguucgauaguauccg

SEQ ID NO: 560826 - RNA, 19 nt, Artificial Sequence
  Description of Artificial Sequence: Synthetic oligonucleotide
agggaauacuucuuuauac

SEQ ID NO: 560827 - RNA, 19 nt, Artificial Sequence
  Description of Artificial Sequence: Synthetic oligonucleotide
uuauguaauauccuaccca

SEQ ID NO: 560828 - RNA, 19 nt, Artificial Sequence
  Description of Artificial Sequence: Synthetic oligonucleotide
caugauaaaaccgggaucc

SEQ ID NO: 560829 - RNA, 19 nt, Artificial Sequence
  Description of Artificial Sequence: Synthetic oligonucleotide
aaaaccgggauccggcccc

SEQ ID NO: 560830 - RNA, 19 nt, Artificial Sequence
  Description of Artificial Sequence: Synthetic oligonucleotide
uuaugcaguaauaaucuca

SEQ ID NO: 560831 - RNA, 19 nt, Artificial Sequence
  Description of Artificial Sequence: Synthetic oligonucleotide
uacagaguaaaauggauac

SEQ ID NO: 560832 - RNA, 19 nt, Artificial Sequence
  Description of Artificial Sequence: Synthetic oligonucleotide
acauauggcucuuauacag

SEQ ID NO: 560833 - RNA, 19 nt, Artificial Sequence
  Description of Artificial Sequence: Synthetic oligonucleotide
auuggaguagcuuccauag

SEQ ID NO: 560834 - RNA, 19 nt, Artificial Sequence
  Description of Artificial Sequence: Synthetic oligonucleotide
uuugaucugacauuuacau

SEQ ID NO: 560835 - RNA, 19 nt, Artificial Sequence
  Description of Artificial Sequence: Synthetic oligonucleotide
acaugauuggaguagcuuc

SEQ ID NO: 560836 - RNA, 19 nt, Artificial Sequence
  Description of Artificial Sequence: Synthetic oligonucleotide
cuuaauguguuccagccag

SEQ ID NO: 560837 - RNA, 19 nt, Artificial Sequence
  Description of Artificial Sequence: Synthetic oligonucleotide
uggguauuagaacagcugc

SEQ ID NO: 560838 - RNA, 19 nt, Artificial Sequence
  Description of Artificial Sequence: Synthetic oligonucleotide
ucuuaguuggaaucgaugu

SEQ ID NO: 560839 - RNA, 19 nt, Artificial Sequence
  Description of Artificial Sequence: Synthetic oligonucleotide
auaguauccgucuagcaug

SEQ ID NO: 560840 - RNA, 19 nt, Artificial Sequence
  Description of Artificial Sequence: Synthetic oligonucleotide
accauaaugacacuguccu

SEQ ID NO: 560841 - RNA, 19 nt, Artificial Sequence
  Description of Artificial Sequence: Synthetic oligonucleotide
uguuacagaggaauguccc

SEQ ID NO: 560842 - RNA, 19 nt, Artificial Sequence
  Description of Artificial Sequence: Synthetic oligonucleotide
uaauauccuacccagaguu

SEQ ID NO: 560843 - RNA, 19 nt, Artificial Sequence
  Description of Artificial Sequence: Synthetic oligonucleotide
auguuuugcuggcacaacc

SEQ ID NO: 560844 - RNA, 19 nt, Artificial Sequence
  Description of Artificial Sequence: Synthetic oligonucleotide
uuaguuggaaucgaugucc

SEQ ID NO: 560845 - RNA, 19 nt, Artificial Sequence
  Description of Artificial Sequence: Synthetic oligonucleotide
ugauucucucauaacauga

SEQ ID NO: 560846 - RNA, 19 nt, Artificial Sequence
  Description of Artificial Sequence: Synthetic oligonucleotide
caaauccucgaauuguucg

SEQ ID NO: 560847 - RNA, 19 nt, Artificial Sequence
  Description of Artificial Sequence: Synthetic oligonucleotide
uuaaguuagugucauacuu

SEQ ID NO: 560848 - RNA, 19 nt, Artificial Sequence
  Description of Artificial Sequence: Synthetic oligonucleotide
ugaauauugugaauaucca

SEQ ID NO: 560849 - RNA, 19 nt, Artificial Sequence
  Description of Artificial Sequence: Synthetic oligonucleotide
uaauaguccuuucauacaa

SEQ ID NO: 560850 - RNA, 19 nt, Artificial Sequence
  Description of Artificial Sequence: Synthetic oligonucleotide
auuccuuacaugcagugug

SEQ ID NO: 560851 - RNA, 19 nt, Artificial Sequence
  Description of Artificial Sequence: Synthetic oligonucleotide
aguacauuacauauggcuc

SEQ ID NO: 560852 - RNA, 19 nt, Artificial Sequence
  Description of Artificial Sequence: Synthetic oligonucleotide
ugguaaacuguucauguga

SEQ ID NO: 560853 - RNA, 19 nt, Artificial Sequence
  Description of Artificial Sequence: Synthetic oligonucleotide
gauuguaauuccuuacaug

SEQ ID NO: 560854 - RNA, 19 nt, Artificial Sequence
  Description of Artificial Sequence: Synthetic oligonucleotide
uuuacaugaaggcccagac

SEQ ID NO: 560855 - RNA, 19 nt, Artificial Sequence
  Description of Artificial Sequence: Synthetic oligonucleotide
uagauuguaauuccuuaca

SEQ ID NO: 560856 - RNA, 19 nt, Artificial Sequence
  Description of Artificial Sequence: Synthetic oligonucleotide
uucguaaugauucucucau

SEQ ID NO: 560857 - RNA, 19 nt, Artificial Sequence
  Description of Artificial Sequence: Synthetic oligonucleotide
agauucucaaauauggauc

SEQ ID NO: 560858 - RNA, 19 nt, Artificial Sequence
  Description of Artificial Sequence: Synthetic oligonucleotide
accacuacagaugucuucc

SEQ ID NO: 560859 - RNA, 19 nt, Artificial Sequence
  Description of Artificial Sequence: Synthetic oligonucleotide
aggaagauucuccuucccc

SEQ ID NO: 560860 - RNA, 19 nt, Artificial Sequence
  Description of Artificial Sequence: Synthetic oligonucleotide
ucaucuaagagagacuuga

SEQ ID NO: 560861 - RNA, 19 nt, Artificial Sequence
  Description of Artificial Sequence: Synthetic oligonucleotide
uuagauuguaauuccuuac

SEQ ID NO: 560862 - RNA, 19 nt, Artificial Sequence
  Description of Artificial Sequence: Synthetic oligonucleotide
uuggaaucgauguccaaag

SEQ ID NO: 560863 - RNA, 19 nt, Artificial Sequence
  Description of Artificial Sequence: Synthetic oligonucleotide
uguaccacuacagaugucu

SEQ ID NO: 560864 - RNA, 19 nt, Artificial Sequence
  Description of Artificial Sequence: Synthetic oligonucleotide
uaauaagcuccuuuguuac

SEQ ID NO: 560865 - RNA, 19 nt, Artificial Sequence
  Description of Artificial Sequence: Synthetic oligonucleotide
uauacagaguaaaauggau

SEQ ID NO: 560866 - RNA, 19 nt, Artificial Sequence
  Description of Artificial Sequence: Synthetic oligonucleotide
ugucauacuuuaauuacaa

SEQ ID NO: 560867 - RNA, 19 nt, Artificial Sequence
  Description of Artificial Sequence: Synthetic oligonucleotide
auagcguucauuuaucuuu

SEQ ID NO: 560868 - RNA, 19 nt, Artificial Sequence
  Description of Artificial Sequence: Synthetic oligonucleotide
aaauauuuugugagacugg

SEQ ID NO: 560869 - RNA, 19 nt, Artificial Sequence
  Description of Artificial Sequence: Synthetic oligonucleotide
cuuauguaauauccuaccc

SEQ ID NO: 560870 - RNA, 19 nt, Artificial Sequence
  Description of Artificial Sequence: Synthetic oligonucleotide
ucucucauaacaugaauau

SEQ ID NO: 560871 - RNA, 19 nt, Artificial Sequence
  Description of Artificial Sequence: Synthetic oligonucleotide
ccuucgauacucuagaagg

SEQ ID NO: 560872 - RNA, 19 nt, Artificial Sequence
  Description of Artificial Sequence: Synthetic oligonucleotide
auaaaaccgggauccggcc

SEQ ID NO: 560873 - RNA, 19 nt, Artificial Sequence
  Description of Artificial Sequence: Synthetic oligonucleotide
cugaagguacuucucaucc

SEQ ID NO: 560874 - RNA, 19 nt, Artificial Sequence
  Description of Artificial Sequence: Synthetic oligonucleotide
uuucguuuggaauucccug

SEQ ID NO: 560875 - RNA, 19 nt, Artificial Sequence
  Description of Artificial Sequence: Synthetic oligonucleotide
uuagauucucaaauaugga

SEQ ID NO: 560876 - RNA, 19 nt, Artificial Sequence
  Description of Artificial Sequence: Synthetic oligonucleotide
ucaagguggcgcaugcugg

SEQ ID NO: 560877 - RNA, 19 nt, Artificial Sequence
  Description of Artificial Sequence: Synthetic oligonucleotide
uucgauaguauccgucuag

SEQ ID NO: 560878 - RNA, 19 nt, Artificial Sequence
  Description of Artificial Sequence: Synthetic oligonucleotide
auauggcucuuauacagag

SEQ ID NO: 560879 - RNA, 19 nt, Artificial Sequence
  Description of Artificial Sequence: Synthetic oligonucleotide
auugaauucaaacgcagua

SEQ ID NO: 560880 - RNA, 19 nt, Artificial Sequence
  Description of Artificial Sequence: Synthetic oligonucleotide
uguucgcuguuacagagga

SEQ ID NO: 560881 - RNA, 19 nt, Artificial Sequence
  Description of Artificial Sequence: Synthetic oligonucleotide
aaauccucgaauuguucga

SEQ ID NO: 560882 - RNA, 19 nt, Artificial Sequence
  Description of Artificial Sequence: Synthetic oligonucleotide
uuggguauuagaacagcug

SEQ ID NO: 560883 - RNA, 19 nt, Artificial Sequence
  Description of Artificial Sequence: Synthetic oligonucleotide
aagggaguaauuugaucug

SEQ ID NO: 560884 - RNA, 19 nt, Artificial Sequence
  Description of Artificial Sequence: Synthetic oligonucleotide
gauaaaaccgggauccggc

SEQ ID NO: 560885 - RNA, 19 nt, Artificial Sequence
  Description of Artificial Sequence: Synthetic oligonucleotide
uguucgauaguauccgucu

SEQ ID NO: 560886 - RNA, 19 nt, Artificial Sequence
  Description of Artificial Sequence: Synthetic oligonucleotide
caugauuggaguagcuucc

SEQ ID NO: 560887 - RNA, 19 nt, Artificial Sequence
  Description of Artificial Sequence: Synthetic oligonucleotide
uucgauacucuagaagggg

SEQ ID NO: 560888 - RNA, 19 nt, Artificial Sequence
  Description of Artificial Sequence: Synthetic oligonucleotide
uccauagagaggauuggug

SEQ ID NO: 560889 - RNA, 19 nt, Artificial Sequence
  Description of Artificial Sequence: Synthetic oligonucleotide
uucguuuggaauucccugc

SEQ ID NO: 560890 - RNA, 19 nt, Artificial Sequence
  Description of Artificial Sequence: Synthetic oligonucleotide
uucaagguggcgcaugcug

SEQ ID NO: 560891 - RNA, 19 nt, Artificial Sequence
  Description of Artificial Sequence: Synthetic oligonucleotide
ugaccuaauaguccuuuca

SEQ ID NO: 560892 - RNA, 19 nt, Artificial Sequence
  Description of Artificial Sequence: Synthetic oligonucleotide
gaauucaaacgcaguaggg

SEQ ID NO: 560893 - RNA, 19 nt, Artificial Sequence
  Description of Artificial Sequence: Synthetic oligonucleotide
aguaauuugaucugacauu

SEQ ID NO: 560894 - RNA, 19 nt, Artificial Sequence
  Description of Artificial Sequence: Synthetic oligonucleotide
uaaaagaccaagugguaau

SEQ ID NO: 560895 - RNA, 19 nt, Artificial Sequence
  Description of Artificial Sequence: Synthetic oligonucleotide
gucagcaauccuaagagcc

SEQ ID NO: 560896 - RNA, 19 nt, Artificial Sequence
  Description of Artificial Sequence: Synthetic oligonucleotide
ggugacuuaaguuaguguc

SEQ ID NO: 560897 - RNA, 19 nt, Artificial Sequence
  Description of Artificial Sequence: Synthetic oligonucleotide
ucagcaauccuaagagccc

SEQ ID NO: 560898 - RNA, 19 nt, Artificial Sequence
  Description of Artificial Sequence: Synthetic oligonucleotide
uaauuccuuacaugcagug

SEQ ID NO: 560899 - RNA, 19 nt, Artificial Sequence
  Description of Artificial Sequence: Synthetic oligonucleotide
uuaaaagaccaagugguaa

SEQ ID NO: 560900 - RNA, 19 nt, Artificial Sequence
  Description of Artificial Sequence: Synthetic oligonucleotide
cuucgauacucuagaaggg

SEQ ID NO: 560901 - RNA, 19 nt, Artificial Sequence
  Description of Artificial Sequence: Synthetic oligonucleotide
uaaguuagugucauacuuu

SEQ ID NO: 560902 - RNA, 19 nt, Artificial Sequence
  Description of Artificial Sequence: Synthetic oligonucleotide
aauaguccuuucauacaac

SEQ ID NO: 560903 - RNA, 19 nt, Artificial Sequence
  Description of Artificial Sequence: Synthetic oligonucleotide
ugauaaaaccgggauccgg

SEQ ID NO: 560904 - RNA, 19 nt, Artificial Sequence
  Description of Artificial Sequence: Synthetic oligonucleotide
agacauaugcucuugggua

SEQ ID NO: 560905 - RNA, 19 nt, Artificial Sequence
  Description of Artificial Sequence: Synthetic oligonucleotide
uuagugucauacuuuaauu

SEQ ID NO: 560906 - RNA, 19 nt, Artificial Sequence
  Description of Artificial Sequence: Synthetic oligonucleotide
uaguccuuucauacaacag

SEQ ID NO: 560907 - RNA, 19 nt, Artificial Sequence
  Description of Artificial Sequence: Synthetic oligonucleotide
auucaaacgcaguagggaa

SEQ ID NO: 560908 - RNA, 19 nt, Artificial Sequence
  Description of Artificial Sequence: Synthetic oligonucleotide
acagaguaaaauggauacc

SEQ ID NO: 560909 - RNA, 19 nt, Artificial Sequence
  Description of Artificial Sequence: Synthetic oligonucleotide
ugagcgguuggaaauuucu

SEQ ID NO: 560910 - RNA, 19 nt, Artificial Sequence
  Description of Artificial Sequence: Synthetic oligonucleotide
auaagcuccuuuguuacag

SEQ ID NO: 560911 - RNA, 19 nt, Artificial Sequence
  Description of Artificial Sequence: Synthetic oligonucleotide
uagugucauacuuuaauua

SEQ ID NO: 560912 - RNA, 19 nt, Artificial Sequence
  Description of Artificial Sequence: Synthetic oligonucleotide
uaaggugcuguaaugucaa

SEQ ID NO: 560913 - RNA, 19 nt, Artificial Sequence
  Description of Artificial Sequence: Synthetic oligonucleotide
agcauugacacuuggccga

SEQ ID NO: 560914 - RNA, 19 nt, Artificial Sequence
  Description of Artificial Sequence: Synthetic oligonucleotide
uccuuaagcuuucguaaug

SEQ ID NO: 560915 - RNA, 19 nt, Artificial Sequence
  Description of Artificial Sequence: Synthetic oligonucleotide
acaaaguucauagcguuca

SEQ ID NO: 560916 - RNA, 19 nt, Artificial Sequence
  Description of Artificial Sequence: Synthetic oligonucleotide
aaauggauaccaggagguc

SEQ ID NO: 560917 - RNA, 19 nt, Artificial Sequence
  Description of Artificial Sequence: Synthetic oligonucleotide
aaauuuaaacauagcacua

SEQ ID NO: 560918 - RNA, 19 nt, Artificial Sequence
  Description of Artificial Sequence: Synthetic oligonucleotide
cuguuacagaggaaugucc

SEQ ID NO: 560919 - RNA, 19 nt, Artificial Sequence
  Description of Artificial Sequence: Synthetic oligonucleotide
cagcauugacacuuggccg

SEQ ID NO: 560920 - RNA, 19 nt, Artificial Sequence
  Description of Artificial Sequence: Synthetic oligonucleotide
aacgcaguagggaacuguc

SEQ ID NO: 560921 - RNA, 19 nt, Artificial Sequence
  Description of Artificial Sequence: Synthetic oligonucleotide
uguuauucuccagcuuucg

SEQ ID NO: 560922 - RNA, 19 nt, Artificial Sequence
  Description of Artificial Sequence: Synthetic oligonucleotide
accuuauguaauauccuac

SEQ ID NO: 560923 - RNA, 19 nt, Artificial Sequence
  Description of Artificial Sequence: Synthetic oligonucleotide
agauuguaauuccuuacau

SEQ ID NO: 560924 - RNA, 19 nt, Artificial Sequence
  Description of Artificial Sequence: Synthetic oligonucleotide
uucgcuguuacagaggaau

SEQ ID NO: 560925 - RNA, 19 nt, Artificial Sequence
  Description of Artificial Sequence: Synthetic oligonucleotide
caguguaccacuacagaug

SEQ ID NO: 560926 - RNA, 19 nt, Artificial Sequence
  Description of Artificial Sequence: Synthetic oligonucleotide
aguguguucuuugguaaac

SEQ ID NO: 560927 - RNA, 19 nt, Artificial Sequence
  Description of Artificial Sequence: Synthetic oligonucleotide
uuccugugguuucauucgg

SEQ ID NO: 560928 - RNA, 19 nt, Artificial Sequence
  Description of Artificial Sequence: Synthetic oligonucleotide
guaauaagcuccuuuguua

SEQ ID NO: 560929 - RNA, 19 nt, Artificial Sequence
  Description of Artificial Sequence: Synthetic oligonucleotide
aacguguccccacugugga

SEQ ID NO: 560930 - RNA, 19 nt, Artificial Sequence
  Description of Artificial Sequence: Synthetic oligonucleotide
aauauccuacccagaguuc

SEQ ID NO: 560931 - RNA, 19 nt, Artificial Sequence
  Description of Artificial Sequence: Synthetic oligonucleotide
uugguaaacuguucaugug

SEQ ID NO: 560932 - RNA, 19 nt, Artificial Sequence
  Description of Artificial Sequence: Synthetic oligonucleotide
ugguaauaagcuccuuugu

SEQ ID NO: 560933 - RNA, 19 nt, Artificial Sequence
  Description of Artificial Sequence: Synthetic oligonucleotide
uagcguucauuuaucuuug

SEQ ID NO: 560934 - RNA, 19 nt, Artificial Sequence
  Description of Artificial Sequence: Synthetic oligonucleotide
uucaaacgcaguagggaac

SEQ ID NO: 560935 - RNA, 19 nt, Artificial Sequence
  Description of Artificial Sequence: Synthetic oligonucleotide
uaugcucuuggguauuaga

SEQ ID NO: 560936 - RNA, 19 nt, Artificial Sequence
  Description of Artificial Sequence: Synthetic oligonucleotide
ugcucuuggguauuagaac

SEQ ID NO: 560937 - RNA, 19 nt, Artificial Sequence
  Description of Artificial Sequence: Synthetic oligonucleotide
aguguguagauuccaaauu

SEQ ID NO: 560938 - RNA, 19 nt, Artificial Sequence
  Description of Artificial Sequence: Synthetic oligonucleotide
ucguuuggaauucccugcc

SEQ ID NO: 560939 - RNA, 19 nt, Artificial Sequence
  Description of Artificial Sequence: Synthetic oligonucleotide
uucauagcguucauuuauc

SEQ ID NO: 560940 - RNA, 19 nt, Artificial Sequence
  Description of Artificial Sequence: Synthetic oligonucleotide
gaggcccuugaccuaauag

SEQ ID NO: 560941 - RNA, 19 nt, Artificial Sequence
  Description of Artificial Sequence: Synthetic oligonucleotide
aauuccuuacaugcagugu

SEQ ID NO: 560942 - RNA, 19 nt, Artificial Sequence
  Description of Artificial Sequence: Synthetic oligonucleotide
caacucuuaguuggaaucg

SEQ ID NO: 560943 - RNA, 19 nt, Artificial Sequence
  Description of Artificial Sequence: Synthetic oligonucleotide
cagaugucuucccugauuc

SEQ ID NO: 560944 - RNA, 19 nt, Artificial Sequence
  Description of Artificial Sequence: Synthetic oligonucleotide
gauaugugucacaaaguuc

SEQ ID NO: 560945 - RNA, 19 nt, Artificial Sequence
  Description of Artificial Sequence: Synthetic oligonucleotide
guaaugauucucucauaac

SEQ ID NO: 560946 - RNA, 19 nt, Artificial Sequence
  Description of Artificial Sequence: Synthetic oligonucleotide
ucauagcguucauuuaucu

SEQ ID NO: 560947 - RNA, 19 nt, Artificial Sequence
  Description of Artificial Sequence: Synthetic oligonucleotide
aggcccuugaccuaauagu

SEQ ID NO: 560948 - RNA, 19 nt, Artificial Sequence
  Description of Artificial Sequence: Synthetic oligonucleotide
uuugccuuauuggcaacag

SEQ ID NO: 560949 - RNA, 19 nt, Artificial Sequence
  Description of Artificial Sequence: Synthetic oligonucleotide
cuuaguuggaaucgauguc

SEQ ID NO: 560950 - RNA, 19 nt, Artificial Sequence
  Description of Artificial Sequence: Synthetic oligonucleotide
cucuuaguuggaaucgaug

SEQ ID NO: 560951 - RNA, 19 nt, Artificial Sequence
  Description of Artificial Sequence: Synthetic oligonucleotide
ugcaugguucuuaucucca

SEQ ID NO: 560952 - RNA, 19 nt, Artificial Sequence
  Description of Artificial Sequence: Synthetic oligonucleotide
cacuguggaaauaggacuc

SEQ ID NO: 560953 - RNA, 19 nt, Artificial Sequence
  Description of Artificial Sequence: Synthetic oligonucleotide
ccuuauguaauauccuacc

SEQ ID NO: 560954 - RNA, 19 nt, Artificial Sequence
  Description of Artificial Sequence: Synthetic oligonucleotide
cuacccagaguucaaggug

SEQ ID NO: 560955 - RNA, 19 nt, Artificial Sequence
  Description of Artificial Sequence: Synthetic oligonucleotide
uauggaucuucuuguucgc

SEQ ID NO: 560956 - RNA, 19 nt, Artificial Sequence
  Description of Artificial Sequence: Synthetic oligonucleotide
uagggaacugucuugucau

SEQ ID NO: 560957 - RNA, 19 nt, Artificial Sequence
  Description of Artificial Sequence: Synthetic oligonucleotide
ucaaacgcaguagggaacu

SEQ ID NO: 560958 - RNA, 19 nt, Artificial Sequence
  Description of Artificial Sequence: Synthetic oligonucleotide
cugcaugguucuuaucucc

SEQ ID NO: 560959 - RNA, 19 nt, Artificial Sequence
  Description of Artificial Sequence: Synthetic oligonucleotide
guauccgucuagcaugagc

SEQ ID NO: 560960 - RNA, 19 nt, Artificial Sequence
  Description of Artificial Sequence: Synthetic oligonucleotide
aacagcuguacaagugguc

SEQ ID NO: 560961 - RNA, 19 nt, Artificial Sequence
  Description of Artificial Sequence: Synthetic oligonucleotide
aucuccuuaagcuuucgua

SEQ ID NO: 560962 - RNA, 19 nt, Artificial Sequence
  Description of Artificial Sequence: Synthetic oligonucleotide
auauccuacccagaguuca

SEQ ID NO: 560963 - RNA, 19 nt, Artificial Sequence
  Description of Artificial Sequence: Synthetic oligonucleotide
aggugaauagagaaacaag

SEQ ID NO: 560964 - RNA, 19 nt, Artificial Sequence
  Description of Artificial Sequence: Synthetic oligonucleotide
uaguauccgucuagcauga

SEQ ID NO: 560965 - RNA, 19 nt, Artificial Sequence
  Description of Artificial Sequence: Synthetic oligonucleotide
aagcuuucguaaugauucu

SEQ ID NO: 560966 - RNA, 19 nt, Artificial Sequence
  Description of Artificial Sequence: Synthetic oligonucleotide
acuccaguacuuuaguauu

SEQ ID NO: 560967 - RNA, 19 nt, Artificial Sequence
  Description of Artificial Sequence: Synthetic oligonucleotide
uggaaucgauguccaaagc

SEQ ID NO: 560968 - RNA, 19 nt, Artificial Sequence
  Description of Artificial Sequence: Synthetic oligonucleotide
cuuagauuguaauuccuua

SEQ ID NO: 560969 - RNA, 19 nt, Artificial Sequence
  Description of Artificial Sequence: Synthetic oligonucleotide
ucgaauuguucgauaguau

SEQ ID NO: 560970 - RNA, 19 nt, Artificial Sequence
  Description of Artificial Sequence: Synthetic oligonucleotide
cucuuggguauuagaacag

SEQ ID NO: 560971 - RNA, 19 nt, Artificial Sequence
  Description of Artificial Sequence: Synthetic oligonucleotide
ggcacuuagauuguaauuc

SEQ ID NO: 560972 - RNA, 19 nt, Artificial Sequence
  Description of Artificial Sequence: Synthetic oligonucleotide
ucgauaguauccgucuagc

SEQ ID NO: 560973 - RNA, 19 nt, Artificial Sequence
  Description of Artificial Sequence: Synthetic oligonucleotide
uguuccagccaguguguag

SEQ ID NO: 560974 - RNA, 19 nt, Artificial Sequence
  Description of Artificial Sequence: Synthetic oligonucleotide
aguagcuuccauagagagg

SEQ ID NO: 560975 - RNA, 19 nt, Artificial Sequence
  Description of Artificial Sequence: Synthetic oligonucleotide
ucuuggguauuagaacagc

SEQ ID NO: 560976 - RNA, 19 nt, Artificial Sequence
  Description of Artificial Sequence: Synthetic oligonucleotide
cuuucguaaugauucucuc

SEQ ID NO: 560977 - RNA, 19 nt, Artificial Sequence
  Description of Artificial Sequence: Synthetic oligonucleotide
auuacauauggcucuuaua

SEQ ID NO: 560978 - RNA, 19 nt, Artificial Sequence
  Description of Artificial Sequence: Synthetic oligonucleotide
agacuuuaugcaguaauaa

SEQ ID NO: 560979 - RNA, 19 nt, Artificial Sequence
  Description of Artificial Sequence: Synthetic oligonucleotide
uucauacaacaguuugaac

SEQ ID NO: 560980 - RNA, 19 nt, Artificial Sequence
  Description of Artificial Sequence: Synthetic oligonucleotide
agaguaaaauggauaccag

SEQ ID NO: 560981 - RNA, 19 nt, Artificial Sequence
  Description of Artificial Sequence: Synthetic oligonucleotide
augagcuuaauguguucca

SEQ ID NO: 560982 - RNA, 19 nt, Artificial Sequence
  Description of Artificial Sequence: Synthetic oligonucleotide
ugacacuuggccgagcauc

SEQ ID NO: 560983 - RNA, 19 nt, Artificial Sequence
  Description of Artificial Sequence: Synthetic oligonucleotide
gaggagguugagcgguugg

SEQ ID NO: 560984 - RNA, 19 nt, Artificial Sequence
  Description of Artificial Sequence: Synthetic oligonucleotide
cccgugaccugaaagaugc

SEQ ID NO: 560985 - RNA, 19 nt, Artificial Sequence
  Description of Artificial Sequence: Synthetic oligonucleotide
auuugaucugacauuuaca

SEQ ID NO: 560986 - RNA, 19 nt, Artificial Sequence
  Description of Artificial Sequence: Synthetic oligonucleotide
gauuggaguagcuuccaua

SEQ ID NO: 560987 - RNA, 19 nt, Artificial Sequence
  Description of Artificial Sequence: Synthetic oligonucleotide
acccaacucaggugaauag

SEQ ID NO: 560988 - RNA, 19 nt, Artificial Sequence
  Description of Artificial Sequence: Synthetic oligonucleotide
guacauuacauauggcucu

SEQ ID NO: 560989 - RNA, 19 nt, Artificial Sequence
  Description of Artificial Sequence: Synthetic oligonucleotide
agaucuuaccaggugcuug

SEQ ID NO: 560990 - RNA, 19 nt, Artificial Sequence
  Description of Artificial Sequence: Synthetic oligonucleotide
aaacgcaguagggaacugu

SEQ ID NO: 560991 - RNA, 19 nt, Artificial Sequence
  Description of Artificial Sequence: Synthetic oligonucleotide
ugggugacuuaaguuagug

SEQ ID NO: 560992 - RNA, 19 nt, Artificial Sequence
  Description of Artificial Sequence: Synthetic oligonucleotide
uccaguacuuuaguauucu

SEQ ID NO: 560993 - RNA, 19 nt, Artificial Sequence
  Description of Artificial Sequence: Synthetic oligonucleotide
aaaagaccaagugguaaua

SEQ ID NO: 560994 - RNA, 19 nt, Artificial Sequence
  Description of Artificial Sequence: Synthetic oligonucleotide
uguccaaagcuuagccacu

SEQ ID NO: 560995 - RNA, 19 nt, Artificial Sequence
  Description of Artificial Sequence: Synthetic oligonucleotide
uggugaaaucuuccagcug

SEQ ID NO: 560996 - RNA, 19 nt, Artificial Sequence
  Description of Artificial Sequence: Synthetic oligonucleotide
uuaauguguuccagccagu

SEQ ID NO: 560997 - RNA, 19 nt, Artificial Sequence
  Description of Artificial Sequence: Synthetic oligonucleotide
gaugguaaugaggaaauau

SEQ ID NO: 560998 - RNA, 19 nt, Artificial Sequence
  Description of Artificial Sequence: Synthetic oligonucleotide
gguaaugaggaaauauuca

SEQ ID NO: 560999 - RNA, 19 nt, Artificial Sequence
  Description of Artificial Sequence: Synthetic oligonucleotide
auuguucgauaguauccgu

SEQ ID NO: 561000 - RNA, 19 nt, Artificial Sequence
  Description of Artificial Sequence: Synthetic oligonucleotide
ucgcuguuacagaggaaug

SEQ ID NO: 561001 - RNA, 19 nt, Artificial Sequence
  Description of Artificial Sequence: Synthetic oligonucleotide
agguugagcgguuggaaau

SEQ ID NO: 561002 - RNA, 19 nt, Artificial Sequence
  Description of Artificial Sequence: Synthetic oligonucleotide
gaaaacaggugaucugucu

SEQ ID NO: 561003 - RNA, 19 nt, Artificial Sequence
  Description of Artificial Sequence: Synthetic oligonucleotide
uuucuacccguaaggugcu

SEQ ID NO: 561004 - RNA, 19 nt, Artificial Sequence
  Description of Artificial Sequence: Synthetic oligonucleotide
uuagaacagcugcucuuuc

SEQ ID NO: 561005 - RNA, 19 nt, Artificial Sequence
  Description of Artificial Sequence: Synthetic oligonucleotide
gcacuuagauuguaauucc

SEQ ID NO: 561006 - RNA, 19 nt, Artificial Sequence
  Description of Artificial Sequence: Synthetic oligonucleotide
aaccaagagggcaggauau

SEQ ID NO: 561007 - RNA, 19 nt, Artificial Sequence
  Description of Artificial Sequence: Synthetic oligonucleotide
cacaaaguucauagcguuc

SEQ ID NO: 561008 - RNA, 19 nt, Artificial Sequence
  Description of Artificial Sequence: Synthetic oligonucleotide
cuguucgcuguuacagagg

SEQ ID NO: 561009 - RNA, 19 nt, Artificial Sequence
  Description of Artificial Sequence: Synthetic oligonucleotide
guaaggugcuguaauguca

SEQ ID NO: 561010 - RNA, 19 nt, Artificial Sequence
  Description of Artificial Sequence: Synthetic oligonucleotide
gacuuuaugcaguaauaau

SEQ ID NO: 561011 - RNA, 19 nt, Artificial Sequence
  Description of Artificial Sequence: Synthetic oligonucleotide
auacagaguaaaauggaua

SEQ ID NO: 561012 - RNA, 19 nt, Artificial Sequence
  Description of Artificial Sequence: Synthetic oligonucleotide
uccgucuagcaugagcaug

SEQ ID NO: 561013 - RNA, 19 nt, Artificial Sequence
  Description of Artificial Sequence: Synthetic oligonucleotide
gaaugagcuuaauguguuc

SEQ ID NO: 561014 - RNA, 19 nt, Artificial Sequence
  Description of Artificial Sequence: Synthetic oligonucleotide
cuuacaugcaguguguucu

SEQ ID NO: 561015 - RNA, 19 nt, Artificial Sequence
  Description of Artificial Sequence: Synthetic oligonucleotide
augguaaugaggaaauauu

SEQ ID NO: 561016 - RNA, 19 nt, Artificial Sequence
  Description of Artificial Sequence: Synthetic oligonucleotide
agcuuucguaaugauucuc

SEQ ID NO: 561017 - RNA, 19 nt, Artificial Sequence
  Description of Artificial Sequence: Synthetic oligonucleotide
aauccucgaauuguucgau

SEQ ID NO: 561018 - RNA, 19 nt, Artificial Sequence
  Description of Artificial Sequence: Synthetic oligonucleotide
cugcguuucccacucacuc

SEQ ID NO: 561019 - RNA, 19 nt, Artificial Sequence
  Description of Artificial Sequence: Synthetic oligonucleotide
auuagaacagcugcucuuu

SEQ ID NO: 561020 - RNA, 19 nt, Artificial Sequence
  Description of Artificial Sequence: Synthetic oligonucleotide
agugagcugagcugugcga

SEQ ID NO: 561021 - RNA, 19 nt, Artificial Sequence
  Description of Artificial Sequence: Synthetic oligonucleotide
augauaaaaccgggauccg

SEQ ID NO: 561022 - RNA, 19 nt, Artificial Sequence
  Description of Artificial Sequence: Synthetic oligonucleotide
accuaauaguccuuucaua

SEQ ID NO: 561023 - RNA, 19 nt, Artificial Sequence
  Description of Artificial Sequence: Synthetic oligonucleotide
gcaagaaguucuuuguauc

SEQ ID NO: 561024 - RNA, 19 nt, Artificial Sequence
  Description of Artificial Sequence: Synthetic oligonucleotide
caauccuaagagccccugc

SEQ ID NO: 561025 - RNA, 19 nt, Artificial Sequence
  Description of Artificial Sequence: Synthetic oligonucleotide
cuccaguacuuuaguauuc

SEQ ID NO: 561026 - RNA, 19 nt, Artificial Sequence
  Description of Artificial Sequence: Synthetic oligonucleotide
gcuuccauagagaggauug

SEQ ID NO: 561027 - RNA, 19 nt, Artificial Sequence
  Description of Artificial Sequence: Synthetic oligonucleotide
caagguggcgcaugcuggc

SEQ ID NO: 561028 - RNA, 19 nt, Artificial Sequence
  Description of Artificial Sequence: Synthetic oligonucleotide
ccgucuagcaugagcaugg

SEQ ID NO: 561029 - RNA, 19 nt, Artificial Sequence
  Description of Artificial Sequence: Synthetic oligonucleotide
gaggucaguuguucacacc

SEQ ID NO: 561030 - RNA, 19 nt, Artificial Sequence
  Description of Artificial Sequence: Synthetic oligonucleotide
uuaucuccauggccaacuc

SEQ ID NO: 561031 - RNA, 19 nt, Artificial Sequence
  Description of Artificial Sequence: Synthetic oligonucleotide
uccuuuguuacaguacauu

SEQ ID NO: 561032 - RNA, 19 nt, Artificial Sequence
  Description of Artificial Sequence: Synthetic oligonucleotide
gugucauacuuuaauuaca

SEQ ID NO: 561033 - RNA, 19 nt, Artificial Sequence
  Description of Artificial Sequence: Synthetic oligonucleotide
cauauggcucuuauacaga

SEQ ID NO: 561034 - RNA, 19 nt, Artificial Sequence
  Description of Artificial Sequence: Synthetic oligonucleotide
uauccuacccagaguucaa

SEQ ID NO: 561035 - RNA, 19 nt, Artificial Sequence
  Description of Artificial Sequence: Synthetic oligonucleotide
uucccugccuucgauacuc

SEQ ID NO: 561036 - RNA, 19 nt, Artificial Sequence
  Description of Artificial Sequence: Synthetic oligonucleotide
gguauuagaacagcugcuc

SEQ ID NO: 561037 - RNA, 19 nt, Artificial Sequence
  Description of Artificial Sequence: Synthetic oligonucleotide
uugaccuaauaguccuuuc

SEQ ID NO: 561038 - RNA, 19 nt, Artificial Sequence
  Description of Artificial Sequence: Synthetic oligonucleotide
uagagaggauuggugaaau

SEQ ID NO: 561039 - RNA, 19 nt, Artificial Sequence
  Description of Artificial Sequence: Synthetic oligonucleotide
uaagcuccuuuguuacagu

SEQ ID NO: 561040 - RNA, 19 nt, Artificial Sequence
  Description of Artificial Sequence: Synthetic oligonucleotide
aggugcuguaaugucaagu

SEQ ID NO: 561041 - RNA, 19 nt, Artificial Sequence
  Description of Artificial Sequence: Synthetic oligonucleotide
guguagauuccaaauuaga

SEQ ID NO: 561042 - RNA, 19 nt, Artificial Sequence
  Description of Artificial Sequence: Synthetic oligonucleotide
aaacagaggcaagccauua

SEQ ID NO: 561043 - RNA, 19 nt, Artificial Sequence
  Description of Artificial Sequence: Synthetic oligonucleotide
gcuuucuacccguaaggug

SEQ ID NO: 561044 - RNA, 19 nt, Artificial Sequence
  Description of Artificial Sequence: Synthetic oligonucleotide
uccaaagcuuagccacucu

SEQ ID NO: 561045 - RNA, 19 nt, Artificial Sequence
  Description of Artificial Sequence: Synthetic oligonucleotide
uugggugacuuaaguuagu

SEQ ID NO: 561046 - RNA, 19 nt, Artificial Sequence
  Description of Artificial Sequence: Synthetic oligonucleotide
gagguugagcgguuggaaa

SEQ ID NO: 561047 - RNA, 19 nt, Artificial Sequence
  Description of Artificial Sequence: Synthetic oligonucleotide
ugauuggaguagcuuccau

SEQ ID NO: 561048 - RNA, 19 nt, Artificial Sequence
  Description of Artificial Sequence: Synthetic oligonucleotide
agucagacuuuaugcagua

SEQ ID NO: 561049 - RNA, 19 nt, Artificial Sequence
  Description of Artificial Sequence: Synthetic oligonucleotide
aggauaugugucacaaagu

SEQ ID NO: 561050 - RNA, 19 nt, Artificial Sequence
  Description of Artificial Sequence: Synthetic oligonucleotide
ggaguaauuugaucugaca

SEQ ID NO: 561051 - RNA, 19 nt, Artificial Sequence
  Description of Artificial Sequence: Synthetic oligonucleotide
cucacucccaccaugggcu

SEQ ID NO: 561052 - RNA, 19 nt, Artificial Sequence
  Description of Artificial Sequence: Synthetic oligonucleotide
agcuuucguuuggaauucc

SEQ ID NO: 561053 - RNA, 19 nt, Artificial Sequence
  Description of Artificial Sequence: Synthetic oligonucleotide
ggaaucgauguccaaagcu

SEQ ID NO: 561054 - RNA, 19 nt, Artificial Sequence
  Description of Artificial Sequence: Synthetic oligonucleotide
agggaguaauuugaucuga

SEQ ID NO: 561055 - RNA, 19 nt, Artificial Sequence
  Description of Artificial Sequence: Synthetic oligonucleotide
gacauaugcucuuggguau

SEQ ID NO: 561056 - RNA, 19 nt, Artificial Sequence
  Description of Artificial Sequence: Synthetic oligonucleotide
uuaccaggugcuugguuuu

SEQ ID NO: 561057 - RNA, 19 nt, Artificial Sequence
  Description of Artificial Sequence: Synthetic oligonucleotide
ucuacccguaaggugcugu

SEQ ID NO: 561058 - RNA, 19 nt, Artificial Sequence
  Description of Artificial Sequence: Synthetic oligonucleotide
cucgaauuguucgauagua

SEQ ID NO: 561059 - RNA, 19 nt, Artificial Sequence
  Description of Artificial Sequence: Synthetic oligonucleotide
gaccuaauaguccuuucau

SEQ ID NO: 561060 - RNA, 19 nt, Artificial Sequence
  Description of Artificial Sequence: Synthetic oligonucleotide
gugcuguaaugucaaguuc

SEQ ID NO: 561061 - RNA, 19 nt, Artificial Sequence
  Description of Artificial Sequence: Synthetic oligonucleotide
cuuagccacucuuucucca

SEQ ID NO: 561062 - RNA, 19 nt, Artificial Sequence
  Description of Artificial Sequence: Synthetic oligonucleotide
uugagcgguuggaaauuuc

SEQ ID NO: 561063 - RNA, 19 nt, Artificial Sequence
  Description of Artificial Sequence: Synthetic oligonucleotide
cugagcugugcgaucccag

SEQ ID NO: 561064 - RNA, 19 nt, Artificial Sequence
  Description of Artificial Sequence: Synthetic oligonucleotide
ggagucacacacugugcag

SEQ ID NO: 561065 - RNA, 19 nt, Artificial Sequence
  Description of Artificial Sequence: Synthetic oligonucleotide
gaaucgauguccaaagcuu

SEQ ID NO: 561066 - RNA, 19 nt, Artificial Sequence
  Description of Artificial Sequence: Synthetic oligonucleotide
ccacgaggacuucaaaucc

SEQ ID NO: 561067 - RNA, 19 nt, Artificial Sequence
  Description of Artificial Sequence: Synthetic oligonucleotide
ucccaccuagagaucuuac

SEQ ID NO: 561068 - RNA, 19 nt, Artificial Sequence
  Description of Artificial Sequence: Synthetic oligonucleotide
ucuuaccaggugcuugguu

SEQ ID NO: 561069 - RNA, 19 nt, Artificial Sequence
  Description of Artificial Sequence: Synthetic oligonucleotide
ccauagagaggauugguga

SEQ ID NO: 561070 - RNA, 19 nt, Artificial Sequence
  Description of Artificial Sequence: Synthetic oligonucleotide
cuuggguauuagaacagcu

SEQ ID NO: 561071 - RNA, 19 nt, Artificial Sequence
  Description of Artificial Sequence: Synthetic oligonucleotide
cgaauuguucgauaguauc

SEQ ID NO: 561072 - RNA, 19 nt, Artificial Sequence
  Description of Artificial Sequence: Synthetic oligonucleotide
gacacuuggccgagcauca

SEQ ID NO: 561073 - RNA, 19 nt, Artificial Sequence
  Description of Artificial Sequence: Synthetic oligonucleotide
ccagacauuuccaaacuca

SEQ ID NO: 561074 - RNA, 19 nt, Artificial Sequence
  Description of Artificial Sequence: Synthetic oligonucleotide
gguacacaaucuccuuaag

SEQ ID NO: 561075 - RNA, 19 nt, Artificial Sequence
  Description of Artificial Sequence: Synthetic oligonucleotide
cuuaccaggugcuugguuu

SEQ ID NO: 561076 - RNA, 19 nt, Artificial Sequence
  Description of Artificial Sequence: Synthetic oligonucleotide
cagcacccaacucagguga

SEQ ID NO: 561077 - RNA, 19 nt, Artificial Sequence
  Description of Artificial Sequence: Synthetic oligonucleotide
agaggauuggugaaaucuu

SEQ ID NO: 561078 - RNA, 19 nt, Artificial Sequence
  Description of Artificial Sequence: Synthetic oligonucleotide
cuuucguuuggaauucccu

SEQ ID NO: 561079 - RNA, 19 nt, Artificial Sequence
  Description of Artificial Sequence: Synthetic oligonucleotide
ucguaaugauucucucaua

SEQ ID NO: 561080 - RNA, 19 nt, Artificial Sequence
  Description of Artificial Sequence: Synthetic oligonucleotide
cauugaauucaaacgcagu

SEQ ID NO: 561081 - RNA, 19 nt, Artificial Sequence
  Description of Artificial Sequence: Synthetic oligonucleotide
aggaggucaguuguucaca

SEQ ID NO: 561082 - RNA, 19 nt, Artificial Sequence
  Description of Artificial Sequence: Synthetic oligonucleotide
caugcuggcuacuggguaa

SEQ ID NO: 561083 - RNA, 19 nt, Artificial Sequence
  Description of Artificial Sequence: Synthetic oligonucleotide
ugggcugacugcagcgagu

SEQ ID NO: 561084 - RNA, 19 nt, Artificial Sequence
  Description of Artificial Sequence: Synthetic oligonucleotide
ccaugauaaaaccgggauc

SEQ ID NO: 561085 - RNA, 19 nt, Artificial Sequence
  Description of Artificial Sequence: Synthetic oligonucleotide
ccaccuagagaucuuacca

SEQ ID NO: 561086 - RNA, 19 nt, Artificial Sequence
  Description of Artificial Sequence: Synthetic oligonucleotide
cccaccuagagaucuuacc

SEQ ID NO: 561087 - RNA, 19 nt, Artificial Sequence
  Description of Artificial Sequence: Synthetic oligonucleotide
auccuacccagaguucaag

SEQ ID NO: 561088 - RNA, 19 nt, Artificial Sequence
  Description of Artificial Sequence: Synthetic oligonucleotide
ggaggucaguuguucacac

SEQ ID NO: 561089 - RNA, 19 nt, Artificial Sequence
  Description of Artificial Sequence: Synthetic oligonucleotide
aaaccgggauccggccccg

SEQ ID NO: 561090 - RNA, 19 nt, Artificial Sequence
  Description of Artificial Sequence: Synthetic oligonucleotide
gcuuagccacucuuucucc

SEQ ID NO: 561091 - RNA, 19 nt, Artificial Sequence
  Description of Artificial Sequence: Synthetic oligonucleotide
gagcgguuggaaauuucuc

SEQ ID NO: 561092 - RNA, 19 nt, Artificial Sequence
  Description of Artificial Sequence: Synthetic oligonucleotide
aguuggaaucgauguccaa

SEQ ID NO: 561093 - RNA, 19 nt, Artificial Sequence
  Description of Artificial Sequence: Synthetic oligonucleotide
agcguucauuuaucuuugu

SEQ ID NO: 561094 - RNA, 19 nt, Artificial Sequence
  Description of Artificial Sequence: Synthetic oligonucleotide
gguaaacuguucaugugaa

SEQ ID NO: 561095 - RNA, 19 nt, Artificial Sequence
  Description of Artificial Sequence: Synthetic oligonucleotide
ggaccauaaugacacuguc

SEQ ID NO: 561096 - RNA, 19 nt, Artificial Sequence
  Description of Artificial Sequence: Synthetic oligonucleotide
gguaauaagcuccuuuguu

SEQ ID NO: 561097 - RNA, 19 nt, Artificial Sequence
  Description of Artificial Sequence: Synthetic oligonucleotide
guuauucuccagcuuucgu

SEQ ID NO: 561098 - RNA, 19 nt, Artificial Sequence
  Description of Artificial Sequence: Synthetic oligonucleotide
auucccugccuucgauacu

SEQ ID NO: 561099 - RNA, 19 nt, Artificial Sequence
  Description of Artificial Sequence: Synthetic oligonucleotide
ccauuagacacaggaaaug

SEQ ID NO: 561100 - RNA, 19 nt, Artificial Sequence
  Description of Artificial Sequence: Synthetic oligonucleotide
gcuggcuacuggguaaagg

SEQ ID NO: 561101 - RNA, 19 nt, Artificial Sequence
  Description of Artificial Sequence: Synthetic oligonucleotide
gcuguuacagaggaauguc

SEQ ID NO: 561102 - RNA, 19 nt, Artificial Sequence
  Description of Artificial Sequence: Synthetic oligonucleotide
gcagugaggcccuugaccu

SEQ ID NO: 561103 - RNA, 19 nt, Artificial Sequence
  Description of Artificial Sequence: Synthetic oligonucleotide
ggcuacuggguaaaggaca

SEQ ID NO: 561104 - RNA, 19 nt, Artificial Sequence
  Description of Artificial Sequence: Synthetic oligonucleotide
caagugguaauaagcuccu

SEQ ID NO: 561105 - RNA, 19 nt, Artificial Sequence
  Description of Artificial Sequence: Synthetic oligonucleotide
caguguguagauuccaaau

SEQ ID NO: 561106 - RNA, 19 nt, Artificial Sequence
  Description of Artificial Sequence: Synthetic oligonucleotide
cauuacauauggcucuuau

SEQ ID NO: 561107 - RNA, 19 nt, Artificial Sequence
  Description of Artificial Sequence: Synthetic oligonucleotide
ggcaagaaguucuuuguau

SEQ ID NO: 561108 - RNA, 19 nt, Artificial Sequence
  Description of Artificial Sequence: Synthetic oligonucleotide
acaggugaucugucugcau

SEQ ID NO: 561109 - RNA, 19 nt, Artificial Sequence
  Description of Artificial Sequence: Synthetic oligonucleotide
cagcuuucguuuggaauuc

SEQ ID NO: 561110 - RNA, 19 nt, Artificial Sequence
  Description of Artificial Sequence: Synthetic oligonucleotide
gucauacaauuuccaccca

SEQ ID NO: 561111 - RNA, 19 nt, Artificial Sequence
  Description of Artificial Sequence: Synthetic oligonucleotide
guucgauaguauccgucua

SEQ ID NO: 561112 - RNA, 19 nt, Artificial Sequence
  Description of Artificial Sequence: Synthetic oligonucleotide
acucuuaguuggaaucgau

SEQ ID NO: 561113 - RNA, 19 nt, Artificial Sequence
  Description of Artificial Sequence: Synthetic oligonucleotide
cacuuagauuguaauuccu

SEQ ID NO: 561114 - RNA, 19 nt, Artificial Sequence
  Description of Artificial Sequence: Synthetic oligonucleotide
guuuggaauucccugccuu

SEQ ID NO: 561115 - RNA, 19 nt, Artificial Sequence
  Description of Artificial Sequence: Synthetic oligonucleotide
auccucgaauuguucgaua

SEQ ID NO: 561116 - RNA, 19 nt, Artificial Sequence
  Description of Artificial Sequence: Synthetic oligonucleotide
gggaguaauuugaucugac

SEQ ID NO: 561117 - RNA, 19 nt, Artificial Sequence
  Description of Artificial Sequence: Synthetic oligonucleotide
aggcaagccauuagacaca

SEQ ID NO: 561118 - RNA, 19 nt, Artificial Sequence
  Description of Artificial Sequence: Synthetic oligonucleotide
gacaugauuggaguagcuu

SEQ ID NO: 561119 - RNA, 19 nt, Artificial Sequence
  Description of Artificial Sequence: Synthetic oligonucleotide
caugaaggcccagacauau

SEQ ID NO: 561120 - RNA, 19 nt, Artificial Sequence
  Description of Artificial Sequence: Synthetic oligonucleotide
aguuagugucauacuuuaa

SEQ ID NO: 561121 - RNA, 19 nt, Artificial Sequence
  Description of Artificial Sequence: Synthetic oligonucleotide
uacccguaaggugcuguaa

SEQ ID NO: 561122 - RNA, 19 nt, Artificial Sequence
  Description of Artificial Sequence: Synthetic oligonucleotide
ggccccgugaccugaaaga

SEQ ID NO: 561123 - RNA, 19 nt, Artificial Sequence
  Description of Artificial Sequence: Synthetic oligonucleotide
cugcagcgagugacugugg

SEQ ID NO: 561124 - RNA, 19 nt, Artificial Sequence
  Description of Artificial Sequence: Synthetic oligonucleotide
uggcgcaugcuggcuacug

SEQ ID NO: 561125 - RNA, 19 nt, Artificial Sequence
  Description of Artificial Sequence: Synthetic oligonucleotide
gauccggccccgugaccug

SEQ ID NO: 561126 - RNA, 19 nt, Artificial Sequence
  Description of Artificial Sequence: Synthetic oligonucleotide
ugaggcccuugaccuaaua

SEQ ID NO: 561127 - RNA, 19 nt, Artificial Sequence
  Description of Artificial Sequence: Synthetic oligonucleotide
cuggcacuuagauuguaau

SEQ ID NO: 561128 - RNA, 19 nt, Artificial Sequence
  Description of Artificial Sequence: Synthetic oligonucleotide
cauagcguucauuuaucuu

SEQ ID NO: 561129 - RNA, 19 nt, Artificial Sequence
  Description of Artificial Sequence: Synthetic oligonucleotide
cugcaccagacauuuccaa

SEQ ID NO: 561130 - RNA, 19 nt, Artificial Sequence
  Description of Artificial Sequence: Synthetic oligonucleotide
ccuuaagcuuucguaauga

SEQ ID NO: 561131 - RNA, 19 nt, Artificial Sequence
  Description of Artificial Sequence: Synthetic oligonucleotide
acauaugcucuuggguauu

SEQ ID NO: 561132 - RNA, 19 nt, Artificial Sequence
  Description of Artificial Sequence: Synthetic oligonucleotide
aagugguaauaagcuccuu

SEQ ID NO: 561133 - RNA, 19 nt, Artificial Sequence
  Description of Artificial Sequence: Synthetic oligonucleotide
gguggcgcaugcuggcuac

SEQ ID NO: 561134 - RNA, 19 nt, Artificial Sequence
  Description of Artificial Sequence: Synthetic oligonucleotide
cauugacacuuggccgagc

SEQ ID NO: 561135 - RNA, 19 nt, Artificial Sequence
  Description of Artificial Sequence: Synthetic oligonucleotide
aguauccgucuagcaugag

SEQ ID NO: 561136 - RNA, 19 nt, Artificial Sequence
  Description of Artificial Sequence: Synthetic oligonucleotide
caaacgcaguagggaacug

SEQ ID NO: 561137 - RNA, 19 nt, Artificial Sequence
  Description of Artificial Sequence: Synthetic oligonucleotide
agcaauccuaagagccccu

SEQ ID NO: 561138 - RNA, 19 nt, Artificial Sequence
  Description of Artificial Sequence: Synthetic oligonucleotide
gccacucuuucuccacgag

SEQ ID NO: 561139 - RNA, 19 nt, Artificial Sequence
  Description of Artificial Sequence: Synthetic oligonucleotide
agguggcgcaugcuggcua

SEQ ID NO: 561140 - RNA, 19 nt, Artificial Sequence
  Description of Artificial Sequence: Synthetic oligonucleotide
aucugagaagggaguaauu

SEQ ID NO: 561141 - RNA, 19 nt, Artificial Sequence
  Description of Artificial Sequence: Synthetic oligonucleotide
aucuuaccaggugcuuggu

SEQ ID NO: 561142 - RNA, 19 nt, Artificial Sequence
  Description of Artificial Sequence: Synthetic oligonucleotide
uucuacccguaaggugcug

SEQ ID NO: 561143 - RNA, 19 nt, Artificial Sequence
  Description of Artificial Sequence: Synthetic oligonucleotide
ccagcuuucguuuggaauu

SEQ ID NO: 561144 - RNA, 19 nt, Artificial Sequence
  Description of Artificial Sequence: Synthetic oligonucleotide
agaguucaagguggcgcau

SEQ ID NO: 561145 - RNA, 19 nt, Artificial Sequence
  Description of Artificial Sequence: Synthetic oligonucleotide
caauguugggguacacaau

SEQ ID NO: 561146 - RNA, 19 nt, Artificial Sequence
  Description of Artificial Sequence: Synthetic oligonucleotide
cuacccguaaggugcugua

SEQ ID NO: 561147 - RNA, 19 nt, Artificial Sequence
  Description of Artificial Sequence: Synthetic oligonucleotide
cuuuguuauucuccagcuu

SEQ ID NO: 561148 - RNA, 19 nt, Artificial Sequence
  Description of Artificial Sequence: Synthetic oligonucleotide
ggacuucaaauccucgaau

SEQ ID NO: 561149 - RNA, 19 nt, Artificial Sequence
  Description of Artificial Sequence: Synthetic oligonucleotide
gggugacuuaaguuagugu

SEQ ID NO: 561150 - RNA, 19 nt, Artificial Sequence
  Description of Artificial Sequence: Synthetic oligonucleotide
acauuacauauggcucuua

SEQ ID NO: 561151 - RNA, 19 nt, Artificial Sequence
  Description of Artificial Sequence: Synthetic oligonucleotide
gcaauccuaagagccccug

SEQ ID NO: 561152 - RNA, 19 nt, Artificial Sequence
  Description of Artificial Sequence: Synthetic oligonucleotide
cuugaccuaauaguccuuu

SEQ ID NO: 561153 - RNA, 19 nt, Artificial Sequence
  Description of Artificial Sequence: Synthetic oligonucleotide
cacccaacucaggugaaua

SEQ ID NO: 561154 - RNA, 19 nt, Artificial Sequence
  Description of Artificial Sequence: Synthetic oligonucleotide
cugugcgaucccagccauc

SEQ ID NO: 561155 - RNA, 19 nt, Artificial Sequence
  Description of Artificial Sequence: Synthetic oligonucleotide
ggagguugagcgguuggaa

SEQ ID NO: 561156 - RNA, 19 nt, Artificial Sequence
  Description of Artificial Sequence: Synthetic oligonucleotide
cauaugcucuuggguauua

SEQ ID NO: 561157 - RNA, 19 nt, Artificial Sequence
  Description of Artificial Sequence: Synthetic oligonucleotide
gucagacuuuaugcaguaa

SEQ ID NO: 561158 - RNA, 19 nt, Artificial Sequence
  Description of Artificial Sequence: Synthetic oligonucleotide
ccccgugaccugaaagaug

SEQ ID NO: 561159 - RNA, 19 nt, Artificial Sequence
  Description of Artificial Sequence: Synthetic oligonucleotide
gcaugcuggcuacugggua

SEQ ID NO: 561160 - RNA, 19 nt, Artificial Sequence
  Description of Artificial Sequence: Synthetic oligonucleotide
cccauuuucagggaauacu

SEQ ID NO: 561161 - RNA, 19 nt, Artificial Sequence
  Description of Artificial Sequence: Synthetic oligonucleotide
cccaacucaggugaauaga

SEQ ID NO: 561162 - RNA, 19 nt, Artificial Sequence
  Description of Artificial Sequence: Synthetic oligonucleotide
cccagaguucaagguggcg

SEQ ID NO: 561163 - RNA, 19 nt, Artificial Sequence
  Description of Artificial Sequence: Synthetic oligonucleotide
ggcuuucuacccguaaggu

SEQ ID NO: 561164 - RNA, 19 nt, Artificial Sequence
  Description of Artificial Sequence: Synthetic oligonucleotide
cgauaguauccgucuagca

SEQ ID NO: 561165 - RNA, 19 nt, Artificial Sequence
  Description of Artificial Sequence: Synthetic oligonucleotide
uccggccccgugaccugaa

SEQ ID NO: 561166 - RNA, 19 nt, Artificial Sequence
  Description of Artificial Sequence: Synthetic oligonucleotide
gcuacuggguaaaggacau

SEQ ID NO: 561167 - RNA, 19 nt, Artificial Sequence
  Description of Artificial Sequence: Synthetic oligonucleotide
gagaucuuaccaggugcuu

SEQ ID NO: 561168 - RNA, 19 nt, Artificial Sequence
  Description of Artificial Sequence: Synthetic oligonucleotide
guugagcgguuggaaauuu

SEQ ID NO: 561169 - RNA, 19 nt, Artificial Sequence
  Description of Artificial Sequence: Synthetic oligonucleotide
agcacccaacucaggugaa

SEQ ID NO: 561170 - RNA, 19 nt, Artificial Sequence
  Description of Artificial Sequence: Synthetic oligonucleotide
ccuuauuggcaacagcauu

SEQ ID NO: 561171 - RNA, 19 nt, Artificial Sequence
  Description of Artificial Sequence: Synthetic oligonucleotide
ccaccaugggcugacugca

SEQ ID NO: 561172 - RNA, 19 nt, Artificial Sequence
  Description of Artificial Sequence: Synthetic oligonucleotide
guucgcuguuacagaggaa

SEQ ID NO: 561173 - RNA, 19 nt, Artificial Sequence
  Description of Artificial Sequence: Synthetic oligonucleotide
auccggccccgugaccuga

SEQ ID NO: 561174 - RNA, 19 nt, Artificial Sequence
  Description of Artificial Sequence: Synthetic oligonucleotide
ggaugguaaugaggaaaua

SEQ ID NO: 561175 - RNA, 19 nt, Artificial Sequence
  Description of Artificial Sequence: Synthetic oligonucleotide
guucaagguggcgcaugcu

SEQ ID NO: 561176 - RNA, 19 nt, Artificial Sequence
  Description of Artificial Sequence: Synthetic oligonucleotide
ggauggguuccugugguuu

SEQ ID NO: 561177 - RNA, 19 nt, Artificial Sequence
  Description of Artificial Sequence: Synthetic oligonucleotide
aaccgggauccggccccgu

SEQ ID NO: 561178 - RNA, 19 nt, Artificial Sequence
  Description of Artificial Sequence: Synthetic oligonucleotide
ggacaugauuggaguagcu

SEQ ID NO: 561179 - RNA, 19 nt, Artificial Sequence
  Description of Artificial Sequence: Synthetic oligonucleotide
gguugagcgguuggaaauu

SEQ ID NO: 561180 - RNA, 19 nt, Artificial Sequence
  Description of Artificial Sequence: Synthetic oligonucleotide
ggccaacucuuaguuggaa

SEQ ID NO: 561181 - RNA, 19 nt, Artificial Sequence
  Description of Artificial Sequence: Synthetic oligonucleotide
ccucaauguugggguacac

SEQ ID NO: 561182 - RNA, 19 nt, Artificial Sequence
  Description of Artificial Sequence: Synthetic oligonucleotide
ccucgaauuguucgauagu

SEQ ID NO: 561183 - RNA, 19 nt, Artificial Sequence
  Description of Artificial Sequence: Synthetic oligonucleotide
cgugaccugaaagaugcua

SEQ ID NO: 561184 - RNA, 19 nt, Artificial Sequence
  Description of Artificial Sequence: Synthetic oligonucleotide
gcugugcgaucccagccau

SEQ ID NO: 561185 - RNA, 19 nt, Artificial Sequence
  Description of Artificial Sequence: Synthetic oligonucleotide
cgggauccggccccgugac

SEQ ID NO: 561186 - RNA, 19 nt, Artificial Sequence
  Description of Artificial Sequence: Synthetic oligonucleotide
gcuguuuauguaggaccau

SEQ ID NO: 561187 - RNA, 19 nt, Artificial Sequence
  Description of Artificial Sequence: Synthetic oligonucleotide
gcuuuacuugcuggcacuu

SEQ ID NO: 561188 - RNA, 19 nt, Artificial Sequence
  Description of Artificial Sequence: Synthetic oligonucleotide
cgcaguagggaacugucuu

SEQ ID NO: 561189 - RNA, 19 nt, Artificial Sequence
  Description of Artificial Sequence: Synthetic oligonucleotide
cgcuguuacagaggaaugu

SEQ ID NO: 561190 - RNA, 19 nt, Artificial Sequence
  Description of Artificial Sequence: Synthetic oligonucleotide
gccccgugaccugaaagau

SEQ ID NO: 561191 - RNA, 19 nt, Artificial Sequence
  Description of Artificial Sequence: Synthetic oligonucleotide
cccugccuucgauacucua

SEQ ID NO: 561192 - RNA, 19 nt, Artificial Sequence
  Description of Artificial Sequence: Synthetic oligonucleotide
ccuugaccuaauaguccuu

SEQ ID NO: 561193 - RNA, 19 nt, Artificial Sequence
  Description of Artificial Sequence: Synthetic oligonucleotide
guggcgcaugcuggcuacu

SEQ ID NO: 561194 - RNA, 19 nt, Artificial Sequence
  Description of Artificial Sequence: Synthetic oligonucleotide
gcacccaacucaggugaau

SEQ ID NO: 561195 - RNA, 19 nt, Artificial Sequence
  Description of Artificial Sequence: Synthetic oligonucleotide
ccggccccgugaccugaaa

SEQ ID NO: 561196 - RNA, 19 nt, Artificial Sequence
  Description of Artificial Sequence: Synthetic oligonucleotide
uuuuagauugcacagcacg

SEQ ID NO: 561197 - RNA, 19 nt, Artificial Sequence
  Description of Artificial Sequence: Synthetic oligonucleotide
aaggaggucgauuuuagac

SEQ ID NO: 561198 - RNA, 19 nt, Artificial Sequence
  Description of Artificial Sequence: Synthetic oligonucleotide
gacgauuuugccuacacgg

SEQ ID NO: 561199 - RNA, 19 nt, Artificial Sequence
  Description of Artificial Sequence: Synthetic oligonucleotide
aacagaauucuuuaggucu

SEQ ID NO: 561200 - RNA, 19 nt, Artificial Sequence
  Description of Artificial Sequence: Synthetic oligonucleotide
ucagaaauccuaaaaucgg

SEQ ID NO: 561201 - RNA, 19 nt, Artificial Sequence
  Description of Artificial Sequence: Synthetic oligonucleotide
aacuuuaaguucccgcucc

SEQ ID NO: 561202 - RNA, 19 nt, Artificial Sequence
  Description of Artificial Sequence: Synthetic oligonucleotide
uguuguguaaccacggagg

SEQ ID NO: 561203 - RNA, 19 nt, Artificial Sequence
  Description of Artificial Sequence: Synthetic oligonucleotide
uuuugaguagccaagcgca

SEQ ID NO: 561204 - RNA, 19 nt, Artificial Sequence
  Description of Artificial Sequence: Synthetic oligonucleotide
gaauuguuaccucacaccc

SEQ ID NO: 561205 - RNA, 19 nt, Artificial Sequence
  Description of Artificial Sequence: Synthetic oligonucleotide
aagaggacaugcuugauga

SEQ ID NO: 561206 - RNA, 19 nt, Artificial Sequence
  Description of Artificial Sequence: Synthetic oligonucleotide
ugagcuaucccuuaccaag

SEQ ID NO: 561207 - RNA, 19 nt, Artificial Sequence
  Description of Artificial Sequence: Synthetic oligonucleotide
uuuuccaauuacaaggaug

SEQ ID NO: 561208 - RNA, 19 nt, Artificial Sequence
  Description of Artificial Sequence: Synthetic oligonucleotide
ucucauaguaacugguucg

SEQ ID NO: 561209 - RNA, 19 nt, Artificial Sequence
  Description of Artificial Sequence: Synthetic oligonucleotide
uuuacaaauacucgcucgc

SEQ ID NO: 561210 - RNA, 19 nt, Artificial Sequence
  Description of Artificial Sequence: Synthetic oligonucleotide
aauccuaaaaucggccugc

SEQ ID NO: 561211 - RNA, 19 nt, Artificial Sequence
  Description of Artificial Sequence: Synthetic oligonucleotide
uuuagugauuuacaggaga

SEQ ID NO: 561212 - RNA, 19 nt, Artificial Sequence
  Description of Artificial Sequence: Synthetic oligonucleotide
uacacggauauccagccgg

SEQ ID NO: 561213 - RNA, 19 nt, Artificial Sequence
  Description of Artificial Sequence: Synthetic oligonucleotide
agagguucaaccuggcggc

SEQ ID NO: 561214 - RNA, 19 nt, Artificial Sequence
  Description of Artificial Sequence: Synthetic oligonucleotide
uuugccuacacggauaucc

SEQ ID NO: 561215 - RNA, 19 nt, Artificial Sequence
  Description of Artificial Sequence: Synthetic oligonucleotide
uuucuauugguucuauuga

SEQ ID NO: 561216 - RNA, 19 nt, Artificial Sequence
  Description of Artificial Sequence: Synthetic oligonucleotide
cauaaaguugguuuguuuc

SEQ ID NO: 561217 - RNA, 19 nt, Artificial Sequence
  Description of Artificial Sequence: Synthetic oligonucleotide
aacuguaauuagcccagac

SEQ ID NO: 561218 - RNA, 19 nt, Artificial Sequence
  Description of Artificial Sequence: Synthetic oligonucleotide
uuuagauugcacagcacga

SEQ ID NO: 561219 - RNA, 19 nt, Artificial Sequence
  Description of Artificial Sequence: Synthetic oligonucleotide
ugaagguccgcaaacagaa

SEQ ID NO: 561220 - RNA, 19 nt, Artificial Sequence
  Description of Artificial Sequence: Synthetic oligonucleotide
agcaaucuuggacaugggc

SEQ ID NO: 561221 - RNA, 19 nt, Artificial Sequence
  Description of Artificial Sequence: Synthetic oligonucleotide
uguguaaccacggaggaca

SEQ ID NO: 561222 - RNA, 19 nt, Artificial Sequence
  Description of Artificial Sequence: Synthetic oligonucleotide
agaaauccuaaaaucggcc

SEQ ID NO: 561223 - RNA, 19 nt, Artificial Sequence
  Description of Artificial Sequence: Synthetic oligonucleotide
ucauguuguguaaccacgg

SEQ ID NO: 561224 - RNA, 19 nt, Artificial Sequence
  Description of Artificial Sequence: Synthetic oligonucleotide
cuuccgaucaaggaggucg

SEQ ID NO: 561225 - RNA, 19 nt, Artificial Sequence
  Description of Artificial Sequence: Synthetic oligonucleotide
guaaacuuuaaguucccgc

SEQ ID NO: 561226 - RNA, 19 nt, Artificial Sequence
  Description of Artificial Sequence: Synthetic oligonucleotide
ugggcaucuacuuuuaagu

SEQ ID NO: 561227 - RNA, 19 nt, Artificial Sequence
  Description of Artificial Sequence: Synthetic oligonucleotide
uuuuagacuccucuucuga

SEQ ID NO: 561228 - RNA, 19 nt, Artificial Sequence
  Description of Artificial Sequence: Synthetic oligonucleotide
cagagguucaaccuggcgg

SEQ ID NO: 561229 - RNA, 19 nt, Artificial Sequence
  Description of Artificial Sequence: Synthetic oligonucleotide
uuagacuccucuucugagg

SEQ ID NO: 561230 - RNA, 19 nt, Artificial Sequence
  Description of Artificial Sequence: Synthetic oligonucleotide
agguaaacgguguaggucu

SEQ ID NO: 561231 - RNA, 19 nt, Artificial Sequence
  Description of Artificial Sequence: Synthetic oligonucleotide
cauaguaacugguucgaag

SEQ ID NO: 561232 - RNA, 19 nt, Artificial Sequence
  Description of Artificial Sequence: Synthetic oligonucleotide
cuucuauggaagcacacag

SEQ ID NO: 561233 - RNA, 19 nt, Artificial Sequence
  Description of Artificial Sequence: Synthetic oligonucleotide
ggauucaucagauggaccc

SEQ ID NO: 561234 - RNA, 19 nt, Artificial Sequence
  Description of Artificial Sequence: Synthetic oligonucleotide
uuuugcucccaguuaaccc

SEQ ID NO: 561235 - RNA, 19 nt, Artificial Sequence
  Description of Artificial Sequence: Synthetic oligonucleotide
uuagugauuuacaggagau

SEQ ID NO: 561236 - RNA, 19 nt, Artificial Sequence
  Description of Artificial Sequence: Synthetic oligonucleotide
guuuugaguagccaagcgc

SEQ ID NO: 561237 - RNA, 19 nt, Artificial Sequence
  Description of Artificial Sequence: Synthetic oligonucleotide
gugggaugaucccagaggg

SEQ ID NO: 561238 - RNA, 19 nt, Artificial Sequence
  Description of Artificial Sequence: Synthetic oligonucleotide
uagcccuuuacaaauacuc

SEQ ID NO: 561239 - RNA, 19 nt, Artificial Sequence
  Description of Artificial Sequence: Synthetic oligonucleotide
aaccacggaggacaggcgg

SEQ ID NO: 561240 - RNA, 19 nt, Artificial Sequence
  Description of Artificial Sequence: Synthetic oligonucleotide
uuugcucccaguuaacccu

SEQ ID NO: 561241 - RNA, 19 nt, Artificial Sequence
  Description of Artificial Sequence: Synthetic oligonucleotide
aagcugagacgguagguag

SEQ ID NO: 561242 - RNA, 19 nt, Artificial Sequence
  Description of Artificial Sequence: Synthetic oligonucleotide
cagaaauccuaaaaucggc

SEQ ID NO: 561243 - RNA, 19 nt, Artificial Sequence
  Description of Artificial Sequence: Synthetic oligonucleotide
ucucucaggaucacaaacu

SEQ ID NO: 561244 - RNA, 19 nt, Artificial Sequence
  Description of Artificial Sequence: Synthetic oligonucleotide
aacuguacgaggccgcuca

SEQ ID NO: 561245 - RNA, 19 nt, Artificial Sequence
  Description of Artificial Sequence: Synthetic oligonucleotide
agcuagcuaauguuacccc

SEQ ID NO: 561246 - RNA, 19 nt, Artificial Sequence
  Description of Artificial Sequence: Synthetic oligonucleotide
aagggaaaccccaagagaa

SEQ ID NO: 561247 - RNA, 19 nt, Artificial Sequence
  Description of Artificial Sequence: Synthetic oligonucleotide
uccgcaaacagaauuguua

SEQ ID NO: 561248 - RNA, 19 nt, Artificial Sequence
  Description of Artificial Sequence: Synthetic oligonucleotide
guaauuagcccagaccagg

SEQ ID NO: 561249 - RNA, 19 nt, Artificial Sequence
  Description of Artificial Sequence: Synthetic oligonucleotide
aaaguaagccacauguggu

SEQ ID NO: 561250 - RNA, 19 nt, Artificial Sequence
  Description of Artificial Sequence: Synthetic oligonucleotide
ugacgauuuugccuacacg

SEQ ID NO: 561251 - RNA, 19 nt, Artificial Sequence
  Description of Artificial Sequence: Synthetic oligonucleotide
aaccuagcccgaucaaggg

SEQ ID NO: 561252 - RNA, 19 nt, Artificial Sequence
  Description of Artificial Sequence: Synthetic oligonucleotide
ucuauugguucuauugaaa

SEQ ID NO: 561253 - RNA, 19 nt, Artificial Sequence
  Description of Artificial Sequence: Synthetic oligonucleotide
caaccuagcccgaucaagg

SEQ ID NO: 561254 - RNA, 19 nt, Artificial Sequence
  Description of Artificial Sequence: Synthetic oligonucleotide
aauuguuaccucacacccg

SEQ ID NO: 561255 - RNA, 19 nt, Artificial Sequence
  Description of Artificial Sequence: Synthetic oligonucleotide
guagucaauuuccuuguag

SEQ ID NO: 561256 - RNA, 19 nt, Artificial Sequence
  Description of Artificial Sequence: Synthetic oligonucleotide
acgguguaggucuuguuuc

SEQ ID NO: 561257 - RNA, 19 nt, Artificial Sequence
  Description of Artificial Sequence: Synthetic oligonucleotide
uagauugcacagcacgacc

SEQ ID NO: 561258 - RNA, 19 nt, Artificial Sequence
  Description of Artificial Sequence: Synthetic oligonucleotide
auacucgcucgccaggagc

SEQ ID NO: 561259 - RNA, 19 nt, Artificial Sequence
  Description of Artificial Sequence: Synthetic oligonucleotide
cuuuaggucuccagggugc

SEQ ID NO: 561260 - RNA, 19 nt, Artificial Sequence
  Description of Artificial Sequence: Synthetic oligonucleotide
guagaucccagcuagaugu

SEQ ID NO: 561261 - RNA, 19 nt, Artificial Sequence
  Description of Artificial Sequence: Synthetic oligonucleotide
ugguucgaaguucuagaag

SEQ ID NO: 561262 - RNA, 19 nt, Artificial Sequence
  Description of Artificial Sequence: Synthetic oligonucleotide
aacgguguaggucuuguuu

SEQ ID NO: 561263 - RNA, 19 nt, Artificial Sequence
  Description of Artificial Sequence: Synthetic oligonucleotide
uguuaccucacacccggcc

SEQ ID NO: 561264 - RNA, 19 nt, Artificial Sequence
  Description of Artificial Sequence: Synthetic oligonucleotide
aggaggucgauuuuagacu

SEQ ID NO: 561265 - RNA, 19 nt, Artificial Sequence
  Description of Artificial Sequence: Synthetic oligonucleotide
aguagcaugccuugggagu

SEQ ID NO: 561266 - RNA, 19 nt, Artificial Sequence
  Description of Artificial Sequence: Synthetic oligonucleotide
aauuacaaggaugggcaga

SEQ ID NO: 561267 - RNA, 19 nt, Artificial Sequence
  Description of Artificial Sequence: Synthetic oligonucleotide
aacugguucgaaguucuag

SEQ ID NO: 561268 - RNA, 19 nt, Artificial Sequence
  Description of Artificial Sequence: Synthetic oligonucleotide
uccaggguacaacaggcca

SEQ ID NO: 561269 - RNA, 19 nt, Artificial Sequence
  Description of Artificial Sequence: Synthetic oligonucleotide
uuugaguagccaagcgcag

SEQ ID NO: 561270 - RNA, 19 nt, Artificial Sequence
  Description of Artificial Sequence: Synthetic oligonucleotide
aagguccgcaaacagaauu

SEQ ID NO: 561271 - RNA, 19 nt, Artificial Sequence
  Description of Artificial Sequence: Synthetic oligonucleotide
acugguucgaaguucuaga

SEQ ID NO: 561272 - RNA, 19 nt, Artificial Sequence
  Description of Artificial Sequence: Synthetic oligonucleotide
augggcacaaaguaagcca

SEQ ID NO: 561273 - RNA, 19 nt, Artificial Sequence
  Description of Artificial Sequence: Synthetic oligonucleotide
gacgggaugauuuccucug

SEQ ID NO: 561274 - RNA, 19 nt, Artificial Sequence
  Description of Artificial Sequence: Synthetic oligonucleotide
guaaccacggaggacaggc

SEQ ID NO: 561275 - RNA, 19 nt, Artificial Sequence
  Description of Artificial Sequence: Synthetic oligonucleotide
uuaacccugggaccauggg

SEQ ID NO: 561276 - RNA, 19 nt, Artificial Sequence
  Description of Artificial Sequence: Synthetic oligonucleotide
ucucauagcccuuuacaaa

SEQ ID NO: 561277 - RNA, 19 nt, Artificial Sequence
  Description of Artificial Sequence: Synthetic oligonucleotide
cuuagaaugcugccagccc

SEQ ID NO: 561278 - RNA, 19 nt, Artificial Sequence
  Description of Artificial Sequence: Synthetic oligonucleotide
agucaggugggaugauccc

SEQ ID NO: 561279 - RNA, 19 nt, Artificial Sequence
  Description of Artificial Sequence: Synthetic oligonucleotide
ugugcgaugcacuccucag

SEQ ID NO: 561280 - RNA, 19 nt, Artificial Sequence
  Description of Artificial Sequence: Synthetic oligonucleotide
auacaggcuaucugcaucu

SEQ ID NO: 561281 - RNA, 19 nt, Artificial Sequence
  Description of Artificial Sequence: Synthetic oligonucleotide
aguagaucccagcuagaug

SEQ ID NO: 561282 - RNA, 19 nt, Artificial Sequence
  Description of Artificial Sequence: Synthetic oligonucleotide
aggugagcuaucccuuacc

SEQ ID NO: 561283 - RNA, 19 nt, Artificial Sequence
  Description of Artificial Sequence: Synthetic oligonucleotide
uuuucaagucagcugccaa

SEQ ID NO: 561284 - RNA, 19 nt, Artificial Sequence
  Description of Artificial Sequence: Synthetic oligonucleotide
aaggguacgccaaugcucu

SEQ ID NO: 561285 - RNA, 19 nt, Artificial Sequence
  Description of Artificial Sequence: Synthetic oligonucleotide
aaguaagccacaugugguu

SEQ ID NO: 561286 - RNA, 19 nt, Artificial Sequence
  Description of Artificial Sequence: Synthetic oligonucleotide
ugaauucuuggcagggccu

SEQ ID NO: 561287 - RNA, 19 nt, Artificial Sequence
  Description of Artificial Sequence: Synthetic oligonucleotide
gauucaucagauggacccg

SEQ ID NO: 561288 - RNA, 19 nt, Artificial Sequence
  Description of Artificial Sequence: Synthetic oligonucleotide
gguauuaaacuuuucucga

SEQ ID NO: 561289 - RNA, 19 nt, Artificial Sequence
  Description of Artificial Sequence: Synthetic oligonucleotide
aauacucgcucgccaggag

SEQ ID NO: 561290 - RNA, 19 nt, Artificial Sequence
  Description of Artificial Sequence: Synthetic oligonucleotide
agugccuuugauaaacuug

SEQ ID NO: 561291 - RNA, 19 nt, Artificial Sequence
  Description of Artificial Sequence: Synthetic oligonucleotide
ugcgaugcacuccucagaa

SEQ ID NO: 561292 - RNA, 19 nt, Artificial Sequence
  Description of Artificial Sequence: Synthetic oligonucleotide
ugccccaguaaacuuuaag

SEQ ID NO: 561293 - RNA, 19 nt, Artificial Sequence
  Description of Artificial Sequence: Synthetic oligonucleotide
cugggcaucuacuuuuaag

SEQ ID NO: 561294 - RNA, 19 nt, Artificial Sequence
  Description of Artificial Sequence: Synthetic oligonucleotide
aaccccaagagaacugggg

SEQ ID NO: 561295 - RNA, 19 nt, Artificial Sequence
  Description of Artificial Sequence: Synthetic oligonucleotide
uucuauggaagcacacagu

SEQ ID NO: 561296 - RNA, 19 nt, Artificial Sequence
  Description of Artificial Sequence: Synthetic oligonucleotide
uaaguucccgcuccuucag

SEQ ID NO: 561297 - RNA, 19 nt, Artificial Sequence
  Description of Artificial Sequence: Synthetic oligonucleotide
uccagggugcacaaccuca

SEQ ID NO: 561298 - RNA, 19 nt, Artificial Sequence
  Description of Artificial Sequence: Synthetic oligonucleotide
gauggacccguuuugagua

SEQ ID NO: 561299 - RNA, 19 nt, Artificial Sequence
  Description of Artificial Sequence: Synthetic oligonucleotide
uugcacagcacgaccacca

SEQ ID NO: 561300 - RNA, 19 nt, Artificial Sequence
  Description of Artificial Sequence: Synthetic oligonucleotide
uuagauugcacagcacgac

SEQ ID NO: 561301 - RNA, 19 nt, Artificial Sequence
  Description of Artificial Sequence: Synthetic oligonucleotide
aucagauggacccguuuug

SEQ ID NO: 561302 - RNA, 19 nt, Artificial Sequence
  Description of Artificial Sequence: Synthetic oligonucleotide
cugguucugaauucuuggc

SEQ ID NO: 561303 - RNA, 19 nt, Artificial Sequence
  Description of Artificial Sequence: Synthetic oligonucleotide
uuacaaauacucgcucgcc

SEQ ID NO: 561304 - RNA, 19 nt, Artificial Sequence
  Description of Artificial Sequence: Synthetic oligonucleotide
gaugaucccagaggguagg

SEQ ID NO: 561305 - RNA, 19 nt, Artificial Sequence
  Description of Artificial Sequence: Synthetic oligonucleotide
caaggguacgccaaugcuc

SEQ ID NO: 561306 - RNA, 19 nt, Artificial Sequence
  Description of Artificial Sequence: Synthetic oligonucleotide
acagaauucuuuaggucuc

SEQ ID NO: 561307 - RNA, 19 nt, Artificial Sequence
  Description of Artificial Sequence: Synthetic oligonucleotide
acaaacuguacgaggccgc

SEQ ID NO: 561308 - RNA, 19 nt, Artificial Sequence
  Description of Artificial Sequence: Synthetic oligonucleotide
cauacaggcuaucugcauc

SEQ ID NO: 561309 - RNA, 19 nt, Artificial Sequence
  Description of Artificial Sequence: Synthetic oligonucleotide
uugaguagccaagcgcagg

SEQ ID NO: 561310 - RNA, 19 nt, Artificial Sequence
  Description of Artificial Sequence: Synthetic oligonucleotide
agcccgaucaagggaaacc

SEQ ID NO: 561311 - RNA, 19 nt, Artificial Sequence
  Description of Artificial Sequence: Synthetic oligonucleotide
gaaggacagaaccccguug

SEQ ID NO: 561312 - RNA, 19 nt, Artificial Sequence
  Description of Artificial Sequence: Synthetic oligonucleotide
cauagcccuuuacaaauac

SEQ ID NO: 561313 - RNA, 19 nt, Artificial Sequence
  Description of Artificial Sequence: Synthetic oligonucleotide
auuuugccuacacggauau

SEQ ID NO: 561314 - RNA, 19 nt, Artificial Sequence
  Description of Artificial Sequence: Synthetic oligonucleotide
aaauacucgcucgccagga

SEQ ID NO: 561315 - RNA, 19 nt, Artificial Sequence
  Description of Artificial Sequence: Synthetic oligonucleotide
uuuacaggagaugcacccc

SEQ ID NO: 561316 - RNA, 19 nt, Artificial Sequence
  Description of Artificial Sequence: Synthetic oligonucleotide
ugggaagcuugauagacuu

SEQ ID NO: 561317 - RNA, 19 nt, Artificial Sequence
  Description of Artificial Sequence: Synthetic oligonucleotide
uacucgcucgccaggagca

SEQ ID NO: 561318 - RNA, 19 nt, Artificial Sequence
  Description of Artificial Sequence: Synthetic oligonucleotide
uguugggaagaaacuguaa

SEQ ID NO: 561319 - RNA, 19 nt, Artificial Sequence
  Description of Artificial Sequence: Synthetic oligonucleotide
cacaauuuccuguugggaa

SEQ ID NO: 561320 - RNA, 19 nt, Artificial Sequence
  Description of Artificial Sequence: Synthetic oligonucleotide
gaaacuugggaaccggugu

SEQ ID NO: 561321 - RNA, 19 nt, Artificial Sequence
  Description of Artificial Sequence: Synthetic oligonucleotide
agcccuuuacaaauacucg

SEQ ID NO: 561322 - RNA, 19 nt, Artificial Sequence
  Description of Artificial Sequence: Synthetic oligonucleotide
uaagcaugaagguccgcaa

SEQ ID NO: 561323 - RNA, 19 nt, Artificial Sequence
  Description of Artificial Sequence: Synthetic oligonucleotide
guuggcccuucucauagcc

SEQ ID NO: 561324 - RNA, 19 nt, Artificial Sequence
  Description of Artificial Sequence: Synthetic oligonucleotide
uucuccaaggguacgccaa

SEQ ID NO: 561325 - RNA, 19 nt, Artificial Sequence
  Description of Artificial Sequence: Synthetic oligonucleotide
cagcuagcuaauguuaccc

SEQ ID NO: 561326 - RNA, 19 nt, Artificial Sequence
  Description of Artificial Sequence: Synthetic oligonucleotide
ucgauuuuagacuccucuu

SEQ ID NO: 561327 - RNA, 19 nt, Artificial Sequence
  Description of Artificial Sequence: Synthetic oligonucleotide
ugggauucaucagauggac

SEQ ID NO: 561328 - RNA, 19 nt, Artificial Sequence
  Description of Artificial Sequence: Synthetic oligonucleotide
agcuaucccuuaccaaguc

SEQ ID NO: 561329 - RNA, 19 nt, Artificial Sequence
  Description of Artificial Sequence: Synthetic oligonucleotide
ugguucuauugaaaccaga

SEQ ID NO: 561330 - RNA, 19 nt, Artificial Sequence
  Description of Artificial Sequence: Synthetic oligonucleotide
uaaccacggaggacaggcg

SEQ ID NO: 561331 - RNA, 19 nt, Artificial Sequence
  Description of Artificial Sequence: Synthetic oligonucleotide
gguucgaaguucuagaagu

SEQ ID NO: 561332 - RNA, 19 nt, Artificial Sequence
  Description of Artificial Sequence: Synthetic oligonucleotide
gaacaagcugagacgguag

SEQ ID NO: 561333 - RNA, 19 nt, Artificial Sequence
  Description of Artificial Sequence: Synthetic oligonucleotide
cuaaaaucggccugcagcu

SEQ ID NO: 561334 - RNA, 19 nt, Artificial Sequence
  Description of Artificial Sequence: Synthetic oligonucleotide
uuccccgacgucaauuuuc

SEQ ID NO: 561335 - RNA, 19 nt, Artificial Sequence
  Description of Artificial Sequence: Synthetic oligonucleotide
uaucccuuaccaaguccug

SEQ ID NO: 561336 - RNA, 19 nt, Artificial Sequence
  Description of Artificial Sequence: Synthetic oligonucleotide
guuguguaaccacggagga

SEQ ID NO: 561337 - RNA, 19 nt, Artificial Sequence
  Description of Artificial Sequence: Synthetic oligonucleotide
agcgcagggagguacuucu

SEQ ID NO: 561338 - RNA, 19 nt, Artificial Sequence
  Description of Artificial Sequence: Synthetic oligonucleotide
caguagcaugccuugggag

SEQ ID NO: 561339 - RNA, 19 nt, Artificial Sequence
  Description of Artificial Sequence: Synthetic oligonucleotide
caucuaaagccugcagucc

SEQ ID NO: 561340 - RNA, 19 nt, Artificial Sequence
  Description of Artificial Sequence: Synthetic oligonucleotide
cccgacgucaauuuucucc

SEQ ID NO: 561341 - RNA, 19 nt, Artificial Sequence
  Description of Artificial Sequence: Synthetic oligonucleotide
gcuucccgcgcucagacgg

SEQ ID NO: 561342 - RNA, 19 nt, Artificial Sequence
  Description of Artificial Sequence: Synthetic oligonucleotide
ucggaaacuugggaaccgg

SEQ ID NO: 561343 - RNA, 19 nt, Artificial Sequence
  Description of Artificial Sequence: Synthetic oligonucleotide
acaugggcacaaaguaagc

SEQ ID NO: 561344 - RNA, 19 nt, Artificial Sequence
  Description of Artificial Sequence: Synthetic oligonucleotide
ugccuacacggauauccag

SEQ ID NO: 561345 - RNA, 19 nt, Artificial Sequence
  Description of Artificial Sequence: Synthetic oligonucleotide
aaacuguacgaggccgcuc

SEQ ID NO: 561346 - RNA, 19 nt, Artificial Sequence
  Description of Artificial Sequence: Synthetic oligonucleotide
cugacgauuuugccuacac

SEQ ID NO: 561347 - RNA, 19 nt, Artificial Sequence
  Description of Artificial Sequence: Synthetic oligonucleotide
ugugccccaguaaacuuua

SEQ ID NO: 561348 - RNA, 19 nt, Artificial Sequence
  Description of Artificial Sequence: Synthetic oligonucleotide
agaucccagcuagauguac

SEQ ID NO: 561349 - RNA, 19 nt, Artificial Sequence
  Description of Artificial Sequence: Synthetic oligonucleotide
cccuuuuagugauuuacag

SEQ ID NO: 561350 - RNA, 19 nt, Artificial Sequence
  Description of Artificial Sequence: Synthetic oligonucleotide
uuccgaucaaggaggucga

SEQ ID NO: 561351 - RNA, 19 nt, Artificial Sequence
  Description of Artificial Sequence: Synthetic oligonucleotide
ggaaagaggacaugcuuga

SEQ ID NO: 561352 - RNA, 19 nt, Artificial Sequence
  Description of Artificial Sequence: Synthetic oligonucleotide
agcugagacgguagguagc

SEQ ID NO: 561353 - RNA, 19 nt, Artificial Sequence
  Description of Artificial Sequence: Synthetic oligonucleotide
cacguugccuggcucacag

SEQ ID NO: 561354 - RNA, 19 nt, Artificial Sequence
  Description of Artificial Sequence: Synthetic oligonucleotide
caagggaaaccccaagaga

SEQ ID NO: 561355 - RNA, 19 nt, Artificial Sequence
  Description of Artificial Sequence: Synthetic oligonucleotide
ucauguuguccagguaagc

SEQ ID NO: 561356 - RNA, 19 nt, Artificial Sequence
  Description of Artificial Sequence: Synthetic oligonucleotide
acgggugacagaugaacaa

SEQ ID NO: 561357 - RNA, 19 nt, Artificial Sequence
  Description of Artificial Sequence: Synthetic oligonucleotide
ggaggucgauuuuagacuc

SEQ ID NO: 561358 - RNA, 19 nt, Artificial Sequence
  Description of Artificial Sequence: Synthetic oligonucleotide
ucaccccuucuauggaagc

SEQ ID NO: 561359 - RNA, 19 nt, Artificial Sequence
  Description of Artificial Sequence: Synthetic oligonucleotide
agauugcacagcacgacca

SEQ ID NO: 561360 - RNA, 19 nt, Artificial Sequence
  Description of Artificial Sequence: Synthetic oligonucleotide
acccguuuugaguagccaa

SEQ ID NO: 561361 - RNA, 19 nt, Artificial Sequence
  Description of Artificial Sequence: Synthetic oligonucleotide
guagucagugccuuugaua

SEQ ID NO: 561362 - RNA, 19 nt, Artificial Sequence
  Description of Artificial Sequence: Synthetic oligonucleotide
aaccccucggaaacuuggg

SEQ ID NO: 561363 - RNA, 19 nt, Artificial Sequence
  Description of Artificial Sequence: Synthetic oligonucleotide
ucgcucgccaggagcagag

SEQ ID NO: 561364 - RNA, 19 nt, Artificial Sequence
  Description of Artificial Sequence: Synthetic oligonucleotide
cagguaaacgguguagguc

SEQ ID NO: 561365 - RNA, 19 nt, Artificial Sequence
  Description of Artificial Sequence: Synthetic oligonucleotide
uguaaccacggaggacagg

SEQ ID NO: 561366 - RNA, 19 nt, Artificial Sequence
  Description of Artificial Sequence: Synthetic oligonucleotide
agguccgcaaacagaauug

SEQ ID NO: 561367 - RNA, 19 nt, Artificial Sequence
  Description of Artificial Sequence: Synthetic oligonucleotide
ccgcaaacagaauuguuac

SEQ ID NO: 561368 - RNA, 19 nt, Artificial Sequence
  Description of Artificial Sequence: Synthetic oligonucleotide
caguuccagguaaacggug

SEQ ID NO: 561369 - RNA, 19 nt, Artificial Sequence
  Description of Artificial Sequence: Synthetic oligonucleotide
acauacaggcuaucugcau

SEQ ID NO: 561370 - RNA, 19 nt, Artificial Sequence
  Description of Artificial Sequence: Synthetic oligonucleotide
cucggaaacuugggaaccg

SEQ ID NO: 561371 - RNA, 19 nt, Artificial Sequence
  Description of Artificial Sequence: Synthetic oligonucleotide
augaagguccgcaaacaga

SEQ ID NO: 561372 - RNA, 19 nt, Artificial Sequence
  Description of Artificial Sequence: Synthetic oligonucleotide
uauccagccgggacgggau

SEQ ID NO: 561373 - RNA, 19 nt, Artificial Sequence
  Description of Artificial Sequence: Synthetic oligonucleotide
accaaguccugggaacggg

SEQ ID NO: 561374 - RNA, 19 nt, Artificial Sequence
  Description of Artificial Sequence: Synthetic oligonucleotide
cucacacccggccuucaag

SEQ ID NO: 561375 - RNA, 19 nt, Artificial Sequence
  Description of Artificial Sequence: Synthetic oligonucleotide
uguccaaccuagcccgauc

SEQ ID NO: 561376 - RNA, 19 nt, Artificial Sequence
  Description of Artificial Sequence: Synthetic oligonucleotide
gauuuugccuacacggaua

SEQ ID NO: 561377 - RNA, 19 nt, Artificial Sequence
  Description of Artificial Sequence: Synthetic oligonucleotide
ggauauccagccgggacgg

SEQ ID NO: 561378 - RNA, 19 nt, Artificial Sequence
  Description of Artificial Sequence: Synthetic oligonucleotide
uagccaagcgcagggaggu

SEQ ID NO: 561379 - RNA, 19 nt, Artificial Sequence
  Description of Artificial Sequence: Synthetic oligonucleotide
acuguacgaggccgcucac

SEQ ID NO: 561380 - RNA, 19 nt, Artificial Sequence
  Description of Artificial Sequence: Synthetic oligonucleotide
augggauucaucagaugga

SEQ ID NO: 561381 - RNA, 19 nt, Artificial Sequence
  Description of Artificial Sequence: Synthetic oligonucleotide
cagggcuaggagcaucccc

SEQ ID NO: 561382 - RNA, 19 nt, Artificial Sequence
  Description of Artificial Sequence: Synthetic oligonucleotide
aaacuguaauuagcccaga

SEQ ID NO: 561383 - RNA, 19 nt, Artificial Sequence
  Description of Artificial Sequence: Synthetic oligonucleotide
ggugagcuaucccuuacca

SEQ ID NO: 561384 - RNA, 19 nt, Artificial Sequence
  Description of Artificial Sequence: Synthetic oligonucleotide
ggaaacuugggaaccggug

SEQ ID NO: 561385 - RNA, 19 nt, Artificial Sequence
  Description of Artificial Sequence: Synthetic oligonucleotide
cuuucuccgcuucccgcgc

SEQ ID NO: 561386 - RNA, 19 nt, Artificial Sequence
  Description of Artificial Sequence: Synthetic oligonucleotide
agguaagcaugaagguccg

SEQ ID NO: 561387 - RNA, 19 nt, Artificial Sequence
  Description of Artificial Sequence: Synthetic oligonucleotide
auggacccguuuugaguag

SEQ ID NO: 561388 - RNA, 19 nt, Artificial Sequence
  Description of Artificial Sequence: Synthetic oligonucleotide
guccaaccuagcccgauca

SEQ ID NO: 561389 - RNA, 19 nt, Artificial Sequence
  Description of Artificial Sequence: Synthetic oligonucleotide
agggccuuuggcagugggc

SEQ ID NO: 561390 - RNA, 19 nt, Artificial Sequence
  Description of Artificial Sequence: Synthetic oligonucleotide
uccuuccgaucaaggaggu

SEQ ID NO: 561391 - RNA, 19 nt, Artificial Sequence
  Description of Artificial Sequence: Synthetic oligonucleotide
uaccccaaguagucaauuu

SEQ ID NO: 561392 - RNA, 19 nt, Artificial Sequence
  Description of Artificial Sequence: Synthetic oligonucleotide
aaacgguguaggucuuguu

SEQ ID NO: 561393 - RNA, 19 nt, Artificial Sequence
  Description of Artificial Sequence: Synthetic oligonucleotide
aggucgauuuuagacuccu

SEQ ID NO: 561394 - RNA, 19 nt, Artificial Sequence
  Description of Artificial Sequence: Synthetic oligonucleotide
uuuccaccccacuucucau

SEQ ID NO: 561395 - RNA, 19 nt, Artificial Sequence
  Description of Artificial Sequence: Synthetic oligonucleotide
gcgguacacauccagugug

SEQ ID NO: 561396 - RNA, 19 nt, Artificial Sequence
  Description of Artificial Sequence: Synthetic oligonucleotide
acgauuuugccuacacgga

SEQ ID NO: 561397 - RNA, 19 nt, Artificial Sequence
  Description of Artificial Sequence: Synthetic oligonucleotide
ccuuagaaugcugccagcc

SEQ ID NO: 561398 - RNA, 19 nt, Artificial Sequence
  Description of Artificial Sequence: Synthetic oligonucleotide
gugauuuacaggagaugca

SEQ ID NO: 561399 - RNA, 19 nt, Artificial Sequence
  Description of Artificial Sequence: Synthetic oligonucleotide
gaugcaccccagcuugguc

SEQ ID NO: 561400 - RNA, 19 nt, Artificial Sequence
  Description of Artificial Sequence: Synthetic oligonucleotide
uuguuaccucacacccggc

SEQ ID NO: 561401 - RNA, 19 nt, Artificial Sequence
  Description of Artificial Sequence: Synthetic oligonucleotide
aguaagccacaugugguuu

SEQ ID NO: 561402 - RNA, 19 nt, Artificial Sequence
  Description of Artificial Sequence: Synthetic oligonucleotide
uccaaccuagcccgaucaa

SEQ ID NO: 561403 - RNA, 19 nt, Artificial Sequence
  Description of Artificial Sequence: Synthetic oligonucleotide
cuuugauaaacuugagcuu

SEQ ID NO: 561404 - RNA, 19 nt, Artificial Sequence
  Description of Artificial Sequence: Synthetic oligonucleotide
cugguucgaaguucuagaa

SEQ ID NO: 561405 - RNA, 19 nt, Artificial Sequence
  Description of Artificial Sequence: Synthetic oligonucleotide
aguagucaauuuccuugua

SEQ ID NO: 561406 - RNA, 19 nt, Artificial Sequence
  Description of Artificial Sequence: Synthetic oligonucleotide
auauccagccgggacggga

SEQ ID NO: 561407 - RNA, 19 nt, Artificial Sequence
  Description of Artificial Sequence: Synthetic oligonucleotide
uccuuaccccaaguaguca

SEQ ID NO: 561408 - RNA, 19 nt, Artificial Sequence
  Description of Artificial Sequence: Synthetic oligonucleotide
accccucggaaacuuggga

SEQ ID NO: 561409 - RNA, 19 nt, Artificial Sequence
  Description of Artificial Sequence: Synthetic oligonucleotide
gagaugcaccccagcuugg

SEQ ID NO: 561410 - RNA, 19 nt, Artificial Sequence
  Description of Artificial Sequence: Synthetic oligonucleotide
cagcacgaccaccagccug

SEQ ID NO: 561411 - RNA, 19 nt, Artificial Sequence
  Description of Artificial Sequence: Synthetic oligonucleotide
aggccuuagaaugcugcca

SEQ ID NO: 561412 - RNA, 19 nt, Artificial Sequence
  Description of Artificial Sequence: Synthetic oligonucleotide
uuguuuccacugugcgaug

SEQ ID NO: 561413 - RNA, 19 nt, Artificial Sequence
  Description of Artificial Sequence: Synthetic oligonucleotide
cacgcugacgauuuugccu

SEQ ID NO: 561414 - RNA, 19 nt, Artificial Sequence
  Description of Artificial Sequence: Synthetic oligonucleotide
ccagcuagcuaauguuacc

SEQ ID NO: 561415 - RNA, 19 nt, Artificial Sequence
  Description of Artificial Sequence: Synthetic oligonucleotide
uggacccguuuugaguagc

SEQ ID NO: 561416 - RNA, 19 nt, Artificial Sequence
  Description of Artificial Sequence: Synthetic oligonucleotide
gaggucgauuuuagacucc

SEQ ID NO: 561417 - RNA, 19 nt, Artificial Sequence
  Description of Artificial Sequence: Synthetic oligonucleotide
ccagggagcuuucauguug

SEQ ID NO: 561418 - RNA, 19 nt, Artificial Sequence
  Description of Artificial Sequence: Synthetic oligonucleotide
guuaccucacacccggccu

SEQ ID NO: 561419 - RNA, 19 nt, Artificial Sequence
  Description of Artificial Sequence: Synthetic oligonucleotide
acggaggacaggcgguaca

SEQ ID NO: 561420 - RNA, 19 nt, Artificial Sequence
  Description of Artificial Sequence: Synthetic oligonucleotide
cacucaguaaaggguguuc

SEQ ID NO: 561421 - RNA, 19 nt, Artificial Sequence
  Description of Artificial Sequence: Synthetic oligonucleotide
ccuuuacaaauacucgcuc

SEQ ID NO: 561422 - RNA, 19 nt, Artificial Sequence
  Description of Artificial Sequence: Synthetic oligonucleotide
cggauauccagccgggacg

SEQ ID NO: 561423 - RNA, 19 nt, Artificial Sequence
  Description of Artificial Sequence: Synthetic oligonucleotide
gccccaguaaacuuuaagu

SEQ ID NO: 561424 - RNA, 19 nt, Artificial Sequence
  Description of Artificial Sequence: Synthetic oligonucleotide
uuucuccgcuucccgcgcu

SEQ ID NO: 561425 - RNA, 19 nt, Artificial Sequence
  Description of Artificial Sequence: Synthetic oligonucleotide
uagaucccagcuagaugua

SEQ ID NO: 561426 - RNA, 19 nt, Artificial Sequence
  Description of Artificial Sequence: Synthetic oligonucleotide
accaccaaacugggcaucu

SEQ ID NO: 561427 - RNA, 19 nt, Artificial Sequence
  Description of Artificial Sequence: Synthetic oligonucleotide
guaaacgguguaggucuug

SEQ ID NO: 561428 - RNA, 19 nt, Artificial Sequence
  Description of Artificial Sequence: Synthetic oligonucleotide
cguuuugaguagccaagcg

SEQ ID NO: 561429 - RNA, 19 nt, Artificial Sequence
  Description of Artificial Sequence: Synthetic oligonucleotide
uucaaccuggcggcucacc

SEQ ID NO: 561430 - RNA, 19 nt, Artificial Sequence
  Description of Artificial Sequence: Synthetic oligonucleotide
cacaugugguuuccccgug

SEQ ID NO: 561431 - RNA, 19 nt, Artificial Sequence
  Description of Artificial Sequence: Synthetic oligonucleotide
gugagcuaucccuuaccaa

SEQ ID NO: 561432 - RNA, 19 nt, Artificial Sequence
  Description of Artificial Sequence: Synthetic oligonucleotide
cacccgcgcccuuuucucg

SEQ ID NO: 561433 - RNA, 19 nt, Artificial Sequence
  Description of Artificial Sequence: Synthetic oligonucleotide
gauauccagccgggacggg

SEQ ID NO: 561434 - RNA, 19 nt, Artificial Sequence
  Description of Artificial Sequence: Synthetic oligonucleotide
cagggccuuuggcaguggg

SEQ ID NO: 561435 - RNA, 19 nt, Artificial Sequence
  Description of Artificial Sequence: Synthetic oligonucleotide
auaaccccucggaaacuug

SEQ ID NO: 561436 - RNA, 19 nt, Artificial Sequence
  Description of Artificial Sequence: Synthetic oligonucleotide
cuucccgcgcucagacggc

SEQ ID NO: 561437 - RNA, 19 nt, Artificial Sequence
  Description of Artificial Sequence: Synthetic oligonucleotide
gguucuauugaaaccagau

SEQ ID NO: 561438 - RNA, 19 nt, Artificial Sequence
  Description of Artificial Sequence: Synthetic oligonucleotide
uuggaggaucuggguaggc

SEQ ID NO: 561439 - RNA, 19 nt, Artificial Sequence
  Description of Artificial Sequence: Synthetic oligonucleotide
gcaggccuuagaaugcugc

SEQ ID NO: 561440 - RNA, 19 nt, Artificial Sequence
  Description of Artificial Sequence: Synthetic oligonucleotide
cuguacgaggccgcucacc

SEQ ID NO: 561441 - RNA, 19 nt, Artificial Sequence
  Description of Artificial Sequence: Synthetic oligonucleotide
uaacugguucgaaguucua

SEQ ID NO: 561442 - RNA, 19 nt, Artificial Sequence
  Description of Artificial Sequence: Synthetic oligonucleotide
ccgacgucaauuuucucca

SEQ ID NO: 561443 - RNA, 19 nt, Artificial Sequence
  Description of Artificial Sequence: Synthetic oligonucleotide
uggugccaagccucagggu

SEQ ID NO: 561444 - RNA, 19 nt, Artificial Sequence
  Description of Artificial Sequence: Synthetic oligonucleotide
uccuuguagucagguggga

SEQ ID NO: 561445 - RNA, 19 nt, Artificial Sequence
  Description of Artificial Sequence: Synthetic oligonucleotide
guguaaccacggaggacag

SEQ ID NO: 561446 - RNA, 19 nt, Artificial Sequence
  Description of Artificial Sequence: Synthetic oligonucleotide
gugcgaugcacuccucaga

SEQ ID NO: 561447 - RNA, 19 nt, Artificial Sequence
  Description of Artificial Sequence: Synthetic oligonucleotide
ccucuggucaacaccacca

SEQ ID NO: 561448 - RNA, 19 nt, Artificial Sequence
  Description of Artificial Sequence: Synthetic oligonucleotide
uccagccgggacgggauga

SEQ ID NO: 561449 - RNA, 19 nt, Artificial Sequence
  Description of Artificial Sequence: Synthetic oligonucleotide
gguucaaccuggcggcuca

SEQ ID NO: 561450 - RNA, 19 nt, Artificial Sequence
  Description of Artificial Sequence: Synthetic oligonucleotide
uaaaaucggccugcagcuu

SEQ ID NO: 561451 - RNA, 19 nt, Artificial Sequence
  Description of Artificial Sequence: Synthetic oligonucleotide
cucagacggcacccgcgcc

SEQ ID NO: 561452 - RNA, 19 nt, Artificial Sequence
  Description of Artificial Sequence: Synthetic oligonucleotide
uuccccgugguggcugugc

SEQ ID NO: 561453 - RNA, 19 nt, Artificial Sequence
  Description of Artificial Sequence: Synthetic oligonucleotide
aggguacgccaaugcucuc

SEQ ID NO: 561454 - RNA, 19 nt, Artificial Sequence
  Description of Artificial Sequence: Synthetic oligonucleotide
ccaaccuagcccgaucaag

SEQ ID NO: 561455 - RNA, 19 nt, Artificial Sequence
  Description of Artificial Sequence: Synthetic oligonucleotide
uuucucgaaugggguccag

SEQ ID NO: 561456 - RNA, 19 nt, Artificial Sequence
  Description of Artificial Sequence: Synthetic oligonucleotide
ugggaccaugggauucauc

SEQ ID NO: 561457 - RNA, 19 nt, Artificial Sequence
  Description of Artificial Sequence: Synthetic oligonucleotide
ucgucugguuggcccuucu

SEQ ID NO: 561458 - RNA, 19 nt, Artificial Sequence
  Description of Artificial Sequence: Synthetic oligonucleotide
agccccggccuucuuggca

SEQ ID NO: 561459 - RNA, 19 nt, Artificial Sequence
  Description of Artificial Sequence: Synthetic oligonucleotide
gcucagacggcacccgcgc

SEQ ID NO: 561460 - RNA, 19 nt, Artificial Sequence
  Description of Artificial Sequence: Synthetic oligonucleotide
uucuccgcuucccgcgcuc

SEQ ID NO: 561461 - RNA, 19 nt, Artificial Sequence
  Description of Artificial Sequence: Synthetic oligonucleotide
ccgaucaagggaaacccca

SEQ ID NO: 561462 - RNA, 19 nt, Artificial Sequence
  Description of Artificial Sequence: Synthetic oligonucleotide
gacccguuuugaguagcca

SEQ ID NO: 561463 - RNA, 19 nt, Artificial Sequence
  Description of Artificial Sequence: Synthetic oligonucleotide
gccagcuagcuaauguuac

SEQ ID NO: 561464 - RNA, 19 nt, Artificial Sequence
  Description of Artificial Sequence: Synthetic oligonucleotide
gcaucauguuguguaacca

SEQ ID NO: 561465 - RNA, 19 nt, Artificial Sequence
  Description of Artificial Sequence: Synthetic oligonucleotide
auccuaaaaucggccugca

SEQ ID NO: 561466 - RNA, 19 nt, Artificial Sequence
  Description of Artificial Sequence: Synthetic oligonucleotide
ggguacgccaaugcucucc

SEQ ID NO: 561467 - RNA, 19 nt, Artificial Sequence
  Description of Artificial Sequence: Synthetic oligonucleotide
cggcucaccccuucuaugg

SEQ ID NO: 561468 - RNA, 19 nt, Artificial Sequence
  Description of Artificial Sequence: Synthetic oligonucleotide
cccgaucaagggaaacccc

SEQ ID NO: 561469 - RNA, 19 nt, Artificial Sequence
  Description of Artificial Sequence: Synthetic oligonucleotide
gauaaccccucggaaacuu

SEQ ID NO: 561470 - RNA, 19 nt, Artificial Sequence
  Description of Artificial Sequence: Synthetic oligonucleotide
gagcuaucccuuaccaagu

SEQ ID NO: 561471 - RNA, 19 nt, Artificial Sequence
  Description of Artificial Sequence: Synthetic oligonucleotide
ccucggaaacuugggaacc

SEQ ID NO: 561472 - RNA, 19 nt, Artificial Sequence
  Description of Artificial Sequence: Synthetic oligonucleotide
ccgcucaccacaguccugg

SEQ ID NO: 561473 - RNA, 19 nt, Artificial Sequence
  Description of Artificial Sequence: Synthetic oligonucleotide
cacugugcgaugcacuccu

SEQ ID NO: 561474 - RNA, 19 nt, Artificial Sequence
  Description of Artificial Sequence: Synthetic oligonucleotide
cugggaacgggugacagau

SEQ ID NO: 561475 - RNA, 19 nt, Artificial Sequence
  Description of Artificial Sequence: Synthetic oligonucleotide
uccgcuucccgcgcucaga

SEQ ID NO: 561476 - RNA, 19 nt, Artificial Sequence
  Description of Artificial Sequence: Synthetic oligonucleotide
ccguuuugaguagccaagc

SEQ ID NO: 561477 - RNA, 19 nt, Artificial Sequence
  Description of Artificial Sequence: Synthetic oligonucleotide
uuuugccuacacggauauc

SEQ ID NO: 561478 - RNA, 19 nt, Artificial Sequence
  Description of Artificial Sequence: Synthetic oligonucleotide
ucgccaggagcagagccuu

SEQ ID NO: 561479 - RNA, 19 nt, Artificial Sequence
  Description of Artificial Sequence: Synthetic oligonucleotide
cuugggaguccacuccucu

SEQ ID NO: 561480 - RNA, 19 nt, Artificial Sequence
  Description of Artificial Sequence: Synthetic oligonucleotide
uuacaaggaugggcagaau

SEQ ID NO: 561481 - RNA, 19 nt, Artificial Sequence
  Description of Artificial Sequence: Synthetic oligonucleotide
ccuuaccccaaguagucaa

SEQ ID NO: 561482 - RNA, 19 nt, Artificial Sequence
  Description of Artificial Sequence: Synthetic oligonucleotide
caggguaggcaggccuuag

SEQ ID NO: 561483 - RNA, 19 nt, Artificial Sequence
  Description of Artificial Sequence: Synthetic oligonucleotide
uggcucacagaaggccuuc

SEQ ID NO: 561484 - RNA, 19 nt, Artificial Sequence
  Description of Artificial Sequence: Synthetic oligonucleotide
gccuuagaaugcugccagc

SEQ ID NO: 561485 - RNA, 19 nt, Artificial Sequence
  Description of Artificial Sequence: Synthetic oligonucleotide
gguuggcccuucucauagc

SEQ ID NO: 561486 - RNA, 19 nt, Artificial Sequence
  Description of Artificial Sequence: Synthetic oligonucleotide
cgguguaggucuuguuucc

SEQ ID NO: 561487 - RNA, 19 nt, Artificial Sequence
  Description of Artificial Sequence: Synthetic oligonucleotide
uggcggcucaccccuucua

SEQ ID NO: 561488 - RNA, 19 nt, Artificial Sequence
  Description of Artificial Sequence: Synthetic oligonucleotide
ggguccagagguucaaccu

SEQ ID NO: 561489 - RNA, 19 nt, Artificial Sequence
  Description of Artificial Sequence: Synthetic oligonucleotide
uucccgcgcucagacggca

SEQ ID NO: 561490 - RNA, 19 nt, Artificial Sequence
  Description of Artificial Sequence: Synthetic oligonucleotide
gggaaaccccaagagaacu

SEQ ID NO: 561491 - RNA, 19 nt, Artificial Sequence
  Description of Artificial Sequence: Synthetic oligonucleotide
cuuaccccaaguagucaau

SEQ ID NO: 561492 - RNA, 19 nt, Artificial Sequence
  Description of Artificial Sequence: Synthetic oligonucleotide
ggacccguuuugaguagcc

SEQ ID NO: 561493 - RNA, 19 nt, Artificial Sequence
  Description of Artificial Sequence: Synthetic oligonucleotide
gcggcucaccccuucuaug

SEQ ID NO: 561494 - RNA, 19 nt, Artificial Sequence
  Description of Artificial Sequence: Synthetic oligonucleotide
acgaggccgcucaccacag

SEQ ID NO: 561495 - RNA, 19 nt, Artificial Sequence
  Description of Artificial Sequence: Synthetic oligonucleotide
cacacccggccuucaagaa

SEQ ID NO: 561496 - RNA, 19 nt, Artificial Sequence
  Description of Artificial Sequence: Synthetic oligonucleotide
ucccgcgcucagacggcac

SEQ ID NO: 561497 - RNA, 19 nt, Artificial Sequence
  Description of Artificial Sequence: Synthetic oligonucleotide
ccaccagccuguccuguag

SEQ ID NO: 561498 - RNA, 19 nt, Artificial Sequence
  Description of Artificial Sequence: Synthetic oligonucleotide
cacggaggacaggcgguac

SEQ ID NO: 561499 - RNA, 19 nt, Artificial Sequence
  Description of Artificial Sequence: Synthetic oligonucleotide
gggagguacuucucugcaa

SEQ ID NO: 561500 - RNA, 19 nt, Artificial Sequence
  Description of Artificial Sequence: Synthetic oligonucleotide
uccgaucaaggaggucgau

SEQ ID NO: 561501 - RNA, 19 nt, Artificial Sequence
  Description of Artificial Sequence: Synthetic oligonucleotide
ggcgguacacauccagugu

SEQ ID NO: 561502 - RNA, 19 nt, Artificial Sequence
  Description of Artificial Sequence: Synthetic oligonucleotide
gguaagcaugaagguccgc

SEQ ID NO: 561503 - RNA, 19 nt, Artificial Sequence
  Description of Artificial Sequence: Synthetic oligonucleotide
ccccaguaaacuuuaaguu

SEQ ID NO: 561504 - RNA, 19 nt, Artificial Sequence
  Description of Artificial Sequence: Synthetic oligonucleotide
guucgaaguucuagaaguu

SEQ ID NO: 561505 - RNA, 19 nt, Artificial Sequence
  Description of Artificial Sequence: Synthetic oligonucleotide
cugugccccaguaaacuuu

SEQ ID NO: 561506 - RNA, 19 nt, Artificial Sequence
  Description of Artificial Sequence: Synthetic oligonucleotide
acccugggaccaugggauu

SEQ ID NO: 561507 - RNA, 19 nt, Artificial Sequence
  Description of Artificial Sequence: Synthetic oligonucleotide
cgcucagacggcacccgcg

SEQ ID NO: 561508 - RNA, 19 nt, Artificial Sequence
  Description of Artificial Sequence: Synthetic oligonucleotide
uuuccccgugguggcugug

SEQ ID NO: 561509 - RNA, 19 nt, Artificial Sequence
  Description of Artificial Sequence: Synthetic oligonucleotide
ccccucggaaacuugggaa

SEQ ID NO: 561510 - RNA, 19 nt, Artificial Sequence
  Description of Artificial Sequence: Synthetic oligonucleotide
caaacuguacgaggccgcu

SEQ ID NO: 561511 - RNA, 19 nt, Artificial Sequence
  Description of Artificial Sequence: Synthetic oligonucleotide
gcacccgcgcccuuuucuc

SEQ ID NO: 561512 - RNA, 19 nt, Artificial Sequence
  Description of Artificial Sequence: Synthetic oligonucleotide
ggccagcuagcuaauguua

SEQ ID NO: 561513 - RNA, 19 nt, Artificial Sequence
  Description of Artificial Sequence: Synthetic oligonucleotide
gacaggcgguacacaucca

SEQ ID NO: 561514 - RNA, 19 nt, Artificial Sequence
  Description of Artificial Sequence: Synthetic oligonucleotide
cagugccuuugauaaacuu

SEQ ID NO: 561515 - RNA, 19 nt, Artificial Sequence
  Description of Artificial Sequence: Synthetic oligonucleotide
gccgggacgggaugauuuc

SEQ ID NO: 561516 - RNA, 19 nt, Artificial Sequence
  Description of Artificial Sequence: Synthetic oligonucleotide
gggaagcuugauagacuuc

SEQ ID NO: 561517 - RNA, 19 nt, Artificial Sequence
  Description of Artificial Sequence: Synthetic oligonucleotide
cgaucaaggaggucgauuu

SEQ ID NO: 561518 - RNA, 19 nt, Artificial Sequence
  Description of Artificial Sequence: Synthetic oligonucleotide
acccggccuucaagaaguc

SEQ ID NO: 561519 - RNA, 19 nt, Artificial Sequence
  Description of Artificial Sequence: Synthetic oligonucleotide
guucaaccuggcggcucac

SEQ ID NO: 561520 - RNA, 19 nt, Artificial Sequence
  Description of Artificial Sequence: Synthetic oligonucleotide
gguccgcaaacagaauugu

SEQ ID NO: 561521 - RNA, 19 nt, Artificial Sequence
  Description of Artificial Sequence: Synthetic oligonucleotide
cccgcgcucagacggcacc

SEQ ID NO: 561522 - RNA, 19 nt, Artificial Sequence
  Description of Artificial Sequence: Synthetic oligonucleotide
ccaguuccagguaaacggu

SEQ ID NO: 561523 - RNA, 19 nt, Artificial Sequence
  Description of Artificial Sequence: Synthetic oligonucleotide
gaagguccgcaaacagaau

SEQ ID NO: 561524 - RNA, 19 nt, Artificial Sequence
  Description of Artificial Sequence: Synthetic oligonucleotide
ggucgauuuuagacuccuc

SEQ ID NO: 561525 - RNA, 19 nt, Artificial Sequence
  Description of Artificial Sequence: Synthetic oligonucleotide
ccgggacgggaugauuucc

SEQ ID NO: 561526 - RNA, 19 nt, Artificial Sequence
  Description of Artificial Sequence: Synthetic oligonucleotide
ccaaggguacgccaaugcu

SEQ ID NO: 561527 - RNA, 19 nt, Artificial Sequence
  Description of Artificial Sequence: Synthetic oligonucleotide
guuuccccgugguggcugu

SEQ ID NO: 561528 - RNA, 19 nt, Artificial Sequence
  Description of Artificial Sequence: Synthetic oligonucleotide
acggcacccgcgcccuuuu

SEQ ID NO: 561529 - RNA, 19 nt, Artificial Sequence
  Description of Artificial Sequence: Synthetic oligonucleotide
ccaagccucaggguaggca

SEQ ID NO: 561530 - RNA, 19 nt, Artificial Sequence
  Description of Artificial Sequence: Synthetic oligonucleotide
gcugacgauuuugccuaca

SEQ ID NO: 561531 - RNA, 19 nt, Artificial Sequence
  Description of Artificial Sequence: Synthetic oligonucleotide
ggaacgggugacagaugaa

SEQ ID NO: 561532 - RNA, 19 nt, Artificial Sequence
  Description of Artificial Sequence: Synthetic oligonucleotide
ggcacccgcgcccuuuucu

SEQ ID NO: 561533 - RNA, 19 nt, Artificial Sequence
  Description of Artificial Sequence: Synthetic oligonucleotide
gcgcccuuuucucgcccgc

SEQ ID NO: 561534 - RNA, 19 nt, Artificial Sequence
  Description of Artificial Sequence: Synthetic oligonucleotide
cgcgcccuuuucucgcccg

SEQ ID NO: 561535 - RNA, 19 nt, Artificial Sequence
  Description of Artificial Sequence: Synthetic oligonucleotide
cggaggacaggcgguacac

SEQ ID NO: 561536 - RNA, 19 nt, Artificial Sequence
  Description of Artificial Sequence: Synthetic oligonucleotide
cgacgucaauuuucuccac

SEQ ID NO: 561537 - RNA, 19 nt, Artificial Sequence
  Description of Artificial Sequence: Synthetic oligonucleotide
guccgcaaacagaauuguu

SEQ ID NO: 561538 - RNA, 19 nt, Artificial Sequence
  Description of Artificial Sequence: Synthetic oligonucleotide
ccaaguccugggaacgggu

SEQ ID NO: 561539 - RNA, 19 nt, Artificial Sequence
  Description of Artificial Sequence: Synthetic oligonucleotide
cgauuuugccuacacggau

SEQ ID NO: 561540 - RNA, 19 nt, Artificial Sequence
  Description of Artificial Sequence: Synthetic oligonucleotide
ccgcgcucagacggcaccc

SEQ ID NO: 561541 - RNA, 19 nt, Artificial Sequence
  Description of Artificial Sequence: Synthetic oligonucleotide
cgcuucccgcgcucagacg

SEQ ID NO: 561542 - RNA, 19 nt, Artificial Sequence
  Description of Artificial Sequence: Synthetic oligonucleotide
cgcucaccacaguccuggg

SEQ ID NO: 561543 - RNA, 19 nt, Artificial Sequence
  Description of Artificial Sequence: Synthetic oligonucleotide
gggaguccacuccucucau

SEQ ID NO: 561544 - RNA, 19 nt, Artificial Sequence
  Description of Artificial Sequence: Synthetic oligonucleotide
agccaagcgcagggaggua

SEQ ID NO: 561545 - RNA, 19 nt, Artificial Sequence
  Description of Artificial Sequence: Synthetic oligonucleotide
ccuuccgaucaaggagguc

SEQ ID NO: 561546 - RNA, 19 nt, Artificial Sequence
  Description of Artificial Sequence: Synthetic oligonucleotide
ccgcgcccuuuucucgccc

SEQ ID NO: 561547 - RNA, 19 nt, Artificial Sequence
  Description of Artificial Sequence: Synthetic oligonucleotide
ccaagcgcagggagguacu

SEQ ID NO: 561548 - RNA, 19 nt, Artificial Sequence
  Description of Artificial Sequence: Synthetic oligonucleotide
gacggcacccgcgcccuuu

SEQ ID NO: 561549 - RNA, 19 nt, Artificial Sequence
  Description of Artificial Sequence: Synthetic oligonucleotide
gguaaacgguguaggucuu

SEQ ID NO: 561550 - RNA, 19 nt, Artificial Sequence
  Description of Artificial Sequence: Synthetic oligonucleotide
cgcugacgauuuugccuac

SEQ ID NO: 561551 - RNA, 19 nt, Artificial Sequence
  Description of Artificial Sequence: Synthetic oligonucleotide
ccuuguagucaggugggau

SEQ ID NO: 561552 - RNA, 19 nt, Artificial Sequence
  Description of Artificial Sequence: Synthetic oligonucleotide
agacggcacccgcgcccuu

SEQ ID NO: 561553 - RNA, 19 nt, Artificial Sequence
  Description of Artificial Sequence: Synthetic oligonucleotide
ccccgacgucaauuuucuc

SEQ ID NO: 561554 - RNA, 19 nt, Artificial Sequence
  Description of Artificial Sequence: Synthetic oligonucleotide
cggaaacuugggaaccggu

SEQ ID NO: 561555 - RNA, 19 nt, Artificial Sequence
  Description of Artificial Sequence: Synthetic oligonucleotide
caguuaacccugggaccau

SEQ ID NO: 561556 - RNA, 19 nt, Artificial Sequence
  Description of Artificial Sequence: Synthetic oligonucleotide
gcgcagggagguacuucuc

SEQ ID NO: 561557 - RNA, 19 nt, Artificial Sequence
  Description of Artificial Sequence: Synthetic oligonucleotide
cccggccuucaagaaguca

SEQ ID NO: 561558 - RNA, 19 nt, Artificial Sequence
  Description of Artificial Sequence: Synthetic oligonucleotide
cugagacgguagguagcau

SEQ ID NO: 561559 - RNA, 19 nt, Artificial Sequence
  Description of Artificial Sequence: Synthetic oligonucleotide
cgggacgggaugauuuccu

SEQ ID NO: 561560 - RNA, 19 nt, Artificial Sequence
  Description of Artificial Sequence: Synthetic oligonucleotide
ccgaucaaggaggucgauu

SEQ ID NO: 561561 - RNA, 19 nt, Artificial Sequence
  Description of Artificial Sequence: Synthetic oligonucleotide
ccacggaggacaggcggua

SEQ ID NO: 561562 - RNA, 19 nt, Artificial Sequence
  Description of Artificial Sequence: Synthetic oligonucleotide
ccacguugccuggcucaca

SEQ ID NO: 561563 - RNA, 19 nt, Artificial Sequence
  Description of Artificial Sequence: Synthetic oligonucleotide
cagcccugggaagcuugau

SEQ ID NO: 561564 - RNA, 19 nt, Artificial Sequence
  Description of Artificial Sequence: Synthetic oligonucleotide
ccacucaguaaaggguguu

SEQ ID NO: 561565 - RNA, 19 nt, Artificial Sequence
  Description of Artificial Sequence: Synthetic oligonucleotide
gcaccccagcuuggucaua

SEQ ID NO: 561566 - RNA, 19 nt, Artificial Sequence
  Description of Artificial Sequence: Synthetic oligonucleotide
uguucaauagucuuuggcc

SEQ ID NO: 561567 - RNA, 19 nt, Artificial Sequence
  Description of Artificial Sequence: Synthetic oligonucleotide
caaguuuuacuauugacgc

SEQ ID NO: 561568 - RNA, 19 nt, Artificial Sequence
  Description of Artificial Sequence: Synthetic oligonucleotide
ucaaugauagacuuggacu

SEQ ID NO: 561569 - RNA, 19 nt, Artificial Sequence
  Description of Artificial Sequence: Synthetic oligonucleotide
ucuacaauaaguucucuca

SEQ ID NO: 561570 - RNA, 19 nt, Artificial Sequence
  Description of Artificial Sequence: Synthetic oligonucleotide
aauaaguucucucauggaa

SEQ ID NO: 561571 - RNA, 19 nt, Artificial Sequence
  Description of Artificial Sequence: Synthetic oligonucleotide
aaauucuacaauaaguucu

SEQ ID NO: 561572 - RNA, 19 nt, Artificial Sequence
  Description of Artificial Sequence: Synthetic oligonucleotide
uuacuauugacgcuuguag

SEQ ID NO: 561573 - RNA, 19 nt, Artificial Sequence
  Description of Artificial Sequence: Synthetic oligonucleotide
ucuagauuagccucuaccc

SEQ ID NO: 561574 - RNA, 19 nt, Artificial Sequence
  Description of Artificial Sequence: Synthetic oligonucleotide
ugccuuaggaaccagcugg

SEQ ID NO: 561575 - RNA, 19 nt, Artificial Sequence
  Description of Artificial Sequence: Synthetic oligonucleotide
aucaaugauagacuuggac

SEQ ID NO: 561576 - RNA, 19 nt, Artificial Sequence
  Description of Artificial Sequence: Synthetic oligonucleotide
aauauggggaauaucaaug

SEQ ID NO: 561577 - RNA, 19 nt, Artificial Sequence
  Description of Artificial Sequence: Synthetic oligonucleotide
uguauuuugguuuccgagc

SEQ ID NO: 561578 - RNA, 19 nt, Artificial Sequence
  Description of Artificial Sequence: Synthetic oligonucleotide
ucuguuugcauagaaggcg

SEQ ID NO: 561579 - RNA, 19 nt, Artificial Sequence
  Description of Artificial Sequence: Synthetic oligonucleotide
ugaagcaugaaucgaauuc

SEQ ID NO: 561580 - RNA, 19 nt, Artificial Sequence
  Description of Artificial Sequence: Synthetic oligonucleotide
aaugcugugacagauuuga

SEQ ID NO: 561581 - RNA, 19 nt, Artificial Sequence
  Description of Artificial Sequence: Synthetic oligonucleotide
uguaggcgaacucaucugg

SEQ ID NO: 561582 - RNA, 19 nt, Artificial Sequence
  Description of Artificial Sequence: Synthetic oligonucleotide
guauuaguuauccucagac

SEQ ID NO: 561583 - RNA, 19 nt, Artificial Sequence
  Description of Artificial Sequence: Synthetic oligonucleotide
uuaguuauccucagacucc

SEQ ID NO: 561584 - RNA, 19 nt, Artificial Sequence
  Description of Artificial Sequence: Synthetic oligonucleotide
uucugauuucacuagcucc

SEQ ID NO: 561585 - RNA, 19 nt, Artificial Sequence
  Description of Artificial Sequence: Synthetic oligonucleotide
aaacggccgucauuaaagc

SEQ ID NO: 561586 - RNA, 19 nt, Artificial Sequence
  Description of Artificial Sequence: Synthetic oligonucleotide
uauaauagcugcuuugcaa

SEQ ID NO: 561587 - RNA, 19 nt, Artificial Sequence
  Description of Artificial Sequence: Synthetic oligonucleotide
acuauugacgcuuguagug

SEQ ID NO: 561588 - RNA, 19 nt, Artificial Sequence
  Description of Artificial Sequence: Synthetic oligonucleotide
agcugauacaguaaguggc

SEQ ID NO: 561589 - RNA, 19 nt, Artificial Sequence
  Description of Artificial Sequence: Synthetic oligonucleotide
aaagcucuaaggaauguag

SEQ ID NO: 561590 - RNA, 19 nt, Artificial Sequence
  Description of Artificial Sequence: Synthetic oligonucleotide
ucguuuguguauuugaagu

SEQ ID NO: 561591 - RNA, 19 nt, Artificial Sequence
  Description of Artificial Sequence: Synthetic oligonucleotide
ugugucugagucuagguac

SEQ ID NO: 561592 - RNA, 19 nt, Artificial Sequence
  Description of Artificial Sequence: Synthetic oligonucleotide
uguaggaacucaucaauga

SEQ ID NO: 561593 - RNA, 19 nt, Artificial Sequence
  Description of Artificial Sequence: Synthetic oligonucleotide
uagauuagccucuacccag

SEQ ID NO: 561594 - RNA, 19 nt, Artificial Sequence
  Description of Artificial Sequence: Synthetic oligonucleotide
ugaacaguauuccauccac

SEQ ID NO: 561595 - RNA, 19 nt, Artificial Sequence
  Description of Artificial Sequence: Synthetic oligonucleotide
caaacggccgucauuaaag

SEQ ID NO: 561596 - RNA, 19 nt, Artificial Sequence
  Description of Artificial Sequence: Synthetic oligonucleotide
aaggcgcaagauuucagag

SEQ ID NO: 561597 - RNA, 19 nt, Artificial Sequence
  Description of Artificial Sequence: Synthetic oligonucleotide
uggggaauaucaauggcca

SEQ ID NO: 561598 - RNA, 19 nt, Artificial Sequence
  Description of Artificial Sequence: Synthetic oligonucleotide
augaaucgaauucuggaug

SEQ ID NO: 561599 - RNA, 19 nt, Artificial Sequence
  Description of Artificial Sequence: Synthetic oligonucleotide
gggaaucaaacucuaaagg

SEQ ID NO: 561600 - RNA, 19 nt, Artificial Sequence
  Description of Artificial Sequence: Synthetic oligonucleotide
aaggaauguaggcgaacuc

SEQ ID NO: 561601 - RNA, 19 nt, Artificial Sequence
  Description of Artificial Sequence: Synthetic oligonucleotide
ugaaucgaauucuggaugu

SEQ ID NO: 561602 - RNA, 19 nt, Artificial Sequence
  Description of Artificial Sequence: Synthetic oligonucleotide
ugcauaaagugcuugcagu

SEQ ID NO: 561603 - RNA, 19 nt, Artificial Sequence
  Description of Artificial Sequence: Synthetic oligonucleotide
uccucuaugcacugcgugg

SEQ ID NO: 561604 - RNA, 19 nt, Artificial Sequence
  Description of Artificial Sequence: Synthetic oligonucleotide
ucggccucccuccauaagg

SEQ ID NO: 561605 - RNA, 19 nt, Artificial Sequence
  Description of Artificial Sequence: Synthetic oligonucleotide
ugguagaaaguccuuccag

SEQ ID NO: 561606 - RNA, 19 nt, Artificial Sequence
  Description of Artificial Sequence: Synthetic oligonucleotide
uaaguggcccaugugaucc

SEQ ID NO: 561607 - RNA, 19 nt, Artificial Sequence
  Description of Artificial Sequence: Synthetic oligonucleotide
gaaguauuaguuauccuca

SEQ ID NO: 561608 - RNA, 19 nt, Artificial Sequence
  Description of Artificial Sequence: Synthetic oligonucleotide
ucaaacucuaaaggugugg

SEQ ID NO: 561609 - RNA, 19 nt, Artificial Sequence
  Description of Artificial Sequence: Synthetic oligonucleotide
ucuuccaacgggaaguaaa

SEQ ID NO: 561610 - RNA, 19 nt, Artificial Sequence
  Description of Artificial Sequence: Synthetic oligonucleotide
acugugauuggcgaagacg

SEQ ID NO: 561611 - RNA, 19 nt, Artificial Sequence
  Description of Artificial Sequence: Synthetic oligonucleotide
ugugccuuaggaaccagcu

SEQ ID NO: 561612 - RNA, 19 nt, Artificial Sequence
  Description of Artificial Sequence: Synthetic oligonucleotide
guaaaggcuugcuaaauuc

SEQ ID NO: 561613 - RNA, 19 nt, Artificial Sequence
  Description of Artificial Sequence: Synthetic oligonucleotide
ucgggaaucaaacucuaaa

SEQ ID NO: 561614 - RNA, 19 nt, Artificial Sequence
  Description of Artificial Sequence: Synthetic oligonucleotide
ucuagaacucggcuguucu

SEQ ID NO: 561615 - RNA, 19 nt, Artificial Sequence
  Description of Artificial Sequence: Synthetic oligonucleotide
gucuagauuagccucuacc

SEQ ID NO: 561616 - RNA, 19 nt, Artificial Sequence
  Description of Artificial Sequence: Synthetic oligonucleotide
aacauccggagcaaauugg

SEQ ID NO: 561617 - RNA, 19 nt, Artificial Sequence
  Description of Artificial Sequence: Synthetic oligonucleotide
auugauauguaggaacuca

SEQ ID NO: 561618 - RNA, 19 nt, Artificial Sequence
  Description of Artificial Sequence: Synthetic oligonucleotide
uaucacguccugaagcaug

SEQ ID NO: 561619 - RNA, 19 nt, Artificial Sequence
  Description of Artificial Sequence: Synthetic oligonucleotide
agcuauaauagcugcuuug

SEQ ID NO: 561620 - RNA, 19 nt, Artificial Sequence
  Description of Artificial Sequence: Synthetic oligonucleotide
cugguuaaugcccuucggg

SEQ ID NO: 561621 - RNA, 19 nt, Artificial Sequence
  Description of Artificial Sequence: Synthetic oligonucleotide
acgcuuguagugcauaaag

SEQ ID NO: 561622 - RNA, 19 nt, Artificial Sequence
  Description of Artificial Sequence: Synthetic oligonucleotide
aaguuuuacuauugacgcu

SEQ ID NO: 561623 - RNA, 19 nt, Artificial Sequence
  Description of Artificial Sequence: Synthetic oligonucleotide
uccggagcaaauuggcagg

SEQ ID NO: 561624 - RNA, 19 nt, Artificial Sequence
  Description of Artificial Sequence: Synthetic oligonucleotide
uuucguuuguguauuugaa

SEQ ID NO: 561625 - RNA, 19 nt, Artificial Sequence
  Description of Artificial Sequence: Synthetic oligonucleotide
ugagucuagguacuugagu

SEQ ID NO: 561626 - RNA, 19 nt, Artificial Sequence
  Description of Artificial Sequence: Synthetic oligonucleotide
cacccaauuacacagccug

SEQ ID NO: 561627 - RNA, 19 nt, Artificial Sequence
  Description of Artificial Sequence: Synthetic oligonucleotide
aaaguguuggggcgggcug

SEQ ID NO: 561628 - RNA, 19 nt, Artificial Sequence
  Description of Artificial Sequence: Synthetic oligonucleotide
ccaaauauggggaauauca

SEQ ID NO: 561629 - RNA, 19 nt, Artificial Sequence
  Description of Artificial Sequence: Synthetic oligonucleotide
aauuuggaggggucuagaa

SEQ ID NO: 561630 - RNA, 19 nt, Artificial Sequence
  Description of Artificial Sequence: Synthetic oligonucleotide
aagcucuaaggaauguagg

SEQ ID NO: 561631 - RNA, 19 nt, Artificial Sequence
  Description of Artificial Sequence: Synthetic oligonucleotide
uacuauugacgcuuguagu

SEQ ID NO: 561632 - RNA, 19 nt, Artificial Sequence
  Description of Artificial Sequence: Synthetic oligonucleotide
ggcgcaagauuucagagag

SEQ ID NO: 561633 - RNA, 19 nt, Artificial Sequence
  Description of Artificial Sequence: Synthetic oligonucleotide
aaguuaugaguccucguuu

SEQ ID NO: 561634 - RNA, 19 nt, Artificial Sequence
  Description of Artificial Sequence: Synthetic oligonucleotide
uuuuaaguuaugaguccuc

SEQ ID NO: 561635 - RNA, 19 nt, Artificial Sequence
  Description of Artificial Sequence: Synthetic oligonucleotide
cagcugauacaguaagugg

SEQ ID NO: 561636 - RNA, 19 nt, Artificial Sequence
  Description of Artificial Sequence: Synthetic oligonucleotide
uagugcauaaagugcuugc

SEQ ID NO: 561637 - RNA, 19 nt, Artificial Sequence
  Description of Artificial Sequence: Synthetic oligonucleotide
gggacacccaauuacacag

SEQ ID NO: 561638 - RNA, 19 nt, Artificial Sequence
  Description of Artificial Sequence: Synthetic oligonucleotide
uugcuaaauucuacaauaa

SEQ ID NO: 561639 - RNA, 19 nt, Artificial Sequence
  Description of Artificial Sequence: Synthetic oligonucleotide
uucgggacacccaauuaca

SEQ ID NO: 561640 - RNA, 19 nt, Artificial Sequence
  Description of Artificial Sequence: Synthetic oligonucleotide
uuggcgaagacgugaaacu

SEQ ID NO: 561641 - RNA, 19 nt, Artificial Sequence
  Description of Artificial Sequence: Synthetic oligonucleotide
aacgccuggucuucucuuc

SEQ ID NO: 561642 - RNA, 19 nt, Artificial Sequence
  Description of Artificial Sequence: Synthetic oligonucleotide
uuauggcucaucuguuugc

SEQ ID NO: 561643 - RNA, 19 nt, Artificial Sequence
  Description of Artificial Sequence: Synthetic oligonucleotide
acguccugaagcaugaauc

SEQ ID NO: 561644 - RNA, 19 nt, Artificial Sequence
  Description of Artificial Sequence: Synthetic oligonucleotide
ugcccuucgggaaucaaac

SEQ ID NO: 561645 - RNA, 19 nt, Artificial Sequence
  Description of Artificial Sequence: Synthetic oligonucleotide
aguuuuacuauugacgcuu

SEQ ID NO: 561646 - RNA, 19 nt, Artificial Sequence
  Description of Artificial Sequence: Synthetic oligonucleotide
uuugcuccaccgcugcugc

SEQ ID NO: 561647 - RNA, 19 nt, Artificial Sequence
  Description of Artificial Sequence: Synthetic oligonucleotide
ucucgucuagauuagccuc

SEQ ID NO: 561648 - RNA, 19 nt, Artificial Sequence
  Description of Artificial Sequence: Synthetic oligonucleotide
aaauuggcagguuggucaa

SEQ ID NO: 561649 - RNA, 19 nt, Artificial Sequence
  Description of Artificial Sequence: Synthetic oligonucleotide
uuguguauuugaaguauua

SEQ ID NO: 561650 - RNA, 19 nt, Artificial Sequence
  Description of Artificial Sequence: Synthetic oligonucleotide
agguaggacagucagcuau

SEQ ID NO: 561651 - RNA, 19 nt, Artificial Sequence
  Description of Artificial Sequence: Synthetic oligonucleotide
guuucugcgagaguuggcc

SEQ ID NO: 561652 - RNA, 19 nt, Artificial Sequence
  Description of Artificial Sequence: Synthetic oligonucleotide
aguauuaguuauccucaga

SEQ ID NO: 561653 - RNA, 19 nt, Artificial Sequence
  Description of Artificial Sequence: Synthetic oligonucleotide
cuucgggacacccaauuac

SEQ ID NO: 561654 - RNA, 19 nt, Artificial Sequence
  Description of Artificial Sequence: Synthetic oligonucleotide
agcucccucgucuugcuuc

SEQ ID NO: 561655 - RNA, 19 nt, Artificial Sequence
  Description of Artificial Sequence: Synthetic oligonucleotide
ggaaguaaaggcuugcuaa

SEQ ID NO: 561656 - RNA, 19 nt, Artificial Sequence
  Description of Artificial Sequence: Synthetic oligonucleotide
gcuucggucagccucagag

SEQ ID NO: 561657 - RNA, 19 nt, Artificial Sequence
  Description of Artificial Sequence: Synthetic oligonucleotide
uuccucuaugcacugcgug

SEQ ID NO: 561658 - RNA, 19 nt, Artificial Sequence
  Description of Artificial Sequence: Synthetic oligonucleotide
uuuacuauugacgcuugua

SEQ ID NO: 561659 - RNA, 19 nt, Artificial Sequence
  Description of Artificial Sequence: Synthetic oligonucleotide
uagaacucggcuguucuug

SEQ ID NO: 561660 - RNA, 19 nt, Artificial Sequence
  Description of Artificial Sequence: Synthetic oligonucleotide
gaaauuuggaggggucuag

SEQ ID NO: 561661 - RNA, 19 nt, Artificial Sequence
  Description of Artificial Sequence: Synthetic oligonucleotide
aucacggcaguguccacuc

SEQ ID NO: 561662 - RNA, 19 nt, Artificial Sequence
  Description of Artificial Sequence: Synthetic oligonucleotide
gaaggcgcaagauuucaga

SEQ ID NO: 561663 - RNA, 19 nt, Artificial Sequence
  Description of Artificial Sequence: Synthetic oligonucleotide
aggaauguaggcgaacuca

SEQ ID NO: 561664 - RNA, 19 nt, Artificial Sequence
  Description of Artificial Sequence: Synthetic oligonucleotide
uauccacgccuccagucag

SEQ ID NO: 561665 - RNA, 19 nt, Artificial Sequence
  Description of Artificial Sequence: Synthetic oligonucleotide
agguuggucaaguuuuacu

SEQ ID NO: 561666 - RNA, 19 nt, Artificial Sequence
  Description of Artificial Sequence: Synthetic oligonucleotide
aguaaaggcuugcuaaauu

SEQ ID NO: 561667 - RNA, 19 nt, Artificial Sequence
  Description of Artificial Sequence: Synthetic oligonucleotide
uauugacgcuuguagugca

SEQ ID NO: 561668 - RNA, 19 nt, Artificial Sequence
  Description of Artificial Sequence: Synthetic oligonucleotide
acggccgucauuaaagcuc

SEQ ID NO: 561669 - RNA, 19 nt, Artificial Sequence
  Description of Artificial Sequence: Synthetic oligonucleotide
cagucagcuauaauagcug

SEQ ID NO: 561670 - RNA, 19 nt, Artificial Sequence
  Description of Artificial Sequence: Synthetic oligonucleotide
ggcgccuacuuucuuaugg

SEQ ID NO: 561671 - RNA, 19 nt, Artificial Sequence
  Description of Artificial Sequence: Synthetic oligonucleotide
aacggccgucauuaaagcu

SEQ ID NO: 561672 - RNA, 19 nt, Artificial Sequence
  Description of Artificial Sequence: Synthetic oligonucleotide
aguuaugaguccucguuua

SEQ ID NO: 561673 - RNA, 19 nt, Artificial Sequence
  Description of Artificial Sequence: Synthetic oligonucleotide
uccguauccacgccuccag

SEQ ID NO: 561674 - RNA, 19 nt, Artificial Sequence
  Description of Artificial Sequence: Synthetic oligonucleotide
ugcguggccuccuuaaagu

SEQ ID NO: 561675 - RNA, 19 nt, Artificial Sequence
  Description of Artificial Sequence: Synthetic oligonucleotide
acucuaaaggugugguuga

SEQ ID NO: 561676 - RNA, 19 nt, Artificial Sequence
  Description of Artificial Sequence: Synthetic oligonucleotide
uacaaccaaauauggggaa

SEQ ID NO: 561677 - RNA, 19 nt, Artificial Sequence
  Description of Artificial Sequence: Synthetic oligonucleotide
aggucuaucacguccugaa

SEQ ID NO: 561678 - RNA, 19 nt, Artificial Sequence
  Description of Artificial Sequence: Synthetic oligonucleotide
ggaaucaaacucuaaaggu

SEQ ID NO: 561679 - RNA, 19 nt, Artificial Sequence
  Description of Artificial Sequence: Synthetic oligonucleotide
ugauuggcgaagacgugaa

SEQ ID NO: 561680 - RNA, 19 nt, Artificial Sequence
  Description of Artificial Sequence: Synthetic oligonucleotide
aaggcgccuacuuucuuau

SEQ ID NO: 561681 - RNA, 19 nt, Artificial Sequence
  Description of Artificial Sequence: Synthetic oligonucleotide
ugugauuggcgaagacgug

SEQ ID NO: 561682 - RNA, 19 nt, Artificial Sequence
  Description of Artificial Sequence: Synthetic oligonucleotide
ucccacgacugguuaaugc

SEQ ID NO: 561683 - RNA, 19 nt, Artificial Sequence
  Description of Artificial Sequence: Synthetic oligonucleotide
uuccaacgggaaguaaagg

SEQ ID NO: 561684 - RNA, 19 nt, Artificial Sequence
  Description of Artificial Sequence: Synthetic oligonucleotide
aaacucuaaaggugugguu

SEQ ID NO: 561685 - RNA, 19 nt, Artificial Sequence
  Description of Artificial Sequence: Synthetic oligonucleotide
caguaaguggcccauguga

SEQ ID NO: 561686 - RNA, 19 nt, Artificial Sequence
  Description of Artificial Sequence: Synthetic oligonucleotide
agauuucagagagcaggac

SEQ ID NO: 561687 - RNA, 19 nt, Artificial Sequence
  Description of Artificial Sequence: Synthetic oligonucleotide
cuagauuagccucuaccca

SEQ ID NO: 561688 - RNA, 19 nt, Artificial Sequence
  Description of Artificial Sequence: Synthetic oligonucleotide
accaaauauggggaauauc

SEQ ID NO: 561689 - RNA, 19 nt, Artificial Sequence
  Description of Artificial Sequence: Synthetic oligonucleotide
cuugccuuugcuccaccgc

SEQ ID NO: 561690 - RNA, 19 nt, Artificial Sequence
  Description of Artificial Sequence: Synthetic oligonucleotide
gcucuaaggaauguaggcg

SEQ ID NO: 561691 - RNA, 19 nt, Artificial Sequence
  Description of Artificial Sequence: Synthetic oligonucleotide
uuaaagcucuaaggaaugu

SEQ ID NO: 561692 - RNA, 19 nt, Artificial Sequence
  Description of Artificial Sequence: Synthetic oligonucleotide
uuugcaaacggccgucauu

SEQ ID NO: 561693 - RNA, 19 nt, Artificial Sequence
  Description of Artificial Sequence: Synthetic oligonucleotide
gcuauaauagcugcuuugc

SEQ ID NO: 561694 - RNA, 19 nt, Artificial Sequence
  Description of Artificial Sequence: Synthetic oligonucleotide
cauagaaggcgcaagauuu

SEQ ID NO: 561695 - RNA, 19 nt, Artificial Sequence
  Description of Artificial Sequence: Synthetic oligonucleotide
aagcaugaaucgaauucug

SEQ ID NO: 561696 - RNA, 19 nt, Artificial Sequence
  Description of Artificial Sequence: Synthetic oligonucleotide
ugaacgccuggucuucucu

SEQ ID NO: 561697 - RNA, 19 nt, Artificial Sequence
  Description of Artificial Sequence: Synthetic oligonucleotide
uggacuuccucuccacuuc

SEQ ID NO: 561698 - RNA, 19 nt, Artificial Sequence
  Description of Artificial Sequence: Synthetic oligonucleotide
auagaaggcgcaagauuuc

SEQ ID NO: 561699 - RNA, 19 nt, Artificial Sequence
  Description of Artificial Sequence: Synthetic oligonucleotide
ggcacucucugcuugauca

SEQ ID NO: 561700 - RNA, 19 nt, Artificial Sequence
  Description of Artificial Sequence: Synthetic oligonucleotide
guacuugaguaagaugggc

SEQ ID NO: 561701 - RNA, 19 nt, Artificial Sequence
  Description of Artificial Sequence: Synthetic oligonucleotide
uagaaggcgcaagauuuca

SEQ ID NO: 561702 - RNA, 19 nt, Artificial Sequence
  Description of Artificial Sequence: Synthetic oligonucleotide
uccauaaggcgccuacuuu

SEQ ID NO: 561703 - RNA, 19 nt, Artificial Sequence
  Description of Artificial Sequence: Synthetic oligonucleotide
agauccgcucgucgucugc

SEQ ID NO: 561704 - RNA, 19 nt, Artificial Sequence
  Description of Artificial Sequence: Synthetic oligonucleotide
auguaggaacucaucaaug

SEQ ID NO: 561705 - RNA, 19 nt, Artificial Sequence
  Description of Artificial Sequence: Synthetic oligonucleotide
gcaugaaucgaauucugga

SEQ ID NO: 561706 - RNA, 19 nt, Artificial Sequence
  Description of Artificial Sequence: Synthetic oligonucleotide
agucuagguacuugaguaa

SEQ ID NO: 561707 - RNA, 19 nt, Artificial Sequence
  Description of Artificial Sequence: Synthetic oligonucleotide
ucgggacacccaauuacac

SEQ ID NO: 561708 - RNA, 19 nt, Artificial Sequence
  Description of Artificial Sequence: Synthetic oligonucleotide
uccccuucugguagaaagu

SEQ ID NO: 561709 - RNA, 19 nt, Artificial Sequence
  Description of Artificial Sequence: Synthetic oligonucleotide
ucggaagguaggacaguca

SEQ ID NO: 561710 - RNA, 19 nt, Artificial Sequence
  Description of Artificial Sequence: Synthetic oligonucleotide
acgggaaguaaaggcuugc

SEQ ID NO: 561711 - RNA, 19 nt, Artificial Sequence
  Description of Artificial Sequence: Synthetic oligonucleotide
augugaucccuggugaucu

SEQ ID NO: 561712 - RNA, 19 nt, Artificial Sequence
  Description of Artificial Sequence: Synthetic oligonucleotide
aaccaaauauggggaauau

SEQ ID NO: 561713 - RNA, 19 nt, Artificial Sequence
  Description of Artificial Sequence: Synthetic oligonucleotide
uaaggcgccuacuuucuua

SEQ ID NO: 561714 - RNA, 19 nt, Artificial Sequence
  Description of Artificial Sequence: Synthetic oligonucleotide
gguacuugaguaagauggg

SEQ ID NO: 561715 - RNA, 19 nt, Artificial Sequence
  Description of Artificial Sequence: Synthetic oligonucleotide
aggcgcaagauuucagaga

SEQ ID NO: 561716 - RNA, 19 nt, Artificial Sequence
  Description of Artificial Sequence: Synthetic oligonucleotide
uuucugcgagaguuggccu

SEQ ID NO: 561717 - RNA, 19 nt, Artificial Sequence
  Description of Artificial Sequence: Synthetic oligonucleotide
cuauaauagcugcuuugca

SEQ ID NO: 561718 - RNA, 19 nt, Artificial Sequence
  Description of Artificial Sequence: Synthetic oligonucleotide
gcugcucucccauuuguag

SEQ ID NO: 561719 - RNA, 19 nt, Artificial Sequence
  Description of Artificial Sequence: Synthetic oligonucleotide
guagugcauaaagugcuug

SEQ ID NO: 561720 - RNA, 19 nt, Artificial Sequence
  Description of Artificial Sequence: Synthetic oligonucleotide
ucuucgggacacccaauua

SEQ ID NO: 561721 - RNA, 19 nt, Artificial Sequence
  Description of Artificial Sequence: Synthetic oligonucleotide
gggaauaucaauggccaug

SEQ ID NO: 561722 - RNA, 19 nt, Artificial Sequence
  Description of Artificial Sequence: Synthetic oligonucleotide
uggucauuagcugcuggac

SEQ ID NO: 561723 - RNA, 19 nt, Artificial Sequence
  Description of Artificial Sequence: Synthetic oligonucleotide
ugcgacugauuguccagca

SEQ ID NO: 561724 - RNA, 19 nt, Artificial Sequence
  Description of Artificial Sequence: Synthetic oligonucleotide
cacucgugcacacgugggg

SEQ ID NO: 561725 - RNA, 19 nt, Artificial Sequence
  Description of Artificial Sequence: Synthetic oligonucleotide
guuucgcuugccuuugcuc

SEQ ID NO: 561726 - RNA, 19 nt, Artificial Sequence
  Description of Artificial Sequence: Synthetic oligonucleotide
caaugauagacuuggacuu

SEQ ID NO: 561727 - RNA, 19 nt, Artificial Sequence
  Description of Artificial Sequence: Synthetic oligonucleotide
guguccacucggaagguag

SEQ ID NO: 561728 - RNA, 19 nt, Artificial Sequence
  Description of Artificial Sequence: Synthetic oligonucleotide
cagcugugccuuaggaacc

SEQ ID NO: 561729 - RNA, 19 nt, Artificial Sequence
  Description of Artificial Sequence: Synthetic oligonucleotide
uucgcuugccuuugcucca

SEQ ID NO: 561730 - RNA, 19 nt, Artificial Sequence
  Description of Artificial Sequence: Synthetic oligonucleotide
ugacgcuuguagugcauaa

SEQ ID NO: 561731 - RNA, 19 nt, Artificial Sequence
  Description of Artificial Sequence: Synthetic oligonucleotide
guauccacgccuccaguca

SEQ ID NO: 561732 - RNA, 19 nt, Artificial Sequence
  Description of Artificial Sequence: Synthetic oligonucleotide
aggggucuagaacucggcu

SEQ ID NO: 561733 - RNA, 19 nt, Artificial Sequence
  Description of Artificial Sequence: Synthetic oligonucleotide
caggaaaguguuggggcgg

SEQ ID NO: 561734 - RNA, 19 nt, Artificial Sequence
  Description of Artificial Sequence: Synthetic oligonucleotide
ucuaugcacugcguggccu

SEQ ID NO: 561735 - RNA, 19 nt, Artificial Sequence
  Description of Artificial Sequence: Synthetic oligonucleotide
uggcucucgucuagauuag

SEQ ID NO: 561736 - RNA, 19 nt, Artificial Sequence
  Description of Artificial Sequence: Synthetic oligonucleotide
cccacgacugguuaaugcc

SEQ ID NO: 561737 - RNA, 19 nt, Artificial Sequence
  Description of Artificial Sequence: Synthetic oligonucleotide
aagauccgcucgucgucug

SEQ ID NO: 561738 - RNA, 19 nt, Artificial Sequence
  Description of Artificial Sequence: Synthetic oligonucleotide
gggugacuaguucagccag

SEQ ID NO: 561739 - RNA, 19 nt, Artificial Sequence
  Description of Artificial Sequence: Synthetic oligonucleotide
cauccacucuuugaacgcc

SEQ ID NO: 561740 - RNA, 19 nt, Artificial Sequence
  Description of Artificial Sequence: Synthetic oligonucleotide
gugauuggcgaagacguga

SEQ ID NO: 561741 - RNA, 19 nt, Artificial Sequence
  Description of Artificial Sequence: Synthetic oligonucleotide
uucgggaaucaaacucuaa

SEQ ID NO: 561742 - RNA, 19 nt, Artificial Sequence
  Description of Artificial Sequence: Synthetic oligonucleotide
cucgucuugcuucggucag

SEQ ID NO: 561743 - RNA, 19 nt, Artificial Sequence
  Description of Artificial Sequence: Synthetic oligonucleotide
cuacccagucaaagauccg

SEQ ID NO: 561744 - RNA, 19 nt, Artificial Sequence
  Description of Artificial Sequence: Synthetic oligonucleotide
ucugcgagaguuggccuug

SEQ ID NO: 561745 - RNA, 19 nt, Artificial Sequence
  Description of Artificial Sequence: Synthetic oligonucleotide
cgggaaucaaacucuaaag

SEQ ID NO: 561746 - RNA, 19 nt, Artificial Sequence
  Description of Artificial Sequence: Synthetic oligonucleotide
ccuugaacaguauuccauc

SEQ ID NO: 561747 - RNA, 19 nt, Artificial Sequence
  Description of Artificial Sequence: Synthetic oligonucleotide
ucuccguauccacgccucc

SEQ ID NO: 561748 - RNA, 19 nt, Artificial Sequence
  Description of Artificial Sequence: Synthetic oligonucleotide
acaguauuccauccaccuu

SEQ ID NO: 561749 - RNA, 19 nt, Artificial Sequence
  Description of Artificial Sequence: Synthetic oligonucleotide
guuuuacuauugacgcuug

SEQ ID NO: 561750 - RNA, 19 nt, Artificial Sequence
  Description of Artificial Sequence: Synthetic oligonucleotide
ccauaaggcgccuacuuuc

SEQ ID NO: 561751 - RNA, 19 nt, Artificial Sequence
  Description of Artificial Sequence: Synthetic oligonucleotide
cuaaggaauguaggcgaac

SEQ ID NO: 561752 - RNA, 19 nt, Artificial Sequence
  Description of Artificial Sequence: Synthetic oligonucleotide
aucgaauucuggauguaau

SEQ ID NO: 561753 - RNA, 19 nt, Artificial Sequence
  Description of Artificial Sequence: Synthetic oligonucleotide
ccagcugauacaguaagug

SEQ ID NO: 561754 - RNA, 19 nt, Artificial Sequence
  Description of Artificial Sequence: Synthetic oligonucleotide
cgacugauuguccagcagg

SEQ ID NO: 561755 - RNA, 19 nt, Artificial Sequence
  Description of Artificial Sequence: Synthetic oligonucleotide
cacgugggguuucugcgag

SEQ ID NO: 561756 - RNA, 19 nt, Artificial Sequence
  Description of Artificial Sequence: Synthetic oligonucleotide
cuaugcacugcguggccuc

SEQ ID NO: 561757 - RNA, 19 nt, Artificial Sequence
  Description of Artificial Sequence: Synthetic oligonucleotide
gauuagccucuacccaguc

SEQ ID NO: 561758 - RNA, 19 nt, Artificial Sequence
  Description of Artificial Sequence: Synthetic oligonucleotide
guaggcgaacucaucuggc

SEQ ID NO: 561759 - RNA, 19 nt, Artificial Sequence
  Description of Artificial Sequence: Synthetic oligonucleotide
ggugaauuccacacccacc

SEQ ID NO: 561760 - RNA, 19 nt, Artificial Sequence
  Description of Artificial Sequence: Synthetic oligonucleotide
acacgugggguuucugcga

SEQ ID NO: 561761 - RNA, 19 nt, Artificial Sequence
  Description of Artificial Sequence: Synthetic oligonucleotide
uucugcgagaguuggccuu

SEQ ID NO: 561762 - RNA, 19 nt, Artificial Sequence
  Description of Artificial Sequence: Synthetic oligonucleotide
ccgucauuaaagcucuaag

SEQ ID NO: 561763 - RNA, 19 nt, Artificial Sequence
  Description of Artificial Sequence: Synthetic oligonucleotide
agaaggcgcaagauuucag

SEQ ID NO: 561764 - RNA, 19 nt, Artificial Sequence
  Description of Artificial Sequence: Synthetic oligonucleotide
cucggaagguaggacaguc

SEQ ID NO: 561765 - RNA, 19 nt, Artificial Sequence
  Description of Artificial Sequence: Synthetic oligonucleotide
cucuaugcacugcguggcc

SEQ ID NO: 561766 - RNA, 19 nt, Artificial Sequence
  Description of Artificial Sequence: Synthetic oligonucleotide
agggccacgcccuucccgu

SEQ ID NO: 561767 - RNA, 19 nt, Artificial Sequence
  Description of Artificial Sequence: Synthetic oligonucleotide
gugccuuaggaaccagcug

SEQ ID NO: 561768 - RNA, 19 nt, Artificial Sequence
  Description of Artificial Sequence: Synthetic oligonucleotide
guuaugaguccucguuuaa

SEQ ID NO: 561769 - RNA, 19 nt, Artificial Sequence
  Description of Artificial Sequence: Synthetic oligonucleotide
cucuccguauccacgccuc

SEQ ID NO: 561770 - RNA, 19 nt, Artificial Sequence
  Description of Artificial Sequence: Synthetic oligonucleotide
ugugaucccuggugaucug

SEQ ID NO: 561771 - RNA, 19 nt, Artificial Sequence
  Description of Artificial Sequence: Synthetic oligonucleotide
gguuaaugcccuucgggaa

SEQ ID NO: 561772 - RNA, 19 nt, Artificial Sequence
  Description of Artificial Sequence: Synthetic oligonucleotide
cugguagaaaguccuucca

SEQ ID NO: 561773 - RNA, 19 nt, Artificial Sequence
  Description of Artificial Sequence: Synthetic oligonucleotide
guuaaugcccuucgggaau

SEQ ID NO: 561774 - RNA, 19 nt, Artificial Sequence
  Description of Artificial Sequence: Synthetic oligonucleotide
cuuugaacgccuggucuuc

SEQ ID NO: 561775 - RNA, 19 nt, Artificial Sequence
  Description of Artificial Sequence: Synthetic oligonucleotide
uuugaacgccuggucuucu

SEQ ID NO: 561776 - RNA, 19 nt, Artificial Sequence
  Description of Artificial Sequence: Synthetic oligonucleotide
ccacgacugguuaaugccc

SEQ ID NO: 561777 - RNA, 19 nt, Artificial Sequence
  Description of Artificial Sequence: Synthetic oligonucleotide
uaugcacugcguggccucc

SEQ ID NO: 561778 - RNA, 19 nt, Artificial Sequence
  Description of Artificial Sequence: Synthetic oligonucleotide
ccgaggaacaggaacuuuc

SEQ ID NO: 561779 - RNA, 19 nt, Artificial Sequence
  Description of Artificial Sequence: Synthetic oligonucleotide
ucccgcagccacgugaaaa

SEQ ID NO: 561780 - RNA, 19 nt, Artificial Sequence
  Description of Artificial Sequence: Synthetic oligonucleotide
cugcgacugauuguccagc

SEQ ID NO: 561781 - RNA, 19 nt, Artificial Sequence
  Description of Artificial Sequence: Synthetic oligonucleotide
aacaugcagugggcccugg

SEQ ID NO: 561782 - RNA, 19 nt, Artificial Sequence
  Description of Artificial Sequence: Synthetic oligonucleotide
cccuucgggaaucaaacuc

SEQ ID NO: 561783 - RNA, 19 nt, Artificial Sequence
  Description of Artificial Sequence: Synthetic oligonucleotide
ugcuuugcaaacggccguc

SEQ ID NO: 561784 - RNA, 19 nt, Artificial Sequence
  Description of Artificial Sequence: Synthetic oligonucleotide
agauuagccucuacccagu

SEQ ID NO: 561785 - RNA, 19 nt, Artificial Sequence
  Description of Artificial Sequence: Synthetic oligonucleotide
ucccacucgugcacacgug

SEQ ID NO: 561786 - RNA, 19 nt, Artificial Sequence
  Description of Artificial Sequence: Synthetic oligonucleotide
caaacucuaaagguguggu

SEQ ID NO: 561787 - RNA, 19 nt, Artificial Sequence
  Description of Artificial Sequence: Synthetic oligonucleotide
ugacuaguucagccaggua

SEQ ID NO: 561788 - RNA, 19 nt, Artificial Sequence
  Description of Artificial Sequence: Synthetic oligonucleotide
cucucgucuagauuagccu

SEQ ID NO: 561789 - RNA, 19 nt, Artificial Sequence
  Description of Artificial Sequence: Synthetic oligonucleotide
gcuugccuuugcuccaccg

SEQ ID NO: 561790 - RNA, 19 nt, Artificial Sequence
  Description of Artificial Sequence: Synthetic oligonucleotide
ggugacuaguucagccagg

SEQ ID NO: 561791 - RNA, 19 nt, Artificial Sequence
  Description of Artificial Sequence: Synthetic oligonucleotide
uuugccccagcugcccagc

SEQ ID NO: 561792 - RNA, 19 nt, Artificial Sequence
  Description of Artificial Sequence: Synthetic oligonucleotide
uugacgcuuguagugcaua

SEQ ID NO: 561793 - RNA, 19 nt, Artificial Sequence
  Description of Artificial Sequence: Synthetic oligonucleotide
acgcccuucccguucugcu

SEQ ID NO: 561794 - RNA, 19 nt, Artificial Sequence
  Description of Artificial Sequence: Synthetic oligonucleotide
gcgccuacuuucuuauggc

SEQ ID NO: 561795 - RNA, 19 nt, Artificial Sequence
  Description of Artificial Sequence: Synthetic oligonucleotide
gcucccucgucuugcuucg

SEQ ID NO: 561796 - RNA, 19 nt, Artificial Sequence
  Description of Artificial Sequence: Synthetic oligonucleotide
acgccuggucuucucuucu

SEQ ID NO: 561797 - RNA, 19 nt, Artificial Sequence
  Description of Artificial Sequence: Synthetic oligonucleotide
cauaaggcgccuacuuucu

SEQ ID NO: 561798 - RNA, 19 nt, Artificial Sequence
  Description of Artificial Sequence: Synthetic oligonucleotide
auccacgccuccagucagc

SEQ ID NO: 561799 - RNA, 19 nt, Artificial Sequence
  Description of Artificial Sequence: Synthetic oligonucleotide
caucaaugauagacuugga

SEQ ID NO: 561800 - RNA, 19 nt, Artificial Sequence
  Description of Artificial Sequence: Synthetic oligonucleotide
caaccaaauauggggaaua

SEQ ID NO: 561801 - RNA, 19 nt, Artificial Sequence
  Description of Artificial Sequence: Synthetic oligonucleotide
ugcgagaguuggccuugcu

SEQ ID NO: 561802 - RNA, 19 nt, Artificial Sequence
  Description of Artificial Sequence: Synthetic oligonucleotide
aaugcccuucgggaaucaa

SEQ ID NO: 561803 - RNA, 19 nt, Artificial Sequence
  Description of Artificial Sequence: Synthetic oligonucleotide
cccacucgugcacacgugg

SEQ ID NO: 561804 - RNA, 19 nt, Artificial Sequence
  Description of Artificial Sequence: Synthetic oligonucleotide
gccccuugaacaguauucc

SEQ ID NO: 561805 - RNA, 19 nt, Artificial Sequence
  Description of Artificial Sequence: Synthetic oligonucleotide
gaggucuaucacguccuga

SEQ ID NO: 561806 - RNA, 19 nt, Artificial Sequence
  Description of Artificial Sequence: Synthetic oligonucleotide
acugcguggccuccuuaaa

SEQ ID NO: 561807 - RNA, 19 nt, Artificial Sequence
  Description of Artificial Sequence: Synthetic oligonucleotide
ucgucuugcuucggucagc

SEQ ID NO: 561808 - RNA, 19 nt, Artificial Sequence
  Description of Artificial Sequence: Synthetic oligonucleotide
cagguuggucaaguuuuac

SEQ ID NO: 561809 - RNA, 19 nt, Artificial Sequence
  Description of Artificial Sequence: Synthetic oligonucleotide
cucgucuagauuagccucu

SEQ ID NO: 561810 - RNA, 19 nt, Artificial Sequence
  Description of Artificial Sequence: Synthetic oligonucleotide
gauuggcgaagacgugaaa

SEQ ID NO: 561811 - RNA, 19 nt, Artificial Sequence
  Description of Artificial Sequence: Synthetic oligonucleotide
cuucgggaaucaaacucua

SEQ ID NO: 561812 - RNA, 19 nt, Artificial Sequence
  Description of Artificial Sequence: Synthetic oligonucleotide
gggaaguaaaggcuugcua

SEQ ID NO: 561813 - RNA, 19 nt, Artificial Sequence
  Description of Artificial Sequence: Synthetic oligonucleotide
gacgcuuguagugcauaaa

SEQ ID NO: 561814 - RNA, 19 nt, Artificial Sequence
  Description of Artificial Sequence: Synthetic oligonucleotide
auaaggcgccuacuuucuu

SEQ ID NO: 561815 - RNA, 19 nt, Artificial Sequence
  Description of Artificial Sequence: Synthetic oligonucleotide
ccugcgacugauuguccag

SEQ ID NO: 561816 - RNA, 19 nt, Artificial Sequence
  Description of Artificial Sequence: Synthetic oligonucleotide
cugcccaugcucccacgac

SEQ ID NO: 561817 - RNA, 19 nt, Artificial Sequence
  Description of Artificial Sequence: Synthetic oligonucleotide
ucucuacgcugcuccuccu

SEQ ID NO: 561818 - RNA, 19 nt, Artificial Sequence
  Description of Artificial Sequence: Synthetic oligonucleotide
cuucccgcagccacgugaa

SEQ ID NO: 561819 - RNA, 19 nt, Artificial Sequence
  Description of Artificial Sequence: Synthetic oligonucleotide
cuagguacuugaguaagau

SEQ ID NO: 561820 - RNA, 19 nt, Artificial Sequence
  Description of Artificial Sequence: Synthetic oligonucleotide
uccgcucgucgucugcuuu

SEQ ID NO: 561821 - RNA, 19 nt, Artificial Sequence
  Description of Artificial Sequence: Synthetic oligonucleotide
ggucauuagcugcuggacu

SEQ ID NO: 561822 - RNA, 19 nt, Artificial Sequence
  Description of Artificial Sequence: Synthetic oligonucleotide
ccacucgugcacacguggg

SEQ ID NO: 561823 - RNA, 19 nt, Artificial Sequence
  Description of Artificial Sequence: Synthetic oligonucleotide
acacccaauuacacagccu

SEQ ID NO: 561824 - RNA, 19 nt, Artificial Sequence
  Description of Artificial Sequence: Synthetic oligonucleotide
gcgacugauuguccagcag

SEQ ID NO: 561825 - RNA, 19 nt, Artificial Sequence
  Description of Artificial Sequence: Synthetic oligonucleotide
gcccucuccguauccacgc

SEQ ID NO: 561826 - RNA, 19 nt, Artificial Sequence
  Description of Artificial Sequence: Synthetic oligonucleotide
acccaauuacacagccuga

SEQ ID NO: 561827 - RNA, 19 nt, Artificial Sequence
  Description of Artificial Sequence: Synthetic oligonucleotide
gucuagaacucggcuguuc

SEQ ID NO: 561828 - RNA, 19 nt, Artificial Sequence
  Description of Artificial Sequence: Synthetic oligonucleotide
ccuccugcgacugauuguc

SEQ ID NO: 561829 - RNA, 19 nt, Artificial Sequence
  Description of Artificial Sequence: Synthetic oligonucleotide
caguuucgcuugccuuugc

SEQ ID NO: 561830 - RNA, 19 nt, Artificial Sequence
  Description of Artificial Sequence: Synthetic oligonucleotide
ccaacgggaaguaaaggcu

SEQ ID NO: 561831 - RNA, 19 nt, Artificial Sequence
  Description of Artificial Sequence: Synthetic oligonucleotide
augcccuucgggaaucaaa

SEQ ID NO: 561832 - RNA, 19 nt, Artificial Sequence
  Description of Artificial Sequence: Synthetic oligonucleotide
ccugaucugcucuucggga

SEQ ID NO: 561833 - RNA, 19 nt, Artificial Sequence
  Description of Artificial Sequence: Synthetic oligonucleotide
gcaaacggccgucauuaaa

SEQ ID NO: 561834 - RNA, 19 nt, Artificial Sequence
  Description of Artificial Sequence: Synthetic oligonucleotide
ugcacugcguggccuccuu

SEQ ID NO: 561835 - RNA, 19 nt, Artificial Sequence
  Description of Artificial Sequence: Synthetic oligonucleotide
aggucggccucccuccaua

SEQ ID NO: 561836 - RNA, 19 nt, Artificial Sequence
  Description of Artificial Sequence: Synthetic oligonucleotide
auugacgcuuguagugcau

SEQ ID NO: 561837 - RNA, 19 nt, Artificial Sequence
  Description of Artificial Sequence: Synthetic oligonucleotide
acucggaagguaggacagu

SEQ ID NO: 561838 - RNA, 19 nt, Artificial Sequence
  Description of Artificial Sequence: Synthetic oligonucleotide
ggcgaacucaucuggcucu

SEQ ID NO: 561839 - RNA, 19 nt, Artificial Sequence
  Description of Artificial Sequence: Synthetic oligonucleotide
aggcgccuacuuucuuaug

SEQ ID NO: 561840 - RNA, 19 nt, Artificial Sequence
  Description of Artificial Sequence: Synthetic oligonucleotide
gcaguuucgcuugccuuug

SEQ ID NO: 561841 - RNA, 19 nt, Artificial Sequence
  Description of Artificial Sequence: Synthetic oligonucleotide
ugcuucggucagccucaga

SEQ ID NO: 561842 - RNA, 19 nt, Artificial Sequence
  Description of Artificial Sequence: Synthetic oligonucleotide
cacgcccuucccguucugc

SEQ ID NO: 561843 - RNA, 19 nt, Artificial Sequence
  Description of Artificial Sequence: Synthetic oligonucleotide
ccuucgggaaucaaacucu

SEQ ID NO: 561844 - RNA, 19 nt, Artificial Sequence
  Description of Artificial Sequence: Synthetic oligonucleotide
acgacugguuaaugcccuu

SEQ ID NO: 561845 - RNA, 19 nt, Artificial Sequence
  Description of Artificial Sequence: Synthetic oligonucleotide
cguauccacgccuccaguc

SEQ ID NO: 561846 - RNA, 19 nt, Artificial Sequence
  Description of Artificial Sequence: Synthetic oligonucleotide
ucgcuugccuuugcuccac

SEQ ID NO: 561847 - RNA, 19 nt, Artificial Sequence
  Description of Artificial Sequence: Synthetic oligonucleotide
cugaagcaugaaucgaauu

SEQ ID NO: 561848 - RNA, 19 nt, Artificial Sequence
  Description of Artificial Sequence: Synthetic oligonucleotide
ggugcaguuucgcuugccu

SEQ ID NO: 561849 - RNA, 19 nt, Artificial Sequence
  Description of Artificial Sequence: Synthetic oligonucleotide
gcauagaaggcgcaagauu

SEQ ID NO: 561850 - RNA, 19 nt, Artificial Sequence
  Description of Artificial Sequence: Synthetic oligonucleotide
cccuccauaaggcgccuac

SEQ ID NO: 561851 - RNA, 19 nt, Artificial Sequence
  Description of Artificial Sequence: Synthetic oligonucleotide
uuccgagcucccgcccuca

SEQ ID NO: 561852 - RNA, 19 nt, Artificial Sequence
  Description of Artificial Sequence: Synthetic oligonucleotide
gaacgccuggucuucucuu

SEQ ID NO: 561853 - RNA, 19 nt, Artificial Sequence
  Description of Artificial Sequence: Synthetic oligonucleotide
cuccauaaggcgccuacuu

SEQ ID NO: 561854 - RNA, 19 nt, Artificial Sequence
  Description of Artificial Sequence: Synthetic oligonucleotide
cucccacgacugguuaaug

SEQ ID NO: 561855 - RNA, 19 nt, Artificial Sequence
  Description of Artificial Sequence: Synthetic oligonucleotide
gcccaugcucccacgacug

SEQ ID NO: 561856 - RNA, 19 nt, Artificial Sequence
  Description of Artificial Sequence: Synthetic oligonucleotide
cuccguauccacgccucca

SEQ ID NO: 561857 - RNA, 19 nt, Artificial Sequence
  Description of Artificial Sequence: Synthetic oligonucleotide
gguaggacagucagcuaua

SEQ ID NO: 561858 - RNA, 19 nt, Artificial Sequence
  Description of Artificial Sequence: Synthetic oligonucleotide
uuggggcgggcugcuccag

SEQ ID NO: 561859 - RNA, 19 nt, Artificial Sequence
  Description of Artificial Sequence: Synthetic oligonucleotide
cacguccugaagcaugaau

SEQ ID NO: 561860 - RNA, 19 nt, Artificial Sequence
  Description of Artificial Sequence: Synthetic oligonucleotide
gagcucccgcccucagguc

SEQ ID NO: 561861 - RNA, 19 nt, Artificial Sequence
  Description of Artificial Sequence: Synthetic oligonucleotide
cucuucgggacacccaauu

SEQ ID NO: 561862 - RNA, 19 nt, Artificial Sequence
  Description of Artificial Sequence: Synthetic oligonucleotide
cgucuugcuucggucagcc

SEQ ID NO: 561863 - RNA, 19 nt, Artificial Sequence
  Description of Artificial Sequence: Synthetic oligonucleotide
gcucucccauuuguagaag

SEQ ID NO: 561864 - RNA, 19 nt, Artificial Sequence
  Description of Artificial Sequence: Synthetic oligonucleotide
cugcgagaguuggccuugc

SEQ ID NO: 561865 - RNA, 19 nt, Artificial Sequence
  Description of Artificial Sequence: Synthetic oligonucleotide
auccgcucgucgucugcuu

SEQ ID NO: 561866 - RNA, 19 nt, Artificial Sequence
  Description of Artificial Sequence: Synthetic oligonucleotide
caguuggaaguggcuuguc

SEQ ID NO: 561867 - RNA, 19 nt, Artificial Sequence
  Description of Artificial Sequence: Synthetic oligonucleotide
cccucgucuugcuucgguc

SEQ ID NO: 561868 - RNA, 19 nt, Artificial Sequence
  Description of Artificial Sequence: Synthetic oligonucleotide
cuagaacucggcuguucuu

SEQ ID NO: 561869 - RNA, 19 nt, Artificial Sequence
  Description of Artificial Sequence: Synthetic oligonucleotide
gccgucauuaaagcucuaa

SEQ ID NO: 561870 - RNA, 19 nt, Artificial Sequence
  Description of Artificial Sequence: Synthetic oligonucleotide
caucuggcucucgucuaga

SEQ ID NO: 561871 - RNA, 19 nt, Artificial Sequence
  Description of Artificial Sequence: Synthetic oligonucleotide
cuuugcaaacggccgucau

SEQ ID NO: 561872 - RNA, 19 nt, Artificial Sequence
  Description of Artificial Sequence: Synthetic oligonucleotide
cccaugcucccacgacugg

SEQ ID NO: 561873 - RNA, 19 nt, Artificial Sequence
  Description of Artificial Sequence: Synthetic oligonucleotide
ggcucucgucuagauuagc

SEQ ID NO: 561874 - RNA, 19 nt, Artificial Sequence
  Description of Artificial Sequence: Synthetic oligonucleotide
ccccuugaacaguauucca

SEQ ID NO: 561875 - RNA, 19 nt, Artificial Sequence
  Description of Artificial Sequence: Synthetic oligonucleotide
gccuuaggaaccagcugga

SEQ ID NO: 561876 - RNA, 19 nt, Artificial Sequence
  Description of Artificial Sequence: Synthetic oligonucleotide
cucccucgucuugcuucgg

SEQ ID NO: 561877 - RNA, 19 nt, Artificial Sequence
  Description of Artificial Sequence: Synthetic oligonucleotide
gagcuggcccucuccguau

SEQ ID NO: 561878 - RNA, 19 nt, Artificial Sequence
  Description of Artificial Sequence: Synthetic oligonucleotide
augcacugcguggccuccu

SEQ ID NO: 561879 - RNA, 19 nt, Artificial Sequence
  Description of Artificial Sequence: Synthetic oligonucleotide
ccgcucgucgucugcuuug

SEQ ID NO: 561880 - RNA, 19 nt, Artificial Sequence
  Description of Artificial Sequence: Synthetic oligonucleotide
cgggacacccaauuacaca

SEQ ID NO: 561881 - RNA, 19 nt, Artificial Sequence
  Description of Artificial Sequence: Synthetic oligonucleotide
gcuuugcaaacggccguca

SEQ ID NO: 561882 - RNA, 19 nt, Artificial Sequence
  Description of Artificial Sequence: Synthetic oligonucleotide
ccugaagcaugaaucgaau

SEQ ID NO: 561883 - RNA, 19 nt, Artificial Sequence
  Description of Artificial Sequence: Synthetic oligonucleotide
gcgcaagauuucagagagc

SEQ ID NO: 561884 - RNA, 19 nt, Artificial Sequence
  Description of Artificial Sequence: Synthetic oligonucleotide
cccucuccguauccacgcc

SEQ ID NO: 561885 - RNA, 19 nt, Artificial Sequence
  Description of Artificial Sequence: Synthetic oligonucleotide
ggggaauaucaauggccau

SEQ ID NO: 561886 - RNA, 19 nt, Artificial Sequence
  Description of Artificial Sequence: Synthetic oligonucleotide
cuaucacguccugaagcau

SEQ ID NO: 561887 - RNA, 19 nt, Artificial Sequence
  Description of Artificial Sequence: Synthetic oligonucleotide
ggucggccucccuccauaa

SEQ ID NO: 561888 - RNA, 19 nt, Artificial Sequence
  Description of Artificial Sequence: Synthetic oligonucleotide
gcgaagacgugaaacuuuu

SEQ ID NO: 561889 - RNA, 19 nt, Artificial Sequence
  Description of Artificial Sequence: Synthetic oligonucleotide
ucccuccauaaggcgccua

SEQ ID NO: 561890 - RNA, 19 nt, Artificial Sequence
  Description of Artificial Sequence: Synthetic oligonucleotide
gcgaacucaucuggcucuc

SEQ ID NO: 561891 - RNA, 19 nt, Artificial Sequence
  Description of Artificial Sequence: Synthetic oligonucleotide
cucccgcccucaggucugc

SEQ ID NO: 561892 - RNA, 19 nt, Artificial Sequence
  Description of Artificial Sequence: Synthetic oligonucleotide
cgucuagauuagccucuac

SEQ ID NO: 561893 - RNA, 19 nt, Artificial Sequence
  Description of Artificial Sequence: Synthetic oligonucleotide
gcccuucgggaaucaaacu

SEQ ID NO: 561894 - RNA, 19 nt, Artificial Sequence
  Description of Artificial Sequence: Synthetic oligonucleotide
ccuuugccccagcugccca

SEQ ID NO: 561895 - RNA, 19 nt, Artificial Sequence
  Description of Artificial Sequence: Synthetic oligonucleotide
cgcccuucccguucugcuc

SEQ ID NO: 561896 - RNA, 19 nt, Artificial Sequence
  Description of Artificial Sequence: Synthetic oligonucleotide
cgagcucccgcccucaggu

SEQ ID NO: 561897 - RNA, 19 nt, Artificial Sequence
  Description of Artificial Sequence: Synthetic oligonucleotide
ucccgcccucaggucugcu

SEQ ID NO: 561898 - RNA, 19 nt, Artificial Sequence
  Description of Artificial Sequence: Synthetic oligonucleotide
cgucgucugcuuuguccuc

SEQ ID NO: 561899 - RNA, 19 nt, Artificial Sequence
  Description of Artificial Sequence: Synthetic oligonucleotide
gcucccacgacugguuaau

SEQ ID NO: 561900 - RNA, 19 nt, Artificial Sequence
  Description of Artificial Sequence: Synthetic oligonucleotide
ccaguuggaaguggcuugu

SEQ ID NO: 561901 - RNA, 19 nt, Artificial Sequence
  Description of Artificial Sequence: Synthetic oligonucleotide
caguguccacucggaaggu

SEQ ID NO: 561902 - RNA, 19 nt, Artificial Sequence
  Description of Artificial Sequence: Synthetic oligonucleotide
cggccgucauuaaagcucu

SEQ ID NO: 561903 - RNA, 19 nt, Artificial Sequence
  Description of Artificial Sequence: Synthetic oligonucleotide
ccucuccguauccacgccu

SEQ ID NO: 561904 - RNA, 19 nt, Artificial Sequence
  Description of Artificial Sequence: Synthetic oligonucleotide
gcacugcguggccuccuua

SEQ ID NO: 561905 - RNA, 19 nt, Artificial Sequence
  Description of Artificial Sequence: Synthetic oligonucleotide
gcgggcugcuccaguugga

SEQ ID NO: 561906 - RNA, 19 nt, Artificial Sequence
  Description of Artificial Sequence: Synthetic oligonucleotide
ccuccauaaggcgccuacu

SEQ ID NO: 561907 - RNA, 19 nt, Artificial Sequence
  Description of Artificial Sequence: Synthetic oligonucleotide
ccguauccacgccuccagu

SEQ ID NO: 561908 - RNA, 19 nt, Artificial Sequence
  Description of Artificial Sequence: Synthetic oligonucleotide
cgggaaguaaaggcuugcu

SEQ ID NO: 561909 - RNA, 19 nt, Artificial Sequence
  Description of Artificial Sequence: Synthetic oligonucleotide
ggccgucauuaaagcucua

SEQ ID NO: 561910 - RNA, 19 nt, Artificial Sequence
  Description of Artificial Sequence: Synthetic oligonucleotide
ccguucugcucugcagggu

SEQ ID NO: 561911 - RNA, 19 nt, Artificial Sequence
  Description of Artificial Sequence: Synthetic oligonucleotide
cgcuucccgcagccacgug

SEQ ID NO: 561912 - RNA, 19 nt, Artificial Sequence
  Description of Artificial Sequence: Synthetic oligonucleotide
ccuggugaucuggcuccgu

SEQ ID NO: 561913 - RNA, 19 nt, Artificial Sequence
  Description of Artificial Sequence: Synthetic oligonucleotide
ccgcuucccgcagccacgu

SEQ ID NO: 561914 - RNA, 19 nt, Artificial Sequence
  Description of Artificial Sequence: Synthetic oligonucleotide
uauccuaauaaauuaacag

SEQ ID NO: 561915 - RNA, 19 nt, Artificial Sequence
  Description of Artificial Sequence: Synthetic oligonucleotide
aacagaaccuuccuggugg

SEQ ID NO: 561916 - RNA, 19 nt, Artificial Sequence
  Description of Artificial Sequence: Synthetic oligonucleotide
uuaagcucgaaucuaggcg

SEQ ID NO: 561917 - RNA, 19 nt, Artificial Sequence
  Description of Artificial Sequence: Synthetic oligonucleotide
aaaagcgcuacuuguuucc

SEQ ID NO: 561918 - RNA, 19 nt, Artificial Sequence
  Description of Artificial Sequence: Synthetic oligonucleotide
uccuaauaaauuaacagac

SEQ ID NO: 561919 - RNA, 19 nt, Artificial Sequence
  Description of Artificial Sequence: Synthetic oligonucleotide
augaaacgaaaacaaaagc

SEQ ID NO: 561920 - RNA, 19 nt, Artificial Sequence
  Description of Artificial Sequence: Synthetic oligonucleotide
aaugaaacgaaaacaaaag

SEQ ID NO: 561921 - RNA, 19 nt, Artificial Sequence
  Description of Artificial Sequence: Synthetic oligonucleotide
uucgcaacucucuagaccg

SEQ ID NO: 561922 - RNA, 19 nt, Artificial Sequence
  Description of Artificial Sequence: Synthetic oligonucleotide
ucuacuguaguccuggagc

SEQ ID NO: 561923 - RNA, 19 nt, Artificial Sequence
  Description of Artificial Sequence: Synthetic oligonucleotide
aagauuaacccucacguga

SEQ ID NO: 561924 - RNA, 19 nt, Artificial Sequence
  Description of Artificial Sequence: Synthetic oligonucleotide
uuaagaaucuuaaacugcu

SEQ ID NO: 561925 - RNA, 19 nt, Artificial Sequence
  Description of Artificial Sequence: Synthetic oligonucleotide
gaaacaugguaaaagaaag

SEQ ID NO: 561926 - RNA, 19 nt, Artificial Sequence
  Description of Artificial Sequence: Synthetic oligonucleotide
aaagauuagaucugcauua

SEQ ID NO: 561927 - RNA, 19 nt, Artificial Sequence
  Description of Artificial Sequence: Synthetic oligonucleotide
aagauugggcagcauuucc

SEQ ID NO: 561928 - RNA, 19 nt, Artificial Sequence
  Description of Artificial Sequence: Synthetic oligonucleotide
aaucaugagacaaggaguc

SEQ ID NO: 561929 - RNA, 19 nt, Artificial Sequence
  Description of Artificial Sequence: Synthetic oligonucleotide
aagaaucuuaaacugcugu

SEQ ID NO: 561930 - RNA, 19 nt, Artificial Sequence
  Description of Artificial Sequence: Synthetic oligonucleotide
ucuuucacuauaauaggca

SEQ ID NO: 561931 - RNA, 19 nt, Artificial Sequence
  Description of Artificial Sequence: Synthetic oligonucleotide
acucucuagaccgacaugc

SEQ ID NO: 561932 - RNA, 19 nt, Artificial Sequence
  Description of Artificial Sequence: Synthetic oligonucleotide
ucaacuauauccccguucu

SEQ ID NO: 561933 - RNA, 19 nt, Artificial Sequence
  Description of Artificial Sequence: Synthetic oligonucleotide
gauguugguaacgaggccg

SEQ ID NO: 561934 - RNA, 19 nt, Artificial Sequence
  Description of Artificial Sequence: Synthetic oligonucleotide
uaucagacuuuucuaaacc

SEQ ID NO: 561935 - RNA, 19 nt, Artificial Sequence
  Description of Artificial Sequence: Synthetic oligonucleotide
acuuuauugcagcaucggc

SEQ ID NO: 561936 - RNA, 19 nt, Artificial Sequence
  Description of Artificial Sequence: Synthetic oligonucleotide
ucuuuaagcucgaaucuag

SEQ ID NO: 561937 - RNA, 19 nt, Artificial Sequence
  Description of Artificial Sequence: Synthetic oligonucleotide
ucagauacaggaccuaaug

SEQ ID NO: 561938 - RNA, 19 nt, Artificial Sequence
  Description of Artificial Sequence: Synthetic oligonucleotide
auccuaauaaauuaacaga

SEQ ID NO: 561939 - RNA, 19 nt, Artificial Sequence
  Description of Artificial Sequence: Synthetic oligonucleotide
agacacuguaacuuaaauc

SEQ ID NO: 561940 - RNA, 19 nt, Artificial Sequence
  Description of Artificial Sequence: Synthetic oligonucleotide
ugauggauaaaacugguuu

SEQ ID NO: 561941 - RNA, 19 nt, Artificial Sequence
  Description of Artificial Sequence: Synthetic oligonucleotide
auucgcaacucucuagacc

SEQ ID NO: 561942 - RNA, 19 nt, Artificial Sequence
  Description of Artificial Sequence: Synthetic oligonucleotide
uuuagauucgcaacucucu

SEQ ID NO: 561943 - RNA, 19 nt, Artificial Sequence
  Description of Artificial Sequence: Synthetic oligonucleotide
uuucuuuaagcucgaaucu

SEQ ID NO: 561944 - RNA, 19 nt, Artificial Sequence
  Description of Artificial Sequence: Synthetic oligonucleotide
uauauccccguucuuaggc

SEQ ID NO: 561945 - RNA, 19 nt, Artificial Sequence
  Description of Artificial Sequence: Synthetic oligonucleotide
cuaaugaaaugacacgugc

SEQ ID NO: 561946 - RNA, 19 nt, Artificial Sequence
  Description of Artificial Sequence: Synthetic oligonucleotide
ucuuuaacuaaauuacuau

SEQ ID NO: 561947 - RNA, 19 nt, Artificial Sequence
  Description of Artificial Sequence: Synthetic oligonucleotide
uaaagauuagaucugcauu

SEQ ID NO: 561948 - RNA, 19 nt, Artificial Sequence
  Description of Artificial Sequence: Synthetic oligonucleotide
uuuaagcucgaaucuaggc

SEQ ID NO: 561949 - RNA, 19 nt, Artificial Sequence
  Description of Artificial Sequence: Synthetic oligonucleotide
uugucguucauugauaucu

SEQ ID NO: 561950 - RNA, 19 nt, Artificial Sequence
  Description of Artificial Sequence: Synthetic oligonucleotide
aacaugacaaauggcauug

SEQ ID NO: 561951 - RNA, 19 nt, Artificial Sequence
  Description of Artificial Sequence: Synthetic oligonucleotide
uuacuaacacuuuauugca

SEQ ID NO: 561952 - RNA, 19 nt, Artificial Sequence
  Description of Artificial Sequence: Synthetic oligonucleotide
ucauugacgcacuuccugg

SEQ ID NO: 561953 - RNA, 19 nt, Artificial Sequence
  Description of Artificial Sequence: Synthetic oligonucleotide
aaaucaugagacaaggagu

SEQ ID NO: 561954 - RNA, 19 nt, Artificial Sequence
  Description of Artificial Sequence: Synthetic oligonucleotide
gaccuaaugaaaugacacg

SEQ ID NO: 561955 - RNA, 19 nt, Artificial Sequence
  Description of Artificial Sequence: Synthetic oligonucleotide
aagauaccuauccuaauaa

SEQ ID NO: 561956 - RNA, 19 nt, Artificial Sequence
  Description of Artificial Sequence: Synthetic oligonucleotide
cauauuaacagucuucaca

SEQ ID NO: 561957 - RNA, 19 nt, Artificial Sequence
  Description of Artificial Sequence: Synthetic oligonucleotide
uauucaggccauuaaaauc

SEQ ID NO: 561958 - RNA, 19 nt, Artificial Sequence
  Description of Artificial Sequence: Synthetic oligonucleotide
uaccauucccaucucaacc

SEQ ID NO: 561959 - RNA, 19 nt, Artificial Sequence
  Description of Artificial Sequence: Synthetic oligonucleotide
ugcauauuaacagucuuca

SEQ ID NO: 561960 - RNA, 19 nt, Artificial Sequence
  Description of Artificial Sequence: Synthetic oligonucleotide
auguucaauucagagacac

SEQ ID NO: 561961 - RNA, 19 nt, Artificial Sequence
  Description of Artificial Sequence: Synthetic oligonucleotide
uuuacugcuugcucuauac

SEQ ID NO: 561962 - RNA, 19 nt, Artificial Sequence
  Description of Artificial Sequence: Synthetic oligonucleotide
accauucccaucucaaccg

SEQ ID NO: 561963 - RNA, 19 nt, Artificial Sequence
  Description of Artificial Sequence: Synthetic oligonucleotide
aaauuacuaacacuuuauu

SEQ ID NO: 561964 - RNA, 19 nt, Artificial Sequence
  Description of Artificial Sequence: Synthetic oligonucleotide
caacaucagauacaggacc

SEQ ID NO: 561965 - RNA, 19 nt, Artificial Sequence
  Description of Artificial Sequence: Synthetic oligonucleotide
ugugcaagagacugcaaca

SEQ ID NO: 561966 - RNA, 19 nt, Artificial Sequence
  Description of Artificial Sequence: Synthetic oligonucleotide
uccaaugauuugcagcaag

SEQ ID NO: 561967 - RNA, 19 nt, Artificial Sequence
  Description of Artificial Sequence: Synthetic oligonucleotide
aaauuacuaugccuauuga

SEQ ID NO: 561968 - RNA, 19 nt, Artificial Sequence
  Description of Artificial Sequence: Synthetic oligonucleotide
augaaaugacacgugcugc

SEQ ID NO: 561969 - RNA, 19 nt, Artificial Sequence
  Description of Artificial Sequence: Synthetic oligonucleotide
gagacaaggagucucucug

SEQ ID NO: 561970 - RNA, 19 nt, Artificial Sequence
  Description of Artificial Sequence: Synthetic oligonucleotide
agacuaagaacccucauuu

SEQ ID NO: 561971 - RNA, 19 nt, Artificial Sequence
  Description of Artificial Sequence: Synthetic oligonucleotide
caaugauacuuacaauggg

SEQ ID NO: 561972 - RNA, 19 nt, Artificial Sequence
  Description of Artificial Sequence: Synthetic oligonucleotide
aucaacgucuccucccacc

SEQ ID NO: 561973 - RNA, 19 nt, Artificial Sequence
  Description of Artificial Sequence: Synthetic oligonucleotide
ugggcguugugcaagagac

SEQ ID NO: 561974 - RNA, 19 nt, Artificial Sequence
  Description of Artificial Sequence: Synthetic oligonucleotide
ucaaguuguagcauacaaa

SEQ ID NO: 561975 - RNA, 19 nt, Artificial Sequence
  Description of Artificial Sequence: Synthetic oligonucleotide
aaggucaacaaaauacucu

SEQ ID NO: 561976 - RNA, 19 nt, Artificial Sequence
  Description of Artificial Sequence: Synthetic oligonucleotide
uugugcaagagacugcaac

SEQ ID NO: 561977 - RNA, 19 nt, Artificial Sequence
  Description of Artificial Sequence: Synthetic oligonucleotide
uaaucaaguuguagcauac

SEQ ID NO: 561978 - RNA, 19 nt, Artificial Sequence
  Description of Artificial Sequence: Synthetic oligonucleotide
uagaccgacaugcugagau

SEQ ID NO: 561979 - RNA, 19 nt, Artificial Sequence
  Description of Artificial Sequence: Synthetic oligonucleotide
cuuuauugcagcaucggca

SEQ ID NO: 561980 - RNA, 19 nt, Artificial Sequence
  Description of Artificial Sequence: Synthetic oligonucleotide
agugaaauguuacaacuuu

SEQ ID NO: 561981 - RNA, 19 nt, Artificial Sequence
  Description of Artificial Sequence: Synthetic oligonucleotide
auauuuuguuuagacacag

SEQ ID NO: 561982 - RNA, 19 nt, Artificial Sequence
  Description of Artificial Sequence: Synthetic oligonucleotide
cuuuuagcugagcagcugc

SEQ ID NO: 561983 - RNA, 19 nt, Artificial Sequence
  Description of Artificial Sequence: Synthetic oligonucleotide
acaaauggcauugugucug

SEQ ID NO: 561984 - RNA, 19 nt, Artificial Sequence
  Description of Artificial Sequence: Synthetic oligonucleotide
ucuaaaccaucucaauuaa

SEQ ID NO: 561985 - RNA, 19 nt, Artificial Sequence
  Description of Artificial Sequence: Synthetic oligonucleotide
cuauacuuuucuacuguag

SEQ ID NO: 561986 - RNA, 19 nt, Artificial Sequence
  Description of Artificial Sequence: Synthetic oligonucleotide
aagauuagaucugcauuag

SEQ ID NO: 561987 - RNA, 19 nt, Artificial Sequence
  Description of Artificial Sequence: Synthetic oligonucleotide
ugacaugggcacauuaaga

SEQ ID NO: 561988 - RNA, 19 nt, Artificial Sequence
  Description of Artificial Sequence: Synthetic oligonucleotide
aucggcaaaggucagauuu

SEQ ID NO: 561989 - RNA, 19 nt, Artificial Sequence
  Description of Artificial Sequence: Synthetic oligonucleotide
ugaaaugacacgugcugcu

SEQ ID NO: 561990 - RNA, 19 nt, Artificial Sequence
  Description of Artificial Sequence: Synthetic oligonucleotide
cacuguaacuuaaaucaag

SEQ ID NO: 561991 - RNA, 19 nt, Artificial Sequence
  Description of Artificial Sequence: Synthetic oligonucleotide
uuuucuuacguuccuuguc

SEQ ID NO: 561992 - RNA, 19 nt, Artificial Sequence
  Description of Artificial Sequence: Synthetic oligonucleotide
cuuuugagauauucaggcc

SEQ ID NO: 561993 - RNA, 19 nt, Artificial Sequence
  Description of Artificial Sequence: Synthetic oligonucleotide
uuugcauauuaacagucuu

SEQ ID NO: 561994 - RNA, 19 nt, Artificial Sequence
  Description of Artificial Sequence: Synthetic oligonucleotide
cuuuaagcucgaaucuagg

SEQ ID NO: 561995 - RNA, 19 nt, Artificial Sequence
  Description of Artificial Sequence: Synthetic oligonucleotide
uacuaacacuuuauugcag

SEQ ID NO: 561996 - RNA, 19 nt, Artificial Sequence
  Description of Artificial Sequence: Synthetic oligonucleotide
agauauucaggccauuaaa

SEQ ID NO: 561997 - RNA, 19 nt, Artificial Sequence
  Description of Artificial Sequence: Synthetic oligonucleotide
ucuagggacuuuuacugac

SEQ ID NO: 561998 - RNA, 19 nt, Artificial Sequence
  Description of Artificial Sequence: Synthetic oligonucleotide
uguuguuccguaaucguuu

SEQ ID NO: 561999 - RNA, 19 nt, Artificial Sequence
  Description of Artificial Sequence: Synthetic oligonucleotide
uuaggcugguaucagacuu

SEQ ID NO: 562000 - RNA, 19 nt, Artificial Sequence
  Description of Artificial Sequence: Synthetic oligonucleotide
aacccucauuucuacuagg

SEQ ID NO: 562001 - RNA, 19 nt, Artificial Sequence
  Description of Artificial Sequence: Synthetic oligonucleotide
caggccauuaaaaucauga

SEQ ID NO: 562002 - RNA, 19 nt, Artificial Sequence
  Description of Artificial Sequence: Synthetic oligonucleotide
agauuagaucugcauuagg

SEQ ID NO: 562003 - RNA, 19 nt, Artificial Sequence
  Description of Artificial Sequence: Synthetic oligonucleotide
ucaauucagagacacugua

SEQ ID NO: 562004 - RNA, 19 nt, Artificial Sequence
  Description of Artificial Sequence: Synthetic oligonucleotide
uugcauauuaacagucuuc

SEQ ID NO: 562005 - RNA, 19 nt, Artificial Sequence
  Description of Artificial Sequence: Synthetic oligonucleotide
aaucuacaugcagaaacug

SEQ ID NO: 562006 - RNA, 19 nt, Artificial Sequence
  Description of Artificial Sequence: Synthetic oligonucleotide
uuuacaucacugacucuga

SEQ ID NO: 562007 - RNA, 19 nt, Artificial Sequence
  Description of Artificial Sequence: Synthetic oligonucleotide
acaacaucagauacaggac

SEQ ID NO: 562008 - RNA, 19 nt, Artificial Sequence
  Description of Artificial Sequence: Synthetic oligonucleotide
acuauaauaggcaauuuua

SEQ ID NO: 562009 - RNA, 19 nt, Artificial Sequence
  Description of Artificial Sequence: Synthetic oligonucleotide
uucacuauaauaggcaauu

SEQ ID NO: 562010 - RNA, 19 nt, Artificial Sequence
  Description of Artificial Sequence: Synthetic oligonucleotide
uaccuauccuaauaaauua

SEQ ID NO: 562011 - RNA, 19 nt, Artificial Sequence
  Description of Artificial Sequence: Synthetic oligonucleotide
gaagcgucggcuuguuccg

SEQ ID NO: 562012 - RNA, 19 nt, Artificial Sequence
  Description of Artificial Sequence: Synthetic oligonucleotide
uagauucgcaacucucuag

SEQ ID NO: 562013 - RNA, 19 nt, Artificial Sequence
  Description of Artificial Sequence: Synthetic oligonucleotide
cuacuguaguccuggagcc

SEQ ID NO: 562014 - RNA, 19 nt, Artificial Sequence
  Description of Artificial Sequence: Synthetic oligonucleotide
cuauccuaauaaauuaaca

SEQ ID NO: 562015 - RNA, 19 nt, Artificial Sequence
  Description of Artificial Sequence: Synthetic oligonucleotide
ugguguaacugcucaguag

SEQ ID NO: 562016 - RNA, 19 nt, Artificial Sequence
  Description of Artificial Sequence: Synthetic oligonucleotide
gaaagaugcaaaauagaaa

SEQ ID NO: 562017 - RNA, 19 nt, Artificial Sequence
  Description of Artificial Sequence: Synthetic oligonucleotide
guagcauacaaauguguuc

SEQ ID NO: 562018 - RNA, 19 nt, Artificial Sequence
  Description of Artificial Sequence: Synthetic oligonucleotide
gauauucaggccauuaaaa

SEQ ID NO: 562019 - RNA, 19 nt, Artificial Sequence
  Description of Artificial Sequence: Synthetic oligonucleotide
gaacccucauuucuacuag

SEQ ID NO: 562020 - RNA, 19 nt, Artificial Sequence
  Description of Artificial Sequence: Synthetic oligonucleotide
aggccauuaaaaucaugag

SEQ ID NO: 562021 - RNA, 19 nt, Artificial Sequence
  Description of Artificial Sequence: Synthetic oligonucleotide
acgaaaacaaaagcaaagu

SEQ ID NO: 562022 - RNA, 19 nt, Artificial Sequence
  Description of Artificial Sequence: Synthetic oligonucleotide
ucucuagaccgacaugcug

SEQ ID NO: 562023 - RNA, 19 nt, Artificial Sequence
  Description of Artificial Sequence: Synthetic oligonucleotide
uuagauucgcaacucucua

SEQ ID NO: 562024 - RNA, 19 nt, Artificial Sequence
  Description of Artificial Sequence: Synthetic oligonucleotide
ucguaacugaugucguucc

SEQ ID NO: 562025 - RNA, 19 nt, Artificial Sequence
  Description of Artificial Sequence: Synthetic oligonucleotide
ucaacgucuccucccacca

SEQ ID NO: 562026 - RNA, 19 nt, Artificial Sequence
  Description of Artificial Sequence: Synthetic oligonucleotide
cuuguuccgguguuggcag

SEQ ID NO: 562027 - RNA, 19 nt, Artificial Sequence
  Description of Artificial Sequence: Synthetic oligonucleotide
gauuagaucugcauuaggu

SEQ ID NO: 562028 - RNA, 19 nt, Artificial Sequence
  Description of Artificial Sequence: Synthetic oligonucleotide
aacgucuccucccaccagu

SEQ ID NO: 562029 - RNA, 19 nt, Artificial Sequence
  Description of Artificial Sequence: Synthetic oligonucleotide
ucuagaccgacaugcugag

SEQ ID NO: 562030 - RNA, 19 nt, Artificial Sequence
  Description of Artificial Sequence: Synthetic oligonucleotide
ucuugucguucauugauau

SEQ ID NO: 562031 - RNA, 19 nt, Artificial Sequence
  Description of Artificial Sequence: Synthetic oligonucleotide
uucaauugcuggaggacuc

SEQ ID NO: 562032 - RNA, 19 nt, Artificial Sequence
  Description of Artificial Sequence: Synthetic oligonucleotide
ggaagcgucggcuuguucc

SEQ ID NO: 562033 - RNA, 19 nt, Artificial Sequence
  Description of Artificial Sequence: Synthetic oligonucleotide
ugcuacggaguuccuuucg

SEQ ID NO: 562034 - RNA, 19 nt, Artificial Sequence
  Description of Artificial Sequence: Synthetic oligonucleotide
uaaaagcgcuacuuguuuc

SEQ ID NO: 562035 - RNA, 19 nt, Artificial Sequence
  Description of Artificial Sequence: Synthetic oligonucleotide
ucguucauugauaucuaau

SEQ ID NO: 562036 - RNA, 19 nt, Artificial Sequence
  Description of Artificial Sequence: Synthetic oligonucleotide
acuguaacuuaaaucaagu

SEQ ID NO: 562037 - RNA, 19 nt, Artificial Sequence
  Description of Artificial Sequence: Synthetic oligonucleotide
acuaugccuauugaaagca

SEQ ID NO: 562038 - RNA, 19 nt, Artificial Sequence
  Description of Artificial Sequence: Synthetic oligonucleotide
uucuuguuaacaugacaaa

SEQ ID NO: 562039 - RNA, 19 nt, Artificial Sequence
  Description of Artificial Sequence: Synthetic oligonucleotide
ugauacuuacaaugggcuc

SEQ ID NO: 562040 - RNA, 19 nt, Artificial Sequence
  Description of Artificial Sequence: Synthetic oligonucleotide
ugccuauugaaagcaaaug

SEQ ID NO: 562041 - RNA, 19 nt, Artificial Sequence
  Description of Artificial Sequence: Synthetic oligonucleotide
agagaagauuaacccucac

SEQ ID NO: 562042 - RNA, 19 nt, Artificial Sequence
  Description of Artificial Sequence: Synthetic oligonucleotide
uagggacuuuuacugaccu

SEQ ID NO: 562043 - RNA, 19 nt, Artificial Sequence
  Description of Artificial Sequence: Synthetic oligonucleotide
aucucaaccgugucuucuc

SEQ ID NO: 562044 - RNA, 19 nt, Artificial Sequence
  Description of Artificial Sequence: Synthetic oligonucleotide
ucuaggcggcuaaagaaau

SEQ ID NO: 562045 - RNA, 19 nt, Artificial Sequence
  Description of Artificial Sequence: Synthetic oligonucleotide
uucucaagagaagauuaac

SEQ ID NO: 562046 - RNA, 19 nt, Artificial Sequence
  Description of Artificial Sequence: Synthetic oligonucleotide
uaacaugacaaauggcauu

SEQ ID NO: 562047 - RNA, 19 nt, Artificial Sequence
  Description of Artificial Sequence: Synthetic oligonucleotide
ucacgugauuuccauuaca

SEQ ID NO: 562048 - RNA, 19 nt, Artificial Sequence
  Description of Artificial Sequence: Synthetic oligonucleotide
gcucucauucaauugcugg

SEQ ID NO: 562049 - RNA, 19 nt, Artificial Sequence
  Description of Artificial Sequence: Synthetic oligonucleotide
gggacuuuuacugaccucc

SEQ ID NO: 562050 - RNA, 19 nt, Artificial Sequence
  Description of Artificial Sequence: Synthetic oligonucleotide
aacccaugaaggucaacaa

SEQ ID NO: 562051 - RNA, 19 nt, Artificial Sequence
  Description of Artificial Sequence: Synthetic oligonucleotide
gaugucguucccaagcuuc

SEQ ID NO: 562052 - RNA, 19 nt, Artificial Sequence
  Description of Artificial Sequence: Synthetic oligonucleotide
cucuagaccgacaugcuga

SEQ ID NO: 562053 - RNA, 19 nt, Artificial Sequence
  Description of Artificial Sequence: Synthetic oligonucleotide
uguuggcagaggcuggugu

SEQ ID NO: 562054 - RNA, 19 nt, Artificial Sequence
  Description of Artificial Sequence: Synthetic oligonucleotide
cacgauugguguuggcugg

SEQ ID NO: 562055 - RNA, 19 nt, Artificial Sequence
  Description of Artificial Sequence: Synthetic oligonucleotide
uggucgguugucuggagca

SEQ ID NO: 562056 - RNA, 19 nt, Artificial Sequence
  Description of Artificial Sequence: Synthetic oligonucleotide
uucuagggacuuuuacuga

SEQ ID NO: 562057 - RNA, 19 nt, Artificial Sequence
  Description of Artificial Sequence: Synthetic oligonucleotide
guaaucaaguuguagcaua

SEQ ID NO: 562058 - RNA, 19 nt, Artificial Sequence
  Description of Artificial Sequence: Synthetic oligonucleotide
ucaugagacaaggagucuc

SEQ ID NO: 562059 - RNA, 19 nt, Artificial Sequence
  Description of Artificial Sequence: Synthetic oligonucleotide
cuugcugccguuuggccug

SEQ ID NO: 562060 - RNA, 19 nt, Artificial Sequence
  Description of Artificial Sequence: Synthetic oligonucleotide
uacggaguuccuuucguaa

SEQ ID NO: 562061 - RNA, 19 nt, Artificial Sequence
  Description of Artificial Sequence: Synthetic oligonucleotide
uucguaacugaugucguuc

SEQ ID NO: 562062 - RNA, 19 nt, Artificial Sequence
  Description of Artificial Sequence: Synthetic oligonucleotide
acaggaccuaaugaaauga

SEQ ID NO: 562063 - RNA, 19 nt, Artificial Sequence
  Description of Artificial Sequence: Synthetic oligonucleotide
acaaaaggccuuucugccu

SEQ ID NO: 562064 - RNA, 19 nt, Artificial Sequence
  Description of Artificial Sequence: Synthetic oligonucleotide
uguaaucaaguuguagcau

SEQ ID NO: 562065 - RNA, 19 nt, Artificial Sequence
  Description of Artificial Sequence: Synthetic oligonucleotide
uugacgcacuuccuggugu

SEQ ID NO: 562066 - RNA, 19 nt, Artificial Sequence
  Description of Artificial Sequence: Synthetic oligonucleotide
ggaccuaaugaaaugacac

SEQ ID NO: 562067 - RNA, 19 nt, Artificial Sequence
  Description of Artificial Sequence: Synthetic oligonucleotide
ucuuaaacugcuguuuauu

SEQ ID NO: 562068 - RNA, 19 nt, Artificial Sequence
  Description of Artificial Sequence: Synthetic oligonucleotide
auguugguaacgaggccgc

SEQ ID NO: 562069 - RNA, 19 nt, Artificial Sequence
  Description of Artificial Sequence: Synthetic oligonucleotide
uaacugaugucguucccaa

SEQ ID NO: 562070 - RNA, 19 nt, Artificial Sequence
  Description of Artificial Sequence: Synthetic oligonucleotide
gauugguguuggcuggagc

SEQ ID NO: 562071 - RNA, 19 nt, Artificial Sequence
  Description of Artificial Sequence: Synthetic oligonucleotide
gagauauucaggccauuaa

SEQ ID NO: 562072 - RNA, 19 nt, Artificial Sequence
  Description of Artificial Sequence: Synthetic oligonucleotide
uuaacccucacgugauuuc

SEQ ID NO: 562073 - RNA, 19 nt, Artificial Sequence
  Description of Artificial Sequence: Synthetic oligonucleotide
cucaacuauauccccguuc

SEQ ID NO: 562074 - RNA, 19 nt, Artificial Sequence
  Description of Artificial Sequence: Synthetic oligonucleotide
agauaccuauccuaauaaa

SEQ ID NO: 562075 - RNA, 19 nt, Artificial Sequence
  Description of Artificial Sequence: Synthetic oligonucleotide
auuaacagacugucagaaa

SEQ ID NO: 562076 - RNA, 19 nt, Artificial Sequence
  Description of Artificial Sequence: Synthetic oligonucleotide
gauucgcaacucucuagac

SEQ ID NO: 562077 - RNA, 19 nt, Artificial Sequence
  Description of Artificial Sequence: Synthetic oligonucleotide
gccuauugaaagcaaauga

SEQ ID NO: 562078 - RNA, 19 nt, Artificial Sequence
  Description of Artificial Sequence: Synthetic oligonucleotide
aagcucgaaucuaggcggc

SEQ ID NO: 562079 - RNA, 19 nt, Artificial Sequence
  Description of Artificial Sequence: Synthetic oligonucleotide
agguuuagauucgcaacuc

SEQ ID NO: 562080 - RNA, 19 nt, Artificial Sequence
  Description of Artificial Sequence: Synthetic oligonucleotide
uaacccucacgugauuucc

SEQ ID NO: 562081 - RNA, 19 nt, Artificial Sequence
  Description of Artificial Sequence: Synthetic oligonucleotide
aacagacuaagaacccuca

SEQ ID NO: 562082 - RNA, 19 nt, Artificial Sequence
  Description of Artificial Sequence: Synthetic oligonucleotide
gauaccuauccuaauaaau

SEQ ID NO: 562083 - RNA, 19 nt, Artificial Sequence
  Description of Artificial Sequence: Synthetic oligonucleotide
gaggacuccacuauccaca

SEQ ID NO: 562084 - RNA, 19 nt, Artificial Sequence
  Description of Artificial Sequence: Synthetic oligonucleotide
uauccccguucuuaggcug

SEQ ID NO: 562085 - RNA, 19 nt, Artificial Sequence
  Description of Artificial Sequence: Synthetic oligonucleotide
aagugaaauguuacaacuu

SEQ ID NO: 562086 - RNA, 19 nt, Artificial Sequence
  Description of Artificial Sequence: Synthetic oligonucleotide
acuccuuaacagaaccuuc

SEQ ID NO: 562087 - RNA, 19 nt, Artificial Sequence
  Description of Artificial Sequence: Synthetic oligonucleotide
ugagauauucaggccauua

SEQ ID NO: 562088 - RNA, 19 nt, Artificial Sequence
  Description of Artificial Sequence: Synthetic oligonucleotide
guugguaacgaggccgccg

SEQ ID NO: 562089 - RNA, 19 nt, Artificial Sequence
  Description of Artificial Sequence: Synthetic oligonucleotide
caggaccuaaugaaaugac

SEQ ID NO: 562090 - RNA, 19 nt, Artificial Sequence
  Description of Artificial Sequence: Synthetic oligonucleotide
ugcucucauucaauugcug

SEQ ID NO: 562091 - RNA, 19 nt, Artificial Sequence
  Description of Artificial Sequence: Synthetic oligonucleotide
ccuauccuaauaaauuaac

SEQ ID NO: 562092 - RNA, 19 nt, Artificial Sequence
  Description of Artificial Sequence: Synthetic oligonucleotide
ggcagggaucuugagaucg

SEQ ID NO: 562093 - RNA, 19 nt, Artificial Sequence
  Description of Artificial Sequence: Synthetic oligonucleotide
guaacugcucaguagucaa

SEQ ID NO: 562094 - RNA, 19 nt, Artificial Sequence
  Description of Artificial Sequence: Synthetic oligonucleotide
ucuuuuagcugagcagcug

SEQ ID NO: 562095 - RNA, 19 nt, Artificial Sequence
  Description of Artificial Sequence: Synthetic oligonucleotide
uucuuuaagcucgaaucua

SEQ ID NO: 562096 - RNA, 19 nt, Artificial Sequence
  Description of Artificial Sequence: Synthetic oligonucleotide
ucggcaaaggucagauuuc

SEQ ID NO: 562097 - RNA, 19 nt, Artificial Sequence
  Description of Artificial Sequence: Synthetic oligonucleotide
cuguaaacccaugaagguc

SEQ ID NO: 562098 - RNA, 19 nt, Artificial Sequence
  Description of Artificial Sequence: Synthetic oligonucleotide
cauaccauucccaucucaa

SEQ ID NO: 562099 - RNA, 19 nt, Artificial Sequence
  Description of Artificial Sequence: Synthetic oligonucleotide
ugauaucuaaugugagcuu

SEQ ID NO: 562100 - RNA, 19 nt, Artificial Sequence
  Description of Artificial Sequence: Synthetic oligonucleotide
cauggccccagccuguccc

SEQ ID NO: 562101 - RNA, 19 nt, Artificial Sequence
  Description of Artificial Sequence: Synthetic oligonucleotide
ucuuacguuccuugucuuc

SEQ ID NO: 562102 - RNA, 19 nt, Artificial Sequence
  Description of Artificial Sequence: Synthetic oligonucleotide
cacgugauuuccauuacaa

SEQ ID NO: 562103 - RNA, 19 nt, Artificial Sequence
  Description of Artificial Sequence: Synthetic oligonucleotide
acccucauuucuacuaggg

SEQ ID NO: 562104 - RNA, 19 nt, Artificial Sequence
  Description of Artificial Sequence: Synthetic oligonucleotide
caaauggcauugugucugc

SEQ ID NO: 562105 - RNA, 19 nt, Artificial Sequence
  Description of Artificial Sequence: Synthetic oligonucleotide
augucguucccaagcuucc

SEQ ID NO: 562106 - RNA, 19 nt, Artificial Sequence
  Description of Artificial Sequence: Synthetic oligonucleotide
ugaccuccuucuuggcagg

SEQ ID NO: 562107 - RNA, 19 nt, Artificial Sequence
  Description of Artificial Sequence: Synthetic oligonucleotide
ucugcauuaggugcucccu

SEQ ID NO: 562108 - RNA, 19 nt, Artificial Sequence
  Description of Artificial Sequence: Synthetic oligonucleotide
auauccccguucuuaggcu

SEQ ID NO: 562109 - RNA, 19 nt, Artificial Sequence
  Description of Artificial Sequence: Synthetic oligonucleotide
agggacuuuuacugaccuc

SEQ ID NO: 562110 - RNA, 19 nt, Artificial Sequence
  Description of Artificial Sequence: Synthetic oligonucleotide
ugcugguuccaaugauuug

SEQ ID NO: 562111 - RNA, 19 nt, Artificial Sequence
  Description of Artificial Sequence: Synthetic oligonucleotide
aaagcgcuacuuguuucca

SEQ ID NO: 562112 - RNA, 19 nt, Artificial Sequence
  Description of Artificial Sequence: Synthetic oligonucleotide
uuacaucacugacucugau

SEQ ID NO: 562113 - RNA, 19 nt, Artificial Sequence
  Description of Artificial Sequence: Synthetic oligonucleotide
gaagauugggcagcauuuc

SEQ ID NO: 562114 - RNA, 19 nt, Artificial Sequence
  Description of Artificial Sequence: Synthetic oligonucleotide
aguaaaagcgcuacuuguu

SEQ ID NO: 562115 - RNA, 19 nt, Artificial Sequence
  Description of Artificial Sequence: Synthetic oligonucleotide
uccugguguaacugcucag

SEQ ID NO: 562116 - RNA, 19 nt, Artificial Sequence
  Description of Artificial Sequence: Synthetic oligonucleotide
guguccgcugcucucauuc

SEQ ID NO: 562117 - RNA, 19 nt, Artificial Sequence
  Description of Artificial Sequence: Synthetic oligonucleotide
uucuccggcucagucaucu

SEQ ID NO: 562118 - RNA, 19 nt, Artificial Sequence
  Description of Artificial Sequence: Synthetic oligonucleotide
ggcguugugcaagagacug

SEQ ID NO: 562119 - RNA, 19 nt, Artificial Sequence
  Description of Artificial Sequence: Synthetic oligonucleotide
accagucuuaaagauuaga

SEQ ID NO: 562120 - RNA, 19 nt, Artificial Sequence
  Description of Artificial Sequence: Synthetic oligonucleotide
auuaacccucacgugauuu

SEQ ID NO: 562121 - RNA, 19 nt, Artificial Sequence
  Description of Artificial Sequence: Synthetic oligonucleotide
ucacuggcaccuuuuguuu

SEQ ID NO: 562122 - RNA, 19 nt, Artificial Sequence
  Description of Artificial Sequence: Synthetic oligonucleotide
aggaccuaaugaaaugaca

SEQ ID NO: 562123 - RNA, 19 nt, Artificial Sequence
  Description of Artificial Sequence: Synthetic oligonucleotide
agauugggcagcauuucca

SEQ ID NO: 562124 - RNA, 19 nt, Artificial Sequence
  Description of Artificial Sequence: Synthetic oligonucleotide
uuucguaacugaugucguu

SEQ ID NO: 562125 - RNA, 19 nt, Artificial Sequence
  Description of Artificial Sequence: Synthetic oligonucleotide
gcggcuaaagaaauuuucc

SEQ ID NO: 562126 - RNA, 19 nt, Artificial Sequence
  Description of Artificial Sequence: Synthetic oligonucleotide
cuugucguucauugauauc

SEQ ID NO: 562127 - RNA, 19 nt, Artificial Sequence
  Description of Artificial Sequence: Synthetic oligonucleotide
gaaacagacuaagaacccu

SEQ ID NO: 562128 - RNA, 19 nt, Artificial Sequence
  Description of Artificial Sequence: Synthetic oligonucleotide
agcgcuacuuguuuccaua

SEQ ID NO: 562129 - RNA, 19 nt, Artificial Sequence
  Description of Artificial Sequence: Synthetic oligonucleotide
agaucugcauuaggugcuc

SEQ ID NO: 562130 - RNA, 19 nt, Artificial Sequence
  Description of Artificial Sequence: Synthetic oligonucleotide
gauguguccgcugcucuca

SEQ ID NO: 562131 - RNA, 19 nt, Artificial Sequence
  Description of Artificial Sequence: Synthetic oligonucleotide
cauucccaucucaaccgug

SEQ ID NO: 562132 - RNA, 19 nt, Artificial Sequence
  Description of Artificial Sequence: Synthetic oligonucleotide
accuauccuaauaaauuaa

SEQ ID NO: 562133 - RNA, 19 nt, Artificial Sequence
  Description of Artificial Sequence: Synthetic oligonucleotide
agauuaacccucacgugau

SEQ ID NO: 562134 - RNA, 19 nt, Artificial Sequence
  Description of Artificial Sequence: Synthetic oligonucleotide
aucuaggcggcuaaagaaa

SEQ ID NO: 562135 - RNA, 19 nt, Artificial Sequence
  Description of Artificial Sequence: Synthetic oligonucleotide
aagcgcuacuuguuuccau

SEQ ID NO: 562136 - RNA, 19 nt, Artificial Sequence
  Description of Artificial Sequence: Synthetic oligonucleotide
gucaagugaaccuucucau

SEQ ID NO: 562137 - RNA, 19 nt, Artificial Sequence
  Description of Artificial Sequence: Synthetic oligonucleotide
aguuccuuucguaacugau

SEQ ID NO: 562138 - RNA, 19 nt, Artificial Sequence
  Description of Artificial Sequence: Synthetic oligonucleotide
ucuggaagcgucggcuugu

SEQ ID NO: 562139 - RNA, 19 nt, Artificial Sequence
  Description of Artificial Sequence: Synthetic oligonucleotide
cuucuuccgugacaugcuc

SEQ ID NO: 562140 - RNA, 19 nt, Artificial Sequence
  Description of Artificial Sequence: Synthetic oligonucleotide
cagguuuagauucgcaacu

SEQ ID NO: 562141 - RNA, 19 nt, Artificial Sequence
  Description of Artificial Sequence: Synthetic oligonucleotide
guaacgaggccgccgcuca

SEQ ID NO: 562142 - RNA, 19 nt, Artificial Sequence
  Description of Artificial Sequence: Synthetic oligonucleotide
augccuauugaaagcaaau

SEQ ID NO: 562143 - RNA, 19 nt, Artificial Sequence
  Description of Artificial Sequence: Synthetic oligonucleotide
gcauugugucugcagauuc

SEQ ID NO: 562144 - RNA, 19 nt, Artificial Sequence
  Description of Artificial Sequence: Synthetic oligonucleotide
acgugcugcuggaucaacg

SEQ ID NO: 562145 - RNA, 19 nt, Artificial Sequence
  Description of Artificial Sequence: Synthetic oligonucleotide
aaauggcauugugucugca

SEQ ID NO: 562146 - RNA, 19 nt, Artificial Sequence
  Description of Artificial Sequence: Synthetic oligonucleotide
guaaaagcgcuacuuguuu

SEQ ID NO: 562147 - RNA, 19 nt, Artificial Sequence
  Description of Artificial Sequence: Synthetic oligonucleotide
caaccgugucuucuccggc

SEQ ID NO: 562148 - RNA, 19 nt, Artificial Sequence
  Description of Artificial Sequence: Synthetic oligonucleotide
uguccgcugcucucauuca

SEQ ID NO: 562149 - RNA, 19 nt, Artificial Sequence
  Description of Artificial Sequence: Synthetic oligonucleotide
cccucauuucuacuagggg

SEQ ID NO: 562150 - RNA, 19 nt, Artificial Sequence
  Description of Artificial Sequence: Synthetic oligonucleotide
uuuagcugagcagcugcuu

SEQ ID NO: 562151 - RNA, 19 nt, Artificial Sequence
  Description of Artificial Sequence: Synthetic oligonucleotide
ccaaauguaucuucuucca

SEQ ID NO: 562152 - RNA, 19 nt, Artificial Sequence
  Description of Artificial Sequence: Synthetic oligonucleotide
aagauguaaucaaguugua

SEQ ID NO: 562153 - RNA, 19 nt, Artificial Sequence
  Description of Artificial Sequence: Synthetic oligonucleotide
ugucuggaagcgucggcuu

SEQ ID NO: 562154 - RNA, 19 nt, Artificial Sequence
  Description of Artificial Sequence: Synthetic oligonucleotide
cuccacuauccacaacauc

SEQ ID NO: 562155 - RNA, 19 nt, Artificial Sequence
  Description of Artificial Sequence: Synthetic oligonucleotide
gaucaacgucuccucccac

SEQ ID NO: 562156 - RNA, 19 nt, Artificial Sequence
  Description of Artificial Sequence: Synthetic oligonucleotide
ggaggacuccacuauccac

SEQ ID NO: 562157 - RNA, 19 nt, Artificial Sequence
  Description of Artificial Sequence: Synthetic oligonucleotide
ccaccagucuuaaagauua

SEQ ID NO: 562158 - RNA, 19 nt, Artificial Sequence
  Description of Artificial Sequence: Synthetic oligonucleotide
aagcgucggcuuguuccgg

SEQ ID NO: 562159 - RNA, 19 nt, Artificial Sequence
  Description of Artificial Sequence: Synthetic oligonucleotide
cuuucguaacugaugucgu

SEQ ID NO: 562160 - RNA, 19 nt, Artificial Sequence
  Description of Artificial Sequence: Synthetic oligonucleotide
aacccucacgugauuucca

SEQ ID NO: 562161 - RNA, 19 nt, Artificial Sequence
  Description of Artificial Sequence: Synthetic oligonucleotide
gauuugcagcaaguuggga

SEQ ID NO: 562162 - RNA, 19 nt, Artificial Sequence
  Description of Artificial Sequence: Synthetic oligonucleotide
aucagauacaggaccuaau

SEQ ID NO: 562163 - RNA, 19 nt, Artificial Sequence
  Description of Artificial Sequence: Synthetic oligonucleotide
gucguucauugauaucuaa

SEQ ID NO: 562164 - RNA, 19 nt, Artificial Sequence
  Description of Artificial Sequence: Synthetic oligonucleotide
ggcggcuaaagaaauuuuc

SEQ ID NO: 562165 - RNA, 19 nt, Artificial Sequence
  Description of Artificial Sequence: Synthetic oligonucleotide
uguugguaacgaggccgcc

SEQ ID NO: 562166 - RNA, 19 nt, Artificial Sequence
  Description of Artificial Sequence: Synthetic oligonucleotide
ggaucaacgucuccuccca

SEQ ID NO: 562167 - RNA, 19 nt, Artificial Sequence
  Description of Artificial Sequence: Synthetic oligonucleotide
auccccguucuuaggcugg

SEQ ID NO: 562168 - RNA, 19 nt, Artificial Sequence
  Description of Artificial Sequence: Synthetic oligonucleotide
cuaugccuauugaaagcaa

SEQ ID NO: 562169 - RNA, 19 nt, Artificial Sequence
  Description of Artificial Sequence: Synthetic oligonucleotide
gaccgacaugcugagaugu

SEQ ID NO: 562170 - RNA, 19 nt, Artificial Sequence
  Description of Artificial Sequence: Synthetic oligonucleotide
caucccuuguuccuuucaa

SEQ ID NO: 562171 - RNA, 19 nt, Artificial Sequence
  Description of Artificial Sequence: Synthetic oligonucleotide
cauugugucugcagauucu

SEQ ID NO: 562172 - RNA, 19 nt, Artificial Sequence
  Description of Artificial Sequence: Synthetic oligonucleotide
uuguuccgguguuggcaga

SEQ ID NO: 562173 - RNA, 19 nt, Artificial Sequence
  Description of Artificial Sequence: Synthetic oligonucleotide
cucgaaucuaggcggcuaa

SEQ ID NO: 562174 - RNA, 19 nt, Artificial Sequence
  Description of Artificial Sequence: Synthetic oligonucleotide
caacgucuccucccaccag

SEQ ID NO: 562175 - RNA, 19 nt, Artificial Sequence
  Description of Artificial Sequence: Synthetic oligonucleotide
ucgaaucuaggcggcuaaa

SEQ ID NO: 562176 - RNA, 19 nt, Artificial Sequence
  Description of Artificial Sequence: Synthetic oligonucleotide
cugggcguugugcaagaga

SEQ ID NO: 562177 - RNA, 19 nt, Artificial Sequence
  Description of Artificial Sequence: Synthetic oligonucleotide
uaacgaggccgccgcucac

SEQ ID NO: 562178 - RNA, 19 nt, Artificial Sequence
  Description of Artificial Sequence: Synthetic oligonucleotide
gguuuagauucgcaacucu

SEQ ID NO: 562179 - RNA, 19 nt, Artificial Sequence
  Description of Artificial Sequence: Synthetic oligonucleotide
uggaagcgucggcuuguuc

SEQ ID NO: 562180 - RNA, 19 nt, Artificial Sequence
  Description of Artificial Sequence: Synthetic oligonucleotide
acuccacuauccacaacau

SEQ ID NO: 562181 - RNA, 19 nt, Artificial Sequence
  Description of Artificial Sequence: Synthetic oligonucleotide
agcaucggcaaaggucaga

SEQ ID NO: 562182 - RNA, 19 nt, Artificial Sequence
  Description of Artificial Sequence: Synthetic oligonucleotide
cucccuuuggauguuggua

SEQ ID NO: 562183 - RNA, 19 nt, Artificial Sequence
  Description of Artificial Sequence: Synthetic oligonucleotide
cuaaaccaucucaauuaau

SEQ ID NO: 562184 - RNA, 19 nt, Artificial Sequence
  Description of Artificial Sequence: Synthetic oligonucleotide
cuacggaguuccuuucgua

SEQ ID NO: 562185 - RNA, 19 nt, Artificial Sequence
  Description of Artificial Sequence: Synthetic oligonucleotide
cagcaucggcaaaggucag

SEQ ID NO: 562186 - RNA, 19 nt, Artificial Sequence
  Description of Artificial Sequence: Synthetic oligonucleotide
ggaugacaugggcacauua

SEQ ID NO: 562187 - RNA, 19 nt, Artificial Sequence
  Description of Artificial Sequence: Synthetic oligonucleotide
cauugacgcacuuccuggu

SEQ ID NO: 562188 - RNA, 19 nt, Artificial Sequence
  Description of Artificial Sequence: Synthetic oligonucleotide
cuguuguuccguaaucguu

SEQ ID NO: 562189 - RNA, 19 nt, Artificial Sequence
  Description of Artificial Sequence: Synthetic oligonucleotide
acgauugguguuggcugga

SEQ ID NO: 562190 - RNA, 19 nt, Artificial Sequence
  Description of Artificial Sequence: Synthetic oligonucleotide
guuguuccguaaucguuuu

SEQ ID NO: 562191 - RNA, 19 nt, Artificial Sequence
  Description of Artificial Sequence: Synthetic oligonucleotide
cucucuguuguuccguaau

SEQ ID NO: 562192 - RNA, 19 nt, Artificial Sequence
  Description of Artificial Sequence: Synthetic oligonucleotide
ggcucaacuauauccccgu

SEQ ID NO: 562193 - RNA, 19 nt, Artificial Sequence
  Description of Artificial Sequence: Synthetic oligonucleotide
guugcugguuccaaugauu

SEQ ID NO: 562194 - RNA, 19 nt, Artificial Sequence
  Description of Artificial Sequence: Synthetic oligonucleotide
ccguucuuaggcugguauc

SEQ ID NO: 562195 - RNA, 19 nt, Artificial Sequence
  Description of Artificial Sequence: Synthetic oligonucleotide
ggcaaaggucagauuucug

SEQ ID NO: 562196 - RNA, 19 nt, Artificial Sequence
  Description of Artificial Sequence: Synthetic oligonucleotide
gacuuuuacugaccuccuu

SEQ ID NO: 562197 - RNA, 19 nt, Artificial Sequence
  Description of Artificial Sequence: Synthetic oligonucleotide
cgaaucuaggcggcuaaag

SEQ ID NO: 562198 - RNA, 19 nt, Artificial Sequence
  Description of Artificial Sequence: Synthetic oligonucleotide
auguguccgcugcucucau

SEQ ID NO: 562199 - RNA, 19 nt, Artificial Sequence
  Description of Artificial Sequence: Synthetic oligonucleotide
gaucguucuuuugguuucu

SEQ ID NO: 562200 - RNA, 19 nt, Artificial Sequence
  Description of Artificial Sequence: Synthetic oligonucleotide
agcucgaaucuaggcggcu

SEQ ID NO: 562201 - RNA, 19 nt, Artificial Sequence
  Description of Artificial Sequence: Synthetic oligonucleotide
gauuaacccucacgugauu

SEQ ID NO: 562202 - RNA, 19 nt, Artificial Sequence
  Description of Artificial Sequence: Synthetic oligonucleotide
gguaacgaggccgccgcuc

SEQ ID NO: 562203 - RNA, 19 nt, Artificial Sequence
  Description of Artificial Sequence: Synthetic oligonucleotide
cucucuagaccgacaugcu

SEQ ID NO: 562204 - RNA, 19 nt, Artificial Sequence
  Description of Artificial Sequence: Synthetic oligonucleotide
ccaaugauuugcagcaagu

SEQ ID NO: 562205 - RNA, 19 nt, Artificial Sequence
  Description of Artificial Sequence: Synthetic oligonucleotide
cgugacaugcucacuggca

SEQ ID NO: 562206 - RNA, 19 nt, Artificial Sequence
  Description of Artificial Sequence: Synthetic oligonucleotide
cccaagcuuccugaugaag

SEQ ID NO: 562207 - RNA, 19 nt, Artificial Sequence
  Description of Artificial Sequence: Synthetic oligonucleotide
uccccguucuuaggcuggu

SEQ ID NO: 562208 - RNA, 19 nt, Artificial Sequence
  Description of Artificial Sequence: Synthetic oligonucleotide
aggcggcuaaagaaauuuu

SEQ ID NO: 562209 - RNA, 19 nt, Artificial Sequence
  Description of Artificial Sequence: Synthetic oligonucleotide
gcuacggaguuccuuucgu

SEQ ID NO: 562210 - RNA, 19 nt, Artificial Sequence
  Description of Artificial Sequence: Synthetic oligonucleotide
caguagucaagugaaccuu

SEQ ID NO: 562211 - RNA, 19 nt, Artificial Sequence
  Description of Artificial Sequence: Synthetic oligonucleotide
guugugcaagagacugcaa

SEQ ID NO: 562212 - RNA, 19 nt, Artificial Sequence
  Description of Artificial Sequence: Synthetic oligonucleotide
gcguugugcaagagacugc

SEQ ID NO: 562213 - RNA, 19 nt, Artificial Sequence
  Description of Artificial Sequence: Synthetic oligonucleotide
gacgcacuuccugguguaa

SEQ ID NO: 562214 - RNA, 19 nt, Artificial Sequence
  Description of Artificial Sequence: Synthetic oligonucleotide
uugcugccguuuggccugc

SEQ ID NO: 562215 - RNA, 19 nt, Artificial Sequence
  Description of Artificial Sequence: Synthetic oligonucleotide
ccgccgcucacgauuggug

SEQ ID NO: 562216 - RNA, 19 nt, Artificial Sequence
  Description of Artificial Sequence: Synthetic oligonucleotide
cuaggcggcuaaagaaauu

SEQ ID NO: 562217 - RNA, 19 nt, Artificial Sequence
  Description of Artificial Sequence: Synthetic oligonucleotide
cuagaccgacaugcugaga

SEQ ID NO: 562218 - RNA, 19 nt, Artificial Sequence
  Description of Artificial Sequence: Synthetic oligonucleotide
ccauuacaaaaggccuuuc

SEQ ID NO: 562219 - RNA, 19 nt, Artificial Sequence
  Description of Artificial Sequence: Synthetic oligonucleotide
gguggcuuaucuggcauuu

SEQ ID NO: 562220 - RNA, 19 nt, Artificial Sequence
  Description of Artificial Sequence: Synthetic oligonucleotide
gcucgaaucuaggcggcua

SEQ ID NO: 562221 - RNA, 19 nt, Artificial Sequence
  Description of Artificial Sequence: Synthetic oligonucleotide
gcgcuacuuguuuccauau

SEQ ID NO: 562222 - RNA, 19 nt, Artificial Sequence
  Description of Artificial Sequence: Synthetic oligonucleotide
caacuauauccccguucuu

SEQ ID NO: 562223 - RNA, 19 nt, Artificial Sequence
  Description of Artificial Sequence: Synthetic oligonucleotide
ccaacaugggauguucaau

SEQ ID NO: 562224 - RNA, 19 nt, Artificial Sequence
  Description of Artificial Sequence: Synthetic oligonucleotide
cuuccgugacaugcucacu

SEQ ID NO: 562225 - RNA, 19 nt, Artificial Sequence
  Description of Artificial Sequence: Synthetic oligonucleotide
cccguucuuaggcugguau

SEQ ID NO: 562226 - RNA, 19 nt, Artificial Sequence
  Description of Artificial Sequence: Synthetic oligonucleotide
caucggcaaaggucagauu

SEQ ID NO: 562227 - RNA, 19 nt, Artificial Sequence
  Description of Artificial Sequence: Synthetic oligonucleotide
cccaucucaaccgugucuu

SEQ ID NO: 562228 - RNA, 19 nt, Artificial Sequence
  Description of Artificial Sequence: Synthetic oligonucleotide
ccgacaugcugagaugugu

SEQ ID NO: 562229 - RNA, 19 nt, Artificial Sequence
  Description of Artificial Sequence: Synthetic oligonucleotide
guggcuuaucuggcauuuu

SEQ ID NO: 562230 - RNA, 19 nt, Artificial Sequence
  Description of Artificial Sequence: Synthetic oligonucleotide
gcucaacuauauccccguu

SEQ ID NO: 562231 - RNA, 19 nt, Artificial Sequence
  Description of Artificial Sequence: Synthetic oligonucleotide
gggcguugugcaagagacu

SEQ ID NO: 562232 - RNA, 19 nt, Artificial Sequence
  Description of Artificial Sequence: Synthetic oligonucleotide
ggucgguugucuggagcau

SEQ ID NO: 562233 - RNA, 19 nt, Artificial Sequence
  Description of Artificial Sequence: Synthetic oligonucleotide
cggcaaaggucagauuucu

SEQ ID NO: 562234 - RNA, 19 nt, Artificial Sequence
  Description of Artificial Sequence: Synthetic oligonucleotide
cuggaagcgucggcuuguu

SEQ ID NO: 562235 - RNA, 19 nt, Artificial Sequence
  Description of Artificial Sequence: Synthetic oligonucleotide
gccgccgcucacgauuggu

SEQ ID NO: 562236 - RNA, 19 nt, Artificial Sequence
  Description of Artificial Sequence: Synthetic oligonucleotide
cccucacgugauuuccauu

SEQ ID NO: 562237 - RNA, 19 nt, Artificial Sequence
  Description of Artificial Sequence: Synthetic oligonucleotide
cgucggcuuguuccggugu

SEQ ID NO: 562238 - RNA, 19 nt, Artificial Sequence
  Description of Artificial Sequence: Synthetic oligonucleotide
ccccguucuuaggcuggua

SEQ ID NO: 562239 - RNA, 19 nt, Artificial Sequence
  Description of Artificial Sequence: Synthetic oligonucleotide
cgaggccgccgcucacgau

SEQ ID NO: 562240 - RNA, 19 nt, Artificial Sequence
  Description of Artificial Sequence: Synthetic oligonucleotide
aaugauauggcgcagacgu

SEQ ID NO: 562241 - RNA, 19 nt, Artificial Sequence
  Description of Artificial Sequence: Synthetic oligonucleotide
aaacaaagcggucacacag

SEQ ID NO: 562242 - RNA, 19 nt, Artificial Sequence
  Description of Artificial Sequence: Synthetic oligonucleotide
uugaaaacuacucauuuca

SEQ ID NO: 562243 - RNA, 19 nt, Artificial Sequence
  Description of Artificial Sequence: Synthetic oligonucleotide
ugaagaguagccaauucgg

SEQ ID NO: 562244 - RNA, 19 nt, Artificial Sequence
  Description of Artificial Sequence: Synthetic oligonucleotide
acuaaugccaaacuaauca

SEQ ID NO: 562245 - RNA, 19 nt, Artificial Sequence
  Description of Artificial Sequence: Synthetic oligonucleotide
uuauaggccaaaauaaaca

SEQ ID NO: 562246 - RNA, 19 nt, Artificial Sequence
  Description of Artificial Sequence: Synthetic oligonucleotide
aaagcggucacacagggga

SEQ ID NO: 562247 - RNA, 19 nt, Artificial Sequence
  Description of Artificial Sequence: Synthetic oligonucleotide
acacauuucaaguauuuuc

SEQ ID NO: 562248 - RNA, 19 nt, Artificial Sequence
  Description of Artificial Sequence: Synthetic oligonucleotide
auaucucccgugcagagcc

SEQ ID NO: 562249 - RNA, 19 nt, Artificial Sequence
  Description of Artificial Sequence: Synthetic oligonucleotide
aaacuaauggugcucccac

SEQ ID NO: 562250 - RNA, 19 nt, Artificial Sequence
  Description of Artificial Sequence: Synthetic oligonucleotide
uaauucuagaacaugggcu

SEQ ID NO: 562251 - RNA, 19 nt, Artificial Sequence
  Description of Artificial Sequence: Synthetic oligonucleotide
aauccaauuacguaagaau

SEQ ID NO: 562252 - RNA, 19 nt, Artificial Sequence
  Description of Artificial Sequence: Synthetic oligonucleotide
aaauguuaucaaucagugg

SEQ ID NO: 562253 - RNA, 19 nt, Artificial Sequence
  Description of Artificial Sequence: Synthetic oligonucleotide
caucuuguaauuauaggcc

SEQ ID NO: 562254 - RNA, 19 nt, Artificial Sequence
  Description of Artificial Sequence: Synthetic oligonucleotide
cauuccggaaaacaaagcg

SEQ ID NO: 562255 - RNA, 19 nt, Artificial Sequence
  Description of Artificial Sequence: Synthetic oligonucleotide
uauauuuccuauuuauccu

SEQ ID NO: 562256 - RNA, 19 nt, Artificial Sequence
  Description of Artificial Sequence: Synthetic oligonucleotide
uuggccaccaauaagaauu

SEQ ID NO: 562257 - RNA, 19 nt, Artificial Sequence
  Description of Artificial Sequence: Synthetic oligonucleotide
auuacguaagaaugguaac

SEQ ID NO: 562258 - RNA, 19 nt, Artificial Sequence
  Description of Artificial Sequence: Synthetic oligonucleotide
aauucuagaacaugggcua

SEQ ID NO: 562259 - RNA, 19 nt, Artificial Sequence
  Description of Artificial Sequence: Synthetic oligonucleotide
uuccuauuugaucugagcu

SEQ ID NO: 562260 - RNA, 19 nt, Artificial Sequence
  Description of Artificial Sequence: Synthetic oligonucleotide
aauauuuuacuaauccugu

SEQ ID NO: 562261 - RNA, 19 nt, Artificial Sequence
  Description of Artificial Sequence: Synthetic oligonucleotide
uuaucaaucagugggaggu

SEQ ID NO: 562262 - RNA, 19 nt, Artificial Sequence
  Description of Artificial Sequence: Synthetic oligonucleotide
ugucaguauuaaaauagcc

SEQ ID NO: 562263 - RNA, 19 nt, Artificial Sequence
  Description of Artificial Sequence: Synthetic oligonucleotide
uguacagaacauauaaauc

SEQ ID NO: 562264 - RNA, 19 nt, Artificial Sequence
  Description of Artificial Sequence: Synthetic oligonucleotide
ucuccuauugacaaacaca

SEQ ID NO: 562265 - RNA, 19 nt, Artificial Sequence
  Description of Artificial Sequence: Synthetic oligonucleotide
agaaagacacacaagcucg

SEQ ID NO: 562266 - RNA, 19 nt, Artificial Sequence
  Description of Artificial Sequence: Synthetic oligonucleotide
aauuacguaagaaugguaa

SEQ ID NO: 562267 - RNA, 19 nt, Artificial Sequence
  Description of Artificial Sequence: Synthetic oligonucleotide
aaccaucagggucaaacuc

SEQ ID NO: 562268 - RNA, 19 nt, Artificial Sequence
  Description of Artificial Sequence: Synthetic oligonucleotide
uuuguggugaagaguagcc

SEQ ID NO: 562269 - RNA, 19 nt, Artificial Sequence
  Description of Artificial Sequence: Synthetic oligonucleotide
uuuaguccgugaacaaugg

SEQ ID NO: 562270 - RNA, 19 nt, Artificial Sequence
  Description of Artificial Sequence: Synthetic oligonucleotide
ugcguuucaacuugaaggc

SEQ ID NO: 562271 - RNA, 19 nt, Artificial Sequence
  Description of Artificial Sequence: Synthetic oligonucleotide
gacaugcugaaauagcagc

SEQ ID NO: 562272 - RNA, 19 nt, Artificial Sequence
  Description of Artificial Sequence: Synthetic oligonucleotide
uuucguugaaaacuacuca

SEQ ID NO: 562273 - RNA, 19 nt, Artificial Sequence
  Description of Artificial Sequence: Synthetic oligonucleotide
ugagcuuuguuuuccacgc

SEQ ID NO: 562274 - RNA, 19 nt, Artificial Sequence
  Description of Artificial Sequence: Synthetic oligonucleotide
agacacacaagcucggcac

SEQ ID NO: 562275 - RNA, 19 nt, Artificial Sequence
  Description of Artificial Sequence: Synthetic oligonucleotide
uccaucuuguaauuauagg

SEQ ID NO: 562276 - RNA, 19 nt, Artificial Sequence
  Description of Artificial Sequence: Synthetic oligonucleotide
uguuuuaagcucuuugcgu

SEQ ID NO: 562277 - RNA, 19 nt, Artificial Sequence
  Description of Artificial Sequence: Synthetic oligonucleotide
aguuauagcagcaaugaug

SEQ ID NO: 562278 - RNA, 19 nt, Artificial Sequence
  Description of Artificial Sequence: Synthetic oligonucleotide
aagaguagccaauucggca

SEQ ID NO: 562279 - RNA, 19 nt, Artificial Sequence
  Description of Artificial Sequence: Synthetic oligonucleotide
uucggcauccaugagaaag

SEQ ID NO: 562280 - RNA, 19 nt, Artificial Sequence
  Description of Artificial Sequence: Synthetic oligonucleotide
acaguaaugauauggcgca

SEQ ID NO: 562281 - RNA, 19 nt, Artificial Sequence
  Description of Artificial Sequence: Synthetic oligonucleotide
ugauuuccggaacagcugc

SEQ ID NO: 562282 - RNA, 19 nt, Artificial Sequence
  Description of Artificial Sequence: Synthetic oligonucleotide
ucugcuaaaguuuguggug

SEQ ID NO: 562283 - RNA, 19 nt, Artificial Sequence
  Description of Artificial Sequence: Synthetic oligonucleotide
cucaaacgaauuuucagug

SEQ ID NO: 562284 - RNA, 19 nt, Artificial Sequence
  Description of Artificial Sequence: Synthetic oligonucleotide
acuaguaaugauguugguc

SEQ ID NO: 562285 - RNA, 19 nt, Artificial Sequence
  Description of Artificial Sequence: Synthetic oligonucleotide
aacgagacuauauccuuca

SEQ ID NO: 562286 - RNA, 19 nt, Artificial Sequence
  Description of Artificial Sequence: Synthetic oligonucleotide
agcaaacuaauggugcucc

SEQ ID NO: 562287 - RNA, 19 nt, Artificial Sequence
  Description of Artificial Sequence: Synthetic oligonucleotide
uacaugauuacugcaaugu

SEQ ID NO: 562288 - RNA, 19 nt, Artificial Sequence
  Description of Artificial Sequence: Synthetic oligonucleotide
uuuugauuuggcacaacaa

SEQ ID NO: 562289 - RNA, 19 nt, Artificial Sequence
  Description of Artificial Sequence: Synthetic oligonucleotide
agugggagguucuucaaag

SEQ ID NO: 562290 - RNA, 19 nt, Artificial Sequence
  Description of Artificial Sequence: Synthetic oligonucleotide
ugauuucacagcaaacuaa

SEQ ID NO: 562291 - RNA, 19 nt, Artificial Sequence
  Description of Artificial Sequence: Synthetic oligonucleotide
uucauucuagcuagcuccg

SEQ ID NO: 562292 - RNA, 19 nt, Artificial Sequence
  Description of Artificial Sequence: Synthetic oligonucleotide
agaauuucaccucugggau

SEQ ID NO: 562293 - RNA, 19 nt, Artificial Sequence
  Description of Artificial Sequence: Synthetic oligonucleotide
ucccaagagaaacauacuc

SEQ ID NO: 562294 - RNA, 19 nt, Artificial Sequence
  Description of Artificial Sequence: Synthetic oligonucleotide
ugaaucgcuguguuguugc

SEQ ID NO: 562295 - RNA, 19 nt, Artificial Sequence
  Description of Artificial Sequence: Synthetic oligonucleotide
uaauaugaggaauggaguu

SEQ ID NO: 562296 - RNA, 19 nt, Artificial Sequence
  Description of Artificial Sequence: Synthetic oligonucleotide
aagacugaucugcuaaagu

SEQ ID NO: 562297 - RNA, 19 nt, Artificial Sequence
  Description of Artificial Sequence: Synthetic oligonucleotide
uuggaauuccuguggaccc

SEQ ID NO: 562298 - RNA, 19 nt, Artificial Sequence
  Description of Artificial Sequence: Synthetic oligonucleotide
gaccaacgagacuauaucc

SEQ ID NO: 562299 - RNA, 19 nt, Artificial Sequence
  Description of Artificial Sequence: Synthetic oligonucleotide
uugauucauaagcauuuga

SEQ ID NO: 562300 - RNA, 19 nt, Artificial Sequence
  Description of Artificial Sequence: Synthetic oligonucleotide
uuuacuaauccugucaguu

SEQ ID NO: 562301 - RNA, 19 nt, Artificial Sequence
  Description of Artificial Sequence: Synthetic oligonucleotide
uaacuguuugcauacgcac

SEQ ID NO: 562302 - RNA, 19 nt, Artificial Sequence
  Description of Artificial Sequence: Synthetic oligonucleotide
uuguaguaccccauuguca

SEQ ID NO: 562303 - RNA, 19 nt, Artificial Sequence
  Description of Artificial Sequence: Synthetic oligonucleotide
uacguaagaaugguaacug

SEQ ID NO: 562304 - RNA, 19 nt, Artificial Sequence
  Description of Artificial Sequence: Synthetic oligonucleotide
aucugcuaaaguuuguggu

SEQ ID NO: 562305 - RNA, 19 nt, Artificial Sequence
  Description of Artificial Sequence: Synthetic oligonucleotide
aggguaacgagcuggaagu

SEQ ID NO: 562306 - RNA, 19 nt, Artificial Sequence
  Description of Artificial Sequence: Synthetic oligonucleotide
uucaacauagaugugucuc

SEQ ID NO: 562307 - RNA, 19 nt, Artificial Sequence
  Description of Artificial Sequence: Synthetic oligonucleotide
aguaguacacccuuuugaa

SEQ ID NO: 562308 - RNA, 19 nt, Artificial Sequence
  Description of Artificial Sequence: Synthetic oligonucleotide
auacgcacaaauguuauca

SEQ ID NO: 562309 - RNA, 19 nt, Artificial Sequence
  Description of Artificial Sequence: Synthetic oligonucleotide
uucccaucaacaguaauga

SEQ ID NO: 562310 - RNA, 19 nt, Artificial Sequence
  Description of Artificial Sequence: Synthetic oligonucleotide
uuacguaagaaugguaacu

SEQ ID NO: 562311 - RNA, 19 nt, Artificial Sequence
  Description of Artificial Sequence: Synthetic oligonucleotide
agucaugguguguacaaug

SEQ ID NO: 562312 - RNA, 19 nt, Artificial Sequence
  Description of Artificial Sequence: Synthetic oligonucleotide
aguacacccuuuugaaauc

SEQ ID NO: 562313 - RNA, 19 nt, Artificial Sequence
  Description of Artificial Sequence: Synthetic oligonucleotide
ucuagaacaugggcuaggg

SEQ ID NO: 562314 - RNA, 19 nt, Artificial Sequence
  Description of Artificial Sequence: Synthetic oligonucleotide
aacuaaugccaaacuaauc

SEQ ID NO: 562315 - RNA, 19 nt, Artificial Sequence
  Description of Artificial Sequence: Synthetic oligonucleotide
ugucugaaggcaaugguuu

SEQ ID NO: 562316 - RNA, 19 nt, Artificial Sequence
  Description of Artificial Sequence: Synthetic oligonucleotide
ggcacuuaauucuagaaca

SEQ ID NO: 562317 - RNA, 19 nt, Artificial Sequence
  Description of Artificial Sequence: Synthetic oligonucleotide
aauucggcauccaugagaa

SEQ ID NO: 562318 - RNA, 19 nt, Artificial Sequence
  Description of Artificial Sequence: Synthetic oligonucleotide
acauugauacccuuguuuu

SEQ ID NO: 562319 - RNA, 19 nt, Artificial Sequence
  Description of Artificial Sequence: Synthetic oligonucleotide
uucuccuauugacaaacac

SEQ ID NO: 562320 - RNA, 19 nt, Artificial Sequence
  Description of Artificial Sequence: Synthetic oligonucleotide
gguaauguguuuuaagcuc

SEQ ID NO: 562321 - RNA, 19 nt, Artificial Sequence
  Description of Artificial Sequence: Synthetic oligonucleotide
ucucauuuaguccgugaac

SEQ ID NO: 562322 - RNA, 19 nt, Artificial Sequence
  Description of Artificial Sequence: Synthetic oligonucleotide
aauauccaauguauacauc

SEQ ID NO: 562323 - RNA, 19 nt, Artificial Sequence
  Description of Artificial Sequence: Synthetic oligonucleotide
gaguaguacacccuuuuga

SEQ ID NO: 562324 - RNA, 19 nt, Artificial Sequence
  Description of Artificial Sequence: Synthetic oligonucleotide
ggaacucagaccauguugg

SEQ ID NO: 562325 - RNA, 19 nt, Artificial Sequence
  Description of Artificial Sequence: Synthetic oligonucleotide
aguagauucugugagucca

SEQ ID NO: 562326 - RNA, 19 nt, Artificial Sequence
  Description of Artificial Sequence: Synthetic oligonucleotide
ucucccauacauccguuca

SEQ ID NO: 562327 - RNA, 19 nt, Artificial Sequence
  Description of Artificial Sequence: Synthetic oligonucleotide
auacaggguaacgagcugg

SEQ ID NO: 562328 - RNA, 19 nt, Artificial Sequence
  Description of Artificial Sequence: Synthetic oligonucleotide
cugugggagaucaugacuc

SEQ ID NO: 562329 - RNA, 19 nt, Artificial Sequence
  Description of Artificial Sequence: Synthetic oligonucleotide
uguuggaggcuucccauca

SEQ ID NO: 562330 - RNA, 19 nt, Artificial Sequence
  Description of Artificial Sequence: Synthetic oligonucleotide
uuugaucugagcucgcuuu

SEQ ID NO: 562331 - RNA, 19 nt, Artificial Sequence
  Description of Artificial Sequence: Synthetic oligonucleotide
agaguagccaauucggcau

SEQ ID NO: 562332 - RNA, 19 nt, Artificial Sequence
  Description of Artificial Sequence: Synthetic oligonucleotide
ugcaagaguucuuuaacua

SEQ ID NO: 562333 - RNA, 19 nt, Artificial Sequence
  Description of Artificial Sequence: Synthetic oligonucleotide
guuauagcagcaaugaugu

SEQ ID NO: 562334 - RNA, 19 nt, Artificial Sequence
  Description of Artificial Sequence: Synthetic oligonucleotide
cacucugccgguauuguag

SEQ ID NO: 562335 - RNA, 19 nt, Artificial Sequence
  Description of Artificial Sequence: Synthetic oligonucleotide
ugcauacgcacaaauguua

SEQ ID NO: 562336 - RNA, 19 nt, Artificial Sequence
  Description of Artificial Sequence: Synthetic oligonucleotide
uguuugcauacgcacaaau

SEQ ID NO: 562337 - RNA, 19 nt, Artificial Sequence
  Description of Artificial Sequence: Synthetic oligonucleotide
acaauuguacagaacauau

SEQ ID NO: 562338 - RNA, 19 nt, Artificial Sequence
  Description of Artificial Sequence: Synthetic oligonucleotide
gaugccaaagcaaacugga

SEQ ID NO: 562339 - RNA, 19 nt, Artificial Sequence
  Description of Artificial Sequence: Synthetic oligonucleotide
cauuuuggccaccaauaag

SEQ ID NO: 562340 - RNA, 19 nt, Artificial Sequence
  Description of Artificial Sequence: Synthetic oligonucleotide
ugaaaacuacucauuucau

SEQ ID NO: 562341 - RNA, 19 nt, Artificial Sequence
  Description of Artificial Sequence: Synthetic oligonucleotide
aacucagaccauguuggag

SEQ ID NO: 562342 - RNA, 19 nt, Artificial Sequence
  Description of Artificial Sequence: Synthetic oligonucleotide
uccuauuuauccuucuaua

SEQ ID NO: 562343 - RNA, 19 nt, Artificial Sequence
  Description of Artificial Sequence: Synthetic oligonucleotide
aacgaauuuucaguggaau

SEQ ID NO: 562344 - RNA, 19 nt, Artificial Sequence
  Description of Artificial Sequence: Synthetic oligonucleotide
uucuagcuagcuccgugag

SEQ ID NO: 562345 - RNA, 19 nt, Artificial Sequence
  Description of Artificial Sequence: Synthetic oligonucleotide
cuuuugauuuggcacaaca

SEQ ID NO: 562346 - RNA, 19 nt, Artificial Sequence
  Description of Artificial Sequence: Synthetic oligonucleotide
caaacgaauuuucagugga

SEQ ID NO: 562347 - RNA, 19 nt, Artificial Sequence
  Description of Artificial Sequence: Synthetic oligonucleotide
caggguaacgagcuggaag

SEQ ID NO: 562348 - RNA, 19 nt, Artificial Sequence
  Description of Artificial Sequence: Synthetic oligonucleotide
uguagauccgauccaugau

SEQ ID NO: 562349 - RNA, 19 nt, Artificial Sequence
  Description of Artificial Sequence: Synthetic oligonucleotide
guuucguugaaaacuacuc

SEQ ID NO: 562350 - RNA, 19 nt, Artificial Sequence
  Description of Artificial Sequence: Synthetic oligonucleotide
aaucagugggagguucuuc

SEQ ID NO: 562351 - RNA, 19 nt, Artificial Sequence
  Description of Artificial Sequence: Synthetic oligonucleotide
caccaccacacaauaaaag

SEQ ID NO: 562352 - RNA, 19 nt, Artificial Sequence
  Description of Artificial Sequence: Synthetic oligonucleotide
gaagacugaucugcuaaag

SEQ ID NO: 562353 - RNA, 19 nt, Artificial Sequence
  Description of Artificial Sequence: Synthetic oligonucleotide
gcaagaguucuuuaacuag

SEQ ID NO: 562354 - RNA, 19 nt, Artificial Sequence
  Description of Artificial Sequence: Synthetic oligonucleotide
acaagcucggcacuuaauu

SEQ ID NO: 562355 - RNA, 19 nt, Artificial Sequence
  Description of Artificial Sequence: Synthetic oligonucleotide
ucgcuuuagcaaacuaaug

SEQ ID NO: 562356 - RNA, 19 nt, Artificial Sequence
  Description of Artificial Sequence: Synthetic oligonucleotide
ugggcuaggggcaaauauc

SEQ ID NO: 562357 - RNA, 19 nt, Artificial Sequence
  Description of Artificial Sequence: Synthetic oligonucleotide
uuugccucggccugagaca

SEQ ID NO: 562358 - RNA, 19 nt, Artificial Sequence
  Description of Artificial Sequence: Synthetic oligonucleotide
cucauuuaguccgugaaca

SEQ ID NO: 562359 - RNA, 19 nt, Artificial Sequence
  Description of Artificial Sequence: Synthetic oligonucleotide
auucuagcuagcuccguga

SEQ ID NO: 562360 - RNA, 19 nt, Artificial Sequence
  Description of Artificial Sequence: Synthetic oligonucleotide
uuaguccgugaacaauggc

SEQ ID NO: 562361 - RNA, 19 nt, Artificial Sequence
  Description of Artificial Sequence: Synthetic oligonucleotide
uauuguagucccacacuuc

SEQ ID NO: 562362 - RNA, 19 nt, Artificial Sequence
  Description of Artificial Sequence: Synthetic oligonucleotide
gacccacuuguauacauga

SEQ ID NO: 562363 - RNA, 19 nt, Artificial Sequence
  Description of Artificial Sequence: Synthetic oligonucleotide
cccaguaugauucagaaaa

SEQ ID NO: 562364 - RNA, 19 nt, Artificial Sequence
  Description of Artificial Sequence: Synthetic oligonucleotide
acauuccggaaaacaaagc

SEQ ID NO: 562365 - RNA, 19 nt, Artificial Sequence
  Description of Artificial Sequence: Synthetic oligonucleotide
uccauaccccugaccaacg

SEQ ID NO: 562366 - RNA, 19 nt, Artificial Sequence
  Description of Artificial Sequence: Synthetic oligonucleotide
aaguuucguugaaaacuac

SEQ ID NO: 562367 - RNA, 19 nt, Artificial Sequence
  Description of Artificial Sequence: Synthetic oligonucleotide
ccuauuugaucugagcucg

SEQ ID NO: 562368 - RNA, 19 nt, Artificial Sequence
  Description of Artificial Sequence: Synthetic oligonucleotide
accccauugucacauuuug

SEQ ID NO: 562369 - RNA, 19 nt, Artificial Sequence
  Description of Artificial Sequence: Synthetic oligonucleotide
ccuauuuauccuucuauac

SEQ ID NO: 562370 - RNA, 19 nt, Artificial Sequence
  Description of Artificial Sequence: Synthetic oligonucleotide
uuuuacgaucaauaaucuu

SEQ ID NO: 562371 - RNA, 19 nt, Artificial Sequence
  Description of Artificial Sequence: Synthetic oligonucleotide
uugcauacgcacaaauguu

SEQ ID NO: 562372 - RNA, 19 nt, Artificial Sequence
  Description of Artificial Sequence: Synthetic oligonucleotide
guuugcauacgcacaaaug

SEQ ID NO: 562373 - RNA, 19 nt, Artificial Sequence
  Description of Artificial Sequence: Synthetic oligonucleotide
aucgcuguguuguugcaga

SEQ ID NO: 562374 - RNA, 19 nt, Artificial Sequence
  Description of Artificial Sequence: Synthetic oligonucleotide
gguaacuguuugcauacgc

SEQ ID NO: 562375 - RNA, 19 nt, Artificial Sequence
  Description of Artificial Sequence: Synthetic oligonucleotide
ugacguggugagaaguaac

SEQ ID NO: 562376 - RNA, 19 nt, Artificial Sequence
  Description of Artificial Sequence: Synthetic oligonucleotide
uagauccgauccaugauuu

SEQ ID NO: 562377 - RNA, 19 nt, Artificial Sequence
  Description of Artificial Sequence: Synthetic oligonucleotide
auuuauccuucuauacauc

SEQ ID NO: 562378 - RNA, 19 nt, Artificial Sequence
  Description of Artificial Sequence: Synthetic oligonucleotide
ucggcacuuaauucuagaa

SEQ ID NO: 562379 - RNA, 19 nt, Artificial Sequence
  Description of Artificial Sequence: Synthetic oligonucleotide
aguagccaauucggcaucc

SEQ ID NO: 562380 - RNA, 19 nt, Artificial Sequence
  Description of Artificial Sequence: Synthetic oligonucleotide
uccccaguaugauucagaa

SEQ ID NO: 562381 - RNA, 19 nt, Artificial Sequence
  Description of Artificial Sequence: Synthetic oligonucleotide
guauacaugauuacugcaa

SEQ ID NO: 562382 - RNA, 19 nt, Artificial Sequence
  Description of Artificial Sequence: Synthetic oligonucleotide
uaggggcaaauauccaaug

SEQ ID NO: 562383 - RNA, 19 nt, Artificial Sequence
  Description of Artificial Sequence: Synthetic oligonucleotide
gauauggcgcagacguggg

SEQ ID NO: 562384 - RNA, 19 nt, Artificial Sequence
  Description of Artificial Sequence: Synthetic oligonucleotide
gggaacucagaccauguug

SEQ ID NO: 562385 - RNA, 19 nt, Artificial Sequence
  Description of Artificial Sequence: Synthetic oligonucleotide
guagcauacaggguaacga

SEQ ID NO: 562386 - RNA, 19 nt, Artificial Sequence
  Description of Artificial Sequence: Synthetic oligonucleotide
ugucucauuuaguccguga

SEQ ID NO: 562387 - RNA, 19 nt, Artificial Sequence
  Description of Artificial Sequence: Synthetic oligonucleotide
auguuggaggcuucccauc

SEQ ID NO: 562388 - RNA, 19 nt, Artificial Sequence
  Description of Artificial Sequence: Synthetic oligonucleotide
cauucuagcuagcuccgug

SEQ ID NO: 562389 - RNA, 19 nt, Artificial Sequence
  Description of Artificial Sequence: Synthetic oligonucleotide
cuagaacaugggcuagggg

SEQ ID NO: 562390 - RNA, 19 nt, Artificial Sequence
  Description of Artificial Sequence: Synthetic oligonucleotide
aggggcaaauauccaaugu

SEQ ID NO: 562391 - RNA, 19 nt, Artificial Sequence
  Description of Artificial Sequence: Synthetic oligonucleotide
uaguaaugauguuggucac

SEQ ID NO: 562392 - RNA, 19 nt, Artificial Sequence
  Description of Artificial Sequence: Synthetic oligonucleotide
ugauguuggucaccucugu

SEQ ID NO: 562393 - RNA, 19 nt, Artificial Sequence
  Description of Artificial Sequence: Synthetic oligonucleotide
cagauauucaugaaucgcu

SEQ ID NO: 562394 - RNA, 19 nt, Artificial Sequence
  Description of Artificial Sequence: Synthetic oligonucleotide
acgaauuuucaguggaauu

SEQ ID NO: 562395 - RNA, 19 nt, Artificial Sequence
  Description of Artificial Sequence: Synthetic oligonucleotide
aguuucguugaaaacuacu

SEQ ID NO: 562396 - RNA, 19 nt, Artificial Sequence
  Description of Artificial Sequence: Synthetic oligonucleotide
uauggcgcagacgugggac

SEQ ID NO: 562397 - RNA, 19 nt, Artificial Sequence
  Description of Artificial Sequence: Synthetic oligonucleotide
ucuuugcguuucaacuuga

SEQ ID NO: 562398 - RNA, 19 nt, Artificial Sequence
  Description of Artificial Sequence: Synthetic oligonucleotide
caauucggcauccaugaga

SEQ ID NO: 562399 - RNA, 19 nt, Artificial Sequence
  Description of Artificial Sequence: Synthetic oligonucleotide
caacuugaaggcauccguc

SEQ ID NO: 562400 - RNA, 19 nt, Artificial Sequence
  Description of Artificial Sequence: Synthetic oligonucleotide
augggcuaggggcaaauau

SEQ ID NO: 562401 - RNA, 19 nt, Artificial Sequence
  Description of Artificial Sequence: Synthetic oligonucleotide
agauccgauccaugauuuc

SEQ ID NO: 562402 - RNA, 19 nt, Artificial Sequence
  Description of Artificial Sequence: Synthetic oligonucleotide
uacacccuuuugaaaucug

SEQ ID NO: 562403 - RNA, 19 nt, Artificial Sequence
  Description of Artificial Sequence: Synthetic oligonucleotide
uuaagcucuuugcguuuca

SEQ ID NO: 562404 - RNA, 19 nt, Artificial Sequence
  Description of Artificial Sequence: Synthetic oligonucleotide
caguagauucugugagucc

SEQ ID NO: 562405 - RNA, 19 nt, Artificial Sequence
  Description of Artificial Sequence: Synthetic oligonucleotide
ucuagcuagcuccgugagu

SEQ ID NO: 562406 - RNA, 19 nt, Artificial Sequence
  Description of Artificial Sequence: Synthetic oligonucleotide
aaagcacuuuaaggacuuc

SEQ ID NO: 562407 - RNA, 19 nt, Artificial Sequence
  Description of Artificial Sequence: Synthetic oligonucleotide
ugagcucgcuuuagcaaac

SEQ ID NO: 562408 - RNA, 19 nt, Artificial Sequence
  Description of Artificial Sequence: Synthetic oligonucleotide
ucugucucauuuaguccgu

SEQ ID NO: 562409 - RNA, 19 nt, Artificial Sequence
  Description of Artificial Sequence: Synthetic oligonucleotide
ucagggcucaaacgaauuu

SEQ ID NO: 562410 - RNA, 19 nt, Artificial Sequence
  Description of Artificial Sequence: Synthetic oligonucleotide
guaacuguuugcauacgca

SEQ ID NO: 562411 - RNA, 19 nt, Artificial Sequence
  Description of Artificial Sequence: Synthetic oligonucleotide
caacgagacuauauccuuc

SEQ ID NO: 562412 - RNA, 19 nt, Artificial Sequence
  Description of Artificial Sequence: Synthetic oligonucleotide
uccgagagccugcacugca

SEQ ID NO: 562413 - RNA, 19 nt, Artificial Sequence
  Description of Artificial Sequence: Synthetic oligonucleotide
uacgcacaaauguuaucaa

SEQ ID NO: 562414 - RNA, 19 nt, Artificial Sequence
  Description of Artificial Sequence: Synthetic oligonucleotide
ucccaguuauagcagcaau

SEQ ID NO: 562415 - RNA, 19 nt, Artificial Sequence
  Description of Artificial Sequence: Synthetic oligonucleotide
cugcgcagcaaucauccac

SEQ ID NO: 562416 - RNA, 19 nt, Artificial Sequence
  Description of Artificial Sequence: Synthetic oligonucleotide
uuguggugaagaguagcca

SEQ ID NO: 562417 - RNA, 19 nt, Artificial Sequence
  Description of Artificial Sequence: Synthetic oligonucleotide
caacaaauccaauuacgua

SEQ ID NO: 562418 - RNA, 19 nt, Artificial Sequence
  Description of Artificial Sequence: Synthetic oligonucleotide
uccgucaccagaccaguuu

SEQ ID NO: 562419 - RNA, 19 nt, Artificial Sequence
  Description of Artificial Sequence: Synthetic oligonucleotide
cauacgcacaaauguuauc

SEQ ID NO: 562420 - RNA, 19 nt, Artificial Sequence
  Description of Artificial Sequence: Synthetic oligonucleotide
guccgugaacaauggcugg

SEQ ID NO: 562421 - RNA, 19 nt, Artificial Sequence
  Description of Artificial Sequence: Synthetic oligonucleotide
uucucgccaucccaguuau

SEQ ID NO: 562422 - RNA, 19 nt, Artificial Sequence
  Description of Artificial Sequence: Synthetic oligonucleotide
gguagcauacaggguaacg

SEQ ID NO: 562423 - RNA, 19 nt, Artificial Sequence
  Description of Artificial Sequence: Synthetic oligonucleotide
gucucauuuaguccgugaa

SEQ ID NO: 562424 - RNA, 19 nt, Artificial Sequence
  Description of Artificial Sequence: Synthetic oligonucleotide
auucuagaacaugggcuag

SEQ ID NO: 562425 - RNA, 19 nt, Artificial Sequence
  Description of Artificial Sequence: Synthetic oligonucleotide
aaacgaauuuucaguggaa

SEQ ID NO: 562426 - RNA, 19 nt, Artificial Sequence
  Description of Artificial Sequence: Synthetic oligonucleotide
acgcacaaauguuaucaau

SEQ ID NO: 562427 - RNA, 19 nt, Artificial Sequence
  Description of Artificial Sequence: Synthetic oligonucleotide
gccaauucggcauccauga

SEQ ID NO: 562428 - RNA, 19 nt, Artificial Sequence
  Description of Artificial Sequence: Synthetic oligonucleotide
auguuaucaaucaguggga

SEQ ID NO: 562429 - RNA, 19 nt, Artificial Sequence
  Description of Artificial Sequence: Synthetic oligonucleotide
cuucacuccgagagccugc

SEQ ID NO: 562430 - RNA, 19 nt, Artificial Sequence
  Description of Artificial Sequence: Synthetic oligonucleotide
auacauccguucaaugucu

SEQ ID NO: 562431 - RNA, 19 nt, Artificial Sequence
  Description of Artificial Sequence: Synthetic oligonucleotide
uaguaccccauugucacau

SEQ ID NO: 562432 - RNA, 19 nt, Artificial Sequence
  Description of Artificial Sequence: Synthetic oligonucleotide
gugggagguucuucaaagc

SEQ ID NO: 562433 - RNA, 19 nt, Artificial Sequence
  Description of Artificial Sequence: Synthetic oligonucleotide
ugcuguuacacagcucuuc

SEQ ID NO: 562434 - RNA, 19 nt, Artificial Sequence
  Description of Artificial Sequence: Synthetic oligonucleotide
ggcgaauauuuccacccag

SEQ ID NO: 562435 - RNA, 19 nt, Artificial Sequence
  Description of Artificial Sequence: Synthetic oligonucleotide
uccggaaaacaaagcgguc

SEQ ID NO: 562436 - RNA, 19 nt, Artificial Sequence
  Description of Artificial Sequence: Synthetic oligonucleotide
guccccuuaaauccuuuca

SEQ ID NO: 562437 - RNA, 19 nt, Artificial Sequence
  Description of Artificial Sequence: Synthetic oligonucleotide
ggaccaacgagacuauauc

SEQ ID NO: 562438 - RNA, 19 nt, Artificial Sequence
  Description of Artificial Sequence: Synthetic oligonucleotide
augacuccuuuuggaauuc

SEQ ID NO: 562439 - RNA, 19 nt, Artificial Sequence
  Description of Artificial Sequence: Synthetic oligonucleotide
acucugccgguauuguagu

SEQ ID NO: 562440 - RNA, 19 nt, Artificial Sequence
  Description of Artificial Sequence: Synthetic oligonucleotide
guaguacacccuuuugaaa

SEQ ID NO: 562441 - RNA, 19 nt, Artificial Sequence
  Description of Artificial Sequence: Synthetic oligonucleotide
agggucaaacucuccaaua

SEQ ID NO: 562442 - RNA, 19 nt, Artificial Sequence
  Description of Artificial Sequence: Synthetic oligonucleotide
uccgugaguuccuuuugau

SEQ ID NO: 562443 - RNA, 19 nt, Artificial Sequence
  Description of Artificial Sequence: Synthetic oligonucleotide
cgcacaaauguuaucaauc

SEQ ID NO: 562444 - RNA, 19 nt, Artificial Sequence
  Description of Artificial Sequence: Synthetic oligonucleotide
acgagacuauauccuucag

SEQ ID NO: 562445 - RNA, 19 nt, Artificial Sequence
  Description of Artificial Sequence: Synthetic oligonucleotide
agccaauucggcauccaug

SEQ ID NO: 562446 - RNA, 19 nt, Artificial Sequence
  Description of Artificial Sequence: Synthetic oligonucleotide
uauauccuucagcuuuguu

SEQ ID NO: 562447 - RNA, 19 nt, Artificial Sequence
  Description of Artificial Sequence: Synthetic oligonucleotide
cauacaggguaacgagcug

SEQ ID NO: 562448 - RNA, 19 nt, Artificial Sequence
  Description of Artificial Sequence: Synthetic oligonucleotide
ugcuaaaguuuguggugaa

SEQ ID NO: 562449 - RNA, 19 nt, Artificial Sequence
  Description of Artificial Sequence: Synthetic oligonucleotide
augaaucgcuguguuguug

SEQ ID NO: 562450 - RNA, 19 nt, Artificial Sequence
  Description of Artificial Sequence: Synthetic oligonucleotide
cugagcucgcuuuagcaaa

SEQ ID NO: 562451 - RNA, 19 nt, Artificial Sequence
  Description of Artificial Sequence: Synthetic oligonucleotide
gucaugguguguacaauga

SEQ ID NO: 562452 - RNA, 19 nt, Artificial Sequence
  Description of Artificial Sequence: Synthetic oligonucleotide
accacacaauaaaaggcga

SEQ ID NO: 562453 - RNA, 19 nt, Artificial Sequence
  Description of Artificial Sequence: Synthetic oligonucleotide
uaccccauugucacauuuu

SEQ ID NO: 562454 - RNA, 19 nt, Artificial Sequence
  Description of Artificial Sequence: Synthetic oligonucleotide
guauuguagucccacacuu

SEQ ID NO: 562455 - RNA, 19 nt, Artificial Sequence
  Description of Artificial Sequence: Synthetic oligonucleotide
gggcuaggggcaaauaucc

SEQ ID NO: 562456 - RNA, 19 nt, Artificial Sequence
  Description of Artificial Sequence: Synthetic oligonucleotide
cucgcuuuagcaaacuaau

SEQ ID NO: 562457 - RNA, 19 nt, Artificial Sequence
  Description of Artificial Sequence: Synthetic oligonucleotide
gcucaaacgaauuuucagu

SEQ ID NO: 562458 - RNA, 19 nt, Artificial Sequence
  Description of Artificial Sequence: Synthetic oligonucleotide
cccaguuauagcagcaaug

SEQ ID NO: 562459 - RNA, 19 nt, Artificial Sequence
  Description of Artificial Sequence: Synthetic oligonucleotide
cugcuaaaguuugugguga

SEQ ID NO: 562460 - RNA, 19 nt, Artificial Sequence
  Description of Artificial Sequence: Synthetic oligonucleotide
gacgugggaccaacgagac

SEQ ID NO: 562461 - RNA, 19 nt, Artificial Sequence
  Description of Artificial Sequence: Synthetic oligonucleotide
gaguagccaauucggcauc

SEQ ID NO: 562462 - RNA, 19 nt, Artificial Sequence
  Description of Artificial Sequence: Synthetic oligonucleotide
uggaauuccuguggaccca

SEQ ID NO: 562463 - RNA, 19 nt, Artificial Sequence
  Description of Artificial Sequence: Synthetic oligonucleotide
guagauccgauccaugauu

SEQ ID NO: 562464 - RNA, 19 nt, Artificial Sequence
  Description of Artificial Sequence: Synthetic oligonucleotide
aucucccgugcagagccac

SEQ ID NO: 562465 - RNA, 19 nt, Artificial Sequence
  Description of Artificial Sequence: Synthetic oligonucleotide
gaaucgcuguguuguugca

SEQ ID NO: 562466 - RNA, 19 nt, Artificial Sequence
  Description of Artificial Sequence: Synthetic oligonucleotide
cuaauccugucaguuaaaa

SEQ ID NO: 562467 - RNA, 19 nt, Artificial Sequence
  Description of Artificial Sequence: Synthetic oligonucleotide
ucccacucugccgguauug

SEQ ID NO: 562468 - RNA, 19 nt, Artificial Sequence
  Description of Artificial Sequence: Synthetic oligonucleotide
caauuacguaagaauggua

SEQ ID NO: 562469 - RNA, 19 nt, Artificial Sequence
  Description of Artificial Sequence: Synthetic oligonucleotide
ggggcaaauauccaaugua

SEQ ID NO: 562470 - RNA, 19 nt, Artificial Sequence
  Description of Artificial Sequence: Synthetic oligonucleotide
ucucccgugcagagccacc

SEQ ID NO: 562471 - RNA, 19 nt, Artificial Sequence
  Description of Artificial Sequence: Synthetic oligonucleotide
acacaagcucggcacuuaa

SEQ ID NO: 562472 - RNA, 19 nt, Artificial Sequence
  Description of Artificial Sequence: Synthetic oligonucleotide
ucccaucaacaguaaugau

SEQ ID NO: 562473 - RNA, 19 nt, Artificial Sequence
  Description of Artificial Sequence: Synthetic oligonucleotide
gcgaauauuuccacccagc

SEQ ID NO: 562474 - RNA, 19 nt, Artificial Sequence
  Description of Artificial Sequence: Synthetic oligonucleotide
auauggcgcagacguggga

SEQ ID NO: 562475 - RNA, 19 nt, Artificial Sequence
  Description of Artificial Sequence: Synthetic oligonucleotide
gguauuguagucccacacu

SEQ ID NO: 562476 - RNA, 19 nt, Artificial Sequence
  Description of Artificial Sequence: Synthetic oligonucleotide
ccaucccaguuauagcagc

SEQ ID NO: 562477 - RNA, 19 nt, Artificial Sequence
  Description of Artificial Sequence: Synthetic oligonucleotide
gucccacacuucuguaaug

SEQ ID NO: 562478 - RNA, 19 nt, Artificial Sequence
  Description of Artificial Sequence: Synthetic oligonucleotide
ucauucuagcuagcuccgu

SEQ ID NO: 562479 - RNA, 19 nt, Artificial Sequence
  Description of Artificial Sequence: Synthetic oligonucleotide
cuaggggcaaauauccaau

SEQ ID NO: 562480 - RNA, 19 nt, Artificial Sequence
  Description of Artificial Sequence: Synthetic oligonucleotide
gccugcgcagcaaucaucc

SEQ ID NO: 562481 - RNA, 19 nt, Artificial Sequence
  Description of Artificial Sequence: Synthetic oligonucleotide
caguaaugauauggcgcag

SEQ ID NO: 562482 - RNA, 19 nt, Artificial Sequence
  Description of Artificial Sequence: Synthetic oligonucleotide
caugacuccuuuuggaauu

SEQ ID NO: 562483 - RNA, 19 nt, Artificial Sequence
  Description of Artificial Sequence: Synthetic oligonucleotide
uaucucccgugcagagcca

SEQ ID NO: 562484 - RNA, 19 nt, Artificial Sequence
  Description of Artificial Sequence: Synthetic oligonucleotide
guaacgagcuggaaguuau

SEQ ID NO: 562485 - RNA, 19 nt, Artificial Sequence
  Description of Artificial Sequence: Synthetic oligonucleotide
cuuugcguuucaacuugaa

SEQ ID NO: 562486 - RNA, 19 nt, Artificial Sequence
  Description of Artificial Sequence: Synthetic oligonucleotide
augccugcgcagcaaucau

SEQ ID NO: 562487 - RNA, 19 nt, Artificial Sequence
  Description of Artificial Sequence: Synthetic oligonucleotide
augauauggcgcagacgug

SEQ ID NO: 562488 - RNA, 19 nt, Artificial Sequence
  Description of Artificial Sequence: Synthetic oligonucleotide
gcagacgugggaccaacga

SEQ ID NO: 562489 - RNA, 19 nt, Artificial Sequence
  Description of Artificial Sequence: Synthetic oligonucleotide
cggcacuuaauucuagaac

SEQ ID NO: 562490 - RNA, 19 nt, Artificial Sequence
  Description of Artificial Sequence: Synthetic oligonucleotide
aucccaguuauagcagcaa

SEQ ID NO: 562491 - RNA, 19 nt, Artificial Sequence
  Description of Artificial Sequence: Synthetic oligonucleotide
augacacccuuggggaacu

SEQ ID NO: 562492 - RNA, 19 nt, Artificial Sequence
  Description of Artificial Sequence: Synthetic oligonucleotide
aguaacagcugggguuuaa

SEQ ID NO: 562493 - RNA, 19 nt, Artificial Sequence
  Description of Artificial Sequence: Synthetic oligonucleotide
acuaauccugucaguuaaa

SEQ ID NO: 562494 - RNA, 19 nt, Artificial Sequence
  Description of Artificial Sequence: Synthetic oligonucleotide
agcggucacacaggggagu

SEQ ID NO: 562495 - RNA, 19 nt, Artificial Sequence
  Description of Artificial Sequence: Synthetic oligonucleotide
accaacgggacagcagaaa

SEQ ID NO: 562496 - RNA, 19 nt, Artificial Sequence
  Description of Artificial Sequence: Synthetic oligonucleotide
cacuccgagagccugcacu

SEQ ID NO: 562497 - RNA, 19 nt, Artificial Sequence
  Description of Artificial Sequence: Synthetic oligonucleotide
gugacguggugagaaguaa

SEQ ID NO: 562498 - RNA, 19 nt, Artificial Sequence
  Description of Artificial Sequence: Synthetic oligonucleotide
cgguauuguagucccacac

SEQ ID NO: 562499 - RNA, 19 nt, Artificial Sequence
  Description of Artificial Sequence: Synthetic oligonucleotide
gucacauuuuggccaccaa

SEQ ID NO: 562500 - RNA, 19 nt, Artificial Sequence
  Description of Artificial Sequence: Synthetic oligonucleotide
gcauacaggguaacgagcu

SEQ ID NO: 562501 - RNA, 19 nt, Artificial Sequence
  Description of Artificial Sequence: Synthetic oligonucleotide
gguccccuuaaauccuuuc

SEQ ID NO: 562502 - RNA, 19 nt, Artificial Sequence
  Description of Artificial Sequence: Synthetic oligonucleotide
cgauccaugauuuccggaa

SEQ ID NO: 562503 - RNA, 19 nt, Artificial Sequence
  Description of Artificial Sequence: Synthetic oligonucleotide
gccccaguagauucuguga

SEQ ID NO: 562504 - RNA, 19 nt, Artificial Sequence
  Description of Artificial Sequence: Synthetic oligonucleotide
cauuuaguccgugaacaau

SEQ ID NO: 562505 - RNA, 19 nt, Artificial Sequence
  Description of Artificial Sequence: Synthetic oligonucleotide
cugucucauuuaguccgug

SEQ ID NO: 562506 - RNA, 19 nt, Artificial Sequence
  Description of Artificial Sequence: Synthetic oligonucleotide
gggcaaauauccaauguau

SEQ ID NO: 562507 - RNA, 19 nt, Artificial Sequence
  Description of Artificial Sequence: Synthetic oligonucleotide
aguaccccauugucacauu

SEQ ID NO: 562508 - RNA, 19 nt, Artificial Sequence
  Description of Artificial Sequence: Synthetic oligonucleotide
gccgguauuguagucccac

SEQ ID NO: 562509 - RNA, 19 nt, Artificial Sequence
  Description of Artificial Sequence: Synthetic oligonucleotide
gaacaugggcuaggggcaa

SEQ ID NO: 562510 - RNA, 19 nt, Artificial Sequence
  Description of Artificial Sequence: Synthetic oligonucleotide
cagugggagguucuucaaa

SEQ ID NO: 562511 - RNA, 19 nt, Artificial Sequence
  Description of Artificial Sequence: Synthetic oligonucleotide
cuccgagagccugcacugc

SEQ ID NO: 562512 - RNA, 19 nt, Artificial Sequence
  Description of Artificial Sequence: Synthetic oligonucleotide
agcucggcacuuaauucua

SEQ ID NO: 562513 - RNA, 19 nt, Artificial Sequence
  Description of Artificial Sequence: Synthetic oligonucleotide
cacccuuggggaacucaga

SEQ ID NO: 562514 - RNA, 19 nt, Artificial Sequence
  Description of Artificial Sequence: Synthetic oligonucleotide
guuuuccacgcuggccuuc

SEQ ID NO: 562515 - RNA, 19 nt, Artificial Sequence
  Description of Artificial Sequence: Synthetic oligonucleotide
gguaacgagcuggaaguua

SEQ ID NO: 562516 - RNA, 19 nt, Artificial Sequence
  Description of Artificial Sequence: Synthetic oligonucleotide
ccacacaauaaaaggcgaa

SEQ ID NO: 562517 - RNA, 19 nt, Artificial Sequence
  Description of Artificial Sequence: Synthetic oligonucleotide
cgugggaccaacgagacua

SEQ ID NO: 562518 - RNA, 19 nt, Artificial Sequence
  Description of Artificial Sequence: Synthetic oligonucleotide
cacccuuuugaaaucuguu

SEQ ID NO: 562519 - RNA, 19 nt, Artificial Sequence
  Description of Artificial Sequence: Synthetic oligonucleotide
ccaauaucucccgugcaga

SEQ ID NO: 562520 - RNA, 19 nt, Artificial Sequence
  Description of Artificial Sequence: Synthetic oligonucleotide
acccacuuguauacaugau

SEQ ID NO: 562521 - RNA, 19 nt, Artificial Sequence
  Description of Artificial Sequence: Synthetic oligonucleotide
caguuauagcagcaaugau

SEQ ID NO: 562522 - RNA, 19 nt, Artificial Sequence
  Description of Artificial Sequence: Synthetic oligonucleotide
ccaauuacguaagaauggu

SEQ ID NO: 562523 - RNA, 19 nt, Artificial Sequence
  Description of Artificial Sequence: Synthetic oligonucleotide
ugggaccaacgagacuaua

SEQ ID NO: 562524 - RNA, 19 nt, Artificial Sequence
  Description of Artificial Sequence: Synthetic oligonucleotide
ggugacguggugagaagua

SEQ ID NO: 562525 - RNA, 19 nt, Artificial Sequence
  Description of Artificial Sequence: Synthetic oligonucleotide
caggggaguaguacacccu

SEQ ID NO: 562526 - RNA, 19 nt, Artificial Sequence
  Description of Artificial Sequence: Synthetic oligonucleotide
gggaguaguacacccuuuu

SEQ ID NO: 562527 - RNA, 19 nt, Artificial Sequence
  Description of Artificial Sequence: Synthetic oligonucleotide
gcguuucaacuugaaggca

SEQ ID NO: 562528 - RNA, 19 nt, Artificial Sequence
  Description of Artificial Sequence: Synthetic oligonucleotide
gggaccaacgagacuauau

SEQ ID NO: 562529 - RNA, 19 nt, Artificial Sequence
  Description of Artificial Sequence: Synthetic oligonucleotide
cagggcucaaacgaauuuu

SEQ ID NO: 562530 - RNA, 19 nt, Artificial Sequence
  Description of Artificial Sequence: Synthetic oligonucleotide
caugaaucgcuguguuguu

SEQ ID NO: 562531 - RNA, 19 nt, Artificial Sequence
  Description of Artificial Sequence: Synthetic oligonucleotide
gcauacgcacaaauguuau

SEQ ID NO: 562532 - RNA, 19 nt, Artificial Sequence
  Description of Artificial Sequence: Synthetic oligonucleotide
ggcuaggggcaaauaucca

SEQ ID NO: 562533 - RNA, 19 nt, Artificial Sequence
  Description of Artificial Sequence: Synthetic oligonucleotide
cccacuuguauacaugauu

SEQ ID NO: 562534 - RNA, 19 nt, Artificial Sequence
  Description of Artificial Sequence: Synthetic oligonucleotide
ggguagcauacaggguaac

SEQ ID NO: 562535 - RNA, 19 nt, Artificial Sequence
  Description of Artificial Sequence: Synthetic oligonucleotide
ccgauccaugauuuccgga

SEQ ID NO: 562536 - RNA, 19 nt, Artificial Sequence
  Description of Artificial Sequence: Synthetic oligonucleotide
gagcucgcuuuagcaaacu

SEQ ID NO: 562537 - RNA, 19 nt, Artificial Sequence
  Description of Artificial Sequence: Synthetic oligonucleotide
gggucagggcucaaacgaa

SEQ ID NO: 562538 - RNA, 19 nt, Artificial Sequence
  Description of Artificial Sequence: Synthetic oligonucleotide
ccaacgagacuauauccuu

SEQ ID NO: 562539 - RNA, 19 nt, Artificial Sequence
  Description of Artificial Sequence: Synthetic oligonucleotide
ccgguauuguagucccaca

SEQ ID NO: 562540 - RNA, 19 nt, Artificial Sequence
  Description of Artificial Sequence: Synthetic oligonucleotide
caugggcuaggggcaaaua

SEQ ID NO: 562541 - RNA, 19 nt, Artificial Sequence
  Description of Artificial Sequence: Synthetic oligonucleotide
agguccccuuaaauccuuu

SEQ ID NO: 562542 - RNA, 19 nt, Artificial Sequence
  Description of Artificial Sequence: Synthetic oligonucleotide
auccgucaccagaccaguu

SEQ ID NO: 562543 - RNA, 19 nt, Artificial Sequence
  Description of Artificial Sequence: Synthetic oligonucleotide
ggucagggcucaaacgaau

SEQ ID NO: 562544 - RNA, 19 nt, Artificial Sequence
  Description of Artificial Sequence: Synthetic oligonucleotide
ccccaguaugauucagaaa

SEQ ID NO: 562545 - RNA, 19 nt, Artificial Sequence
  Description of Artificial Sequence: Synthetic oligonucleotide
caaucagugggagguucuu

SEQ ID NO: 562546 - RNA, 19 nt, Artificial Sequence
  Description of Artificial Sequence: Synthetic oligonucleotide
ggucccagccccaguagau

SEQ ID NO: 562547 - RNA, 19 nt, Artificial Sequence
  Description of Artificial Sequence: Synthetic oligonucleotide
ccugcgcagcaaucaucca

SEQ ID NO: 562548 - RNA, 19 nt, Artificial Sequence
  Description of Artificial Sequence: Synthetic oligonucleotide
ccacucugccgguauugua

SEQ ID NO: 562549 - RNA, 19 nt, Artificial Sequence
  Description of Artificial Sequence: Synthetic oligonucleotide
gugggaccaacgagacuau

SEQ ID NO: 562550 - RNA, 19 nt, Artificial Sequence
  Description of Artificial Sequence: Synthetic oligonucleotide
ccgugaguuccuuuugauu

SEQ ID NO: 562551 - RNA, 19 nt, Artificial Sequence
  Description of Artificial Sequence: Synthetic oligonucleotide
gcggucacacaggggagua

SEQ ID NO: 562552 - RNA, 19 nt, Artificial Sequence
  Description of Artificial Sequence: Synthetic oligonucleotide
ccaugggucagggcucaaa

SEQ ID NO: 562553 - RNA, 19 nt, Artificial Sequence
  Description of Artificial Sequence: Synthetic oligonucleotide
ggggaguaguacacccuuu

SEQ ID NO: 562554 - RNA, 19 nt, Artificial Sequence
  Description of Artificial Sequence: Synthetic oligonucleotide
ggguaacgagcuggaaguu

SEQ ID NO: 562555 - RNA, 19 nt, Artificial Sequence
  Description of Artificial Sequence: Synthetic oligonucleotide
cccacucugccgguauugu

SEQ ID NO: 562556 - RNA, 19 nt, Artificial Sequence
  Description of Artificial Sequence: Synthetic oligonucleotide
agaaauauauauuagugcc

SEQ ID NO: 562557 - RNA, 19 nt, Artificial Sequence
  Description of Artificial Sequence: Synthetic oligonucleotide
aauuuaucuuaacaugugc

SEQ ID NO: 562558 - RNA, 19 nt, Artificial Sequence
  Description of Artificial Sequence: Synthetic oligonucleotide
uuuauuuugaagaagcgca

SEQ ID NO: 562559 - RNA, 19 nt, Artificial Sequence
  Description of Artificial Sequence: Synthetic oligonucleotide
uaacuaaauagcuauaucc

SEQ ID NO: 562560 - RNA, 19 nt, Artificial Sequence
  Description of Artificial Sequence: Synthetic oligonucleotide
aauccgugaagucuaacac

SEQ ID NO: 562561 - RNA, 19 nt, Artificial Sequence
  Description of Artificial Sequence: Synthetic oligonucleotide
ucuuguucggaauugacag

SEQ ID NO: 562562 - RNA, 19 nt, Artificial Sequence
  Description of Artificial Sequence: Synthetic oligonucleotide
caacauaugcugaagaggg

SEQ ID NO: 562563 - RNA, 19 nt, Artificial Sequence
  Description of Artificial Sequence: Synthetic oligonucleotide
ucuucuauaaguuggguga

SEQ ID NO: 562564 - RNA, 19 nt, Artificial Sequence
  Description of Artificial Sequence: Synthetic oligonucleotide
aauauauauuagugccugc

SEQ ID NO: 562565 - RNA, 19 nt, Artificial Sequence
  Description of Artificial Sequence: Synthetic oligonucleotide
agagguaugauccuucuuc

SEQ ID NO: 562566 - RNA, 19 nt, Artificial Sequence
  Description of Artificial Sequence: Synthetic oligonucleotide
uuuucuacuauaauccgug

SEQ ID NO: 562567 - RNA, 19 nt, Artificial Sequence
  Description of Artificial Sequence: Synthetic oligonucleotide
uauaaguugggugaaaagc

SEQ ID NO: 562568 - RNA, 19 nt, Artificial Sequence
  Description of Artificial Sequence: Synthetic oligonucleotide
auaucuagcacguagcuca

SEQ ID NO: 562569 - RNA, 19 nt, Artificial Sequence
  Description of Artificial Sequence: Synthetic oligonucleotide
uguccuauguaucuuuacg

SEQ ID NO: 562570 - RNA, 19 nt, Artificial Sequence
  Description of Artificial Sequence: Synthetic oligonucleotide
aauggacuaaccaccagcc

SEQ ID NO: 562571 - RNA, 19 nt, Artificial Sequence
  Description of Artificial Sequence: Synthetic oligonucleotide
uccauuaacugacaucacg

SEQ ID NO: 562572 - RNA, 19 nt, Artificial Sequence
  Description of Artificial Sequence: Synthetic oligonucleotide
aaauauauauuagugccug

SEQ ID NO: 562573 - RNA, 19 nt, Artificial Sequence
  Description of Artificial Sequence: Synthetic oligonucleotide
uguccauuaacugacauca

SEQ ID NO: 562574 - RNA, 19 nt, Artificial Sequence
  Description of Artificial Sequence: Synthetic oligonucleotide
gaguuaucaaacuugagga

SEQ ID NO: 562575 - RNA, 19 nt, Artificial Sequence
  Description of Artificial Sequence: Synthetic oligonucleotide
uuaagcacugguuaggaga

SEQ ID NO: 562576 - RNA, 19 nt, Artificial Sequence
  Description of Artificial Sequence: Synthetic oligonucleotide
uuacgugucaauuaucuac

SEQ ID NO: 562577 - RNA, 19 nt, Artificial Sequence
  Description of Artificial Sequence: Synthetic oligonucleotide
uagucuaaguuuaacauuc

SEQ ID NO: 562578 - RNA, 19 nt, Artificial Sequence
  Description of Artificial Sequence: Synthetic oligonucleotide
uuugaauagucuaaguuua

SEQ ID NO: 562579 - RNA, 19 nt, Artificial Sequence
  Description of Artificial Sequence: Synthetic oligonucleotide
guuagcaguagugugaacg

SEQ ID NO: 562580 - RNA, 19 nt, Artificial Sequence
  Description of Artificial Sequence: Synthetic oligonucleotide
aaccuuagacuccaggcuc

SEQ ID NO: 562581 - RNA, 19 nt, Artificial Sequence
  Description of Artificial Sequence: Synthetic oligonucleotide
aguauaguagacucuguag

SEQ ID NO: 562582 - RNA, 19 nt, Artificial Sequence
  Description of Artificial Sequence: Synthetic oligonucleotide
uuaacugacaucacgucac

SEQ ID NO: 562583 - RNA, 19 nt, Artificial Sequence
  Description of Artificial Sequence: Synthetic oligonucleotide
acauaacuaacuaaauagc

SEQ ID NO: 562584 - RNA, 19 nt, Artificial Sequence
  Description of Artificial Sequence: Synthetic oligonucleotide
gauguuauuuuggagacug

SEQ ID NO: 562585 - RNA, 19 nt, Artificial Sequence
  Description of Artificial Sequence: Synthetic oligonucleotide
ugaauaucuagcacguagc

SEQ ID NO: 562586 - RNA, 19 nt, Artificial Sequence
  Description of Artificial Sequence: Synthetic oligonucleotide
ucagcuaugaacaggugac

SEQ ID NO: 562587 - RNA, 19 nt, Artificial Sequence
  Description of Artificial Sequence: Synthetic oligonucleotide
uggacuaaccaccagccag

SEQ ID NO: 562588 - RNA, 19 nt, Artificial Sequence
  Description of Artificial Sequence: Synthetic oligonucleotide
uuauuuugaagaagcgcag

SEQ ID NO: 562589 - RNA, 19 nt, Artificial Sequence
  Description of Artificial Sequence: Synthetic oligonucleotide
uuuuguuagcaguagugug

SEQ ID NO: 562590 - RNA, 19 nt, Artificial Sequence
  Description of Artificial Sequence: Synthetic oligonucleotide
ucggaauugacaguguggg

SEQ ID NO: 562591 - RNA, 19 nt, Artificial Sequence
  Description of Artificial Sequence: Synthetic oligonucleotide
cuuaacaugugcaaggaca

SEQ ID NO: 562592 - RNA, 19 nt, Artificial Sequence
  Description of Artificial Sequence: Synthetic oligonucleotide
cugaauaucuagcacguag

SEQ ID NO: 562593 - RNA, 19 nt, Artificial Sequence
  Description of Artificial Sequence: Synthetic oligonucleotide
aacuaaauagcuauaucca

SEQ ID NO: 562594 - RNA, 19 nt, Artificial Sequence
  Description of Artificial Sequence: Synthetic oligonucleotide
uuuaucuaguauaguagac

SEQ ID NO: 562595 - RNA, 19 nt, Artificial Sequence
  Description of Artificial Sequence: Synthetic oligonucleotide
aacuccaguaucuacuagu

SEQ ID NO: 562596 - RNA, 19 nt, Artificial Sequence
  Description of Artificial Sequence: Synthetic oligonucleotide
uaacauaacuaacuaaaua

SEQ ID NO: 562597 - RNA, 19 nt, Artificial Sequence
  Description of Artificial Sequence: Synthetic oligonucleotide
uaguagacugacuuggacc

SEQ ID NO: 562598 - RNA, 19 nt, Artificial Sequence
  Description of Artificial Sequence: Synthetic oligonucleotide
cuacuaguggcucuguugg

SEQ ID NO: 562599 - RNA, 19 nt, Artificial Sequence
  Description of Artificial Sequence: Synthetic oligonucleotide
aguagacugacuuggaccu

SEQ ID NO: 562600 - RNA, 19 nt, Artificial Sequence
  Description of Artificial Sequence: Synthetic oligonucleotide
aauaucuagcacguagcuc

SEQ ID NO: 562601 - RNA, 19 nt, Artificial Sequence
  Description of Artificial Sequence: Synthetic oligonucleotide
uaucuacugaguuugaaua

SEQ ID NO: 562602 - RNA, 19 nt, Artificial Sequence
  Description of Artificial Sequence: Synthetic oligonucleotide
auuaacugacaucacguca

SEQ ID NO: 562603 - RNA, 19 nt, Artificial Sequence
  Description of Artificial Sequence: Synthetic oligonucleotide
ucaacaagccaaaggacga

SEQ ID NO: 562604 - RNA, 19 nt, Artificial Sequence
  Description of Artificial Sequence: Synthetic oligonucleotide
ucguacugugaucacagag

SEQ ID NO: 562605 - RNA, 19 nt, Artificial Sequence
  Description of Artificial Sequence: Synthetic oligonucleotide
uucuucuauaaguugggug

SEQ ID NO: 562606 - RNA, 19 nt, Artificial Sequence
  Description of Artificial Sequence: Synthetic oligonucleotide
acguagcucacguaacucc

SEQ ID NO: 562607 - RNA, 19 nt, Artificial Sequence
  Description of Artificial Sequence: Synthetic oligonucleotide
cuaugaacaggugacagag

SEQ ID NO: 562608 - RNA, 19 nt, Artificial Sequence
  Description of Artificial Sequence: Synthetic oligonucleotide
uuguaugggcccaagagaa

SEQ ID NO: 562609 - RNA, 19 nt, Artificial Sequence
  Description of Artificial Sequence: Synthetic oligonucleotide
uaauccgugaagucuaaca

SEQ ID NO: 562610 - RNA, 19 nt, Artificial Sequence
  Description of Artificial Sequence: Synthetic oligonucleotide
aguuaucaaacuugaggag

SEQ ID NO: 562611 - RNA, 19 nt, Artificial Sequence
  Description of Artificial Sequence: Synthetic oligonucleotide
agccuaaugaauauucugg

SEQ ID NO: 562612 - RNA, 19 nt, Artificial Sequence
  Description of Artificial Sequence: Synthetic oligonucleotide
agaacguuuuguuagcagu

SEQ ID NO: 562613 - RNA, 19 nt, Artificial Sequence
  Description of Artificial Sequence: Synthetic oligonucleotide
caucagaacaaaaucaaga

SEQ ID NO: 562614 - RNA, 19 nt, Artificial Sequence
  Description of Artificial Sequence: Synthetic oligonucleotide
uuaucuaguauaguagacu

SEQ ID NO: 562615 - RNA, 19 nt, Artificial Sequence
  Description of Artificial Sequence: Synthetic oligonucleotide
uccuauguaucuuuacgug

SEQ ID NO: 562616 - RNA, 19 nt, Artificial Sequence
  Description of Artificial Sequence: Synthetic oligonucleotide
ugaguuugaauagucuaag

SEQ ID NO: 562617 - RNA, 19 nt, Artificial Sequence
  Description of Artificial Sequence: Synthetic oligonucleotide
uagugugaacgguaagugg

SEQ ID NO: 562618 - RNA, 19 nt, Artificial Sequence
  Description of Artificial Sequence: Synthetic oligonucleotide
gucuguagcaaauucccag

SEQ ID NO: 562619 - RNA, 19 nt, Artificial Sequence
  Description of Artificial Sequence: Synthetic oligonucleotide
aucuacugaguuugaauag

SEQ ID NO: 562620 - RNA, 19 nt, Artificial Sequence
  Description of Artificial Sequence: Synthetic oligonucleotide
ucaauuaucuacugaguuu

SEQ ID NO: 562621 - RNA, 19 nt, Artificial Sequence
  Description of Artificial Sequence: Synthetic oligonucleotide
caauggacuaaccaccagc

SEQ ID NO: 562622 - RNA, 19 nt, Artificial Sequence
  Description of Artificial Sequence: Synthetic oligonucleotide
cuauguaucuuuacguguc

SEQ ID NO: 562623 - RNA, 19 nt, Artificial Sequence
  Description of Artificial Sequence: Synthetic oligonucleotide
ugagcuguccuauguaucu

SEQ ID NO: 562624 - RNA, 19 nt, Artificial Sequence
  Description of Artificial Sequence: Synthetic oligonucleotide
aauccuaacucugugguuu

SEQ ID NO: 562625 - RNA, 19 nt, Artificial Sequence
  Description of Artificial Sequence: Synthetic oligonucleotide
aggaguaggaguuaucaaa

SEQ ID NO: 562626 - RNA, 19 nt, Artificial Sequence
  Description of Artificial Sequence: Synthetic oligonucleotide
uauaguagacucuguagua

SEQ ID NO: 562627 - RNA, 19 nt, Artificial Sequence
  Description of Artificial Sequence: Synthetic oligonucleotide
agcaagaguucacaaacca

SEQ ID NO: 562628 - RNA, 19 nt, Artificial Sequence
  Description of Artificial Sequence: Synthetic oligonucleotide
uuguucggaauugacagug

SEQ ID NO: 562629 - RNA, 19 nt, Artificial Sequence
  Description of Artificial Sequence: Synthetic oligonucleotide
ugucaauuaucuacugagu

SEQ ID NO: 562630 - RNA, 19 nt, Artificial Sequence
  Description of Artificial Sequence: Synthetic oligonucleotide
cuauaaguugggugaaaag

SEQ ID NO: 562631 - RNA, 19 nt, Artificial Sequence
  Description of Artificial Sequence: Synthetic oligonucleotide
auaaguugggugaaaagcu

SEQ ID NO: 562632 - RNA, 19 nt, Artificial Sequence
  Description of Artificial Sequence: Synthetic oligonucleotide
uaagcacugguuaggagaa

SEQ ID NO: 562633 - RNA, 19 nt, Artificial Sequence
  Description of Artificial Sequence: Synthetic oligonucleotide
ugcgucaucaaagucaaaa

SEQ ID NO: 562634 - RNA, 19 nt, Artificial Sequence
  Description of Artificial Sequence: Synthetic oligonucleotide
auauauauuagugccugcu

SEQ ID NO: 562635 - RNA, 19 nt, Artificial Sequence
  Description of Artificial Sequence: Synthetic oligonucleotide
auauauuagugccugcuuu

SEQ ID NO: 562636 - RNA, 19 nt, Artificial Sequence
  Description of Artificial Sequence: Synthetic oligonucleotide
ugacuacuucuccucgucg

SEQ ID NO: 562637 - RNA, 19 nt, Artificial Sequence
  Description of Artificial Sequence: Synthetic oligonucleotide
aagaagguaaacacugacu

SEQ ID NO: 562638 - RNA, 19 nt, Artificial Sequence
  Description of Artificial Sequence: Synthetic oligonucleotide
aacacugacuccaaugcgu

SEQ ID NO: 562639 - RNA, 19 nt, Artificial Sequence
  Description of Artificial Sequence: Synthetic oligonucleotide
cuaacuaaauagcuauauc

SEQ ID NO: 562640 - RNA, 19 nt, Artificial Sequence
  Description of Artificial Sequence: Synthetic oligonucleotide
agauuaagcacugguuagg

SEQ ID NO: 562641 - RNA, 19 nt, Artificial Sequence
  Description of Artificial Sequence: Synthetic oligonucleotide
aacguuuuguuagcaguag

SEQ ID NO: 562642 - RNA, 19 nt, Artificial Sequence
  Description of Artificial Sequence: Synthetic oligonucleotide
acugaguuugaauagucua

SEQ ID NO: 562643 - RNA, 19 nt, Artificial Sequence
  Description of Artificial Sequence: Synthetic oligonucleotide
gguuguaugggcccaagag

SEQ ID NO: 562644 - RNA, 19 nt, Artificial Sequence
  Description of Artificial Sequence: Synthetic oligonucleotide
auagcuauauccaaagcaa

SEQ ID NO: 562645 - RNA, 19 nt, Artificial Sequence
  Description of Artificial Sequence: Synthetic oligonucleotide
uucuacuauaauccgugaa

SEQ ID NO: 562646 - RNA, 19 nt, Artificial Sequence
  Description of Artificial Sequence: Synthetic oligonucleotide
aagccaaaggacgauaaaa

SEQ ID NO: 562647 - RNA, 19 nt, Artificial Sequence
  Description of Artificial Sequence: Synthetic oligonucleotide
acacagauuaagcacuggu

SEQ ID NO: 562648 - RNA, 19 nt, Artificial Sequence
  Description of Artificial Sequence: Synthetic oligonucleotide
gagaacguuuuguuagcag

SEQ ID NO: 562649 - RNA, 19 nt, Artificial Sequence
  Description of Artificial Sequence: Synthetic oligonucleotide
auagucuaaguuuaacauu

SEQ ID NO: 562650 - RNA, 19 nt, Artificial Sequence
  Description of Artificial Sequence: Synthetic oligonucleotide
uaucuuuacgugucaauua

SEQ ID NO: 562651 - RNA, 19 nt, Artificial Sequence
  Description of Artificial Sequence: Synthetic oligonucleotide
uauguaucuuuacguguca

SEQ ID NO: 562652 - RNA, 19 nt, Artificial Sequence
  Description of Artificial Sequence: Synthetic oligonucleotide
ugguccauuuuccaaggcu

SEQ ID NO: 562653 - RNA, 19 nt, Artificial Sequence
  Description of Artificial Sequence: Synthetic oligonucleotide
uccaaugcgucaucaaagu

SEQ ID NO: 562654 - RNA, 19 nt, Artificial Sequence
  Description of Artificial Sequence: Synthetic oligonucleotide
aguagugugaacgguaagu

SEQ ID NO: 562655 - RNA, 19 nt, Artificial Sequence
  Description of Artificial Sequence: Synthetic oligonucleotide
uuucuuguucggaauugac

SEQ ID NO: 562656 - RNA, 19 nt, Artificial Sequence
  Description of Artificial Sequence: Synthetic oligonucleotide
acuaacuaaauagcuauau

SEQ ID NO: 562657 - RNA, 19 nt, Artificial Sequence
  Description of Artificial Sequence: Synthetic oligonucleotide
uauauuagugccugcuuuu

SEQ ID NO: 562658 - RNA, 19 nt, Artificial Sequence
  Description of Artificial Sequence: Synthetic oligonucleotide
auuaagcacugguuaggag

SEQ ID NO: 562659 - RNA, 19 nt, Artificial Sequence
  Description of Artificial Sequence: Synthetic oligonucleotide
cauaacuaacuaaauagcu

SEQ ID NO: 562660 - RNA, 19 nt, Artificial Sequence
  Description of Artificial Sequence: Synthetic oligonucleotide
uaguagacucuguaguaga

SEQ ID NO: 562661 - RNA, 19 nt, Artificial Sequence
  Description of Artificial Sequence: Synthetic oligonucleotide
ucucuauucugugggaagc

SEQ ID NO: 562662 - RNA, 19 nt, Artificial Sequence
  Description of Artificial Sequence: Synthetic oligonucleotide
ucuuaacaugugcaaggac

SEQ ID NO: 562663 - RNA, 19 nt, Artificial Sequence
  Description of Artificial Sequence: Synthetic oligonucleotide
aacgcugggauguuauuuu

SEQ ID NO: 562664 - RNA, 19 nt, Artificial Sequence
  Description of Artificial Sequence: Synthetic oligonucleotide
cuuaugcagugccacaaac

SEQ ID NO: 562665 - RNA, 19 nt, Artificial Sequence
  Description of Artificial Sequence: Synthetic oligonucleotide
cacagagucugcauccugc

SEQ ID NO: 562666 - RNA, 19 nt, Artificial Sequence
  Description of Artificial Sequence: Synthetic oligonucleotide
uguaguagacugacuugga

SEQ ID NO: 562667 - RNA, 19 nt, Artificial Sequence
  Description of Artificial Sequence: Synthetic oligonucleotide
gaagcaacauaugcugaag

SEQ ID NO: 562668 - RNA, 19 nt, Artificial Sequence
  Description of Artificial Sequence: Synthetic oligonucleotide
cugucuaaccuuagacucc

SEQ ID NO: 562669 - RNA, 19 nt, Artificial Sequence
  Description of Artificial Sequence: Synthetic oligonucleotide
ugugaacgguaaguggacg

SEQ ID NO: 562670 - RNA, 19 nt, Artificial Sequence
  Description of Artificial Sequence: Synthetic oligonucleotide
ucggguucaacgcugggau

SEQ ID NO: 562671 - RNA, 19 nt, Artificial Sequence
  Description of Artificial Sequence: Synthetic oligonucleotide
cauguacugcgcuuccgcg

SEQ ID NO: 562672 - RNA, 19 nt, Artificial Sequence
  Description of Artificial Sequence: Synthetic oligonucleotide
guauaguagacucuguagu

SEQ ID NO: 562673 - RNA, 19 nt, Artificial Sequence
  Description of Artificial Sequence: Synthetic oligonucleotide
cacggcuacuucuuguugc

SEQ ID NO: 562674 - RNA, 19 nt, Artificial Sequence
  Description of Artificial Sequence: Synthetic oligonucleotide
uguaucuuuacgugucaau

SEQ ID NO: 562675 - RNA, 19 nt, Artificial Sequence
  Description of Artificial Sequence: Synthetic oligonucleotide
uacuauaauccgugaaguc

SEQ ID NO: 562676 - RNA, 19 nt, Artificial Sequence
  Description of Artificial Sequence: Synthetic oligonucleotide
uaagugacauacacugcuc

SEQ ID NO: 562677 - RNA, 19 nt, Artificial Sequence
  Description of Artificial Sequence: Synthetic oligonucleotide
cauuaacugacaucacguc

SEQ ID NO: 562678 - RNA, 19 nt, Artificial Sequence
  Description of Artificial Sequence: Synthetic oligonucleotide
gacagagacugcuauguaa

SEQ ID NO: 562679 - RNA, 19 nt, Artificial Sequence
  Description of Artificial Sequence: Synthetic oligonucleotide
guagugugaacgguaagug

SEQ ID NO: 562680 - RNA, 19 nt, Artificial Sequence
  Description of Artificial Sequence: Synthetic oligonucleotide
uagcuauauccaaagcaaa

SEQ ID NO: 562681 - RNA, 19 nt, Artificial Sequence
  Description of Artificial Sequence: Synthetic oligonucleotide
cuuuacgugucaauuaucu

SEQ ID NO: 562682 - RNA, 19 nt, Artificial Sequence
  Description of Artificial Sequence: Synthetic oligonucleotide
aguagacucuguaguagac

SEQ ID NO: 562683 - RNA, 19 nt, Artificial Sequence
  Description of Artificial Sequence: Synthetic oligonucleotide
acuaguggcucuguugguc

SEQ ID NO: 562684 - RNA, 19 nt, Artificial Sequence
  Description of Artificial Sequence: Synthetic oligonucleotide
uugaauagucuaaguuuaa

SEQ ID NO: 562685 - RNA, 19 nt, Artificial Sequence
  Description of Artificial Sequence: Synthetic oligonucleotide
uguggggcagccuaaugaa

SEQ ID NO: 562686 - RNA, 19 nt, Artificial Sequence
  Description of Artificial Sequence: Synthetic oligonucleotide
ugugaucacagagucugca

SEQ ID NO: 562687 - RNA, 19 nt, Artificial Sequence
  Description of Artificial Sequence: Synthetic oligonucleotide
gagguaugauccuucuuca

SEQ ID NO: 562688 - RNA, 19 nt, Artificial Sequence
  Description of Artificial Sequence: Synthetic oligonucleotide
uuucuacuauaauccguga

SEQ ID NO: 562689 - RNA, 19 nt, Artificial Sequence
  Description of Artificial Sequence: Synthetic oligonucleotide
ugccacaaacuucaguuuu

SEQ ID NO: 562690 - RNA, 19 nt, Artificial Sequence
  Description of Artificial Sequence: Synthetic oligonucleotide
guucggaauugacagugug

SEQ ID NO: 562691 - RNA, 19 nt, Artificial Sequence
  Description of Artificial Sequence: Synthetic oligonucleotide
aaauccuaacucugugguu

SEQ ID NO: 562692 - RNA, 19 nt, Artificial Sequence
  Description of Artificial Sequence: Synthetic oligonucleotide
guaguagacugacuuggac

SEQ ID NO: 562693 - RNA, 19 nt, Artificial Sequence
  Description of Artificial Sequence: Synthetic oligonucleotide
acuuuugaugauguaggca

SEQ ID NO: 562694 - RNA, 19 nt, Artificial Sequence
  Description of Artificial Sequence: Synthetic oligonucleotide
aaguggacgaaaaggccug

SEQ ID NO: 562695 - RNA, 19 nt, Artificial Sequence
  Description of Artificial Sequence: Synthetic oligonucleotide
uuuacgugucaauuaucua

SEQ ID NO: 562696 - RNA, 19 nt, Artificial Sequence
  Description of Artificial Sequence: Synthetic oligonucleotide
acgguaaguggacgaaaag

SEQ ID NO: 562697 - RNA, 19 nt, Artificial Sequence
  Description of Artificial Sequence: Synthetic oligonucleotide
ugacauacacugcucccaa

SEQ ID NO: 562698 - RNA, 19 nt, Artificial Sequence
  Description of Artificial Sequence: Synthetic oligonucleotide
uacacuuccucaugacagu

SEQ ID NO: 562699 - RNA, 19 nt, Artificial Sequence
  Description of Artificial Sequence: Synthetic oligonucleotide
cuaucauuccccaacacau

SEQ ID NO: 562700 - RNA, 19 nt, Artificial Sequence
  Description of Artificial Sequence: Synthetic oligonucleotide
uucugugggaagcaacaua

SEQ ID NO: 562701 - RNA, 19 nt, Artificial Sequence
  Description of Artificial Sequence: Synthetic oligonucleotide
uauaauccgugaagucuaa

SEQ ID NO: 562702 - RNA, 19 nt, Artificial Sequence
  Description of Artificial Sequence: Synthetic oligonucleotide
gaauaucuagcacguagcu

SEQ ID NO: 562703 - RNA, 19 nt, Artificial Sequence
  Description of Artificial Sequence: Synthetic oligonucleotide
gggauguuauuuuggagac

SEQ ID NO: 562704 - RNA, 19 nt, Artificial Sequence
  Description of Artificial Sequence: Synthetic oligonucleotide
ggcugaaagaaauauauau

SEQ ID NO: 562705 - RNA, 19 nt, Artificial Sequence
  Description of Artificial Sequence: Synthetic oligonucleotide
cuccaguaucuacuagugg

SEQ ID NO: 562706 - RNA, 19 nt, Artificial Sequence
  Description of Artificial Sequence: Synthetic oligonucleotide
acucagguaagaccaaguu

SEQ ID NO: 562707 - RNA, 19 nt, Artificial Sequence
  Description of Artificial Sequence: Synthetic oligonucleotide
cugugacuacuucuccucg

SEQ ID NO: 562708 - RNA, 19 nt, Artificial Sequence
  Description of Artificial Sequence: Synthetic oligonucleotide
uggggacucgaacugugac

SEQ ID NO: 562709 - RNA, 19 nt, Artificial Sequence
  Description of Artificial Sequence: Synthetic oligonucleotide
aacgguaaguggacgaaaa

SEQ ID NO: 562710 - RNA, 19 nt, Artificial Sequence
  Description of Artificial Sequence: Synthetic oligonucleotide
ggcuagaugagucuucuga

SEQ ID NO: 562711 - RNA, 19 nt, Artificial Sequence
  Description of Artificial Sequence: Synthetic oligonucleotide
ucacggcuacuucuuguug

SEQ ID NO: 562712 - RNA, 19 nt, Artificial Sequence
  Description of Artificial Sequence: Synthetic oligonucleotide
uguaugggcccaagagaac

SEQ ID NO: 562713 - RNA, 19 nt, Artificial Sequence
  Description of Artificial Sequence: Synthetic oligonucleotide
uuguuagcaguagugugaa

SEQ ID NO: 562714 - RNA, 19 nt, Artificial Sequence
  Description of Artificial Sequence: Synthetic oligonucleotide
uguucggaauugacagugu

SEQ ID NO: 562715 - RNA, 19 nt, Artificial Sequence
  Description of Artificial Sequence: Synthetic oligonucleotide
ugaaaagcuuuagaaccau

SEQ ID NO: 562716 - RNA, 19 nt, Artificial Sequence
  Description of Artificial Sequence: Synthetic oligonucleotide
uaacugacaucacgucacu

SEQ ID NO: 562717 - RNA, 19 nt, Artificial Sequence
  Description of Artificial Sequence: Synthetic oligonucleotide
acuccaguaucuacuagug

SEQ ID NO: 562718 - RNA, 19 nt, Artificial Sequence
  Description of Artificial Sequence: Synthetic oligonucleotide
auaauccgugaagucuaac

SEQ ID NO: 562719 - RNA, 19 nt, Artificial Sequence
  Description of Artificial Sequence: Synthetic oligonucleotide
gacauacacugcucccaag

SEQ ID NO: 562720 - RNA, 19 nt, Artificial Sequence
  Description of Artificial Sequence: Synthetic oligonucleotide
acguuuuguuagcaguagu

SEQ ID NO: 562721 - RNA, 19 nt, Artificial Sequence
  Description of Artificial Sequence: Synthetic oligonucleotide
cuggccuguccauuaacug

SEQ ID NO: 562722 - RNA, 19 nt, Artificial Sequence
  Description of Artificial Sequence: Synthetic oligonucleotide
gcgucaucaaagucaaaag

SEQ ID NO: 562723 - RNA, 19 nt, Artificial Sequence
  Description of Artificial Sequence: Synthetic oligonucleotide
agucacggcuacuucuugu

SEQ ID NO: 562724 - RNA, 19 nt, Artificial Sequence
  Description of Artificial Sequence: Synthetic oligonucleotide
ggaguaggaguuaucaaac

SEQ ID NO: 562725 - RNA, 19 nt, Artificial Sequence
  Description of Artificial Sequence: Synthetic oligonucleotide
uuuaaccucagagcaucaa

SEQ ID NO: 562726 - RNA, 19 nt, Artificial Sequence
  Description of Artificial Sequence: Synthetic oligonucleotide
ugugcgagcugcacuuggu

SEQ ID NO: 562727 - RNA, 19 nt, Artificial Sequence
  Description of Artificial Sequence: Synthetic oligonucleotide
gucaauuaucuacugaguu

SEQ ID NO: 562728 - RNA, 19 nt, Artificial Sequence
  Description of Artificial Sequence: Synthetic oligonucleotide
aagagguaugauccuucuu

SEQ ID NO: 562729 - RNA, 19 nt, Artificial Sequence
  Description of Artificial Sequence: Synthetic oligonucleotide
uggacucgcugacaugcac

SEQ ID NO: 562730 - RNA, 19 nt, Artificial Sequence
  Description of Artificial Sequence: Synthetic oligonucleotide
auguacugcgcuuccgcgu

SEQ ID NO: 562731 - RNA, 19 nt, Artificial Sequence
  Description of Artificial Sequence: Synthetic oligonucleotide
cagacagcaauggacuaac

SEQ ID NO: 562732 - RNA, 19 nt, Artificial Sequence
  Description of Artificial Sequence: Synthetic oligonucleotide
gugaacgguaaguggacga

SEQ ID NO: 562733 - RNA, 19 nt, Artificial Sequence
  Description of Artificial Sequence: Synthetic oligonucleotide
cugagcuguccuauguauc

SEQ ID NO: 562734 - RNA, 19 nt, Artificial Sequence
  Description of Artificial Sequence: Synthetic oligonucleotide
guccuauguaucuuuacgu

SEQ ID NO: 562735 - RNA, 19 nt, Artificial Sequence
  Description of Artificial Sequence: Synthetic oligonucleotide
agcauucggagagucuguc

SEQ ID NO: 562736 - RNA, 19 nt, Artificial Sequence
  Description of Artificial Sequence: Synthetic oligonucleotide
uaucuagcacguagcucac

SEQ ID NO: 562737 - RNA, 19 nt, Artificial Sequence
  Description of Artificial Sequence: Synthetic oligonucleotide
cagguaagaccaaguugag

SEQ ID NO: 562738 - RNA, 19 nt, Artificial Sequence
  Description of Artificial Sequence: Synthetic oligonucleotide
ugcugugcgagcugcacuu

SEQ ID NO: 562739 - RNA, 19 nt, Artificial Sequence
  Description of Artificial Sequence: Synthetic oligonucleotide
aacaagccaaaggacgaua

SEQ ID NO: 562740 - RNA, 19 nt, Artificial Sequence
  Description of Artificial Sequence: Synthetic oligonucleotide
ccaucagaacaaaaucaag

SEQ ID NO: 562741 - RNA, 19 nt, Artificial Sequence
  Description of Artificial Sequence: Synthetic oligonucleotide
auacugguggcugccagca

SEQ ID NO: 562742 - RNA, 19 nt, Artificial Sequence
  Description of Artificial Sequence: Synthetic oligonucleotide
cuaguggcucuguugguca

SEQ ID NO: 562743 - RNA, 19 nt, Artificial Sequence
  Description of Artificial Sequence: Synthetic oligonucleotide
caucacgucacuugcccca

SEQ ID NO: 562744 - RNA, 19 nt, Artificial Sequence
  Description of Artificial Sequence: Synthetic oligonucleotide
aacuaacuaaauagcuaua

SEQ ID NO: 562745 - RNA, 19 nt, Artificial Sequence
  Description of Artificial Sequence: Synthetic oligonucleotide
ugacagucccgccgguaca

SEQ ID NO: 562746 - RNA, 19 nt, Artificial Sequence
  Description of Artificial Sequence: Synthetic oligonucleotide
cguuuuguuagcaguagug

SEQ ID NO: 562747 - RNA, 19 nt, Artificial Sequence
  Description of Artificial Sequence: Synthetic oligonucleotide
guuuuguuagcaguagugu

SEQ ID NO: 562748 - RNA, 19 nt, Artificial Sequence
  Description of Artificial Sequence: Synthetic oligonucleotide
agagaacguuuuguuagca

SEQ ID NO: 562749 - RNA, 19 nt, Artificial Sequence
  Description of Artificial Sequence: Synthetic oligonucleotide
gaacguuuuguuagcagua

SEQ ID NO: 562750 - RNA, 19 nt, Artificial Sequence
  Description of Artificial Sequence: Synthetic oligonucleotide
cugugcgagcugcacuugg

SEQ ID NO: 562751 - RNA, 19 nt, Artificial Sequence
  Description of Artificial Sequence: Synthetic oligonucleotide
gugacuacuucuccucguc

SEQ ID NO: 562752 - RNA, 19 nt, Artificial Sequence
  Description of Artificial Sequence: Synthetic oligonucleotide
gaagagguaugauccuucu

SEQ ID NO: 562753 - RNA, 19 nt, Artificial Sequence
  Description of Artificial Sequence: Synthetic oligonucleotide
ugacuccaaugcgucauca

SEQ ID NO: 562754 - RNA, 19 nt, Artificial Sequence
  Description of Artificial Sequence: Synthetic oligonucleotide
agcacugguuaggagaaaa

SEQ ID NO: 562755 - RNA, 19 nt, Artificial Sequence
  Description of Artificial Sequence: Synthetic oligonucleotide
gacugaauaucuagcacgu

SEQ ID NO: 562756 - RNA, 19 nt, Artificial Sequence
  Description of Artificial Sequence: Synthetic oligonucleotide
acaaggaguaggaguuauc

SEQ ID NO: 562757 - RNA, 19 nt, Artificial Sequence
  Description of Artificial Sequence: Synthetic oligonucleotide
aucuaguauaguagacucu

SEQ ID NO: 562758 - RNA, 19 nt, Artificial Sequence
  Description of Artificial Sequence: Synthetic oligonucleotide
gaguuugaauagucuaagu

SEQ ID NO: 562759 - RNA, 19 nt, Artificial Sequence
  Description of Artificial Sequence: Synthetic oligonucleotide
gacuacuucuccucgucgu

SEQ ID NO: 562760 - RNA, 19 nt, Artificial Sequence
  Description of Artificial Sequence: Synthetic oligonucleotide
agcugcgaucacuggaaga

SEQ ID NO: 562761 - RNA, 19 nt, Artificial Sequence
  Description of Artificial Sequence: Synthetic oligonucleotide
ugacagagacugcuaugua

SEQ ID NO: 562762 - RNA, 19 nt, Artificial Sequence
  Description of Artificial Sequence: Synthetic oligonucleotide
ucggagagucuguccauuc

SEQ ID NO: 562763 - RNA, 19 nt, Artificial Sequence
  Description of Artificial Sequence: Synthetic oligonucleotide
ucgcugacaugcacacuga

SEQ ID NO: 562764 - RNA, 19 nt, Artificial Sequence
  Description of Artificial Sequence: Synthetic oligonucleotide
cugugaucacagagucugc

SEQ ID NO: 562765 - RNA, 19 nt, Artificial Sequence
  Description of Artificial Sequence: Synthetic oligonucleotide
uccucaugacagucccgcc

SEQ ID NO: 562766 - RNA, 19 nt, Artificial Sequence
  Description of Artificial Sequence: Synthetic oligonucleotide
acuacuucuccucgucgua

SEQ ID NO: 562767 - RNA, 19 nt, Artificial Sequence
  Description of Artificial Sequence: Synthetic oligonucleotide
caggucggguucaacgcug

SEQ ID NO: 562768 - RNA, 19 nt, Artificial Sequence
  Description of Artificial Sequence: Synthetic oligonucleotide
cucuguaguagacugacuu

SEQ ID NO: 562769 - RNA, 19 nt, Artificial Sequence
  Description of Artificial Sequence: Synthetic oligonucleotide
caguagugugaacgguaag

SEQ ID NO: 562770 - RNA, 19 nt, Artificial Sequence
  Description of Artificial Sequence: Synthetic oligonucleotide
uuucguucagggcgcucuc

SEQ ID NO: 562771 - RNA, 19 nt, Artificial Sequence
  Description of Artificial Sequence: Synthetic oligonucleotide
acaagccaaaggacgauaa

SEQ ID NO: 562772 - RNA, 19 nt, Artificial Sequence
  Description of Artificial Sequence: Synthetic oligonucleotide
uacuaguggcucuguuggu

SEQ ID NO: 562773 - RNA, 19 nt, Artificial Sequence
  Description of Artificial Sequence: Synthetic oligonucleotide
agggcuagaugagucuucu

SEQ ID NO: 562774 - RNA, 19 nt, Artificial Sequence
  Description of Artificial Sequence: Synthetic oligonucleotide
gucccgccgguacacaggc

SEQ ID NO: 562775 - RNA, 19 nt, Artificial Sequence
  Description of Artificial Sequence: Synthetic oligonucleotide
gcuagaugagucuucugaa

SEQ ID NO: 562776 - RNA, 19 nt, Artificial Sequence
  Description of Artificial Sequence: Synthetic oligonucleotide
uguuagcaguagugugaac

SEQ ID NO: 562777 - RNA, 19 nt, Artificial Sequence
  Description of Artificial Sequence: Synthetic oligonucleotide
ugcucccaagaacaauauu

SEQ ID NO: 562778 - RNA, 19 nt, Artificial Sequence
  Description of Artificial Sequence: Synthetic oligonucleotide
cugcauguacugcgcuucc

SEQ ID NO: 562779 - RNA, 19 nt, Artificial Sequence
  Description of Artificial Sequence: Synthetic oligonucleotide
caguaucuacuaguggcuc

SEQ ID NO: 562780 - RNA, 19 nt, Artificial Sequence
  Description of Artificial Sequence: Synthetic oligonucleotide
agucuaaguuuaacauucu

SEQ ID NO: 562781 - RNA, 19 nt, Artificial Sequence
  Description of Artificial Sequence: Synthetic oligonucleotide
ccuaucauuccccaacaca

SEQ ID NO: 562782 - RNA, 19 nt, Artificial Sequence
  Description of Artificial Sequence: Synthetic oligonucleotide
cuucaugaguggggacucg

SEQ ID NO: 562783 - RNA, 19 nt, Artificial Sequence
  Description of Artificial Sequence: Synthetic oligonucleotide
guuauuuuggagacugaau

SEQ ID NO: 562784 - RNA, 19 nt, Artificial Sequence
  Description of Artificial Sequence: Synthetic oligonucleotide
gccaggucggguucaacgc

SEQ ID NO: 562785 - RNA, 19 nt, Artificial Sequence
  Description of Artificial Sequence: Synthetic oligonucleotide
gugugaacgguaaguggac

SEQ ID NO: 562786 - RNA, 19 nt, Artificial Sequence
  Description of Artificial Sequence: Synthetic oligonucleotide
cacguagcucacguaacuc

SEQ ID NO: 562787 - RNA, 19 nt, Artificial Sequence
  Description of Artificial Sequence: Synthetic oligonucleotide
uccucgucguacugugauc

SEQ ID NO: 562788 - RNA, 19 nt, Artificial Sequence
  Description of Artificial Sequence: Synthetic oligonucleotide
aacugacaucacgucacuu

SEQ ID NO: 562789 - RNA, 19 nt, Artificial Sequence
  Description of Artificial Sequence: Synthetic oligonucleotide
auguaucuuuacgugucaa

SEQ ID NO: 562790 - RNA, 19 nt, Artificial Sequence
  Description of Artificial Sequence: Synthetic oligonucleotide
acgucacuugccccagcug

SEQ ID NO: 562791 - RNA, 19 nt, Artificial Sequence
  Description of Artificial Sequence: Synthetic oligonucleotide
aucacgucacuugccccag

SEQ ID NO: 562792 - RNA, 19 nt, Artificial Sequence
  Description of Artificial Sequence: Synthetic oligonucleotide
ucaacgcugggauguuauu

SEQ ID NO: 562793 - RNA, 19 nt, Artificial Sequence
  Description of Artificial Sequence: Synthetic oligonucleotide
aucuacuaguggcucuguu

SEQ ID NO: 562794 - RNA, 19 nt, Artificial Sequence
  Description of Artificial Sequence: Synthetic oligonucleotide
ucaugacagucccgccggu

SEQ ID NO: 562795 - RNA, 19 nt, Artificial Sequence
  Description of Artificial Sequence: Synthetic oligonucleotide
ccauuaacugacaucacgu

SEQ ID NO: 562796 - RNA, 19 nt, Artificial Sequence
  Description of Artificial Sequence: Synthetic oligonucleotide
gaacgguaaguggacgaaa

SEQ ID NO: 562797 - RNA, 19 nt, Artificial Sequence
  Description of Artificial Sequence: Synthetic oligonucleotide
caggaaaucuugguuccca

SEQ ID NO: 562798 - RNA, 19 nt, Artificial Sequence
  Description of Artificial Sequence: Synthetic oligonucleotide
cacagauuaagcacugguu

SEQ ID NO: 562799 - RNA, 19 nt, Artificial Sequence
  Description of Artificial Sequence: Synthetic oligonucleotide
gacucgaacugugacuacu

SEQ ID NO: 562800 - RNA, 19 nt, Artificial Sequence
  Description of Artificial Sequence: Synthetic oligonucleotide
gcauucggagagucugucc

SEQ ID NO: 562801 - RNA, 19 nt, Artificial Sequence
  Description of Artificial Sequence: Synthetic oligonucleotide
ccuggaucacucagguaag

SEQ ID NO: 562802 - RNA, 19 nt, Artificial Sequence
  Description of Artificial Sequence: Synthetic oligonucleotide
cucgucguacugugaucac

SEQ ID NO: 562803 - RNA, 19 nt, Artificial Sequence
  Description of Artificial Sequence: Synthetic oligonucleotide
gaauccaacuucagggcau

SEQ ID NO: 562804 - RNA, 19 nt, Artificial Sequence
  Description of Artificial Sequence: Synthetic oligonucleotide
gucggguucaacgcuggga

SEQ ID NO: 562805 - RNA, 19 nt, Artificial Sequence
  Description of Artificial Sequence: Synthetic oligonucleotide
uucggagagucuguccauu

SEQ ID NO: 562806 - RNA, 19 nt, Artificial Sequence
  Description of Artificial Sequence: Synthetic oligonucleotide
aggucggguucaacgcugg

SEQ ID NO: 562807 - RNA, 19 nt, Artificial Sequence
  Description of Artificial Sequence: Synthetic oligonucleotide
aggcugaaagaaauauaua

SEQ ID NO: 562808 - RNA, 19 nt, Artificial Sequence
  Description of Artificial Sequence: Synthetic oligonucleotide
gggacucgaacugugacua

SEQ ID NO: 562809 - RNA, 19 nt, Artificial Sequence
  Description of Artificial Sequence: Synthetic oligonucleotide
ccuauguaucuuuacgugu

SEQ ID NO: 562810 - RNA, 19 nt, Artificial Sequence
  Description of Artificial Sequence: Synthetic oligonucleotide
aguggacgaaaaggccuga

SEQ ID NO: 562811 - RNA, 19 nt, Artificial Sequence
  Description of Artificial Sequence: Synthetic oligonucleotide
aggggacagcaccgguuca

SEQ ID NO: 562812 - RNA, 19 nt, Artificial Sequence
  Description of Artificial Sequence: Synthetic oligonucleotide
acugaauaucuagcacgua

SEQ ID NO: 562813 - RNA, 19 nt, Artificial Sequence
  Description of Artificial Sequence: Synthetic oligonucleotide
cuaacacauggagcagaca

SEQ ID NO: 562814 - RNA, 19 nt, Artificial Sequence
  Description of Artificial Sequence: Synthetic oligonucleotide
ggucggguucaacgcuggg

SEQ ID NO: 562815 - RNA, 19 nt, Artificial Sequence
  Description of Artificial Sequence: Synthetic oligonucleotide
aagcacugguuaggagaaa

SEQ ID NO: 562816 - RNA, 19 nt, Artificial Sequence
  Description of Artificial Sequence: Synthetic oligonucleotide
ggacucgcugacaugcaca

SEQ ID NO: 562817 - RNA, 19 nt, Artificial Sequence
  Description of Artificial Sequence: Synthetic oligonucleotide
gucacggcuacuucuuguu

SEQ ID NO: 562818 - RNA, 19 nt, Artificial Sequence
  Description of Artificial Sequence: Synthetic oligonucleotide
gcaguagugugaacgguaa

SEQ ID NO: 562819 - RNA, 19 nt, Artificial Sequence
  Description of Artificial Sequence: Synthetic oligonucleotide
cuggacucgcugacaugca

SEQ ID NO: 562820 - RNA, 19 nt, Artificial Sequence
  Description of Artificial Sequence: Synthetic oligonucleotide
cguacugugaucacagagu

SEQ ID NO: 562821 - RNA, 19 nt, Artificial Sequence
  Description of Artificial Sequence: Synthetic oligonucleotide
guagacugacuuggaccuc

SEQ ID NO: 562822 - RNA, 19 nt, Artificial Sequence
  Description of Artificial Sequence: Synthetic oligonucleotide
ggguucaacgcugggaugu

SEQ ID NO: 562823 - RNA, 19 nt, Artificial Sequence
  Description of Artificial Sequence: Synthetic oligonucleotide
ccucgucguacugugauca

SEQ ID NO: 562824 - RNA, 19 nt, Artificial Sequence
  Description of Artificial Sequence: Synthetic oligonucleotide
cuuuucguucagggcgcuc

SEQ ID NO: 562825 - RNA, 19 nt, Artificial Sequence
  Description of Artificial Sequence: Synthetic oligonucleotide
cuggaucacucagguaaga

SEQ ID NO: 562826 - RNA, 19 nt, Artificial Sequence
  Description of Artificial Sequence: Synthetic oligonucleotide
gcugagcuguccuauguau

SEQ ID NO: 562827 - RNA, 19 nt, Artificial Sequence
  Description of Artificial Sequence: Synthetic oligonucleotide
gugcgagcugcacuuggua

SEQ ID NO: 562828 - RNA, 19 nt, Artificial Sequence
  Description of Artificial Sequence: Synthetic oligonucleotide
ccaguaucuacuaguggcu

SEQ ID NO: 562829 - RNA, 19 nt, Artificial Sequence
  Description of Artificial Sequence: Synthetic oligonucleotide
cuccucgucguacugugau

SEQ ID NO: 562830 - RNA, 19 nt, Artificial Sequence
  Description of Artificial Sequence: Synthetic oligonucleotide
cuugccccagcugcauuca

SEQ ID NO: 562831 - RNA, 19 nt, Artificial Sequence
  Description of Artificial Sequence: Synthetic oligonucleotide
cacguaacuccaguaucua

SEQ ID NO: 562832 - RNA, 19 nt, Artificial Sequence
  Description of Artificial Sequence: Synthetic oligonucleotide
cacgucacuugccccagcu

SEQ ID NO: 562833 - RNA, 19 nt, Artificial Sequence
  Description of Artificial Sequence: Synthetic oligonucleotide
guggggacucgaacuguga

SEQ ID NO: 562834 - RNA, 19 nt, Artificial Sequence
  Description of Artificial Sequence: Synthetic oligonucleotide
cugcgaucacuggaagaga

SEQ ID NO: 562835 - RNA, 19 nt, Artificial Sequence
  Description of Artificial Sequence: Synthetic oligonucleotide
ucccgccgguacacaggca

SEQ ID NO: 562836 - RNA, 19 nt, Artificial Sequence
  Description of Artificial Sequence: Synthetic oligonucleotide
ggacucgaacugugacuac

SEQ ID NO: 562837 - RNA, 19 nt, Artificial Sequence
  Description of Artificial Sequence: Synthetic oligonucleotide
gcacguagcucacguaacu

SEQ ID NO: 562838 - RNA, 19 nt, Artificial Sequence
  Description of Artificial Sequence: Synthetic oligonucleotide
gaccaaguugaggccauuu

SEQ ID NO: 562839 - RNA, 19 nt, Artificial Sequence
  Description of Artificial Sequence: Synthetic oligonucleotide
caacgcugggauguuauuu

SEQ ID NO: 562840 - RNA, 19 nt, Artificial Sequence
  Description of Artificial Sequence: Synthetic oligonucleotide
cagcauucggagagucugu

SEQ ID NO: 562841 - RNA, 19 nt, Artificial Sequence
  Description of Artificial Sequence: Synthetic oligonucleotide
guucaacgcugggauguua

SEQ ID NO: 562842 - RNA, 19 nt, Artificial Sequence
  Description of Artificial Sequence: Synthetic oligonucleotide
caugacagucccgccggua

SEQ ID NO: 562843 - RNA, 19 nt, Artificial Sequence
  Description of Artificial Sequence: Synthetic oligonucleotide
ggauguuauuuuggagacu

SEQ ID NO: 562844 - RNA, 19 nt, Artificial Sequence
  Description of Artificial Sequence: Synthetic oligonucleotide
cccagucacggcuacuucu

SEQ ID NO: 562845 - RNA, 19 nt, Artificial Sequence
  Description of Artificial Sequence: Synthetic oligonucleotide
caacaagccaaaggacgau

SEQ ID NO: 562846 - RNA, 19 nt, Artificial Sequence
  Description of Artificial Sequence: Synthetic oligonucleotide
ccagaagagguaugauccu

SEQ ID NO: 562847 - RNA, 19 nt, Artificial Sequence
  Description of Artificial Sequence: Synthetic oligonucleotide
cuggguuguaugggcccaa

SEQ ID NO: 562848 - RNA, 19 nt, Artificial Sequence
  Description of Artificial Sequence: Synthetic oligonucleotide
guacugcgcuuccgcgucu

SEQ ID NO: 562849 - RNA, 19 nt, Artificial Sequence
  Description of Artificial Sequence: Synthetic oligonucleotide
gggcaugugucuggguugu

SEQ ID NO: 562850 - RNA, 19 nt, Artificial Sequence
  Description of Artificial Sequence: Synthetic oligonucleotide
ccaggucggguucaacgcu

SEQ ID NO: 562851 - RNA, 19 nt, Artificial Sequence
  Description of Artificial Sequence: Synthetic oligonucleotide
ccucgucgucaucacugga

SEQ ID NO: 562852 - RNA, 19 nt, Artificial Sequence
  Description of Artificial Sequence: Synthetic oligonucleotide
ccagucacggcuacuucuu

SEQ ID NO: 562853 - RNA, 19 nt, Artificial Sequence
  Description of Artificial Sequence: Synthetic oligonucleotide
ccgccgguacacaggcaca

SEQ ID NO: 562854 - RNA, 19 nt, Artificial Sequence
  Description of Artificial Sequence: Synthetic oligonucleotide
gguucaacgcugggauguu

SEQ ID NO: 562855 - RNA, 19 nt, Artificial Sequence
  Description of Artificial Sequence: Synthetic oligonucleotide
cgccgguacacaggcacaa

SEQ ID NO: 562856 - RNA, 19 nt, Artificial Sequence
  Description of Artificial Sequence: Synthetic oligonucleotide
auaacuaugucauagucac

SEQ ID NO: 562857 - RNA, 19 nt, Artificial Sequence
  Description of Artificial Sequence: Synthetic oligonucleotide
aagacgaggagacagcugc

SEQ ID NO: 562858 - RNA, 19 nt, Artificial Sequence
  Description of Artificial Sequence: Synthetic oligonucleotide
uaguacaugaagaacaagg

SEQ ID NO: 562859 - RNA, 19 nt, Artificial Sequence
  Description of Artificial Sequence: Synthetic oligonucleotide
ucuacgaugcucuugaggg

SEQ ID NO: 562860 - RNA, 19 nt, Artificial Sequence
  Description of Artificial Sequence: Synthetic oligonucleotide
ugugauaggucuuuggucg

SEQ ID NO: 562861 - RNA, 19 nt, Artificial Sequence
  Description of Artificial Sequence: Synthetic oligonucleotide
uguaggagaggacauagcg

SEQ ID NO: 562862 - RNA, 19 nt, Artificial Sequence
  Description of Artificial Sequence: Synthetic oligonucleotide
uaggcauaaauaaagacac

SEQ ID NO: 562863 - RNA, 19 nt, Artificial Sequence
  Description of Artificial Sequence: Synthetic oligonucleotide
ugcauagagaaaauccucg

SEQ ID NO: 562864 - RNA, 19 nt, Artificial Sequence
  Description of Artificial Sequence: Synthetic oligonucleotide
aaguguaccgcucacuguc

SEQ ID NO: 562865 - RNA, 19 nt, Artificial Sequence
  Description of Artificial Sequence: Synthetic oligonucleotide
aaauccucgucuacgaugc

SEQ ID NO: 562866 - RNA, 19 nt, Artificial Sequence
  Description of Artificial Sequence: Synthetic oligonucleotide
acuagugccaauuguggcc

SEQ ID NO: 562867 - RNA, 19 nt, Artificial Sequence
  Description of Artificial Sequence: Synthetic oligonucleotide
uaaagcauuuaguacauga

SEQ ID NO: 562868 - RNA, 19 nt, Artificial Sequence
  Description of Artificial Sequence: Synthetic oligonucleotide
uuucccaacuuaaauaggc

SEQ ID NO: 562869 - RNA, 19 nt, Artificial Sequence
  Description of Artificial Sequence: Synthetic oligonucleotide
ucauucgucauccuguuca

SEQ ID NO: 562870 - RNA, 19 nt, Artificial Sequence
  Description of Artificial Sequence: Synthetic oligonucleotide
uccgauuucgagcugggcg

SEQ ID NO: 562871 - RNA, 19 nt, Artificial Sequence
  Description of Artificial Sequence: Synthetic oligonucleotide
aaagaugcccguguuaagg

SEQ ID NO: 562872 - RNA, 19 nt, Artificial Sequence
  Description of Artificial Sequence: Synthetic oligonucleotide
agaaacugcugucaccugc

SEQ ID NO: 562873 - RNA, 19 nt, Artificial Sequence
  Description of Artificial Sequence: Synthetic oligonucleotide
aacuggugaccccagguac

SEQ ID NO: 562874 - RNA, 19 nt, Artificial Sequence
  Description of Artificial Sequence: Synthetic oligonucleotide
uauguagaaggagaagucg

SEQ ID NO: 562875 - RNA, 19 nt, Artificial Sequence
  Description of Artificial Sequence: Synthetic oligonucleotide
aguugauguagccaggcuc

SEQ ID NO: 562876 - RNA, 19 nt, Artificial Sequence
  Description of Artificial Sequence: Synthetic oligonucleotide
gauguagaugucacgaugg

SEQ ID NO: 562877 - RNA, 19 nt, Artificial Sequence
  Description of Artificial Sequence: Synthetic oligonucleotide
aaaucccaggaagauaugg

SEQ ID NO: 562878 - RNA, 19 nt, Artificial Sequence
  Description of Artificial Sequence: Synthetic oligonucleotide
guagaggugguauauguag

SEQ ID NO: 562879 - RNA, 19 nt, Artificial Sequence
  Description of Artificial Sequence: Synthetic oligonucleotide
ugaacucccaccaguagag

SEQ ID NO: 562880 - RNA, 19 nt, Artificial Sequence
  Description of Artificial Sequence: Synthetic oligonucleotide
aacacauagugcaacuugg

SEQ ID NO: 562881 - RNA, 19 nt, Artificial Sequence
  Description of Artificial Sequence: Synthetic oligonucleotide
agguacauggcggauaacc

SEQ ID NO: 562882 - RNA, 19 nt, Artificial Sequence
  Description of Artificial Sequence: Synthetic oligonucleotide
gaugacauacucgaagucc

SEQ ID NO: 562883 - RNA, 19 nt, Artificial Sequence
  Description of Artificial Sequence: Synthetic oligonucleotide
cuuuagacuggugugauag

SEQ ID NO: 562884 - RNA, 19 nt, Artificial Sequence
  Description of Artificial Sequence: Synthetic oligonucleotide
agaagaccgagcugggacc

SEQ ID NO: 562885 - RNA, 19 nt, Artificial Sequence
  Description of Artificial Sequence: Synthetic oligonucleotide
gagaucagucaccacaaag

SEQ ID NO: 562886 - RNA, 19 nt, Artificial Sequence
  Description of Artificial Sequence: Synthetic oligonucleotide
guguaguugauguagccag

SEQ ID NO: 562887 - RNA, 19 nt, Artificial Sequence
  Description of Artificial Sequence: Synthetic oligonucleotide
uaaggggcuacacacuugc

SEQ ID NO: 562888 - RNA, 19 nt, Artificial Sequence
  Description of Artificial Sequence: Synthetic oligonucleotide
gaaagagcagaacugguga

SEQ ID NO: 562889 - RNA, 19 nt, Artificial Sequence
  Description of Artificial Sequence: Synthetic oligonucleotide
uccuuaaggggcuacacac

SEQ ID NO: 562890 - RNA, 19 nt, Artificial Sequence
  Description of Artificial Sequence: Synthetic oligonucleotide
gaagucgucauccccacug

SEQ ID NO: 562891 - RNA, 19 nt, Artificial Sequence
  Description of Artificial Sequence: Synthetic oligonucleotide
agauauggccugcauagag

SEQ ID NO: 562892 - RNA, 19 nt, Artificial Sequence
  Description of Artificial Sequence: Synthetic oligonucleotide
aacacuagugccaauugug

SEQ ID NO: 562893 - RNA, 19 nt, Artificial Sequence
  Description of Artificial Sequence: Synthetic oligonucleotide
uacucgaaguccaauguga

SEQ ID NO: 562894 - RNA, 19 nt, Artificial Sequence
  Description of Artificial Sequence: Synthetic oligonucleotide
ugcccacugaucuugaccc

SEQ ID NO: 562895 - RNA, 19 nt, Artificial Sequence
  Description of Artificial Sequence: Synthetic oligonucleotide
aagucgucauccccacugc

SEQ ID NO: 562896 - RNA, 19 nt, Artificial Sequence
  Description of Artificial Sequence: Synthetic oligonucleotide
guaaguugcggccacggag

SEQ ID NO: 562897 - RNA, 19 nt, Artificial Sequence
  Description of Artificial Sequence: Synthetic oligonucleotide
ucauacaggauuuggcaga

SEQ ID NO: 562898 - RNA, 19 nt, Artificial Sequence
  Description of Artificial Sequence: Synthetic oligonucleotide
cuugguguaguugauguag

SEQ ID NO: 562899 - RNA, 19 nt, Artificial Sequence
  Description of Artificial Sequence: Synthetic oligonucleotide
acgacuggcauccuggcag

SEQ ID NO: 562900 - RNA, 19 nt, Artificial Sequence
  Description of Artificial Sequence: Synthetic oligonucleotide
uaaguugcggccacggaga

SEQ ID NO: 562901 - RNA, 19 nt, Artificial Sequence
  Description of Artificial Sequence: Synthetic oligonucleotide
cacacuuggaaaaucccag

SEQ ID NO: 562902 - RNA, 19 nt, Artificial Sequence
  Description of Artificial Sequence: Synthetic oligonucleotide
aauccaaguguaccgcuca

SEQ ID NO: 562903 - RNA, 19 nt, Artificial Sequence
  Description of Artificial Sequence: Synthetic oligonucleotide
gauaacuaugucauaguca

SEQ ID NO: 562904 - RNA, 19 nt, Artificial Sequence
  Description of Artificial Sequence: Synthetic oligonucleotide
ucgucuacgaugcucuuga

SEQ ID NO: 562905 - RNA, 19 nt, Artificial Sequence
  Description of Artificial Sequence: Synthetic oligonucleotide
acauacucgaaguccaaug

SEQ ID NO: 562906 - RNA, 19 nt, Artificial Sequence
  Description of Artificial Sequence: Synthetic oligonucleotide
caggauaacuaugucauag

SEQ ID NO: 562907 - RNA, 19 nt, Artificial Sequence
  Description of Artificial Sequence: Synthetic oligonucleotide
ugguucucaucacucauca

SEQ ID NO: 562908 - RNA, 19 nt, Artificial Sequence
  Description of Artificial Sequence: Synthetic oligonucleotide
cagaccgcaacacauagug

SEQ ID NO: 562909 - RNA, 19 nt, Artificial Sequence
  Description of Artificial Sequence: Synthetic oligonucleotide
aggaaggcgguccuuuccc

SEQ ID NO: 562910 - RNA, 19 nt, Artificial Sequence
  Description of Artificial Sequence: Synthetic oligonucleotide
uggucauacaggauuuggc

SEQ ID NO: 562911 - RNA, 19 nt, Artificial Sequence
  Description of Artificial Sequence: Synthetic oligonucleotide
acggagaucagucaccaca

SEQ ID NO: 562912 - RNA, 19 nt, Artificial Sequence
  Description of Artificial Sequence: Synthetic oligonucleotide
uacgguaggagcuccagac

SEQ ID NO: 562913 - RNA, 19 nt, Artificial Sequence
  Description of Artificial Sequence: Synthetic oligonucleotide
ucgcuaggcacucacacac

SEQ ID NO: 562914 - RNA, 19 nt, Artificial Sequence
  Description of Artificial Sequence: Synthetic oligonucleotide
auauguagaaggagaaguc

SEQ ID NO: 562915 - RNA, 19 nt, Artificial Sequence
  Description of Artificial Sequence: Synthetic oligonucleotide
gaaaagccgcaccugccgg

SEQ ID NO: 562916 - RNA, 19 nt, Artificial Sequence
  Description of Artificial Sequence: Synthetic oligonucleotide
aacucccaccaguagaggu

SEQ ID NO: 562917 - RNA, 19 nt, Artificial Sequence
  Description of Artificial Sequence: Synthetic oligonucleotide
agacuggugugauaggucu

SEQ ID NO: 562918 - RNA, 19 nt, Artificial Sequence
  Description of Artificial Sequence: Synthetic oligonucleotide
gguuaggucacccacgcug

SEQ ID NO: 562919 - RNA, 19 nt, Artificial Sequence
  Description of Artificial Sequence: Synthetic oligonucleotide
uucccaacuuaaauaggca

SEQ ID NO: 562920 - RNA, 19 nt, Artificial Sequence
  Description of Artificial Sequence: Synthetic oligonucleotide
uugugcagugccucauucg

SEQ ID NO: 562921 - RNA, 19 nt, Artificial Sequence
  Description of Artificial Sequence: Synthetic oligonucleotide
aaacacgaugaccuuggaa

SEQ ID NO: 562922 - RNA, 19 nt, Artificial Sequence
  Description of Artificial Sequence: Synthetic oligonucleotide
uccucgucuacgaugcucu

SEQ ID NO: 562923 - RNA, 19 nt, Artificial Sequence
  Description of Artificial Sequence: Synthetic oligonucleotide
aguggacagagacagcgca

SEQ ID NO: 562924 - RNA, 19 nt, Artificial Sequence
  Description of Artificial Sequence: Synthetic oligonucleotide
guaggagaggacauagcgg

SEQ ID NO: 562925 - RNA, 19 nt, Artificial Sequence
  Description of Artificial Sequence: Synthetic oligonucleotide
ucgguuaggucacccacgc

SEQ ID NO: 562926 - RNA, 19 nt, Artificial Sequence
  Description of Artificial Sequence: Synthetic oligonucleotide
auauggccugcauagagaa

SEQ ID NO: 562927 - RNA, 19 nt, Artificial Sequence
  Description of Artificial Sequence: Synthetic oligonucleotide
uggugugauaggucuuugg

SEQ ID NO: 562928 - RNA, 19 nt, Artificial Sequence
  Description of Artificial Sequence: Synthetic oligonucleotide
gaaaagacgaggagacagc

SEQ ID NO: 562929 - RNA, 19 nt, Artificial Sequence
  Description of Artificial Sequence: Synthetic oligonucleotide
augagcaucccaaacacga

SEQ ID NO: 562930 - RNA, 19 nt, Artificial Sequence
  Description of Artificial Sequence: Synthetic oligonucleotide
aggcuggaaccacugggcc

SEQ ID NO: 562931 - RNA, 19 nt, Artificial Sequence
  Description of Artificial Sequence: Synthetic oligonucleotide
ugcccuuugaccucgguua

SEQ ID NO: 562932 - RNA, 19 nt, Artificial Sequence
  Description of Artificial Sequence: Synthetic oligonucleotide
agaacaaggccagguggcc

SEQ ID NO: 562933 - RNA, 19 nt, Artificial Sequence
  Description of Artificial Sequence: Synthetic oligonucleotide
cuugaggacguguucccgc

SEQ ID NO: 562934 - RNA, 19 nt, Artificial Sequence
  Description of Artificial Sequence: Synthetic oligonucleotide
ucccaacuuaaauaggcau

SEQ ID NO: 562935 - RNA, 19 nt, Artificial Sequence
  Description of Artificial Sequence: Synthetic oligonucleotide
cacgcugacugucucaaag

SEQ ID NO: 562936 - RNA, 19 nt, Artificial Sequence
  Description of Artificial Sequence: Synthetic oligonucleotide
uuuggcagaaacugcuguc

SEQ ID NO: 562937 - RNA, 19 nt, Artificial Sequence
  Description of Artificial Sequence: Synthetic oligonucleotide
cagaagaccgagcugggac

SEQ ID NO: 562938 - RNA, 19 nt, Artificial Sequence
  Description of Artificial Sequence: Synthetic oligonucleotide
auagcggccacacuuggaa

SEQ ID NO: 562939 - RNA, 19 nt, Artificial Sequence
  Description of Artificial Sequence: Synthetic oligonucleotide
uagucacugaaagagcaga

SEQ ID NO: 562940 - RNA, 19 nt, Artificial Sequence
  Description of Artificial Sequence: Synthetic oligonucleotide
aggauaacuaugucauagu

SEQ ID NO: 562941 - RNA, 19 nt, Artificial Sequence
  Description of Artificial Sequence: Synthetic oligonucleotide
ugaugacauacucgaaguc

SEQ ID NO: 562942 - RNA, 19 nt, Artificial Sequence
  Description of Artificial Sequence: Synthetic oligonucleotide
accagucccaucccgcaac

SEQ ID NO: 562943 - RNA, 19 nt, Artificial Sequence
  Description of Artificial Sequence: Synthetic oligonucleotide
ucuuccaagguaccacccu

SEQ ID NO: 562944 - RNA, 19 nt, Artificial Sequence
  Description of Artificial Sequence: Synthetic oligonucleotide
guugcggccacggagauca

SEQ ID NO: 562945 - RNA, 19 nt, Artificial Sequence
  Description of Artificial Sequence: Synthetic oligonucleotide
caugagcaucccaaacacg

SEQ ID NO: 562946 - RNA, 19 nt, Artificial Sequence
  Description of Artificial Sequence: Synthetic oligonucleotide
cacuagugccaauuguggc

SEQ ID NO: 562947 - RNA, 19 nt, Artificial Sequence
  Description of Artificial Sequence: Synthetic oligonucleotide
uggcggauaaccucauuga

SEQ ID NO: 562948 - RNA, 19 nt, Artificial Sequence
  Description of Artificial Sequence: Synthetic oligonucleotide
cugcauagagaaaauccuc

SEQ ID NO: 562949 - RNA, 19 nt, Artificial Sequence
  Description of Artificial Sequence: Synthetic oligonucleotide
ucucgcaugggccguaagu

SEQ ID NO: 562950 - RNA, 19 nt, Artificial Sequence
  Description of Artificial Sequence: Synthetic oligonucleotide
cuuggaagcgucgcuaggc

SEQ ID NO: 562951 - RNA, 19 nt, Artificial Sequence
  Description of Artificial Sequence: Synthetic oligonucleotide
ggcacucacacacagucag

SEQ ID NO: 562952 - RNA, 19 nt, Artificial Sequence
  Description of Artificial Sequence: Synthetic oligonucleotide
uuccgcuccgauuucgagc

SEQ ID NO: 562953 - RNA, 19 nt, Artificial Sequence
  Description of Artificial Sequence: Synthetic oligonucleotide
guauauguagaaggagaag

SEQ ID NO: 562954 - RNA, 19 nt, Artificial Sequence
  Description of Artificial Sequence: Synthetic oligonucleotide
gaagccgugccgcaggcac

SEQ ID NO: 562955 - RNA, 19 nt, Artificial Sequence
  Description of Artificial Sequence: Synthetic oligonucleotide
caaccuaacacuagugcca

SEQ ID NO: 562956 - RNA, 19 nt, Artificial Sequence
  Description of Artificial Sequence: Synthetic oligonucleotide
gcacaauccaaguguaccg

SEQ ID NO: 562957 - RNA, 19 nt, Artificial Sequence
  Description of Artificial Sequence: Synthetic oligonucleotide
ucauccuggaaaagccgca

SEQ ID NO: 562958 - RNA, 19 nt, Artificial Sequence
  Description of Artificial Sequence: Synthetic oligonucleotide
gaaggcgguccuuucccgg

SEQ ID NO: 562959 - RNA, 19 nt, Artificial Sequence
  Description of Artificial Sequence: Synthetic oligonucleotide
cuagugccaauuguggccc

SEQ ID NO: 562960 - RNA, 19 nt, Artificial Sequence
  Description of Artificial Sequence: Synthetic oligonucleotide
guguuaaggucccaggcca

SEQ ID NO: 562961 - RNA, 19 nt, Artificial Sequence
  Description of Artificial Sequence: Synthetic oligonucleotide
uuccaagguaccacccuug

SEQ ID NO: 562962 - RNA, 19 nt, Artificial Sequence
  Description of Artificial Sequence: Synthetic oligonucleotide
aaaagccgcaccugccgga

SEQ ID NO: 562963 - RNA, 19 nt, Artificial Sequence
  Description of Artificial Sequence: Synthetic oligonucleotide
cagagagaucuugucaucc

SEQ ID NO: 562964 - RNA, 19 nt, Artificial Sequence
  Description of Artificial Sequence: Synthetic oligonucleotide
guugaacucccaccaguag

SEQ ID NO: 562965 - RNA, 19 nt, Artificial Sequence
  Description of Artificial Sequence: Synthetic oligonucleotide
acauagcggccacacuugg

SEQ ID NO: 562966 - RNA, 19 nt, Artificial Sequence
  Description of Artificial Sequence: Synthetic oligonucleotide
ugggccguaaguugcggcc

SEQ ID NO: 562967 - RNA, 19 nt, Artificial Sequence
  Description of Artificial Sequence: Synthetic oligonucleotide
uacgaugcucuugagggac

SEQ ID NO: 562968 - RNA, 19 nt, Artificial Sequence
  Description of Artificial Sequence: Synthetic oligonucleotide
agcgucgcuaggcacucac

SEQ ID NO: 562969 - RNA, 19 nt, Artificial Sequence
  Description of Artificial Sequence: Synthetic oligonucleotide
auggccugcauagagaaaa

SEQ ID NO: 562970 - RNA, 19 nt, Artificial Sequence
  Description of Artificial Sequence: Synthetic oligonucleotide
guaguuggagucagggucc

SEQ ID NO: 562971 - RNA, 19 nt, Artificial Sequence
  Description of Artificial Sequence: Synthetic oligonucleotide
ggucauacaggauuuggca

SEQ ID NO: 562972 - RNA, 19 nt, Artificial Sequence
  Description of Artificial Sequence: Synthetic oligonucleotide
uucacauagcggccacugc

SEQ ID NO: 562973 - RNA, 19 nt, Artificial Sequence
  Description of Artificial Sequence: Synthetic oligonucleotide
cagcucuuacgguaggagc

SEQ ID NO: 562974 - RNA, 19 nt, Artificial Sequence
  Description of Artificial Sequence: Synthetic oligonucleotide
gugguauauguagaaggag

SEQ ID NO: 562975 - RNA, 19 nt, Artificial Sequence
  Description of Artificial Sequence: Synthetic oligonucleotide
gaagguagggaagggguac

SEQ ID NO: 562976 - RNA, 19 nt, Artificial Sequence
  Description of Artificial Sequence: Synthetic oligonucleotide
cuccaggauaacuauguca

SEQ ID NO: 562977 - RNA, 19 nt, Artificial Sequence
  Description of Artificial Sequence: Synthetic oligonucleotide
uggaaaaucccaggaagau

SEQ ID NO: 562978 - RNA, 19 nt, Artificial Sequence
  Description of Artificial Sequence: Synthetic oligonucleotide
ggauaacuaugucauaguc

SEQ ID NO: 562979 - RNA, 19 nt, Artificial Sequence
  Description of Artificial Sequence: Synthetic oligonucleotide
gaaguccaaugugagcugc

SEQ ID NO: 562980 - RNA, 19 nt, Artificial Sequence
  Description of Artificial Sequence: Synthetic oligonucleotide
augacauacucgaagucca

SEQ ID NO: 562981 - RNA, 19 nt, Artificial Sequence
  Description of Artificial Sequence: Synthetic oligonucleotide
gaugaccuuggaagcgucg

SEQ ID NO: 562982 - RNA, 19 nt, Artificial Sequence
  Description of Artificial Sequence: Synthetic oligonucleotide
acguugaacucccaccagu

SEQ ID NO: 562983 - RNA, 19 nt, Artificial Sequence
  Description of Artificial Sequence: Synthetic oligonucleotide
acuaugucauagucacuga

SEQ ID NO: 562984 - RNA, 19 nt, Artificial Sequence
  Description of Artificial Sequence: Synthetic oligonucleotide
uuacgguaggagcuccaga

SEQ ID NO: 562985 - RNA, 19 nt, Artificial Sequence
  Description of Artificial Sequence: Synthetic oligonucleotide
agcgcaggccaccagcgag

SEQ ID NO: 562986 - RNA, 19 nt, Artificial Sequence
  Description of Artificial Sequence: Synthetic oligonucleotide
gauuuggcagaaacugcug

SEQ ID NO: 562987 - RNA, 19 nt, Artificial Sequence
  Description of Artificial Sequence: Synthetic oligonucleotide
gauauggccugcauagaga

SEQ ID NO: 562988 - RNA, 19 nt, Artificial Sequence
  Description of Artificial Sequence: Synthetic oligonucleotide
uguaccgcucacugucugc

SEQ ID NO: 562989 - RNA, 19 nt, Artificial Sequence
  Description of Artificial Sequence: Synthetic oligonucleotide
uggcccugcauaucugucc

SEQ ID NO: 562990 - RNA, 19 nt, Artificial Sequence
  Description of Artificial Sequence: Synthetic oligonucleotide
cuguggacguugaacuccc

SEQ ID NO: 562991 - RNA, 19 nt, Artificial Sequence
  Description of Artificial Sequence: Synthetic oligonucleotide
gauaggucuuuggucggag

SEQ ID NO: 562992 - RNA, 19 nt, Artificial Sequence
  Description of Artificial Sequence: Synthetic oligonucleotide
gacauagcggccacacuug

SEQ ID NO: 562993 - RNA, 19 nt, Artificial Sequence
  Description of Artificial Sequence: Synthetic oligonucleotide
agcucuuacgguaggagcu

SEQ ID NO: 562994 - RNA, 19 nt, Artificial Sequence
  Description of Artificial Sequence: Synthetic oligonucleotide
ucuuuggucggagcugacc

SEQ ID NO: 562995 - RNA, 19 nt, Artificial Sequence
  Description of Artificial Sequence: Synthetic oligonucleotide
gacguugaacucccaccag

SEQ ID NO: 562996 - RNA, 19 nt, Artificial Sequence
  Description of Artificial Sequence: Synthetic oligonucleotide
accuuggaagcgucgcuag

SEQ ID NO: 562997 - RNA, 19 nt, Artificial Sequence
  Description of Artificial Sequence: Synthetic oligonucleotide
uguccgcucucgcaugggc

SEQ ID NO: 562998 - RNA, 19 nt, Artificial Sequence
  Description of Artificial Sequence: Synthetic oligonucleotide
gugggcacgacuggcaucc

SEQ ID NO: 562999 - RNA, 19 nt, Artificial Sequence
  Description of Artificial Sequence: Synthetic oligonucleotide
uaacuaugucauagucacu

SEQ ID NO: 563000 - RNA, 19 nt, Artificial Sequence
  Description of Artificial Sequence: Synthetic oligonucleotide
uguuccgcuccgauuucga

SEQ ID NO: 563001 - RNA, 19 nt, Artificial Sequence
  Description of Artificial Sequence: Synthetic oligonucleotide
ccggaaaagacgaggagac

SEQ ID NO: 563002 - RNA, 19 nt, Artificial Sequence
  Description of Artificial Sequence: Synthetic oligonucleotide
ucuuacgguaggagcucca

SEQ ID NO: 563003 - RNA, 19 nt, Artificial Sequence
  Description of Artificial Sequence: Synthetic oligonucleotide
guagaaggagaagucguca

SEQ ID NO: 563004 - RNA, 19 nt, Artificial Sequence
  Description of Artificial Sequence: Synthetic oligonucleotide
cauucgucauccuguucac

SEQ ID NO: 563005 - RNA, 19 nt, Artificial Sequence
  Description of Artificial Sequence: Synthetic oligonucleotide
gcugauguagaugucacga

SEQ ID NO: 563006 - RNA, 19 nt, Artificial Sequence
  Description of Artificial Sequence: Synthetic oligonucleotide
aagcaggaggacugucccu

SEQ ID NO: 563007 - RNA, 19 nt, Artificial Sequence
  Description of Artificial Sequence: Synthetic oligonucleotide
auccucgucuacgaugcuc

SEQ ID NO: 563008 - RNA, 19 nt, Artificial Sequence
  Description of Artificial Sequence: Synthetic oligonucleotide
acgcugacugucucaaaga

SEQ ID NO: 563009 - RNA, 19 nt, Artificial Sequence
  Description of Artificial Sequence: Synthetic oligonucleotide
ugacauacucgaaguccaa

SEQ ID NO: 563010 - RNA, 19 nt, Artificial Sequence
  Description of Artificial Sequence: Synthetic oligonucleotide
agugcaacuugguguaguu

SEQ ID NO: 563011 - RNA, 19 nt, Artificial Sequence
  Description of Artificial Sequence: Synthetic oligonucleotide
gcuuccggaaaagacgagg

SEQ ID NO: 563012 - RNA, 19 nt, Artificial Sequence
  Description of Artificial Sequence: Synthetic oligonucleotide
agaccgagcugggaccacc

SEQ ID NO: 563013 - RNA, 19 nt, Artificial Sequence
  Description of Artificial Sequence: Synthetic oligonucleotide
ugcucuugagggacacgca

SEQ ID NO: 563014 - RNA, 19 nt, Artificial Sequence
  Description of Artificial Sequence: Synthetic oligonucleotide
ccgauuucgagcugggcgc

SEQ ID NO: 563015 - RNA, 19 nt, Artificial Sequence
  Description of Artificial Sequence: Synthetic oligonucleotide
cuuacgguaggagcuccag

SEQ ID NO: 563016 - RNA, 19 nt, Artificial Sequence
  Description of Artificial Sequence: Synthetic oligonucleotide
gguauauguagaaggagaa

SEQ ID NO: 563017 - RNA, 19 nt, Artificial Sequence
  Description of Artificial Sequence: Synthetic oligonucleotide
gggcagacgccccugaagc

SEQ ID NO: 563018 - RNA, 19 nt, Artificial Sequence
  Description of Artificial Sequence: Synthetic oligonucleotide
ggcccugcauaucuguccg

SEQ ID NO: 563019 - RNA, 19 nt, Artificial Sequence
  Description of Artificial Sequence: Synthetic oligonucleotide
cuaugucauagucacugaa

SEQ ID NO: 563020 - RNA, 19 nt, Artificial Sequence
  Description of Artificial Sequence: Synthetic oligonucleotide
ggugguauauguagaagga

SEQ ID NO: 563021 - RNA, 19 nt, Artificial Sequence
  Description of Artificial Sequence: Synthetic oligonucleotide
auagcggccacugcucucu

SEQ ID NO: 563022 - RNA, 19 nt, Artificial Sequence
  Description of Artificial Sequence: Synthetic oligonucleotide
gaugguucucaucacucau

SEQ ID NO: 563023 - RNA, 19 nt, Artificial Sequence
  Description of Artificial Sequence: Synthetic oligonucleotide
ccaaguguaccgcucacug

SEQ ID NO: 563024 - RNA, 19 nt, Artificial Sequence
  Description of Artificial Sequence: Synthetic oligonucleotide
agagcacaggaagcaggac

SEQ ID NO: 563025 - RNA, 19 nt, Artificial Sequence
  Description of Artificial Sequence: Synthetic oligonucleotide
guggacguugaacucccac

SEQ ID NO: 563026 - RNA, 19 nt, Artificial Sequence
  Description of Artificial Sequence: Synthetic oligonucleotide
ggcacgacuggcauccugg

SEQ ID NO: 563027 - RNA, 19 nt, Artificial Sequence
  Description of Artificial Sequence: Synthetic oligonucleotide
cauacucgaaguccaaugu

SEQ ID NO: 563028 - RNA, 19 nt, Artificial Sequence
  Description of Artificial Sequence: Synthetic oligonucleotide
ugauaggucuuuggucgga

SEQ ID NO: 563029 - RNA, 19 nt, Artificial Sequence
  Description of Artificial Sequence: Synthetic oligonucleotide
cuacacacuugcagcccag

SEQ ID NO: 563030 - RNA, 19 nt, Artificial Sequence
  Description of Artificial Sequence: Synthetic oligonucleotide
ugcuguggacguugaacuc

SEQ ID NO: 563031 - RNA, 19 nt, Artificial Sequence
  Description of Artificial Sequence: Synthetic oligonucleotide
guuaaggucccaggccacc

SEQ ID NO: 563032 - RNA, 19 nt, Artificial Sequence
  Description of Artificial Sequence: Synthetic oligonucleotide
uuaggucacccacgcugac

SEQ ID NO: 563033 - RNA, 19 nt, Artificial Sequence
  Description of Artificial Sequence: Synthetic oligonucleotide
uccuuucccgggcccgcgg

SEQ ID NO: 563034 - RNA, 19 nt, Artificial Sequence
  Description of Artificial Sequence: Synthetic oligonucleotide
cuuuggucggagcugaccu

SEQ ID NO: 563035 - RNA, 19 nt, Artificial Sequence
  Description of Artificial Sequence: Synthetic oligonucleotide
uccaaguguaccgcucacu

SEQ ID NO: 563036 - RNA, 19 nt, Artificial Sequence
  Description of Artificial Sequence: Synthetic oligonucleotide
agucccaucccgcaaccua

SEQ ID NO: 563037 - RNA, 19 nt, Artificial Sequence
  Description of Artificial Sequence: Synthetic oligonucleotide
gagaggacauagcggccac

SEQ ID NO: 563038 - RNA, 19 nt, Artificial Sequence
  Description of Artificial Sequence: Synthetic oligonucleotide
uuucccgggcccgcggagg

SEQ ID NO: 563039 - RNA, 19 nt, Artificial Sequence
  Description of Artificial Sequence: Synthetic oligonucleotide
agguaccacccuuggccuc

SEQ ID NO: 563040 - RNA, 19 nt, Artificial Sequence
  Description of Artificial Sequence: Synthetic oligonucleotide
uacuggcccugcauaucug

SEQ ID NO: 563041 - RNA, 19 nt, Artificial Sequence
  Description of Artificial Sequence: Synthetic oligonucleotide
aaguugcggccacggagau

SEQ ID NO: 563042 - RNA, 19 nt, Artificial Sequence
  Description of Artificial Sequence: Synthetic oligonucleotide
caucccgcaaccuaacacu

SEQ ID NO: 563043 - RNA, 19 nt, Artificial Sequence
  Description of Artificial Sequence: Synthetic oligonucleotide
agguucugucccuucccca

SEQ ID NO: 563044 - RNA, 19 nt, Artificial Sequence
  Description of Artificial Sequence: Synthetic oligonucleotide
ugccaauuguggccccugu

SEQ ID NO: 563045 - RNA, 19 nt, Artificial Sequence
  Description of Artificial Sequence: Synthetic oligonucleotide
ggugugauaggucuuuggu

SEQ ID NO: 563046 - RNA, 19 nt, Artificial Sequence
  Description of Artificial Sequence: Synthetic oligonucleotide
agggacacgcacacccugg

SEQ ID NO: 563047 - RNA, 19 nt, Artificial Sequence
  Description of Artificial Sequence: Synthetic oligonucleotide
aagaccgagcugggaccac

SEQ ID NO: 563048 - RNA, 19 nt, Artificial Sequence
  Description of Artificial Sequence: Synthetic oligonucleotide
aauccucgucuacgaugcu

SEQ ID NO: 563049 - RNA, 19 nt, Artificial Sequence
  Description of Artificial Sequence: Synthetic oligonucleotide
cguguuaaggucccaggcc

SEQ ID NO: 563050 - RNA, 19 nt, Artificial Sequence
  Description of Artificial Sequence: Synthetic oligonucleotide
ggaaggcgguccuuucccg

SEQ ID NO: 563051 - RNA, 19 nt, Artificial Sequence
  Description of Artificial Sequence: Synthetic oligonucleotide
ccaccuuuagacuggugug

SEQ ID NO: 563052 - RNA, 19 nt, Artificial Sequence
  Description of Artificial Sequence: Synthetic oligonucleotide
gaagaccgagcugggacca

SEQ ID NO: 563053 - RNA, 19 nt, Artificial Sequence
  Description of Artificial Sequence: Synthetic oligonucleotide
gguguaguugauguagcca

SEQ ID NO: 563054 - RNA, 19 nt, Artificial Sequence
  Description of Artificial Sequence: Synthetic oligonucleotide
ggccacacuuggaaaaucc

SEQ ID NO: 563055 - RNA, 19 nt, Artificial Sequence
  Description of Artificial Sequence: Synthetic oligonucleotide
ccacccuuggccucuuugg

SEQ ID NO: 563056 - RNA, 19 nt, Artificial Sequence
  Description of Artificial Sequence: Synthetic oligonucleotide
gucgcuaggcacucacaca

SEQ ID NO: 563057 - RNA, 19 nt, Artificial Sequence
  Description of Artificial Sequence: Synthetic oligonucleotide
cugaguggacagagacagc

SEQ ID NO: 563058 - RNA, 19 nt, Artificial Sequence
  Description of Artificial Sequence: Synthetic oligonucleotide
cucuuacgguaggagcucc

SEQ ID NO: 563059 - RNA, 19 nt, Artificial Sequence
  Description of Artificial Sequence: Synthetic oligonucleotide
cgcaaccuaacacuagugc

SEQ ID NO: 563060 - RNA, 19 nt, Artificial Sequence
  Description of Artificial Sequence: Synthetic oligonucleotide
uuuggucggagcugaccuu

SEQ ID NO: 563061 - RNA, 19 nt, Artificial Sequence
  Description of Artificial Sequence: Synthetic oligonucleotide
cacaggguucccaccccag

SEQ ID NO: 563062 - RNA, 19 nt, Artificial Sequence
  Description of Artificial Sequence: Synthetic oligonucleotide
accucgguuaggucaccca

SEQ ID NO: 563063 - RNA, 19 nt, Artificial Sequence
  Description of Artificial Sequence: Synthetic oligonucleotide
cuguuccgcuccgauuucg

SEQ ID NO: 563064 - RNA, 19 nt, Artificial Sequence
  Description of Artificial Sequence: Synthetic oligonucleotide
acuggugugauaggucuuu

SEQ ID NO: 563065 - RNA, 19 nt, Artificial Sequence
  Description of Artificial Sequence: Synthetic oligonucleotide
gacugggcuucgcugggca

SEQ ID NO: 563066 - RNA, 19 nt, Artificial Sequence
  Description of Artificial Sequence: Synthetic oligonucleotide
gaaaauccucgucuacgau

SEQ ID NO: 563067 - RNA, 19 nt, Artificial Sequence
  Description of Artificial Sequence: Synthetic oligonucleotide
cuguucacauagcggccac

SEQ ID NO: 563068 - RNA, 19 nt, Artificial Sequence
  Description of Artificial Sequence: Synthetic oligonucleotide
guacuggcccugcauaucu

SEQ ID NO: 563069 - RNA, 19 nt, Artificial Sequence
  Description of Artificial Sequence: Synthetic oligonucleotide
ccguguuaaggucccaggc

SEQ ID NO: 563070 - RNA, 19 nt, Artificial Sequence
  Description of Artificial Sequence: Synthetic oligonucleotide
guguaccgcucacugucug

SEQ ID NO: 563071 - RNA, 19 nt, Artificial Sequence
  Description of Artificial Sequence: Synthetic oligonucleotide
agacacauccagacucuca

SEQ ID NO: 563072 - RNA, 19 nt, Artificial Sequence
  Description of Artificial Sequence: Synthetic oligonucleotide
ggugugcagcaugaagccg

SEQ ID NO: 563073 - RNA, 19 nt, Artificial Sequence
  Description of Artificial Sequence: Synthetic oligonucleotide
uaggucacccacgcugacu

SEQ ID NO: 563074 - RNA, 19 nt, Artificial Sequence
  Description of Artificial Sequence: Synthetic oligonucleotide
agaagucgucauccccacu

SEQ ID NO: 563075 - RNA, 19 nt, Artificial Sequence
  Description of Artificial Sequence: Synthetic oligonucleotide
cuacgaugcucuugaggga

SEQ ID NO: 563076 - RNA, 19 nt, Artificial Sequence
  Description of Artificial Sequence: Synthetic oligonucleotide
agcggccacugcucucugg

SEQ ID NO: 563077 - RNA, 19 nt, Artificial Sequence
  Description of Artificial Sequence: Synthetic oligonucleotide
gaagcgucgcuaggcacuc

SEQ ID NO: 563078 - RNA, 19 nt, Artificial Sequence
  Description of Artificial Sequence: Synthetic oligonucleotide
caugggccguaaguugcgg

SEQ ID NO: 563079 - RNA, 19 nt, Artificial Sequence
  Description of Artificial Sequence: Synthetic oligonucleotide
gggacacgcacacccuggg

SEQ ID NO: 563080 - RNA, 19 nt, Artificial Sequence
  Description of Artificial Sequence: Synthetic oligonucleotide
cugaaagagcagaacuggu

SEQ ID NO: 563081 - RNA, 19 nt, Artificial Sequence
  Description of Artificial Sequence: Synthetic oligonucleotide
aggcauaaauaaagacaca

SEQ ID NO: 563082 - RNA, 19 nt, Artificial Sequence
  Description of Artificial Sequence: Synthetic oligonucleotide
uguucccgccgccgccccg

SEQ ID NO: 563083 - RNA, 19 nt, Artificial Sequence
  Description of Artificial Sequence: Synthetic oligonucleotide
ccaucccgcaaccuaacac

SEQ ID NO: 563084 - RNA, 19 nt, Artificial Sequence
  Description of Artificial Sequence: Synthetic oligonucleotide
caccuuuagacugguguga

SEQ ID NO: 563085 - RNA, 19 nt, Artificial Sequence
  Description of Artificial Sequence: Synthetic oligonucleotide
cucauucgucauccuguuc

SEQ ID NO: 563086 - RNA, 19 nt, Artificial Sequence
  Description of Artificial Sequence: Synthetic oligonucleotide
cauagcggccacugcucuc

SEQ ID NO: 563087 - RNA, 19 nt, Artificial Sequence
  Description of Artificial Sequence: Synthetic oligonucleotide
ggcggguuggaagguaggg

SEQ ID NO: 563088 - RNA, 19 nt, Artificial Sequence
  Description of Artificial Sequence: Synthetic oligonucleotide
ggcccgcggagguaguugg

SEQ ID NO: 563089 - RNA, 19 nt, Artificial Sequence
  Description of Artificial Sequence: Synthetic oligonucleotide
gcauaucuguccgcucucg

SEQ ID NO: 563090 - RNA, 19 nt, Artificial Sequence
  Description of Artificial Sequence: Synthetic oligonucleotide
uagcggccacacuuggaaa

SEQ ID NO: 563091 - RNA, 19 nt, Artificial Sequence
  Description of Artificial Sequence: Synthetic oligonucleotide
caauggcuggugagggcuc

SEQ ID NO: 563092 - RNA, 19 nt, Artificial Sequence
  Description of Artificial Sequence: Synthetic oligonucleotide
ggccacggagaucagucac

SEQ ID NO: 563093 - RNA, 19 nt, Artificial Sequence
  Description of Artificial Sequence: Synthetic oligonucleotide
cauacaggauuuggcagaa

SEQ ID NO: 563094 - RNA, 19 nt, Artificial Sequence
  Description of Artificial Sequence: Synthetic oligonucleotide
uaccgcucacugucugcca

SEQ ID NO: 563095 - RNA, 19 nt, Artificial Sequence
  Description of Artificial Sequence: Synthetic oligonucleotide
ggagaggacauagcggcca

SEQ ID NO: 563096 - RNA, 19 nt, Artificial Sequence
  Description of Artificial Sequence: Synthetic oligonucleotide
ggucccaggccaccuuuag

SEQ ID NO: 563097 - RNA, 19 nt, Artificial Sequence
  Description of Artificial Sequence: Synthetic oligonucleotide
cuuucccgggcccgcggag

SEQ ID NO: 563098 - RNA, 19 nt, Artificial Sequence
  Description of Artificial Sequence: Synthetic oligonucleotide
cgcaugggccguaaguugc

SEQ ID NO: 563099 - RNA, 19 nt, Artificial Sequence
  Description of Artificial Sequence: Synthetic oligonucleotide
gcggccacugcucucuggc

SEQ ID NO: 563100 - RNA, 19 nt, Artificial Sequence
  Description of Artificial Sequence: Synthetic oligonucleotide
ccucgguuaggucacccac

SEQ ID NO: 563101 - RNA, 19 nt, Artificial Sequence
  Description of Artificial Sequence: Synthetic oligonucleotide
guucugucccuuccccaga

SEQ ID NO: 563102 - RNA, 19 nt, Artificial Sequence
  Description of Artificial Sequence: Synthetic oligonucleotide
aguugcggccacggagauc

SEQ ID NO: 563103 - RNA, 19 nt, Artificial Sequence
  Description of Artificial Sequence: Synthetic oligonucleotide
gcuugaggacguguucccg

SEQ ID NO: 563104 - RNA, 19 nt, Artificial Sequence
  Description of Artificial Sequence: Synthetic oligonucleotide
ggcggcccagcccucacag

SEQ ID NO: 563105 - RNA, 19 nt, Artificial Sequence
  Description of Artificial Sequence: Synthetic oligonucleotide
caauguugaugaggaccug

SEQ ID NO: 563106 - RNA, 19 nt, Artificial Sequence
  Description of Artificial Sequence: Synthetic oligonucleotide
gaccuuggaagcgucgcua

SEQ ID NO: 563107 - RNA, 19 nt, Artificial Sequence
  Description of Artificial Sequence: Synthetic oligonucleotide
cuggugugauaggucuuug

SEQ ID NO: 563108 - RNA, 19 nt, Artificial Sequence
  Description of Artificial Sequence: Synthetic oligonucleotide
ggguuggaagguagggaag

SEQ ID NO: 563109 - RNA, 19 nt, Artificial Sequence
  Description of Artificial Sequence: Synthetic oligonucleotide
cagaaccuucagugagcac

SEQ ID NO: 563110 - RNA, 19 nt, Artificial Sequence
  Description of Artificial Sequence: Synthetic oligonucleotide
acugugcacuugggucccc

SEQ ID NO: 563111 - RNA, 19 nt, Artificial Sequence
  Description of Artificial Sequence: Synthetic oligonucleotide
agugccaauuguggccccu

SEQ ID NO: 563112 - RNA, 19 nt, Artificial Sequence
  Description of Artificial Sequence: Synthetic oligonucleotide
cagugccucauucgucauc

SEQ ID NO: 563113 - RNA, 19 nt, Artificial Sequence
  Description of Artificial Sequence: Synthetic oligonucleotide
cccaacuuaaauaggcaua

SEQ ID NO: 563114 - RNA, 19 nt, Artificial Sequence
  Description of Artificial Sequence: Synthetic oligonucleotide
agggcggcccagcccucac

SEQ ID NO: 563115 - RNA, 19 nt, Artificial Sequence
  Description of Artificial Sequence: Synthetic oligonucleotide
ugccgcaggcacugugcac

SEQ ID NO: 563116 - RNA, 19 nt, Artificial Sequence
  Description of Artificial Sequence: Synthetic oligonucleotide
auuuggugugcagcaugaa

SEQ ID NO: 563117 - RNA, 19 nt, Artificial Sequence
  Description of Artificial Sequence: Synthetic oligonucleotide
cuucgcugggcaggccagg

SEQ ID NO: 563118 - RNA, 19 nt, Artificial Sequence
  Description of Artificial Sequence: Synthetic oligonucleotide
cccgaggaggcacagccac

SEQ ID NO: 563119 - RNA, 19 nt, Artificial Sequence
  Description of Artificial Sequence: Synthetic oligonucleotide
ccaagguaccacccuuggc

SEQ ID NO: 563120 - RNA, 19 nt, Artificial Sequence
  Description of Artificial Sequence: Synthetic oligonucleotide
cuccgauuucgagcugggc

SEQ ID NO: 563121 - RNA, 19 nt, Artificial Sequence
  Description of Artificial Sequence: Synthetic oligonucleotide
cacggagaucagucaccac

SEQ ID NO: 563122 - RNA, 19 nt, Artificial Sequence
  Description of Artificial Sequence: Synthetic oligonucleotide
cccuuucccaacuuaaaua

SEQ ID NO: 563123 - RNA, 19 nt, Artificial Sequence
  Description of Artificial Sequence: Synthetic oligonucleotide
gacauacucgaaguccaau

SEQ ID NO: 563124 - RNA, 19 nt, Artificial Sequence
  Description of Artificial Sequence: Synthetic oligonucleotide
aggcggguuggaagguagg

SEQ ID NO: 563125 - RNA, 19 nt, Artificial Sequence
  Description of Artificial Sequence: Synthetic oligonucleotide
gcgccacuuccccacuugg

SEQ ID NO: 563126 - RNA, 19 nt, Artificial Sequence
  Description of Artificial Sequence: Synthetic oligonucleotide
accgcaacacauagugcaa

SEQ ID NO: 563127 - RNA, 19 nt, Artificial Sequence
  Description of Artificial Sequence: Synthetic oligonucleotide
gguacauggcggauaaccu

SEQ ID NO: 563128 - RNA, 19 nt, Artificial Sequence
  Description of Artificial Sequence: Synthetic oligonucleotide
ggcuacacacuugcagccc

SEQ ID NO: 563129 - RNA, 19 nt, Artificial Sequence
  Description of Artificial Sequence: Synthetic oligonucleotide
cgucgcuaggcacucacac

SEQ ID NO: 563130 - RNA, 19 nt, Artificial Sequence
  Description of Artificial Sequence: Synthetic oligonucleotide
agcuuccggaaaagacgag

SEQ ID NO: 563131 - RNA, 19 nt, Artificial Sequence
  Description of Artificial Sequence: Synthetic oligonucleotide
gcaugggccguaaguugcg

SEQ ID NO: 563132 - RNA, 19 nt, Artificial Sequence
  Description of Artificial Sequence: Synthetic oligonucleotide
gucccaucccgcaaccuaa

SEQ ID NO: 563133 - RNA, 19 nt, Artificial Sequence
  Description of Artificial Sequence: Synthetic oligonucleotide
ugcggccacggagaucagu

SEQ ID NO: 563134 - RNA, 19 nt, Artificial Sequence
  Description of Artificial Sequence: Synthetic oligonucleotide
gcccacugaucuugacccg

SEQ ID NO: 563135 - RNA, 19 nt, Artificial Sequence
  Description of Artificial Sequence: Synthetic oligonucleotide
gccacggagaucagucacc

SEQ ID NO: 563136 - RNA, 19 nt, Artificial Sequence
  Description of Artificial Sequence: Synthetic oligonucleotide
cacgacuggcauccuggca

SEQ ID NO: 563137 - RNA, 19 nt, Artificial Sequence
  Description of Artificial Sequence: Synthetic oligonucleotide
cucucgcaugggccguaag

SEQ ID NO: 563138 - RNA, 19 nt, Artificial Sequence
  Description of Artificial Sequence: Synthetic oligonucleotide
ccgcaaccuaacacuagug

SEQ ID NO: 563139 - RNA, 19 nt, Artificial Sequence
  Description of Artificial Sequence: Synthetic oligonucleotide
ccguaaguugcggccacgg

SEQ ID NO: 563140 - RNA, 19 nt, Artificial Sequence
  Description of Artificial Sequence: Synthetic oligonucleotide
caaugugagcugcuccacu

SEQ ID NO: 563141 - RNA, 19 nt, Artificial Sequence
  Description of Artificial Sequence: Synthetic oligonucleotide
uagcggccacugcucucug

SEQ ID NO: 563142 - RNA, 19 nt, Artificial Sequence
  Description of Artificial Sequence: Synthetic oligonucleotide
gcacgacuggcauccuggc

SEQ ID NO: 563143 - RNA, 19 nt, Artificial Sequence
  Description of Artificial Sequence: Synthetic oligonucleotide
caccaguagaggugguaua

SEQ ID NO: 563144 - RNA, 19 nt, Artificial Sequence
  Description of Artificial Sequence: Synthetic oligonucleotide
ccuggaaaagccgcaccug

SEQ ID NO: 563145 - RNA, 19 nt, Artificial Sequence
  Description of Artificial Sequence: Synthetic oligonucleotide
accuaacacuagugccaau

SEQ ID NO: 563146 - RNA, 19 nt, Artificial Sequence
  Description of Artificial Sequence: Synthetic oligonucleotide
cgugccgcaggcacugugc

SEQ ID NO: 563147 - RNA, 19 nt, Artificial Sequence
  Description of Artificial Sequence: Synthetic oligonucleotide
gcuccgauuucgagcuggg

SEQ ID NO: 563148 - RNA, 19 nt, Artificial Sequence
  Description of Artificial Sequence: Synthetic oligonucleotide
gcaauggcuggugagggcu

SEQ ID NO: 563149 - RNA, 19 nt, Artificial Sequence
  Description of Artificial Sequence: Synthetic oligonucleotide
cacccacgcugacugucuc

SEQ ID NO: 563150 - RNA, 19 nt, Artificial Sequence
  Description of Artificial Sequence: Synthetic oligonucleotide
gggcucaucccucugcccu

SEQ ID NO: 563151 - RNA, 19 nt, Artificial Sequence
  Description of Artificial Sequence: Synthetic oligonucleotide
ccagucccaucccgcaacc

SEQ ID NO: 563152 - RNA, 19 nt, Artificial Sequence
  Description of Artificial Sequence: Synthetic oligonucleotide
ggggcucaucccucugccc

SEQ ID NO: 563153 - RNA, 19 nt, Artificial Sequence
  Description of Artificial Sequence: Synthetic oligonucleotide
ggccugcauagagaaaauc

SEQ ID NO: 563154 - RNA, 19 nt, Artificial Sequence
  Description of Artificial Sequence: Synthetic oligonucleotide
ggcggauaaccucauugau

SEQ ID NO: 563155 - RNA, 19 nt, Artificial Sequence
  Description of Artificial Sequence: Synthetic oligonucleotide
ggaagcgucgcuaggcacu

SEQ ID NO: 563156 - RNA, 19 nt, Artificial Sequence
  Description of Artificial Sequence: Synthetic oligonucleotide
ccucuuuggcccuucggaa

SEQ ID NO: 563157 - RNA, 19 nt, Artificial Sequence
  Description of Artificial Sequence: Synthetic oligonucleotide
gaugaggaccugguugguu

SEQ ID NO: 563158 - RNA, 19 nt, Artificial Sequence
  Description of Artificial Sequence: Synthetic oligonucleotide
ccugaggggcucaucccuc

SEQ ID NO: 563159 - RNA, 19 nt, Artificial Sequence
  Description of Artificial Sequence: Synthetic oligonucleotide
ggaagguagggaaggggua

SEQ ID NO: 563160 - RNA, 19 nt, Artificial Sequence
  Description of Artificial Sequence: Synthetic oligonucleotide
gcucuuacgguaggagcuc

SEQ ID NO: 563161 - RNA, 19 nt, Artificial Sequence
  Description of Artificial Sequence: Synthetic oligonucleotide
gggcacgacuggcauccug

SEQ ID NO: 563162 - RNA, 19 nt, Artificial Sequence
  Description of Artificial Sequence: Synthetic oligonucleotide
cucgcaugggccguaaguu

SEQ ID NO: 563163 - RNA, 19 nt, Artificial Sequence
  Description of Artificial Sequence: Synthetic oligonucleotide
ggccguaaguugcggccac

SEQ ID NO: 563164 - RNA, 19 nt, Artificial Sequence
  Description of Artificial Sequence: Synthetic oligonucleotide
cgcuccgauuucgagcugg

SEQ ID NO: 563165 - RNA, 19 nt, Artificial Sequence
  Description of Artificial Sequence: Synthetic oligonucleotide
cgccacuuccccacuuggg

SEQ ID NO: 563166 - RNA, 19 nt, Artificial Sequence
  Description of Artificial Sequence: Synthetic oligonucleotide
ccgcaacacauagugcaac

SEQ ID NO: 563167 - RNA, 19 nt, Artificial Sequence
  Description of Artificial Sequence: Synthetic oligonucleotide
cgaugguucucaucacuca

SEQ ID NO: 563168 - RNA, 19 nt, Artificial Sequence
  Description of Artificial Sequence: Synthetic oligonucleotide
gguccuuucccgggcccgc

SEQ ID NO: 563169 - RNA, 19 nt, Artificial Sequence
  Description of Artificial Sequence: Synthetic oligonucleotide
gccguaaguugcggccacg

SEQ ID NO: 563170 - RNA, 19 nt, Artificial Sequence
  Description of Artificial Sequence: Synthetic oligonucleotide
cggagaucagucaccacaa

SEQ ID NO: 563171 - RNA, 19 nt, Artificial Sequence
  Description of Artificial Sequence: Synthetic oligonucleotide
cccgcggagguaguuggag

SEQ ID NO: 563172 - RNA, 19 nt, Artificial Sequence
  Description of Artificial Sequence: Synthetic oligonucleotide
gcuguuccgcuccgauuuc

SEQ ID NO: 563173 - RNA, 19 nt, Artificial Sequence
  Description of Artificial Sequence: Synthetic oligonucleotide
caccagucccaucccgcaa

SEQ ID NO: 563174 - RNA, 19 nt, Artificial Sequence
  Description of Artificial Sequence: Synthetic oligonucleotide
cuuugugcagugccucauu

SEQ ID NO: 563175 - RNA, 19 nt, Artificial Sequence
  Description of Artificial Sequence: Synthetic oligonucleotide
gcggcagcggcugcuugag

SEQ ID NO: 563176 - RNA, 19 nt, Artificial Sequence
  Description of Artificial Sequence: Synthetic oligonucleotide
gccaauuguggccccugua

SEQ ID NO: 563177 - RNA, 19 nt, Artificial Sequence
  Description of Artificial Sequence: Synthetic oligonucleotide
cccugggcgccacuucccc

SEQ ID NO: 563178 - RNA, 19 nt, Artificial Sequence
  Description of Artificial Sequence: Synthetic oligonucleotide
gguaccacccuuggccucu

SEQ ID NO: 563179 - RNA, 19 nt, Artificial Sequence
  Description of Artificial Sequence: Synthetic oligonucleotide
ccacggagaucagucacca

SEQ ID NO: 563180 - RNA, 19 nt, Artificial Sequence
  Description of Artificial Sequence: Synthetic oligonucleotide
ccuaacacuagugccaauu

SEQ ID NO: 563181 - RNA, 19 nt, Artificial Sequence
  Description of Artificial Sequence: Synthetic oligonucleotide
gcccugcauaucuguccgc

SEQ ID NO: 563182 - RNA, 19 nt, Artificial Sequence
  Description of Artificial Sequence: Synthetic oligonucleotide
gggccguaaguugcggcca

SEQ ID NO: 563183 - RNA, 19 nt, Artificial Sequence
  Description of Artificial Sequence: Synthetic oligonucleotide
cgauuucgagcugggcgcc

SEQ ID NO: 563184 - RNA, 19 nt, Artificial Sequence
  Description of Artificial Sequence: Synthetic oligonucleotide
caccagcgaguagcuggug

SEQ ID NO: 563185 - RNA, 19 nt, Artificial Sequence
  Description of Artificial Sequence: Synthetic oligonucleotide
gacuggugugauaggucuu

SEQ ID NO: 563186 - RNA, 19 nt, Artificial Sequence
  Description of Artificial Sequence: Synthetic oligonucleotide
cagcgcaggccaccagcga

SEQ ID NO: 563187 - RNA, 19 nt, Artificial Sequence
  Description of Artificial Sequence: Synthetic oligonucleotide
gggcccgcggagguaguug

SEQ ID NO: 563188 - RNA, 19 nt, Artificial Sequence
  Description of Artificial Sequence: Synthetic oligonucleotide
gcaacacauagugcaacuu

SEQ ID NO: 563189 - RNA, 19 nt, Artificial Sequence
  Description of Artificial Sequence: Synthetic oligonucleotide
ccuuuagacuggugugaua

SEQ ID NO: 563190 - RNA, 19 nt, Artificial Sequence
  Description of Artificial Sequence: Synthetic oligonucleotide
ccacuggucugcccuuuga

SEQ ID NO: 563191 - RNA, 19 nt, Artificial Sequence
  Description of Artificial Sequence: Synthetic oligonucleotide
cguaaguugcggccacgga

SEQ ID NO: 563192 - RNA, 19 nt, Artificial Sequence
  Description of Artificial Sequence: Synthetic oligonucleotide
cguguucccgccgccgccc

SEQ ID NO: 563193 - RNA, 19 nt, Artificial Sequence
  Description of Artificial Sequence: Synthetic oligonucleotide
cgcaacacauagugcaacu

SEQ ID NO: 563194 - RNA, 19 nt, Artificial Sequence
  Description of Artificial Sequence: Synthetic oligonucleotide
gccccgcuguuccgcuccg

SEQ ID NO: 563195 - RNA, 19 nt, Artificial Sequence
  Description of Artificial Sequence: Synthetic oligonucleotide
gcggcccagcccucacagc

SEQ ID NO: 563196 - RNA, 19 nt, Artificial Sequence
  Description of Artificial Sequence: Synthetic oligonucleotide
ccugccggaccagcuugag

SEQ ID NO: 563197 - RNA, 19 nt, Artificial Sequence
  Description of Artificial Sequence: Synthetic oligonucleotide
ccgugccgcaggcacugug

SEQ ID NO: 563198 - RNA, 19 nt, Artificial Sequence
  Description of Artificial Sequence: Synthetic oligonucleotide
cccaucccgcaaccuaaca

SEQ ID NO: 563199 - RNA, 19 nt, Artificial Sequence
  Description of Artificial Sequence: Synthetic oligonucleotide
gcggcugcuugagggcccc

SEQ ID NO: 563200 - RNA, 19 nt, Artificial Sequence
  Description of Artificial Sequence: Synthetic oligonucleotide
gugccucauucgucauccu

SEQ ID NO: 563201 - RNA, 19 nt, Artificial Sequence
  Description of Artificial Sequence: Synthetic oligonucleotide
ccaccagcgaguagcuggu

SEQ ID NO: 563202 - RNA, 19 nt, Artificial Sequence
  Description of Artificial Sequence: Synthetic oligonucleotide
cauggcggauaaccucauu

SEQ ID NO: 563203 - RNA, 19 nt, Artificial Sequence
  Description of Artificial Sequence: Synthetic oligonucleotide
ccugggcgccacuucccca

SEQ ID NO: 563204 - RNA, 19 nt, Artificial Sequence
  Description of Artificial Sequence: Synthetic oligonucleotide
ccuuucccgggcccgcgga

SEQ ID NO: 563205 - RNA, 19 nt, Artificial Sequence
  Description of Artificial Sequence: Synthetic oligonucleotide
cugugcacuuggguccccu

SEQ ID NO: 563206 - RNA, 19 nt, Artificial Sequence
  Description of Artificial Sequence: Synthetic oligonucleotide
cccugcauaucuguccgcu

SEQ ID NO: 563207 - RNA, 19 nt, Artificial Sequence
  Description of Artificial Sequence: Synthetic oligonucleotide
cccagguacauggcggaua

SEQ ID NO: 563208 - RNA, 19 nt, Artificial Sequence
  Description of Artificial Sequence: Synthetic oligonucleotide
ccucauucgucauccuguu

SEQ ID NO: 563209 - RNA, 19 nt, Artificial Sequence
  Description of Artificial Sequence: Synthetic oligonucleotide
gcgucgcuaggcacucaca

SEQ ID NO: 563210 - RNA, 19 nt, Artificial Sequence
  Description of Artificial Sequence: Synthetic oligonucleotide
ccacagugcugauguagau

SEQ ID NO: 563211 - RNA, 19 nt, Artificial Sequence
  Description of Artificial Sequence: Synthetic oligonucleotide
gcgaccccgaggaggcaca

SEQ ID NO: 563212 - RNA, 19 nt, Artificial Sequence
  Description of Artificial Sequence: Synthetic oligonucleotide
cggaaaagacgaggagaca

SEQ ID NO: 563213 - RNA, 19 nt, Artificial Sequence
  Description of Artificial Sequence: Synthetic oligonucleotide
ggacugucccugggcgcca

SEQ ID NO: 563214 - RNA, 19 nt, Artificial Sequence
  Description of Artificial Sequence: Synthetic oligonucleotide
ccccgaggaggcacagcca

SEQ ID NO: 563215 - RNA, 19 nt, Artificial Sequence
  Description of Artificial Sequence: Synthetic oligonucleotide
cagucccaucccgcaaccu

SEQ ID NO: 563216 - RNA, 19 nt, Artificial Sequence
  Description of Artificial Sequence: Synthetic oligonucleotide
ccuuugugcagugccucau

SEQ ID NO: 563217 - RNA, 19 nt, Artificial Sequence
  Description of Artificial Sequence: Synthetic oligonucleotide
gcucucgcaugggccguaa

SEQ ID NO: 563218 - RNA, 19 nt, Artificial Sequence
  Description of Artificial Sequence: Synthetic oligonucleotide
ccacgcugacugucucaaa

SEQ ID NO: 563219 - RNA, 19 nt, Artificial Sequence
  Description of Artificial Sequence: Synthetic oligonucleotide
ccgcuccgauuucgagcug

SEQ ID NO: 563220 - RNA, 19 nt, Artificial Sequence
  Description of Artificial Sequence: Synthetic oligonucleotide
gcccgcggagguaguugga

SEQ ID NO: 563221 - RNA, 19 nt, Artificial Sequence
  Description of Artificial Sequence: Synthetic oligonucleotide
ccgcuguuccgcuccgauu

SEQ ID NO: 563222 - RNA, 19 nt, Artificial Sequence
  Description of Artificial Sequence: Synthetic oligonucleotide
cgguuaggucacccacgcu

SEQ ID NO: 563223 - RNA, 19 nt, Artificial Sequence
  Description of Artificial Sequence: Synthetic oligonucleotide
ccgcaggcacugugcacuu

SEQ ID NO: 563224 - RNA, 19 nt, Artificial Sequence
  Description of Artificial Sequence: Synthetic oligonucleotide
ccccagguacauggcggau

SEQ ID NO: 563225 - RNA, 19 nt, Artificial Sequence
  Description of Artificial Sequence: Synthetic oligonucleotide
ccgcucucgcaugggccgu

SEQ ID NO: 563226 - RNA, 19 nt, Artificial Sequence
  Description of Artificial Sequence: Synthetic oligonucleotide
cgcucucgcaugggccgua

SEQ ID NO: 563227 - RNA, 19 nt, Artificial Sequence
  Description of Artificial Sequence: Synthetic oligonucleotide
aucuauagaagucagaggc

SEQ ID NO: 563228 - RNA, 19 nt, Artificial Sequence
  Description of Artificial Sequence: Synthetic oligonucleotide
aagucguucaaacaacacg

SEQ ID NO: 563229 - RNA, 19 nt, Artificial Sequence
  Description of Artificial Sequence: Synthetic oligonucleotide
ucugcacaaacucacaaag

SEQ ID NO: 563230 - RNA, 19 nt, Artificial Sequence
  Description of Artificial Sequence: Synthetic oligonucleotide
agaagcaugaccgaggaac

SEQ ID NO: 563231 - RNA, 19 nt, Artificial Sequence
  Description of Artificial Sequence: Synthetic oligonucleotide
uucaugauaguguggaagg

SEQ ID NO: 563232 - RNA, 19 nt, Artificial Sequence
  Description of Artificial Sequence: Synthetic oligonucleotide
ugugucaucaccaggcccg

SEQ ID NO: 563233 - RNA, 19 nt, Artificial Sequence
  Description of Artificial Sequence: Synthetic oligonucleotide
gaagcggauagccagaucc

SEQ ID NO: 563234 - RNA, 19 nt, Artificial Sequence
  Description of Artificial Sequence: Synthetic oligonucleotide
gagauuauagacugcauug

SEQ ID NO: 563235 - RNA, 19 nt, Artificial Sequence
  Description of Artificial Sequence: Synthetic oligonucleotide
gauuagagcggacaguggg

SEQ ID NO: 563236 - RNA, 19 nt, Artificial Sequence
  Description of Artificial Sequence: Synthetic oligonucleotide
aagaccugugucuucgggc

SEQ ID NO: 563237 - RNA, 19 nt, Artificial Sequence
  Description of Artificial Sequence: Synthetic oligonucleotide
uuaggugugacaaagucau

SEQ ID NO: 563238 - RNA, 19 nt, Artificial Sequence
  Description of Artificial Sequence: Synthetic oligonucleotide
aguguuuggacgaugacgg

SEQ ID NO: 563239 - RNA, 19 nt, Artificial Sequence
  Description of Artificial Sequence: Synthetic oligonucleotide
uaguagacgaagcugggag

SEQ ID NO: 563240 - RNA, 19 nt, Artificial Sequence
  Description of Artificial Sequence: Synthetic oligonucleotide
gaaaguucauccucacugg

SEQ ID NO: 563241 - RNA, 19 nt, Artificial Sequence
  Description of Artificial Sequence: Synthetic oligonucleotide
ugcucaaauucaucuaugg

SEQ ID NO: 563242 - RNA, 19 nt, Artificial Sequence
  Description of Artificial Sequence: Synthetic oligonucleotide
gaggcugucgccuugagac

SEQ ID NO: 563243 - RNA, 19 nt, Artificial Sequence
  Description of Artificial Sequence: Synthetic oligonucleotide
auucaguacagcuucccgg

SEQ ID NO: 563244 - RNA, 19 nt, Artificial Sequence
  Description of Artificial Sequence: Synthetic oligonucleotide
gaauaggugaggcaacucc

SEQ ID NO: 563245 - RNA, 19 nt, Artificial Sequence
  Description of Artificial Sequence: Synthetic oligonucleotide
ucaagcauggugaauagua

SEQ ID NO: 563246 - RNA, 19 nt, Artificial Sequence
  Description of Artificial Sequence: Synthetic oligonucleotide
gauuauagacugcauugcc

SEQ ID NO: 563247 - RNA, 19 nt, Artificial Sequence
  Description of Artificial Sequence: Synthetic oligonucleotide
gaaccgaugacacagcuuc

SEQ ID NO: 563248 - RNA, 19 nt, Artificial Sequence
  Description of Artificial Sequence: Synthetic oligonucleotide
gguacugccgcucaguucg

SEQ ID NO: 563249 - RNA, 19 nt, Artificial Sequence
  Description of Artificial Sequence: Synthetic oligonucleotide
auuauagacugcauugccc

SEQ ID NO: 563250 - RNA, 19 nt, Artificial Sequence
  Description of Artificial Sequence: Synthetic oligonucleotide
uuauagacugcauugcccu

SEQ ID NO: 563251 - RNA, 19 nt, Artificial Sequence
  Description of Artificial Sequence: Synthetic oligonucleotide
agauuauagacugcauugc

SEQ ID NO: 563252 - RNA, 19 nt, Artificial Sequence
  Description of Artificial Sequence: Synthetic oligonucleotide
gacgaaggcagcuagcacc

SEQ ID NO: 563253 - RNA, 19 nt, Artificial Sequence
  Description of Artificial Sequence: Synthetic oligonucleotide
uaaauugcuuccuauaauu

SEQ ID NO: 563254 - RNA, 19 nt, Artificial Sequence
  Description of Artificial Sequence: Synthetic oligonucleotide
uugucugaaucuauagaag

SEQ ID NO: 563255 - RNA, 19 nt, Artificial Sequence
  Description of Artificial Sequence: Synthetic oligonucleotide
cacacaguaggccaggucc

SEQ ID NO: 563256 - RNA, 19 nt, Artificial Sequence
  Description of Artificial Sequence: Synthetic oligonucleotide
uugucaagcaucuugugaa

SEQ ID NO: 563257 - RNA, 19 nt, Artificial Sequence
  Description of Artificial Sequence: Synthetic oligonucleotide
cagggcaccaaucugaggc

SEQ ID NO: 563258 - RNA, 19 nt, Artificial Sequence
  Description of Artificial Sequence: Synthetic oligonucleotide
cagaccuuaagcagcagcg

SEQ ID NO: 563259 - RNA, 19 nt, Artificial Sequence
  Description of Artificial Sequence: Synthetic oligonucleotide
acaguaggcauucaguaca

SEQ ID NO: 563260 - RNA, 19 nt, Artificial Sequence
  Description of Artificial Sequence: Synthetic oligonucleotide
aacaacacguguuccugag

SEQ ID NO: 563261 - RNA, 19 nt, Artificial Sequence
  Description of Artificial Sequence: Synthetic oligonucleotide
augccaagaagcaugaccg

SEQ ID NO: 563262 - RNA, 19 nt, Artificial Sequence
  Description of Artificial Sequence: Synthetic oligonucleotide
gaguguuuggacgaugacg

SEQ ID NO: 563263 - RNA, 19 nt, Artificial Sequence
  Description of Artificial Sequence: Synthetic oligonucleotide
ucugguaugacaugcccga

SEQ ID NO: 563264 - RNA, 19 nt, Artificial Sequence
  Description of Artificial Sequence: Synthetic oligonucleotide
acagcuuaucuccaaagca

SEQ ID NO: 563265 - RNA, 19 nt, Artificial Sequence
  Description of Artificial Sequence: Synthetic oligonucleotide
gcaaucaugagauuagagc

SEQ ID NO: 563266 - RNA, 19 nt, Artificial Sequence
  Description of Artificial Sequence: Synthetic oligonucleotide
acagaugcuauggauuagc

SEQ ID NO: 563267 - RNA, 19 nt, Artificial Sequence
  Description of Artificial Sequence: Synthetic oligonucleotide
gagauuagagcggacagug

SEQ ID NO: 563268 - RNA, 19 nt, Artificial Sequence
  Description of Artificial Sequence: Synthetic oligonucleotide
uuguugcagaccuuaagca

SEQ ID NO: 563269 - RNA, 19 nt, Artificial Sequence
  Description of Artificial Sequence: Synthetic oligonucleotide
ugaagacuucucaagcaug

SEQ ID NO: 563270 - RNA, 19 nt, Artificial Sequence
  Description of Artificial Sequence: Synthetic oligonucleotide
accagagugucuaaauugc

SEQ ID NO: 563271 - RNA, 19 nt, Artificial Sequence
  Description of Artificial Sequence: Synthetic oligonucleotide
agaggcguccacuaacaac

SEQ ID NO: 563272 - RNA, 19 nt, Artificial Sequence
  Description of Artificial Sequence: Synthetic oligonucleotide
uguggaugugcaaagcccu

SEQ ID NO: 563273 - RNA, 19 nt, Artificial Sequence
  Description of Artificial Sequence: Synthetic oligonucleotide
uuuccucgugccaucaugc

SEQ ID NO: 563274 - RNA, 19 nt, Artificial Sequence
  Description of Artificial Sequence: Synthetic oligonucleotide
acagauucaucuaacagcu

SEQ ID NO: 563275 - RNA, 19 nt, Artificial Sequence
  Description of Artificial Sequence: Synthetic oligonucleotide
ugcggaaccgaugacacag

SEQ ID NO: 563276 - RNA, 19 nt, Artificial Sequence
  Description of Artificial Sequence: Synthetic oligonucleotide
ucuuccgucauuuccgcug

SEQ ID NO: 563277 - RNA, 19 nt, Artificial Sequence
  Description of Artificial Sequence: Synthetic oligonucleotide
cagcuuaucuccaaagcag

SEQ ID NO: 563278 - RNA, 19 nt, Artificial Sequence
  Description of Artificial Sequence: Synthetic oligonucleotide
ucuauagaagucagaggcu

SEQ ID NO: 563279 - RNA, 19 nt, Artificial Sequence
  Description of Artificial Sequence: Synthetic oligonucleotide
aauucaucuaugguagccu

SEQ ID NO: 563280 - RNA, 19 nt, Artificial Sequence
  Description of Artificial Sequence: Synthetic oligonucleotide
uuuuccucgugccaucaug

SEQ ID NO: 563281 - RNA, 19 nt, Artificial Sequence
  Description of Artificial Sequence: Synthetic oligonucleotide
agauucaucuaacagcuua

SEQ ID NO: 563282 - RNA, 19 nt, Artificial Sequence
  Description of Artificial Sequence: Synthetic oligonucleotide
agcauggugaauaguagac

SEQ ID NO: 563283 - RNA, 19 nt, Artificial Sequence
  Description of Artificial Sequence: Synthetic oligonucleotide
uucaguacagcuucccgga

SEQ ID NO: 563284 - RNA, 19 nt, Artificial Sequence
  Description of Artificial Sequence: Synthetic oligonucleotide
cugggagucacagaaagag

SEQ ID NO: 563285 - RNA, 19 nt, Artificial Sequence
  Description of Artificial Sequence: Synthetic oligonucleotide
agaugcuauggauuagcuc

SEQ ID NO: 563286 - RNA, 19 nt, Artificial Sequence
  Description of Artificial Sequence: Synthetic oligonucleotide
cagaaagaggcacugauca

SEQ ID NO: 563287 - RNA, 19 nt, Artificial Sequence
  Description of Artificial Sequence: Synthetic oligonucleotide
agucguucaaacaacacgu

SEQ ID NO: 563288 - RNA, 19 nt, Artificial Sequence
  Description of Artificial Sequence: Synthetic oligonucleotide
ugcgucgaggcuuaggugu

SEQ ID NO: 563289 - RNA, 19 nt, Artificial Sequence
  Description of Artificial Sequence: Synthetic oligonucleotide
auaguuguuucagagcuug

SEQ ID NO: 563290 - RNA, 19 nt, Artificial Sequence
  Description of Artificial Sequence: Synthetic oligonucleotide
uuugugaccaucucccgaa

SEQ ID NO: 563291 - RNA, 19 nt, Artificial Sequence
  Description of Artificial Sequence: Synthetic oligonucleotide
uuaagcagcagcgggacga

SEQ ID NO: 563292 - RNA, 19 nt, Artificial Sequence
  Description of Artificial Sequence: Synthetic oligonucleotide
cugaaucuauagaagucag

SEQ ID NO: 563293 - RNA, 19 nt, Artificial Sequence
  Description of Artificial Sequence: Synthetic oligonucleotide
agagcaguugggucacugc

SEQ ID NO: 563294 - RNA, 19 nt, Artificial Sequence
  Description of Artificial Sequence: Synthetic oligonucleotide
ugggagucacagaaagagg

SEQ ID NO: 563295 - RNA, 19 nt, Artificial Sequence
  Description of Artificial Sequence: Synthetic oligonucleotide
ugugcggaaccgaugacac

SEQ ID NO: 563296 - RNA, 19 nt, Artificial Sequence
  Description of Artificial Sequence: Synthetic oligonucleotide
ugaaucuauagaagucaga

SEQ ID NO: 563297 - RNA, 19 nt, Artificial Sequence
  Description of Artificial Sequence: Synthetic oligonucleotide
agauacccugcacagcagg

SEQ ID NO: 563298 - RNA, 19 nt, Artificial Sequence
  Description of Artificial Sequence: Synthetic oligonucleotide
ggaaacuucucauccagcc

SEQ ID NO: 563299 - RNA, 19 nt, Artificial Sequence
  Description of Artificial Sequence: Synthetic oligonucleotide
ucguucaaacaacacgugu

SEQ ID NO: 563300 - RNA, 19 nt, Artificial Sequence
  Description of Artificial Sequence: Synthetic oligonucleotide
acgguuggugcgucgaggc

SEQ ID NO: 563301 - RNA, 19 nt, Artificial Sequence
  Description of Artificial Sequence: Synthetic oligonucleotide
gaugguuccgacagaggcg

SEQ ID NO: 563302 - RNA, 19 nt, Artificial Sequence
  Description of Artificial Sequence: Synthetic oligonucleotide
ucaucuaugguagccuugc

SEQ ID NO: 563303 - RNA, 19 nt, Artificial Sequence
  Description of Artificial Sequence: Synthetic oligonucleotide
uuucuccuaucugagaugu

SEQ ID NO: 563304 - RNA, 19 nt, Artificial Sequence
  Description of Artificial Sequence: Synthetic oligonucleotide
cauggugaauaguagacga

SEQ ID NO: 563305 - RNA, 19 nt, Artificial Sequence
  Description of Artificial Sequence: Synthetic oligonucleotide
caagacacuggaugguucc

SEQ ID NO: 563306 - RNA, 19 nt, Artificial Sequence
  Description of Artificial Sequence: Synthetic oligonucleotide
gaggcguccacuaacaaca

SEQ ID NO: 563307 - RNA, 19 nt, Artificial Sequence
  Description of Artificial Sequence: Synthetic oligonucleotide
aauaggugaggcaacuccu

SEQ ID NO: 563308 - RNA, 19 nt, Artificial Sequence
  Description of Artificial Sequence: Synthetic oligonucleotide
uugggagucucuucuuccg

SEQ ID NO: 563309 - RNA, 19 nt, Artificial Sequence
  Description of Artificial Sequence: Synthetic oligonucleotide
gauaucagggaggagauua

SEQ ID NO: 563310 - RNA, 19 nt, Artificial Sequence
  Description of Artificial Sequence: Synthetic oligonucleotide
gagcaggggaccuuuuccg

SEQ ID NO: 563311 - RNA, 19 nt, Artificial Sequence
  Description of Artificial Sequence: Synthetic oligonucleotide
cacuggaugguuccgacag

SEQ ID NO: 563312 - RNA, 19 nt, Artificial Sequence
  Description of Artificial Sequence: Synthetic oligonucleotide
cucugguaugacaugcccg

SEQ ID NO: 563313 - RNA, 19 nt, Artificial Sequence
  Description of Artificial Sequence: Synthetic oligonucleotide
aaacucucagucuguuugu

SEQ ID NO: 563314 - RNA, 19 nt, Artificial Sequence
  Description of Artificial Sequence: Synthetic oligonucleotide
uguggaaacuucucaucca

SEQ ID NO: 563315 - RNA, 19 nt, Artificial Sequence
  Description of Artificial Sequence: Synthetic oligonucleotide
gaagaaauucuuggccagg

SEQ ID NO: 563316 - RNA, 19 nt, Artificial Sequence
  Description of Artificial Sequence: Synthetic oligonucleotide
aggugugacaaagucauug

SEQ ID NO: 563317 - RNA, 19 nt, Artificial Sequence
  Description of Artificial Sequence: Synthetic oligonucleotide
agcaugaccgaggaacagc

SEQ ID NO: 563318 - RNA, 19 nt, Artificial Sequence
  Description of Artificial Sequence: Synthetic oligonucleotide
ugcauugcccuugugggag

SEQ ID NO: 563319 - RNA, 19 nt, Artificial Sequence
  Description of Artificial Sequence: Synthetic oligonucleotide
cauucaguacagcuucccg

SEQ ID NO: 563320 - RNA, 19 nt, Artificial Sequence
  Description of Artificial Sequence: Synthetic oligonucleotide
uugcccacaacugacaaaa

SEQ ID NO: 563321 - RNA, 19 nt, Artificial Sequence
  Description of Artificial Sequence: Synthetic oligonucleotide
guucaaacaacacguguuc

SEQ ID NO: 563322 - RNA, 19 nt, Artificial Sequence
  Description of Artificial Sequence: Synthetic oligonucleotide
acaugcccgaagcuucugc

SEQ ID NO: 563323 - RNA, 19 nt, Artificial Sequence
  Description of Artificial Sequence: Synthetic oligonucleotide
ugucaagcaucuugugaag

SEQ ID NO: 563324 - RNA, 19 nt, Artificial Sequence
  Description of Artificial Sequence: Synthetic oligonucleotide
agguucaucagcaggaaug

SEQ ID NO: 563325 - RNA, 19 nt, Artificial Sequence
  Description of Artificial Sequence: Synthetic oligonucleotide
cuaacaacaguaggcauuc

SEQ ID NO: 563326 - RNA, 19 nt, Artificial Sequence
  Description of Artificial Sequence: Synthetic oligonucleotide
augaccgaggaacagcgcu

SEQ ID NO: 563327 - RNA, 19 nt, Artificial Sequence
  Description of Artificial Sequence: Synthetic oligonucleotide
ucacguucacccagggaag

SEQ ID NO: 563328 - RNA, 19 nt, Artificial Sequence
  Description of Artificial Sequence: Synthetic oligonucleotide
gguaugacaugcccgaagc

SEQ ID NO: 563329 - RNA, 19 nt, Artificial Sequence
  Description of Artificial Sequence: Synthetic oligonucleotide
aagcggauagccagauccc

SEQ ID NO: 563330 - RNA, 19 nt, Artificial Sequence
  Description of Artificial Sequence: Synthetic oligonucleotide
uuuuccgugguccgcuccc

SEQ ID NO: 563331 - RNA, 19 nt, Artificial Sequence
  Description of Artificial Sequence: Synthetic oligonucleotide
auagaagucagaggcuguc

SEQ ID NO: 563332 - RNA, 19 nt, Artificial Sequence
  Description of Artificial Sequence: Synthetic oligonucleotide
acgcaguuugcccacaacu

SEQ ID NO: 563333 - RNA, 19 nt, Artificial Sequence
  Description of Artificial Sequence: Synthetic oligonucleotide
gaggagauuauagacugca

SEQ ID NO: 563334 - RNA, 19 nt, Artificial Sequence
  Description of Artificial Sequence: Synthetic oligonucleotide
uaucugagauguuggaaau

SEQ ID NO: 563335 - RNA, 19 nt, Artificial Sequence
  Description of Artificial Sequence: Synthetic oligonucleotide
cagccuugcagcaucuggg

SEQ ID NO: 563336 - RNA, 19 nt, Artificial Sequence
  Description of Artificial Sequence: Synthetic oligonucleotide
uucgggcagaugaucugcg

SEQ ID NO: 563337 - RNA, 19 nt, Artificial Sequence
  Description of Artificial Sequence: Synthetic oligonucleotide
acugccgcucaguucgggc

SEQ ID NO: 563338 - RNA, 19 nt, Artificial Sequence
  Description of Artificial Sequence: Synthetic oligonucleotide
agaugaucugcggaugggg

SEQ ID NO: 563339 - RNA, 19 nt, Artificial Sequence
  Description of Artificial Sequence: Synthetic oligonucleotide
gauacccugcacagcaggg

SEQ ID NO: 563340 - RNA, 19 nt, Artificial Sequence
  Description of Artificial Sequence: Synthetic oligonucleotide
ggcuccuuagaccagauga

SEQ ID NO: 563341 - RNA, 19 nt, Artificial Sequence
  Description of Artificial Sequence: Synthetic oligonucleotide
ucgccuugagacagcagag

SEQ ID NO: 563342 - RNA, 19 nt, Artificial Sequence
  Description of Artificial Sequence: Synthetic oligonucleotide
uuuggacgaugacgguugg

SEQ ID NO: 563343 - RNA, 19 nt, Artificial Sequence
  Description of Artificial Sequence: Synthetic oligonucleotide
gacagaggcguccacuaac

SEQ ID NO: 563344 - RNA, 19 nt, Artificial Sequence
  Description of Artificial Sequence: Synthetic oligonucleotide
auuagagcggacagugggg

SEQ ID NO: 563345 - RNA, 19 nt, Artificial Sequence
  Description of Artificial Sequence: Synthetic oligonucleotide
uugcugaguguuuggacga

SEQ ID NO: 563346 - RNA, 19 nt, Artificial Sequence
  Description of Artificial Sequence: Synthetic oligonucleotide
ucuaacagcuuaucuccaa

SEQ ID NO: 563347 - RNA, 19 nt, Artificial Sequence
  Description of Artificial Sequence: Synthetic oligonucleotide
guuuggacgaugacgguug

SEQ ID NO: 563348 - RNA, 19 nt, Artificial Sequence
  Description of Artificial Sequence: Synthetic oligonucleotide
agcacggccaucucgcuca

SEQ ID NO: 563349 - RNA, 19 nt, Artificial Sequence
  Description of Artificial Sequence: Synthetic oligonucleotide
uuucguugcugaguguuug

SEQ ID NO: 563350 - RNA, 19 nt, Artificial Sequence
  Description of Artificial Sequence: Synthetic oligonucleotide
gauuagcucugccucugug

SEQ ID NO: 563351 - RNA, 19 nt, Artificial Sequence
  Description of Artificial Sequence: Synthetic oligonucleotide
aagacacuggaugguuccg

SEQ ID NO: 563352 - RNA, 19 nt, Artificial Sequence
  Description of Artificial Sequence: Synthetic oligonucleotide
acagaaagaggcacugauc

SEQ ID NO: 563353 - RNA, 19 nt, Artificial Sequence
  Description of Artificial Sequence: Synthetic oligonucleotide
ggaacagcgcuccagagga

SEQ ID NO: 563354 - RNA, 19 nt, Artificial Sequence
  Description of Artificial Sequence: Synthetic oligonucleotide
caugcggcgaaccccaaac

SEQ ID NO: 563355 - RNA, 19 nt, Artificial Sequence
  Description of Artificial Sequence: Synthetic oligonucleotide
aaauugcuuccuauaauuu

SEQ ID NO: 563356 - RNA, 19 nt, Artificial Sequence
  Description of Artificial Sequence: Synthetic oligonucleotide
aguagacgaagcugggagu

SEQ ID NO: 563357 - RNA, 19 nt, Artificial Sequence
  Description of Artificial Sequence: Synthetic oligonucleotide
caagcaucuugugaaggcc

SEQ ID NO: 563358 - RNA, 19 nt, Artificial Sequence
  Description of Artificial Sequence: Synthetic oligonucleotide
gugcaaagcccuuugugac

SEQ ID NO: 563359 - RNA, 19 nt, Artificial Sequence
  Description of Artificial Sequence: Synthetic oligonucleotide
uuagagcggacagugggga

SEQ ID NO: 563360 - RNA, 19 nt, Artificial Sequence
  Description of Artificial Sequence: Synthetic oligonucleotide
agcggauagccagaucccc

SEQ ID NO: 563361 - RNA, 19 nt, Artificial Sequence
  Description of Artificial Sequence: Synthetic oligonucleotide
acaacacguguuccugagg

SEQ ID NO: 563362 - RNA, 19 nt, Artificial Sequence
  Description of Artificial Sequence: Synthetic oligonucleotide
acaacaguaggcauucagu

SEQ ID NO: 563363 - RNA, 19 nt, Artificial Sequence
  Description of Artificial Sequence: Synthetic oligonucleotide
uccucgugccaucaugcca

SEQ ID NO: 563364 - RNA, 19 nt, Artificial Sequence
  Description of Artificial Sequence: Synthetic oligonucleotide
cauugucugaaucuauaga

SEQ ID NO: 563365 - RNA, 19 nt, Artificial Sequence
  Description of Artificial Sequence: Synthetic oligonucleotide
guggcaaucaugagauuag

SEQ ID NO: 563366 - RNA, 19 nt, Artificial Sequence
  Description of Artificial Sequence: Synthetic oligonucleotide
gaugggaauaggugaggca

SEQ ID NO: 563367 - RNA, 19 nt, Artificial Sequence
  Description of Artificial Sequence: Synthetic oligonucleotide
ugacaaagucauugucuga

SEQ ID NO: 563368 - RNA, 19 nt, Artificial Sequence
  Description of Artificial Sequence: Synthetic oligonucleotide
cugagauguuggaaauggc

SEQ ID NO: 563369 - RNA, 19 nt, Artificial Sequence
  Description of Artificial Sequence: Synthetic oligonucleotide
acacaguaggccagguccc

SEQ ID NO: 563370 - RNA, 19 nt, Artificial Sequence
  Description of Artificial Sequence: Synthetic oligonucleotide
uggacuuucguugcugagu

SEQ ID NO: 563371 - RNA, 19 nt, Artificial Sequence
  Description of Artificial Sequence: Synthetic oligonucleotide
aucaugagauuagagcgga

SEQ ID NO: 563372 - RNA, 19 nt, Artificial Sequence
  Description of Artificial Sequence: Synthetic oligonucleotide
gaugacgguuggugcgucg

SEQ ID NO: 563373 - RNA, 19 nt, Artificial Sequence
  Description of Artificial Sequence: Synthetic oligonucleotide
gcugaugauaucagggagg

SEQ ID NO: 563374 - RNA, 19 nt, Artificial Sequence
  Description of Artificial Sequence: Synthetic oligonucleotide
ucuucgggcagaugaucug

SEQ ID NO: 563375 - RNA, 19 nt, Artificial Sequence
  Description of Artificial Sequence: Synthetic oligonucleotide
ugugaccaucucccgaagu

SEQ ID NO: 563376 - RNA, 19 nt, Artificial Sequence
  Description of Artificial Sequence: Synthetic oligonucleotide
gucgaugagcagcacggcc

SEQ ID NO: 563377 - RNA, 19 nt, Artificial Sequence
  Description of Artificial Sequence: Synthetic oligonucleotide
cuugccaagggccagugaa

SEQ ID NO: 563378 - RNA, 19 nt, Artificial Sequence
  Description of Artificial Sequence: Synthetic oligonucleotide
gucguuguagaggccaggg

SEQ ID NO: 563379 - RNA, 19 nt, Artificial Sequence
  Description of Artificial Sequence: Synthetic oligonucleotide
ugccucugguaugacaugc

SEQ ID NO: 563380 - RNA, 19 nt, Artificial Sequence
  Description of Artificial Sequence: Synthetic oligonucleotide
auagacugcauugcccuug

SEQ ID NO: 563381 - RNA, 19 nt, Artificial Sequence
  Description of Artificial Sequence: Synthetic oligonucleotide
gaagucguucaaacaacac

SEQ ID NO: 563382 - RNA, 19 nt, Artificial Sequence
  Description of Artificial Sequence: Synthetic oligonucleotide
aggaucaggugugucauca

SEQ ID NO: 563383 - RNA, 19 nt, Artificial Sequence
  Description of Artificial Sequence: Synthetic oligonucleotide
aacagcgcuccagaggaga

SEQ ID NO: 563384 - RNA, 19 nt, Artificial Sequence
  Description of Artificial Sequence: Synthetic oligonucleotide
gugaccaucucccgaaguc

SEQ ID NO: 563385 - RNA, 19 nt, Artificial Sequence
  Description of Artificial Sequence: Synthetic oligonucleotide
ugauaguguggaagggcuc

SEQ ID NO: 563386 - RNA, 19 nt, Artificial Sequence
  Description of Artificial Sequence: Synthetic oligonucleotide
gugaauaguagacgaagcu

SEQ ID NO: 563387 - RNA, 19 nt, Artificial Sequence
  Description of Artificial Sequence: Synthetic oligonucleotide
ggugaauaguagacgaagc

SEQ ID NO: 563388 - RNA, 19 nt, Artificial Sequence
  Description of Artificial Sequence: Synthetic oligonucleotide
agugucuaaauugcuuccu

SEQ ID NO: 563389 - RNA, 19 nt, Artificial Sequence
  Description of Artificial Sequence: Synthetic oligonucleotide
aguaggcauucaguacagc

SEQ ID NO: 563390 - RNA, 19 nt, Artificial Sequence
  Description of Artificial Sequence: Synthetic oligonucleotide
aagcaugaccgaggaacag

SEQ ID NO: 563391 - RNA, 19 nt, Artificial Sequence
  Description of Artificial Sequence: Synthetic oligonucleotide
aagcuucugcucaaauuca

SEQ ID NO: 563392 - RNA, 19 nt, Artificial Sequence
  Description of Artificial Sequence: Synthetic oligonucleotide
gcagaugaucugcggaugg

SEQ ID NO: 563393 - RNA, 19 nt, Artificial Sequence
  Description of Artificial Sequence: Synthetic oligonucleotide
ucgggcagaugaucugcgg

SEQ ID NO: 563394 - RNA, 19 nt, Artificial Sequence
  Description of Artificial Sequence: Synthetic oligonucleotide
aacucacaaaggauuuccu

SEQ ID NO: 563395 - RNA, 19 nt, Artificial Sequence
  Description of Artificial Sequence: Synthetic oligonucleotide
gucugaaucuauagaaguc

SEQ ID NO: 563396 - RNA, 19 nt, Artificial Sequence
  Description of Artificial Sequence: Synthetic oligonucleotide
caagaagcaugaccgagga

SEQ ID NO: 563397 - RNA, 19 nt, Artificial Sequence
  Description of Artificial Sequence: Synthetic oligonucleotide
accgaugacacagcuucuc

SEQ ID NO: 563398 - RNA, 19 nt, Artificial Sequence
  Description of Artificial Sequence: Synthetic oligonucleotide
uguuuggacgaugacgguu

SEQ ID NO: 563399 - RNA, 19 nt, Artificial Sequence
  Description of Artificial Sequence: Synthetic oligonucleotide
cuuaagcagcagcgggacg

SEQ ID NO: 563400 - RNA, 19 nt, Artificial Sequence
  Description of Artificial Sequence: Synthetic oligonucleotide
gcucaguucgggcugugcg

SEQ ID NO: 563401 - RNA, 19 nt, Artificial Sequence
  Description of Artificial Sequence: Synthetic oligonucleotide
gacgguuggugcgucgagg

SEQ ID NO: 563402 - RNA, 19 nt, Artificial Sequence
  Description of Artificial Sequence: Synthetic oligonucleotide
ugaccgaggaacagcgcuc

SEQ ID NO: 563403 - RNA, 19 nt, Artificial Sequence
  Description of Artificial Sequence: Synthetic oligonucleotide
uuugcccacaacugacaaa

SEQ ID NO: 563404 - RNA, 19 nt, Artificial Sequence
  Description of Artificial Sequence: Synthetic oligonucleotide
cuucgggcagaugaucugc

SEQ ID NO: 563405 - RNA, 19 nt, Artificial Sequence
  Description of Artificial Sequence: Synthetic oligonucleotide
gugaagcagcggcacagag

SEQ ID NO: 563406 - RNA, 19 nt, Artificial Sequence
  Description of Artificial Sequence: Synthetic oligonucleotide
gaagcaugaccgaggaaca

SEQ ID NO: 563407 - RNA, 19 nt, Artificial Sequence
  Description of Artificial Sequence: Synthetic oligonucleotide
agaaagaggcacugaucau

SEQ ID NO: 563408 - RNA, 19 nt, Artificial Sequence
  Description of Artificial Sequence: Synthetic oligonucleotide
cugggcacagaucacuuca

SEQ ID NO: 563409 - RNA, 19 nt, Artificial Sequence
  Description of Artificial Sequence: Synthetic oligonucleotide
ggaagggaggcucacguuc

SEQ ID NO: 563410 - RNA, 19 nt, Artificial Sequence
  Description of Artificial Sequence: Synthetic oligonucleotide
ugacaugcccgaagcuucu

SEQ ID NO: 563411 - RNA, 19 nt, Artificial Sequence
  Description of Artificial Sequence: Synthetic oligonucleotide
guagacgaagcugggaguc

SEQ ID NO: 563412 - RNA, 19 nt, Artificial Sequence
  Description of Artificial Sequence: Synthetic oligonucleotide
aagacuucucaagcauggu

SEQ ID NO: 563413 - RNA, 19 nt, Artificial Sequence
  Description of Artificial Sequence: Synthetic oligonucleotide
gcauggugaauaguagacg

SEQ ID NO: 563414 - RNA, 19 nt, Artificial Sequence
  Description of Artificial Sequence: Synthetic oligonucleotide
agcuuaucuccaaagcagu

SEQ ID NO: 563415 - RNA, 19 nt, Artificial Sequence
  Description of Artificial Sequence: Synthetic oligonucleotide
ugacgguuggugcgucgag

SEQ ID NO: 563416 - RNA, 19 nt, Artificial Sequence
  Description of Artificial Sequence: Synthetic oligonucleotide
cuuugugaccaucucccga

SEQ ID NO: 563417 - RNA, 19 nt, Artificial Sequence
  Description of Artificial Sequence: Synthetic oligonucleotide
agcugggucucggaggcgg

SEQ ID NO: 563418 - RNA, 19 nt, Artificial Sequence
  Description of Artificial Sequence: Synthetic oligonucleotide
acguucacccagggaaggc

SEQ ID NO: 563419 - RNA, 19 nt, Artificial Sequence
  Description of Artificial Sequence: Synthetic oligonucleotide
ggcaaucaugagauuagag

SEQ ID NO: 563420 - RNA, 19 nt, Artificial Sequence
  Description of Artificial Sequence: Synthetic oligonucleotide
uggggacagucuccuuggg

SEQ ID NO: 563421 - RNA, 19 nt, Artificial Sequence
  Description of Artificial Sequence: Synthetic oligonucleotide
aagaggcacugaucaugca

SEQ ID NO: 563422 - RNA, 19 nt, Artificial Sequence
  Description of Artificial Sequence: Synthetic oligonucleotide
aagaagcaugaccgaggaa

SEQ ID NO: 563423 - RNA, 19 nt, Artificial Sequence
  Description of Artificial Sequence: Synthetic oligonucleotide
ugccaagaagcaugaccga

SEQ ID NO: 563424 - RNA, 19 nt, Artificial Sequence
  Description of Artificial Sequence: Synthetic oligonucleotide
ccaccaaacucucagucug

SEQ ID NO: 563425 - RNA, 19 nt, Artificial Sequence
  Description of Artificial Sequence: Synthetic oligonucleotide
acccagggaaggcuuucuc

SEQ ID NO: 563426 - RNA, 19 nt, Artificial Sequence
  Description of Artificial Sequence: Synthetic oligonucleotide
cagaugaucugcggauggg

SEQ ID NO: 563427 - RNA, 19 nt, Artificial Sequence
  Description of Artificial Sequence: Synthetic oligonucleotide
uggcaaucaugagauuaga

SEQ ID NO: 563428 - RNA, 19 nt, Artificial Sequence
  Description of Artificial Sequence: Synthetic oligonucleotide
ggaccuuuuccgugguccg

SEQ ID NO: 563429 - RNA, 19 nt, Artificial Sequence
  Description of Artificial Sequence: Synthetic oligonucleotide
uuuccgcugaaaguucauc

SEQ ID NO: 563430 - RNA, 19 nt, Artificial Sequence
  Description of Artificial Sequence: Synthetic oligonucleotide
agcccuacccucaccagag

SEQ ID NO: 563431 - RNA, 19 nt, Artificial Sequence
  Description of Artificial Sequence: Synthetic oligonucleotide
agcgcuccagaggagagca

SEQ ID NO: 563432 - RNA, 19 nt, Artificial Sequence
  Description of Artificial Sequence: Synthetic oligonucleotide
agcaggggaccuuuuccgu

SEQ ID NO: 563433 - RNA, 19 nt, Artificial Sequence
  Description of Artificial Sequence: Synthetic oligonucleotide
gaccgaggaacagcgcucc

SEQ ID NO: 563434 - RNA, 19 nt, Artificial Sequence
  Description of Artificial Sequence: Synthetic oligonucleotide
ucguugcugaguguuugga

SEQ ID NO: 563435 - RNA, 19 nt, Artificial Sequence
  Description of Artificial Sequence: Synthetic oligonucleotide
gaagggaggcucacguuca

SEQ ID NO: 563436 - RNA, 19 nt, Artificial Sequence
  Description of Artificial Sequence: Synthetic oligonucleotide
guaggacaggagcugcuuc

SEQ ID NO: 563437 - RNA, 19 nt, Artificial Sequence
  Description of Artificial Sequence: Synthetic oligonucleotide
ugggucucggaggcgggcg

SEQ ID NO: 563438 - RNA, 19 nt, Artificial Sequence
  Description of Artificial Sequence: Synthetic oligonucleotide
ugcuauggauuagcucugc

SEQ ID NO: 563439 - RNA, 19 nt, Artificial Sequence
  Description of Artificial Sequence: Synthetic oligonucleotide
ugacaggcggcugaugaua

SEQ ID NO: 563440 - RNA, 19 nt, Artificial Sequence
  Description of Artificial Sequence: Synthetic oligonucleotide
gagcugcuucaugauagug

SEQ ID NO: 563441 - RNA, 19 nt, Artificial Sequence
  Description of Artificial Sequence: Synthetic oligonucleotide
caucuaugguagccuugcc

SEQ ID NO: 563442 - RNA, 19 nt, Artificial Sequence
  Description of Artificial Sequence: Synthetic oligonucleotide
agcagggaugggaauaggu

SEQ ID NO: 563443 - RNA, 19 nt, Artificial Sequence
  Description of Artificial Sequence: Synthetic oligonucleotide
aucucgcucaccugccccu

SEQ ID NO: 563444 - RNA, 19 nt, Artificial Sequence
  Description of Artificial Sequence: Synthetic oligonucleotide
ccgucauuuccgcugaaag

SEQ ID NO: 563445 - RNA, 19 nt, Artificial Sequence
  Description of Artificial Sequence: Synthetic oligonucleotide
cacguucacccagggaagg

SEQ ID NO: 563446 - RNA, 19 nt, Artificial Sequence
  Description of Artificial Sequence: Synthetic oligonucleotide
agagcggacaguggggagu

SEQ ID NO: 563447 - RNA, 19 nt, Artificial Sequence
  Description of Artificial Sequence: Synthetic oligonucleotide
acagaggcguccacuaaca

SEQ ID NO: 563448 - RNA, 19 nt, Artificial Sequence
  Description of Artificial Sequence: Synthetic oligonucleotide
ugucgccuugagacagcag

SEQ ID NO: 563449 - RNA, 19 nt, Artificial Sequence
  Description of Artificial Sequence: Synthetic oligonucleotide
cuaugguagccuugcccuc

SEQ ID NO: 563450 - RNA, 19 nt, Artificial Sequence
  Description of Artificial Sequence: Synthetic oligonucleotide
cuacccucaccagaguguc

SEQ ID NO: 563451 - RNA, 19 nt, Artificial Sequence
  Description of Artificial Sequence: Synthetic oligonucleotide
ggaugggaauaggugaggc

SEQ ID NO: 563452 - RNA, 19 nt, Artificial Sequence
  Description of Artificial Sequence: Synthetic oligonucleotide
ugucuucgggcagaugauc

SEQ ID NO: 563453 - RNA, 19 nt, Artificial Sequence
  Description of Artificial Sequence: Synthetic oligonucleotide
gucaucagcgguggccccg

SEQ ID NO: 563454 - RNA, 19 nt, Artificial Sequence
  Description of Artificial Sequence: Synthetic oligonucleotide
ucgcucaccugccccuuca

SEQ ID NO: 563455 - RNA, 19 nt, Artificial Sequence
  Description of Artificial Sequence: Synthetic oligonucleotide
accuuaagcagcagcggga

SEQ ID NO: 563456 - RNA, 19 nt, Artificial Sequence
  Description of Artificial Sequence: Synthetic oligonucleotide
uaucagggaggagauuaua

SEQ ID NO: 563457 - RNA, 19 nt, Artificial Sequence
  Description of Artificial Sequence: Synthetic oligonucleotide
aguuugcccacaacugaca

SEQ ID NO: 563458 - RNA, 19 nt, Artificial Sequence
  Description of Artificial Sequence: Synthetic oligonucleotide
uuccgugguccgcucccag

SEQ ID NO: 563459 - RNA, 19 nt, Artificial Sequence
  Description of Artificial Sequence: Synthetic oligonucleotide
ugaaggccuuugucuguga

SEQ ID NO: 563460 - RNA, 19 nt, Artificial Sequence
  Description of Artificial Sequence: Synthetic oligonucleotide
acuggaugguuccgacaga

SEQ ID NO: 563461 - RNA, 19 nt, Artificial Sequence
  Description of Artificial Sequence: Synthetic oligonucleotide
cuuugucugugaggggcag

SEQ ID NO: 563462 - RNA, 19 nt, Artificial Sequence
  Description of Artificial Sequence: Synthetic oligonucleotide
ugguccgcucccagagcag

SEQ ID NO: 563463 - RNA, 19 nt, Artificial Sequence
  Description of Artificial Sequence: Synthetic oligonucleotide
aggguuguugcagaccuua

SEQ ID NO: 563464 - RNA, 19 nt, Artificial Sequence
  Description of Artificial Sequence: Synthetic oligonucleotide
ggcugugcggaaccgauga

SEQ ID NO: 563465 - RNA, 19 nt, Artificial Sequence
  Description of Artificial Sequence: Synthetic oligonucleotide
gcuccuuagaccagaugag

SEQ ID NO: 563466 - RNA, 19 nt, Artificial Sequence
  Description of Artificial Sequence: Synthetic oligonucleotide
uucgggcugugcggaaccg

SEQ ID NO: 563467 - RNA, 19 nt, Artificial Sequence
  Description of Artificial Sequence: Synthetic oligonucleotide
ugguuuuccucgugccauc

SEQ ID NO: 563468 - RNA, 19 nt, Artificial Sequence
  Description of Artificial Sequence: Synthetic oligonucleotide
gcuauggauuagcucugcc

SEQ ID NO: 563469 - RNA, 19 nt, Artificial Sequence
  Description of Artificial Sequence: Synthetic oligonucleotide
cacagaugcuauggauuag

SEQ ID NO: 563470 - RNA, 19 nt, Artificial Sequence
  Description of Artificial Sequence: Synthetic oligonucleotide
caggaauguggggagcgug

SEQ ID NO: 563471 - RNA, 19 nt, Artificial Sequence
  Description of Artificial Sequence: Synthetic oligonucleotide
uggugcgucgaggcuuagg

SEQ ID NO: 563472 - RNA, 19 nt, Artificial Sequence
  Description of Artificial Sequence: Synthetic oligonucleotide
gaggcuuaggugugacaaa

SEQ ID NO: 563473 - RNA, 19 nt, Artificial Sequence
  Description of Artificial Sequence: Synthetic oligonucleotide
cuuccgucauuuccgcuga

SEQ ID NO: 563474 - RNA, 19 nt, Artificial Sequence
  Description of Artificial Sequence: Synthetic oligonucleotide
augcuauggauuagcucug

SEQ ID NO: 563475 - RNA, 19 nt, Artificial Sequence
  Description of Artificial Sequence: Synthetic oligonucleotide
cagaacgcgccgccggccc

SEQ ID NO: 563476 - RNA, 19 nt, Artificial Sequence
  Description of Artificial Sequence: Synthetic oligonucleotide
aggcagcaugcggcgaacc

SEQ ID NO: 563477 - RNA, 19 nt, Artificial Sequence
  Description of Artificial Sequence: Synthetic oligonucleotide
ggagcguggggacagucuc

SEQ ID NO: 563478 - RNA, 19 nt, Artificial Sequence
  Description of Artificial Sequence: Synthetic oligonucleotide
ucggaggcgggcguagaga

SEQ ID NO: 563479 - RNA, 19 nt, Artificial Sequence
  Description of Artificial Sequence: Synthetic oligonucleotide
augcggcgaaccccaaaca

SEQ ID NO: 563480 - RNA, 19 nt, Artificial Sequence
  Description of Artificial Sequence: Synthetic oligonucleotide
uccgucauuuccgcugaaa

SEQ ID NO: 563481 - RNA, 19 nt, Artificial Sequence
  Description of Artificial Sequence: Synthetic oligonucleotide
augacgguuggugcgucga

SEQ ID NO: 563482 - RNA, 19 nt, Artificial Sequence
  Description of Artificial Sequence: Synthetic oligonucleotide
ggugugacaaagucauugu

SEQ ID NO: 563483 - RNA, 19 nt, Artificial Sequence
  Description of Artificial Sequence: Synthetic oligonucleotide
acagcgcuccagaggagag

SEQ ID NO: 563484 - RNA, 19 nt, Artificial Sequence
  Description of Artificial Sequence: Synthetic oligonucleotide
ccuuugugaccaucucccg

SEQ ID NO: 563485 - RNA, 19 nt, Artificial Sequence
  Description of Artificial Sequence: Synthetic oligonucleotide
uacugccgcucaguucggg

SEQ ID NO: 563486 - RNA, 19 nt, Artificial Sequence
  Description of Artificial Sequence: Synthetic oligonucleotide
auggugaauaguagacgaa

SEQ ID NO: 563487 - RNA, 19 nt, Artificial Sequence
  Description of Artificial Sequence: Synthetic oligonucleotide
uggaugugcaaagcccuuu

SEQ ID NO: 563488 - RNA, 19 nt, Artificial Sequence
  Description of Artificial Sequence: Synthetic oligonucleotide
ggcagcaugcggcgaaccc

SEQ ID NO: 563489 - RNA, 19 nt, Artificial Sequence
  Description of Artificial Sequence: Synthetic oligonucleotide
cugugcggaaccgaugaca

SEQ ID NO: 563490 - RNA, 19 nt, Artificial Sequence
  Description of Artificial Sequence: Synthetic oligonucleotide
cagcaugcggcgaacccca

SEQ ID NO: 563491 - RNA, 19 nt, Artificial Sequence
  Description of Artificial Sequence: Synthetic oligonucleotide
ggauguggaugugcaaagc

SEQ ID NO: 563492 - RNA, 19 nt, Artificial Sequence
  Description of Artificial Sequence: Synthetic oligonucleotide
acgaugacgguuggugcgu

SEQ ID NO: 563493 - RNA, 19 nt, Artificial Sequence
  Description of Artificial Sequence: Synthetic oligonucleotide
ggcugucgccuugagacag

SEQ ID NO: 563494 - RNA, 19 nt, Artificial Sequence
  Description of Artificial Sequence: Synthetic oligonucleotide
aaccgaugacacagcuucu

SEQ ID NO: 563495 - RNA, 19 nt, Artificial Sequence
  Description of Artificial Sequence: Synthetic oligonucleotide
auaguguggaagggcuccu

SEQ ID NO: 563496 - RNA, 19 nt, Artificial Sequence
  Description of Artificial Sequence: Synthetic oligonucleotide
auaucagggaggagauuau

SEQ ID NO: 563497 - RNA, 19 nt, Artificial Sequence
  Description of Artificial Sequence: Synthetic oligonucleotide
cgcaguuugcccacaacug

SEQ ID NO: 563498 - RNA, 19 nt, Artificial Sequence
  Description of Artificial Sequence: Synthetic oligonucleotide
cguccacuaacaacaguag

SEQ ID NO: 563499 - RNA, 19 nt, Artificial Sequence
  Description of Artificial Sequence: Synthetic oligonucleotide
cauugcccuugugggagag

SEQ ID NO: 563500 - RNA, 19 nt, Artificial Sequence
  Description of Artificial Sequence: Synthetic oligonucleotide
agauccccaguggcaauca

SEQ ID NO: 563501 - RNA, 19 nt, Artificial Sequence
  Description of Artificial Sequence: Synthetic oligonucleotide
gcaaagcccuuugugacca

SEQ ID NO: 563502 - RNA, 19 nt, Artificial Sequence
  Description of Artificial Sequence: Synthetic oligonucleotide
gcguccacuaacaacagua

SEQ ID NO: 563503 - RNA, 19 nt, Artificial Sequence
  Description of Artificial Sequence: Synthetic oligonucleotide
cugcauugcccuuguggga

SEQ ID NO: 563504 - RNA, 19 nt, Artificial Sequence
  Description of Artificial Sequence: Synthetic oligonucleotide
gcagcaugcggcgaacccc

SEQ ID NO: 563505 - RNA, 19 nt, Artificial Sequence
  Description of Artificial Sequence: Synthetic oligonucleotide
uuuccgugguccgcuccca

SEQ ID NO: 563506 - RNA, 19 nt, Artificial Sequence
  Description of Artificial Sequence: Synthetic oligonucleotide
gggagucucuucuuccguc

SEQ ID NO: 563507 - RNA, 19 nt, Artificial Sequence
  Description of Artificial Sequence: Synthetic oligonucleotide
aggagauuauagacugcau

SEQ ID NO: 563508 - RNA, 19 nt, Artificial Sequence
  Description of Artificial Sequence: Synthetic oligonucleotide
agggcuugcuggcugccuu

SEQ ID NO: 563509 - RNA, 19 nt, Artificial Sequence
  Description of Artificial Sequence: Synthetic oligonucleotide
aggcccgcuguccuucgca

SEQ ID NO: 563510 - RNA, 19 nt, Artificial Sequence
  Description of Artificial Sequence: Synthetic oligonucleotide
guaugacaugcccgaagcu

SEQ ID NO: 563511 - RNA, 19 nt, Artificial Sequence
  Description of Artificial Sequence: Synthetic oligonucleotide
uaggugugacaaagucauu

SEQ ID NO: 563512 - RNA, 19 nt, Artificial Sequence
  Description of Artificial Sequence: Synthetic oligonucleotide
cagagugucuaaauugcuu

SEQ ID NO: 563513 - RNA, 19 nt, Artificial Sequence
  Description of Artificial Sequence: Synthetic oligonucleotide
uuggacgaugacgguuggu

SEQ ID NO: 563514 - RNA, 19 nt, Artificial Sequence
  Description of Artificial Sequence: Synthetic oligonucleotide
gggacgaaggcagcuagca

SEQ ID NO: 563515 - RNA, 19 nt, Artificial Sequence
  Description of Artificial Sequence: Synthetic oligonucleotide
ucaugccaagaagcaugac

SEQ ID NO: 563516 - RNA, 19 nt, Artificial Sequence
  Description of Artificial Sequence: Synthetic oligonucleotide
cagaugcuauggauuagcu

SEQ ID NO: 563517 - RNA, 19 nt, Artificial Sequence
  Description of Artificial Sequence: Synthetic oligonucleotide
cugggucguuguagaggcc

SEQ ID NO: 563518 - RNA, 19 nt, Artificial Sequence
  Description of Artificial Sequence: Synthetic oligonucleotide
ggggauguggaugugcaaa

SEQ ID NO: 563519 - RNA, 19 nt, Artificial Sequence
  Description of Artificial Sequence: Synthetic oligonucleotide
gacaugcccgaagcuucug

SEQ ID NO: 563520 - RNA, 19 nt, Artificial Sequence
  Description of Artificial Sequence: Synthetic oligonucleotide
auguaggacaggagcugcu

SEQ ID NO: 563521 - RNA, 19 nt, Artificial Sequence
  Description of Artificial Sequence: Synthetic oligonucleotide
aggggauguggaugugcaa

SEQ ID NO: 563522 - RNA, 19 nt, Artificial Sequence
  Description of Artificial Sequence: Synthetic oligonucleotide
ggacgaaggcagcuagcac

SEQ ID NO: 563523 - RNA, 19 nt, Artificial Sequence
  Description of Artificial Sequence: Synthetic oligonucleotide
cucgugccaucaugccaag

SEQ ID NO: 563524 - RNA, 19 nt, Artificial Sequence
  Description of Artificial Sequence: Synthetic oligonucleotide
ccuuaagcagcagcgggac

SEQ ID NO: 563525 - RNA, 19 nt, Artificial Sequence
  Description of Artificial Sequence: Synthetic oligonucleotide
ggucguuguagaggccagg

SEQ ID NO: 563526 - RNA, 19 nt, Artificial Sequence
  Description of Artificial Sequence: Synthetic oligonucleotide
caggaucaggugugucauc

SEQ ID NO: 563527 - RNA, 19 nt, Artificial Sequence
  Description of Artificial Sequence: Synthetic oligonucleotide
gucuucgggcagaugaucu

SEQ ID NO: 563528 - RNA, 19 nt, Artificial Sequence
  Description of Artificial Sequence: Synthetic oligonucleotide
cagcccuacccucaccaga

SEQ ID NO: 563529 - RNA, 19 nt, Artificial Sequence
  Description of Artificial Sequence: Synthetic oligonucleotide
ucgggcugugcggaaccga

SEQ ID NO: 563530 - RNA, 19 nt, Artificial Sequence
  Description of Artificial Sequence: Synthetic oligonucleotide
cggauagccagauccccag

SEQ ID NO: 563531 - RNA, 19 nt, Artificial Sequence
  Description of Artificial Sequence: Synthetic oligonucleotide
gaccaucucccgaagucgu

SEQ ID NO: 563532 - RNA, 19 nt, Artificial Sequence
  Description of Artificial Sequence: Synthetic oligonucleotide
cguugcugaguguuuggac

SEQ ID NO: 563533 - RNA, 19 nt, Artificial Sequence
  Description of Artificial Sequence: Synthetic oligonucleotide
cagcacggccaucucgcuc

SEQ ID NO: 563534 - RNA, 19 nt, Artificial Sequence
  Description of Artificial Sequence: Synthetic oligonucleotide
caccugccccuucacuuuc

SEQ ID NO: 563535 - RNA, 19 nt, Artificial Sequence
  Description of Artificial Sequence: Synthetic oligonucleotide
agcaucuugugaaggccuu

SEQ ID NO: 563536 - RNA, 19 nt, Artificial Sequence
  Description of Artificial Sequence: Synthetic oligonucleotide
gugucaucaccaggcccgc

SEQ ID NO: 563537 - RNA, 19 nt, Artificial Sequence
  Description of Artificial Sequence: Synthetic oligonucleotide
aggcguccacuaacaacag

SEQ ID NO: 563538 - RNA, 19 nt, Artificial Sequence
  Description of Artificial Sequence: Synthetic oligonucleotide
cagcgcuccagaggagagc

SEQ ID NO: 563539 - RNA, 19 nt, Artificial Sequence
  Description of Artificial Sequence: Synthetic oligonucleotide
gcgggcguagagaugagga

SEQ ID NO: 563540 - RNA, 19 nt, Artificial Sequence
  Description of Artificial Sequence: Synthetic oligonucleotide
cgaagucguucaaacaaca

SEQ ID NO: 563541 - RNA, 19 nt, Artificial Sequence
  Description of Artificial Sequence: Synthetic oligonucleotide
uuccgucauuuccgcugaa

SEQ ID NO: 563542 - RNA, 19 nt, Artificial Sequence
  Description of Artificial Sequence: Synthetic oligonucleotide
accgaggaacagcgcucca

SEQ ID NO: 563543 - RNA, 19 nt, Artificial Sequence
  Description of Artificial Sequence: Synthetic oligonucleotide
ucgugccaucaugccaaga

SEQ ID NO: 563544 - RNA, 19 nt, Artificial Sequence
  Description of Artificial Sequence: Synthetic oligonucleotide
cgugccaucaugccaagaa

SEQ ID NO: 563545 - RNA, 19 nt, Artificial Sequence
  Description of Artificial Sequence: Synthetic oligonucleotide
ucucggaggcgggcguaga

SEQ ID NO: 563546 - RNA, 19 nt, Artificial Sequence
  Description of Artificial Sequence: Synthetic oligonucleotide
guacugccgcucaguucgg

SEQ ID NO: 563547 - RNA, 19 nt, Artificial Sequence
  Description of Artificial Sequence: Synthetic oligonucleotide
ugucaucaccaggcccgcu

SEQ ID NO: 563548 - RNA, 19 nt, Artificial Sequence
  Description of Artificial Sequence: Synthetic oligonucleotide
caacuccuaagaccugugu

SEQ ID NO: 563549 - RNA, 19 nt, Artificial Sequence
  Description of Artificial Sequence: Synthetic oligonucleotide
ggcgggcguagagaugagg

SEQ ID NO: 563550 - RNA, 19 nt, Artificial Sequence
  Description of Artificial Sequence: Synthetic oligonucleotide
gugcggaaccgaugacaca

SEQ ID NO: 563551 - RNA, 19 nt, Artificial Sequence
  Description of Artificial Sequence: Synthetic oligonucleotide
gacuuucguugcugagugu

SEQ ID NO: 563552 - RNA, 19 nt, Artificial Sequence
  Description of Artificial Sequence: Synthetic oligonucleotide
ucgccacucacugcuuguu

SEQ ID NO: 563553 - RNA, 19 nt, Artificial Sequence
  Description of Artificial Sequence: Synthetic oligonucleotide
guuggugcgucgaggcuua

SEQ ID NO: 563554 - RNA, 19 nt, Artificial Sequence
  Description of Artificial Sequence: Synthetic oligonucleotide
gcagccggaagggaggcuc

SEQ ID NO: 563555 - RNA, 19 nt, Artificial Sequence
  Description of Artificial Sequence: Synthetic oligonucleotide
ccuaucugagauguuggaa

SEQ ID NO: 563556 - RNA, 19 nt, Artificial Sequence
  Description of Artificial Sequence: Synthetic oligonucleotide
ccgaggaacagcgcuccag

SEQ ID NO: 563557 - RNA, 19 nt, Artificial Sequence
  Description of Artificial Sequence: Synthetic oligonucleotide
ccuuugucugugaggggca

SEQ ID NO: 563558 - RNA, 19 nt, Artificial Sequence
  Description of Artificial Sequence: Synthetic oligonucleotide
agcgggacgaaggcagcua

SEQ ID NO: 563559 - RNA, 19 nt, Artificial Sequence
  Description of Artificial Sequence: Synthetic oligonucleotide
ggaagcggauagccagauc

SEQ ID NO: 563560 - RNA, 19 nt, Artificial Sequence
  Description of Artificial Sequence: Synthetic oligonucleotide
ccaucucccgaagucguuc

SEQ ID NO: 563561 - RNA, 19 nt, Artificial Sequence
  Description of Artificial Sequence: Synthetic oligonucleotide
cagaggcguccacuaacaa

SEQ ID NO: 563562 - RNA, 19 nt, Artificial Sequence
  Description of Artificial Sequence: Synthetic oligonucleotide
cggacaguggggagugaag

SEQ ID NO: 563563 - RNA, 19 nt, Artificial Sequence
  Description of Artificial Sequence: Synthetic oligonucleotide
gccaccucuuugaauggga

SEQ ID NO: 563564 - RNA, 19 nt, Artificial Sequence
  Description of Artificial Sequence: Synthetic oligonucleotide
gcugugcggaaccgaugac

SEQ ID NO: 563565 - RNA, 19 nt, Artificial Sequence
  Description of Artificial Sequence: Synthetic oligonucleotide
ccagcccuacccucaccag

SEQ ID NO: 563566 - RNA, 19 nt, Artificial Sequence
  Description of Artificial Sequence: Synthetic oligonucleotide
gccuguaguccuguggaaa

SEQ ID NO: 563567 - RNA, 19 nt, Artificial Sequence
  Description of Artificial Sequence: Synthetic oligonucleotide
cguucaaacaacacguguu

SEQ ID NO: 563568 - RNA, 19 nt, Artificial Sequence
  Description of Artificial Sequence: Synthetic oligonucleotide
gcguagagaugaggagucc

SEQ ID NO: 563569 - RNA, 19 nt, Artificial Sequence
  Description of Artificial Sequence: Synthetic oligonucleotide
ggcccgcuguccuucgcac

SEQ ID NO: 563570 - RNA, 19 nt, Artificial Sequence
  Description of Artificial Sequence: Synthetic oligonucleotide
ggcacaccugcugggccag

SEQ ID NO: 563571 - RNA, 19 nt, Artificial Sequence
  Description of Artificial Sequence: Synthetic oligonucleotide
uuggugcgucgaggcuuag

SEQ ID NO: 563572 - RNA, 19 nt, Artificial Sequence
  Description of Artificial Sequence: Synthetic oligonucleotide
ccuacccucaccagagugu

SEQ ID NO: 563573 - RNA, 19 nt, Artificial Sequence
  Description of Artificial Sequence: Synthetic oligonucleotide
caggcccgcuguccuucgc

SEQ ID NO: 563574 - RNA, 19 nt, Artificial Sequence
  Description of Artificial Sequence: Synthetic oligonucleotide
guuuuccucgugccaucau

SEQ ID NO: 563575 - RNA, 19 nt, Artificial Sequence
  Description of Artificial Sequence: Synthetic oligonucleotide
cguagagaugaggagucca

SEQ ID NO: 563576 - RNA, 19 nt, Artificial Sequence
  Description of Artificial Sequence: Synthetic oligonucleotide
cgaggaacagcgcuccaga

SEQ ID NO: 563577 - RNA, 19 nt, Artificial Sequence
  Description of Artificial Sequence: Synthetic oligonucleotide
gcagaacgcgccgccggcc

SEQ ID NO: 563578 - RNA, 19 nt, Artificial Sequence
  Description of Artificial Sequence: Synthetic oligonucleotide
accaucucccgaagucguu

SEQ ID NO: 563579 - RNA, 19 nt, Artificial Sequence
  Description of Artificial Sequence: Synthetic oligonucleotide
cugguaugacaugcccgaa

SEQ ID NO: 563580 - RNA, 19 nt, Artificial Sequence
  Description of Artificial Sequence: Synthetic oligonucleotide
ccccaguggcaaucaugag

SEQ ID NO: 563581 - RNA, 19 nt, Artificial Sequence
  Description of Artificial Sequence: Synthetic oligonucleotide
gcggaaccgaugacacagc

SEQ ID NO: 563582 - RNA, 19 nt, Artificial Sequence
  Description of Artificial Sequence: Synthetic oligonucleotide
gugucuucgggcagaugau

SEQ ID NO: 563583 - RNA, 19 nt, Artificial Sequence
  Description of Artificial Sequence: Synthetic oligonucleotide
ccaaucugaggcacagggu

SEQ ID NO: 563584 - RNA, 19 nt, Artificial Sequence
  Description of Artificial Sequence: Synthetic oligonucleotide
cagcagcgggacgaaggca

SEQ ID NO: 563585 - RNA, 19 nt, Artificial Sequence
  Description of Artificial Sequence: Synthetic oligonucleotide
ccagugaagcagcggcaca

SEQ ID NO: 563586 - RNA, 19 nt, Artificial Sequence
  Description of Artificial Sequence: Synthetic oligonucleotide
caucagcgguggccccgac

SEQ ID NO: 563587 - RNA, 19 nt, Artificial Sequence
  Description of Artificial Sequence: Synthetic oligonucleotide
cgggacgaaggcagcuagc

SEQ ID NO: 563588 - RNA, 19 nt, Artificial Sequence
  Description of Artificial Sequence: Synthetic oligonucleotide
cagggucgaugagcagcac

SEQ ID NO: 563589 - RNA, 19 nt, Artificial Sequence
  Description of Artificial Sequence: Synthetic oligonucleotide
ggauuagcucugccucugu

SEQ ID NO: 563590 - RNA, 19 nt, Artificial Sequence
  Description of Artificial Sequence: Synthetic oligonucleotide
ggauagccagauccccagu

SEQ ID NO: 563591 - RNA, 19 nt, Artificial Sequence
  Description of Artificial Sequence: Synthetic oligonucleotide
gggcugugcggaaccgaug

SEQ ID NO: 563592 - RNA, 19 nt, Artificial Sequence
  Description of Artificial Sequence: Synthetic oligonucleotide
gcggacaguggggagugaa

SEQ ID NO: 563593 - RNA, 19 nt, Artificial Sequence
  Description of Artificial Sequence: Synthetic oligonucleotide
ggcguccacuaacaacagu

SEQ ID NO: 563594 - RNA, 19 nt, Artificial Sequence
  Description of Artificial Sequence: Synthetic oligonucleotide
cgguacugccgcucaguuc

SEQ ID NO: 563595 - RNA, 19 nt, Artificial Sequence
  Description of Artificial Sequence: Synthetic oligonucleotide
ggaaccgaugacacagcuu

SEQ ID NO: 563596 - RNA, 19 nt, Artificial Sequence
  Description of Artificial Sequence: Synthetic oligonucleotide
ccaccucuuugaaugggau

SEQ ID NO: 563597 - RNA, 19 nt, Artificial Sequence
  Description of Artificial Sequence: Synthetic oligonucleotide
ccucaccagagugucuaaa

SEQ ID NO: 563598 - RNA, 19 nt, Artificial Sequence
  Description of Artificial Sequence: Synthetic oligonucleotide
ccaucaugccaagaagcau

SEQ ID NO: 563599 - RNA, 19 nt, Artificial Sequence
  Description of Artificial Sequence: Synthetic oligonucleotide
cagcgggacgaaggcagcu

SEQ ID NO: 563600 - RNA, 19 nt, Artificial Sequence
  Description of Artificial Sequence: Synthetic oligonucleotide
gggucucggaggcgggcgu

SEQ ID NO: 563601 - RNA, 19 nt, Artificial Sequence
  Description of Artificial Sequence: Synthetic oligonucleotide
caggguuguugcagaccuu

SEQ ID NO: 563602 - RNA, 19 nt, Artificial Sequence
  Description of Artificial Sequence: Synthetic oligonucleotide
caguggcaaucaugagauu

SEQ ID NO: 563603 - RNA, 19 nt, Artificial Sequence
  Description of Artificial Sequence: Synthetic oligonucleotide
cguucacccagggaaggcu

SEQ ID NO: 563604 - RNA, 19 nt, Artificial Sequence
  Description of Artificial Sequence: Synthetic oligonucleotide
cgaugacgguuggugcguc

SEQ ID NO: 563605 - RNA, 19 nt, Artificial Sequence
  Description of Artificial Sequence: Synthetic oligonucleotide
cugguaggucaggcucacu

SEQ ID NO: 563606 - RNA, 19 nt, Artificial Sequence
  Description of Artificial Sequence: Synthetic oligonucleotide
ccuugcccucaggcuuggc

SEQ ID NO: 563607 - RNA, 19 nt, Artificial Sequence
  Description of Artificial Sequence: Synthetic oligonucleotide
cgacgcaguuugcccacaa

SEQ ID NO: 563608 - RNA, 19 nt, Artificial Sequence
  Description of Artificial Sequence: Synthetic oligonucleotide
cgucgaggcuuagguguga

SEQ ID NO: 563609 - RNA, 19 nt, Artificial Sequence
  Description of Artificial Sequence: Synthetic oligonucleotide
ccgcucaguucgggcugug

SEQ ID NO: 563610 - RNA, 19 nt, Artificial Sequence
  Description of Artificial Sequence: Synthetic oligonucleotide
ccccacacucugggucuga

SEQ ID NO: 563611 - RNA, 19 nt, Artificial Sequence
  Description of Artificial Sequence: Synthetic oligonucleotide
gcguggggacagucuccuu

SEQ ID NO: 563612 - RNA, 19 nt, Artificial Sequence
  Description of Artificial Sequence: Synthetic oligonucleotide
aaaucuacaaagcuguuuc

SEQ ID NO: 563613 - RNA, 19 nt, Artificial Sequence
  Description of Artificial Sequence: Synthetic oligonucleotide
uguagagucauaauguggg

SEQ ID NO: 563614 - RNA, 19 nt, Artificial Sequence
  Description of Artificial Sequence: Synthetic oligonucleotide
auaauaaauggucucuggc

SEQ ID NO: 563615 - RNA, 19 nt, Artificial Sequence
  Description of Artificial Sequence: Synthetic oligonucleotide
aguguaauagcuucuuugc

SEQ ID NO: 563616 - RNA, 19 nt, Artificial Sequence
  Description of Artificial Sequence: Synthetic oligonucleotide
agucuaaucucacaggggc

SEQ ID NO: 563617 - RNA, 19 nt, Artificial Sequence
  Description of Artificial Sequence: Synthetic oligonucleotide
auuaguacacauuagcuug

SEQ ID NO: 563618 - RNA, 19 nt, Artificial Sequence
  Description of Artificial Sequence: Synthetic oligonucleotide
uguuuaauuaucauagagu

SEQ ID NO: 563619 - RNA, 19 nt, Artificial Sequence
  Description of Artificial Sequence: Synthetic oligonucleotide
aaagacuucagccggagca

SEQ ID NO: 563620 - RNA, 19 nt, Artificial Sequence
  Description of Artificial Sequence: Synthetic oligonucleotide
agacagaucauauugggag

SEQ ID NO: 563621 - RNA, 19 nt, Artificial Sequence
  Description of Artificial Sequence: Synthetic oligonucleotide
uguaaucaauaccagacca

SEQ ID NO: 563622 - RNA, 19 nt, Artificial Sequence
  Description of Artificial Sequence: Synthetic oligonucleotide
aucucuggaacauugaaag

SEQ ID NO: 563623 - RNA, 19 nt, Artificial Sequence
  Description of Artificial Sequence: Synthetic oligonucleotide
aaauaguuaauaucuucug

SEQ ID NO: 563624 - RNA, 19 nt, Artificial Sequence
  Description of Artificial Sequence: Synthetic oligonucleotide
gguacuaaaauccauuggg

SEQ ID NO: 563625 - RNA, 19 nt, Artificial Sequence
  Description of Artificial Sequence: Synthetic oligonucleotide
uauuuccuaauacaagucc

SEQ ID NO: 563626 - RNA, 19 nt, Artificial Sequence
  Description of Artificial Sequence: Synthetic oligonucleotide
cauaguguaaucaauacca

SEQ ID NO: 563627 - RNA, 19 nt, Artificial Sequence
  Description of Artificial Sequence: Synthetic oligonucleotide
auguugaauagauuaaauc

SEQ ID NO: 563628 - RNA, 19 nt, Artificial Sequence
  Description of Artificial Sequence: Synthetic oligonucleotide
ucugccauaacauacgggu

SEQ ID NO: 563629 - RNA, 19 nt, Artificial Sequence
  Description of Artificial Sequence: Synthetic oligonucleotide
ugcauuaguacacauuagc

SEQ ID NO: 563630 - RNA, 19 nt, Artificial Sequence
  Description of Artificial Sequence: Synthetic oligonucleotide
aaucuacaaagcuguuucc

SEQ ID NO: 563631 - RNA, 19 nt, Artificial Sequence
  Description of Artificial Sequence: Synthetic oligonucleotide
agucuuacagggcaguagc

SEQ ID NO: 563632 - RNA, 19 nt, Artificial Sequence
  Description of Artificial Sequence: Synthetic oligonucleotide
aagguuauuggucacuugu

SEQ ID NO: 563633 - RNA, 19 nt, Artificial Sequence
  Description of Artificial Sequence: Synthetic oligonucleotide
uuuuguuagaacauccagu

SEQ ID NO: 563634 - RNA, 19 nt, Artificial Sequence
  Description of Artificial Sequence: Synthetic oligonucleotide
uuaguggggcuucugaagg

SEQ ID NO: 563635 - RNA, 19 nt, Artificial Sequence
  Description of Artificial Sequence: Synthetic oligonucleotide
agcuuuauaauaaaugguc

SEQ ID NO: 563636 - RNA, 19 nt, Artificial Sequence
  Description of Artificial Sequence: Synthetic oligonucleotide
agagucauaauguggggcg

SEQ ID NO: 563637 - RNA, 19 nt, Artificial Sequence
  Description of Artificial Sequence: Synthetic oligonucleotide
cauccaguaaacuaucugc

SEQ ID NO: 563638 - RNA, 19 nt, Artificial Sequence
  Description of Artificial Sequence: Synthetic oligonucleotide
acuccaaacgcccuguugg

SEQ ID NO: 563639 - RNA, 19 nt, Artificial Sequence
  Description of Artificial Sequence: Synthetic oligonucleotide
uuuguuagaacauccagua

SEQ ID NO: 563640 - RNA, 19 nt, Artificial Sequence
  Description of Artificial Sequence: Synthetic oligonucleotide
aauaaauggucucuggcuu

SEQ ID NO: 563641 - RNA, 19 nt, Artificial Sequence
  Description of Artificial Sequence: Synthetic oligonucleotide
uaauaaauggucucuggcu

SEQ ID NO: 563642 - RNA, 19 nt, Artificial Sequence
  Description of Artificial Sequence: Synthetic oligonucleotide
guguuuaauuaucauagag

SEQ ID NO: 563643 - RNA, 19 nt, Artificial Sequence
  Description of Artificial Sequence: Synthetic oligonucleotide
ugcaaguccgccaugaagu

SEQ ID NO: 563644 - RNA, 19 nt, Artificial Sequence
  Description of Artificial Sequence: Synthetic oligonucleotide
ugguacuaaaauccauugg

SEQ ID NO: 563645 - RNA, 19 nt, Artificial Sequence
  Description of Artificial Sequence: Synthetic oligonucleotide
cuuuauaauaaauggucuc

SEQ ID NO: 563646 - RNA, 19 nt, Artificial Sequence
  Description of Artificial Sequence: Synthetic oligonucleotide
auuagcuugaaguuauccu

SEQ ID NO: 563647 - RNA, 19 nt, Artificial Sequence
  Description of Artificial Sequence: Synthetic oligonucleotide
gguaagucuaaucucacag

SEQ ID NO: 563648 - RNA, 19 nt, Artificial Sequence
  Description of Artificial Sequence: Synthetic oligonucleotide
gggcguaagaacuauaggg

SEQ ID NO: 563649 - RNA, 19 nt, Artificial Sequence
  Description of Artificial Sequence: Synthetic oligonucleotide
gaagucuauacucugcuuc

SEQ ID NO: 563650 - RNA, 19 nt, Artificial Sequence
  Description of Artificial Sequence: Synthetic oligonucleotide
aauucacacugacuguuug

SEQ ID NO: 563651 - RNA, 19 nt, Artificial Sequence
  Description of Artificial Sequence: Synthetic oligonucleotide
auucacacugacuguuugc

SEQ ID NO: 563652 - RNA, 19 nt, Artificial Sequence
  Description of Artificial Sequence: Synthetic oligonucleotide
gacagaucauauugggagg

SEQ ID NO: 563653 - RNA, 19 nt, Artificial Sequence
  Description of Artificial Sequence: Synthetic oligonucleotide
guaagucuaaucucacagg

SEQ ID NO: 563654 - RNA, 19 nt, Artificial Sequence
  Description of Artificial Sequence: Synthetic oligonucleotide
uaaucaauaccagaccagc

SEQ ID NO: 563655 - RNA, 19 nt, Artificial Sequence
  Description of Artificial Sequence: Synthetic oligonucleotide
uaucugccauaacauacgg

SEQ ID NO: 563656 - RNA, 19 nt, Artificial Sequence
  Description of Artificial Sequence: Synthetic oligonucleotide
uauguugaauagauuaaau

SEQ ID NO: 563657 - RNA, 19 nt, Artificial Sequence
  Description of Artificial Sequence: Synthetic oligonucleotide
agcaauaaaauccgugaca

SEQ ID NO: 563658 - RNA, 19 nt, Artificial Sequence
  Description of Artificial Sequence: Synthetic oligonucleotide
aaguauaacacugggguaa

SEQ ID NO: 563659 - RNA, 19 nt, Artificial Sequence
  Description of Artificial Sequence: Synthetic oligonucleotide
gaucccgcuucuuuuaucc

SEQ ID NO: 563660 - RNA, 19 nt, Artificial Sequence
  Description of Artificial Sequence: Synthetic oligonucleotide
uuagcuugaaguuauccuu

SEQ ID NO: 563661 - RNA, 19 nt, Artificial Sequence
  Description of Artificial Sequence: Synthetic oligonucleotide
uggggcguaagaacuauag

SEQ ID NO: 563662 - RNA, 19 nt, Artificial Sequence
  Description of Artificial Sequence: Synthetic oligonucleotide
cuugugagaggcuucucgg

SEQ ID NO: 563663 - RNA, 19 nt, Artificial Sequence
  Description of Artificial Sequence: Synthetic oligonucleotide
uggagaagucccaauguug

SEQ ID NO: 563664 - RNA, 19 nt, Artificial Sequence
  Description of Artificial Sequence: Synthetic oligonucleotide
uaaaauccgugacaggaaa

SEQ ID NO: 563665 - RNA, 19 nt, Artificial Sequence
  Description of Artificial Sequence: Synthetic oligonucleotide
ucaauaccagaccagcuuc

SEQ ID NO: 563666 - RNA, 19 nt, Artificial Sequence
  Description of Artificial Sequence: Synthetic oligonucleotide
aagaggcuagagucgucgc

SEQ ID NO: 563667 - RNA, 19 nt, Artificial Sequence
  Description of Artificial Sequence: Synthetic oligonucleotide
ucuucgaagaggcuagagu

SEQ ID NO: 563668 - RNA, 19 nt, Artificial Sequence
  Description of Artificial Sequence: Synthetic oligonucleotide
gaucauauugggaggaggc

SEQ ID NO: 563669 - RNA, 19 nt, Artificial Sequence
  Description of Artificial Sequence: Synthetic oligonucleotide
ucaucccugaguguaauag

SEQ ID NO: 563670 - RNA, 19 nt, Artificial Sequence
  Description of Artificial Sequence: Synthetic oligonucleotide
auccaguaaacuaucugcc

SEQ ID NO: 563671 - RNA, 19 nt, Artificial Sequence
  Description of Artificial Sequence: Synthetic oligonucleotide
ugucucaugaguugauuca

SEQ ID NO: 563672 - RNA, 19 nt, Artificial Sequence
  Description of Artificial Sequence: Synthetic oligonucleotide
ggguguuuaauuaucauag

SEQ ID NO: 563673 - RNA, 19 nt, Artificial Sequence
  Description of Artificial Sequence: Synthetic oligonucleotide
acuauaggguccguaauuc

SEQ ID NO: 563674 - RNA, 19 nt, Artificial Sequence
  Description of Artificial Sequence: Synthetic oligonucleotide
aaguccuguaggcuccugg

SEQ ID NO: 563675 - RNA, 19 nt, Artificial Sequence
  Description of Artificial Sequence: Synthetic oligonucleotide
uuccccauauguugaauag

SEQ ID NO: 563676 - RNA, 19 nt, Artificial Sequence
  Description of Artificial Sequence: Synthetic oligonucleotide
uccgccaugaagucuauac

SEQ ID NO: 563677 - RNA, 19 nt, Artificial Sequence
  Description of Artificial Sequence: Synthetic oligonucleotide
gaagaggcuagagucgucg

SEQ ID NO: 563678 - RNA, 19 nt, Artificial Sequence
  Description of Artificial Sequence: Synthetic oligonucleotide
uggcuagagagcuugugag

SEQ ID NO: 563679 - RNA, 19 nt, Artificial Sequence
  Description of Artificial Sequence: Synthetic oligonucleotide
ugcaauugucucaugaguu

SEQ ID NO: 563680 - RNA, 19 nt, Artificial Sequence
  Description of Artificial Sequence: Synthetic oligonucleotide
ccauuugucaucaagaaca

SEQ ID NO: 563681 - RNA, 19 nt, Artificial Sequence
  Description of Artificial Sequence: Synthetic oligonucleotide
uauaggguccguaauucaa

SEQ ID NO: 563682 - RNA, 19 nt, Artificial Sequence
  Description of Artificial Sequence: Synthetic oligonucleotide
guaagaacuauaggguccg

SEQ ID NO: 563683 - RNA, 19 nt, Artificial Sequence
  Description of Artificial Sequence: Synthetic oligonucleotide
ugccauaacauacggguaa

SEQ ID NO: 563684 - RNA, 19 nt, Artificial Sequence
  Description of Artificial Sequence: Synthetic oligonucleotide
caugaguugauucaaagcu

SEQ ID NO: 563685 - RNA, 19 nt, Artificial Sequence
  Description of Artificial Sequence: Synthetic oligonucleotide
agaacuauaggguccguaa

SEQ ID NO: 563686 - RNA, 19 nt, Artificial Sequence
  Description of Artificial Sequence: Synthetic oligonucleotide
aacuauaggguccguaauu

SEQ ID NO: 563687 - RNA, 19 nt, Artificial Sequence
  Description of Artificial Sequence: Synthetic oligonucleotide
uuaguacacauuagcuuga

SEQ ID NO: 563688 - RNA, 19 nt, Artificial Sequence
  Description of Artificial Sequence: Synthetic oligonucleotide
cuuaguggggcuucugaag

SEQ ID NO: 563689 - RNA, 19 nt, Artificial Sequence
  Description of Artificial Sequence: Synthetic oligonucleotide
uuuccggacuccauguaug

SEQ ID NO: 563690 - RNA, 19 nt, Artificial Sequence
  Description of Artificial Sequence: Synthetic oligonucleotide
caucuuugcugauauuggc

SEQ ID NO: 563691 - RNA, 19 nt, Artificial Sequence
  Description of Artificial Sequence: Synthetic oligonucleotide
aucauauugggaggaggcc

SEQ ID NO: 563692 - RNA, 19 nt, Artificial Sequence
  Description of Artificial Sequence: Synthetic oligonucleotide
auaaauggucucuggcuug

SEQ ID NO: 563693 - RNA, 19 nt, Artificial Sequence
  Description of Artificial Sequence: Synthetic oligonucleotide
uggacaacgcgcucaaucu

SEQ ID NO: 563694 - RNA, 19 nt, Artificial Sequence
  Description of Artificial Sequence: Synthetic oligonucleotide
aaauuguuuggaaggucag

SEQ ID NO: 563695 - RNA, 19 nt, Artificial Sequence
  Description of Artificial Sequence: Synthetic oligonucleotide
uacuccucguagaagugcc

SEQ ID NO: 563696 - RNA, 19 nt, Artificial Sequence
  Description of Artificial Sequence: Synthetic oligonucleotide
aacauacggguaaucuugg

SEQ ID NO: 563697 - RNA, 19 nt, Artificial Sequence
  Description of Artificial Sequence: Synthetic oligonucleotide
gagcaauaaaauccgugac

SEQ ID NO: 563698 - RNA, 19 nt, Artificial Sequence
  Description of Artificial Sequence: Synthetic oligonucleotide
auaacauacggguaaucuu

SEQ ID NO: 563699 - RNA, 19 nt, Artificial Sequence
  Description of Artificial Sequence: Synthetic oligonucleotide
gaugcugaaauuguuugga

SEQ ID NO: 563700 - RNA, 19 nt, Artificial Sequence
  Description of Artificial Sequence: Synthetic oligonucleotide
ugcugauauuggcaaaugu

SEQ ID NO: 563701 - RNA, 19 nt, Artificial Sequence
  Description of Artificial Sequence: Synthetic oligonucleotide
uggguguuuaauuaucaua

SEQ ID NO: 563702 - RNA, 19 nt, Artificial Sequence
  Description of Artificial Sequence: Synthetic oligonucleotide
ucuugcccauguccgaccg

SEQ ID NO: 563703 - RNA, 19 nt, Artificial Sequence
  Description of Artificial Sequence: Synthetic oligonucleotide
ucuaucuuucugcuuccga

SEQ ID NO: 563704 - RNA, 19 nt, Artificial Sequence
  Description of Artificial Sequence: Synthetic oligonucleotide
uccaguaaacuaucugcca

SEQ ID NO: 563705 - RNA, 19 nt, Artificial Sequence
  Description of Artificial Sequence: Synthetic oligonucleotide
agcaagguacauuucucug

SEQ ID NO: 563706 - RNA, 19 nt, Artificial Sequence
  Description of Artificial Sequence: Synthetic oligonucleotide
aggggcaugacacuggaaa

SEQ ID NO: 563707 - RNA, 19 nt, Artificial Sequence
  Description of Artificial Sequence: Synthetic oligonucleotide
acauacggguaaucuuggc

SEQ ID NO: 563708 - RNA, 19 nt, Artificial Sequence
  Description of Artificial Sequence: Synthetic oligonucleotide
ucagcaagguacauuucuc

SEQ ID NO: 563709 - RNA, 19 nt, Artificial Sequence
  Description of Artificial Sequence: Synthetic oligonucleotide
ucacacugacuguuugccg

SEQ ID NO: 563710 - RNA, 19 nt, Artificial Sequence
  Description of Artificial Sequence: Synthetic oligonucleotide
agauuaaaucagaaucauc

SEQ ID NO: 563711 - RNA, 19 nt, Artificial Sequence
  Description of Artificial Sequence: Synthetic oligonucleotide
guuagaacauccaguaaac

SEQ ID NO: 563712 - RNA, 19 nt, Artificial Sequence
  Description of Artificial Sequence: Synthetic oligonucleotide
aauaccagaccagcuucag

SEQ ID NO: 563713 - RNA, 19 nt, Artificial Sequence
  Description of Artificial Sequence: Synthetic oligonucleotide
ucguagaagugccgguccg

SEQ ID NO: 563714 - RNA, 19 nt, Artificial Sequence
  Description of Artificial Sequence: Synthetic oligonucleotide
aguauaacacugggguaac

SEQ ID NO: 563715 - RNA, 19 nt, Artificial Sequence
  Description of Artificial Sequence: Synthetic oligonucleotide
cugucuucgaagaggcuag

SEQ ID NO: 563716 - RNA, 19 nt, Artificial Sequence
  Description of Artificial Sequence: Synthetic oligonucleotide
cuaauacaaguccaaucuc

SEQ ID NO: 563717 - RNA, 19 nt, Artificial Sequence
  Description of Artificial Sequence: Synthetic oligonucleotide
ucuauggacugguagucau

SEQ ID NO: 563718 - RNA, 19 nt, Artificial Sequence
  Description of Artificial Sequence: Synthetic oligonucleotide
ggaaggaacagaaaucccc

SEQ ID NO: 563719 - RNA, 19 nt, Artificial Sequence
  Description of Artificial Sequence: Synthetic oligonucleotide
cucgacagcacaagccucc

SEQ ID NO: 563720 - RNA, 19 nt, Artificial Sequence
  Description of Artificial Sequence: Synthetic oligonucleotide
cuacuugugcaaucucugc

SEQ ID NO: 563721 - RNA, 19 nt, Artificial Sequence
  Description of Artificial Sequence: Synthetic oligonucleotide
auauuggcaaauguagagu

SEQ ID NO: 563722 - RNA, 19 nt, Artificial Sequence
  Description of Artificial Sequence: Synthetic oligonucleotide
auuuucaucccugagugua

SEQ ID NO: 563723 - RNA, 19 nt, Artificial Sequence
  Description of Artificial Sequence: Synthetic oligonucleotide
auguaugcucacaacauca

SEQ ID NO: 563724 - RNA, 19 nt, Artificial Sequence
  Description of Artificial Sequence: Synthetic oligonucleotide
ucuuccgguugucaucccc

SEQ ID NO: 563725 - RNA, 19 nt, Artificial Sequence
  Description of Artificial Sequence: Synthetic oligonucleotide
uggacugguagucauuauu

SEQ ID NO: 563726 - RNA, 19 nt, Artificial Sequence
  Description of Artificial Sequence: Synthetic oligonucleotide
ggaacauugaaaggaacug

SEQ ID NO: 563727 - RNA, 19 nt, Artificial Sequence
  Description of Artificial Sequence: Synthetic oligonucleotide
caucuucaggugauaacac

SEQ ID NO: 563728 - RNA, 19 nt, Artificial Sequence
  Description of Artificial Sequence: Synthetic oligonucleotide
gacaacgcgcucaaucugc

SEQ ID NO: 563729 - RNA, 19 nt, Artificial Sequence
  Description of Artificial Sequence: Synthetic oligonucleotide
auaguguaaucaauaccag

SEQ ID NO: 563730 - RNA, 19 nt, Artificial Sequence
  Description of Artificial Sequence: Synthetic oligonucleotide
cgaguuuucugcaaguccg

SEQ ID NO: 563731 - RNA, 19 nt, Artificial Sequence
  Description of Artificial Sequence: Synthetic oligonucleotide
cuggacaacgcgcucaauc

SEQ ID NO: 563732 - RNA, 19 nt, Artificial Sequence
  Description of Artificial Sequence: Synthetic oligonucleotide
uaagguuauuggucacuug

SEQ ID NO: 563733 - RNA, 19 nt, Artificial Sequence
  Description of Artificial Sequence: Synthetic oligonucleotide
gugauaacacguccaaguc

SEQ ID NO: 563734 - RNA, 19 nt, Artificial Sequence
  Description of Artificial Sequence: Synthetic oligonucleotide
cuccugacuaagaauuuuc

SEQ ID NO: 563735 - RNA, 19 nt, Artificial Sequence
  Description of Artificial Sequence: Synthetic oligonucleotide
gaggcuagagucgucgccc

SEQ ID NO: 563736 - RNA, 19 nt, Artificial Sequence
  Description of Artificial Sequence: Synthetic oligonucleotide
aguugauucaaagcuuccu

SEQ ID NO: 563737 - RNA, 19 nt, Artificial Sequence
  Description of Artificial Sequence: Synthetic oligonucleotide
uggcucucccacaaugggc

SEQ ID NO: 563738 - RNA, 19 nt, Artificial Sequence
  Description of Artificial Sequence: Synthetic oligonucleotide
uuguuagaacauccaguaa

SEQ ID NO: 563739 - RNA, 19 nt, Artificial Sequence
  Description of Artificial Sequence: Synthetic oligonucleotide
cauaauguggggcguaaga

SEQ ID NO: 563740 - RNA, 19 nt, Artificial Sequence
  Description of Artificial Sequence: Synthetic oligonucleotide
uuaagguuauuggucacuu

SEQ ID NO: 563741 - RNA, 19 nt, Artificial Sequence
  Description of Artificial Sequence: Synthetic oligonucleotide
ccguaauucaaguauaaca

SEQ ID NO: 563742 - RNA, 19 nt, Artificial Sequence
  Description of Artificial Sequence: Synthetic oligonucleotide
cugacuccuggacaacgcg

SEQ ID NO: 563743 - RNA, 19 nt, Artificial Sequence
  Description of Artificial Sequence: Synthetic oligonucleotide
acuugugcaaucucugcuu

SEQ ID NO: 563744 - RNA, 19 nt, Artificial Sequence
  Description of Artificial Sequence: Synthetic oligonucleotide
uaggguccguaauucaagu

SEQ ID NO: 563745 - RNA, 19 nt, Artificial Sequence
  Description of Artificial Sequence: Synthetic oligonucleotide
auaggguccguaauucaag

SEQ ID NO: 563746 - RNA, 19 nt, Artificial Sequence
  Description of Artificial Sequence: Synthetic oligonucleotide
gcuagagagcuugugagag

SEQ ID NO: 563747 - RNA, 19 nt, Artificial Sequence
  Description of Artificial Sequence: Synthetic oligonucleotide
acagaucauauugggagga

SEQ ID NO: 563748 - RNA, 19 nt, Artificial Sequence
  Description of Artificial Sequence: Synthetic oligonucleotide
ggugauaacacguccaagu

SEQ ID NO: 563749 - RNA, 19 nt, Artificial Sequence
  Description of Artificial Sequence: Synthetic oligonucleotide
uacggguaaucuuggcaug

SEQ ID NO: 563750 - RNA, 19 nt, Artificial Sequence
  Description of Artificial Sequence: Synthetic oligonucleotide
gcaauugucucaugaguug

SEQ ID NO: 563751 - RNA, 19 nt, Artificial Sequence
  Description of Artificial Sequence: Synthetic oligonucleotide
uaaucucacaggggcauga

SEQ ID NO: 563752 - RNA, 19 nt, Artificial Sequence
  Description of Artificial Sequence: Synthetic oligonucleotide
agguaagucuaaucucaca

SEQ ID NO: 563753 - RNA, 19 nt, Artificial Sequence
  Description of Artificial Sequence: Synthetic oligonucleotide
cacacucgacagcacaagc

SEQ ID NO: 563754 - RNA, 19 nt, Artificial Sequence
  Description of Artificial Sequence: Synthetic oligonucleotide
gaagcggugucuguucuac

SEQ ID NO: 563755 - RNA, 19 nt, Artificial Sequence
  Description of Artificial Sequence: Synthetic oligonucleotide
uucuaucuuucugcuuccg

SEQ ID NO: 563756 - RNA, 19 nt, Artificial Sequence
  Description of Artificial Sequence: Synthetic oligonucleotide
uccguaauucaaguauaac

SEQ ID NO: 563757 - RNA, 19 nt, Artificial Sequence
  Description of Artificial Sequence: Synthetic oligonucleotide
gguuauuggucacuuguuc

SEQ ID NO: 563758 - RNA, 19 nt, Artificial Sequence
  Description of Artificial Sequence: Synthetic oligonucleotide
ggcuuguuauaaaucauug

SEQ ID NO: 563759 - RNA, 19 nt, Artificial Sequence
  Description of Artificial Sequence: Synthetic oligonucleotide
ucguucuccacacggucuc

SEQ ID NO: 563760 - RNA, 19 nt, Artificial Sequence
  Description of Artificial Sequence: Synthetic oligonucleotide
cacguccaaguccuguagg

SEQ ID NO: 563761 - RNA, 19 nt, Artificial Sequence
  Description of Artificial Sequence: Synthetic oligonucleotide
uagccgggagcaauaaaau

SEQ ID NO: 563762 - RNA, 19 nt, Artificial Sequence
  Description of Artificial Sequence: Synthetic oligonucleotide
ucauggucgcuucugucuu

SEQ ID NO: 563763 - RNA, 19 nt, Artificial Sequence
  Description of Artificial Sequence: Synthetic oligonucleotide
acugcuugcagugcuguga

SEQ ID NO: 563764 - RNA, 19 nt, Artificial Sequence
  Description of Artificial Sequence: Synthetic oligonucleotide
ucauaauguggggcguaag

SEQ ID NO: 563765 - RNA, 19 nt, Artificial Sequence
  Description of Artificial Sequence: Synthetic oligonucleotide
uuauccuccuugacucuuc

SEQ ID NO: 563766 - RNA, 19 nt, Artificial Sequence
  Description of Artificial Sequence: Synthetic oligonucleotide
aaaauccgugacaggaaau

SEQ ID NO: 563767 - RNA, 19 nt, Artificial Sequence
  Description of Artificial Sequence: Synthetic oligonucleotide
guagccgggagcaauaaaa

SEQ ID NO: 563768 - RNA, 19 nt, Artificial Sequence
  Description of Artificial Sequence: Synthetic oligonucleotide
uuguuugucauggucgcuu

SEQ ID NO: 563769 - RNA, 19 nt, Artificial Sequence
  Description of Artificial Sequence: Synthetic oligonucleotide
cuucugucaaaucuacaaa

SEQ ID NO: 563770 - RNA, 19 nt, Artificial Sequence
  Description of Artificial Sequence: Synthetic oligonucleotide
ugaagucuauacucugcuu

SEQ ID NO: 563771 - RNA, 19 nt, Artificial Sequence
  Description of Artificial Sequence: Synthetic oligonucleotide
aaguccgccaugaagucua

SEQ ID NO: 563772 - RNA, 19 nt, Artificial Sequence
  Description of Artificial Sequence: Synthetic oligonucleotide
aagguacauuucucuguaa

SEQ ID NO: 563773 - RNA, 19 nt, Artificial Sequence
  Description of Artificial Sequence: Synthetic oligonucleotide
aagaacuauaggguccgua

SEQ ID NO: 563774 - RNA, 19 nt, Artificial Sequence
  Description of Artificial Sequence: Synthetic oligonucleotide
ucccgcuucuuuuauccuc

SEQ ID NO: 563775 - RNA, 19 nt, Artificial Sequence
  Description of Artificial Sequence: Synthetic oligonucleotide
cuguuugccggccgccucg

SEQ ID NO: 563776 - RNA, 19 nt, Artificial Sequence
  Description of Artificial Sequence: Synthetic oligonucleotide
ggggcguaagaacuauagg

SEQ ID NO: 563777 - RNA, 19 nt, Artificial Sequence
  Description of Artificial Sequence: Synthetic oligonucleotide
uccccauauguugaauaga

SEQ ID NO: 563778 - RNA, 19 nt, Artificial Sequence
  Description of Artificial Sequence: Synthetic oligonucleotide
gaguuuucugcaaguccgc

SEQ ID NO: 563779 - RNA, 19 nt, Artificial Sequence
  Description of Artificial Sequence: Synthetic oligonucleotide
acaacaucaccuggaguca

SEQ ID NO: 563780 - RNA, 19 nt, Artificial Sequence
  Description of Artificial Sequence: Synthetic oligonucleotide
auggucgcuucugucuucg

SEQ ID NO: 563781 - RNA, 19 nt, Artificial Sequence
  Description of Artificial Sequence: Synthetic oligonucleotide
uuccuaauacaaguccaau

SEQ ID NO: 563782 - RNA, 19 nt, Artificial Sequence
  Description of Artificial Sequence: Synthetic oligonucleotide
aucugccauaacauacggg

SEQ ID NO: 563783 - RNA, 19 nt, Artificial Sequence
  Description of Artificial Sequence: Synthetic oligonucleotide
guacuccucguagaagugc

SEQ ID NO: 563784 - RNA, 19 nt, Artificial Sequence
  Description of Artificial Sequence: Synthetic oligonucleotide
gagguaagucuaaucucac

SEQ ID NO: 563785 - RNA, 19 nt, Artificial Sequence
  Description of Artificial Sequence: Synthetic oligonucleotide
gcuuaauuagaacacaauu

SEQ ID NO: 563786 - RNA, 19 nt, Artificial Sequence
  Description of Artificial Sequence: Synthetic oligonucleotide
aagaaggacccaagagaca

SEQ ID NO: 563787 - RNA, 19 nt, Artificial Sequence
  Description of Artificial Sequence: Synthetic oligonucleotide
caaagacuucagccggagc

SEQ ID NO: 563788 - RNA, 19 nt, Artificial Sequence
  Description of Artificial Sequence: Synthetic oligonucleotide
ucgggagguaagucuaauc

SEQ ID NO: 563789 - RNA, 19 nt, Artificial Sequence
  Description of Artificial Sequence: Synthetic oligonucleotide
uccguuuucuguccuuguu

SEQ ID NO: 563790 - RNA, 19 nt, Artificial Sequence
  Description of Artificial Sequence: Synthetic oligonucleotide
aggcuagagucgucgcccg

SEQ ID NO: 563791 - RNA, 19 nt, Artificial Sequence
  Description of Artificial Sequence: Synthetic oligonucleotide
cagucuuacagggcaguag

SEQ ID NO: 563792 - RNA, 19 nt, Artificial Sequence
  Description of Artificial Sequence: Synthetic oligonucleotide
agcggugucuguucuacuu

SEQ ID NO: 563793 - RNA, 19 nt, Artificial Sequence
  Description of Artificial Sequence: Synthetic oligonucleotide
cuauaggguccguaauuca

SEQ ID NO: 563794 - RNA, 19 nt, Artificial Sequence
  Description of Artificial Sequence: Synthetic oligonucleotide
guaaacuaucugccauaac

SEQ ID NO: 563795 - RNA, 19 nt, Artificial Sequence
  Description of Artificial Sequence: Synthetic oligonucleotide
caauugucucaugaguuga

SEQ ID NO: 563796 - RNA, 19 nt, Artificial Sequence
  Description of Artificial Sequence: Synthetic oligonucleotide
guuggcucuacuugugcaa

SEQ ID NO: 563797 - RNA, 19 nt, Artificial Sequence
  Description of Artificial Sequence: Synthetic oligonucleotide
agcuuaauuagaacacaau

SEQ ID NO: 563798 - RNA, 19 nt, Artificial Sequence
  Description of Artificial Sequence: Synthetic oligonucleotide
cuagagucgucgcccggag

SEQ ID NO: 563799 - RNA, 19 nt, Artificial Sequence
  Description of Artificial Sequence: Synthetic oligonucleotide
gguguuuaauuaucauaga

SEQ ID NO: 563800 - RNA, 19 nt, Artificial Sequence
  Description of Artificial Sequence: Synthetic oligonucleotide
ugacuucgcugccacccac

SEQ ID NO: 563801 - RNA, 19 nt, Artificial Sequence
  Description of Artificial Sequence: Synthetic oligonucleotide
gcguaagaacuauaggguc

SEQ ID NO: 563802 - RNA, 19 nt, Artificial Sequence
  Description of Artificial Sequence: Synthetic oligonucleotide
uccgaguuuucugcaaguc

SEQ ID NO: 563803 - RNA, 19 nt, Artificial Sequence
  Description of Artificial Sequence: Synthetic oligonucleotide
caccaaaguuugucacugc

SEQ ID NO: 563804 - RNA, 19 nt, Artificial Sequence
  Description of Artificial Sequence: Synthetic oligonucleotide
caaguauaacacuggggua

SEQ ID NO: 563805 - RNA, 19 nt, Artificial Sequence
  Description of Artificial Sequence: Synthetic oligonucleotide
uagagucgucgcccggagc

SEQ ID NO: 563806 - RNA, 19 nt, Artificial Sequence
  Description of Artificial Sequence: Synthetic oligonucleotide
acucgacagcacaagccuc

SEQ ID NO: 563807 - RNA, 19 nt, Artificial Sequence
  Description of Artificial Sequence: Synthetic oligonucleotide
gcaccaaaguuugucacug

SEQ ID NO: 563808 - RNA, 19 nt, Artificial Sequence
  Description of Artificial Sequence: Synthetic oligonucleotide
uguuucccaugauggggaa

SEQ ID NO: 563809 - RNA, 19 nt, Artificial Sequence
  Description of Artificial Sequence: Synthetic oligonucleotide
gaagugccgguccgacuug

SEQ ID NO: 563810 - RNA, 19 nt, Artificial Sequence
  Description of Artificial Sequence: Synthetic oligonucleotide
aagcggugucuguucuacu

SEQ ID NO: 563811 - RNA, 19 nt, Artificial Sequence
  Description of Artificial Sequence: Synthetic oligonucleotide
ucgaucccgcuucuuuuau

SEQ ID NO: 563812 - RNA, 19 nt, Artificial Sequence
  Description of Artificial Sequence: Synthetic oligonucleotide
gcugauauuggcaaaugua

SEQ ID NO: 563813 - RNA, 19 nt, Artificial Sequence
  Description of Artificial Sequence: Synthetic oligonucleotide
uguggggcguaagaacuau

SEQ ID NO: 563814 - RNA, 19 nt, Artificial Sequence
  Description of Artificial Sequence: Synthetic oligonucleotide
gaacuauaggguccguaau

SEQ ID NO: 563815 - RNA, 19 nt, Artificial Sequence
  Description of Artificial Sequence: Synthetic oligonucleotide
caguaaacuaucugccaua

SEQ ID NO: 563816 - RNA, 19 nt, Artificial Sequence
  Description of Artificial Sequence: Synthetic oligonucleotide
acggguaaucuuggcaugu

SEQ ID NO: 563817 - RNA, 19 nt, Artificial Sequence
  Description of Artificial Sequence: Synthetic oligonucleotide
aacgcccuguuggcucuac

SEQ ID NO: 563818 - RNA, 19 nt, Artificial Sequence
  Description of Artificial Sequence: Synthetic oligonucleotide
aguagccgggagcaauaaa

SEQ ID NO: 563819 - RNA, 19 nt, Artificial Sequence
  Description of Artificial Sequence: Synthetic oligonucleotide
cuucucgggagguaagucu

SEQ ID NO: 563820 - RNA, 19 nt, Artificial Sequence
  Description of Artificial Sequence: Synthetic oligonucleotide
ucccaauguuguuguucca

SEQ ID NO: 563821 - RNA, 19 nt, Artificial Sequence
  Description of Artificial Sequence: Synthetic oligonucleotide
uucaucccugaguguaaua

SEQ ID NO: 563822 - RNA, 19 nt, Artificial Sequence
  Description of Artificial Sequence: Synthetic oligonucleotide
ggacaacgcgcucaaucug

SEQ ID NO: 563823 - RNA, 19 nt, Artificial Sequence
  Description of Artificial Sequence: Synthetic oligonucleotide
aggaccagcuuuaggggcu

SEQ ID NO: 563824 - RNA, 19 nt, Artificial Sequence
  Description of Artificial Sequence: Synthetic oligonucleotide
ccguuuucuguccuuguug

SEQ ID NO: 563825 - RNA, 19 nt, Artificial Sequence
  Description of Artificial Sequence: Synthetic oligonucleotide
caggugauaacacguccaa

SEQ ID NO: 563826 - RNA, 19 nt, Artificial Sequence
  Description of Artificial Sequence: Synthetic oligonucleotide
aucccgcuucuuuuauccu

SEQ ID NO: 563827 - RNA, 19 nt, Artificial Sequence
  Description of Artificial Sequence: Synthetic oligonucleotide
gucuaaucucacaggggca

SEQ ID NO: 563828 - RNA, 19 nt, Artificial Sequence
  Description of Artificial Sequence: Synthetic oligonucleotide
ggagaagucccaauguugu

SEQ ID NO: 563829 - RNA, 19 nt, Artificial Sequence
  Description of Artificial Sequence: Synthetic oligonucleotide
ggcguaagaacuauagggu

SEQ ID NO: 563830 - RNA, 19 nt, Artificial Sequence
  Description of Artificial Sequence: Synthetic oligonucleotide
uccgaccgggccccagagc

SEQ ID NO: 563831 - RNA, 19 nt, Artificial Sequence
  Description of Artificial Sequence: Synthetic oligonucleotide
cacucugagaggcaucugu

SEQ ID NO: 563832 - RNA, 19 nt, Artificial Sequence
  Description of Artificial Sequence: Synthetic oligonucleotide
cauggucgcuucugucuuc

SEQ ID NO: 563833 - RNA, 19 nt, Artificial Sequence
  Description of Artificial Sequence: Synthetic oligonucleotide
cagcaagguacauuucucu

SEQ ID NO: 563834 - RNA, 19 nt, Artificial Sequence
  Description of Artificial Sequence: Synthetic oligonucleotide
aagugccgguccgacuugu

SEQ ID NO: 563835 - RNA, 19 nt, Artificial Sequence
  Description of Artificial Sequence: Synthetic oligonucleotide
ggcuagagagcuugugaga

SEQ ID NO: 563836 - RNA, 19 nt, Artificial Sequence
  Description of Artificial Sequence: Synthetic oligonucleotide
uaagaacuauaggguccgu

SEQ ID NO: 563837 - RNA, 19 nt, Artificial Sequence
  Description of Artificial Sequence: Synthetic oligonucleotide
guccguaauucaaguauaa

SEQ ID NO: 563838 - RNA, 19 nt, Artificial Sequence
  Description of Artificial Sequence: Synthetic oligonucleotide
agguuauuggucacuuguu

SEQ ID NO: 563839 - RNA, 19 nt, Artificial Sequence
  Description of Artificial Sequence: Synthetic oligonucleotide
ggaacacuucagcuucuuc

SEQ ID NO: 563840 - RNA, 19 nt, Artificial Sequence
  Description of Artificial Sequence: Synthetic oligonucleotide
cugucaggcccacacucga

SEQ ID NO: 563841 - RNA, 19 nt, Artificial Sequence
  Description of Artificial Sequence: Synthetic oligonucleotide
cauugcuuuccggacucca

SEQ ID NO: 563842 - RNA, 19 nt, Artificial Sequence
  Description of Artificial Sequence: Synthetic oligonucleotide
cucuauggacugguaguca

SEQ ID NO: 563843 - RNA, 19 nt, Artificial Sequence
  Description of Artificial Sequence: Synthetic oligonucleotide
gugacuucgcugccaccca

SEQ ID NO: 563844 - RNA, 19 nt, Artificial Sequence
  Description of Artificial Sequence: Synthetic oligonucleotide
acaacgcgcucaaucugcu

SEQ ID NO: 563845 - RNA, 19 nt, Artificial Sequence
  Description of Artificial Sequence: Synthetic oligonucleotide
agcuugugagaggcuucuc

SEQ ID NO: 563846 - RNA, 19 nt, Artificial Sequence
  Description of Artificial Sequence: Synthetic oligonucleotide
guccgaccgggccccagag

SEQ ID NO: 563847 - RNA, 19 nt, Artificial Sequence
  Description of Artificial Sequence: Synthetic oligonucleotide
cugccauaacauacgggua

SEQ ID NO: 563848 - RNA, 19 nt, Artificial Sequence
  Description of Artificial Sequence: Synthetic oligonucleotide
ccugaagcggugucuguuc

SEQ ID NO: 563849 - RNA, 19 nt, Artificial Sequence
  Description of Artificial Sequence: Synthetic oligonucleotide
cucgaucccgcuucuuuua

SEQ ID NO: 563850 - RNA, 19 nt, Artificial Sequence
  Description of Artificial Sequence: Synthetic oligonucleotide
cucguucuccacacggucu

SEQ ID NO: 563851 - RNA, 19 nt, Artificial Sequence
  Description of Artificial Sequence: Synthetic oligonucleotide
agaguagccgggagcaaua

SEQ ID NO: 563852 - RNA, 19 nt, Artificial Sequence
  Description of Artificial Sequence: Synthetic oligonucleotide
auaacacguccaaguccug

SEQ ID NO: 563853 - RNA, 19 nt, Artificial Sequence
  Description of Artificial Sequence: Synthetic oligonucleotide
cccauugcuuuccggacuc

SEQ ID NO: 563854 - RNA, 19 nt, Artificial Sequence
  Description of Artificial Sequence: Synthetic oligonucleotide
ggcuagagucgucgcccgg

SEQ ID NO: 563855 - RNA, 19 nt, Artificial Sequence
  Description of Artificial Sequence: Synthetic oligonucleotide
ggucgcuucugucuucgaa

SEQ ID NO: 563856 - RNA, 19 nt, Artificial Sequence
  Description of Artificial Sequence: Synthetic oligonucleotide
gucacuuguucagcaaggu

SEQ ID NO: 563857 - RNA, 19 nt, Artificial Sequence
  Description of Artificial Sequence: Synthetic oligonucleotide
gcggugucuguucuacuuc

SEQ ID NO: 563858 - RNA, 19 nt, Artificial Sequence
  Description of Artificial Sequence: Synthetic oligonucleotide
auagaguagccgggagcaa

SEQ ID NO: 563859 - RNA, 19 nt, Artificial Sequence
  Description of Artificial Sequence: Synthetic oligonucleotide
ggucucuggcuuguuauaa

SEQ ID NO: 563860 - RNA, 19 nt, Artificial Sequence
  Description of Artificial Sequence: Synthetic oligonucleotide
cuuugaaccccugcagggu

SEQ ID NO: 563861 - RNA, 19 nt, Artificial Sequence
  Description of Artificial Sequence: Synthetic oligonucleotide
gaguagccgggagcaauaa

SEQ ID NO: 563862 - RNA, 19 nt, Artificial Sequence
  Description of Artificial Sequence: Synthetic oligonucleotide
uggucgcuucugucuucga

SEQ ID NO: 563863 - RNA, 19 nt, Artificial Sequence
  Description of Artificial Sequence: Synthetic oligonucleotide
gucucgaucccgcuucuuu

SEQ ID NO: 563864 - RNA, 19 nt, Artificial Sequence
  Description of Artificial Sequence: Synthetic oligonucleotide
ccuuaguggggcuucugaa

SEQ ID NO: 563865 - RNA, 19 nt, Artificial Sequence
  Description of Artificial Sequence: Synthetic oligonucleotide
ccaguaaacuaucugccau

SEQ ID NO: 563866 - RNA, 19 nt, Artificial Sequence
  Description of Artificial Sequence: Synthetic oligonucleotide
gcuagagucgucgcccgga

SEQ ID NO: 563867 - RNA, 19 nt, Artificial Sequence
  Description of Artificial Sequence: Synthetic oligonucleotide
cuccuugacucuucuccgu

SEQ ID NO: 563868 - RNA, 19 nt, Artificial Sequence
  Description of Artificial Sequence: Synthetic oligonucleotide
acgcccuguuggcucuacu

SEQ ID NO: 563869 - RNA, 19 nt, Artificial Sequence
  Description of Artificial Sequence: Synthetic oligonucleotide
guuguuugucauggucgcu

SEQ ID NO: 563870 - RNA, 19 nt, Artificial Sequence
  Description of Artificial Sequence: Synthetic oligonucleotide
ccauaacauacggguaauc

SEQ ID NO: 563871 - RNA, 19 nt, Artificial Sequence
  Description of Artificial Sequence: Synthetic oligonucleotide
cuauggacugguagucauu

SEQ ID NO: 563872 - RNA, 19 nt, Artificial Sequence
  Description of Artificial Sequence: Synthetic oligonucleotide
auguccgaccgggccccag

SEQ ID NO: 563873 - RNA, 19 nt, Artificial Sequence
  Description of Artificial Sequence: Synthetic oligonucleotide
ccacacggucucgaucccg

SEQ ID NO: 563874 - RNA, 19 nt, Artificial Sequence
  Description of Artificial Sequence: Synthetic oligonucleotide
aaacgcccuguuggcucua

SEQ ID NO: 563875 - RNA, 19 nt, Artificial Sequence
  Description of Artificial Sequence: Synthetic oligonucleotide
gcuuuccggacuccaugua

SEQ ID NO: 563876 - RNA, 19 nt, Artificial Sequence
  Description of Artificial Sequence: Synthetic oligonucleotide
ggaguucccugagcaaucu

SEQ ID NO: 563877 - RNA, 19 nt, Artificial Sequence
  Description of Artificial Sequence: Synthetic oligonucleotide
gggguaacucuguuccuuu

SEQ ID NO: 563878 - RNA, 19 nt, Artificial Sequence
  Description of Artificial Sequence: Synthetic oligonucleotide
cgaucccgcuucuuuuauc

SEQ ID NO: 563879 - RNA, 19 nt, Artificial Sequence
  Description of Artificial Sequence: Synthetic oligonucleotide
guggggcguaagaacuaua

SEQ ID NO: 563880 - RNA, 19 nt, Artificial Sequence
  Description of Artificial Sequence: Synthetic oligonucleotide
gccauaacauacggguaau

SEQ ID NO: 563881 - RNA, 19 nt, Artificial Sequence
  Description of Artificial Sequence: Synthetic oligonucleotide
ccgccaugaagucuauacu

SEQ ID NO: 563882 - RNA, 19 nt, Artificial Sequence
  Description of Artificial Sequence: Synthetic oligonucleotide
ggcuucucgggagguaagu

SEQ ID NO: 563883 - RNA, 19 nt, Artificial Sequence
  Description of Artificial Sequence: Synthetic oligonucleotide
cggguaaucuuggcaugug

SEQ ID NO: 563884 - RNA, 19 nt, Artificial Sequence
  Description of Artificial Sequence: Synthetic oligonucleotide
cccuuucugaguugccgcu

SEQ ID NO: 563885 - RNA, 19 nt, Artificial Sequence
  Description of Artificial Sequence: Synthetic oligonucleotide
gucgcccggagcugcccgu

SEQ ID NO: 563886 - RNA, 19 nt, Artificial Sequence
  Description of Artificial Sequence: Synthetic oligonucleotide
ccccauugcuuuccggacu

SEQ ID NO: 563887 - RNA, 19 nt, Artificial Sequence
  Description of Artificial Sequence: Synthetic oligonucleotide
ccacucugagaggcaucug

SEQ ID NO: 563888 - RNA, 19 nt, Artificial Sequence
  Description of Artificial Sequence: Synthetic oligonucleotide
ccagucuuacagggcagua

SEQ ID NO: 563889 - RNA, 19 nt, Artificial Sequence
  Description of Artificial Sequence: Synthetic oligonucleotide
gccucguucuccacacggu

SEQ ID NO: 563890 - RNA, 19 nt, Artificial Sequence
  Description of Artificial Sequence: Synthetic oligonucleotide
ccgguccgacuugugcuuc

SEQ ID NO: 563891 - RNA, 19 nt, Artificial Sequence
  Description of Artificial Sequence: Synthetic oligonucleotide
gccgguccgacuugugcuu

SEQ ID NO: 563892 - RNA, 19 nt, Artificial Sequence
  Description of Artificial Sequence: Synthetic oligonucleotide
cauguccgaccgggcccca

SEQ ID NO: 563893 - RNA, 19 nt, Artificial Sequence
  Description of Artificial Sequence: Synthetic oligonucleotide
cgggagcaauaaaauccgu

SEQ ID NO: 563894 - RNA, 19 nt, Artificial Sequence
  Description of Artificial Sequence: Synthetic oligonucleotide
ggaccagcuuuaggggcuu

SEQ ID NO: 563895 - RNA, 19 nt, Artificial Sequence
  Description of Artificial Sequence: Synthetic oligonucleotide
ccgcuucuuuuauccuccu

SEQ ID NO: 563896 - RNA, 19 nt, Artificial Sequence
  Description of Artificial Sequence: Synthetic oligonucleotide
ggucucgaucccgcuucuu

SEQ ID NO: 563897 - RNA, 19 nt, Artificial Sequence
  Description of Artificial Sequence: Synthetic oligonucleotide
uuuaaaacgcacaucugcg

SEQ ID NO: 563898 - RNA, 19 nt, Artificial Sequence
  Description of Artificial Sequence: Synthetic oligonucleotide
uguaaauuaguacaggccu

SEQ ID NO: 563899 - RNA, 19 nt, Artificial Sequence
  Description of Artificial Sequence: Synthetic oligonucleotide
aauuaguacaggccuaugg

SEQ ID NO: 563900 - RNA, 19 nt, Artificial Sequence
  Description of Artificial Sequence: Synthetic oligonucleotide
gauacguuaaaauacuccc

SEQ ID NO: 563901 - RNA, 19 nt, Artificial Sequence
  Description of Artificial Sequence: Synthetic oligonucleotide
ucuacuaggggacuuaaag

SEQ ID NO: 563902 - RNA, 19 nt, Artificial Sequence
  Description of Artificial Sequence: Synthetic oligonucleotide
uaaaauacuccccacgugc

SEQ ID NO: 563903 - RNA, 19 nt, Artificial Sequence
  Description of Artificial Sequence: Synthetic oligonucleotide
uuaugagagccuuucaugg

SEQ ID NO: 563904 - RNA, 19 nt, Artificial Sequence
  Description of Artificial Sequence: Synthetic oligonucleotide
accuguaugcuucugacgc

SEQ ID NO: 563905 - RNA, 19 nt, Artificial Sequence
  Description of Artificial Sequence: Synthetic oligonucleotide
uuuuggacgacuccaaucc

SEQ ID NO: 563906 - RNA, 19 nt, Artificial Sequence
  Description of Artificial Sequence: Synthetic oligonucleotide
aacggacugaagcaugucc

SEQ ID NO: 563907 - RNA, 19 nt, Artificial Sequence
  Description of Artificial Sequence: Synthetic oligonucleotide
auaaguucucaauauuuac

SEQ ID NO: 563908 - RNA, 19 nt, Artificial Sequence
  Description of Artificial Sequence: Synthetic oligonucleotide
uacuuuaagauuuguauga

SEQ ID NO: 563909 - RNA, 19 nt, Artificial Sequence
  Description of Artificial Sequence: Synthetic oligonucleotide
aucaugauugacuuggcuc

SEQ ID NO: 563910 - RNA, 19 nt, Artificial Sequence
  Description of Artificial Sequence: Synthetic oligonucleotide
uccacauuccuaaaucugg

SEQ ID NO: 563911 - RNA, 19 nt, Artificial Sequence
  Description of Artificial Sequence: Synthetic oligonucleotide
uucguugucaugaucagug

SEQ ID NO: 563912 - RNA, 19 nt, Artificial Sequence
  Description of Artificial Sequence: Synthetic oligonucleotide
uguguaaauuaguacaggc

SEQ ID NO: 563913 - RNA, 19 nt, Artificial Sequence
  Description of Artificial Sequence: Synthetic oligonucleotide
  modified_base (4)..(4): a, c, u, g, unknown or other
uccnccuccagccagugcg

SEQ ID NO: 563914 - RNA, 19 nt, Artificial Sequence
  Description of Artificial Sequence: Synthetic oligonucleotide
ugauacguuaaaauacucc

SEQ ID NO: 563915 - RNA, 19 nt, Artificial Sequence
  Description of Artificial Sequence: Synthetic oligonucleotide
uaaaacgcacaucugcggg

SEQ ID NO: 563916 - RNA, 19 nt, Artificial Sequence
  Description of Artificial Sequence: Synthetic oligonucleotide
uacuaggggacuuaaaggc

SEQ ID NO: 563917 - RNA, 19 nt, Artificial Sequence
  Description of Artificial Sequence: Synthetic oligonucleotide
ucaugauugacuuggcucc

SEQ ID NO: 563918 - RNA, 19 nt, Artificial Sequence
  Description of Artificial Sequence: Synthetic oligonucleotide
uugcacgucagucagaugu

SEQ ID NO: 563919 - RNA, 19 nt, Artificial Sequence
  Description of Artificial Sequence: Synthetic oligonucleotide
cauucagacaucaaucuag

SEQ ID NO: 563920 - RNA, 19 nt, Artificial Sequence
  Description of Artificial Sequence: Synthetic oligonucleotide
guaacaaagacagugguug

SEQ ID NO: 563921 - RNA, 19 nt, Artificial Sequence
  Description of Artificial Sequence: Synthetic oligonucleotide
uuguucguugucaugauca

SEQ ID NO: 563922 - RNA, 19 nt, Artificial Sequence
  Description of Artificial Sequence: Synthetic oligonucleotide
agagacuugggauuaggcg

SEQ ID NO: 563923 - RNA, 19 nt, Artificial Sequence
  Description of Artificial Sequence: Synthetic oligonucleotide
aacagaacgagugcauacc

SEQ ID NO: 563924 - RNA, 19 nt, Artificial Sequence
  Description of Artificial Sequence: Synthetic oligonucleotide
ugugauacguuaaaauacu

SEQ ID NO: 563925 - RNA, 19 nt, Artificial Sequence
  Description of Artificial Sequence: Synthetic oligonucleotide
uacguuaaaauacucccca

SEQ ID NO: 563926 - RNA, 19 nt, Artificial Sequence
  Description of Artificial Sequence: Synthetic oligonucleotide
uugcuaauguguaaauuag

SEQ ID NO: 563927 - RNA, 19 nt, Artificial Sequence
  Description of Artificial Sequence: Synthetic oligonucleotide
aaauacuccccacgugccc

SEQ ID NO: 563928 - RNA, 19 nt, Artificial Sequence
  Description of Artificial Sequence: Synthetic oligonucleotide
uggacgaagacuucuaggc

SEQ ID NO: 563929 - RNA, 19 nt, Artificial Sequence
  Description of Artificial Sequence: Synthetic oligonucleotide
auggacacauaccugugcc

SEQ ID NO: 563930 - RNA, 19 nt, Artificial Sequence
  Description of Artificial Sequence: Synthetic oligonucleotide
uaguuuuaaauauuuugga

SEQ ID NO: 563931 - RNA, 19 nt, Artificial Sequence
  Description of Artificial Sequence: Synthetic oligonucleotide
uuaaaacgcacaucugcgg

SEQ ID NO: 563932 - RNA, 19 nt, Artificial Sequence
  Description of Artificial Sequence: Synthetic oligonucleotide
guugaguaaggcuucacag

SEQ ID NO: 563933 - RNA, 19 nt, Artificial Sequence
  Description of Artificial Sequence: Synthetic oligonucleotide
aauacacuugcauaguaua

SEQ ID NO: 563934 - RNA, 19 nt, Artificial Sequence
  Description of Artificial Sequence: Synthetic oligonucleotide
cugugauacguuaaaauac

SEQ ID NO: 563935 - RNA, 19 nt, Artificial Sequence
  Description of Artificial Sequence: Synthetic oligonucleotide
uggugaacggccuucaaag

SEQ ID NO: 563936 - RNA, 19 nt, Artificial Sequence
  Description of Artificial Sequence: Synthetic oligonucleotide
auugcuaauguguaaauua

SEQ ID NO: 563937 - RNA, 19 nt, Artificial Sequence
  Description of Artificial Sequence: Synthetic oligonucleotide
aaaauacuccccacgugcc

SEQ ID NO: 563938 - RNA, 19 nt, Artificial Sequence
  Description of Artificial Sequence: Synthetic oligonucleotide
aaucaacgaaauuccuuuc

SEQ ID NO: 563939 - RNA, 19 nt, Artificial Sequence
  Description of Artificial Sequence: Synthetic oligonucleotide
gacgaagacuucuaggcag

SEQ ID NO: 563940 - RNA, 19 nt, Artificial Sequence
  Description of Artificial Sequence: Synthetic oligonucleotide
aaguaacaaagacaguggu

SEQ ID NO: 563941 - RNA, 19 nt, Artificial Sequence
  Description of Artificial Sequence: Synthetic oligonucleotide
gacuagacaguguacuggg

SEQ ID NO: 563942 - RNA, 19 nt, Artificial Sequence
  Description of Artificial Sequence: Synthetic oligonucleotide
acaucugcgggucacucgc

SEQ ID NO: 563943 - RNA, 19 nt, Artificial Sequence
  Description of Artificial Sequence: Synthetic oligonucleotide
cauuccuaaaucugggugc

SEQ ID NO: 563944 - RNA, 19 nt, Artificial Sequence
  Description of Artificial Sequence: Synthetic oligonucleotide
ucagaaauggaagccagag

SEQ ID NO: 563945 - RNA, 19 nt, Artificial Sequence
  Description of Artificial Sequence: Synthetic oligonucleotide
cuacuaggggacuuaaagg

SEQ ID NO: 563946 - RNA, 19 nt, Artificial Sequence
  Description of Artificial Sequence: Synthetic oligonucleotide
ugaucaguguucuggaagc

SEQ ID NO: 563947 - RNA, 19 nt, Artificial Sequence
  Description of Artificial Sequence: Synthetic oligonucleotide
uuaaaauacuccccacgug

SEQ ID NO: 563948 - RNA, 19 nt, Artificial Sequence
  Description of Artificial Sequence: Synthetic oligonucleotide
acuugcauaguauaccugu

SEQ ID NO: 563949 - RNA, 19 nt, Artificial Sequence
  Description of Artificial Sequence: Synthetic oligonucleotide
aucaaucuagaacucccac

SEQ ID NO: 563950 - RNA, 19 nt, Artificial Sequence
  Description of Artificial Sequence: Synthetic oligonucleotide
uuuaacggacugaagcaug

SEQ ID NO: 563951 - RNA, 19 nt, Artificial Sequence
  Description of Artificial Sequence: Synthetic oligonucleotide
agcaacgagaggcggaccc

SEQ ID NO: 563952 - RNA, 19 nt, Artificial Sequence
  Description of Artificial Sequence: Synthetic oligonucleotide
cauaccgcuaugcagauuc

SEQ ID NO: 563953 - RNA, 19 nt, Artificial Sequence
  Description of Artificial Sequence: Synthetic oligonucleotide
uuaaaggcggaccuaccug

SEQ ID NO: 563954 - RNA, 19 nt, Artificial Sequence
  Description of Artificial Sequence: Synthetic oligonucleotide
uccacguugaguaaggcuu

SEQ ID NO: 563955 - RNA, 19 nt, Artificial Sequence
  Description of Artificial Sequence: Synthetic oligonucleotide
acauuccuaaaucugggug

SEQ ID NO: 563956 - RNA, 19 nt, Artificial Sequence
  Description of Artificial Sequence: Synthetic oligonucleotide
ucaaacuguugcauguggc

SEQ ID NO: 563957 - RNA, 19 nt, Artificial Sequence
  Description of Artificial Sequence: Synthetic oligonucleotide
uuaggcgauggauauauuc

SEQ ID NO: 563958 - RNA, 19 nt, Artificial Sequence
  Description of Artificial Sequence: Synthetic oligonucleotide
ugcuacucugcucuggacc

SEQ ID NO: 563959 - RNA, 19 nt, Artificial Sequence
  Description of Artificial Sequence: Synthetic oligonucleotide
auacguuaaaauacucccc

SEQ ID NO: 563960 - RNA, 19 nt, Artificial Sequence
  Description of Artificial Sequence: Synthetic oligonucleotide
acagaacgagugcauaccg

SEQ ID NO: 563961 - RNA, 19 nt, Artificial Sequence
  Description of Artificial Sequence: Synthetic oligonucleotide
aaacccaacccaaaauguc

SEQ ID NO: 563962 - RNA, 19 nt, Artificial Sequence
  Description of Artificial Sequence: Synthetic oligonucleotide
caaacuguugcauguggcc

SEQ ID NO: 563963 - RNA, 19 nt, Artificial Sequence
  Description of Artificial Sequence: Synthetic oligonucleotide
auccucacgagcugcagac

SEQ ID NO: 563964 - RNA, 19 nt, Artificial Sequence
  Description of Artificial Sequence: Synthetic oligonucleotide
cuaucagauggauucggcc

SEQ ID NO: 563965 - RNA, 19 nt, Artificial Sequence
  Description of Artificial Sequence: Synthetic oligonucleotide
ucuaucagauggauucggc

SEQ ID NO: 563966 - RNA, 19 nt, Artificial Sequence
  Description of Artificial Sequence: Synthetic oligonucleotide
ccauuuaacggacugaagc

SEQ ID NO: 563967 - RNA, 19 nt, Artificial Sequence
  Description of Artificial Sequence: Synthetic oligonucleotide
agaccacaccauuuaacgg

SEQ ID NO: 563968 - RNA, 19 nt, Artificial Sequence
  Description of Artificial Sequence: Synthetic oligonucleotide
uaugaugugacaaccucuu

SEQ ID NO: 563969 - RNA, 19 nt, Artificial Sequence
  Description of Artificial Sequence: Synthetic oligonucleotide
agaacgagugcauaccgcu

SEQ ID NO: 563970 - RNA, 19 nt, Artificial Sequence
  Description of Artificial Sequence: Synthetic oligonucleotide
aauaguaaaccuggucuga

SEQ ID NO: 563971 - RNA, 19 nt, Artificial Sequence
  Description of Artificial Sequence: Synthetic oligonucleotide
aagacaugagggcaguaaa

SEQ ID NO: 563972 - RNA, 19 nt, Artificial Sequence
  Description of Artificial Sequence: Synthetic oligonucleotide
uacagaugaggacuagaca

SEQ ID NO: 563973 - RNA, 19 nt, Artificial Sequence
  Description of Artificial Sequence: Synthetic oligonucleotide
gauggauucggccaccaca

SEQ ID NO: 563974 - RNA, 19 nt, Artificial Sequence
  Description of Artificial Sequence: Synthetic oligonucleotide
ucaacgaaauuccuuucuc

SEQ ID NO: 563975 - RNA, 19 nt, Artificial Sequence
  Description of Artificial Sequence: Synthetic oligonucleotide
aaaacgcacaucugcgggu

SEQ ID NO: 563976 - RNA, 19 nt, Artificial Sequence
  Description of Artificial Sequence: Synthetic oligonucleotide
uuaacggacugaagcaugu

SEQ ID NO: 563977 - RNA, 19 nt, Artificial Sequence
  Description of Artificial Sequence: Synthetic oligonucleotide
acauaccugugccugggac

SEQ ID NO: 563978 - RNA, 19 nt, Artificial Sequence
  Description of Artificial Sequence: Synthetic oligonucleotide
uacuccaagggucggcggg

SEQ ID NO: 563979 - RNA, 19 nt, Artificial Sequence
  Description of Artificial Sequence: Synthetic oligonucleotide
cauuuaacggacugaagca

SEQ ID NO: 563980 - RNA, 19 nt, Artificial Sequence
  Description of Artificial Sequence: Synthetic oligonucleotide
caggacaacagcccaaggc

SEQ ID NO: 563981 - RNA, 19 nt, Artificial Sequence
  Description of Artificial Sequence: Synthetic oligonucleotide
acguuaaaauacuccccac

SEQ ID NO: 563982 - RNA, 19 nt, Artificial Sequence
  Description of Artificial Sequence: Synthetic oligonucleotide
uaaaggcggaccuaccugu

SEQ ID NO: 563983 - RNA, 19 nt, Artificial Sequence
  Description of Artificial Sequence: Synthetic oligonucleotide
auuguucguugucaugauc

SEQ ID NO: 563984 - RNA, 19 nt, Artificial Sequence
  Description of Artificial Sequence: Synthetic oligonucleotide
cuuaaugcagguacaguca

SEQ ID NO: 563985 - RNA, 19 nt, Artificial Sequence
  Description of Artificial Sequence: Synthetic oligonucleotide
gauggacacauaccugugc

SEQ ID NO: 563986 - RNA, 19 nt, Artificial Sequence
  Description of Artificial Sequence: Synthetic oligonucleotide
auuaucugcugagacucac

SEQ ID NO: 563987 - RNA, 19 nt, Artificial Sequence
  Description of Artificial Sequence: Synthetic oligonucleotide
aacgagugcauaccgcuau

SEQ ID NO: 563988 - RNA, 19 nt, Artificial Sequence
  Description of Artificial Sequence: Synthetic oligonucleotide
uuguaugaugugacaaccu

SEQ ID NO: 563989 - RNA, 19 nt, Artificial Sequence
  Description of Artificial Sequence: Synthetic oligonucleotide
acagucaauauugcuaaug

SEQ ID NO: 563990 - RNA, 19 nt, Artificial Sequence
  Description of Artificial Sequence: Synthetic oligonucleotide
auggauucggccaccacac

SEQ ID NO: 563991 - RNA, 19 nt, Artificial Sequence
  Description of Artificial Sequence: Synthetic oligonucleotide
gcagguacagucaauauug

SEQ ID NO: 563992 - RNA, 19 nt, Artificial Sequence
  Description of Artificial Sequence: Synthetic oligonucleotide
cuaccuguaguguuuagca

SEQ ID NO: 563993 - RNA, 19 nt, Artificial Sequence
  Description of Artificial Sequence: Synthetic oligonucleotide
uauggaccaguguucauaa

SEQ ID NO: 563994 - RNA, 19 nt, Artificial Sequence
  Description of Artificial Sequence: Synthetic oligonucleotide
aaugauacucucaggccca

SEQ ID NO: 563995 - RNA, 19 nt, Artificial Sequence
  Description of Artificial Sequence: Synthetic oligonucleotide
gacaucaaucuagaacucc

SEQ ID NO: 563996 - RNA, 19 nt, Artificial Sequence
  Description of Artificial Sequence: Synthetic oligonucleotide
acgacuccaauccucacga

SEQ ID NO: 563997 - RNA, 19 nt, Artificial Sequence
  Description of Artificial Sequence: Synthetic oligonucleotide
ugcucuuaacagaacgagu

SEQ ID NO: 563998 - RNA, 19 nt, Artificial Sequence
  Description of Artificial Sequence: Synthetic oligonucleotide
uucuagaccacaccauuua

SEQ ID NO: 563999 - RNA, 19 nt, Artificial Sequence
  Description of Artificial Sequence: Synthetic oligonucleotide
aacccaacccaaaauguca

SEQ ID NO: 564000 - RNA, 19 nt, Artificial Sequence
  Description of Artificial Sequence: Synthetic oligonucleotide
aaacgcacaucugcggguc

SEQ ID NO: 564001 - RNA, 19 nt, Artificial Sequence
  Description of Artificial Sequence: Synthetic oligonucleotide
ugggauuaggcgauggaua

SEQ ID NO: 564002 - RNA, 19 nt, Artificial Sequence
  Description of Artificial Sequence: Synthetic oligonucleotide
aaucuagaacucccacugu

SEQ ID NO: 564003 - RNA, 19 nt, Artificial Sequence
  Description of Artificial Sequence: Synthetic oligonucleotide
ugcagguacagucaauauu

SEQ ID NO: 564004 - RNA, 19 nt, Artificial Sequence
  Description of Artificial Sequence: Synthetic oligonucleotide
auguucauaaguucucaau

SEQ ID NO: 564005 - RNA, 19 nt, Artificial Sequence
  Description of Artificial Sequence: Synthetic oligonucleotide
augaggacuagacagugua

SEQ ID NO: 564006 - RNA, 19 nt, Artificial Sequence
  Description of Artificial Sequence: Synthetic oligonucleotide
uggacgacuccaauccuca

SEQ ID NO: 564007 - RNA, 19 nt, Artificial Sequence
  Description of Artificial Sequence: Synthetic oligonucleotide
agauuuguaugaugugaca

SEQ ID NO: 564008 - RNA, 19 nt, Artificial Sequence
  Description of Artificial Sequence: Synthetic oligonucleotide
aauacuccccacgugcccu

SEQ ID NO: 564009 - RNA, 19 nt, Artificial Sequence
  Description of Artificial Sequence: Synthetic oligonucleotide
  modified_base (7)..(7): a, c, u, g, unknown or other
uuuuccnccuccagccagu

SEQ ID NO: 564010 - RNA, 19 nt, Artificial Sequence
  Description of Artificial Sequence: Synthetic oligonucleotide
uggaaucaacgaaauuccu

SEQ ID NO: 564011 - RNA, 19 nt, Artificial Sequence
  Description of Artificial Sequence: Synthetic oligonucleotide
uuuugucaaacuguugcau

SEQ ID NO: 564012 - RNA, 19 nt, Artificial Sequence
  Description of Artificial Sequence: Synthetic oligonucleotide
cacaccauuuaacggacug

SEQ ID NO: 564013 - RNA, 19 nt, Artificial Sequence
  Description of Artificial Sequence: Synthetic oligonucleotide
cuguaaugauacucucagg

SEQ ID NO: 564014 - RNA, 19 nt, Artificial Sequence
  Description of Artificial Sequence: Synthetic oligonucleotide
aguaaagcggcagccucac

SEQ ID NO: 564015 - RNA, 19 nt, Artificial Sequence
  Description of Artificial Sequence: Synthetic oligonucleotide
ggacagaacuuuaaaacgc

SEQ ID NO: 564016 - RNA, 19 nt, Artificial Sequence
  Description of Artificial Sequence: Synthetic oligonucleotide
acagcaacgagaggcggac

SEQ ID NO: 564017 - RNA, 19 nt, Artificial Sequence
  Description of Artificial Sequence: Synthetic oligonucleotide
cauaaguucucaauauuua

SEQ ID NO: 564018 - RNA, 19 nt, Artificial Sequence
  Description of Artificial Sequence: Synthetic oligonucleotide
uggcagaauacacuugcau

SEQ ID NO: 564019 - RNA, 19 nt, Artificial Sequence
  Description of Artificial Sequence: Synthetic oligonucleotide
aggacuagacaguguacug

SEQ ID NO: 564020 - RNA, 19 nt, Artificial Sequence
  Description of Artificial Sequence: Synthetic oligonucleotide
uuuaaauauuuuggacgac

SEQ ID NO: 564021 - RNA, 19 nt, Artificial Sequence
  Description of Artificial Sequence: Synthetic oligonucleotide
ucuccugugauacguuaaa

SEQ ID NO: 564022 - RNA, 19 nt, Artificial Sequence
  Description of Artificial Sequence: Synthetic oligonucleotide
ccuuaaugcagguacaguc

SEQ ID NO: 564023 - RNA, 19 nt, Artificial Sequence
  Description of Artificial Sequence: Synthetic oligonucleotide
gacuuaaaggcggaccuac

SEQ ID NO: 564024 - RNA, 19 nt, Artificial Sequence
  Description of Artificial Sequence: Synthetic oligonucleotide
aguucuagaccacaccauu

SEQ ID NO: 564025 - RNA, 19 nt, Artificial Sequence
  Description of Artificial Sequence: Synthetic oligonucleotide
gucagagcaggacaacagc

SEQ ID NO: 564026 - RNA, 19 nt, Artificial Sequence
  Description of Artificial Sequence: Synthetic oligonucleotide
acgagaggcggacccagac

SEQ ID NO: 564027 - RNA, 19 nt, Artificial Sequence
  Description of Artificial Sequence: Synthetic oligonucleotide
ggcuccuuaaugcagguac

SEQ ID NO: 564028 - RNA, 19 nt, Artificial Sequence
  Description of Artificial Sequence: Synthetic oligonucleotide
aggccuauggaccaguguu

SEQ ID NO: 564029 - RNA, 19 nt, Artificial Sequence
  Description of Artificial Sequence: Synthetic oligonucleotide
aaggcggaccuaccuguag

SEQ ID NO: 564030 - RNA, 19 nt, Artificial Sequence
  Description of Artificial Sequence: Synthetic oligonucleotide
ugucagaccuuguggucag

SEQ ID NO: 564031 - RNA, 19 nt, Artificial Sequence
  Description of Artificial Sequence: Synthetic oligonucleotide
ugaggacuagacaguguac

SEQ ID NO: 564032 - RNA, 19 nt, Artificial Sequence
  Description of Artificial Sequence: Synthetic oligonucleotide
ggaccugucucccagaguc

SEQ ID NO: 564033 - RNA, 19 nt, Artificial Sequence
  Description of Artificial Sequence: Synthetic oligonucleotide
guauuggugguguccccgg

SEQ ID NO: 564034 - RNA, 19 nt, Artificial Sequence
  Description of Artificial Sequence: Synthetic oligonucleotide
caccacacaaacaugcaga

SEQ ID NO: 564035 - RNA, 19 nt, Artificial Sequence
  Description of Artificial Sequence: Synthetic oligonucleotide
cauggacgaagacuucuag

SEQ ID NO: 564036 - RNA, 19 nt, Artificial Sequence
  Description of Artificial Sequence: Synthetic oligonucleotide
aagcaguaggcugagguuu

SEQ ID NO: 564037 - RNA, 19 nt, Artificial Sequence
  Description of Artificial Sequence: Synthetic oligonucleotide
ugugcucuccugugauacg

SEQ ID NO: 564038 - RNA, 19 nt, Artificial Sequence
  Description of Artificial Sequence: Synthetic oligonucleotide
uuggacgacuccaauccuc

SEQ ID NO: 564039 - RNA, 19 nt, Artificial Sequence
  Description of Artificial Sequence: Synthetic oligonucleotide
acagcggagguacuuuuca

SEQ ID NO: 564040 - RNA, 19 nt, Artificial Sequence
  Description of Artificial Sequence: Synthetic oligonucleotide
cagccaauucaucugguuc

SEQ ID NO: 564041 - RNA, 19 nt, Artificial Sequence
  Description of Artificial Sequence: Synthetic oligonucleotide
aaauuaguacaggccuaug

SEQ ID NO: 564042 - RNA, 19 nt, Artificial Sequence
  Description of Artificial Sequence: Synthetic oligonucleotide
ucugcgggucacucgcacg

SEQ ID NO: 564043 - RNA, 19 nt, Artificial Sequence
  Description of Artificial Sequence: Synthetic oligonucleotide
cagacgcacauccacguug

SEQ ID NO: 564044 - RNA, 19 nt, Artificial Sequence
  Description of Artificial Sequence: Synthetic oligonucleotide
uguugcacgucagucagau

SEQ ID NO: 564045 - RNA, 19 nt, Artificial Sequence
  Description of Artificial Sequence: Synthetic oligonucleotide
aucuagaacucccacuguu

SEQ ID NO: 564046 - RNA, 19 nt, Artificial Sequence
  Description of Artificial Sequence: Synthetic oligonucleotide
uaguucuagaccacaccau

SEQ ID NO: 564047 - RNA, 19 nt, Artificial Sequence
  Description of Artificial Sequence: Synthetic oligonucleotide
agcggagguacuuuucaga

SEQ ID NO: 564048 - RNA, 19 nt, Artificial Sequence
  Description of Artificial Sequence: Synthetic oligonucleotide
cucuaucagauggauucgg

SEQ ID NO: 564049 - RNA, 19 nt, Artificial Sequence
  Description of Artificial Sequence: Synthetic oligonucleotide
auuuaacggacugaagcau

SEQ ID NO: 564050 - RNA, 19 nt, Artificial Sequence
  Description of Artificial Sequence: Synthetic oligonucleotide
acuuaaaggcggaccuacc

SEQ ID NO: 564051 - RNA, 19 nt, Artificial Sequence
  Description of Artificial Sequence: Synthetic oligonucleotide
gugcuuguuugugauacag

SEQ ID NO: 564052 - RNA, 19 nt, Artificial Sequence
  Description of Artificial Sequence: Synthetic oligonucleotide
aacagcggagguacuuuuc

SEQ ID NO: 564053 - RNA, 19 nt, Artificial Sequence
  Description of Artificial Sequence: Synthetic oligonucleotide
auacgcuggccucacaaaa

SEQ ID NO: 564054 - RNA, 19 nt, Artificial Sequence
  Description of Artificial Sequence: Synthetic oligonucleotide
ugauugacuuggcuccuuc

SEQ ID NO: 564055 - RNA, 19 nt, Artificial Sequence
  Description of Artificial Sequence: Synthetic oligonucleotide
gaugagcgcagggagcugc

SEQ ID NO: 564056 - RNA, 19 nt, Artificial Sequence
  Description of Artificial Sequence: Synthetic oligonucleotide
ugagccgcccugcugggca

SEQ ID NO: 564057 - RNA, 19 nt, Artificial Sequence
  Description of Artificial Sequence: Synthetic oligonucleotide
gaugccgaggggauggcug

SEQ ID NO: 564058 - RNA, 19 nt, Artificial Sequence
  Description of Artificial Sequence: Synthetic oligonucleotide
uauacgcuggccucacaaa

SEQ ID NO: 564059 - RNA, 19 nt, Artificial Sequence
  Description of Artificial Sequence: Synthetic oligonucleotide
ggacuagacaguguacugg

SEQ ID NO: 564060 - RNA, 19 nt, Artificial Sequence
  Description of Artificial Sequence: Synthetic oligonucleotide
agauggauucggccaccac

SEQ ID NO: 564061 - RNA, 19 nt, Artificial Sequence
  Description of Artificial Sequence: Synthetic oligonucleotide
gauuaggcgauggauauau

SEQ ID NO: 564062 - RNA, 19 nt, Artificial Sequence
  Description of Artificial Sequence: Synthetic oligonucleotide
acgucagucagaugucaca

SEQ ID NO: 564063 - RNA, 19 nt, Artificial Sequence
  Description of Artificial Sequence: Synthetic oligonucleotide
augccgaggggauggcugg

SEQ ID NO: 564064 - RNA, 19 nt, Artificial Sequence
  Description of Artificial Sequence: Synthetic oligonucleotide
uccccacgugcccugaaca

SEQ ID NO: 564065 - RNA, 19 nt, Artificial Sequence
  Description of Artificial Sequence: Synthetic oligonucleotide
aagcacucccaggacaacu

SEQ ID NO: 564066 - RNA, 19 nt, Artificial Sequence
  Description of Artificial Sequence: Synthetic oligonucleotide
cacaucugcgggucacucg

SEQ ID NO: 564067 - RNA, 19 nt, Artificial Sequence
  Description of Artificial Sequence: Synthetic oligonucleotide
uccccgguugccaacugga

SEQ ID NO: 564068 - RNA, 19 nt, Artificial Sequence
  Description of Artificial Sequence: Synthetic oligonucleotide
auggugaacggccuucaaa

SEQ ID NO: 564069 - RNA, 19 nt, Artificial Sequence
  Description of Artificial Sequence: Synthetic oligonucleotide
gugcauaccgcuaugcaga

SEQ ID NO: 564070 - RNA, 19 nt, Artificial Sequence
  Description of Artificial Sequence: Synthetic oligonucleotide
caaagaugggguuccuuca

SEQ ID NO: 564071 - RNA, 19 nt, Artificial Sequence
  Description of Artificial Sequence: Synthetic oligonucleotide
gauugacuuggcuccuuca

SEQ ID NO: 564072 - RNA, 19 nt, Artificial Sequence
  Description of Artificial Sequence: Synthetic oligonucleotide
auucagacaucaaucuaga

SEQ ID NO: 564073 - RNA, 19 nt, Artificial Sequence
  Description of Artificial Sequence: Synthetic oligonucleotide
cugauuguucguugucaug

SEQ ID NO: 564074 - RNA, 19 nt, Artificial Sequence
  Description of Artificial Sequence: Synthetic oligonucleotide
ggagguacuuuucagauau

SEQ ID NO: 564075 - RNA, 19 nt, Artificial Sequence
  Description of Artificial Sequence: Synthetic oligonucleotide
gguacagucaauauugcua

SEQ ID NO: 564076 - RNA, 19 nt, Artificial Sequence
  Description of Artificial Sequence: Synthetic oligonucleotide
acgaagacuucuaggcagg

SEQ ID NO: 564077 - RNA, 19 nt, Artificial Sequence
  Description of Artificial Sequence: Synthetic oligonucleotide
accgcuaugcagauuccuc

SEQ ID NO: 564078 - RNA, 19 nt, Artificial Sequence
  Description of Artificial Sequence: Synthetic oligonucleotide
guaguguuuagcagggcca

SEQ ID NO: 564079 - RNA, 19 nt, Artificial Sequence
  Description of Artificial Sequence: Synthetic oligonucleotide
guauacgcuggccucacaa

SEQ ID NO: 564080 - RNA, 19 nt, Artificial Sequence
  Description of Artificial Sequence: Synthetic oligonucleotide
ccgguugccaacuggaggc

SEQ ID NO: 564081 - RNA, 19 nt, Artificial Sequence
  Description of Artificial Sequence: Synthetic oligonucleotide
cauaccugugccugggaca

SEQ ID NO: 564082 - RNA, 19 nt, Artificial Sequence
  Description of Artificial Sequence: Synthetic oligonucleotide
uccuuaaugcagguacagu

SEQ ID NO: 564083 - RNA, 19 nt, Artificial Sequence
  Description of Artificial Sequence: Synthetic oligonucleotide
cuggucugauuguucguug

SEQ ID NO: 564084 - RNA, 19 nt, Artificial Sequence
  Description of Artificial Sequence: Synthetic oligonucleotide
gggaauaguaaaccugguc

SEQ ID NO: 564085 - RNA, 19 nt, Artificial Sequence
  Description of Artificial Sequence: Synthetic oligonucleotide
cauaguauaccuguaugcu

SEQ ID NO: 564086 - RNA, 19 nt, Artificial Sequence
  Description of Artificial Sequence: Synthetic oligonucleotide
cacuugcauaguauaccug

SEQ ID NO: 564087 - RNA, 19 nt, Artificial Sequence
  Description of Artificial Sequence: Synthetic oligonucleotide
aggcgauggauauauucuu

SEQ ID NO: 564088 - RNA, 19 nt, Artificial Sequence
  Description of Artificial Sequence: Synthetic oligonucleotide
cagucaauauugcuaaugu

SEQ ID NO: 564089 - RNA, 19 nt, Artificial Sequence
  Description of Artificial Sequence: Synthetic oligonucleotide
gauuugcugucuaauuuua

SEQ ID NO: 564090 - RNA, 19 nt, Artificial Sequence
  Description of Artificial Sequence: Synthetic oligonucleotide
uucggccaccacacaaaca

SEQ ID NO: 564091 - RNA, 19 nt, Artificial Sequence
  Description of Artificial Sequence: Synthetic oligonucleotide
acggacugaagcaugucca

SEQ ID NO: 564092 - RNA, 19 nt, Artificial Sequence
  Description of Artificial Sequence: Synthetic oligonucleotide
gacuucuaggcaggcagac

SEQ ID NO: 564093 - RNA, 19 nt, Artificial Sequence
  Description of Artificial Sequence: Synthetic oligonucleotide
acgguggcuccuuaaugca

SEQ ID NO: 564094 - RNA, 19 nt, Artificial Sequence
  Description of Artificial Sequence: Synthetic oligonucleotide
gaggacuagacaguguacu

SEQ ID NO: 564095 - RNA, 19 nt, Artificial Sequence
  Description of Artificial Sequence: Synthetic oligonucleotide
uaguaaaccuggucugauu

SEQ ID NO: 564096 - RNA, 19 nt, Artificial Sequence
  Description of Artificial Sequence: Synthetic oligonucleotide
cacgucagucagaugucac

SEQ ID NO: 564097 - RNA, 19 nt, Artificial Sequence
  Description of Artificial Sequence: Synthetic oligonucleotide
ugcgguuguauugguggug

SEQ ID NO: 564098 - RNA, 19 nt, Artificial Sequence
  Description of Artificial Sequence: Synthetic oligonucleotide
caaaaccaucaugauugac

SEQ ID NO: 564099 - RNA, 19 nt, Artificial Sequence
  Description of Artificial Sequence: Synthetic oligonucleotide
cauguucauaaguucucaa

SEQ ID NO: 564100 - RNA, 19 nt, Artificial Sequence
  Description of Artificial Sequence: Synthetic oligonucleotide
auauuuuggacgacuccaa

SEQ ID NO: 564101 - RNA, 19 nt, Artificial Sequence
  Description of Artificial Sequence: Synthetic oligonucleotide
cuggucucgguucccggag

SEQ ID NO: 564102 - RNA, 19 nt, Artificial Sequence
  Description of Artificial Sequence: Synthetic oligonucleotide
ugaacagcggagguacuuu

SEQ ID NO: 564103 - RNA, 19 nt, Artificial Sequence
  Description of Artificial Sequence: Synthetic oligonucleotide
guaaauuaguacaggccua

SEQ ID NO: 564104 - RNA, 19 nt, Artificial Sequence
  Description of Artificial Sequence: Synthetic oligonucleotide
aggcggaccuaccuguagu

SEQ ID NO: 564105 - RNA, 19 nt, Artificial Sequence
  Description of Artificial Sequence: Synthetic oligonucleotide
gggugugguuaugagagcc

SEQ ID NO: 564106 - RNA, 19 nt, Artificial Sequence
  Description of Artificial Sequence: Synthetic oligonucleotide
gacagugguuguuguggca

SEQ ID NO: 564107 - RNA, 19 nt, Artificial Sequence
  Description of Artificial Sequence: Synthetic oligonucleotide
cagcggagguacuuuucag

SEQ ID NO: 564108 - RNA, 19 nt, Artificial Sequence
  Description of Artificial Sequence: Synthetic oligonucleotide
accccaugugcuacucugc

SEQ ID NO: 564109 - RNA, 19 nt, Artificial Sequence
  Description of Artificial Sequence: Synthetic oligonucleotide
gaaauuccuuucuccacau

SEQ ID NO: 564110 - RNA, 19 nt, Artificial Sequence
  Description of Artificial Sequence: Synthetic oligonucleotide
ugcuggauuugcugucuaa

SEQ ID NO: 564111 - RNA, 19 nt, Artificial Sequence
  Description of Artificial Sequence: Synthetic oligonucleotide
ugccauugucuguaaugau

SEQ ID NO: 564112 - RNA, 19 nt, Artificial Sequence
  Description of Artificial Sequence: Synthetic oligonucleotide
gauucggccaccacacaaa

SEQ ID NO: 564113 - RNA, 19 nt, Artificial Sequence
  Description of Artificial Sequence: Synthetic oligonucleotide
gugauacguuaaaauacuc

SEQ ID NO: 564114 - RNA, 19 nt, Artificial Sequence
  Description of Artificial Sequence: Synthetic oligonucleotide
auaccgcuaugcagauucc

SEQ ID NO: 564115 - RNA, 19 nt, Artificial Sequence
  Description of Artificial Sequence: Synthetic oligonucleotide
gcuacuccaagggucggcg

SEQ ID NO: 564116 - RNA, 19 nt, Artificial Sequence
  Description of Artificial Sequence: Synthetic oligonucleotide
ugcagaccccaugugcuac

SEQ ID NO: 564117 - RNA, 19 nt, Artificial Sequence
  Description of Artificial Sequence: Synthetic oligonucleotide
acgagugcauaccgcuaug

SEQ ID NO: 564118 - RNA, 19 nt, Artificial Sequence
  Description of Artificial Sequence: Synthetic oligonucleotide
guucaccauugcgggaugg

SEQ ID NO: 564119 - RNA, 19 nt, Artificial Sequence
  Description of Artificial Sequence: Synthetic oligonucleotide
uacagucaauauugcuaau

SEQ ID NO: 564120 - RNA, 19 nt, Artificial Sequence
  Description of Artificial Sequence: Synthetic oligonucleotide
acauuguuguccacacaca

SEQ ID NO: 564121 - RNA, 19 nt, Artificial Sequence
  Description of Artificial Sequence: Synthetic oligonucleotide
ggcauuggcaaggcugugg

SEQ ID NO: 564122 - RNA, 19 nt, Artificial Sequence
  Description of Artificial Sequence: Synthetic oligonucleotide
acguugaguaaggcuucac

SEQ ID NO: 564123 - RNA, 19 nt, Artificial Sequence
  Description of Artificial Sequence: Synthetic oligonucleotide
ucacucgcacggccccacg

SEQ ID NO: 564124 - RNA, 19 nt, Artificial Sequence
  Description of Artificial Sequence: Synthetic oligonucleotide
ucucuacuaggggacuuaa

SEQ ID NO: 564125 - RNA, 19 nt, Artificial Sequence
  Description of Artificial Sequence: Synthetic oligonucleotide
ggggcuacuccaagggucg

SEQ ID NO: 564126 - RNA, 19 nt, Artificial Sequence
  Description of Artificial Sequence: Synthetic oligonucleotide
caguaaagcggcagccuca

SEQ ID NO: 564127 - RNA, 19 nt, Artificial Sequence
  Description of Artificial Sequence: Synthetic oligonucleotide
cuugcauaguauaccugua

SEQ ID NO: 564128 - RNA, 19 nt, Artificial Sequence
  Description of Artificial Sequence: Synthetic oligonucleotide
  modified_base (5)..(5): a, c, u, g, unknown or other
uuccnccuccagccagugc

SEQ ID NO: 564129 - RNA, 19 nt, Artificial Sequence
  Description of Artificial Sequence: Synthetic oligonucleotide
ccaacccaaaaugucagac

SEQ ID NO: 564130 - RNA, 19 nt, Artificial Sequence
  Description of Artificial Sequence: Synthetic oligonucleotide
caccauuuaacggacugaa

SEQ ID NO: 564131 - RNA, 19 nt, Artificial Sequence
  Description of Artificial Sequence: Synthetic oligonucleotide
uaccgcuaugcagauuccu

SEQ ID NO: 564132 - RNA, 19 nt, Artificial Sequence
  Description of Artificial Sequence: Synthetic oligonucleotide
guccccgguugccaacugg

SEQ ID NO: 564133 - RNA, 19 nt, Artificial Sequence
  Description of Artificial Sequence: Synthetic oligonucleotide
uacucugcucuggaccugu

SEQ ID NO: 564134 - RNA, 19 nt, Artificial Sequence
  Description of Artificial Sequence: Synthetic oligonucleotide
uucucuacuaggggacuua

SEQ ID NO: 564135 - RNA, 19 nt, Artificial Sequence
  Description of Artificial Sequence: Synthetic oligonucleotide
acucgcacggccccacggu

SEQ ID NO: 564136 - RNA, 19 nt, Artificial Sequence
  Description of Artificial Sequence: Synthetic oligonucleotide
cacgcagaacuuguccuug

SEQ ID NO: 564137 - RNA, 19 nt, Artificial Sequence
  Description of Artificial Sequence: Synthetic oligonucleotide
accuaccuguaguguuuag

SEQ ID NO: 564138 - RNA, 19 nt, Artificial Sequence
  Description of Artificial Sequence: Synthetic oligonucleotide
cuauggaccaguguucaua

SEQ ID NO: 564139 - RNA, 19 nt, Artificial Sequence
  Description of Artificial Sequence: Synthetic oligonucleotide
cacucgcacggccccacgg

SEQ ID NO: 564140 - RNA, 19 nt, Artificial Sequence
  Description of Artificial Sequence: Synthetic oligonucleotide
gagcuguagccaccacccc

SEQ ID NO: 564141 - RNA, 19 nt, Artificial Sequence
  Description of Artificial Sequence: Synthetic oligonucleotide
ccuaccuguaguguuuagc

SEQ ID NO: 564142 - RNA, 19 nt, Artificial Sequence
  Description of Artificial Sequence: Synthetic oligonucleotide
gcucuaucagauggauucg

SEQ ID NO: 564143 - RNA, 19 nt, Artificial Sequence
  Description of Artificial Sequence: Synthetic oligonucleotide
auuugcugucuaauuuuaa

SEQ ID NO: 564144 - RNA, 19 nt, Artificial Sequence
  Description of Artificial Sequence: Synthetic oligonucleotide
gaagcaguaggcugagguu

SEQ ID NO: 564145 - RNA, 19 nt, Artificial Sequence
  Description of Artificial Sequence: Synthetic oligonucleotide
cagugcgguuguauuggug

SEQ ID NO: 564146 - RNA, 19 nt, Artificial Sequence
  Description of Artificial Sequence: Synthetic oligonucleotide
caacgagaggcggacccag

SEQ ID NO: 564147 - RNA, 19 nt, Artificial Sequence
  Description of Artificial Sequence: Synthetic oligonucleotide
ggggacuuaaaggcggacc

SEQ ID NO: 564148 - RNA, 19 nt, Artificial Sequence
  Description of Artificial Sequence: Synthetic oligonucleotide
auacuccccacgugcccug

SEQ ID NO: 564149 - RNA, 19 nt, Artificial Sequence
  Description of Artificial Sequence: Synthetic oligonucleotide
acucacgggcaggcugucc

SEQ ID NO: 564150 - RNA, 19 nt, Artificial Sequence
  Description of Artificial Sequence: Synthetic oligonucleotide
caugaucaguguucuggaa

SEQ ID NO: 564151 - RNA, 19 nt, Artificial Sequence
  Description of Artificial Sequence: Synthetic oligonucleotide
augaugugacaaccucuuu

SEQ ID NO: 564152 - RNA, 19 nt, Artificial Sequence
  Description of Artificial Sequence: Synthetic oligonucleotide
agacucacgggcaggcugu

SEQ ID NO: 564153 - RNA, 19 nt, Artificial Sequence
  Description of Artificial Sequence: Synthetic oligonucleotide
gauuguucguugucaugau

SEQ ID NO: 564154 - RNA, 19 nt, Artificial Sequence
  Description of Artificial Sequence: Synthetic oligonucleotide
cccgguugccaacuggagg

SEQ ID NO: 564155 - RNA, 19 nt, Artificial Sequence
  Description of Artificial Sequence: Synthetic oligonucleotide
acgugcccugaacagcgga

SEQ ID NO: 564156 - RNA, 19 nt, Artificial Sequence
  Description of Artificial Sequence: Synthetic oligonucleotide
acauggugaacggccuuca

SEQ ID NO: 564157 - RNA, 19 nt, Artificial Sequence
  Description of Artificial Sequence: Synthetic oligonucleotide
cucuccugugauacguuaa

SEQ ID NO: 564158 - RNA, 19 nt, Artificial Sequence
  Description of Artificial Sequence: Synthetic oligonucleotide
ccuguaugcuucugacgcc

SEQ ID NO: 564159 - RNA, 19 nt, Artificial Sequence
  Description of Artificial Sequence: Synthetic oligonucleotide
ggugaacggccuucaaaga

SEQ ID NO: 564160 - RNA, 19 nt, Artificial Sequence
  Description of Artificial Sequence: Synthetic oligonucleotide
ggcggaccuaccuguagug

SEQ ID NO: 564161 - RNA, 19 nt, Artificial Sequence
  Description of Artificial Sequence: Synthetic oligonucleotide
uguccccgguugccaacug

SEQ ID NO: 564162 - RNA, 19 nt, Artificial Sequence
  Description of Artificial Sequence: Synthetic oligonucleotide
uaacggacugaagcauguc

SEQ ID NO: 564163 - RNA, 19 nt, Artificial Sequence
  Description of Artificial Sequence: Synthetic oligonucleotide
uccucacgagcugcagacc

SEQ ID NO: 564164 - RNA, 19 nt, Artificial Sequence
  Description of Artificial Sequence: Synthetic oligonucleotide
cuaggcaggcagacgcaca

SEQ ID NO: 564165 - RNA, 19 nt, Artificial Sequence
  Description of Artificial Sequence: Synthetic oligonucleotide
gcgggauggacacauaccu

SEQ ID NO: 564166 - RNA, 19 nt, Artificial Sequence
  Description of Artificial Sequence: Synthetic oligonucleotide
gugauacagaugaggacua

SEQ ID NO: 564167 - RNA, 19 nt, Artificial Sequence
  Description of Artificial Sequence: Synthetic oligonucleotide
cucgcacggccccacggug

SEQ ID NO: 564168 - RNA, 19 nt, Artificial Sequence
  Description of Artificial Sequence: Synthetic oligonucleotide
caucaugauugacuuggcu

SEQ ID NO: 564169 - RNA, 19 nt, Artificial Sequence
  Description of Artificial Sequence: Synthetic oligonucleotide
guugcacgucagucagaug

SEQ ID NO: 564170 - RNA, 19 nt, Artificial Sequence
  Description of Artificial Sequence: Synthetic oligonucleotide
cacauuccuaaaucugggu

SEQ ID NO: 564171 - RNA, 19 nt, Artificial Sequence
  Description of Artificial Sequence: Synthetic oligonucleotide
gcaggacaacagcccaagg

SEQ ID NO: 564172 - RNA, 19 nt, Artificial Sequence
  Description of Artificial Sequence: Synthetic oligonucleotide
agaggcggacccagacacg

SEQ ID NO: 564173 - RNA, 19 nt, Artificial Sequence
  Description of Artificial Sequence: Synthetic oligonucleotide
uucaugccgcugugcuugu

SEQ ID NO: 564174 - RNA, 19 nt, Artificial Sequence
  Description of Artificial Sequence: Synthetic oligonucleotide
ggaccaguguucauaaaua

SEQ ID NO: 564175 - RNA, 19 nt, Artificial Sequence
  Description of Artificial Sequence: Synthetic oligonucleotide
aacgagaggcggacccaga

SEQ ID NO: 564176 - RNA, 19 nt, Artificial Sequence
  Description of Artificial Sequence: Synthetic oligonucleotide
gaugaggacuagacagugu

SEQ ID NO: 564177 - RNA, 19 nt, Artificial Sequence
  Description of Artificial Sequence: Synthetic oligonucleotide
cgucagucagaugucacag

SEQ ID NO: 564178 - RNA, 19 nt, Artificial Sequence
  Description of Artificial Sequence: Synthetic oligonucleotide
ccaucaugauugacuuggc

SEQ ID NO: 564179 - RNA, 19 nt, Artificial Sequence
  Description of Artificial Sequence: Synthetic oligonucleotide
gggcaguaaagcggcagcc

SEQ ID NO: 564180 - RNA, 19 nt, Artificial Sequence
  Description of Artificial Sequence: Synthetic oligonucleotide
aaaggcggaccuaccugua

SEQ ID NO: 564181 - RNA, 19 nt, Artificial Sequence
  Description of Artificial Sequence: Synthetic oligonucleotide
ccucacgguguucauguuc

SEQ ID NO: 564182 - RNA, 19 nt, Artificial Sequence
  Description of Artificial Sequence: Synthetic oligonucleotide
gaacgagugcauaccgcua

SEQ ID NO: 564183 - RNA, 19 nt, Artificial Sequence
  Description of Artificial Sequence: Synthetic oligonucleotide
guacaggccuauggaccag

SEQ ID NO: 564184 - RNA, 19 nt, Artificial Sequence
  Description of Artificial Sequence: Synthetic oligonucleotide
acagccggucccugccacu

SEQ ID NO: 564185 - RNA, 19 nt, Artificial Sequence
  Description of Artificial Sequence: Synthetic oligonucleotide
ucgguucccggagccauua

SEQ ID NO: 564186 - RNA, 19 nt, Artificial Sequence
  Description of Artificial Sequence: Synthetic oligonucleotide
cucuacuaggggacuuaaa

SEQ ID NO: 564187 - RNA, 19 nt, Artificial Sequence
  Description of Artificial Sequence: Synthetic oligonucleotide
gaacagcggagguacuuuu

SEQ ID NO: 564188 - RNA, 19 nt, Artificial Sequence
  Description of Artificial Sequence: Synthetic oligonucleotide
cugguucaccauugcggga

SEQ ID NO: 564189 - RNA, 19 nt, Artificial Sequence
  Description of Artificial Sequence: Synthetic oligonucleotide
gggucacucgcacggcccc

SEQ ID NO: 564190 - RNA, 19 nt, Artificial Sequence
  Description of Artificial Sequence: Synthetic oligonucleotide
ccacguugaguaaggcuuc

SEQ ID NO: 564191 - RNA, 19 nt, Artificial Sequence
  Description of Artificial Sequence: Synthetic oligonucleotide
ugggugccauugucuguaa

SEQ ID NO: 564192 - RNA, 19 nt, Artificial Sequence
  Description of Artificial Sequence: Synthetic oligonucleotide
ggaaucaacgaaauuccuu

SEQ ID NO: 564193 - RNA, 19 nt, Artificial Sequence
  Description of Artificial Sequence: Synthetic oligonucleotide
caagcacucccaggacaac

SEQ ID NO: 564194 - RNA, 19 nt, Artificial Sequence
  Description of Artificial Sequence: Synthetic oligonucleotide
agcaguaggcugagguuuu

SEQ ID NO: 564195 - RNA, 19 nt, Artificial Sequence
  Description of Artificial Sequence: Synthetic oligonucleotide
  modified_base (3)..(3): a, c, u, g, unknown or other
ccnccuccagccagugcgg

SEQ ID NO: 564196 - RNA, 19 nt, Artificial Sequence
  Description of Artificial Sequence: Synthetic oligonucleotide
cuccugugauacguuaaaa

SEQ ID NO: 564197 - RNA, 19 nt, Artificial Sequence
  Description of Artificial Sequence: Synthetic oligonucleotide
agaugagcgcagggagcug

SEQ ID NO: 564198 - RNA, 19 nt, Artificial Sequence
  Description of Artificial Sequence: Synthetic oligonucleotide
ccgcuaugcagauuccuca

SEQ ID NO: 564199 - RNA, 19 nt, Artificial Sequence
  Description of Artificial Sequence: Synthetic oligonucleotide
cauugcgggauggacacau

SEQ ID NO: 564200 - RNA, 19 nt, Artificial Sequence
  Description of Artificial Sequence: Synthetic oligonucleotide
cguugaguaaggcuucaca

SEQ ID NO: 564201 - RNA, 19 nt, Artificial Sequence
  Description of Artificial Sequence: Synthetic oligonucleotide
gccuauggaccaguguuca

SEQ ID NO: 564202 - RNA, 19 nt, Artificial Sequence
  Description of Artificial Sequence: Synthetic oligonucleotide
guucuagaccacaccauuu

SEQ ID NO: 564203 - RNA, 19 nt, Artificial Sequence
  Description of Artificial Sequence: Synthetic oligonucleotide
gcggagguacuuuucagau

SEQ ID NO: 564204 - RNA, 19 nt, Artificial Sequence
  Description of Artificial Sequence: Synthetic oligonucleotide
gaccuaccuguaguguuua

SEQ ID NO: 564205 - RNA, 19 nt, Artificial Sequence
  Description of Artificial Sequence: Synthetic oligonucleotide
guaaagcggcagccucaca

SEQ ID NO: 564206 - RNA, 19 nt, Artificial Sequence
  Description of Artificial Sequence: Synthetic oligonucleotide
ggacaacugugcugcuuca

SEQ ID NO: 564207 - RNA, 19 nt, Artificial Sequence
  Description of Artificial Sequence: Synthetic oligonucleotide
ggccuauggaccaguguuc

SEQ ID NO: 564208 - RNA, 19 nt, Artificial Sequence
  Description of Artificial Sequence: Synthetic oligonucleotide
augauugacuuggcuccuu

SEQ ID NO: 564209 - RNA, 19 nt, Artificial Sequence
  Description of Artificial Sequence: Synthetic oligonucleotide
cacguugaguaaggcuuca

SEQ ID NO: 564210 - RNA, 19 nt, Artificial Sequence
  Description of Artificial Sequence: Synthetic oligonucleotide
gcuccuuaaugcagguaca

SEQ ID NO: 564211 - RNA, 19 nt, Artificial Sequence
  Description of Artificial Sequence: Synthetic oligonucleotide
cagcaacgagaggcggacc

SEQ ID NO: 564212 - RNA, 19 nt, Artificial Sequence
  Description of Artificial Sequence: Synthetic oligonucleotide
ggcuacuccaagggucggc

SEQ ID NO: 564213 - RNA, 19 nt, Artificial Sequence
  Description of Artificial Sequence: Synthetic oligonucleotide
cgagugcauaccgcuaugc

SEQ ID NO: 564214 - RNA, 19 nt, Artificial Sequence
  Description of Artificial Sequence: Synthetic oligonucleotide
ggcauggacgaagacuucu

SEQ ID NO: 564215 - RNA, 19 nt, Artificial Sequence
  Description of Artificial Sequence: Synthetic oligonucleotide
ggacgacuccaauccucac

SEQ ID NO: 564216 - RNA, 19 nt, Artificial Sequence
  Description of Artificial Sequence: Synthetic oligonucleotide
ccugucugcaagggacggg

SEQ ID NO: 564217 - RNA, 19 nt, Artificial Sequence
  Description of Artificial Sequence: Synthetic oligonucleotide
auuaggcgauggauauauu

SEQ ID NO: 564218 - RNA, 19 nt, Artificial Sequence
  Description of Artificial Sequence: Synthetic oligonucleotide
caucugcgggucacucgca

SEQ ID NO: 564219 - RNA, 19 nt, Artificial Sequence
  Description of Artificial Sequence: Synthetic oligonucleotide
cugcagaccccaugugcua

SEQ ID NO: 564220 - RNA, 19 nt, Artificial Sequence
  Description of Artificial Sequence: Synthetic oligonucleotide
gcucuccugugauacguua

SEQ ID NO: 564221 - RNA, 19 nt, Artificial Sequence
  Description of Artificial Sequence: Synthetic oligonucleotide
aggcugccagguauacgcu

SEQ ID NO: 564222 - RNA, 19 nt, Artificial Sequence
  Description of Artificial Sequence: Synthetic oligonucleotide
cauucucuacuaggggacu

SEQ ID NO: 564223 - RNA, 19 nt, Artificial Sequence
  Description of Artificial Sequence: Synthetic oligonucleotide
ccuucaacaccagccuguc

SEQ ID NO: 564224 - RNA, 19 nt, Artificial Sequence
  Description of Artificial Sequence: Synthetic oligonucleotide
cugagccgcccugcugggc

SEQ ID NO: 564225 - RNA, 19 nt, Artificial Sequence
  Description of Artificial Sequence: Synthetic oligonucleotide
acuccccacgugcccugaa

SEQ ID NO: 564226 - RNA, 19 nt, Artificial Sequence
  Description of Artificial Sequence: Synthetic oligonucleotide
gguauacgcuggccucaca

SEQ ID NO: 564227 - RNA, 19 nt, Artificial Sequence
  Description of Artificial Sequence: Synthetic oligonucleotide
caugccgcugugcuuguuu

SEQ ID NO: 564228 - RNA, 19 nt, Artificial Sequence
  Description of Artificial Sequence: Synthetic oligonucleotide
ccccgguugccaacuggag

SEQ ID NO: 564229 - RNA, 19 nt, Artificial Sequence
  Description of Artificial Sequence: Synthetic oligonucleotide
ucccucgugugcgcguguu

SEQ ID NO: 564230 - RNA, 19 nt, Artificial Sequence
  Description of Artificial Sequence: Synthetic oligonucleotide
gacucacgggcaggcuguc

SEQ ID NO: 564231 - RNA, 19 nt, Artificial Sequence
  Description of Artificial Sequence: Synthetic oligonucleotide
gcaguaggcugagguuuug

SEQ ID NO: 564232 - RNA, 19 nt, Artificial Sequence
  Description of Artificial Sequence: Synthetic oligonucleotide
gucucgguucccggagcca

SEQ ID NO: 564233 - RNA, 19 nt, Artificial Sequence
  Description of Artificial Sequence: Synthetic oligonucleotide
caggccuauggaccagugu

SEQ ID NO: 564234 - RNA, 19 nt, Artificial Sequence
  Description of Artificial Sequence: Synthetic oligonucleotide
gcuaugcagauuccucaau

SEQ ID NO: 564235 - RNA, 19 nt, Artificial Sequence
  Description of Artificial Sequence: Synthetic oligonucleotide
ggcaguaaagcggcagccu

SEQ ID NO: 564236 - RNA, 19 nt, Artificial Sequence
  Description of Artificial Sequence: Synthetic oligonucleotide
cccaacccaaaaugucaga

SEQ ID NO: 564237 - RNA, 19 nt, Artificial Sequence
  Description of Artificial Sequence: Synthetic oligonucleotide
gcgguuguauugguggugu

SEQ ID NO: 564238 - RNA, 19 nt, Artificial Sequence
  Description of Artificial Sequence: Synthetic oligonucleotide
gcaacgagaggcggaccca

SEQ ID NO: 564239 - RNA, 19 nt, Artificial Sequence
  Description of Artificial Sequence: Synthetic oligonucleotide
ggacuuaaaggcggaccua

SEQ ID NO: 564240 - RNA, 19 nt, Artificial Sequence
  Description of Artificial Sequence: Synthetic oligonucleotide
gcccauaguucuagaccac

SEQ ID NO: 564241 - RNA, 19 nt, Artificial Sequence
  Description of Artificial Sequence: Synthetic oligonucleotide
caacagcccaaggccuaca

SEQ ID NO: 564242 - RNA, 19 nt, Artificial Sequence
  Description of Artificial Sequence: Synthetic oligonucleotide
ggauuaggcgauggauaua

SEQ ID NO: 564243 - RNA, 19 nt, Artificial Sequence
  Description of Artificial Sequence: Synthetic oligonucleotide
gggugcuuguaggcugaac

SEQ ID NO: 564244 - RNA, 19 nt, Artificial Sequence
  Description of Artificial Sequence: Synthetic oligonucleotide
ggggaauaguaaaccuggu

SEQ ID NO: 564245 - RNA, 19 nt, Artificial Sequence
  Description of Artificial Sequence: Synthetic oligonucleotide
ggaccuaccuguaguguuu

SEQ ID NO: 564246 - RNA, 19 nt, Artificial Sequence
  Description of Artificial Sequence: Synthetic oligonucleotide
gccgcccugcugggcaugg

SEQ ID NO: 564247 - RNA, 19 nt, Artificial Sequence
  Description of Artificial Sequence: Synthetic oligonucleotide
gagguacuuuucagauauu

SEQ ID NO: 564248 - RNA, 19 nt, Artificial Sequence
  Description of Artificial Sequence: Synthetic oligonucleotide
ggucacucgcacggcccca

SEQ ID NO: 564249 - RNA, 19 nt, Artificial Sequence
  Description of Artificial Sequence: Synthetic oligonucleotide
ccccaugugcuacucugcu

SEQ ID NO: 564250 - RNA, 19 nt, Artificial Sequence
  Description of Artificial Sequence: Synthetic oligonucleotide
gcggaccuaccuguagugu

SEQ ID NO: 564251 - RNA, 19 nt, Artificial Sequence
  Description of Artificial Sequence: Synthetic oligonucleotide
ggaugccgaggggauggcu

SEQ ID NO: 564252 - RNA, 19 nt, Artificial Sequence
  Description of Artificial Sequence: Synthetic oligonucleotide
gucccucgugugcgcgugu

SEQ ID NO: 564253 - RNA, 19 nt, Artificial Sequence
  Description of Artificial Sequence: Synthetic oligonucleotide
  modified_base (2)..(2): a, c, u, g, unknown or other
cnccuccagccagugcggu

SEQ ID NO: 564254 - RNA, 19 nt, Artificial Sequence
  Description of Artificial Sequence: Synthetic oligonucleotide
cccacgguggcuccuuaau

SEQ ID NO: 564255 - RNA, 19 nt, Artificial Sequence
  Description of Artificial Sequence: Synthetic oligonucleotide
cggaccuaccuguaguguu

SEQ ID NO: 564256 - RNA, 19 nt, Artificial Sequence
  Description of Artificial Sequence: Synthetic oligonucleotide
ccuauggaccaguguucau

SEQ ID NO: 564257 - RNA, 19 nt, Artificial Sequence
  Description of Artificial Sequence: Synthetic oligonucleotide
gcuaggcauccaucacauu

SEQ ID NO: 564258 - RNA, 19 nt, Artificial Sequence
  Description of Artificial Sequence: Synthetic oligonucleotide
ccauugcgggauggacaca

SEQ ID NO: 564259 - RNA, 19 nt, Artificial Sequence
  Description of Artificial Sequence: Synthetic oligonucleotide
gcauaccgcuaugcagauu

SEQ ID NO: 564260 - RNA, 19 nt, Artificial Sequence
  Description of Artificial Sequence: Synthetic oligonucleotide
ccgcccugcugggcaugga

SEQ ID NO: 564261 - RNA, 19 nt, Artificial Sequence
  Description of Artificial Sequence: Synthetic oligonucleotide
cggcagccucacagccggu

SEQ ID NO: 564262 - RNA, 19 nt, Artificial Sequence
  Description of Artificial Sequence: Synthetic oligonucleotide
aaucucaucuuccaguccc

SEQ ID NO: 564263 - RNA, 19 nt, Artificial Sequence
  Description of Artificial Sequence: Synthetic oligonucleotide
aagcguucagcuuugaagc

SEQ ID NO: 564264 - RNA, 19 nt, Artificial Sequence
  Description of Artificial Sequence: Synthetic oligonucleotide
uuuauuagcagccacugag

SEQ ID NO: 564265 - RNA, 19 nt, Artificial Sequence
  Description of Artificial Sequence: Synthetic oligonucleotide
aaagcuaaccucuuggaag

SEQ ID NO: 564266 - RNA, 19 nt, Artificial Sequence
  Description of Artificial Sequence: Synthetic oligonucleotide
uuuaagacgauuuaugacu

SEQ ID NO: 564267 - RNA, 19 nt, Artificial Sequence
  Description of Artificial Sequence: Synthetic oligonucleotide
ucaaaauugacucguaagc

SEQ ID NO: 564268 - RNA, 19 nt, Artificial Sequence
  Description of Artificial Sequence: Synthetic oligonucleotide
aaacggaagacagaguucc

SEQ ID NO: 564269 - RNA, 19 nt, Artificial Sequence
  Description of Artificial Sequence: Synthetic oligonucleotide
ugcaacuggauccaggugg

SEQ ID NO: 564270 - RNA, 19 nt, Artificial Sequence
  Description of Artificial Sequence: Synthetic oligonucleotide
uguaaauccaacaucaaua

SEQ ID NO: 564271 - RNA, 19 nt, Artificial Sequence
  Description of Artificial Sequence: Synthetic oligonucleotide
guugagacauaucauaggg

SEQ ID NO: 564272 - RNA, 19 nt, Artificial Sequence
  Description of Artificial Sequence: Synthetic oligonucleotide
auuucaaucagguaucucu

SEQ ID NO: 564273 - RNA, 19 nt, Artificial Sequence
  Description of Artificial Sequence: Synthetic oligonucleotide
uuauaaggaagaacuaugc

SEQ ID NO: 564274 - RNA, 19 nt, Artificial Sequence
  Description of Artificial Sequence: Synthetic oligonucleotide
uauuaaggcaacuggaagc

SEQ ID NO: 564275 - RNA, 19 nt, Artificial Sequence
  Description of Artificial Sequence: Synthetic oligonucleotide
uaucaguuuguaaagauuc

SEQ ID NO: 564276 - RNA, 19 nt, Artificial Sequence
  Description of Artificial Sequence: Synthetic oligonucleotide
uacaagacaagguugagac

SEQ ID NO: 564277 - RNA, 19 nt, Artificial Sequence
  Description of Artificial Sequence: Synthetic oligonucleotide
gauaaggccaaaccgagcc

SEQ ID NO: 564278 - RNA, 19 nt, Artificial Sequence
  Description of Artificial Sequence: Synthetic oligonucleotide
acaagguugagacauauca

SEQ ID NO: 564279 - RNA, 19 nt, Artificial Sequence
  Description of Artificial Sequence: Synthetic oligonucleotide
aagcuaaccucuuggaagg

SEQ ID NO: 564280 - RNA, 19 nt, Artificial Sequence
  Description of Artificial Sequence: Synthetic oligonucleotide
uaagcguucagcuuugaag

SEQ ID NO: 564281 - RNA, 19 nt, Artificial Sequence
  Description of Artificial Sequence: Synthetic oligonucleotide
aaaauugacucguaagcgu

SEQ ID NO: 564282 - RNA, 19 nt, Artificial Sequence
  Description of Artificial Sequence: Synthetic oligonucleotide
acuguuauaaggaagaacu

SEQ ID NO: 564283 - RNA, 19 nt, Artificial Sequence
  Description of Artificial Sequence: Synthetic oligonucleotide
ucuccuaacaugcuauggg

SEQ ID NO: 564284 - RNA, 19 nt, Artificial Sequence
  Description of Artificial Sequence: Synthetic oligonucleotide
auggcacuaaaauuuaagg

SEQ ID NO: 564285 - RNA, 19 nt, Artificial Sequence
  Description of Artificial Sequence: Synthetic oligonucleotide
uugaaacagguauauacag

SEQ ID NO: 564286 - RNA, 19 nt, Artificial Sequence
  Description of Artificial Sequence: Synthetic oligonucleotide
ucuacacucaguuugugca

SEQ ID NO: 564287 - RNA, 19 nt, Artificial Sequence
  Description of Artificial Sequence: Synthetic oligonucleotide
cagaccagaaucuagcucc

SEQ ID NO: 564288 - RNA, 19 nt, Artificial Sequence
  Description of Artificial Sequence: Synthetic oligonucleotide
ucaucaacagauucauacg

SEQ ID NO: 564289 - RNA, 19 nt, Artificial Sequence
  Description of Artificial Sequence: Synthetic oligonucleotide
gagaaaacggaagacagag

SEQ ID NO: 564290 - RNA, 19 nt, Artificial Sequence
  Description of Artificial Sequence: Synthetic oligonucleotide
ugacuaaucucaaaauuga

SEQ ID NO: 564291 - RNA, 19 nt, Artificial Sequence
  Description of Artificial Sequence: Synthetic oligonucleotide
cuugcuauauuuagcacag

SEQ ID NO: 564292 - RNA, 19 nt, Artificial Sequence
  Description of Artificial Sequence: Synthetic oligonucleotide
ucuggcaguacaaaguugu

SEQ ID NO: 564293 - RNA, 19 nt, Artificial Sequence
  Description of Artificial Sequence: Synthetic oligonucleotide
auaggguacauuguaauuc

SEQ ID NO: 564294 - RNA, 19 nt, Artificial Sequence
  Description of Artificial Sequence: Synthetic oligonucleotide
auucucucuauaaucaccc

SEQ ID NO: 564295 - RNA, 19 nt, Artificial Sequence
  Description of Artificial Sequence: Synthetic oligonucleotide
aguuuaagacgauuuauga

SEQ ID NO: 564296 - RNA, 19 nt, Artificial Sequence
  Description of Artificial Sequence: Synthetic oligonucleotide
uauaaggaagaacuaugca

SEQ ID NO: 564297 - RNA, 19 nt, Artificial Sequence
  Description of Artificial Sequence: Synthetic oligonucleotide
uuggcaguggauaugagaa

SEQ ID NO: 564298 - RNA, 19 nt, Artificial Sequence
  Description of Artificial Sequence: Synthetic oligonucleotide
auauuuagcacagagcuga

SEQ ID NO: 564299 - RNA, 19 nt, Artificial Sequence
  Description of Artificial Sequence: Synthetic oligonucleotide
ugagacauaucauagggua

SEQ ID NO: 564300 - RNA, 19 nt, Artificial Sequence
  Description of Artificial Sequence: Synthetic oligonucleotide
acgauuuaugacuaaucuc

SEQ ID NO: 564301 - RNA, 19 nt, Artificial Sequence
  Description of Artificial Sequence: Synthetic oligonucleotide
cucaaaauugacucguaag

SEQ ID NO: 564302 - RNA, 19 nt, Artificial Sequence
  Description of Artificial Sequence: Synthetic oligonucleotide
uuguaauuauccauggguc

SEQ ID NO: 564303 - RNA, 19 nt, Artificial Sequence
  Description of Artificial Sequence: Synthetic oligonucleotide
ucuauuaaggcaacuggaa

SEQ ID NO: 564304 - RNA, 19 nt, Artificial Sequence
  Description of Artificial Sequence: Synthetic oligonucleotide
uguuguaauuauccauggg

SEQ ID NO: 564305 - RNA, 19 nt, Artificial Sequence
  Description of Artificial Sequence: Synthetic oligonucleotide
agaaagacagaucacuaga

SEQ ID NO: 564306 - RNA, 19 nt, Artificial Sequence
  Description of Artificial Sequence: Synthetic oligonucleotide
caaaauugacucguaagcg

SEQ ID NO: 564307 - RNA, 19 nt, Artificial Sequence
  Description of Artificial Sequence: Synthetic oligonucleotide
agaacuaugcagucucaac

SEQ ID NO: 564308 - RNA, 19 nt, Artificial Sequence
  Description of Artificial Sequence: Synthetic oligonucleotide
ugagaucuuuauuagcagc

SEQ ID NO: 564309 - RNA, 19 nt, Artificial Sequence
  Description of Artificial Sequence: Synthetic oligonucleotide
uucauagacuggauaaggc

SEQ ID NO: 564310 - RNA, 19 nt, Artificial Sequence
  Description of Artificial Sequence: Synthetic oligonucleotide
ucagguaucucuccacuag

SEQ ID NO: 564311 - RNA, 19 nt, Artificial Sequence
  Description of Artificial Sequence: Synthetic oligonucleotide
agaucucuacccaagagac

SEQ ID NO: 564312 - RNA, 19 nt, Artificial Sequence
  Description of Artificial Sequence: Synthetic oligonucleotide
cagaguuccgauuagccgc

SEQ ID NO: 564313 - RNA, 19 nt, Artificial Sequence
  Description of Artificial Sequence: Synthetic oligonucleotide
ucuaacucauuugagaaaa

SEQ ID NO: 564314 - RNA, 19 nt, Artificial Sequence
  Description of Artificial Sequence: Synthetic oligonucleotide
uauauuuagcacagagcug

SEQ ID NO: 564315 - RNA, 19 nt, Artificial Sequence
  Description of Artificial Sequence: Synthetic oligonucleotide
aagguugagacauaucaua

SEQ ID NO: 564316 - RNA, 19 nt, Artificial Sequence
  Description of Artificial Sequence: Synthetic oligonucleotide
uccaaacaaacuuugcaac

SEQ ID NO: 564317 - RNA, 19 nt, Artificial Sequence
  Description of Artificial Sequence: Synthetic oligonucleotide
uggcacuaaaauuuaaggu

SEQ ID NO: 564318 - RNA, 19 nt, Artificial Sequence
  Description of Artificial Sequence: Synthetic oligonucleotide
cugaucagcaacuauuuuc

SEQ ID NO: 564319 - RNA, 19 nt, Artificial Sequence
  Description of Artificial Sequence: Synthetic oligonucleotide
auaaguuacuguaaugaag

SEQ ID NO: 564320 - RNA, 19 nt, Artificial Sequence
  Description of Artificial Sequence: Synthetic oligonucleotide
uauagugcugcucuuuccu

SEQ ID NO: 564321 - RNA, 19 nt, Artificial Sequence
  Description of Artificial Sequence: Synthetic oligonucleotide
uuauuagcagccacugagc

SEQ ID NO: 564322 - RNA, 19 nt, Artificial Sequence
  Description of Artificial Sequence: Synthetic oligonucleotide
cuauuaaggcaacuggaag

SEQ ID NO: 564323 - RNA, 19 nt, Artificial Sequence
  Description of Artificial Sequence: Synthetic oligonucleotide
ucuccaucggccuccauag

SEQ ID NO: 564324 - RNA, 19 nt, Artificial Sequence
  Description of Artificial Sequence: Synthetic oligonucleotide
guuuaagacgauuuaugac

SEQ ID NO: 564325 - RNA, 19 nt, Artificial Sequence
  Description of Artificial Sequence: Synthetic oligonucleotide
ugagcuacagccacauggc

SEQ ID NO: 564326 - RNA, 19 nt, Artificial Sequence
  Description of Artificial Sequence: Synthetic oligonucleotide
ugaguacuucuauuaaggc

SEQ ID NO: 564327 - RNA, 19 nt, Artificial Sequence
  Description of Artificial Sequence: Synthetic oligonucleotide
ugagccaucuaacucauuu

SEQ ID NO: 564328 - RNA, 19 nt, Artificial Sequence
  Description of Artificial Sequence: Synthetic oligonucleotide
caaguuucuauagugcugc

SEQ ID NO: 564329 - RNA, 19 nt, Artificial Sequence
  Description of Artificial Sequence: Synthetic oligonucleotide
aaucagguaucucuccacu

SEQ ID NO: 564330 - RNA, 19 nt, Artificial Sequence
  Description of Artificial Sequence: Synthetic oligonucleotide
agcagugagcuacagccac

SEQ ID NO: 564331 - RNA, 19 nt, Artificial Sequence
  Description of Artificial Sequence: Synthetic oligonucleotide
aucacuagagaacuggaaa

SEQ ID NO: 564332 - RNA, 19 nt, Artificial Sequence
  Description of Artificial Sequence: Synthetic oligonucleotide
uuuggcaguggauaugaga

SEQ ID NO: 564333 - RNA, 19 nt, Artificial Sequence
  Description of Artificial Sequence: Synthetic oligonucleotide
aguaguguguaugucaaug

SEQ ID NO: 564334 - RNA, 19 nt, Artificial Sequence
  Description of Artificial Sequence: Synthetic oligonucleotide
aacuaagagagaacuuuuc

SEQ ID NO: 564335 - RNA, 19 nt, Artificial Sequence
  Description of Artificial Sequence: Synthetic oligonucleotide
gaguacuucuauuaaggca

SEQ ID NO: 564336 - RNA, 19 nt, Artificial Sequence
  Description of Artificial Sequence: Synthetic oligonucleotide
aaaacggaagacagaguuc

SEQ ID NO: 564337 - RNA, 19 nt, Artificial Sequence
  Description of Artificial Sequence: Synthetic oligonucleotide
uuaagacgauuuaugacua

SEQ ID NO: 564338 - RNA, 19 nt, Artificial Sequence
  Description of Artificial Sequence: Synthetic oligonucleotide
aacacaauugguagagcag

SEQ ID NO: 564339 - RNA, 19 nt, Artificial Sequence
  Description of Artificial Sequence: Synthetic oligonucleotide
ugaaacggaauuucauaga

SEQ ID NO: 564340 - RNA, 19 nt, Artificial Sequence
  Description of Artificial Sequence: Synthetic oligonucleotide
ucccugagaauccaguaga

SEQ ID NO: 564341 - RNA, 19 nt, Artificial Sequence
  Description of Artificial Sequence: Synthetic oligonucleotide
aacuaugcagucucaacuu

SEQ ID NO: 564342 - RNA, 19 nt, Artificial Sequence
  Description of Artificial Sequence: Synthetic oligonucleotide
caacuugccauauuccuug

SEQ ID NO: 564343 - RNA, 19 nt, Artificial Sequence
  Description of Artificial Sequence: Synthetic oligonucleotide
agaaucacaaccacccagg

SEQ ID NO: 564344 - RNA, 19 nt, Artificial Sequence
  Description of Artificial Sequence: Synthetic oligonucleotide
ucacaucaucuguaaaucc

SEQ ID NO: 564345 - RNA, 19 nt, Artificial Sequence
  Description of Artificial Sequence: Synthetic oligonucleotide
ucuccacuaggauuuuggg

SEQ ID NO: 564346 - RNA, 19 nt, Artificial Sequence
  Description of Artificial Sequence: Synthetic oligonucleotide
ucugaugcagagguacugg

SEQ ID NO: 564347 - RNA, 19 nt, Artificial Sequence
  Description of Artificial Sequence: Synthetic oligonucleotide
augagaucuuuauuagcag

SEQ ID NO: 564348 - RNA, 19 nt, Artificial Sequence
  Description of Artificial Sequence: Synthetic oligonucleotide
gaugaaacggaauuucaua

SEQ ID NO: 564349 - RNA, 19 nt, Artificial Sequence
  Description of Artificial Sequence: Synthetic oligonucleotide
agcaacacaauugguagag

SEQ ID NO: 564350 - RNA, 19 nt, Artificial Sequence
  Description of Artificial Sequence: Synthetic oligonucleotide
aauuucaaucagguaucuc

SEQ ID NO: 564351 - RNA, 19 nt, Artificial Sequence
  Description of Artificial Sequence: Synthetic oligonucleotide
gaugcagagguacuggcuc

SEQ ID NO: 564352 - RNA, 19 nt, Artificial Sequence
  Description of Artificial Sequence: Synthetic oligonucleotide
cuaugcagucucaacuucc

SEQ ID NO: 564353 - RNA, 19 nt, Artificial Sequence
  Description of Artificial Sequence: Synthetic oligonucleotide
aucagccuaucauucacag

SEQ ID NO: 564354 - RNA, 19 nt, Artificial Sequence
  Description of Artificial Sequence: Synthetic oligonucleotide
uuacuguaaugaagaauca

SEQ ID NO: 564355 - RNA, 19 nt, Artificial Sequence
  Description of Artificial Sequence: Synthetic oligonucleotide
ucucaaaauugacucguaa

SEQ ID NO: 564356 - RNA, 19 nt, Artificial Sequence
  Description of Artificial Sequence: Synthetic oligonucleotide
auuuacaagacaagguuga

SEQ ID NO: 564357 - RNA, 19 nt, Artificial Sequence
  Description of Artificial Sequence: Synthetic oligonucleotide
uaggguacauuguaauucu

SEQ ID NO: 564358 - RNA, 19 nt, Artificial Sequence
  Description of Artificial Sequence: Synthetic oligonucleotide
aguagaacuaagagagaac

SEQ ID NO: 564359 - RNA, 19 nt, Artificial Sequence
  Description of Artificial Sequence: Synthetic oligonucleotide
cagacggcaacucuggcag

SEQ ID NO: 564360 - RNA, 19 nt, Artificial Sequence
  Description of Artificial Sequence: Synthetic oligonucleotide
uucauaggguacauuguaa

SEQ ID NO: 564361 - RNA, 19 nt, Artificial Sequence
  Description of Artificial Sequence: Synthetic oligonucleotide
agaaauguaccccucuuuu

SEQ ID NO: 564362 - RNA, 19 nt, Artificial Sequence
  Description of Artificial Sequence: Synthetic oligonucleotide
ugcugcucuuuccuaaaag

SEQ ID NO: 564363 - RNA, 19 nt, Artificial Sequence
  Description of Artificial Sequence: Synthetic oligonucleotide
uguguaugucaaugagagg

SEQ ID NO: 564364 - RNA, 19 nt, Artificial Sequence
  Description of Artificial Sequence: Synthetic oligonucleotide
agcguucagcuuugaagcc

SEQ ID NO: 564365 - RNA, 19 nt, Artificial Sequence
  Description of Artificial Sequence: Synthetic oligonucleotide
agcauuuggagauggcaug

SEQ ID NO: 564366 - RNA, 19 nt, Artificial Sequence
  Description of Artificial Sequence: Synthetic oligonucleotide
acgagaaaacggaagacag

SEQ ID NO: 564367 - RNA, 19 nt, Artificial Sequence
  Description of Artificial Sequence: Synthetic oligonucleotide
ugugcagaagaaauauuuu

SEQ ID NO: 564368 - RNA, 19 nt, Artificial Sequence
  Description of Artificial Sequence: Synthetic oligonucleotide
caggaaagcagugagcuac

SEQ ID NO: 564369 - RNA, 19 nt, Artificial Sequence
  Description of Artificial Sequence: Synthetic oligonucleotide
cuaaccucuuggaagggug

SEQ ID NO: 564370 - RNA, 19 nt, Artificial Sequence
  Description of Artificial Sequence: Synthetic oligonucleotide
uuccagaucucuacccaag

SEQ ID NO: 564371 - RNA, 19 nt, Artificial Sequence
  Description of Artificial Sequence: Synthetic oligonucleotide
aguggauaugagaagggag

SEQ ID NO: 564372 - RNA, 19 nt, Artificial Sequence
  Description of Artificial Sequence: Synthetic oligonucleotide
gaacuaugcagucucaacu

SEQ ID NO: 564373 - RNA, 19 nt, Artificial Sequence
  Description of Artificial Sequence: Synthetic oligonucleotide
acauuguaauucuuggcaa

SEQ ID NO: 564374 - RNA, 19 nt, Artificial Sequence
  Description of Artificial Sequence: Synthetic oligonucleotide
aauugacucguaagcguuc

SEQ ID NO: 564375 - RNA, 19 nt, Artificial Sequence
  Description of Artificial Sequence: Synthetic oligonucleotide
agaccuaugcuucucuccu

SEQ ID NO: 564376 - RNA, 19 nt, Artificial Sequence
  Description of Artificial Sequence: Synthetic oligonucleotide
aaccucuuggaaggguggc

SEQ ID NO: 564377 - RNA, 19 nt, Artificial Sequence
  Description of Artificial Sequence: Synthetic oligonucleotide
gugaauguuagggaaggcc

SEQ ID NO: 564378 - RNA, 19 nt, Artificial Sequence
  Description of Artificial Sequence: Synthetic oligonucleotide
acacagauucagccagacc

SEQ ID NO: 564379 - RNA, 19 nt, Artificial Sequence
  Description of Artificial Sequence: Synthetic oligonucleotide
ggcacuaaaauuuaaggua

SEQ ID NO: 564380 - RNA, 19 nt, Artificial Sequence
  Description of Artificial Sequence: Synthetic oligonucleotide
gagugugucuggcacagac

SEQ ID NO: 564381 - RNA, 19 nt, Artificial Sequence
  Description of Artificial Sequence: Synthetic oligonucleotide
uuacaagacaagguugaga

SEQ ID NO: 564382 - RNA, 19 nt, Artificial Sequence
  Description of Artificial Sequence: Synthetic oligonucleotide
agccaagaugcacauaagu

SEQ ID NO: 564383 - RNA, 19 nt, Artificial Sequence
  Description of Artificial Sequence: Synthetic oligonucleotide
caacacaauugguagagca

SEQ ID NO: 564384 - RNA, 19 nt, Artificial Sequence
  Description of Artificial Sequence: Synthetic oligonucleotide
gagacauaucauaggguag

SEQ ID NO: 564385 - RNA, 19 nt, Artificial Sequence
  Description of Artificial Sequence: Synthetic oligonucleotide
gauucacuguuauaaggaa

SEQ ID NO: 564386 - RNA, 19 nt, Artificial Sequence
  Description of Artificial Sequence: Synthetic oligonucleotide
ugacugaagccgaggagca

SEQ ID NO: 564387 - RNA, 19 nt, Artificial Sequence
  Description of Artificial Sequence: Synthetic oligonucleotide
uuccagacuguggauauug

SEQ ID NO: 564388 - RNA, 19 nt, Artificial Sequence
  Description of Artificial Sequence: Synthetic oligonucleotide
auccgauggucccuuuggc

SEQ ID NO: 564389 - RNA, 19 nt, Artificial Sequence
  Description of Artificial Sequence: Synthetic oligonucleotide
auauugccugcuuuaagaa

SEQ ID NO: 564390 - RNA, 19 nt, Artificial Sequence
  Description of Artificial Sequence: Synthetic oligonucleotide
agacagaguuccgauuagc

SEQ ID NO: 564391 - RNA, 19 nt, Artificial Sequence
  Description of Artificial Sequence: Synthetic oligonucleotide
agacgauuuaugacuaauc

SEQ ID NO: 564392 - RNA, 19 nt, Artificial Sequence
  Description of Artificial Sequence: Synthetic oligonucleotide
agguugagacauaucauag

SEQ ID NO: 564393 - RNA, 19 nt, Artificial Sequence
  Description of Artificial Sequence: Synthetic oligonucleotide
uacuguaaugaagaaucac

SEQ ID NO: 564394 - RNA, 19 nt, Artificial Sequence
  Description of Artificial Sequence: Synthetic oligonucleotide
uccuaacaugcuaugggaa

SEQ ID NO: 564395 - RNA, 19 nt, Artificial Sequence
  Description of Artificial Sequence: Synthetic oligonucleotide
aaauugacucguaagcguu

SEQ ID NO: 564396 - RNA, 19 nt, Artificial Sequence
  Description of Artificial Sequence: Synthetic oligonucleotide
cagaucaguguagacacag

SEQ ID NO: 564397 - RNA, 19 nt, Artificial Sequence
  Description of Artificial Sequence: Synthetic oligonucleotide
gacgagaaaacggaagaca

SEQ ID NO: 564398 - RNA, 19 nt, Artificial Sequence
  Description of Artificial Sequence: Synthetic oligonucleotide
uuaucaccauuaaugucau

SEQ ID NO: 564399 - RNA, 19 nt, Artificial Sequence
  Description of Artificial Sequence: Synthetic oligonucleotide
uccucugaugcagagguac

SEQ ID NO: 564400 - RNA, 19 nt, Artificial Sequence
  Description of Artificial Sequence: Synthetic oligonucleotide
gcaacuauuuucaacucag

SEQ ID NO: 564401 - RNA, 19 nt, Artificial Sequence
  Description of Artificial Sequence: Synthetic oligonucleotide
uccaucggccuccauaguc

SEQ ID NO: 564402 - RNA, 19 nt, Artificial Sequence
  Description of Artificial Sequence: Synthetic oligonucleotide
cuggcaauccacugaaauc

SEQ ID NO: 564403 - RNA, 19 nt, Artificial Sequence
  Description of Artificial Sequence: Synthetic oligonucleotide
gaauccaguagaacuaaga

SEQ ID NO: 564404 - RNA, 19 nt, Artificial Sequence
  Description of Artificial Sequence: Synthetic oligonucleotide
ccgggaaagaucaucaaag

SEQ ID NO: 564405 - RNA, 19 nt, Artificial Sequence
  Description of Artificial Sequence: Synthetic oligonucleotide
gagccaucuaacucauuug

SEQ ID NO: 564406 - RNA, 19 nt, Artificial Sequence
  Description of Artificial Sequence: Synthetic oligonucleotide
uuuaagguaucaguuugua

SEQ ID NO: 564407 - RNA, 19 nt, Artificial Sequence
  Description of Artificial Sequence: Synthetic oligonucleotide
uaggguagucucuuccaug

SEQ ID NO: 564408 - RNA, 19 nt, Artificial Sequence
  Description of Artificial Sequence: Synthetic oligonucleotide
auccaacaucaauaagguc

SEQ ID NO: 564409 - RNA, 19 nt, Artificial Sequence
  Description of Artificial Sequence: Synthetic oligonucleotide
ucauagagauucacuguua

SEQ ID NO: 564410 - RNA, 19 nt, Artificial Sequence
  Description of Artificial Sequence: Synthetic oligonucleotide
gagaaaacacaugguggcc

SEQ ID NO: 564411 - RNA, 19 nt, Artificial Sequence
  Description of Artificial Sequence: Synthetic oligonucleotide
ugacucguaagcguucagc

SEQ ID NO: 564412 - RNA, 19 nt, Artificial Sequence
  Description of Artificial Sequence: Synthetic oligonucleotide
uccagaucucuacccaaga

SEQ ID NO: 564413 - RNA, 19 nt, Artificial Sequence
  Description of Artificial Sequence: Synthetic oligonucleotide
uggcaguacaaaguuguug

SEQ ID NO: 564414 - RNA, 19 nt, Artificial Sequence
  Description of Artificial Sequence: Synthetic oligonucleotide
ucuacccacaauacuucuc

SEQ ID NO: 564415 - RNA, 19 nt, Artificial Sequence
  Description of Artificial Sequence: Synthetic oligonucleotide
guaguguguaugucaauga

SEQ ID NO: 564416 - RNA, 19 nt, Artificial Sequence
  Description of Artificial Sequence: Synthetic oligonucleotide
aucucuacccaagagacuu

SEQ ID NO: 564417 - RNA, 19 nt, Artificial Sequence
  Description of Artificial Sequence: Synthetic oligonucleotide
aguuacuguaaugaagaau

SEQ ID NO: 564418 - RNA, 19 nt, Artificial Sequence
  Description of Artificial Sequence: Synthetic oligonucleotide
gacuaaucucaaaauugac

SEQ ID NO: 564419 - RNA, 19 nt, Artificial Sequence
  Description of Artificial Sequence: Synthetic oligonucleotide
cggaauuucauagagauuc

SEQ ID NO: 564420 - RNA, 19 nt, Artificial Sequence
  Description of Artificial Sequence: Synthetic oligonucleotide
cugaugcagagguacuggc

SEQ ID NO: 564421 - RNA, 19 nt, Artificial Sequence
  Description of Artificial Sequence: Synthetic oligonucleotide
aguuccgauuagccgcucg

SEQ ID NO: 564422 - RNA, 19 nt, Artificial Sequence
  Description of Artificial Sequence: Synthetic oligonucleotide
ugcaucagccuaucauuca

SEQ ID NO: 564423 - RNA, 19 nt, Artificial Sequence
  Description of Artificial Sequence: Synthetic oligonucleotide
ucuacccaagagacuugag

SEQ ID NO: 564424 - RNA, 19 nt, Artificial Sequence
  Description of Artificial Sequence: Synthetic oligonucleotide
uucucucuauaaucacccc

SEQ ID NO: 564425 - RNA, 19 nt, Artificial Sequence
  Description of Artificial Sequence: Synthetic oligonucleotide
aaggcaacuggaagcccac

SEQ ID NO: 564426 - RNA, 19 nt, Artificial Sequence
  Description of Artificial Sequence: Synthetic oligonucleotide
cagaucucuacccaagaga

SEQ ID NO: 564427 - RNA, 19 nt, Artificial Sequence
  Description of Artificial Sequence: Synthetic oligonucleotide
cagacgagaaaacggaaga

SEQ ID NO: 564428 - RNA, 19 nt, Artificial Sequence
  Description of Artificial Sequence: Synthetic oligonucleotide
cuaggauuuuggguggagc

SEQ ID NO: 564429 - RNA, 19 nt, Artificial Sequence
  Description of Artificial Sequence: Synthetic oligonucleotide
gcuauauuuagcacagagc

SEQ ID NO: 564430 - RNA, 19 nt, Artificial Sequence
  Description of Artificial Sequence: Synthetic oligonucleotide
cucuccuaacaugcuaugg

SEQ ID NO: 564431 - RNA, 19 nt, Artificial Sequence
  Description of Artificial Sequence: Synthetic oligonucleotide
gaucaguguagacacagau

SEQ ID NO: 564432 - RNA, 19 nt, Artificial Sequence
  Description of Artificial Sequence: Synthetic oligonucleotide
cuaugcuucucuccuaaca

SEQ ID NO: 564433 - RNA, 19 nt, Artificial Sequence
  Description of Artificial Sequence: Synthetic oligonucleotide
aguaggagcuucugccaug

SEQ ID NO: 564434 - RNA, 19 nt, Artificial Sequence
  Description of Artificial Sequence: Synthetic oligonucleotide
guucauaggguacauugua

SEQ ID NO: 564435 - RNA, 19 nt, Artificial Sequence
  Description of Artificial Sequence: Synthetic oligonucleotide
ucucuccuaacaugcuaug

SEQ ID NO: 564436 - RNA, 19 nt, Artificial Sequence
  Description of Artificial Sequence: Synthetic oligonucleotide
uuugugcaucagccuauca

SEQ ID NO: 564437 - RNA, 19 nt, Artificial Sequence
  Description of Artificial Sequence: Synthetic oligonucleotide
uccagacgagaaaacggaa

SEQ ID NO: 564438 - RNA, 19 nt, Artificial Sequence
  Description of Artificial Sequence: Synthetic oligonucleotide
cacuguuauaaggaagaac

SEQ ID NO: 564439 - RNA, 19 nt, Artificial Sequence
  Description of Artificial Sequence: Synthetic oligonucleotide
cauuaaugucaucaacaga

SEQ ID NO: 564440 - RNA, 19 nt, Artificial Sequence
  Description of Artificial Sequence: Synthetic oligonucleotide
cccaguaggagcuucugcc

SEQ ID NO: 564441 - RNA, 19 nt, Artificial Sequence
  Description of Artificial Sequence: Synthetic oligonucleotide
gacucguaagcguucagcu

SEQ ID NO: 564442 - RNA, 19 nt, Artificial Sequence
  Description of Artificial Sequence: Synthetic oligonucleotide
ccuaagcuuggguagagac

SEQ ID NO: 564443 - RNA, 19 nt, Artificial Sequence
  Description of Artificial Sequence: Synthetic oligonucleotide
auaggguagucucuuccau

SEQ ID NO: 564444 - RNA, 19 nt, Artificial Sequence
  Description of Artificial Sequence: Synthetic oligonucleotide
ucguaagcguucagcuuug

SEQ ID NO: 564445 - RNA, 19 nt, Artificial Sequence
  Description of Artificial Sequence: Synthetic oligonucleotide
acaagacaagguugagaca

SEQ ID NO: 564446 - RNA, 19 nt, Artificial Sequence
  Description of Artificial Sequence: Synthetic oligonucleotide
aaaacacaugguggccuug

SEQ ID NO: 564447 - RNA, 19 nt, Artificial Sequence
  Description of Artificial Sequence: Synthetic oligonucleotide
accucuuggaaggguggcc

SEQ ID NO: 564448 - RNA, 19 nt, Artificial Sequence
  Description of Artificial Sequence: Synthetic oligonucleotide
ugacaguggcuuccugagc

SEQ ID NO: 564449 - RNA, 19 nt, Artificial Sequence
  Description of Artificial Sequence: Synthetic oligonucleotide
ucucuacccaagagacuug

SEQ ID NO: 564450 - RNA, 19 nt, Artificial Sequence
  Description of Artificial Sequence: Synthetic oligonucleotide
ugugucuggcacagacggc

SEQ ID NO: 564451 - RNA, 19 nt, Artificial Sequence
  Description of Artificial Sequence: Synthetic oligonucleotide
auccagacgagaaaacgga

SEQ ID NO: 564452 - RNA, 19 nt, Artificial Sequence
  Description of Artificial Sequence: Synthetic oligonucleotide
ggcaguacaaaguuguugu

SEQ ID NO: 564453 - RNA, 19 nt, Artificial Sequence
  Description of Artificial Sequence: Synthetic oligonucleotide
auaucauaggguagucucu

SEQ ID NO: 564454 - RNA, 19 nt, Artificial Sequence
  Description of Artificial Sequence: Synthetic oligonucleotide
ggauauugccugcuuuaag

SEQ ID NO: 564455 - RNA, 19 nt, Artificial Sequence
  Description of Artificial Sequence: Synthetic oligonucleotide
aacggaagacagaguuccg

SEQ ID NO: 564456 - RNA, 19 nt, Artificial Sequence
  Description of Artificial Sequence: Synthetic oligonucleotide
uaagacgauuuaugacuaa

SEQ ID NO: 564457 - RNA, 19 nt, Artificial Sequence
  Description of Artificial Sequence: Synthetic oligonucleotide
gaugcacauaaguuacugu

SEQ ID NO: 564458 - RNA, 19 nt, Artificial Sequence
  Description of Artificial Sequence: Synthetic oligonucleotide
acauaucauaggguagucu

SEQ ID NO: 564459 - RNA, 19 nt, Artificial Sequence
  Description of Artificial Sequence: Synthetic oligonucleotide
agacuugaguacuucuauu

SEQ ID NO: 564460 - RNA, 19 nt, Artificial Sequence
  Description of Artificial Sequence: Synthetic oligonucleotide
cugagcuaugagacaaauc

SEQ ID NO: 564461 - RNA, 19 nt, Artificial Sequence
  Description of Artificial Sequence: Synthetic oligonucleotide
auugacucguaagcguuca

SEQ ID NO: 564462 - RNA, 19 nt, Artificial Sequence
  Description of Artificial Sequence: Synthetic oligonucleotide
ucagccuaucauucacagu

SEQ ID NO: 564463 - RNA, 19 nt, Artificial Sequence
  Description of Artificial Sequence: Synthetic oligonucleotide
ccagacgagaaaacggaag

SEQ ID NO: 564464 - RNA, 19 nt, Artificial Sequence
  Description of Artificial Sequence: Synthetic oligonucleotide
ccuugcuauauuuagcaca

SEQ ID NO: 564465 - RNA, 19 nt, Artificial Sequence
  Description of Artificial Sequence: Synthetic oligonucleotide
accuaugcuucucuccuaa

SEQ ID NO: 564466 - RNA, 19 nt, Artificial Sequence
  Description of Artificial Sequence: Synthetic oligonucleotide
uggauauugccugcuuuaa

SEQ ID NO: 564467 - RNA, 19 nt, Artificial Sequence
  Description of Artificial Sequence: Synthetic oligonucleotide
caggaaccgugacaguggc

SEQ ID NO: 564468 - RNA, 19 nt, Artificial Sequence
  Description of Artificial Sequence: Synthetic oligonucleotide
caaagcuaaccucuuggaa

SEQ ID NO: 564469 - RNA, 19 nt, Artificial Sequence
  Description of Artificial Sequence: Synthetic oligonucleotide
gauaugagaagggagcauu

SEQ ID NO: 564470 - RNA, 19 nt, Artificial Sequence
  Description of Artificial Sequence: Synthetic oligonucleotide
ggguacauuguaauucuug

SEQ ID NO: 564471 - RNA, 19 nt, Artificial Sequence
  Description of Artificial Sequence: Synthetic oligonucleotide
aacacaugguggccuugau

SEQ ID NO: 564472 - RNA, 19 nt, Artificial Sequence
  Description of Artificial Sequence: Synthetic oligonucleotide
guggauauugccugcuuua

SEQ ID NO: 564473 - RNA, 19 nt, Artificial Sequence
  Description of Artificial Sequence: Synthetic oligonucleotide
cacaauugguagagcagca

SEQ ID NO: 564474 - RNA, 19 nt, Artificial Sequence
  Description of Artificial Sequence: Synthetic oligonucleotide
agaucacuagagaacugga

SEQ ID NO: 564475 - RNA, 19 nt, Artificial Sequence
  Description of Artificial Sequence: Synthetic oligonucleotide
gcuaugagacaaaucaauc

SEQ ID NO: 564476 - RNA, 19 nt, Artificial Sequence
  Description of Artificial Sequence: Synthetic oligonucleotide
uggaauggccaggagugaa

SEQ ID NO: 564477 - RNA, 19 nt, Artificial Sequence
  Description of Artificial Sequence: Synthetic oligonucleotide
gacauaucauaggguaguc

SEQ ID NO: 564478 - RNA, 19 nt, Artificial Sequence
  Description of Artificial Sequence: Synthetic oligonucleotide
aucaacagauucauacgau

SEQ ID NO: 564479 - RNA, 19 nt, Artificial Sequence
  Description of Artificial Sequence: Synthetic oligonucleotide
ccgauggucccuuuggcag

SEQ ID NO: 564480 - RNA, 19 nt, Artificial Sequence
  Description of Artificial Sequence: Synthetic oligonucleotide
acuaggauuuuggguggag

SEQ ID NO: 564481 - RNA, 19 nt, Artificial Sequence
  Description of Artificial Sequence: Synthetic oligonucleotide
ccaucuaacucauuugaga

SEQ ID NO: 564482 - RNA, 19 nt, Artificial Sequence
  Description of Artificial Sequence: Synthetic oligonucleotide
gguaaguccccacuggcaa

SEQ ID NO: 564483 - RNA, 19 nt, Artificial Sequence
  Description of Artificial Sequence: Synthetic oligonucleotide
ccaagaugcacauaaguua

SEQ ID NO: 564484 - RNA, 19 nt, Artificial Sequence
  Description of Artificial Sequence: Synthetic oligonucleotide
gcaaggaguaguguguaug

SEQ ID NO: 564485 - RNA, 19 nt, Artificial Sequence
  Description of Artificial Sequence: Synthetic oligonucleotide
aucagguaucucuccacua

SEQ ID NO: 564486 - RNA, 19 nt, Artificial Sequence
  Description of Artificial Sequence: Synthetic oligonucleotide
guguagacacagauucagc

SEQ ID NO: 564487 - RNA, 19 nt, Artificial Sequence
  Description of Artificial Sequence: Synthetic oligonucleotide
acugagcuaugagacaaau

SEQ ID NO: 564488 - RNA, 19 nt, Artificial Sequence
  Description of Artificial Sequence: Synthetic oligonucleotide
uucuauagugcugcucuuu

SEQ ID NO: 564489 - RNA, 19 nt, Artificial Sequence
  Description of Artificial Sequence: Synthetic oligonucleotide
cucugaugcagagguacug

SEQ ID NO: 564490 - RNA, 19 nt, Artificial Sequence
  Description of Artificial Sequence: Synthetic oligonucleotide
caucggccuccauagucag

SEQ ID NO: 564491 - RNA, 19 nt, Artificial Sequence
  Description of Artificial Sequence: Synthetic oligonucleotide
cuuuggcaguggauaugag

SEQ ID NO: 564492 - RNA, 19 nt, Artificial Sequence
  Description of Artificial Sequence: Synthetic oligonucleotide
caagagacuugaguacuuc

SEQ ID NO: 564493 - RNA, 19 nt, Artificial Sequence
  Description of Artificial Sequence: Synthetic oligonucleotide
ggugggugaauguuaggga

SEQ ID NO: 564494 - RNA, 19 nt, Artificial Sequence
  Description of Artificial Sequence: Synthetic oligonucleotide
guaucucuccacuaggauu

SEQ ID NO: 564495 - RNA, 19 nt, Artificial Sequence
  Description of Artificial Sequence: Synthetic oligonucleotide
agagugcucagugaugguu

SEQ ID NO: 564496 - RNA, 19 nt, Artificial Sequence
  Description of Artificial Sequence: Synthetic oligonucleotide
acucguaagcguucagcuu

SEQ ID NO: 564497 - RNA, 19 nt, Artificial Sequence
  Description of Artificial Sequence: Synthetic oligonucleotide
accaaggauccaugugaca

SEQ ID NO: 564498 - RNA, 19 nt, Artificial Sequence
  Description of Artificial Sequence: Synthetic oligonucleotide
cuguuauaaggaagaacua

SEQ ID NO: 564499 - RNA, 19 nt, Artificial Sequence
  Description of Artificial Sequence: Synthetic oligonucleotide
acacaugguggccuugauu

SEQ ID NO: 564500 - RNA, 19 nt, Artificial Sequence
  Description of Artificial Sequence: Synthetic oligonucleotide
cuacccaagagacuugagu

SEQ ID NO: 564501 - RNA, 19 nt, Artificial Sequence
  Description of Artificial Sequence: Synthetic oligonucleotide
acaauugguagagcagcaa

SEQ ID NO: 564502 - RNA, 19 nt, Artificial Sequence
  Description of Artificial Sequence: Synthetic oligonucleotide
gagccaagaugcacauaag

SEQ ID NO: 564503 - RNA, 19 nt, Artificial Sequence
  Description of Artificial Sequence: Synthetic oligonucleotide
caaggaguaguguguaugu

SEQ ID NO: 564504 - RNA, 19 nt, Artificial Sequence
  Description of Artificial Sequence: Synthetic oligonucleotide
gcaguggauaugagaaggg

SEQ ID NO: 564505 - RNA, 19 nt, Artificial Sequence
  Description of Artificial Sequence: Synthetic oligonucleotide
gaccacagagucagguuca

SEQ ID NO: 564506 - RNA, 19 nt, Artificial Sequence
  Description of Artificial Sequence: Synthetic oligonucleotide
aguuugugcaucagccuau

SEQ ID NO: 564507 - RNA, 19 nt, Artificial Sequence
  Description of Artificial Sequence: Synthetic oligonucleotide
ccagaucucuacccaagag

SEQ ID NO: 564508 - RNA, 19 nt, Artificial Sequence
  Description of Artificial Sequence: Synthetic oligonucleotide
agcuaaccucuuggaaggg

SEQ ID NO: 564509 - RNA, 19 nt, Artificial Sequence
  Description of Artificial Sequence: Synthetic oligonucleotide
cacuccuuugggaauggaa

SEQ ID NO: 564510 - RNA, 19 nt, Artificial Sequence
  Description of Artificial Sequence: Synthetic oligonucleotide
gguuaacagaugaaacgga

SEQ ID NO: 564511 - RNA, 19 nt, Artificial Sequence
  Description of Artificial Sequence: Synthetic oligonucleotide
cucguaagcguucagcuuu

SEQ ID NO: 564512 - RNA, 19 nt, Artificial Sequence
  Description of Artificial Sequence: Synthetic oligonucleotide
agaguuccgauuagccgcu

SEQ ID NO: 564513 - RNA, 19 nt, Artificial Sequence
  Description of Artificial Sequence: Synthetic oligonucleotide
guaagcguucagcuuugaa

SEQ ID NO: 564514 - RNA, 19 nt, Artificial Sequence
  Description of Artificial Sequence: Synthetic oligonucleotide
acggcaacucuggcaguac

SEQ ID NO: 564515 - RNA, 19 nt, Artificial Sequence
  Description of Artificial Sequence: Synthetic oligonucleotide
gagcauuuggagauggcau

SEQ ID NO: 564516 - RNA, 19 nt, Artificial Sequence
  Description of Artificial Sequence: Synthetic oligonucleotide
gccaucuaacucauuugag

SEQ ID NO: 564517 - RNA, 19 nt, Artificial Sequence
  Description of Artificial Sequence: Synthetic oligonucleotide
gagcugaucagcaacuauu

SEQ ID NO: 564518 - RNA, 19 nt, Artificial Sequence
  Description of Artificial Sequence: Synthetic oligonucleotide
ggaggaauccagacgagaa

SEQ ID NO: 564519 - RNA, 19 nt, Artificial Sequence
  Description of Artificial Sequence: Synthetic oligonucleotide
caagguugagacauaucau

SEQ ID NO: 564520 - RNA, 19 nt, Artificial Sequence
  Description of Artificial Sequence: Synthetic oligonucleotide
guacuucuauuaaggcaac

SEQ ID NO: 564521 - RNA, 19 nt, Artificial Sequence
  Description of Artificial Sequence: Synthetic oligonucleotide
uugcuauauuuagcacaga

SEQ ID NO: 564522 - RNA, 19 nt, Artificial Sequence
  Description of Artificial Sequence: Synthetic oligonucleotide
ggauaaggccaaaccgagc

SEQ ID NO: 564523 - RNA, 19 nt, Artificial Sequence
  Description of Artificial Sequence: Synthetic oligonucleotide
ccagaccagaaucuagcuc

SEQ ID NO: 564524 - RNA, 19 nt, Artificial Sequence
  Description of Artificial Sequence: Synthetic oligonucleotide
ccuccgggaaagaucauca

SEQ ID NO: 564525 - RNA, 19 nt, Artificial Sequence
  Description of Artificial Sequence: Synthetic oligonucleotide
agauucccuuaaucauaaa

SEQ ID NO: 564526 - RNA, 19 nt, Artificial Sequence
  Description of Artificial Sequence: Synthetic oligonucleotide
gaccaccuuucuucacauc

SEQ ID NO: 564527 - RNA, 19 nt, Artificial Sequence
  Description of Artificial Sequence: Synthetic oligonucleotide
agaccagaaucuagcuccu

SEQ ID NO: 564528 - RNA, 19 nt, Artificial Sequence
  Description of Artificial Sequence: Synthetic oligonucleotide
ccugagaauccaguagaac

SEQ ID NO: 564529 - RNA, 19 nt, Artificial Sequence
  Description of Artificial Sequence: Synthetic oligonucleotide
aaguugcuugaaacaggua

SEQ ID NO: 564530 - RNA, 19 nt, Artificial Sequence
  Description of Artificial Sequence: Synthetic oligonucleotide
gaccuaugcuucucuccua

SEQ ID NO: 564531 - RNA, 19 nt, Artificial Sequence
  Description of Artificial Sequence: Synthetic oligonucleotide
cucuacccacaauacuucu

SEQ ID NO: 564532 - RNA, 19 nt, Artificial Sequence
  Description of Artificial Sequence: Synthetic oligonucleotide
gcaacacaauugguagagc

SEQ ID NO: 564533 - RNA, 19 nt, Artificial Sequence
  Description of Artificial Sequence: Synthetic oligonucleotide
gaucucuacccaagagacu

SEQ ID NO: 564534 - RNA, 19 nt, Artificial Sequence
  Description of Artificial Sequence: Synthetic oligonucleotide
ccaucggccuccauaguca

SEQ ID NO: 564535 - RNA, 19 nt, Artificial Sequence
  Description of Artificial Sequence: Synthetic oligonucleotide
acggaauuucauagagauu

SEQ ID NO: 564536 - RNA, 19 nt, Artificial Sequence
  Description of Artificial Sequence: Synthetic oligonucleotide
gguaucucuccacuaggau

SEQ ID NO: 564537 - RNA, 19 nt, Artificial Sequence
  Description of Artificial Sequence: Synthetic oligonucleotide
accccaguaggagcuucug

SEQ ID NO: 564538 - RNA, 19 nt, Artificial Sequence
  Description of Artificial Sequence: Synthetic oligonucleotide
caauuucaaucagguaucu

SEQ ID NO: 564539 - RNA, 19 nt, Artificial Sequence
  Description of Artificial Sequence: Synthetic oligonucleotide
accgugacaguggcuuccu

SEQ ID NO: 564540 - RNA, 19 nt, Artificial Sequence
  Description of Artificial Sequence: Synthetic oligonucleotide
gugcugcucuuuccuaaaa

SEQ ID NO: 564541 - RNA, 19 nt, Artificial Sequence
  Description of Artificial Sequence: Synthetic oligonucleotide
ccccaguaggagcuucugc

SEQ ID NO: 564542 - RNA, 19 nt, Artificial Sequence
  Description of Artificial Sequence: Synthetic oligonucleotide
gccaagaugcacauaaguu

SEQ ID NO: 564543 - RNA, 19 nt, Artificial Sequence
  Description of Artificial Sequence: Synthetic oligonucleotide
gaguaguguguaugucaau

SEQ ID NO: 564544 - RNA, 19 nt, Artificial Sequence
  Description of Artificial Sequence: Synthetic oligonucleotide
ccuaugcuucucuccuaac

SEQ ID NO: 564545 - RNA, 19 nt, Artificial Sequence
  Description of Artificial Sequence: Synthetic oligonucleotide
gcaacucuggcaguacaaa

SEQ ID NO: 564546 - RNA, 19 nt, Artificial Sequence
  Description of Artificial Sequence: Synthetic oligonucleotide
ggcaacucuggcaguacaa

SEQ ID NO: 564547 - RNA, 19 nt, Artificial Sequence
  Description of Artificial Sequence: Synthetic oligonucleotide
guacagcuccaggacucuc

SEQ ID NO: 564548 - RNA, 19 nt, Artificial Sequence
  Description of Artificial Sequence: Synthetic oligonucleotide
gagcuucuacacucaguuu

SEQ ID NO: 564549 - RNA, 19 nt, Artificial Sequence
  Description of Artificial Sequence: Synthetic oligonucleotide
agcccacccuaagcuuggg

SEQ ID NO: 564550 - RNA, 19 nt, Artificial Sequence
  Description of Artificial Sequence: Synthetic oligonucleotide
guaccccucuuuuccugua

SEQ ID NO: 564551 - RNA, 19 nt, Artificial Sequence
  Description of Artificial Sequence: Synthetic oligonucleotide
caguaggagcuucugccau

SEQ ID NO: 564552 - RNA, 19 nt, Artificial Sequence
  Description of Artificial Sequence: Synthetic oligonucleotide
aggaaccgugacaguggcu

SEQ ID NO: 564553 - RNA, 19 nt, Artificial Sequence
  Description of Artificial Sequence: Synthetic oligonucleotide
cacuaggauuuugggugga

SEQ ID NO: 564554 - RNA, 19 nt, Artificial Sequence
  Description of Artificial Sequence: Synthetic oligonucleotide
gaaauccgauggucccuuu

SEQ ID NO: 564555 - RNA, 19 nt, Artificial Sequence
  Description of Artificial Sequence: Synthetic oligonucleotide
aaccuccgggaaagaucau

SEQ ID NO: 564556 - RNA, 19 nt, Artificial Sequence
  Description of Artificial Sequence: Synthetic oligonucleotide
cagugagcuacagccacau

SEQ ID NO: 564557 - RNA, 19 nt, Artificial Sequence
  Description of Artificial Sequence: Synthetic oligonucleotide
gaguuccgauuagccgcuc

SEQ ID NO: 564558 - RNA, 19 nt, Artificial Sequence
  Description of Artificial Sequence: Synthetic oligonucleotide
ccagaucaguguagacaca

SEQ ID NO: 564559 - RNA, 19 nt, Artificial Sequence
  Description of Artificial Sequence: Synthetic oligonucleotide
cuggcaguacaaaguuguu

SEQ ID NO: 564560 - RNA, 19 nt, Artificial Sequence
  Description of Artificial Sequence: Synthetic oligonucleotide
gcugaucagcaacuauuuu

SEQ ID NO: 564561 - RNA, 19 nt, Artificial Sequence
  Description of Artificial Sequence: Synthetic oligonucleotide
gcuaaccucuuggaagggu

SEQ ID NO: 564562 - RNA, 19 nt, Artificial Sequence
  Description of Artificial Sequence: Synthetic oligonucleotide
ggccugguaaguccccacu

SEQ ID NO: 564563 - RNA, 19 nt, Artificial Sequence
  Description of Artificial Sequence: Synthetic oligonucleotide
ccauauuccuugcuauauu

SEQ ID NO: 564564 - RNA, 19 nt, Artificial Sequence
  Description of Artificial Sequence: Synthetic oligonucleotide
ccaagagacuugaguacuu

SEQ ID NO: 564565 - RNA, 19 nt, Artificial Sequence
  Description of Artificial Sequence: Synthetic oligonucleotide
gaccagaaucuagcuccuu

SEQ ID NO: 564566 - RNA, 19 nt, Artificial Sequence
  Description of Artificial Sequence: Synthetic oligonucleotide
ccgugacaguggcuuccug

SEQ ID NO: 564567 - RNA, 19 nt, Artificial Sequence
  Description of Artificial Sequence: Synthetic oligonucleotide
cugcacaacuugccauauu

SEQ ID NO: 564568 - RNA, 19 nt, Artificial Sequence
  Description of Artificial Sequence: Synthetic oligonucleotide
ggucccuuuggcaguggau

SEQ ID NO: 564569 - RNA, 19 nt, Artificial Sequence
  Description of Artificial Sequence: Synthetic oligonucleotide
cggcaacucuggcaguaca

SEQ ID NO: 564570 - RNA, 19 nt, Artificial Sequence
  Description of Artificial Sequence: Synthetic oligonucleotide
ccugcacaacuugccauau

SEQ ID NO: 564571 - RNA, 19 nt, Artificial Sequence
  Description of Artificial Sequence: Synthetic oligonucleotide
uguuguuuaaauaugaggg

SEQ ID NO: 564572 - RNA, 19 nt, Artificial Sequence
  Description of Artificial Sequence: Synthetic oligonucleotide
aucaguuuaacuuaggguc

SEQ ID NO: 564573 - RNA, 19 nt, Artificial Sequence
  Description of Artificial Sequence: Synthetic oligonucleotide
gugagauucacuuauaggg

SEQ ID NO: 564574 - RNA, 19 nt, Artificial Sequence
  Description of Artificial Sequence: Synthetic oligonucleotide
uagguuaucaccaagauuu

SEQ ID NO: 564575 - RNA, 19 nt, Artificial Sequence
  Description of Artificial Sequence: Synthetic oligonucleotide
auagggacuauucuaaugg

SEQ ID NO: 564576 - RNA, 19 nt, Artificial Sequence
  Description of Artificial Sequence: Synthetic oligonucleotide
aguuauuuccucuauccgg

SEQ ID NO: 564577 - RNA, 19 nt, Artificial Sequence
  Description of Artificial Sequence: Synthetic oligonucleotide
cauaauaaaaguacuguug

SEQ ID NO: 564578 - RNA, 19 nt, Artificial Sequence
  Description of Artificial Sequence: Synthetic oligonucleotide
uuuggaggcagauauaagc

SEQ ID NO: 564579 - RNA, 19 nt, Artificial Sequence
  Description of Artificial Sequence: Synthetic oligonucleotide
aaucaguuuaacuuagggu

SEQ ID NO: 564580 - RNA, 19 nt, Artificial Sequence
  Description of Artificial Sequence: Synthetic oligonucleotide
aauaaaaguacuguuggga

SEQ ID NO: 564581 - RNA, 19 nt, Artificial Sequence
  Description of Artificial Sequence: Synthetic oligonucleotide
uuguuuuaugucuagaccu

SEQ ID NO: 564582 - RNA, 19 nt, Artificial Sequence
  Description of Artificial Sequence: Synthetic oligonucleotide
aauggccucaaucuugcgg

SEQ ID NO: 564583 - RNA, 19 nt, Artificial Sequence
  Description of Artificial Sequence: Synthetic oligonucleotide
auaaaaguacuguugggag

SEQ ID NO: 564584 - RNA, 19 nt, Artificial Sequence
  Description of Artificial Sequence: Synthetic oligonucleotide
acuagaguucuccauggcc

SEQ ID NO: 564585 - RNA, 19 nt, Artificial Sequence
  Description of Artificial Sequence: Synthetic oligonucleotide
aaauaugagggguguuggc

SEQ ID NO: 564586 - RNA, 19 nt, Artificial Sequence
  Description of Artificial Sequence: Synthetic oligonucleotide
uuuguuguuuaaauaugag

SEQ ID NO: 564587 - RNA, 19 nt, Artificial Sequence
  Description of Artificial Sequence: Synthetic oligonucleotide
ucaccaagauuuaaugggg

SEQ ID NO: 564588 - RNA, 19 nt, Artificial Sequence
  Description of Artificial Sequence: Synthetic oligonucleotide
ucuaaucaaccacuucugg

SEQ ID NO: 564589 - RNA, 19 nt, Artificial Sequence
  Description of Artificial Sequence: Synthetic oligonucleotide
aagugagauucacuuauag

SEQ ID NO: 564590 - RNA, 19 nt, Artificial Sequence
  Description of Artificial Sequence: Synthetic oligonucleotide
ugccauacugccuacaggc

SEQ ID NO: 564591 - RNA, 19 nt, Artificial Sequence
  Description of Artificial Sequence: Synthetic oligonucleotide
augcauuauacaaagaaag

SEQ ID NO: 564592 - RNA, 19 nt, Artificial Sequence
  Description of Artificial Sequence: Synthetic oligonucleotide
uguuauaagcuugagacau

SEQ ID NO: 564593 - RNA, 19 nt, Artificial Sequence
  Description of Artificial Sequence: Synthetic oligonucleotide
ucuuacgaagcucuccuag

SEQ ID NO: 564594 - RNA, 19 nt, Artificial Sequence
  Description of Artificial Sequence: Synthetic oligonucleotide
ugaacacaccaucaguucc

SEQ ID NO: 564595 - RNA, 19 nt, Artificial Sequence
  Description of Artificial Sequence: Synthetic oligonucleotide
uuaaauaugagggguguug

SEQ ID NO: 564596 - RNA, 19 nt, Artificial Sequence
  Description of Artificial Sequence: Synthetic oligonucleotide
uaaauaugagggguguugg

SEQ ID NO: 564597 - RNA, 19 nt, Artificial Sequence
  Description of Artificial Sequence: Synthetic oligonucleotide
ugagauucacuuauaggga

SEQ ID NO: 564598 - RNA, 19 nt, Artificial Sequence
  Description of Artificial Sequence: Synthetic oligonucleotide
caggcugacauauuuauug

SEQ ID NO: 564599 - RNA, 19 nt, Artificial Sequence
  Description of Artificial Sequence: Synthetic oligonucleotide
cacgagaucagcagcaucc

SEQ ID NO: 564600 - RNA, 19 nt, Artificial Sequence
  Description of Artificial Sequence: Synthetic oligonucleotide
aacaagagccgguggcacc

SEQ ID NO: 564601 - RNA, 19 nt, Artificial Sequence
  Description of Artificial Sequence: Synthetic oligonucleotide
auuuccucuauccgguugg

SEQ ID NO: 564602 - RNA, 19 nt, Artificial Sequence
  Description of Artificial Sequence: Synthetic oligonucleotide
uuuaugucuagaccucuug

SEQ ID NO: 564603 - RNA, 19 nt, Artificial Sequence
  Description of Artificial Sequence: Synthetic oligonucleotide
aggacaaucugacagugug

SEQ ID NO: 564604 - RNA, 19 nt, Artificial Sequence
  Description of Artificial Sequence: Synthetic oligonucleotide
ugagaauccaucuccuggc

SEQ ID NO: 564605 - RNA, 19 nt, Artificial Sequence
  Description of Artificial Sequence: Synthetic oligonucleotide
augcuaaucaguuuaacuu

SEQ ID NO: 564606 - RNA, 19 nt, Artificial Sequence
  Description of Artificial Sequence: Synthetic oligonucleotide
uucauuccauaauaaaagu

SEQ ID NO: 564607 - RNA, 19 nt, Artificial Sequence
  Description of Artificial Sequence: Synthetic oligonucleotide
uauagggacuauucuaaug

SEQ ID NO: 564608 - RNA, 19 nt, Artificial Sequence
  Description of Artificial Sequence: Synthetic oligonucleotide
ucacaucuaaucaaccacu

SEQ ID NO: 564609 - RNA, 19 nt, Artificial Sequence
  Description of Artificial Sequence: Synthetic oligonucleotide
ucacuagaguucuccaugg

SEQ ID NO: 564610 - RNA, 19 nt, Artificial Sequence
  Description of Artificial Sequence: Synthetic oligonucleotide
aaugcauuauacaaagaaa

SEQ ID NO: 564611 - RNA, 19 nt, Artificial Sequence
  Description of Artificial Sequence: Synthetic oligonucleotide
uagcuuuaaccuuggaugc

SEQ ID NO: 564612 - RNA, 19 nt, Artificial Sequence
  Description of Artificial Sequence: Synthetic oligonucleotide
aauaugagggguguuggcu

SEQ ID NO: 564613 - RNA, 19 nt, Artificial Sequence
  Description of Artificial Sequence: Synthetic oligonucleotide
uugggagaaacaagagccg

SEQ ID NO: 564614 - RNA, 19 nt, Artificial Sequence
  Description of Artificial Sequence: Synthetic oligonucleotide
ucaguuuaacuuagggucu

SEQ ID NO: 564615 - RNA, 19 nt, Artificial Sequence
  Description of Artificial Sequence: Synthetic oligonucleotide
gaucuauaugcucagaacu

SEQ ID NO: 564616 - RNA, 19 nt, Artificial Sequence
  Description of Artificial Sequence: Synthetic oligonucleotide
aucacuagaguucuccaug

SEQ ID NO: 564617 - RNA, 19 nt, Artificial Sequence
  Description of Artificial Sequence: Synthetic oligonucleotide
ucacuuauagggacuauuc

SEQ ID NO: 564618 - RNA, 19 nt, Artificial Sequence
  Description of Artificial Sequence: Synthetic oligonucleotide
uaaaaguacuguugggaga

SEQ ID NO: 564619 - RNA, 19 nt, Artificial Sequence
  Description of Artificial Sequence: Synthetic oligonucleotide
cuuaccuguuggcacaugg

SEQ ID NO: 564620 - RNA, 19 nt, Artificial Sequence
  Description of Artificial Sequence: Synthetic oligonucleotide
aaguacuguugggagaaac

SEQ ID NO: 564621 - RNA, 19 nt, Artificial Sequence
  Description of Artificial Sequence: Synthetic oligonucleotide
ugagauaaggucucaguau

SEQ ID NO: 564622 - RNA, 19 nt, Artificial Sequence
  Description of Artificial Sequence: Synthetic oligonucleotide
cuauucuaauggaaaacug

SEQ ID NO: 564623 - RNA, 19 nt, Artificial Sequence
  Description of Artificial Sequence: Synthetic oligonucleotide
aaauucuuuaugggaugcg

SEQ ID NO: 564624 - RNA, 19 nt, Artificial Sequence
  Description of Artificial Sequence: Synthetic oligonucleotide
uagaccugaacccaugauc

SEQ ID NO: 564625 - RNA, 19 nt, Artificial Sequence
  Description of Artificial Sequence: Synthetic oligonucleotide
ucuacucuuuucuagggau

SEQ ID NO: 564626 - RNA, 19 nt, Artificial Sequence
  Description of Artificial Sequence: Synthetic oligonucleotide
ucagcgaucugugucagcc

SEQ ID NO: 564627 - RNA, 19 nt, Artificial Sequence
  Description of Artificial Sequence: Synthetic oligonucleotide
gagauucacuuauagggac

SEQ ID NO: 564628 - RNA, 19 nt, Artificial Sequence
  Description of Artificial Sequence: Synthetic oligonucleotide
uucuaauggaaaacugcga

SEQ ID NO: 564629 - RNA, 19 nt, Artificial Sequence
  Description of Artificial Sequence: Synthetic oligonucleotide
caagcaggguuauugagug

SEQ ID NO: 564630 - RNA, 19 nt, Artificial Sequence
  Description of Artificial Sequence: Synthetic oligonucleotide
aaagccacucuauuuggaa

SEQ ID NO: 564631 - RNA, 19 nt, Artificial Sequence
  Description of Artificial Sequence: Synthetic oligonucleotide
acuuauagggacuauucua

SEQ ID NO: 564632 - RNA, 19 nt, Artificial Sequence
  Description of Artificial Sequence: Synthetic oligonucleotide
uguuuuaugucuagaccuc

SEQ ID NO: 564633 - RNA, 19 nt, Artificial Sequence
  Description of Artificial Sequence: Synthetic oligonucleotide
uuugagagucuguuauaag

SEQ ID NO: 564634 - RNA, 19 nt, Artificial Sequence
  Description of Artificial Sequence: Synthetic oligonucleotide
uucgcuucagacugggcag

SEQ ID NO: 564635 - RNA, 19 nt, Artificial Sequence
  Description of Artificial Sequence: Synthetic oligonucleotide
aaacaagagccgguggcac

SEQ ID NO: 564636 - RNA, 19 nt, Artificial Sequence
  Description of Artificial Sequence: Synthetic oligonucleotide
aagcuugagacauuagguu

SEQ ID NO: 564637 - RNA, 19 nt, Artificial Sequence
  Description of Artificial Sequence: Synthetic oligonucleotide
uuggcaagcaggguuauug

SEQ ID NO: 564638 - RNA, 19 nt, Artificial Sequence
  Description of Artificial Sequence: Synthetic oligonucleotide
ugcuaaucaguuuaacuua

SEQ ID NO: 564639 - RNA, 19 nt, Artificial Sequence
  Description of Artificial Sequence: Synthetic oligonucleotide
uugaucuucgugcuuucca

SEQ ID NO: 564640 - RNA, 19 nt, Artificial Sequence
  Description of Artificial Sequence: Synthetic oligonucleotide
gucacaucuaaucaaccac

SEQ ID NO: 564641 - RNA, 19 nt, Artificial Sequence
  Description of Artificial Sequence: Synthetic oligonucleotide
cuugcaucaggcuaguaca

SEQ ID NO: 564642 - RNA, 19 nt, Artificial Sequence
  Description of Artificial Sequence: Synthetic oligonucleotide
auaggcuaggguuuccuug

SEQ ID NO: 564643 - RNA, 19 nt, Artificial Sequence
  Description of Artificial Sequence: Synthetic oligonucleotide
uggaccacgagaucagcag

SEQ ID NO: 564644 - RNA, 19 nt, Artificial Sequence
  Description of Artificial Sequence: Synthetic oligonucleotide
uuagggucuucaaaccuga

SEQ ID NO: 564645 - RNA, 19 nt, Artificial Sequence
  Description of Artificial Sequence: Synthetic oligonucleotide
aggcugacauauuuauugg

SEQ ID NO: 564646 - RNA, 19 nt, Artificial Sequence
  Description of Artificial Sequence: Synthetic oligonucleotide
accaaggauccuuucguuc

SEQ ID NO: 564647 - RNA, 19 nt, Artificial Sequence
  Description of Artificial Sequence: Synthetic oligonucleotide
cuuauagggacuauucuaa

SEQ ID NO: 564648 - RNA, 19 nt, Artificial Sequence
  Description of Artificial Sequence: Synthetic oligonucleotide
agggagaacagauaggcua

SEQ ID NO: 564649 - RNA, 19 nt, Artificial Sequence
  Description of Artificial Sequence: Synthetic oligonucleotide
acaucuaaucaaccacuuc

SEQ ID NO: 564650 - RNA, 19 nt, Artificial Sequence
  Description of Artificial Sequence: Synthetic oligonucleotide
auuagguuaucaccaagau

SEQ ID NO: 564651 - RNA, 19 nt, Artificial Sequence
  Description of Artificial Sequence: Synthetic oligonucleotide
aguucagcgaucuguguca

SEQ ID NO: 564652 - RNA, 19 nt, Artificial Sequence
  Description of Artificial Sequence: Synthetic oligonucleotide
aaugggguuccucgguuug

SEQ ID NO: 564653 - RNA, 19 nt, Artificial Sequence
  Description of Artificial Sequence: Synthetic oligonucleotide
cugagaacccgagaggugg

SEQ ID NO: 564654 - RNA, 19 nt, Artificial Sequence
  Description of Artificial Sequence: Synthetic oligonucleotide
gaacccgagagguggagag

SEQ ID NO: 564655 - RNA, 19 nt, Artificial Sequence
  Description of Artificial Sequence: Synthetic oligonucleotide
gagaucagcagcauccacc

SEQ ID NO: 564656 - RNA, 19 nt, Artificial Sequence
  Description of Artificial Sequence: Synthetic oligonucleotide
aguguagaagcucacugau

SEQ ID NO: 564657 - RNA, 19 nt, Artificial Sequence
  Description of Artificial Sequence: Synthetic oligonucleotide
agacauuagguuaucacca

SEQ ID NO: 564658 - RNA, 19 nt, Artificial Sequence
  Description of Artificial Sequence: Synthetic oligonucleotide
cuuggaggucacaacgagg

SEQ ID NO: 564659 - RNA, 19 nt, Artificial Sequence
  Description of Artificial Sequence: Synthetic oligonucleotide
ugggagaaacaagagccgg

SEQ ID NO: 564660 - RNA, 19 nt, Artificial Sequence
  Description of Artificial Sequence: Synthetic oligonucleotide
uugccauacugccuacagg

SEQ ID NO: 564661 - RNA, 19 nt, Artificial Sequence
  Description of Artificial Sequence: Synthetic oligonucleotide
uauuuggaaggccaauuuu

SEQ ID NO: 564662 - RNA, 19 nt, Artificial Sequence
  Description of Artificial Sequence: Synthetic oligonucleotide
ucacuggucaaguuggcaa

SEQ ID NO: 564663 - RNA, 19 nt, Artificial Sequence
  Description of Artificial Sequence: Synthetic oligonucleotide
uaggcuaggguuuccuugc

SEQ ID NO: 564664 - RNA, 19 nt, Artificial Sequence
  Description of Artificial Sequence: Synthetic oligonucleotide
uguaucucacgcuccgcag

SEQ ID NO: 564665 - RNA, 19 nt, Artificial Sequence
  Description of Artificial Sequence: Synthetic oligonucleotide
gaaggugaucuguggaccc

SEQ ID NO: 564666 - RNA, 19 nt, Artificial Sequence
  Description of Artificial Sequence: Synthetic oligonucleotide
cuuuaugggaugcgguacc

SEQ ID NO: 564667 - RNA, 19 nt, Artificial Sequence
  Description of Artificial Sequence: Synthetic oligonucleotide
ugggaagguaggcacgaag

SEQ ID NO: 564668 - RNA, 19 nt, Artificial Sequence
  Description of Artificial Sequence: Synthetic oligonucleotide
acauuagguuaucaccaag

SEQ ID NO: 564669 - RNA, 19 nt, Artificial Sequence
  Description of Artificial Sequence: Synthetic oligonucleotide
ggaaccaaggauccuuucg

SEQ ID NO: 564670 - RNA, 19 nt, Artificial Sequence
  Description of Artificial Sequence: Synthetic oligonucleotide
cauuagguuaucaccaaga

SEQ ID NO: 564671 - RNA, 19 nt, Artificial Sequence
  Description of Artificial Sequence: Synthetic oligonucleotide
uccugcucgggauuuacug

SEQ ID NO: 564672 - RNA, 19 nt, Artificial Sequence
  Description of Artificial Sequence: Synthetic oligonucleotide
uuacugaguuauuuccucu

SEQ ID NO: 564673 - RNA, 19 nt, Artificial Sequence
  Description of Artificial Sequence: Synthetic oligonucleotide
uggacaggccagauacugg

SEQ ID NO: 564674 - RNA, 19 nt, Artificial Sequence
  Description of Artificial Sequence: Synthetic oligonucleotide
gacuauucuaauggaaaac

SEQ ID NO: 564675 - RNA, 19 nt, Artificial Sequence
  Description of Artificial Sequence: Synthetic oligonucleotide
gaucuguggacccugcaca

SEQ ID NO: 564676 - RNA, 19 nt, Artificial Sequence
  Description of Artificial Sequence: Synthetic oligonucleotide
ucgggauuuacugaguuau

SEQ ID NO: 564677 - RNA, 19 nt, Artificial Sequence
  Description of Artificial Sequence: Synthetic oligonucleotide
ugagggucaccugaaaaca

SEQ ID NO: 564678 - RNA, 19 nt, Artificial Sequence
  Description of Artificial Sequence: Synthetic oligonucleotide
uccgcagccuuccuggacc

SEQ ID NO: 564679 - RNA, 19 nt, Artificial Sequence
  Description of Artificial Sequence: Synthetic oligonucleotide
guaguguuucuuacgaagc

SEQ ID NO: 564680 - RNA, 19 nt, Artificial Sequence
  Description of Artificial Sequence: Synthetic oligonucleotide
accugaacccaugaucccc

SEQ ID NO: 564681 - RNA, 19 nt, Artificial Sequence
  Description of Artificial Sequence: Synthetic oligonucleotide
uaugggaugcgguaccccu

SEQ ID NO: 564682 - RNA, 19 nt, Artificial Sequence
  Description of Artificial Sequence: Synthetic oligonucleotide
uuauaagcuugagacauua

SEQ ID NO: 564683 - RNA, 19 nt, Artificial Sequence
  Description of Artificial Sequence: Synthetic oligonucleotide
gagauaaggucucaguaua

SEQ ID NO: 564684 - RNA, 19 nt, Artificial Sequence
  Description of Artificial Sequence: Synthetic oligonucleotide
cuugccauacugccuacag

SEQ ID NO: 564685 - RNA, 19 nt, Artificial Sequence
  Description of Artificial Sequence: Synthetic oligonucleotide
aggaucuauaugcucagaa

SEQ ID NO: 564686 - RNA, 19 nt, Artificial Sequence
  Description of Artificial Sequence: Synthetic oligonucleotide
caucuaaucaaccacuucu

SEQ ID NO: 564687 - RNA, 19 nt, Artificial Sequence
  Description of Artificial Sequence: Synthetic oligonucleotide
gcuaguacaggaaccaagg

SEQ ID NO: 564688 - RNA, 19 nt, Artificial Sequence
  Description of Artificial Sequence: Synthetic oligonucleotide
agcuugagacauuagguua

SEQ ID NO: 564689 - RNA, 19 nt, Artificial Sequence
  Description of Artificial Sequence: Synthetic oligonucleotide
uggucaaguuggcaagcag

SEQ ID NO: 564690 - RNA, 19 nt, Artificial Sequence
  Description of Artificial Sequence: Synthetic oligonucleotide
uggcgcuuaaucuggguca

SEQ ID NO: 564691 - RNA, 19 nt, Artificial Sequence
  Description of Artificial Sequence: Synthetic oligonucleotide
agauuuaaugggguuccuc

SEQ ID NO: 564692 - RNA, 19 nt, Artificial Sequence
  Description of Artificial Sequence: Synthetic oligonucleotide
ucuuuaugggaugcgguac

SEQ ID NO: 564693 - RNA, 19 nt, Artificial Sequence
  Description of Artificial Sequence: Synthetic oligonucleotide
gauaucuucuggacaggcc

SEQ ID NO: 564694 - RNA, 19 nt, Artificial Sequence
  Description of Artificial Sequence: Synthetic oligonucleotide
gaagcucacugauaucuuc

SEQ ID NO: 564695 - RNA, 19 nt, Artificial Sequence
  Description of Artificial Sequence: Synthetic oligonucleotide
acgaagugaaaagugagau

SEQ ID NO: 564696 - RNA, 19 nt, Artificial Sequence
  Description of Artificial Sequence: Synthetic oligonucleotide
auuugagagucuguuauaa

SEQ ID NO: 564697 - RNA, 19 nt, Artificial Sequence
  Description of Artificial Sequence: Synthetic oligonucleotide
gaacagauaggcuaggguu

SEQ ID NO: 564698 - RNA, 19 nt, Artificial Sequence
  Description of Artificial Sequence: Synthetic oligonucleotide
cugaaugauggugucacug

SEQ ID NO: 564699 - RNA, 19 nt, Artificial Sequence
  Description of Artificial Sequence: Synthetic oligonucleotide
uuaccuguuggcacaugga

SEQ ID NO: 564700 - RNA, 19 nt, Artificial Sequence
  Description of Artificial Sequence: Synthetic oligonucleotide
aaucaaccacuucuggcuu

SEQ ID NO: 564701 - RNA, 19 nt, Artificial Sequence
  Description of Artificial Sequence: Synthetic oligonucleotide
cuucaagcuggcucagugc

SEQ ID NO: 564702 - RNA, 19 nt, Artificial Sequence
  Description of Artificial Sequence: Synthetic oligonucleotide
uuauugaguguagaagcuc

SEQ ID NO: 564703 - RNA, 19 nt, Artificial Sequence
  Description of Artificial Sequence: Synthetic oligonucleotide
gaucuucgugcuuuccagc

SEQ ID NO: 564704 - RNA, 19 nt, Artificial Sequence
  Description of Artificial Sequence: Synthetic oligonucleotide
gcagauauaagcccuucug

SEQ ID NO: 564705 - RNA, 19 nt, Artificial Sequence
  Description of Artificial Sequence: Synthetic oligonucleotide
aucuucgugcuuuccagcu

SEQ ID NO: 564706 - RNA, 19 nt, Artificial Sequence
  Description of Artificial Sequence: Synthetic oligonucleotide
gcccuuguuagcuuuaacc

SEQ ID NO: 564707 - RNA, 19 nt, Artificial Sequence
  Description of Artificial Sequence: Synthetic oligonucleotide
cuucgcuucagacugggca

SEQ ID NO: 564708 - RNA, 19 nt, Artificial Sequence
  Description of Artificial Sequence: Synthetic oligonucleotide
uaugagggguguuggcuug

SEQ ID NO: 564709 - RNA, 19 nt, Artificial Sequence
  Description of Artificial Sequence: Synthetic oligonucleotide
aaucugagauuugccggag

SEQ ID NO: 564710 - RNA, 19 nt, Artificial Sequence
  Description of Artificial Sequence: Synthetic oligonucleotide
accaaccccaucccugaac

SEQ ID NO: 564711 - RNA, 19 nt, Artificial Sequence
  Description of Artificial Sequence: Synthetic oligonucleotide
aggguuauugaguguagaa

SEQ ID NO: 564712 - RNA, 19 nt, Artificial Sequence
  Description of Artificial Sequence: Synthetic oligonucleotide
cuuuggaggcagauauaag

SEQ ID NO: 564713 - RNA, 19 nt, Artificial Sequence
  Description of Artificial Sequence: Synthetic oligonucleotide
ugaccugagaauccaucuc

SEQ ID NO: 564714 - RNA, 19 nt, Artificial Sequence
  Description of Artificial Sequence: Synthetic oligonucleotide
cugcucgggauuuacugag

SEQ ID NO: 564715 - RNA, 19 nt, Artificial Sequence
  Description of Artificial Sequence: Synthetic oligonucleotide
uuacgaagcucuccuaguu

SEQ ID NO: 564716 - RNA, 19 nt, Artificial Sequence
  Description of Artificial Sequence: Synthetic oligonucleotide
uagggacuauucuaaugga

SEQ ID NO: 564717 - RNA, 19 nt, Artificial Sequence
  Description of Artificial Sequence: Synthetic oligonucleotide
ucuauuuggaaggccaauu

SEQ ID NO: 564718 - RNA, 19 nt, Artificial Sequence
  Description of Artificial Sequence: Synthetic oligonucleotide
caaagaccaaccccauccc

SEQ ID NO: 564719 - RNA, 19 nt, Artificial Sequence
  Description of Artificial Sequence: Synthetic oligonucleotide
aacgaggaccuugauggcu

SEQ ID NO: 564720 - RNA, 19 nt, Artificial Sequence
  Description of Artificial Sequence: Synthetic oligonucleotide
uuuuaugucuagaccucuu

SEQ ID NO: 564721 - RNA, 19 nt, Artificial Sequence
  Description of Artificial Sequence: Synthetic oligonucleotide
aacagauaggcuaggguuu

SEQ ID NO: 564722 - RNA, 19 nt, Artificial Sequence
  Description of Artificial Sequence: Synthetic oligonucleotide
uccccgagaggccugcugc

SEQ ID NO: 564723 - RNA, 19 nt, Artificial Sequence
  Description of Artificial Sequence: Synthetic oligonucleotide
aggucucaguauauagacc

SEQ ID NO: 564724 - RNA, 19 nt, Artificial Sequence
  Description of Artificial Sequence: Synthetic oligonucleotide
uuuaugggaugcgguaccc

SEQ ID NO: 564725 - RNA, 19 nt, Artificial Sequence
  Description of Artificial Sequence: Synthetic oligonucleotide
uggaaggaucuauaugcuc

SEQ ID NO: 564726 - RNA, 19 nt, Artificial Sequence
  Description of Artificial Sequence: Synthetic oligonucleotide
uuauagggacuauucuaau

SEQ ID NO: 564727 - RNA, 19 nt, Artificial Sequence
  Description of Artificial Sequence: Synthetic oligonucleotide
aucuaaucaaccacuucug

SEQ ID NO: 564728 - RNA, 19 nt, Artificial Sequence
  Description of Artificial Sequence: Synthetic oligonucleotide
cagucacaucuaaucaacc

SEQ ID NO: 564729 - RNA, 19 nt, Artificial Sequence
  Description of Artificial Sequence: Synthetic oligonucleotide
aucuguggacccugcacag

SEQ ID NO: 564730 - RNA, 19 nt, Artificial Sequence
  Description of Artificial Sequence: Synthetic oligonucleotide
cacuggucaaguuggcaag

SEQ ID NO: 564731 - RNA, 19 nt, Artificial Sequence
  Description of Artificial Sequence: Synthetic oligonucleotide
uuaaugggguuccucgguu

SEQ ID NO: 564732 - RNA, 19 nt, Artificial Sequence
  Description of Artificial Sequence: Synthetic oligonucleotide
ugguugacuccccgagagg

SEQ ID NO: 564733 - RNA, 19 nt, Artificial Sequence
  Description of Artificial Sequence: Synthetic oligonucleotide
uaggcacgaagugaaaagu

SEQ ID NO: 564734 - RNA, 19 nt, Artificial Sequence
  Description of Artificial Sequence: Synthetic oligonucleotide
gauuugccggagaugguug

SEQ ID NO: 564735 - RNA, 19 nt, Artificial Sequence
  Description of Artificial Sequence: Synthetic oligonucleotide
cucguaguguuucuuacga

SEQ ID NO: 564736 - RNA, 19 nt, Artificial Sequence
  Description of Artificial Sequence: Synthetic oligonucleotide
ucaugcuugagaaguccau

SEQ ID NO: 564737 - RNA, 19 nt, Artificial Sequence
  Description of Artificial Sequence: Synthetic oligonucleotide
gaugguagcuccccagcca

SEQ ID NO: 564738 - RNA, 19 nt, Artificial Sequence
  Description of Artificial Sequence: Synthetic oligonucleotide
cagccuugacuuuggagag

SEQ ID NO: 564739 - RNA, 19 nt, Artificial Sequence
  Description of Artificial Sequence: Synthetic oligonucleotide
auugaguguagaagcucac

SEQ ID NO: 564740 - RNA, 19 nt, Artificial Sequence
  Description of Artificial Sequence: Synthetic oligonucleotide
caucccugaacauuugaga

SEQ ID NO: 564741 - RNA, 19 nt, Artificial Sequence
  Description of Artificial Sequence: Synthetic oligonucleotide
cauacugccuacaggccuc

SEQ ID NO: 564742 - RNA, 19 nt, Artificial Sequence
  Description of Artificial Sequence: Synthetic oligonucleotide
guaucucacgcuccgcagc

SEQ ID NO: 564743 - RNA, 19 nt, Artificial Sequence
  Description of Artificial Sequence: Synthetic oligonucleotide
ggguuauugaguguagaag

SEQ ID NO: 564744 - RNA, 19 nt, Artificial Sequence
  Description of Artificial Sequence: Synthetic oligonucleotide
ggaaggaucuauaugcuca

SEQ ID NO: 564745 - RNA, 19 nt, Artificial Sequence
  Description of Artificial Sequence: Synthetic oligonucleotide
gacccugcacagcugauga

SEQ ID NO: 564746 - RNA, 19 nt, Artificial Sequence
  Description of Artificial Sequence: Synthetic oligonucleotide
aguuugaucuucgugcuuu

SEQ ID NO: 564747 - RNA, 19 nt, Artificial Sequence
  Description of Artificial Sequence: Synthetic oligonucleotide
caaucugagauuugccgga

SEQ ID NO: 564748 - RNA, 19 nt, Artificial Sequence
  Description of Artificial Sequence: Synthetic oligonucleotide
gcuugcaucaggcuaguac

SEQ ID NO: 564749 - RNA, 19 nt, Artificial Sequence
  Description of Artificial Sequence: Synthetic oligonucleotide
uuugaucuucgugcuuucc

SEQ ID NO: 564750 - RNA, 19 nt, Artificial Sequence
  Description of Artificial Sequence: Synthetic oligonucleotide
gaaugcuaaucaguuuaac

SEQ ID NO: 564751 - RNA, 19 nt, Artificial Sequence
  Description of Artificial Sequence: Synthetic oligonucleotide
aagugaaaagugagauuca

SEQ ID NO: 564752 - RNA, 19 nt, Artificial Sequence
  Description of Artificial Sequence: Synthetic oligonucleotide
uucacuuauagggacuauu

SEQ ID NO: 564753 - RNA, 19 nt, Artificial Sequence
  Description of Artificial Sequence: Synthetic oligonucleotide
cguaguguuucuuacgaag

SEQ ID NO: 564754 - RNA, 19 nt, Artificial Sequence
  Description of Artificial Sequence: Synthetic oligonucleotide
agccacuucgcuucagacu

SEQ ID NO: 564755 - RNA, 19 nt, Artificial Sequence
  Description of Artificial Sequence: Synthetic oligonucleotide
ugugucuccugcucgggau

SEQ ID NO: 564756 - RNA, 19 nt, Artificial Sequence
  Description of Artificial Sequence: Synthetic oligonucleotide
accaagauuuaaugggguu

SEQ ID NO: 564757 - RNA, 19 nt, Artificial Sequence
  Description of Artificial Sequence: Synthetic oligonucleotide
gacauuagguuaucaccaa

SEQ ID NO: 564758 - RNA, 19 nt, Artificial Sequence
  Description of Artificial Sequence: Synthetic oligonucleotide
agcccuucuguccaccgug

SEQ ID NO: 564759 - RNA, 19 nt, Artificial Sequence
  Description of Artificial Sequence: Synthetic oligonucleotide
agaccaaccccaucccuga

SEQ ID NO: 564760 - RNA, 19 nt, Artificial Sequence
  Description of Artificial Sequence: Synthetic oligonucleotide
guugagggucaccugaaaa

SEQ ID NO: 564761 - RNA, 19 nt, Artificial Sequence
  Description of Artificial Sequence: Synthetic oligonucleotide
ggaggucacaacgaggacc

SEQ ID NO: 564762 - RNA, 19 nt, Artificial Sequence
  Description of Artificial Sequence: Synthetic oligonucleotide
gacaaucugacaguguggu

SEQ ID NO: 564763 - RNA, 19 nt, Artificial Sequence
  Description of Artificial Sequence: Synthetic oligonucleotide
cacgaagugaaaagugaga

SEQ ID NO: 564764 - RNA, 19 nt, Artificial Sequence
  Description of Artificial Sequence: Synthetic oligonucleotide
uacgaagcucuccuaguuu

SEQ ID NO: 564765 - RNA, 19 nt, Artificial Sequence
  Description of Artificial Sequence: Synthetic oligonucleotide
ugguccuuaccuguuggca

SEQ ID NO: 564766 - RNA, 19 nt, Artificial Sequence
  Description of Artificial Sequence: Synthetic oligonucleotide
gggucuucaaaccugaggu

SEQ ID NO: 564767 - RNA, 19 nt, Artificial Sequence
  Description of Artificial Sequence: Synthetic oligonucleotide
auucuuuaugggaugcggu

SEQ ID NO: 564768 - RNA, 19 nt, Artificial Sequence
  Description of Artificial Sequence: Synthetic oligonucleotide
cuggacaggccagauacug

SEQ ID NO: 564769 - RNA, 19 nt, Artificial Sequence
  Description of Artificial Sequence: Synthetic oligonucleotide
uguggccugguugacuccc

SEQ ID NO: 564770 - RNA, 19 nt, Artificial Sequence
  Description of Artificial Sequence: Synthetic oligonucleotide
ugagaacccgagaggugga

SEQ ID NO: 564771 - RNA, 19 nt, Artificial Sequence
  Description of Artificial Sequence: Synthetic oligonucleotide
aggcuaggguuuccuugcc

SEQ ID NO: 564772 - RNA, 19 nt, Artificial Sequence
  Description of Artificial Sequence: Synthetic oligonucleotide
uugagacauuagguuauca

SEQ ID NO: 564773 - RNA, 19 nt, Artificial Sequence
  Description of Artificial Sequence: Synthetic oligonucleotide
acugccuacaggccucugu

SEQ ID NO: 564774 - RNA, 19 nt, Artificial Sequence
  Description of Artificial Sequence: Synthetic oligonucleotide
uugagcaguaggaggugau

SEQ ID NO: 564775 - RNA, 19 nt, Artificial Sequence
  Description of Artificial Sequence: Synthetic oligonucleotide
auuugccggagaugguuga

SEQ ID NO: 564776 - RNA, 19 nt, Artificial Sequence
  Description of Artificial Sequence: Synthetic oligonucleotide
uccgguugguggcagcuuc

SEQ ID NO: 564777 - RNA, 19 nt, Artificial Sequence
  Description of Artificial Sequence: Synthetic oligonucleotide
gguugacuccccgagaggc

SEQ ID NO: 564778 - RNA, 19 nt, Artificial Sequence
  Description of Artificial Sequence: Synthetic oligonucleotide
uaguugagggucaccugaa

SEQ ID NO: 564779 - RNA, 19 nt, Artificial Sequence
  Description of Artificial Sequence: Synthetic oligonucleotide
caaucugacaguguggucu

SEQ ID NO: 564780 - RNA, 19 nt, Artificial Sequence
  Description of Artificial Sequence: Synthetic oligonucleotide
gaccugaacccaugauccc

SEQ ID NO: 564781 - RNA, 19 nt, Artificial Sequence
  Description of Artificial Sequence: Synthetic oligonucleotide
guuggcuuggcucuacucu

SEQ ID NO: 564782 - RNA, 19 nt, Artificial Sequence
  Description of Artificial Sequence: Synthetic oligonucleotide
uauaagcccuucuguccac

SEQ ID NO: 564783 - RNA, 19 nt, Artificial Sequence
  Description of Artificial Sequence: Synthetic oligonucleotide
gucagauugaggcugcccu

SEQ ID NO: 564784 - RNA, 19 nt, Artificial Sequence
  Description of Artificial Sequence: Synthetic oligonucleotide
uguuggcuuggcucuacuc

SEQ ID NO: 564785 - RNA, 19 nt, Artificial Sequence
  Description of Artificial Sequence: Synthetic oligonucleotide
gauuguagggcagguuuga

SEQ ID NO: 564786 - RNA, 19 nt, Artificial Sequence
  Description of Artificial Sequence: Synthetic oligonucleotide
uuaugggaugcgguacccc

SEQ ID NO: 564787 - RNA, 19 nt, Artificial Sequence
  Description of Artificial Sequence: Synthetic oligonucleotide
ggcaagcaggguuauugag

SEQ ID NO: 564788 - RNA, 19 nt, Artificial Sequence
  Description of Artificial Sequence: Synthetic oligonucleotide
uggccugguugacuccccg

SEQ ID NO: 564789 - RNA, 19 nt, Artificial Sequence
  Description of Artificial Sequence: Synthetic oligonucleotide
gcggccaucuccuuguagc

SEQ ID NO: 564790 - RNA, 19 nt, Artificial Sequence
  Description of Artificial Sequence: Synthetic oligonucleotide
cacccugaccugagaaucc

SEQ ID NO: 564791 - RNA, 19 nt, Artificial Sequence
  Description of Artificial Sequence: Synthetic oligonucleotide
agauucacuuauagggacu

SEQ ID NO: 564792 - RNA, 19 nt, Artificial Sequence
  Description of Artificial Sequence: Synthetic oligonucleotide
uuugccggagaugguugag

SEQ ID NO: 564793 - RNA, 19 nt, Artificial Sequence
  Description of Artificial Sequence: Synthetic oligonucleotide
aagauuuaaugggguuccu

SEQ ID NO: 564794 - RNA, 19 nt, Artificial Sequence
  Description of Artificial Sequence: Synthetic oligonucleotide
uagggucuucaaaccugag

SEQ ID NO: 564795 - RNA, 19 nt, Artificial Sequence
  Description of Artificial Sequence: Synthetic oligonucleotide
aagcaggguuauugagugu

SEQ ID NO: 564796 - RNA, 19 nt, Artificial Sequence
  Description of Artificial Sequence: Synthetic oligonucleotide
ggagaaacaagagccggug

SEQ ID NO: 564797 - RNA, 19 nt, Artificial Sequence
  Description of Artificial Sequence: Synthetic oligonucleotide
gguccuuaccuguuggcac

SEQ ID NO: 564798 - RNA, 19 nt, Artificial Sequence
  Description of Artificial Sequence: Synthetic oligonucleotide
ccaagaguauuuccucugg

SEQ ID NO: 564799 - RNA, 19 nt, Artificial Sequence
  Description of Artificial Sequence: Synthetic oligonucleotide
ucuauccgguugguggcag

SEQ ID NO: 564800 - RNA, 19 nt, Artificial Sequence
  Description of Artificial Sequence: Synthetic oligonucleotide
agauuugccggagaugguu

SEQ ID NO: 564801 - RNA, 19 nt, Artificial Sequence
  Description of Artificial Sequence: Synthetic oligonucleotide
ucguaguguuucuuacgaa

SEQ ID NO: 564802 - RNA, 19 nt, Artificial Sequence
  Description of Artificial Sequence: Synthetic oligonucleotide
aggcacgaagugaaaagug

SEQ ID NO: 564803 - RNA, 19 nt, Artificial Sequence
  Description of Artificial Sequence: Synthetic oligonucleotide
gagaggacaaucugacagu

SEQ ID NO: 564804 - RNA, 19 nt, Artificial Sequence
  Description of Artificial Sequence: Synthetic oligonucleotide
cugccuacaggccucuguc

SEQ ID NO: 564805 - RNA, 19 nt, Artificial Sequence
  Description of Artificial Sequence: Synthetic oligonucleotide
ucagauugaggcugcccuu

SEQ ID NO: 564806 - RNA, 19 nt, Artificial Sequence
  Description of Artificial Sequence: Synthetic oligonucleotide
gaaguccauacugucuguc

SEQ ID NO: 564807 - RNA, 19 nt, Artificial Sequence
  Description of Artificial Sequence: Synthetic oligonucleotide
cacuagaguucuccauggc

SEQ ID NO: 564808 - RNA, 19 nt, Artificial Sequence
  Description of Artificial Sequence: Synthetic oligonucleotide
aaggugaucuguggacccu

SEQ ID NO: 564809 - RNA, 19 nt, Artificial Sequence
  Description of Artificial Sequence: Synthetic oligonucleotide
ucaaguuggcaagcagggu

SEQ ID NO: 564810 - RNA, 19 nt, Artificial Sequence
  Description of Artificial Sequence: Synthetic oligonucleotide
ggcuuuggcuccuaggaga

SEQ ID NO: 564811 - RNA, 19 nt, Artificial Sequence
  Description of Artificial Sequence: Synthetic oligonucleotide
cuaguacaggaaccaagga

SEQ ID NO: 564812 - RNA, 19 nt, Artificial Sequence
  Description of Artificial Sequence: Synthetic oligonucleotide
aaggaucuauaugcucaga

SEQ ID NO: 564813 - RNA, 19 nt, Artificial Sequence
  Description of Artificial Sequence: Synthetic oligonucleotide
ggcuaguacaggaaccaag

SEQ ID NO: 564814 - RNA, 19 nt, Artificial Sequence
  Description of Artificial Sequence: Synthetic oligonucleotide
cuguaucucacgcuccgca

SEQ ID NO: 564815 - RNA, 19 nt, Artificial Sequence
  Description of Artificial Sequence: Synthetic oligonucleotide
gaccacgagaucagcagca

SEQ ID NO: 564816 - RNA, 19 nt, Artificial Sequence
  Description of Artificial Sequence: Synthetic oligonucleotide
uaaugggguuccucgguuu

SEQ ID NO: 564817 - RNA, 19 nt, Artificial Sequence
  Description of Artificial Sequence: Synthetic oligonucleotide
agggcaaagccacucuauu

SEQ ID NO: 564818 - RNA, 19 nt, Artificial Sequence
  Description of Artificial Sequence: Synthetic oligonucleotide
gccaagaguauuuccucug

SEQ ID NO: 564819 - RNA, 19 nt, Artificial Sequence
  Description of Artificial Sequence: Synthetic oligonucleotide
uggaggucacaacgaggac

SEQ ID NO: 564820 - RNA, 19 nt, Artificial Sequence
  Description of Artificial Sequence: Synthetic oligonucleotide
gccgcuuuccacaaucucc

SEQ ID NO: 564821 - RNA, 19 nt, Artificial Sequence
  Description of Artificial Sequence: Synthetic oligonucleotide
guccuuaccuguuggcaca

SEQ ID NO: 564822 - RNA, 19 nt, Artificial Sequence
  Description of Artificial Sequence: Synthetic oligonucleotide
cagccacuucgcuucagac

SEQ ID NO: 564823 - RNA, 19 nt, Artificial Sequence
  Description of Artificial Sequence: Synthetic oligonucleotide
cucuacucuuuucuaggga

SEQ ID NO: 564824 - RNA, 19 nt, Artificial Sequence
  Description of Artificial Sequence: Synthetic oligonucleotide
aggcagauauaagcccuuc

SEQ ID NO: 564825 - RNA, 19 nt, Artificial Sequence
  Description of Artificial Sequence: Synthetic oligonucleotide
ucuagaccucuuggcagca

SEQ ID NO: 564826 - RNA, 19 nt, Artificial Sequence
  Description of Artificial Sequence: Synthetic oligonucleotide
agagggcaaagccacucua

SEQ ID NO: 564827 - RNA, 19 nt, Artificial Sequence
  Description of Artificial Sequence: Synthetic oligonucleotide
cugagauuugccggagaug

SEQ ID NO: 564828 - RNA, 19 nt, Artificial Sequence
  Description of Artificial Sequence: Synthetic oligonucleotide
ugcucgggauuuacugagu

SEQ ID NO: 564829 - RNA, 19 nt, Artificial Sequence
  Description of Artificial Sequence: Synthetic oligonucleotide
ugcccuuguuagcuuuaac

SEQ ID NO: 564830 - RNA, 19 nt, Artificial Sequence
  Description of Artificial Sequence: Synthetic oligonucleotide
gggacuauucuaauggaaa

SEQ ID NO: 564831 - RNA, 19 nt, Artificial Sequence
  Description of Artificial Sequence: Synthetic oligonucleotide
guagggcagguuugauuug

SEQ ID NO: 564832 - RNA, 19 nt, Artificial Sequence
  Description of Artificial Sequence: Synthetic oligonucleotide
ggaccacgagaucagcagc

SEQ ID NO: 564833 - RNA, 19 nt, Artificial Sequence
  Description of Artificial Sequence: Synthetic oligonucleotide
cagagagucagcuggcucu

SEQ ID NO: 564834 - RNA, 19 nt, Artificial Sequence
  Description of Artificial Sequence: Synthetic oligonucleotide
uucuuacgaagcucuccua

SEQ ID NO: 564835 - RNA, 19 nt, Artificial Sequence
  Description of Artificial Sequence: Synthetic oligonucleotide
uuggcuccuaggagaggac

SEQ ID NO: 564836 - RNA, 19 nt, Artificial Sequence
  Description of Artificial Sequence: Synthetic oligonucleotide
caauggccucaaucuugcg

SEQ ID NO: 564837 - RNA, 19 nt, Artificial Sequence
  Description of Artificial Sequence: Synthetic oligonucleotide
uccucgguuugucccuaga

SEQ ID NO: 564838 - RNA, 19 nt, Artificial Sequence
  Description of Artificial Sequence: Synthetic oligonucleotide
agcuuuaaccuuggaugca

SEQ ID NO: 564839 - RNA, 19 nt, Artificial Sequence
  Description of Artificial Sequence: Synthetic oligonucleotide
ggcagguuugauuuguugu

SEQ ID NO: 564840 - RNA, 19 nt, Artificial Sequence
  Description of Artificial Sequence: Synthetic oligonucleotide
uggcuccuaggagaggaca

SEQ ID NO: 564841 - RNA, 19 nt, Artificial Sequence
  Description of Artificial Sequence: Synthetic oligonucleotide
agggacuauucuaauggaa

SEQ ID NO: 564842 - RNA, 19 nt, Artificial Sequence
  Description of Artificial Sequence: Synthetic oligonucleotide
cuuggaccacgagaucagc

SEQ ID NO: 564843 - RNA, 19 nt, Artificial Sequence
  Description of Artificial Sequence: Synthetic oligonucleotide
cuggacccugccaagagua

SEQ ID NO: 564844 - RNA, 19 nt, Artificial Sequence
  Description of Artificial Sequence: Synthetic oligonucleotide
gagaacccgagagguggag

SEQ ID NO: 564845 - RNA, 19 nt, Artificial Sequence
  Description of Artificial Sequence: Synthetic oligonucleotide
ggucacaacgaggaccuug

SEQ ID NO: 564846 - RNA, 19 nt, Artificial Sequence
  Description of Artificial Sequence: Synthetic oligonucleotide
agauaaggucucaguauau

SEQ ID NO: 564847 - RNA, 19 nt, Artificial Sequence
  Description of Artificial Sequence: Synthetic oligonucleotide
acuuuggagagaaggugau

SEQ ID NO: 564848 - RNA, 19 nt, Artificial Sequence
  Description of Artificial Sequence: Synthetic oligonucleotide
guggcacuccccugaauga

SEQ ID NO: 564849 - RNA, 19 nt, Artificial Sequence
  Description of Artificial Sequence: Synthetic oligonucleotide
ggcacgaagugaaaaguga

SEQ ID NO: 564850 - RNA, 19 nt, Artificial Sequence
  Description of Artificial Sequence: Synthetic oligonucleotide
ugucagccacuucgcuuca

SEQ ID NO: 564851 - RNA, 19 nt, Artificial Sequence
  Description of Artificial Sequence: Synthetic oligonucleotide
guugacuccccgagaggcc

SEQ ID NO: 564852 - RNA, 19 nt, Artificial Sequence
  Description of Artificial Sequence: Synthetic oligonucleotide
cuauccgguugguggcagc

SEQ ID NO: 564853 - RNA, 19 nt, Artificial Sequence
  Description of Artificial Sequence: Synthetic oligonucleotide
cuuacgaagcucuccuagu

SEQ ID NO: 564854 - RNA, 19 nt, Artificial Sequence
  Description of Artificial Sequence: Synthetic oligonucleotide
uacaggaaccaaggauccu

SEQ ID NO: 564855 - RNA, 19 nt, Artificial Sequence
  Description of Artificial Sequence: Synthetic oligonucleotide
ggauuguagggcagguuug

SEQ ID NO: 564856 - RNA, 19 nt, Artificial Sequence
  Description of Artificial Sequence: Synthetic oligonucleotide
acuucgcuucagacugggc

SEQ ID NO: 564857 - RNA, 19 nt, Artificial Sequence
  Description of Artificial Sequence: Synthetic oligonucleotide
guucagcgaucugugucag

SEQ ID NO: 564858 - RNA, 19 nt, Artificial Sequence
  Description of Artificial Sequence: Synthetic oligonucleotide
gcaguuaccaggcugcccu

SEQ ID NO: 564859 - RNA, 19 nt, Artificial Sequence
  Description of Artificial Sequence: Synthetic oligonucleotide
ggaggcaguucuucauggc

SEQ ID NO: 564860 - RNA, 19 nt, Artificial Sequence
  Description of Artificial Sequence: Synthetic oligonucleotide
gggcagguuugauuuguug

SEQ ID NO: 564861 - RNA, 19 nt, Artificial Sequence
  Description of Artificial Sequence: Synthetic oligonucleotide
agaacccgagagguggaga

SEQ ID NO: 564862 - RNA, 19 nt, Artificial Sequence
  Description of Artificial Sequence: Synthetic oligonucleotide
augagggguguuggcuugg

SEQ ID NO: 564863 - RNA, 19 nt, Artificial Sequence
  Description of Artificial Sequence: Synthetic oligonucleotide
uggacccugccaagaguau

SEQ ID NO: 564864 - RNA, 19 nt, Artificial Sequence
  Description of Artificial Sequence: Synthetic oligonucleotide
gaaguggcggccaucuccu

SEQ ID NO: 564865 - RNA, 19 nt, Artificial Sequence
  Description of Artificial Sequence: Synthetic oligonucleotide
guuuuaugucuagaccucu

SEQ ID NO: 564866 - RNA, 19 nt, Artificial Sequence
  Description of Artificial Sequence: Synthetic oligonucleotide
acgagaucagcagcaucca

SEQ ID NO: 564867 - RNA, 19 nt, Artificial Sequence
  Description of Artificial Sequence: Synthetic oligonucleotide
uuccucgguuugucccuag

SEQ ID NO: 564868 - RNA, 19 nt, Artificial Sequence
  Description of Artificial Sequence: Synthetic oligonucleotide
acucuauuuggaaggccaa

SEQ ID NO: 564869 - RNA, 19 nt, Artificial Sequence
  Description of Artificial Sequence: Synthetic oligonucleotide
cuggaaggaucuauaugcu

SEQ ID NO: 564870 - RNA, 19 nt, Artificial Sequence
  Description of Artificial Sequence: Synthetic oligonucleotide
cgcuuaaucugggucaggg

SEQ ID NO: 564871 - RNA, 19 nt, Artificial Sequence
  Description of Artificial Sequence: Synthetic oligonucleotide
uggcacuccccugaaugau

SEQ ID NO: 564872 - RNA, 19 nt, Artificial Sequence
  Description of Artificial Sequence: Synthetic oligonucleotide
gguaggcacgaagugaaaa

SEQ ID NO: 564873 - RNA, 19 nt, Artificial Sequence
  Description of Artificial Sequence: Synthetic oligonucleotide
ccuagaaugcuaaucaguu

SEQ ID NO: 564874 - RNA, 19 nt, Artificial Sequence
  Description of Artificial Sequence: Synthetic oligonucleotide
aguuaccaggcugcccugu

SEQ ID NO: 564875 - RNA, 19 nt, Artificial Sequence
  Description of Artificial Sequence: Synthetic oligonucleotide
acccugaccugagaaucca

SEQ ID NO: 564876 - RNA, 19 nt, Artificial Sequence
  Description of Artificial Sequence: Synthetic oligonucleotide
gcuagaccugaacccauga

SEQ ID NO: 564877 - RNA, 19 nt, Artificial Sequence
  Description of Artificial Sequence: Synthetic oligonucleotide
cuagaaugcuaaucaguuu

SEQ ID NO: 564878 - RNA, 19 nt, Artificial Sequence
  Description of Artificial Sequence: Synthetic oligonucleotide
cagauaggcuaggguuucc

SEQ ID NO: 564879 - RNA, 19 nt, Artificial Sequence
  Description of Artificial Sequence: Synthetic oligonucleotide
gauaggcuaggguuuccuu

SEQ ID NO: 564880 - RNA, 19 nt, Artificial Sequence
  Description of Artificial Sequence: Synthetic oligonucleotide
ggcgcuuaaucugggucag

SEQ ID NO: 564881 - RNA, 19 nt, Artificial Sequence
  Description of Artificial Sequence: Synthetic oligonucleotide
cucgguuugucccuagaau

SEQ ID NO: 564882 - RNA, 19 nt, Artificial Sequence
  Description of Artificial Sequence: Synthetic oligonucleotide
cucgggauuuacugaguua

SEQ ID NO: 564883 - RNA, 19 nt, Artificial Sequence
  Description of Artificial Sequence: Synthetic oligonucleotide
agaagcucacugauaucuu

SEQ ID NO: 564884 - RNA, 19 nt, Artificial Sequence
  Description of Artificial Sequence: Synthetic oligonucleotide
ggucagauugaggcugccc

SEQ ID NO: 564885 - RNA, 19 nt, Artificial Sequence
  Description of Artificial Sequence: Synthetic oligonucleotide
auccuuucguucaccucca

SEQ ID NO: 564886 - RNA, 19 nt, Artificial Sequence
  Description of Artificial Sequence: Synthetic oligonucleotide
caguuaccaggcugcccug

SEQ ID NO: 564887 - RNA, 19 nt, Artificial Sequence
  Description of Artificial Sequence: Synthetic oligonucleotide
augggaugcgguaccccug

SEQ ID NO: 564888 - RNA, 19 nt, Artificial Sequence
  Description of Artificial Sequence: Synthetic oligonucleotide
ugucuccugcucgggauuu

SEQ ID NO: 564889 - RNA, 19 nt, Artificial Sequence
  Description of Artificial Sequence: Synthetic oligonucleotide
caggguuauugaguguaga

SEQ ID NO: 564890 - RNA, 19 nt, Artificial Sequence
  Description of Artificial Sequence: Synthetic oligonucleotide
ggucucggagggcugagaa

SEQ ID NO: 564891 - RNA, 19 nt, Artificial Sequence
  Description of Artificial Sequence: Synthetic oligonucleotide
uggacccugcacagcugau

SEQ ID NO: 564892 - RNA, 19 nt, Artificial Sequence
  Description of Artificial Sequence: Synthetic oligonucleotide
augcgguaccccugccgcu

SEQ ID NO: 564893 - RNA, 19 nt, Artificial Sequence
  Description of Artificial Sequence: Synthetic oligonucleotide
cuggcucugguggggcccg

SEQ ID NO: 564894 - RNA, 19 nt, Artificial Sequence
  Description of Artificial Sequence: Synthetic oligonucleotide
cacaucuaaucaaccacuu

SEQ ID NO: 564895 - RNA, 19 nt, Artificial Sequence
  Description of Artificial Sequence: Synthetic oligonucleotide
cuggucaaguuggcaagca

SEQ ID NO: 564896 - RNA, 19 nt, Artificial Sequence
  Description of Artificial Sequence: Synthetic oligonucleotide
gccacucuauuuggaaggc

SEQ ID NO: 564897 - RNA, 19 nt, Artificial Sequence
  Description of Artificial Sequence: Synthetic oligonucleotide
cccugccaagaguauuucc

SEQ ID NO: 564898 - RNA, 19 nt, Artificial Sequence
  Description of Artificial Sequence: Synthetic oligonucleotide
uccuuaccuguuggcacau

SEQ ID NO: 564899 - RNA, 19 nt, Artificial Sequence
  Description of Artificial Sequence: Synthetic oligonucleotide
cuaggguuuccuugccaua

SEQ ID NO: 564900 - RNA, 19 nt, Artificial Sequence
  Description of Artificial Sequence: Synthetic oligonucleotide
cccugggaagguaggcacg

SEQ ID NO: 564901 - RNA, 19 nt, Artificial Sequence
  Description of Artificial Sequence: Synthetic oligonucleotide
gacuccccgagaggccugc

SEQ ID NO: 564902 - RNA, 19 nt, Artificial Sequence
  Description of Artificial Sequence: Synthetic oligonucleotide
accuccaacuugacuccug

SEQ ID NO: 564903 - RNA, 19 nt, Artificial Sequence
  Description of Artificial Sequence: Synthetic oligonucleotide
agccuugacuuuggagaga

SEQ ID NO: 564904 - RNA, 19 nt, Artificial Sequence
  Description of Artificial Sequence: Synthetic oligonucleotide
ucgugcuuuccagcugguc

SEQ ID NO: 564905 - RNA, 19 nt, Artificial Sequence
  Description of Artificial Sequence: Synthetic oligonucleotide
accacgagaucagcagcau

SEQ ID NO: 564906 - RNA, 19 nt, Artificial Sequence
  Description of Artificial Sequence: Synthetic oligonucleotide
gcagguuugauuuguuguu

SEQ ID NO: 564907 - RNA, 19 nt, Artificial Sequence
  Description of Artificial Sequence: Synthetic oligonucleotide
gcaagcaggguuauugagu

SEQ ID NO: 564908 - RNA, 19 nt, Artificial Sequence
  Description of Artificial Sequence: Synthetic oligonucleotide
ggacccugcacagcugaug

SEQ ID NO: 564909 - RNA, 19 nt, Artificial Sequence
  Description of Artificial Sequence: Synthetic oligonucleotide
ccugcucgggauuuacuga

SEQ ID NO: 564910 - RNA, 19 nt, Artificial Sequence
  Description of Artificial Sequence: Synthetic oligonucleotide
ggucucugagaacccgaga

SEQ ID NO: 564911 - RNA, 19 nt, Artificial Sequence
  Description of Artificial Sequence: Synthetic oligonucleotide
gccauacugccuacaggcc

SEQ ID NO: 564912 - RNA, 19 nt, Artificial Sequence
  Description of Artificial Sequence: Synthetic oligonucleotide
cuacucuuuucuagggauu

SEQ ID NO: 564913 - RNA, 19 nt, Artificial Sequence
  Description of Artificial Sequence: Synthetic oligonucleotide
guaccccugccgcuuucca

SEQ ID NO: 564914 - RNA, 19 nt, Artificial Sequence
  Description of Artificial Sequence: Synthetic oligonucleotide
cuagaccugaacccaugau

SEQ ID NO: 564915 - RNA, 19 nt, Artificial Sequence
  Description of Artificial Sequence: Synthetic oligonucleotide
ggcggccaucuccuuguag

SEQ ID NO: 564916 - RNA, 19 nt, Artificial Sequence
  Description of Artificial Sequence: Synthetic oligonucleotide
gccuugacuuuggagagaa

SEQ ID NO: 564917 - RNA, 19 nt, Artificial Sequence
  Description of Artificial Sequence: Synthetic oligonucleotide
gccaggcugacauauuuau

SEQ ID NO: 564918 - RNA, 19 nt, Artificial Sequence
  Description of Artificial Sequence: Synthetic oligonucleotide
ggcuagaccugaacccaug

SEQ ID NO: 564919 - RNA, 19 nt, Artificial Sequence
  Description of Artificial Sequence: Synthetic oligonucleotide
ggcuaggguuuccuugcca

SEQ ID NO: 564920 - RNA, 19 nt, Artificial Sequence
  Description of Artificial Sequence: Synthetic oligonucleotide
aaguggcggccaucuccuu

SEQ ID NO: 564921 - RNA, 19 nt, Artificial Sequence
  Description of Artificial Sequence: Synthetic oligonucleotide
cagcgaucugugucagcca

SEQ ID NO: 564922 - RNA, 19 nt, Artificial Sequence
  Description of Artificial Sequence: Synthetic oligonucleotide
cccuagaaugcuaaucagu

SEQ ID NO: 564923 - RNA, 19 nt, Artificial Sequence
  Description of Artificial Sequence: Synthetic oligonucleotide
ccacucuauuuggaaggcc

SEQ ID NO: 564924 - RNA, 19 nt, Artificial Sequence
  Description of Artificial Sequence: Synthetic oligonucleotide
gguaccccugccgcuuucc

SEQ ID NO: 564925 - RNA, 19 nt, Artificial Sequence
  Description of Artificial Sequence: Synthetic oligonucleotide
gguuccucgguuugucccu

SEQ ID NO: 564926 - RNA, 19 nt, Artificial Sequence
  Description of Artificial Sequence: Synthetic oligonucleotide
gaccaaccccaucccugaa

SEQ ID NO: 564927 - RNA, 19 nt, Artificial Sequence
  Description of Artificial Sequence: Synthetic oligonucleotide
aggcuagaccugaacccau

SEQ ID NO: 564928 - RNA, 19 nt, Artificial Sequence
  Description of Artificial Sequence: Synthetic oligonucleotide
uacugccuacaggccucug

SEQ ID NO: 564929 - RNA, 19 nt, Artificial Sequence
  Description of Artificial Sequence: Synthetic oligonucleotide
cucuauuuggaaggccaau

SEQ ID NO: 564930 - RNA, 19 nt, Artificial Sequence
  Description of Artificial Sequence: Synthetic oligonucleotide
ccgugaguucuuugcauaa

SEQ ID NO: 564931 - RNA, 19 nt, Artificial Sequence
  Description of Artificial Sequence: Synthetic oligonucleotide
gaggcagauauaagcccuu

SEQ ID NO: 564932 - RNA, 19 nt, Artificial Sequence
  Description of Artificial Sequence: Synthetic oligonucleotide
cugccgcuuuccacaaucu

SEQ ID NO: 564933 - RNA, 19 nt, Artificial Sequence
  Description of Artificial Sequence: Synthetic oligonucleotide
cugccucagaaugccaagu

SEQ ID NO: 564934 - RNA, 19 nt, Artificial Sequence
  Description of Artificial Sequence: Synthetic oligonucleotide
ccucgguuugucccuagaa

SEQ ID NO: 564935 - RNA, 19 nt, Artificial Sequence
  Description of Artificial Sequence: Synthetic oligonucleotide
ggccugguugacuccccga

SEQ ID NO: 564936 - RNA, 19 nt, Artificial Sequence
  Description of Artificial Sequence: Synthetic oligonucleotide
cccaucccugaacauuuga

SEQ ID NO: 564937 - RNA, 19 nt, Artificial Sequence
  Description of Artificial Sequence: Synthetic oligonucleotide
gcucgggauuuacugaguu

SEQ ID NO: 564938 - RNA, 19 nt, Artificial Sequence
  Description of Artificial Sequence: Synthetic oligonucleotide
auccgguugguggcagcuu

SEQ ID NO: 564939 - RNA, 19 nt, Artificial Sequence
  Description of Artificial Sequence: Synthetic oligonucleotide
cugcccuuguuagcuuuaa

SEQ ID NO: 564940 - RNA, 19 nt, Artificial Sequence
  Description of Artificial Sequence: Synthetic oligonucleotide
guuccucgguuugucccua

SEQ ID NO: 564941 - RNA, 19 nt, Artificial Sequence
  Description of Artificial Sequence: Synthetic oligonucleotide
caguuuaacuuagggucuu

SEQ ID NO: 564942 - RNA, 19 nt, Artificial Sequence
  Description of Artificial Sequence: Synthetic oligonucleotide
ggccaggcugacauauuua

SEQ ID NO: 564943 - RNA, 19 nt, Artificial Sequence
  Description of Artificial Sequence: Synthetic oligonucleotide
caguuugaucuucgugcuu

SEQ ID NO: 564944 - RNA, 19 nt, Artificial Sequence
  Description of Artificial Sequence: Synthetic oligonucleotide
caaccccaucccugaacau

SEQ ID NO: 564945 - RNA, 19 nt, Artificial Sequence
  Description of Artificial Sequence: Synthetic oligonucleotide
ccgguugguggcagcuuca

SEQ ID NO: 564946 - RNA, 19 nt, Artificial Sequence
  Description of Artificial Sequence: Synthetic oligonucleotide
ccuuaccuguuggcacaug

SEQ ID NO: 564947 - RNA, 19 nt, Artificial Sequence
  Description of Artificial Sequence: Synthetic oligonucleotide
aggucacaacgaggaccuu

SEQ ID NO: 564948 - RNA, 19 nt, Artificial Sequence
  Description of Artificial Sequence: Synthetic oligonucleotide
ggacccugccaagaguauu

SEQ ID NO: 564949 - RNA, 19 nt, Artificial Sequence
  Description of Artificial Sequence: Synthetic oligonucleotide
ccaggcugacauauuuauu

SEQ ID NO: 564950 - RNA, 19 nt, Artificial Sequence
  Description of Artificial Sequence: Synthetic oligonucleotide
ccggaggcugguggcacuc

SEQ ID NO: 564951 - RNA, 19 nt, Artificial Sequence
  Description of Artificial Sequence: Synthetic oligonucleotide
ccuggcgcuuaaucugggu

SEQ ID NO: 564952 - RNA, 19 nt, Artificial Sequence
  Description of Artificial Sequence: Synthetic oligonucleotide
cgguaccccugccgcuuuc

SEQ ID NO: 564953 - RNA, 19 nt, Artificial Sequence
  Description of Artificial Sequence: Synthetic oligonucleotide
cgggauuuacugaguuauu

SEQ ID NO: 564954 - RNA, 19 nt, Artificial Sequence
  Description of Artificial Sequence: Synthetic oligonucleotide
ccucaccaauggccucaau

SEQ ID NO: 564955 - RNA, 19 nt, Artificial Sequence
  Description of Artificial Sequence: Synthetic oligonucleotide
agaagauucacacagcgac

SEQ ID NO: 564956 - RNA, 19 nt, Artificial Sequence
  Description of Artificial Sequence: Synthetic oligonucleotide
agaaauuagcucaagaacc

SEQ ID NO: 564957 - RNA, 19 nt, Artificial Sequence
  Description of Artificial Sequence: Synthetic oligonucleotide
agauuaugaagcuucaugg

SEQ ID NO: 564958 - RNA, 19 nt, Artificial Sequence
  Description of Artificial Sequence: Synthetic oligonucleotide
ucuaugaggaagaauuugg

SEQ ID NO: 564959 - RNA, 19 nt, Artificial Sequence
  Description of Artificial Sequence: Synthetic oligonucleotide
uaagaagauucacacagcg

SEQ ID NO: 564960 - RNA, 19 nt, Artificial Sequence
  Description of Artificial Sequence: Synthetic oligonucleotide
aacaucucaggguugaguc

SEQ ID NO: 564961 - RNA, 19 nt, Artificial Sequence
  Description of Artificial Sequence: Synthetic oligonucleotide
aaugaucucgucccggagc

SEQ ID NO: 564962 - RNA, 19 nt, Artificial Sequence
  Description of Artificial Sequence: Synthetic oligonucleotide
aaaacuaccccacgggauc

SEQ ID NO: 564963 - RNA, 19 nt, Artificial Sequence
  Description of Artificial Sequence: Synthetic oligonucleotide
aguaacuaaauaaaguggg

SEQ ID NO: 564964 - RNA, 19 nt, Artificial Sequence
  Description of Artificial Sequence: Synthetic oligonucleotide
aaauaaaguggguaacaag

SEQ ID NO: 564965 - RNA, 19 nt, Artificial Sequence
  Description of Artificial Sequence: Synthetic oligonucleotide
aauguugggugugagacgg

SEQ ID NO: 564966 - RNA, 19 nt, Artificial Sequence
  Description of Artificial Sequence: Synthetic oligonucleotide
aaaucucacgcucuuucac

SEQ ID NO: 564967 - RNA, 19 nt, Artificial Sequence
  Description of Artificial Sequence: Synthetic oligonucleotide
aacuaaauaaaguggguaa

SEQ ID NO: 564968 - RNA, 19 nt, Artificial Sequence
  Description of Artificial Sequence: Synthetic oligonucleotide
ugucaaaucgaaaguaagc

SEQ ID NO: 564969 - RNA, 19 nt, Artificial Sequence
  Description of Artificial Sequence: Synthetic oligonucleotide
agaggcacauuucacauuc

SEQ ID NO: 564970 - RNA, 19 nt, Artificial Sequence
  Description of Artificial Sequence: Synthetic oligonucleotide
aauuagcucaagaaccggc

SEQ ID NO: 564971 - RNA, 19 nt, Artificial Sequence
  Description of Artificial Sequence: Synthetic oligonucleotide
ugagaaauuagcucaagaa

SEQ ID NO: 564972 - RNA, 19 nt, Artificial Sequence
  Description of Artificial Sequence: Synthetic oligonucleotide
cauaaagcgagcaaucuug

SEQ ID NO: 564973 - RNA, 19 nt, Artificial Sequence
  Description of Artificial Sequence: Synthetic oligonucleotide
aaccacugcagcuugagcu

SEQ ID NO: 564974 - RNA, 19 nt, Artificial Sequence
  Description of Artificial Sequence: Synthetic oligonucleotide
ugcaccacauaucuggccg

SEQ ID NO: 564975 - RNA, 19 nt, Artificial Sequence
  Description of Artificial Sequence: Synthetic oligonucleotide
guugagucuauugagaugc

SEQ ID NO: 564976 - RNA, 19 nt, Artificial Sequence
  Description of Artificial Sequence: Synthetic oligonucleotide
auccuguacagauauugcc

SEQ ID NO: 564977 - RNA, 19 nt, Artificial Sequence
  Description of Artificial Sequence: Synthetic oligonucleotide
caaaucgaaaguaagcgac

SEQ ID NO: 564978 - RNA, 19 nt, Artificial Sequence
  Description of Artificial Sequence: Synthetic oligonucleotide
acaaaucucacgcucuuuc

SEQ ID NO: 564979 - RNA, 19 nt, Artificial Sequence
  Description of Artificial Sequence: Synthetic oligonucleotide
guaagcgacauucagcuug

SEQ ID NO: 564980 - RNA, 19 nt, Artificial Sequence
  Description of Artificial Sequence: Synthetic oligonucleotide
gacggaaagggacuggacg

SEQ ID NO: 564981 - RNA, 19 nt, Artificial Sequence
  Description of Artificial Sequence: Synthetic oligonucleotide
uguacagauauugccauag

SEQ ID NO: 564982 - RNA, 19 nt, Artificial Sequence
  Description of Artificial Sequence: Synthetic oligonucleotide
ugaagucaaaaucuguggu

SEQ ID NO: 564983 - RNA, 19 nt, Artificial Sequence
  Description of Artificial Sequence: Synthetic oligonucleotide
accaaugguggucaggaac

SEQ ID NO: 564984 - RNA, 19 nt, Artificial Sequence
  Description of Artificial Sequence: Synthetic oligonucleotide
aaauguugggugugagacg

SEQ ID NO: 564985 - RNA, 19 nt, Artificial Sequence
  Description of Artificial Sequence: Synthetic oligonucleotide
acuaaauaaaguggguaac

SEQ ID NO: 564986 - RNA, 19 nt, Artificial Sequence
  Description of Artificial Sequence: Synthetic oligonucleotide
gaauuugggaagcugcuug

SEQ ID NO: 564987 - RNA, 19 nt, Artificial Sequence
  Description of Artificial Sequence: Synthetic oligonucleotide
gaagucaaaaucuguggug

SEQ ID NO: 564988 - RNA, 19 nt, Artificial Sequence
  Description of Artificial Sequence: Synthetic oligonucleotide
agaggaaacccuuaaauua

SEQ ID NO: 564989 - RNA, 19 nt, Artificial Sequence
  Description of Artificial Sequence: Synthetic oligonucleotide
acagcgacgagagagcacc

SEQ ID NO: 564990 - RNA, 19 nt, Artificial Sequence
  Description of Artificial Sequence: Synthetic oligonucleotide
ucgaaaguaagcgacauuc

SEQ ID NO: 564991 - RNA, 19 nt, Artificial Sequence
  Description of Artificial Sequence: Synthetic oligonucleotide
ugacuugcaccacauaucu

SEQ ID NO: 564992 - RNA, 19 nt, Artificial Sequence
  Description of Artificial Sequence: Synthetic oligonucleotide
uuaugaagcuucauggauc

SEQ ID NO: 564993 - RNA, 19 nt, Artificial Sequence
  Description of Artificial Sequence: Synthetic oligonucleotide
cuaugaggaagaauuuggg

SEQ ID NO: 564994 - RNA, 19 nt, Artificial Sequence
  Description of Artificial Sequence: Synthetic oligonucleotide
ucaaaucgaaaguaagcga

SEQ ID NO: 564995 - RNA, 19 nt, Artificial Sequence
  Description of Artificial Sequence: Synthetic oligonucleotide
auaguaacgggagaugggg

SEQ ID NO: 564996 - RNA, 19 nt, Artificial Sequence
  Description of Artificial Sequence: Synthetic oligonucleotide
guccaugcgacauagguug

SEQ ID NO: 564997 - RNA, 19 nt, Artificial Sequence
  Description of Artificial Sequence: Synthetic oligonucleotide
gagucuauugagaugcagg

SEQ ID NO: 564998 - RNA, 19 nt, Artificial Sequence
  Description of Artificial Sequence: Synthetic oligonucleotide
gaaaacgggguccuggggc

SEQ ID NO: 564999 - RNA, 19 nt, Artificial Sequence
  Description of Artificial Sequence: Synthetic oligonucleotide
aagucaaaaucugugguga

SEQ ID NO: 565000 - RNA, 19 nt, Artificial Sequence
  Description of Artificial Sequence: Synthetic oligonucleotide
uggacaauuuccacucggg

SEQ ID NO: 565001 - RNA, 19 nt, Artificial Sequence
  Description of Artificial Sequence: Synthetic oligonucleotide
uugguggucuccuuucucg

SEQ ID NO: 565002 - RNA, 19 nt, Artificial Sequence
  Description of Artificial Sequence: Synthetic oligonucleotide
uuagccucaaggauuuuga

SEQ ID NO: 565003 - RNA, 19 nt, Artificial Sequence
  Description of Artificial Sequence: Synthetic oligonucleotide
acggaaagggacuggacgg

SEQ ID NO: 565004 - RNA, 19 nt, Artificial Sequence
  Description of Artificial Sequence: Synthetic oligonucleotide
cugcacgucacacugaggc

SEQ ID NO: 565005 - RNA, 19 nt, Artificial Sequence
  Description of Artificial Sequence: Synthetic oligonucleotide
aggauuuugauccacuuuu

SEQ ID NO: 565006 - RNA, 19 nt, Artificial Sequence
  Description of Artificial Sequence: Synthetic oligonucleotide
ucguuuaugucaaaucgaa

SEQ ID NO: 565007 - RNA, 19 nt, Artificial Sequence
  Description of Artificial Sequence: Synthetic oligonucleotide
ucggaagcugcucaguuug

SEQ ID NO: 565008 - RNA, 19 nt, Artificial Sequence
  Description of Artificial Sequence: Synthetic oligonucleotide
agucuauugagaugcagga

SEQ ID NO: 565009 - RNA, 19 nt, Artificial Sequence
  Description of Artificial Sequence: Synthetic oligonucleotide
ucgaacugggccaaguugu

SEQ ID NO: 565010 - RNA, 19 nt, Artificial Sequence
  Description of Artificial Sequence: Synthetic oligonucleotide
uugucguugaccuggcaag

SEQ ID NO: 565011 - RNA, 19 nt, Artificial Sequence
  Description of Artificial Sequence: Synthetic oligonucleotide
uugaagcuacugaggaugg

SEQ ID NO: 565012 - RNA, 19 nt, Artificial Sequence
  Description of Artificial Sequence: Synthetic oligonucleotide
augguugagacguuggaca

SEQ ID NO: 565013 - RNA, 19 nt, Artificial Sequence
  Description of Artificial Sequence: Synthetic oligonucleotide
aggaguaccacggagagga

SEQ ID NO: 565014 - RNA, 19 nt, Artificial Sequence
  Description of Artificial Sequence: Synthetic oligonucleotide
aucucuaauggcagcagcc

SEQ ID NO: 565015 - RNA, 19 nt, Artificial Sequence
  Description of Artificial Sequence: Synthetic oligonucleotide
agugugucggcuuaggcau

SEQ ID NO: 565016 - RNA, 19 nt, Artificial Sequence
  Description of Artificial Sequence: Synthetic oligonucleotide
gagaaugucucggaggacc

SEQ ID NO: 565017 - RNA, 19 nt, Artificial Sequence
  Description of Artificial Sequence: Synthetic oligonucleotide
uuccacucggggcauaaag

SEQ ID NO: 565018 - RNA, 19 nt, Artificial Sequence
  Description of Artificial Sequence: Synthetic oligonucleotide
cauaguaacgggagauggg

SEQ ID NO: 565019 - RNA, 19 nt, Artificial Sequence
  Description of Artificial Sequence: Synthetic oligonucleotide
ugugagacggaaagggacu

SEQ ID NO: 565020 - RNA, 19 nt, Artificial Sequence
  Description of Artificial Sequence: Synthetic oligonucleotide
agccucaaggauuuugauc

SEQ ID NO: 565021 - RNA, 19 nt, Artificial Sequence
  Description of Artificial Sequence: Synthetic oligonucleotide
aguaccacggagaggaaac

SEQ ID NO: 565022 - RNA, 19 nt, Artificial Sequence
  Description of Artificial Sequence: Synthetic oligonucleotide
aucucacgcucuuucacac

SEQ ID NO: 565023 - RNA, 19 nt, Artificial Sequence
  Description of Artificial Sequence: Synthetic oligonucleotide
acauaucuggccgcaaagc

SEQ ID NO: 565024 - RNA, 19 nt, Artificial Sequence
  Description of Artificial Sequence: Synthetic oligonucleotide
aagauucacacagcgacga

SEQ ID NO: 565025 - RNA, 19 nt, Artificial Sequence
  Description of Artificial Sequence: Synthetic oligonucleotide
uccggaauaugacugugcu

SEQ ID NO: 565026 - RNA, 19 nt, Artificial Sequence
  Description of Artificial Sequence: Synthetic oligonucleotide
caauccuguacagauauug

SEQ ID NO: 565027 - RNA, 19 nt, Artificial Sequence
  Description of Artificial Sequence: Synthetic oligonucleotide
gaagauucacacagcgacg

SEQ ID NO: 565028 - RNA, 19 nt, Artificial Sequence
  Description of Artificial Sequence: Synthetic oligonucleotide
uugauguaguagugugucg

SEQ ID NO: 565029 - RNA, 19 nt, Artificial Sequence
  Description of Artificial Sequence: Synthetic oligonucleotide
uuaugucaaaucgaaagua

SEQ ID NO: 565030 - RNA, 19 nt, Artificial Sequence
  Description of Artificial Sequence: Synthetic oligonucleotide
ugagacguuggacacguuc

SEQ ID NO: 565031 - RNA, 19 nt, Artificial Sequence
  Description of Artificial Sequence: Synthetic oligonucleotide
uguccucggauguaggagc

SEQ ID NO: 565032 - RNA, 19 nt, Artificial Sequence
  Description of Artificial Sequence: Synthetic oligonucleotide
gaagcuucauggauccugg

SEQ ID NO: 565033 - RNA, 19 nt, Artificial Sequence
  Description of Artificial Sequence: Synthetic oligonucleotide
aguuaagagugugagcgag

SEQ ID NO: 565034 - RNA, 19 nt, Artificial Sequence
  Description of Artificial Sequence: Synthetic oligonucleotide
ucuugauguaguagugugu

SEQ ID NO: 565035 - RNA, 19 nt, Artificial Sequence
  Description of Artificial Sequence: Synthetic oligonucleotide
uccacucggggcauaaagc

SEQ ID NO: 565036 - RNA, 19 nt, Artificial Sequence
  Description of Artificial Sequence: Synthetic oligonucleotide
guagucuguagcauugggg

SEQ ID NO: 565037 - RNA, 19 nt, Artificial Sequence
  Description of Artificial Sequence: Synthetic oligonucleotide
gugccaagcaaugaucucg

SEQ ID NO: 565038 - RNA, 19 nt, Artificial Sequence
  Description of Artificial Sequence: Synthetic oligonucleotide
cuugauguaguaguguguc

SEQ ID NO: 565039 - RNA, 19 nt, Artificial Sequence
  Description of Artificial Sequence: Synthetic oligonucleotide
ugaccuggcaagccacucg

SEQ ID NO: 565040 - RNA, 19 nt, Artificial Sequence
  Description of Artificial Sequence: Synthetic oligonucleotide
aaggauuuugauccacuuu

SEQ ID NO: 565041 - RNA, 19 nt, Artificial Sequence
  Description of Artificial Sequence: Synthetic oligonucleotide
uggacgguuggcaucuaag

SEQ ID NO: 565042 - RNA, 19 nt, Artificial Sequence
  Description of Artificial Sequence: Synthetic oligonucleotide
ugcgguguugguguugucg

SEQ ID NO: 565043 - RNA, 19 nt, Artificial Sequence
  Description of Artificial Sequence: Synthetic oligonucleotide
ugcgaugcccgcugcagcg

SEQ ID NO: 565044 - RNA, 19 nt, Artificial Sequence
  Description of Artificial Sequence: Synthetic oligonucleotide
ucuggacaauuuccacucg

SEQ ID NO: 565045 - RNA, 19 nt, Artificial Sequence
  Description of Artificial Sequence: Synthetic oligonucleotide
aaguuaagagugugagcga

SEQ ID NO: 565046 - RNA, 19 nt, Artificial Sequence
  Description of Artificial Sequence: Synthetic oligonucleotide
ugaaccaaggagaccaguu

SEQ ID NO: 565047 - RNA, 19 nt, Artificial Sequence
  Description of Artificial Sequence: Synthetic oligonucleotide
caaacuacugggaaaguaa

SEQ ID NO: 565048 - RNA, 19 nt, Artificial Sequence
  Description of Artificial Sequence: Synthetic oligonucleotide
cuggacaauuuccacucgg

SEQ ID NO: 565049 - RNA, 19 nt, Artificial Sequence
  Description of Artificial Sequence: Synthetic oligonucleotide
uuagcucaagaaccggcac

SEQ ID NO: 565050 - RNA, 19 nt, Artificial Sequence
  Description of Artificial Sequence: Synthetic oligonucleotide
aaaucgaaaguaagcgaca

SEQ ID NO: 565051 - RNA, 19 nt, Artificial Sequence
  Description of Artificial Sequence: Synthetic oligonucleotide
uggcuccggaauaugacug

SEQ ID NO: 565052 - RNA, 19 nt, Artificial Sequence
  Description of Artificial Sequence: Synthetic oligonucleotide
ucccacaugucaugcaagc

SEQ ID NO: 565053 - RNA, 19 nt, Artificial Sequence
  Description of Artificial Sequence: Synthetic oligonucleotide
aucuccacgagggaaagug

SEQ ID NO: 565054 - RNA, 19 nt, Artificial Sequence
  Description of Artificial Sequence: Synthetic oligonucleotide
uccacgagggaaagugaag

SEQ ID NO: 565055 - RNA, 19 nt, Artificial Sequence
  Description of Artificial Sequence: Synthetic oligonucleotide
ugcaggacgaauucugcaa

SEQ ID NO: 565056 - RNA, 19 nt, Artificial Sequence
  Description of Artificial Sequence: Synthetic oligonucleotide
cacaaggcgcaucuguggg

SEQ ID NO: 565057 - RNA, 19 nt, Artificial Sequence
  Description of Artificial Sequence: Synthetic oligonucleotide
gcgacauucagcuugccug

SEQ ID NO: 565058 - RNA, 19 nt, Artificial Sequence
  Description of Artificial Sequence: Synthetic oligonucleotide
gacgaauucugcaaagcca

SEQ ID NO: 565059 - RNA, 19 nt, Artificial Sequence
  Description of Artificial Sequence: Synthetic oligonucleotide
gccaaugagugccagcugg

SEQ ID NO: 565060 - RNA, 19 nt, Artificial Sequence
  Description of Artificial Sequence: Synthetic oligonucleotide
gacgguuggcaucuaaguc

SEQ ID NO: 565061 - RNA, 19 nt, Artificial Sequence
  Description of Artificial Sequence: Synthetic oligonucleotide
cugacuugcaccacauauc

SEQ ID NO: 565062 - RNA, 19 nt, Artificial Sequence
  Description of Artificial Sequence: Synthetic oligonucleotide
gacgagagagcaccucucc

SEQ ID NO: 565063 - RNA, 19 nt, Artificial Sequence
  Description of Artificial Sequence: Synthetic oligonucleotide
ucacauuccggguggggug

SEQ ID NO: 565064 - RNA, 19 nt, Artificial Sequence
  Description of Artificial Sequence: Synthetic oligonucleotide
uuaugcuucuggacaauuu

SEQ ID NO: 565065 - RNA, 19 nt, Artificial Sequence
  Description of Artificial Sequence: Synthetic oligonucleotide
ggacgaauucugcaaagcc

SEQ ID NO: 565066 - RNA, 19 nt, Artificial Sequence
  Description of Artificial Sequence: Synthetic oligonucleotide
ggacaauuuccacucgggg

SEQ ID NO: 565067 - RNA, 19 nt, Artificial Sequence
  Description of Artificial Sequence: Synthetic oligonucleotide
agacguuggacacguucuc

SEQ ID NO: 565068 - RNA, 19 nt, Artificial Sequence
  Description of Artificial Sequence: Synthetic oligonucleotide
cucuaugaggaagaauuug

SEQ ID NO: 565069 - RNA, 19 nt, Artificial Sequence
  Description of Artificial Sequence: Synthetic oligonucleotide
ucguguucaaugccuuucu

SEQ ID NO: 565070 - RNA, 19 nt, Artificial Sequence
  Description of Artificial Sequence: Synthetic oligonucleotide
aagaagauucacacagcga

SEQ ID NO: 565071 - RNA, 19 nt, Artificial Sequence
  Description of Artificial Sequence: Synthetic oligonucleotide
ccggaaacaccaauggugg

SEQ ID NO: 565072 - RNA, 19 nt, Artificial Sequence
  Description of Artificial Sequence: Synthetic oligonucleotide
ugugagcgagagaggaggc

SEQ ID NO: 565073 - RNA, 19 nt, Artificial Sequence
  Description of Artificial Sequence: Synthetic oligonucleotide
aagcuucauggauccuggg

SEQ ID NO: 565074 - RNA, 19 nt, Artificial Sequence
  Description of Artificial Sequence: Synthetic oligonucleotide
ucucggaggaccugauggc

SEQ ID NO: 565075 - RNA, 19 nt, Artificial Sequence
  Description of Artificial Sequence: Synthetic oligonucleotide
uucucguguccucggaugu

SEQ ID NO: 565076 - RNA, 19 nt, Artificial Sequence
  Description of Artificial Sequence: Synthetic oligonucleotide
augucaugcaagcugcgau

SEQ ID NO: 565077 - RNA, 19 nt, Artificial Sequence
  Description of Artificial Sequence: Synthetic oligonucleotide
acauagguuguccaagcua

SEQ ID NO: 565078 - RNA, 19 nt, Artificial Sequence
  Description of Artificial Sequence: Synthetic oligonucleotide
aacuacugggaaaguaacu

SEQ ID NO: 565079 - RNA, 19 nt, Artificial Sequence
  Description of Artificial Sequence: Synthetic oligonucleotide
ugccaagcaaugaucucgu

SEQ ID NO: 565080 - RNA, 19 nt, Artificial Sequence
  Description of Artificial Sequence: Synthetic oligonucleotide
cauaucuggccgcaaagca

SEQ ID NO: 565081 - RNA, 19 nt, Artificial Sequence
  Description of Artificial Sequence: Synthetic oligonucleotide
gggguugucguguucaaug

SEQ ID NO: 565082 - RNA, 19 nt, Artificial Sequence
  Description of Artificial Sequence: Synthetic oligonucleotide
gauucacacagcgacgaga

SEQ ID NO: 565083 - RNA, 19 nt, Artificial Sequence
  Description of Artificial Sequence: Synthetic oligonucleotide
ucucuaauggcagcagccu

SEQ ID NO: 565084 - RNA, 19 nt, Artificial Sequence
  Description of Artificial Sequence: Synthetic oligonucleotide
gacaaaguuaagaguguga

SEQ ID NO: 565085 - RNA, 19 nt, Artificial Sequence
  Description of Artificial Sequence: Synthetic oligonucleotide
agcggcuugaagcuacuga

SEQ ID NO: 565086 - RNA, 19 nt, Artificial Sequence
  Description of Artificial Sequence: Synthetic oligonucleotide
uggugaacuggcccuucag

SEQ ID NO: 565087 - RNA, 19 nt, Artificial Sequence
  Description of Artificial Sequence: Synthetic oligonucleotide
auuagcucaagaaccggca

SEQ ID NO: 565088 - RNA, 19 nt, Artificial Sequence
  Description of Artificial Sequence: Synthetic oligonucleotide
ccugucauaguaacgggag

SEQ ID NO: 565089 - RNA, 19 nt, Artificial Sequence
  Description of Artificial Sequence: Synthetic oligonucleotide
gggugugagacggaaaggg

SEQ ID NO: 565090 - RNA, 19 nt, Artificial Sequence
  Description of Artificial Sequence: Synthetic oligonucleotide
auuagauuaugaagcuuca

SEQ ID NO: 565091 - RNA, 19 nt, Artificial Sequence
  Description of Artificial Sequence: Synthetic oligonucleotide
ucggauguaggagccugcg

SEQ ID NO: 565092 - RNA, 19 nt, Artificial Sequence
  Description of Artificial Sequence: Synthetic oligonucleotide
uaguaacgggagauggggu

SEQ ID NO: 565093 - RNA, 19 nt, Artificial Sequence
  Description of Artificial Sequence: Synthetic oligonucleotide
aaguggguaacaaggcaga

SEQ ID NO: 565094 - RNA, 19 nt, Artificial Sequence
  Description of Artificial Sequence: Synthetic oligonucleotide
guugucguugaccuggcaa

SEQ ID NO: 565095 - RNA, 19 nt, Artificial Sequence
  Description of Artificial Sequence: Synthetic oligonucleotide
uaacaucucaggguugagu

SEQ ID NO: 565096 - RNA, 19 nt, Artificial Sequence
  Description of Artificial Sequence: Synthetic oligonucleotide
cauaguucaccugguucgg

SEQ ID NO: 565097 - RNA, 19 nt, Artificial Sequence
  Description of Artificial Sequence: Synthetic oligonucleotide
gagcgaggucuccacagcc

SEQ ID NO: 565098 - RNA, 19 nt, Artificial Sequence
  Description of Artificial Sequence: Synthetic oligonucleotide
aguucaccugguucggcug

SEQ ID NO: 565099 - RNA, 19 nt, Artificial Sequence
  Description of Artificial Sequence: Synthetic oligonucleotide
ucuccacgagggaaaguga

SEQ ID NO: 565100 - RNA, 19 nt, Artificial Sequence
  Description of Artificial Sequence: Synthetic oligonucleotide
ugcgacauagguuguccaa

SEQ ID NO: 565101 - RNA, 19 nt, Artificial Sequence
  Description of Artificial Sequence: Synthetic oligonucleotide
caggacgaauucugcaaag

SEQ ID NO: 565102 - RNA, 19 nt, Artificial Sequence
  Description of Artificial Sequence: Synthetic oligonucleotide
acucggggcauaaagcgag

SEQ ID NO: 565103 - RNA, 19 nt, Artificial Sequence
  Description of Artificial Sequence: Synthetic oligonucleotide
acguuggacacguucucca

SEQ ID NO: 565104 - RNA, 19 nt, Artificial Sequence
  Description of Artificial Sequence: Synthetic oligonucleotide
aagguccaguagucuguag

SEQ ID NO: 565105 - RNA, 19 nt, Artificial Sequence
  Description of Artificial Sequence: Synthetic oligonucleotide
ugagacggaaagggacugg

SEQ ID NO: 565106 - RNA, 19 nt, Artificial Sequence
  Description of Artificial Sequence: Synthetic oligonucleotide
cuccggaauaugacugugc

SEQ ID NO: 565107 - RNA, 19 nt, Artificial Sequence
  Description of Artificial Sequence: Synthetic oligonucleotide
agcgacauucagcuugccu

SEQ ID NO: 565108 - RNA, 19 nt, Artificial Sequence
  Description of Artificial Sequence: Synthetic oligonucleotide
cauagguuguccaagcuau

SEQ ID NO: 565109 - RNA, 19 nt, Artificial Sequence
  Description of Artificial Sequence: Synthetic oligonucleotide
augcaggacgaauucugca

SEQ ID NO: 565110 - RNA, 19 nt, Artificial Sequence
  Description of Artificial Sequence: Synthetic oligonucleotide
acaucucaggguugagucu

SEQ ID NO: 565111 - RNA, 19 nt, Artificial Sequence
  Description of Artificial Sequence: Synthetic oligonucleotide
ugacuguagcacaguuagc

SEQ ID NO: 565112 - RNA, 19 nt, Artificial Sequence
  Description of Artificial Sequence: Synthetic oligonucleotide
aaacuaccccacgggaucu

SEQ ID NO: 565113 - RNA, 19 nt, Artificial Sequence
  Description of Artificial Sequence: Synthetic oligonucleotide
uuagauuaugaagcuucau

SEQ ID NO: 565114 - RNA, 19 nt, Artificial Sequence
  Description of Artificial Sequence: Synthetic oligonucleotide
ucagcgggccggaaacacc

SEQ ID NO: 565115 - RNA, 19 nt, Artificial Sequence
  Description of Artificial Sequence: Synthetic oligonucleotide
agauucacacagcgacgag

SEQ ID NO: 565116 - RNA, 19 nt, Artificial Sequence
  Description of Artificial Sequence: Synthetic oligonucleotide
cugagcaaucuguaacauc

SEQ ID NO: 565117 - RNA, 19 nt, Artificial Sequence
  Description of Artificial Sequence: Synthetic oligonucleotide
uaccacggagaggaaaccc

SEQ ID NO: 565118 - RNA, 19 nt, Artificial Sequence
  Description of Artificial Sequence: Synthetic oligonucleotide
uucggcugcuccacaguca

SEQ ID NO: 565119 - RNA, 19 nt, Artificial Sequence
  Description of Artificial Sequence: Synthetic oligonucleotide
gccggaaacaccaauggug

SEQ ID NO: 565120 - RNA, 19 nt, Artificial Sequence
  Description of Artificial Sequence: Synthetic oligonucleotide
gaaagggacuggacgguug

SEQ ID NO: 565121 - RNA, 19 nt, Artificial Sequence
  Description of Artificial Sequence: Synthetic oligonucleotide
acaaacuacugggaaagua

SEQ ID NO: 565122 - RNA, 19 nt, Artificial Sequence
  Description of Artificial Sequence: Synthetic oligonucleotide
gacguuggacacguucucc

SEQ ID NO: 565123 - RNA, 19 nt, Artificial Sequence
  Description of Artificial Sequence: Synthetic oligonucleotide
ugcacgucacacugaggca

SEQ ID NO: 565124 - RNA, 19 nt, Artificial Sequence
  Description of Artificial Sequence: Synthetic oligonucleotide
cacaacccgaggaacugug

SEQ ID NO: 565125 - RNA, 19 nt, Artificial Sequence
  Description of Artificial Sequence: Synthetic oligonucleotide
gaggcguguggacggcucg

SEQ ID NO: 565126 - RNA, 19 nt, Artificial Sequence
  Description of Artificial Sequence: Synthetic oligonucleotide
ugugccaagcaaugaucuc

SEQ ID NO: 565127 - RNA, 19 nt, Artificial Sequence
  Description of Artificial Sequence: Synthetic oligonucleotide
ugucguugaccuggcaagc

SEQ ID NO: 565128 - RNA, 19 nt, Artificial Sequence
  Description of Artificial Sequence: Synthetic oligonucleotide
gucugagcugagaaauuag

SEQ ID NO: 565129 - RNA, 19 nt, Artificial Sequence
  Description of Artificial Sequence: Synthetic oligonucleotide
cacgguguccgugugcugc

SEQ ID NO: 565130 - RNA, 19 nt, Artificial Sequence
  Description of Artificial Sequence: Synthetic oligonucleotide
auaaagcgagcaaucuuga

SEQ ID NO: 565131 - RNA, 19 nt, Artificial Sequence
  Description of Artificial Sequence: Synthetic oligonucleotide
caaaucucacgcucuuuca

SEQ ID NO: 565132 - RNA, 19 nt, Artificial Sequence
  Description of Artificial Sequence: Synthetic oligonucleotide
uugagucuauugagaugca

SEQ ID NO: 565133 - RNA, 19 nt, Artificial Sequence
  Description of Artificial Sequence: Synthetic oligonucleotide
gcaggaguaccacggagag

SEQ ID NO: 565134 - RNA, 19 nt, Artificial Sequence
  Description of Artificial Sequence: Synthetic oligonucleotide
cauuggggaaggugugcag

SEQ ID NO: 565135 - RNA, 19 nt, Artificial Sequence
  Description of Artificial Sequence: Synthetic oligonucleotide
ugucucggaggaccugaug

SEQ ID NO: 565136 - RNA, 19 nt, Artificial Sequence
  Description of Artificial Sequence: Synthetic oligonucleotide
ucccggagcacaguuuuca

SEQ ID NO: 565137 - RNA, 19 nt, Artificial Sequence
  Description of Artificial Sequence: Synthetic oligonucleotide
uccgugugcugcuugucaa

SEQ ID NO: 565138 - RNA, 19 nt, Artificial Sequence
  Description of Artificial Sequence: Synthetic oligonucleotide
uguugggugugagacggaa

SEQ ID NO: 565139 - RNA, 19 nt, Artificial Sequence
  Description of Artificial Sequence: Synthetic oligonucleotide
cagucagcgggccggaaac

SEQ ID NO: 565140 - RNA, 19 nt, Artificial Sequence
  Description of Artificial Sequence: Synthetic oligonucleotide
gaaguugggcugggcaaag

SEQ ID NO: 565141 - RNA, 19 nt, Artificial Sequence
  Description of Artificial Sequence: Synthetic oligonucleotide
caucucggaagcugcucag

SEQ ID NO: 565142 - RNA, 19 nt, Artificial Sequence
  Description of Artificial Sequence: Synthetic oligonucleotide
guguccucggauguaggag

SEQ ID NO: 565143 - RNA, 19 nt, Artificial Sequence
  Description of Artificial Sequence: Synthetic oligonucleotide
uccggguggggugacagcu

SEQ ID NO: 565144 - RNA, 19 nt, Artificial Sequence
  Description of Artificial Sequence: Synthetic oligonucleotide
ugugucggcuuaggcauca

SEQ ID NO: 565145 - RNA, 19 nt, Artificial Sequence
  Description of Artificial Sequence: Synthetic oligonucleotide
ggguugucguguucaaugc

SEQ ID NO: 565146 - RNA, 19 nt, Artificial Sequence
  Description of Artificial Sequence: Synthetic oligonucleotide
auuccggguggggugacag

SEQ ID NO: 565147 - RNA, 19 nt, Artificial Sequence
  Description of Artificial Sequence: Synthetic oligonucleotide
ggaaaacgggguccugggg

SEQ ID NO: 565148 - RNA, 19 nt, Artificial Sequence
  Description of Artificial Sequence: Synthetic oligonucleotide
agcaucucggaagcugcuc

SEQ ID NO: 565149 - RNA, 19 nt, Artificial Sequence
  Description of Artificial Sequence: Synthetic oligonucleotide
ugucggcuuaggcaucaaa

SEQ ID NO: 565150 - RNA, 19 nt, Artificial Sequence
  Description of Artificial Sequence: Synthetic oligonucleotide
ugcccggcggccgacaaug

SEQ ID NO: 565151 - RNA, 19 nt, Artificial Sequence
  Description of Artificial Sequence: Synthetic oligonucleotide
gagacggaaagggacugga

SEQ ID NO: 565152 - RNA, 19 nt, Artificial Sequence
  Description of Artificial Sequence: Synthetic oligonucleotide
cucggauguaggagccugc

SEQ ID NO: 565153 - RNA, 19 nt, Artificial Sequence
  Description of Artificial Sequence: Synthetic oligonucleotide
guaacuaaauaaagugggu

SEQ ID NO: 565154 - RNA, 19 nt, Artificial Sequence
  Description of Artificial Sequence: Synthetic oligonucleotide
gucuauugagaugcaggac

SEQ ID NO: 565155 - RNA, 19 nt, Artificial Sequence
  Description of Artificial Sequence: Synthetic oligonucleotide
caggguccaugcgacauag

SEQ ID NO: 565156 - RNA, 19 nt, Artificial Sequence
  Description of Artificial Sequence: Synthetic oligonucleotide
cuuugguguucccacaugu

SEQ ID NO: 565157 - RNA, 19 nt, Artificial Sequence
  Description of Artificial Sequence: Synthetic oligonucleotide
gucggcuuaggcaucaaaa

SEQ ID NO: 565158 - RNA, 19 nt, Artificial Sequence
  Description of Artificial Sequence: Synthetic oligonucleotide
guucggcugcuccacaguc

SEQ ID NO: 565159 - RNA, 19 nt, Artificial Sequence
  Description of Artificial Sequence: Synthetic oligonucleotide
ccuggcaaugacuggcucc

SEQ ID NO: 565160 - RNA, 19 nt, Artificial Sequence
  Description of Artificial Sequence: Synthetic oligonucleotide
gccgcacuggagaacaugg

SEQ ID NO: 565161 - RNA, 19 nt, Artificial Sequence
  Description of Artificial Sequence: Synthetic oligonucleotide
uguugucguugaccuggca

SEQ ID NO: 565162 - RNA, 19 nt, Artificial Sequence
  Description of Artificial Sequence: Synthetic oligonucleotide
aacuaccccacgggaucuc

SEQ ID NO: 565163 - RNA, 19 nt, Artificial Sequence
  Description of Artificial Sequence: Synthetic oligonucleotide
ggugaacaucuuccggaag

SEQ ID NO: 565164 - RNA, 19 nt, Artificial Sequence
  Description of Artificial Sequence: Synthetic oligonucleotide
caguagucuguagcauugg

SEQ ID NO: 565165 - RNA, 19 nt, Artificial Sequence
  Description of Artificial Sequence: Synthetic oligonucleotide
uagccucaaggauuuugau

SEQ ID NO: 565166 - RNA, 19 nt, Artificial Sequence
  Description of Artificial Sequence: Synthetic oligonucleotide
agaccaguugcuggcuguc

SEQ ID NO: 565167 - RNA, 19 nt, Artificial Sequence
  Description of Artificial Sequence: Synthetic oligonucleotide
uccaugcgacauagguugu

SEQ ID NO: 565168 - RNA, 19 nt, Artificial Sequence
  Description of Artificial Sequence: Synthetic oligonucleotide
gacauagguuguccaagcu

SEQ ID NO: 565169 - RNA, 19 nt, Artificial Sequence
  Description of Artificial Sequence: Synthetic oligonucleotide
gacccugcgguguuggugu

SEQ ID NO: 565170 - RNA, 19 nt, Artificial Sequence
  Description of Artificial Sequence: Synthetic oligonucleotide
cguguuaugcuucuggaca

SEQ ID NO: 565171 - RNA, 19 nt, Artificial Sequence
  Description of Artificial Sequence: Synthetic oligonucleotide
aaucugcacgucacacuga

SEQ ID NO: 565172 - RNA, 19 nt, Artificial Sequence
  Description of Artificial Sequence: Synthetic oligonucleotide
gccgacaauggagaggaag

SEQ ID NO: 565173 - RNA, 19 nt, Artificial Sequence
  Description of Artificial Sequence: Synthetic oligonucleotide
uaccccacgggaucuccac

SEQ ID NO: 565174 - RNA, 19 nt, Artificial Sequence
  Description of Artificial Sequence: Synthetic oligonucleotide
gugagacggaaagggacug

SEQ ID NO: 565175 - RNA, 19 nt, Artificial Sequence
  Description of Artificial Sequence: Synthetic oligonucleotide
accacggagaggaaacccu

SEQ ID NO: 565176 - RNA, 19 nt, Artificial Sequence
  Description of Artificial Sequence: Synthetic oligonucleotide
guugucguguucaaugccu

SEQ ID NO: 565177 - RNA, 19 nt, Artificial Sequence
  Description of Artificial Sequence: Synthetic oligonucleotide
acaugucaugcaagcugcg

SEQ ID NO: 565178 - RNA, 19 nt, Artificial Sequence
  Description of Artificial Sequence: Synthetic oligonucleotide
uauugagaugcaggacgaa

SEQ ID NO: 565179 - RNA, 19 nt, Artificial Sequence
  Description of Artificial Sequence: Synthetic oligonucleotide
ccacaaggcgcaucugugg

SEQ ID NO: 565180 - RNA, 19 nt, Artificial Sequence
  Description of Artificial Sequence: Synthetic oligonucleotide
ucggggcauaaagcgagca

SEQ ID NO: 565181 - RNA, 19 nt, Artificial Sequence
  Description of Artificial Sequence: Synthetic oligonucleotide
ggcaagaagagagucagcu

SEQ ID NO: 565182 - RNA, 19 nt, Artificial Sequence
  Description of Artificial Sequence: Synthetic oligonucleotide
gcucgcagcacuuuggugu

SEQ ID NO: 565183 - RNA, 19 nt, Artificial Sequence
  Description of Artificial Sequence: Synthetic oligonucleotide
aucuaaguccccaguugca

SEQ ID NO: 565184 - RNA, 19 nt, Artificial Sequence
  Description of Artificial Sequence: Synthetic oligonucleotide
guuaagagugugagcgaga

SEQ ID NO: 565185 - RNA, 19 nt, Artificial Sequence
  Description of Artificial Sequence: Synthetic oligonucleotide
acucggaggccgcacugga

SEQ ID NO: 565186 - RNA, 19 nt, Artificial Sequence
  Description of Artificial Sequence: Synthetic oligonucleotide
guaacaucucaggguugag

SEQ ID NO: 565187 - RNA, 19 nt, Artificial Sequence
  Description of Artificial Sequence: Synthetic oligonucleotide
uguuaugcuucuggacaau

SEQ ID NO: 565188 - RNA, 19 nt, Artificial Sequence
  Description of Artificial Sequence: Synthetic oligonucleotide
agcgacgagagagcaccuc

SEQ ID NO: 565189 - RNA, 19 nt, Artificial Sequence
  Description of Artificial Sequence: Synthetic oligonucleotide
gguugagacguuggacacg

SEQ ID NO: 565190 - RNA, 19 nt, Artificial Sequence
  Description of Artificial Sequence: Synthetic oligonucleotide
gucguugaccuggcaagcc

SEQ ID NO: 565191 - RNA, 19 nt, Artificial Sequence
  Description of Artificial Sequence: Synthetic oligonucleotide
gacuugcaccacauaucug

SEQ ID NO: 565192 - RNA, 19 nt, Artificial Sequence
  Description of Artificial Sequence: Synthetic oligonucleotide
cacgcucuuucacacacaa

SEQ ID NO: 565193 - RNA, 19 nt, Artificial Sequence
  Description of Artificial Sequence: Synthetic oligonucleotide
gcgacauagguuguccaag

SEQ ID NO: 565194 - RNA, 19 nt, Artificial Sequence
  Description of Artificial Sequence: Synthetic oligonucleotide
cucggggcauaaagcgagc

SEQ ID NO: 565195 - RNA, 19 nt, Artificial Sequence
  Description of Artificial Sequence: Synthetic oligonucleotide
aggcguguggacggcucgc

SEQ ID NO: 565196 - RNA, 19 nt, Artificial Sequence
  Description of Artificial Sequence: Synthetic oligonucleotide
aacgggagaugggguuguc

SEQ ID NO: 565197 - RNA, 19 nt, Artificial Sequence
  Description of Artificial Sequence: Synthetic oligonucleotide
guaccacggagaggaaacc

SEQ ID NO: 565198 - RNA, 19 nt, Artificial Sequence
  Description of Artificial Sequence: Synthetic oligonucleotide
cacauuucacauuccgggu

SEQ ID NO: 565199 - RNA, 19 nt, Artificial Sequence
  Description of Artificial Sequence: Synthetic oligonucleotide
guccgugugcugcuuguca

SEQ ID NO: 565200 - RNA, 19 nt, Artificial Sequence
  Description of Artificial Sequence: Synthetic oligonucleotide
cagcgggccggaaacacca

SEQ ID NO: 565201 - RNA, 19 nt, Artificial Sequence
  Description of Artificial Sequence: Synthetic oligonucleotide
acggcucgcagcacuuugg

SEQ ID NO: 565202 - RNA, 19 nt, Artificial Sequence
  Description of Artificial Sequence: Synthetic oligonucleotide
ccgcaaagcagucuuaaga

SEQ ID NO: 565203 - RNA, 19 nt, Artificial Sequence
  Description of Artificial Sequence: Synthetic oligonucleotide
ucggcgggccagugacucg

SEQ ID NO: 565204 - RNA, 19 nt, Artificial Sequence
  Description of Artificial Sequence: Synthetic oligonucleotide
gaggcacauuucacauucc

SEQ ID NO: 565205 - RNA, 19 nt, Artificial Sequence
  Description of Artificial Sequence: Synthetic oligonucleotide
gaccaguugcuggcugucc

SEQ ID NO: 565206 - RNA, 19 nt, Artificial Sequence
  Description of Artificial Sequence: Synthetic oligonucleotide
ucauggauccugggacacu

SEQ ID NO: 565207 - RNA, 19 nt, Artificial Sequence
  Description of Artificial Sequence: Synthetic oligonucleotide
aggaaacccuuaaauuaaa

SEQ ID NO: 565208 - RNA, 19 nt, Artificial Sequence
  Description of Artificial Sequence: Synthetic oligonucleotide
ugacagcuuucugaaccaa

SEQ ID NO: 565209 - RNA, 19 nt, Artificial Sequence
  Description of Artificial Sequence: Synthetic oligonucleotide
gaguaccacggagaggaaa

SEQ ID NO: 565210 - RNA, 19 nt, Artificial Sequence
  Description of Artificial Sequence: Synthetic oligonucleotide
cuauuggcggcagccacca

SEQ ID NO: 565211 - RNA, 19 nt, Artificial Sequence
  Description of Artificial Sequence: Synthetic oligonucleotide
caggaguaccacggagagg

SEQ ID NO: 565212 - RNA, 19 nt, Artificial Sequence
  Description of Artificial Sequence: Synthetic oligonucleotide
caugucaugcaagcugcga

SEQ ID NO: 565213 - RNA, 19 nt, Artificial Sequence
  Description of Artificial Sequence: Synthetic oligonucleotide
uauuggcggcagccaccag

SEQ ID NO: 565214 - RNA, 19 nt, Artificial Sequence
  Description of Artificial Sequence: Synthetic oligonucleotide
gagcgagagaggaggcgug

SEQ ID NO: 565215 - RNA, 19 nt, Artificial Sequence
  Description of Artificial Sequence: Synthetic oligonucleotide
aaacgggguccuggggcug

SEQ ID NO: 565216 - RNA, 19 nt, Artificial Sequence
  Description of Artificial Sequence: Synthetic oligonucleotide
uuccggguggggugacagc

SEQ ID NO: 565217 - RNA, 19 nt, Artificial Sequence
  Description of Artificial Sequence: Synthetic oligonucleotide
ucccuccgggacaaaucuc

SEQ ID NO: 565218 - RNA, 19 nt, Artificial Sequence
  Description of Artificial Sequence: Synthetic oligonucleotide
ggugacccugcgguguugg

SEQ ID NO: 565219 - RNA, 19 nt, Artificial Sequence
  Description of Artificial Sequence: Synthetic oligonucleotide
cuuucucaaucugcacguc

SEQ ID NO: 565220 - RNA, 19 nt, Artificial Sequence
  Description of Artificial Sequence: Synthetic oligonucleotide
guuccccgugccugcacug

SEQ ID NO: 565221 - RNA, 19 nt, Artificial Sequence
  Description of Artificial Sequence: Synthetic oligonucleotide
gcugagaaauuagcucaag

SEQ ID NO: 565222 - RNA, 19 nt, Artificial Sequence
  Description of Artificial Sequence: Synthetic oligonucleotide
gacuggacgguuggcaucu

SEQ ID NO: 565223 - RNA, 19 nt, Artificial Sequence
  Description of Artificial Sequence: Synthetic oligonucleotide
ggaccugauggcuggccug

SEQ ID NO: 565224 - RNA, 19 nt, Artificial Sequence
  Description of Artificial Sequence: Synthetic oligonucleotide
gucagcgggccggaaacac

SEQ ID NO: 565225 - RNA, 19 nt, Artificial Sequence
  Description of Artificial Sequence: Synthetic oligonucleotide
ccguguuaugcuucuggac

SEQ ID NO: 565226 - RNA, 19 nt, Artificial Sequence
  Description of Artificial Sequence: Synthetic oligonucleotide
uggacggcucgcagcacuu

SEQ ID NO: 565227 - RNA, 19 nt, Artificial Sequence
  Description of Artificial Sequence: Synthetic oligonucleotide
gccgcaaagcagucuuaag

SEQ ID NO: 565228 - RNA, 19 nt, Artificial Sequence
  Description of Artificial Sequence: Synthetic oligonucleotide
agcgaggucuccacagcca

SEQ ID NO: 565229 - RNA, 19 nt, Artificial Sequence
  Description of Artificial Sequence: Synthetic oligonucleotide
ccggcggccgacaauggag

SEQ ID NO: 565230 - RNA, 19 nt, Artificial Sequence
  Description of Artificial Sequence: Synthetic oligonucleotide
cucggcgggccagugacuc

SEQ ID NO: 565231 - RNA, 19 nt, Artificial Sequence
  Description of Artificial Sequence: Synthetic oligonucleotide
ccgggcgacagcaaucaug

SEQ ID NO: 565232 - RNA, 19 nt, Artificial Sequence
  Description of Artificial Sequence: Synthetic oligonucleotide
caaggauuuugauccacuu

SEQ ID NO: 565233 - RNA, 19 nt, Artificial Sequence
  Description of Artificial Sequence: Synthetic oligonucleotide
cagggcccacucuuucaac

SEQ ID NO: 565234 - RNA, 19 nt, Artificial Sequence
  Description of Artificial Sequence: Synthetic oligonucleotide
agcgagagaggaggcgugu

SEQ ID NO: 565235 - RNA, 19 nt, Artificial Sequence
  Description of Artificial Sequence: Synthetic oligonucleotide
gccguguuaugcuucugga

SEQ ID NO: 565236 - RNA, 19 nt, Artificial Sequence
  Description of Artificial Sequence: Synthetic oligonucleotide
gcaggacgaauucugcaaa

SEQ ID NO: 565237 - RNA, 19 nt, Artificial Sequence
  Description of Artificial Sequence: Synthetic oligonucleotide
ucgucccggagcacaguuu

SEQ ID NO: 565238 - RNA, 19 nt, Artificial Sequence
  Description of Artificial Sequence: Synthetic oligonucleotide
ggacgguuggcaucuaagu

SEQ ID NO: 565239 - RNA, 19 nt, Artificial Sequence
  Description of Artificial Sequence: Synthetic oligonucleotide
ggguugagucuauugagau

SEQ ID NO: 565240 - RNA, 19 nt, Artificial Sequence
  Description of Artificial Sequence: Synthetic oligonucleotide
acauuccggguggggugac

SEQ ID NO: 565241 - RNA, 19 nt, Artificial Sequence
  Description of Artificial Sequence: Synthetic oligonucleotide
gcaccucuccaggugaccc

SEQ ID NO: 565242 - RNA, 19 nt, Artificial Sequence
  Description of Artificial Sequence: Synthetic oligonucleotide
acaacccgaggaacuguga

SEQ ID NO: 565243 - RNA, 19 nt, Artificial Sequence
  Description of Artificial Sequence: Synthetic oligonucleotide
gcaagccacucggaugagg

SEQ ID NO: 565244 - RNA, 19 nt, Artificial Sequence
  Description of Artificial Sequence: Synthetic oligonucleotide
aucuggccgcaaagcaguc

SEQ ID NO: 565245 - RNA, 19 nt, Artificial Sequence
  Description of Artificial Sequence: Synthetic oligonucleotide
cuguacagauauugccaua

SEQ ID NO: 565246 - RNA, 19 nt, Artificial Sequence
  Description of Artificial Sequence: Synthetic oligonucleotide
ggaccauguugcucuggac

SEQ ID NO: 565247 - RNA, 19 nt, Artificial Sequence
  Description of Artificial Sequence: Synthetic oligonucleotide
uuuccacucggggcauaaa

SEQ ID NO: 565248 - RNA, 19 nt, Artificial Sequence
  Description of Artificial Sequence: Synthetic oligonucleotide
guguugucguugaccuggc

SEQ ID NO: 565249 - RNA, 19 nt, Artificial Sequence
  Description of Artificial Sequence: Synthetic oligonucleotide
ggacuggacgguuggcauc

SEQ ID NO: 565250 - RNA, 19 nt, Artificial Sequence
  Description of Artificial Sequence: Synthetic oligonucleotide
cguguggacggcucgcagc

SEQ ID NO: 565251 - RNA, 19 nt, Artificial Sequence
  Description of Artificial Sequence: Synthetic oligonucleotide
uggccgcaaagcagucuua

SEQ ID NO: 565252 - RNA, 19 nt, Artificial Sequence
  Description of Artificial Sequence: Synthetic oligonucleotide
uugcaucguuuaugucaaa

SEQ ID NO: 565253 - RNA, 19 nt, Artificial Sequence
  Description of Artificial Sequence: Synthetic oligonucleotide
aggcgcaucuguggggaga

SEQ ID NO: 565254 - RNA, 19 nt, Artificial Sequence
  Description of Artificial Sequence: Synthetic oligonucleotide
ccacgagggaaagugaaga

SEQ ID NO: 565255 - RNA, 19 nt, Artificial Sequence
  Description of Artificial Sequence: Synthetic oligonucleotide
ccgacaauggagaggaagu

SEQ ID NO: 565256 - RNA, 19 nt, Artificial Sequence
  Description of Artificial Sequence: Synthetic oligonucleotide
cgggacaaaucucacgcuc

SEQ ID NO: 565257 - RNA, 19 nt, Artificial Sequence
  Description of Artificial Sequence: Synthetic oligonucleotide
agucagcgggccggaaaca

SEQ ID NO: 565258 - RNA, 19 nt, Artificial Sequence
  Description of Artificial Sequence: Synthetic oligonucleotide
cacauuccgggugggguga

SEQ ID NO: 565259 - RNA, 19 nt, Artificial Sequence
  Description of Artificial Sequence: Synthetic oligonucleotide
gcuccggaauaugacugug

SEQ ID NO: 565260 - RNA, 19 nt, Artificial Sequence
  Description of Artificial Sequence: Synthetic oligonucleotide
cguugaccuggcaagccac

SEQ ID NO: 565261 - RNA, 19 nt, Artificial Sequence
  Description of Artificial Sequence: Synthetic oligonucleotide
gcggccgacaauggagagg

SEQ ID NO: 565262 - RNA, 19 nt, Artificial Sequence
  Description of Artificial Sequence: Synthetic oligonucleotide
ggcggccgacaauggagag

SEQ ID NO: 565263 - RNA, 19 nt, Artificial Sequence
  Description of Artificial Sequence: Synthetic oligonucleotide
ggguguucaccuugcucuc

SEQ ID NO: 565264 - RNA, 19 nt, Artificial Sequence
  Description of Artificial Sequence: Synthetic oligonucleotide
gcauaaagcgagcaaucuu

SEQ ID NO: 565265 - RNA, 19 nt, Artificial Sequence
  Description of Artificial Sequence: Synthetic oligonucleotide
auagguuguccaagcuauu

SEQ ID NO: 565266 - RNA, 19 nt, Artificial Sequence
  Description of Artificial Sequence: Synthetic oligonucleotide
cacagcgcugcuuguagau

SEQ ID NO: 565267 - RNA, 19 nt, Artificial Sequence
  Description of Artificial Sequence: Synthetic oligonucleotide
gcacuuugguguucccaca

SEQ ID NO: 565268 - RNA, 19 nt, Artificial Sequence
  Description of Artificial Sequence: Synthetic oligonucleotide
ggggcauaaagcgagcaau

SEQ ID NO: 565269 - RNA, 19 nt, Artificial Sequence
  Description of Artificial Sequence: Synthetic oligonucleotide
gaccugauggcuggccugu

SEQ ID NO: 565270 - RNA, 19 nt, Artificial Sequence
  Description of Artificial Sequence: Synthetic oligonucleotide
ucucgucccggagcacagu

SEQ ID NO: 565271 - RNA, 19 nt, Artificial Sequence
  Description of Artificial Sequence: Synthetic oligonucleotide
cccggagcacaguuuucag

SEQ ID NO: 565272 - RNA, 19 nt, Artificial Sequence
  Description of Artificial Sequence: Synthetic oligonucleotide
aggguccaugcgacauagg

SEQ ID NO: 565273 - RNA, 19 nt, Artificial Sequence
  Description of Artificial Sequence: Synthetic oligonucleotide
ccaaugagugccagcugga

SEQ ID NO: 565274 - RNA, 19 nt, Artificial Sequence
  Description of Artificial Sequence: Synthetic oligonucleotide
ggcgcaucuguggggagac

SEQ ID NO: 565275 - RNA, 19 nt, Artificial Sequence
  Description of Artificial Sequence: Synthetic oligonucleotide
caccacauaucuggccgca

SEQ ID NO: 565276 - RNA, 19 nt, Artificial Sequence
  Description of Artificial Sequence: Synthetic oligonucleotide
uugugcucggcgggccagu

SEQ ID NO: 565277 - RNA, 19 nt, Artificial Sequence
  Description of Artificial Sequence: Synthetic oligonucleotide
gggacaaaucucacgcucu

SEQ ID NO: 565278 - RNA, 19 nt, Artificial Sequence
  Description of Artificial Sequence: Synthetic oligonucleotide
cgggccggaaacaccaaug

SEQ ID NO: 565279 - RNA, 19 nt, Artificial Sequence
  Description of Artificial Sequence: Synthetic oligonucleotide
acgucacacugaggcagga

SEQ ID NO: 565280 - RNA, 19 nt, Artificial Sequence
  Description of Artificial Sequence: Synthetic oligonucleotide
gacaaaucucacgcucuuu

SEQ ID NO: 565281 - RNA, 19 nt, Artificial Sequence
  Description of Artificial Sequence: Synthetic oligonucleotide
accacauaucuggccgcaa

SEQ ID NO: 565282 - RNA, 19 nt, Artificial Sequence
  Description of Artificial Sequence: Synthetic oligonucleotide
gcgacgagagagcaccucu

SEQ ID NO: 565283 - RNA, 19 nt, Artificial Sequence
  Description of Artificial Sequence: Synthetic oligonucleotide
cuggacgguuggcaucuaa

SEQ ID NO: 565284 - RNA, 19 nt, Artificial Sequence
  Description of Artificial Sequence: Synthetic oligonucleotide
uugagacguuggacacguu

SEQ ID NO: 565285 - RNA, 19 nt, Artificial Sequence
  Description of Artificial Sequence: Synthetic oligonucleotide
guugugcaggcgggucaug

SEQ ID NO: 565286 - RNA, 19 nt, Artificial Sequence
  Description of Artificial Sequence: Synthetic oligonucleotide
gcagagcgaggucuccaca

SEQ ID NO: 565287 - RNA, 19 nt, Artificial Sequence
  Description of Artificial Sequence: Synthetic oligonucleotide
caccaaugguggucaggaa

SEQ ID NO: 565288 - RNA, 19 nt, Artificial Sequence
  Description of Artificial Sequence: Synthetic oligonucleotide
ccggagcacaguuuucaga

SEQ ID NO: 565289 - RNA, 19 nt, Artificial Sequence
  Description of Artificial Sequence: Synthetic oligonucleotide
ggaccucuuugagaauguc

SEQ ID NO: 565290 - RNA, 19 nt, Artificial Sequence
  Description of Artificial Sequence: Synthetic oligonucleotide
cagcggcuugaagcuacug

SEQ ID NO: 565291 - RNA, 19 nt, Artificial Sequence
  Description of Artificial Sequence: Synthetic oligonucleotide
caucgaacugggccaaguu

SEQ ID NO: 565292 - RNA, 19 nt, Artificial Sequence
  Description of Artificial Sequence: Synthetic oligonucleotide
cucggaggaccugauggcu

SEQ ID NO: 565293 - RNA, 19 nt, Artificial Sequence
  Description of Artificial Sequence: Synthetic oligonucleotide
cugguucggcugcuccaca

SEQ ID NO: 565294 - RNA, 19 nt, Artificial Sequence
  Description of Artificial Sequence: Synthetic oligonucleotide
ggccggaaacaccaauggu

SEQ ID NO: 565295 - RNA, 19 nt, Artificial Sequence
  Description of Artificial Sequence: Synthetic oligonucleotide
ggugacagcugaggucaca

SEQ ID NO: 565296 - RNA, 19 nt, Artificial Sequence
  Description of Artificial Sequence: Synthetic oligonucleotide
gaucuccacgagggaaagu

SEQ ID NO: 565297 - RNA, 19 nt, Artificial Sequence
  Description of Artificial Sequence: Synthetic oligonucleotide
ggccgcaaagcagucuuaa

SEQ ID NO: 565298 - RNA, 19 nt, Artificial Sequence
  Description of Artificial Sequence: Synthetic oligonucleotide
ccucaaggauuuugaucca

SEQ ID NO: 565299 - RNA, 19 nt, Artificial Sequence
  Description of Artificial Sequence: Synthetic oligonucleotide
ggcuccggaauaugacugu

SEQ ID NO: 565300 - RNA, 19 nt, Artificial Sequence
  Description of Artificial Sequence: Synthetic oligonucleotide
gcucccuccgggacaaauc

SEQ ID NO: 565301 - RNA, 19 nt, Artificial Sequence
  Description of Artificial Sequence: Synthetic oligonucleotide
cucgcagcacuuugguguu

SEQ ID NO: 565302 - RNA, 19 nt, Artificial Sequence
  Description of Artificial Sequence: Synthetic oligonucleotide
acgcucuuucacacacaaa

SEQ ID NO: 565303 - RNA, 19 nt, Artificial Sequence
  Description of Artificial Sequence: Synthetic oligonucleotide
gugugucggcuuaggcauc

SEQ ID NO: 565304 - RNA, 19 nt, Artificial Sequence
  Description of Artificial Sequence: Synthetic oligonucleotide
gccaagcaaugaucucguc

SEQ ID NO: 565305 - RNA, 19 nt, Artificial Sequence
  Description of Artificial Sequence: Synthetic oligonucleotide
ccaugcgacauagguuguc

SEQ ID NO: 565306 - RNA, 19 nt, Artificial Sequence
  Description of Artificial Sequence: Synthetic oligonucleotide
caaugagugccagcuggau

SEQ ID NO: 565307 - RNA, 19 nt, Artificial Sequence
  Description of Artificial Sequence: Synthetic oligonucleotide
cucgucccggagcacaguu

SEQ ID NO: 565308 - RNA, 19 nt, Artificial Sequence
  Description of Artificial Sequence: Synthetic oligonucleotide
cccacgggaucuccacuuc

SEQ ID NO: 565309 - RNA, 19 nt, Artificial Sequence
  Description of Artificial Sequence: Synthetic oligonucleotide
gcaccgggcgacagcaauc

SEQ ID NO: 565310 - RNA, 19 nt, Artificial Sequence
  Description of Artificial Sequence: Synthetic oligonucleotide
ccggguggggugacagcug

SEQ ID NO: 565311 - RNA, 19 nt, Artificial Sequence
  Description of Artificial Sequence: Synthetic oligonucleotide
cgaugcccgcugcagcggc

SEQ ID NO: 565312 - RNA, 19 nt, Artificial Sequence
  Description of Artificial Sequence: Synthetic oligonucleotide
cauuccggguggggugaca

SEQ ID NO: 565313 - RNA, 19 nt, Artificial Sequence
  Description of Artificial Sequence: Synthetic oligonucleotide
cuguggccagccugucaua

SEQ ID NO: 565314 - RNA, 19 nt, Artificial Sequence
  Description of Artificial Sequence: Synthetic oligonucleotide
acccugcgguguugguguu

SEQ ID NO: 565315 - RNA, 19 nt, Artificial Sequence
  Description of Artificial Sequence: Synthetic oligonucleotide
gaugcccgcugcagcggcu

SEQ ID NO: 565316 - RNA, 19 nt, Artificial Sequence
  Description of Artificial Sequence: Synthetic oligonucleotide
ccuggcaagccacucggau

SEQ ID NO: 565317 - RNA, 19 nt, Artificial Sequence
  Description of Artificial Sequence: Synthetic oligonucleotide
ggaaagggacuggacgguu

SEQ ID NO: 565318 - RNA, 19 nt, Artificial Sequence
  Description of Artificial Sequence: Synthetic oligonucleotide
agcgggccggaaacaccaa

SEQ ID NO: 565319 - RNA, 19 nt, Artificial Sequence
  Description of Artificial Sequence: Synthetic oligonucleotide
cugcgggccgccguguuau

SEQ ID NO: 565320 - RNA, 19 nt, Artificial Sequence
  Description of Artificial Sequence: Synthetic oligonucleotide
gcaagcugcgaugcccgcu

SEQ ID NO: 565321 - RNA, 19 nt, Artificial Sequence
  Description of Artificial Sequence: Synthetic oligonucleotide
cagcgacgagagagcaccu

SEQ ID NO: 565322 - RNA, 19 nt, Artificial Sequence
  Description of Artificial Sequence: Synthetic oligonucleotide
acuggacgguuggcaucua

SEQ ID NO: 565323 - RNA, 19 nt, Artificial Sequence
  Description of Artificial Sequence: Synthetic oligonucleotide
cggguggggugacagcuga

SEQ ID NO: 565324 - RNA, 19 nt, Artificial Sequence
  Description of Artificial Sequence: Synthetic oligonucleotide
cggcggccgacaauggaga

SEQ ID NO: 565325 - RNA, 19 nt, Artificial Sequence
  Description of Artificial Sequence: Synthetic oligonucleotide
ccugagcaaucuguaacau

SEQ ID NO: 565326 - RNA, 19 nt, Artificial Sequence
  Description of Artificial Sequence: Synthetic oligonucleotide
cggggcauaaagcgagcaa

SEQ ID NO: 565327 - RNA, 19 nt, Artificial Sequence
  Description of Artificial Sequence: Synthetic oligonucleotide
gcccggcggccgacaaugg

SEQ ID NO: 565328 - RNA, 19 nt, Artificial Sequence
  Description of Artificial Sequence: Synthetic oligonucleotide
ggaguaccacggagaggaa

SEQ ID NO: 565329 - RNA, 19 nt, Artificial Sequence
  Description of Artificial Sequence: Synthetic oligonucleotide
gcugcccggcggccgacaa

SEQ ID NO: 565330 - RNA, 19 nt, Artificial Sequence
  Description of Artificial Sequence: Synthetic oligonucleotide
ccacggagaggaaacccuu

SEQ ID NO: 565331 - RNA, 19 nt, Artificial Sequence
  Description of Artificial Sequence: Synthetic oligonucleotide
cccugcgguguugguguug

SEQ ID NO: 565332 - RNA, 19 nt, Artificial Sequence
  Description of Artificial Sequence: Synthetic oligonucleotide
cccggcggccgacaaugga

SEQ ID NO: 565333 - RNA, 19 nt, Artificial Sequence
  Description of Artificial Sequence: Synthetic oligonucleotide
ccaaguugugcaggcgggu

SEQ ID NO: 565334 - RNA, 19 nt, Artificial Sequence
  Description of Artificial Sequence: Synthetic oligonucleotide
ccgcacuggagaacauggu

SEQ ID NO: 565335 - RNA, 19 nt, Artificial Sequence
  Description of Artificial Sequence: Synthetic oligonucleotide
cuguagcauuggggaaggu

SEQ ID NO: 565336 - RNA, 19 nt, Artificial Sequence
  Description of Artificial Sequence: Synthetic oligonucleotide
ccccacgggaucuccacuu

SEQ ID NO: 565337 - RNA, 19 nt, Artificial Sequence
  Description of Artificial Sequence: Synthetic oligonucleotide
cgucccggagcacaguuuu

SEQ ID NO: 565338 - RNA, 19 nt, Artificial Sequence
  Description of Artificial Sequence: Synthetic oligonucleotide
ccaauccuguacagauauu

SEQ ID NO: 565339 - RNA, 19 nt, Artificial Sequence
  Description of Artificial Sequence: Synthetic oligonucleotide
ccggaagguccaguagucu

SEQ ID NO: 565340 - RNA, 19 nt, Artificial Sequence
  Description of Artificial Sequence: Synthetic oligonucleotide
ccgccguguuaugcuucug

SEQ ID NO: 565341 - RNA, 19 nt, Artificial Sequence
  Description of Artificial Sequence: Synthetic oligonucleotide
cugcccggcggccgacaau

SEQ ID NO: 565342 - RNA, 19 nt, Artificial Sequence
  Description of Artificial Sequence: Synthetic oligonucleotide
cggcucgcagcacuuuggu

SEQ ID NO: 565343 - RNA, 19 nt, Artificial Sequence
  Description of Artificial Sequence: Synthetic oligonucleotide
ggccgacaauggagaggaa

SEQ ID NO: 565344 - RNA, 19 nt, Artificial Sequence
  Description of Artificial Sequence: Synthetic oligonucleotide
ggacggcucgcagcacuuu

SEQ ID NO: 565345 - RNA, 19 nt, Artificial Sequence
  Description of Artificial Sequence: Synthetic oligonucleotide
gcucggcgggccagugacu

SEQ ID NO: 565346 - RNA, 19 nt, Artificial Sequence
  Description of Artificial Sequence: Synthetic oligonucleotide
aauacuuuccauuugacuc

SEQ ID NO: 565347 - RNA, 19 nt, Artificial Sequence
  Description of Artificial Sequence: Synthetic oligonucleotide
aauacuuaaauacugauaa

SEQ ID NO: 565348 - RNA, 19 nt, Artificial Sequence
  Description of Artificial Sequence: Synthetic oligonucleotide
uguaccauccauaugacug

SEQ ID NO: 565349 - RNA, 19 nt, Artificial Sequence
  Description of Artificial Sequence: Synthetic oligonucleotide
guauauauagcucuccucg

SEQ ID NO: 565350 - RNA, 19 nt, Artificial Sequence
  Description of Artificial Sequence: Synthetic oligonucleotide
aaaguggcgauucugaacu

SEQ ID NO: 565351 - RNA, 19 nt, Artificial Sequence
  Description of Artificial Sequence: Synthetic oligonucleotide
aaugacugaaguuaauaug

SEQ ID NO: 565352 - RNA, 19 nt, Artificial Sequence
  Description of Artificial Sequence: Synthetic oligonucleotide
acugcuguuagucuguccc

SEQ ID NO: 565353 - RNA, 19 nt, Artificial Sequence
  Description of Artificial Sequence: Synthetic oligonucleotide
acugaaguuaauaugaccg

SEQ ID NO: 565354 - RNA, 19 nt, Artificial Sequence
  Description of Artificial Sequence: Synthetic oligonucleotide
aaggguuaaagcuucaagu

SEQ ID NO: 565355 - RNA, 19 nt, Artificial Sequence
  Description of Artificial Sequence: Synthetic oligonucleotide
aaaauugguaucgcguacc

SEQ ID NO: 565356 - RNA, 19 nt, Artificial Sequence
  Description of Artificial Sequence: Synthetic oligonucleotide
aaguagaacaaucaacagu

SEQ ID NO: 565357 - RNA, 19 nt, Artificial Sequence
  Description of Artificial Sequence: Synthetic oligonucleotide
uguaugaacaccauugguc

SEQ ID NO: 565358 - RNA, 19 nt, Artificial Sequence
  Description of Artificial Sequence: Synthetic oligonucleotide
auacuuuccauuugacucg

SEQ ID NO: 565359 - RNA, 19 nt, Artificial Sequence
  Description of Artificial Sequence: Synthetic oligonucleotide
agaucgagcaagcagagca

SEQ ID NO: 565360 - RNA, 19 nt, Artificial Sequence
  Description of Artificial Sequence: Synthetic oligonucleotide
uauauauagcucuccucgg

SEQ ID NO: 565361 - RNA, 19 nt, Artificial Sequence
  Description of Artificial Sequence: Synthetic oligonucleotide
aguuguaugggaaacauca

SEQ ID NO: 565362 - RNA, 19 nt, Artificial Sequence
  Description of Artificial Sequence: Synthetic oligonucleotide
accagagcgaagcuaaugg

SEQ ID NO: 565363 - RNA, 19 nt, Artificial Sequence
  Description of Artificial Sequence: Synthetic oligonucleotide
agaacaaucaacaguugac

SEQ ID NO: 565364 - RNA, 19 nt, Artificial Sequence
  Description of Artificial Sequence: Synthetic oligonucleotide
uagaacaaucaacaguuga

SEQ ID NO: 565365 - RNA, 19 nt, Artificial Sequence
  Description of Artificial Sequence: Synthetic oligonucleotide
ugaaccagaacggagaccu

SEQ ID NO: 565366 - RNA, 19 nt, Artificial Sequence
  Description of Artificial Sequence: Synthetic oligonucleotide
uagucugucccuaacuucc

SEQ ID NO: 565367 - RNA, 19 nt, Artificial Sequence
  Description of Artificial Sequence: Synthetic oligonucleotide
gucuguaccauccauauga

SEQ ID NO: 565368 - RNA, 19 nt, Artificial Sequence
  Description of Artificial Sequence: Synthetic oligonucleotide
aaaugaaaucugagaaggc

SEQ ID NO: 565369 - RNA, 19 nt, Artificial Sequence
  Description of Artificial Sequence: Synthetic oligonucleotide
guuaauaugaccgagggcu

SEQ ID NO: 565370 - RNA, 19 nt, Artificial Sequence
  Description of Artificial Sequence: Synthetic oligonucleotide
uauauagcucuccucggcc

SEQ ID NO: 565371 - RNA, 19 nt, Artificial Sequence
  Description of Artificial Sequence: Synthetic oligonucleotide
uaugacugcuauuggaagc

SEQ ID NO: 565372 - RNA, 19 nt, Artificial Sequence
  Description of Artificial Sequence: Synthetic oligonucleotide
gaaguuaauaugaccgagg

SEQ ID NO: 565373 - RNA, 19 nt, Artificial Sequence
  Description of Artificial Sequence: Synthetic oligonucleotide
uaugggaaacaucacucgc

SEQ ID NO: 565374 - RNA, 19 nt, Artificial Sequence
  Description of Artificial Sequence: Synthetic oligonucleotide
uaggucauauccuucggag

SEQ ID NO: 565375 - RNA, 19 nt, Artificial Sequence
  Description of Artificial Sequence: Synthetic oligonucleotide
gauuuaaauauccaugggu

SEQ ID NO: 565376 - RNA, 19 nt, Artificial Sequence
  Description of Artificial Sequence: Synthetic oligonucleotide
ugaccgagggcucucaaag

SEQ ID NO: 565377 - RNA, 19 nt, Artificial Sequence
  Description of Artificial Sequence: Synthetic oligonucleotide
acagccuccgcuaagauag

SEQ ID NO: 565378 - RNA, 19 nt, Artificial Sequence
  Description of Artificial Sequence: Synthetic oligonucleotide
ugccgagaccaccagagcg

SEQ ID NO: 565379 - RNA, 19 nt, Artificial Sequence
  Description of Artificial Sequence: Synthetic oligonucleotide
gguuugccaacauugaggg

SEQ ID NO: 565380 - RNA, 19 nt, Artificial Sequence
  Description of Artificial Sequence: Synthetic oligonucleotide
uuguaugggaaacaucacu

SEQ ID NO: 565381 - RNA, 19 nt, Artificial Sequence
  Description of Artificial Sequence: Synthetic oligonucleotide
ugaaguuaauaugaccgag

SEQ ID NO: 565382 - RNA, 19 nt, Artificial Sequence
  Description of Artificial Sequence: Synthetic oligonucleotide
ugcuauuggaagcagacuu

SEQ ID NO: 565383 - RNA, 19 nt, Artificial Sequence
  Description of Artificial Sequence: Synthetic oligonucleotide
ggagauaccaccugcacag

SEQ ID NO: 565384 - RNA, 19 nt, Artificial Sequence
  Description of Artificial Sequence: Synthetic oligonucleotide
gaacaaucaacaguugacc

SEQ ID NO: 565385 - RNA, 19 nt, Artificial Sequence
  Description of Artificial Sequence: Synthetic oligonucleotide
accgagggcucucaaaggc

SEQ ID NO: 565386 - RNA, 19 nt, Artificial Sequence
  Description of Artificial Sequence: Synthetic oligonucleotide
auugguaucgcguaccaaa

SEQ ID NO: 565387 - RNA, 19 nt, Artificial Sequence
  Description of Artificial Sequence: Synthetic oligonucleotide
cugaucugaaccagaacgg

SEQ ID NO: 565388 - RNA, 19 nt, Artificial Sequence
  Description of Artificial Sequence: Synthetic oligonucleotide
ucuugugggaaguuacugc

SEQ ID NO: 565389 - RNA, 19 nt, Artificial Sequence
  Description of Artificial Sequence: Synthetic oligonucleotide
auccauaugacugcuauug

SEQ ID NO: 565390 - RNA, 19 nt, Artificial Sequence
  Description of Artificial Sequence: Synthetic oligonucleotide
ucauacucugguacagggg

SEQ ID NO: 565391 - RNA, 19 nt, Artificial Sequence
  Description of Artificial Sequence: Synthetic oligonucleotide
aagauagcaacagcugauc

SEQ ID NO: 565392 - RNA, 19 nt, Artificial Sequence
  Description of Artificial Sequence: Synthetic oligonucleotide
aagcuaauggcuaagggaa

SEQ ID NO: 565393 - RNA, 19 nt, Artificial Sequence
  Description of Artificial Sequence: Synthetic oligonucleotide
auaugacugcuauuggaag

SEQ ID NO: 565394 - RNA, 19 nt, Artificial Sequence
  Description of Artificial Sequence: Synthetic oligonucleotide
ugcaaguagaaaccaaguc

SEQ ID NO: 565395 - RNA, 19 nt, Artificial Sequence
  Description of Artificial Sequence: Synthetic oligonucleotide
ugaugugccuaucaugacu

SEQ ID NO: 565396 - RNA, 19 nt, Artificial Sequence
  Description of Artificial Sequence: Synthetic oligonucleotide
uccauaugacugcuauugg

SEQ ID NO: 565397 - RNA, 19 nt, Artificial Sequence
  Description of Artificial Sequence: Synthetic oligonucleotide
uaagauagcaacagcugau

SEQ ID NO: 565398 - RNA, 19 nt, Artificial Sequence
  Description of Artificial Sequence: Synthetic oligonucleotide
aacuucaggugucugaaua

SEQ ID NO: 565399 - RNA, 19 nt, Artificial Sequence
  Description of Artificial Sequence: Synthetic oligonucleotide
uuaagucaggccccacagg

SEQ ID NO: 565400 - RNA, 19 nt, Artificial Sequence
  Description of Artificial Sequence: Synthetic oligonucleotide
augacaucgcuuugauggc

SEQ ID NO: 565401 - RNA, 19 nt, Artificial Sequence
  Description of Artificial Sequence: Synthetic oligonucleotide
uccgcuaagauagcaacag

SEQ ID NO: 565402 - RNA, 19 nt, Artificial Sequence
  Description of Artificial Sequence: Synthetic oligonucleotide
augaaauugacagauuuaa

SEQ ID NO: 565403 - RNA, 19 nt, Artificial Sequence
  Description of Artificial Sequence: Synthetic oligonucleotide
ugacagauuuaaauaucca

SEQ ID NO: 565404 - RNA, 19 nt, Artificial Sequence
  Description of Artificial Sequence: Synthetic oligonucleotide
ugaauacuugaugugcaag

SEQ ID NO: 565405 - RNA, 19 nt, Artificial Sequence
  Description of Artificial Sequence: Synthetic oligonucleotide
cauugagggacuguggagg

SEQ ID NO: 565406 - RNA, 19 nt, Artificial Sequence
  Description of Artificial Sequence: Synthetic oligonucleotide
ugacaugagcccugguugg

SEQ ID NO: 565407 - RNA, 19 nt, Artificial Sequence
  Description of Artificial Sequence: Synthetic oligonucleotide
aaauugguaucgcguacca

SEQ ID NO: 565408 - RNA, 19 nt, Artificial Sequence
  Description of Artificial Sequence: Synthetic oligonucleotide
uguuagucugucccuaacu

SEQ ID NO: 565409 - RNA, 19 nt, Artificial Sequence
  Description of Artificial Sequence: Synthetic oligonucleotide
cagaacucucacacgagcg

SEQ ID NO: 565410 - RNA, 19 nt, Artificial Sequence
  Description of Artificial Sequence: Synthetic oligonucleotide
cuuaggaaggcacagggga

SEQ ID NO: 565411 - RNA, 19 nt, Artificial Sequence
  Description of Artificial Sequence: Synthetic oligonucleotide
ucucacacgagcgaggcca

SEQ ID NO: 565412 - RNA, 19 nt, Artificial Sequence
  Description of Artificial Sequence: Synthetic oligonucleotide
cugcuaguaaauacuuucc

SEQ ID NO: 565413 - RNA, 19 nt, Artificial Sequence
  Description of Artificial Sequence: Synthetic oligonucleotide
cagggguuugccaacauug

SEQ ID NO: 565414 - RNA, 19 nt, Artificial Sequence
  Description of Artificial Sequence: Synthetic oligonucleotide
ggagcuuagccucaggucc

SEQ ID NO: 565415 - RNA, 19 nt, Artificial Sequence
  Description of Artificial Sequence: Synthetic oligonucleotide
uggagauaccaccugcaca

SEQ ID NO: 565416 - RNA, 19 nt, Artificial Sequence
  Description of Artificial Sequence: Synthetic oligonucleotide
acaaaauugguaucgcgua

SEQ ID NO: 565417 - RNA, 19 nt, Artificial Sequence
  Description of Artificial Sequence: Synthetic oligonucleotide
uacugauaaauauuugcuu

SEQ ID NO: 565418 - RNA, 19 nt, Artificial Sequence
  Description of Artificial Sequence: Synthetic oligonucleotide
ucaacaguugaccgcuagc

SEQ ID NO: 565419 - RNA, 19 nt, Artificial Sequence
  Description of Artificial Sequence: Synthetic oligonucleotide
aggucauauccuucggagg

SEQ ID NO: 565420 - RNA, 19 nt, Artificial Sequence
  Description of Artificial Sequence: Synthetic oligonucleotide
ugauggcuuccaaacuccg

SEQ ID NO: 565421 - RNA, 19 nt, Artificial Sequence
  Description of Artificial Sequence: Synthetic oligonucleotide
aguugguuauauaauauau

SEQ ID NO: 565422 - RNA, 19 nt, Artificial Sequence
  Description of Artificial Sequence: Synthetic oligonucleotide
ggucauauccuucggaggc

SEQ ID NO: 565423 - RNA, 19 nt, Artificial Sequence
  Description of Artificial Sequence: Synthetic oligonucleotide
cuaagauagcaacagcuga

SEQ ID NO: 565424 - RNA, 19 nt, Artificial Sequence
  Description of Artificial Sequence: Synthetic oligonucleotide
aauaugaccgagggcucuc

SEQ ID NO: 565425 - RNA, 19 nt, Artificial Sequence
  Description of Artificial Sequence: Synthetic oligonucleotide
caggaucaaacugucaacc

SEQ ID NO: 565426 - RNA, 19 nt, Artificial Sequence
  Description of Artificial Sequence: Synthetic oligonucleotide
gguguaugaacaccauugg

SEQ ID NO: 565427 - RNA, 19 nt, Artificial Sequence
  Description of Artificial Sequence: Synthetic oligonucleotide
ugggauacacaggaaguag

SEQ ID NO: 565428 - RNA, 19 nt, Artificial Sequence
  Description of Artificial Sequence: Synthetic oligonucleotide
gagggugucucacacuccc

SEQ ID NO: 565429 - RNA, 19 nt, Artificial Sequence
  Description of Artificial Sequence: Synthetic oligonucleotide
ucuggagggugucucacac

SEQ ID NO: 565430 - RNA, 19 nt, Artificial Sequence
  Description of Artificial Sequence: Synthetic oligonucleotide
gguuucagcaaugucaggc

SEQ ID NO: 565431 - RNA, 19 nt, Artificial Sequence
  Description of Artificial Sequence: Synthetic oligonucleotide
ggauaggagagccaucucc

SEQ ID NO: 565432 - RNA, 19 nt, Artificial Sequence
  Description of Artificial Sequence: Synthetic oligonucleotide
guaccauccauaugacugc

SEQ ID NO: 565433 - RNA, 19 nt, Artificial Sequence
  Description of Artificial Sequence: Synthetic oligonucleotide
cuuagcguggccgaggcug

SEQ ID NO: 565434 - RNA, 19 nt, Artificial Sequence
  Description of Artificial Sequence: Synthetic oligonucleotide
cauaugacugcuauuggaa

SEQ ID NO: 565435 - RNA, 19 nt, Artificial Sequence
  Description of Artificial Sequence: Synthetic oligonucleotide
acugggaucgguaucccgg

SEQ ID NO: 565436 - RNA, 19 nt, Artificial Sequence
  Description of Artificial Sequence: Synthetic oligonucleotide
caaaauugguaucgcguac

SEQ ID NO: 565437 - RNA, 19 nt, Artificial Sequence
  Description of Artificial Sequence: Synthetic oligonucleotide
uugaccgcuagcuuaggaa

SEQ ID NO: 565438 - RNA, 19 nt, Artificial Sequence
  Description of Artificial Sequence: Synthetic oligonucleotide
guaugaacaccauuggucu

SEQ ID NO: 565439 - RNA, 19 nt, Artificial Sequence
  Description of Artificial Sequence: Synthetic oligonucleotide
ucaguguuccccagcggcc

SEQ ID NO: 565440 - RNA, 19 nt, Artificial Sequence
  Description of Artificial Sequence: Synthetic oligonucleotide
acucucacacgagcgaggc

SEQ ID NO: 565441 - RNA, 19 nt, Artificial Sequence
  Description of Artificial Sequence: Synthetic oligonucleotide
agaacucucacacgagcga

SEQ ID NO: 565442 - RNA, 19 nt, Artificial Sequence
  Description of Artificial Sequence: Synthetic oligonucleotide
caacauugagggacugugg

SEQ ID NO: 565443 - RNA, 19 nt, Artificial Sequence
  Description of Artificial Sequence: Synthetic oligonucleotide
acaguugaccgcuagcuua

SEQ ID NO: 565444 - RNA, 19 nt, Artificial Sequence
  Description of Artificial Sequence: Synthetic oligonucleotide
aucaacaguugaccgcuag

SEQ ID NO: 565445 - RNA, 19 nt, Artificial Sequence
  Description of Artificial Sequence: Synthetic oligonucleotide
uaugaacaccauuggucug

SEQ ID NO: 565446 - RNA, 19 nt, Artificial Sequence
  Description of Artificial Sequence: Synthetic oligonucleotide
guugguuauauaauauauc

SEQ ID NO: 565447 - RNA, 19 nt, Artificial Sequence
  Description of Artificial Sequence: Synthetic oligonucleotide
ucuccucgagagcuggucc

SEQ ID NO: 565448 - RNA, 19 nt, Artificial Sequence
  Description of Artificial Sequence: Synthetic oligonucleotide
ucugguacagggguuugcc

SEQ ID NO: 565449 - RNA, 19 nt, Artificial Sequence
  Description of Artificial Sequence: Synthetic oligonucleotide
uuggagauaccaccugcac

SEQ ID NO: 565450 - RNA, 19 nt, Artificial Sequence
  Description of Artificial Sequence: Synthetic oligonucleotide
cuuccaaacuccgacgcag

SEQ ID NO: 565451 - RNA, 19 nt, Artificial Sequence
  Description of Artificial Sequence: Synthetic oligonucleotide
cuuaccugggcuuccccag

SEQ ID NO: 565452 - RNA, 19 nt, Artificial Sequence
  Description of Artificial Sequence: Synthetic oligonucleotide
gcuaagggaagacugagca

SEQ ID NO: 565453 - RNA, 19 nt, Artificial Sequence
  Description of Artificial Sequence: Synthetic oligonucleotide
ugaguuguaugggaaacau

SEQ ID NO: 565454 - RNA, 19 nt, Artificial Sequence
  Description of Artificial Sequence: Synthetic oligonucleotide
uggcuuccaaacuccgacg

SEQ ID NO: 565455 - RNA, 19 nt, Artificial Sequence
  Description of Artificial Sequence: Synthetic oligonucleotide
uccgacgcagggcacuggg

SEQ ID NO: 565456 - RNA, 19 nt, Artificial Sequence
  Description of Artificial Sequence: Synthetic oligonucleotide
uacacugugaugugccuau

SEQ ID NO: 565457 - RNA, 19 nt, Artificial Sequence
  Description of Artificial Sequence: Synthetic oligonucleotide
aaccaaaggacuggcagaa

SEQ ID NO: 565458 - RNA, 19 nt, Artificial Sequence
  Description of Artificial Sequence: Synthetic oligonucleotide
cauacuccucacaggagac

SEQ ID NO: 565459 - RNA, 19 nt, Artificial Sequence
  Description of Artificial Sequence: Synthetic oligonucleotide
ugaucugggagagagccuc

SEQ ID NO: 565460 - RNA, 19 nt, Artificial Sequence
  Description of Artificial Sequence: Synthetic oligonucleotide
caaggagcuucauccauac

SEQ ID NO: 565461 - RNA, 19 nt, Artificial Sequence
  Description of Artificial Sequence: Synthetic oligonucleotide
gaacucucacacgagcgag

SEQ ID NO: 565462 - RNA, 19 nt, Artificial Sequence
  Description of Artificial Sequence: Synthetic oligonucleotide
caaacuccgacgcagggca

SEQ ID NO: 565463 - RNA, 19 nt, Artificial Sequence
  Description of Artificial Sequence: Synthetic oligonucleotide
gaguugguuauauaauaua

SEQ ID NO: 565464 - RNA, 19 nt, Artificial Sequence
  Description of Artificial Sequence: Synthetic oligonucleotide
uuaccugggcuuccccagg

SEQ ID NO: 565465 - RNA, 19 nt, Artificial Sequence
  Description of Artificial Sequence: Synthetic oligonucleotide
cauuaacacaaggagcuuc

SEQ ID NO: 565466 - RNA, 19 nt, Artificial Sequence
  Description of Artificial Sequence: Synthetic oligonucleotide
uucgguuuuaaaggcaaaa

SEQ ID NO: 565467 - RNA, 19 nt, Artificial Sequence
  Description of Artificial Sequence: Synthetic oligonucleotide
ggaauggaaaggguuaaag

SEQ ID NO: 565468 - RNA, 19 nt, Artificial Sequence
  Description of Artificial Sequence: Synthetic oligonucleotide
gacaaaauugguaucgcgu

SEQ ID NO: 565469 - RNA, 19 nt, Artificial Sequence
  Description of Artificial Sequence: Synthetic oligonucleotide
gacuaucagggugagcccc

SEQ ID NO: 565470 - RNA, 19 nt, Artificial Sequence
  Description of Artificial Sequence: Synthetic oligonucleotide
accgcuagcuuaggaaggc

SEQ ID NO: 565471 - RNA, 19 nt, Artificial Sequence
  Description of Artificial Sequence: Synthetic oligonucleotide
ucauauccuucggaggcag

SEQ ID NO: 565472 - RNA, 19 nt, Artificial Sequence
  Description of Artificial Sequence: Synthetic oligonucleotide
uugugggaaguuacugcug

SEQ ID NO: 565473 - RNA, 19 nt, Artificial Sequence
  Description of Artificial Sequence: Synthetic oligonucleotide
aacaguugaccgcuagcuu

SEQ ID NO: 565474 - RNA, 19 nt, Artificial Sequence
  Description of Artificial Sequence: Synthetic oligonucleotide
gacuuagcguggccgaggc

SEQ ID NO: 565475 - RNA, 19 nt, Artificial Sequence
  Description of Artificial Sequence: Synthetic oligonucleotide
agaccucaccuuuauuugu

SEQ ID NO: 565476 - RNA, 19 nt, Artificial Sequence
  Description of Artificial Sequence: Synthetic oligonucleotide
cauggguuccguuuucauc

SEQ ID NO: 565477 - RNA, 19 nt, Artificial Sequence
  Description of Artificial Sequence: Synthetic oligonucleotide
agcggccauuaacacaagg

SEQ ID NO: 565478 - RNA, 19 nt, Artificial Sequence
  Description of Artificial Sequence: Synthetic oligonucleotide
aacucucacacgagcgagg

SEQ ID NO: 565479 - RNA, 19 nt, Artificial Sequence
  Description of Artificial Sequence: Synthetic oligonucleotide
ucugggagagagccucugc

SEQ ID NO: 565480 - RNA, 19 nt, Artificial Sequence
  Description of Artificial Sequence: Synthetic oligonucleotide
augacugcuauuggaagca

SEQ ID NO: 565481 - RNA, 19 nt, Artificial Sequence
  Description of Artificial Sequence: Synthetic oligonucleotide
ucgguuuuaaaggcaaaau

SEQ ID NO: 565482 - RNA, 19 nt, Artificial Sequence
  Description of Artificial Sequence: Synthetic oligonucleotide
ccaagaggaggacuuagcg

SEQ ID NO: 565483 - RNA, 19 nt, Artificial Sequence
  Description of Artificial Sequence: Synthetic oligonucleotide
caguugaccgcuagcuuag

SEQ ID NO: 565484 - RNA, 19 nt, Artificial Sequence
  Description of Artificial Sequence: Synthetic oligonucleotide
ggcgauucugaacuucagg

SEQ ID NO: 565485 - RNA, 19 nt, Artificial Sequence
  Description of Artificial Sequence: Synthetic oligonucleotide
caccauugaggauaggaga

SEQ ID NO: 565486 - RNA, 19 nt, Artificial Sequence
  Description of Artificial Sequence: Synthetic oligonucleotide
gaccgagggcucucaaagg

SEQ ID NO: 565487 - RNA, 19 nt, Artificial Sequence
  Description of Artificial Sequence: Synthetic oligonucleotide
uggagcuuagccucagguc

SEQ ID NO: 565488 - RNA, 19 nt, Artificial Sequence
  Description of Artificial Sequence: Synthetic oligonucleotide
uauccauggguuccguuuu

SEQ ID NO: 565489 - RNA, 19 nt, Artificial Sequence
  Description of Artificial Sequence: Synthetic oligonucleotide
uggcuaagggaagacugag

SEQ ID NO: 565490 - RNA, 19 nt, Artificial Sequence
  Description of Artificial Sequence: Synthetic oligonucleotide
aucugaaccagaacggaga

SEQ ID NO: 565491 - RNA, 19 nt, Artificial Sequence
  Description of Artificial Sequence: Synthetic oligonucleotide
ccaauucaggucaauggag

SEQ ID NO: 565492 - RNA, 19 nt, Artificial Sequence
  Description of Artificial Sequence: Synthetic oligonucleotide
agaguugguuauauaauau

SEQ ID NO: 565493 - RNA, 19 nt, Artificial Sequence
  Description of Artificial Sequence: Synthetic oligonucleotide
gacuuuccugccgagacca

SEQ ID NO: 565494 - RNA, 19 nt, Artificial Sequence
  Description of Artificial Sequence: Synthetic oligonucleotide
ugucaaccaaaggacuggc

SEQ ID NO: 565495 - RNA, 19 nt, Artificial Sequence
  Description of Artificial Sequence: Synthetic oligonucleotide
aguggcgauucugaacuuc

SEQ ID NO: 565496 - RNA, 19 nt, Artificial Sequence
  Description of Artificial Sequence: Synthetic oligonucleotide
agaagcaacagagcaggga

SEQ ID NO: 565497 - RNA, 19 nt, Artificial Sequence
  Description of Artificial Sequence: Synthetic oligonucleotide
uaauggcuaagggaagacu

SEQ ID NO: 565498 - RNA, 19 nt, Artificial Sequence
  Description of Artificial Sequence: Synthetic oligonucleotide
augaacaccauuggucugu

SEQ ID NO: 565499 - RNA, 19 nt, Artificial Sequence
  Description of Artificial Sequence: Synthetic oligonucleotide
gaccgcuagcuuaggaagg

SEQ ID NO: 565500 - RNA, 19 nt, Artificial Sequence
  Description of Artificial Sequence: Synthetic oligonucleotide
uagcuuaggaaggcacagg

SEQ ID NO: 565501 - RNA, 19 nt, Artificial Sequence
  Description of Artificial Sequence: Synthetic oligonucleotide
gguuaaagcuucaaguaga

SEQ ID NO: 565502 - RNA, 19 nt, Artificial Sequence
  Description of Artificial Sequence: Synthetic oligonucleotide
uaauaugaccgagggcucu

SEQ ID NO: 565503 - RNA, 19 nt, Artificial Sequence
  Description of Artificial Sequence: Synthetic oligonucleotide
ucgagagcugguccuuacc

SEQ ID NO: 565504 - RNA, 19 nt, Artificial Sequence
  Description of Artificial Sequence: Synthetic oligonucleotide
guaggcacagggguguucc

SEQ ID NO: 565505 - RNA, 19 nt, Artificial Sequence
  Description of Artificial Sequence: Synthetic oligonucleotide
agaacggagaccucaccuu

SEQ ID NO: 565506 - RNA, 19 nt, Artificial Sequence
  Description of Artificial Sequence: Synthetic oligonucleotide
ggagacacacacgucagcc

SEQ ID NO: 565507 - RNA, 19 nt, Artificial Sequence
  Description of Artificial Sequence: Synthetic oligonucleotide
uucugaucugggagagagc

SEQ ID NO: 565508 - RNA, 19 nt, Artificial Sequence
  Description of Artificial Sequence: Synthetic oligonucleotide
uccuucggaggcagauggg

SEQ ID NO: 565509 - RNA, 19 nt, Artificial Sequence
  Description of Artificial Sequence: Synthetic oligonucleotide
gcuaagauagcaacagcug

SEQ ID NO: 565510 - RNA, 19 nt, Artificial Sequence
  Description of Artificial Sequence: Synthetic oligonucleotide
uguuucuugugggaaguua

SEQ ID NO: 565511 - RNA, 19 nt, Artificial Sequence
  Description of Artificial Sequence: Synthetic oligonucleotide
ucccuucucgggaaccuga

SEQ ID NO: 565512 - RNA, 19 nt, Artificial Sequence
  Description of Artificial Sequence: Synthetic oligonucleotide
cacguccacaggcaaacac

SEQ ID NO: 565513 - RNA, 19 nt, Artificial Sequence
  Description of Artificial Sequence: Synthetic oligonucleotide
agcuucaaguagaaacaag

SEQ ID NO: 565514 - RNA, 19 nt, Artificial Sequence
  Description of Artificial Sequence: Synthetic oligonucleotide
uuagcguggccgaggcuga

SEQ ID NO: 565515 - RNA, 19 nt, Artificial Sequence
  Description of Artificial Sequence: Synthetic oligonucleotide
gccuaucaugacuaucagg

SEQ ID NO: 565516 - RNA, 19 nt, Artificial Sequence
  Description of Artificial Sequence: Synthetic oligonucleotide
cuugugggaaguuacugcu

SEQ ID NO: 565517 - RNA, 19 nt, Artificial Sequence
  Description of Artificial Sequence: Synthetic oligonucleotide
gagacacacacgucagcca

SEQ ID NO: 565518 - RNA, 19 nt, Artificial Sequence
  Description of Artificial Sequence: Synthetic oligonucleotide
caucccuacacugugaugu

SEQ ID NO: 565519 - RNA, 19 nt, Artificial Sequence
  Description of Artificial Sequence: Synthetic oligonucleotide
ccaccauugaggauaggag

SEQ ID NO: 565520 - RNA, 19 nt, Artificial Sequence
  Description of Artificial Sequence: Synthetic oligonucleotide
gauaggagagccaucuccu

SEQ ID NO: 565521 - RNA, 19 nt, Artificial Sequence
  Description of Artificial Sequence: Synthetic oligonucleotide
aaauauccauggguuccgu

SEQ ID NO: 565522 - RNA, 19 nt, Artificial Sequence
  Description of Artificial Sequence: Synthetic oligonucleotide
gcaccccugaguuguaugg

SEQ ID NO: 565523 - RNA, 19 nt, Artificial Sequence
  Description of Artificial Sequence: Synthetic oligonucleotide
gaggacuuagcguggccga

SEQ ID NO: 565524 - RNA, 19 nt, Artificial Sequence
  Description of Artificial Sequence: Synthetic oligonucleotide
ugugccuaucaugacuauc

SEQ ID NO: 565525 - RNA, 19 nt, Artificial Sequence
  Description of Artificial Sequence: Synthetic oligonucleotide
ugaggauaggagagccauc

SEQ ID NO: 565526 - RNA, 19 nt, Artificial Sequence
  Description of Artificial Sequence: Synthetic oligonucleotide
aggacuggcagaagcaaca

SEQ ID NO: 565527 - RNA, 19 nt, Artificial Sequence
  Description of Artificial Sequence: Synthetic oligonucleotide
cuuuccugccgagaccacc

SEQ ID NO: 565528 - RNA, 19 nt, Artificial Sequence
  Description of Artificial Sequence: Synthetic oligonucleotide
uauccuucggaggcagaug

SEQ ID NO: 565529 - RNA, 19 nt, Artificial Sequence
  Description of Artificial Sequence: Synthetic oligonucleotide
guuccguuuucaucccuac

SEQ ID NO: 565530 - RNA, 19 nt, Artificial Sequence
  Description of Artificial Sequence: Synthetic oligonucleotide
gggguuugccaacauugag

SEQ ID NO: 565531 - RNA, 19 nt, Artificial Sequence
  Description of Artificial Sequence: Synthetic oligonucleotide
ggaucaaacugucaaccaa

SEQ ID NO: 565532 - RNA, 19 nt, Artificial Sequence
  Description of Artificial Sequence: Synthetic oligonucleotide
aggaggcccgaccacagaa

SEQ ID NO: 565533 - RNA, 19 nt, Artificial Sequence
  Description of Artificial Sequence: Synthetic oligonucleotide
guuguaugggaaacaucac

SEQ ID NO: 565534 - RNA, 19 nt, Artificial Sequence
  Description of Artificial Sequence: Synthetic oligonucleotide
auauccuucggaggcagau

SEQ ID NO: 565535 - RNA, 19 nt, Artificial Sequence
  Description of Artificial Sequence: Synthetic oligonucleotide
ccgaccacagaacugcuag

SEQ ID NO: 565536 - RNA, 19 nt, Artificial Sequence
  Description of Artificial Sequence: Synthetic oligonucleotide
cuguuagucugucccuaac

SEQ ID NO: 565537 - RNA, 19 nt, Artificial Sequence
  Description of Artificial Sequence: Synthetic oligonucleotide
uggguuccguuuucauccc

SEQ ID NO: 565538 - RNA, 19 nt, Artificial Sequence
  Description of Artificial Sequence: Synthetic oligonucleotide
aucccuacacugugaugug

SEQ ID NO: 565539 - RNA, 19 nt, Artificial Sequence
  Description of Artificial Sequence: Synthetic oligonucleotide
agacugggaucgguauccc

SEQ ID NO: 565540 - RNA, 19 nt, Artificial Sequence
  Description of Artificial Sequence: Synthetic oligonucleotide
agcgaagcuaauggcuaag

SEQ ID NO: 565541 - RNA, 19 nt, Artificial Sequence
  Description of Artificial Sequence: Synthetic oligonucleotide
agcuaauggcuaagggaag

SEQ ID NO: 565542 - RNA, 19 nt, Artificial Sequence
  Description of Artificial Sequence: Synthetic oligonucleotide
agagcgaagcuaauggcua

SEQ ID NO: 565543 - RNA, 19 nt, Artificial Sequence
  Description of Artificial Sequence: Synthetic oligonucleotide
uccuuaccugggcuucccc

SEQ ID NO: 565544 - RNA, 19 nt, Artificial Sequence
  Description of Artificial Sequence: Synthetic oligonucleotide
ugagggagucugccuuuga

SEQ ID NO: 565545 - RNA, 19 nt, Artificial Sequence
  Description of Artificial Sequence: Synthetic oligonucleotide
aacuccgacgcagggcacu

SEQ ID NO: 565546 - RNA, 19 nt, Artificial Sequence
  Description of Artificial Sequence: Synthetic oligonucleotide
guuagucugucccuaacuu

SEQ ID NO: 565547 - RNA, 19 nt, Artificial Sequence
  Description of Artificial Sequence: Synthetic oligonucleotide
ucccuacacugugaugugc

SEQ ID NO: 565548 - RNA, 19 nt, Artificial Sequence
  Description of Artificial Sequence: Synthetic oligonucleotide
uaugaccgagggcucucaa

SEQ ID NO: 565549 - RNA, 19 nt, Artificial Sequence
  Description of Artificial Sequence: Synthetic oligonucleotide
uccauggguuccguuuuca

SEQ ID NO: 565550 - RNA, 19 nt, Artificial Sequence
  Description of Artificial Sequence: Synthetic oligonucleotide
ggugucucacacucccugc

SEQ ID NO: 565551 - RNA, 19 nt, Artificial Sequence
  Description of Artificial Sequence: Synthetic oligonucleotide
gaguuguaugggaaacauc

SEQ ID NO: 565552 - RNA, 19 nt, Artificial Sequence
  Description of Artificial Sequence: Synthetic oligonucleotide
ccagagcgaagcuaauggc

SEQ ID NO: 565553 - RNA, 19 nt, Artificial Sequence
  Description of Artificial Sequence: Synthetic oligonucleotide
cagauggggugcuuggaga

SEQ ID NO: 565554 - RNA, 19 nt, Artificial Sequence
  Description of Artificial Sequence: Synthetic oligonucleotide
auggcuaagggaagacuga

SEQ ID NO: 565555 - RNA, 19 nt, Artificial Sequence
  Description of Artificial Sequence: Synthetic oligonucleotide
guugaccgcuagcuuagga

SEQ ID NO: 565556 - RNA, 19 nt, Artificial Sequence
  Description of Artificial Sequence: Synthetic oligonucleotide
uaccauccauaugacugcu

SEQ ID NO: 565557 - RNA, 19 nt, Artificial Sequence
  Description of Artificial Sequence: Synthetic oligonucleotide
cagagcgaagcuaauggcu

SEQ ID NO: 565558 - RNA, 19 nt, Artificial Sequence
  Description of Artificial Sequence: Synthetic oligonucleotide
gugaugugccuaucaugac

SEQ ID NO: 565559 - RNA, 19 nt, Artificial Sequence
  Description of Artificial Sequence: Synthetic oligonucleotide
uuccugccgagaccaccag

SEQ ID NO: 565560 - RNA, 19 nt, Artificial Sequence
  Description of Artificial Sequence: Synthetic oligonucleotide
ccuccgcuaagauagcaac

SEQ ID NO: 565561 - RNA, 19 nt, Artificial Sequence
  Description of Artificial Sequence: Synthetic oligonucleotide
uccugccgagaccaccaga

SEQ ID NO: 565562 - RNA, 19 nt, Artificial Sequence
  Description of Artificial Sequence: Synthetic oligonucleotide
cggccauuaacacaaggag

SEQ ID NO: 565563 - RNA, 19 nt, Artificial Sequence
  Description of Artificial Sequence: Synthetic oligonucleotide
ucgggaaccugagggaguc

SEQ ID NO: 565564 - RNA, 19 nt, Artificial Sequence
  Description of Artificial Sequence: Synthetic oligonucleotide
uacucugguacagggguuu

SEQ ID NO: 565565 - RNA, 19 nt, Artificial Sequence
  Description of Artificial Sequence: Synthetic oligonucleotide
gguacagggguuugccaac

SEQ ID NO: 565566 - RNA, 19 nt, Artificial Sequence
  Description of Artificial Sequence: Synthetic oligonucleotide
augaccgagggcucucaaa

SEQ ID NO: 565567 - RNA, 19 nt, Artificial Sequence
  Description of Artificial Sequence: Synthetic oligonucleotide
cucgagagcugguccuuac

SEQ ID NO: 565568 - RNA, 19 nt, Artificial Sequence
  Description of Artificial Sequence: Synthetic oligonucleotide
cuccgcuaagauagcaaca

SEQ ID NO: 565569 - RNA, 19 nt, Artificial Sequence
  Description of Artificial Sequence: Synthetic oligonucleotide
cuguccaaggaagcacccc

SEQ ID NO: 565570 - RNA, 19 nt, Artificial Sequence
  Description of Artificial Sequence: Synthetic oligonucleotide
acagggguuugccaacauu

SEQ ID NO: 565571 - RNA, 19 nt, Artificial Sequence
  Description of Artificial Sequence: Synthetic oligonucleotide
accucaccuuuauuuguaa

SEQ ID NO: 565572 - RNA, 19 nt, Artificial Sequence
  Description of Artificial Sequence: Synthetic oligonucleotide
acggagaccucaccuuuau

SEQ ID NO: 565573 - RNA, 19 nt, Artificial Sequence
  Description of Artificial Sequence: Synthetic oligonucleotide
gcccagaacucucacacga

SEQ ID NO: 565574 - RNA, 19 nt, Artificial Sequence
  Description of Artificial Sequence: Synthetic oligonucleotide
caccccugaguuguauggg

SEQ ID NO: 565575 - RNA, 19 nt, Artificial Sequence
  Description of Artificial Sequence: Synthetic oligonucleotide
ccauaugacugcuauugga

SEQ ID NO: 565576 - RNA, 19 nt, Artificial Sequence
  Description of Artificial Sequence: Synthetic oligonucleotide
cacuggccacauguggugg

SEQ ID NO: 565577 - RNA, 19 nt, Artificial Sequence
  Description of Artificial Sequence: Synthetic oligonucleotide
gagcgaagcuaauggcuaa

SEQ ID NO: 565578 - RNA, 19 nt, Artificial Sequence
  Description of Artificial Sequence: Synthetic oligonucleotide
cucacacgagcgaggccag

SEQ ID NO: 565579 - RNA, 19 nt, Artificial Sequence
  Description of Artificial Sequence: Synthetic oligonucleotide
caucaggggaaaacauuaa

SEQ ID NO: 565580 - RNA, 19 nt, Artificial Sequence
  Description of Artificial Sequence: Synthetic oligonucleotide
caccagagcgaagcuaaug

SEQ ID NO: 565581 - RNA, 19 nt, Artificial Sequence
  Description of Artificial Sequence: Synthetic oligonucleotide
ucgcuuugauggcuuccaa

SEQ ID NO: 565582 - RNA, 19 nt, Artificial Sequence
  Description of Artificial Sequence: Synthetic oligonucleotide
aggacuuagcguggccgag

SEQ ID NO: 565583 - RNA, 19 nt, Artificial Sequence
  Description of Artificial Sequence: Synthetic oligonucleotide
agaggcacguccacaggca

SEQ ID NO: 565584 - RNA, 19 nt, Artificial Sequence
  Description of Artificial Sequence: Synthetic oligonucleotide
cagaacggagaccucaccu

SEQ ID NO: 565585 - RNA, 19 nt, Artificial Sequence
  Description of Artificial Sequence: Synthetic oligonucleotide
cugaguuguaugggaaaca

SEQ ID NO: 565586 - RNA, 19 nt, Artificial Sequence
  Description of Artificial Sequence: Synthetic oligonucleotide
cacucgcagcaccagcuuc

SEQ ID NO: 565587 - RNA, 19 nt, Artificial Sequence
  Description of Artificial Sequence: Synthetic oligonucleotide
aaguggcgauucugaacuu

SEQ ID NO: 565588 - RNA, 19 nt, Artificial Sequence
  Description of Artificial Sequence: Synthetic oligonucleotide
caacaguugaccgcuagcu

SEQ ID NO: 565589 - RNA, 19 nt, Artificial Sequence
  Description of Artificial Sequence: Synthetic oligonucleotide
gcgaagcuaauggcuaagg

SEQ ID NO: 565590 - RNA, 19 nt, Artificial Sequence
  Description of Artificial Sequence: Synthetic oligonucleotide
agggguuugccaacauuga

SEQ ID NO: 565591 - RNA, 19 nt, Artificial Sequence
  Description of Artificial Sequence: Synthetic oligonucleotide
gaggcccgaccacagaacu

SEQ ID NO: 565592 - RNA, 19 nt, Artificial Sequence
  Description of Artificial Sequence: Synthetic oligonucleotide
gagcgaggccagccaaaug

SEQ ID NO: 565593 - RNA, 19 nt, Artificial Sequence
  Description of Artificial Sequence: Synthetic oligonucleotide
aguugaccgcuagcuuagg

SEQ ID NO: 565594 - RNA, 19 nt, Artificial Sequence
  Description of Artificial Sequence: Synthetic oligonucleotide
gcuauuggaagcagacuuc

SEQ ID NO: 565595 - RNA, 19 nt, Artificial Sequence
  Description of Artificial Sequence: Synthetic oligonucleotide
gggaaacaucacucgcagc

SEQ ID NO: 565596 - RNA, 19 nt, Artificial Sequence
  Description of Artificial Sequence: Synthetic oligonucleotide
gaccucaccuuuauuugua

SEQ ID NO: 565597 - RNA, 19 nt, Artificial Sequence
  Description of Artificial Sequence: Synthetic oligonucleotide
ggcacguccacaggcaaac

SEQ ID NO: 565598 - RNA, 19 nt, Artificial Sequence
  Description of Artificial Sequence: Synthetic oligonucleotide
ggacuuagcguggccgagg

SEQ ID NO: 565599 - RNA, 19 nt, Artificial Sequence
  Description of Artificial Sequence: Synthetic oligonucleotide
gcggccauuaacacaagga

SEQ ID NO: 565600 - RNA, 19 nt, Artificial Sequence
  Description of Artificial Sequence: Synthetic oligonucleotide
aacggagaccucaccuuua

SEQ ID NO: 565601 - RNA, 19 nt, Artificial Sequence
  Description of Artificial Sequence: Synthetic oligonucleotide
auaugaccgagggcucuca

SEQ ID NO: 565602 - RNA, 19 nt, Artificial Sequence
  Description of Artificial Sequence: Synthetic oligonucleotide
gccucuuaagucaggcccc

SEQ ID NO: 565603 - RNA, 19 nt, Artificial Sequence
  Description of Artificial Sequence: Synthetic oligonucleotide
gaacaccauuggucuguuc

SEQ ID NO: 565604 - RNA, 19 nt, Artificial Sequence
  Description of Artificial Sequence: Synthetic oligonucleotide
ggcuaagggaagacugagc

SEQ ID NO: 565605 - RNA, 19 nt, Artificial Sequence
  Description of Artificial Sequence: Synthetic oligonucleotide
acuuagcguggccgaggcu

SEQ ID NO: 565606 - RNA, 19 nt, Artificial Sequence
  Description of Artificial Sequence: Synthetic oligonucleotide
ccaaacuccgacgcagggc

SEQ ID NO: 565607 - RNA, 19 nt, Artificial Sequence
  Description of Artificial Sequence: Synthetic oligonucleotide
augugccuaucaugacuau

SEQ ID NO: 565608 - RNA, 19 nt, Artificial Sequence
  Description of Artificial Sequence: Synthetic oligonucleotide
ggcaccccugaguuguaug

SEQ ID NO: 565609 - RNA, 19 nt, Artificial Sequence
  Description of Artificial Sequence: Synthetic oligonucleotide
acuuuccugccgagaccac

SEQ ID NO: 565610 - RNA, 19 nt, Artificial Sequence
  Description of Artificial Sequence: Synthetic oligonucleotide
uguuccccagcggccauua

SEQ ID NO: 565611 - RNA, 19 nt, Artificial Sequence
  Description of Artificial Sequence: Synthetic oligonucleotide
uccauuugacucggccuuu

SEQ ID NO: 565612 - RNA, 19 nt, Artificial Sequence
  Description of Artificial Sequence: Synthetic oligonucleotide
gccaaaugacugaaguuaa

SEQ ID NO: 565613 - RNA, 19 nt, Artificial Sequence
  Description of Artificial Sequence: Synthetic oligonucleotide
guacagggguuugccaaca

SEQ ID NO: 565614 - RNA, 19 nt, Artificial Sequence
  Description of Artificial Sequence: Synthetic oligonucleotide
ggaaguuacugcuguuagu

SEQ ID NO: 565615 - RNA, 19 nt, Artificial Sequence
  Description of Artificial Sequence: Synthetic oligonucleotide
aaucaacaguugaccgcua

SEQ ID NO: 565616 - RNA, 19 nt, Artificial Sequence
  Description of Artificial Sequence: Synthetic oligonucleotide
agccuccgcuaagauagca

SEQ ID NO: 565617 - RNA, 19 nt, Artificial Sequence
  Description of Artificial Sequence: Synthetic oligonucleotide
ccgcuaagauagcaacagc

SEQ ID NO: 565618 - RNA, 19 nt, Artificial Sequence
  Description of Artificial Sequence: Synthetic oligonucleotide
guccuuaccugggcuuccc

SEQ ID NO: 565619 - RNA, 19 nt, Artificial Sequence
  Description of Artificial Sequence: Synthetic oligonucleotide
cgcuaagauagcaacagcu

SEQ ID NO: 565620 - RNA, 19 nt, Artificial Sequence
  Description of Artificial Sequence: Synthetic oligonucleotide
aggcggcgagcaauugggg

SEQ ID NO: 565621 - RNA, 19 nt, Artificial Sequence
  Description of Artificial Sequence: Synthetic oligonucleotide
cgcuagcuuaggaaggcac

SEQ ID NO: 565622 - RNA, 19 nt, Artificial Sequence
  Description of Artificial Sequence: Synthetic oligonucleotide
cuguaccauccauaugacu

SEQ ID NO: 565623 - RNA, 19 nt, Artificial Sequence
  Description of Artificial Sequence: Synthetic oligonucleotide
cuacacugugaugugccua

SEQ ID NO: 565624 - RNA, 19 nt, Artificial Sequence
  Description of Artificial Sequence: Synthetic oligonucleotide
cuacaaaaguggcgauucu

SEQ ID NO: 565625 - RNA, 19 nt, Artificial Sequence
  Description of Artificial Sequence: Synthetic oligonucleotide
cagccuccgcuaagauagc

SEQ ID NO: 565626 - RNA, 19 nt, Artificial Sequence
  Description of Artificial Sequence: Synthetic oligonucleotide
ggguguucccuugggagca

SEQ ID NO: 565627 - RNA, 19 nt, Artificial Sequence
  Description of Artificial Sequence: Synthetic oligonucleotide
gagcuuagccucagguccu

SEQ ID NO: 565628 - RNA, 19 nt, Artificial Sequence
  Description of Artificial Sequence: Synthetic oligonucleotide
gcuguuagucugucccuaa

SEQ ID NO: 565629 - RNA, 19 nt, Artificial Sequence
  Description of Artificial Sequence: Synthetic oligonucleotide
ugguuucaggaggcccgac

SEQ ID NO: 565630 - RNA, 19 nt, Artificial Sequence
  Description of Artificial Sequence: Synthetic oligonucleotide
ccuuaccugggcuucccca

SEQ ID NO: 565631 - RNA, 19 nt, Artificial Sequence
  Description of Artificial Sequence: Synthetic oligonucleotide
cacgagcgaggccagccaa

SEQ ID NO: 565632 - RNA, 19 nt, Artificial Sequence
  Description of Artificial Sequence: Synthetic oligonucleotide
gacaucgcuuugauggcuu

SEQ ID NO: 565633 - RNA, 19 nt, Artificial Sequence
  Description of Artificial Sequence: Synthetic oligonucleotide
cuuuaauguccagcacaua

SEQ ID NO: 565634 - RNA, 19 nt, Artificial Sequence
  Description of Artificial Sequence: Synthetic oligonucleotide
gguccuuaccugggcuucc

SEQ ID NO: 565635 - RNA, 19 nt, Artificial Sequence
  Description of Artificial Sequence: Synthetic oligonucleotide
uagcguggccgaggcugag

SEQ ID NO: 565636 - RNA, 19 nt, Artificial Sequence
  Description of Artificial Sequence: Synthetic oligonucleotide
cauuugacucggccuuucu

SEQ ID NO: 565637 - RNA, 19 nt, Artificial Sequence
  Description of Artificial Sequence: Synthetic oligonucleotide
ggggccuuuggaugacauc

SEQ ID NO: 565638 - RNA, 19 nt, Artificial Sequence
  Description of Artificial Sequence: Synthetic oligonucleotide
uagcucuccucggcccugu

SEQ ID NO: 565639 - RNA, 19 nt, Artificial Sequence
  Description of Artificial Sequence: Synthetic oligonucleotide
ccauccauaugacugcuau

SEQ ID NO: 565640 - RNA, 19 nt, Artificial Sequence
  Description of Artificial Sequence: Synthetic oligonucleotide
gacccaagaggaggacuua

SEQ ID NO: 565641 - RNA, 19 nt, Artificial Sequence
  Description of Artificial Sequence: Synthetic oligonucleotide
ccgacgcagggcacugggg

SEQ ID NO: 565642 - RNA, 19 nt, Artificial Sequence
  Description of Artificial Sequence: Synthetic oligonucleotide
gguuccguuuucaucccua

SEQ ID NO: 565643 - RNA, 19 nt, Artificial Sequence
  Description of Artificial Sequence: Synthetic oligonucleotide
uggcaccccugaguuguau

SEQ ID NO: 565644 - RNA, 19 nt, Artificial Sequence
  Description of Artificial Sequence: Synthetic oligonucleotide
cucgggaaccugagggagu

SEQ ID NO: 565645 - RNA, 19 nt, Artificial Sequence
  Description of Artificial Sequence: Synthetic oligonucleotide
cugcuauuggaagcagacu

SEQ ID NO: 565646 - RNA, 19 nt, Artificial Sequence
  Description of Artificial Sequence: Synthetic oligonucleotide
gcgaggccagccaaaugac

SEQ ID NO: 565647 - RNA, 19 nt, Artificial Sequence
  Description of Artificial Sequence: Synthetic oligonucleotide
cucaugucucucagugaau

SEQ ID NO: 565648 - RNA, 19 nt, Artificial Sequence
  Description of Artificial Sequence: Synthetic oligonucleotide
cuccacugcucagguucug

SEQ ID NO: 565649 - RNA, 19 nt, Artificial Sequence
  Description of Artificial Sequence: Synthetic oligonucleotide
aggcacguccacaggcaaa

SEQ ID NO: 565650 - RNA, 19 nt, Artificial Sequence
  Description of Artificial Sequence: Synthetic oligonucleotide
acgagcgaggccagccaaa

SEQ ID NO: 565651 - RNA, 19 nt, Artificial Sequence
  Description of Artificial Sequence: Synthetic oligonucleotide
cugguccuuaccugggcuu

SEQ ID NO: 565652 - RNA, 19 nt, Artificial Sequence
  Description of Artificial Sequence: Synthetic oligonucleotide
ccauuugacucggccuuuc

SEQ ID NO: 565653 - RNA, 19 nt, Artificial Sequence
  Description of Artificial Sequence: Synthetic oligonucleotide
cggggagcuagggaaaguc

SEQ ID NO: 565654 - RNA, 19 nt, Artificial Sequence
  Description of Artificial Sequence: Synthetic oligonucleotide
cugcugaccuugccucuua

SEQ ID NO: 565655 - RNA, 19 nt, Artificial Sequence
  Description of Artificial Sequence: Synthetic oligonucleotide
ccguuuucaucccuacacu

SEQ ID NO: 565656 - RNA, 19 nt, Artificial Sequence
  Description of Artificial Sequence: Synthetic oligonucleotide
gccuccgcuaagauagcaa

SEQ ID NO: 565657 - RNA, 19 nt, Artificial Sequence
  Description of Artificial Sequence: Synthetic oligonucleotide
ccucuuaagucaggcccca

SEQ ID NO: 565658 - RNA, 19 nt, Artificial Sequence
  Description of Artificial Sequence: Synthetic oligonucleotide
ggguuccguuuucaucccu

SEQ ID NO: 565659 - RNA, 19 nt, Artificial Sequence
  Description of Artificial Sequence: Synthetic oligonucleotide
cugauucccuggagagcuu

SEQ ID NO: 565660 - RNA, 19 nt, Artificial Sequence
  Description of Artificial Sequence: Synthetic oligonucleotide
ccauggguuccguuuucau

SEQ ID NO: 565661 - RNA, 19 nt, Artificial Sequence
  Description of Artificial Sequence: Synthetic oligonucleotide
ccgcuagcuuaggaaggca

SEQ ID NO: 565662 - RNA, 19 nt, Artificial Sequence
  Description of Artificial Sequence: Synthetic oligonucleotide
ggucccaauucaggucaau

SEQ ID NO: 565663 - RNA, 19 nt, Artificial Sequence
  Description of Artificial Sequence: Synthetic oligonucleotide
ccauuaacacaaggagcuu

SEQ ID NO: 565664 - RNA, 19 nt, Artificial Sequence
  Description of Artificial Sequence: Synthetic oligonucleotide
gcggggagcuagggaaagu

SEQ ID NO: 565665 - RNA, 19 nt, Artificial Sequence
  Description of Artificial Sequence: Synthetic oligonucleotide
ccgaggcugaggggccuuu

SEQ ID NO: 565666 - RNA, 19 nt, Artificial Sequence
  Description of Artificial Sequence: Synthetic oligonucleotide
aucuuauauggcuugaucc

SEQ ID NO: 565667 - RNA, 19 nt, Artificial Sequence
  Description of Artificial Sequence: Synthetic oligonucleotide
aacaugucgccauucaggc

SEQ ID NO: 565668 - RNA, 19 nt, Artificial Sequence
  Description of Artificial Sequence: Synthetic oligonucleotide
ucacaagaaucuuauaugg

SEQ ID NO: 565669 - RNA, 19 nt, Artificial Sequence
  Description of Artificial Sequence: Synthetic oligonucleotide
uguagcaucugauuuagag

SEQ ID NO: 565670 - RNA, 19 nt, Artificial Sequence
  Description of Artificial Sequence: Synthetic oligonucleotide
uuuacuugcaauagguagc

SEQ ID NO: 565671 - RNA, 19 nt, Artificial Sequence
  Description of Artificial Sequence: Synthetic oligonucleotide
uuuaugguugaguagggag

SEQ ID NO: 565672 - RNA, 19 nt, Artificial Sequence
  Description of Artificial Sequence: Synthetic oligonucleotide
ucagcuuaaaggcugaugu

SEQ ID NO: 565673 - RNA, 19 nt, Artificial Sequence
  Description of Artificial Sequence: Synthetic oligonucleotide
aaucuuauauggcuugauc

SEQ ID NO: 565674 - RNA, 19 nt, Artificial Sequence
  Description of Artificial Sequence: Synthetic oligonucleotide
ugaauucucguucaggggc

SEQ ID NO: 565675 - RNA, 19 nt, Artificial Sequence
  Description of Artificial Sequence: Synthetic oligonucleotide
uccacguagauccagguag

SEQ ID NO: 565676 - RNA, 19 nt, Artificial Sequence
  Description of Artificial Sequence: Synthetic oligonucleotide
aaggcugaugucucaaagc

SEQ ID NO: 565677 - RNA, 19 nt, Artificial Sequence
  Description of Artificial Sequence: Synthetic oligonucleotide
guaauacugacacagccgg

SEQ ID NO: 565678 - RNA, 19 nt, Artificial Sequence
  Description of Artificial Sequence: Synthetic oligonucleotide
acuuauaggcccaagaagg

SEQ ID NO: 565679 - RNA, 19 nt, Artificial Sequence
  Description of Artificial Sequence: Synthetic oligonucleotide
aggcugaugucucaaagcc

SEQ ID NO: 565680 - RNA, 19 nt, Artificial Sequence
  Description of Artificial Sequence: Synthetic oligonucleotide
guaguaguugaacaugucg

SEQ ID NO: 565681 - RNA, 19 nt, Artificial Sequence
  Description of Artificial Sequence: Synthetic oligonucleotide
aagccggacaggcucaucc

SEQ ID NO: 565682 - RNA, 19 nt, Artificial Sequence
  Description of Artificial Sequence: Synthetic oligonucleotide
uaaggaaugccucaguggu

SEQ ID NO: 565683 - RNA, 19 nt, Artificial Sequence
  Description of Artificial Sequence: Synthetic oligonucleotide
acguucaucaccucucucc

SEQ ID NO: 565684 - RNA, 19 nt, Artificial Sequence
  Description of Artificial Sequence: Synthetic oligonucleotide
agugggaaaaugugcaucg

SEQ ID NO: 565685 - RNA, 19 nt, Artificial Sequence
  Description of Artificial Sequence: Synthetic oligonucleotide
ugauuuagagcgcugguga

SEQ ID NO: 565686 - RNA, 19 nt, Artificial Sequence
  Description of Artificial Sequence: Synthetic oligonucleotide
aucacaagaaucuuauaug

SEQ ID NO: 565687 - RNA, 19 nt, Artificial Sequence
  Description of Artificial Sequence: Synthetic oligonucleotide
ucaucugagaggauuagcu

SEQ ID NO: 565688 - RNA, 19 nt, Artificial Sequence
  Description of Artificial Sequence: Synthetic oligonucleotide
caugucgccauucaggccg

SEQ ID NO: 565689 - RNA, 19 nt, Artificial Sequence
  Description of Artificial Sequence: Synthetic oligonucleotide
gaagcaaggaaguugagaa

SEQ ID NO: 565690 - RNA, 19 nt, Artificial Sequence
  Description of Artificial Sequence: Synthetic oligonucleotide
uugacuacugguucaauca

SEQ ID NO: 565691 - RNA, 19 nt, Artificial Sequence
  Description of Artificial Sequence: Synthetic oligonucleotide
uguaggaaguaaucgagca

SEQ ID NO: 565692 - RNA, 19 nt, Artificial Sequence
  Description of Artificial Sequence: Synthetic oligonucleotide
uacugguucaaucaugcca

SEQ ID NO: 565693 - RNA, 19 nt, Artificial Sequence
  Description of Artificial Sequence: Synthetic oligonucleotide
aaagaguaggccccaagca

SEQ ID NO: 565694 - RNA, 19 nt, Artificial Sequence
  Description of Artificial Sequence: Synthetic oligonucleotide
aaguugaugcucuggcgac

SEQ ID NO: 565695 - RNA, 19 nt, Artificial Sequence
  Description of Artificial Sequence: Synthetic oligonucleotide
aaugugcaucgucugaaag

SEQ ID NO: 565696 - RNA, 19 nt, Artificial Sequence
  Description of Artificial Sequence: Synthetic oligonucleotide
uaggaaguaaucgagcaag

SEQ ID NO: 565697 - RNA, 19 nt, Artificial Sequence
  Description of Artificial Sequence: Synthetic oligonucleotide
uguggaaccucucuuugag

SEQ ID NO: 565698 - RNA, 19 nt, Artificial Sequence
  Description of Artificial Sequence: Synthetic oligonucleotide
aaguaaucgagcaaggaga

SEQ ID NO: 565699 - RNA, 19 nt, Artificial Sequence
  Description of Artificial Sequence: Synthetic oligonucleotide
ucauaauugggcaccgugc

SEQ ID NO: 565700 - RNA, 19 nt, Artificial Sequence
  Description of Artificial Sequence: Synthetic oligonucleotide
acuacugguucaaucaugc

SEQ ID NO: 565701 - RNA, 19 nt, Artificial Sequence
  Description of Artificial Sequence: Synthetic oligonucleotide
aggaacacuaguugugucg

SEQ ID NO: 565702 - RNA, 19 nt, Artificial Sequence
  Description of Artificial Sequence: Synthetic oligonucleotide
uuaugguugaguagggaga

SEQ ID NO: 565703 - RNA, 19 nt, Artificial Sequence
  Description of Artificial Sequence: Synthetic oligonucleotide
uccuuuacuugcaauaggu

SEQ ID NO: 565704 - RNA, 19 nt, Artificial Sequence
  Description of Artificial Sequence: Synthetic oligonucleotide
ugugcaucgucugaaagag

SEQ ID NO: 565705 - RNA, 19 nt, Artificial Sequence
  Description of Artificial Sequence: Synthetic oligonucleotide
uucaacucaucugagagga

SEQ ID NO: 565706 - RNA, 19 nt, Artificial Sequence
  Description of Artificial Sequence: Synthetic oligonucleotide
gaagccaucguagaguuug

SEQ ID NO: 565707 - RNA, 19 nt, Artificial Sequence
  Description of Artificial Sequence: Synthetic oligonucleotide
guggugauagaccucaugc

SEQ ID NO: 565708 - RNA, 19 nt, Artificial Sequence
  Description of Artificial Sequence: Synthetic oligonucleotide
agugguauaacugccaugu

SEQ ID NO: 565709 - RNA, 19 nt, Artificial Sequence
  Description of Artificial Sequence: Synthetic oligonucleotide
uggaauugaggacaacagc

SEQ ID NO: 565710 - RNA, 19 nt, Artificial Sequence
  Description of Artificial Sequence: Synthetic oligonucleotide
auagguagcagaccaagca

SEQ ID NO: 565711 - RNA, 19 nt, Artificial Sequence
  Description of Artificial Sequence: Synthetic oligonucleotide
ugcaguugcuucaacaccu

SEQ ID NO: 565712 - RNA, 19 nt, Artificial Sequence
  Description of Artificial Sequence: Synthetic oligonucleotide
gauccaaagaggcacucgc

SEQ ID NO: 565713 - RNA, 19 nt, Artificial Sequence
  Description of Artificial Sequence: Synthetic oligonucleotide
agcuuccguaacuuggucc

SEQ ID NO: 565714 - RNA, 19 nt, Artificial Sequence
  Description of Artificial Sequence: Synthetic oligonucleotide
aagaacuuccacguagauc

SEQ ID NO: 565715 - RNA, 19 nt, Artificial Sequence
  Description of Artificial Sequence: Synthetic oligonucleotide
ucguucaggggcaagccgg

SEQ ID NO: 565716 - RNA, 19 nt, Artificial Sequence
  Description of Artificial Sequence: Synthetic oligonucleotide
ucgccuaugucauccaccg

SEQ ID NO: 565717 - RNA, 19 nt, Artificial Sequence
  Description of Artificial Sequence: Synthetic oligonucleotide
ugaaaucacaagaaucuua

SEQ ID NO: 565718 - RNA, 19 nt, Artificial Sequence
  Description of Artificial Sequence: Synthetic oligonucleotide
guuuucuguuccuuagugg

SEQ ID NO: 565719 - RNA, 19 nt, Artificial Sequence
  Description of Artificial Sequence: Synthetic oligonucleotide
cuuauaggcccaagaaggg

SEQ ID NO: 565720 - RNA, 19 nt, Artificial Sequence
  Description of Artificial Sequence: Synthetic oligonucleotide
ugucgaaguuuucacauuc

SEQ ID NO: 565721 - RNA, 19 nt, Artificial Sequence
  Description of Artificial Sequence: Synthetic oligonucleotide
ucacaugaugccauuggug

SEQ ID NO: 565722 - RNA, 19 nt, Artificial Sequence
  Description of Artificial Sequence: Synthetic oligonucleotide
uggugugcacuucagggag

SEQ ID NO: 565723 - RNA, 19 nt, Artificial Sequence
  Description of Artificial Sequence: Synthetic oligonucleotide
aauucgguucucaggaauc

SEQ ID NO: 565724 - RNA, 19 nt, Artificial Sequence
  Description of Artificial Sequence: Synthetic oligonucleotide
acuugcaauagguagcaga

SEQ ID NO: 565725 - RNA, 19 nt, Artificial Sequence
  Description of Artificial Sequence: Synthetic oligonucleotide
uuguccauaugcuuccgag

SEQ ID NO: 565726 - RNA, 19 nt, Artificial Sequence
  Description of Artificial Sequence: Synthetic oligonucleotide
uuugggguuucuuaggcaa

SEQ ID NO: 565727 - RNA, 19 nt, Artificial Sequence
  Description of Artificial Sequence: Synthetic oligonucleotide
uuccgagcagcaaucagcc

SEQ ID NO: 565728 - RNA, 19 nt, Artificial Sequence
  Description of Artificial Sequence: Synthetic oligonucleotide
ucgguucucaggaauccgg

SEQ ID NO: 565729 - RNA, 19 nt, Artificial Sequence
  Description of Artificial Sequence: Synthetic oligonucleotide
uggaaccucucuuugaggu

SEQ ID NO: 565730 - RNA, 19 nt, Artificial Sequence
  Description of Artificial Sequence: Synthetic oligonucleotide
augaauucucguucagggg

SEQ ID NO: 565731 - RNA, 19 nt, Artificial Sequence
  Description of Artificial Sequence: Synthetic oligonucleotide
aagaguaggccccaagcaa

SEQ ID NO: 565732 - RNA, 19 nt, Artificial Sequence
  Description of Artificial Sequence: Synthetic oligonucleotide
aaugccucagugguauaac

SEQ ID NO: 565733 - RNA, 19 nt, Artificial Sequence
  Description of Artificial Sequence: Synthetic oligonucleotide
ugaugaauucucguucagg

SEQ ID NO: 565734 - RNA, 19 nt, Artificial Sequence
  Description of Artificial Sequence: Synthetic oligonucleotide
uguuggugugcacuucagg

SEQ ID NO: 565735 - RNA, 19 nt, Artificial Sequence
  Description of Artificial Sequence: Synthetic oligonucleotide
uucucuacggaccgugugc

SEQ ID NO: 565736 - RNA, 19 nt, Artificial Sequence
  Description of Artificial Sequence: Synthetic oligonucleotide
uaugguugaguagggagag

SEQ ID NO: 565737 - RNA, 19 nt, Artificial Sequence
  Description of Artificial Sequence: Synthetic oligonucleotide
uguuccuuaguggggaggg

SEQ ID NO: 565738 - RNA, 19 nt, Artificial Sequence
  Description of Artificial Sequence: Synthetic oligonucleotide
gguauaacugccauguucc

SEQ ID NO: 565739 - RNA, 19 nt, Artificial Sequence
  Description of Artificial Sequence: Synthetic oligonucleotide
acuugacaaugacugacag

SEQ ID NO: 565740 - RNA, 19 nt, Artificial Sequence
  Description of Artificial Sequence: Synthetic oligonucleotide
cucguuugaaggcuguggg

SEQ ID NO: 565741 - RNA, 19 nt, Artificial Sequence
  Description of Artificial Sequence: Synthetic oligonucleotide
cacaagaaucuuauauggc

SEQ ID NO: 565742 - RNA, 19 nt, Artificial Sequence
  Description of Artificial Sequence: Synthetic oligonucleotide
acaaugacugacaggaguc

SEQ ID NO: 565743 - RNA, 19 nt, Artificial Sequence
  Description of Artificial Sequence: Synthetic oligonucleotide
cacuuauaggcccaagaag

SEQ ID NO: 565744 - RNA, 19 nt, Artificial Sequence
  Description of Artificial Sequence: Synthetic oligonucleotide
uaggguugcuggcuguucg

SEQ ID NO: 565745 - RNA, 19 nt, Artificial Sequence
  Description of Artificial Sequence: Synthetic oligonucleotide
caugagugauaccacauuc

SEQ ID NO: 565746 - RNA, 19 nt, Artificial Sequence
  Description of Artificial Sequence: Synthetic oligonucleotide
ugaaagaguaggccccaag

SEQ ID NO: 565747 - RNA, 19 nt, Artificial Sequence
  Description of Artificial Sequence: Synthetic oligonucleotide
ccaucguagaguuuggugg

SEQ ID NO: 565748 - RNA, 19 nt, Artificial Sequence
  Description of Artificial Sequence: Synthetic oligonucleotide
uccuuaguggggagggugg

SEQ ID NO: 565749 - RNA, 19 nt, Artificial Sequence
  Description of Artificial Sequence: Synthetic oligonucleotide
acaaauucaguggucagcu

SEQ ID NO: 565750 - RNA, 19 nt, Artificial Sequence
  Description of Artificial Sequence: Synthetic oligonucleotide
uuagcuuccguaacuuggu

SEQ ID NO: 565751 - RNA, 19 nt, Artificial Sequence
  Description of Artificial Sequence: Synthetic oligonucleotide
gauuuagagcgcuggugag

SEQ ID NO: 565752 - RNA, 19 nt, Artificial Sequence
  Description of Artificial Sequence: Synthetic oligonucleotide
gaagggugucacaugaugc

SEQ ID NO: 565753 - RNA, 19 nt, Artificial Sequence
  Description of Artificial Sequence: Synthetic oligonucleotide
ucucguuugaaggcugugg

SEQ ID NO: 565754 - RNA, 19 nt, Artificial Sequence
  Description of Artificial Sequence: Synthetic oligonucleotide
acaggagucgccaauuggg

SEQ ID NO: 565755 - RNA, 19 nt, Artificial Sequence
  Description of Artificial Sequence: Synthetic oligonucleotide
guuucuuaggcaagggucc

SEQ ID NO: 565756 - RNA, 19 nt, Artificial Sequence
  Description of Artificial Sequence: Synthetic oligonucleotide
auucgguucucaggaaucc

SEQ ID NO: 565757 - RNA, 19 nt, Artificial Sequence
  Description of Artificial Sequence: Synthetic oligonucleotide
gucauaauugggcaccgug

SEQ ID NO: 565758 - RNA, 19 nt, Artificial Sequence
  Description of Artificial Sequence: Synthetic oligonucleotide
aguccuuuuggagggagac

SEQ ID NO: 565759 - RNA, 19 nt, Artificial Sequence
  Description of Artificial Sequence: Synthetic oligonucleotide
ugugcuccgaauucgguuc

SEQ ID NO: 565760 - RNA, 19 nt, Artificial Sequence
  Description of Artificial Sequence: Synthetic oligonucleotide
ugcacaaaauugcgcuggg

SEQ ID NO: 565761 - RNA, 19 nt, Artificial Sequence
  Description of Artificial Sequence: Synthetic oligonucleotide
ugugugagccagcuguucu

SEQ ID NO: 565762 - RNA, 19 nt, Artificial Sequence
  Description of Artificial Sequence: Synthetic oligonucleotide
uuacuugcaauagguagca

SEQ ID NO: 565763 - RNA, 19 nt, Artificial Sequence
  Description of Artificial Sequence: Synthetic oligonucleotide
caucgucugaaagaguagg

SEQ ID NO: 565764 - RNA, 19 nt, Artificial Sequence
  Description of Artificial Sequence: Synthetic oligonucleotide
aagcucucaugguuaccac

SEQ ID NO: 565765 - RNA, 19 nt, Artificial Sequence
  Description of Artificial Sequence: Synthetic oligonucleotide
ucuccuacccucuggcaag

SEQ ID NO: 565766 - RNA, 19 nt, Artificial Sequence
  Description of Artificial Sequence: Synthetic oligonucleotide
ugauagaccucaugcugcc

SEQ ID NO: 565767 - RNA, 19 nt, Artificial Sequence
  Description of Artificial Sequence: Synthetic oligonucleotide
agaggauuagcuuccguaa

SEQ ID NO: 565768 - RNA, 19 nt, Artificial Sequence
  Description of Artificial Sequence: Synthetic oligonucleotide
cuguaggaaguaaucgagc

SEQ ID NO: 565769 - RNA, 19 nt, Artificial Sequence
  Description of Artificial Sequence: Synthetic oligonucleotide
uccaaagaggcacucgcuc

SEQ ID NO: 565770 - RNA, 19 nt, Artificial Sequence
  Description of Artificial Sequence: Synthetic oligonucleotide
guugugucgaaguuuucac

SEQ ID NO: 565771 - RNA, 19 nt, Artificial Sequence
  Description of Artificial Sequence: Synthetic oligonucleotide
ucgaaguuuucacauucaa

SEQ ID NO: 565772 - RNA, 19 nt, Artificial Sequence
  Description of Artificial Sequence: Synthetic oligonucleotide
gauuagcuuccguaacuug

SEQ ID NO: 565773 - RNA, 19 nt, Artificial Sequence
  Description of Artificial Sequence: Synthetic oligonucleotide
aguaaucgagcaaggagag

SEQ ID NO: 565774 - RNA, 19 nt, Artificial Sequence
  Description of Artificial Sequence: Synthetic oligonucleotide
agaguaggccccaagcaac

SEQ ID NO: 565775 - RNA, 19 nt, Artificial Sequence
  Description of Artificial Sequence: Synthetic oligonucleotide
guuaccacaugauccuuug

SEQ ID NO: 565776 - RNA, 19 nt, Artificial Sequence
  Description of Artificial Sequence: Synthetic oligonucleotide
ucgucugaaagaguaggcc

SEQ ID NO: 565777 - RNA, 19 nt, Artificial Sequence
  Description of Artificial Sequence: Synthetic oligonucleotide
ugugccuguccuuuacuug

SEQ ID NO: 565778 - RNA, 19 nt, Artificial Sequence
  Description of Artificial Sequence: Synthetic oligonucleotide
aucgucugaaagaguaggc

SEQ ID NO: 565779 - RNA, 19 nt, Artificial Sequence
  Description of Artificial Sequence: Synthetic oligonucleotide
cucuggcaagcucucaugg

SEQ ID NO: 565780 - RNA, 19 nt, Artificial Sequence
  Description of Artificial Sequence: Synthetic oligonucleotide
uuuagagcgcuggugaguc

SEQ ID NO: 565781 - RNA, 19 nt, Artificial Sequence
  Description of Artificial Sequence: Synthetic oligonucleotide
ucuacggaccgugugcucc

SEQ ID NO: 565782 - RNA, 19 nt, Artificial Sequence
  Description of Artificial Sequence: Synthetic oligonucleotide
gucggcugaaaucacaaga

SEQ ID NO: 565783 - RNA, 19 nt, Artificial Sequence
  Description of Artificial Sequence: Synthetic oligonucleotide
auacugacacagccggagg

SEQ ID NO: 565784 - RNA, 19 nt, Artificial Sequence
  Description of Artificial Sequence: Synthetic oligonucleotide
guccauaugcuuccgagca

SEQ ID NO: 565785 - RNA, 19 nt, Artificial Sequence
  Description of Artificial Sequence: Synthetic oligonucleotide
ugauccaaagaggcacucg

SEQ ID NO: 565786 - RNA, 19 nt, Artificial Sequence
  Description of Artificial Sequence: Synthetic oligonucleotide
uggugauagaccucaugcu

SEQ ID NO: 565787 - RNA, 19 nt, Artificial Sequence
  Description of Artificial Sequence: Synthetic oligonucleotide
acaugucgccauucaggcc

SEQ ID NO: 565788 - RNA, 19 nt, Artificial Sequence
  Description of Artificial Sequence: Synthetic oligonucleotide
accacuuauaggcccaaga

SEQ ID NO: 565789 - RNA, 19 nt, Artificial Sequence
  Description of Artificial Sequence: Synthetic oligonucleotide
cuuggaauugaggacaaca

SEQ ID NO: 565790 - RNA, 19 nt, Artificial Sequence
  Description of Artificial Sequence: Synthetic oligonucleotide
guccuuuacuugcaauagg

SEQ ID NO: 565791 - RNA, 19 nt, Artificial Sequence
  Description of Artificial Sequence: Synthetic oligonucleotide
aguugugucgaaguuuuca

SEQ ID NO: 565792 - RNA, 19 nt, Artificial Sequence
  Description of Artificial Sequence: Synthetic oligonucleotide
ugggcacuaaggaaugccu

SEQ ID NO: 565793 - RNA, 19 nt, Artificial Sequence
  Description of Artificial Sequence: Synthetic oligonucleotide
uguaguaguugaacauguc

SEQ ID NO: 565794 - RNA, 19 nt, Artificial Sequence
  Description of Artificial Sequence: Synthetic oligonucleotide
acuuuaggguugcuggcug

SEQ ID NO: 565795 - RNA, 19 nt, Artificial Sequence
  Description of Artificial Sequence: Synthetic oligonucleotide
gaguuugguggugauagac

SEQ ID NO: 565796 - RNA, 19 nt, Artificial Sequence
  Description of Artificial Sequence: Synthetic oligonucleotide
ugaaaggcgccgucggaug

SEQ ID NO: 565797 - RNA, 19 nt, Artificial Sequence
  Description of Artificial Sequence: Synthetic oligonucleotide
cucacguucaucaccucuc

SEQ ID NO: 565798 - RNA, 19 nt, Artificial Sequence
  Description of Artificial Sequence: Synthetic oligonucleotide
cagccguuugccaauugcc

SEQ ID NO: 565799 - RNA, 19 nt, Artificial Sequence
  Description of Artificial Sequence: Synthetic oligonucleotide
aucugucaggugguaauac

SEQ ID NO: 565800 - RNA, 19 nt, Artificial Sequence
  Description of Artificial Sequence: Synthetic oligonucleotide
cucucuuugagguugcgaa

SEQ ID NO: 565801 - RNA, 19 nt, Artificial Sequence
  Description of Artificial Sequence: Synthetic oligonucleotide
uugaguagggagagcucug

SEQ ID NO: 565802 - RNA, 19 nt, Artificial Sequence
  Description of Artificial Sequence: Synthetic oligonucleotide
ucaugagugauaccacauu

SEQ ID NO: 565803 - RNA, 19 nt, Artificial Sequence
  Description of Artificial Sequence: Synthetic oligonucleotide
cguagauccagguagggag

SEQ ID NO: 565804 - RNA, 19 nt, Artificial Sequence
  Description of Artificial Sequence: Synthetic oligonucleotide
cucgccuaugucauccacc

SEQ ID NO: 565805 - RNA, 19 nt, Artificial Sequence
  Description of Artificial Sequence: Synthetic oligonucleotide
ugacuacugguucaaucau

SEQ ID NO: 565806 - RNA, 19 nt, Artificial Sequence
  Description of Artificial Sequence: Synthetic oligonucleotide
ucccaaauggacugcaguu

SEQ ID NO: 565807 - RNA, 19 nt, Artificial Sequence
  Description of Artificial Sequence: Synthetic oligonucleotide
uggcuguagcaucugauuu

SEQ ID NO: 565808 - RNA, 19 nt, Artificial Sequence
  Description of Artificial Sequence: Synthetic oligonucleotide
cugcaguugcuucaacacc

SEQ ID NO: 565809 - RNA, 19 nt, Artificial Sequence
  Description of Artificial Sequence: Synthetic oligonucleotide
ccuguaggaaguaaucgag

SEQ ID NO: 565810 - RNA, 19 nt, Artificial Sequence
  Description of Artificial Sequence: Synthetic oligonucleotide
auuugggguuucuuaggca

SEQ ID NO: 565811 - RNA, 19 nt, Artificial Sequence
  Description of Artificial Sequence: Synthetic oligonucleotide
uuaaaggcugaugucucaa

SEQ ID NO: 565812 - RNA, 19 nt, Artificial Sequence
  Description of Artificial Sequence: Synthetic oligonucleotide
agguagggagccuuguccu

SEQ ID NO: 565813 - RNA, 19 nt, Artificial Sequence
  Description of Artificial Sequence: Synthetic oligonucleotide
ugcucaugagugauaccac

SEQ ID NO: 565814 - RNA, 19 nt, Artificial Sequence
  Description of Artificial Sequence: Synthetic oligonucleotide
uucgguucucaggaauccg

SEQ ID NO: 565815 - RNA, 19 nt, Artificial Sequence
  Description of Artificial Sequence: Synthetic oligonucleotide
uucucguucaggggcaagc

SEQ ID NO: 565816 - RNA, 19 nt, Artificial Sequence
  Description of Artificial Sequence: Synthetic oligonucleotide
gcuuccguaacuugguccc

SEQ ID NO: 565817 - RNA, 19 nt, Artificial Sequence
  Description of Artificial Sequence: Synthetic oligonucleotide
guucaaucaugccacuguc

SEQ ID NO: 565818 - RNA, 19 nt, Artificial Sequence
  Description of Artificial Sequence: Synthetic oligonucleotide
uuccuuaguggggagggug

SEQ ID NO: 565819 - RNA, 19 nt, Artificial Sequence
  Description of Artificial Sequence: Synthetic oligonucleotide
ugguuagguagguaggguu

SEQ ID NO: 565820 - RNA, 19 nt, Artificial Sequence
  Description of Artificial Sequence: Synthetic oligonucleotide
aaggcgccgucggaugucc

SEQ ID NO: 565821 - RNA, 19 nt, Artificial Sequence
  Description of Artificial Sequence: Synthetic oligonucleotide
ugagaaccuugcugcauga

SEQ ID NO: 565822 - RNA, 19 nt, Artificial Sequence
  Description of Artificial Sequence: Synthetic oligonucleotide
agcguugacuacugguuca

SEQ ID NO: 565823 - RNA, 19 nt, Artificial Sequence
  Description of Artificial Sequence: Synthetic oligonucleotide
guucugaaaggcgccgucg

SEQ ID NO: 565824 - RNA, 19 nt, Artificial Sequence
  Description of Artificial Sequence: Synthetic oligonucleotide
cugauuuagagcgcuggug

SEQ ID NO: 565825 - RNA, 19 nt, Artificial Sequence
  Description of Artificial Sequence: Synthetic oligonucleotide
uggagccauggaagcaagg

SEQ ID NO: 565826 - RNA, 19 nt, Artificial Sequence
  Description of Artificial Sequence: Synthetic oligonucleotide
uuucggggugagcuggaga

SEQ ID NO: 565827 - RNA, 19 nt, Artificial Sequence
  Description of Artificial Sequence: Synthetic oligonucleotide
gaccacgugguggucaaag

SEQ ID NO: 565828 - RNA, 19 nt, Artificial Sequence
  Description of Artificial Sequence: Synthetic oligonucleotide
aggaaguaaucgagcaagg

SEQ ID NO: 565829 - RNA, 19 nt, Artificial Sequence
  Description of Artificial Sequence: Synthetic oligonucleotide
ggggaacccucucugaucc

SEQ ID NO: 565830 - RNA, 19 nt, Artificial Sequence
  Description of Artificial Sequence: Synthetic oligonucleotide
cucguucaggggcaagccg

SEQ ID NO: 565831 - RNA, 19 nt, Artificial Sequence
  Description of Artificial Sequence: Synthetic oligonucleotide
accgugcugaagcugccag

SEQ ID NO: 565832 - RNA, 19 nt, Artificial Sequence
  Description of Artificial Sequence: Synthetic oligonucleotide
ugaguccuuuuggagggag

SEQ ID NO: 565833 - RNA, 19 nt, Artificial Sequence
  Description of Artificial Sequence: Synthetic oligonucleotide
agcaucugauuuagagcgc

SEQ ID NO: 565834 - RNA, 19 nt, Artificial Sequence
  Description of Artificial Sequence: Synthetic oligonucleotide
agguuucggggugagcugg

SEQ ID NO: 565835 - RNA, 19 nt, Artificial Sequence
  Description of Artificial Sequence: Synthetic oligonucleotide
cuugagggcaacugcagaa

SEQ ID NO: 565836 - RNA, 19 nt, Artificial Sequence
  Description of Artificial Sequence: Synthetic oligonucleotide
augagugauaccacauuca

SEQ ID NO: 565837 - RNA, 19 nt, Artificial Sequence
  Description of Artificial Sequence: Synthetic oligonucleotide
ucugauccuccgcacuuuc

SEQ ID NO: 565838 - RNA, 19 nt, Artificial Sequence
  Description of Artificial Sequence: Synthetic oligonucleotide
ugaggacaacagcuugugu

SEQ ID NO: 565839 - RNA, 19 nt, Artificial Sequence
  Description of Artificial Sequence: Synthetic oligonucleotide
accuguagcucgccuaugu

SEQ ID NO: 565840 - RNA, 19 nt, Artificial Sequence
  Description of Artificial Sequence: Synthetic oligonucleotide
agacuuaugcuggcuguag

SEQ ID NO: 565841 - RNA, 19 nt, Artificial Sequence
  Description of Artificial Sequence: Synthetic oligonucleotide
cuacugguucaaucaugcc

SEQ ID NO: 565842 - RNA, 19 nt, Artificial Sequence
  Description of Artificial Sequence: Synthetic oligonucleotide
ggaauugaggacaacagcu

SEQ ID NO: 565843 - RNA, 19 nt, Artificial Sequence
  Description of Artificial Sequence: Synthetic oligonucleotide
ccgagcagcaaucagcccc

SEQ ID NO: 565844 - RNA, 19 nt, Artificial Sequence
  Description of Artificial Sequence: Synthetic oligonucleotide
ucucguucaggggcaagcc

SEQ ID NO: 565845 - RNA, 19 nt, Artificial Sequence
  Description of Artificial Sequence: Synthetic oligonucleotide
ggagguuuaugguugagua

SEQ ID NO: 565846 - RNA, 19 nt, Artificial Sequence
  Description of Artificial Sequence: Synthetic oligonucleotide
guucucuacggaccgugug

SEQ ID NO: 565847 - RNA, 19 nt, Artificial Sequence
  Description of Artificial Sequence: Synthetic oligonucleotide
uugcaauagguagcagacc

SEQ ID NO: 565848 - RNA, 19 nt, Artificial Sequence
  Description of Artificial Sequence: Synthetic oligonucleotide
accgugugcuccgaauucg

SEQ ID NO: 565849 - RNA, 19 nt, Artificial Sequence
  Description of Artificial Sequence: Synthetic oligonucleotide
aaaggcgccgucggauguc

SEQ ID NO: 565850 - RNA, 19 nt, Artificial Sequence
  Description of Artificial Sequence: Synthetic oligonucleotide
uucaggccgcccauuacau

SEQ ID NO: 565851 - RNA, 19 nt, Artificial Sequence
  Description of Artificial Sequence: Synthetic oligonucleotide
auuuagagcgcuggugagu

SEQ ID NO: 565852 - RNA, 19 nt, Artificial Sequence
  Description of Artificial Sequence: Synthetic oligonucleotide
augccucagugguauaacu

SEQ ID NO: 565853 - RNA, 19 nt, Artificial Sequence
  Description of Artificial Sequence: Synthetic oligonucleotide
gacacagcguugacuacug

SEQ ID NO: 565854 - RNA, 19 nt, Artificial Sequence
  Description of Artificial Sequence: Synthetic oligonucleotide
ugaguagggagagcucuga

SEQ ID NO: 565855 - RNA, 19 nt, Artificial Sequence
  Description of Artificial Sequence: Synthetic oligonucleotide
acacggaccacgugguggu

SEQ ID NO: 565856 - RNA, 19 nt, Artificial Sequence
  Description of Artificial Sequence: Synthetic oligonucleotide
ucucuacggaccgugugcu

SEQ ID NO: 565857 - RNA, 19 nt, Artificial Sequence
  Description of Artificial Sequence: Synthetic oligonucleotide
guugcgaauggugcuggag

SEQ ID NO: 565858 - RNA, 19 nt, Artificial Sequence
  Description of Artificial Sequence: Synthetic oligonucleotide
cuccgaauucgguucucag

SEQ ID NO: 565859 - RNA, 19 nt, Artificial Sequence
  Description of Artificial Sequence: Synthetic oligonucleotide
guagauccagguagggagc

SEQ ID NO: 565860 - RNA, 19 nt, Artificial Sequence
  Description of Artificial Sequence: Synthetic oligonucleotide
gaauucucguucaggggca

SEQ ID NO: 565861 - RNA, 19 nt, Artificial Sequence
  Description of Artificial Sequence: Synthetic oligonucleotide
agggcaacugcagaagggu

SEQ ID NO: 565862 - RNA, 19 nt, Artificial Sequence
  Description of Artificial Sequence: Synthetic oligonucleotide
aaaauugcgcugggcacua

SEQ ID NO: 565863 - RNA, 19 nt, Artificial Sequence
  Description of Artificial Sequence: Synthetic oligonucleotide
cuacggaccgugugcuccg

SEQ ID NO: 565864 - RNA, 19 nt, Artificial Sequence
  Description of Artificial Sequence: Synthetic oligonucleotide
uuccacguagauccaggua

SEQ ID NO: 565865 - RNA, 19 nt, Artificial Sequence
  Description of Artificial Sequence: Synthetic oligonucleotide
cgucugaaagaguaggccc

SEQ ID NO: 565866 - RNA, 19 nt, Artificial Sequence
  Description of Artificial Sequence: Synthetic oligonucleotide
aagccaucguagaguuugg

SEQ ID NO: 565867 - RNA, 19 nt, Artificial Sequence
  Description of Artificial Sequence: Synthetic oligonucleotide
gaccgugugcuccgaauuc

SEQ ID NO: 565868 - RNA, 19 nt, Artificial Sequence
  Description of Artificial Sequence: Synthetic oligonucleotide
gaauucgguucucaggaau

SEQ ID NO: 565869 - RNA, 19 nt, Artificial Sequence
  Description of Artificial Sequence: Synthetic oligonucleotide
cauaauugggcaccgugcu

SEQ ID NO: 565870 - RNA, 19 nt, Artificial Sequence
  Description of Artificial Sequence: Synthetic oligonucleotide
gucagcuuaaaggcugaug

SEQ ID NO: 565871 - RNA, 19 nt, Artificial Sequence
  Description of Artificial Sequence: Synthetic oligonucleotide
aauugggcaccgugcugaa

SEQ ID NO: 565872 - RNA, 19 nt, Artificial Sequence
  Description of Artificial Sequence: Synthetic oligonucleotide
cauccaccgaccaggcuuc

SEQ ID NO: 565873 - RNA, 19 nt, Artificial Sequence
  Description of Artificial Sequence: Synthetic oligonucleotide
cagugguauaacugccaug

SEQ ID NO: 565874 - RNA, 19 nt, Artificial Sequence
  Description of Artificial Sequence: Synthetic oligonucleotide
auccuccgcacuuucuccu

SEQ ID NO: 565875 - RNA, 19 nt, Artificial Sequence
  Description of Artificial Sequence: Synthetic oligonucleotide
cuaguugugucgaaguuuu

SEQ ID NO: 565876 - RNA, 19 nt, Artificial Sequence
  Description of Artificial Sequence: Synthetic oligonucleotide
gaaugccucagugguauaa

SEQ ID NO: 565877 - RNA, 19 nt, Artificial Sequence
  Description of Artificial Sequence: Synthetic oligonucleotide
ccuaugucauccaccgacc

SEQ ID NO: 565878 - RNA, 19 nt, Artificial Sequence
  Description of Artificial Sequence: Synthetic oligonucleotide
cagcguugacuacugguuc

SEQ ID NO: 565879 - RNA, 19 nt, Artificial Sequence
  Description of Artificial Sequence: Synthetic oligonucleotide
guagggagccuuguccuug

SEQ ID NO: 565880 - RNA, 19 nt, Artificial Sequence
  Description of Artificial Sequence: Synthetic oligonucleotide
uuagagcgcuggugagucc

SEQ ID NO: 565881 - RNA, 19 nt, Artificial Sequence
  Description of Artificial Sequence: Synthetic oligonucleotide
agugaguccugggaucugu

SEQ ID NO: 565882 - RNA, 19 nt, Artificial Sequence
  Description of Artificial Sequence: Synthetic oligonucleotide
ucggugagcuggcuucaac

SEQ ID NO: 565883 - RNA, 19 nt, Artificial Sequence
  Description of Artificial Sequence: Synthetic oligonucleotide
ggcaaggguccuccuaggg

SEQ ID NO: 565884 - RNA, 19 nt, Artificial Sequence
  Description of Artificial Sequence: Synthetic oligonucleotide
cuuaguggggaggguggcc

SEQ ID NO: 565885 - RNA, 19 nt, Artificial Sequence
  Description of Artificial Sequence: Synthetic oligonucleotide
gguggugauagaccucaug

SEQ ID NO: 565886 - RNA, 19 nt, Artificial Sequence
  Description of Artificial Sequence: Synthetic oligonucleotide
ggagauguugucacagcug

SEQ ID NO: 565887 - RNA, 19 nt, Artificial Sequence
  Description of Artificial Sequence: Synthetic oligonucleotide
cacguagauccagguaggg

SEQ ID NO: 565888 - RNA, 19 nt, Artificial Sequence
  Description of Artificial Sequence: Synthetic oligonucleotide
uccgcacuuucuccugcca

SEQ ID NO: 565889 - RNA, 19 nt, Artificial Sequence
  Description of Artificial Sequence: Synthetic oligonucleotide
cuaugucauccaccgacca

SEQ ID NO: 565890 - RNA, 19 nt, Artificial Sequence
  Description of Artificial Sequence: Synthetic oligonucleotide
guuuaugguugaguaggga

SEQ ID NO: 565891 - RNA, 19 nt, Artificial Sequence
  Description of Artificial Sequence: Synthetic oligonucleotide
agggucucguuugaaggcu

SEQ ID NO: 565892 - RNA, 19 nt, Artificial Sequence
  Description of Artificial Sequence: Synthetic oligonucleotide
ggagugcccgcugaguggg

SEQ ID NO: 565893 - RNA, 19 nt, Artificial Sequence
  Description of Artificial Sequence: Synthetic oligonucleotide
guaaucgagcaaggagagc

SEQ ID NO: 565894 - RNA, 19 nt, Artificial Sequence
  Description of Artificial Sequence: Synthetic oligonucleotide
uuucggugagcuggcuuca

SEQ ID NO: 565895 - RNA, 19 nt, Artificial Sequence
  Description of Artificial Sequence: Synthetic oligonucleotide
acguagauccagguaggga

SEQ ID NO: 565896 - RNA, 19 nt, Artificial Sequence
  Description of Artificial Sequence: Synthetic oligonucleotide
uuccguaacuugguccccu

SEQ ID NO: 565897 - RNA, 19 nt, Artificial Sequence
  Description of Artificial Sequence: Synthetic oligonucleotide
ucgcuccugcucccaaaug

SEQ ID NO: 565898 - RNA, 19 nt, Artificial Sequence
  Description of Artificial Sequence: Synthetic oligonucleotide
ggaacacuaguugugucga

SEQ ID NO: 565899 - RNA, 19 nt, Artificial Sequence
  Description of Artificial Sequence: Synthetic oligonucleotide
aauugggaagauggccaua

SEQ ID NO: 565900 - RNA, 19 nt, Artificial Sequence
  Description of Artificial Sequence: Synthetic oligonucleotide
ucaacucaucugagaggau

SEQ ID NO: 565901 - RNA, 19 nt, Artificial Sequence
  Description of Artificial Sequence: Synthetic oligonucleotide
gagucgccaauugggaaga

SEQ ID NO: 565902 - RNA, 19 nt, Artificial Sequence
  Description of Artificial Sequence: Synthetic oligonucleotide
cuccgcacuuucuccugcc

SEQ ID NO: 565903 - RNA, 19 nt, Artificial Sequence
  Description of Artificial Sequence: Synthetic oligonucleotide
gucacaugaugccauuggu

SEQ ID NO: 565904 - RNA, 19 nt, Artificial Sequence
  Description of Artificial Sequence: Synthetic oligonucleotide
cucuccuacccucuggcaa

SEQ ID NO: 565905 - RNA, 19 nt, Artificial Sequence
  Description of Artificial Sequence: Synthetic oligonucleotide
ucggggugagcuggagagg

SEQ ID NO: 565906 - RNA, 19 nt, Artificial Sequence
  Description of Artificial Sequence: Synthetic oligonucleotide
uccgagcagcaaucagccc

SEQ ID NO: 565907 - RNA, 19 nt, Artificial Sequence
  Description of Artificial Sequence: Synthetic oligonucleotide
ccacguagauccagguagg

SEQ ID NO: 565908 - RNA, 19 nt, Artificial Sequence
  Description of Artificial Sequence: Synthetic oligonucleotide
caccgaccaggcuucauca

SEQ ID NO: 565909 - RNA, 19 nt, Artificial Sequence
  Description of Artificial Sequence: Synthetic oligonucleotide
gcuguucugaaaggcgccg

SEQ ID NO: 565910 - RNA, 19 nt, Artificial Sequence
  Description of Artificial Sequence: Synthetic oligonucleotide
guccccucgggagugcccg

SEQ ID NO: 565911 - RNA, 19 nt, Artificial Sequence
  Description of Artificial Sequence: Synthetic oligonucleotide
cauaugcuuccgagcagca

SEQ ID NO: 565912 - RNA, 19 nt, Artificial Sequence
  Description of Artificial Sequence: Synthetic oligonucleotide
aauucucguucaggggcaa

SEQ ID NO: 565913 - RNA, 19 nt, Artificial Sequence
  Description of Artificial Sequence: Synthetic oligonucleotide
ugucauaauugggcaccgu

SEQ ID NO: 565914 - RNA, 19 nt, Artificial Sequence
  Description of Artificial Sequence: Synthetic oligonucleotide
aggguugcuggcuguucgu

SEQ ID NO: 565915 - RNA, 19 nt, Artificial Sequence
  Description of Artificial Sequence: Synthetic oligonucleotide
ggagccauggaagcaagga

SEQ ID NO: 565916 - RNA, 19 nt, Artificial Sequence
  Description of Artificial Sequence: Synthetic oligonucleotide
gcccauuacauccacaaau

SEQ ID NO: 565917 - RNA, 19 nt, Artificial Sequence
  Description of Artificial Sequence: Synthetic oligonucleotide
ggaaguaaucgagcaagga

SEQ ID NO: 565918 - RNA, 19 nt, Artificial Sequence
  Description of Artificial Sequence: Synthetic oligonucleotide
caucguagaguuugguggu

SEQ ID NO: 565919 - RNA, 19 nt, Artificial Sequence
  Description of Artificial Sequence: Synthetic oligonucleotide
gucgaaguuuucacauuca

SEQ ID NO: 565920 - RNA, 19 nt, Artificial Sequence
  Description of Artificial Sequence: Synthetic oligonucleotide
uaguugugucgaaguuuuc

SEQ ID NO: 565921 - RNA, 19 nt, Artificial Sequence
  Description of Artificial Sequence: Synthetic oligonucleotide
gguaggguuuugugauuug

SEQ ID NO: 565922 - RNA, 19 nt, Artificial Sequence
  Description of Artificial Sequence: Synthetic oligonucleotide
agccggacaggcucauccu

SEQ ID NO: 565923 - RNA, 19 nt, Artificial Sequence
  Description of Artificial Sequence: Synthetic oligonucleotide
ccacuuuaggguugcuggc

SEQ ID NO: 565924 - RNA, 19 nt, Artificial Sequence
  Description of Artificial Sequence: Synthetic oligonucleotide
uccguaacuugguccccuc

SEQ ID NO: 565925 - RNA, 19 nt, Artificial Sequence
  Description of Artificial Sequence: Synthetic oligonucleotide
guauuucuugccuuccauu

SEQ ID NO: 565926 - RNA, 19 nt, Artificial Sequence
  Description of Artificial Sequence: Synthetic oligonucleotide
ccauuggugagguacugga

SEQ ID NO: 565927 - RNA, 19 nt, Artificial Sequence
  Description of Artificial Sequence: Synthetic oligonucleotide
gaacacuaguugugucgaa

SEQ ID NO: 565928 - RNA, 19 nt, Artificial Sequence
  Description of Artificial Sequence: Synthetic oligonucleotide
ucaggccgcccauuacauc

SEQ ID NO: 565929 - RNA, 19 nt, Artificial Sequence
  Description of Artificial Sequence: Synthetic oligonucleotide
ggcaagcucucaugguuac

SEQ ID NO: 565930 - RNA, 19 nt, Artificial Sequence
  Description of Artificial Sequence: Synthetic oligonucleotide
augucgccauucaggccgc

SEQ ID NO: 565931 - RNA, 19 nt, Artificial Sequence
  Description of Artificial Sequence: Synthetic oligonucleotide
cacugucggcugaaaucac

SEQ ID NO: 565932 - RNA, 19 nt, Artificial Sequence
  Description of Artificial Sequence: Synthetic oligonucleotide
ggccccaagcaacagggca

SEQ ID NO: 565933 - RNA, 19 nt, Artificial Sequence
  Description of Artificial Sequence: Synthetic oligonucleotide
gaaaggcgccgucggaugu

SEQ ID NO: 565934 - RNA, 19 nt, Artificial Sequence
  Description of Artificial Sequence: Synthetic oligonucleotide
cccaaauggacugcaguug

SEQ ID NO: 565935 - RNA, 19 nt, Artificial Sequence
  Description of Artificial Sequence: Synthetic oligonucleotide
uucuuaggcaaggguccuc

SEQ ID NO: 565936 - RNA, 19 nt, Artificial Sequence
  Description of Artificial Sequence: Synthetic oligonucleotide
auaugcuuccgagcagcaa

SEQ ID NO: 565937 - RNA, 19 nt, Artificial Sequence
  Description of Artificial Sequence: Synthetic oligonucleotide
cucaugguuaccacaugau

SEQ ID NO: 565938 - RNA, 19 nt, Artificial Sequence
  Description of Artificial Sequence: Synthetic oligonucleotide
agggagguuuaugguugag

SEQ ID NO: 565939 - RNA, 19 nt, Artificial Sequence
  Description of Artificial Sequence: Synthetic oligonucleotide
gagacuuaugcuggcugua

SEQ ID NO: 565940 - RNA, 19 nt, Artificial Sequence
  Description of Artificial Sequence: Synthetic oligonucleotide
guuucggggugagcuggag

SEQ ID NO: 565941 - RNA, 19 nt, Artificial Sequence
  Description of Artificial Sequence: Synthetic oligonucleotide
guauaacugccauguuccu

SEQ ID NO: 565942 - RNA, 19 nt, Artificial Sequence
  Description of Artificial Sequence: Synthetic oligonucleotide
gucucguuugaaggcugug

SEQ ID NO: 565943 - RNA, 19 nt, Artificial Sequence
  Description of Artificial Sequence: Synthetic oligonucleotide
gaguccuuuuggagggaga

SEQ ID NO: 565944 - RNA, 19 nt, Artificial Sequence
  Description of Artificial Sequence: Synthetic oligonucleotide
aggcccaagaaggguguca

SEQ ID NO: 565945 - RNA, 19 nt, Artificial Sequence
  Description of Artificial Sequence: Synthetic oligonucleotide
agggugccuucaaucccac

SEQ ID NO: 565946 - RNA, 19 nt, Artificial Sequence
  Description of Artificial Sequence: Synthetic oligonucleotide
accgaccaggcuucaucau

SEQ ID NO: 565947 - RNA, 19 nt, Artificial Sequence
  Description of Artificial Sequence: Synthetic oligonucleotide
ucgggagugcccgcugagu

SEQ ID NO: 565948 - RNA, 19 nt, Artificial Sequence
  Description of Artificial Sequence: Synthetic oligonucleotide
ccacugucggcugaaauca

SEQ ID NO: 565949 - RNA, 19 nt, Artificial Sequence
  Description of Artificial Sequence: Synthetic oligonucleotide
uaacugccauguuccugua

SEQ ID NO: 565950 - RNA, 19 nt, Artificial Sequence
  Description of Artificial Sequence: Synthetic oligonucleotide
ccgugugcuccgaauucgg

SEQ ID NO: 565951 - RNA, 19 nt, Artificial Sequence
  Description of Artificial Sequence: Synthetic oligonucleotide
ccguuugccaauugccauc

SEQ ID NO: 565952 - RNA, 19 nt, Artificial Sequence
  Description of Artificial Sequence: Synthetic oligonucleotide
caucugagaggauuagcuu

SEQ ID NO: 565953 - RNA, 19 nt, Artificial Sequence
  Description of Artificial Sequence: Synthetic oligonucleotide
cuuccacguagauccaggu

SEQ ID NO: 565954 - RNA, 19 nt, Artificial Sequence
  Description of Artificial Sequence: Synthetic oligonucleotide
ugcugccauccaccaucug

SEQ ID NO: 565955 - RNA, 19 nt, Artificial Sequence
  Description of Artificial Sequence: Synthetic oligonucleotide
agccaucguagaguuuggu

SEQ ID NO: 565956 - RNA, 19 nt, Artificial Sequence
  Description of Artificial Sequence: Synthetic oligonucleotide
caggcagguucucuacgga

SEQ ID NO: 565957 - RNA, 19 nt, Artificial Sequence
  Description of Artificial Sequence: Synthetic oligonucleotide
cuggcaagcucucaugguu

SEQ ID NO: 565958 - RNA, 19 nt, Artificial Sequence
  Description of Artificial Sequence: Synthetic oligonucleotide
cucuacggaccgugugcuc

SEQ ID NO: 565959 - RNA, 19 nt, Artificial Sequence
  Description of Artificial Sequence: Synthetic oligonucleotide
cuuuaggguugcuggcugu

SEQ ID NO: 565960 - RNA, 19 nt, Artificial Sequence
  Description of Artificial Sequence: Synthetic oligonucleotide
ggcgccgucggaugucccc

SEQ ID NO: 565961 - RNA, 19 nt, Artificial Sequence
  Description of Artificial Sequence: Synthetic oligonucleotide
gugugcuccgaauucgguu

SEQ ID NO: 565962 - RNA, 19 nt, Artificial Sequence
  Description of Artificial Sequence: Synthetic oligonucleotide
cuggcuguagcaucugauu

SEQ ID NO: 565963 - RNA, 19 nt, Artificial Sequence
  Description of Artificial Sequence: Synthetic oligonucleotide
ccguaacuugguccccucg

SEQ ID NO: 565964 - RNA, 19 nt, Artificial Sequence
  Description of Artificial Sequence: Synthetic oligonucleotide
ccgaccaggcuucaucauc

SEQ ID NO: 565965 - RNA, 19 nt, Artificial Sequence
  Description of Artificial Sequence: Synthetic oligonucleotide
augcugccauccaccaucu

SEQ ID NO: 565966 - RNA, 19 nt, Artificial Sequence
  Description of Artificial Sequence: Synthetic oligonucleotide
ccgcacuuucuccugccag

SEQ ID NO: 565967 - RNA, 19 nt, Artificial Sequence
  Description of Artificial Sequence: Synthetic oligonucleotide
gccccaagcaacagggcac

SEQ ID NO: 565968 - RNA, 19 nt, Artificial Sequence
  Description of Artificial Sequence: Synthetic oligonucleotide
gacucgggcagggagguuu

SEQ ID NO: 565969 - RNA, 19 nt, Artificial Sequence
  Description of Artificial Sequence: Synthetic oligonucleotide
ccuuuacuugcaauaggua

SEQ ID NO: 565970 - RNA, 19 nt, Artificial Sequence
  Description of Artificial Sequence: Synthetic oligonucleotide
agugcccgcugagugggaa

SEQ ID NO: 565971 - RNA, 19 nt, Artificial Sequence
  Description of Artificial Sequence: Synthetic oligonucleotide
aaauugcgcugggcacuaa

SEQ ID NO: 565972 - RNA, 19 nt, Artificial Sequence
  Description of Artificial Sequence: Synthetic oligonucleotide
gguugaguagggagagcuc

SEQ ID NO: 565973 - RNA, 19 nt, Artificial Sequence
  Description of Artificial Sequence: Synthetic oligonucleotide
cacuuuaggguugcuggcu

SEQ ID NO: 565974 - RNA, 19 nt, Artificial Sequence
  Description of Artificial Sequence: Synthetic oligonucleotide
ggucaucuccacacuugac

SEQ ID NO: 565975 - RNA, 19 nt, Artificial Sequence
  Description of Artificial Sequence: Synthetic oligonucleotide
guuagguagguaggguuuu

SEQ ID NO: 565976 - RNA, 19 nt, Artificial Sequence
  Description of Artificial Sequence: Synthetic oligonucleotide
ccgcccauuacauccacaa

SEQ ID NO: 565977 - RNA, 19 nt, Artificial Sequence
  Description of Artificial Sequence: Synthetic oligonucleotide
gcucgccuaugucauccac

SEQ ID NO: 565978 - RNA, 19 nt, Artificial Sequence
  Description of Artificial Sequence: Synthetic oligonucleotide
ugugcacuucagggagcuc

SEQ ID NO: 565979 - RNA, 19 nt, Artificial Sequence
  Description of Artificial Sequence: Synthetic oligonucleotide
cgccaauugggaagauggc

SEQ ID NO: 565980 - RNA, 19 nt, Artificial Sequence
  Description of Artificial Sequence: Synthetic oligonucleotide
gcuguucguuucagguugc

SEQ ID NO: 565981 - RNA, 19 nt, Artificial Sequence
  Description of Artificial Sequence: Synthetic oligonucleotide
ugcuccgaauucgguucuc

SEQ ID NO: 565982 - RNA, 19 nt, Artificial Sequence
  Description of Artificial Sequence: Synthetic oligonucleotide
gugucgaaguuuucacauu

SEQ ID NO: 565983 - RNA, 19 nt, Artificial Sequence
  Description of Artificial Sequence: Synthetic oligonucleotide
gggucucguuugaaggcug

SEQ ID NO: 565984 - RNA, 19 nt, Artificial Sequence
  Description of Artificial Sequence: Synthetic oligonucleotide
ggaauccgggcaggaacac

SEQ ID NO: 565985 - RNA, 19 nt, Artificial Sequence
  Description of Artificial Sequence: Synthetic oligonucleotide
ccuuaguggggaggguggc

SEQ ID NO: 565986 - RNA, 19 nt, Artificial Sequence
  Description of Artificial Sequence: Synthetic oligonucleotide
cugaaaggcgccgucggau

SEQ ID NO: 565987 - RNA, 19 nt, Artificial Sequence
  Description of Artificial Sequence: Synthetic oligonucleotide
gcaagcucucaugguuacc

SEQ ID NO: 565988 - RNA, 19 nt, Artificial Sequence
  Description of Artificial Sequence: Synthetic oligonucleotide
gccggacaggcucauccuc

SEQ ID NO: 565989 - RNA, 19 nt, Artificial Sequence
  Description of Artificial Sequence: Synthetic oligonucleotide
uacggaccgugugcuccga

SEQ ID NO: 565990 - RNA, 19 nt, Artificial Sequence
  Description of Artificial Sequence: Synthetic oligonucleotide
cagugaguccugggaucug

SEQ ID NO: 565991 - RNA, 19 nt, Artificial Sequence
  Description of Artificial Sequence: Synthetic oligonucleotide
gggagguuuaugguugagu

SEQ ID NO: 565992 - RNA, 19 nt, Artificial Sequence
  Description of Artificial Sequence: Synthetic oligonucleotide
caccuguagcucgccuaug

SEQ ID NO: 565993 - RNA, 19 nt, Artificial Sequence
  Description of Artificial Sequence: Synthetic oligonucleotide
uccaccgaccaggcuucau

SEQ ID NO: 565994 - RNA, 19 nt, Artificial Sequence
  Description of Artificial Sequence: Synthetic oligonucleotide
cuuaggcaaggguccuccu

SEQ ID NO: 565995 - RNA, 19 nt, Artificial Sequence
  Description of Artificial Sequence: Synthetic oligonucleotide
ugucgccauucaggccgcc

SEQ ID NO: 565996 - RNA, 19 nt, Artificial Sequence
  Description of Artificial Sequence: Synthetic oligonucleotide
gguugcgaauggugcugga

SEQ ID NO: 565997 - RNA, 19 nt, Artificial Sequence
  Description of Artificial Sequence: Synthetic oligonucleotide
cacagccggagguggggaa

SEQ ID NO: 565998 - RNA, 19 nt, Artificial Sequence
  Description of Artificial Sequence: Synthetic oligonucleotide
gugcuccgaauucgguucu

SEQ ID NO: 565999 - RNA, 19 nt, Artificial Sequence
  Description of Artificial Sequence: Synthetic oligonucleotide
acggaccgugugcuccgaa

SEQ ID NO: 566000 - RNA, 19 nt, Artificial Sequence
  Description of Artificial Sequence: Synthetic oligonucleotide
gcucuccuacccucuggca

SEQ ID NO: 566001 - RNA, 19 nt, Artificial Sequence
  Description of Artificial Sequence: Synthetic oligonucleotide
gugggaaaaugugcaucgu

SEQ ID NO: 566002 - RNA, 19 nt, Artificial Sequence
  Description of Artificial Sequence: Synthetic oligonucleotide
gcacacggaccacguggug

SEQ ID NO: 566003 - RNA, 19 nt, Artificial Sequence
  Description of Artificial Sequence: Synthetic oligonucleotide
gcagugaguccugggaucu

SEQ ID NO: 566004 - RNA, 19 nt, Artificial Sequence
  Description of Artificial Sequence: Synthetic oligonucleotide
ggggcacacggaccacgug

SEQ ID NO: 566005 - RNA, 19 nt, Artificial Sequence
  Description of Artificial Sequence: Synthetic oligonucleotide
gcuccgaauucgguucuca

SEQ ID NO: 566006 - RNA, 19 nt, Artificial Sequence
  Description of Artificial Sequence: Synthetic oligonucleotide
gugcccgcugagugggaaa

SEQ ID NO: 566007 - RNA, 19 nt, Artificial Sequence
  Description of Artificial Sequence: Synthetic oligonucleotide
cgucggauguccccugcug

SEQ ID NO: 566008 - RNA, 19 nt, Artificial Sequence
  Description of Artificial Sequence: Synthetic oligonucleotide
ggcaagccggacaggcuca

SEQ ID NO: 566009 - RNA, 19 nt, Artificial Sequence
  Description of Artificial Sequence: Synthetic oligonucleotide
caccugguggauggacaca

SEQ ID NO: 566010 - RNA, 19 nt, Artificial Sequence
  Description of Artificial Sequence: Synthetic oligonucleotide
caaggaaguugagaaccuu

SEQ ID NO: 566011 - RNA, 19 nt, Artificial Sequence
  Description of Artificial Sequence: Synthetic oligonucleotide
gggagagcucugagaucag

SEQ ID NO: 566012 - RNA, 19 nt, Artificial Sequence
  Description of Artificial Sequence: Synthetic oligonucleotide
caagccggacaggcucauc

SEQ ID NO: 566013 - RNA, 19 nt, Artificial Sequence
  Description of Artificial Sequence: Synthetic oligonucleotide
cccaagaagggugucacau

SEQ ID NO: 566014 - RNA, 19 nt, Artificial Sequence
  Description of Artificial Sequence: Synthetic oligonucleotide
ccacaugauccuuuguauu

SEQ ID NO: 566015 - RNA, 19 nt, Artificial Sequence
  Description of Artificial Sequence: Synthetic oligonucleotide
gcguugacuacugguucaa

SEQ ID NO: 566016 - RNA, 19 nt, Artificial Sequence
  Description of Artificial Sequence: Synthetic oligonucleotide
cacucgcuccugcucccaa

SEQ ID NO: 566017 - RNA, 19 nt, Artificial Sequence
  Description of Artificial Sequence: Synthetic oligonucleotide
caaucagccccugcagcau

SEQ ID NO: 566018 - RNA, 19 nt, Artificial Sequence
  Description of Artificial Sequence: Synthetic oligonucleotide
gguuucggggugagcugga

SEQ ID NO: 566019 - RNA, 19 nt, Artificial Sequence
  Description of Artificial Sequence: Synthetic oligonucleotide
ggaaugccucagugguaua

SEQ ID NO: 566020 - RNA, 19 nt, Artificial Sequence
  Description of Artificial Sequence: Synthetic oligonucleotide
agagcgcuggugaguccuu

SEQ ID NO: 566021 - RNA, 19 nt, Artificial Sequence
  Description of Artificial Sequence: Synthetic oligonucleotide
auccaccgaccaggcuuca

SEQ ID NO: 566022 - RNA, 19 nt, Artificial Sequence
  Description of Artificial Sequence: Synthetic oligonucleotide
cacggaccacguggugguc

SEQ ID NO: 566023 - RNA, 19 nt, Artificial Sequence
  Description of Artificial Sequence: Synthetic oligonucleotide
gguagggagccuuguccuu

SEQ ID NO: 566024 - RNA, 19 nt, Artificial Sequence
  Description of Artificial Sequence: Synthetic oligonucleotide
cuccaccuguagcucgccu

SEQ ID NO: 566025 - RNA, 19 nt, Artificial Sequence
  Description of Artificial Sequence: Synthetic oligonucleotide
gugcaucgucugaaagagu

SEQ ID NO: 566026 - RNA, 19 nt, Artificial Sequence
  Description of Artificial Sequence: Synthetic oligonucleotide
ggucucguuugaaggcugu

SEQ ID NO: 566027 - RNA, 19 nt, Artificial Sequence
  Description of Artificial Sequence: Synthetic oligonucleotide
cggugagcuggcuucaacu

SEQ ID NO: 566028 - RNA, 19 nt, Artificial Sequence
  Description of Artificial Sequence: Synthetic oligonucleotide
gagugcccgcugaguggga

SEQ ID NO: 566029 - RNA, 19 nt, Artificial Sequence
  Description of Artificial Sequence: Synthetic oligonucleotide
ccccaagcaacagggcaca

SEQ ID NO: 566030 - RNA, 19 nt, Artificial Sequence
  Description of Artificial Sequence: Synthetic oligonucleotide
ccgggcaggaacacuaguu

SEQ ID NO: 566031 - RNA, 19 nt, Artificial Sequence
  Description of Artificial Sequence: Synthetic oligonucleotide
cucugauccuccgcacuuu

SEQ ID NO: 566032 - RNA, 19 nt, Artificial Sequence
  Description of Artificial Sequence: Synthetic oligonucleotide
ccaccuguagcucgccuau

SEQ ID NO: 566033 - RNA, 19 nt, Artificial Sequence
  Description of Artificial Sequence: Synthetic oligonucleotide
gccgcccauuacauccaca

SEQ ID NO: 566034 - RNA, 19 nt, Artificial Sequence
  Description of Artificial Sequence: Synthetic oligonucleotide
gagcgcuggugaguccuuu

SEQ ID NO: 566035 - RNA, 19 nt, Artificial Sequence
  Description of Artificial Sequence: Synthetic oligonucleotide
cucuuucggugagcuggcu

SEQ ID NO: 566036 - RNA, 19 nt, Artificial Sequence
  Description of Artificial Sequence: Synthetic oligonucleotide
cguagaguuugguggugau

SEQ ID NO: 566037 - RNA, 19 nt, Artificial Sequence
  Description of Artificial Sequence: Synthetic oligonucleotide
cgugugcuccgaauucggu

SEQ ID NO: 566038 - RNA, 19 nt, Artificial Sequence
  Description of Artificial Sequence: Synthetic oligonucleotide
cgccuaugucauccaccga

SEQ ID NO: 566039 - RNA, 19 nt, Artificial Sequence
  Description of Artificial Sequence: Synthetic oligonucleotide
ccgucggauguccccugcu

SEQ ID NO: 566040 - RNA, 19 nt, Artificial Sequence
  Description of Artificial Sequence: Synthetic oligonucleotide
gcaagccggacaggcucau

SEQ ID NO: 566041 - RNA, 19 nt, Artificial Sequence
  Description of Artificial Sequence: Synthetic oligonucleotide
cucgggcagggagguuuau

SEQ ID NO: 566042 - RNA, 19 nt, Artificial Sequence
  Description of Artificial Sequence: Synthetic oligonucleotide
ggccagccguuugccaauu

SEQ ID NO: 566043 - RNA, 19 nt, Artificial Sequence
  Description of Artificial Sequence: Synthetic oligonucleotide
cguugacuacugguucaau

SEQ ID NO: 566044 - RNA, 19 nt, Artificial Sequence
  Description of Artificial Sequence: Synthetic oligonucleotide
aucgauguaagauaggagc

SEQ ID NO: 566045 - RNA, 19 nt, Artificial Sequence
  Description of Artificial Sequence: Synthetic oligonucleotide
aaggauauugauuuugagg

SEQ ID NO: 566046 - RNA, 19 nt, Artificial Sequence
  Description of Artificial Sequence: Synthetic oligonucleotide
cauaauaaaacucuugcag

SEQ ID NO: 566047 - RNA, 19 nt, Artificial Sequence
  Description of Artificial Sequence: Synthetic oligonucleotide
aaaaccggacacuucgucc

SEQ ID NO: 566048 - RNA, 19 nt, Artificial Sequence
  Description of Artificial Sequence: Synthetic oligonucleotide
aaaucuacgcaucagcuca

SEQ ID NO: 566049 - RNA, 19 nt, Artificial Sequence
  Description of Artificial Sequence: Synthetic oligonucleotide
auuaucaaaggcaugaagg

SEQ ID NO: 566050 - RNA, 19 nt, Artificial Sequence
  Description of Artificial Sequence: Synthetic oligonucleotide
uaauaaauuuggaaccacg

SEQ ID NO: 566051 - RNA, 19 nt, Artificial Sequence
  Description of Artificial Sequence: Synthetic oligonucleotide
aaauuuggaaccacgaguc

SEQ ID NO: 566052 - RNA, 19 nt, Artificial Sequence
  Description of Artificial Sequence: Synthetic oligonucleotide
aguacagccgcugugagcc

SEQ ID NO: 566053 - RNA, 19 nt, Artificial Sequence
  Description of Artificial Sequence: Synthetic oligonucleotide
uucccgaugagccagauga

SEQ ID NO: 566054 - RNA, 19 nt, Artificial Sequence
  Description of Artificial Sequence: Synthetic oligonucleotide
ucucccauaaggcagaugu

SEQ ID NO: 566055 - RNA, 19 nt, Artificial Sequence
  Description of Artificial Sequence: Synthetic oligonucleotide
ucuagguccacguacaaug

SEQ ID NO: 566056 - RNA, 19 nt, Artificial Sequence
  Description of Artificial Sequence: Synthetic oligonucleotide
aauaucacaucugcuggcc

SEQ ID NO: 566057 - RNA, 19 nt, Artificial Sequence
  Description of Artificial Sequence: Synthetic oligonucleotide
aguauauguggccaccacc

SEQ ID NO: 566058 - RNA, 19 nt, Artificial Sequence
  Description of Artificial Sequence: Synthetic oligonucleotide
ugaaucagccauaaaaggu

SEQ ID NO: 566059 - RNA, 19 nt, Artificial Sequence
  Description of Artificial Sequence: Synthetic oligonucleotide
ucgaagaauggccaguagg

SEQ ID NO: 566060 - RNA, 19 nt, Artificial Sequence
  Description of Artificial Sequence: Synthetic oligonucleotide
aucacaaguauauguggcc

SEQ ID NO: 566061 - RNA, 19 nt, Artificial Sequence
  Description of Artificial Sequence: Synthetic oligonucleotide
auucucacaaauugagucg

SEQ ID NO: 566062 - RNA, 19 nt, Artificial Sequence
  Description of Artificial Sequence: Synthetic oligonucleotide
uuugacuucagagacacga

SEQ ID NO: 566063 - RNA, 19 nt, Artificial Sequence
  Description of Artificial Sequence: Synthetic oligonucleotide
ugaucacaaguauaugugg

SEQ ID NO: 566064 - RNA, 19 nt, Artificial Sequence
  Description of Artificial Sequence: Synthetic oligonucleotide
caaauaucacaucugcugg

SEQ ID NO: 566065 - RNA, 19 nt, Artificial Sequence
  Description of Artificial Sequence: Synthetic oligonucleotide
agagucucucaguacagcc

SEQ ID NO: 566066 - RNA, 19 nt, Artificial Sequence
  Description of Artificial Sequence: Synthetic oligonucleotide
aauugggcuggugugaaac

SEQ ID NO: 566067 - RNA, 19 nt, Artificial Sequence
  Description of Artificial Sequence: Synthetic oligonucleotide
agagacacgagugacaauc

SEQ ID NO: 566068 - RNA, 19 nt, Artificial Sequence
  Description of Artificial Sequence: Synthetic oligonucleotide
cauuaucucggucaggccg

SEQ ID NO: 566069 - RNA, 19 nt, Artificial Sequence
  Description of Artificial Sequence: Synthetic oligonucleotide
acugaucacaaguauaugu

SEQ ID NO: 566070 - RNA, 19 nt, Artificial Sequence
  Description of Artificial Sequence: Synthetic oligonucleotide
agccauaaaaggucgaauc

SEQ ID NO: 566071 - RNA, 19 nt, Artificial Sequence
  Description of Artificial Sequence: Synthetic oligonucleotide
gguuguaucgcccauaggc

SEQ ID NO: 566072 - RNA, 19 nt, Artificial Sequence
  Description of Artificial Sequence: Synthetic oligonucleotide
uacaacucaaaucuacgca

SEQ ID NO: 566073 - RNA, 19 nt, Artificial Sequence
  Description of Artificial Sequence: Synthetic oligonucleotide
uauguaccgucucauaagc

SEQ ID NO: 566074 - RNA, 19 nt, Artificial Sequence
  Description of Artificial Sequence: Synthetic oligonucleotide
acaaauugagucgaccagc

SEQ ID NO: 566075 - RNA, 19 nt, Artificial Sequence
  Description of Artificial Sequence: Synthetic oligonucleotide
ucaaaucuacgcaucagcu

SEQ ID NO: 566076 - RNA, 19 nt, Artificial Sequence
  Description of Artificial Sequence: Synthetic oligonucleotide
cagaaaaccggacacuucg

SEQ ID NO: 566077 - RNA, 19 nt, Artificial Sequence
  Description of Artificial Sequence: Synthetic oligonucleotide
uguccgagaaguauugacc

SEQ ID NO: 566078 - RNA, 19 nt, Artificial Sequence
  Description of Artificial Sequence: Synthetic oligonucleotide
aaguauauguggccaccac

SEQ ID NO: 566079 - RNA, 19 nt, Artificial Sequence
  Description of Artificial Sequence: Synthetic oligonucleotide
uguuguauacugacuucgg

SEQ ID NO: 566080 - RNA, 19 nt, Artificial Sequence
  Description of Artificial Sequence: Synthetic oligonucleotide
uggcaaauaucacaucugc

SEQ ID NO: 566081 - RNA, 19 nt, Artificial Sequence
  Description of Artificial Sequence: Synthetic oligonucleotide
acccucuaaggucaguucc

SEQ ID NO: 566082 - RNA, 19 nt, Artificial Sequence
  Description of Artificial Sequence: Synthetic oligonucleotide
aaagucgaagaauggccag

SEQ ID NO: 566083 - RNA, 19 nt, Artificial Sequence
  Description of Artificial Sequence: Synthetic oligonucleotide
aaaaggucgaaucgggaaa

SEQ ID NO: 566084 - RNA, 19 nt, Artificial Sequence
  Description of Artificial Sequence: Synthetic oligonucleotide
cuuuucaccuagaagugag

SEQ ID NO: 566085 - RNA, 19 nt, Artificial Sequence
  Description of Artificial Sequence: Synthetic oligonucleotide
aaucccacgaacagucacc

SEQ ID NO: 566086 - RNA, 19 nt, Artificial Sequence
  Description of Artificial Sequence: Synthetic oligonucleotide
ucccauaaggcagaugugg

SEQ ID NO: 566087 - RNA, 19 nt, Artificial Sequence
  Description of Artificial Sequence: Synthetic oligonucleotide
uguuugucccuuuucaccu

SEQ ID NO: 566088 - RNA, 19 nt, Artificial Sequence
  Description of Artificial Sequence: Synthetic oligonucleotide
ucuuguacaacaucagcaa

SEQ ID NO: 566089 - RNA, 19 nt, Artificial Sequence
  Description of Artificial Sequence: Synthetic oligonucleotide
cugaucacaaguauaugug

SEQ ID NO: 566090 - RNA, 19 nt, Artificial Sequence
  Description of Artificial Sequence: Synthetic oligonucleotide
ggaaccacgagucugcagg

SEQ ID NO: 566091 - RNA, 19 nt, Artificial Sequence
  Description of Artificial Sequence: Synthetic oligonucleotide
gagauuuggccacaccagg

SEQ ID NO: 566092 - RNA, 19 nt, Artificial Sequence
  Description of Artificial Sequence: Synthetic oligonucleotide
uaaaaggucgaaucgggaa

SEQ ID NO: 566093 - RNA, 19 nt, Artificial Sequence
  Description of Artificial Sequence: Synthetic oligonucleotide
aaguauugaccugccagac

SEQ ID NO: 566094 - RNA, 19 nt, Artificial Sequence
  Description of Artificial Sequence: Synthetic oligonucleotide
ucagacaaaagugaugcgu

SEQ ID NO: 566095 - RNA, 19 nt, Artificial Sequence
  Description of Artificial Sequence: Synthetic oligonucleotide
uguauucucuccuuguaaa

SEQ ID NO: 566096 - RNA, 19 nt, Artificial Sequence
  Description of Artificial Sequence: Synthetic oligonucleotide
guuguauacugacuucggg

SEQ ID NO: 566097 - RNA, 19 nt, Artificial Sequence
  Description of Artificial Sequence: Synthetic oligonucleotide
uguaucgcccauaggcagg

SEQ ID NO: 566098 - RNA, 19 nt, Artificial Sequence
  Description of Artificial Sequence: Synthetic oligonucleotide
ucuaaggucaguuccccac

SEQ ID NO: 566099 - RNA, 19 nt, Artificial Sequence
  Description of Artificial Sequence: Synthetic oligonucleotide
accuuauggcuucauuuac

SEQ ID NO: 566100 - RNA, 19 nt, Artificial Sequence
  Description of Artificial Sequence: Synthetic oligonucleotide
gacgaucgauguaagauag

SEQ ID NO: 566101 - RNA, 19 nt, Artificial Sequence
  Description of Artificial Sequence: Synthetic oligonucleotide
uguacaacaucagcaaaca

SEQ ID NO: 566102 - RNA, 19 nt, Artificial Sequence
  Description of Artificial Sequence: Synthetic oligonucleotide
cuauguaccgucucauaag

SEQ ID NO: 566103 - RNA, 19 nt, Artificial Sequence
  Description of Artificial Sequence: Synthetic oligonucleotide
gaaucagccauaaaagguc

SEQ ID NO: 566104 - RNA, 19 nt, Artificial Sequence
  Description of Artificial Sequence: Synthetic oligonucleotide
gagcaauagaagcugccag

SEQ ID NO: 566105 - RNA, 19 nt, Artificial Sequence
  Description of Artificial Sequence: Synthetic oligonucleotide
accacugugaugcuacgag

SEQ ID NO: 566106 - RNA, 19 nt, Artificial Sequence
  Description of Artificial Sequence: Synthetic oligonucleotide
guacaaugccacuuguucc

SEQ ID NO: 566107 - RNA, 19 nt, Artificial Sequence
  Description of Artificial Sequence: Synthetic oligonucleotide
gaaguauugaccugccaga

SEQ ID NO: 566108 - RNA, 19 nt, Artificial Sequence
  Description of Artificial Sequence: Synthetic oligonucleotide
uucaccuagaagugagucc

SEQ ID NO: 566109 - RNA, 19 nt, Artificial Sequence
  Description of Artificial Sequence: Synthetic oligonucleotide
aaaggucgaaucgggaaag

SEQ ID NO: 566110 - RNA, 19 nt, Artificial Sequence
  Description of Artificial Sequence: Synthetic oligonucleotide
ucagcucagaaggauauug

SEQ ID NO: 566111 - RNA, 19 nt, Artificial Sequence
  Description of Artificial Sequence: Synthetic oligonucleotide
acaaguauauguggccacc

SEQ ID NO: 566112 - RNA, 19 nt, Artificial Sequence
  Description of Artificial Sequence: Synthetic oligonucleotide
ucaccuagaagugaguccu

SEQ ID NO: 566113 - RNA, 19 nt, Artificial Sequence
  Description of Artificial Sequence: Synthetic oligonucleotide
agacacgagugacaauccc

SEQ ID NO: 566114 - RNA, 19 nt, Artificial Sequence
  Description of Artificial Sequence: Synthetic oligonucleotide
aaccuuauggcuucauuua

SEQ ID NO: 566115 - RNA, 19 nt, Artificial Sequence
  Description of Artificial Sequence: Synthetic oligonucleotide
ucagccucagaaaaccgga

SEQ ID NO: 566116 - RNA, 19 nt, Artificial Sequence
  Description of Artificial Sequence: Synthetic oligonucleotide
gauuuugaggguuccggac

SEQ ID NO: 566117 - RNA, 19 nt, Artificial Sequence
  Description of Artificial Sequence: Synthetic oligonucleotide
uuguaucgcccauaggcag

SEQ ID NO: 566118 - RNA, 19 nt, Artificial Sequence
  Description of Artificial Sequence: Synthetic oligonucleotide
guuggaacccuguacgcag

SEQ ID NO: 566119 - RNA, 19 nt, Artificial Sequence
  Description of Artificial Sequence: Synthetic oligonucleotide
uuuugaggguuccggacug

SEQ ID NO: 566120 - RNA, 19 nt, Artificial Sequence
  Description of Artificial Sequence: Synthetic oligonucleotide
cuguuguauacugacuucg

SEQ ID NO: 566121 - RNA, 19 nt, Artificial Sequence
  Description of Artificial Sequence: Synthetic oligonucleotide
auuuugaggguuccggacu

SEQ ID NO: 566122 - RNA, 19 nt, Artificial Sequence
  Description of Artificial Sequence: Synthetic oligonucleotide
ugagcgguugguuuggcac

SEQ ID NO: 566123 - RNA, 19 nt, Artificial Sequence
  Description of Artificial Sequence: Synthetic oligonucleotide
aauuuggaaccacgagucu

SEQ ID NO: 566124 - RNA, 19 nt, Artificial Sequence
  Description of Artificial Sequence: Synthetic oligonucleotide
gaccaauucacgaacugug

SEQ ID NO: 566125 - RNA, 19 nt, Artificial Sequence
  Description of Artificial Sequence: Synthetic oligonucleotide
ucucggaucacucgaggcu

SEQ ID NO: 566126 - RNA, 19 nt, Artificial Sequence
  Description of Artificial Sequence: Synthetic oligonucleotide
uguaagauaggagcugaga

SEQ ID NO: 566127 - RNA, 19 nt, Artificial Sequence
  Description of Artificial Sequence: Synthetic oligonucleotide
cacaaauugagucgaccag

SEQ ID NO: 566128 - RNA, 19 nt, Artificial Sequence
  Description of Artificial Sequence: Synthetic oligonucleotide
ugaugcguguccgagaagu

SEQ ID NO: 566129 - RNA, 19 nt, Artificial Sequence
  Description of Artificial Sequence: Synthetic oligonucleotide
ugauuuugaggguuccgga

SEQ ID NO: 566130 - RNA, 19 nt, Artificial Sequence
  Description of Artificial Sequence: Synthetic oligonucleotide
uggguuccauacuugaacu

SEQ ID NO: 566131 - RNA, 19 nt, Artificial Sequence
  Description of Artificial Sequence: Synthetic oligonucleotide
cugugauguagucagccag

SEQ ID NO: 566132 - RNA, 19 nt, Artificial Sequence
  Description of Artificial Sequence: Synthetic oligonucleotide
agagauucaggcacgguag

SEQ ID NO: 566133 - RNA, 19 nt, Artificial Sequence
  Description of Artificial Sequence: Synthetic oligonucleotide
acgagugacaaucccacga

SEQ ID NO: 566134 - RNA, 19 nt, Artificial Sequence
  Description of Artificial Sequence: Synthetic oligonucleotide
ugcccauagaucucuggag

SEQ ID NO: 566135 - RNA, 19 nt, Artificial Sequence
  Description of Artificial Sequence: Synthetic oligonucleotide
uugacaucuccaucaaccu

SEQ ID NO: 566136 - RNA, 19 nt, Artificial Sequence
  Description of Artificial Sequence: Synthetic oligonucleotide
ucacaaguauauguggcca

SEQ ID NO: 566137 - RNA, 19 nt, Artificial Sequence
  Description of Artificial Sequence: Synthetic oligonucleotide
ucuacauaugcugcuguga

SEQ ID NO: 566138 - RNA, 19 nt, Artificial Sequence
  Description of Artificial Sequence: Synthetic oligonucleotide
gugcucaauguaaacaucc

SEQ ID NO: 566139 - RNA, 19 nt, Artificial Sequence
  Description of Artificial Sequence: Synthetic oligonucleotide
gaugaaccaacuggguucc

SEQ ID NO: 566140 - RNA, 19 nt, Artificial Sequence
  Description of Artificial Sequence: Synthetic oligonucleotide
uucucacaaauugagucga

SEQ ID NO: 566141 - RNA, 19 nt, Artificial Sequence
  Description of Artificial Sequence: Synthetic oligonucleotide
ugagaccaauucacgaacu

SEQ ID NO: 566142 - RNA, 19 nt, Artificial Sequence
  Description of Artificial Sequence: Synthetic oligonucleotide
uggagcaauagaagcugcc

SEQ ID NO: 566143 - RNA, 19 nt, Artificial Sequence
  Description of Artificial Sequence: Synthetic oligonucleotide
ucgaaucgggaaagcagag

SEQ ID NO: 566144 - RNA, 19 nt, Artificial Sequence
  Description of Artificial Sequence: Synthetic oligonucleotide
caaaagugaugcguguccg

SEQ ID NO: 566145 - RNA, 19 nt, Artificial Sequence
  Description of Artificial Sequence: Synthetic oligonucleotide
auuaucucggucaggccgg

SEQ ID NO: 566146 - RNA, 19 nt, Artificial Sequence
  Description of Artificial Sequence: Synthetic oligonucleotide
uuuuaguuccuccccgcuc

SEQ ID NO: 566147 - RNA, 19 nt, Artificial Sequence
  Description of Artificial Sequence: Synthetic oligonucleotide
uucucggaucacucgaggc

SEQ ID NO: 566148 - RNA, 19 nt, Artificial Sequence
  Description of Artificial Sequence: Synthetic oligonucleotide
agugaugcguguccgagaa

SEQ ID NO: 566149 - RNA, 19 nt, Artificial Sequence
  Description of Artificial Sequence: Synthetic oligonucleotide
gauguaagauaggagcuga

SEQ ID NO: 566150 - RNA, 19 nt, Artificial Sequence
  Description of Artificial Sequence: Synthetic oligonucleotide
accggaggucauuaucucg

SEQ ID NO: 566151 - RNA, 19 nt, Artificial Sequence
  Description of Artificial Sequence: Synthetic oligonucleotide
gagaccaauucacgaacug

SEQ ID NO: 566152 - RNA, 19 nt, Artificial Sequence
  Description of Artificial Sequence: Synthetic oligonucleotide
cuuugaguagcguuuggca

SEQ ID NO: 566153 - RNA, 19 nt, Artificial Sequence
  Description of Artificial Sequence: Synthetic oligonucleotide
uagcguuuggcauucucac

SEQ ID NO: 566154 - RNA, 19 nt, Artificial Sequence
  Description of Artificial Sequence: Synthetic oligonucleotide
gaucucuggagcaauagaa

SEQ ID NO: 566155 - RNA, 19 nt, Artificial Sequence
  Description of Artificial Sequence: Synthetic oligonucleotide
caaaucuacgcaucagcuc

SEQ ID NO: 566156 - RNA, 19 nt, Artificial Sequence
  Description of Artificial Sequence: Synthetic oligonucleotide
cugagaccaauucacgaac

SEQ ID NO: 566157 - RNA, 19 nt, Artificial Sequence
  Description of Artificial Sequence: Synthetic oligonucleotide
ucucuacauaugcugcugu

SEQ ID NO: 566158 - RNA, 19 nt, Artificial Sequence
  Description of Artificial Sequence: Synthetic oligonucleotide
cucagaaggauauugauuu

SEQ ID NO: 566159 - RNA, 19 nt, Artificial Sequence
  Description of Artificial Sequence: Synthetic oligonucleotide
uuucaccuagaagugaguc

SEQ ID NO: 566160 - RNA, 19 nt, Artificial Sequence
  Description of Artificial Sequence: Synthetic oligonucleotide
aaggucgaaucgggaaagc

SEQ ID NO: 566161 - RNA, 19 nt, Artificial Sequence
  Description of Artificial Sequence: Synthetic oligonucleotide
auaugcagcgcugcucagc

SEQ ID NO: 566162 - RNA, 19 nt, Artificial Sequence
  Description of Artificial Sequence: Synthetic oligonucleotide
gaaaaccggacacuucguc

SEQ ID NO: 566163 - RNA, 19 nt, Artificial Sequence
  Description of Artificial Sequence: Synthetic oligonucleotide
cuagguccacguacaaugc

SEQ ID NO: 566164 - RNA, 19 nt, Artificial Sequence
  Description of Artificial Sequence: Synthetic oligonucleotide
guauagguggcauccuuac

SEQ ID NO: 566165 - RNA, 19 nt, Artificial Sequence
  Description of Artificial Sequence: Synthetic oligonucleotide
uuggaacccuguacgcagg

SEQ ID NO: 566166 - RNA, 19 nt, Artificial Sequence
  Description of Artificial Sequence: Synthetic oligonucleotide
aaugccacuuguucccgau

SEQ ID NO: 566167 - RNA, 19 nt, Artificial Sequence
  Description of Artificial Sequence: Synthetic oligonucleotide
aaguauagguggcauccuu

SEQ ID NO: 566168 - RNA, 19 nt, Artificial Sequence
  Description of Artificial Sequence: Synthetic oligonucleotide
cuagaagugaguccuuuga

SEQ ID NO: 566169 - RNA, 19 nt, Artificial Sequence
  Description of Artificial Sequence: Synthetic oligonucleotide
cagaaggauauugauuuug

SEQ ID NO: 566170 - RNA, 19 nt, Artificial Sequence
  Description of Artificial Sequence: Synthetic oligonucleotide
uccaccauacggaggcgag

SEQ ID NO: 566171 - RNA, 19 nt, Artificial Sequence
  Description of Artificial Sequence: Synthetic oligonucleotide
ucggugcucaauguaaaca

SEQ ID NO: 566172 - RNA, 19 nt, Artificial Sequence
  Description of Artificial Sequence: Synthetic oligonucleotide
caauucacgaacuguggca

SEQ ID NO: 566173 - RNA, 19 nt, Artificial Sequence
  Description of Artificial Sequence: Synthetic oligonucleotide
cuuguucccgaugagccag

SEQ ID NO: 566174 - RNA, 19 nt, Artificial Sequence
  Description of Artificial Sequence: Synthetic oligonucleotide
auaugcugcugugauguag

SEQ ID NO: 566175 - RNA, 19 nt, Artificial Sequence
  Description of Artificial Sequence: Synthetic oligonucleotide
uuuucaccuagaagugagu

SEQ ID NO: 566176 - RNA, 19 nt, Artificial Sequence
  Description of Artificial Sequence: Synthetic oligonucleotide
agugacaaucccacgaaca

SEQ ID NO: 566177 - RNA, 19 nt, Artificial Sequence
  Description of Artificial Sequence: Synthetic oligonucleotide
ucgcccauaggcaggguug

SEQ ID NO: 566178 - RNA, 19 nt, Artificial Sequence
  Description of Artificial Sequence: Synthetic oligonucleotide
acucgaggcuugcugcuac

SEQ ID NO: 566179 - RNA, 19 nt, Artificial Sequence
  Description of Artificial Sequence: Synthetic oligonucleotide
agaucucuggagcaauaga

SEQ ID NO: 566180 - RNA, 19 nt, Artificial Sequence
  Description of Artificial Sequence: Synthetic oligonucleotide
agacgaucgauguaagaua

SEQ ID NO: 566181 - RNA, 19 nt, Artificial Sequence
  Description of Artificial Sequence: Synthetic oligonucleotide
uauagguggcauccuuacu

SEQ ID NO: 566182 - RNA, 19 nt, Artificial Sequence
  Description of Artificial Sequence: Synthetic oligonucleotide
agucugcagguaaagccgc

SEQ ID NO: 566183 - RNA, 19 nt, Artificial Sequence
  Description of Artificial Sequence: Synthetic oligonucleotide
guaagauaggagcugagau

SEQ ID NO: 566184 - RNA, 19 nt, Artificial Sequence
  Description of Artificial Sequence: Synthetic oligonucleotide
uugaguagcguuuggcauu

SEQ ID NO: 566185 - RNA, 19 nt, Artificial Sequence
  Description of Artificial Sequence: Synthetic oligonucleotide
ucauuaucucggucaggcc

SEQ ID NO: 566186 - RNA, 19 nt, Artificial Sequence
  Description of Artificial Sequence: Synthetic oligonucleotide
ucuuucucgaucgcguagu

SEQ ID NO: 566187 - RNA, 19 nt, Artificial Sequence
  Description of Artificial Sequence: Synthetic oligonucleotide
aguauugaccugccagaca

SEQ ID NO: 566188 - RNA, 19 nt, Artificial Sequence
  Description of Artificial Sequence: Synthetic oligonucleotide
acgagucugcagguaaagc

SEQ ID NO: 566189 - RNA, 19 nt, Artificial Sequence
  Description of Artificial Sequence: Synthetic oligonucleotide
ugggagacuggaucggcug

SEQ ID NO: 566190 - RNA, 19 nt, Artificial Sequence
  Description of Artificial Sequence: Synthetic oligonucleotide
aagugaugcguguccgaga

SEQ ID NO: 566191 - RNA, 19 nt, Artificial Sequence
  Description of Artificial Sequence: Synthetic oligonucleotide
guguccgagaaguauugac

SEQ ID NO: 566192 - RNA, 19 nt, Artificial Sequence
  Description of Artificial Sequence: Synthetic oligonucleotide
guauugaccugccagacau

SEQ ID NO: 566193 - RNA, 19 nt, Artificial Sequence
  Description of Artificial Sequence: Synthetic oligonucleotide
cuucucggaucacucgagg

SEQ ID NO: 566194 - RNA, 19 nt, Artificial Sequence
  Description of Artificial Sequence: Synthetic oligonucleotide
ucuuuccgaguucaucauc

SEQ ID NO: 566195 - RNA, 19 nt, Artificial Sequence
  Description of Artificial Sequence: Synthetic oligonucleotide
acgugauaugcagcgcugc

SEQ ID NO: 566196 - RNA, 19 nt, Artificial Sequence
  Description of Artificial Sequence: Synthetic oligonucleotide
ucaaccuuauggcuucauu

SEQ ID NO: 566197 - RNA, 19 nt, Artificial Sequence
  Description of Artificial Sequence: Synthetic oligonucleotide
ccauaaaaggucgaaucgg

SEQ ID NO: 566198 - RNA, 19 nt, Artificial Sequence
  Description of Artificial Sequence: Synthetic oligonucleotide
cuguuggaacccuguacgc

SEQ ID NO: 566199 - RNA, 19 nt, Artificial Sequence
  Description of Artificial Sequence: Synthetic oligonucleotide
agccucagaaaaccggaca

SEQ ID NO: 566200 - RNA, 19 nt, Artificial Sequence
  Description of Artificial Sequence: Synthetic oligonucleotide
ucagucggugcucaaugua

SEQ ID NO: 566201 - RNA, 19 nt, Artificial Sequence
  Description of Artificial Sequence: Synthetic oligonucleotide
cucuacauaugcugcugug

SEQ ID NO: 566202 - RNA, 19 nt, Artificial Sequence
  Description of Artificial Sequence: Synthetic oligonucleotide
uggaucggcugguaagucu

SEQ ID NO: 566203 - RNA, 19 nt, Artificial Sequence
  Description of Artificial Sequence: Synthetic oligonucleotide
ucggcacauggcuauguac

SEQ ID NO: 566204 - RNA, 19 nt, Artificial Sequence
  Description of Artificial Sequence: Synthetic oligonucleotide
gacacgagugacaauccca

SEQ ID NO: 566205 - RNA, 19 nt, Artificial Sequence
  Description of Artificial Sequence: Synthetic oligonucleotide
ucuacgcaucagcucagaa

SEQ ID NO: 566206 - RNA, 19 nt, Artificial Sequence
  Description of Artificial Sequence: Synthetic oligonucleotide
guuguaucgcccauaggca

SEQ ID NO: 566207 - RNA, 19 nt, Artificial Sequence
  Description of Artificial Sequence: Synthetic oligonucleotide
ugcguguccgagaaguauu

SEQ ID NO: 566208 - RNA, 19 nt, Artificial Sequence
  Description of Artificial Sequence: Synthetic oligonucleotide
caccauacggaggcgagcc

SEQ ID NO: 566209 - RNA, 19 nt, Artificial Sequence
  Description of Artificial Sequence: Synthetic oligonucleotide
ugacaaucccacgaacagu

SEQ ID NO: 566210 - RNA, 19 nt, Artificial Sequence
  Description of Artificial Sequence: Synthetic oligonucleotide
uccgagguuugacuucaga

SEQ ID NO: 566211 - RNA, 19 nt, Artificial Sequence
  Description of Artificial Sequence: Synthetic oligonucleotide
acuggcccgggccucucgc

SEQ ID NO: 566212 - RNA, 19 nt, Artificial Sequence
  Description of Artificial Sequence: Synthetic oligonucleotide
ccgagguuugacuucagag

SEQ ID NO: 566213 - RNA, 19 nt, Artificial Sequence
  Description of Artificial Sequence: Synthetic oligonucleotide
cacucuuagucaucuucac

SEQ ID NO: 566214 - RNA, 19 nt, Artificial Sequence
  Description of Artificial Sequence: Synthetic oligonucleotide
gagugacaaucccacgaac

SEQ ID NO: 566215 - RNA, 19 nt, Artificial Sequence
  Description of Artificial Sequence: Synthetic oligonucleotide
aaucuacgcaucagcucag

SEQ ID NO: 566216 - RNA, 19 nt, Artificial Sequence
  Description of Artificial Sequence: Synthetic oligonucleotide
ucugcagguaaagccgccc

SEQ ID NO: 566217 - RNA, 19 nt, Artificial Sequence
  Description of Artificial Sequence: Synthetic oligonucleotide
uugggcuggugugaaacca

SEQ ID NO: 566218 - RNA, 19 nt, Artificial Sequence
  Description of Artificial Sequence: Synthetic oligonucleotide
ucggcugguaagucucugc

SEQ ID NO: 566219 - RNA, 19 nt, Artificial Sequence
  Description of Artificial Sequence: Synthetic oligonucleotide
ucucacaaauugagucgac

SEQ ID NO: 566220 - RNA, 19 nt, Artificial Sequence
  Description of Artificial Sequence: Synthetic oligonucleotide
gucgaaucgggaaagcaga

SEQ ID NO: 566221 - RNA, 19 nt, Artificial Sequence
  Description of Artificial Sequence: Synthetic oligonucleotide
guggcaaauaucacaucug

SEQ ID NO: 566222 - RNA, 19 nt, Artificial Sequence
  Description of Artificial Sequence: Synthetic oligonucleotide
ggucgaaucgggaaagcag

SEQ ID NO: 566223 - RNA, 19 nt, Artificial Sequence
  Description of Artificial Sequence: Synthetic oligonucleotide
aggcagauguggauguuuc

SEQ ID NO: 566224 - RNA, 19 nt, Artificial Sequence
  Description of Artificial Sequence: Synthetic oligonucleotide
ccggaggucauuaucucgg

SEQ ID NO: 566225 - RNA, 19 nt, Artificial Sequence
  Description of Artificial Sequence: Synthetic oligonucleotide
aucagucggugcucaaugu

SEQ ID NO: 566226 - RNA, 19 nt, Artificial Sequence
  Description of Artificial Sequence: Synthetic oligonucleotide
gagacacgagugacaaucc

SEQ ID NO: 566227 - RNA, 19 nt, Artificial Sequence
  Description of Artificial Sequence: Synthetic oligonucleotide
aucucuacauaugcugcug

SEQ ID NO: 566228 - RNA, 19 nt, Artificial Sequence
  Description of Artificial Sequence: Synthetic oligonucleotide
ccgaugagccagaugaacc

SEQ ID NO: 566229 - RNA, 19 nt, Artificial Sequence
  Description of Artificial Sequence: Synthetic oligonucleotide
cagaaguauagguggcauc

SEQ ID NO: 566230 - RNA, 19 nt, Artificial Sequence
  Description of Artificial Sequence: Synthetic oligonucleotide
accauccgagguuugacuu

SEQ ID NO: 566231 - RNA, 19 nt, Artificial Sequence
  Description of Artificial Sequence: Synthetic oligonucleotide
uacgagggauguuucccac

SEQ ID NO: 566232 - RNA, 19 nt, Artificial Sequence
  Description of Artificial Sequence: Synthetic oligonucleotide
uccacguacaaugccacuu

SEQ ID NO: 566233 - RNA, 19 nt, Artificial Sequence
  Description of Artificial Sequence: Synthetic oligonucleotide
guaucgcccauaggcaggg

SEQ ID NO: 566234 - RNA, 19 nt, Artificial Sequence
  Description of Artificial Sequence: Synthetic oligonucleotide
aaacucuugcaggaauuuu

SEQ ID NO: 566235 - RNA, 19 nt, Artificial Sequence
  Description of Artificial Sequence: Synthetic oligonucleotide
ugggcuggugugaaaccac

SEQ ID NO: 566236 - RNA, 19 nt, Artificial Sequence
  Description of Artificial Sequence: Synthetic oligonucleotide
uaaagccgcccuccugagc

SEQ ID NO: 566237 - RNA, 19 nt, Artificial Sequence
  Description of Artificial Sequence: Synthetic oligonucleotide
ugaguagcguuuggcauuc

SEQ ID NO: 566238 - RNA, 19 nt, Artificial Sequence
  Description of Artificial Sequence: Synthetic oligonucleotide
gauuuggccacaccagggu

SEQ ID NO: 566239 - RNA, 19 nt, Artificial Sequence
  Description of Artificial Sequence: Synthetic oligonucleotide
gcccauagaucucuggagc

SEQ ID NO: 566240 - RNA, 19 nt, Artificial Sequence
  Description of Artificial Sequence: Synthetic oligonucleotide
uggaaccacgagucugcag

SEQ ID NO: 566241 - RNA, 19 nt, Artificial Sequence
  Description of Artificial Sequence: Synthetic oligonucleotide
guccgagaaguauugaccu

SEQ ID NO: 566242 - RNA, 19 nt, Artificial Sequence
  Description of Artificial Sequence: Synthetic oligonucleotide
ucgccucaucucuacauau

SEQ ID NO: 566243 - RNA, 19 nt, Artificial Sequence
  Description of Artificial Sequence: Synthetic oligonucleotide
cuuguaaaaccacugugau

SEQ ID NO: 566244 - RNA, 19 nt, Artificial Sequence
  Description of Artificial Sequence: Synthetic oligonucleotide
gcuauguaccgucucauaa

SEQ ID NO: 566245 - RNA, 19 nt, Artificial Sequence
  Description of Artificial Sequence: Synthetic oligonucleotide
gcagauguggauguuuccc

SEQ ID NO: 566246 - RNA, 19 nt, Artificial Sequence
  Description of Artificial Sequence: Synthetic oligonucleotide
gugcccauagaucucugga

SEQ ID NO: 566247 - RNA, 19 nt, Artificial Sequence
  Description of Artificial Sequence: Synthetic oligonucleotide
acgguaggcugccucucuc

SEQ ID NO: 566248 - RNA, 19 nt, Artificial Sequence
  Description of Artificial Sequence: Synthetic oligonucleotide
guaaagccgcccuccugag

SEQ ID NO: 566249 - RNA, 19 nt, Artificial Sequence
  Description of Artificial Sequence: Synthetic oligonucleotide
uccugagcgguugguuugg

SEQ ID NO: 566250 - RNA, 19 nt, Artificial Sequence
  Description of Artificial Sequence: Synthetic oligonucleotide
guaggguccgggcagaagu

SEQ ID NO: 566251 - RNA, 19 nt, Artificial Sequence
  Description of Artificial Sequence: Synthetic oligonucleotide
cacgugauaugcagcgcug

SEQ ID NO: 566252 - RNA, 19 nt, Artificial Sequence
  Description of Artificial Sequence: Synthetic oligonucleotide
cuccugagcgguugguuug

SEQ ID NO: 566253 - RNA, 19 nt, Artificial Sequence
  Description of Artificial Sequence: Synthetic oligonucleotide
aaccacugugaugcuacga

SEQ ID NO: 566254 - RNA, 19 nt, Artificial Sequence
  Description of Artificial Sequence: Synthetic oligonucleotide
uggaacccuguacgcagga

SEQ ID NO: 566255 - RNA, 19 nt, Artificial Sequence
  Description of Artificial Sequence: Synthetic oligonucleotide
gggguuguaucgcccauag

SEQ ID NO: 566256 - RNA, 19 nt, Artificial Sequence
  Description of Artificial Sequence: Synthetic oligonucleotide
ucacucgaggcuugcugcu

SEQ ID NO: 566257 - RNA, 19 nt, Artificial Sequence
  Description of Artificial Sequence: Synthetic oligonucleotide
aaggcagauguggauguuu

SEQ ID NO: 566258 - RNA, 19 nt, Artificial Sequence
  Description of Artificial Sequence: Synthetic oligonucleotide
cguacaaugccacuuguuc

SEQ ID NO: 566259 - RNA, 19 nt, Artificial Sequence
  Description of Artificial Sequence: Synthetic oligonucleotide
gguaggcugccucucucgg

SEQ ID NO: 566260 - RNA, 19 nt, Artificial Sequence
  Description of Artificial Sequence: Synthetic oligonucleotide
agcuucauguccaaagguu

SEQ ID NO: 566261 - RNA, 19 nt, Artificial Sequence
  Description of Artificial Sequence: Synthetic oligonucleotide
ucggaucacucgaggcuug

SEQ ID NO: 566262 - RNA, 19 nt, Artificial Sequence
  Description of Artificial Sequence: Synthetic oligonucleotide
guaccgucucauaagcuuc

SEQ ID NO: 566263 - RNA, 19 nt, Artificial Sequence
  Description of Artificial Sequence: Synthetic oligonucleotide
agguaaagccgcccuccug

SEQ ID NO: 566264 - RNA, 19 nt, Artificial Sequence
  Description of Artificial Sequence: Synthetic oligonucleotide
gagucgaccagcucagggu

SEQ ID NO: 566265 - RNA, 19 nt, Artificial Sequence
  Description of Artificial Sequence: Synthetic oligonucleotide
cauccuuacuggcccgggc

SEQ ID NO: 566266 - RNA, 19 nt, Artificial Sequence
  Description of Artificial Sequence: Synthetic oligonucleotide
gucggugcucaauguaaac

SEQ ID NO: 566267 - RNA, 19 nt, Artificial Sequence
  Description of Artificial Sequence: Synthetic oligonucleotide
cuacgagggauguuuccca

SEQ ID NO: 566268 - RNA, 19 nt, Artificial Sequence
  Description of Artificial Sequence: Synthetic oligonucleotide
uuuccgaguucaucaucau

SEQ ID NO: 566269 - RNA, 19 nt, Artificial Sequence
  Description of Artificial Sequence: Synthetic oligonucleotide
gauucaggcacgguaggcu

SEQ ID NO: 566270 - RNA, 19 nt, Artificial Sequence
  Description of Artificial Sequence: Synthetic oligonucleotide
ccgagaaguauugaccugc

SEQ ID NO: 566271 - RNA, 19 nt, Artificial Sequence
  Description of Artificial Sequence: Synthetic oligonucleotide
ucaucagucggugcucaau

SEQ ID NO: 566272 - RNA, 19 nt, Artificial Sequence
  Description of Artificial Sequence: Synthetic oligonucleotide
uuccggacugccccagggu

SEQ ID NO: 566273 - RNA, 19 nt, Artificial Sequence
  Description of Artificial Sequence: Synthetic oligonucleotide
ucgauacagcacacacccu

SEQ ID NO: 566274 - RNA, 19 nt, Artificial Sequence
  Description of Artificial Sequence: Synthetic oligonucleotide
aggucgaaucgggaaagca

SEQ ID NO: 566275 - RNA, 19 nt, Artificial Sequence
  Description of Artificial Sequence: Synthetic oligonucleotide
gccuuggaaauacaacuca

SEQ ID NO: 566276 - RNA, 19 nt, Artificial Sequence
  Description of Artificial Sequence: Synthetic oligonucleotide
aguauagguggcauccuua

SEQ ID NO: 566277 - RNA, 19 nt, Artificial Sequence
  Description of Artificial Sequence: Synthetic oligonucleotide
gcaugaaggugggagacug

SEQ ID NO: 566278 - RNA, 19 nt, Artificial Sequence
  Description of Artificial Sequence: Synthetic oligonucleotide
guaggcugccucucucggc

SEQ ID NO: 566279 - RNA, 19 nt, Artificial Sequence
  Description of Artificial Sequence: Synthetic oligonucleotide
caaccuuauggcuucauuu

SEQ ID NO: 566280 - RNA, 19 nt, Artificial Sequence
  Description of Artificial Sequence: Synthetic oligonucleotide
aggagccccggccuguugu

SEQ ID NO: 566281 - RNA, 19 nt, Artificial Sequence
  Description of Artificial Sequence: Synthetic oligonucleotide
aucccugcuuuggcaaugg

SEQ ID NO: 566282 - RNA, 19 nt, Artificial Sequence
  Description of Artificial Sequence: Synthetic oligonucleotide
cagucggugcucaauguaa

SEQ ID NO: 566283 - RNA, 19 nt, Artificial Sequence
  Description of Artificial Sequence: Synthetic oligonucleotide
cacgagucugcagguaaag

SEQ ID NO: 566284 - RNA, 19 nt, Artificial Sequence
  Description of Artificial Sequence: Synthetic oligonucleotide
aggccgguccugaaucagc

SEQ ID NO: 566285 - RNA, 19 nt, Artificial Sequence
  Description of Artificial Sequence: Synthetic oligonucleotide
acgagggauguuucccaca

SEQ ID NO: 566286 - RNA, 19 nt, Artificial Sequence
  Description of Artificial Sequence: Synthetic oligonucleotide
uccccgcucagcucuccag

SEQ ID NO: 566287 - RNA, 19 nt, Artificial Sequence
  Description of Artificial Sequence: Synthetic oligonucleotide
acauccucgugcccauaga

SEQ ID NO: 566288 - RNA, 19 nt, Artificial Sequence
  Description of Artificial Sequence: Synthetic oligonucleotide
acgaucgauguaagauagg

SEQ ID NO: 566289 - RNA, 19 nt, Artificial Sequence
  Description of Artificial Sequence: Synthetic oligonucleotide
gccaguaggguccgggcag

SEQ ID NO: 566290 - RNA, 19 nt, Artificial Sequence
  Description of Artificial Sequence: Synthetic oligonucleotide
gugugaaaccacgugauau

SEQ ID NO: 566291 - RNA, 19 nt, Artificial Sequence
  Description of Artificial Sequence: Synthetic oligonucleotide
gguucaaacugggcagggg

SEQ ID NO: 566292 - RNA, 19 nt, Artificial Sequence
  Description of Artificial Sequence: Synthetic oligonucleotide
agcacacacccuggucagc

SEQ ID NO: 566293 - RNA, 19 nt, Artificial Sequence
  Description of Artificial Sequence: Synthetic oligonucleotide
agacuggaucggcugguaa

SEQ ID NO: 566294 - RNA, 19 nt, Artificial Sequence
  Description of Artificial Sequence: Synthetic oligonucleotide
agucgaagaauggccagua

SEQ ID NO: 566295 - RNA, 19 nt, Artificial Sequence
  Description of Artificial Sequence: Synthetic oligonucleotide
agaaaaccggacacuucgu

SEQ ID NO: 566296 - RNA, 19 nt, Artificial Sequence
  Description of Artificial Sequence: Synthetic oligonucleotide
auucacgaacuguggcaaa

SEQ ID NO: 566297 - RNA, 19 nt, Artificial Sequence
  Description of Artificial Sequence: Synthetic oligonucleotide
ccaucaaccuuauggcuuc

SEQ ID NO: 566298 - RNA, 19 nt, Artificial Sequence
  Description of Artificial Sequence: Synthetic oligonucleotide
uuguucccgaugagccaga

SEQ ID NO: 566299 - RNA, 19 nt, Artificial Sequence
  Description of Artificial Sequence: Synthetic oligonucleotide
cagacgaucgauguaagau

SEQ ID NO: 566300 - RNA, 19 nt, Artificial Sequence
  Description of Artificial Sequence: Synthetic oligonucleotide
aucgcccauaggcaggguu

SEQ ID NO: 566301 - RNA, 19 nt, Artificial Sequence
  Description of Artificial Sequence: Synthetic oligonucleotide
augccacuuguucccgaug

SEQ ID NO: 566302 - RNA, 19 nt, Artificial Sequence
  Description of Artificial Sequence: Synthetic oligonucleotide
uaggguccgggcagaagua

SEQ ID NO: 566303 - RNA, 19 nt, Artificial Sequence
  Description of Artificial Sequence: Synthetic oligonucleotide
caaguauauguggccacca

SEQ ID NO: 566304 - RNA, 19 nt, Artificial Sequence
  Description of Artificial Sequence: Synthetic oligonucleotide
uauugaccugccagacauu

SEQ ID NO: 566305 - RNA, 19 nt, Artificial Sequence
  Description of Artificial Sequence: Synthetic oligonucleotide
agagcaguagaaagucgaa

SEQ ID NO: 566306 - RNA, 19 nt, Artificial Sequence
  Description of Artificial Sequence: Synthetic oligonucleotide
ucacgaacuguggcaaaua

SEQ ID NO: 566307 - RNA, 19 nt, Artificial Sequence
  Description of Artificial Sequence: Synthetic oligonucleotide
ccuagaagugaguccuuug

SEQ ID NO: 566308 - RNA, 19 nt, Artificial Sequence
  Description of Artificial Sequence: Synthetic oligonucleotide
ucucggcacauggcuaugu

SEQ ID NO: 566309 - RNA, 19 nt, Artificial Sequence
  Description of Artificial Sequence: Synthetic oligonucleotide
augcuacgagggauguuuc

SEQ ID NO: 566310 - RNA, 19 nt, Artificial Sequence
  Description of Artificial Sequence: Synthetic oligonucleotide
cauccgagguuugacuuca

SEQ ID NO: 566311 - RNA, 19 nt, Artificial Sequence
  Description of Artificial Sequence: Synthetic oligonucleotide
guuuuaguuccuccccgcu

SEQ ID NO: 566312 - RNA, 19 nt, Artificial Sequence
  Description of Artificial Sequence: Synthetic oligonucleotide
guccgggcagaaguauagg

SEQ ID NO: 566313 - RNA, 19 nt, Artificial Sequence
  Description of Artificial Sequence: Synthetic oligonucleotide
augcguguccgagaaguau

SEQ ID NO: 566314 - RNA, 19 nt, Artificial Sequence
  Description of Artificial Sequence: Synthetic oligonucleotide
guucccgaugagccagaug

SEQ ID NO: 566315 - RNA, 19 nt, Artificial Sequence
  Description of Artificial Sequence: Synthetic oligonucleotide
agucaccaauuuccccaca

SEQ ID NO: 566316 - RNA, 19 nt, Artificial Sequence
  Description of Artificial Sequence: Synthetic oligonucleotide
acccuguacgcaggacugg

SEQ ID NO: 566317 - RNA, 19 nt, Artificial Sequence
  Description of Artificial Sequence: Synthetic oligonucleotide
ggaucggcugguaagucuc

SEQ ID NO: 566318 - RNA, 19 nt, Artificial Sequence
  Description of Artificial Sequence: Synthetic oligonucleotide
cucuaaggucaguucccca

SEQ ID NO: 566319 - RNA, 19 nt, Artificial Sequence
  Description of Artificial Sequence: Synthetic oligonucleotide
agucggugcucaauguaaa

SEQ ID NO: 566320 - RNA, 19 nt, Artificial Sequence
  Description of Artificial Sequence: Synthetic oligonucleotide
accauacggaggcgagcca

SEQ ID NO: 566321 - RNA, 19 nt, Artificial Sequence
  Description of Artificial Sequence: Synthetic oligonucleotide
gaaccacgagucugcaggu

SEQ ID NO: 566322 - RNA, 19 nt, Artificial Sequence
  Description of Artificial Sequence: Synthetic oligonucleotide
ggucauuaucucggucagg

SEQ ID NO: 566323 - RNA, 19 nt, Artificial Sequence
  Description of Artificial Sequence: Synthetic oligonucleotide
ggauauugauuuugagggu

SEQ ID NO: 566324 - RNA, 19 nt, Artificial Sequence
  Description of Artificial Sequence: Synthetic oligonucleotide
gagcgguugguuuggcacu

SEQ ID NO: 566325 - RNA, 19 nt, Artificial Sequence
  Description of Artificial Sequence: Synthetic oligonucleotide
ccacguacaaugccacuug

SEQ ID NO: 566326 - RNA, 19 nt, Artificial Sequence
  Description of Artificial Sequence: Synthetic oligonucleotide
aucagccauaaaaggucga

SEQ ID NO: 566327 - RNA, 19 nt, Artificial Sequence
  Description of Artificial Sequence: Synthetic oligonucleotide
gugaugcguguccgagaag

SEQ ID NO: 566328 - RNA, 19 nt, Artificial Sequence
  Description of Artificial Sequence: Synthetic oligonucleotide
auagaucucuggagcaaua

SEQ ID NO: 566329 - RNA, 19 nt, Artificial Sequence
  Description of Artificial Sequence: Synthetic oligonucleotide
ggugcucaauguaaacauc

SEQ ID NO: 566330 - RNA, 19 nt, Artificial Sequence
  Description of Artificial Sequence: Synthetic oligonucleotide
accuagaagugaguccuuu

SEQ ID NO: 566331 - RNA, 19 nt, Artificial Sequence
  Description of Artificial Sequence: Synthetic oligonucleotide
aucggcugguaagucucug

SEQ ID NO: 566332 - RNA, 19 nt, Artificial Sequence
  Description of Artificial Sequence: Synthetic oligonucleotide
caccgggcauugagugugg

SEQ ID NO: 566333 - RNA, 19 nt, Artificial Sequence
  Description of Artificial Sequence: Synthetic oligonucleotide
ggccagacgaucgauguaa

SEQ ID NO: 566334 - RNA, 19 nt, Artificial Sequence
  Description of Artificial Sequence: Synthetic oligonucleotide
cacaauccggugggcuucc

SEQ ID NO: 566335 - RNA, 19 nt, Artificial Sequence
  Description of Artificial Sequence: Synthetic oligonucleotide
gaaguauagguggcauccu

SEQ ID NO: 566336 - RNA, 19 nt, Artificial Sequence
  Description of Artificial Sequence: Synthetic oligonucleotide
ccuuggaaauacaacucaa

SEQ ID NO: 566337 - RNA, 19 nt, Artificial Sequence
  Description of Artificial Sequence: Synthetic oligonucleotide
aucaucagucggugcucaa

SEQ ID NO: 566338 - RNA, 19 nt, Artificial Sequence
  Description of Artificial Sequence: Synthetic oligonucleotide
ggguuguaucgcccauagg

SEQ ID NO: 566339 - RNA, 19 nt, Artificial Sequence
  Description of Artificial Sequence: Synthetic oligonucleotide
acaaucccacgaacaguca

SEQ ID NO: 566340 - RNA, 19 nt, Artificial Sequence
  Description of Artificial Sequence: Synthetic oligonucleotide
caucaucagucggugcuca

SEQ ID NO: 566341 - RNA, 19 nt, Artificial Sequence
  Description of Artificial Sequence: Synthetic oligonucleotide
ucgaccagcucagggucau

SEQ ID NO: 566342 - RNA, 19 nt, Artificial Sequence
  Description of Artificial Sequence: Synthetic oligonucleotide
ccauacggaggcgagccag

SEQ ID NO: 566343 - RNA, 19 nt, Artificial Sequence
  Description of Artificial Sequence: Synthetic oligonucleotide
ggacuggcaagaagauacc

SEQ ID NO: 566344 - RNA, 19 nt, Artificial Sequence
  Description of Artificial Sequence: Synthetic oligonucleotide
aaccacgagucugcaggua

SEQ ID NO: 566345 - RNA, 19 nt, Artificial Sequence
  Description of Artificial Sequence: Synthetic oligonucleotide
cugagcgguugguuuggca

SEQ ID NO: 566346 - RNA, 19 nt, Artificial Sequence
  Description of Artificial Sequence: Synthetic oligonucleotide
cccauaaggcagaugugga

SEQ ID NO: 566347 - RNA, 19 nt, Artificial Sequence
  Description of Artificial Sequence: Synthetic oligonucleotide
cugugcggucagcuucggc

SEQ ID NO: 566348 - RNA, 19 nt, Artificial Sequence
  Description of Artificial Sequence: Synthetic oligonucleotide
ugcggucagcuucggccau

SEQ ID NO: 566349 - RNA, 19 nt, Artificial Sequence
  Description of Artificial Sequence: Synthetic oligonucleotide
aucuacgcaucagcucaga

SEQ ID NO: 566350 - RNA, 19 nt, Artificial Sequence
  Description of Artificial Sequence: Synthetic oligonucleotide
caucuguuggaacccugua

SEQ ID NO: 566351 - RNA, 19 nt, Artificial Sequence
  Description of Artificial Sequence: Synthetic oligonucleotide
caggccgguccugaaucag

SEQ ID NO: 566352 - RNA, 19 nt, Artificial Sequence
  Description of Artificial Sequence: Synthetic oligonucleotide
gacugccccagggucucug

SEQ ID NO: 566353 - RNA, 19 nt, Artificial Sequence
  Description of Artificial Sequence: Synthetic oligonucleotide
cucgccucaucucuacaua

SEQ ID NO: 566354 - RNA, 19 nt, Artificial Sequence
  Description of Artificial Sequence: Synthetic oligonucleotide
caaugccacuuguucccga

SEQ ID NO: 566355 - RNA, 19 nt, Artificial Sequence
  Description of Artificial Sequence: Synthetic oligonucleotide
cacgaacuguggcaaauau

SEQ ID NO: 566356 - RNA, 19 nt, Artificial Sequence
  Description of Artificial Sequence: Synthetic oligonucleotide
acguacaaugccacuuguu

SEQ ID NO: 566357 - RNA, 19 nt, Artificial Sequence
  Description of Artificial Sequence: Synthetic oligonucleotide
aucaaccuuauggcuucau

SEQ ID NO: 566358 - RNA, 19 nt, Artificial Sequence
  Description of Artificial Sequence: Synthetic oligonucleotide
ucgaggcuugcugcuacuu

SEQ ID NO: 566359 - RNA, 19 nt, Artificial Sequence
  Description of Artificial Sequence: Synthetic oligonucleotide
cauccucgugcccauagau

SEQ ID NO: 566360 - RNA, 19 nt, Artificial Sequence
  Description of Artificial Sequence: Synthetic oligonucleotide
gaugcguguccgagaagua

SEQ ID NO: 566361 - RNA, 19 nt, Artificial Sequence
  Description of Artificial Sequence: Synthetic oligonucleotide
guccaccauacggaggcga

SEQ ID NO: 566362 - RNA, 19 nt, Artificial Sequence
  Description of Artificial Sequence: Synthetic oligonucleotide
guacagccgcugugagccc

SEQ ID NO: 566363 - RNA, 19 nt, Artificial Sequence
  Description of Artificial Sequence: Synthetic oligonucleotide
caccauccgagguuugacu

SEQ ID NO: 566364 - RNA, 19 nt, Artificial Sequence
  Description of Artificial Sequence: Synthetic oligonucleotide
aguuccccacucacagagu

SEQ ID NO: 566365 - RNA, 19 nt, Artificial Sequence
  Description of Artificial Sequence: Synthetic oligonucleotide
cccggccuguuguauacug

SEQ ID NO: 566366 - RNA, 19 nt, Artificial Sequence
  Description of Artificial Sequence: Synthetic oligonucleotide
uucaugccuugaggagacu

SEQ ID NO: 566367 - RNA, 19 nt, Artificial Sequence
  Description of Artificial Sequence: Synthetic oligonucleotide
ggggccagacgaucgaugu

SEQ ID NO: 566368 - RNA, 19 nt, Artificial Sequence
  Description of Artificial Sequence: Synthetic oligonucleotide
aggguccgggcagaaguau

SEQ ID NO: 566369 - RNA, 19 nt, Artificial Sequence
  Description of Artificial Sequence: Synthetic oligonucleotide
gcauccuuacuggcccggg

SEQ ID NO: 566370 - RNA, 19 nt, Artificial Sequence
  Description of Artificial Sequence: Synthetic oligonucleotide
ggcgagccagagcaguaga

SEQ ID NO: 566371 - RNA, 19 nt, Artificial Sequence
  Description of Artificial Sequence: Synthetic oligonucleotide
gcccgcacuucucggauca

SEQ ID NO: 566372 - RNA, 19 nt, Artificial Sequence
  Description of Artificial Sequence: Synthetic oligonucleotide
agccccggccuguuguaua

SEQ ID NO: 566373 - RNA, 19 nt, Artificial Sequence
  Description of Artificial Sequence: Synthetic oligonucleotide
cgaaucgggaaagcagagc

SEQ ID NO: 566374 - RNA, 19 nt, Artificial Sequence
  Description of Artificial Sequence: Synthetic oligonucleotide
cgguaggcugccucucucg

SEQ ID NO: 566375 - RNA, 19 nt, Artificial Sequence
  Description of Artificial Sequence: Synthetic oligonucleotide
gccagacgaucgauguaag

SEQ ID NO: 566376 - RNA, 19 nt, Artificial Sequence
  Description of Artificial Sequence: Synthetic oligonucleotide
ccucucgccucaucucuac

SEQ ID NO: 566377 - RNA, 19 nt, Artificial Sequence
  Description of Artificial Sequence: Synthetic oligonucleotide
cauaugcugcugugaugua

SEQ ID NO: 566378 - RNA, 19 nt, Artificial Sequence
  Description of Artificial Sequence: Synthetic oligonucleotide
cucucgccucaucucuaca

SEQ ID NO: 566379 - RNA, 19 nt, Artificial Sequence
  Description of Artificial Sequence: Synthetic oligonucleotide
cugcagguaaagccgcccu

SEQ ID NO: 566380 - RNA, 19 nt, Artificial Sequence
  Description of Artificial Sequence: Synthetic oligonucleotide
cugugaugcuacgagggau

SEQ ID NO: 566381 - RNA, 19 nt, Artificial Sequence
  Description of Artificial Sequence: Synthetic oligonucleotide
cucucggcacauggcuaug

SEQ ID NO: 566382 - RNA, 19 nt, Artificial Sequence
  Description of Artificial Sequence: Synthetic oligonucleotide
cucggcacauggcuaugua

SEQ ID NO: 566383 - RNA, 19 nt, Artificial Sequence
  Description of Artificial Sequence: Synthetic oligonucleotide
ggugaugugcugggccaac

SEQ ID NO: 566384 - RNA, 19 nt, Artificial Sequence
  Description of Artificial Sequence: Synthetic oligonucleotide
cucgugcccauagaucucu

SEQ ID NO: 566385 - RNA, 19 nt, Artificial Sequence
  Description of Artificial Sequence: Synthetic oligonucleotide
gagacuggaucggcuggua

SEQ ID NO: 566386 - RNA, 19 nt, Artificial Sequence
  Description of Artificial Sequence: Synthetic oligonucleotide
gugaugcuacgagggaugu

SEQ ID NO: 566387 - RNA, 19 nt, Artificial Sequence
  Description of Artificial Sequence: Synthetic oligonucleotide
ccagacgaucgauguaaga

SEQ ID NO: 566388 - RNA, 19 nt, Artificial Sequence
  Description of Artificial Sequence: Synthetic oligonucleotide
cccacgaacagucaccaau

SEQ ID NO: 566389 - RNA, 19 nt, Artificial Sequence
  Description of Artificial Sequence: Synthetic oligonucleotide
auccgagguuugacuucag

SEQ ID NO: 566390 - RNA, 19 nt, Artificial Sequence
  Description of Artificial Sequence: Synthetic oligonucleotide
guccugaaucagccauaaa

SEQ ID NO: 566391 - RNA, 19 nt, Artificial Sequence
  Description of Artificial Sequence: Synthetic oligonucleotide
cucggucaggccgguccug

SEQ ID NO: 566392 - RNA, 19 nt, Artificial Sequence
  Description of Artificial Sequence: Synthetic oligonucleotide
ccaccauacggaggcgagc

SEQ ID NO: 566393 - RNA, 19 nt, Artificial Sequence
  Description of Artificial Sequence: Synthetic oligonucleotide
cucggaucacucgaggcuu

SEQ ID NO: 566394 - RNA, 19 nt, Artificial Sequence
  Description of Artificial Sequence: Synthetic oligonucleotide
ccacgugauaugcagcgcu

SEQ ID NO: 566395 - RNA, 19 nt, Artificial Sequence
  Description of Artificial Sequence: Synthetic oligonucleotide
caucaaccuuauggcuuca

SEQ ID NO: 566396 - RNA, 19 nt, Artificial Sequence
  Description of Artificial Sequence: Synthetic oligonucleotide
cuucggccauuuugucaaa

SEQ ID NO: 566397 - RNA, 19 nt, Artificial Sequence
  Description of Artificial Sequence: Synthetic oligonucleotide
cgagugacaaucccacgaa

SEQ ID NO: 566398 - RNA, 19 nt, Artificial Sequence
  Description of Artificial Sequence: Synthetic oligonucleotide
ccucgugcccauagaucuc

SEQ ID NO: 566399 - RNA, 19 nt, Artificial Sequence
  Description of Artificial Sequence: Synthetic oligonucleotide
ccucucucggcacauggcu

SEQ ID NO: 566400 - RNA, 19 nt, Artificial Sequence
  Description of Artificial Sequence: Synthetic oligonucleotide
agccgcccuccugagcggu

SEQ ID NO: 566401 - RNA, 19 nt, Artificial Sequence
  Description of Artificial Sequence: Synthetic oligonucleotide
cugccucucucggcacaug

SEQ ID NO: 566402 - RNA, 19 nt, Artificial Sequence
  Description of Artificial Sequence: Synthetic oligonucleotide
cuccccgcucagcucucca

SEQ ID NO: 566403 - RNA, 19 nt, Artificial Sequence
  Description of Artificial Sequence: Synthetic oligonucleotide
cuuacuggcccgggccucu

SEQ ID NO: 566404 - RNA, 19 nt, Artificial Sequence
  Description of Artificial Sequence: Synthetic oligonucleotide
cucgaggcuugcugcuacu

SEQ ID NO: 566405 - RNA, 19 nt, Artificial Sequence
  Description of Artificial Sequence: Synthetic oligonucleotide
ccggccuguuguauacuga

SEQ ID NO: 566406 - RNA, 19 nt, Artificial Sequence
  Description of Artificial Sequence: Synthetic oligonucleotide
ggagacuggaucggcuggu

SEQ ID NO: 566407 - RNA, 19 nt, Artificial Sequence
  Description of Artificial Sequence: Synthetic oligonucleotide
gcgagccagagcaguagaa

SEQ ID NO: 566408 - RNA, 19 nt, Artificial Sequence
  Description of Artificial Sequence: Synthetic oligonucleotide
cacucgaggcuugcugcua

SEQ ID NO: 566409 - RNA, 19 nt, Artificial Sequence
  Description of Artificial Sequence: Synthetic oligonucleotide
ggcaugaaggugggagacu

SEQ ID NO: 566410 - RNA, 19 nt, Artificial Sequence
  Description of Artificial Sequence: Synthetic oligonucleotide
ccugagcgguugguuuggc

SEQ ID NO: 566411 - RNA, 19 nt, Artificial Sequence
  Description of Artificial Sequence: Synthetic oligonucleotide
gggccagacgaucgaugua

SEQ ID NO: 566412 - RNA, 19 nt, Artificial Sequence
  Description of Artificial Sequence: Synthetic oligonucleotide
ggccaaccggaggucauua

SEQ ID NO: 566413 - RNA, 19 nt, Artificial Sequence
  Description of Artificial Sequence: Synthetic oligonucleotide
cagagacacgagugacaau

SEQ ID NO: 566414 - RNA, 19 nt, Artificial Sequence
  Description of Artificial Sequence: Synthetic oligonucleotide
ccgguccugaaucagccau

SEQ ID NO: 566415 - RNA, 19 nt, Artificial Sequence
  Description of Artificial Sequence: Synthetic oligonucleotide
cagcccgcacuucucggau

SEQ ID NO: 566416 - RNA, 19 nt, Artificial Sequence
  Description of Artificial Sequence: Synthetic oligonucleotide
ggguccgggcagaaguaua

SEQ ID NO: 566417 - RNA, 19 nt, Artificial Sequence
  Description of Artificial Sequence: Synthetic oligonucleotide
ggaucacucgaggcuugcu

SEQ ID NO: 566418 - RNA, 19 nt, Artificial Sequence
  Description of Artificial Sequence: Synthetic oligonucleotide
caguaggguccgggcagaa

SEQ ID NO: 566419 - RNA, 19 nt, Artificial Sequence
  Description of Artificial Sequence: Synthetic oligonucleotide
caccuagaagugaguccuu

SEQ ID NO: 566420 - RNA, 19 nt, Artificial Sequence
  Description of Artificial Sequence: Synthetic oligonucleotide
ccaguaggguccgggcaga

SEQ ID NO: 566421 - RNA, 19 nt, Artificial Sequence
  Description of Artificial Sequence: Synthetic oligonucleotide
gccaaccggaggucauuau

SEQ ID NO: 566422 - RNA, 19 nt, Artificial Sequence
  Description of Artificial Sequence: Synthetic oligonucleotide
ccggacugccccagggucu

SEQ ID NO: 566423 - RNA, 19 nt, Artificial Sequence
  Description of Artificial Sequence: Synthetic oligonucleotide
cguguccgagaaguauuga

SEQ ID NO: 566424 - RNA, 19 nt, Artificial Sequence
  Description of Artificial Sequence: Synthetic oligonucleotide
cgguccugaaucagccaua

SEQ ID NO: 566425 - RNA, 19 nt, Artificial Sequence
  Description of Artificial Sequence: Synthetic oligonucleotide
cgaccagcucagggucauc

SEQ ID NO: 566426 - RNA, 19 nt, Artificial Sequence
  Description of Artificial Sequence: Synthetic oligonucleotide
ggacugccccagggucucu

SEQ ID NO: 566427 - RNA, 19 nt, Artificial Sequence
  Description of Artificial Sequence: Synthetic oligonucleotide
ccccggccuguuguauacu

SEQ ID NO: 566428 - RNA, 19 nt, Artificial Sequence
  Description of Artificial Sequence: Synthetic oligonucleotide
aaagaaucaauucuuacag

SEQ ID NO: 566429 - RNA, 19 nt, Artificial Sequence
  Description of Artificial Sequence: Synthetic oligonucleotide
uauagaaauaggaacauag

SEQ ID NO: 566430 - RNA, 19 nt, Artificial Sequence
  Description of Artificial Sequence: Synthetic oligonucleotide
aacauagcaauuuugaaug

SEQ ID NO: 566431 - RNA, 19 nt, Artificial Sequence
  Description of Artificial Sequence: Synthetic oligonucleotide
aaacuaguaaaaccgaaac

SEQ ID NO: 566432 - RNA, 19 nt, Artificial Sequence
  Description of Artificial Sequence: Synthetic oligonucleotide
uguauuaucaacucuauac

SEQ ID NO: 566433 - RNA, 19 nt, Artificial Sequence
  Description of Artificial Sequence: Synthetic oligonucleotide
aaaacuuaaugagaaaugg

SEQ ID NO: 566434 - RNA, 19 nt, Artificial Sequence
  Description of Artificial Sequence: Synthetic oligonucleotide
agaauaauuguugaggugc

SEQ ID NO: 566435 - RNA, 19 nt, Artificial Sequence
  Description of Artificial Sequence: Synthetic oligonucleotide
cuaauaucaaaauaagccc

SEQ ID NO: 566436 - RNA, 19 nt, Artificial Sequence
  Description of Artificial Sequence: Synthetic oligonucleotide
gauuacaacauugaagugg

SEQ ID NO: 566437 - RNA, 19 nt, Artificial Sequence
  Description of Artificial Sequence: Synthetic oligonucleotide
acuuucaaguacuacaugg

SEQ ID NO: 566438 - RNA, 19 nt, Artificial Sequence
  Description of Artificial Sequence: Synthetic oligonucleotide
ugaauguauaguuuuaacc

SEQ ID NO: 566439 - RNA, 19 nt, Artificial Sequence
  Description of Artificial Sequence: Synthetic oligonucleotide
aauguauaguuuuaaccag

SEQ ID NO: 566440 - RNA, 19 nt, Artificial Sequence
  Description of Artificial Sequence: Synthetic oligonucleotide
cucuaaauaaguuaauccc

SEQ ID NO: 566441 - RNA, 19 nt, Artificial Sequence
  Description of Artificial Sequence: Synthetic oligonucleotide
cuaacuugaacuuacuagc

SEQ ID NO: 566442 - RNA, 19 nt, Artificial Sequence
  Description of Artificial Sequence: Synthetic oligonucleotide
uauaacaugagcagaaccu

SEQ ID NO: 566443 - RNA, 19 nt, Artificial Sequence
  Description of Artificial Sequence: Synthetic oligonucleotide
aacucuauaccauugauua

SEQ ID NO: 566444 - RNA, 19 nt, Artificial Sequence
  Description of Artificial Sequence: Synthetic oligonucleotide
uagaaauaggaacauagca

SEQ ID NO: 566445 - RNA, 19 nt, Artificial Sequence
  Description of Artificial Sequence: Synthetic oligonucleotide
aacuuaaugagaaauggag

SEQ ID NO: 566446 - RNA, 19 nt, Artificial Sequence
  Description of Artificial Sequence: Synthetic oligonucleotide
aucgagauaacuauuaaac

SEQ ID NO: 566447 - RNA, 19 nt, Artificial Sequence
  Description of Artificial Sequence: Synthetic oligonucleotide
aaguauggaguuuagaaaa

SEQ ID NO: 566448 - RNA, 19 nt, Artificial Sequence
  Description of Artificial Sequence: Synthetic oligonucleotide
aauucuaacuugaacuuac

SEQ ID NO: 566449 - RNA, 19 nt, Artificial Sequence
  Description of Artificial Sequence: Synthetic oligonucleotide
auauucaacuuguaccugc

SEQ ID NO: 566450 - RNA, 19 nt, Artificial Sequence
  Description of Artificial Sequence: Synthetic oligonucleotide
ugagauauccaugauauca

SEQ ID NO: 566451 - RNA, 19 nt, Artificial Sequence
  Description of Artificial Sequence: Synthetic oligonucleotide
aauguguagaaauuaguau

SEQ ID NO: 566452 - RNA, 19 nt, Artificial Sequence
  Description of Artificial Sequence: Synthetic oligonucleotide
uaagccuuaaccgaaaacc

SEQ ID NO: 566453 - RNA, 19 nt, Artificial Sequence
  Description of Artificial Sequence: Synthetic oligonucleotide
uuuauaucuauaacaugag

SEQ ID NO: 566454 - RNA, 19 nt, Artificial Sequence
  Description of Artificial Sequence: Synthetic oligonucleotide
gauaauaugcucuaguucu

SEQ ID NO: 566455 - RNA, 19 nt, Artificial Sequence
  Description of Artificial Sequence: Synthetic oligonucleotide
auagcuaacagucuacuug

SEQ ID NO: 566456 - RNA, 19 nt, Artificial Sequence
  Description of Artificial Sequence: Synthetic oligonucleotide
uuuguuaucgagauaacua

SEQ ID NO: 566457 - RNA, 19 nt, Artificial Sequence
  Description of Artificial Sequence: Synthetic oligonucleotide
ucaacuugcaucuggaaga

SEQ ID NO: 566458 - RNA, 19 nt, Artificial Sequence
  Description of Artificial Sequence: Synthetic oligonucleotide
auaaguuaaucccacaaga

SEQ ID NO: 566459 - RNA, 19 nt, Artificial Sequence
  Description of Artificial Sequence: Synthetic oligonucleotide
uggacagucaaucaacuug

SEQ ID NO: 566460 - RNA, 19 nt, Artificial Sequence
  Description of Artificial Sequence: Synthetic oligonucleotide
uugacuuucaaguacuaca

SEQ ID NO: 566461 - RNA, 19 nt, Artificial Sequence
  Description of Artificial Sequence: Synthetic oligonucleotide
agauaauaugcucuaguuc

SEQ ID NO: 566462 - RNA, 19 nt, Artificial Sequence
  Description of Artificial Sequence: Synthetic oligonucleotide
aguggcuuaggaaacaucc

SEQ ID NO: 566463 - RNA, 19 nt, Artificial Sequence
  Description of Artificial Sequence: Synthetic oligonucleotide
aaaccuaacuaaucuguag

SEQ ID NO: 566464 - RNA, 19 nt, Artificial Sequence
  Description of Artificial Sequence: Synthetic oligonucleotide
aacuuacuagcaaaagacc

SEQ ID NO: 566465 - RNA, 19 nt, Artificial Sequence
  Description of Artificial Sequence: Synthetic oligonucleotide
gauguuuacuuccaucugc

SEQ ID NO: 566466 - RNA, 19 nt, Artificial Sequence
  Description of Artificial Sequence: Synthetic oligonucleotide
ggaauuuggacucugcugg

SEQ ID NO: 566467 - RNA, 19 nt, Artificial Sequence
  Description of Artificial Sequence: Synthetic oligonucleotide
ucaaguacuacauggguac

SEQ ID NO: 566468 - RNA, 19 nt, Artificial Sequence
  Description of Artificial Sequence: Synthetic oligonucleotide
uauuaucaacucuauacca

SEQ ID NO: 566469 - RNA, 19 nt, Artificial Sequence
  Description of Artificial Sequence: Synthetic oligonucleotide
aaaaccgaaacuaaacuga

SEQ ID NO: 566470 - RNA, 19 nt, Artificial Sequence
  Description of Artificial Sequence: Synthetic oligonucleotide
uacaccuuuagguggaggg

SEQ ID NO: 566471 - RNA, 19 nt, Artificial Sequence
  Description of Artificial Sequence: Synthetic oligonucleotide
gaacuuacuagcaaaagac

SEQ ID NO: 566472 - RNA, 19 nt, Artificial Sequence
  Description of Artificial Sequence: Synthetic oligonucleotide
uuaaccgaaaaccuaacua

SEQ ID NO: 566473 - RNA, 19 nt, Artificial Sequence
  Description of Artificial Sequence: Synthetic oligonucleotide
agcagaauaauuguugagg

SEQ ID NO: 566474 - RNA, 19 nt, Artificial Sequence
  Description of Artificial Sequence: Synthetic oligonucleotide
agauccucacuuuucuucc

SEQ ID NO: 566475 - RNA, 19 nt, Artificial Sequence
  Description of Artificial Sequence: Synthetic oligonucleotide
ugcaauuagacacuuacuu

SEQ ID NO: 566476 - RNA, 19 nt, Artificial Sequence
  Description of Artificial Sequence: Synthetic oligonucleotide
accgaaacuaaacugagga

SEQ ID NO: 566477 - RNA, 19 nt, Artificial Sequence
  Description of Artificial Sequence: Synthetic oligonucleotide
ugaguuggaugaauaaaag

SEQ ID NO: 566478 - RNA, 19 nt, Artificial Sequence
  Description of Artificial Sequence: Synthetic oligonucleotide
gaugcuaccuuaaauauca

SEQ ID NO: 566479 - RNA, 19 nt, Artificial Sequence
  Description of Artificial Sequence: Synthetic oligonucleotide
aacuaguaaaaccgaaacu

SEQ ID NO: 566480 - RNA, 19 nt, Artificial Sequence
  Description of Artificial Sequence: Synthetic oligonucleotide
uguauuuaggcggagauau

SEQ ID NO: 566481 - RNA, 19 nt, Artificial Sequence
  Description of Artificial Sequence: Synthetic oligonucleotide
uggaugaauaaaagaauca

SEQ ID NO: 566482 - RNA, 19 nt, Artificial Sequence
  Description of Artificial Sequence: Synthetic oligonucleotide
aaauaagcccaauguguag

SEQ ID NO: 566483 - RNA, 19 nt, Artificial Sequence
  Description of Artificial Sequence: Synthetic oligonucleotide
cuuaacugcuagcugaugc

SEQ ID NO: 566484 - RNA, 19 nt, Artificial Sequence
  Description of Artificial Sequence: Synthetic oligonucleotide
uaugguaagccuuaaccga

SEQ ID NO: 566485 - RNA, 19 nt, Artificial Sequence
  Description of Artificial Sequence: Synthetic oligonucleotide
uucguguucgaguagaagu

SEQ ID NO: 566486 - RNA, 19 nt, Artificial Sequence
  Description of Artificial Sequence: Synthetic oligonucleotide
aaagauaccuggaagacau

SEQ ID NO: 566487 - RNA, 19 nt, Artificial Sequence
  Description of Artificial Sequence: Synthetic oligonucleotide
cacauaguguauuuaggcg

SEQ ID NO: 566488 - RNA, 19 nt, Artificial Sequence
  Description of Artificial Sequence: Synthetic oligonucleotide
uaaccgaaaaccuaacuaa

SEQ ID NO: 566489 - RNA, 19 nt, Artificial Sequence
  Description of Artificial Sequence: Synthetic oligonucleotide
auagauaaacuauuauaga

SEQ ID NO: 566490 - RNA, 19 nt, Artificial Sequence
  Description of Artificial Sequence: Synthetic oligonucleotide
uauugcuuuuguuaucgag

SEQ ID NO: 566491 - RNA, 19 nt, Artificial Sequence
  Description of Artificial Sequence: Synthetic oligonucleotide
uaaacuaguaaaaccgaaa

SEQ ID NO: 566492 - RNA, 19 nt, Artificial Sequence
  Description of Artificial Sequence: Synthetic oligonucleotide
aaaauagggaaagggaggu

SEQ ID NO: 566493 - RNA, 19 nt, Artificial Sequence
  Description of Artificial Sequence: Synthetic oligonucleotide
uauuuaggcggagauaugc

SEQ ID NO: 566494 - RNA, 19 nt, Artificial Sequence
  Description of Artificial Sequence: Synthetic oligonucleotide
aaaauaaccuggaauauua

SEQ ID NO: 566495 - RNA, 19 nt, Artificial Sequence
  Description of Artificial Sequence: Synthetic oligonucleotide
uuaggcggagauaugcuag

SEQ ID NO: 566496 - RNA, 19 nt, Artificial Sequence
  Description of Artificial Sequence: Synthetic oligonucleotide
uuaaacuaguaaaaccgaa

SEQ ID NO: 566497 - RNA, 19 nt, Artificial Sequence
  Description of Artificial Sequence: Synthetic oligonucleotide
auuagauucuaauaucaaa

SEQ ID NO: 566498 - RNA, 19 nt, Artificial Sequence
  Description of Artificial Sequence: Synthetic oligonucleotide
acuuaaugagaaauggagg

SEQ ID NO: 566499 - RNA, 19 nt, Artificial Sequence
  Description of Artificial Sequence: Synthetic oligonucleotide
cuuucaugagcucauacuc

SEQ ID NO: 566500 - RNA, 19 nt, Artificial Sequence
  Description of Artificial Sequence: Synthetic oligonucleotide
cuauaacaugagcagaacc

SEQ ID NO: 566501 - RNA, 19 nt, Artificial Sequence
  Description of Artificial Sequence: Synthetic oligonucleotide
uuugcauucguguucgagu

SEQ ID NO: 566502 - RNA, 19 nt, Artificial Sequence
  Description of Artificial Sequence: Synthetic oligonucleotide
uagacacuuacuucuauga

SEQ ID NO: 566503 - RNA, 19 nt, Artificial Sequence
  Description of Artificial Sequence: Synthetic oligonucleotide
agaaaaucgaaguuuguuu

SEQ ID NO: 566504 - RNA, 19 nt, Artificial Sequence
  Description of Artificial Sequence: Synthetic oligonucleotide
uaaaaguaugguaagccuu

SEQ ID NO: 566505 - RNA, 19 nt, Artificial Sequence
  Description of Artificial Sequence: Synthetic oligonucleotide
uguguagaaauuaguauuu

SEQ ID NO: 566506 - RNA, 19 nt, Artificial Sequence
  Description of Artificial Sequence: Synthetic oligonucleotide
aauuugguugauguggaca

SEQ ID NO: 566507 - RNA, 19 nt, Artificial Sequence
  Description of Artificial Sequence: Synthetic oligonucleotide
ucuaaggguauucacguua

SEQ ID NO: 566508 - RNA, 19 nt, Artificial Sequence
  Description of Artificial Sequence: Synthetic oligonucleotide
ugguuuauuuucuggaacu

SEQ ID NO: 566509 - RNA, 19 nt, Artificial Sequence
  Description of Artificial Sequence: Synthetic oligonucleotide
uuacacguguaguugaacu

SEQ ID NO: 566510 - RNA, 19 nt, Artificial Sequence
  Description of Artificial Sequence: Synthetic oligonucleotide
uguugaggugcaauuagac

SEQ ID NO: 566511 - RNA, 19 nt, Artificial Sequence
  Description of Artificial Sequence: Synthetic oligonucleotide
aauaagcccaauguguaga

SEQ ID NO: 566512 - RNA, 19 nt, Artificial Sequence
  Description of Artificial Sequence: Synthetic oligonucleotide
uaccauuccagagaaaaca

SEQ ID NO: 566513 - RNA, 19 nt, Artificial Sequence
  Description of Artificial Sequence: Synthetic oligonucleotide
aagcccaauguguagaaau

SEQ ID NO: 566514 - RNA, 19 nt, Artificial Sequence
  Description of Artificial Sequence: Synthetic oligonucleotide
uuguuaucgagauaacuau

SEQ ID NO: 566515 - RNA, 19 nt, Artificial Sequence
  Description of Artificial Sequence: Synthetic oligonucleotide
accugcacauuuuauaucu

SEQ ID NO: 566516 - RNA, 19 nt, Artificial Sequence
  Description of Artificial Sequence: Synthetic oligonucleotide
auuuucuuaacugcuagcu

SEQ ID NO: 566517 - RNA, 19 nt, Artificial Sequence
  Description of Artificial Sequence: Synthetic oligonucleotide
uaucaacucuauaccauug

SEQ ID NO: 566518 - RNA, 19 nt, Artificial Sequence
  Description of Artificial Sequence: Synthetic oligonucleotide
ugacuuucaaguacuacau

SEQ ID NO: 566519 - RNA, 19 nt, Artificial Sequence
  Description of Artificial Sequence: Synthetic oligonucleotide
aguuaaucccacaagauaa

SEQ ID NO: 566520 - RNA, 19 nt, Artificial Sequence
  Description of Artificial Sequence: Synthetic oligonucleotide
uucaucggaucccucaaug

SEQ ID NO: 566521 - RNA, 19 nt, Artificial Sequence
  Description of Artificial Sequence: Synthetic oligonucleotide
caaacgaucugcuuucaug

SEQ ID NO: 566522 - RNA, 19 nt, Artificial Sequence
  Description of Artificial Sequence: Synthetic oligonucleotide
uuuuguuaucgagauaacu

SEQ ID NO: 566523 - RNA, 19 nt, Artificial Sequence
  Description of Artificial Sequence: Synthetic oligonucleotide
aaaugccggucuuucauga

SEQ ID NO: 566524 - RNA, 19 nt, Artificial Sequence
  Description of Artificial Sequence: Synthetic oligonucleotide
gcggagauaugcuagacgg

SEQ ID NO: 566525 - RNA, 19 nt, Artificial Sequence
  Description of Artificial Sequence: Synthetic oligonucleotide
gaaauaggaacauagcaau

SEQ ID NO: 566526 - RNA, 19 nt, Artificial Sequence
  Description of Artificial Sequence: Synthetic oligonucleotide
aaggcgugcacauagugua

SEQ ID NO: 566527 - RNA, 19 nt, Artificial Sequence
  Description of Artificial Sequence: Synthetic oligonucleotide
acuagcaaaagaccuaaaa

SEQ ID NO: 566528 - RNA, 19 nt, Artificial Sequence
  Description of Artificial Sequence: Synthetic oligonucleotide
auagagcacaucaugaucu

SEQ ID NO: 566529 - RNA, 19 nt, Artificial Sequence
  Description of Artificial Sequence: Synthetic oligonucleotide
acuugcaucuggaagacag

SEQ ID NO: 566530 - RNA, 19 nt, Artificial Sequence
  Description of Artificial Sequence: Synthetic oligonucleotide
uuuuccgcgguuuguaaca

SEQ ID NO: 566531 - RNA, 19 nt, Artificial Sequence
  Description of Artificial Sequence: Synthetic oligonucleotide
ucaggacccagaaacauua

SEQ ID NO: 566532 - RNA, 19 nt, Artificial Sequence
  Description of Artificial Sequence: Synthetic oligonucleotide
aggguauucacguuaaauu

SEQ ID NO: 566533 - RNA, 19 nt, Artificial Sequence
  Description of Artificial Sequence: Synthetic oligonucleotide
aagagccaagauaauuugg

SEQ ID NO: 566534 - RNA, 19 nt, Artificial Sequence
  Description of Artificial Sequence: Synthetic oligonucleotide
augccggucuuucaugagc

SEQ ID NO: 566535 - RNA, 19 nt, Artificial Sequence
  Description of Artificial Sequence: Synthetic oligonucleotide
aaaccgaaacuaaacugag

SEQ ID NO: 566536 - RNA, 19 nt, Artificial Sequence
  Description of Artificial Sequence: Synthetic oligonucleotide
cuaacagucuacuugugga

SEQ ID NO: 566537 - RNA, 19 nt, Artificial Sequence
  Description of Artificial Sequence: Synthetic oligonucleotide
uaacugccaguucaaaaga

SEQ ID NO: 566538 - RNA, 19 nt, Artificial Sequence
  Description of Artificial Sequence: Synthetic oligonucleotide
ucuacuuguggaacaaaau

SEQ ID NO: 566539 - RNA, 19 nt, Artificial Sequence
  Description of Artificial Sequence: Synthetic oligonucleotide
uucaaagguaaaauaugua

SEQ ID NO: 566540 - RNA, 19 nt, Artificial Sequence
  Description of Artificial Sequence: Synthetic oligonucleotide
uggcuuaggaaacauccac

SEQ ID NO: 566541 - RNA, 19 nt, Artificial Sequence
  Description of Artificial Sequence: Synthetic oligonucleotide
gagauguuuacuuccaucu

SEQ ID NO: 566542 - RNA, 19 nt, Artificial Sequence
  Description of Artificial Sequence: Synthetic oligonucleotide
uuaucgagauaacuauuaa

SEQ ID NO: 566543 - RNA, 19 nt, Artificial Sequence
  Description of Artificial Sequence: Synthetic oligonucleotide
acuugaacuuacuagcaaa

SEQ ID NO: 566544 - RNA, 19 nt, Artificial Sequence
  Description of Artificial Sequence: Synthetic oligonucleotide
uauucaacuuguaccugca

SEQ ID NO: 566545 - RNA, 19 nt, Artificial Sequence
  Description of Artificial Sequence: Synthetic oligonucleotide
acucuauaccauugauuac

SEQ ID NO: 566546 - RNA, 19 nt, Artificial Sequence
  Description of Artificial Sequence: Synthetic oligonucleotide
acuaguuuauuuaaauaga

SEQ ID NO: 566547 - RNA, 19 nt, Artificial Sequence
  Description of Artificial Sequence: Synthetic oligonucleotide
aauauucaacuuguaccug

SEQ ID NO: 566548 - RNA, 19 nt, Artificial Sequence
  Description of Artificial Sequence: Synthetic oligonucleotide
agacacuuacuucuaugag

SEQ ID NO: 566549 - RNA, 19 nt, Artificial Sequence
  Description of Artificial Sequence: Synthetic oligonucleotide
uugaacuuacuagcaaaag

SEQ ID NO: 566550 - RNA, 19 nt, Artificial Sequence
  Description of Artificial Sequence: Synthetic oligonucleotide
gaacauagcaauuuugaau

SEQ ID NO: 566551 - RNA, 19 nt, Artificial Sequence
  Description of Artificial Sequence: Synthetic oligonucleotide
ucccucaaugucaaagcgc

SEQ ID NO: 566552 - RNA, 19 nt, Artificial Sequence
  Description of Artificial Sequence: Synthetic oligonucleotide
gaauuuggacucugcuggg

SEQ ID NO: 566553 - RNA, 19 nt, Artificial Sequence
  Description of Artificial Sequence: Synthetic oligonucleotide
acuuacuucuaugagggga

SEQ ID NO: 566554 - RNA, 19 nt, Artificial Sequence
  Description of Artificial Sequence: Synthetic oligonucleotide
cauggguacuuaaauucag

SEQ ID NO: 566555 - RNA, 19 nt, Artificial Sequence
  Description of Artificial Sequence: Synthetic oligonucleotide
ucaauacaggaucuuugaa

SEQ ID NO: 566556 - RNA, 19 nt, Artificial Sequence
  Description of Artificial Sequence: Synthetic oligonucleotide
aaggguauucacguuaaau

SEQ ID NO: 566557 - RNA, 19 nt, Artificial Sequence
  Description of Artificial Sequence: Synthetic oligonucleotide
ucggucacuauuacacacc

SEQ ID NO: 566558 - RNA, 19 nt, Artificial Sequence
  Description of Artificial Sequence: Synthetic oligonucleotide
ugaugcuaccuuaaauauc

SEQ ID NO: 566559 - RNA, 19 nt, Artificial Sequence
  Description of Artificial Sequence: Synthetic oligonucleotide
cacuaauucuaacuugaac

SEQ ID NO: 566560 - RNA, 19 nt, Artificial Sequence
  Description of Artificial Sequence: Synthetic oligonucleotide
gauguggacagucaaucaa

SEQ ID NO: 566561 - RNA, 19 nt, Artificial Sequence
  Description of Artificial Sequence: Synthetic oligonucleotide
acauugaaguggcuuagga

SEQ ID NO: 566562 - RNA, 19 nt, Artificial Sequence
  Description of Artificial Sequence: Synthetic oligonucleotide
aaaaguaugguaagccuua

SEQ ID NO: 566563 - RNA, 19 nt, Artificial Sequence
  Description of Artificial Sequence: Synthetic oligonucleotide
caauuagacacuuacuucu

SEQ ID NO: 566564 - RNA, 19 nt, Artificial Sequence
  Description of Artificial Sequence: Synthetic oligonucleotide
uuguugaggugcaauuaga

SEQ ID NO: 566565 - RNA, 19 nt, Artificial Sequence
  Description of Artificial Sequence: Synthetic oligonucleotide
cuaaucuguaggauguuca

SEQ ID NO: 566566 - RNA, 19 nt, Artificial Sequence
  Description of Artificial Sequence: Synthetic oligonucleotide
acguuggaaaugcaaacga

SEQ ID NO: 566567 - RNA, 19 nt, Artificial Sequence
  Description of Artificial Sequence: Synthetic oligonucleotide
ucguguucgaguagaaguc

SEQ ID NO: 566568 - RNA, 19 nt, Artificial Sequence
  Description of Artificial Sequence: Synthetic oligonucleotide
uaauuguugaggugcaauu

SEQ ID NO: 566569 - RNA, 19 nt, Artificial Sequence
  Description of Artificial Sequence: Synthetic oligonucleotide
uguguaaggcugaggcugc

SEQ ID NO: 566570 - RNA, 19 nt, Artificial Sequence
  Description of Artificial Sequence: Synthetic oligonucleotide
cauagagcacaucaugauc

SEQ ID NO: 566571 - RNA, 19 nt, Artificial Sequence
  Description of Artificial Sequence: Synthetic oligonucleotide
accuaacuaaucuguagga

SEQ ID NO: 566572 - RNA, 19 nt, Artificial Sequence
  Description of Artificial Sequence: Synthetic oligonucleotide
agauaugcuagacgguaca

SEQ ID NO: 566573 - RNA, 19 nt, Artificial Sequence
  Description of Artificial Sequence: Synthetic oligonucleotide
uuacuagcaaaagaccuaa

SEQ ID NO: 566574 - RNA, 19 nt, Artificial Sequence
  Description of Artificial Sequence: Synthetic oligonucleotide
accauuccagagaaaacac

SEQ ID NO: 566575 - RNA, 19 nt, Artificial Sequence
  Description of Artificial Sequence: Synthetic oligonucleotide
uauucacguuaaauuaaaa

SEQ ID NO: 566576 - RNA, 19 nt, Artificial Sequence
  Description of Artificial Sequence: Synthetic oligonucleotide
aaugccggucuuucaugag

SEQ ID NO: 566577 - RNA, 19 nt, Artificial Sequence
  Description of Artificial Sequence: Synthetic oligonucleotide
ugcacauuuuauaucuaua

SEQ ID NO: 566578 - RNA, 19 nt, Artificial Sequence
  Description of Artificial Sequence: Synthetic oligonucleotide
cacguuggaaaugcaaacg

SEQ ID NO: 566579 - RNA, 19 nt, Artificial Sequence
  Description of Artificial Sequence: Synthetic oligonucleotide
ugucaguagaagagccaag

SEQ ID NO: 566580 - RNA, 19 nt, Artificial Sequence
  Description of Artificial Sequence: Synthetic oligonucleotide
auuacacaccaucugguuu

SEQ ID NO: 566581 - RNA, 19 nt, Artificial Sequence
  Description of Artificial Sequence: Synthetic oligonucleotide
aggagaaaaucgaaguuug

SEQ ID NO: 566582 - RNA, 19 nt, Artificial Sequence
  Description of Artificial Sequence: Synthetic oligonucleotide
ugauguggacagucaauca

SEQ ID NO: 566583 - RNA, 19 nt, Artificial Sequence
  Description of Artificial Sequence: Synthetic oligonucleotide
ucuaaaugccggucuuuca

SEQ ID NO: 566584 - RNA, 19 nt, Artificial Sequence
  Description of Artificial Sequence: Synthetic oligonucleotide
aucaacucuauaccauuga

SEQ ID NO: 566585 - RNA, 19 nt, Artificial Sequence
  Description of Artificial Sequence: Synthetic oligonucleotide
uguuaucgagauaacuauu

SEQ ID NO: 566586 - RNA, 19 nt, Artificial Sequence
  Description of Artificial Sequence: Synthetic oligonucleotide
aggcucacguuggaaaugc

SEQ ID NO: 566587 - RNA, 19 nt, Artificial Sequence
  Description of Artificial Sequence: Synthetic oligonucleotide
uuggguuguacuguacuug

SEQ ID NO: 566588 - RNA, 19 nt, Artificial Sequence
  Description of Artificial Sequence: Synthetic oligonucleotide
uggguacuuaaauucaguu

SEQ ID NO: 566589 - RNA, 19 nt, Artificial Sequence
  Description of Artificial Sequence: Synthetic oligonucleotide
gcuaacagucuacuugugg

SEQ ID NO: 566590 - RNA, 19 nt, Artificial Sequence
  Description of Artificial Sequence: Synthetic oligonucleotide
augaguuggaugaauaaaa

SEQ ID NO: 566591 - RNA, 19 nt, Artificial Sequence
  Description of Artificial Sequence: Synthetic oligonucleotide
aacaucacacaugugccau

SEQ ID NO: 566592 - RNA, 19 nt, Artificial Sequence
  Description of Artificial Sequence: Synthetic oligonucleotide
uccgcgguuuguaacaauc

SEQ ID NO: 566593 - RNA, 19 nt, Artificial Sequence
  Description of Artificial Sequence: Synthetic oligonucleotide
aaccuggaauauuaucaau

SEQ ID NO: 566594 - RNA, 19 nt, Artificial Sequence
  Description of Artificial Sequence: Synthetic oligonucleotide
uccuuguuugagauaucca

SEQ ID NO: 566595 - RNA, 19 nt, Artificial Sequence
  Description of Artificial Sequence: Synthetic oligonucleotide
uuuaggcggagauaugcua

SEQ ID NO: 566596 - RNA, 19 nt, Artificial Sequence
  Description of Artificial Sequence: Synthetic oligonucleotide
agcacucggucacuauuac

SEQ ID NO: 566597 - RNA, 19 nt, Artificial Sequence
  Description of Artificial Sequence: Synthetic oligonucleotide
caaucugugucaguagaag

SEQ ID NO: 566598 - RNA, 19 nt, Artificial Sequence
  Description of Artificial Sequence: Synthetic oligonucleotide
uaacagucuacuuguggaa

SEQ ID NO: 566599 - RNA, 19 nt, Artificial Sequence
  Description of Artificial Sequence: Synthetic oligonucleotide
uccuauaauucugucacua

SEQ ID NO: 566600 - RNA, 19 nt, Artificial Sequence
  Description of Artificial Sequence: Synthetic oligonucleotide
accgaaaaccuaacuaauc

SEQ ID NO: 566601 - RNA, 19 nt, Artificial Sequence
  Description of Artificial Sequence: Synthetic oligonucleotide
cuaguaaaaccgaaacuaa

SEQ ID NO: 566602 - RNA, 19 nt, Artificial Sequence
  Description of Artificial Sequence: Synthetic oligonucleotide
ucaucggaucccucaaugu

SEQ ID NO: 566603 - RNA, 19 nt, Artificial Sequence
  Description of Artificial Sequence: Synthetic oligonucleotide
uauuacacaccaucugguu

SEQ ID NO: 566604 - RNA, 19 nt, Artificial Sequence
  Description of Artificial Sequence: Synthetic oligonucleotide
gcuccuauagcuaacaguc

SEQ ID NO: 566605 - RNA, 19 nt, Artificial Sequence
  Description of Artificial Sequence: Synthetic oligonucleotide
uggcaugaucugcacaaga

SEQ ID NO: 566606 - RNA, 19 nt, Artificial Sequence
  Description of Artificial Sequence: Synthetic oligonucleotide
uugcauucguguucgagua

SEQ ID NO: 566607 - RNA, 19 nt, Artificial Sequence
  Description of Artificial Sequence: Synthetic oligonucleotide
aaacagaguccagauaaua

SEQ ID NO: 566608 - RNA, 19 nt, Artificial Sequence
  Description of Artificial Sequence: Synthetic oligonucleotide
gagugccucuuuucaaugc

SEQ ID NO: 566609 - RNA, 19 nt, Artificial Sequence
  Description of Artificial Sequence: Synthetic oligonucleotide
auaauuguugaggugcaau

SEQ ID NO: 566610 - RNA, 19 nt, Artificial Sequence
  Description of Artificial Sequence: Synthetic oligonucleotide
uccaugagacaugagucac

SEQ ID NO: 566611 - RNA, 19 nt, Artificial Sequence
  Description of Artificial Sequence: Synthetic oligonucleotide
cauaguguauuuaggcgga

SEQ ID NO: 566612 - RNA, 19 nt, Artificial Sequence
  Description of Artificial Sequence: Synthetic oligonucleotide
guaagccuuaaccgaaaac

SEQ ID NO: 566613 - RNA, 19 nt, Artificial Sequence
  Description of Artificial Sequence: Synthetic oligonucleotide
auaccaucucuaaauaagu

SEQ ID NO: 566614 - RNA, 19 nt, Artificial Sequence
  Description of Artificial Sequence: Synthetic oligonucleotide
aguguguaaggcugaggcu

SEQ ID NO: 566615 - RNA, 19 nt, Artificial Sequence
  Description of Artificial Sequence: Synthetic oligonucleotide
cuaguuuauuuaaauagau

SEQ ID NO: 566616 - RNA, 19 nt, Artificial Sequence
  Description of Artificial Sequence: Synthetic oligonucleotide
ucacauccaugagacauga

SEQ ID NO: 566617 - RNA, 19 nt, Artificial Sequence
  Description of Artificial Sequence: Synthetic oligonucleotide
aguucaaaagauaccugga

SEQ ID NO: 566618 - RNA, 19 nt, Artificial Sequence
  Description of Artificial Sequence: Synthetic oligonucleotide
ugcauucguguucgaguag

SEQ ID NO: 566619 - RNA, 19 nt, Artificial Sequence
  Description of Artificial Sequence: Synthetic oligonucleotide
caucggaucccucaauguc

SEQ ID NO: 566620 - RNA, 19 nt, Artificial Sequence
  Description of Artificial Sequence: Synthetic oligonucleotide
guuaucgagauaacuauua

SEQ ID NO: 566621 - RNA, 19 nt, Artificial Sequence
  Description of Artificial Sequence: Synthetic oligonucleotide
guaugcugaaacagagucc

SEQ ID NO: 566622 - RNA, 19 nt, Artificial Sequence
  Description of Artificial Sequence: Synthetic oligonucleotide
gcaauuagacacuuacuuc

SEQ ID NO: 566623 - RNA, 19 nt, Artificial Sequence
  Description of Artificial Sequence: Synthetic oligonucleotide
aauuuggacucugcuggga

SEQ ID NO: 566624 - RNA, 19 nt, Artificial Sequence
  Description of Artificial Sequence: Synthetic oligonucleotide
uccagauaauaugcucuag

SEQ ID NO: 566625 - RNA, 19 nt, Artificial Sequence
  Description of Artificial Sequence: Synthetic oligonucleotide
cuuacuagcaaaagaccua

SEQ ID NO: 566626 - RNA, 19 nt, Artificial Sequence
  Description of Artificial Sequence: Synthetic oligonucleotide
gaauaauuguugaggugca

SEQ ID NO: 566627 - RNA, 19 nt, Artificial Sequence
  Description of Artificial Sequence: Synthetic oligonucleotide
ggacagucaaucaacuugc

SEQ ID NO: 566628 - RNA, 19 nt, Artificial Sequence
  Description of Artificial Sequence: Synthetic oligonucleotide
aaccgaaaaccuaacuaau

SEQ ID NO: 566629 - RNA, 19 nt, Artificial Sequence
  Description of Artificial Sequence: Synthetic oligonucleotide
uugguugauguggacaguc

SEQ ID NO: 566630 - RNA, 19 nt, Artificial Sequence
  Description of Artificial Sequence: Synthetic oligonucleotide
agcugaugcuaccuuaaau

SEQ ID NO: 566631 - RNA, 19 nt, Artificial Sequence
  Description of Artificial Sequence: Synthetic oligonucleotide
aaauaaccuggaauauuau

SEQ ID NO: 566632 - RNA, 19 nt, Artificial Sequence
  Description of Artificial Sequence: Synthetic oligonucleotide
ugcagccuuaagaaauguc

SEQ ID NO: 566633 - RNA, 19 nt, Artificial Sequence
  Description of Artificial Sequence: Synthetic oligonucleotide
auguauaguuuuaaccagu

SEQ ID NO: 566634 - RNA, 19 nt, Artificial Sequence
  Description of Artificial Sequence: Synthetic oligonucleotide
gauaacuauuaaacuagua

SEQ ID NO: 566635 - RNA, 19 nt, Artificial Sequence
  Description of Artificial Sequence: Synthetic oligonucleotide
gcugaugcuaccuuaaaua

SEQ ID NO: 566636 - RNA, 19 nt, Artificial Sequence
  Description of Artificial Sequence: Synthetic oligonucleotide
ggaucccucaaugucaaag

SEQ ID NO: 566637 - RNA, 19 nt, Artificial Sequence
  Description of Artificial Sequence: Synthetic oligonucleotide
acagucaaucaacuugcau

SEQ ID NO: 566638 - RNA, 19 nt, Artificial Sequence
  Description of Artificial Sequence: Synthetic oligonucleotide
aauaauuguugaggugcaa

SEQ ID NO: 566639 - RNA, 19 nt, Artificial Sequence
  Description of Artificial Sequence: Synthetic oligonucleotide
aauacaccuuuagguggag

SEQ ID NO: 566640 - RNA, 19 nt, Artificial Sequence
  Description of Artificial Sequence: Synthetic oligonucleotide
auaagcccaauguguagaa

SEQ ID NO: 566641 - RNA, 19 nt, Artificial Sequence
  Description of Artificial Sequence: Synthetic oligonucleotide
uuuacacguguaguugaac

SEQ ID NO: 566642 - RNA, 19 nt, Artificial Sequence
  Description of Artificial Sequence: Synthetic oligonucleotide
agccuuaagaaaugucaau

SEQ ID NO: 566643 - RNA, 19 nt, Artificial Sequence
  Description of Artificial Sequence: Synthetic oligonucleotide
auucaguuaucugaaugau

SEQ ID NO: 566644 - RNA, 19 nt, Artificial Sequence
  Description of Artificial Sequence: Synthetic oligonucleotide
uucaggacccagaaacauu

SEQ ID NO: 566645 - RNA, 19 nt, Artificial Sequence
  Description of Artificial Sequence: Synthetic oligonucleotide
acauggguacuuaaauuca

SEQ ID NO: 566646 - RNA, 19 nt, Artificial Sequence
  Description of Artificial Sequence: Synthetic oligonucleotide
agauaacuauuaaacuagu

SEQ ID NO: 566647 - RNA, 19 nt, Artificial Sequence
  Description of Artificial Sequence: Synthetic oligonucleotide
cccaauguguagaaauuag

SEQ ID NO: 566648 - RNA, 19 nt, Artificial Sequence
  Description of Artificial Sequence: Synthetic oligonucleotide
aacugaggagaaaaucgaa

SEQ ID NO: 566649 - RNA, 19 nt, Artificial Sequence
  Description of Artificial Sequence: Synthetic oligonucleotide
gagauaugcuagacgguac

SEQ ID NO: 566650 - RNA, 19 nt, Artificial Sequence
  Description of Artificial Sequence: Synthetic oligonucleotide
ucggaucccucaaugucaa

SEQ ID NO: 566651 - RNA, 19 nt, Artificial Sequence
  Description of Artificial Sequence: Synthetic oligonucleotide
auucguguucgaguagaag

SEQ ID NO: 566652 - RNA, 19 nt, Artificial Sequence
  Description of Artificial Sequence: Synthetic oligonucleotide
aucggaucccucaauguca

SEQ ID NO: 566653 - RNA, 19 nt, Artificial Sequence
  Description of Artificial Sequence: Synthetic oligonucleotide
uaggcggagauaugcuaga

SEQ ID NO: 566654 - RNA, 19 nt, Artificial Sequence
  Description of Artificial Sequence: Synthetic oligonucleotide
uaccugcacauuuuauauc

SEQ ID NO: 566655 - RNA, 19 nt, Artificial Sequence
  Description of Artificial Sequence: Synthetic oligonucleotide
ggcggagauaugcuagacg

SEQ ID NO: 566656 - RNA, 19 nt, Artificial Sequence
  Description of Artificial Sequence: Synthetic oligonucleotide
gcagccuuaagaaauguca

SEQ ID NO: 566657 - RNA, 19 nt, Artificial Sequence
  Description of Artificial Sequence: Synthetic oligonucleotide
cuauaccauugauuacaac

SEQ ID NO: 566658 - RNA, 19 nt, Artificial Sequence
  Description of Artificial Sequence: Synthetic oligonucleotide
aaagcaugaguuggaugaa

SEQ ID NO: 566659 - RNA, 19 nt, Artificial Sequence
  Description of Artificial Sequence: Synthetic oligonucleotide
ggagauguuuacuuccauc

SEQ ID NO: 566660 - RNA, 19 nt, Artificial Sequence
  Description of Artificial Sequence: Synthetic oligonucleotide
aaguacuacauggguacuu

SEQ ID NO: 566661 - RNA, 19 nt, Artificial Sequence
  Description of Artificial Sequence: Synthetic oligonucleotide
cuaaggguauucacguuaa

SEQ ID NO: 566662 - RNA, 19 nt, Artificial Sequence
  Description of Artificial Sequence: Synthetic oligonucleotide
aaacuaaacugaggagaaa

SEQ ID NO: 566663 - RNA, 19 nt, Artificial Sequence
  Description of Artificial Sequence: Synthetic oligonucleotide
cuuaggaaacauccacaca

SEQ ID NO: 566664 - RNA, 19 nt, Artificial Sequence
  Description of Artificial Sequence: Synthetic oligonucleotide
uccugagauccucacuuuu

SEQ ID NO: 566665 - RNA, 19 nt, Artificial Sequence
  Description of Artificial Sequence: Synthetic oligonucleotide
ugguaagccuuaaccgaaa

SEQ ID NO: 566666 - RNA, 19 nt, Artificial Sequence
  Description of Artificial Sequence: Synthetic oligonucleotide
auuuaggcggagauaugcu

SEQ ID NO: 566667 - RNA, 19 nt, Artificial Sequence
  Description of Artificial Sequence: Synthetic oligonucleotide
cauccacacaaauauucaa

SEQ ID NO: 566668 - RNA, 19 nt, Artificial Sequence
  Description of Artificial Sequence: Synthetic oligonucleotide
aacugccaguucaaaagau

SEQ ID NO: 566669 - RNA, 19 nt, Artificial Sequence
  Description of Artificial Sequence: Synthetic oligonucleotide
aaccaauagugcagugucu

SEQ ID NO: 566670 - RNA, 19 nt, Artificial Sequence
  Description of Artificial Sequence: Synthetic oligonucleotide
ggaacauagcaauuuugaa

SEQ ID NO: 566671 - RNA, 19 nt, Artificial Sequence
  Description of Artificial Sequence: Synthetic oligonucleotide
cuauuacacaccaucuggu

SEQ ID NO: 566672 - RNA, 19 nt, Artificial Sequence
  Description of Artificial Sequence: Synthetic oligonucleotide
uggucuaaaugccggucuu

SEQ ID NO: 566673 - RNA, 19 nt, Artificial Sequence
  Description of Artificial Sequence: Synthetic oligonucleotide
guuggaugaauaaaagaau

SEQ ID NO: 566674 - RNA, 19 nt, Artificial Sequence
  Description of Artificial Sequence: Synthetic oligonucleotide
ccuauagcuaacagucuac

SEQ ID NO: 566675 - RNA, 19 nt, Artificial Sequence
  Description of Artificial Sequence: Synthetic oligonucleotide
guagcagaauuuacacgug

SEQ ID NO: 566676 - RNA, 19 nt, Artificial Sequence
  Description of Artificial Sequence: Synthetic oligonucleotide
gagaaaaucgaaguuuguu

SEQ ID NO: 566677 - RNA, 19 nt, Artificial Sequence
  Description of Artificial Sequence: Synthetic oligonucleotide
aagcaugaguuggaugaau

SEQ ID NO: 566678 - RNA, 19 nt, Artificial Sequence
  Description of Artificial Sequence: Synthetic oligonucleotide
cuagcugaugcuaccuuaa

SEQ ID NO: 566679 - RNA, 19 nt, Artificial Sequence
  Description of Artificial Sequence: Synthetic oligonucleotide
gucuaaaugccggucuuuc

SEQ ID NO: 566680 - RNA, 19 nt, Artificial Sequence
  Description of Artificial Sequence: Synthetic oligonucleotide
uacuagcaaaagaccuaaa

SEQ ID NO: 566681 - RNA, 19 nt, Artificial Sequence
  Description of Artificial Sequence: Synthetic oligonucleotide
caagagcaaacaucacaca

SEQ ID NO: 566682 - RNA, 19 nt, Artificial Sequence
  Description of Artificial Sequence: Synthetic oligonucleotide
auggguacuuaaauucagu

SEQ ID NO: 566683 - RNA, 19 nt, Artificial Sequence
  Description of Artificial Sequence: Synthetic oligonucleotide
cugaugcuaccuuaaauau

SEQ ID NO: 566684 - RNA, 19 nt, Artificial Sequence
  Description of Artificial Sequence: Synthetic oligonucleotide
auaguguauuuaggcggag

SEQ ID NO: 566685 - RNA, 19 nt, Artificial Sequence
  Description of Artificial Sequence: Synthetic oligonucleotide
augguaagccuuaaccgaa

SEQ ID NO: 566686 - RNA, 19 nt, Artificial Sequence
  Description of Artificial Sequence: Synthetic oligonucleotide
ggguacuuaaauucaguua

SEQ ID NO: 566687 - RNA, 19 nt, Artificial Sequence
  Description of Artificial Sequence: Synthetic oligonucleotide
cuuaaccgaaaaccuaacu

SEQ ID NO: 566688 - RNA, 19 nt, Artificial Sequence
  Description of Artificial Sequence: Synthetic oligonucleotide
agaagucauuucugccagu

SEQ ID NO: 566689 - RNA, 19 nt, Artificial Sequence
  Description of Artificial Sequence: Synthetic oligonucleotide
aggcggagauaugcuagac

SEQ ID NO: 566690 - RNA, 19 nt, Artificial Sequence
  Description of Artificial Sequence: Synthetic oligonucleotide
ccgaaacuaaacugaggag

SEQ ID NO: 566691 - RNA, 19 nt, Artificial Sequence
  Description of Artificial Sequence: Synthetic oligonucleotide
guacuuaaauucaguuauc

SEQ ID NO: 566692 - RNA, 19 nt, Artificial Sequence
  Description of Artificial Sequence: Synthetic oligonucleotide
uucuaaggguauucacguu

SEQ ID NO: 566693 - RNA, 19 nt, Artificial Sequence
  Description of Artificial Sequence: Synthetic oligonucleotide
uuugguugauguggacagu

SEQ ID NO: 566694 - RNA, 19 nt, Artificial Sequence
  Description of Artificial Sequence: Synthetic oligonucleotide
gugucaguagaagagccaa

SEQ ID NO: 566695 - RNA, 19 nt, Artificial Sequence
  Description of Artificial Sequence: Synthetic oligonucleotide
caguacauuagauucuaau

SEQ ID NO: 566696 - RNA, 19 nt, Artificial Sequence
  Description of Artificial Sequence: Synthetic oligonucleotide
cagauaauaugcucuaguu

SEQ ID NO: 566697 - RNA, 19 nt, Artificial Sequence
  Description of Artificial Sequence: Synthetic oligonucleotide
ugcuagcugaugcuaccuu

SEQ ID NO: 566698 - RNA, 19 nt, Artificial Sequence
  Description of Artificial Sequence: Synthetic oligonucleotide
gaaggcuccuauagcuaac

SEQ ID NO: 566699 - RNA, 19 nt, Artificial Sequence
  Description of Artificial Sequence: Synthetic oligonucleotide
cccaaauuacauagagcac

SEQ ID NO: 566700 - RNA, 19 nt, Artificial Sequence
  Description of Artificial Sequence: Synthetic oligonucleotide
guccagauaauaugcucua

SEQ ID NO: 566701 - RNA, 19 nt, Artificial Sequence
  Description of Artificial Sequence: Synthetic oligonucleotide
auuuacacguguaguugaa

SEQ ID NO: 566702 - RNA, 19 nt, Artificial Sequence
  Description of Artificial Sequence: Synthetic oligonucleotide
guauuuaggcggagauaug

SEQ ID NO: 566703 - RNA, 19 nt, Artificial Sequence
  Description of Artificial Sequence: Synthetic oligonucleotide
gguugauguggacagucaa

SEQ ID NO: 566704 - RNA, 19 nt, Artificial Sequence
  Description of Artificial Sequence: Synthetic oligonucleotide
ggagauaugcuagacggua

SEQ ID NO: 566705 - RNA, 19 nt, Artificial Sequence
  Description of Artificial Sequence: Synthetic oligonucleotide
guguauuaucaacucuaua

SEQ ID NO: 566706 - RNA, 19 nt, Artificial Sequence
  Description of Artificial Sequence: Synthetic oligonucleotide
uaagcccaauguguagaaa

SEQ ID NO: 566707 - RNA, 19 nt, Artificial Sequence
  Description of Artificial Sequence: Synthetic oligonucleotide
uuacuucuaugaggggaaa

SEQ ID NO: 566708 - RNA, 19 nt, Artificial Sequence
  Description of Artificial Sequence: Synthetic oligonucleotide
gauucucaauccuguguau

SEQ ID NO: 566709 - RNA, 19 nt, Artificial Sequence
  Description of Artificial Sequence: Synthetic oligonucleotide
cuacauggguacuuaaauu

SEQ ID NO: 566710 - RNA, 19 nt, Artificial Sequence
  Description of Artificial Sequence: Synthetic oligonucleotide
uuuccgcgguuuguaacaa

SEQ ID NO: 566711 - RNA, 19 nt, Artificial Sequence
  Description of Artificial Sequence: Synthetic oligonucleotide
cagaugucccaaauuacau

SEQ ID NO: 566712 - RNA, 19 nt, Artificial Sequence
  Description of Artificial Sequence: Synthetic oligonucleotide
acuuguaccugcacauuuu

SEQ ID NO: 566713 - RNA, 19 nt, Artificial Sequence
  Description of Artificial Sequence: Synthetic oligonucleotide
guacuacauggguacuuaa

SEQ ID NO: 566714 - RNA, 19 nt, Artificial Sequence
  Description of Artificial Sequence: Synthetic oligonucleotide
cacauccaugagacaugag

SEQ ID NO: 566715 - RNA, 19 nt, Artificial Sequence
  Description of Artificial Sequence: Synthetic oligonucleotide
ccuuaaccgaaaaccuaac

SEQ ID NO: 566716 - RNA, 19 nt, Artificial Sequence
  Description of Artificial Sequence: Synthetic oligonucleotide
guggcuuaggaaacaucca

SEQ ID NO: 566717 - RNA, 19 nt, Artificial Sequence
  Description of Artificial Sequence: Synthetic oligonucleotide
gagcacucggucacuauua

SEQ ID NO: 566718 - RNA, 19 nt, Artificial Sequence
  Description of Artificial Sequence: Synthetic oligonucleotide
ggcuuaggaaacauccaca

SEQ ID NO: 566719 - RNA, 19 nt, Artificial Sequence
  Description of Artificial Sequence: Synthetic oligonucleotide
ccgaaaaccuaacuaaucu

SEQ ID NO: 566720 - RNA, 19 nt, Artificial Sequence
  Description of Artificial Sequence: Synthetic oligonucleotide
cuauagcuaacagucuacu

SEQ ID NO: 566721 - RNA, 19 nt, Artificial Sequence
  Description of Artificial Sequence: Synthetic oligonucleotide
gccuuaaccgaaaaccuaa

SEQ ID NO: 566722 - RNA, 19 nt, Artificial Sequence
  Description of Artificial Sequence: Synthetic oligonucleotide
augucccaaauuacauaga

SEQ ID NO: 566723 - RNA, 19 nt, Artificial Sequence
  Description of Artificial Sequence: Synthetic oligonucleotide
cauucguguucgaguagaa

SEQ ID NO: 566724 - RNA, 19 nt, Artificial Sequence
  Description of Artificial Sequence: Synthetic oligonucleotide
gguaagccuuaaccgaaaa

SEQ ID NO: 566725 - RNA, 19 nt, Artificial Sequence
  Description of Artificial Sequence: Synthetic oligonucleotide
guuaaucccacaagauaau

SEQ ID NO: 566726 - RNA, 19 nt, Artificial Sequence
  Description of Artificial Sequence: Synthetic oligonucleotide
ggcuccuauagcuaacagu

SEQ ID NO: 566727 - RNA, 19 nt, Artificial Sequence
  Description of Artificial Sequence: Synthetic oligonucleotide
gcauucguguucgaguaga

SEQ ID NO: 566728 - RNA, 19 nt, Artificial Sequence
  Description of Artificial Sequence: Synthetic oligonucleotide
agcuaacagucuacuugug

SEQ ID NO: 566729 - RNA, 19 nt, Artificial Sequence
  Description of Artificial Sequence: Synthetic oligonucleotide
gcuagcugaugcuaccuua

SEQ ID NO: 566730 - RNA, 19 nt, Artificial Sequence
  Description of Artificial Sequence: Synthetic oligonucleotide
cacguguaguugaacuucu

SEQ ID NO: 566731 - RNA, 19 nt, Artificial Sequence
  Description of Artificial Sequence: Synthetic oligonucleotide
cuuggguuguacuguacuu

SEQ ID NO: 566732 - RNA, 19 nt, Artificial Sequence
  Description of Artificial Sequence: Synthetic oligonucleotide
ccuauaauucugucacuaa

SEQ ID NO: 566733 - RNA, 19 nt, Artificial Sequence
  Description of Artificial Sequence: Synthetic oligonucleotide
guguauuuaggcggagaua

SEQ ID NO: 566734 - RNA, 19 nt, Artificial Sequence
  Description of Artificial Sequence: Synthetic oligonucleotide
uuccgcgguuuguaacaau

SEQ ID NO: 566735 - RNA, 19 nt, Artificial Sequence
  Description of Artificial Sequence: Synthetic oligonucleotide
agguaacugccaguucaaa

SEQ ID NO: 566736 - RNA, 19 nt, Artificial Sequence
  Description of Artificial Sequence: Synthetic oligonucleotide
ccagauaauaugcucuagu

SEQ ID NO: 566737 - RNA, 19 nt, Artificial Sequence
  Description of Artificial Sequence: Synthetic oligonucleotide
ccuuaaauaucaccuauuu

SEQ ID NO: 566738 - RNA, 19 nt, Artificial Sequence
  Description of Artificial Sequence: Synthetic oligonucleotide
gugcaauuagacacuuacu

SEQ ID NO: 566739 - RNA, 19 nt, Artificial Sequence
  Description of Artificial Sequence: Synthetic oligonucleotide
gcuucaucggaucccucaa

SEQ ID NO: 566740 - RNA, 19 nt, Artificial Sequence
  Description of Artificial Sequence: Synthetic oligonucleotide
cccacaagauaauuuaaau

SEQ ID NO: 566741 - RNA, 19 nt, Artificial Sequence
  Description of Artificial Sequence: Synthetic oligonucleotide
gcacucggucacuauuaca

SEQ ID NO: 566742 - RNA, 19 nt, Artificial Sequence
  Description of Artificial Sequence: Synthetic oligonucleotide
augcuagacgguacacuuu

SEQ ID NO: 566743 - RNA, 19 nt, Artificial Sequence
  Description of Artificial Sequence: Synthetic oligonucleotide
guguagaaauuaguauuuu

SEQ ID NO: 566744 - RNA, 19 nt, Artificial Sequence
  Description of Artificial Sequence: Synthetic oligonucleotide
gcucuaguucuggaugguc

SEQ ID NO: 566745 - RNA, 19 nt, Artificial Sequence
  Description of Artificial Sequence: Synthetic oligonucleotide
guguucgaguagaagucau

SEQ ID NO: 566746 - RNA, 19 nt, Artificial Sequence
  Description of Artificial Sequence: Synthetic oligonucleotide
aggcgugcacauaguguau

SEQ ID NO: 566747 - RNA, 19 nt, Artificial Sequence
  Description of Artificial Sequence: Synthetic oligonucleotide
ccggucuuucaugagcuca

SEQ ID NO: 566748 - RNA, 19 nt, Artificial Sequence
  Description of Artificial Sequence: Synthetic oligonucleotide
cuucaucggaucccucaau

SEQ ID NO: 566749 - RNA, 19 nt, Artificial Sequence
  Description of Artificial Sequence: Synthetic oligonucleotide
gcaggcucacguuggaaau

SEQ ID NO: 566750 - RNA, 19 nt, Artificial Sequence
  Description of Artificial Sequence: Synthetic oligonucleotide
ccuaacuaaucuguaggau

SEQ ID NO: 566751 - RNA, 19 nt, Artificial Sequence
  Description of Artificial Sequence: Synthetic oligonucleotide
cguguucgaguagaaguca

SEQ ID NO: 566752 - RNA, 19 nt, Artificial Sequence
  Description of Artificial Sequence: Synthetic oligonucleotide
gugaagggagugccucuuu

SEQ ID NO: 566753 - RNA, 19 nt, Artificial Sequence
  Description of Artificial Sequence: Synthetic oligonucleotide
cguuggaaaugcaaacgau

SEQ ID NO: 566754 - RNA, 19 nt, Artificial Sequence
  Description of Artificial Sequence: Synthetic oligonucleotide
ccgcgguuuguaacaaucu

SEQ ID NO: 566755 - RNA, 19 nt, Artificial Sequence
  Description of Artificial Sequence: Synthetic oligonucleotide
gcgugcacauaguguauuu

SEQ ID NO: 566756 - RNA, 19 nt, Artificial Sequence
  Description of Artificial Sequence: Synthetic oligonucleotide
ggucuaaaugccggucuuu

SEQ ID NO: 566757 - RNA, 19 nt, Artificial Sequence
  Description of Artificial Sequence: Synthetic oligonucleotide
ggcgugcacauaguguauu

SEQ ID NO: 566758 - RNA, 19 nt, Artificial Sequence
  Description of Artificial Sequence: Synthetic oligonucleotide
cgugcacauaguguauuua

SEQ ID NO: 566759 - RNA, 19 nt, Artificial Sequence
  Description of Artificial Sequence: Synthetic oligonucleotide
cggagauaugcuagacggu

SEQ ID NO: 566760 - RNA, 19 nt, Artificial Sequence
  Description of Artificial Sequence: Synthetic oligonucleotide
cggaucccucaaugucaaa

SEQ ID NO: 566761 - RNA, 19 nt, Artificial Sequence
  Description of Artificial Sequence: Synthetic oligonucleotide
aauaaagucauccaaagcg

SEQ ID NO: 566762 - RNA, 19 nt, Artificial Sequence
  Description of Artificial Sequence: Synthetic oligonucleotide
ucuuaaaacacacauagug

SEQ ID NO: 566763 - RNA, 19 nt, Artificial Sequence
  Description of Artificial Sequence: Synthetic oligonucleotide
uacgauuuaacuuauuugg

SEQ ID NO: 566764 - RNA, 19 nt, Artificial Sequence
  Description of Artificial Sequence: Synthetic oligonucleotide
aauaauggcaguuggaugu

SEQ ID NO: 566765 - RNA, 19 nt, Artificial Sequence
  Description of Artificial Sequence: Synthetic oligonucleotide
gaaauuuccaacuugggug

SEQ ID NO: 566766 - RNA, 19 nt, Artificial Sequence
  Description of Artificial Sequence: Synthetic oligonucleotide
aauagaaccagcuauuaau

SEQ ID NO: 566767 - RNA, 19 nt, Artificial Sequence
  Description of Artificial Sequence: Synthetic oligonucleotide
uacuauuaagaauuaaaag

SEQ ID NO: 566768 - RNA, 19 nt, Artificial Sequence
  Description of Artificial Sequence: Synthetic oligonucleotide
ugaucuggcaaaaucaucc

SEQ ID NO: 566769 - RNA, 19 nt, Artificial Sequence
  Description of Artificial Sequence: Synthetic oligonucleotide
aggcaaaucuuuuaagucc

SEQ ID NO: 566770 - RNA, 19 nt, Artificial Sequence
  Description of Artificial Sequence: Synthetic oligonucleotide
aaucccauagaagacaccg

SEQ ID NO: 566771 - RNA, 19 nt, Artificial Sequence
  Description of Artificial Sequence: Synthetic oligonucleotide
guuacuguaaagugcaugg

SEQ ID NO: 566772 - RNA, 19 nt, Artificial Sequence
  Description of Artificial Sequence: Synthetic oligonucleotide
uauuugguaggauugugcg

SEQ ID NO: 566773 - RNA, 19 nt, Artificial Sequence
  Description of Artificial Sequence: Synthetic oligonucleotide
ucauuaccgaaucacaaag

SEQ ID NO: 566774 - RNA, 19 nt, Artificial Sequence
  Description of Artificial Sequence: Synthetic oligonucleotide
aaauccuguguucaugccg

SEQ ID NO: 566775 - RNA, 19 nt, Artificial Sequence
  Description of Artificial Sequence: Synthetic oligonucleotide
acauguaaagaguuuguac

SEQ ID NO: 566776 - RNA, 19 nt, Artificial Sequence
  Description of Artificial Sequence: Synthetic oligonucleotide
ucaggaaauagaacaaucc

SEQ ID NO: 566777 - RNA, 19 nt, Artificial Sequence
  Description of Artificial Sequence: Synthetic oligonucleotide
uuaugauacggucacaccu

SEQ ID NO: 566778 - RNA, 19 nt, Artificial Sequence
  Description of Artificial Sequence: Synthetic oligonucleotide
gaagacaccguuauuaucc

SEQ ID NO: 566779 - RNA, 19 nt, Artificial Sequence
  Description of Artificial Sequence: Synthetic oligonucleotide
uucaugccgagcaacaagg

SEQ ID NO: 566780 - RNA, 19 nt, Artificial Sequence
  Description of Artificial Sequence: Synthetic oligonucleotide
ugaaccauacgauuuaacu

SEQ ID NO: 566781 - RNA, 19 nt, Artificial Sequence
  Description of Artificial Sequence: Synthetic oligonucleotide
aaauaauggcaguuggaug

SEQ ID NO: 566782 - RNA, 19 nt, Artificial Sequence
  Description of Artificial Sequence: Synthetic oligonucleotide
ugacauguguaagaaaugg

SEQ ID NO: 566783 - RNA, 19 nt, Artificial Sequence
  Description of Artificial Sequence: Synthetic oligonucleotide
aaccauacgauuuaacuua

SEQ ID NO: 566784 - RNA, 19 nt, Artificial Sequence
  Description of Artificial Sequence: Synthetic oligonucleotide
gaaucagggaaacaauucc

SEQ ID NO: 566785 - RNA, 19 nt, Artificial Sequence
  Description of Artificial Sequence: Synthetic oligonucleotide
auguaaagaguuuguacac

SEQ ID NO: 566786 - RNA, 19 nt, Artificial Sequence
  Description of Artificial Sequence: Synthetic oligonucleotide
uuugguaggauugugcgag

SEQ ID NO: 566787 - RNA, 19 nt, Artificial Sequence
  Description of Artificial Sequence: Synthetic oligonucleotide
uaccgaaucacaaagguua

SEQ ID NO: 566788 - RNA, 19 nt, Artificial Sequence
  Description of Artificial Sequence: Synthetic oligonucleotide
uuauuugguaggauugugc

SEQ ID NO: 566789 - RNA, 19 nt, Artificial Sequence
  Description of Artificial Sequence: Synthetic oligonucleotide
auacgauuuaacuuauuug

SEQ ID NO: 566790 - RNA, 19 nt, Artificial Sequence
  Description of Artificial Sequence: Synthetic oligonucleotide
uucgucauuagaaauugcu

SEQ ID NO: 566791 - RNA, 19 nt, Artificial Sequence
  Description of Artificial Sequence: Synthetic oligonucleotide
cauuccaucacuguguacc

SEQ ID NO: 566792 - RNA, 19 nt, Artificial Sequence
  Description of Artificial Sequence: Synthetic oligonucleotide
ucaggauaauguuuguugc

SEQ ID NO: 566793 - RNA, 19 nt, Artificial Sequence
  Description of Artificial Sequence: Synthetic oligonucleotide
cugaccauggccauagucc

SEQ ID NO: 566794 - RNA, 19 nt, Artificial Sequence
  Description of Artificial Sequence: Synthetic oligonucleotide
agaaauuuccaacuugggu

SEQ ID NO: 566795 - RNA, 19 nt, Artificial Sequence
  Description of Artificial Sequence: Synthetic oligonucleotide
aggauaauguuuguugccc

SEQ ID NO: 566796 - RNA, 19 nt, Artificial Sequence
  Description of Artificial Sequence: Synthetic oligonucleotide
auuaccgaaucacaaaggu

SEQ ID NO: 566797 - RNA, 19 nt, Artificial Sequence
  Description of Artificial Sequence: Synthetic oligonucleotide
uuuggucccaaacacauua

SEQ ID NO: 566798 - RNA, 19 nt, Artificial Sequence
  Description of Artificial Sequence: Synthetic oligonucleotide
uaugauacggucacaccug

SEQ ID NO: 566799 - RNA, 19 nt, Artificial Sequence
  Description of Artificial Sequence: Synthetic oligonucleotide
aaucacaaagguuacugua

SEQ ID NO: 566800 - RNA, 19 nt, Artificial Sequence
  Description of Artificial Sequence: Synthetic oligonucleotide
agcauguuaugauacgguc

SEQ ID NO: 566801 - RNA, 19 nt, Artificial Sequence
  Description of Artificial Sequence: Synthetic oligonucleotide
uccacauaaaguacuucag

SEQ ID NO: 566802 - RNA, 19 nt, Artificial Sequence
  Description of Artificial Sequence: Synthetic oligonucleotide
aaaccaucaauguucuuaa

SEQ ID NO: 566803 - RNA, 19 nt, Artificial Sequence
  Description of Artificial Sequence: Synthetic oligonucleotide
caaagguuacuguaaagug

SEQ ID NO: 566804 - RNA, 19 nt, Artificial Sequence
  Description of Artificial Sequence: Synthetic oligonucleotide
aacaagacacuaaaccauc

SEQ ID NO: 566805 - RNA, 19 nt, Artificial Sequence
  Description of Artificial Sequence: Synthetic oligonucleotide
uguauaacugucucauuac

SEQ ID NO: 566806 - RNA, 19 nt, Artificial Sequence
  Description of Artificial Sequence: Synthetic oligonucleotide
acaccguuauuauccaccc

SEQ ID NO: 566807 - RNA, 19 nt, Artificial Sequence
  Description of Artificial Sequence: Synthetic oligonucleotide
ugaaucagggaaacaauuc

SEQ ID NO: 566808 - RNA, 19 nt, Artificial Sequence
  Description of Artificial Sequence: Synthetic oligonucleotide
auaacugucucauuaccga

SEQ ID NO: 566809 - RNA, 19 nt, Artificial Sequence
  Description of Artificial Sequence: Synthetic oligonucleotide
cauguuaugauacggucac

SEQ ID NO: 566810 - RNA, 19 nt, Artificial Sequence
  Description of Artificial Sequence: Synthetic oligonucleotide
uuacaugacuugcaggaca

SEQ ID NO: 566811 - RNA, 19 nt, Artificial Sequence
  Description of Artificial Sequence: Synthetic oligonucleotide
uaaaccaucaauguucuua

SEQ ID NO: 566812 - RNA, 19 nt, Artificial Sequence
  Description of Artificial Sequence: Synthetic oligonucleotide
uguggaccagcacugauac

SEQ ID NO: 566813 - RNA, 19 nt, Artificial Sequence
  Description of Artificial Sequence: Synthetic oligonucleotide
gauugugcgagacauuuuc

SEQ ID NO: 566814 - RNA, 19 nt, Artificial Sequence
  Description of Artificial Sequence: Synthetic oligonucleotide
aggacaaaaucccauagaa

SEQ ID NO: 566815 - RNA, 19 nt, Artificial Sequence
  Description of Artificial Sequence: Synthetic oligonucleotide
uccaaaguuuguauacuug

SEQ ID NO: 566816 - RNA, 19 nt, Artificial Sequence
  Description of Artificial Sequence: Synthetic oligonucleotide
agaacaauccacuuucgau

SEQ ID NO: 566817 - RNA, 19 nt, Artificial Sequence
  Description of Artificial Sequence: Synthetic oligonucleotide
acaaagguuacuguaaagu

SEQ ID NO: 566818 - RNA, 19 nt, Artificial Sequence
  Description of Artificial Sequence: Synthetic oligonucleotide
aaauagaaccagcuauuaa

SEQ ID NO: 566819 - RNA, 19 nt, Artificial Sequence
  Description of Artificial Sequence: Synthetic oligonucleotide
uuuaacuuauuugguagga

SEQ ID NO: 566820 - RNA, 19 nt, Artificial Sequence
  Description of Artificial Sequence: Synthetic oligonucleotide
ucucauuaccgaaucacaa

SEQ ID NO: 566821 - RNA, 19 nt, Artificial Sequence
  Description of Artificial Sequence: Synthetic oligonucleotide
uguuaugauacggucacac

SEQ ID NO: 566822 - RNA, 19 nt, Artificial Sequence
  Description of Artificial Sequence: Synthetic oligonucleotide
aguuuguacaccacagucg

SEQ ID NO: 566823 - RNA, 19 nt, Artificial Sequence
  Description of Artificial Sequence: Synthetic oligonucleotide
agugacauguguaagaaau

SEQ ID NO: 566824 - RNA, 19 nt, Artificial Sequence
  Description of Artificial Sequence: Synthetic oligonucleotide
cugucuuauaaagaagucc

SEQ ID NO: 566825 - RNA, 19 nt, Artificial Sequence
  Description of Artificial Sequence: Synthetic oligonucleotide
cauuaccgaaucacaaagg

SEQ ID NO: 566826 - RNA, 19 nt, Artificial Sequence
  Description of Artificial Sequence: Synthetic oligonucleotide
agacacuaaaccaucaaug

SEQ ID NO: 566827 - RNA, 19 nt, Artificial Sequence
  Description of Artificial Sequence: Synthetic oligonucleotide
ugguaagacuggaggaagg

SEQ ID NO: 566828 - RNA, 19 nt, Artificial Sequence
  Description of Artificial Sequence: Synthetic oligonucleotide
aacaauuccaaaguuugua

SEQ ID NO: 566829 - RNA, 19 nt, Artificial Sequence
  Description of Artificial Sequence: Synthetic oligonucleotide
augauacggucacaccugc

SEQ ID NO: 566830 - RNA, 19 nt, Artificial Sequence
  Description of Artificial Sequence: Synthetic oligonucleotide
auagaagacaccguuauua

SEQ ID NO: 566831 - RNA, 19 nt, Artificial Sequence
  Description of Artificial Sequence: Synthetic oligonucleotide
uucauauuaagugggaauu

SEQ ID NO: 566832 - RNA, 19 nt, Artificial Sequence
  Description of Artificial Sequence: Synthetic oligonucleotide
agaaagcucaacaagcuga

SEQ ID NO: 566833 - RNA, 19 nt, Artificial Sequence
  Description of Artificial Sequence: Synthetic oligonucleotide
uacuuugcaacuauacauu

SEQ ID NO: 566834 - RNA, 19 nt, Artificial Sequence
  Description of Artificial Sequence: Synthetic oligonucleotide
acauguguaagaaauggca

SEQ ID NO: 566835 - RNA, 19 nt, Artificial Sequence
  Description of Artificial Sequence: Synthetic oligonucleotide
gacaccguuauuauccacc

SEQ ID NO: 566836 - RNA, 19 nt, Artificial Sequence
  Description of Artificial Sequence: Synthetic oligonucleotide
ugguauucacaauauuuaa

SEQ ID NO: 566837 - RNA, 19 nt, Artificial Sequence
  Description of Artificial Sequence: Synthetic oligonucleotide
aaucagggaaacaauucca

SEQ ID NO: 566838 - RNA, 19 nt, Artificial Sequence
  Description of Artificial Sequence: Synthetic oligonucleotide
uagaacaauccacuuucga

SEQ ID NO: 566839 - RNA, 19 nt, Artificial Sequence
  Description of Artificial Sequence: Synthetic oligonucleotide
agccggaugguuuucucac

SEQ ID NO: 566840 - RNA, 19 nt, Artificial Sequence
  Description of Artificial Sequence: Synthetic oligonucleotide
aagcguuugcauacuuugc

SEQ ID NO: 566841 - RNA, 19 nt, Artificial Sequence
  Description of Artificial Sequence: Synthetic oligonucleotide
gauacggucacaccugcuc

SEQ ID NO: 566842 - RNA, 19 nt, Artificial Sequence
  Description of Artificial Sequence: Synthetic oligonucleotide
agaccaaaagaggauuugg

SEQ ID NO: 566843 - RNA, 19 nt, Artificial Sequence
  Description of Artificial Sequence: Synthetic oligonucleotide
gucacaccugcucauacag

SEQ ID NO: 566844 - RNA, 19 nt, Artificial Sequence
  Description of Artificial Sequence: Synthetic oligonucleotide
uguaacuacugagggcugg

SEQ ID NO: 566845 - RNA, 19 nt, Artificial Sequence
  Description of Artificial Sequence: Synthetic oligonucleotide
agauccacgugugaccagc

SEQ ID NO: 566846 - RNA, 19 nt, Artificial Sequence
  Description of Artificial Sequence: Synthetic oligonucleotide
aaccuuggcaaagugacau

SEQ ID NO: 566847 - RNA, 19 nt, Artificial Sequence
  Description of Artificial Sequence: Synthetic oligonucleotide
gaaggcuuacaugacuugc

SEQ ID NO: 566848 - RNA, 19 nt, Artificial Sequence
  Description of Artificial Sequence: Synthetic oligonucleotide
uucaggguaugccaggcuc

SEQ ID NO: 566849 - RNA, 19 nt, Artificial Sequence
  Description of Artificial Sequence: Synthetic oligonucleotide
caggauaauguuuguugcc

SEQ ID NO: 566850 - RNA, 19 nt, Artificial Sequence
  Description of Artificial Sequence: Synthetic oligonucleotide
agcguuugcauacuuugca

SEQ ID NO: 566851 - RNA, 19 nt, Artificial Sequence
  Description of Artificial Sequence: Synthetic oligonucleotide
uuucugaaaaggugaucug

SEQ ID NO: 566852 - RNA, 19 nt, Artificial Sequence
  Description of Artificial Sequence: Synthetic oligonucleotide
accguuauuauccacccuu

SEQ ID NO: 566853 - RNA, 19 nt, Artificial Sequence
  Description of Artificial Sequence: Synthetic oligonucleotide
auaaagucauccaaagcgu

SEQ ID NO: 566854 - RNA, 19 nt, Artificial Sequence
  Description of Artificial Sequence: Synthetic oligonucleotide
gguagacugaaccauacga

SEQ ID NO: 566855 - RNA, 19 nt, Artificial Sequence
  Description of Artificial Sequence: Synthetic oligonucleotide
ucaugccgagcaacaaggg

SEQ ID NO: 566856 - RNA, 19 nt, Artificial Sequence
  Description of Artificial Sequence: Synthetic oligonucleotide
uacaugacuugcaggacaa

SEQ ID NO: 566857 - RNA, 19 nt, Artificial Sequence
  Description of Artificial Sequence: Synthetic oligonucleotide
cacgguaggaucuucccug

SEQ ID NO: 566858 - RNA, 19 nt, Artificial Sequence
  Description of Artificial Sequence: Synthetic oligonucleotide
guucaugccgagcaacaag

SEQ ID NO: 566859 - RNA, 19 nt, Artificial Sequence
  Description of Artificial Sequence: Synthetic oligonucleotide
aagacaccguuauuaucca

SEQ ID NO: 566860 - RNA, 19 nt, Artificial Sequence
  Description of Artificial Sequence: Synthetic oligonucleotide
gcuagcaugacugugacuc

SEQ ID NO: 566861 - RNA, 19 nt, Artificial Sequence
  Description of Artificial Sequence: Synthetic oligonucleotide
acugcuucgucauuagaaa

SEQ ID NO: 566862 - RNA, 19 nt, Artificial Sequence
  Description of Artificial Sequence: Synthetic oligonucleotide
ucgucauuagaaauugcuu

SEQ ID NO: 566863 - RNA, 19 nt, Artificial Sequence
  Description of Artificial Sequence: Synthetic oligonucleotide
aaauuucugaaaaggugau

SEQ ID NO: 566864 - RNA, 19 nt, Artificial Sequence
  Description of Artificial Sequence: Synthetic oligonucleotide
gcuuacaugacuugcagga

SEQ ID NO: 566865 - RNA, 19 nt, Artificial Sequence
  Description of Artificial Sequence: Synthetic oligonucleotide
uuauccacccuuuguggac

SEQ ID NO: 566866 - RNA, 19 nt, Artificial Sequence
  Description of Artificial Sequence: Synthetic oligonucleotide
agaucacaaagaaagcuca

SEQ ID NO: 566867 - RNA, 19 nt, Artificial Sequence
  Description of Artificial Sequence: Synthetic oligonucleotide
uagacugaaccauacgauu

SEQ ID NO: 566868 - RNA, 19 nt, Artificial Sequence
  Description of Artificial Sequence: Synthetic oligonucleotide
ugcauggacuccuuacaug

SEQ ID NO: 566869 - RNA, 19 nt, Artificial Sequence
  Description of Artificial Sequence: Synthetic oligonucleotide
ugcuucgucauuagaaauu

SEQ ID NO: 566870 - RNA, 19 nt, Artificial Sequence
  Description of Artificial Sequence: Synthetic oligonucleotide
uaaagucauccaaagcguu

SEQ ID NO: 566871 - RNA, 19 nt, Artificial Sequence
  Description of Artificial Sequence: Synthetic oligonucleotide
uccacgugugaccagcccu

SEQ ID NO: 566872 - RNA, 19 nt, Artificial Sequence
  Description of Artificial Sequence: Synthetic oligonucleotide
acacauuagucucucccca

SEQ ID NO: 566873 - RNA, 19 nt, Artificial Sequence
  Description of Artificial Sequence: Synthetic oligonucleotide
aggcuuacaugacuugcag

SEQ ID NO: 566874 - RNA, 19 nt, Artificial Sequence
  Description of Artificial Sequence: Synthetic oligonucleotide
ucguguucaacaguuuaca

SEQ ID NO: 566875 - RNA, 19 nt, Artificial Sequence
  Description of Artificial Sequence: Synthetic oligonucleotide
agcaccaaccagugacggc

SEQ ID NO: 566876 - RNA, 19 nt, Artificial Sequence
  Description of Artificial Sequence: Synthetic oligonucleotide
cacaaagguuacuguaaag

SEQ ID NO: 566877 - RNA, 19 nt, Artificial Sequence
  Description of Artificial Sequence: Synthetic oligonucleotide
gagcuccaggcauaagccg

SEQ ID NO: 566878 - RNA, 19 nt, Artificial Sequence
  Description of Artificial Sequence: Synthetic oligonucleotide
acaaccggcccuuuguccu

SEQ ID NO: 566879 - RNA, 19 nt, Artificial Sequence
  Description of Artificial Sequence: Synthetic oligonucleotide
uuaccgaaucacaaagguu

SEQ ID NO: 566880 - RNA, 19 nt, Artificial Sequence
  Description of Artificial Sequence: Synthetic oligonucleotide
auuugguaggauugugcga

SEQ ID NO: 566881 - RNA, 19 nt, Artificial Sequence
  Description of Artificial Sequence: Synthetic oligonucleotide
uguuggucacgguaggauc

SEQ ID NO: 566882 - RNA, 19 nt, Artificial Sequence
  Description of Artificial Sequence: Synthetic oligonucleotide
auaagccgcagcagcaggc

SEQ ID NO: 566883 - RNA, 19 nt, Artificial Sequence
  Description of Artificial Sequence: Synthetic oligonucleotide
cauguguaagaaauggcaa

SEQ ID NO: 566884 - RNA, 19 nt, Artificial Sequence
  Description of Artificial Sequence: Synthetic oligonucleotide
caugccgagcaacaagggc

SEQ ID NO: 566885 - RNA, 19 nt, Artificial Sequence
  Description of Artificial Sequence: Synthetic oligonucleotide
ucagaccaaaagaggauuu

SEQ ID NO: 566886 - RNA, 19 nt, Artificial Sequence
  Description of Artificial Sequence: Synthetic oligonucleotide
aaauccucagauggaauuu

SEQ ID NO: 566887 - RNA, 19 nt, Artificial Sequence
  Description of Artificial Sequence: Synthetic oligonucleotide
acgugugcuagcaugacug

SEQ ID NO: 566888 - RNA, 19 nt, Artificial Sequence
  Description of Artificial Sequence: Synthetic oligonucleotide
gauaauguuuguugcccaa

SEQ ID NO: 566889 - RNA, 19 nt, Artificial Sequence
  Description of Artificial Sequence: Synthetic oligonucleotide
cuuauuugguaggauugug

SEQ ID NO: 566890 - RNA, 19 nt, Artificial Sequence
  Description of Artificial Sequence: Synthetic oligonucleotide
cauaagccgcagcagcagg

SEQ ID NO: 566891 - RNA, 19 nt, Artificial Sequence
  Description of Artificial Sequence: Synthetic oligonucleotide
uacuucagaggggaaauaa

SEQ ID NO: 566892 - RNA, 19 nt, Artificial Sequence
  Description of Artificial Sequence: Synthetic oligonucleotide
ugacaucagcauguuauga

SEQ ID NO: 566893 - RNA, 19 nt, Artificial Sequence
  Description of Artificial Sequence: Synthetic oligonucleotide
guuauuauccacccuuugu

SEQ ID NO: 566894 - RNA, 19 nt, Artificial Sequence
  Description of Artificial Sequence: Synthetic oligonucleotide
gaaccauacgauuuaacuu

SEQ ID NO: 566895 - RNA, 19 nt, Artificial Sequence
  Description of Artificial Sequence: Synthetic oligonucleotide
uugugcgagacauuuucau

SEQ ID NO: 566896 - RNA, 19 nt, Artificial Sequence
  Description of Artificial Sequence: Synthetic oligonucleotide
ugcgagacauuuucauaca

SEQ ID NO: 566897 - RNA, 19 nt, Artificial Sequence
  Description of Artificial Sequence: Synthetic oligonucleotide
uggucccaaacacauuagu

SEQ ID NO: 566898 - RNA, 19 nt, Artificial Sequence
  Description of Artificial Sequence: Synthetic oligonucleotide
uuaacuuauuugguaggau

SEQ ID NO: 566899 - RNA, 19 nt, Artificial Sequence
  Description of Artificial Sequence: Synthetic oligonucleotide
ucacgguaggaucuucccu

SEQ ID NO: 566900 - RNA, 19 nt, Artificial Sequence
  Description of Artificial Sequence: Synthetic oligonucleotide
uaacugucucauuaccgaa

SEQ ID NO: 566901 - RNA, 19 nt, Artificial Sequence
  Description of Artificial Sequence: Synthetic oligonucleotide
aaggcuuacaugacuugca

SEQ ID NO: 566902 - RNA, 19 nt, Artificial Sequence
  Description of Artificial Sequence: Synthetic oligonucleotide
aaaccagauccacguguga

SEQ ID NO: 566903 - RNA, 19 nt, Artificial Sequence
  Description of Artificial Sequence: Synthetic oligonucleotide
aggugaucuggcaaaauca

SEQ ID NO: 566904 - RNA, 19 nt, Artificial Sequence
  Description of Artificial Sequence: Synthetic oligonucleotide
auacggucacaccugcuca

SEQ ID NO: 566905 - RNA, 19 nt, Artificial Sequence
  Description of Artificial Sequence: Synthetic oligonucleotide
ccuaaauccaggaaaagaa

SEQ ID NO: 566906 - RNA, 19 nt, Artificial Sequence
  Description of Artificial Sequence: Synthetic oligonucleotide
gaucuggcaaaaucaucca

SEQ ID NO: 566907 - RNA, 19 nt, Artificial Sequence
  Description of Artificial Sequence: Synthetic oligonucleotide
ccucuaaucugcuuucagg

SEQ ID NO: 566908 - RNA, 19 nt, Artificial Sequence
  Description of Artificial Sequence: Synthetic oligonucleotide
auccacgugugaccagccc

SEQ ID NO: 566909 - RNA, 19 nt, Artificial Sequence
  Description of Artificial Sequence: Synthetic oligonucleotide
agacaccguuauuauccac

SEQ ID NO: 566910 - RNA, 19 nt, Artificial Sequence
  Description of Artificial Sequence: Synthetic oligonucleotide
auagaacaauccacuuucg

SEQ ID NO: 566911 - RNA, 19 nt, Artificial Sequence
  Description of Artificial Sequence: Synthetic oligonucleotide
agucguguucaacaguuua

SEQ ID NO: 566912 - RNA, 19 nt, Artificial Sequence
  Description of Artificial Sequence: Synthetic oligonucleotide
guugcccaaaccuuggcaa

SEQ ID NO: 566913 - RNA, 19 nt, Artificial Sequence
  Description of Artificial Sequence: Synthetic oligonucleotide
augccgagcaacaagggca

SEQ ID NO: 566914 - RNA, 19 nt, Artificial Sequence
  Description of Artificial Sequence: Synthetic oligonucleotide
cuugggugguuuugguccc

SEQ ID NO: 566915 - RNA, 19 nt, Artificial Sequence
  Description of Artificial Sequence: Synthetic oligonucleotide
auggcaguuggauguauaa

SEQ ID NO: 566916 - RNA, 19 nt, Artificial Sequence
  Description of Artificial Sequence: Synthetic oligonucleotide
agauuguaucuuucaccug

SEQ ID NO: 566917 - RNA, 19 nt, Artificial Sequence
  Description of Artificial Sequence: Synthetic oligonucleotide
acacauagugacaugcaga

SEQ ID NO: 566918 - RNA, 19 nt, Artificial Sequence
  Description of Artificial Sequence: Synthetic oligonucleotide
cuucgucauuagaaauugc

SEQ ID NO: 566919 - RNA, 19 nt, Artificial Sequence
  Description of Artificial Sequence: Synthetic oligonucleotide
uuacuguaaagugcaugga

SEQ ID NO: 566920 - RNA, 19 nt, Artificial Sequence
  Description of Artificial Sequence: Synthetic oligonucleotide
uagcaugacugugacucag

SEQ ID NO: 566921 - RNA, 19 nt, Artificial Sequence
  Description of Artificial Sequence: Synthetic oligonucleotide
uauccacccuuuguggacc

SEQ ID NO: 566922 - RNA, 19 nt, Artificial Sequence
  Description of Artificial Sequence: Synthetic oligonucleotide
caucaugacgugugcuagc

SEQ ID NO: 566923 - RNA, 19 nt, Artificial Sequence
  Description of Artificial Sequence: Synthetic oligonucleotide
gucacgguaggaucuuccc

SEQ ID NO: 566924 - RNA, 19 nt, Artificial Sequence
  Description of Artificial Sequence: Synthetic oligonucleotide
uggacuccuuacauguaaa

SEQ ID NO: 566925 - RNA, 19 nt, Artificial Sequence
  Description of Artificial Sequence: Synthetic oligonucleotide
accgaaucacaaagguuac

SEQ ID NO: 566926 - RNA, 19 nt, Artificial Sequence
  Description of Artificial Sequence: Synthetic oligonucleotide
acgauuuaacuuauuuggu

SEQ ID NO: 566927 - RNA, 19 nt, Artificial Sequence
  Description of Artificial Sequence: Synthetic oligonucleotide
cacaaccggcccuuugucc

SEQ ID NO: 566928 - RNA, 19 nt, Artificial Sequence
  Description of Artificial Sequence: Synthetic oligonucleotide
cuugcaggacaaaauccca

SEQ ID NO: 566929 - RNA, 19 nt, Artificial Sequence
  Description of Artificial Sequence: Synthetic oligonucleotide
ggcuuacaugacuugcagg

SEQ ID NO: 566930 - RNA, 19 nt, Artificial Sequence
  Description of Artificial Sequence: Synthetic oligonucleotide
cucauuaccgaaucacaaa

SEQ ID NO: 566931 - RNA, 19 nt, Artificial Sequence
  Description of Artificial Sequence: Synthetic oligonucleotide
auaugauccaucagccaca

SEQ ID NO: 566932 - RNA, 19 nt, Artificial Sequence
  Description of Artificial Sequence: Synthetic oligonucleotide
gagguagacugaaccauac

SEQ ID NO: 566933 - RNA, 19 nt, Artificial Sequence
  Description of Artificial Sequence: Synthetic oligonucleotide
ggacaaaaucccauagaag

SEQ ID NO: 566934 - RNA, 19 nt, Artificial Sequence
  Description of Artificial Sequence: Synthetic oligonucleotide
aucaugacgugugcuagca

SEQ ID NO: 566935 - RNA, 19 nt, Artificial Sequence
  Description of Artificial Sequence: Synthetic oligonucleotide
cuaaucugcuuucaggccu

SEQ ID NO: 566936 - RNA, 19 nt, Artificial Sequence
  Description of Artificial Sequence: Synthetic oligonucleotide
cauacgauuuaacuuauuu

SEQ ID NO: 566937 - RNA, 19 nt, Artificial Sequence
  Description of Artificial Sequence: Synthetic oligonucleotide
gagcccacuuuguaacuac

SEQ ID NO: 566938 - RNA, 19 nt, Artificial Sequence
  Description of Artificial Sequence: Synthetic oligonucleotide
cuuacaugacuugcaggac

SEQ ID NO: 566939 - RNA, 19 nt, Artificial Sequence
  Description of Artificial Sequence: Synthetic oligonucleotide
augaaucagggaaacaauu

SEQ ID NO: 566940 - RNA, 19 nt, Artificial Sequence
  Description of Artificial Sequence: Synthetic oligonucleotide
gcagccuaaauccaggaaa

SEQ ID NO: 566941 - RNA, 19 nt, Artificial Sequence
  Description of Artificial Sequence: Synthetic oligonucleotide
gugacauguguaagaaaug

SEQ ID NO: 566942 - RNA, 19 nt, Artificial Sequence
  Description of Artificial Sequence: Synthetic oligonucleotide
gguuacuguaaagugcaug

SEQ ID NO: 566943 - RNA, 19 nt, Artificial Sequence
  Description of Artificial Sequence: Synthetic oligonucleotide
cagcugacuccucagacca

SEQ ID NO: 566944 - RNA, 19 nt, Artificial Sequence
  Description of Artificial Sequence: Synthetic oligonucleotide
acagucguguucaacaguu

SEQ ID NO: 566945 - RNA, 19 nt, Artificial Sequence
  Description of Artificial Sequence: Synthetic oligonucleotide
gucguguucaacaguuuac

SEQ ID NO: 566946 - RNA, 19 nt, Artificial Sequence
  Description of Artificial Sequence: Synthetic oligonucleotide
gcuucgucauuagaaauug

SEQ ID NO: 566947 - RNA, 19 nt, Artificial Sequence
  Description of Artificial Sequence: Synthetic oligonucleotide
caaaagugaaugacaguua

SEQ ID NO: 566948 - RNA, 19 nt, Artificial Sequence
  Description of Artificial Sequence: Synthetic oligonucleotide
gcaaguuauuuucuuggca

SEQ ID NO: 566949 - RNA, 19 nt, Artificial Sequence
  Description of Artificial Sequence: Synthetic oligonucleotide
acauagugacaugcagauc

SEQ ID NO: 566950 - RNA, 19 nt, Artificial Sequence
  Description of Artificial Sequence: Synthetic oligonucleotide
cagaccaaaagaggauuug

SEQ ID NO: 566951 - RNA, 19 nt, Artificial Sequence
  Description of Artificial Sequence: Synthetic oligonucleotide
aaaggugaucuggcaaaau

SEQ ID NO: 566952 - RNA, 19 nt, Artificial Sequence
  Description of Artificial Sequence: Synthetic oligonucleotide
aucagggaaacaauuccaa

SEQ ID NO: 566953 - RNA, 19 nt, Artificial Sequence
  Description of Artificial Sequence: Synthetic oligonucleotide
ugauacggucacaccugcu

SEQ ID NO: 566954 - RNA, 19 nt, Artificial Sequence
  Description of Artificial Sequence: Synthetic oligonucleotide
caauguacacacaucuccu

SEQ ID NO: 566955 - RNA, 19 nt, Artificial Sequence
  Description of Artificial Sequence: Synthetic oligonucleotide
caggacaaaaucccauaga

SEQ ID NO: 566956 - RNA, 19 nt, Artificial Sequence
  Description of Artificial Sequence: Synthetic oligonucleotide
uaugauccaucagccacau

SEQ ID NO: 566957 - RNA, 19 nt, Artificial Sequence
  Description of Artificial Sequence: Synthetic oligonucleotide
gguauucacaauauuuaaa

SEQ ID NO: 566958 - RNA, 19 nt, Artificial Sequence
  Description of Artificial Sequence: Synthetic oligonucleotide
gucucauuaccgaaucaca

SEQ ID NO: 566959 - RNA, 19 nt, Artificial Sequence
  Description of Artificial Sequence: Synthetic oligonucleotide
guaggauugugcgagacau

SEQ ID NO: 566960 - RNA, 19 nt, Artificial Sequence
  Description of Artificial Sequence: Synthetic oligonucleotide
accuuggcaaagugacaug

SEQ ID NO: 566961 - RNA, 19 nt, Artificial Sequence
  Description of Artificial Sequence: Synthetic oligonucleotide
aauggcaguuggauguaua

SEQ ID NO: 566962 - RNA, 19 nt, Artificial Sequence
  Description of Artificial Sequence: Synthetic oligonucleotide
gagccggaugguuuucuca

SEQ ID NO: 566963 - RNA, 19 nt, Artificial Sequence
  Description of Artificial Sequence: Synthetic oligonucleotide
ggauaauguuuguugccca

SEQ ID NO: 566964 - RNA, 19 nt, Artificial Sequence
  Description of Artificial Sequence: Synthetic oligonucleotide
uucaccugaccauggccau

SEQ ID NO: 566965 - RNA, 19 nt, Artificial Sequence
  Description of Artificial Sequence: Synthetic oligonucleotide
augacgugugcuagcauga

SEQ ID NO: 566966 - RNA, 19 nt, Artificial Sequence
  Description of Artificial Sequence: Synthetic oligonucleotide
accaaccagugacggcuuc

SEQ ID NO: 566967 - RNA, 19 nt, Artificial Sequence
  Description of Artificial Sequence: Synthetic oligonucleotide
ucuaugacaucagcauguu

SEQ ID NO: 566968 - RNA, 19 nt, Artificial Sequence
  Description of Artificial Sequence: Synthetic oligonucleotide
auugugcgagacauuuuca

SEQ ID NO: 566969 - RNA, 19 nt, Artificial Sequence
  Description of Artificial Sequence: Synthetic oligonucleotide
ugguaggauugugcgagac

SEQ ID NO: 566970 - RNA, 19 nt, Artificial Sequence
  Description of Artificial Sequence: Synthetic oligonucleotide
guccuguaggcacaucauc

SEQ ID NO: 566971 - RNA, 19 nt, Artificial Sequence
  Description of Artificial Sequence: Synthetic oligonucleotide
agggaaauccuguguucau

SEQ ID NO: 566972 - RNA, 19 nt, Artificial Sequence
  Description of Artificial Sequence: Synthetic oligonucleotide
gugcuagcaugacugugac

SEQ ID NO: 566973 - RNA, 19 nt, Artificial Sequence
  Description of Artificial Sequence: Synthetic oligonucleotide
gacuggaggaaggcaaauc

SEQ ID NO: 566974 - RNA, 19 nt, Artificial Sequence
  Description of Artificial Sequence: Synthetic oligonucleotide
accacaugguaagacugga

SEQ ID NO: 566975 - RNA, 19 nt, Artificial Sequence
  Description of Artificial Sequence: Synthetic oligonucleotide
acgguaggaucuucccugu

SEQ ID NO: 566976 - RNA, 19 nt, Artificial Sequence
  Description of Artificial Sequence: Synthetic oligonucleotide
aaguuuucauuggggucaa

SEQ ID NO: 566977 - RNA, 19 nt, Artificial Sequence
  Description of Artificial Sequence: Synthetic oligonucleotide
cagaacccgcagcauacuc

SEQ ID NO: 566978 - RNA, 19 nt, Artificial Sequence
  Description of Artificial Sequence: Synthetic oligonucleotide
caggcauaagccgcagcag

SEQ ID NO: 566979 - RNA, 19 nt, Artificial Sequence
  Description of Artificial Sequence: Synthetic oligonucleotide
gccuaaauccaggaaaaga

SEQ ID NO: 566980 - RNA, 19 nt, Artificial Sequence
  Description of Artificial Sequence: Synthetic oligonucleotide
gugaucuggcaaaaucauc

SEQ ID NO: 566981 - RNA, 19 nt, Artificial Sequence
  Description of Artificial Sequence: Synthetic oligonucleotide
ugcuagcaugacugugacu

SEQ ID NO: 566982 - RNA, 19 nt, Artificial Sequence
  Description of Artificial Sequence: Synthetic oligonucleotide
ggauguauaacugucucau

SEQ ID NO: 566983 - RNA, 19 nt, Artificial Sequence
  Description of Artificial Sequence: Synthetic oligonucleotide
gugugcuagcaugacugug

SEQ ID NO: 566984 - RNA, 19 nt, Artificial Sequence
  Description of Artificial Sequence: Synthetic oligonucleotide
ucagaacccgcagcauacu

SEQ ID NO: 566985 - RNA, 19 nt, Artificial Sequence
  Description of Artificial Sequence: Synthetic oligonucleotide
gguaugccaggcuccuuug

SEQ ID NO: 566986 - RNA, 19 nt, Artificial Sequence
  Description of Artificial Sequence: Synthetic oligonucleotide
cuagcaugacugugacuca

SEQ ID NO: 566987 - RNA, 19 nt, Artificial Sequence
  Description of Artificial Sequence: Synthetic oligonucleotide
gguaggauugugcgagaca

SEQ ID NO: 566988 - RNA, 19 nt, Artificial Sequence
  Description of Artificial Sequence: Synthetic oligonucleotide
guuggucacgguaggaucu

SEQ ID NO: 566989 - RNA, 19 nt, Artificial Sequence
  Description of Artificial Sequence: Synthetic oligonucleotide
cagagcuccucugauccuc

SEQ ID NO: 566990 - RNA, 19 nt, Artificial Sequence
  Description of Artificial Sequence: Synthetic oligonucleotide
cauuggaugcugagcucca

SEQ ID NO: 566991 - RNA, 19 nt, Artificial Sequence
  Description of Artificial Sequence: Synthetic oligonucleotide
ugacgugugcuagcaugac

SEQ ID NO: 566992 - RNA, 19 nt, Artificial Sequence
  Description of Artificial Sequence: Synthetic oligonucleotide
gacgugugcuagcaugacu

SEQ ID NO: 566993 - RNA, 19 nt, Artificial Sequence
  Description of Artificial Sequence: Synthetic oligonucleotide
augauccaucagccacauc

SEQ ID NO: 566994 - RNA, 19 nt, Artificial Sequence
  Description of Artificial Sequence: Synthetic oligonucleotide
accauacgauuuaacuuau

SEQ ID NO: 566995 - RNA, 19 nt, Artificial Sequence
  Description of Artificial Sequence: Synthetic oligonucleotide
ccaggcauaagccgcagca

SEQ ID NO: 566996 - RNA, 19 nt, Artificial Sequence
  Description of Artificial Sequence: Synthetic oligonucleotide
cagcauguuaugauacggu

SEQ ID NO: 566997 - RNA, 19 nt, Artificial Sequence
  Description of Artificial Sequence: Synthetic oligonucleotide
ccaucaugacgugugcuag

SEQ ID NO: 566998 - RNA, 19 nt, Artificial Sequence
  Description of Artificial Sequence: Synthetic oligonucleotide
agaaagccccagauuguau

SEQ ID NO: 566999 - RNA, 19 nt, Artificial Sequence
  Description of Artificial Sequence: Synthetic oligonucleotide
ggucacgguaggaucuucc

SEQ ID NO: 567000 - RNA, 19 nt, Artificial Sequence
  Description of Artificial Sequence: Synthetic oligonucleotide
aucccauagaagacaccgu

SEQ ID NO: 567001 - RNA, 19 nt, Artificial Sequence
  Description of Artificial Sequence: Synthetic oligonucleotide
ccccuuacuauuaagaauu

SEQ ID NO: 567002 - RNA, 19 nt, Artificial Sequence
  Description of Artificial Sequence: Synthetic oligonucleotide
gcaggcgcugagcaacucc

SEQ ID NO: 567003 - RNA, 19 nt, Artificial Sequence
  Description of Artificial Sequence: Synthetic oligonucleotide
agugacggcuucaggguau

SEQ ID NO: 567004 - RNA, 19 nt, Artificial Sequence
  Description of Artificial Sequence: Synthetic oligonucleotide
caucaauguucuuaauguu

SEQ ID NO: 567005 - RNA, 19 nt, Artificial Sequence
  Description of Artificial Sequence: Synthetic oligonucleotide
cccugucuuauaaagaagu

SEQ ID NO: 567006 - RNA, 19 nt, Artificial Sequence
  Description of Artificial Sequence: Synthetic oligonucleotide
guaggaucuucccugucuu

SEQ ID NO: 567007 - RNA, 19 nt, Artificial Sequence
  Description of Artificial Sequence: Synthetic oligonucleotide
agcaugacugugacucaga

SEQ ID NO: 567008 - RNA, 19 nt, Artificial Sequence
  Description of Artificial Sequence: Synthetic oligonucleotide
caaccggcccuuuguccug

SEQ ID NO: 567009 - RNA, 19 nt, Artificial Sequence
  Description of Artificial Sequence: Synthetic oligonucleotide
cgugugaccagcccuuuac

SEQ ID NO: 567010 - RNA, 19 nt, Artificial Sequence
  Description of Artificial Sequence: Synthetic oligonucleotide
ccgcagcauacucucagag

SEQ ID NO: 567011 - RNA, 19 nt, Artificial Sequence
  Description of Artificial Sequence: Synthetic oligonucleotide
agacuggaggaaggcaaau

SEQ ID NO: 567012 - RNA, 19 nt, Artificial Sequence
  Description of Artificial Sequence: Synthetic oligonucleotide
gcguuugcauacuuugcaa

SEQ ID NO: 567013 - RNA, 19 nt, Artificial Sequence
  Description of Artificial Sequence: Synthetic oligonucleotide
agccucuaaucugcuuuca

SEQ ID NO: 567014 - RNA, 19 nt, Artificial Sequence
  Description of Artificial Sequence: Synthetic oligonucleotide
gugcauggacuccuuacau

SEQ ID NO: 567015 - RNA, 19 nt, Artificial Sequence
  Description of Artificial Sequence: Synthetic oligonucleotide
cguuauuauccacccuuug

SEQ ID NO: 567016 - RNA, 19 nt, Artificial Sequence
  Description of Artificial Sequence: Synthetic oligonucleotide
cugcuucgucauuagaaau

SEQ ID NO: 567017 - RNA, 19 nt, Artificial Sequence
  Description of Artificial Sequence: Synthetic oligonucleotide
gcccacuuuguaacuacug

SEQ ID NO: 567018 - RNA, 19 nt, Artificial Sequence
  Description of Artificial Sequence: Synthetic oligonucleotide
agcccacuuuguaacuacu

SEQ ID NO: 567019 - RNA, 19 nt, Artificial Sequence
  Description of Artificial Sequence: Synthetic oligonucleotide
uuggucacgguaggaucuu

SEQ ID NO: 567020 - RNA, 19 nt, Artificial Sequence
  Description of Artificial Sequence: Synthetic oligonucleotide
ugacggcuucaggguaugc

SEQ ID NO: 567021 - RNA, 19 nt, Artificial Sequence
  Description of Artificial Sequence: Synthetic oligonucleotide
cucuccccaucaugacgug

SEQ ID NO: 567022 - RNA, 19 nt, Artificial Sequence
  Description of Artificial Sequence: Synthetic oligonucleotide
cauacucucagagcccacu

SEQ ID NO: 567023 - RNA, 19 nt, Artificial Sequence
  Description of Artificial Sequence: Synthetic oligonucleotide
guaacuacugagggcuggu

SEQ ID NO: 567024 - RNA, 19 nt, Artificial Sequence
  Description of Artificial Sequence: Synthetic oligonucleotide
aacccgcagcauacucuca

SEQ ID NO: 567025 - RNA, 19 nt, Artificial Sequence
  Description of Artificial Sequence: Synthetic oligonucleotide
gugacggcuucaggguaug

SEQ ID NO: 567026 - RNA, 19 nt, Artificial Sequence
  Description of Artificial Sequence: Synthetic oligonucleotide
ugggaggagccggaugguu

SEQ ID NO: 567027 - RNA, 19 nt, Artificial Sequence
  Description of Artificial Sequence: Synthetic oligonucleotide
ggugaucuggcaaaaucau

SEQ ID NO: 567028 - RNA, 19 nt, Artificial Sequence
  Description of Artificial Sequence: Synthetic oligonucleotide
uggucacgguaggaucuuc

SEQ ID NO: 567029 - RNA, 19 nt, Artificial Sequence
  Description of Artificial Sequence: Synthetic oligonucleotide
cuguguucaugccgagcaa

SEQ ID NO: 567030 - RNA, 19 nt, Artificial Sequence
  Description of Artificial Sequence: Synthetic oligonucleotide
acgugugaccagcccuuua

SEQ ID NO: 567031 - RNA, 19 nt, Artificial Sequence
  Description of Artificial Sequence: Synthetic oligonucleotide
ccgagcaacaagggcauuc

SEQ ID NO: 567032 - RNA, 19 nt, Artificial Sequence
  Description of Artificial Sequence: Synthetic oligonucleotide
cccuuuguggaccagcacu

SEQ ID NO: 567033 - RNA, 19 nt, Artificial Sequence
  Description of Artificial Sequence: Synthetic oligonucleotide
guaugccaggcuccuuugu

SEQ ID NO: 567034 - RNA, 19 nt, Artificial Sequence
  Description of Artificial Sequence: Synthetic oligonucleotide
cacagucguguucaacagu

SEQ ID NO: 567035 - RNA, 19 nt, Artificial Sequence
  Description of Artificial Sequence: Synthetic oligonucleotide
gacaguuaccacagccuuu

SEQ ID NO: 567036 - RNA, 19 nt, Artificial Sequence
  Description of Artificial Sequence: Synthetic oligonucleotide
gguaacucuggagggaaau

SEQ ID NO: 567037 - RNA, 19 nt, Artificial Sequence
  Description of Artificial Sequence: Synthetic oligonucleotide
cagugacggcuucagggua

SEQ ID NO: 567038 - RNA, 19 nt, Artificial Sequence
  Description of Artificial Sequence: Synthetic oligonucleotide
gggcauucaggauaauguu

SEQ ID NO: 567039 - RNA, 19 nt, Artificial Sequence
  Description of Artificial Sequence: Synthetic oligonucleotide
ccauaguccccaccagcuc

SEQ ID NO: 567040 - RNA, 19 nt, Artificial Sequence
  Description of Artificial Sequence: Synthetic oligonucleotide
gcaaaugccuggcuuguuu

SEQ ID NO: 567041 - RNA, 19 nt, Artificial Sequence
  Description of Artificial Sequence: Synthetic oligonucleotide
gccacaaccggcccuuugu

SEQ ID NO: 567042 - RNA, 19 nt, Artificial Sequence
  Description of Artificial Sequence: Synthetic oligonucleotide
cccauagaagacaccguua

SEQ ID NO: 567043 - RNA, 19 nt, Artificial Sequence
  Description of Artificial Sequence: Synthetic oligonucleotide
ccacaaccggcccuuuguc

SEQ ID NO: 567044 - RNA, 19 nt, Artificial Sequence
  Description of Artificial Sequence: Synthetic oligonucleotide
cuccuguaauucuguucua

SEQ ID NO: 567045 - RNA, 19 nt, Artificial Sequence
  Description of Artificial Sequence: Synthetic oligonucleotide
ggguaugccaggcuccuuu

SEQ ID NO: 567046 - RNA, 19 nt, Artificial Sequence
  Description of Artificial Sequence: Synthetic oligonucleotide
gcgagacauuuucauacau

SEQ ID NO: 567047 - RNA, 19 nt, Artificial Sequence
  Description of Artificial Sequence: Synthetic oligonucleotide
caccguuauuauccacccu

SEQ ID NO: 567048 - RNA, 19 nt, Artificial Sequence
  Description of Artificial Sequence: Synthetic oligonucleotide
agcugacuccucagaccaa

SEQ ID NO: 567049 - RNA, 19 nt, Artificial Sequence
  Description of Artificial Sequence: Synthetic oligonucleotide
cgagcaacaagggcauuca

SEQ ID NO: 567050 - RNA, 19 nt, Artificial Sequence
  Description of Artificial Sequence: Synthetic oligonucleotide
acccaaccagcagccuaaa

SEQ ID NO: 567051 - RNA, 19 nt, Artificial Sequence
  Description of Artificial Sequence: Synthetic oligonucleotide
ccaaccagugacggcuuca

SEQ ID NO: 567052 - RNA, 19 nt, Artificial Sequence
  Description of Artificial Sequence: Synthetic oligonucleotide
ccacccaaccagcagccua

SEQ ID NO: 567053 - RNA, 19 nt, Artificial Sequence
  Description of Artificial Sequence: Synthetic oligonucleotide
cagucguguucaacaguuu

SEQ ID NO: 567054 - RNA, 19 nt, Artificial Sequence
  Description of Artificial Sequence: Synthetic oligonucleotide
aggguaugccaggcuccuu

SEQ ID NO: 567055 - RNA, 19 nt, Artificial Sequence
  Description of Artificial Sequence: Synthetic oligonucleotide
cccaugaaucagggaaaca

SEQ ID NO: 567056 - RNA, 19 nt, Artificial Sequence
  Description of Artificial Sequence: Synthetic oligonucleotide
ccuccugccugcagacaga

SEQ ID NO: 567057 - RNA, 19 nt, Artificial Sequence
  Description of Artificial Sequence: Synthetic oligonucleotide
ccguuauuauccacccuuu

SEQ ID NO: 567058 - RNA, 19 nt, Artificial Sequence
  Description of Artificial Sequence: Synthetic oligonucleotide
ggauugugcgagacauuuu

SEQ ID NO: 567059 - RNA, 19 nt, Artificial Sequence
  Description of Artificial Sequence: Synthetic oligonucleotide
cacagccuuuacagucauu

SEQ ID NO: 567060 - RNA, 19 nt, Artificial Sequence
  Description of Artificial Sequence: Synthetic oligonucleotide
ccgaaucacaaagguuacu

SEQ ID NO: 567061 - RNA, 19 nt, Artificial Sequence
  Description of Artificial Sequence: Synthetic oligonucleotide
cgugugcuagcaugacugu

SEQ ID NO: 567062 - RNA, 19 nt, Artificial Sequence
  Description of Artificial Sequence: Synthetic oligonucleotide
ggcaaaugccuggcuuguu

SEQ ID NO: 567063 - RNA, 19 nt, Artificial Sequence
  Description of Artificial Sequence: Synthetic oligonucleotide
cacgugugaccagcccuuu

SEQ ID NO: 567064 - RNA, 19 nt, Artificial Sequence
  Description of Artificial Sequence: Synthetic oligonucleotide
cccaaccagcagccuaaau

SEQ ID NO: 567065 - RNA, 19 nt, Artificial Sequence
  Description of Artificial Sequence: Synthetic oligonucleotide
gccgagcaacaagggcauu

SEQ ID NO: 567066 - RNA, 19 nt, Artificial Sequence
  Description of Artificial Sequence: Synthetic oligonucleotide
augguaaguaaguaaaccg

SEQ ID NO: 567067 - RNA, 19 nt, Artificial Sequence
  Description of Artificial Sequence: Synthetic oligonucleotide
aaguaaaccguugucacag

SEQ ID NO: 567068 - RNA, 19 nt, Artificial Sequence
  Description of Artificial Sequence: Synthetic oligonucleotide
gacgaguagucacugaagg

SEQ ID NO: 567069 - RNA, 19 nt, Artificial Sequence
  Description of Artificial Sequence: Synthetic oligonucleotide
uaccauaugagcagcuggg

SEQ ID NO: 567070 - RNA, 19 nt, Artificial Sequence
  Description of Artificial Sequence: Synthetic oligonucleotide
agucaugacagcuagcagu

SEQ ID NO: 567071 - RNA, 19 nt, Artificial Sequence
  Description of Artificial Sequence: Synthetic oligonucleotide
aggauuugggccugcacgc

SEQ ID NO: 567072 - RNA, 19 nt, Artificial Sequence
  Description of Artificial Sequence: Synthetic oligonucleotide
aaagugccaggucugacca

SEQ ID NO: 567073 - RNA, 19 nt, Artificial Sequence
  Description of Artificial Sequence: Synthetic oligonucleotide
guuacuucgcuccauggcc

SEQ ID NO: 567074 - RNA, 19 nt, Artificial Sequence
  Description of Artificial Sequence: Synthetic oligonucleotide
gaugcugucuacuuugcac

SEQ ID NO: 567075 - RNA, 19 nt, Artificial Sequence
  Description of Artificial Sequence: Synthetic oligonucleotide
acacucuauacacaucagg

SEQ ID NO: 567076 - RNA, 19 nt, Artificial Sequence
  Description of Artificial Sequence: Synthetic oligonucleotide
cuuaauggcaccguagggc

SEQ ID NO: 567077 - RNA, 19 nt, Artificial Sequence
  Description of Artificial Sequence: Synthetic oligonucleotide
aucacggcuccucacgucc

SEQ ID NO: 567078 - RNA, 19 nt, Artificial Sequence
  Description of Artificial Sequence: Synthetic oligonucleotide
aagcuguugccacggaccg

SEQ ID NO: 567079 - RNA, 19 nt, Artificial Sequence
  Description of Artificial Sequence: Synthetic oligonucleotide
acgaguagucacugaaggc

SEQ ID NO: 567080 - RNA, 19 nt, Artificial Sequence
  Description of Artificial Sequence: Synthetic oligonucleotide
acacauuuuacaugggacu

SEQ ID NO: 567081 - RNA, 19 nt, Artificial Sequence
  Description of Artificial Sequence: Synthetic oligonucleotide
cauacagccugguuuauug

SEQ ID NO: 567082 - RNA, 19 nt, Artificial Sequence
  Description of Artificial Sequence: Synthetic oligonucleotide
uaaaccguugucacagagc

SEQ ID NO: 567083 - RNA, 19 nt, Artificial Sequence
  Description of Artificial Sequence: Synthetic oligonucleotide
uauuggcucaucauacaca

SEQ ID NO: 567084 - RNA, 19 nt, Artificial Sequence
  Description of Artificial Sequence: Synthetic oligonucleotide
guaccauaugagcagcugg

SEQ ID NO: 567085 - RNA, 19 nt, Artificial Sequence
  Description of Artificial Sequence: Synthetic oligonucleotide
ucgacagcccuguagacug

SEQ ID NO: 567086 - RNA, 19 nt, Artificial Sequence
  Description of Artificial Sequence: Synthetic oligonucleotide
uuuagcaggauccccugcu

SEQ ID NO: 567087 - RNA, 19 nt, Artificial Sequence
  Description of Artificial Sequence: Synthetic oligonucleotide
uuuacaugggacucacaga

SEQ ID NO: 567088 - RNA, 19 nt, Artificial Sequence
  Description of Artificial Sequence: Synthetic oligonucleotide
uguucaaggacuugccacu

SEQ ID NO: 567089 - RNA, 19 nt, Artificial Sequence
  Description of Artificial Sequence: Synthetic oligonucleotide
gcacaugucucauaguacg

SEQ ID NO: 567090 - RNA, 19 nt, Artificial Sequence
  Description of Artificial Sequence: Synthetic oligonucleotide
uuuugucccuuaauggcac

SEQ ID NO: 567091 - RNA, 19 nt, Artificial Sequence
  Description of Artificial Sequence: Synthetic oligonucleotide
acuucgacagcccuguaga

SEQ ID NO: 567092 - RNA, 19 nt, Artificial Sequence
  Description of Artificial Sequence: Synthetic oligonucleotide
cuugccauggauguucugc

SEQ ID NO: 567093 - RNA, 19 nt, Artificial Sequence
  Description of Artificial Sequence: Synthetic oligonucleotide
uccaaucucagaccucgag

SEQ ID NO: 567094 - RNA, 19 nt, Artificial Sequence
  Description of Artificial Sequence: Synthetic oligonucleotide
gauucgugccauuggcagg

SEQ ID NO: 567095 - RNA, 19 nt, Artificial Sequence
  Description of Artificial Sequence: Synthetic oligonucleotide
ucgcacaugucucauagua

SEQ ID NO: 567096 - RNA, 19 nt, Artificial Sequence
  Description of Artificial Sequence: Synthetic oligonucleotide
ugccguugaggccucaaag

SEQ ID NO: 567097 - RNA, 19 nt, Artificial Sequence
  Description of Artificial Sequence: Synthetic oligonucleotide
uguagacuggcaaggauuu

SEQ ID NO: 567098 - RNA, 19 nt, Artificial Sequence
  Description of Artificial Sequence: Synthetic oligonucleotide
uguuguccgcagaagguca

SEQ ID NO: 567099 - RNA, 19 nt, Artificial Sequence
  Description of Artificial Sequence: Synthetic oligonucleotide
ucaagauguccgcacacuc

SEQ ID NO: 567100 - RNA, 19 nt, Artificial Sequence
  Description of Artificial Sequence: Synthetic oligonucleotide
uugacuguuguccgcagaa

SEQ ID NO: 567101 - RNA, 19 nt, Artificial Sequence
  Description of Artificial Sequence: Synthetic oligonucleotide
cuguggguuacuucgcucc

SEQ ID NO: 567102 - RNA, 19 nt, Artificial Sequence
  Description of Artificial Sequence: Synthetic oligonucleotide
cuacuuugcacucggcagc

SEQ ID NO: 567103 - RNA, 19 nt, Artificial Sequence
  Description of Artificial Sequence: Synthetic oligonucleotide
agcuucauaggagacuagg

SEQ ID NO: 567104 - RNA, 19 nt, Artificial Sequence
  Description of Artificial Sequence: Synthetic oligonucleotide
uccuuguucaaggacuugc

SEQ ID NO: 567105 - RNA, 19 nt, Artificial Sequence
  Description of Artificial Sequence: Synthetic oligonucleotide
ugggaugguaaguaaguaa

SEQ ID NO: 567106 - RNA, 19 nt, Artificial Sequence
  Description of Artificial Sequence: Synthetic oligonucleotide
uguggcucggggcaggcgc

SEQ ID NO: 567107 - RNA, 19 nt, Artificial Sequence
  Description of Artificial Sequence: Synthetic oligonucleotide
guaaaccguugucacagag

SEQ ID NO: 567108 - RNA, 19 nt, Artificial Sequence
  Description of Artificial Sequence: Synthetic oligonucleotide
caucaagguccaaggagcg

SEQ ID NO: 567109 - RNA, 19 nt, Artificial Sequence
  Description of Artificial Sequence: Synthetic oligonucleotide
agcguuucaggucugugga

SEQ ID NO: 567110 - RNA, 19 nt, Artificial Sequence
  Description of Artificial Sequence: Synthetic oligonucleotide
augcugucuacuuugcacu

SEQ ID NO: 567111 - RNA, 19 nt, Artificial Sequence
  Description of Artificial Sequence: Synthetic oligonucleotide
ggcaccguagggcagaggg

SEQ ID NO: 567112 - RNA, 19 nt, Artificial Sequence
  Description of Artificial Sequence: Synthetic oligonucleotide
gagacuagggcugcggugc

SEQ ID NO: 567113 - RNA, 19 nt, Artificial Sequence
  Description of Artificial Sequence: Synthetic oligonucleotide
cucuguuggaagugggugc

SEQ ID NO: 567114 - RNA, 19 nt, Artificial Sequence
  Description of Artificial Sequence: Synthetic oligonucleotide
ucucuguuggaagugggug

SEQ ID NO: 567115 - RNA, 19 nt, Artificial Sequence
  Description of Artificial Sequence: Synthetic oligonucleotide
ucauaguacgugcagcguu

SEQ ID NO: 567116 - RNA, 19 nt, Artificial Sequence
  Description of Artificial Sequence: Synthetic oligonucleotide
uccugagcuucauaggaga

SEQ ID NO: 567117 - RNA, 19 nt, Artificial Sequence
  Description of Artificial Sequence: Synthetic oligonucleotide
cuuaggucgcacaugucuc

SEQ ID NO: 567118 - RNA, 19 nt, Artificial Sequence
  Description of Artificial Sequence: Synthetic oligonucleotide
uccaccccguaccauauga

SEQ ID NO: 567119 - RNA, 19 nt, Artificial Sequence
  Description of Artificial Sequence: Synthetic oligonucleotide
uguguucugguuccccagc

SEQ ID NO: 567120 - RNA, 19 nt, Artificial Sequence
  Description of Artificial Sequence: Synthetic oligonucleotide
guugaggccucaaagugcc

SEQ ID NO: 567121 - RNA, 19 nt, Artificial Sequence
  Description of Artificial Sequence: Synthetic oligonucleotide
guacgugcagcguuucagg

SEQ ID NO: 567122 - RNA, 19 nt, Artificial Sequence
  Description of Artificial Sequence: Synthetic oligonucleotide
uugcccauugcagucauga

SEQ ID NO: 567123 - RNA, 19 nt, Artificial Sequence
  Description of Artificial Sequence: Synthetic oligonucleotide
aguacgugcagcguuucag

SEQ ID NO: 567124 - RNA, 19 nt, Artificial Sequence
  Description of Artificial Sequence: Synthetic oligonucleotide
cagcguuucaggucugugg

SEQ ID NO: 567125 - RNA, 19 nt, Artificial Sequence
  Description of Artificial Sequence: Synthetic oligonucleotide
accucgaguccuucuggcc

SEQ ID NO: 567126 - RNA, 19 nt, Artificial Sequence
  Description of Artificial Sequence: Synthetic oligonucleotide
gucaauacagaagcuguug

SEQ ID NO: 567127 - RNA, 19 nt, Artificial Sequence
  Description of Artificial Sequence: Synthetic oligonucleotide
ggauucgugccauuggcag

SEQ ID NO: 567128 - RNA, 19 nt, Artificial Sequence
  Description of Artificial Sequence: Synthetic oligonucleotide
uuaggucgcacaugucuca

SEQ ID NO: 567129 - RNA, 19 nt, Artificial Sequence
  Description of Artificial Sequence: Synthetic oligonucleotide
guugccacggaccgugcgg

SEQ ID NO: 567130 - RNA, 19 nt, Artificial Sequence
  Description of Artificial Sequence: Synthetic oligonucleotide
gauccccugcuuaaugggg

SEQ ID NO: 567131 - RNA, 19 nt, Artificial Sequence
  Description of Artificial Sequence: Synthetic oligonucleotide
uggagcgccucuuggacug

SEQ ID NO: 567132 - RNA, 19 nt, Artificial Sequence
  Description of Artificial Sequence: Synthetic oligonucleotide
gaguagucacugaaggcgc

SEQ ID NO: 567133 - RNA, 19 nt, Artificial Sequence
  Description of Artificial Sequence: Synthetic oligonucleotide
uucaaggacuugccacucc

SEQ ID NO: 567134 - RNA, 19 nt, Artificial Sequence
  Description of Artificial Sequence: Synthetic oligonucleotide
ugaguaccucagcugggcc

SEQ ID NO: 567135 - RNA, 19 nt, Artificial Sequence
  Description of Artificial Sequence: Synthetic oligonucleotide
cacauuuuacaugggacuc

SEQ ID NO: 567136 - RNA, 19 nt, Artificial Sequence
  Description of Artificial Sequence: Synthetic oligonucleotide
uuuuccucucugcaggcuu

SEQ ID NO: 567137 - RNA, 19 nt, Artificial Sequence
  Description of Artificial Sequence: Synthetic oligonucleotide
ucacagagcgucacauacu

SEQ ID NO: 567138 - RNA, 19 nt, Artificial Sequence
  Description of Artificial Sequence: Synthetic oligonucleotide
auguccgcacacuccuggc

SEQ ID NO: 567139 - RNA, 19 nt, Artificial Sequence
  Description of Artificial Sequence: Synthetic oligonucleotide
cauuuuacaugggacucac

SEQ ID NO: 567140 - RNA, 19 nt, Artificial Sequence
  Description of Artificial Sequence: Synthetic oligonucleotide
agcgauggucucgaugcgc

SEQ ID NO: 567141 - RNA, 19 nt, Artificial Sequence
  Description of Artificial Sequence: Synthetic oligonucleotide
caccccguaccauaugagc

SEQ ID NO: 567142 - RNA, 19 nt, Artificial Sequence
  Description of Artificial Sequence: Synthetic oligonucleotide
cuuaauggggauggcccgg

SEQ ID NO: 567143 - RNA, 19 nt, Artificial Sequence
  Description of Artificial Sequence: Synthetic oligonucleotide
ugacagcuagcaguucagg

SEQ ID NO: 567144 - RNA, 19 nt, Artificial Sequence
  Description of Artificial Sequence: Synthetic oligonucleotide
gucuacuuugcacucggca

SEQ ID NO: 567145 - RNA, 19 nt, Artificial Sequence
  Description of Artificial Sequence: Synthetic oligonucleotide
gguuacuucgcuccauggc

SEQ ID NO: 567146 - RNA, 19 nt, Artificial Sequence
  Description of Artificial Sequence: Synthetic oligonucleotide
guagguguggcucggggca

SEQ ID NO: 567147 - RNA, 19 nt, Artificial Sequence
  Description of Artificial Sequence: Synthetic oligonucleotide
caccaacagucgcaggucg

SEQ ID NO: 567148 - RNA, 19 nt, Artificial Sequence
  Description of Artificial Sequence: Synthetic oligonucleotide
auguaaucgugcaggcugg

SEQ ID NO: 567149 - RNA, 19 nt, Artificial Sequence
  Description of Artificial Sequence: Synthetic oligonucleotide
cacuucgacagcccuguag

SEQ ID NO: 567150 - RNA, 19 nt, Artificial Sequence
  Description of Artificial Sequence: Synthetic oligonucleotide
ugucgguggaucccugaac

SEQ ID NO: 567151 - RNA, 19 nt, Artificial Sequence
  Description of Artificial Sequence: Synthetic oligonucleotide
cuucgaguagccauccaga

SEQ ID NO: 567152 - RNA, 19 nt, Artificial Sequence
  Description of Artificial Sequence: Synthetic oligonucleotide
uaggagacuagggcugcgg

SEQ ID NO: 567153 - RNA, 19 nt, Artificial Sequence
  Description of Artificial Sequence: Synthetic oligonucleotide
ucuuggacugcuugcggau

SEQ ID NO: 567154 - RNA, 19 nt, Artificial Sequence
  Description of Artificial Sequence: Synthetic oligonucleotide
cgaguagucacugaaggcg

SEQ ID NO: 567155 - RNA, 19 nt, Artificial Sequence
  Description of Artificial Sequence: Synthetic oligonucleotide
uacuuugcacucggcagcc

SEQ ID NO: 567156 - RNA, 19 nt, Artificial Sequence
  Description of Artificial Sequence: Synthetic oligonucleotide
uuugucccuuaauggcacc

SEQ ID NO: 567157 - RNA, 19 nt, Artificial Sequence
  Description of Artificial Sequence: Synthetic oligonucleotide
uguaaucgugcaggcuggg

SEQ ID NO: 567158 - RNA, 19 nt, Artificial Sequence
  Description of Artificial Sequence: Synthetic oligonucleotide
ugaggacgaguagucacug

SEQ ID NO: 567159 - RNA, 19 nt, Artificial Sequence
  Description of Artificial Sequence: Synthetic oligonucleotide
auccgagcuuggcaguggg

SEQ ID NO: 567160 - RNA, 19 nt, Artificial Sequence
  Description of Artificial Sequence: Synthetic oligonucleotide
uucgacagcccuguagacu

SEQ ID NO: 567161 - RNA, 19 nt, Artificial Sequence
  Description of Artificial Sequence: Synthetic oligonucleotide
ggauccccugcuuaauggg

SEQ ID NO: 567162 - RNA, 19 nt, Artificial Sequence
  Description of Artificial Sequence: Synthetic oligonucleotide
gcacauccgagcuuggcag

SEQ ID NO: 567163 - RNA, 19 nt, Artificial Sequence
  Description of Artificial Sequence: Synthetic oligonucleotide
acauuuuacaugggacuca

SEQ ID NO: 567164 - RNA, 19 nt, Artificial Sequence
  Description of Artificial Sequence: Synthetic oligonucleotide
ggucugaccagugagggac

SEQ ID NO: 567165 - RNA, 19 nt, Artificial Sequence
  Description of Artificial Sequence: Synthetic oligonucleotide
gggguuggaacugaguacc

SEQ ID NO: 567166 - RNA, 19 nt, Artificial Sequence
  Description of Artificial Sequence: Synthetic oligonucleotide
uccccuugucucucucugg

SEQ ID NO: 567167 - RNA, 19 nt, Artificial Sequence
  Description of Artificial Sequence: Synthetic oligonucleotide
uuaauggggauggcccggc

SEQ ID NO: 567168 - RNA, 19 nt, Artificial Sequence
  Description of Artificial Sequence: Synthetic oligonucleotide
gccugauugaugugcacag

SEQ ID NO: 567169 - RNA, 19 nt, Artificial Sequence
  Description of Artificial Sequence: Synthetic oligonucleotide
aggcgcugccauucguggc

SEQ ID NO: 567170 - RNA, 19 nt, Artificial Sequence
  Description of Artificial Sequence: Synthetic oligonucleotide
uguccgcacacuccuggcu

SEQ ID NO: 567171 - RNA, 19 nt, Artificial Sequence
  Description of Artificial Sequence: Synthetic oligonucleotide
uugucacagagcgucacau

SEQ ID NO: 567172 - RNA, 19 nt, Artificial Sequence
  Description of Artificial Sequence: Synthetic oligonucleotide
uccgagcuuggcagugggg

SEQ ID NO: 567173 - RNA, 19 nt, Artificial Sequence
  Description of Artificial Sequence: Synthetic oligonucleotide
cuucuuaggucgcacaugu

SEQ ID NO: 567174 - RNA, 19 nt, Artificial Sequence
  Description of Artificial Sequence: Synthetic oligonucleotide
cugcggagggauucgugcc

SEQ ID NO: 567175 - RNA, 19 nt, Artificial Sequence
  Description of Artificial Sequence: Synthetic oligonucleotide
gucaccaacagucgcaggu

SEQ ID NO: 567176 - RNA, 19 nt, Artificial Sequence
  Description of Artificial Sequence: Synthetic oligonucleotide
ugucuacuuugcacucggc

SEQ ID NO: 567177 - RNA, 19 nt, Artificial Sequence
  Description of Artificial Sequence: Synthetic oligonucleotide
ucagaccucgaguccuucu

SEQ ID NO: 567178 - RNA, 19 nt, Artificial Sequence
  Description of Artificial Sequence: Synthetic oligonucleotide
uuggagcgccucuuggacu

SEQ ID NO: 567179 - RNA, 19 nt, Artificial Sequence
  Description of Artificial Sequence: Synthetic oligonucleotide
cagucaauacagaagcugu

SEQ ID NO: 567180 - RNA, 19 nt, Artificial Sequence
  Description of Artificial Sequence: Synthetic oligonucleotide
aucaagauguccgcacacu

SEQ ID NO: 567181 - RNA, 19 nt, Artificial Sequence
  Description of Artificial Sequence: Synthetic oligonucleotide
uggcacuucgacagcccug

SEQ ID NO: 567182 - RNA, 19 nt, Artificial Sequence
  Description of Artificial Sequence: Synthetic oligonucleotide
gacagcuagcaguucaggu

SEQ ID NO: 567183 - RNA, 19 nt, Artificial Sequence
  Description of Artificial Sequence: Synthetic oligonucleotide
cagaccucgaguccuucug

SEQ ID NO: 567184 - RNA, 19 nt, Artificial Sequence
  Description of Artificial Sequence: Synthetic oligonucleotide
gccgaugcugucuacuuug

SEQ ID NO: 567185 - RNA, 19 nt, Artificial Sequence
  Description of Artificial Sequence: Synthetic oligonucleotide
uaguacgugcagcguuuca

SEQ ID NO: 567186 - RNA, 19 nt, Artificial Sequence
  Description of Artificial Sequence: Synthetic oligonucleotide
auaguacgugcagcguuuc

SEQ ID NO: 567187 - RNA, 19 nt, Artificial Sequence
  Description of Artificial Sequence: Synthetic oligonucleotide
ggacucacagacugguccc

SEQ ID NO: 567188 - RNA, 19 nt, Artificial Sequence
  Description of Artificial Sequence: Synthetic oligonucleotide
aguaaaccguugucacaga

SEQ ID NO: 567189 - RNA, 19 nt, Artificial Sequence
  Description of Artificial Sequence: Synthetic oligonucleotide
caaggauuugggccugcac

SEQ ID NO: 567190 - RNA, 19 nt, Artificial Sequence
  Description of Artificial Sequence: Synthetic oligonucleotide
accccguaccauaugagca

SEQ ID NO: 567191 - RNA, 19 nt, Artificial Sequence
  Description of Artificial Sequence: Synthetic oligonucleotide
gccauucguggccugauug

SEQ ID NO: 567192 - RNA, 19 nt, Artificial Sequence
  Description of Artificial Sequence: Synthetic oligonucleotide
ucgccguccccguaugucu

SEQ ID NO: 567193 - RNA, 19 nt, Artificial Sequence
  Description of Artificial Sequence: Synthetic oligonucleotide
gguagguguggcucggggc

SEQ ID NO: 567194 - RNA, 19 nt, Artificial Sequence
  Description of Artificial Sequence: Synthetic oligonucleotide
ggguuacuucgcuccaugg

SEQ ID NO: 567195 - RNA, 19 nt, Artificial Sequence
  Description of Artificial Sequence: Synthetic oligonucleotide
uccccguaugucucauuca

SEQ ID NO: 567196 - RNA, 19 nt, Artificial Sequence
  Description of Artificial Sequence: Synthetic oligonucleotide
aucgccguccccguauguc

SEQ ID NO: 567197 - RNA, 19 nt, Artificial Sequence
  Description of Artificial Sequence: Synthetic oligonucleotide
cuucgacagcccuguagac

SEQ ID NO: 567198 - RNA, 19 nt, Artificial Sequence
  Description of Artificial Sequence: Synthetic oligonucleotide
uaauggggauggcccggcc

SEQ ID NO: 567199 - RNA, 19 nt, Artificial Sequence
  Description of Artificial Sequence: Synthetic oligonucleotide
acggaccgugcggacagcc

SEQ ID NO: 567200 - RNA, 19 nt, Artificial Sequence
  Description of Artificial Sequence: Synthetic oligonucleotide
ucgguggaucccugaacac

SEQ ID NO: 567201 - RNA, 19 nt, Artificial Sequence
  Description of Artificial Sequence: Synthetic oligonucleotide
ugucacagagcgucacaua

SEQ ID NO: 567202 - RNA, 19 nt, Artificial Sequence
  Description of Artificial Sequence: Synthetic oligonucleotide
guugucacagagcgucaca

SEQ ID NO: 567203 - RNA, 19 nt, Artificial Sequence
  Description of Artificial Sequence: Synthetic oligonucleotide
cagagggcugcaaaacaca

SEQ ID NO: 567204 - RNA, 19 nt, Artificial Sequence
  Description of Artificial Sequence: Synthetic oligonucleotide
ugucccuuaauggcaccgu

SEQ ID NO: 567205 - RNA, 19 nt, Artificial Sequence
  Description of Artificial Sequence: Synthetic oligonucleotide
auaggagacuagggcugcg

SEQ ID NO: 567206 - RNA, 19 nt, Artificial Sequence
  Description of Artificial Sequence: Synthetic oligonucleotide
agcugucaugaggaggcag

SEQ ID NO: 567207 - RNA, 19 nt, Artificial Sequence
  Description of Artificial Sequence: Synthetic oligonucleotide
gccauggauguucugcaug

SEQ ID NO: 567208 - RNA, 19 nt, Artificial Sequence
  Description of Artificial Sequence: Synthetic oligonucleotide
gcaaaacacacuccugcuc

SEQ ID NO: 567209 - RNA, 19 nt, Artificial Sequence
  Description of Artificial Sequence: Synthetic oligonucleotide
uguccgcagaaggucaauc

SEQ ID NO: 567210 - RNA, 19 nt, Artificial Sequence
  Description of Artificial Sequence: Synthetic oligonucleotide
ccucgaguccuucuggccc

SEQ ID NO: 567211 - RNA, 19 nt, Artificial Sequence
  Description of Artificial Sequence: Synthetic oligonucleotide
ggcgcugccauucguggcc

SEQ ID NO: 567212 - RNA, 19 nt, Artificial Sequence
  Description of Artificial Sequence: Synthetic oligonucleotide
acagcuugcgggcccugcu

SEQ ID NO: 567213 - RNA, 19 nt, Artificial Sequence
  Description of Artificial Sequence: Synthetic oligonucleotide
uucuuaggucgcacauguc

SEQ ID NO: 567214 - RNA, 19 nt, Artificial Sequence
  Description of Artificial Sequence: Synthetic oligonucleotide
ggaugguaaguaaguaaac

SEQ ID NO: 567215 - RNA, 19 nt, Artificial Sequence
  Description of Artificial Sequence: Synthetic oligonucleotide
ucacggcuccucacgucca

SEQ ID NO: 567216 - RNA, 19 nt, Artificial Sequence
  Description of Artificial Sequence: Synthetic oligonucleotide
agcuagcaguucagguggc

SEQ ID NO: 567217 - RNA, 19 nt, Artificial Sequence
  Description of Artificial Sequence: Synthetic oligonucleotide
ucuccccgugaagauguug

SEQ ID NO: 567218 - RNA, 19 nt, Artificial Sequence
  Description of Artificial Sequence: Synthetic oligonucleotide
gguggaucccugaacacuc

SEQ ID NO: 567219 - RNA, 19 nt, Artificial Sequence
  Description of Artificial Sequence: Synthetic oligonucleotide
ggcacauccgagcuuggca

SEQ ID NO: 567220 - RNA, 19 nt, Artificial Sequence
  Description of Artificial Sequence: Synthetic oligonucleotide
gcuguugccacggaccgug

SEQ ID NO: 567221 - RNA, 19 nt, Artificial Sequence
  Description of Artificial Sequence: Synthetic oligonucleotide
uugccacggaccgugcgga

SEQ ID NO: 567222 - RNA, 19 nt, Artificial Sequence
  Description of Artificial Sequence: Synthetic oligonucleotide
ccguugaggccucaaagug

SEQ ID NO: 567223 - RNA, 19 nt, Artificial Sequence
  Description of Artificial Sequence: Synthetic oligonucleotide
auucguggccugauugaug

SEQ ID NO: 567224 - RNA, 19 nt, Artificial Sequence
  Description of Artificial Sequence: Synthetic oligonucleotide
acauccgagcuuggcagug

SEQ ID NO: 567225 - RNA, 19 nt, Artificial Sequence
  Description of Artificial Sequence: Synthetic oligonucleotide
agcucugcggagggauucg

SEQ ID NO: 567226 - RNA, 19 nt, Artificial Sequence
  Description of Artificial Sequence: Synthetic oligonucleotide
gcugcggugcagcucugcg

SEQ ID NO: 567227 - RNA, 19 nt, Artificial Sequence
  Description of Artificial Sequence: Synthetic oligonucleotide
auuugggccugcacgcucu

SEQ ID NO: 567228 - RNA, 19 nt, Artificial Sequence
  Description of Artificial Sequence: Synthetic oligonucleotide
gauggcccggccgcugccg

SEQ ID NO: 567229 - RNA, 19 nt, Artificial Sequence
  Description of Artificial Sequence: Synthetic oligonucleotide
ggaccgugcggacagccug

SEQ ID NO: 567230 - RNA, 19 nt, Artificial Sequence
  Description of Artificial Sequence: Synthetic oligonucleotide
uacuucgcuccauggccaa

SEQ ID NO: 567231 - RNA, 19 nt, Artificial Sequence
  Description of Artificial Sequence: Synthetic oligonucleotide
acuccaauguacacauuuu

SEQ ID NO: 567232 - RNA, 19 nt, Artificial Sequence
  Description of Artificial Sequence: Synthetic oligonucleotide
ggagggauucgugccauug

SEQ ID NO: 567233 - RNA, 19 nt, Artificial Sequence
  Description of Artificial Sequence: Synthetic oligonucleotide
acguccaccccguaccaua

SEQ ID NO: 567234 - RNA, 19 nt, Artificial Sequence
  Description of Artificial Sequence: Synthetic oligonucleotide
cauccgagcuuggcagugg

SEQ ID NO: 567235 - RNA, 19 nt, Artificial Sequence
  Description of Artificial Sequence: Synthetic oligonucleotide
ccccguaugucucauucac

SEQ ID NO: 567236 - RNA, 19 nt, Artificial Sequence
  Description of Artificial Sequence: Synthetic oligonucleotide
uugaggccucaaagugcca

SEQ ID NO: 567237 - RNA, 19 nt, Artificial Sequence
  Description of Artificial Sequence: Synthetic oligonucleotide
uccccugcuuaauggggau

SEQ ID NO: 567238 - RNA, 19 nt, Artificial Sequence
  Description of Artificial Sequence: Synthetic oligonucleotide
ugcacccacagcucucguu

SEQ ID NO: 567239 - RNA, 19 nt, Artificial Sequence
  Description of Artificial Sequence: Synthetic oligonucleotide
ccccguaccauaugagcag

SEQ ID NO: 567240 - RNA, 19 nt, Artificial Sequence
  Description of Artificial Sequence: Synthetic oligonucleotide
acuucgcuccauggccaac

SEQ ID NO: 567241 - RNA, 19 nt, Artificial Sequence
  Description of Artificial Sequence: Synthetic oligonucleotide
agacacggccgaguggcug

SEQ ID NO: 567242 - RNA, 19 nt, Artificial Sequence
  Description of Artificial Sequence: Synthetic oligonucleotide
caucacggcuccucacguc

SEQ ID NO: 567243 - RNA, 19 nt, Artificial Sequence
  Description of Artificial Sequence: Synthetic oligonucleotide
gaagggacugaggacgagu

SEQ ID NO: 567244 - RNA, 19 nt, Artificial Sequence
  Description of Artificial Sequence: Synthetic oligonucleotide
gaccgugcggacagccugc

SEQ ID NO: 567245 - RNA, 19 nt, Artificial Sequence
  Description of Artificial Sequence: Synthetic oligonucleotide
agucgcaggucguccucca

SEQ ID NO: 567246 - RNA, 19 nt, Artificial Sequence
  Description of Artificial Sequence: Synthetic oligonucleotide
cugaggacgaguagucacu

SEQ ID NO: 567247 - RNA, 19 nt, Artificial Sequence
  Description of Artificial Sequence: Synthetic oligonucleotide
ccgagcuuggcaguggggc

SEQ ID NO: 567248 - RNA, 19 nt, Artificial Sequence
  Description of Artificial Sequence: Synthetic oligonucleotide
gacagcuugcgggcccugc

SEQ ID NO: 567249 - RNA, 19 nt, Artificial Sequence
  Description of Artificial Sequence: Synthetic oligonucleotide
agacuagggcugcggugca

SEQ ID NO: 567250 - RNA, 19 nt, Artificial Sequence
  Description of Artificial Sequence: Synthetic oligonucleotide
cauaguacgugcagcguuu

SEQ ID NO: 567251 - RNA, 19 nt, Artificial Sequence
  Description of Artificial Sequence: Synthetic oligonucleotide
ucgugccauuggcaggcuc

SEQ ID NO: 567252 - RNA, 19 nt, Artificial Sequence
  Description of Artificial Sequence: Synthetic oligonucleotide
ucguggccugauugaugug

SEQ ID NO: 567253 - RNA, 19 nt, Artificial Sequence
  Description of Artificial Sequence: Synthetic oligonucleotide
cuggcaucacggcuccuca

SEQ ID NO: 567254 - RNA, 19 nt, Artificial Sequence
  Description of Artificial Sequence: Synthetic oligonucleotide
auuuuacaugggacucaca

SEQ ID NO: 567255 - RNA, 19 nt, Artificial Sequence
  Description of Artificial Sequence: Synthetic oligonucleotide
guaaucgugcaggcuggga

SEQ ID NO: 567256 - RNA, 19 nt, Artificial Sequence
  Description of Artificial Sequence: Synthetic oligonucleotide
ugcagcguuucaggucugu

SEQ ID NO: 567257 - RNA, 19 nt, Artificial Sequence
  Description of Artificial Sequence: Synthetic oligonucleotide
cacagagcgucacauacuu

SEQ ID NO: 567258 - RNA, 19 nt, Artificial Sequence
  Description of Artificial Sequence: Synthetic oligonucleotide
guaccuccaaaggguuuug

SEQ ID NO: 567259 - RNA, 19 nt, Artificial Sequence
  Description of Artificial Sequence: Synthetic oligonucleotide
ggccaacccauuggcacgg

SEQ ID NO: 567260 - RNA, 19 nt, Artificial Sequence
  Description of Artificial Sequence: Synthetic oligonucleotide
ggcccagucuggauugggg

SEQ ID NO: 567261 - RNA, 19 nt, Artificial Sequence
  Description of Artificial Sequence: Synthetic oligonucleotide
cugaccagugagggacacc

SEQ ID NO: 567262 - RNA, 19 nt, Artificial Sequence
  Description of Artificial Sequence: Synthetic oligonucleotide
cccaucgcagggugaaggc

SEQ ID NO: 567263 - RNA, 19 nt, Artificial Sequence
  Description of Artificial Sequence: Synthetic oligonucleotide
gugucgguggaucccugaa

SEQ ID NO: 567264 - RNA, 19 nt, Artificial Sequence
  Description of Artificial Sequence: Synthetic oligonucleotide
caccacguauauacacuaa

SEQ ID NO: 567265 - RNA, 19 nt, Artificial Sequence
  Description of Artificial Sequence: Synthetic oligonucleotide
cugcuugcggaugggcgug

SEQ ID NO: 567266 - RNA, 19 nt, Artificial Sequence
  Description of Artificial Sequence: Synthetic oligonucleotide
cuguugccacggaccgugc

SEQ ID NO: 567267 - RNA, 19 nt, Artificial Sequence
  Description of Artificial Sequence: Synthetic oligonucleotide
gcacccaugcuggaucaag

SEQ ID NO: 567268 - RNA, 19 nt, Artificial Sequence
  Description of Artificial Sequence: Synthetic oligonucleotide
ccugaacacucuauacaca

SEQ ID NO: 567269 - RNA, 19 nt, Artificial Sequence
  Description of Artificial Sequence: Synthetic oligonucleotide
ucugccguugaggccucaa

SEQ ID NO: 567270 - RNA, 19 nt, Artificial Sequence
  Description of Artificial Sequence: Synthetic oligonucleotide
cagacugguccccuugucu

SEQ ID NO: 567271 - RNA, 19 nt, Artificial Sequence
  Description of Artificial Sequence: Synthetic oligonucleotide
gucccuuaauggcaccgua

SEQ ID NO: 567272 - RNA, 19 nt, Artificial Sequence
  Description of Artificial Sequence: Synthetic oligonucleotide
ccacggaccgugcggacag

SEQ ID NO: 567273 - RNA, 19 nt, Artificial Sequence
  Description of Artificial Sequence: Synthetic oligonucleotide
ccgaugcugucuacuuugc

SEQ ID NO: 567274 - RNA, 19 nt, Artificial Sequence
  Description of Artificial Sequence: Synthetic oligonucleotide
ccggaguaacugcugcccc

SEQ ID NO: 567275 - RNA, 19 nt, Artificial Sequence
  Description of Artificial Sequence: Synthetic oligonucleotide
cugggaugguaaguaagua

SEQ ID NO: 567276 - RNA, 19 nt, Artificial Sequence
  Description of Artificial Sequence: Synthetic oligonucleotide
ccaacccauuggcacgggg

SEQ ID NO: 567277 - RNA, 19 nt, Artificial Sequence
  Description of Artificial Sequence: Synthetic oligonucleotide
gcgccucuuggacugcuug

SEQ ID NO: 567278 - RNA, 19 nt, Artificial Sequence
  Description of Artificial Sequence: Synthetic oligonucleotide
gccguugaggccucaaagu

SEQ ID NO: 567279 - RNA, 19 nt, Artificial Sequence
  Description of Artificial Sequence: Synthetic oligonucleotide
auggcaccguagggcagag

SEQ ID NO: 567280 - RNA, 19 nt, Artificial Sequence
  Description of Artificial Sequence: Synthetic oligonucleotide
cguaugucucauucacuuc

SEQ ID NO: 567281 - RNA, 19 nt, Artificial Sequence
  Description of Artificial Sequence: Synthetic oligonucleotide
ccccagccgagucuugucc

SEQ ID NO: 567282 - RNA, 19 nt, Artificial Sequence
  Description of Artificial Sequence: Synthetic oligonucleotide
uuguccgcagaaggucaau

SEQ ID NO: 567283 - RNA, 19 nt, Artificial Sequence
  Description of Artificial Sequence: Synthetic oligonucleotide
ccauucguggccugauuga

SEQ ID NO: 567284 - RNA, 19 nt, Artificial Sequence
  Description of Artificial Sequence: Synthetic oligonucleotide
ccaccccguaccauaugag

SEQ ID NO: 567285 - RNA, 19 nt, Artificial Sequence
  Description of Artificial Sequence: Synthetic oligonucleotide
aggucgcacaugucucaua

SEQ ID NO: 567286 - RNA, 19 nt, Artificial Sequence
  Description of Artificial Sequence: Synthetic oligonucleotide
ugcgccccgcccagcugug

SEQ ID NO: 567287 - RNA, 19 nt, Artificial Sequence
  Description of Artificial Sequence: Synthetic oligonucleotide
gggauucgugccauuggca

SEQ ID NO: 567288 - RNA, 19 nt, Artificial Sequence
  Description of Artificial Sequence: Synthetic oligonucleotide
guuguccgcagaaggucaa

SEQ ID NO: 567289 - RNA, 19 nt, Artificial Sequence
  Description of Artificial Sequence: Synthetic oligonucleotide
gucgcaggucguccuccac

SEQ ID NO: 567290 - RNA, 19 nt, Artificial Sequence
  Description of Artificial Sequence: Synthetic oligonucleotide
ugccacggaccgugcggac

SEQ ID NO: 567291 - RNA, 19 nt, Artificial Sequence
  Description of Artificial Sequence: Synthetic oligonucleotide
uggcaccguagggcagagg

SEQ ID NO: 567292 - RNA, 19 nt, Artificial Sequence
  Description of Artificial Sequence: Synthetic oligonucleotide
gcgauggucucgaugcgca

SEQ ID NO: 567293 - RNA, 19 nt, Artificial Sequence
  Description of Artificial Sequence: Synthetic oligonucleotide
cccguaccauaugagcagc

SEQ ID NO: 567294 - RNA, 19 nt, Artificial Sequence
  Description of Artificial Sequence: Synthetic oligonucleotide
ccucacguccaccccguac

SEQ ID NO: 567295 - RNA, 19 nt, Artificial Sequence
  Description of Artificial Sequence: Synthetic oligonucleotide
cgugcggacagccugcaca

SEQ ID NO: 567296 - RNA, 19 nt, Artificial Sequence
  Description of Artificial Sequence: Synthetic oligonucleotide
cuucugccguugaggccuc

SEQ ID NO: 567297 - RNA, 19 nt, Artificial Sequence
  Description of Artificial Sequence: Synthetic oligonucleotide
ccccgugaagauguuggag

SEQ ID NO: 567298 - RNA, 19 nt, Artificial Sequence
  Description of Artificial Sequence: Synthetic oligonucleotide
ggaagggacugaggacgag

SEQ ID NO: 567299 - RNA, 19 nt, Artificial Sequence
  Description of Artificial Sequence: Synthetic oligonucleotide
guguggcucggggcaggcg

SEQ ID NO: 567300 - RNA, 19 nt, Artificial Sequence
  Description of Artificial Sequence: Synthetic oligonucleotide
gacccggggauuggcggca

SEQ ID NO: 567301 - RNA, 19 nt, Artificial Sequence
  Description of Artificial Sequence: Synthetic oligonucleotide
cguaccauaugagcagcug

SEQ ID NO: 567302 - RNA, 19 nt, Artificial Sequence
  Description of Artificial Sequence: Synthetic oligonucleotide
gcagcguuucaggucugug

SEQ ID NO: 567303 - RNA, 19 nt, Artificial Sequence
  Description of Artificial Sequence: Synthetic oligonucleotide
cucauaguacgugcagcgu

SEQ ID NO: 567304 - RNA, 19 nt, Artificial Sequence
  Description of Artificial Sequence: Synthetic oligonucleotide
ggcacuucgacagcccugu

SEQ ID NO: 567305 - RNA, 19 nt, Artificial Sequence
  Description of Artificial Sequence: Synthetic oligonucleotide
cugccguugaggccucaaa

SEQ ID NO: 567306 - RNA, 19 nt, Artificial Sequence
  Description of Artificial Sequence: Synthetic oligonucleotide
gguaccuccaaaggguuuu

SEQ ID NO: 567307 - RNA, 19 nt, Artificial Sequence
  Description of Artificial Sequence: Synthetic oligonucleotide
cauucguggccugauugau

SEQ ID NO: 567308 - RNA, 19 nt, Artificial Sequence
  Description of Artificial Sequence: Synthetic oligonucleotide
cacccaucgcagggugaag

SEQ ID NO: 567309 - RNA, 19 nt, Artificial Sequence
  Description of Artificial Sequence: Synthetic oligonucleotide
gugccaacccacagcccuc

SEQ ID NO: 567310 - RNA, 19 nt, Artificial Sequence
  Description of Artificial Sequence: Synthetic oligonucleotide
cgggcguaggccagugggg

SEQ ID NO: 567311 - RNA, 19 nt, Artificial Sequence
  Description of Artificial Sequence: Synthetic oligonucleotide
cacauccgagcuuggcagu

SEQ ID NO: 567312 - RNA, 19 nt, Artificial Sequence
  Description of Artificial Sequence: Synthetic oligonucleotide
gcaccguagggcagagggc

SEQ ID NO: 567313 - RNA, 19 nt, Artificial Sequence
  Description of Artificial Sequence: Synthetic oligonucleotide
cagguaccuccaaaggguu

SEQ ID NO: 567314 - RNA, 19 nt, Artificial Sequence
  Description of Artificial Sequence: Synthetic oligonucleotide
gggcacauccgagcuuggc

SEQ ID NO: 567315 - RNA, 19 nt, Artificial Sequence
  Description of Artificial Sequence: Synthetic oligonucleotide
ggcguaggccagugggguc

SEQ ID NO: 567316 - RNA, 19 nt, Artificial Sequence
  Description of Artificial Sequence: Synthetic oligonucleotide
cccucuccucacagguacc

SEQ ID NO: 567317 - RNA, 19 nt, Artificial Sequence
  Description of Artificial Sequence: Synthetic oligonucleotide
ggcgggcguaggccagugg

SEQ ID NO: 567318 - RNA, 19 nt, Artificial Sequence
  Description of Artificial Sequence: Synthetic oligonucleotide
cacuguuagccaaggcauu

SEQ ID NO: 567319 - RNA, 19 nt, Artificial Sequence
  Description of Artificial Sequence: Synthetic oligonucleotide
accgugcggacagccugca

SEQ ID NO: 567320 - RNA, 19 nt, Artificial Sequence
  Description of Artificial Sequence: Synthetic oligonucleotide
auacuccaauguacacauu

SEQ ID NO: 567321 - RNA, 19 nt, Artificial Sequence
  Description of Artificial Sequence: Synthetic oligonucleotide
gcugccggcccggcgggcg

SEQ ID NO: 567322 - RNA, 19 nt, Artificial Sequence
  Description of Artificial Sequence: Synthetic oligonucleotide
cuggggccgucuggucggg

SEQ ID NO: 567323 - RNA, 19 nt, Artificial Sequence
  Description of Artificial Sequence: Synthetic oligonucleotide
ccccuggcaucacggcucc

SEQ ID NO: 567324 - RNA, 19 nt, Artificial Sequence
  Description of Artificial Sequence: Synthetic oligonucleotide
uucugccguugaggccuca

SEQ ID NO: 567325 - RNA, 19 nt, Artificial Sequence
  Description of Artificial Sequence: Synthetic oligonucleotide
guagggcagagggcugcaa

SEQ ID NO: 567326 - RNA, 19 nt, Artificial Sequence
  Description of Artificial Sequence: Synthetic oligonucleotide
ccggggauuggcggcacug

SEQ ID NO: 567327 - RNA, 19 nt, Artificial Sequence
  Description of Artificial Sequence: Synthetic oligonucleotide
cacggaccgugcggacagc

SEQ ID NO: 567328 - RNA, 19 nt, Artificial Sequence
  Description of Artificial Sequence: Synthetic oligonucleotide
cggaguaacugcugcccca

SEQ ID NO: 567329 - RNA, 19 nt, Artificial Sequence
  Description of Artificial Sequence: Synthetic oligonucleotide
ggcugcggugcagcucugc

SEQ ID NO: 567330 - RNA, 19 nt, Artificial Sequence
  Description of Artificial Sequence: Synthetic oligonucleotide
gccacggaccgugcggaca

SEQ ID NO: 567331 - RNA, 19 nt, Artificial Sequence
  Description of Artificial Sequence: Synthetic oligonucleotide
gccguccccguaugucuca

SEQ ID NO: 567332 - RNA, 19 nt, Artificial Sequence
  Description of Artificial Sequence: Synthetic oligonucleotide
caucaaugacccggggauu

SEQ ID NO: 567333 - RNA, 19 nt, Artificial Sequence
  Description of Artificial Sequence: Synthetic oligonucleotide
gccaacccauuggcacggg

SEQ ID NO: 567334 - RNA, 19 nt, Artificial Sequence
  Description of Artificial Sequence: Synthetic oligonucleotide
ggcccggauccagcgcucc

SEQ ID NO: 567335 - RNA, 19 nt, Artificial Sequence
  Description of Artificial Sequence: Synthetic oligonucleotide
gggcguaggccaguggggu

SEQ ID NO: 567336 - RNA, 19 nt, Artificial Sequence
  Description of Artificial Sequence: Synthetic oligonucleotide
ggagcgccucuuggacugc

SEQ ID NO: 567337 - RNA, 19 nt, Artificial Sequence
  Description of Artificial Sequence: Synthetic oligonucleotide
ggcaggcgcuucccuggca

SEQ ID NO: 567338 - RNA, 19 nt, Artificial Sequence
  Description of Artificial Sequence: Synthetic oligonucleotide
ggggauggcccggccgcug

SEQ ID NO: 567339 - RNA, 19 nt, Artificial Sequence
  Description of Artificial Sequence: Synthetic oligonucleotide
cggacccgggacaggugag

SEQ ID NO: 567340 - RNA, 19 nt, Artificial Sequence
  Description of Artificial Sequence: Synthetic oligonucleotide
ccacccaucgcagggugaa

SEQ ID NO: 567341 - RNA, 19 nt, Artificial Sequence
  Description of Artificial Sequence: Synthetic oligonucleotide
cccuguagacuggcaagga

SEQ ID NO: 567342 - RNA, 19 nt, Artificial Sequence
  Description of Artificial Sequence: Synthetic oligonucleotide
gcccggccgcugccgaugc

SEQ ID NO: 567343 - RNA, 19 nt, Artificial Sequence
  Description of Artificial Sequence: Synthetic oligonucleotide
cccggcgggcguaggccag

SEQ ID NO: 567344 - RNA, 19 nt, Artificial Sequence
  Description of Artificial Sequence: Synthetic oligonucleotide
cagacacggccgaguggcu

SEQ ID NO: 567345 - RNA, 19 nt, Artificial Sequence
  Description of Artificial Sequence: Synthetic oligonucleotide
caucgccguccccguaugu

SEQ ID NO: 567346 - RNA, 19 nt, Artificial Sequence
  Description of Artificial Sequence: Synthetic oligonucleotide
ccgcacacuccuggcugcc

SEQ ID NO: 567347 - RNA, 19 nt, Artificial Sequence
  Description of Artificial Sequence: Synthetic oligonucleotide
cacauacagccugguuuau

SEQ ID NO: 567348 - RNA, 19 nt, Artificial Sequence
  Description of Artificial Sequence: Synthetic oligonucleotide
cccagccgagucuuguccu

SEQ ID NO: 567349 - RNA, 19 nt, Artificial Sequence
  Description of Artificial Sequence: Synthetic oligonucleotide
cgccguccccguaugucuc

SEQ ID NO: 567350 - RNA, 19 nt, Artificial Sequence
  Description of Artificial Sequence: Synthetic oligonucleotide
cccacccaucgcaggguga

SEQ ID NO: 567351 - RNA, 19 nt, Artificial Sequence
  Description of Artificial Sequence: Synthetic oligonucleotide
ggacagcuugcgggcccug

SEQ ID NO: 567352 - RNA, 19 nt, Artificial Sequence
  Description of Artificial Sequence: Synthetic oligonucleotide
cugccauucguggccugau

SEQ ID NO: 567353 - RNA, 19 nt, Artificial Sequence
  Description of Artificial Sequence: Synthetic oligonucleotide
ccgcccagcuguggguuac

SEQ ID NO: 567354 - RNA, 19 nt, Artificial Sequence
  Description of Artificial Sequence: Synthetic oligonucleotide
ccguaccauaugagcagcu

SEQ ID NO: 567355 - RNA, 19 nt, Artificial Sequence
  Description of Artificial Sequence: Synthetic oligonucleotide
cguaggccaguggggucag

SEQ ID NO: 567356 - RNA, 19 nt, Artificial Sequence
  Description of Artificial Sequence: Synthetic oligonucleotide
ccaucgcagggugaaggcu

SEQ ID NO: 567357 - RNA, 19 nt, Artificial Sequence
  Description of Artificial Sequence: Synthetic oligonucleotide
ccgugcggacagccugcac

SEQ ID NO: 567358 - RNA, 19 nt, Artificial Sequence
  Description of Artificial Sequence: Synthetic oligonucleotide
guaccucagcugggccacu

SEQ ID NO: 567359 - RNA, 19 nt, Artificial Sequence
  Description of Artificial Sequence: Synthetic oligonucleotide
gcucugcggagggauucgu

SEQ ID NO: 567360 - RNA, 19 nt, Artificial Sequence
  Description of Artificial Sequence: Synthetic oligonucleotide
ccgcugccgaugcugucua

SEQ ID NO: 567361 - RNA, 19 nt, Artificial Sequence
  Description of Artificial Sequence: Synthetic oligonucleotide
ccccucccagacacuguua

SEQ ID NO: 567362 - RNA, 19 nt, Artificial Sequence
  Description of Artificial Sequence: Synthetic oligonucleotide
gccccgcccagcugugggu

SEQ ID NO: 567363 - RNA, 19 nt, Artificial Sequence
  Description of Artificial Sequence: Synthetic oligonucleotide
ccagccgagucuuguccuu

SEQ ID NO: 567364 - RNA, 19 nt, Artificial Sequence
  Description of Artificial Sequence: Synthetic oligonucleotide
cugccggcccggcgggcgu

SEQ ID NO: 567365 - RNA, 19 nt, Artificial Sequence
  Description of Artificial Sequence: Synthetic oligonucleotide
ggcgcuucccuggcacuuu

SEQ ID NO: 567366 - RNA, 19 nt, Artificial Sequence
  Description of Artificial Sequence: Synthetic oligonucleotide
cccgcccagcuguggguua

SEQ ID NO: 567367 - RNA, 19 nt, Artificial Sequence
  Description of Artificial Sequence: Synthetic oligonucleotide
cggaccgugcggacagccu

SEQ ID NO: 567368 - RNA, 19 nt, Artificial Sequence
  Description of Artificial Sequence: Synthetic oligonucleotide
cggcgggcguaggccagug
